United States Patent Application Publication US 2007/0067865 A1 - sequence listing, part 54

SEQ ID NO: 338377 - DNA, 389 bp, Zea mays
tcgccgggaaggaggcccgcaggccgcaggcagagcagccgccgttccgtatccgtcccgtctccggcgcggcggcgctgacgctaggggttgccgcacccagcgcggagatgcagcaacgtgcgcgggatggcgagcaacaccgcctgctcgacctcgcagtcgagtccggcttcgaccgcgacctcgccgccagctgcctcgcccgcctcctcgaggtctacggggaggatggtctggatatggttactgtcgacaactgtggcaatgatttccttgcatcactggctgatgccacacaacctactgatgactgggacgatctcaaagggattgagaccgaggcatgtggcaacttgaatgatatgatgatgaagaatgtacctgac

SEQ ID NO: 338378 - DNA, 250 bp, Zea mays
tctcctcgaaaccgtctctctgagcgtcctgagtccgtggagagggtggcggcggtggatatggagagcctggcgcagcgcgcggcgctgctgcgggagtcgctgcacaagagccagcatgtcaccgacgccgtctgcttcatactcggctccttagacaagagcctcaccgtgcttgactccgccatgcgccccattcaagtgaggacgcacgccgtttggaaccggcaccataacatttaccgcacgc

SEQ ID NO: 338379 - DNA, 238 bp, Zea mays
cttctcctccccctccggttcgggttcgggttcgtgaggttctccggggttcggtttcgtgggtgagcggatcgagatggcggcgtcggatgttgagtaccgctgcttcgtcggcggcctcgcctgggccacggacgaccactccctccacaacgccttcagcacctacggcgaggtcctcgagtccaagatcatcctcgatcgggagacgcagaggtcccgcggctttcgcttcgtc

SEQ ID NO: 338380 - DNA, 344 bp, Zea mays
tctttatctactccagagcgcagaagaacgcgatcgacaccatgagggtgttgctcgccgccctcgctctcctggctctcgctgcgagcgccacctccacgcatacaagcggctgctgcggctgccagccaccgccgccggttcatctaccgccgccggtgcatctgccacctccggttcacctgccacctccggtgcatctcccaccgccggtccacctgccgtcgccggtccacctgccaccgacggtccatgtgccgccgacggttcatctgccgtcgtcaccatgccactaccctactcaaaccgcccggccttaggctcatccccagccacacccatgc

SEQ ID NO: 338381 - DNA, 365 bp, Zea mays
agaccattagctttatctactccagagcgcgagaagaacccgatcgacaccatgaggccgttgctcgttgccctcgctctcctggctctcgctgcgagcgccacctccacgcatacaagcggcggctgcggctgccagccaccgccgccggttcatctaccgccgccggtgcatctgccacctccggttcacctgccacctccggtgcatctcccaccgccggtccacctgccgccgccggtccacctgccaccgccggtccatgtgccgccgccggttcatctgccgccgccaccatgccactaccctactcaaccgccccggcctcagcctcatccccagccacacccatgcccgtgccaaca

SEQ ID NO: 338382 - DNA, 215 bp, Zea mays
tctggaacagattgtgatgaggttgaatgggtaaaaaacacccaccgaccgctgtgtccccttgtacatcaccttaaagggctgcccactcctgcattcttggcccacaacccggtgcttaacatcttctcttcttcctaccggaactatttctttggccgtcgattaccctacatctttcctgtctgaagttatttttcggtcaaatttcctca

SEQ ID NO: 338383 - DNA, 123 bp, Zea mays
gttgtcctccccctccggttcgggttcgggtgcgtgaggatctccggcgatcggcttctctggtgagcgaatcgaaatggcagcaccatgatgttgagaaccgatgcttcgtccgccatctac

SEQ ID NO: 338384 - DNA, 164 bp, Zea mays
aaagctggaatcttttaaagtgaaccaagccgtcttcttcgaatccggttggttggcggcaagtgagcaggtttttggattggcttaaaccccccccaaaatgaaaaaaatcttggacattcagggagggcaatgtggcaaccaaatcggtgccaaggtctggg

SEQ ID NO: 338385 - DNA, 230 bp, Zea mays
ctcgcgccctcgctcgcttaaatactatggaggcgcaccgcacagaaggggcctgccccctcctcgtctgcgaaaagattgcggtgctgctgctgacgaagaagatcgtgaagaagcgggtcaagcagatcaagaggccctaactcgatcggtacaagtgccttaagccaagctggctcatgccaaatggtatagactttcgtttctggaagaagtttaagggatgcacc

SEQ ID NO: 338386 - DNA, 219 bp, Zea mays
ggaaaaatatccccaaaccctagctcccggtctcgatggcgaaccctcgcgtcttcttcgacatgaccgtcggcggcgccccggcgggccggatcgtgatggagctgtacgccaacgaggtgcccaagaccgcggagaacttccgcgcgctgtgcacgggcgagaagggcgtgggcaagtccgggaagccgctccactacaagggcttcacctttcacc

SEQ ID NO: 338387 - DNA, 408 bp, Zea mays
tgggtcttcagaccattagctttatctactccagagcgcagaagaacccgatcgacaccatgagggtgttgctcgttgccctcgctctcctggctctcgctgcgagcgccacctccacgcatacaagcggcggctgcggctgccagccaccgccgccggttcatctaccgccgccggtgcatctgccacctccggttcacctgccacctccggtgcatctcccaccgccggtccacctgccgccgccggtccacctgccaccgccggtccatgtgccgccgccggttcatctgccgccgccaccatgccactaccctactcaaccgccccggcctcagcctcatccccagccacacccatgcccgtgccaacagccgcatccaagcccgtgccagctgcagggaacct

SEQ ID NO: 338388 - DNA, 373 bp, Zea mays
tgggtcttcagaccattagctttatctgctccagagcgcagaagaacccgatcgacaccatgagggtgttgctcgttgccctcgctctcctggctctcgctgcgagcgccacctccacgcatacaagcggcggctgcggctgccagccaccgccgacggttcatctaccgccgccggtgcatctgccaccttcggttcacctgccacctccggtgcatcttccaccgccggtccacctgccgccgccggtccacctgccaccgccggtccatgtgccgccgccggttcatctgccgccgtcaccatgccactaccctactcaaccgccccggccttagtcttatgcccagccacacccatgcccgtgccaaca

SEQ ID NO: 338389 - DNA, 237 bp, Zea mays
atcttcatgtgcgccgccaacgcgccggcgcgctccgaccctgcgcctcagcctggtaccgtgcctgtgccgccctgagccatcgggcctacgccctgcggatctgcctggtaccgtgctagtgccgactgcgcatccgaccttcgtctgggactacgaccatcgcggatacgacttgcgacttaacccagcacggaccgccgacggccggacggccgataggagccactgacccga

SEQ ID NO: 338390 - DNA, 303 bp, Zea mays
atcactcagtgcacaccaaccggctcagggggctcttgacaggacagtcagcacttacccagctctatcgccggaacagcgccgctgatctagcagaggctcagagaccaaggacacctttctcggcttggagctcaggcacgcgtggcccttggttcgacgcctcgtgcggagctgtccttgccactcatgagacgacgtgcgcgggggcggcggtccactgaccggagcgtggactacggcttttgcgtgtagaggctgatccaccaccacgacaggcccgacgcggacacctggggcctg

SEQ ID NO: 338391 - DNA, 370 bp, Zea mays
agaccattagctttatctactccagagcgcgagaagaacccgatcgacaccatgagggtgttgctcgttgccctcgctctcctggctctcgctgcgagcgccacctgcacgcatacaagcggcggctgcggctgccagccaccgccgccggttcatctaccgccgccggtgcatctgccacctccggttcacctgccacctccggtgcatctcccaccgccggtccacctgccgccgccggtccacctgccaccgccggtccatgtgccgccgccggttcatctgccgccgccaccatgccactaccctactcaaccgccccggcctcagcctcatccccagccacacccatgcccgtgccaacagccgc

SEQ ID NO: 338392 - DNA, 168 bp, Zea mays
tcgacccacgcactcgtgtcacgtgaattccatcatacacacggggggttcctgcgagcccaccaattttaactatagagagcataattatagaaggtggttatgatactcatatatgatgcctgcacaagaaaaatatacgatcacgcttcacaacaaaataccagc

SEQ ID NO: 338393 - DNA, 403 bp, Zea mays
tcgggcgacggtccgcctcagcgcatcgcgggcggcgacctcatggatcacctttagccctcaatcatggtgagttccccgccaaaactgtattcaccttcaagatccacggggtgcttatgactctcacatgtactaatcagctttgctcaagccgacgtcgatagtcgaaccggacgttgccgccgtagctgccaacaagagtacattccataagtacagctaccgtggcgtctgacctagatgcgcttctcgacatgtccactgactaccttgttcagcttttgcgcgggcgcaccaggagaaggtttcagacgcgtctgaagaggaagcccatggcgctcataaagaagctacgcaaggggaaaaaagatgctcctgcttgtgagaagcccgagccagt

SEQ ID NO: 338394 - DNA, 296 bp, Zea mays
cggacgcgtgggcgtacgcgtggggggggcgggcatcgcatgcgacgcccacaacgcatacgtgctcccgcgccggcttctcccaggcccacggcgacccaccatgattgatagaggcatgagactgtggacatcattgctattgcgattcgattactggatatagtgtaggtggtaaagcatcacctgtgcacacactcttcgagctgttggtgcatcaagggccacctacacgaagatgctctatttgtcgtcttatgtcacattaaatgtaacccaacgctcattggtatctt

SEQ ID NO: 338395 - DNA, 101 bp, Zea mays
acgacccacgcgtctctgtgaggcaaaagcacttcgaccacagacggggcgcgcttcaaggtctaatttttttgaaatatcattgtagacaagatgagatg

SEQ ID NO: 338396 - DNA, 119 bp, Zea mays
ttttcgaggcaaaagcatagcgaccacagacggggcgcgcttcatggccttattattctgacattaactaagaggtgaggaggatactgctgtcacgatcacttgggagaaggcgaggc

SEQ ID NO: 338397 - DNA, 204 bp, Zea mays
tcgtacacacgcgtgtatttcaaattgcttgagtggtctacactgccctgccatcatactccacgtgagcccggtcgagcgtgagcaagggaaaggcatggctgttccgaatcattgaacgctggcgctgggcgtgcttttggccgtgaccgtggtggctcatcaagcctgtgtgcgcgcagcgatcacaatttccaccgtgta

SEQ ID NO: 338398 - DNA, 191 bp, Zea mays
tctcatggcagtggtgcggcactaatccgctggggtgcacttttgggaatcgttgtttcaccacttcgacctggcagcattacgcctggtcctattccattttaaactacacgaattccaattacgtttagtaccagctgttggacgtgcttgtgatttacaagccagtgcaccaattgggaacactgctg

SEQ ID NO: 338399 - DNA, 135 bp, Zea mays
cggacgcgtggacggacgcgtgtgttcagcgtggcatgaaccatcttgatgtggcgaccagaggacgcatacaggatgtcctgtaccggctggccaacatgcttgaacaaactcattgcgctgacagtacaagcg

SEQ ID NO: 338400 - DNA, 278 bp, Zea mays
gagaaacgctaggctgcagctctatatcagggcgcaggtactcacggtacagggcatcgagctctacgcgctggaccccatccatctatacaaagagcctactcggaccatccgagaaccgtggctaggaacatcgtgcggtatcaccaagaggacctttgcgctcgctgccagcacatccgtcatttacttgctagaccagagatcctgaccatgctcaggtgctattgctcaacgtgacgcatacaaacttgatctacaccgtctaacactccaag

SEQ ID NO: 338401 - DNA, 83 bp, Zea mays
tctcggacgcgtgggcagacgcttgtacgcggagtggtattaaccagccagatattgcccctcgtggactcattaaggatttt

SEQ ID NO: 338402 - DNA, 95 bp, Zea mays
tttgctcaatgcgcccaaacattgaatgctgggcaattttgatgggctttttgctcccaaccatttttttgacctcacaagtcttaggagttcct

SEQ ID NO: 338403 - DNA, 218 bp, Zea mays
ctgggtcttcagaccattagcttgatggactccagagcgcagaagaacccgatcgacaccatgagggtgttgctcgttgccctcgctctcctggctctcgctgcgagcgccacctccacgcatacaagcggcggctgcggctgccagccaccgccgccggttcatctaccgccgccggtgcatctgccacctccggttcacctgccacctccggtgca

SEQ ID NO: 338404 - DNA, 222 bp, Zea mays
ttctatagagtagacccacgcgtgcgccgtgttgcttgacgcacccccacgcgcggccgtgttgctcgccgccaccgccccgccggcagccaaaatgccgttcaagaggttcgtggagatcgggcgagtggcccttgtgaactacggcaaggagtatggccgcctcgtcgtcatcgtcgacgtcgtcgaccagaacagggctcttgtggatgcccccgacat

SEQ ID NO: 338405 - DNA, 169 bp, Zea mays
tagtcgacccactcgttctcccttgcgcgcctccatttgcgaagaagggccttgcaaggagaaagtgccctccacccatgaggccagagaaaccccacataaacattggggtcactggccatgtcgactctagctagactagcacgacaatacaccttatgtactaact

SEQ ID NO: 338406 - DNA, 187 bp, Zea mays
ctcgagaagctaccggctggtccgatcggacggaccccttcgcgcgccccaaagatttcaagtaaggtgctgtaacaaaaaatgcaagggggcaaaggtgggaagcaaggcttattctgtttccgggacccttctggggggtccgggggcttttgacaaccagggagccttatgcctggtttttttg

SEQ ID NO: 338407 - DNA, 175 bp, Zea mays
tcatagcagccgcatccaaaagccctatgggggggtccttttcagccgccgcagccagctcacgtaatctactgtaaggacagatacagaggtcaatccgcacgaggtcgggatggtctagtttgtgcaactcaaacgctaccgcaagagggagctccccgagagggttgacatt

SEQ ID NO: 338408 - DNA, 138 bp, Zea mays
ttttgatgaaactaaggaagagtattgtatgctggtttattgacagtggtgtgacactcacccttgcacccaagatgaaggctcttcaaattgcagagaaagctagggacgctgtcctaagaagaaagtctgaccatg

SEQ ID NO: 338409 - DNA, 203 bp, Zea mays
tcgacccacgctttcttaaaacagaggcattaaaaagttaggggggagctttaaactgaaaaggagaagacacctacataaaatgaagcggccttccgaactcagactttctttattgaaccttgcttcaatctacatttaccttatatggagttctaatacatgtctgcgttagcatgaatttaatctgttcctgcgtaaaa

SEQ ID NO: 338410 - DNA, 199 bp, Zea mays
tctacccacgcgtcttgtttcgccaaaggtggtggaaaggatggtccgtagtattgttgctcgtcagccccaccaccaccctccaagcagcctgctgagagccaagaaaccaccgtcaatggtcctttggatgctgagaaagagcagcctgcagtctctgagtgaccggatagggtgtctttattaagacatacacaat

SEQ ID NO: 338411 - DNA, 179 bp, Zea mays
tcgacccactcgttctgtgatctctcctggccctcctcagagagcttcttgttgctagggcctgcgtgctttccatcccgccagcgtccaccttctcctggggcccacgcccctatgattgccaggctgcgcggcgcgtgacggttacatcacttttctcgaagtacccaatgctggag

SEQ ID NO: 338412 - DNA, 246 bp, Zea mays
cgaccgagcgaattcaccacagcttctcaccaccgctaccttcgatggcacccaaggcggacaagaagccggcggcgaagaagcctgcagaggaggagcccgcgacagagaaggcggagaaggctccggcggggaagaagcccaaggccgagaagcgcctcccggcgggcaagtccgccggtaaggagggcggcgagggcaagaaggggaaaaagaaagcgaagaagtccgtggagacctacaaga

SEQ ID NO: 338413 - DNA, 254 bp, Zea mays
tcgagccgagcgtcttatcaaagacggcatgctcctctagctcaagagagccacatctgccgcggtagtttacagaagcatctaagggaagcttgttgttgaggatgcctacgctctggagctcaaccgccttcgcatgtgactctcttccaagaaggtccagaacctgcacatagattatgcccatctgcttaaaggagcctttgacattcctctatgggctaaggcagctgaaccgacccctacttagggtg

SEQ ID NO: 338414 - DNA, 242 bp, Zea mays
cataccacgttgagggtaaaaacaggggatgtgtaatgcacggcgtgtatacacccatacaaggaattaccaggcatgatgacaggatctaagataattaaccattacaccttgatttatacaaaacaaagatgtccttttcatctcccacgctatcatctcataacactaacccgatgatatgccctcaataaatcaatcgccatgcctcgcattctttttatgagctattcaatgacttt

SEQ ID NO: 338415 - DNA, 171 bp, Zea mays
tagtcgacccactcgtctcggctcacctgagcctcccccacaaagacgagcttctatagatgcgcgaaccaactcaagccctgtcatgacagcggaagatactttgttctagaagcaaccctaatccccctagacaactgacattagttacaaaccggtaactacgcccct

SEQ ID NO: 338416 - DNA, 111 bp, Zea mays
tcgatcgcggcgttcgcgctttaaggagaagaggggtcaaccgtggacgttgaggcccgcccctttccctccgagcccctggtccaaaccccaaaaaaaaaggccccttgg

SEQ ID NO: 338417 - DNA, 378 bp, Zea mays
gttggcttctcctcccccaccggttcgtgttcaggttctggttcgtgggcgagagggaagagatggcggcgtcggacgttgagtaccgttgcttcgttggcggcctcgcctgggccaccgacgaccactccctcaacaacgccttcagcacctacggcgaggtcctcgagtcgaagatcatcctggatcgggagacgcagaggtcccgcggcttcggcttcgtcaccttctccacggaggacgcgatgcgcagcgccatcgagggcatgaacggcaaggagctcgacggccgcaacatcaccgttaacgaggcccagtcccgcggcggccgtggaggcggcggtggcggatacggtggcggccgccgtgatggaggcg

SEQ ID NO: 338418 - DNA, 174 bp, Zea mays
ttatcgccgaatgtcggattgagaaaagggtgcggtcatctccttacctccatgccccaccagaagaatctgaccaactctatgcgacacataaaaagacagaacctcgtcctaaaatatctcgatctcgagagcggacactcgtttacctgcgccaacaatgtgctcgagtag

SEQ ID NO: 338419 - DNA, 211 bp, Zea mays
tcaccacacgcgttctgtcaccgtaaccctagcagcatatcggccagcggattttggcgacctgggtggggacaaccgtcacctccgccttcttcgcctccctcgagcgctgctcctgcatcaacctctccaccgacgacgacgactacgactaggaccacgacgaggccaaggaccggaccctcattctcttcgcggcctacgccacgac

SEQ ID NO: 338420 - DNA, 257 bp, Zea mays
tcgatcgaatccgtggcgcacttgctggggggtcactctcaagccgccgacgtcgtcgtgaggactccggcaaatggtgtcccgcgtggcctcgggcctgctcctccgccgtgccggcagccacactattgcctcctaaggagttatgcacatgtcaaaagctgcaacagacaactttcacctttggtctttgatagatctgaatgctaaaatatgaggagaagatgctattacttacctaatccctctacatacca

SEQ ID NO: 338421 - DNA, 249 bp, Zea mays
tagtccacccacgccttcgcttgactatccctaagtgtacgaagtaggctttttatgtggacgaggtcttaaatcgcgctggctttctactgaaccgcgtgtgctttgtccacgcggagctactcgacagttgccgcggtagctacccgggactccccccgtccgcgcttccgtctacggcacgatcgctctcggtttctctcctacgtcatgtcctttatcccgtttctagtgtgctcagttcttgct

SEQ ID NO: 338422 - DNA, 142 bp, Zea mays
tcgacccactcgttcgcgcacacatagcccggttgccgaggatggatttctatgaatgcaacgtgcctgatcatagtcctgtttcataccttacggcttggaagctccaactccagccgccatcgttggactcaacaccgat

SEQ ID NO: 338423 - DNA, 259 bp, Zea mays
cttattcgagcgtgcacgctatttcgcgggggaggcttttgggctgggctcgttaccactccagacgggggcaagatcaagatggggatcaacgcatggcgatggcatggccggctcgagacatgcttggcgagcgatagtcaggacaggacgtccgtatgcataaagtgttggctcgcggggcggtagtaaatgtcctacatttccaagttaggtccttgtgctctgttacatgatttcacatgcatgatatcttgtt

SEQ ID NO: 338424 - DNA, 76 bp, Zea mays
gtgactcattattaacaataaaacaagttgggtgttattatccaaaaaaaaaaaaataatcaaaaggctaaaaagt

SEQ ID NO: 338425 - DNA, 121 bp, Zea mays
tcgttctcgcgaactccatctcgaatggcagagtgatttaggcatacgcgtttcctccgtatagcattctcgcagccttatgggcgatatcaagagcgctatctatgtttccgacccgatc

SEQ ID NO: 338426 - DNA, 287 bp, Zea mays
aacacagcacaggcaggtcgcgagagagagagagagagagagagataaagatgtcgtggttcgggcaccaccaccacaaccagccggctcccccggcgtcgggccccaaccaggtgttcaagatcttctgccgcgccaacgagaactactgcctggccgtccgcgacggcgccgtcgtgctggccccggtcaaccccaaggacgaccaccagcactggtacaaggacatgcgctatagcacccggttcaaggacgaggaaggcatgccggcgttcgcgctcgtcaac

SEQ ID NO: 338427 - DNA, 297 bp, Zea mays
caagctctcacacaactacccgcggggcttccttgctgacaagggcagcgactgttacaatgcttaaccgccacaacagatccgcttcgcctttgtgggtcgcgaatttggcgggctgcttgatagacattcgcctatcttgccagatacgctcataatcgtcatggaacctatagtcactgtaacgtagtattgaaacgaaaggattttagctctaagaccagaccatccaggacagtgttaatacttatacgatgttcgtacgaactacatgaaatacatagcacattacttgag

SEQ ID NO: 338428 - DNA, 160 bp, Zea mays
agctcctattaacattgactgtcgggggccctacgggccggtgacaataggctgaccccaatccgcctgattgggctcgcaccttcggtcatggatgcctgagctaggccgatctcctaggggatcatgttcctatcgacgcttaaggaggcgaagccgc

SEQ ID NO: 338429 - DNA, 175 bp, Zea mays
tcgaaacgaggcatgtattgattcttcagatcatacatcaagctgtacaagcccatttacctaattcataaaagatgccacttgccgtattgaaaggcattagggtcaacgcgccggaaggtaaattgaccttaccatgtcccaagaatgcacaagcctaggaaggattgaccct

SEQ ID NO: 338430 - DNA, 382 bp, Zea mays
ccgtcatcgatctcgtttcaaatccatccatcctcgtttcctccgtcccgcagcatctcaaccccatggccaagatcaagatcgggatcaatgggttcggcaggatcggaaggctggtggccagggtggccctgcagagtgacgatgtcgagctcgtcgccgtgaacgaccccttcatcagcaccgactacatgacctacatgttcaagtacgacactgtgcacggacagtggaagcaccatgaagtcaaggtgaaggactccaaaacccttctctttggtgagaaggaggttgctgtgtttggctgcaggaaccctgaggagatcccgtggggttcggttggtgctgaatatgttgttgagtctactggtgttttcactga

SEQ ID NO: 338431 - DNA, 418 bp, Zea mays
  unsure (1)..(418): unsure at all n locations
cgagcggaaaagcgtcccccaacccagcacacgctgacgacacaccggcgaggcagacaggcagatcagccgcacctccccagtcccccttccccacctacgacgaccgccgcggacgaatcaaaaaagcttcctcctcccggcgtcgcctccgcgcgtggaggcgacgatccattccgccccccgtaggattttgctcctcccgatccggacgtcagatctcgagtggcggcacgcggatctgggggtttctctagaggcggcggcggcggccggaacaggggcagatggcgctctcggagatgcgggggctctcggtcttcatcagcgacatacgcaactgccacaacaaggagcatgagcgcctncgcgtcgacaaggagctcggcaacatccgcacgcggttcaaaaacgagaa

SEQ ID NO: 338432 - DNA, 421 bp, Zea mays
gtactcgcctatctccgcgacccaaagcgttcccccttctcccattcttctctcatttctcaccaccgccgccgctaccccctttcgacaacaccatgagggagtgcatctcgatccacatcggccaggccggtatccaggtcggaaacgcgtgctgggagctgtactgcctcgagcatggcattcaggctgatggtcagatgcccggtgacaagaccattgggggaggtgatgatgctttcaacaccttcttcagtgagactggcgctgggaagcacgtcccccgtgctgtttttgttgaccttgagcccactgtcatcgatgaggtgaggactggcacctatcgccagctcttccatcctgagcagctcatcagtggcaaggaggatgcagccaacaacttcgctcgtggtcactacac

SEQ ID NO: 338433 - DNA, 349 bp, Zea mays
cgtgaggttctccggggttcggtttggggggtgagcggatcgagatggcggcgtcggatgttgagtaccgctgcttcgtcggcggcctcgcctgggccacggacgaccactccctccacaacgccttcagcacctacggcgaggtcctcgagtccaagatcatcctcgatcgggagacgcagaggtcccgcggcttcggcttcgtcaccttctccacggaggaggcgatgcggaacgccatcgagggcatgaacggcaaggagctggacggccgcaacatcaccgtcaacgaggcccattcccgcggcggccgttgaagcggcggctgcggctggtacagtggtggccg

SEQ ID NO: 338434 - DNA, 104 bp, Zea mays
gtggtaacgccatcgagggcatgcacggcgaggcggtgcaccgtcgtaacattactgtcatagaagcctactcctgcggcggtcgtggagacgggcgaggacgc

SEQ ID NO: 338435 - DNA, 348 bp, Zea mays
gtttcctccgtcccgcagcatctcaaccccatggccaagatcaagatcgggatcaatgggttcggcaggatcggaaggctggtggccagggtggccctgcagagtgacgatgtcgagctcgtcgccgtgaacgaccccttcatcagcaccgactacatgacctacatgttcaagtacgacactgtgcacggacagtggaagcaccatgaagtcaaggtgaaggactccaaaacccttctctttggtgagaaagaggttgctgtgtttggctgcaggaaccctgaggagatcccgtgggggttcaggtggtgctgaatatgttagtgagtctactggtgttttcactga

SEQ ID NO: 338436 - DNA, 367 bp, Zea mays
gccgcatctaccattccacccgggatgggccctcagcagagcttccccttcctcactgtggtggcttggtggggggatccgcgcctcccccatcgctggccagctcatggcgcccccgccgccggaggatctccaatgcgccgtgaacgtcaagtgcgccgcgccgccggcgctggccgcgggggacggcgagctccggtggctgctgcggtgcgtggaggcggcagcgaaaggcttcgccatctgcgcatgcctcaagggcggcctcgcgctcttctccgtcctcgtacgcatccgcagccgtcgctcccccagatcgaagaaggccggagctatgaccaacgatgaggccgtggtgctcgcggtc

SEQ ID NO: 338437 - DNA, 209 bp, Zea mays
  unsure (1)..(209): unsure at all n locations
tagtngacccaagcgtgcgccgcccccctcttgctcaataaaccgggctcttgtttccgcggtctggtcgttcgatctgtgcaccaaatctgaggtgtcgagcgaccgcgaagcaacttcaatagacggcatggcgctcgtattgtataatggggctggaaacaaaaatgacttctaagcactcattgctgcggaatacaaaaggatca

SEQ ID NO: 338438 - DNA, 420 bp, Zea mays
ctccgctcgccccgcggttcccgcttgctacagccctccggtcgactcgggtcggcctcttcccagttcccacttcgccgccgctcccccgtttccttcaccccttctcctgcagtcctgcgcaccttcctcccagagtcccagtcaaaccctgctcggaagcaaacggactttggatcctcggctttaacactcgcgtaccctgctggaggttgttttgtatcatggagagtacagacaagaatgacaaaaaaattgctgtcacagaagagtcttctaatcctggacaaaattgtgaagatgacggggatttttcaatgaaaactgaaatgttaaatgtagaagaagcaccaagtttctcgaatgacaaattaaacaacgaatcagaagtgcagattcaagagggaggtaatgattcag

SEQ ID NO: 338439 - DNA, 388 bp, Zea mays
cagaccattagctttatctactccagagcgcagaagaacccgatcgacaccatgagggtgttgctcgttgccctcgctctcctggctctcgctgcgagcgccacctccacgcatacaagcggcggctgcggctgccagccaccgccgccggttcatctaccgccgccggtgcatctgccacctccggttcacctgccacctccggtgcatctcccaccgccggtccacctgccgccgccggtccacctgccaccgccggtccatgtgccgccgccggttcatctgccgccgccaccatgccactaccctactcaaccgccccggcctcagcctcatccccagccacacccatgcccgtgccaacagccgcatccaagcccgtgccagc

SEQ ID NO: 338440 - DNA, 117 bp, Zea mays
aaaacaataaaatcaatataatgagaagaagaaaagggcggcgaccccgaccattccgaaccggttcctggaggcgtacctcctgtccctatatagaggcgcattataacttggcgc

SEQ ID NO: 338441 - DNA, 409 bp, Zea mays
gcgtcttcgtactcgcctacctgcggggctcaaacctttcccccttctcccaattcccgccgccgctccatcccgtaacgcgacaccatgagggagtgcatttcgatccacatcggccaggccggtatccaggtcggaaacgcgtgctgggagctgtactgccttgagcatggcattcaggctgacggtcagatgcccggtgacaagaccattgggggaggtgatgatgctttcaacaccttcttcagtgagactggtgctgggaagcacgtgccccgtgctgtttttgttgaccttgaacccactgtcatcgatgaggtgagaactggcacctaccgccagctcttccaccctgagcagctcatcagtgggaaggaggatgcagccaacaactttgcccgtggtcact

SEQ ID NO: 338442 - DNA, 372 bp, Zea mays
gggttggcttctcctcccccaccggttcgtgttcaggttctggttcgtgggcgagagggaagagatggcggcgtcggacgttgagtaccgttgcttcgttggcggcctcgcctgggccaccgacgaccactccctcaacaacgccttcagcacctacggcgaggtcctcgagtcgaagatcatcctggatcgggagacgcagaggtcccgcggcttcggcttcgtcaccttctccacggaggacgcgatgcgcagcgccatcgagggcatgaacggcaaggagctcgacggccgcaacatcaccgttaacgaggcccagtcccgcggcggccgtggaggcggcggtggcggatacagtggcgggcgccgtga

SEQ ID NO: 338443 - DNA, 331 bp, Zea mays
acgatgacaagctctccacccctagggaggggccttcttggcagtgacgacatcaacccgtacccatccatactcaccaccgacgtttgatggagtctctcctcgactagcgatacattaagtcttacttatccgtcgttgataatattatggaccaccttatgcccaagccctcacgcgtagacaccccttacagcgcctacaccgacatccggtcccttccactccgtgctggccacacagacataatccttgatgtgctggctcaggaccatattctgaacgcaaatgagctgctccaatgggacaatggcttgtcattcattgacat

SEQ ID NO: 338444 - DNA, 359 bp, Zea mays
ccctccgcgtcggcctggacgccaccaccgcatccgactaccgcttcgtcgtcgccgccggcgaggaggcactcggccgcgccaccgaggcctacgaggcgctcaccggccctgcccctgggaccttctggaccgcctgcgccgggtgccggctcctacacgagttcgagcgcaagtatgtgggataccgactggcctgcccatcctgccgccggaccttgatcggcgtggaggtcacacctccgccggaagacgaacccgttgcccggatgcctgcgcctcatcagatgccaccgggcaagatgcccgagaagatggacatgacgctcgccgtgatgcaactccagctcgtcaagaag

SEQ ID NO: 338445 - DNA, 268 bp, Zea mays
tccgttacgaggaaacccaccatcccctcgggtgggttcctattcctacttacgtcaccaacctgcaaagatgacttgggtgcgtacacttcgttttcgtctgctccctcctccaaatatatcaacgcttcctggtgggttaatcacattgttacgctcgcgaggctgatcagaatttctgccgaaggcccccgcgtgaacgtctaatcctcagcagtttcttcagccccaactgcagatgttgctgaatcacacgccccagctgctg

SEQ ID NO: 338446 - DNA, 266 bp, Zea mays
  unsure (1)..(266): unsure at all n locations
atcctatagagtcgaccctcgcgtacgaagagacccaccgagtgcttgcgcgcgtgcagattcataattaggtcataaacctgcaaagatgaatcgngtgcgtacacttagatggaatctgttctctcgtccaagtatatcaacgctgcaaggtggtttaatcacattgatacgctcgcgaggctgaacagaattactgcagagggccaaggtgtgaaggttgaatcctaagcagttccttaagccccaactccagatgttgctga

SEQ ID NO: 338447 - DNA, 116 bp, Zea mays
aaaaaaaaaaaaaaaaaaaaaaaggggggaaaaaaaagggcggacggccgggcgtttccggacctggtcctgcaggcgtacctgctttccctcttgtgtgccttattaaagctggg

SEQ ID NO: 338448 - DNA, 116 bp, Zea mays
acctggattcctctaaagccaacaacccaatcagggacggccgccggcctggaatttccagaccggtaccggcaggcgaaccatctgcctccttagtgagtggaatacgagctcga

SEQ ID NO: 338449 - DNA, 181 bp, Zea mays
tagtcgacccacgctctctgacctacatctagtacctgacctccagcgggatttttatagtcactcgggcacacaagtattaatatccgaccgccctattttgcatattacggaatatttgtttccatctagggacgcaccatcaataaggcaatatattgctaaaccctagaagaataat

SEQ ID NO: 338450 - DNA, 321 bp, Zea mays
ccacccttccggtaaaagcatccgccaattacctttcggggtccaatctgagcctaattttttcaacggttccaaaatgaccgtgcttttttaccgatttcaggcttgggcaaaagtcgccaaccgcaacttttttgaagtggggctattttgacctagttttcctgttaaacattgccagcgccgcaactttgtcgtcttatgttgatcaacatttatcggggccattgggcagctgctagtttggcaattgcaaatcaatttaccttttggttcataaggcatatgctgctaccctaatggctaaaaatttcgttgaca

SEQ ID NO: 338451 - DNA, 206 bp, Zea mays
tcggaaccaaagtgggatgctcatctcgggccgacagaagaagagatgctccaaagaccaccgacagacagggcgctgtcacacaggccaagatgtgatgggagaactcgcgggagcgaacgactggccacgggagctgcatcagcgcgcatgaccgaaaccgatacgttcacctcaaagcctaattcaaaactaacgagcgattt

SEQ ID NO: 338452 - DNA, 291 bp, Zea mays
ggcgcgctcgacctgactctgcgaggcggaggcggacatctcctgctttgactcctcactacctggagtacgggtcgttctgaagcaccgctatgccgacttcatcgtgcatgaggttgcccgcgatggcgctctcatgcagctcacctagatcgacctccacaccgatagcgttggtgtgaacgaagatgacatggctgacccttccgctgaagcggatcactcacaagccctacagtcgttccaggcgatctgcggcgatgccgattgcaacgcattgaggggtcttct

SEQ ID NO: 338453 - DNA, 215 bp, Zea mays
cacctatcggtcgcgtgtgcttcacgcggcggctcattcctgacaccgcacaccatgcatttgattctgatcgcaccgacgtcggcccaccgttttagttggcagttgcgacttgcgagtggcttcaacaaggcaacacaatgcaccggtaccaaccaaaaacagcggcaccggagacccgtacccactttcccggagagcgatggcgacggagc

SEQ ID NO: 338454 - DNA, 280 bp, Zea mays
ctccttttagcagcagcatgaacccttcaccggggtattcttacacatggggttcgacctccttgccggtgggaggaacaagaagaccaagcgtcacatcgcctgtattacgaccgttgtttaatatcaagctcccttgtcaaagctctaaccgttttcttggtcaatgaggaccaaagagcaaccttcaatgcctgtctttctcaaagaggcgtcttcaatgagcaataaccaattcgcccaccaatctttcaagcgccgtctttgtaaagttcatgga

SEQ ID NO: 338455 - DNA, 276 bp, Zea mays
aaaaaaaaaaaaaaaaaaaaaaaaggggggataaaaaaaaaaagaaaaaaccccacgcttccgttcgccgtggttttctgcggttctgccgtttacgcctacaatttggcctttttcctttgcaggtttaagctccaccttcaacacatgggtagggagaagtcccaactcaacattgaggacattggccactttaactttggaaagtggaacaccaccggccacctgttctacaatcttgaaggcatttacaaccgcgaaatatataggtttgat

SEQ ID NO: 338456 - DNA, 295 bp, Zea mays
tacataagctttatcctctatatctacccacgctttctttttttcgtcctcatttattttctagcgtatttttataaaataataaaaacaaaaaaataataataataatattaaaattattaataatttattatcatattatttctaatttaaaaaatatattcctttctccctcttttatccttcaccttcccctcaaccttacctattttacctttatttactcctattatacctctccctcacattaattaaacctttattttttctaaaaattttaccctttcacattttc

SEQ ID NO: 338457 - DNA, 408 bp, Zea mays
ctggattcctttaaagccgaccaacccgtccgttcataaaaagtaatcaccatggggagagaaggtagaagggagtagaggtctagggcgttgccgacgtcgtcttctgccatcacgtcatccagtgctcgtgtggaggtcctggggaaccaacgtgccgtaagggacctgggcgaacctctctcgtgcaaggattcggccgggctcgccgggaatttctcactgacgcaagccactgccgtggatcgagctctgctgtggccggagcgctacgcgacagaccctctggatgcaaatgaggcacacaaaatgaggagatccactatatcctttgtacacaaatttgagtattacacctggactacggttcccgcccgaggctgggctcgggcgaggcgagatcgcgtt

SEQ ID NO: 338458 - DNA, 331 bp, Zea mays
cttctcctccccctcttaccaagtcctcttcgggttagggttacttagggttttgtggaggggcgatggcggcggctgatgtggagtaccgttgcttcgtcggcgggcttgcctgggccaccagcaacgagtcgctggagaatgccttcgcctcctacggcgagatcctcgactccaaggtcatcaccgaccgggagacggggaggtctcgcggcttcggcttcgttaccttctcctccgagaactccatgctcgacgctatcgagaacatgaacggcaaggagctcgacggccgtaacatcaccgttaaccaggcccagtcccgttgcgg

SEQ ID NO: 338459 - DNA, 202 bp, Zea mays
tccacccactccttccccaatattcattcccctctcctccccggcgatttttaaaatcttgcagaattcctcatccggcttcctctattcaaccaaccaacaaaaaaccaatttccttaccccccaaccacttagataacggtccttccacaacctaatgatccacgattaatgccggtcgccgccccctcacccttccact

SEQ ID NO: 338460 - DNA, 422 bp, Zea mays
ttaaagtcgaccaacccgtccgcaagattcaagttccggaacggccacacggacaaggcgaacggcccaaagtcggcaatcggcgtgcctccactctacaggcgacgacgaaaccagcagcctcagcgccgaccactccgggagcggggcttcacaacctcaggatccacgggagatgccggtcgccgccgcctcaccctcgcactcgtgaactggcttcctctgcgacgagccggggcgggctcggattcggcggatcttgtggggccctggcgtcgggctggtccggtgctagattgatcccgcattcgagctgcggcaagcgtctgggtagtcgcttctcccgagggaaaggaaaacaaagttgcttggccgactttgggatcaaggatcggcgaaaagaaagagaaaggagggatctt

SEQ ID NO: 338461 - DNA, 224 bp, Zea mays
cagcgctcgtcacctccaatcaacaaaggcccaatccgccgcttcccatcccgcgttcgccgctccatttgatcgaattcccgatggcgcccaatgccgagaagaagcccgctgagaagaagccgactgaggagaaggccgagaagaagcccatggcggagaagcgcgtgccggcaaggagggcggcgagaagaatgggaagaagaaggccaagaagagcgtct

SEQ ID NO: 338462 - DNA, 72 bp, Zea mays
tcggagcactcgtctcctcctgcctacggggacctaatccggcggttctcggcccccattctacggtccatt

SEQ ID NO: 338463 - DNA, 322 bp, Zea mays
tcctttaaatccgaccaacccttcctaggaaagcaccctccacctgttgctccgtctaaggggtggcatgcaaatctttgtgaagacactcactggcaagacaatcacccttgaggtggagtcttcggataccattgacaatgtcaaggccaagatccaggacaaggagggcatcccaccggaccagcagcgcctcatcttcgccggcaagcagctggaggatggccgcaccctggcggactacaacatccagaaggagagcaccctccacctggtgctccgcctcaggggtggcatgcagatttttgtgaagacattgact

SEQ ID NO: 338464 - DNA, 87 bp, Zea mays
tcgtcacaccgacatagaatctgttctcggggggttatatacctgcacactagatgtgcttatactcttgtgaactagagctagacc

SEQ ID NO: 338465 - DNA, 57 bp, Zea mays
tcgtgtcaccctgcaaaaagagtcctgggcgcgcctactaaccacaatggggagtct

SEQ ID NO: 338466 - DNA, 416 bp, Zea mays
ccacccttccaaaaaaaaaaaaaaaaaaaaaaaaaaaagggaaaaaaaaaaaaaaaaaaaaaaaaaaaaaaaaaaaaaaaaaaaaaaaaaaaaaaaaaaaaaaaaaaaaaaaaaaaaaaaaaattgaaaaaataaaaaaaaaaaaaaaaaaaaaaaaaaaaaaggggggggcccccccgggattttcgggccggtcccttgggggcgaccaactttcccttatagggggccttttaaaacctgggcaaaataagggcaatagcttttcccggggaaaaatttttttccgttaaaatttccaaaaaaattacaacccgaaaccttaaatttaaaacccggggggccttaatggggggcctacctcactttattgggttggccctaattgccctttttcaagtgggaaaacttttttt

SEQ ID NO: 338467 - DNA, 356 bp, Zea mays
accacccacgcgtccgtacacctcttcatactgatcttatggggccagtttctgagttccgggacaatctggagcagttgctagaaagtatcccaagcatgtttgagaataatagggttgctgattctgcttttggagcagctatgaaggctggcttcctggctatgaattctacctgcggtaaacttcttggttttcaatcagtgctgccatcacttgggattggttcttttattatctagggaagctgaaagtaaagcaaacattacatctggttacaaggaaacccataaacttttgcagcctgttacaacaccctcaaaaaatgggcacttaaatttgctgagaataagtct

SEQ ID NO: 338468 - DNA, 334 bp, Zea mays
ctgggagtggcatatctgtttctgttgatggcacatctattgccccagaatcttattatacctatccttcagtcactgtggctgcaagcgctgtaacagctgaacattctggatactacgcttcatcagtctctgccatttctagcagtgcagcagatatcaaaacaagctcagcttctcttgtttctgcaaatagcaattcggatctaaaaaatcctgataatgttatatccaatgatgcaagtattgtgcctttcacccaagctgtagtagcaacatcagctgcaggaacgacatctgttcttgaaagttctacacagccttctagcagcac

SEQ ID NO: 338469 - DNA, 124 bp, Zea mays
gctaagcatttcaagcgcatcaatgtggggcttatgtcacagtcagggcaggttgacttctaccagtacatgacagagagggacataatcgttttccttctcgagcatgaacactattaccagc

SEQ ID NO: 338470 - DNA, 71 bp, Zea mays
gtggaatttacgatgcattcgaagtgagtggtgtacacccaacaacggtaggtgttacacctgtcccaaca

SEQ ID NO: 338471 - DNA, 117 bp, Zea mays
cggagactgagcgagaagccgggccggggctcctcctttcttcgacgtcaagcttcgccccactccatggattcgatctgggaggcgaggagctgaggccaggacagggggaggtgc

SEQ ID NO: 338472 - DNA, 111 bp, Zea mays
tcgggcttctcctccccctccggggcgggggcgggttcgtgaggatctcctgtgttcgatatcgtgggtgagcggatcgagatggctgcttcagatgttgagaaccgttgc

SEQ ID NO: 338473 - DNA, 269 bp, Zea mays
acagagctagacgcctgccgcgccgtcgcaagcatgctcctataatcacccactctcggtcgctcctccccgttgggccttcctccctgcttcccgatccttcacttacactgtctctctcctcctccctgcacgaccactggtggtctaccccccctcctttctggtcaatagcgctcaccagttttcttggatctttgagcttagaaaatgcccacgggacagagaattctctttcaccaaatcagctaattggtgaaacaacctac

SEQ ID NO: 338474 - DNA, 291 bp, Zea mays
tcgacccacgctttcgtcagtaccgagcactcaccgtcctctgtctgtattcatcagatatgagactccattaactttatctgctcctctaacgattttcaagtgctttcttttcttgttaaccttcatgttatttgttatgattcttaatactattgccttttattctgtttttggtctttcttactatttatcttgcccattaagttttttcttattttctttttaaattcatttcatttctctttttttatgttgtctttaattcttttcaattttttttcttttgtt

SEQ ID NO: 338475 - DNA, 378 bp, Zea mays
  unsure (1)..(378): unsure at all n locations
agtcgacccacagcgtccagcgccgctcagcgccatcctattagtccctcgtcgccatccgtcagccagccagtccgccagcttgcatgcagatgccatccgtccccagcccagtcgctttgagagtatgacacccatatccatccgtccatgagggcagtatagccacatgccgcgaggaagaggttnatctcttcaatcggcgcctgccagtacatagagggtactcctccgatctaggctcatagaatcagctaccatccgagggtggagagagatgtattaccaagagctgcgaaggaaaggccatgatgcccgtcgcagaattggtgttctgctccgtgaccagcacggcatcccgcttgtcaagagcgtgac

SEQ ID NO: 338476 - DNA, 344 bp, Zea mays
ctttttgtcatccaaatttcggggaaactgagttatcctgctggagtgacgcctagttatctactctggaacgtgtccttgtaaatgcgtcaatggtcaatctgagtttttttttccttgtttattcttcgccaatgtatgtttccaaattccaaggtagtgttttggtagtgttgatgattctaccttgacatatccaacacaaggcgagcagcttgtcctttgttcaaaaaaaaaaaaaaaaaaaaaagtacaaaaaaaaacaaaaaataaaaaaaagaaaaaaaaaaaagatcataaaggattaataaaaaaaataaaaaaaaaaaataaagggcggccgc

SEQ ID NO: 338477 - DNA, 142 bp, Zea mays
tctttttgtcatccaaatttcggggggggtggtgtattttgctggagtgacacctaattatctactttggaacgtgttcttgtaaatgcgttaatggtcaaacccatgttttttttttcctttgtctaattctttcgccata

SEQ ID NO: 338478 - DNA, 259 bp, Zea mays
tgaaggtgaactggagggtgatggcgaggatgatctgcttatggaaagggagttgatatgactgttgggcgcgaagagtgatcaccttattgctagatctaggctggaggctaggttacgacggatggtaaccactggggtttatattgctactaagaggaagaccactaatgtagcagatgatagagtggcagcaagattcgcggccttgatgctattggatacagttgatgatcatagagctcattattattcagag

SEQ ID NO: 338479 - DNA, 378 bp, Zea mays
atatagtccacccattcgttttgaccaaccctcccaaaccttcggccgggttttttcattcttgaaacacggaaagcttccttaaagagcttttaacttgcagccattttttgcacgtacggtcttctttttcctatggccctccccttcttcacatctatatgattgtcgctggagtgtatatataccccccctctgaatatcctccgatggtaatattttataaagattgtggtgttaactcaaacacccattctctacactcatgacgaccctcccgggagataactattgatttttttgctacgcgggacctcctgctctttttacagcatccagccgttctttctctcaaccatttcatccgtcatcattttt

SEQ ID NO: 338480 - DNA, 328 bp, Zea mays
gcgattataagagatcgatgtgtgcgtctaaacaagtagccgctcttctagtccttgtaacggattcttctaccaatcccagcctcctgaggggtggtaagccatcattgagcgaagaacagaaggacaagattctagaggaatgcgaccggatcatacgtgtcggctaccccatctatgttgtggcccacgcatagttcctgttgcgatgctgtacgagcgggtgagaacacaaacatggactatgtggttctcctgctgacaaacgacgaggaggacatgtgcggcatcactaaaatcctggcgctccatgggctctgcgaacttt

SEQ ID NO: 338481 - DNA, 97 bp, Zea mays
tcggcgccattccttactcttcttcgaagccatcgttcccgtcccaaccttcccggacttcaagggcaaaagcttcaacctccaaattgtgaaaggg

SEQ ID NO: 338482 - DNA, 394 bp, Zea mays
gtcgagccgtccgtgagggcgcgtccagcacggcgcatcaaacaccagtccgtgaccgcttttccgacggcagcattgatgctgacgcctcagttgactccgatgaacgtacctgggacggtacccgttctgaagacttatcaagtccgttttttcgattgttacgctatctttcgctatcttggtcgcttgaaggatgacaacaagtcttttttggtcttcccatatggaacaagcccacgttgtgcaatgtatggattttgtcacatcacaatgtgatccttggtgttgcatgagtctcgtatccaaagcttgagtaccttcattatgttagtacaacttatgaaactgctattttttcattgatgaagtcgcttggtgccttgaacacaca

SEQ ID NO: 338483 - DNA, 301 bp, Zea mays
cccgtcgcatcccatcccactaccacccatctcgtcgtccgccgattcgatccggttcttccaacccaggggcagtgatggcgacgaagaggagcgtgggcaccctcggcgaggcggatctgaaggggaagaaggggttcgtgcgcgccgacctcaacgtcccgctcgacgatgcccagaagatcaccgacgacacccgcatccgcgcctccgtccccaccatcaagttcctcctcgagaagggcgccaaggtcatcctcgccagccacctgggtcgtccaaaaggtgtcaccccaaagta

SEQ ID NO: 338484 - DNA, 355 bp, Zea mays
gtggggtgacccgagtggccgcaggcaggtggcctctggtacctgtacctccaaagccgcgcgcggggcccggcagtctccactggctgtcgcctgggccccgccctgggagccaggagaggaagggggtggtggccggaagcgcaacctggccttgcttgccgcctctgctcgcgggacggtagagagaatggagagaatcgcctcgctaggagtagtacggagtgctgccgtgctggttggttggtgttcaactctctcatcttttgggaccggtggtcaccaaaaaaacagcatgtttgtagtgcgccaacattcgtgctgatcaactaatcactgcgttgtttttggtggt

SEQ ID NO: 338485 - DNA, 97 bp, Zea mays
gtgggataatgcttcttggaatagtcggattttgtatattattggctttgatgatagctggtatttatttggcaagaacatcaaaatatactggaaa

SEQ ID NO: 338486 - DNA, 408 bp, Zea mays
cagaccattagctttatctactccagagcgcagaagaacccgatcgacaccatgagggtgttgctcgttgccctcgctctcctggctctcgctgcgagcgccacctccacgcatacaagcggcggctgcggctgccagccaccgccgccggttcatctaccgccgccggtgcatctgccacctccggttcacctgccacctccggtgcatctcccaccgccggtccacctgccgccgccggtccacctgccaccgccggtccatgtgccgccgccggttcatctgccgccgccaccatgccactaccctactcaaccgccccggcctcagcctcatccccagccacacccatgctcgtgccaacagccgcatccaagcccgtgccagctgcagggaacctgctgcgtt

SEQ ID NO: 338487 - DNA, 194 bp, Zea mays
gccggataatgctatctcacaacaaccgcatcttgtatatcatcgcctctagatcatatcttttctactcatttgccaagatcatcaaaaaatactagcaaactctctcatgcatcaaacttttttcacttactactactttattaacccactcttctcttcaagccaagttataaatcccttcatataacctt

SEQ ID NO: 338488 - DNA, 309 bp, Zea mays
gaccattagctttatctactccagagcgcagaagaacccgatcgacaccatgagggtgttgctcgttgccctcgctctcctggctctcgctgcgagcgccacctccacgcatacaagcggcggctgcggctgccagccaccgccgccggttcatctaccgccgccggtgcatctgccaccttcggttcacctgccacctccggtgcatcttccaccgccggtccacctgccgccgccggtccacctgccaccgccggtccatgtgccgccgccggttcatctgccgccgccaccatgccactaccctac

SEQ ID NO: 338489 - DNA, 78 bp, Zea mays
tcgggcgtcaaagatcgcttctacttacagtgatgtgttcactgccacagtactagatgtagagaaaatgcaagaact

SEQ ID NO: 338490 - DNA, 243 bp, Zea mays
cggacgcgtggggattctacaaggctcggtgcacgatttgtataaattttgcgatcaagttcacatggaagaattgccacctgacagaaaaagcaccacaatcattcagggattttcttttggagatgtaggataaccattatgatgctgaaacatttcgccgtaggtagtaagctaccatggataccatggatacagaggtaaagaggtcttggttggcatgacctctgtatccacattatt

SEQ ID NO: 338491 - DNA, 341 bp, Zea mays
aactgatactcatgaccgccttgtgtggccaactgccgaaaatgcagcaaaggaacagcgggctgaagtacaccatggctttaatatgtctcagatacgatcaactgacctgctggatgaaccgactgtgcggatcaataccatacctgatccgcccgagcgacaatcataaaaatcaatccccagaagacagggtactggtagttgaaacggtcgctgctgctacacacatacaaagtgaagtaatgctggtatcatcttaagagagatcgatttttaataatgagccgcttaataccaacatggaaagctcaaacactataggatcttgccttaactga

SEQ ID NO: 338492 - DNA, 267 bp, Zea mays
tcgacccacacgcttcggtcctcacttttttatggcaacctaggtgccatcccgatcctttccatacaacttttagcactcaaagccttttagaagccctctattattaaaccggtgttggtagtgcccaaatccgaccttttgaacaacctttttacactcctcagggtccaagaccaagaattcattgaaaccccttgttcttgcgcctatttgtttattaatgggcagttcattgtctagattttctttttctcacactttatc

SEQ ID NO: 338493 - DNA, 206 bp, Zea mays
cttaattctaaactagtcggcgcctacggtctcgccggctccaggggcgtgcggcagaaaaagcacggcttgccggggcttctgacgacatgtgtgtgccgcagcaggcccgtccgcaaagctcggattaccggccggtgcttcaacaatgcatgttcctccttcaacggacctaacgccgagcaagatgagatcagttcctttct

SEQ ID NO: 338494 - DNA, 108 bp, Zea mays
atataatcgacccactcgtccggtcactctcctccctatttcactgcggggcccaaccgaaatttttgtccatcaacttcactcactaatacctttccatgattctca

SEQ ID NO: 338495 - DNA, 254 bp, Zea mays
gcccacgcccacgcccacgccgacccacccggatgcctacctcgcctacaccagagcgatgtcaggctgggacgagggctccgtgttctacagcgaccaggcgcaggtcccacgcagcggccccggcgtgaacccagccagccgcctcacccgtcagtccggccgtttgaagtgcaaggagtgcctccgcgggttcaccggcccgaccagcaactttccttaccgggagagcctactacactagccgaaccatg

SEQ ID NO: 338496 - DNA, 396 bp, Zea mays
atttttcctagccgccactttcttctctccctggcttcttcccccacgtgcagcgacgcccttcttccccaatagcatggagcagcggcttccctctcccagctcggcctcgccatcgcgcagggaagagcagacgcccagctctccctctccatcgcgcccccatccatggcgcccaagccctagtttcttcctcctgctgatttccccatggtgcagcagcccattcttcaccacacccagcagcggtagcagcttccatggaggacgcccagattttttttcacccctccttggcctcccttgcacaggggcagcagcctccatggccgacctctcctcctctgcgcagggcgcccctgttcccctgctccttctccctcgcacaacagcagc

SEQ ID NO: 338497 - DNA, 329 bp, Zea mays
gagggcagattcatggaccaagatcattcgatttggctgatctttctctaagcgagtacaagtataatttagctgctgaagatcattagattgagcactaccatatgtctactatcctttgcaattgatcaagaatggtgagctattctaaggaagcatctgaacaatatacctgctgtcctggagtgtcacagatcaaggttgagatgattccatcatacttataccaagattttcctagcaaggaatggtttgaacaatgttgtgattaagcaagggataataagtacttgctcttggatgacttaaaaagaatgagactgatcgta

SEQ ID NO: 338498 - DNA, 138 bp, Zea mays
ctcttcttatgcgcctgccctcgcggggggactatatacctctagaagctacttaacatatgtctctcacgattaaggataatcagcttgaaccctacagatatggtttactatcactctgacaaacttattcaaaca

SEQ ID NO: 338499 - DNA, 337 bp, Zea mays
cggacgcgtgggcggacgcgtgggcgggcgcgtgggcggacgcgtgggcaggcctgccgccacagcaccgcggatagcagagcagagcggcagccaggtcggtcgtcgtcgtcgtcgtcagccatgagcaaggacaagcaccacaagcacgagcaccacctgcggcgttgctgcgggtgcatggcgtcgtgcctcctggcgctggtcctcatcgtggccttcgtctcgctggtggtgtacctggcgctgcgcccctcgaagccgttcttctacctgcaggacctgcagctgcgcaagcccatctcgctgggcgacccgtcgctgactgcgtcggcgc

SEQ ID NO: 338500 - DNA, 367 bp, Zea mays
gagtacgtgaagcgcaattattagcgtcgggggaggaacatggggacgccgaagactgcatgggagccatgcccgaaccggatcctggacgacgtcaagctgcgacgttcggaatgagctcgcacgctatgatacgcctttcacttgatcaagggcatctacaactgcaacaactggatacgcatgttcatgggctcgcaggccgagcccatgaacaacgccagcgtaaagggcatcttcaacgagtgcggcagcctattatcaacattaactgctgcatagtctacgcgcgccagaaggaggatacatggaactacattatcgcaggcgcattcacgggtgggtgaatctatatgcaccagggcat

SEQ ID NO: 338501 - DNA, 322 bp, Zea mays
tgcattctttggctcacattcacagccacatgggctatcttaggaccaaactgagtgccgaatggtgcatgtgaatggctcgtcagacgcaccatcacagcacacggtatgtgcgctcaaatgacgtacccctggaactccctcttgctgaagcgtggaacactctgctaatgaatattgttgctttaaaaggatctgaaccttgaggaatggaacgaacaatgctaagtctagcgtttctcactattgtgcaagcacttatggtgaatggacttatgatttgcaggtttctcaaaattgttaaagcactgttactgaaaat

SEQ ID NO: 338502 - DNA, 119 bp, Zea mays
tcgggtcatcgtccacaagggcgatacggggatgttacccagccacctgcgtcttccacatggagtcaccctaatgtacagcttgcagcctcttgatacaacttgtctgatctgctaaa

SEQ ID NO: 338503 - DNA, 323 bp, Zea mays
tcgtgagggtggatggaaggattggccagcgttcaggtgcacgaaatgggctctgttcttttggcccacgttatgggatgggtatgaacgtcgaaagtgggatgagtggaacttttgatgcaaactctggtttcatcagtaactccaatgggagagcaaatgggaacatacttcaatggaagttcgaatagattgagtacttctattgcgtatcttgattatgacataggatctaatgctagttctatgtctaatgattttaatgccagcgttaacttaccaccccaatatatcaaacatgattgctgctgttgccattggaa

SEQ ID NO: 338504 - DNA, 211 bp, Zea mays
tctgtatacataaaaaaaaaaatcttagttgttaatttacacatacggactgctcataatactcacatatacaatatcttcaaagaaagcaaacttacagaatttaatcctaattcactgattgagaactattggcccatgatgttttctaattttattcatacactatctcatttaataacactactaaatacctctaaatacacttatt

SEQ ID NO: 338505 - DNA, 388 bp, Zea mays
ctcgtagagagaaggaaaaatatccccaaaccctagctcccgatctcgatggcgaaccctcgcgtcttcttcgacatgaccgtcggcggcgccccggcgggccggatcgtgatggagctgtacgccaacgaggtgcccaagaccgcggagaacttccgcgcgctgtgcacgggcgagaagggcgtgggcaagtccgggaagccgctccactacaagggctccaccttccaccgcgtcatccccgagttcatgtgccagggcggcgacttcacccgcggcaacggcaccggcggcgagtccatctacggcgagaagttccccgacgagaagttcgtgcgcaagcacaccgcccccggtgtgctctccatggccaacgccgggcccaaca

SEQ ID NO: 338506 - DNA, 110 bp, Zea mays
gccgttcccggtctgcatccgccacgttgcgcggcgtcaccctccatgctccgggctgacgacgccaggccgagcctcgacactctgcgaatacggatcacgcgcgacaa

SEQ ID NO: 338507 - DNA, 177 bp, Zea mays
gccaaaggagactagatggtgggtccatgacaacacggtgtaatgatctgctgggcatggcctgtcagccttgtgtactgcgaactgtgatgtatctatgtaagcggggagatgagatgatttatgcctatttctaagcagccttatataggattgcgaagtttaccttgctggggt

SEQ ID NO: 338508 - DNA, 339 bp, Zea mays
aaattgtaggcggccagcgggcgaatgggggatcggggactggaggctgaccacctaccactataccgtgtcgtgtgacagattggagcaagcatggataaaggtgatagctgtgtgaagtgggaaatcgctaacaattcaaaacaacatacaacatacaagcataaagcataaagcctgaagtgtgtaatgagtgatctaactgatataaaacatgaattgcttagtgctcactgtccagtttgcaaacctgaaacgcgagctgcatgaatgaataatgaaacgcgcaacgcgcggcgagaggcgtattgcgcatcaggctcgagggtggttttacta

SEQ ID NO: 338509 - DNA, 331 bp, Zea mays
gtcacccctgactgctcgacgacctctgcgtcctatcctaccccacccgtccatcgccccctccctccggtctgcgctcccacagcctcacctctgcgccccggtcgattcgcgtcgccactcgttggaaggaacgatggagcagaccttcatcatgatcaagcccgacggcgttcagctgagcctgatcgcggacatcatcagtctgcttactgaagaaagggttctaccttaaggggatgaagatcatgaacgtggagaggagcttcacgcaacaacagtacgctgacttggccgacaacgcctgtctttcgcgggttggtggagaaca

SEQ ID NO: 338510 - DNA, 253 bp, Zea mays
atgctataagcgcacctttcgctgtgtctagcattgttcatcgcgcgatactgcggaccgtactctgatgaacacatcaacaatgcgggctacatggtcttcgttggcagggacttgaaatgtaatggtaccacaaatgacgtcatgaacatgggcataaccatgattgaaggacaggacgttgatgcaaatcttgcggccgtcggtgagacccctacttatgtgccttcttgctgtggacaacatccagctg

SEQ ID NO: 338511 - DNA, 215 bp, Zea mays
ctctctctctggtactgctagagctacctaggtagccagagccagcctctctctgtatctggtcagggatgaatactgccgccgcccacaaattccacctttcaagaacagcgctgcatggcggggtcgctgtacttagcagtgccctgacgttcatgctatataattaagctacgctgctaggagccatcgggagagagatgagaccgagagat

SEQ ID NO: 338512 - DNA, 106 bp, Zea mays
cagctcacttgaagggtggtgccaagaaggttgtcatctctgctcctagcaaggatgcccccatgtttgtcgttggtgtcaaccagaaagggtacaaatctgacat

SEQ ID NO: 338513 - DNA, 139 bp, Zea mays
aaaaaaaaaaaaaaaaaaaaaaataggggaaaataaaaaaaaaaaaaaaaaataatgggcggtcgacacaataattaaaaaaccgaaacctgatagcgtacacattattccttatacatagtattattagagcttgact

SEQ ID NO: 338514 - DNA, 304 bp, Zea mays
ttaaagtcgacccacgccttcgtcgagagccaggccagccagccacctgggcttggtctccatggccgacgcgctcacgtccccggcctcggccaaggtcttgagccccgtcgccgactccaaggtgcgccaggcgtccagagtcgcggtggtcgggttccggcagcatccgcggagccgtggcgcccccgtggccgagcgggcgtcgctgttctcgcccaagcccgcggcggccaaggacgcgcggccgaccaaggtgcacgaactgtacgtgtacgagatgaacgagcgggaccgcgagagc

SEQ ID NO: 338515 - DNA, 352 bp, Zea mays
gcagctggttccagtgttctttggtggtggccttgctttgcccgaaaaggttggcatttcgagtgctgagacatcggcttcattgaatcctaaagcacggttgagccatggctggctcccttgctgcctcagccttcttccctggcccacgggcgtctccagcagcatccgcaaagaacttggctggtgaagtaccggatagtttgagcgtccgtggtattgttgcaaagcctaatgccaattctgggaacatgcaagtgaatgctcaagcacaaacccttgccaaggttaatggcaccaacgttaacctcaagaatgcaagctcagacacagatgatgcgataccctacac

SEQ ID NO: 338516 - DNA, 312 bp, Zea mays
ggagccctatctatccttttgttggcacctcgcgggtcttccgaccgccccgtaccgcatacaaatcctatgctcactctcaccgccgcctcttccactgcaccccgagccaagatgaatgttaaaaagctcaagacgatggcacgtgctgtgcgcactgcggggaatggtagcatgcgcaaggaagaagatcgcagttcacaagactacgaccacagatgataaaacgcttcagagcaccctgaaatgaataggagtgaacaccattgctggtattgaaaacgtcaacatctgtaaagatgatgttgttat

SEQ ID NO: 338517 - DNA, 310 bp, Zea mays
taaaagacacccacccctccgaaattatgccgacaccatatctccggatgtcgatggcgaaccctcgcgtcttcttcgacatgaccgtcggcggcgccccggcgggccggatcgtgatggagctgtacgccaacgaggtgcccaagaccgcggagaacttccgcgcgctgtgcacgggcgagaagggcgtgggcaagtccgggaagccgctccactacaagggctccaccttccaccgcgtcatccccgagttcatgtgccagggcggcgacttcacccgcggcaacggcaccggcggcgagtccatcta

SEQ ID NO: 338518 - DNA, 72 bp, Zea mays
tcggaaagagctggccgcactgattactgggggcaaaatacaagcccggattgactcccacaaaagatcctt

SEQ ID NO: 338519 - DNA, 286 bp, Zea mays
agtcgacccagcgtccgccaccgtcggtccagctgcagtccgcgagatggtgggggcacaagccgtgggggaaagcgtatccggccacgcgtcccagagcggcggtatagctctccgcgcgcggtcccctcatcggcaagacctactcactgggagcgacgcgcaaacatagatgggcatccgatgtggggaccgctcatggccgttcggcctgagttatacaatggcattgatggccatattggtaacttctggatgagacacgtttgggacctataactttaac

SEQ ID NO: 338520 - DNA, 121 bp, Zea mays
tccacccactcgttctgctgttgatgaaccagatccggcgggtcgtttgtcctagaaggctacatattccggaccgccattacctagaagtgtccacctgctaagagcaaaaacactttct

SEQ ID NO: 338521 - DNA, 183 bp, Zea mays
tagtcaacccacgcgtttcttcacacgtacggttccagcctcaccggcggacttaatagtgggaggcatctagcctatcagtgaaagcctattcaccgtccacacgataatcagtgtgactaccatcacctactacctcgtacgctagtcccgcactataccttcaacacactcatacatatt

SEQ ID NO: 338522 - DNA, 343 bp, Zea mays
ctcctgtctaccatctcggctagggcgaggtcgaatggccaagtcgccatgatgcagcatcccacgccgcagcacccgcagccggtcatggagctgcctccctctacgaaggctgttggctggcagctaccgtactgggataggatcccgccgtcgatggcactgatgtacggcgcaccgactacattgcagacttaagcgatgtggaggaagactttgccgaatgcacactaaaactaggcaccaaccacgcaacagtactacaccatactcaccgtgtcgcttcaggttccagctgcatgcgctatagaagactaagtccggacgctatcgatcaggcacc

SEQ ID NO: 338523 - DNA, 358 bp, Zea mays
  unsure (1)..(358): unsure at all n locations
tcccaacccaccgtaaaccctagctgcgagctatggcccgcaagcgccaggcgccgccgccgccgccgccgccgccgccgcaggaggaggaggatgagtcatcctccgaggaatctggctccgaagaggagtctcctcgcctccccgagccccgaaggccctcgcaggccgccgccgccaacaacgccgactcgtcggacgcggactcggattccgacgccgacgtccaagccttccagatgcgccaggtgccccgcttcctcaccaagcagacacacccagtctctcacccagaatccggtgccgaagaggaggagggcgagttgtcagagtcngagcacgagaacccggtgcctgt

SEQ ID NO: 338524 - DNA, 348 bp, Zea mays
cgacgcgtccattctaggcggccgcctccagagcggccgacgggcttttattatactggcgtgttacaacagacccgtcatcatcatgatcatgagctaccatgcggggtgaagttgtcctgccgaaaactaaacagcacatcatagccgccggcatcatgaagcacccctccggcgccgcataagcagtgtacaaactaacaatagcagtgctctcacaacacgctgaggaccatgaacacaagatgtaccagctgctttattaattaagtagaccatccgcgagaagaggcacaatcgcttatcccacaccaaggtcaatcttttctacactcagaagacctacaa

SEQ ID NO: 338525 - DNA, 267 bp, Zea mays
tcggccgacatcattccttacttgccagggccgggcacgggctggcgaagcctctgctcctgcacagctgcagccgataacatggactcaacgcgggtatacggggccagctcccggagctttgttacacgctactaatgttgcaatgaacgagccggaagcgaaaagtggatagccttggataagtagaatgaggacttactccttatgaatgctgagagcttactggatgatttgcaggagcaaattctaacactccagaatggt

SEQ ID NO: 338526 - DNA, 389 bp, Zea mays
  unsure (1)..(389): unsure at all n locations
cgccgataccacctccacaccatgggcgatggatagattatcgggggcatcccccacgcgtccgggagcttgtggggatgacaaccagggaattttgtttgtcaacaatatgagctttagtggtgtggatctcacaaggttaagggccaaaaaagggcacaccgctcagtgtgtgtgcttggtcgatgcaagcggcaatcgcaccatgcgtccgtgcctatctagcgcagtcaagatacaggccaatgaatttagaaaggaggatttcaaaggctccaagtggcttattgtgagatatgcacaacagaacatggaacagattattgaagctattangattgctaaacaggaaggcctttcagtatcattagatgtggccagttttgaga

SEQ ID NO: 338527 - DNA, 334 bp, Zea mays
tcgcgcgaggaggacgtggacaacctcggggagggcttgaagacactgggcatctaccacgcggccgtgagcatgttggaataacaccatgcgaatgccggcggccaacaaaatcatcaactactgctgtgaagcgtacaaggctaaggagcacaaattggcccacccataagcagctcagatgctgagactcacactgctatctcacgacgcggaggtgcatatgcagcacatcgaagagccaagcacctatacaaagagaggatgatatagcacgctcacaagcgctaaacccaagtcatgctcaacatagactagtaacaacaattatagc

SEQ ID NO: 338528 - DNA, 215 bp, Zea mays
tcaacccacgcgttctttccaataccaccttaacaaaatacggggagggctattaaaaaaaaggcgtcccccaaacatctaacatccacccttactattaacacgctcctatccaagagatcgcagtgcctcttcttacaaagaaaatcgtctataaactgtttcagcatttcaaaaagccccatctctaccgctttatattccttaaactaatc

SEQ ID NO: 338529 - DNA, 326 bp, Zea mays
accacccactcgtcctgtttccgcttccatctccgtcctctgggcgcatgccttctgcatccacactctcccaccatccgtaaaaaggagaacgccctacccacttcggttattccgcatatgtccttttgcgagaagcacaacacaaagaaccttatctacgatcttcaaaacgttaacgtcaccatcgctctacagttctaccaagccagctactataatctactatccgaggttccaaaacacatgcatatcacaccatctatactatttgaccgccacaaggttaatgcattcttttcacttatggccatttaggatctcct

SEQ ID NO: 338530 - DNA, 192 bp, Zea mays
gttcctttgatggattttcaaaaggagtcaacatttgatatgtggagtactgttggtctatcttctaaaggagaaaatgactcttccaaggacacttctacgtacatcaatatgaaactataattgaagttcaccaaagcatggctgcatttttttaagttactaacaccaatttatgtgtgcatcgaggca

SEQ ID NO: 338531 - DNA, 279 bp, Zea mays
ataaaaaaaaaaagaggaaaaaaaaaagggaaaaaaataaaaaaaaaagaaaaagaaaaaaaaaagaaaaaaataaaaaacaatggacaaagacgtcaagatgcttgaaaaggggggagaagaaaagaaaaatgaaggtgctgcagaacaatcattatgttgaacaaaaaaaaaaataatgggggagctgccggagaatgttggagcgaatgacatatagtacaagttctattatatggaagagattgagtttgagattttgctacagaatgtatttag

SEQ ID NO: 338532 - DNA, 333 bp, Zea mays
gcttctcctccccctccggttcgggttcgggttcgcgaggttctccggggttcggattcttgggtgagcggatcgagatggcagcctccgatgttgagtaccgctgcttcgtcggcggcctcgcctgggccacggacgaccactccctccacaacgccttcagcacctacggcgaggtcctcgagtccaagatcatactcgatcgggagacgcagaggtcccgcggcttcagctttgtcaccttctacacggaggatgcgatgcggaacgccatcgagggcatgaacggcaaggagctggacggccgcaacatcaccgtcaacgaggcccaat

SEQ ID NO: 338533 - DNA, 240 bp, Zea mays
acctgattatggttacaaccaatagggggaggatgaacgagattattataacacagggctccgaaaaaggcggctacgtggacgacgtgatagagggcctggcggctactactgaggtgggaggcgtcactggatactgttatgattatggatatgcccccagaggaggttactatgaagagcaagacgaatactatgatgagtcctatgaatatgctactccgactggccgctgatgtg

SEQ ID NO: 338534 - DNA, 154 bp, Zea mays
atgcattctatacaatccacccatgcgttcggattttgctcgtggaggccacatgggggggctaagctaaagccttaccggcacagtttctacagaattcggacatggctaacttgaactgatagctaatcatttcattcatcaaattgtcgaa

SEQ ID NO: 338535 - DNA, 206 bp, Zea mays
tcgtatcaacagaccattatctttataggggggagatcgtatattatgtggacacacaccatgaggatgtcgctcgtttccctcactatgctggctcgcgcttcgagcttcacaatgacgtgtacaatccgccgtttaagctgccagccatcgacatcagtttatctaccgtctccttggcatgtaccacctctggtttaactgcc

SEQ ID NO: 338536 - DNA, 106 bp, Zea mays
atacagtcgacgcgctcattagtgacagccgtcgcccctataatggggggccggtacatgaaggcgtaccacctcttcctatagttagtcgtattacagcttgtcc

SEQ ID NO: 338537 - DNA, 317 bp, Zea mays
ggtcttcagaccattagctttatctagtgcagagcgcagaagaacccgatcgacaccatgagggtgttgctcgttgccctcgctatcctggctctcgctgcgagcgccacctccacgcatacaagcggcggctgcggctgccagccaccgccgccggttcatataccgccgccggggcatctgccacctacggttcacctgccaccttcggtgcatctcccaccgccggtccacctgccgtcgacggtccacctgccaccgccggtccatgtgccgccgacggttcatctgccgccgccaccatgccactaccctac

SEQ ID NO: 338538 - DNA, 130 bp, Zea mays
tcaacccacgcattcgtttttctacaccattatcttatactgcgggggattctttaaaaaccctaaccacacacatcagaatgtactacttttcacctacacttcaagctttagttttcagcaccttatt

SEQ ID NO: 338539 - DNA, 364 bp, Zea mays
tcgacctattgcgtggcatgtacggcggcggctactagaagctgtccaccatacatcaatactcatcgctcgtcattatgaacaggctctactgatcttgcatgcatagaataggtctcgtgaatgcaccctttatcatgttaaaactagagattaatattcattcaggttcgctcgaagaaactgactctatgttaagggatagaagccagcctaccattgatctagatagagcaatgcagcctattgggtaatacattgctttcaaaactacgaatagcaaacctagaaagatattaggtgcagacgtgcctgctgaagcacataaaatatgtgacgattatttaactctgccgaaacactg

SEQ ID NO: 338540 - DNA, 286 bp, Zea mays
tcgcgacaggtagttcaattgtgatcttggactattacgaatccctcttgttttaatgttttatttgcctttttattttaaaaaaaaaaaaaaaaaaaaaaaaaaaaaaaaaaaataaaaaaaaaaaaaaaaaaatataaaaagtaaaaactagaaaataaaaattccttcaagttcgcttgaaaaaaactgactctatgttaaagagaggaaggccaccctaccattgatctgtctaaacaaaaggaagggggggcgcccatccagtgcttccaagactaggaag

SEQ ID NO: 338541 - DNA, 248 bp, Zea mays
tcggtcagagaagccaaaacaggttggagagggtaaaggtgtggatactgagtccactagagtcgaatctgtgactataaatgaagatctaaaagaaaacgatccagacgatgacagatgtcgttagtatatacctgtatgaacgtctgaatacaacatctgctgatcctgctactgagatagatataagtaggcgagagacgttcttatcttgaacagactttaattagagttctgatatgtcatag

SEQ ID NO: 338542 - DNA, 228 bp, Zea mays
tcgtaacagcagtcccatctagagacgtgcgggagccaaactctatctagtccaacccccagatcctcattcccagggtttatgaacatgacatcttcgtcttgacatctatcgaatcgcctgatgattgcaccctctaacaagccagaactagatactaatatcacttcaggctcccttgcaataactgactctgagtctacgcaggaacgccaccctacaatcatc

SEQ ID NO: 338543 - DNA, 340 bp, Zea mays
gccgctcggtcgcctcctgctggggggcacgggcggtcgaaaccctaccgccttcgccccctccctacactccattccacctcgccgtcaccagagggcgccgccgcatgtgctcgcggtcccaaggaaggaggcggcggcgcgattattctctgctttggtcgcgtctgcccggatctagtctggttccaggaggtgggggcgacatgtgtggggcgtcgacccttagcctgcgcggatcggccttggaggcatcctggctgtagtgagctcggcgctcgtatgtcactttcgggcgttgaggaacctggctgtgttgttcgcgcatcaagggggcttg

SEQ ID NO: 338544 - DNA, 309 bp, Zea mays
taacgctaggtcctcgcggcccaacggcgggcgtcgtcgtctaagtcatgcactgccctcagcacctcaggctctcccttacccgcgccctgatccacgcaccattccgatacatatattcgaccccatctctcgtccaaaccctctacccctcagaggcgacgcctcccgccgctgaagcatcggccggtagcgaagctgcggcggcggatgcaggcggacgcgcacacgctgcgtgacttgacgtactcagcggaggtgacgacgcggcagaacccgctgcctaagcccaagtggatgaatgagacc

SEQ ID NO: 338545 - DNA, 62 bp, Zea mays
tcaggggcggtacttgcccgcgtatccgctttccctttcgggggtcctaatatagctgggcc

SEQ ID NO: 338546 - DNA, 105 bp, Zea mays
actgttagagatcggtccccacgtggtgagggactttacggagggcgtgctgccgcccccaaagcagaaggacgcgacgtgcccagatgcgccggctgcgatcat

SEQ ID NO: 338547 - DNA, 337 bp, Zea mays
ctccgagggcaccggcattctctgccagagcaacgaattactacaggagctgtttcgaggtgttcgcctataattagaccgattcattaacaagcttaaggattgtgactagcagaaggccgaggttgatctggggcatagctacaaaacaggcaaggcgaaattcattgtggatcatgtttgaaacatggcgagtcatgctgataaaaatattggatacgctagacaaggacatcaataacttcttcttgctagtcaatgtatagatcgcatggcacttctctattcttgtcaagattgtggatggcgagaacatagatttcaagcttgatgagat

SEQ ID NO: 338548 - DNA, 217 bp, Zea mays
cttcaaagaaagccacattctctgagggagcaacgacctaccatacgagctcatctcaccattacgtattgaatttaactcctcattcaacaatctcaaagattttgaataaaagaagtctcagctctaccctgtctatagctacaaatccaccatctcgaacatcatactcaatacttaacacaacatggagatctacacactttatatacatgat

SEQ ID NO: 338549 - DNA, 158 bp, Zea mays
ttcgcctcattgctacacaagctgccgaggcgtatgtcaacgcgcacctcaccaacaccgaaatatacattccccaattctactccaccaggcgcgctctgcagaactcatccggattcttccgctctgatcgagagagtagatctggactcagtgcc

SEQ ID NO: 338550 - DNA, 133 bp, Zea mays
cgcacgcgcgcgtacgcaagcatgcattctatacaatcgacccactctttcttactgacccccacagaaatcccagacgcggcacttttagatgtgccatgacctcccataaagagttgtatttcagcttagt

SEQ ID NO: 338551 - DNA, 280 bp, Zea mays
  unsure (1)..(280): unsure at all n locations
agcaaggaaccactagagacaacccacgcgcccgctcgaaaaggaacccgaagccaggccagcgggcaacaaaagaagggcggggaagngccacacgacacgaagcagccaaaccgacacaaaaggacacagaacacgggaacccaacacgacaggaagagaaaaagcgagcccgacacaaaagggcggacgaacaccaacgaaccccgagaccaaaaccaagaacggccgcaccaaaaaccagaggaagagcaaccgggacccccacaaaaaacgcaag

SEQ ID NO: 338552 - DNA, 66 bp, Zea mays
cgaggcggtcgccggcatcctccggcgggacctctcggacgccgagctggtccgctccgagtgctc

SEQ ID NO: 338553 - DNA, 108 bp, Zea mays
tagtcaacccacgcattcgttcgctttatcactacacaatactacggcggttttttcaacgcgcaccccaccaacaccaaaatatacattccccaattctactgcact

SEQ ID NO: 338554 - DNA, 325 bp, Zea mays
cgcataactagggaactcactgcattgtatagtctaatagtggttgattttacgctgaaggaagatggcgtgaatactgcaagctatgatccaatacctcatgtcaatgcaagcatgtaacctgataaccctgccttagaactgccagatctactagtactgatactatatgatatcaactgcgtaagtcatcttcaagaacaaagactatagacgcgacctagcgagctacgtgctcagcaatatggaggtgtacatttactaggtctgcaactgacatattacctgcatagctgttattcgatactagctgaaggtacgaatg

SEQ ID NO: 338555 - DNA, 176 bp, Zea mays
tagtctacccacacgtcctattactctccctcctatctttcgacagaactattcaccaaatttttactcatccaaaaacaaaacacttttttttttccttcccttcctgtcttctactacttatttatctaccaacaccctctctttctcttactaattaccaaaccatatttctt

SEQ ID NO: 338556 - DNA, 302 bp, Zea mays
cagtgcgtagagaggatcgtcgaacagaacagcatgaagatggtcatcgttctcgtcgtgtgcctggctctgtcagctgccagcgcctctgcaatgcagatgccctgcccctgcgcggggctgcagggcttgtacggcgctggcgccggcctgacgacgatgatgggcgccggcgggctgtacccctacgcggagtacctgaggcagccgcagtgcagcccgctggcggcggcgccctactacgccgggtgtgggcagacgagcgccatgtaccagccgctccggcaacagtgctgccagca

SEQ ID NO: 338557 - DNA, 238 bp, Zea mays
gtgcaagcagagcggattccagcaggtgccagctaggaggaacgatgcggagatgacgaaaaacctatcctcgggcattgcgtcgagttgaataagcatgataacgcacgcacatgagacacgctaatggtatcgacaatgccagtcctgtgcgacaatagaggtgtcagcaattgatgctactggagccacttgaccggactcatgcaatcattggctagagtgtacaatacatact

SEQ ID NO: 338558 - DNA, 395 bp, Zea mays
cccacgcgtccgcccacgcgtccggcgagcggccgtcctttttttttttttttttttttttttagaaacaaggcctgggtgcataatggttatccaatccgagagcgtcactgcctttatcagtgcatcagcccaaaggaatacagaagttattttaggatccatcttcataggctctggtggaaatcaatggttcttgaaccaagttcaaaaacccatgactaccaagtatgatcttatatggaggtaaggatctgagagacatgaaccaagttcatactgcacggttcttaataaacagaattaactttttaaccaacacggcttgtgaaccatatacaggtttttttcctttactgatccatttttttttcaagcctgatggttttgcatta

SEQ ID NO: 338559 - DNA, 289 bp, Zea mays
tctatacagtcgacccatgcgttcggcctgtgtagaacctataacattggcgccactcaccagtgcaatcgacatctgtaggcatggactgcagacgaggcgagccgcaaggggaataagggagcggacgatcgcaaggcatgatgttgcaagaagaagattattactcatgtccttagggccgggctgtagttcattgtttgtctactaggtcgatacctgcactaatgccaggactcgcaacgcgtgggcactgacgctcaagtttacctagctgacggactggagt

SEQ ID NO: 338560 - DNA, 217 bp, Zea mays
tcgacccatgcgttcgttgtatacgcattccttcccaaaacacatactgcgatcctcgaagcctccgccgagcatcgatcatgtactccctactgatgcaatgtacgtgtatgagctcatcaagaatgctgtctacatcggcaccgatggcacgtatattactagctgctgatgagtcaactggcactcataggcaagcgcgctatcagcataaatg

SEQ ID NO: 338561 - DNA, 89 bp, Zea mays
agagcgatcacggacgatgcacgcacgcgtacgcaagcatgcattctagacagccgacgcatgcgttcgttgcataccataccatccca

SEQ ID NO: 338562 - DNA, 284 bp, Zea mays
gagctatgtcggaccatgcacgcgcgcgtacgctagcatgcattctagagagtcgacgcatgcgttcgcattcaatctcactaccatacatcatgtgggacgtcgaatccatgcggtttttctaaactacgggcatggatgtcgacgaagagaagatctagcacggaacgcaaggcaagatctaagatcactaaagtgtttactctcgcccacttcatattgatctttcacaatgcgcaaaggatcgcctgatgcactggcgtgcgcacatccgaccggaccat

SEQ ID NO: 338563 - DNA, 316 bp, Zea mays
tcgctgtgaacatgaccataactatttactctgcgctgataaccaactctttgttttatatcacaccttctctacagggagctcatgcgggaacagcttaaggaacctcgctccggaggggttcgaggacgaatactctggacgttatatttctgcgggtggcgtcttttacaagtgtataagtccagtcaacattggctcgtagaacatgaacatccattgcatgcactgttttatgggaatgctattctgccatcctaagctatgttgtcaacgacctaggttgaagagattcgatcatcatgcaagcatgctg

SEQ ID NO: 338564 - DNA, 69 bp, Zea mays
gtcgcatcccatcccactaccacccatctcggcgtccgccgattcgatccggttcttccaacccaaggg

SEQ ID NO: 338565 - DNA, 201 bp, Zea mays
gacgatgcacgcacgcgtacgcaagcatgcattatatacagtccacgcatgcgttcggaacgagagcgaccatctttactcggcgcagataacggatctttattttagatcatcacaagctctccacgacgtcatgcaggaagatctttatgtaccttgttccgatggggtacgactaagaaacatcgggccgacatattt

SEQ ID NO: 338566 - DNA, 201 bp, Zea mays
gcggatccgtgcctgcacaccgcatagggagtgctggactgccctgctcttttggggcagccgggcgccgatgaggatactgctcgcacgcacacagagcagacagccggttcgagatcggagacgcggagaggggaaaggctagacgtcgacctggcactgcggctctcctacgtctcctgtggggccggcttacctagc

SEQ ID NO: 338567 - DNA, 300 bp, Zea mays
  unsure (1)..(300): unsure at all n locations
gacgncgcagcacgcgnacgaaagcangganccccgagagacgacccacgcgaccggancacacgcacncgcgcaagcggggggccccgcgccnaaaggcaaaccgaggcgccggcgacaccgcgncagcgcaaccgagggccagaaacccgcacggcaacaacgaaaaggacggcccgcacacagacacggagggcaacaacacggaggagcaagagaagaaccnagcgagggacgacaaggggagcgaccggacgcacaaagccaagaagaagggcaagaaagcggacgaggcagccc

SEQ ID NO: 338568 - DNA, 119 bp, Zea mays
gagccaaggatccatatagatgagcggggtgctaccagggcagcactcattgcagatagtgagattggtcattgatcgtcaatactgatccagagctatattggaggatgtgcaaacag

SEQ ID NO: 338569 - DNA, 232 bp, Zea mays
tcgacgcgcgcgttagggacggccgcctcctggtggagtaccggttcgtattataaggcgtaccataatagcgtgaagtaatcatcataacagctgcctgcaatcagacgtagtcctctgataagaacgcaaaacataagagcctgcggaatcatatagagtaccacccgagggtactgattgatctgcctgacatcattagttgcgtgctgattgctgacttattacgagg

SEQ ID NO: 338570 - DNA, 150 bp, Zea mays
tcgacgcacgcgtgcgcttgaccacatccggctcgcactcaccggtgatcacgagcgcgacctaatggcgctggacgtgggactgaagcagactggcacgggagcaggggccgcagcctgccagatcgggacattgtcagggcctaccga

SEQ ID NO: 338571 - DNA, 239 bp, Zea mays
acccacgcgtccgtactttttactagatttgtatctaaccgacgcaccttttctttcttaatcttaggcaggcaacaatcagcttgatcaggtcccattctattgcaaaccagggaaccggggaaaccgctattctgaccggctctgttgtatataacgcgagcgcgtctgcatcaggtacgctttatgcgatgaccatagccataagaattggcggcggggaaaagaaaagagaaaag

SEQ ID NO: 338572 - DNA, 141 bp, Zea mays
aaaaatcattgggtaaacgatgtaatgatggctatcacggggaatcgggtgtgctggaagctaggcatcaagtagaacggcacactagctaagcaggaaggagcgagctcctgtctgatctgctcggaatatatgaagaac

SEQ ID NO: 338573 - DNA, 171 bp, Zea mays
tcgacactctcaagttgaaatgccctgtccacattgtcggatgattagactccatcacccgacggtcaatagcctggtaagcaaggctggatcggctccgaaagccgatccggtcgagcctcagcatgtgtgcgaccatgccttaggcactggcgcccactgctttatctg

SEQ ID NO: 338574 - DNA, 55 bp, Zea mays
aataaaataatataaattagggggtaattatatattattaaaaaaatataaaaat

SEQ ID NO: 338575 - DNA, 53 bp, Zea mays
gcatgccttccaactttccctattatgaggcggattaaaacctggccgtatca

SEQ ID NO: 338576 - DNA, 253 bp, Zea mays
tcgaaggattgcactgatgcttggtgcgccgcctcttccatggcaaccctcaaccctctggaactggcgggcgaacacatcctcgacgaccggcagctgccgattgcgacggtggcgggtgtcactgaatccgccgcgggcaactagcaccccgtagcccctgtttgctggtctggcacacacgcagggacgactcttgtgcgcacgtagcatgctccgcggttcatacggtcagattgcgaacggatgcagg

SEQ ID NO: 338577 - DNA, 198 bp, Zea mays
cgaccccccgataccggaccgccgcctcctggcggcccaccggctcctattataaggagtcttataacagctcgtcatcatcatcataatagcttcctgctgggaaaaattatcatctcatcacaccacaccacatcataccctccacatcaaatataaagcctccggtgcctccttattaggcatccaacctacaat

SEQ ID NO: 338578 - DNA, 368 bp, Zea mays
cgcacgctggccgactacaacatccagaaggagagcaccctccacttggtgctgcgcctcaagggaggcatgcagatcttcgtgaagaccctgactggcaagactatcaccctcgaggtggagtcttcagacaccatcgacaacgtcaaggccaagatccaggacaaggagggcatcccaccggaccagcagcgtttgatcttcgctggccaagcagctggaggatggccgcacccttgcggattacaacatccagaaagagagcaccctccacctggtgctccgtctcatgggtggcatgcagatctttgtgaagacactcactggcaagacaatcacccttgaagtggagtcttcggataccattg

SEQ ID NO: 338579 - DNA, 269 bp, Zea mays
aattcttgaaggaatattctgccagagttgcatgagctgcacataactgatgtcgccaagatcatgacccattggagtgaaagtaaagccttcagagaggactactagaagagaattctcacatccttaaatagcgacaacgttacttgagatgtgcagatgaggaatcctgattatacgcccatatttatagagtcacatgctccagcttcagctacagcttcagaaccgatttcctgtaaaattgtctgcaaaacaagcctaggaag

SEQ ID NO: 338580 - DNA, 263 bp, Zea mays
cgcgacccaaagcaagctcaagctcagctcctccagtctccagtctccaccgcccgccaaccccgagatatacctcccttcttctcgaagcttcgtctgcagacgaagtcgccggctcttccctcggcgctggtgccggtgggttgccagtggcggtgggtgggtggcccggctggtggtgttgctgggatgccctccgagacggctaccgctgacggactcctaatacgagggtgataagcccattaaccctttccgtgctc

SEQ ID NO: 338581 - DNA, 212 bp, Zea mays
ggcttctcctccccctccgggtcgggttcgggttcgtgaggatctccggggttcggtttcgtgggtgagcggatcgagatggcggcgtctgatgttgagtaccgctgcttcgttggcggccttgcctgggcctggacgaccacttccttcacaacgccttcagcacctacggcgaggtccttgagtccaagatcattctctttcggtagact

SEQ ID NO: 338582 - DNA, 125 bp, Zea mays
caataagtgcattcacctatgggaaccgacttcaaattactggaacgttaattccaacccatttggtggacacctctgctaggggtggaaatctacaagggagtcccaccggagccgacatattt

SEQ ID NO: 338583 - DNA, 65 bp, Zea mays
tcgattcacgcattcgctatccattaactctatcgacttccgggcggattccaacatgatcgaca

SEQ ID NO: 338584 - DNA, 129 bp, Zea mays
gctaatcattaagacctgcttgaatgggcagaatgagaaattgtggcccttgctttataagcttaatgttaccatgaatgctgatgagaatgagttgattggcaaatctcttatgaatcgtgttttgca

SEQ ID NO: 338585 - DNA, 393 bp, Zea mays
ctgtctgccaattgccatcctaccaaatcatcccggaaccatctgttccaaatcatggtttactctagatatattgactgacaaccataggcattagctgttccactctgacaacgacttatacaatagagaataaaaaaaaattgtggggcatgggttttatgtcaccatagttatgtacttgctcactctgatatgatgactttgattcagagaattatcggtttcatgtagcctgatcattttcttgcccttttagaagcatatttatggagcatttggatttgcggttgagttctttactctctcttcttcatgcagctctctttcagatcatcaagacagcatcaaacgctggtctattctgaggtgaatcggttgacacatgcaagt

SEQ ID NO: 338586 - DNA, 300 bp, Zea mays
ctcgtagatcattgtacacatatcgagacagctatctagctagcgcgctcataatctaacccgtattacggcatggcttacaagcatatccgagtcttgtcctgcttcattgcgatcagcgctcttgcatgcgctcgctgcgcatccgacgtacccatggacggtggcaggtgcaacggcggcgccacctggtacaggcccggcaatggcgctggatgcgacggtaacgcgtgtgggtaccactgtgccgtcgaccaaactgagatctagggaatgatcaccgacatgggggaatccatc

SEQ ID NO: 338587 - DNA, 386 bp, Zea mays
gccgtcgccgctgcagtgtgcactgccaccgcttgagactgagatggggggtgttttcgaggcggccctccgccatgcctgctcacatcttcccatgcttacgtgtaaaagaaggcgcccatgccagacttggcccgggcacgcccttgtgctaatctgcgaggtccaatgccagtacagtactcccagctgcatccgcagctgctgaaaagaaagcctggacatcaccctgagtttatagactatgtgccatgagtggctatagaacgatgtctttttaattcacaagatatctctcttctaggctggtgctttgcgactataaattaggagattgttccactgtccgtggcatcatttgaacatgttacttcttattgtaccct

SEQ ID NO: 338588 - DNA, 237 bp, Zea mays
atgaggtaacaactgtacagtgtatgatggaccctggggaaatggtttctttttcatatagcttgtaccgtagatagaaacaaaagaaatccttcttatgttttactgtgtagcgttataatgagattttgatgggtctatcatcgttcttgattttgttttttttttctttaaaaaaaaaaaaaaaaaaaaaaaaaaaaaaaaaaaaaaaaaaaaaaaaaaaaagggggggcgccc

SEQ ID NO: 338589 - DNA, 345 bp, Zea mays
gatcagcaaagcggcagtgcgtagagaggatcgtcgaacagaacagcatgaagatggtcatcgttctcgtcgtgtgcctggctctgtcagctgccagcgcctctgcaatgcagatgccctgcccctgcgcggggtgcagggcttgtacggcgctggcgccggcctgacgacgatgatgggcgccggcgggctgtacccctacgcggagtacctgaggcagccgcagtgcagcccgctggcggcggcgccctactacgccgggtgtgggcagacgagcgccatgtaccagccgctccggcaacagtgctgccagcagcagatgaggatgatggacgtgcagtccgt

SEQ ID NO: 338590 - DNA, 53 bp, Zea mays
attcctgcatgcgtaccatctttccctatattgagtcgtattagaacttgaca

SEQ ID NO: 338591 - DNA, 198 bp, Zea mays
tcgtaataatataagaaataaggtcattcggactaatttatggaaaggactcataaattaataatgcaccactttatttaaaatggaatgattttttcaaccaaacaccttctaatggaaccaaattcccctggttgattgcatgcattaatattgaatctggatttgtttcttacagccctgttgcatacttgttat

SEQ ID NO: 338592 - DNA, 287 bp, Zea mays
gttggcttctcctccccctccggttcgggttcgggttcgtgaggttctccggggttcggtttcgtgggtgagcggatcgagatggcggcgtcggatgttgagtaccgctgcttcgtcggcggcctcgcctgggccacggacgaccactccctccacaacgccttcagcacctacggcgaggtcctcgagtccaagatcatcctctatcgggagacgcagtggtcccgcggcttccgcttcgtcaccttctccacggatgatgctattgcggaacgccatctactgca

SEQ ID NO: 338593 - DNA, 291 bp, Zea mays
gccacgtctaggtcaccgccatggccggggactggcaggagctgggccaagcggcggccatcggcctcctcttcgccttcctggtcgccaagctcatctccaccgtgatcgccttcaaggaggacaacctccgcatcacgcgctcccctccgacctcccccactgccgccgccgcagccgcgcctcccgtcccctcccacagacggctccaccgacggcggcagcggcagcgacagcgacagctactgggagggcgtggagagcaccgagctcgacgaggagttcagcgcc

SEQ ID NO: 338594 - DNA, 228 bp, Zea mays
  unsure (1)..(228): unsure at all n locations
gtctacccacgcgtcctggcgttgctgagcccgcgcgtgccgcaatgaccggtnttacaacttcagctgggctnccaaancccnnnnctttggccctgcctcgaggtgccaggcgacggcggcgggcggcgtggccgccgcggggccccctgtgtcggagctggaggccattcagtggggcagcgccaagctgcatggcgctcgcgacgagatggatgatgaggtctt

SEQ ID NO: 338595 - DNA, 197 bp, Zea mays
tttcctcggctcaaaccctcaccaagccttcgattttttctctgaacccatgcctaactaaaaacctgattatttcatgcatccccatctccacaatggattcaatctcacagataataatctcaccttcaatattactcatgagcttcatatatgtcttaacaattattatccctatactgccactctatacccta

SEQ ID NO: 338596 - DNA, 411 bp, Zea mays
ctcgtagagagaaggaaaaatatcggcgaaccctagctcccgatctcgatggcgaaccctcgcgtcttcttcgacatgaccgtcggcggcgccccggcgggccggatcgtgatggagctgtacgccaacgaggtgcccaagaccgcggagaacttccgcgcgctgtgcacgggcgagaagggcgtgggcaagtccgggaagccgctccactacaagggctccaccttccaccgcgtcatccccgagttcatgtgccagggcggcgacttcacccgcggcaacggcaccggcggcgagtccatctacggcgagaagttccccgacgagaagttcgtgcgcaagcacaccgcccccggtgtgctctccatggccaacgccgggcccaacaccaacggctcccaagtcttcatc

SEQ ID NO: 338597 - DNA, 133 bp, Zea mays
tcggcgagcgccgctcttttttttattttcgggggggtaattactatcaaaagacctgccgctaatcaagcagaccatgggagaacttttacaacatggttacttgggagatttctcccggggagcttgatgt

SEQ ID NO: 338598 - DNA, 372 bp, Zea mays
  unsure (1)..(372): unsure at all n locations
ccctattctcanattacttttctttcatctgactaccaatgcanaagagatgctttctaacaaaacaacactccacccattcaaatcctcaantattctnaacaaaattcaattaaataattttcacaccatcactaaaatanaagctttnatattacttactgtnattcattaattgctaaaaanttnctanactattttcacaagatcaaatcccaacagctaacgaaacaagtactgcatcttctgctgctaccattccatctcatgatacttcactgcattctgttaatttctgttaaaccacaataaaaaatttaacttgttctatttttccttaaaaaccagtctcaacttgccacactaataacc

SEQ ID NO: 338599 - DNA, 324 bp, Zea mays
  unsure (1)..(324): unsure at all n locations
atcatccccccccccactttnncaaatcaaaaatatttctctaataaacaccccatcattctccaatcaactccatcaacttaaattataacatcccacaaaattccattataacaccaccctttttctcaattacaccccttcttcctactctttcttacactcttttaccttttttatccaanctaccttctctcatcccatcttataaccttaacaaaccttcttaaataaacatcatcaaccaaaccaacaatacaaaccaaataataaattcctattattttaattctttcttttaaatttccatttcttatacaaaaa

SEQ ID NO: 338600 - DNA, 406 bp, Zea mays
  unsure (1)..(406): unsure at all n locations
gggatcctctaaagtctacccacccgtttgtccattacgttccctctcctcacaccaatgacattttttacatctcacctaccatcaaatcncgnaattcaatcaacccttcaacctataccataaatataacaacttcttcatcactaccaattatcttataacacttattctcctcctcttccttaaccataccaagccatatctgcacaccataatcaactacttcaaattctcattcaaaatttactatctactccctcaaccctcataaaaccactccattccaacaataatatactcctatacagacaactagcatatacattcctctcgaataaattacaaatacaactaactattaacttctaaccacaaaaattttcattccatttcaaattataac

SEQ ID NO: 338601 - DNA, 217 bp, Zea mays
tcgacccacgctttcggcttctcctccccctccagatccggcgcaggttcttaaggatctccgctcattccatacgtggatcaccaaatccaaatcacagccacggatctagacaaccgctgcttcgcctactgactcacacagaccacatacgaccactccatccacaacaataacatcacatacctccaggtcctatagtacaagatcaaactca

SEQ ID NO: 338602 - DNA, 226 bp, Zea mays
tcgacccacgcgctcgaggtctaccacatgaacagacacatcgcaggttttaataatggctaggcatgtcaagacagcatttccaacggcttatgaactccgatgcacatattcaaacttctggacgcctacttaccgacactgcttagattgcaatacttggcttccatcagtcgcttgtaatgtttacagtacaataaggacgagtgcgactacaatcaaatct

SEQ ID NO: 338603 - DNA, 377 bp, Zea mays
agcagacctgaaagaaatctttattataattcatgccccccacaaactctactcacttcttcttagctatctcttcttcataaacttttaaaacattcacttcttaatactcctaaaaattatttttttttttctttctattcttcattataccattcacccattaccattttaattctttatttattaacacatacatatcatcatacaactaccattattcactccttctttaaataatatattaatatcaatttcttttttcaccttaataaatttattctctttctccaaactcccatcttttcttatcttaaatatcaccttctttaaccacaaaactatatattgtttctcaaaacatttattgctctttt

SEQ ID NO: 338604 - DNA, 199 bp, Zea mays
  unsure (1)..(199): unsure at all n locations
gggaggctctanagtctacccacacgttcgttatactagccctctgctcctctgaaaatgcaacttttactacctcttccacctacctcaccatcnncctcaaaaccctaaacccctccccctccttagccacagccatcaccttcgtctccttccccgccacacatcattcattcctcgttgcctcctccgactaccg

SEQ ID NO: 338605 - DNA, 241 bp, Zea mays
  unsure (1)..(241): unsure at all n locations
acacccccaccacccccttatcctacaaaatggccgccgccgccccaagattttcttataaaaaaccataccaccccacatanctactnattccaccccaaccnttcctctctctaatttaataaaaacctctattctaccccacatcttcaccttcttccacnacaatatatccaaaaacatccttcaaccctattccntctccaaactcccctttcaccaaacttcatcttaatccttt

SEQ ID NO: 338606 - DNA, 111 bp, Zea mays
ttttaaggggggaaaaaaggaaaggggatcgggggggcagcgtcgccgcaacagcaaggccagggcggccctggcaacggcgggtggaatcctcagcagttctggtcgctg

SEQ ID NO: 338607 - DNA, 393 bp, Zea mays
aagaaacacaacaacccaccggagattcttacctcaaaacacctattctatcacgatatgtcttccaaccacatcaacaaccgcctaacttagcctgaacatcatgcacttcaccattcactactgcttgtccttaaatctaaagagcagcatgatcctcagagggatccaagtggacatatctcatgactacaatcacaatactcattctgattatcaagagaatgacgacaatcaacattctgcgcatataaacatcagggagccctcactccacaaaaggaagctccacacatatacttcttttcccacatcaagctctcatgaaggcacctagaggtcttatccccatactttcacaatggacatcaacaagtctttcacaaattcaac

SEQ ID NO: 338608 - DNA, 312 bp, Zea mays
cgcgcgcggcggcgctggatccatatagacacaccacgcggtcgttccataacacattaagcactccggggggcgtctttatagggaaatactggctacagccatctaaccctatccaatggcacaaggccgttgtaagcggacccccagtacactgaccgagaggagaaaaggctgcttatgctcatgccatctagaaagttgcagatcgggacggcgccgcccaagaacgatttgtacctgatgcgcgagtaccctttggacggacgtataaacgcgcccctcagaatcctcattcagatctacaaggtg

SEQ ID NO: 338609 - DNA, 421 bp, Zea mays
  unsure (1)..(421): unsure at all n locations
aacatccnttcccccttattctatataaccagatgcctgaacaccatgaatgaacttttttaaaacatgatgagccaccccaatttnncnnaacaaaaatatttatctaataaagaccctcatattctccaatcaagtccatcaacttagattacaacatcccacaaaanttcattatattaccaccctttttttcaattccaccccttcttcctactttgtcttgcaatcttttaacttttttatccaaacttccttctttcatcccatcttataacgttaacgaacctccttaaataaacatcatcaaccataccaacaatacaaaccaaataaaaaaagcccattatttatgttcgttcgctcaagttcccattgcttagacaaaaatataagcttcaaatcaatnttaaacttctta

SEQ ID NO: 338610 - DNA, 417 bp, Zea mays
ctttcagataagatgaaagacgatgcaagaaagatacttagctcaaagcacctattttatgaggagatgtgttcctaccacaacaacaaccgtgtaaatttgcctgaagatcatgcacttcagcattcactactgcttgcccttagatgtaaagaggagcatgatcctcagagggatccaagtggagatgctgatgaatacgatcaaagtgctgattctgattatgaggagaatgacgacgatcaacatcctgtgcatataaacatgagggagccctcaatgcacaaaaggaagcgccacagtgatgtggctttggtcacatcaagttctcatgaaggcagtgagaggtctgatcctcatgctgtcacagtggacatcaacaaggctttcacagatgcaaccaacatggttttgttg

SEQ ID NO: 338611 - DNA, 253 bp, Zea mays
  unsure (1)..(253): unsure at all n locations
tctacccacgcgtttgtgctcctatgcgcccgcagcaaccaactagtcaacttatcaaattcctctccgaactccaactctnccccgcaatccactcaagaaggttagccctcgtggtctcggatttggataatcctccgccgaggtatgaaacatgaggcggccaccatcatagtggtgaccctataggacttcctgcaccactacaaggagcctccaccccgccgcgaggacaatccgtcagcactggctt

SEQ ID NO: 338612 - DNA, 300 bp, Zea mays
tagatcggatcggaaagccacggcgccgagggcgttggcgacgccgcagcgcatgcagaccaatcccgatgatggccacagccaggtgccagccgacaagcgccgtcgaccggagcaccctgagacctccgacacggactcagactatcgcgacaatgatgataacggacgtcgagagcggaggttggccgactagaaggtgcgcgcatatgacattctgatcaagcacgagggctaacgccgtacggccatatggcgggagccagaacgcgttgacagctcagacacgacacgtgacga

SEQ ID NO: 338613 - DNA, 151 bp, Zea mays
  unsure (1)..(151): unsure at all n locations
ganaaaaaaaaaaaagacaagcggcgatgatcttaaatgaaagcacgctatatgagacatttttctacacacactaccgtgtaatttgctgaagacatgcacttctctcactctgtggccttaaattaaagggcttgttcctcaaggatcc

SEQ ID NO: 338614 - DNA, 238 bp, Zea mays
tccacccacgcgtcctaaaccacaccatacacagacgccgccgtcttcttttaaagggcagcgcgactacaaaacactcctcattctccccacccaggttcatcttccaaacaaaaccgatcagatcaacattctgcaacaaacgatgttgattcagattatctctactatgatgatacccgacgtgccgccaccacgatctactactaaagtagtagcctcacatctccttttcaag

SEQ ID NO: 338615 - DNA, 281 bp, Zea mays
  unsure (1)..(281): unsure at all n locations
cactcccccacnncccccttattctacaaaatggccgccnccncccgcacgattgtctttatacaaaccatagggcctcacatanctactnatnccaccccaaccnttcctctctcttattttataaaancctctattctaccctacatcntcaccttcttccacaacaatatatccaaaaacatccttcaaccctattccatctccaaacactcctttcaccaaacttcatcttaatcctttnntacctntcntcccctctctcntatccctcntattcc

SEQ ID NO: 338616 - DNA, 317 bp, Zea mays
ttgcttcagaccattagctttatctactccatgtcgcagaagaacccgatcgacaccatgagggtgttgctcgttgccctcgctctcctggctctcgctgcgagcgccacctccacgcatacaagcggcggctgcggctgccagccaccgccgccggttcatctaccgccgccggtgcatctgccacctccggttcacctgccacctccggtgcatctcccaccgccggtccacctgccgccgccggtccacctgccaccgccggtccatgtgccgccgccggttcatctgccgccgccaccatgccactaccctac

SEQ ID NO: 338617 - DNA, 163 bp, Zea mays
ttaaaactctgcacactccccctaacaatacataatatatttaacgtacataataccaataatacttactgcatcaacaacaaatcattactcactcactccacaagatcactcagtatcacaacgtcttcgatagcctgtctacccatacaacgcacaacta

SEQ ID NO: 338618 - DNA, 343 bp, Zea mays
  unsure (1)..(343): unsure at all n locations
aaaaaaaaatttaaaacaaaattataaaaaaaaaaaaaaaaaaaaaaaacaagcagaatttttaaaaaaaaaagaccccccacaaacccctaaactaaaaaacaccaaaacaaaacaccaacaaacctaacataacactaaaaaccctacttccccaaaaataataaaaaacatcccacccccaacccaacacaccaaaaccatttacattttacccccaaacaaaaaaaaacctccccaactttaacaaccataccacccaaaaacctccaccctaccccacatcaaattctttncaacacatacccccccccccaaaatataaaaacaactaaaccccccc

SEQ ID NO: 338619 - DNA, 281 bp, Zea mays
aatcacattctaattatctctaccaacatcaacactatcactaccaaacttctcttacctctcatactcaaaacaaactcctataaatctcaccaaacatcatcaaaaacatttcctcctccctaaataacttaaaacttccatatccttcaaaaaactaaaataacatattacattccaattttaactaatatccattaaactattcatcattaatcacaccaaataaaacctcatattattcatactccatcattcttatctcaacatactaatcttct

SEQ ID NO: 338620 - DNA, 318 bp, Zea mays
  unsure (1)..(318): unsure at all n locations
tctcataactaaacctcttatcactaaaccggtcgtttttatcaccaacaaacttcacacaaatccatctccccatctatacactaaaacatccaatcatcatcatccatcacaacttacattctatcctttaaatcctaaaccaaaactaacctcacctcactattaacttctataaacaccacttcacataatccctntaatatgcaaacaaacataatctaccagttccacattcaaaaaaatcaatatacagccaaaacctaaacaagagccaccttaaccaatatctttacatcctttagaacccaccaaatc

SEQ ID NO: 338621 - DNA, 346 bp, Zea mays
cctcctatctatagaaacttttctactaaacccttctatcactctacacaaaacccatcatcacataaacccaacaaatataactccatttttccaaaacctcctctcacacatacaaacaagaatctactccatgtcgcaaaacattaagacaaagatataccaaatagtaaccaaaattgatcacctctatcagatcatcaacgatctccaaatcaatattgtcactctgactcctcccaaaatactcatacatccaaatcctttctaccatttcttactattccataactcacaaaaatttcataaaacacacaaataccacacattccacaaatcccacaaa

SEQ ID NO: 338622 - DNA, 346 bp, Zea mays
tccatcaccacataacctccataactttactgcaaaaaaaaaccatcccactaaaaacattcaaaacaaatttcctcaccatattctcacaacaccgtatcaaaataaatataaaatatcatccaagattcattaactcaaccaactcacctaccaactcataccttattttaacaactaaacccaatcctccactccttttaacacctaacctccatcaacgtttcactattcttttactcaacttattttcccttacaaatcaaccccaaacactatcattagaacaatcataataaaaggccttaccctctatcacttaaaatcacaccttcaaaaataccct

SEQ ID NO: 338623 - DNA, 396 bp, Zea mays
  unsure (1)..(396): unsure at all n locations
tctacccacgcgtctgatgagagaaccccgtgttttgcgtgaaagaagcttttctatcgacgctcggccatatcntancnattcacaaatcggaatcaccgtcgttcttgcaaacgcccattgggtttggttaatgatccaaaaaatattattcaaccctttgatgtggtcccaaccacaagatgcatttggtgaacaacctgaaaaaggttggacttaaccattgattccctgcaagccagtgccacccaacaaacactggctaagattttaattaaaggagagagagggatagacggaaagtgcaatgtgtcatgacagcaaccccagaccaaatattcatcctgattgtgagagcaagataaccaacctgtatctttgctcaattgctcccca

SEQ ID NO: 338624 - DNA, 249 bp, Zea mays
ctccaacctctttaattattttaaaccaaactaaaatttactactcccatctcacaatactttttatcatataacaactaaccaacctatccatttcaacacatttttaattaatcaacatctcaaacccttcaaaaaaataaaaacttattactaataaaatcataaaatacataacttctattatcaaatattaaaaactgatcaaaaaacacataacactgctacaataaactccaatggaagtgt

SEQ ID NO: 338625 - DNA, 237 bp, Zea mays
ttgtcctcctccaaccccggtctcgcgcgatgccggttccggtttccccgcgcccggccgcccgtcccgatcccgccgttgtgtcggcggcccggttccgccctccgttccgtcgccttgcggcctgccgttgatgtggcgtggcacggggcccgtgcttcggttttgagagctctcgtgtcggtgcggagaggcccgcggcggtctttcaatgaggcggcggccggtcctgccggc

SEQ ID NO: 338626 - DNA, 319 bp, Zea mays
tcgaccagactcattagttacagcggcgcgtcccggctaattacggagccggtgctctgcaggacgtaccagtctctacctataagtgagtatgcattaaacgcttgtcttaatacatggtcatcagctgcttttcagagatgatacgaggagtctcctgtcacgcaaaacaattcgatttctgccacaagattgaaacatgtagaaaagtttagaatgcgcttaggcggattgacaggaatgcctcgcagatcaaagttctccccttacatgctgagctggatcaggcccagcgcatcgcatacatcaaggagtttct

SEQ ID NO: 338627 - DNA, 107 bp, Zea mays
tcgacccacgcgatcggaaagacgagaaggcccctaggcgaggtcgggatcaaagaacaggatgaacgtccactccgcggtgaatctcctgtgcccgtattgcaagg

SEQ ID NO: 338628 - DNA, 290 bp, Zea mays
gagctgagctgccggaggcagaataggagaggcaggctatgaccatggcgacgaaggcggcgtgcgtgctggcggtgtgggtgctcatatcatccggcctgtccgacctgagctcagcgcgcgcgcccatgggcagtaagccttagtgggagttggactacttgctgctctcacttcagtggcgcggcatcatatgagcatccacacggcactgatgcacgaccaacggctgctgacggtcggagcctgtctatacgattacgattcacggactatagctggactaccac

SEQ ID NO: 338629 - DNA, 380 bp, Zea mays
tcgggctcgcctcgggggaccgcgtgtgcgtggcgagctcggtgctgccggctgccgccccagtgcgaggcgatggggaggaggctggacgtgctgctggggcggacgacgaagcagacggcgcggctcaagtcgctgctggggctggcggcgacgcgcctcggcgtggtgcggggccaccgccaggtgcggtgcgggcaggcgcgcggggacgtggagcagcttctccgcctcggccacgcggaccgcgcgctggcccgcgccgagcacgttgtgcgggagcagaacgcgctcgacgtccttgccgagctcgaagcctgctgcaacctcatcgccgagcgggccgcgctcgtcgacgacgcgcaccagggggagtgccc

SEQ ID NO: 338630 - DNA, 355 bp, Zea mays
tgcaaataatgcggctgcctactactgcccgcagcagcagcagcagcaggtgacagtcatgtaccagcagtacccaacaaggatggagatcgggcaggacaagacgacgacgccaccggccgccacgttccagcaggccgcagcaccgcgcggtgccgcgagcaccaccaccccaccgcaggtgctgcactcgcagtccccgcccgccattaataacggcgcccgcgggccagcggatcagcgcgtcggccgccccagccgcgaccgcgacctcgagacgctgcagctgttcccgctccagcccaccttcgctcagctgcggcgcgacaaggggaacgccgccgctggcagcagc

SEQ ID NO: 338631 - DNA, 178 bp, Zea mays
tcgacccgctcactcgtagaaaaggcccacatgggtattggggttcgccggccttcagggacataagtgttgttcacagggaacccatacgtactggtcacaaggcctatgtcctgtgctttgtggagtttgagaacgcgaaattcgcacgcactcccatgcaagctttacaagggta

SEQ ID NO: 338632 - DNA, 402 bp, Zea mays
aaaatccgccgccggtgcccagaactcgacgggaaaaccggggctttggtcgccggacgccggctgcctcgagatgctcgtgtgggcggccaccgcgtcaccacccagcactccatccgccgtgccatttgctcctccccaccgcgccgccgctccccgccctccaccgcctctctgccgctcgctcccggggctgctgtgcgcgggcctgatccctccgccgcgcgccgccgcttctgacggcgacgtcttctgggaggagccagacgacggctccgggagcgactacgaggacgacggcccggagcaaaggagggccttgcgtttcccatcttcctcgccgtcctacaggctcgaggcgtcggcgcagcaagaacaggacctccggagagagatcgagct

SEQ ID NO: 338633 - DNA, 324 bp, Zea mays
tcgcgcgaagcgcgcccgaggcggcacccgacggtcgtattagaagacacgggacgcacccccgcagcctcgctcgctcgctcccctcacttcctccccgcgcgatccacgggccccgccccccgcgctcctgtctgctctccctctccgcaatggcgacgccctcggccgtgggcgccgcgtgccttcttctcgcgcgggccgcctggccggccgccgtcggcgaccgggcgcgcccgcggcggctccagcgcgtgctgcgccgcctgtgctgttcggagctgaacagggaggggcccgcgccgcgcccgctgccacccgcgc

SEQ ID NO: 338634 - DNA, 356 bp, Zea mays
cgcagaagtaggagctctcgtttctgcatcagtagtgattgggcagcatcgtcatcgatcgatcgccatgaggctccgcggcttgctgcgcctcgtcctcgcgctcctcctcgccgccaccgccatcgtgccggtgctgctccttagcgagaacggcggcggcggcgtcgcacctgcgccgccgttcaactcctcgcgtgtcaaggccgtctcgtggcatccaaggatcttcgtgtacaaggggttcctctccgacgccgagtgcgaccacctcgtgactctggcgaagaagaagatccagcggtccatggtggcggacaacgagtccggcaagagcgtcaagaacgaggtgcgca

SEQ ID NO: 338635 - DNA, 310 bp, Zea mays
tcgtaggcgggcacgactccggtcaacggggcgggcggcacccagattccaaactctagcacacgcaccatggctgagcagcataagatccggtggggggagctggaggaggacgataagcttgggacctcgattatacttctccagcccagtagtagggtcagacataacgagaacagcctgaagaacgtaatgaaggaccgatttgacaacaactgcaacaaggtcagtgtcacgaccacaatccgcgtacgtaaactcgctcgggcgcgcatgtatcgcagcgccatcgagcgcgcggcagtggcct

SEQ ID NO: 338636 - DNA, 363 bp, Zea mays
cggctgcggctgccagccaccgccgccggttcatctaccgccgccggtgcatctgccacctccggttcacctgccacctccggtgcatctcccaccgccggtccacctgccgccgccggtccacctgccaccgccggtccatgtgccgccgccggttcatctgccgccgccaccatgccactaccctactcaaccgccccggcctcagcctcatccccagccacacccatgcccgtgccaacagccgcatccaagcccgtgccagctgcagggaacctgcggcgttggcagcaccccgatcctgggccagtgcgtcgagttcctgaggcatcagtgcagcccgacggcgacgccctactgctc

SEQ ID NO: 338637 - DNA, 375 bp, Zea mays
cttcaattcccgccgcctcctcgggcgttctttccacctccacctccgtatccctttattggaccacctccaccccatgattagccgccgcgcggcggccacggcagccctacgcgcctctgtgcggcgtgcctgctcttcctcctcccgcgccgccgaccctgacgaccaactgcttggcctcttagaagcccctgagccgcagcgcgaaccccgcctctcagccaaggacttcgcctttcttcaggtgcccacccctgtcctccgcgccgcggccctcccgccgccggaggctgttcttatatccaaggcgatccgagcctacgcctccgactttgacgggaaagcggagcggttcctgcggcggcaccggga

SEQ ID NO: 338638 - DNA, 408 bp, Zea mays
agtcgatgtcgccgcgctgcgcggtggagagcgacttatgtcgctggaattactgaagactgaagtcgacgtctggaagccggagatcacaaagaaggtggaggacttatcactagaggtggcgagggttggcaagttcctcgaacgggaatttcgacctcacgtcgtcgaccaacctggcatcttcggtccatatcagtcggcgtccgcgcgaccaccaggcggaatccaccacgccgacgggccttttggccgccgccctgatctgcactaccgggatcgtgagtccgggccccaaggggttccgactcacatcccggtcaagggtacgttctcagcgcatccttctcgtctctccgggttcatggctgagcaatattatccgcatgaatcccctagagaatacat

SEQ ID NO: 338639 - DNA, 361 bp, Zea mays
ggcggctgcggctgccagccaccgccgggggttcatctaccgccgccggtgcatctgccacctccggttcacctgccacctccggtgcatctcccaccgccggtccacctgccgccgccggtccacctgccaccgccggtccatgtgccgccgccggttcatctgccgccgccaccatgccactaccctactcaaccgccccggcctcagcctcatccccagccacacccatgcccgtgccaacagccgcatccaagcccgtgccagctgcagggaacctgcggcgttggcagcaccccgatcctgggccagtgcgtcgagtttctgaggcatcagtgcagcccgacggcgacgccctact

SEQ ID NO: 338640 - DNA, 341 bp, Zea mays
  unsure (1)..(341): unsure at all n locations
actagatcgagctctggcggcgacgaggatgcctgttatgcccacggacacacgcaatccaatgttactttatacaggggagcgtgttcaacgggcacctgcatctggacccgagcgggcaatacgtcacggcgtaaaaccaaccatatttcgtatatacgtgtgctggtccagcggcaaccatctggacgtcgagtgcctccgtccaccgatattaggacggtcgcggccgaacctgacgacgtcgtatggagggtgctacgacgtcaatctaggacgacnttggctgcggagagctactacgcacgaggagaaaattgaccatgctgaaattcggaaga

SEQ ID NO: 338641 - DNA, 217 bp, Zea mays
ttcaatcggccctggtggcgggtctaagggctcggcggaatctccctatgcgcctctccgtccgcgcctccgctactgcagcagctgcacctggagcggagacggatcctaagaagcgggtggtgatcacggggatggggttggtctctcgtgttcatgcacgacgtagacgcttactaccaccgcctgctatccctggagagcggcatacggccca

SEQ ID NO: 338642 - DNA, 167 bp, Zea mays
acgggcgctgacccactggcaactcaacgggatactgttgtattgcgtcttaccaattcttatctatcatcgttgtagttggtggctgctgaacgtagttactatctcatcacttctcaacacaataaagcactacgcatcatctggcgaaactcgcgtgcctacta

SEQ ID NO: 338643 - DNA, 332 bp, Zea mays
agcagccaaaacctacctagccgccgccgcaggcggccccccatcgccgccaagatgcatatctttgtgaagactctgacggggaagaccatcactttggaggtggagtcctccgacaccattgacaatgtgaaggccaagatccaggacaaggagggcatccccccggaccagcagcggctcatcttcgccggcaagcagctcgaggacggtcgcaccctcgccgactacaacattcagaaggagtccaccctccacctggtgctccgcctccgcggtggcgccaagaagcgtaagaagaagacgtacaccaagcccaagaagatcaagca

SEQ ID NO: 338644 - DNA, 374 bp, Zea mays
ctttaaagtcaacccacccgtccgtacaggcgtcttcgtactcgcctatcggcgcgacccaaagcgttcccccttctcccattcttctctcatttctcaccaccgccgccgctaccccctttcgacaacaccatgagggagtgcatctcgatccacatcggccaggccggtatccaggtcggaaacgcgtgctgggagctgtactgcctcgagcatggcattcaggctgatggtcagatgcccggtgacaagaccattgggggaggtgatgatgctttcaacaccttcttcagtgagactggcgctgggaagcacgtcccccgtgctgtttttgttgaccttgagcccactgtcatcgatgaggtgaggactgg

SEQ ID NO: 338645 - DNA, 257 bp, Zea mays
cggacgcgtgggcggacgcgtgggccggcgcagccaaaccctccccagcagccgtcgtcgccaccgctgcagcgcggaggcgaccccccatcgccgccaagatgcagatcttcgtgaagaccctgacggggaaaaccatcacgttggaggtggagtcctcggacaccatcgacaacgtgaaggccaagatacaggacaaggagggcattccgccggaccagcagcggctcatcttcgccggcaagcagctcgaggac

SEQ ID NO: 338646 - DNA, 268 bp, Zea mays
cgtgcatccttttcctaccgtgccgcccatctgtcggctggcgggcgcggcaagctaatccatggatctgtactacagtgcaaggctcggagaggccatgtgcgcaggcgaggcaaggtacattggcaccgcgggctccggcataagaggacgactcttaaccggggtagaagcggcgactcgcgagtcgacaacacaagcacataggacggtgagacagcacacattccacaagacatgggagaacaagcgcgccaccagacacgca

SEQ ID NO: 338647 - DNA, 183 bp, Zea mays
gagctacgcatattgataattaaatgggtgatctgatactggagaccaaagcaaactaattatggattgccacccatccaaacaagtcttgaagcgcacctagactagtgatacactacctactaattgattaccatcttgaattagaggagggaatccttgacttactcattcacgcaactt

SEQ ID NO: 338648 - DNA, 308 bp, Zea mays
gcgtccgtgatcttctccccttctctgccccgaggtcggttctaggacacgggcacccggataccgaagcgcgccccctcggtcccagccaaaagcatcgcagtttctaatcagtgtggagagcacacaacaatgtccttcgtgcagctatctggtgctagagtccctgcagtggccttcacgaacaacagcctagtctctgggcacgcaacgctacggagctgatcgtcgaggcgctccataccgagcctgggcggtaggctgcaactgtcgttaccccaaagtacactataatgaagcctctggga

SEQ ID NO: 338649 - DNA, 235 bp, Zea mays
tgatgctccttttgctactacatttgtgcttccattgtctcattgctgatgctccttttacaatataaaaaaaaaaaaaaaaaaaaaaaaaaaaaaaaaaaaaaaaacaaaaaaaaaaaaaaaaaaaaaaaaaaatggcgaaacaacaccaaaagtgtcaacgacaccatcaagatgggcacccggcgcatgtgatacaaaaatacaagcgtgcgagcctataacaaacagcatt

SEQ ID NO: 338650 - DNA, 226 bp, Zea mays
tcgacccacgctttcggtatcaggactagtagctgccgaaggccgctttctaccgctcccagaccccatcttatctaccctgcaaccctagcatcctaaccctcgaccacgtcgcagctaacgacctcctatactactccgtcttttcgccctttcaacttccttctccacttttctatcctacttctttattccgactcacctttacgtacatgccccaaccggg

SEQ ID NO: 338651 - DNA, 263 bp, Zea mays
  unsure (1)..(263): unsure at all n locations
tattctacccactcgttctcctccacctccnactcctgctccttgctatcctactcaccacagtgcaaggtcttcatccatcctctttcgtgccttacctcccttttatactattatccgcatcctctgtatcctttttaatcttctacatcatgcttctttccacttcatcactgtcgagctcattaccttcgatatctaccttttttttatggtctattgccatgacaatttgtacttccttctctaaaacattttcttta

SEQ ID NO: 338652 - DNA, 122 bp, Zea mays
ctggcgaggcaaaagcattgcgacgacaaacagcccccgcttaaaggcctttttttttaaaataacaaggaggaaaggaggaaatgccgttaacaacaacttggttaaaggcaaggaaaatt

SEQ ID NO: 338653 - DNA, 370 bp, Zea mays
cgatctcgtttcaaatccatccatcctcggttcctccgtcccgcagcatctcaaccccatggccaagatcaagatcgggatcaatgggttcggcaggatcggaaggctggtggccagggtggccctgcagagtgacgatgtcgagctcgtcgccgtgaacgaccccttcatcagcaccgactacatgacctacatgttcaagtacgacactgtgcacggacagtggaagcaccatgaagtcaaggtgaaggactccaaaacccttctctttggtgagaaggaggttgctgtgtttggctgcatgaaccctgaggagatcccgtggggttcggttggtgctgaatatgttgttgagtctactggtgttttc

SEQ ID NO: 338654 - DNA, 225 bp, Zea mays
ctcgagagctgtttcacacattcggagcccgaagcctacccacatcgcctgcaccacacgtttatctactgacccacatgaattttcataaccggatcttgctctctcacttctctaatcttgccaagaaaatcaacttaaattatctagcctcatccccaatgagaccaggttacacaattcttcacctgcacccactgcttatcagatatgtttactgatact

SEQ ID NO: 338655 - DNA, 128 bp, Zea mays
gccgccgcctccgctagggttttggagtgaggatcgccgatgtcgacggctcccaagcgccccttccgaggccgcggcgccccccccccttgcaccggctacgttccacccgggccccccccttgccc

SEQ ID NO: 338656 - DNA, 331 bp, Zea mays
ggccctctctctggtgctgcagctcgccccccccctctgctcaccatctcctccctggttcccatggcgccctcccctttttggtggccgacgccccccctctctctcctcttggcgacgactgggcggcatgtgcctaggtcttcttgggacccttcgccggcgacaagcactaccagcatcgcgtcacgcctgctgcttgtacgtgcgtgctctctccgtcacgcgtcgggggtggattggatcagagccgatcgagtgcggagaacaccacgccaggggtgcttcagatggcagtaaagttcagtcatgagtgggcttctcatgagct

SEQ ID NO: 338657 - DNA, 358 bp, Zea mays
ggaaaagtgagcacattcttgcacgaagcttgccgccgccgagctggggaactgggaagaggaagagatcttgcctaggtctagcgaggaggaggtcgatcgatcgattggctaggactctaggaggaggagctggctcataagcaggtcagtgcgcccctttctactatcgctctaactattactcgatctccctcgactgcacattcctgacaagatcctagaaggtgggaaggtttctccgaggatgttttttagggaacccgccgtttcaattcgattcgtgcgtgtctctcttcttgtagacctactgacccacccatcgactgtacttgttcggaggaagggatggccgatc

SEQ ID NO: 338658 - DNA, 267 bp, Zea mays
  unsure (1)..(267): unsure at all n locations
tgatgctccttatgctacttcatttctacttccattgtctcattgctgatgctccttttacaatntaaaaaaaaaaaaaaaaaaaaaaaaaaaaaaaaaaaaaaaaaaaaaaaggggagaaaaaaaaaaaaaaaaaaaagcggaaacaacaaaaaaaacagcggcgccaaaggcgaggccaaaaaaagacaagggaaaaacaaagccacaaccgcggcctgatcaaaaaaaaaatccnctcagaaaacgacacaaaatactaagacg

SEQ ID NO: 338659 - DNA, 105 bp, Zea mays
tcgggccgataaccagtgcccacctatgatggctccgaaaccgacttctaccgacttctgtagcctcctaggatgataagaacccctttttataaggggctcaca

SEQ ID NO: 338660 - DNA, 158 bp, Zea mays
tcggcccggcccctgtgcttcccttgccggcggacgagagccaaaagcctttcgccccacgactcgcctcgccctgctgcgacgcccttgaggacgtttgccgcaccgaccggcgaccaagccttgattgccttcgccccatggctactcgggcgcgg

SEQ ID NO: 338661 - DNA, 284 bp, Zea mays
tagtcgacccacactttctacctaacaaaccaacctagccttctgtatcctttatctcgcatctaataaccccctatactacacccttctcttctcttcccaaccatcatctacttcctctatctattttaccacagtctctctacactacctctcctactacttattctcactgcacccattcatcttttgcttaaatcattctcctatatcaccataatcaccattccttccaatatcccaactacatcaatatgcttttttcaactattattttttttttt

SEQ ID NO: 338662 - DNA, 145 bp, Zea mays
tataccacccacttcttttctctctcataaaccctatataccatgcgactctttttctaaaaaaccccccccatctctacaccagctttatataatcactcccaccctacccttttttacccttacattcatcacaaacacattt

SEQ ID NO: 338663 - DNA, 225 bp, Zea mays
tattcgacccactctttctaaaaaaaaaaaaaaaaaaaaaaaaagtaaaaatttaaaaaaaaaaaaaaaaaaaaaaaaaaaataaaaaaaaaaaaaaaaaaaaaaaaaaaaaaaaaaaaaaaaaaatggcctcccccccctttatttcctaaccgttacctccattctaacaaattttccctatatttattcttattaaaccttgcctaaataattacaataccc

SEQ ID NO: 338664 - DNA, 276 bp, Zea mays
cgtcactcacctcgaccaccggcatgggcatggccttggcctccgcgaccgtcgccgcactcttgcgctccgacctgttcgagccacacggcgccggcgcgcgcgtacggccgcagcgccagcagccgttcttggctacgctccacgcggcgaatggccccggctcggcgccggtggtgctggaaggcaaggccaaaggaaagaagaagaaggggcccagctacaggaacctttccgcagaccttgacgttgagatcagggaggcgcaggagtacc

SEQ ID NO: 338665 - DNA, 170 bp, Zea mays
cacactttgctttatagagaccggacgcgtggatgcagcggacgtaacatataacagccgaacatttatcttaaatgggcctgcaccagagcgggttgcttttgagtacagcgaagtgtagacaaaccgtctgctgaaagctcttcgcctaggttgcactcttcgctcca

SEQ ID NO: 338666 - DNA, 102 bp, Zea mays
cgtatcgttctttatcttatccaattctttattcaactctgacgggcatgctatggggtcatgttcatataaaactgtagaattcactcttgctaaattcta

SEQ ID NO: 338667 - DNA, 289 bp, Zea mays
  unsure (1)..(289): unsure at all n locations
tctacccacactttcggtccacgcttacgcgtcgcggctccgctggtctttcacttcaccggctgaaggcnatatcaggcgcttgtcgctatttcgttctccgacgctcgcttggctggtatagtctactcgatgcttgtcattcccgactatcccaagccagttatcatactccaggacatcatttcactgctgctgtacaccaacgccttccgttacattttcgaccaccttttaaattgtttcaagggccaaaggatcaccgtattttcttttttttcatcccagt

SEQ ID NO: 338668 - DNA, 115 bp, Zea mays
tcgtgccgtgctgccgactgttaccatgcagcgcctctcgcgaaggctaagccttttctctataagaaccagtatcgcggcatccggcagctgccgtggtgcatgttggctgtgg

SEQ ID NO: 338669 - DNA, 363 bp, Zea mays
ctcctcccccaccggttcgtgttcaggttctggttcgtgggcgagagggaagagatggcggcgtcggacgttgagtaccgttgcttcgttggcggcctcgcctgggccaccgacgaccactccctcaacaacgccttcagcacctacggcgaggtcctcgagtcgaagatcatcctggatcgggagacgcagaggtcccgcggcttcggcttcgtcaccttctccacggaggacgcgatgcgcagcgccatcgagggcatgaacggcaaggagctcgacggccgcaacatcaccgttaacgaggcccagtcccgcggcggccgtggaggcggcggtggcggataccgtggcgggcgccgtgat

SEQ ID NO: 338670 - DNA, 361 bp, Zea mays
attagctttatctactccagagcgcgagaagaacccgatcgacaccatgagggtgttgctcgttgccctcgctctcctggctctcgctgcgagcgccacctccacgcatacaagcggcggctgcggctgccagccaccgccgccggttcatctaccgccgccggtgcatctgccacctccggttcacctgccacctccggtgcatctcccaccgccggtccacctgccgccgccggtccacctgccaccgccggtccatgtgccgccgccggttcatctgccgccgccaccatgccactaccctactcaaccgccccggcctcagcctcatccccagccacacccatgcccgtgccaacag

SEQ ID NO: 338671 - DNA, 325 bp, Zea mays
ggcttctcctccccctccggttcgggttggggttcgtgaggttctccggggttcggtttcgtgggtgagcggatcgagatggcggcgtcggatgttgagtaccgctgcttcgtcggcggcctcgcctgggccacggacgaccactccctccacaacgccttcagcacctacggcgaggtcctcgagtccaagatcatcctcgatcgggagacgcagaggtcccgcggcttcggcttcgtcaccttctccacggaggaggcgatgcggaacgccatcgagggcatgaacggcaaggagctggacgggcgcaacatcaccgtcaacg

SEQ ID NO: 338672 - DNA, 393 bp, Zea mays
ggttcgggttcgggttcgtgaggttcggcggggttcggtttcgtgggtgagcggatcgagatggcggcgtcggatgttgagtaccgctgcttcgtcggcggcctcgcctgggccacggacgaccactccctccacaacgccttcagcacctacggcgaggtcctcgagtccaagatcatcctcgatcgggagacgcagaggtcccgcggcttcggcttcgtcaccttctccacggaggaggcgatgcggaacgccatcgagggcatgaacggcaaggagctggacggccgcaacatcaccgtcaacgaggcccagtcccgcggcggccgtggaggcggcggcggcggcgggtaccgtggtggccgtggaggcggcggctaccgcggtggccgg

SEQ ID NO: 338673 - DNA, 391 bp, Zea mays
ccttggcatgctgaatcttcaaatggtgcaaatgctgatgcacagccaccttctcatcctgctggaaatgcattgatcaaagccaaccttgacattgggccacagcaagcatattctcatgtacattctccagattattatcctgtacaaactatgcgtgactgggatctgctctggaatgaaactgggcaggtcatacgaagtgagggtgccacaccacgtgcacatcatgataatgttgagaggacctctcctgtaaccatcagccatcatatgaaagatgcccctcagagaaccgatcatgattcccgtgctggtcgatacaacattgaatactaggatcaaaaccgatcattcaaagaccttatgaagagtgatgcctgataaagtc

SEQ ID NO: 338674 - DNA, 400 bp, Zea mays
tcgcggacgcgtgggcagaaacacacgcaagcgaagcgcactagcagcgacctaacaacaatggctaccaagatattagccctccttgcgcttcttgccctttttgtgagcgcaacaaatgcgttcattattccacaatgctcacttgctcctagtgccattattccacagttcctcccaccagttacttcaatgggcttcgaacacctagctgtgcaagccaacatgcaacaacaagcgcttgcggcgagcgtcttacaacaaccaattgcccaattgcaacaacaatccttgccacatctaacaatacaagccatcacaacgcaacagcaacaacagttcctaccagcactgagccacctagccatggtgaaccctgccgcctacttgcaagagcagc

SEQ ID NO: 338675 - DNA, 57 bp, Zea mays
gagaaataaaaattctagttttacaacggctcaaaaaaaaaaaaaaagggcggccgc

SEQ ID NO: 338676 - DNA, 373 bp, Zea mays
cttgctcccccagccttccatggcgtccctgctcctcctctccatggccaacgccctgctcaggtgatgaatcccgcgctccctgtgccacatctccagccggcttttgtttcccttgctctacggccagcagcaaacctccatggacgcccccctatttttcttcctagcacagctgttgggagcccctgctcagacagcagccatggcgccatgattctctgcgcatcgatgccggtccaaaaacagcagccccggatcccctccgcatcgtgtgcttcgctcgatctacgcagccccgacccacgccgttgcgttggtgtttgggggacagcccatgcctcgtcgttgatctgcacggttcgaccgtcta

SEQ ID NO: 338677 - DNA, 245 bp, Zea mays
tcaacccacccttccgctggatgtcaaacttttaccacgaggggtggttctgaaaaggttggttgaatgttgcacctcaaacaaaaaaacaaaaaatataaaaaaaaaaaaaaaacaaaaaaaaaaaaaaacaaaataaatcataaacaaacaactatatcaaacaaaaaataacaagaacaaaaaccggggggaacaccatcaaaattacgaaccggaacctcaaggcgccccactatttccta

SEQ ID NO: 338678 - DNA, 402 bp, Zea mays
ccaggacgtatatttttactgaaatgatgctgggaagagcaaaaaaacagaagtacagacgcagcaaagaagattacaattattctctagcgggctcctcgtgaggtctcctccccatcgccacgcccacgcgccgcacaccgcccgcccgctcgccccgcctccgatcccaaatcaatcggcctgaccctagcccgccgccggccgcccacgcccgcccgcctcggctcgtctcaaatcgggcgccccaggggagcgaggcctcgatcgcggcggaccccgatgccccgcattccggcccctccggcgacgtcggcggcagcggaggcatgatccggtggggactcggcggacctgccagccatggacgccaccgcacgcccggccatcgtcatcgacaac

SEQ ID NO: 338679 - DNA, 340 bp, Zea mays
gccgccgcgtctggctcggcaccgtggacaccgccgaggaggccgccgcggcctacgtcgccgcgcgcctccgcatccgcgggcccaaggcgtccgggagcaacctgctcccgtccggtgctcacgcgggctcgctccctccgcccgcgcaccggccgcccctgccccctcgacccccgccaccgtctcagcgggagaagcagcagtgcccgccaccgcctctgcttccgccgaagaagcagcagtacccgccaccgtctctgctcccgccgaagaagcagctgtacccgccaccgcttcccctcccgccgaagaagcagcagcaccatcacccgccacc

SEQ ID NO: 338680 - DNA, 100 bp, Zea mays
atgcaattgacgagctcatagaatagacggggccgttcagtgcgggcgtgccaactctccctataatgagacgcatcagagcctggcggaacaggcgcac

SEQ ID NO: 338681 - DNA, 256 bp, Zea mays
caaaaatacgatccaactaagatcaagcatcttgacatttcctgctacacttaacacatcgttagtttcattcctctcctccccatcgttgtaaggtcatgctgtgaagggcgcgatggcgtggaatggatggtggtggtagcaaagatgctcagaagatgacatttcgttagttatttaattaagtcttccaaggcgtcaatcttcctgacatgtatctttattcgaaaaaataaactggattatttctggtttc

SEQ ID NO: 338682 - DNA, 327 bp, Zea mays
aatacagttgccgtggaagggaggagagctgtttgtcacaatgttgagtccataatcaagtcattgacaaaatcagcaggcaggtatgaagctcggctgtggctctgtgccactgtctcgttggtccattcgctcagtgactgtggccagagggacctgtttcttgatctcttagagaggaagaattccaggcgtgatgtcgctgctcgcttgctgcgtatgattttcgataagaaacccaaaacggttgggtctattctagcaagaaaaggccatatactggaagatttcttccgaggaaatccaaacaggataatgcagtggttt

SEQ ID NO: 338683 - DNA, 330 bp, Zea mays
tcaggctgatggtcagatgcccggtgacaagaccattgggggtggtgatgatgctttcaacaccttcttcagtgagactggtgctgggaagcacgtccctcgtgctgtttttgttgaccttgaaccaactgtcatcgatgaggtgaggactggcacctaccgccagctcttccaccctgagcagcttatcagtggcaaggaggatgcagccaacaacttcgcccgtggtcactacaccattggcaaggagattgttgacctgtgccttgatcgcatcaagaagcttgccgacaactgcactggtctccagggcttcctcgtcttcaacgc

SEQ ID NO: 338684 - DNA, 220 bp, Zea mays
ctcaacggcttctccatagtcggggcggggttcagtgacgccagaacctctgtctccctaccgagcttgctgcacattattacaatagtgcgcctaccgacttcgaccttcaataccaactctgtataagaatgttcccgacaagactatgaggggccttaaagatggcgacactagataagaaaaagaaccttaaactagagctacctctccgtaccaa

SEQ ID NO: 338685 - DNA, 399 bp, Zea mays
tcgcccaagtcaacaagcaataccgggtggggttgtgatccgaagcctttcttccaacgcaaaaagaaccccacccgacgtaccgtgagccggcgatggcgacggtggcgatggacatcttgaagcccacgccggcagcgtccggtgacgaggctacggcagcggcgaatgggatgatgcggagcgggggctaggggctgctgaatactacctgcagcacatgcatgacctgcagcttcaagatacggcataagacccataaccttaaccgactctaggcccaacacaacgacctcaactttccagttagaatgctcatggaagaattgtagttgcttcaagagcctgtctcatatgttggtgaggtggtgaacgctatggggaaataaaggttttggt

SEQ ID NO: 338686 - DNA, 335 bp, Zea mays
aaatcgacccacgccttccggaaccgtgaaccaagatccaaggccagggggccaagcaccccccaaggggaaaagccacttttctttcaattccaagaaaaaatgggctataaaaaagcgctcgaaatccaaatctgggccgatgcgaccgccctcgctgctcttccttaccctcgacgccgcgcttcttcgcattgccaatatcgccgacctcttccaccttccaaaccaccttcttatcgatctcttccgtgtagagaaccctcaatgctggtaagctgacaaagaaagttctcaagttgtttctagcaaccggctgtgaagatatcatattg

SEQ ID NO: 338687 - DNA, 394 bp, Zea mays
  unsure (1)..(394): unsure at all n locations
ggagagtgaaaccccaaccctaattgggggttgggtgtatattggatagacgagttangtgggccaagcccattacaagagaaccctaacctaaccctagacaagattctaacatatatatgcactatggttgtgcaccatttcaaaaattttgagaatttctaggtatgtgtttcaagggatttttcatgattgcattgcaccagacagggcggttggcactttgcaccaaatatttggcctatttttcattccttcaatctaaacaagtcacacaactaatgaatggattgctaaaacagttaaacaagcttaggatacaatgaatcttacagtatcattgtcctgttagctactaatacaggcaacacggatacatgtatgatcttacctg

SEQ ID NO: 338688 - DNA, 272 bp, Zea mays
gatctattttttatattgcgaaagggggttctgaaagaagtgatatattcttataataaggatatattggaatacttattggattaacactctaaccccttcacaagaacccccggtctttggttggtttccaaatggtatggcaagaaacccctggtttaattgagcccaaaggtatttggaaaaatataaaacggccttggtccctttataaattgttaaggaccggaattggagaacccacaaggggcctttaaagttttggccgccaa

SEQ ID NO: 338689 - DNA, 103 bp, Zea mays
tcggcttaattttcttcgaaaccattgtcccgggcccaaccttcccggacttcaagggccaaaacttcaaccttcaaattggtaaagggccccccgggccacc

SEQ ID NO: 338690 - DNA, 404 bp, Zea mays
tcgaccaactcattcgtgacagcgttcgtcctgataatgccgtcccagtccaagcaggccctccacctttccatatacaaagtccatttagacatcaacctcaagatgcctatacctccgtcctacctgaaagtgaaatcacctaacaattccacaaaacatacgagccttataacataaagtgctaactctgctgctcataataagcgaactaactaacattaaaagctttgcactgactacccccttttcaatcttgacaccagaaatctcagatctatcaataaatcaaacaacacgcgagaagagacgatttgcgtattgagcaccatgagatctgcttctactcacactgacacgaacaaacaaatgattgcactttcacgaatgtccctgacagagat

SEQ ID NO: 338691 - DNA, 410 bp, Zea mays
  unsure (1)..(410): unsure at all n locations
gcagagaaattctagctgggggaccggtctgcaattccccctcgctcgccattgtccgtaacctcgaccaagacgcgagccgggaatggagtccgggagctcggtgcgtttcggccaccaggacgtgacggctgctggcggcgtgcacgcaggtaacgccggcgctgcttcttctcatcagcaggtgatcccgggcacgggcatgacgatgcccgccggcatggcctccctcctggtgggccgcctcgggatgcaggcgccgcctggcatggtgctgcccggaggagccctggcggcggcgtccgccgggtacggcggcatcatgtccagcgccctgcgcgccgcctggagcggngctcaacagcagctgccgccccacgcgggcggtggcatcggcgggcatagggcgc

SEQ ID NO: 338692 - DNA, 239 bp, Zea mays
  unsure (1)..(239): unsure at all n locations
taaaaccccaaccgcactaccctttnttttcgcttttttttaaaaaaaatttttcctcctccttattatttttttcttttnnttgnngcaaaattnacnnannnggggnnnnnnaagngaaaacaaaaacaacaaaatccaaaaacctcttaacataatataaaaaaccaaaaaaaacccaaaacaacccttcaaatacacccccaatataaacaaccctaaaaaaaaccaacaaattt

SEQ ID NO: 338693 - DNA, 399 bp, Zea mays
  unsure (1)..(399): unsure at all n locations
caccgtctcccctcctgatccaatccagtggcgcgcctcctcctcgtggccgtggcaatgggcttgctcttggccttggcgacggcgcangcaccgggcgcgtccccgatgcccgcgcccatggcgcagcctccggcgacctcggcgcctcctcgtcccgcgccatccccgacccagaagaccgctccagtcccggcgcccaatgccacggtacccgcccccgcctcgccgccggcgccgagctctatcgggcagacgccgaccgaagcgccgtncttcccttcgnncgccagcgccgcgtncagcgtcgcctccgccttgtatgtggccgccgctatggcggctgtcgtgtttttcttctgagggtcgtagtcggcgccgatggatccgccgcctatg

SEQ ID NO: 338694 - DNA, 406 bp, Zea mays
ctctccccacgcagaagtcgtccctgggcctcccatggccgccctagatctccatggttgagctcccccctgcaggatccccttccatggcgcctggtcttctccattagccgagctcgcccagtcgtttctctgctgatggctgatgcccctccagctactgctcgatgctgccctctcgatcccggagtctagcgctgtccccctggtttcagccctcaaaccccagtgtcgatctccctcgtcttgctgctggtttaccgtggaagaggaaagtccattcggcgcgctctaggtgtttggcaaaaagcttaaaccggaaatcgtcatcgcccttacacatatcgatttggtttatgacatgacccacccggcccatcccaagaggtcgtcaaggcctgtgcca

SEQ ID NO: 338695 - DNA, 97 bp, Zea mays
  unsure (1)..(97): unsure at all n locations
tcnaccaacttttattgacagcggccgccccgggaatactgtgccgtttcatgcaggcgtgcgacctttccctataatgagtcatattaaagcttgg

SEQ ID NO: 338696 - DNA, 156 bp, Zea mays
tttacttgggggaacttaattttgaagaaccaaaccttcttttttgttgattccaaaaccttatttgaaccccgccccccttattgccccttattttcttccttcaaccaaaagaagaaggcccgaggcattaaggaccgagtacaactattaaag

SEQ ID NO: 338697 - DNA, 201 bp, Zea mays
tcgcgcactcctttccttaaaaccctatccgggggccgtcgccgcacccgatctgggtttctctgtcgatttttaattttcctcgcgagccccaacccttaaccttaaacttttacccgccggcggcggcaccaccaaaactgtcacttcgccaccaccgtgcccaaaaccccttccagagccatataatttatttttgat

SEQ ID NO: 338698 - DNA, 207 bp, Zea mays
tcgacccacgctttcgttcacttttaaccttacccatttgttgtttacttactaaagaatgcgtctatcatacttggaataatcattatttgtaatcaaacacaaaaaccttatacttaatccaaaacgttaattcctcccacacaaccaacactgccactcctccaccaccatcccaaacccccttccaagcaccatcgacttcat

SEQ ID NO: 338699 - DNA, 385 bp, Zea mays
ccgtcatcgatctcgtttcaaatccatccatcctcgtttcctccgtcccgcagcatctcaaccccatggccaagatcaagatcgggatcaatgggttcggcaggatcggaaggctggtggccagggtggccctgcagagtgacgatgtcgagctcgtcgccgtgaacgaccccttcatcagcaccgactacatgacctacatgttcaagtacgacactgtgcacggacagtggaagcaccatgaagtcaaggtgaaggactccaaaacccttctctttggtgagaaggaggttgctgtgtttggctgcaggaaccctgaggagatcccgtggggttcggttggtgctgaatatgttgttgagtctactggtgttttcactgacca

SEQ ID NO: 338700 - DNA, 310 bp, Zea mays
  unsure (1)..(310): unsure at all n locations
agaccattagctttatctactccagagcgcagaagaacccgatcgacaccatgagggtgttgctcgttgccctcgctctcctggctctcgctgcgagcgccacctccacgcatacaagcggcggctgcggctgccagccaccgccgccggttcatctaccgccgccggtgcatctgccacctncggttcacctgccacctccggtgcatctcccaccgccggtccacctgccgccgccggtccacctgccaccgncggtccatgtgccgccgccggttcatctgncgcncgcaccatgccactaccctac

SEQ ID NO: 338701 - DNA, 194 bp, Zea mays
ataaattcatgagcactaaatgctgttgaccaagatcgagggaaggaggaagacagacgcgacagacagacagacagagagatggatcggatgagctcattagtgctgtgctgtgtggatgaacacaagctcttgaccatgggtacagtgtggtctagcgtagtggtcacgtccctcaatcacagcctactgag

SEQ ID NO: 338702 - DNA, 248 bp, Zea mays
aaaaaaaaaaaaaaaaaaaaaagaaaaaaaaaaaaaaaaaaaaaaaaaaaaaaaaaaaaaataaaaaaaaaaaaagaaaaaaaaagaaacaaaaagaaaagaaaaaaaaaaaaaaaaaaaaaaaaataaaaaaaaaaagaaggactagagagagaaaaaaagaagggcaaaatcaacaaaaaagaaaacaggaatgctaggttggggggggccccgatgttaatcactggtgagtatgggggtgccaa

SEQ ID NO: 338703 - DNA, 150 bp, Zea mays
tagtttaccaactcactttaaccgacggctgaccaacaaaagggatggggacagtttaacgcacgaaagcaaccgttatatatggtcggattaataattgcatgtagcatagccatagccgattcacgtttgaaattcgtagtcacatac

SEQ ID NO: 338704 - DNA, 252 bp, Zea mays
gcattcagaaatagctaatcgagcatcgcaggcttagctcctgtactctgctgttctctgcgacgtcaaggaacttctctacggcggctgccatataaaggaggaagaagagaacagcatcgctagctagccggccagactccgtcgacaccggcgtcgtcaactagctagctaactgtcgatctccaattactgcgcccgccccacgcccgggcgtggtgaatcgtcagcaatataatggcatgaggcctc

SEQ ID NO: 338705 - DNA, 237 bp, Zea mays
cgatttcccatttgaaattcttagatcgcacagtgccgaacgtcctcacacatctctgtcggatggtgcgcacgaagcaaacggcaaggaaccaaagcgcgtgctaggcaccggcggaagcaggatggacacgaatgtcggcgcgaaagtcatggacccggtacaccgtgggatgcgaagaagcacgaacaggtcttcgactctgcacatgctcgctatgcgagatgcgcatgtacc

SEQ ID NO: 338706 - DNA, 165 bp, Zea mays
gggtcgcgtgggctgcacatgctgttcgagagagagagagagagagagagagatttagatgttgcggttctgacaccacaacaacaacgaggctgctccctctgcgtaagaccctgacgaggtgtttaatgatcttcatgtcgggccaacgagaactactgtctg

SEQ ID NO: 338707 - DNA, 212 bp, Zea mays
gcaaatcacccagcccacctgtgattttttttcttttggttttggtttcaagttgatcggtgctgtaagctacacctatgaatgctgctccttcctttttttgtaataaaaaaaactgcaccgaggtacacaaacacagtcaaaaaaaaaaaaaaaaaaaaaaaaaaaaaaaaaaaaaaaaaaaaaaaaaaaaaaaaaaaaggggcggccgc

SEQ ID NO: 338708 - DNA, 316 bp, Zea mays
  unsure (1)..(316): unsure at all n locations
atgtgattgggaacataccatgtaggacgtcatatatggttctggctgatggggccaaagatgaacataggtagcttataggattcatgttttttgcttcgttgaggcgtcttgttgcgctgggattgtgccacatgtgttgtcttgcacgtgagagatgcttctactcacccgcgacatgcttatgtcagtggggcaataattaatctctactccttaaagcgtcactttcgttgtgcattctncttncttncgcattcctacgggccatgcagnccacacgacacataaccacttnctcttcagtcagtgacac

SEQ ID NO: 338709 - DNA, 395 bp, Zea mays
  unsure (1)..(395): unsure at all n locations
gcgtcttcgtactcgcctacctccgcggctcaaacctttcccccttctcccaattcccgccgccgctccatcccgtaacgcgacaccatgagggagtgcatttcgatccacatcggccaggccggtatccaggtcggaaacgcgtgctgggagctgtactgccttgagcatggcattcaggctgacggtcagatgcccggtgacaagaccattgggggaggtgatgatgctttcaacaccttcttcagtgagactggtgctgggaagcacgtgccccgtgctgtttttgttgaccttgaacccactgtcatcgatgaggtgagaactggcacctaccgncagctcttncaccctgagcagctcatcagtgggaaggaggatgcagccaacaactt

SEQ ID NO: 338710 - DNA, 344 bp, Zea mays
aaaacttttcccagcacttccttacaccatacaagtctactcttaaaaggggcaccgtcgaggagctcgaacagagaataactatattaaaatctgcactgcaagaagctgagacagagttagatagggttaggaaagggaagcagtcagtgtgattttttttccacaggtcaagtgtgtaaaaccagagagacgatcaattttttcgtgtcattacactcttgttgatttcactatcatgtttcctcatcgaggagtttagacttgtaatagctatcggcagagaagtgtttgattcaaaactcctcgatgaggaaacatgatagtgaaatgcaacaaaaata

SEQ ID NO: 338711 - DNA, 394 bp, Zea mays
caagaagcaagaaaactagaaaaggctcctcccgaccgcaacgcccctcatctccctcgaccccgacatccccgacccgatggcgcccaaggcggagaagaagccagcggagaagaagccggcggccgaggagaaggcggagaagacgaccgcagggaagaagcccaaggccgagaagcggctgcccgcgtccaagtcctccggcaaggagggcggcgagaagaaggggaagaagaaggccaagaagagcgtggagacctacaagatctacatcttcaaggtgctgaagcaggtgcaccccgacatcggcatatcctccaaggccatgtccatcatgaactccttcatcaacgacatctttgagaagctggccggcgaggccgccaagctggcg

SEQ ID NO: 338712 - DNA, 392 bp, Zea mays
cttacatacattctaagctaagcaagtgggctgaaatttatggccccttcttcaaaccatcatcatatttggaacagcgagctaagagtggtgtaccattgagcgcaccaggagcttcgcagcaaggttcggcgaggtcacgcatgtgaggtgctgtccagcattgagcagaataatgcagaatacttgcgggatgagccattgacggctgcttcgctgatcaaaacacctccgtgaacacaaacatgaggcacagaagaaatgatgaaaaataaaagggattgtaacagttttggtgcctttgactgtaactggcagagtttctgaggacagagtggcatggattaattgcacctgatcactctgtatgtcgctgtcatgtgtgcaatgtt

SEQ ID NO: 338713 - DNA, 217 bp, Zea mays
tgcccatgccgctgtagtgtacttagtgagaaacagaaactgagatctgagggttgtacaagacgcattggagctgtgcatgctacaagcggttactttggaacagaaacttgcctcacacgatgctgacatacgtcaactcaatgatagggcgtatctacctagacaatctcaagaacccttcaccgagatgcatatttgacttgcgactgacctt

SEQ ID NO: 338714 - DNA, 367 bp, Zea mays
tcgcgacgcaatgagcgcctcctcagccccggcccccgcagcgggagggcgattcttcacgggcttcacaagactgtgcaagggcctcgccgtcgtcctcttcctcgcccacattttggtccaccttttcccttcagccgccacatatctcacgctgataccagccaggacaatcccttttgcttggaacctgattaccgctggttatattgagcaaacaattccaggggtgattgtgagcatagttggtcttcttctatttgggaaggtgttggagcctttatggggagctaaggaactgctcaagtttatttttattggtaatctctcaatttcagcgtgtgtcttcgtaactatgattgtgcta

SEQ ID NO: 338715 - DNA, 179 bp, Zea mays
tcggtctgatcggccacccacggaggaggcgcataacgatttgcacccagccacaacgcctgtctgccgtgaataaacacgcaaacggcgcacctccggtggatagtccaaggcctggacgcactcacgcaagtttcagactatttcacttccaccctacatcaaattctcaagccatt

SEQ ID NO: 338716 - DNA, 388 bp, Zea mays
ccgtcatcgatctcgtttcaaatccatccatcctcgtttcctccgtcccgcagcatctcaaccccatggccaagatcaagatcgggatcaatgggttcggcaggatcggaaggctggtggccagggtggccctgcagagtgacgatgtcgagctcgtcgccgtgaacgaccccttcatcagcaccgactacatgacctacatgttcaagtacgacactgtgcacggacagtggaagcaccatgaagtcaaggtgaaggactccaaaacccttctctttggtgagaaggaggttgctgtgtttggctgcaggaaccctgaggagatcccgtggggttcggttggtgctgaatatgttgttgagtctactggtgttttcactgaccagga

SEQ ID NO: 338717 - DNA, 248 bp, Zea mays
gattgcagtcgcggtcaggttgaataggaccaagaagcggctgcaagcgaggatgccatgcctgaacgtgtcgaccaacgtgaacctggagggtgtggacaccttcgtcatcctggagcaaatctccatgtccttcatcaacatgatctgcaagcccaaggactacgtgatggttgctatcatgggttcggctcctatggcatttggaggctccgaggagccaacatcttactgtgtagctgtttcca

SEQ ID NO: 338718 - DNA, 506 bp, Zea mays
  unsure (1)..(506): unsure at all n locations
tcgatcccacagcagtccggcgtcaagttatacagacagagcttcgagccacacgtgctggcgtctgtacagaactaggatgcactagtcgagcaggtaggagcagtcggtagaccaggttctaggtgagtagggatgagaggcngatacatcgagactgatcgaccaagaggtccgggagaaagaaagatagatgaggtaggctagtcccgagggatgagggatgcatagatgcaaagtcgttcgtttctgcgagggcccttcatatcttcttcttccaagatatgccaggcagccagcccgctttagtttttatgttcctatctagccgtagaccaaaaccttcttagtgaaatttctttaatttagcctttttagctaagaaagttcttaattttcatagtagtaaattttagtaccaattggccgtgggttaagaaaaatcacaatntttccaaactcagtcctatagcttactgagaagttcgtgatcttgatagctgatc

SEQ ID NO: 338719 - DNA, 101 bp, Zea mays
cagtcgaccagctcactagtgtcagttgccgccccgggaattccagaggggggcctgcaagcgtaccaactttccctataatgagtcatattatagctcga

SEQ ID NO: 338720 - DNA, 379 bp, Zea mays
ccgtcatcgatctcgtttcaaatccatccatcctcgtttcctccgtcccgcagcatctcaaccccatggccaagatcaagatcgggatcaatgggttcggcaggatcggaaggctggtggccagggtggccctgcagagtgacgatgtcgagctcgtcgccgtgaacgaccccttcatcagcaccgactacatgacctacatgttcaagtacgacactgtgcacggacagtggaagcaccatgaagtcaaggtgaaggactccaaaacccttctctttggtgagaaggaggttgctgtgtttggctgcaagaaccctgaggagatcccgtggggttcgggtggggctgaatatgttggtgaatctactggtggtttcac

SEQ ID NO: 338721 - DNA, 66 bp, Zea mays
  unsure (1)..(66): unsure at all n locations
atttgctttatctactccagagcgcagaggagcccgatcgacaccatgagggtgttgctcntttcc

SEQ ID NO: 338722 - DNA, 272 bp, Zea mays
ggatgcggggagaggtgttataaaactagggagcccccagccagcaccaggttgcggcaacggcaacaaccagcaagtggccaccgattcacgggttcaagcgtttagcgccacgccgtggttgtcccaagccaagtgtacatattagtttaatacactgttcagtgcttagttagacagttacatggaatgctcaatagaccttcagttacgatccacccattgtgatacgtgaagaactgtgaattgattatactgaagacgtcaaatct

SEQ ID NO: 338723 - DNA, 136 bp, Zea mays
aacactcagtccatcccaagactctcgaggcgatagtggacgcgtgtgagcctctgctaagctctgcgatcccagacctagtaacaagtcattttagtcctcatcaaacacctccgcgacaaggagcaactcctca

SEQ ID NO: 338724 - DNA, 195 bp, Zea mays
gtgtagagctgaccgcgagatgcatctgaagagactaacctacatcgggagacggactgctgattctacagatcatctgaatctcgaacaaagcttactgggctgtgactatcattatgtcagccactaattggggtctaaggtatggagctcaaggatggaccgacccatgagccagctctccttgcgcacaca

SEQ ID NO: 338725 - DNA, 233 bp, Zea mays
attacttctaaccatcggccaaaccacaaagaaacatctttttcaagagtcagactcaaacaaccttccttatacattataaacagactactcactcctgactataatgacttaaaagatgacaaagcacataacaccaatctagaacaaatcattcttgtagacacatccaccggttttccaggagaccaagaccttcagacctaagacacccccaatgacaccaaccccac

SEQ ID NO: 338726 - DNA, 155 bp, Zea mays
gttaatttttgaccaccaataccatgaagagaagagagatgctgtggacagaaaggttgacgatgttgatgacaacgaagagaaacaaaagaacaatacgaacaccatggcagtttgtcatgagcggacataggacagcaagcagaagcccatat

SEQ ID NO: 338727 - DNA, 111 bp, Zea mays
  unsure (1)..(111): unsure at all n locations
aattatattatgagagggtctactctctagaaagaagttcctaacacctgtgcgggcttacattcangctctcgcagctcctctcttttatcatgtttctttctttcgatc

SEQ ID NO: 338728 - DNA, 196 bp, Zea mays
  unsure (1)..(196): unsure at all n locations
ctccacaccaagccagtaactttttctatccaagtccctcccctcatanaanacaactccaacacttttacttcgagacttcttaatctctccacacacccacaaacccagcaaagcaataacaccaaccatagatacatatatatagacacggaaggatcattcatccatcaaaccattacccattgacaacctt

SEQ ID NO: 338729 - DNA, 225 bp, Zea mays
  unsure (1)..(225): unsure at all n locations
tttatctaggagccctctanacatttccatcactcgactcgatttcccaaaacatcatgtaatgctgtataccccaagaaatgttccatccgtcccaaactttatttcaggctggaatcaatgccctgcatcactctaccttgctgtcaccattattttatgatatgcaactgatgttttttacatagtcattgcacttgttccccattacgtttgctactactt

SEQ ID NO: 338730 - DNA, 366 bp, Zea mays
ctgcactcttcctctccccctctgcggaccttgctgctgccgcccgagcggcctcgcagcacatctactcctcactggtgccactctaccctgctcagcctccaccgctccctaccctcctcacggaccctgccttcgatgccgagcagatttggtcccagatcgagctgcttgcccgcccactcctccctcagctgggccgccagctccgtcgcatcgtgcagcaaccctcctcgcaacagcctcctttgaaaatgcctgctgtcgccgagggtgagcaagtggaggaggatggagaaagtagcgattcagaggaattgaagaatgcaaaggagttggaggggacagatgatgggaggagttgga

SEQ ID NO: 338731 - DNA, 390 bp, Zea mays
tcacccacgcgtccgcatcgatctcgtttcaaatccatccatcgtcggttcctccgtcccgcaggatctcaaccccatggccaagatcaagatcgggatcaatgggttcggcaggatcggaaggctggtggccagggtggccctgcagagtgacgatgtcgagctcgtcgccgtgaacgaccccttcatcagcaccgactacatgacctacatgttcaagtacgacactgtgcacggacagtggaagcaccatgaagtcaaggtgaaggactccaaaacccttctctttggtgagaaggaggttgctgtgtttggctgcaggaaccctgaggagatcccgtggggttcggttggagctgaatatgtagttgagtctactggtggtttcac

SEQ ID NO: 338732 - DNA, 218 bp, Zea mays
tccattctattcaaccacccacgcgtttactcttccctcccttctaggaaggagtaatttctacgagcaagcgtgcacacatttactcctcctggtaccactttaccctgctcagcctccaccgctccctaccctactaacggaccctaccttctatcccaaacagatttggtcccatgatctagctgcttgcccactccactccttcctcagcttaa

SEQ ID NO: 338733 - DNA, 217 bp, Zea mays
cccacacttcgtcggggaaggattattttcactcggagctgccacccccttgcttacttcttcactctcgtcactgaccactgtcaagatcgattacttgctttaattcaccaagatctttgacgctattaaggcgaacttcaatgactaatatacctaattcagtaacaaatggtgaagcagaatcatgttctccaattcccacaccaactccaac

SEQ ID NO: 338734 - DNA, 438 bp, Zea mays
ctctctcgtctctccagcgacggcagcgggcgagggttacgcgaaggcgaagcggagtagtggaagcagaggcggcagccatggccgtgatggagaagctcaagatctttgtcgttaaggagcccgtagtcgcggcctcctgcctcatcgctggattcgttgtccggccaatcctggattcatggcagaccgcggaacaagttcctccacctcttctaaatgatgtggttgcaggtgtcaccggcaagaaaaagtagtgaacttgcattgttttctcatgccaatgttgccccacattttcttccccgtgttttttctggcgaccagattggaaggcttttcccaagagtcacggtcttgaactctagatggtatccgcggaataatcattgtacctgaatcatatactgcaatgtggcagtttgaaaatggtttccc

SEQ ID NO: 338735 - DNA, 279 bp, Zea mays
gttcctctcctcgccctttgtccagcagcagccgccgagggaccgaggaccgtccccggccgagacgaggacgctgctgctcctcctcctggtcgagacgaggatgctgctgctcctggcgctgttcggctctccagtctccatcgcaatcggctctccaagtctccatcgcgatctccacggttgggcgcctgggcggacacgcacgggaggccgcagctctttgcttgggacgaggagtagctcgaggagcagctcgaggggtgaggattcagtttt

SEQ ID NO: 338736 - DNA, 397 bp, Zea mays
  unsure (1)..(397): unsure at all n locations
attagctttatctactccagagcgcagaagaacccgatcgacaccatgagggtgttgctcgttgccctcgctctcctggctctcgctgcgagcgccacctccacgcatacaagcggcggctgcggctgccagccaccgccgccggttcatctaccgccgccggtgcatctgccacctccggttcacctgccacctccggtgcatctaccaccgccggtccacctgccgacgccggtccacctgccaccgccggtccatgtgccgccgacggttcatctgccgtcgncaccatgccactaccctactcaaaccgcccggactcagcctcatcctcagccacactcatgctcgtgccaacagccgcatccaagcccgtgccagctgcagggaacctgcg

SEQ ID NO: 338737 - DNA, 463 bp, Zea mays
actagctcgagcgtgacctgttccaccggctagtccacgacctcgcccaggacccagtgcccatgcgatgggtgatcgcgttctggctctggctcgagtccgatggccaccatgacttcatccgccgcgtctccgcgctgccaggacccgttgtgctgcggttcgtcgaggaggccatcgagtgcctccgcggcctcgcctgccggggccacgggcctgcggccggcaccggcgacggcgacggcgacggccgcgagaggcggtgcctaccctgcacgaacgcgctcctgaccaagcccatagacgatgcgggctacttcgaagggcaacgcgagattttggatggcgtcaggtatcagtacaggaccgtatgcctcgccgtttgtgatgtcgacagcaacatcaccgcttgtgtgcccactaacactagcggcggcgtgcttggtgctccgccgatggtcgg

SEQ ID NO: 338738 - DNA, 101 bp, Zea mays
caccccattcgaggggtgctgatagaccggttaagcgggatacatttttcttaccaagcagactgctagcgagtccacgggagggaaggctcccaggaagc

SEQ ID NO: 338739 - DNA, 372 bp, Zea mays
tcgctggcttctcctccccctcttaccgggggctcttctggttagggggagcttagggttttgtggaggggcgatggcggcggctgatgtggagtaccgttgcttcgtcggcgggcttgcctgggccaccagcaacgagtcgttggagaatgccttcgccttctacggcgagatcctcgactccaaggtcatcaccgaccggtagacggggaggtctcgcggcttcggcttcgttaccttctcctccgagaactccatgctcgacgctatcgagaacatgaacggcaaggagctcgacggccgtaacatcaccgttaaccaggcccagtcccgtggcggtggcggtggcggctgaggctactgcggcagtcg

SEQ ID NO: 338740 - DNA, 379 bp, Zea mays
gtgagaaaaggcgggggaggggggactggaggtgaaaggcggctgctttcgctgtctccccaccacccgcgcacagtggcagcgctgacggtggcaggcaaggaaagtggcgatcacaccaaactcacatacagatggagatggcagagaccttgcatgtattgcccgatgatgccaatggaagtgctgcagttcagactgagccttattgccatgaagacgccattgaggacatggaatctttcttggatgaagtaaacgacagggttcatgtttcaggaattgtgactggtgctatcatcaaagggatcctaagtgatgtgcgggcagaagctgctagccaaattgctctcaaagatgcagagatatcatcactgga

SEQ ID NO: 338741 - DNA, 260 bp, Zea mays
attcactctccttgcgcttcctcgacggggggcgtgcccaccccgtgttcaccgacccatcccctactgctcgcacatggatcccatccatggcggagacaccgtcgccgacggtcagctcggccggtttgacgagcacgaccacctggagcaggcatccgtacactccctcgccggcgggaagaaaggcatcctatacggaggacgaggggccttgaccccgacctgagggaaccagcatgtgccacgattgatcacac

SEQ ID NO: 338742 - DNA, 295 bp, Zea mays
atatagtccacccacgcctcctttttccgagctcttgctatccacgggatgaatctttaatagaccacccttctaccaaacttgggcaccatggcccttgattatggcttgacatcccactctgttgttaactccacaaggacagtcgatgttagtttgattcacagctaaccctggctcacttgtctttttaaatttttatgaattagcgttgagaactatgtactgccaaaaaagttcatttttctttatacaaaaacaaactcttcctactccactatttccaattactaat

SEQ ID NO: 338743 - DNA, 154 bp, Zea mays
cttgcttgtcctctacgtataaccaagtgctgtgagggataagggtacttaaggacatgtggatgagcgaccgattcggatgatgtgttatgcacgacgcttaaactgcggggtcgcatgggacaccagaaaaaagtccgtggacaatgtctta

SEQ ID NO: 338744 - DNA, 455 bp, Zea mays
gttcgcggcgccgccgacgccgaccgcgccactctcggatactaccgcgtccgcccccccgctgcttctcgtctccgcgcagccgtccgatggccaagcggctcgccggcgccgacaaagaggtgctcgtcgaggtggtgaggttcacgcagaagagcggcctgaggggctgtgacggcggctggaaggatttcctggcccggaacgacaggaagtttggcgcgtcggtcagcgaccccaggaagcgctccagggacgtgctgctcgccttcctgcagaccttccccaaggatttccagaagtacttcggcaaattagtgaagcgtcataatgaaagaagtgctgttcagcagtatgtggctgatttccccgacgaagtttctccccagcagaaacttgttcaactgacggcagagcacccagagtacagaaaacactactgcttcccatcgtac

SEQ ID NO: 338745 - DNA, 220 bp, Zea mays
atacaatcacccatcctccttttttacgacagccccaccactaccgcagaactacacaagtccacctccccaccaaccttgtcacactcgcttcagaatcccacacccaacccaaacccaccgagcgctaccaccaccaccatgaccatcaacgtcgaactctacaacttgtacaagctcgggcgcaatctctcccataaaaagaccaccacttctgtcc

SEQ ID NO: 338746 - DNA, 51 bp, Zea mays
tttaattgcccacacggtctacctcttcctgccagtattaaagtgagagtg

SEQ ID NO: 338747 - DNA, 218 bp, Zea mays
  unsure (1)..(218): unsure at all n locations
tccacccacgcgttctgttacagtcttcgcacaaatattcgctcccccaatgccaaaagccgcgagactttccaaatctttcttcccccccttcatcttctttgcgcaaaactagttttgattctcgttcttctcttccatttcngccgaataaagatggcgttngatgcccccctcctcgcgccgttctccacgcgcggcgtcgtctctgtggctct

SEQ ID NO: 338748 - DNA, 221 bp, Zea mays
ctcagaggtgggttggcttctcctgcccgcaccggttcgtgttcaggttctggttcgtgggcgagagggaagagatggcggcgtcggacgttgagtaccgttgcttcgttggcggcctcgcctgggccaccgacgaccacttcctcaacaacgccttcagcacctacggcgaggtcctcgagtcgaagatcatcctggatcgggagacgcagaggtcccgc

SEQ ID NO: 338749 - DNA, 256 bp, Zea mays
gttctagatcgcgagcgaccgccctttggtttttttttttttttttttttttttttttttttttgaaaaaggggcattattgaactctcaggccagggagttcacaacattaaagaaacaggtcctgttattgcacaacacatcccaacgcgagatggtttgatctattacaacaaaccaagctttttattggttccaccaccaatcacaaattccaggctacaatggaaaagagtaacccctgaggtacttggag

SEQ ID NO: 338750 - DNA, 462 bp, Zea mays
gcgaaggcgagccttccacttccctcaggctgccgccgccaccgccgccgccgccgccatgtgcccagcagcggcgaccacgagctccgccaagccgtcgaagaagcggaaacagcccgtcatagcgccgccggagtcggactctgaggaggaatctgtctacgacactgcctccgacgatgacgaggaggaagaggagacgcacgagttagagagtgatgatgtagacgaggaggtggaggaggggagcgaggacggcgaggaaaatgaaattggtgacgatagcgaggtggaagaagaggaggtgaaggagaaaaaagaaaaggaggagacggtgaaggagaaaaaggaaaagaaggacatgaagcatgaggggaagaaggccgaaaagcatgaggaaaagaaggcgaagaatgacaagaaggaagaggaaaaaaagggaaggagggacagaaagaagag

SEQ ID NO: 338751 - DNA, 278 bp, Zea mays
cgaccccacagcaagagccagccacggagggacggatgggatacctccaagtcggaacgcggcttccttcctccggcggtccggcccgaatcaacgcgtggcgtcggagctccgtggcgtcgtcgtcctctcccctctctttcccaacacctcgcgtgttgtctagcactctagctgcttctctcggttctcgcgactcccaaacggcaaaacgccaaaaccctagccgcggccattccggaattggccatggaggcgagggcgtcgccgcgtccgtc

SEQ ID NO: 338752 - DNA, 418 bp, Zea mays
  unsure (1)..(418): unsure at all n locations
taggcgtcttcgtactcgcctacctgcggggctcaaacctttcccccttctcccaattcccgccgccgctccatcccgtaacgcgacaccatgagggagtgcatttcgatccacatcggccaggccggtatccaggtcggaaacgcgtgctgggagctgnactgccttgagcatggcattcaggctgacggtcagatgcccggtgacaagaccattgggggaggtgatgatgctttcaacaccttcttcagtgagactggtgctgggaagcacgtgccccgtgctgtttttgttgaccttgaacccactgtcatcgatgaggtgagaactggcacctaccgccagctcttccaccctgagcagctcatcagtgggaaggaggatgcagccaacaactttgcccgtggtcactacacca

SEQ ID NO: 338753 - DNA, 122 bp, Zea mays
tcgaccagctcactagtgtccgtggacgcattggaaatggcggagagttacctggaggcttaccagctcaccctataatgagtggtattatagcttgacgcagtcacgagcatagatgccgg

SEQ ID NO: 338754 - DNA, 117 bp, Zea mays
ttttcttggcgcggggaccacccaatgggaagcttgcggaaagacccaagaaaccgaaaaaattgttttttccaagcaaacttgttccaaggtcccacggagggaaggcttccaaga

SEQ ID NO: 338755 - DNA, 289 bp, Zea mays
  unsure (1)..(289): unsure at all n locations
gctttatctactccagagcgcagaagaacccgatcgacaccatgagggtgttgctcgttgccctcgctctcctggctctcgctgcgagcgccaccttcacgcatacaagcggcgggtgcagctgccagccaccgccgtcggttcatctaccgccgccggagcatctgccacctccggttcacctgccacctacggtgcatctcccaccgtcggtccacctgccgccgtcggtccacctgacaccgacggtccatgtgccgacgacggttcatttgccgccgncaccatg

SEQ ID NO: 338756 - DNA, 263 bp, Zea mays
cttttccctcgctcgctcgcggctcgtgcgtcgcccgcctgcctgccagtgcgcgccctctccctccctcatggcggactgcttcccgcccgagtcggacgacttccaccgccgctggctgccgcgggagatcctcgccgacattggcatcgccgaccccgaggccgtcggcgccgagaccccgcccgaggccgccgccgccgccgccgtggaggagctcgcggcgcagctcgccggcatcctcggcggcggcgccaaggcgt

SEQ ID NO: 338757 - DNA, 157 bp, Zea mays
cagtcgacctcacgcacccggtcttttctcccgctcccagctcctggggcgggtgttgacaaagtcggcgcggaccaatccataaaactaccataaacaagttgcaagacacccagtatgccagccgagcgcaagctcctgacccaccccatgaacc

SEQ ID NO: 338758 - DNA, 282 bp, Zea mays
ttactctcacggagagagatatacggggccgtgtcattaagaatggagggtgtgataacattactgaacactcatgctacatggttcgataaggatacgaaccaatagccactgcacctaagaccgcctcagagttatgatgatcaggcgaatacaggccacacagactttaactctcagaggctaacttgacaacctcaatatcatgacttatcaagaacttacgggcactacaccctgacctgcactatgaagtaacgatccttcgagcgcctaccccat

SEQ ID NO: 338759 - DNA, 289 bp, Zea mays
gccacgcgtacgttcgcttcccctccccggtcgcctgctctcttgtaccttctccgtctgcttcagcccccagaaatcgaagccaccaccaccatagagctccgagcccctagccctccttcccgactgttcgctgcgtggatctacaggcaggatgctcactcccgcgcgcgcgggcgccgatcggtgagcggctgtgaagaaaaggtgcctgatgagatagcgggcggccaaagaagcgaagtttctcgcactccacctgctgaatataccaactcggcatgctgga

SEQ ID NO: 338760 - DNA, 227 bp, Zea mays
aataaatggcaggtcactgtattttggcggggctgaggaagtctgtagatcagaatatgccattactgcattttcctttcccctttctagctagcatggcaataacaatgacgtgtatcaaacagcggcgcggtttaaggaacttcatatactcccggcccttgtgtctgagtctttgcctgtaataagaacgtgtatatgcgtgaaacctatcaattttgttattt

SEQ ID NO: 338761 - DNA, 171 bp, Zea mays
ctctatcatacgcagataccccaacccctaggggtaaccacgcgcgaggagtgtgcttacttttttatccatattatctatatggctagagaagaaaatgtctacatcgccaatctagctgagcacgccgaaaggtctgaataaatggtcgaatacatgcaaaaaagactt

SEQ ID NO: 338762 - DNA, 250 bp, Zea mays
gttgcattttccttgagagcgagtgcctgtagcgctcacaaccaaagaccgatggagcccactggctacatgaaacccggggcaatcaaccccgtggaggaggtgcccgccgaccagaagactacctgcggaaggaagcccacggcggagaaccagtttccgcgtggctagtccaccggtaaggcaggcggttagggtacacgtggccagcaaaatggcaagaagagcgtggatacgtacaagatctaca

SEQ ID NO: 338763 - DNA, 167 bp, Zea mays
tagtgcccacatgtaagactccgccgggcggggtatgaacaatctggcacgatactcactagccacggtgtgcgatctcggacgcgctagctgttttccccctcgttgcacaacaatagctacatccccttcaccacctacctcagtacatacactatctgctacta

SEQ ID NO: 338764 - DNA, 126 bp, Zea mays
cgacgttgttaaatagtggccacccattggcgcgttctcttcgctatccgtgggttgcccaaccttcaaaagcccttccaaaccccccgtttccaaacctttttaaaagttcccggcggcttcttc

SEQ ID NO: 338765 - DNA, 387 bp, Zea mays
gtcactagctttgaccgccgcctccctgccggtgcgatactgctgctcgggacgccactcccccgcaggagcggcggcggcggcggcgaggtcgtaccccacatcggcgagcggcggcggcaccgccggaggcaaacgcaagatgttcgggcgcgcgccgaagaagagcgacaacaccaagtactacgagatcctcggggtgcccaaggcggcgtaccaggacgatctcaagaaggcctaccgcaaggctgctatcaagaaccaccccgacaagggcggtgacccctagaagttcaaggagctcgcacaagcctatgaggctttgagtgatccagagaaacgcgagatttatgatcagtatggtgaagatgcccttaaggaacgaat

SEQ ID NO: 338766 - DNA, 130 bp, Zea mays
cgactgggtaggctgccgccgccgccctacgggaggtccagaggaccaaggcattcgtattcaacagtctcttccccgggccacacccttttgggtggaacctggaatgtagaaggaagatttggtgatt

SEQ ID NO: 338767 - DNA, 137 bp, Zea mays
cttgtgtttaggctgcaatcctcggcctagggtgggtccctaggaccaaggcgcgcgtattacccactctcttcctggtgcgagaccagtttggttgcttcttgtagtgttaagcgaagatttgatgattatcagac

SEQ ID NO: 338768 - DNA, 206 bp, Zea mays
cagtccacccacgcgtcctctttcaccgccgccgtggcggcggctaccgtggcattcgcgaagagccacaggatctccacgggaaagatgggtggtaagaaaaagaccgtgaactccttctctaacatcgacttggctgacatcaaggccccaaacgactctattgtgcgcaacaatgcgaaaactcttgagttcagcacacattc

SEQ ID NO: 338769 - DNA, 377 bp, Zea mays
attcattccgtggaagagtttgcgagtggccagttgtgaaaggcgtcaaatttgttggcgatggctatactcactgtgaaggtatgctacacaaggcataaggagattcatcttttggcattttcttttattatgtgttaacagagcttctgaattataacgtttgtgttttaagcttccgggtctggtcggtgtgaaattaacaacggagggtgctggaaagataccaagaatggtcggacatactctgcctgtactgtaagtgttagttgaggtttcgctgtccttaaaactgtcattttatcagtaggatcctgtccagttctttttgttttattaagaaatgctatagaaatctgatgttttggttctgggcc

SEQ ID NO: 338770 - DNA, 79 bp, Zea mays
gtcgtaaatataaatcaaaaccatctacgcttgcactgaaaactgatcttcaccaacttataaacaaagactcatgacc

SEQ ID NO: 338771 - DNA, 51 bp, Zea mays
tcgttttaaaaaaaaaaaaaaaaaaaaggaggggaaaaaaagggcggccgc

SEQ ID NO: 338772 - DNA, 308 bp, Zea mays
gggttggcttctcctccccctccggttcgggttcgggttcgtgaggttctccggggttcggtttcgtgggtgagcggatcgagatggcggcgtcggatgttgagtaccgctgcttcgtcggcggcctcgcctgggccacggacgaccactccctccacaacgccttcagcacctacggcgaggtcctcgagtccaagatcatcctcgatcgggagacgcagaggtcccgcggcttcggcttcgtcaccttcttcacggaggaggcgatgcggaacgccatcgagggcatgaacggcaaggagctggac

SEQ ID NO: 338773 - DNA, 251 bp, Zea mays
  unsure (1)..(251): unsure at all n locations
gacgncgatgcacgccgacctaaacctggatcctttaaaatcgacccacgcctccggttattgtttacattggcggtgggacatgggagacgggatacagaggttcgtgctctaccggctgcatacaataacccttagagagctatacactacctgtattctgcaattcctgagaatgtggaggctcatgctgttgcccaaacacactgcttctagacaacaaacaaatcagcaggccatatcacccgctc

SEQ ID NO: 338774 - DNA, 207 bp, Zea mays
attatgcgcaacacgatgcagatcgatgggccgcagtagctttctgacacagccccgagagagtagggatagggccatagggggtcacaaaccataaaccaagaagctgcgggacgttcgaatcaaacatctctaccctctccttccagcgaaatggcaagagcggcggatcctcctctgcaccggatgcccggtctggccttgctg

SEQ ID NO: 338775 - DNA, 225 bp, Zea mays
gttagccaaaggccttccttgcgcttccagggcaaagaagatctgaggccgcggcggagcgtgacgacgacgaagtcggtcaggatgagccgcgaggataccctgaaagtgcagaccctcgagctcaaggtgaacatccactgcgacggctgccttaagaaagtcaagaaggtgcttcacaagatcgatggggtgtaccagagcacggttaatgcggcggagggc

SEQ ID NO: 338776 - DNA, 456 bp, Zea mays
agttgcagagcgtagagaggatcggggggcagaacagcatgaagatggtcatcgttctcgtcgtgtgcctggctctgtcagctgccagcgcctctgcaatgcagatgccctgcccctgcgcggggctgcagggcttgtacggcgctggcgccggcctgacgacgatgatgggcgccggcgggctgtacccctacgcggagtacctgaggcagccgcagtgcagcccgctggcggcggcgccctactacgccgggtgtgggcagacgagcgccatgtaccagccgctccggcaacagtgctgccagcagcagatgaggatgatggacgtgcagtccgtcgcgcagcagctgcagatgatgatgcagcttgagcgtgccgctgccgccagcagcagcctgtacgagccagctctgatgcatcagcagcagcagctgctggcagcccatggtctcaacc

SEQ ID NO: 338777 - DNA, 174 bp, Zea mays
ttttatttataataaaaaataaaaataaggaaggttataaaaaaaataagaaaaagacaaaaaaaaaaaaaaaaacaaaaataaaaaaaaatagggcgtccgccccggtatttcctgaccgttacctgcaggcgtcccagctttccctataaagattcgttttaaagcttgaca

SEQ ID NO: 338778 - DNA, 90 bp, Zea mays
cgccaccatcagttaagttccgctacgggtcgaccagctagcggcaatggtggccttccagttccatcagtgcctagccgtagggctcgc

SEQ ID NO: 338779 - DNA, 337 bp, Zea mays
gtgctggcttctcctccccctcttaccagagagctcttcaggttagggttacttagggttttgtggaggggcgatggcggcggctgatgtggagtaccgttgcttcgtcggcgggcttgcctgggccaccagcaacgagtcgctggagaatgccttcgcctcctacggcgagatcctcgactccaaggtcatcaccgaccgggagacggggaggtctcgcggcttcagcttcgttaccttctcctccgagaactccatgctcgacgctatcgagaacatgaacggcaaggagctcgacagccgtaacatcaccgttaaccaggcccagtcccgtggc

SEQ ID NO: 338780 - DNA, 419 bp, Zea mays
  unsure (1)..(419): unsure at all n locations
cttcacctcgctcctcgcanaaaggaaagaaaaaggagcaagaacggtggtatcctctcatggcacaactcatgagaagttgcatcacagaatttatagccgctcctctcttggttcttttgatcatggcttcaacgtccccgtcctttcaagtgcatgtgaagggcgacgatggccgtcaacatggatcgccggcgcttcggcagcgactggcggcggcgacgtgcttcgagaccactgccggcttctgttgggtgaagcaatgccagagtttctgcgcatcaaaaggcttcaacgccgagagtgctttctgctataaacggcctggttctggccgtcttcatctctggcagtgctgctgccaaccataagagtacgtagtgcaaatgtatgcatcgatccatatatggttgacatgc

SEQ ID NO: 338781 - DNA, 144 bp, Zea mays
  unsure (1)..(144): unsure at all n locations
gttcatgctctcctgctcccccctcagacganaccttctacatcacaggcggggctccccccccccgcagtttctacctccgcgtgtgcttcgcatgtctgccgccccctattctgcgccgcctgttgcatctccttttttttc

SEQ ID NO: 338782 - DNA, 98 bp, Zea mays
  unsure (1)..(98): unsure at all n locations
tcgacctgctcactattgtcagcggccggcccgggaattaggaagcggttctctaaagcgtggcagctttccctattntgagtcgtattagaacttgg

SEQ ID NO: 338783 - DNA, 431 bp, Zea mays
ccctcctcctaggctctgcgtactccgagtccgctgcatcgcccgttgattcggcgcctccgttcagcagcccgcttccgccgccgccgccgccgccgccacacctggcgccgtgctccgcgcccgaatactgcggagggctcggcttctcgagcccctcatcttcttctgcggagccctgcgagctcagccgctcgccatgggacctcatcgccgagctctccgtctccgacccacaggtggaggatgacatcgtagacaagtacttcgtccatgtcgcaacgcgttcgagctggctcttctcagccaccgttccagccgcctccgccaagaagaagagtagtagcacgagtggggatagcaagcacaagcagcagctgcgccgagacgctgtgaataagtctgcaacgagtaaagagaaggttggcgag

SEQ ID NO: 338784 - DNA, 351 bp, Zea mays
  unsure (1)..(351): unsure at all n locations
tcgancccacgccgtccggttggcttctcctccccctcttaccaaagacgggttcgggttaggggtacgtagggttttgtggaggggcgatggcggcggctgatgtggagtaccgttgcttcgtcggcgggcttgcctgggccaccagcaacgagtcgctggagaatgccttcgcctcctacggcgagatcctcgactccaaggtcatcaccgaccgggagacggggaggtctcgcggcttcggcttcgttaccttctcctccgagaactccatgctcgacgctatcgagaacatgaacggcaaggagctcgacggccgttacatcaccgttaaccaggcccagtcccgtg

SEQ ID NO: 338785 - DNA, 254 bp, Zea mays
  unsure (1)..(254): unsure at all n locations
tcgacccacgcggcctgctaatagaaagnagcggtggttggttgcnatctgacctagaaggaggatcgcctacactctaatattcaaaagtatcacattctttcataattggactctatggagatgctttacttgcttgcattatactgatgctcaatcatatattgatgacgattatgatttgagcctgactcatgagattaattcacacccctgaaggcaaatgaagtactatctgaagttggtattgtatc

SEQ ID NO: 338786 - DNA, 105 bp, Zea mays
cttctcaagctcaagacccacccatgaaccacctgtagctacaaggcatacaaaatttccatttggcaataagaaaaaaaacccttctctggtcatcccatgcca

SEQ ID NO: 338787 - DNA, 464 bp, Zea mays
  unsure (1)..(464): unsure at all n locations
attacattctttcgaagttgaagaggtgagttgagttagatcacaggcaagcagctgtttggaatatcctaagtttagttcttcttcggggtggtcagatacagagtgctatctcagttctatcttctctcacggctgttgctccagactacttggactcccttgcaaatcttggcgttgcatacattcaaagtggggatctagagctgtctgcaaagtgctttcaagaacttcttctaaaagatcaaaaccaccccgctgctctggtgaactatgcagntcttcttctgtgtagatatggatctttgtctgcaggggcagggggcaatgtcagcacaggtccttacgtgcatcagaaagaagccttagttgttgcaaaagagtgcttgcttgcagcagtgaaggctgatcctagagctgcatcagtttgggttaatcttgcaaatgcatattacatggatggg

SEQ ID NO: 338788 - DNA, 172 bp, Zea mays
cgtaactggatcctttagtcacccaccgtctttttatctcaccatggcggaggggagagtcccaaacgcgaggaagctcttcaaccctgaccttctccatgtccaatgaactatatctcgctaaacgactacctggtgtgactgcggaaatctctaacattcctgcccactc

SEQ ID NO: 338789 - DNA, 123 bp, Zea mays
  unsure (1)..(123): unsure at all n locations
tctacctccgcgtcctcttttagaatccccaagcantcaaacagaaattttttctatataataggacagcccccctctcccccctccctctttttactctctttcccttccttccattcctct

SEQ ID NO: 338790 - DNA, 201 bp, Zea mays
tttttgagtgtaccatggtttgtgaacaagataaaagaaataagtatgcgggtcacggaaaaaaaaaaaaaaaaaaaaaaaaaaaaaaaaaaaaaaaaaaaaaaaaaaaaaaaaaaaaaatgggcggccgccccgataatttcaaaccggtacctgtaagcgaaccagctttccctatataaaaacgtattaaagattggg

SEQ ID NO: 338791 - DNA, 394 bp, Zea mays
  unsure (1)..(394): unsure at all n locations
cccacgcgtccgcgaagaggctatgcgggccttcttcccgctctccttcggaaaggcggctccgcggcccagctctgctacctcctccgcccactccaacacccttcgcaagcctcaaaaccctagtaaccccaagccttccgcctctaccgccgcggacgacgatggggccgctatgattggtcctcctcgcccgccgccggcgcccgcgggggaggaagacgatgaggacggcggcggtatcatgatcgggccgnctcggccaccgccgccctccgctcgcggcgagggggacgacggcgacggcatgattgggccgcctagaccgccgccagcggatgatgaagacgtcgatgatgacgaggacgacgacgaggaggagatggaggatgat

SEQ ID NO: 338792 - DNA, 433 bp, Zea mays
cagctttgaccgccgcctcccttccccggcggtactgctcctcctcacgccactcccccgcaggagcggcggcggcggcggcgaggtcgtaccccacatcggcgagcggcggcggcaccgccggaggcaaaggcaagatgttcgggcgcgcgccgaagaagagcgacaacaccaagtactacgagatcctcggggtgcccaagtcggcgtcccaggacgatctcaagaaggcctaccgcaaggctgctatcaagaaccaccccgacaagggcggtgaccccgagaagttcaaggagctcgcacaagcctatgaggttttgagtgatccagagaaacgtgagatttatgatcagtatggtgaagatgcccttaagaaggaatgggcggtggaggatcccatgttgatccatttgacatcttctcataaattttt

SEQ ID NO: 338793 - DNA, 329 bp, Zea mays
gcttgactcaaggcatgacaagctggtggagtgtatgagaaagggggagagaactgtagatgtcgaagatctcactccaccagcacatcccctcttgtcccccggatacaagaccgaaacaggtgctcaacatcgcttgatcggccatcgagaactacatggtacacatccacgactgccgccataaccaagaccatgtgaaccttatcgacgaccaccatgcctagatcaaggacatactcttcaatacccgagataacgtcctggaactgattgactcccacctactgccttactataccactgctctatccatggagctctacctc

SEQ ID NO: 338794 - DNA, 186 bp, Zea mays
tgttctagcccacgcaacacactcgaggaggccttctaatgcaaaggcgaggctctccataaacagctgggccaccatatacttactgccaatgatcaaaccaccctactattcctggcaacccacggactttcttccttactcctcatccaagatgatatacctcgaagttcgagagctgctcac

SEQ ID NO: 338795 - DNA, 429 bp, Zea mays
ggtcttcagaccattagctttatctactccagagcgcagaagaacccgatcgacaccatgagggtgttgctcgttgccctcgctctcctggctctcgctgcgagcgccacctccacgcatacaagcggcggctgcggctgccagccaccgccgccggttcatctaccgccgccggtgcatctgccacctccggttcacctgccacctccggtgcatctgccaccggcggtgcaacttgccgccgccggtccacctgccaccgccggtccatgtgccgccgccggttcatctgccgccgccaccatgccactaccctactcaaccgccccggcctcagcctcatccccagccacacccatgcccgtgccaacagccgcatccaagcccgtgccagctgcagggaacctgcggcgttggcagcaccccgat

SEQ ID NO: 338796 - DNA, 457 bp, Zea mays
  unsure (1)..(457): unsure at all n locations
gcgaccgaagctggatcctctgagncgacccacgcgccgttangcgactgctacgatgatctgtgggggagataagcaggatgaccgcgttggaggaggattaggacaagaagaccgtgctttcgcagnncgaggggaagcacaccaggttcatctacaacagngacgacgagaacgagcgggnagaggaggcggatgcagctgaggcgacggcggagcttcgcgcattgatgttcatgggcctgctggtgccggaagggaagcacccgcgctttcactataaggatccttacgaataaaaatctcagccgcgnggccaagaggcnggttgcctttcgctgacaccagccaaaattcttttgcggggctctgaatccagttctgtacgttgattcattctccgttcttaaagaaataanccaacttttctgaaaataaaaattttggggcattcgat

SEQ ID NO: 338797 - DNA, 145 bp, Zea mays
attttgatgggaacaatgatattgtcatagatggatgtgtccctactttaaacagggctgctgcaatgattaacttctttgaaaacactgctgtatgtgacgaccttggtgaggacatcaaccctgatgattatacgatgaaaca

SEQ ID NO: 338798 - DNA, 449 bp, Zea mays
cctatccagtagagccaacccacgcgtccgatcagcttggctacacatactcagtggtgggagaggcctatcgctatgatctaaacgcctcaccatgacaaacatctctgtatccgttatgacattgtacctaaaaaatcgtgccagctttcaaacaacagattcgctaccattcctcggcggagaaatcacgttctcaaaacgcgcgactctgcactgagttttacataatgcttagcacaaacagcccaaaagacattcacttatttttaagaagccttgttgaaaaggatgcaaaaaataatattcatactgatcgaacaggccatgctctaacaagccatgtgatcaactatattgagtgtttgtttgactaccattacattttcactcacttcttctggtgactcacaggagcaagcacaggctctaagcttacatatttgaca

SEQ ID NO: 338799 - DNA, 405 bp, Zea mays
  unsure (1)..(405): unsure at all n locations
cacgccttcccaccacatgcaggcgctggcgcggccatacgccggctcgcgcgcctggcgtgcggcgagtggtggaccgccagatgaccgcgcgccgccgcacaaaagcggccagacaaatgcataagagacagggcggtgaacccccaccgcacacgtgctgcgccggccccggcggcgctcgctgagtgcctgagtcgcttcgcttgccagccgcatgcagcatgtcngattggggaggaattggaatgtgctcgtgtggggggtgagggcctgggccgggccgggtagcacaagcgatcaaaggactggaaagctaggcggccggaggggcggtgccggccctgccgggtgcgcagtcaacgtggaaagcccgcgccgggctcctcagatatcagtagtggg

SEQ ID NO: 338800 - DNA, 421 bp, Zea mays
ttaccattagctttatctactccagatgtcacattaacccgatcgacaccatgagggtgttgctcgttgccctcgctctcctggctctcgctgcgagcgccacctccacgcatacaagcggcggctgcggctgccagccaccgccgccggttcatctaccgccgccggtgcatctgccacctacggttcacctgccacctccggtgcatctaccaccgtcggtccaacctgcggccgccggtccacttgccaccgtcggtccatgtgccgccgccggttcatctgccgccgccaccatgccactaccctactcaaccgccccggcctaagcctcatccccagccacacccatgcccgtgccaacagccgcatccaagcccgtgccagctgcagggaacctgcagcgttcgcagcaccctta

SEQ ID NO: 338801 - DNA, 415 bp, Zea mays
  unsure (1)..(415): unsure at all n locations
gtcggccgttaaccacttccacatccaggggtccagtccagagacacccgagcgacgaagggatccatccatcgtcacaagcatctcgtccatggtgcagcgggccgtcatcgtcaggcatgagcgtgactcggccgccgtgccgccgggcgatcaggccaccacggagacgacggcggcgagggaggtgaagaggaggcggcggctggccgactcgatggccgcgaaccaagcgccggatccttgcggtgcaacgaggccaaggccgaccaccacaacctgcagggccgccggttcaagcgcggctaccgcgcccccggctgcggcgccgtcgactccgcccgcttctaccttgcctgccttgtttgcaccccgccgcgcgcggncgttgttgtcagcggtctcgattatattg

SEQ ID NO: 338802 - DNA, 176 bp, Zea mays
ttcagtcggcggcggcggccagcccaggctgggcagccatggcgcggtgggagtggctcccctggcggcgcggtgtgagcggctccacaggcggagtgggcgcgaccggccccgaccccccggaactggtcgctggcgcggctactgcgtcctcccggccccatactcaacccacg

SEQ ID NO: 338803 - DNA, 215 bp, Zea mays
ataaagtccacccacgcgttcgttccaacacggacaaaaaaaaagggcagcccgaaattcgcgcaggagggggcctcaatcaaattatatattctcttcggacaccggatcgaagcacactggacaggaaccgcccaaactatctgcaaaacaggttaagggttgccgtacggacccccaagctgtgagaacccaccccgacgtaagctcttaga

SEQ ID NO: 338804 - DNA, 219 bp, Zea mays
cagccgccgagcgcctctcgccctacaggaggcaccgtacagaacccaaccaaaaagcgccggcggcaaacagaacccaacccaaagcgccggcggcaagcgaagagaaagcgccggcactaatccgacgatggacgcgtcggccggcggcggcggcaactccctgccgaccactggcgcggacgggtcgaagcgccgcgtctgctacttctacgacgc

SEQ ID NO: 338805 - DNA, 382 bp, Zea mays
tgttggaaatgggcatgtttctggaatagggaaaaaggggcaacagccaattcaggtaaactgcttattagaattacctgatgctaaccaaggtccttcaaagctgaagattttggcatccattggagcattaaccggagtaataatagcatccggaatatatgtatggggtagaaagtaacagacgtgagtgcaatgtgttcaatgagcctttaaatctcgaaaaaaagtatttaagttatttaccctatatctgtttcattgttctaaatataaatagatgtggtttctgaaattgaaattaaacaaatgaaaggacaggtgcaacaaataaatgatacatgttttttcctaaaaaaaaaaaaaaaaaaagggcgggcgt

SEQ ID NO: 338806 - DNA, 185 bp, Zea mays
  unsure (1)..(185): unsure at all n locations
ncgacccacgcgnccgataagancngngcnnggncnngcangggacaaggaagggaggaaagggcgagcnagngcaagngcaaacacaacngnnaaaancngggananagcngnnggnaaaagggcagncacaccagaacaccangangacaaggggcaagcagnngcnnggagcccacagncac

SEQ ID NO: 338807 - DNA, 201 bp, Zea mays
tttcttacacgggcttgctcttcctggcagggggtcatagggagcgacgcattcagtgagacacaaaggatgatgctgaatgcagcacaatgtaacaataccagtgacaccatccatgatgtggagggcatcctatgaatacggctcgcttcctagatcacccttaataccatgccctatttcctgcgatacgtgcaccat

SEQ ID NO: 338808 - DNA, 228 bp, Zea mays
cggacgcgtgggcggacgcgtgggctgtaactcggtctttatgatttcctttttttttttttttttgacaaaaccgcagcatctttgtcaagcaacagtgcccaaaagaaaaggaaaggataaagaccgacacacagcaatggcatacgcacactcctacagaaaagcgaggtctacactgcgaccaacccataaacatatggccgaaactcggaagaactactttgt

SEQ ID NO: 338809 - DNA, 175 bp, Zea mays
  unsure (1)..(175): unsure at all n locations
gacccacgcgnccgttccccccctcagccagaaaaccccccgcggcncccggcggnccgcccgggcgaccngagcaccagaacngaggacgcgagcgaccgcgaagcagcnncaaacgacacgcacggcgcccgcagggcagaggggggcaggaaacaagaacgcccncaaagca

SEQ ID NO: 338810 - DNA, 219 bp, Zea mays
gtcagcattatgtgtgctcgtggctatgggcgatctgtgtctttacctccaactctgaaactggactatggcatgaaaggaggccatgaagagaacggagagggatcatcaccaactgaaaaccgtcatgtcaagtgcgctcctgatgtgtaccatccccctgtgacatccgtaaatcattcattgaccaaaagctatcaacgccaggcaaaacaccgc

SEQ ID NO: 338811 - DNA, 213 bp, Zea mays
  unsure (1)..(213): unsure at all n locations
tccggggggcccgatccccgaaaaatatttttccacgcgctcctcttctctgtgtttccactccacagaagagttcgaataacccgccccccctatttttctattcaagcccttcttgttcaatggaggaagtacgcctccgtggtgtgatactatgtcccgccgccgccgncggcccctccatatatttctcaaagtgcatctaggtcgagc

SEQ ID NO: 338812 - DNA, 240 bp, Zea mays
cgcgtacgtgggactatattgaaggctcatcacacggcacttctatatcatgggaagaatatagaccctgtgagatcgcaacaggagaaggagaggctggaaaagaggcagcacgaagagaaagcaaggatcgacgcccatgtgaaggctgctgaatcacctgcacaacaaaatgttgaggaagacatgaggatgaacagaacgcacgacaaggatgcacgccgcctggctctacgcatg

SEQ ID NO: 338813 - DNA, 235 bp, Zea mays
cagcagcatccatctcatagacagacccacgcgtccgttccttcaacaaccctacagctccccatgagggaatgcttgctcgaaaggggctgccccacggggctttcaaaatctgccggtagaacctgcaagcgaaggcgagacccatttctgaccgaatcctgaaccctaacgccgaactgctcaacaagacggcagagctgtacatgaacatcaacgccgacaagggcctcca

SEQ ID NO: 338814 - DNA, 425 bp, Zea mays
gttggcttctcctccccctccggttcgggttcgggttcgtgaggttctccggggttcggtttcgtgggtgagcggatcgagatggcggcgtccgatgttgagtaccgctgcttcgtcggcggcctcgcctgggccacggacgaccactccctccacaacgccttcagcacctacggcgaggtcctcgagtccaagatcatcctcgatcgggagacgcagaggtcccgcggcttcggcttcgtcaccttctccacggaggaggcgatgcggaacgccatcgagggcatgaacggcaaggagctggacggccgcaacatcaccgtcaacgaggcccagtcccgccgcggtcgtggaggcggcggcgctggagggtacagtggtggccgtggaggcggcggctaccgcggtggcggacgccgagatgg

SEQ ID NO: 338815 - DNA, 156 bp, Zea mays
  unsure (1)..(156): unsure at all n locations
attttgagcattcagaagcacaccngggggggggctctatcatggggctggcagcaatggctaccaagatattatcccttcttgcgcttcttgcgctgtttgcgggcccgacaaatgcgtccattattccacaatgctcacttgctcctagttcca

SEQ ID NO: 338816 - DNA, 380 bp, Zea mays
  unsure (1)..(380): unsure at all n locations
tcgattttgagcattcagaaacacaccaagcgaagcgcactagcaacaacctaacaacaatggctaccaagatattatccctccttgcgcttctttgcgctttttgcgagcgcaacaaatgcgttcattattccacaatgctcacttgctcctagttccattattccacaggtcctgccaccagttacttaaatggcctcgaacacccatctgtgcaagcctataggctacaacaagcgaattgcggnaagcgtcttaccacaaccatttgccaaattgcaacaacaatccttggcacatctaacaatacagaccatcgcaacgcaacagcaacaacagttcctaccagcactgagccacctagccatggtgaaccctgt

SEQ ID NO: 338817 - DNA, 186 bp, Zea mays
cacccccaaacccccgattgcatgactttatttaacaagcaggccggctcccacacttgttcctattgccaatgaacaaaagcacacgctcgttactaacaccgcatgacatactagatataccctaaattccactactgctattactaaaatcattcatgcaaaccatcctgttattctgcacat

SEQ ID NO: 338818 - DNA, 137 bp, Zea mays
  unsure (1)..(137): unsure at all n locations
gggacgaagnggggatccttagagtctactcacacgnacgtccacacccccgaaaaaaaaaaaataagaaattttataaaaaaagggcggccccccacaaaaattcccgaccggaacactaatgattaccatctttc

SEQ ID NO: 338819 - DNA, 323 bp, Zea mays
ggcggactactacgcgaatattgcatcaccgaagggacacagtgccaaggcgaagcaactcgcaccgcaccttattcacaggttctttctgagctcccctgcactcaggacgcgcgccatgtgagccatgttagatctcgtgaatatggaggacctcgcgatcagaatacacgctattcgcggctttacactccttggcacagagactgaatctgtgtcaaaaatttcatatgtactgtgtcaactccttacaagctacgaaaatgttcaacgtgatgctgttcataaagcgctcatgtcccttatacggaaagatgctcaaa

SEQ ID NO: 338820 - DNA, 359 bp, Zea mays
tcggttctggcctggccactggctttcggagggctatcctgcgatctgacgcgaggatgggaccctctataagatgggaggagcgacgaatccgatcgcttgctgtgtggtacagcctccgcaccatcctccgcgtgaagaagttcgacaaggattacaggagccacctagaagatactctgtctcagtgtaaggacaagtacctcgactacaacgtacttaagaagctgatgatgaacctggggcgacgcaagacctcgatgagctgtcctgtcactactcatgacctcgtcgacgccgacgcactagaggccgtgggctccagactacgcccacggcaacctcaaccggctcgactg

SEQ ID NO: 338821 - DNA, 197 bp, Zea mays
tagacaactaattcactcgtttttttgagcgccccgccaattactgaggggaacctgtaggtagaggtgggtggtgatatcttgagcattattaaaggttggatgacaactggtcataccatcactctgacacagaatactattcactgacacttacacaaagaatacaaagcgtacgcatatagcgtcaagaacat

SEQ ID NO: 338822 - DNA, 207 bp, Zea mays
tctatacagtccacccacgcgtatcattgaagatgatgggcggttaaggatcgcaaatctaacttcatggaattcatcatatggttacaacggtgtcttggtgtgtacgctgccatcgactgtgggatccacatacactgcctgtgcccaacacgtgtatgcttgtacggggctacctccttgctgactacaatgatagaccccatg

SEQ ID NO: 338823 - DNA, 160 bp, Zea mays
tcgtttgaacatgcgggtcgtttcaggccaggacccatcccgcgtgcgggctctcattggacggtcacagcagtctgcgccggcggaacctgtcctccacagtctgcacaccgtctaccagatgcacctaactgccataggtagactctcacacccccgt

SEQ ID NO: 338824 - DNA, 439 bp, Zea mays
gatcatcaaagcggcagtgcgtagagaggatcgtcgaacagaacagcatgaagatggtcatcgttctcgtcgtgtgcctggctctgtcagctgccagcgcctctgcaatgcagatgccctgcccctgcgcggggctgcagggcttgtacggcgctggcgccggcctgacgacgatgatgggcgccggcgggctgtacccctacgcggagtacctgaggcagccgcagtgcaacccgctggcggcggcgccctactacgccgggtgtgggcagacgagcgccatgtaccagccgctccggcaacagtgctgccagcagcagatgaggatgatggacgtgcagtccgtcgcgcagcagctgcagatgatgatgcagcttgagcgtgccgctgccgccagcagcagcctgtacgagccagctctgatgcagcagcagcagca

SEQ ID NO: 338825 - DNA, 294 bp, Zea mays
tttacttcacgcgttttttaacgcctgggcgcaagccagtcacgttgcttttaaaaaagggtgggtcctcctccttacatctccactccccatttcacagatccgctcctccatctcatgttagccctcctctacaccaacggcaatcaatttgaccaccgcgtcaaataatacctcactcgataagtatctttgcatgctgctctataagtacaccaaagtgctcatcatactaacctacaaccctacccccaaacacttttaatacattcctcgtatccttaagacctactt

SEQ ID NO: 338826 - DNA, 163 bp, Zea mays
tcttctctcccgcggcctctaaatatgccccggcgttctgtgatatccacactggtctctctctataccaaacccgagacgcgcagtttctagatcttttctccggggtaaaaacgctgctgtggggagcccgcccttgaaaacgagcgagccgagccccgcg

SEQ ID NO: 338827 - DNA, 121 bp, Zea mays
ttccgactcttgcacagatcgagaagggggcccaacacgaaactgggggactggacagcgaactctgacgcacactacacaagaacgtggctggagcaccgcaagacacaatacctacccc

SEQ ID NO: 338828 - DNA, 241 bp, Zea mays
gacgacgcacgcgcgcgtacgcaagcatgcattctatacagtccacccacgcgttcgttcttttgcagctctctctgaacggatgggttgctgacaaggacgacagactccactgtcgttaggggaacaaagtacatcaaatggttgaatcggcacattgaaagcttgtataccacaaccaggacacgctgtgctaagaaaacctacctactcacgaatatgttcacttctgaataacgta

SEQ ID NO: 338829 - DNA, 356 bp, Zea mays
acgatgccgcggcgtaagcagctagcattctatacagcccacccacgcctcattttgtccaacgtcgacgaactgcaggggggagttagaaccaaagcgcgcgcagcacacgacgcaagaactctgtacctttacgggggcattggacatggcagccaatataaaggacgtgccggctttggatctgatgcactaatcgctcccatggatgaatgacggctgcaaaccggacaagcacctcatcctcatcggcccacctggcattgaaagggtctaaactccctgtataaggaggaatattgcctgtgccattgatccactgcaaagatgttgatggctgctgaagcaggcaagac

SEQ ID NO: 338830 - DNA, 147 bp, Zea mays
aactagcgtaccaggtataactgttgagactgtattaaagcttgtcgttagtatagctatagctgccatatgctctcatgctgatggcgactagcaatacgcacaacatacgagcgctaagcatatggagaaatacctgaggtgcct

SEQ ID NO: 338831 - DNA, 231 bp, Zea mays
tctactctcacgcgttcatccgcccgcagcccccatccccgtgggtggctccagatggccaggcggtcgcaccgccccattcctcgattaaacttagatagatcctgtacactcatctagggcaatccgctaacctaatcgattccaacctctgtgaggaattgtgttaacaccactgcattttcactagctgagagtgcactgacagttgtcatctctactgacagcgcg

SEQ ID NO: 338832 - DNA, 314 bp, Zea mays
tgcacgcgtacgtgctggatccttagtgaagctcactagtgacagggcgccggaattcgaccggtcctgcggcgtaccagcttctatggagtgattagactgcgtatatggcatagctgttctggtaaatgtatcgtacatccacaacatacaccgagataaggaaagcctggggctaatgagtgactctacattatggtgctatgccgttcagcgaacctgctgcactgatataatggcacgccgggagaggcggtgcgatggcgccaggggtttttttacatgaacgcacagtgattgccttacgctggctg

SEQ ID NO: 338833 - DNA, 154 bp, Zea mays
tcgactcacgcgttcgttcagacgcggcggcggttgagcaaacgcacctgaatgcgaaggggcgaggaatggagcaccagccattgtgcacgtgcacttgtaccgcaactgtgggctgacgtgcaagataccaatgcgctcttattagaacgac

SEQ ID NO: 338834 - DNA, 202 bp, Zea mays
gttgttttactgtgaccattctgccgacgccatgttcgccgcatgagcggtcgttgcgaacgagctgcaatgcgatgtctgcatatggagagggagctaatggacgtcgccgcccaagacaatgaccatcgaccgaggatggaattgcttgtcgggggcatggcaatctgggattctgctagaaccatattgggcctaaatc

SEQ ID NO: 338835 - DNA, 128 bp, Zea mays
tcgtttatacgtagccagaacacaaatagtggtgtttatataatgtggggggctctcacaagaatgaataaaggacggaaaatgaggatatccattggaaaaaatgctgctgataaaaagacacacga

SEQ ID NO: 338836 - DNA, 358 bp, Zea mays
  unsure (1)..(358): unsure at all n locations
ctcccagtcgcagagtcgcagtccgtaccgtagctcctcctgccaccagaacccaccatgggcctctgcttcagcaagaagaagccaccggccaagccgggaaaggtcgccgccgcggtctccgacgacaaggccaagaagagtccggcgcagcagcccaagagagcggcggcggcggcggcgaacaaggctgcggtgtccgccaaggacgccgcggtgcccggngaggagaagaggangcggttcggatcgcaggggccggcggccgagaagcagctgccggtagtgctggtgccgtcggcgccggtgcgcacgtccagctgcaccaaggaggaggtggacgcgatcctcatccagt

SEQ ID NO: 338837 - DNA, 440 bp, Zea mays
  unsure (1)..(440): unsure at all n locations
cttccccacagcatagctgctgcagtatatgtgactcccgtccatggaaagaaacaggccctaagaaaaccaaagtatgtctgcttgcttcgctgagaggattggggcagatgaactccaagccttgggtatggtaaatcaggcgcccaggctgcttggatgttgtgctcaggctgcacgctgcaggctctttggtcagtcaggctgccacccccaatgaggcttggggcacagcttgccttgccgcttgatcaggccagtgccgccctggccgtttgggctggtgctgcctatgccactcgggttgccactgtcaatctgatccactgtgcatgcttcccttcgacctcaactggatatgaatgacctattgactatagtttanggacggaggggcacgggagagggaacaacagagaggatagaaggcgtttgagctt

SEQ ID NO: 338838 - DNA, 130 bp, Zea mays
gtctgcgagactacagtctaggaaccggggcccgagactgcgcctgctgcggcaaccagaaacacagcgagcgcggcggacgcacgaccgaggggcgctgaaccgggacaaataaggacaccagcccctg

SEQ ID NO: 338839 - DNA, 406 bp, Zea mays
aattcagaagacaggcccagcgcacgaaacaggcactcgccggcgtacacgcggcatacctaaatccccgccgccgccgcgttttgtggggccgcaattcttcccgtcccaccgtccggtcgccgtgagcgcgtgatcctttcacaaccatgatggtcccgctcgatccctcggacaagcccacctcgcaacgttgcattgcggacggcgacaccgtcgtggtgtacgagcgccacgatgcgatgcgcgccgtcgcggttcgcgccggcggtgtgctccagaaccggttcggtgtctttcgccacgacgactggatcggccgccccttcgggtccaaggtattcggaacaggttgcggcggcggcggaggcaagggcggaggcaaggcaggcagtgggttcgtgca

SEQ ID NO: 338840 - DNA, 199 bp, Zea mays
ggcttagacccggcagcacctgcggatggccgagcgcatcaggagccacaggacatactactcttgatctcactcatgctggcagtggagcgcgcacaggacacccccaagctcttcaactggtggagctaagctgatgatcccgcgagagatatcttgctgaacgactacatgcttgctaacgcaacgaatcacacaa

SEQ ID NO: 338841 - DNA, 325 bp, Zea mays
gttgacgccttgggagcgggtccggagctcgacgcggccggaagatacgagaagatcgggactagtcatgcgcatgcttcaacagcgaacacgcacatgaagtgggcggtacctgggacgggcgacatggctctcatgtaagccgcgagcaggaattgttcaaaaaggaccgcaagcatgtaggcaacttgaattaacagataaactgaagggaacacgcatactaaggccggacgcattgaagactgccaacaaatccgaattgccgtcaaacaacatgacgtagatttcatggataatgacgacactaaggacgaacaagatg

SEQ ID NO: 338842 - DNA, 316 bp, Zea mays
tcaggctccgcagccaggcgagcttgttggtgaccacaatgtcgagctgcgcggcacgttcaacaagctcgccaggctccgcagccaggaggatgagtagtctggtttcttgtcataacggccaactagatcctgccattcccggctgtaggaaactactctgctttgtgccttgttggtacttagaataccagtcattttctacatttttggtaccagtagcgacttctatgtggcatattctactgttatcttgcgtcttaaatacctgcacctcatgttttcaaaaaaaaaaaaaaaaaaaaagggcggccgc

SEQ ID NO: 338843 - DNA, 89 bp, Zea mays
  unsure (1)..(89): unsure at all n locations
gggcgcgcgctgccgacgcccggcgacgagcaccccaagaaccaccgcangaagcncngggccaccaacgaaggccgcgccaagagcaa

SEQ ID NO: 338844 - DNA, 190 bp, Zea mays
gtagactgtcacatgagctcctagccgagcgattgcatatagcacaacgaaggctattactgactcattgaacactattctcaatgggactgacagacacttctctgaacagaatactactattatgaattcagttcctgcaaaattggaccgtgaaagaaatgcactatttaataacgaactgacaagg

SEQ ID NO: 338845 - DNA, 414 bp, Zea mays
  unsure (1)..(414): unsure at all n locations
taatcgcgcacgccccagttctgtccgggccgacatcctcgcccatcgagccgcgcacgccccatgtcgcgcttccccaccacgcccgccgcacacgccgcaaaccgtcgatggaaggtgagcggggcgtggccgcccctggcatggcgctatcaaaataggccctccgcgcacgcctcgctccatcaatggaaggctccatcaatggaagttttacagattgtcttgtcctactgcctactatctgccttgaggaagtaccaaggggtttccgttctgtcttcagtggtgcaaacaaaattggtgatggtggttttggttctgtcttcagtgacgcanataacgactttgtgctactatgctgaggtgcgagggttcaagattagtccatgtagttttagggagcagtgggaa

SEQ ID NO: 338846 - DNA, 254 bp, Zea mays
tttcttttgtatctctacttgaataagggggttcatggtgattttacgggagacaatctcttgttttccagctcttcttgtgggaaaagtcggaatgccttcgttaagcatattattgacgatgaacaggatatgctgacaagacacttctggactcatggttatactgtcatatagatgctgtcgctgttcaagctaccagtgagtgagtatatgatacatcggcagatggcgctacactatatagtatggtc

SEQ ID NO: 338847 - DNA, 209 bp, Zea mays
tctacccacgcgtttgtttaccagactaccgaaattataggcggagcgtcatcagagggaggggcgttcaatcgctccactaaaccaaggcagccttcgaccgcgaatgcatactcccacgagaacctgtctgcctaggacttacacattgactatgcagactctctcgacgaccactactgcgtaaactgcgtcatgctccagttaca

SEQ ID NO: 338848 - DNA, 332 bp, Zea mays
ttcgatgcggatcgccttcggttcctggggccggctcctcgagaggaggcactgctcattctcttaattgctacaggtgggaagaatgtgttgtaacaacatcctaggcagatcatagattttgctgcaaacgttcttcgacgggcatacatctgttgtccactttgcttcacagatcctctggtgattttttgcggggcgcacctctaccggagtagaacacgtttttttttaacgtttcttaattttactaaaaggggcttgcccttctttttatgacagttgcctaaactgatttttttggaacaggtaatctttctggtctttcccac

SEQ ID NO: 338849 - DNA, 407 bp, Zea mays
tattctcacttgcttccaaatgacgacgaggcgtttgagcattttgattctttcatttcaagaagaattgatgaggctaataaaattggcaaaatcaaccttgctgctactgggaaggaccttatggatgacgagaaacaagaaattactattgatatgtataccgcattggagatggaaaacgatatagttggggagcgagcccctgagatggaaaagaaccagaaacttgggctacttcttggttttctctctgtgcatgactggtatcatgcacaactactatttgagcgtcttgggcacctaaatcctgttgagcacattgaaatctgtgatggattatttagaatgattgaaaagacaatgtcttccgcatatcatatagtttgtcacctgtattattacct

SEQ ID NO: 338850 - DNA, 266 bp, Zea mays
ttttgggccgcgatgactcctgcggttggggtggtgaatcctcgcgcgcccggtcctggcgcagaggtggtggaggacgaggaggaggcggcggtcgcgtggcgtgagctgcgcggcaaggccgtggatgtcgcggctgcggacgatgaaagggctgtcctggcccgatcgcatcaaggccgccctcctagtaaggagggaggcgcttcggctggcggaggagctggaccagttgacactgatggtggatctccatcaagctcatt

SEQ ID NO: 338851 - DNA, 398 bp, Zea mays
  unsure (1)..(398): unsure at all n locations
cagacattccagaggcaatcttaccaggaccctttaacttgaggtcaaggggccagttaaatcttgaggcatcacataatggacatgctgctgagccacatctgcaaggcaccactaaggatggattctcaaatgcttcccacttcccacaatcttttcgaaagctaatgtcccagaaagtcattactgatggagctgaaagaactcaattgctacttgatccaacaaaactgagctctgtgagtgcttatgatacagaaggaacanacagaagccctaaaaagcaagacaaacatgcttcagttacagtgaactctgaaatttctgctactccaagccgtcatttgatctctcgttgtcaagagggtacgccaaaacaagagacctcagaatcacca

SEQ ID NO: 338852 - DNA, 217 bp, Zea mays
gtgctgtgttgtcgtccccctcgtaccgaggactgttcgggttgagggtacttacggttatgacgaggggcgatagcagtcgctgatgtagagtaccgatgaatctgcagagaggcgttgcctgtgccaccagcaacgagtcggttgagaatgccttgaactactacagggagaacctcaactccaagggcatcaccgaccgtgagacggcgaagta

SEQ ID NO: 338853 - DNA, 294 bp, Zea mays
cacaaggtagatggcgaggcaacggcaaactggcggtctgctgcttcttggctgcagcaagtgctagcgctaaaagcctgcttcccagaagctttacactcagtcatggagcagtacatactagaacccgaatcaggtagagaagctacctctctgaactgaagcgtgcatttcttgcattgtgtgcctgactgcctgtccaggaccggaggtgctctctgatctgtagccaacaaagcaacaacctcgcgccgtcgcaagcagcatgaccaggccttgggcggggatgggaat

SEQ ID NO: 338854 - DNA, 152 bp, Zea mays
ttctcccacgcgtcctcttagccaccgatccagcactgttcgcgaggcagctttcaaaagtagcggggcccccctaaattccaaagccgccccgtcaatgtgctcgtttacataggggtttccacttctacaagggcaatatctaactcaac

SEQ ID NO: 338855 - DNA, 213 bp, Zea mays
tctacccacgcgtcctttctgccccagcaaaaccagactaccgggggagatgttgatatgaagagaacaccttctgttactgctgcacttgaagatgctatgactattcttggctaggataccgaggatatgactgattatcatggacatacattcatagcggacgcttcacgaagacaactgtttgctggatctacaatctttgaacaagat

SEQ ID NO: 338856 - DNA, 221 bp, Zea mays
tctacccacgcgtccttactgacatggaacaaactgtggaagcggggagccataccacagggtgtgtctaccttgactatacgcacacgcgcctaccctccgactgaaagcatactgcctgaaggaagaagcgaaatattagcttggtcagcagccagacgacaccaagctgtaacgcactaatacatttaggaggatgcgtgttcaggcacgcaatgtga

SEQ ID NO: 338857 - DNA, 223 bp, Zea mays
gtcagcgagcgagaggggatcgggacggccggggaccattccgagcgaatcggccgcgcctactctgacgacccctacacatgacagccaacacttaccatgccaacactatgatattgttacgaatcctgatgaactccaaggctagtgacttgaacactgatctgcccagaatatggtaacagaatgacactgccaagggggatatctgtgacgctatgga

SEQ ID NO: 338858 - DNA, 166 bp, Zea mays
  unsure (1)..(166): unsure at all n locations
acgaagctggagtcctctnatttttcccacgcgtcctcgacacccgcgtcaacatcaccttctggaagatgcttttaaataggagcgggggccccttaaatcccctcctacatgtctctcaacctccttatttcaacgatccatctaagaacaaccttactacatt

SEQ ID NO: 338859 - DNA, 402 bp, Zea mays
cttaaaatccacccaacccgtccgttcttttggccggccacaaccaaccccctgggggctttccctagcgcaagggggctctcttctccatgggcgctggccaagatcaccccatggcgcttggctccctggaacacagcagcacgccagcgcatggccttcccatggctgcgagctccttctcccggcgagcggctgcagcagggggtcgtctcctccatggcgcggacgaactacctccctgcaggcaagcagcagccccctcagctccttctatggcgcccagtctgcatgcacgaccgagatccatcagttcctatgttccccatggccgagctcgccccatggacctggctccttggttcttctttcacgtacgcgccctctccaacctgcagcacg

SEQ ID NO: 338860 - DNA, 235 bp, Zea mays
tctacccacgcgtcctgacctacatgatcaagtccgacactgagcgcggactttttatggacaatgacgacatggcatacgacttcaaaaacctattgtttgatgagaaggaagttgctatgtttgtcttctataacattgagatacatccaatgaagggctcttgactctgaatatcgataggacaatactgatgtgggatctgaccatgaagaacgctgaagcttactctgac

SEQ ID NO: 338861 - DNA, 53 bp, Zea mays
gagtgcttttaaacgtaccagcgccccctatattgagtcgtattaaagcttgg

SEQ ID NO: 338862 - DNA, 245 bp, Zea mays
  unsure (1)..(245): unsure at all n locations
ttttcccacgcgttctcncaacgcgggacatnattgctgaaagaagaagtttttacaaggggtgggggcgcccccaaattcatccctttcaccttcactattcacgggtggagtccttagaataacaaagtgaagcaaggccccttgtctggtctaactaacttatgcatcgttttcattgggcactctaggattatctccaaaatatcaattctatagccctttgatatacaccctgcgtcttg

SEQ ID NO: 338863 - DNA, 396 bp, Zea mays
tttccttcctcctctgagttcatgctttcaccctcctccctatacaaagcttggtttctttcgatggttttgctctctctttcctgtttgtctggccttttgttcgcttttccaatggatcgtttgctctccgatgacgattaaaaattactttcgttcttctgaagctgcaatgtggaagaacaatctggagacctgaactgaggagattcgatctcactcgacctatccttggtttcatttcctgaatttgcaggttggttttgttagcgtcctgttggtgaattctggctgatgcgctttcttgttgcgcactgcgcagctctcgagagaactgtttgttctgcatctggagttgtagatagcttagcaaaaaaaaacacaattttaacgtgt

SEQ ID NO: 338864 - DNA, 299 bp, Zea mays
tcttcccacgcgtttttccacgcgtccgcacagcacaggcagttcggcggattgagagagagagagggcgctcaagatgtcgtggttcgggcaccaccaccacaaccagccggctcccccggcgtcgggccccaaccaggtgttcaagatcttctgccgcgccatcgagaactactgcctggccgtccgcgacggcgccgtcgtgctggccccggtcaaccccaatgacgaccaccagcactggtacatggacatgcgcttcatcacccgggtcaaggacgaggaaggcatgccggcgt

SEQ ID NO: 338865 - DNA, 255 bp, Zea mays
tctacccacgcgtcctctcaactgcacgacccctcgccggccatagaagctctttaaacgggcgccgcccatccgcacttcccgatttacatctcctcggacgaggaagactggcacgcctatttcatcgagtcctatagccccgaggaggtccatattcagcagaccattcttctctccctgtatacctttcgcgccaagacggccgcggctggttcggtttcttctttttaccctactgtggcctcctccacc

SEQ ID NO: 338866 - DNA, 267 bp, Zea mays
aattggaaactcgagccatgattgtgctgatcgttgcccttgctctcctggcgctcgctgcgagcgccgcctccagtacaagcggcggctgtggctgccagacaccaccgtttcatctaccgcctccgttctatatgccgcctccgttctatctgccgccgcagcagcagccgcagccatggcaataccccactcaaccaccgcagctaatcccgtgccagcagttcggatcctgctgcgtctgcagcgtcggcagcccgttcctgg

SEQ ID NO: 338867 - DNA, 135 bp, Zea mays
tctacccacgcgtcctgtataaaaaaaaaaaaaaaaaaaaaaaaaaagaaaatttttaaaaaaaaaaagagccacaaaaaaaaaaaaaaaaaaaaaaaaaaaaaaaaaaaaaaataaaatataaaaaaaaaatta

SEQ ID NO: 338868 - DNA, 437 bp, Zea mays
ctggattcctttaaagtctacccacccgtcctttcccctctccctcgcggcctcgccttatggggttcgtcactcacctcgaccaccgccatggccatggccttggcctccgcgaccgccgccgcactcttccgctccgccctgtccgcgccacacggcgccggcgcgcgcgtccggccgcagcgccggcagccgttcttggctccgctccacgcggcgaagggccccggctcggcgccggtggtgctggagggcaaggccaagggaaagaagaagaaggggcccagctccgggaacctttccgcatccctcgacgtcgagatcagggaggcgcatgagtaccttgacagcgaccaacaagaacctgttccagaaaactttccatttgaattaatcgacgaagagggtatgagcgtggttattttgagaagggacta

SEQ ID NO: 338869 - DNA, 298 bp, Zea mays
aagttttcccacgcgttcttccacccctccactttttccatccgccacagcctttttaataatgtcccccgcccccacatctctctttttccctgtgcatggcgcataaaaatctcccagccgtgcatcatctcttcgcgctcccctcagacaccatttctccctcctccctactccctgctgtcgagcagcagctccatggctcccacattttttttcatcatagatcttcttccccatgtagcttctttcctgcaagtcgccaatattctttttcctttcctcctatcttcctttt

SEQ ID NO: 338870 - DNA, 172 bp, Zea mays
aacttaaactccaaataattcctcataaatcatgggtgtatatgcccaccacccccttatcgttgattcaagatgtgttctcaataattttggggctttgcactcaacaccctgtcattatgattatgtattgtgtcaattattttatccattgctagtgtagacttggttc

SEQ ID NO: 338871 - DNA, 378 bp, Zea mays
cttcgatctcgtttcaaatccatccatccggggggtccttcgtcccgcagcatctcaaccccatggccaagatcaagatcgggatcaatgggttcggcaggatcggaaggctggtggccagggtggccctgcagagtgacgatgtctagctcgtcgccgtgaacgaccccttcatcagcaccgactacatgacctacatgttcaagtacgacactgtgcacggacagtggaagcaccatgaagtcaaggtgaaggactccaaaacccttctctttggtgagaaagaggttgctgtgtttggctgcatgaaccctgaggagatcccgtggggttcggttggtgctgaatatgttgttgagtctactggtgttttcactg

SEQ ID NO: 338872 - DNA, 292 bp, Zea mays
tagtctacccacgcgttcttatcgatctcgtttcaaatccatccagcgtcgttttctagagccgcagggtctcaaccccatggccaagatcaagatcgggatcaatgggttcggcaggatcggaaggctggtggccagggtggccctgcagagtgacgatgtcgagctcgtcgccgtgaacgaccccttcatcagcaccgactacatgacctacatgttcaagtacgacactgtgcacggacagtggaagcaccatgaagtcaaggtgaaggactccaaaacccttctcttt

SEQ ID NO: 338873 - DNA, 340 bp, Zea mays
gctactgtcattatattcatacatatgcatggtgcatcttatttacgaccgagagatgacgctcatgcaagtggtgtggtgcaaccacaagatgccgttggcggacgacctaaagaatggacttaaccaatggatgctcgccaagcgagtacctccaccagcatacactacttaagtgttaaattaaaggcaagccccggttttatgcataaccgtgatatatgctattttactgcacttaatgattgtaggtttgtactgtgcacttaagtgtaagagttgactgaaaccttatctgcataaactcaggattacgttttgaagatgatactagtatgct

SEQ ID NO: 338874 - DNA, 53 bp, Zea mays
tcgaccagctcacttttgacagccgacggcccggtaatgcgggtccggttcct

SEQ ID NO: 338875 - DNA, 85 bp, Zea mays
tcgttaagcaggtgttgctggtgattccggagcatttcctgcaagcgggcggggtctctctatatcgagctgtattacagcttga

SEQ ID NO: 338876 - DNA, 98 bp, Zea mays
tcgacttgctcactagttacagacgccgggcgatgcattccggagcgtgtcctgcgagcatgcggcctttctctatagtgagttgtattacagcttgg

SEQ ID NO: 338877 - DNA, 121 bp, Zea mays
cccgatctgatcgaatctaaagcttcctgcgggaattttaataaccatggcggtcggcacacccgctgctacttccatcagaacgtatgcagcatgacaggccttccttgatcattactac

SEQ ID NO: 338878 - DNA, 301 bp, Zea mays
tcgattcacgcgtccggtctccatccaacaataagatgcatgcagatatgatctgtgtggccggcgacctgctagatcatctcacttcctgagtgtgctgatgctcagccaataatgaaccattccatcttgatcggaaattcaacatacaaaaaaaaaaaaaatataaaaaaaggatgcacaacccaaaaaaaaattctaacacacataaacacatttaaactaaacctgtaaaccgctcctttgcaatgttgaaccactgttaataattcttttgcgcagtgggctattagaaaagttt

SEQ ID NO: 338879 - DNA, 279 bp, Zea mays
gcacgcggagcagctttccctataacgagtcgtattacacccttgacgactcatggtcatacctcttcccagagcacaacatcatattccctaacaatttatcccaacatactacccccaagcactccgtatcatctcattattcctcaatacctgatctacctgatatatcatatgttcttataaacgatcttaatttctcaaccaaaaactcatgtttattatgttccaacaagagtgaccaatcctgctttggcttgcctgactggactacctgct

SEQ ID NO: 338880 - DNA, 215 bp, Zea mays
atacagtcgactccacgcgtttgttcataccagccacagccaactcaggacgacgccgttatataggccgtgccagccagcaacctacagactcccctctagcatacctgtcaagcatcgagaagacatggacatagccctggctgccaagagttacattcccgcacgctagacaaaaatcgtgtagctcaccctacatacatagcaacagctct

SEQ ID NO: 338881 - DNA, 240 bp, Zea mays
gcgaagctggatgctcatagtcgaccttgcgtccttttttagagcgcatccagaagctcaaagaggctttttactggggcgggccgaactccatggcctagccgtcatatcaccgtccagcggttgatgaggaggcctcggcagccggctaggatgaggacacctgctcccatgtcgcgcccatcgtgaagcttgaggaggtcgccgttaccaccggagaggaggacgtggtctcgcttc

SEQ ID NO: 338882 - DNA, 440 bp, Zea mays
tcgactccacgcgtccgttagaagagaccctctctgtcctcgcggggggcggctcgaggagcggatgttcccgcctggcctgatccaccaccgccctgacgccaccgctcccggcgatgggccaccgcgctccggccccggtgggccgagcctagtactgacagcggaccccatgcccaggcttccgtggacagccgacctccacgagcgtttcgtcaacgccgtggcccacctcggcggaactctacaaaggcacaccaaaaactatcttaaggacgataggtgtcatgggtcttactcttttccacttgaagagacatcttcagaaatatacgataggttaacaatctaggaaagaggggtcagagcactctaaagacagcttcctatcttctagatgctcaaagtggaatgcgtgtcgcccctagagttgctgccca

SEQ ID NO: 338883 - DNA, 194 bp, Zea mays
ttcatcccgtccccgtccgcgccggcggacgcctccttttcgtccgggcgtcagcgtcgcggctccactgaacctgcgtgtcacccgccggaggcaagggccagccgttgttgccattgcctccggttacccccgctttgccgggatcggcttcttcatccggggcattcccgaatttcccaaaccaaggatcc

SEQ ID NO: 338884 - DNA, 167 bp, Zea mays
tttaatagacatatgcttgtatcagggagtgattcctgcaggggacggtgtcaactaatcttaccattccatcttcaaattgctcattcaataaactatagactgtctgatggaactcgatactcagattaccttcataacttatgagcttattgacacgactaatc

SEQ ID NO: 338885 - DNA, 214 bp, Zea mays
  unsure (1)..(214): unsure at all n locations
agcgagganccccnagagncgacccacgcggccattgacaccaggtcaggtgtcgaagagtaggatttttaaaatgggccggcctcacggaaagacttctatcaaacctgtggtcacaactgacagatattattcttgacagtacccatctttgccaaacacaaaccataatcttaaacaatctagaaacatggttccccccacaaaactttac

SEQ ID NO: 338886 - DNA, 218 bp, Zea mays
tcacccacgcgtccgatcgctagcggctgcccttttttttttgggtggggtatcaaaacaggagggttgaacccggaaggatatgccatgccaatgaagcataaacgactataatatgtgggcaactcaaagaattcacattattgccaacaaaacaaaaggacaactggaggccttctgatccaacaggcccaaaattaccaaaaactttggaactt

SEQ ID NO: 338887 - DNA, 134 bp, Zea mays
cttactcgcactgtgtctctgtctatcggtggggatctcaaacaacagggccgtcctctatttcaacctaagctttcgttaatctataacgcggacacaaccatccactaccacaccggcagaaacgacacata

SEQ ID NO: 338888 - DNA, 202 bp, Zea mays
tttatgagaagattaaggctctgaggcgggtgattatgtctcccacagacgagctgaggaatgactctctttatctctttaacaacttaccataagccttacctttaacgcatcttgcgggctatggatggtcttttacctactattaaactgttagaccctcaaactcaacaagtgccttccctaaaggaacttcatgtaa

SEQ ID NO: 338889 - DNA, 216 bp, Zea mays
  unsure (1)..(216): unsure at all n locations
ctgacgcgtgggaacaaaaagccgcgttgaaacacttgaaagacaggcacggatagcttctgctgnangnnnccacccagagctacctataataattactggttcaaaggatgggacagctccaatgtggcaatctaacaaccacaagcctgagaacacccctaactaaggccctgagccaggttgggccttaaggtatataaaaagggtcaagaa

SEQ ID NO: 338890 - DNA, 153 bp, Zea mays
tcaacttcacttcgtccgctcaattcatcaactccacaactctcgcgcgcgagtctccaaacaatctctgctgctccagccttctcaacccaaaaccacctcggccccacttcttctctctcccacccactgtttgcccaacccataacgacc

SEQ ID NO: 338891 - DNA, 400 bp, Zea mays
tctactcacgcgtcttctcaattacagagatctagatagagaggtggatgttatatctacgcgcgagcgacagatccacaaccaaccaataggaacagccccatatggtattgacgctcgaccccggaccgttctacacctactgcctgcctagtcccaccttcttcaagaacgacttcattgacatcaacaacctcctcagcaaccctctgattattctaccctctaaccgcacagcaccaccaaccgcaatttcactatttttctacaaatttatttccccaaaaagagctccaatatattgtttttttgtcacacaaccgttatattttattatgcaaccctactttataccagctgattgatattataaaatgatgtattttttagtcctcttact

SEQ ID NO: 338892 - DNA, 128 bp, Zea mays
tcgattcacgcgtccgatttttaaaaaaaaaaaaaaaaaaaaaaaagaaaatatataaaaaagagagggggaaaaaaaaaaaaaaaaaaaaaaaaaaaaaaaaaaaaaaaaaaaaaaggggcggcccc

SEQ ID NO: 338893 - DNA, 183 bp, Zea mays
atattacccaacccccatcgacagccattattcctactaaccagcatacttgatccattttttccttagtgcgacagccttcaccctttattaaaacgccggacgacctatcccgtttttatcatgacactgaatgtactgtcaccgaataggctttctttttttttgacaaatcttcataat

SEQ ID NO: 338894 - DNA, 359 bp, Zea mays
agcggggatccttaaagacttcctacgcgtccgctgatacccccatatccgactcggagaagcattttttaaaatggaaggcccactctatttcctccactacctaccctcaccatgctgtcaccgttcttaagaacaacttcatcttcatcaacaaccgttccttttttgctttccaaagtttctaccatcaatacttttaatcatggtcactccaacatccaatttctcaccatacacatattccatgttaaaaatcatgaacatattttttctttatcacacaactcatacatattttatttttaccttacttaacatcaacttatttatatttcttaaaatttaattgctatcct

SEQ ID NO: 338895 - DNA, 148 bp, Zea mays
  unsure (1)..(148): unsure at all n locations
actcgctccactccggccatggccaacccgtcgaccatttaaacggtcctgcccatccataaacatttactnataaaactctccctctatacaccctccaacataactcacgctcaactgacactactcttactttttttattttcac

SEQ ID NO: 338896 - DNA, 134 bp, Zea mays
ttgtttccttctcgaccgtgcgctaacgtaggcagacaacaggtatgggggcgcgcggcacctatatccgcttccctcttcggccacctgatctcaatcgggcgcgtcagttaggctacttgggccaaggcgag

SEQ ID NO: 338897 - DNA, 329 bp, Zea mays
  unsure (1)..(329): unsure at all n locations
gggggccaccacagccatatcctgtcatgaacnnggattggaactcatttatcaatccaagaccganggaccgtangacatggattttatttctctcatcgaaagaaacattcaaacaccgggtagagcgtctaatcaatgtcaacggtctgccagcaagtcaaaactatcaaatgtacaccacacccacacatgccttatagcatcgaacatgtatcctcagatgtgagaccctacactcttattaaggtcattttgtaacgtcacctatctagtaccttgaatcttgtaatactaaatacttatacccaaaaaaaataataaataaa

SEQ ID NO: 338898 - DNA, 423 bp, Zea mays
  unsure (1)..(423): unsure at all n locations
ntcgactccacgcccgtccgagtaataaccctagnccgcnncgccaccgaagcggcgcgtcccagtgtaagcaggatgcgtcgcntngcccgccgctcgcccattgaagccgccaatctctccgctgtcaccgagggctcccgctcggaaaggtgctncgcaagggcgcccactttacgntngccccgttctctccgtcccgcccgcgggttctcaaatgtcnncgcggnnngctgtnncgacggagccctccgcncacaatgtacccaacgtgcgcctcnncatcccgatcccgcaaaggacccgacgaggtgcantgttcgtgcgccgggcacctacaaggggccgtgagtgtgaagggtggtgccagtgtgtaccgccgcccgctggtgtcatccacggtccaagcggatcactccgcga

SEQ ID NO: 338899 - DNA, 439 bp, Zea mays
gtctcaactactactatacccgtcggggggtggatctgagcacagaagcgggcaatcccaccccccctccactcttcctcgccgttgccagatgctccgccagagcctccccgaggccgggtccttcttccgccggctccttggccgcgtctcgaacgagggcgggcttgctgccggctcctccgcgtctgtccgacatttcgtcgaacagcttgtaggcggcacggccccgatcttcccgcgtacccatccgacctcgccgtcgcctccgcggagcgtgggaccggaggaagcaacggcgcttccttgacggtccacttccttcgccactcctgcggcctcgaagaagccgacgccgcgaaggcggccgagcgcgtgcacctccgcaccaccaagaacgcgcacgccgtggtcgcgctcctacgcgacacgctcggca

SEQ ID NO: 338900 - DNA, 334 bp, Zea mays
  unsure (1)..(334): unsure at all n locations
ctagagncgacctactcgtccgctaaatagatccaatggcgccgacctcaaagctgtttattgacatagggcgcgcttcacaatcncacgcgtaccatcgccgtgggctgtgggccatcaaggccaagaacggcgtcgccttcgctaaggccgacatttttctttacgtcgttgaaacaaaaattctaccttgtctaccacttcaagcccctcgtacttatcacctacaagcctaagcctaccaatctcatgtcgagcatcacgcctgggacgtttcttattctactctaactactatatggtaattattgtatcacattctattatctttttt

SEQ ID NO: 338901 - DNA, 255 bp, Zea mays
tcgactccacgcgtccgttcgaacccccgcagacgtacttcccgtgcgggactctttacatgggcggcgtctttcacacagtcacgtagtccatccctccacattactcaccacattgcgctacccaccgtgcgtcgtatatcgtcgtgaattgccataccacctaggcacctttaacctgccgtgactacccgggcgcgccaattgcgtgcgctatctcctattacttgcattgcgaatacttcgagctttaaa

SEQ ID NO: 338902 - DNA, 201 bp, Zea mays
  unsure (1)..(201): unsure at all n locations
ttcttctctcgcatccgcagcctctcgagcggtactccatcccctcgatctggaagcgcancagcagcagtcaggcggccatggacgccagcgcaccaggagccgccggaaaggcaaaaaaggccccggccggccccagggccgccggcccaaggaggaagccgggaccagggtcggcaagggccggccgtaagttcccgg

SEQ ID NO: 338903 - DNA, 440 bp, Zea mays
  unsure (1)..(440): unsure at all n locations
tcgactccacgcgttcgtatcagcagagcagccggaaatttggggggggtctctagaggtggactacctcccactagattaggttccttctgcggttcgagagagcaattctagagcctgatggctaagagagagagtcctgcgatcgggatcgacctcggcaccagatactcatgcatctgcgtgtggccccacgaccggtcgtgaatgatcttcctcaactaagttgacttgaacacactagacgatgtccggttngacagacttgtagcgccagatcggttaatcaaccgacaaccacgtggtcatagacggcatcaacactcgcttcgatgccaagcgcttcatcggcaggtggaactctgaaccagctgtgcggactgtcatggatgtatatcctaaaaaggtaataacaggtcctcgagacgctgccaaaattg

SEQ ID NO: 338904 - DNA, 415 bp, Zea mays
  unsure (1)..(415): unsure at all n locations
tcgtcttacgcgtccggtactctcccatgagaaccacagtaagtatccttttaataggggaggggcggactacactcatctctngcctgcaaggtgactctcctacttattccgcaataacgccgtatgttgggtgaagtaagaacgtcttttctttctcgaaatcacaaaataactgtttttttttctcttaaatcagtcaacgagatctactctatcattaacacacacatactgctaatcatgattattcctacttcctacatcttttttttcccatgtatatccacaataatttttttctacttctactttaactacatataatattctctctaacattttaacattaatgaattttttctagtttatactttaatccaatgtttttttaattttttttattaattatatt

SEQ ID NO: 338905 - DNA, 324 bp, Zea mays
tttatattgacctctgctaaaggtacttgatgtgcattcttcagtacaggggggattgctaccaatatctctattgctgaaaccagaaaatgcagacagcctttgatcaaaagaactactgataggtatgttctcaaggattgcgccacagtttgctgcatttcaattttattatagattcatctatcagaagggcagctctggtgtagaggtgagagttgacatacttaatacctaagtccaaggatttgaatcaacctctctttattttgagggggaaagtctcgcctcgattaaaaaaaaaaataaaaaaagggcgggcgc

SEQ ID NO: 338906 - DNA, 376 bp, Zea mays
ttgtcttgaggacggcgtgttccgggtgtaggcttattaagcggcgcgcgcctccacaaatcccagcctctcattcgcggacccgaagcggcgggaggcgcctcatgactggacggacatgcccgtctttgtccaggtatgcgaagtcatggcgatggaatcccagaaggtcttgataaagcttactactgggacatctttctatgatactggagaagcgagttacccacttgaacggactgggaaacgagtatttacatggaatacatatgcatggtgttttggaccagaaaccacttctgtttaccagacacaccctttggttttgactgttctcccttaaggaaaagcattgattgttcttgcatatacaatt

SEQ ID NO: 338907 - DNA, 221 bp, Zea mays
atacagtcgacttcacgcgttcgcttactctccacaacggcattaatccacttcatctttttataatacggtgcacgcgccccacaattacccatattttatattttctcacaccacattacattcacacattctcctcattacaaatatttactctatcacacatttttttcacatatttcctatacttaatatcattaatataattttcttcctttatc

SEQ ID NO: 338908 - DNA, 446 bp, Zea mays
tcgacctactcgtccggaatgaccagggatccgtcgcccgtctcgtagcattctaagatccggggcagccccgattccggctccaagcgcatcctaaggagggcgatggccgcgatcctggcgctgccgctgaccccgatcaccaaggccaatctcggcctgcttctcttaaagaagcgcgccttcttctccgccgtcgccgccgcgggcaagcgccgctgctacaagccgttccgccactacaactacgcctacgtgggcgagtaccagttctcgccctcccgctccccgctgctcccggccccgccccccggcgtcaccacctggcggagggccgtcgccaggaggcgccggggcagggccaggatggtcctcgcctccctcttctgcggcggcggcggctgccgacgagctcgaactatccgttctggtctgtctctcgcgta

SEQ ID NO: 338909 - DNA, 122 bp, Zea mays
  unsure (1)..(122): unsure at all n locations
acctcctcacgcggccttttatcagcaccaganagactcgacagangctttttacaaacggaggacgcgacccaaacccctctcccatatcatttgatgtccgtgaccacacccgccctaca

SEQ ID NO: 338910 - DNA, 416 bp, Zea mays
gtggtagacaaagccaggaactccaaaggtgggagttcggattcggaggccgacccacaccactccaccacaccctactcgagcgaagcgagccagcaatggcgcatcgcatccgcgggccgtgaccggcgtcgccggagactggaacaacaatggctgccgtggcgcgcggcggtcttgcgatgcccacagcagttgtgccggcggctgcggctgccgcggatgaagagattccggtggcggcacatagacagcgtcctgagcacggtgtcgttcgggttcgtggccaccgacatcctcgtgtccatgttcctcgccatggccatcctcgagcactttcttcgccccagggcccatacgcttgggcacacgccgccccggtggatccgccgccaactccccttttttctcggccg

SEQ ID NO: 338911 - DNA, 202 bp, Zea mays
ctcctttgtataccccacccttgactaactcctagctggttctatataggcggggggaggaaacatttagaccgctccagccctgccaagatcttcattggcggtctctccaaggatacatgcatgactacatccaaagaacattttacgaagtatggccatataacatattctgtcatattcatggacccattcacacaaa

SEQ ID NO: 338912 - DNA, 354 bp, Zea mays
acaagcaccggcgacgaagcatcctcctatacaactatctcacgcgtttgtcaaaaccagcaaagcattatcagccgccctttcttacaagttgtgttggggacaacgccaacgcaaccaagatcccatttatccttacatctcatattttacccacatacacgcccgcttctaatcctcctatctacatactactctccactcctatctcaccctgacttgataggtcaagatccatcttaccaaatctccaaaacattctacctaatttatcacacacctataccgttgatgagctcatacttactagagacatttatgaccatactttttcttttagtttttaacttaatg

SEQ ID NO: 338913 - DNA, 226 bp, Zea mays
gatcctctaaagacacctcatcgtcctttatctgccccgcctcctctcgtccgtccgcctatttttatagccgggatgagggtacacaaacttctttttaatagcaatgctgatctgcaatcacatcttaaggagtttaaatctgagctctccctgctactcttatccaatgtcaccgtctgatctcccaacaagctctccaagatcaaggttgtgctcaccttca

SEQ ID NO: 338914 - DNA, 257 bp, Zea mays
  unsure (1)..(257): unsure at all n locations
gggatcctctaaagnctacttacgcggctgataacaagcaccagnntggctcgtctgtaccttttaacatgggggcgacgcgttactaaccccgctccccggtgatctgatgtcggcggcggcacgcgcgccaccgccgccgcgcgcactctacacgccgtctataaaagtcccctttcgtacccatgattctaatccgcgcctcgaccctgttctaggtttctcacgtcacgttctttctagggtaatgttcataa

SEQ ID NO: 338915 - DNA, 387 bp, Zea mays
tcgactccacgcgtccgttcttctttcttcgatgacaatttttgcgtcgtgtgtccaccgtgggcgggtgctcgatccaaaatctcttcgccctggctcccatcgtgcatgcgtccaggctgtgctactagtcgggggaggcggtcgcggtcaacctcgccttcgcactctcccatgtgcccgacgagagcgtctctccggccaacccccgcgacggcgcgggtgcatccgcggcggccatggcgcgcgggcgtgcccgcacgtggctggcgcggcgtccctggccccgaccacggagcgggtgcggtagatcctatcatggtggcaccggccccgagccctagccctggaggcgacgcaacattaagccccggccaaaccggtggt

SEQ ID NO: 338916 - DNA, 222 bp, Zea mays
tctatccacgcgtttgtctacgcgtccgcccacgcgtccgcccgctcttctttaaacgcgggcgcgcgactcatacacccactcatcctctgctgatgacttccctgaatgtgacctattactgctccttccgcgccccgccccgtcaactcttctttttactgctagcccttgcgttacggctttcattctctccttcttaccattgctgaccactttctt

SEQ ID NO: 338917 - DNA, 191 bp, Zea mays
aaaaaaaataaaagaaaaaaaaaaaaagagggaaaaaaaaaataatagagaaaaaagaaaaaaaaaaaaaaaaaaaacgcgaaagaagaaaaaaaaaaaaaaaagaaacagaaaaaaaaaaaaaaaatgaaaaagaagaaaaaaaaaaaagaaaaatagaaaagaaaaaaaagaaaaaagggggggaagag

SEQ ID NO: 338918 - DNA, 158 bp, Zea mays
tcgactccacgcgtccggcataaccatcagatctagcaaaactctcgccactttatcaacgttgtccgaacgcgtattaaccggaaatggctcctatcgtattgagtatgaacgcctgctcccttttctacttgccccccgccacctttttttttttt

SEQ ID NO: 338919 - DNA, 431 bp, Zea mays
cactctattcacgcgtttgttctctcagaccaccccccattatggcggacttttttaaatacttgtccgcctacaacaatcatcactcacaactaaatcaccattcatataaagtatctgactcccaaacccttccatcttactataatcttttttctaaataatcctgaatcaacccattaatatatcccttttaacatcttttctatttattttctgtttcagtttattactaataattcctcactcactaattaaaaaatatacttacactttcccaattcaaaacaattatatttttcttctctactttttttctttttttttttcaattcaatttttacttttacctatccaaactattttatttttttaatcttttaatcaaattcctatcctatactttttttttcattttaaaaattttttta

SEQ ID NO: 338920 - DNA, 321 bp, Zea mays
ttcaaaagcatttcaccaaaaaaaaataatctctaggcatggaacctatgcccagtggcaaaattgtacatcacaaattcattattttgaatactccttaacagctcatatttaaatataaaaaagggtaatggtactcctgcaactgaagcccagatgggtaaggatgttgtatcattcccttcatgggcagcttgagctcttagatggttttagattaatgttgttctttatgatttaattttatttatctatttttttcttaatctcccttttttatgttttatatttatctcctttatttatgttttttaattcatt

SEQ ID NO: 338921 - DNA, 524 bp, Zea mays
  unsure (1)..(524): unsure at all n locations
tcgactctcacgccgtccgaaatcganctaccgcacgccgtggctcgctgcgggggacgcaatctctcagcgtctggtgacangcctcctacctccgtcagaattccgacgacgagggagacgcataatccatcgatggtagtgaagtgagccgccgaagtatgtggtagccggtgggaccggttgaagggtcgctgccgagcaaaagaacaatgttgccagcgtgcggtcggctgcccgaagccggaaacgtctgctggaccgggcgtgccgtgtgataagaacccgtgatnngcagcttaaagaaagggcttaatanncggcgcctannttccctaggtccgcttacccaatgaaataatacnttnaccagttgacgccatcntngcctccaagtgaatttcnntccaaaccctagcantnnactttanngcgatanntttgtgtnntggtgccgaatagcnnttgtcgcnctgggaagaagaaaggaaaggaggganngcagtccgaggtttaaatatcat

SEQ ID NO: 338922 - DNA, 451 bp, Zea mays
  unsure (1)..(451): unsure at all n locations
cagaatttgaagctggcaggcttggaagattttttcatgatacgttgaagatggcctactattggaagagtgatgaatctgtctatgagcgtgaatgtgcgaacaaacctggttttgcagtgtacttcagatacccaaacagccagcgtgtgtcctacagtcagtttgttcgggttcattggaagtggagttcaagaatcaccaaagcacttaatcaatgtatggaatcaaaagaattccattggaaattcgaaatgcccttattgtccttacgaagatttctagtgtcttcccggtgattcgtaaaagtggtgtcaatcttgagaaacgggtggctaaactaaaaggggatgaaagagaagatcttaaagttctagccactggtgtagctgctgctttagctgctcgcaagagttcttggctatctgaagaagagtntggcgggggtcac

SEQ ID NO: 338923 - DNA, 304 bp, Zea mays
  unsure (1)..(304): unsure at all n locations
ncgacccacgcgnccgncttttctctgggtccgacgccgcctcggcgtcctcttaccacgggtcgggggtcgtataagactatgaccgnggccaatgagtcacatctttnntntaccagcatctctcctacccagcatcactctcggagtacgatcgagggaggtgagatgacagtccctttgtactgaatgctttcctccgacaggccaacggcttgccgcatgatccgttttacatcggtccggaagagaaccaaggagccaattgataaattgcaaagtaccttccaccgctgggagcaaa

SEQ ID NO: 338924 - DNA, 66 bp, Zea mays
tctgcctttttaagtttcatcatgctgtcctttcttttttgttctacttgcttataaatttgtttg

SEQ ID NO: 338925 - DNA, 394 bp, Zea mays
  unsure (1)..(394): unsure at all n locations
tgtcaggctaacgtcagagagatcaagggggtctttatgaagtgctggaaccatcatcatgcaggaccgggcatgtcagactgtcatccgtaacgtgactatgaagtgctcagggacgaacaggatcatgacttcactagtataatgccancgcccagatcaaaactggccacttagatgctactggcctgcacgatagacagtttaccacgttagctgtctctgggtatgacggacttacggtcatgccctcagatacggagacaggcctgaccaaagaaaaaacgtctggagtaagcagttcatatggcacgtatatccaccagtaatacactctggaggcacactgtgctagctgagctatagctcgtaggggaggagtctcatgcatgac

SEQ ID NO: 338926 - DNA, 446 bp, Zea mays
actactctcacgcgtccttctctcctccctacccaacaccaacgtgagcctttttaccaatcggggcgctcctcaaaccccgccgccatgaccatcgcctccgtcaagtcctcctcttcctcatccgaggttccgatcgccgaccgcaccttcttcttcttcagcgaggtggcagaaggagcaatcgctacaatcatcggctacccgttcgcaaaaaattgcggcaagtgctccaatttcctttacaggataacagcttcaataaacggacctcgtcaaggttttctaccactccaactgtttgacctgtattctgaggatgccatcctacaatgagaaccctttctctccacagtgcatacattcattctgattcttaaccgtgcaccgttctctcgactgctgcttacattactacctggtcgagagagtgtattcctccttct

SEQ ID NO: 338927 - DNA, 194 bp, Zea mays
tcgactccacgcgtccggtattaactggctagaggacgcctccgggggcgccaccgctgctgagtactcttaagaccgatccgacccaaagccaaacccgattgccctcgtagtcgtttgtcatcgcgcgaccgattaccccgccgccgccgcgtctgcagcggcgatggcgtcgtcgttgtcgcgggcgctgt

SEQ ID NO: 338928 - DNA, 206 bp, Zea mays
ttttagcctcacctctatggcagcgagggcgatcgttatcaatgggttagggaggaccgcatgatctctgaccaccgtcgtgttgcagagagacaatggcgctctagctgactcgaacgttacctacatgcacatattatcaaccacgtatatactcatgcaaagcactagtcacggccagacgaagcactacgacgtcctggttt

SEQ ID NO: 338929 - DNA, 460 bp, Zea mays
actatccacgcgttcgtctacattcacgtgcaactgtcagaagcaggtttttacaccggatggaggctaacacacactcttctcttaatcccgtgttcgcctacctatccttcgtcagtgtctcgatcctccttgttgtcttcttccttttattagcctaatcttccttcatacgacataactcattatatatatacataatccattttccgtaaagcatctatttaattgattgattgtctcatattcaattattatattctcttatacatttatttaacgtattttaaatttctctttattacaataatcttatttttaattacaccaatttcctttacatttctattttataattattcttatatttctcttattctatattctttttttctttctattattatatttcctattatataattatatattcttattcttttttatatttttattttat

SEQ ID NO: 338930 - DNA, 396 bp, Zea mays
  unsure (1)..(396): unsure at all n locations
tcgactccacgcgtcctggtcaaaagcccacaacttcttctccctgctccttctattccttcgtcagccgcttctctctcttccntcctcaccttacaaaaagctagctccttcctttaccgccccttcattgctattctatcccccgccattcttttctcttctcctctccttcttctttctttctctaaacttattatcttatatttctctttttttttttttttttttttctttttttctttattcttacctcatttttatctttttttttttatcttttattttatttttcttctatttttatttttctttcttctcattatttattttctttttatcttttttatctttcaattttctttatttttctttttttattaattttcttttttt

SEQ ID NO: 338931 - DNA, 318 bp, Zea mays
ttcttgccctgaggacgttggtggcattcgcgcattttttaaaatggttacggcaaccatatctcttctcccattgattcctttttttttgtttttgctcgattcttctattacatctatttttgttgttttctaatatttttttttttttattttttctttattcaatattttcttatattttctttttttttttttttttatcttttatatttttttttttttatattttttaatttttattatcttattttttttttatttattctttcattttatttttttctttatttttattattatttttattgtttatat

SEQ ID NO: 338932 - DNA, 139 bp, Zea mays
tttttgtctacgtccactactaaaccgggtgagtatgtggaggagcacgagggctaggtaaacttccttgcttctaacccagttaacgaatgaactgatgcaacttcttgtgctcttgatattgaaaaaacttattatc

SEQ ID NO: 338933 - DNA, 176 bp, Zea mays
tttcttatacacgtccaatgagttctcgccgatttttacctagggggggggcaccaagcattcaatgtaccattccaaaccctcctactagactgcgcaaactgcacagagccaatatatccttatttgattattaacgcttgtggtcattaggaaagtatgcttgcattattctt

SEQ ID NO: 338934 - DNA, 249 bp, Zea mays
tctacccacgcgttcttgcctatacacgaacactgaccctgggcgaatttttaccacaccggcgggccacaaccttcaaaagccacttttataaccctcctaccatactacccaaactgctccaagcccttttactccatcttctcttactacgcggaggaggatgaccaaaatgacccctcaaatctcttcaacaccacatgcagttctacaaaattcacaactagtacgataaaaacaatcataaaa

SEQ ID NO: 338935 - DNA, 256 bp, Zea mays
cttatggtctcggagtggactaaaccgggagagtctttgaagacgcacggaggtgcgaaaaattgactgcactataacctgtttaacgtatgcactattcgcactcgcaacactgacaagactttgaaatctatttatattaagaagtcttctactaaattgttcacctttcgacttctatgaatatagtattgtgtcacctttttaatattttctcattttatttttgttatctttctttctattttttttttct

SEQ ID NO: 338936 - DNA, 192 bp, Zea mays
ttatcaaggccggagcaaccacttgggggggtttttttactggtcggtgagctcctccaattcaccgccggattccgaccgacaccaccaaagaagaccaaacgttcccaccccactcgtgcaactcggcgtagccatccccaggaaggtcagaaaatctctcttcgcccaccagatcagcaccttctccac

SEQ ID NO: 338937 - DNA, 252 bp, Zea mays
tcgttctagtggaggtcgaaggagttcggggggatttctagcgggcgggccagctccaagcattcaaagtagcattacaaatccgcgtactcatgggcacaaattgttccgagccaaaatatccttatttgcacagtaacgcacaacatactaaccagaggcttatagcgtaaagcctggacagcctagtgagggcgctatcttacacaactagcgagaaacgcacagtccgcattagtgtttgttaaacct

SEQ ID NO: 338938 - DNA, 315 bp, Zea mays
ctctttctcgggtagtcaaatacatacccctgtgttctttaacgggtgggggctccaaaatcttttaaccatctgatcgcttttcttctcatcctgtctctcaccatgatacctccatttgtattgttctcctatttttattatgaggtttacttataaatctgatttattttcttccattctctttctcttattttactctttatatatctttttattcttatttcttaaaatctttattttataatttatatttctttctttttttattattttattttttttatttcttcttttacctttttttttttttta

SEQ ID NO: 338939 - DNA, 218 bp, Zea mays
tctatccacgcgtttgtcatccgccgctgctgctgccgcttgcagatattttgaggtggcgtgcggactcataataccaattcttatttcaaacgtttccaagtgaaattcaacataaggctgcttgtcatgacagactacagggcttatattaggcttattaatcaatacacaaacatgctcatctcactctaaatacatattttttgtgctatcta

SEQ ID NO: 338940 - DNA, 176 bp, Zea mays
tcgattcacgcgtccgctgattcctgggccgacgcgtagtcggggcgcgtttctaacacgtgggcggactcgtacttcctcatgaaagcagtgctgatttgcagcagccatttgcactacctaaggtagatgcgcatctctcactttatttttaactagccgatgatgatcattca

SEQ ID NO: 338941 - DNA, 503 bp, Zea mays
tcgttccacgcgtccgtttttattgtgatcactatatcaataatagtaaggcttttaatggaagcagtgggttttatgatggatcctttgcttggaaagaaagtttgctttgtgcactttcctcaaagatttaatggttttgacctcctttttctattttcttccattaattgtttgctttttcgtatttataaaaaaacgttttggttgttttttattgggttatatttttttttcttaatatataaaattctcttttattattttttattaaattattcttttctttttttatattttattttattattttatatattcttgtttattctctatttttctattatttttatcttttattcatctattgccctttattttttatttttctccccattatttttaatattcttctttctctttttttatttatttatttttttctctccctttattgttttttattatatattttcttctataattatttttttattattttt

SEQ ID NO: 338942 - DNA, 81 bp, Zea mays
gtgtttttgattttatccgacaacattggtgatctcacatccttcgagaagacgcctgctactctcacgatcgatacaacg

SEQ ID NO: 338943 - DNA, 462 bp, Zea mays
  unsure (1)..(462): unsure at all n locations
tcgatctcactcgtccgctcactttctcctcgtcggtcggaataagacgcctttctagagacgcaagtagattncttcttttttccttgtatgctagctgagtgccgtacctacagtccaacaagttgatggttgaacttttctcgccttttttctttttttcctctattttaacttcggaggttagtttcttttttttagttatcttatctttctccccatatatttttttttttttcttttgcaccgttgacttttatctgcattattatttttccttgctattatctttctttgatttttttccttcttgttttctatttctcgtcttttcttttgtaatctcttaatttttatttttttttatttttttttttatttttttatttattctttattctttatttattttattttttagtttttttttttgtttttttttcatttatttttttttatatt

SEQ ID NO: 338944 - DNA, 130 bp, Zea mays
tcgactcactcgtccgttgacttctccacgcatccgtcatccaagacgggatcccgaccagccgggcatcgcctattacctcttcccgcgctccctagcgcctaagcttcatgcgctcttatttttttaa

SEQ ID NO: 338945 - DNA, 296 bp, Zea mays
tcgattcacgcgtctcgttcctgtccccctcccgagtcccgggccgtctgcctaacccacgacgagacgtctcctatccgatccaagccgccatggatttcttcaagtccatcctcgccgagcccgatccggacccggcctctccgacgcctgatcaggagcctgatccggagccggaattcgccgtatccgtcttatcctccaacttcggcgggtgcggcttttgtttcccgttcttttttgtctctttgtataattatcgttatcttttttattatatcctcatttcttttttt

SEQ ID NO: 338946 - DNA, 104 bp, Zea mays
tagtcacccacgcgtccgttcctactcgactgcttccctctctctgagagagtcttgactctagactgcgccgctacaacctgacgcgatggccttgtccgcga

SEQ ID NO: 338947 - DNA, 102 bp, Zea mays
tttaccccagccctgcttctttgccatggcgagcagcgctagccaggcgagccgcctgctccagaagcagctcaaggatcttgcgaagaaccccgggatggg

SEQ ID NO: 338948 - DNA, 142 bp, Zea mays
  unsure (1)..(142): unsure at all n locations
gtacaacccaacagacnanaanacaagaacatctctatttagccagggggaggacaaccaacttctattctatctcttatgtccttcattcgactcgattgcccgnggccccaaagggaaagtcacgagccaaccaagccat

SEQ ID NO: 338949 - DNA, 188 bp, Zea mays
tcgactccacgcgtccgtttcgaaagagaaagcagaccaacgtagcgcacccttggagaaagaggccaaaagggaggggagagtgtcgtcatggcttccattgtcgcttccaggagggccgttcctctagttcgcgctctggagaagctcatcgcagcgtcctccgctcccgggactggctccgtcct

SEQ ID NO: 338950 - DNA, 442 bp, Zea mays
tcagatctcacgcgtccgtcttcttacacggtctccctcttcctaacgatagtttattgagagtgaagcagcgagtgggagacatggggatatggggaagggtgcgcatgggagcgattcttctgctgcagtcggctaggtgtatgttaactttttgttctttcttatatcaaaaaacattattattattgtttcctttcatgcacacttttatttatattttttttttttgtcatactatttttatttcaattttatattttattttttgtcatttttttctttaattctcttaatttaactttttgtttattttattatttttttttattaatttttttataaaatttttctatttttttttttctattaattttttttatcattattttatattttaatttattatttttgtccattttattctttttttttttttatt

SEQ ID NO: 338951 - DNA, 451 bp, Zea mays
tcgactccactcgtccgttttttctttatctactccagagcgcaagagaaccctatcgacaccataagggtgttgctcgttgccctcgctctcctggctctcgctgcgagcgccaccttcacgcatacaagcggctgctgctgcttcctgccattcttctccgtttttctatcttgcttcgttcttttttttgcttcttattccttatttgttgttttctttattattcttcgttacttctactgctttttttctactttatatcttttattcctttttttattttttttgcttttctctatatttctttttttttttcttcttctagtttttttttctttttttttattattcttctttttttcttttatttttatattatttgttctttttttttgttttttatttgtttttatattttttttttcctaaatttctttatttttttttt

SEQ ID NO: 338952 - DNA, 93 bp, Zea mays
tcgtctccacgcgtccgttctttggatcagattggtttcgtaactagagagggactgaagggctcggagtgccttgatttgggactctcctcc

SEQ ID NO: 338953 - DNA, 414 bp, Zea mays
ctgacgcgtgggctcgtttcaaatccaggcatcctcgtttcctccgtcccgcagcatctcaaccccatggccaagatcaagatcgggatcaatgggttcggcaggatcggaaggctggtggccagggtggccctgcagagtgacgatgtcgagctcgtcgccgtgaacgaccccttcatcagcaccgactacatgacctacatgttcaagtacgacactgtgcacggacagtggaagcaccatgaagtcaaggtgaaggactccaaaacccttctctttggtgagaaggaggttgctgtgtttggctgcatgaaccctgaggagatcccgtggggttcggttggtgctgaatatgttgttgagtctactggtgttttcactgaccaggagaaggctgcagctcacttgaagggt

SEQ ID NO: 338954 - DNA, 192 bp, Zea mays
ctgctccttgcgatcctttctttgatgagagggcttcattatctgcgctgcagaggaggcactactgggtgatgctgtgatgtcaagatgatcaactgacctatctgccactgactgagttactgggcacatacgtccactaaaccgaggacattattatagattccaacaatgctagcgtcagcgacattg

SEQ ID NO: 338955 - DNA, 227 bp, Zea mays
cacccctcaaattttccagccgccactggctcttctcctttctcctctcacgcacaacttccttcttccctgtctcttcttcctcgcggttgcagcaaggagctcagctccttcttccctggcgcagcagcaagctccctcccatggcgcctccacctccctgcgcccagttcatctcctctgcccagcgccgtccccccctctctgtttcccttgagcccaagtgc

SEQ ID NO: 338956 - DNA, 252 bp, Zea mays
tcgacccacagcgtccggtttcatagttagtatatttccgcccctggaacaaagcttatggatgttagatgtctgtaaaaaaaaaaaaaaaaaaaaaaaaaaaaaaaaaaaaaaaaaaaaaaaaaaaaaaaaaaaaaaaaaaaaaaaaaaaaaaaaaaaaaaaaaaaaaaaaaaaaaaatttccctaaaaaaaaacaaaaaaaggggggggcccccccaatgttttaaactacatccgtgtaaaaattacaa

SEQ ID NO: 338957 - DNA, 184 bp, Zea mays
  unsure (1)..(184): unsure at all n locations
ctcgctctgaagcttgccaagttaaagcaganaactctcatgagggcaaagaggaagagagaggtcatcatcttcgtcctcacgaagatcatatcacctgttactcacactgacaataacaaataaagcatttcattttcatgaatgtttcatctatagattttctactttttctctttcctac

SEQ ID NO: 338958 - DNA, 229 bp, Zea mays
tcgactccacgcgtccgttcagaacccagcgaatccagcctggccgatgcgcatgtctcatccgggacgccgactccatcctcatccccatcgccgcggcgatggatccctccccagccccagccccagccccggctccggctccggtcccggcccctacggtggtcgagtggcccgagggcggcgcactgactcgggactgggtggcggggctggccttcactctgga

SEQ ID NO: 338959 - DNA, 428 bp, Zea mays
ctaagcccaagccgccgcaaccacgggtgcagctcgttgccgcgaggggcgatgtcttcgcggtcccgtcctccgccccgccgggccccccggcccccatagccttccgcaagcagtcccggccccgcccgataactgacgaggaccatccgatctctgcccttcctgcacagcgtccccacaaggacaaaaaggacaagatcgccaaggccatgaagcgccgcctggcggagcgcgccgcggatgccgacggtgagaggtgtagccggaccgatgtcaccgtcatagacaccagcatcgattgctggaaggccgccaaggtgctcatccgccggggagacgtctggaaagttcgtaacaagaagccttccgcggtgtctgaactggaggatgccattgctcagggcaagaggagggctggccttgtt

SEQ ID NO: 338960 - DNA, 72 bp, Zea mays
ggagaagaaacttacgaggattcccctagtaacggctagcgaaccgggagcagcccagcttgagaatcgggc

SEQ ID NO: 338961 - DNA, 383 bp, Zea mays
acccccatctacatctctcccttcattatcttcttcttcctctacaagatccttcttgtatgggacctgaccaacccgattcactcctccccataattctacaccacctccgactatctctttccctttctccgccttaacttccacttccacttatttcaaataattcgtccttaattccaacagccaattctcccttttcagctcctagtattaataacttcacctcttttaccttttcaccaatctttacaccctttctttttttttccaccataataatattctttcctttccttcttcttgacaaccatcaaatatttttcccttcttttactaaaccatattttttttaacaccctttttttttctattacaccttt

SEQ ID NO: 338962 - DNA, 210 bp, Zea mays
tcgacctcacgcgtccggttccattagctttatctactccagagcggagatgatcccgatcgacgccgtgtgggtgttgctcgttgccctcgctctcctggctctcgctgcgagcgccacctccacgcatacaagcggcggctgcggctgccatccaccgccgccggttcatcttccgtcggcggtgcatcttcctcctccggttcacct

SEQ ID NO: 338963 - DNA, 355 bp, Zea mays
tcgactccactcgtccgtctttatatctaagtcaagaaagatacaggtgcctgacgtatctggtggcatctcatatccttgaccgaacttctgaagttcttcggcaaacaacgattggcttttatggatctgattgagcccatttttcaaggaacaatgtgttcaaaggtttggattatttatatgccctatttgattttgaaatacaaaaagattgacatctttgttttcccccagtaccccctttgttctttatgtttaataggtccaaaacttgtgatcgttagtttgcctgcccaaataatgtagttgggtagcctctaagttgagataggtgcagtggcgatacatgtta

SEQ ID NO: 338964 - DNA, 113 bp, Zea mays
aaggttgaaccaagcgttcggcttcaaccttcaagggcctcaaccttcctggcggcctaactccttttgaggacgcggatccgtccggttagacaaagccgtccgcacccatg

SEQ ID NO: 338965 - DNA, 278 bp, Zea mays
atcagttttaacttctaaaatctgttatttgcatatgatgtgttcataccaggatggaagcacaggtagctttgctaactcacatgcaattccgaggttcaaaacgtttaggaaaggacctcaaactcactggtcatcgaattcatggcaaggcgtacacaatcacagaaagagtaggtttgtctaaactgtaagaaagccaatggttgttttgcatttgatgctttgttgccttagagtattctttggtatagtacgtggtgcattcatgagtcatg

SEQ ID NO: 338966 - DNA, 98 bp, Zea mays
ttaaagtcgaaccaagccttccgtccgtttttgtattctataacatgcttcgccggagtctaccacatcatcttatggagtccgagaacaaacattcg

SEQ ID NO: 338967 - DNA, 63 bp, Zea mays
ttaaaatcgacccaacccttccgaggaaatccacttcatttcgttacacctctcggtgcctcg

SEQ ID NO: 338968 - DNA, 160 bp, Zea mays
ttaaaatccaaccaatccttccgaaaattttaaaaaaaaaaaaaaaaaaaaaaggggaaataaaaaaaaagaaatgggggaaaaaacaaagtaaaaataaaaaaatttaaatcaacataataaatactaataccgatcacattaattgttgacaaaaaca

SEQ ID NO: 338969 - DNA, 431 bp, Zea mays
  unsure (1)..(431): unsure at all n locations
aggtcgccccacccgtccgggcttctcctcccccaccggttcgtgttcaggttctggttcgtgggcgagagggaagagatggcggcgtcggacgttgagtaccgttgcttcgttggcggcctcgcctgggccaccgacgaccactccctcaacaacgccttcagcacctacggcgaggtcctcgagtcgaagatcatcctggatcgggagacgcagaggtcccgcggcttcggcttcgtcaccttctccacggaggacgcgatgcgcagcgccatcgagggcatgaacggcaaggagctcgacggccgcaacatcaccgttaacgaggcccagtcccgcggcggccgtggaggcggcggtggcggatacggtggcgggcgccgtgatggaggcggctacngcggtggcggtggaggctacggcggtggtcg

SEQ ID NO: 338970 - DNA, 302 bp, Zea mays
atcgaaccacaccttccggctattttcccttaccaaaaaccactccgcgggggtttcaaacctcccagattgcttgaaacacagtcacaaccggttttcccaagagcgtatcaagagccggccctaccacttcgacgggatcccacccctgatgctcttgccagacggcgtcactaagaagagcgacgcactcgacgcagtatctcgatctgactagtacttcattcattgcctcgaagtacaacgctagtgcgatcatggaaactgacactggaccctcttatcaatcaactttgacatac

SEQ ID NO: 338971 - DNA, 426 bp, Zea mays
tcttttaaagtccaaccaacccgtccggggcttttaatcttgtccgagagtacgcgaggtcgcctccagattgatattgaccaggggtttctcccaccaactgaggtttcaatggcatttgcagggaccgtgctacagcttggcctttctggggaaaaggaatctcatgtgctgaatccccgggctccggggagggatcttgacatggactgctacgtatgactcctactaggaggcctcggtcgagggcgactcctactaccatgacgaggactactagtatgcccagagcgactacaacgagaactagctcgagctcctcaagtacggcaggcaccgggtgcgcaaccaggactgcacctaccgctgcgccttctgcctcagcaagaagaagcagggttacaagatcaaggacctgctacagca

SEQ ID NO: 338972 - DNA, 124 bp, Zea mays
acctaaccaaaaacaacttcgggggaatttcaaaccttgcagttttctttaaaatgacgcacctccaggtcttccatgcgcctgatcagaacccgaacgaccaccttgaaccggtcccacccct

SEQ ID NO: 338973 - DNA, 261 bp, Zea mays
gttgatagtgcctgattcaattaactttcggccaactttggtgtccgggatgaactttagctggatttacttgagatacttgcaaaggaacccactgactgaacttaagggtgatcccagcgatgacttctccttgaccacattattcgcatctgccatgagaccagttacagactctgtagccaacctgtttgataggatgctgtgtgcatggtctacgactaaacaagtagctctctcaatatcagattctaccaaggc

SEQ ID NO: 338974 - DNA, 52 bp, Zea mays
tcgacccacgccttccgaggaagccaaacaccttgaaggagaaaaaggtttt

SEQ ID NO: 338975 - DNA, 174 bp, Zea mays
gcggaagcagatgccgcctataggacctggtaccgaattggcacaacgcattgaattacttccttcacaccaacttagatcacacagcatctattgaccggggataaggcggcgaccatgaatacgaatcgcgtgaagatcatatgcatggatatggcaaatacagcttagaga

SEQ ID NO: 338976 - DNA, 302 bp, Zea mays
aagtcgacccacccgtccgagcggatcgagatggcggcgtcggatgttgagtaccgctgcttcgtcggcggcctcgcctgggccacggacgaccactccctccacaacgccttcagcacctacggcgaggtcctcgagtccaagatcatcctcgatcgggagacgcagaggtcccgcggcttcggcttcgtcaccttctccacggaggaggcgatgcggaacgccatcgagggcatgaacggcaaggagctggacggccgcaacatcaccgtcaacgaggcccagtcccgcggcggccgtgg

SEQ ID NO: 338977 - DNA, 407 bp, Zea mays
ttaaaggcggaccaagccgtccgcgttggttggccctgtgagctaatccgacgcggcggtcacttgagcccccgatggagttcgccgccggcgctgcggtggccccgcgcccgatgcccgccggccccggtcgaaaccgccgggtgggcggtggagcgatcggcatcggttgggcccgccgcgtgaccgggccggggctctcgctggctcccggcgttgcgagacgtgcggcctccgcgtcaggaggagcgaggccacaggcgcgtcatcgttcgctcaaccggcggcggctatctgtggttccgcgacgagggcgccgattgtgaaagtcgaggcaagcggctctactgccactccactctgcagcggtgccagcggtgatgaccacctctcggcctactgctact

SEQ ID NO: 338978 - DNA, 151 bp, Zea mays
aaagcgaaccacgccttccggccgcttgtttgtttgcttccgttccggcggggggctttatttcccgggacaggcggaagttgccaccgacccccccaaaccggggaataaaaattggaattggaagggggaaatcaataaaaagtcaaaa

SEQ ID NO: 338979 - DNA, 166 bp, Zea mays
gggtgcaacaagaaggaaaatatggggaggaagatgtggatggttcatgtgtatcaaaaaaaaaaaattgtgactgcgatgtaaatcagcccaatgcagcggacatcctttccccataatcacccattgcccgcgcagcacttgcgctgctgtcaaaacagacaca

SEQ ID NO: 338980 - DNA, 121 bp, Zea mays
aaagcgaaccaagccttcgggccggtccttccttcgattcgaacatttgggggggctcaacggggtccttcctggaggccgaaataaaacttgcccttgccgagctggctcccggcgttcc

SEQ ID NO: 338981 - DNA, 228 bp, Zea mays
gacaactccctaccgtccgagaccccaagcaccagcgcggcggcggcggcggcggcgaccatggctgtcgggaagaacaagaggatctccaagggaaagaagggtggcaagaaaaagaccgtcgaccctttctctaagaaggattggtatgacatcaaggcaccgtcggtgttcagtgtgcgcaacatcgggaagactctcgtattcaggacacagggtaccaggatt

SEQ ID NO: 338982 - DNA, 160 bp, Zea mays
ctctagccaacacacacataatactctccattccattccattccattttaaaaggtagaataatgggccggctcttcacccagcctttcgggggccctcttccgctcggttggtacacccggaccccagggcggcccgttaccattgtgtccgccaagaa

SEQ ID NO: 338983 - DNA, 469 bp, Zea mays
  unsure (1)..(469): unsure at all n locations
aagtcgacccactccttcgagctttttcacgcatgaaaccctaatgacccggtgcagatcttcgccttcggggtgcttgtccgaacccncattgggccccccgggcctgaattttttcccgggccccttccgttgcttggggctcaagacaaaccacctgtacctcctgtttcccgtttcggggcctgccccttattttcattccttggcttttccctacctcttttttttccttccttttttctgggttcctttatcctattatttcttttcctttaatttaaattttnnataatatatttttttttatttagtataatttccttttatttccatttttttttctttttttacattctttatttttatattttttctttttttattttctttattttattactaattttcttatattattattttttttttttattatgatttattcatattttttttatatttttat

SEQ ID NO: 338984 - DNA, 146 bp, Zea mays
tcttttaaagtcaaccaacccttccggccttttttacttgccgctgggtgtcatgggtggcctccttaactccgtgaagtctcttacttctatgatgatcaccctcgccgtggagtacttacaccccatactcatcgaggcggacg

SEQ ID NO: 338985 - DNA, 327 bp, Zea mays
ctatatacaccaccttctctttcgcatttttttttgaaggaaattattttcgcgcagatgtttattattcatgtgggcagaacaataaaatcttcactttcatgtatattatccatatgttgtggacatcatttacgtaaaatatcccattgtcttctatgaacttggtcattattcatccataacacatcatgtgtgcttctacttatcgaaaatacatcttccaaataacttatgaggacttaaccaagcaccattcaatcttcatttgcttctatagtttatttttgcattcttcatacataatattgcctatcaatgtatatt

SEQ ID NO: 338986 - DNA, 67 bp, Zea mays
ggcggctgatcggatgacacaacgatgcggatagggtactaatcacgtacggcctgacgatcatgtc

SEQ ID NO: 338987 - DNA, 353 bp, Zea mays
cttttattgcaacaccatgaactcccatggtgctggttcgcattcacggcttttggacctaactatccccctgttgaaggggctggtgagggggcttcacgtttcaacagtatccctgtctctcatagagagggttcaagcagcatgcctgtacagcacattcaggcttcgagtagtacaccaccggctactggtgagcctcgcattggtatgcgtagttgccccatcgatgtggaaaccatccatgatgatgccggtatgtattcttcaagaccactgtctcgagcaagacagcagttgaccacgacagaaagtattactatcataatagatgatgattccgaaacaaacct

SEQ ID NO: 338988 - DNA, 120 bp, Zea mays
ttaaaatcgaaccaacccttccggccgaattgcgcgctcttacaaccaatggttaacaacaacttgttcttcaaggggcgcgttcaaggtggacccgaattcccaacaacattgcggggg

SEQ ID NO: 338989 - DNA, 323 bp, Zea mays
ctttttctcagctgatgactgagactgaggcaaaagctgagaaacagggggaagtgccgaacgaaacccaatgcatcagatacgtgcggtcgccgaccacaaactccgaggacaacattgcctcttgcttggttgcatcaacacctctatcatcttccccttcacgctccccactatcaacccttatgatatcatcatgcacatgagggcacatgctatttctctaacccttgctcactacctaaggtatatatgcatcgagcactatgaccagaagtatcctatttttatcccacacgagtacacatacacaagccaatacc

SEQ ID NO: 338990 - DNA, 110 bp, Zea mays
tcgcgctttcgcagccgcgattactcacgcggggcaaccttagggcaccccagttttcattatagatgtgctttttatcgctgggcataagcagactaatagtctgaata

SEQ ID NO: 338991 - DNA, 218 bp, Zea mays
  unsure (1)..(218): unsure at all n locations
aagtcgactctctcgtccgantttacagaaaaaaaaaaaaataatctgctaattatctaacatataccgggcgccacaacaacgaaacaaacatnctgaccacactcaaaaatataaaatgttcatcaaagacaaaagatagattctgcacaatatcaaaaaataaaaacatgtgctaacaaatatacccctgcgccactctacttctaaattctcct

SEQ ID NO: 338992 - DNA, 403 bp, Zea mays
gggacgctatggcagcaagccctccagatgtaatctgctgttgtgaggtgcttgagagggcactgaagctcctgcaggaggatggcgcaagcaatcttgcacctgaactgctttcacagattgatgaaactttggaggagattacacctcgttgtgtattggagcttcttgctcttcctactgatgaaaaacataaaaataaacgccaagaaggtctgcaaggtgcaaaaaacatattgtggagtgttggcaggggtggtattgctactgttggaggaggattttctcgtgaggccttcatgaatgaggctttcttgcagatgacatcagctgagcagatggatttcttctctaaaacaccgaatagcataccacctgaatggtttgagatctatagtgtcgc

SEQ ID NO: 338993 - DNA, 392 bp, Zea mays
cttcgtactcgcctacctccgcggctcaaacctttcccccttctcccaattcccgccgccgctccatcccgtaacgcgacaccatgagggagtgcatttcgatccacatcggccaggccggtatccaggtcggaaacgcgtgctgggagctgtactgccttgagcatggcattcaggctgacggtcagatgcccggtgacaagaccattgggggaggtgatgatgctttcaacaccttcttcagtgagactggtgctgggaagcacgtgccccgtgctgtttttgttgaccttgaacccactgtcatcgatgaggtgagaactggcacctaccgccagctcttccaccctgagcagctcatcagtgggaaggaggatgcagccaacaacttt

SEQ ID NO: 338994 - DNA, 152 bp, Zea mays
aacttacccaccaagggagaaagaggccaaaaggaagggaagagtgtcgaattgctttcaattgtcgtttcaagaaggcccgttcttttatttcgccttttgaaaaacttaatcgaaccgtcttccgttcccggaattggttccgccttaag

SEQ ID NO: 338995 - DNA, 426 bp, Zea mays
tcttttaaagccaacccacccgtccgggagaccaactagcaacatagaaagcacaatagtgtaccaacaatggcagccaaaatattttgcttccttatgctccttggtctttctgcaagtgttgctaccgcaaccattttcccacaatgctcacaagctcctatagcttcccttcttcccccatacctctcaccagcggtgtcttcaatgtgtgaaaacccaattgttcaaccctacaggatccaacaggcaatcgcaacaggcatcttaccattatcacccttgttcctccaacaaccgtcagccctattacagcagttacctttggtccatttggtggcacaaaacatcaaggcacaacaactacaacaacttgtgctagcaaaccttgctgcatactctcagcaacatcagtttcttccattc

SEQ ID NO: 338996 - DNA, 317 bp, Zea mays
cgcaatcaactacctaagctatccacaagcacccatgtaagtgcacgcagagaggggctgcgaccaaacaaatccaatccaatggctgatggcaccggtgcgcatcatgcgtcaggatctgtccccagacgctcagcagggtcaaccgtcgggcccagttccgctgctggtaccggtacaagctacgctgcatcgattgcggcgaatgaagcaaactggacaccgcccatgctcacatgctctgcatatgccaactacataaatgccctggtaccggaccaagatgacgctccaatgatgcacttcgtgagggtgat

SEQ ID NO: 338997 - DNA, 62 bp, Zea mays
tcgacccacaccttcgcctttttgaacttctggagagccccagaagaaggggattgtcttct

SEQ ID NO: 338998 - DNA, 276 bp, Zea mays
tcgacccacgcctccgacgacttggaccaacgcgtgggccgtgttcgtttgccttgatccatgggcgggaaaagatccaattcaatcaacttcaacgtccggggccaatcaaagtttccggcggcaaagcaggaaggcggaagcgaaaggaatgttgcacctttaagtaccgcggcgacctggtgtttcttcctggccggcgatgggctgcttcccgtccttcgactccccggcagatgagcagcttaaccccaaattcgtggcgccgggggtacg

SEQ ID NO: 338999 - DNA, 75 bp, Zea mays
aaagtggaccaacgcttctgaacgcttacaaccggcggttgcggctgccagcgaccgccgccggttcatctaccg

SEQ ID NO: 339000 - DNA, 252 bp, Zea mays
cttaaaatccaaccaacccttccggaaaattttggaaggaagccattttaatttcctggtcatccatgtacacctgaacatctacaggtccttgtcaaagcagttccaattaaacaaggcacacttgaaaattatttcaatcatccaaaccgtgtacaaaaggcttgagcataccattatgtctaagaaagatttttactactaaatgatgcttattgagcggaagatgaatattatcttgggatactaaat

SEQ ID NO: 339001 - DNA, 211 bp, Zea mays
tagtcgaccctttcttccggtgatgttaacactaaccgacaccccagcgcagctttcattcctcgaggaggcgccccttcttgtaccatccctgccctcatattcttcttgtacactaaaacccccatctatctcccttccctctatgcctaacttgtacacttaaccgatcaaattgataactcattttctcatgatgacatcaaagtct

SEQ ID NO: 339002 - DNA, 88 bp, Zea mays
gtccccgcggacctcactcgcatgggcctctccgagatcgtcaacagcctcctcgcagccgcccgaggccgggaccaccaagtcgcca

SEQ ID NO: 339003 - DNA, 228 bp, Zea mays
gggggagtacaagggaataggggcagttggacatgcgcggaaacgaggataaggactggccccacttcgttgaggcgttggagccatactccgtcaccgccttcttcaccggtagctgtaactccatcgccatagtgaactacggcgcgttgtctacatggggatggacccaacgctggaggctcgggcacccgccggataccaagacggagagctccccgggccccg

SEQ ID NO: 339004 - DNA, 396 bp, Zea mays
  unsure (1)..(396): unsure at all n locations
agcgttcccccttctcccatccttctctgagttctaaccaccgncggcgctaccccctttcgacaacaccatgagggagtgcatctcgatccacatcggccaggccggtatccaggtcggaaacgcgtgctgggagctgtactgcctcgagcatggcattcaggctgatggtcagatgcccggtgacaagaccattgggggaggtgatgatgctttcaacaccttcttcagtgagactggcgctgggaagcacgtcccccgtgctgtttttgttgaccttgagcccactgtcatcgatgaggtgaggactggcacctatcgccagctcttccatcctgagcagctcatcagtggcaaggaggatgcagccaacaaccttcgctcgtggtcactaca

SEQ ID NO: 339005 - DNA, 77 bp, Zea mays
ttaaaatcgacccacgccttccggccaaaacattgggaacacaaaaagggcgcgccttaaaggcctttttttttggg

SEQ ID NO: 339006 - DNA, 358 bp, Zea mays
caaagtctcagccaccccagtatactcctccggatccgtgttccatcacggctacaaaaatactccgcctgcatctccaaagcacacggctccctctggtttcccgcctcctcttcacctccttcgcgtcccgacgctccctcatggccgccgctgccgcagcagcagcagcagtttcctccccgattgctccacgcgctgtggccgccgcggcctcccgccgggggttcgtcacgtttggtggaggcgccgcccgctcctcgcccacgctgcggtccggccgcgggttctctggtgtgcaaacccatgttgccgctgttgaacaagcagttgtaaaagatgctacgaagctggaagc

SEQ ID NO: 339007 - DNA, 361 bp, Zea mays
cgcaggccgcatccgcgccggggtcagggcgggcttcgctcgccagctccgctgcctgctccatcgatctcgtcaacagcttccgcatcggcggcagcggagacgggggcggggacctccgcttcctgtgcgagaacctcggcctctccggccccgacgacttcgccatcccgctggccgactgggaggcacacaaggccgctcgatcatccgcctccgcttcagctcccccaaccccgcacgccccaactacgactcccctcaccgccctcagcgggactcaccgctctctcaggtgggtgccgaggagcccgcccaggcttcggacgccgagacggagctaccggccgcaaccggaaag

SEQ ID NO: 339008 - DNA, 201 bp, Zea mays
tagtcgacccactcttccgtaatttttttttacaaaaaaaaaaacaatacggggcatttttttataaaaaaaggggcatataaaaaaaccgtcttccacccctttcaatttccatttctcctaccctatttcctttctatcatttgcccctccccccttaatttctctccctttccctttattcttcccaactttcccttt

SEQ ID NO: 339009 - DNA, 384 bp, Zea mays
catcgatctcgtttcaaatccatccatcctcgtttcctccgtcccgcagcatctcaaccccatggccaagatcaagatcgggatcaatgggttcggcaggatcggaaggctggtggccagggtggccctgcagagtgacgatgtcgagctcgtcgccgtgaacgaccccttcatcagcaccgactacatgacctacatgttcaagtacgacactgtgcacggacagtggaagcaccatgaagtcaaggtgaaggactccaaaacccttctctttggtgagaaggaggttgctgtgtttggctgcaggaaccctgaggagatcccgtgggggtcggttggtgctgaaatatgttgtgagtctactggtgtttcactgaccaggag

SEQ ID NO: 339010 - DNA, 218 bp, Zea mays
gaacgctgaaacgcagcagctgctgggtatcgtactgctcgaacgaataccctggcatgtatggatgaacgcatgatggcgcaccgtgcggatggtaagctgtctgaacccaacgccaggtgcgagctcaacctgagcaggtgatagcggtgtcacgatacggaacatgaactggctgcgtactgcctctgggctcgcgacttgtgtgggcttcatct

SEQ ID NO: 339011 - DNA, 110 bp, Zea mays
gcgacgcgcttgcgcacgaagccgcccggccacggaacgctagaagcgcccgtcagttggcttcagttcgaagccgcgcccacttcgctagggttctagcccacacgcaa

SEQ ID NO: 339012 - DNA, 300 bp, Zea mays
gcgctggggaaagcgaacagcttgattcacagttgtgaatgtccgagtgaggcgtgcttaatgggctcaatgaacctgagctggataatatagcacggaacattcatgagctggagaggggacgcatagatgaagggaactcgactcaagttagcgaccaatcagagctgaacgacaacttgtgatccgagctcttaggggaagactttggagacacggcaagacagccatgagttggaaggaagaactgaagacgagaatgacctcgctcaacaactggggtatctgagttgtaacagc

SEQ ID NO: 339013 - DNA, 369 bp, Zea mays
cttaaaatccacccaacccttccattattcctgaaaaccaacattttcttttaacggtccaattcctgccaaaaggagggaccggttgcctttcctgattttccttaggcggctttgctatttggtgaattggggaacctcctaatccaggcttgttgcctacaattaattccttggttgacgttttgccaaaattggttggtattgggcacgataatttctggaaataaactttaaacagcccttagtattcttttaatattaaaaaaagccagccccttctcgtcagggttgaaatggttgcagttttgatgcttttgtagtgttttaatagctcaaaaaaaaaaaaaaaaaaaaaaggccggccgc

SEQ ID NO: 339014 - DNA, 180 bp, Zea mays
ttaaagtcgaaccaagccttcggacaacttctccccttccttttaagggaaagaaggcaccaaacccccaaatgaggcgtgctaccgttaccaaggaaatggaccggccggccccggtatggagctccaacacttcaagggtcaacctatttccgtggcggaaacccaagggcccagccc

SEQ ID NO: 339015 - DNA, 306 bp, Zea mays
gtcttttctgctctcacccccttgcaggcagcgattgtacaccgatcgagcgggtgcgtgctgcatggaaactgccgacgtctcccacgcacaagccggccgccatatcatgctggcccgagacaagggctagtagagcctgcacacagctcaactagggcctagacaatcgctgttccacggcaggaagcgacacactggtgctcgtacacgcccagacgccgagcccatgctacgccgccatggacagagcaaggaacatgatgacctcaaacgtgctggcaagagactagaggcacgcctact

SEQ ID NO: 339016 - DNA, 433 bp, Zea mays
ttccacccttccgtaaccttgcttcctttatagtcaacccacccttccgaaattttatttttaaaaaaaaaaaaaaaaaggggggggttttttataaaaaaaagggagaataaaaaaataataaaaaagggttgacattaaaaaaaatttaaggcccggccccccaaagggtctccctcccccttttttccgcccatttcctttccgcttaccaagttttttaaattttgcctttttaaagctcttttcacttttctgtttcacttttccttccgttcacattttttcaacatcatatttccccacagcttactaaccgaaaccttcgggttttattccgtgggctccttgtgattatttctaattcccttacttccctttttctaattggcaaattttctgtcccaaaacctttaaaacctctttctttatt

SEQ ID NO: 339017 - DNA, 304 bp, Zea mays
agagtagacccacgcgtcggacacttgttagcctatatacaaagccccctggggggttttgtgtgtaaaaccgtggaaacgttacttcgcgcattgtccgccgccaccagcgtttccttggcggtcgccaacgcggtttggccggaataaatatccgttggccggccttccaacaagcacttatccatcttcgagacgctgttcggaaggaacatgctgcgggcttgcaaaatcgtcaacaagcgcggcttcaggcgcgtcaccggcccgcccagtggccgttcggtctttctggtgctggggg

SEQ ID NO: 339018 - DNA, 109 bp, Zea mays
aaggttggtttctttgggctaaggcggccctcctttgccatttatggcaccgggaagatccataccaggctcagcctcttttgctgacagcgataaatgatggacagct

SEQ ID NO: 339019 - DNA, 400 bp, Zea mays
gtcaatcgttgggatcatgcaaagacttagaggttgaacctgcgagggattgctgatgaacagatcaagccaacggagatggcgactgctctgctacaaataactgacagatcctacaccaggacaaaagctctttgtgtatcaagctctgaccagcagcgaaccgtcaaagtaactagtgaagcaatggagaaggacgtgcacaagaaagggtatacgatggtgacgacaaacgtgatgctgtagtgagatgggttatgactgcaatctaaggaagaccttgcgctgccgcagacaaaaacttgtatgaccggaagacagccttaagggatgacgtaacatatgcgttgcttacactaaagggatcctggaggatattacacaaagttataaggatacc

SEQ ID NO: 339020 - DNA, 419 bp, Zea mays
gtcgtcgcccagccacgccatggactctcgggtcgccagctacgcctcttccgacgacgacgctgatgaggctccacctgctcctcctcctgctcattcccccgccgtcgccacttcctccggtggcggcgcaggcgggtttttctcctcgctcccgcaacccaagtccgcccccgcaccgctcttctcctccctcccggcgcccaaatccacccccacgccgctcttctcctctctctcggcgcccaaatcctcccccgcccctaaccccaccttctcctctatcccgccgcccaagtcttccggaggaaaccctaagcgcgtcgtccagtatcgcccgcagccgattcggcagcccacaggcgacagctccgacgacgacgaggacgatcccaagaaccgccgcgcgagcaacagcg

SEQ ID NO: 339021 - DNA, 368 bp, Zea mays
gtcccttactgtttagtattaattatgaatgaatttgtttgggacggttgaaaaaaaaaaaaaaaaaaaaaaaaaaaaaaaaaaaaaaaaaaaaaaaaaaaaaaaaaaaaaaaaaaaaaaaaaaaaaaaaaaaaaaaaaaaaaaaaaaaaaaaaaaaaaaaaaaaaaaaaaaaaaaaaaaaaaaataaggggggggccccccccaaaaaatcagaccgagactctggagggaaaaaaatttttctaaaaggagagcttaaaaaaactggcaaaaaaaaagcaaaaaaactttccgtgggaaaaaattttttccctaaaaaataccaaaaaaaaataagccgaaaaaaaaaaatgtaaaaccccggggg

SEQ ID NO: 339022 - DNA, 275 bp, Zea mays
ttgggtcttcagaccattagctttatctactccggagcgcaaaaaaacccgatcgacaccatgagggtgttgctcgttgccctcgctctcctggctctcgttgcgagcgccacctccacgcatacaagcggcggctgcggctgccagccaccgccgccggttcatctaccgccgccggtgcatctgccacctccggttcacctgccacctccggtgcatctcccaccgccggtcacctgccgccgccgtccacctgccaccgccgtccatgtgcc

SEQ ID NO: 339023 - DNA, 133 bp, Zea mays
ggctatttttctctgcggcccgtatcctatagcggctcgatccactgcaccgagctagcgatatacgactgttgctgccgaagtatctgctgatggtgcttgctcaatcctgaatcgacacattcggccttat

SEQ ID NO: 339024 - DNA, 414 bp, Zea mays
atctattaccgcacccaagccacgggggggggtcctgccaccgaggccagggcgaccgagccattcacggaccacggccacctcaaccatctgttgcacctgtccctgttcatcgcatcaggggggctatctgtccacttctcctcgccggagccgtaccttcaggaggcccgcacgcgcctgcacggatggggacccaacccacaaaactgagactacgcgcgctggacagacctgtgcaacactgctagtccagagaacaatactgaatgttgacggcgcacatgctgaccttgatcaagggcttatgcaccagctcgcggtcattgctagacgtgctactggcagatctggatgtgtaggaccgtcaaatcatcatgctgtactaccgcatggcaaccttcgaggtagtcg

SEQ ID NO: 339025 - DNA, 418 bp, Zea mays
ctttcttccttctcactccatccccgtcgggtctctcccagtcgctttgcgtcgtcatggcgccgatcgagtgcactatgcacgtcggcgccgtgaaagtcggcgtgggcgcctccgtggccgccgacgaagacgacgctcgccaagcgcgggttgacgaccacttgggtttcgaggtgcctgccgtacgtgcaggacgacggcaggcgtatcactcaccggcacacactcccgtgcacgctaaatgcagtagccggtgccatctcggggctctgggtgttcgcgcagggagaggcgaccaccgcggcggcatcatcttcttctcatagtttggttgcaaggccatagcttttgccctctgcttttttagtgtggttgtctattatctgggatgcagtaagatttgataagaaagggg

SEQ ID NO: 339026 - DNA, 402 bp, Zea mays
  unsure (1)..(402): unsure at all n locations
caggcgtcttcgtactcgcctatctccgcgacccaaagcgttcccccttctcccattcttctctcatttctcaccaccgccgccgctaccccctttcgacaacaccatgagggagtgcatctcgatccacatcggccaggccggtatccaggtcggaaacgcgtgctgggagctgtactgcctcgagcatggcattcaggctgatggtcagatgcccggtgacaagaccattgggggaggtgatgatgctttcaacaccttcttcagtgagactggcgctgggaagcacgtcccccgtgctgtttttgttgaccttgagcccactgtcatcgatgaggtgaggactggcacctatcgccagctcttncatcctgagcagctcatcagtggccaggaggatgc

SEQ ID NO: 339027 - DNA, 150 bp, Zea mays
cccgtccaccgtccatccgtattcccgtcacgcccccaacacccccacaacccgaagcagcgaaagctcccctaacccttttcgggcattcgatcgcaaggaaaaaaagggagattagcttcttcgggcaggaaccccccgttggggttc

SEQ ID NO: 339028 - DNA, 417 bp, Zea mays
gggacgacgacgtcgaccagcgcgccgagctcttcatcgccaacttctacaggcagctgcggatggagcgccaggtctcgctgcagctgcggtacgtcagggggaacagctgggacaggacccctggcgcaactccttctcctgcttcttccaggggatgatccgtagattgcgtagcgaaataagaatttgcaaggtagagatcctttcctttcagagcgcgcggtgacgcgatttagatgggtatcctcttttttttttcctccatcgtttctgcacattcttttttttttgggtgctgaatagtactgtacagtttatgatttgcttggactcatgatcgagagtgtaataaatacaaaaaaaaagagagagagattgggattacagtctgtaaaaaaaaaaaaaaaagggcgg

SEQ ID NO: 339029 - DNA, 221 bp, Zea mays
cggagtcatgcttcttgagctaattactgggcggcgaccaattgacacaacccaattggcactgcttgttataagcacatatgtacttccatttgcatgttgtataatactaataccaattgcaaaattatagttattttttctacccttgttagttaaaaaaaaaaaaaaaaaaaaaaaaaaaaaaaaaaaaaaaaaaaaaaataaaagggggcggccgc

SEQ ID NO: 339030 - DNA, 251 bp, Zea mays
tcgatccattcgtccttttgtcttctcctccccctccggggggggggcgggttcgtgaggttcggcggggttcagtttcgtgggtgagcggatcgagatggcggcgtcggatgttgagtaccgctgcttcgtcggcggcctcgcctgggccacggacgaccactccctacacaacgccttcagcacctacggcgaggtcctagagtccaagatcataatatatcgggagactcactaggccctttgcattc

SEQ ID NO: 339031 - DNA, 321 bp, Zea mays
ctagctctctctctctctctctcaagtgggagggggagcgagatatatacatctgaatccagcagcagcaggtagcatagagcatatatagcatagatatggcggcggaggtggaggctgccaaggacatcgccgaggagaaggccgtcgtgccgttgccaccgtcgcccgccaagccggccgacgacgactccaaagccatcgtcgctcttgtcaaggacgctgctgctgggaaaccttctacagctattattggaggctcaactgaaagagatgcttacctcgccaagatcgtgtccgagaaaaggctgagtctgatca

SEQ ID NO: 339032 - DNA, 338 bp, Zea mays
ctccaccttgtgctccgcctcaggggaggcgtgcggatctttgtgaaaaccctgaccggcaagactatcaccctcgaggtggagtcctctgacaccattgacaacgtcaaggccaagatccaggacaaggagggcatccctccagaccagcagcggctcatctttgctgggaagcagcttgaggacgggcgcacgcttgccgactacaacatccagaaggagagcaccctccacttggtgctgcgcctcaagggaggcatgcagatcttcgtgaagaccctgaccggcaaaactatcaccctcgaggtggagtcttcagacaccatcgacaacgtcaa

SEQ ID NO: 339033 - DNA, 167 bp, Zea mays
tcttcttagagcacgagctcaccaccgcgagggcagagtgatctcactccaccgacacgaacatctctaaccacacctagccgaccgctacatacattgccccgctgctccccttgttccttaaaaaagccatcatagcttcactacttagtaacgccctttaaatc

SEQ ID NO: 339034 - DNA, 293 bp, Zea mays
tcccatccacccgtacctaagcttctatcctatatactcaacccactcgttctactaccacccgaaaattcatgagcgtgggggtttaatttgtcatcattctcactccattatcttcaaagcaaccgggtaatcataccatgctcttcttagacctatctctccaaatatatctcatatggcataaatagaacgacacacacccccataagtaagctcgattgtcaactcttgcacctaccataataaacaacttcaatatcacacatcttttcataacataaccaccataa

SEQ ID NO: 339035 - DNA, 350 bp, Zea mays
tttctttctctgcctgttgccgttaccggggctgatttctccacttccgttttccatgtgaccccgccgggccaccatcaccggaggtggccaagtctgttgcagccccgccgccacctgaggtggcctatccgacgccgcccacttgccctcgcactcctacgcgtgtcatcagccgcgcccgcgcgccgtcgtgccaccaccatgatgccgtcgccatcgaattgtcctcgcccggcgccaccattccgccctcattaggactgcgcctcaccctcatctcacaccccagttcctccctcgagaagaacgccgccaactgtctagtaaactgtgactccgtcctcgat

SEQ ID NO: 339036 - DNA, 65 bp, Zea mays
ggcgtctgcacaaacgccctgcacaaacggtggcccgaacccgacagatctttaatttcccattc

SEQ ID NO: 339037 - DNA, 345 bp, Zea mays
tagctttatctactccagagcgcagaaggggccggtcgacaccatgagggtgttgctcgttgccctcgctctcctggctctcgctgcgagcgccacctccacgcatacaagcggcggctgcggctgccagccaccgccgccggttcatctaccgccgccggtgcatctgccacctccggttcacctgccacctccggtgcatctcccaccgccggtccacctgccgccgccggtccacctgccaccgccggtccatgtgccgccgccggttcatctgccgccgccaccatgccactaccctactcaaccgccccggcctcagcctcatccccagccacacccatg

SEQ ID NO: 339038 - DNA, 372 bp, Zea mays
cgcaacttcacagcgtatcatcggggtcgggcgctcctactcctatcatccagaaaatctgagcggtattgatggcgcccaaggcggagaagaagccggcggcgaagaaggtggcggaggaggagccctcggagaaggcggctccggcggagaaggcccccgcggggaagaagcccaaggcggagaagcggctacctgcgggcaagtccgccggcaaggagggcggcgacaagaagggtaggaagaaggcgaagaagagcgtggagacctacaagatctacatcttcaaggtcctgaagcaggtgcaccccgacatcggcatctcctccaaggccatgtccatcatgaactccttcatcaacgacatcttcg

SEQ ID NO: 339039 - DNA, 194 bp, Zea mays
gtcgccgtcgctctgccctcgtatcccggcccacgacacccagacaccaagatgaccgggccaaccccggaggagcttgccacccaaaacgagccgcaaaagcttgaggggccaaaaaaccaagccaaagaaatttttgttgaagaataagaagaagaaaaataagaccattaccattattacaagggtgatga

SEQ ID NO: 339040 - DNA, 383 bp, Zea mays
gaaaaaagtaacaaagaaaacgaacaaggggtgggcagtgagacgaaaaaagaagaggaaagagcataaaaaacgaaaagataataggagaagaaaataaaaaaaaaaaaaaaaaaaataaaaacgaaaaaatacaaaaataaagaagagcaatgaatatagtagaagataattaaaaggaaaaggagaaagaaaaaaaaaagaagcaaaaaaagaaaaaagtgataaaaatgagaaaaaaaatacaggagaaaaaaaaaggacaaaaggtaagagaaggagagattgaagagaaaagaacaaaaagcagacacaaaagagggcaaaaaaaaggagatgaaagaagcttataaaaaaaagacaccaaatataaaaaaaaaaca

SEQ ID NO: 339041 - DNA, 63 bp, Zea mays
ttccacgcgtccgaaaaaaaaaaaaggggggggaaaaaaaaaaaaaaaaaaaggggcggccgc

SEQ ID NO: 339042 - DNA, 357 bp, Zea mays
  unsure (1)..(357): unsure at all n locations
cacggacggaaacccctcaaccagtcgagcccgaccccctcgaggcctcgacccgacccgacccgcctccaactccaagccaagccgccatggcggctccgcccgcgaccaccgccacgactcaccaccgcgcgctccttccgcccacgcgcacccacgccgncgttacgcactccgcactccgcctcccgctccgcgcgcattcccacgcccacgcccagcgcgcgcgcctcaccgncgtcgttgncccggcccccgcggcgtcgacggcctccctcgagtcctccgccgtggggaagcctacggtgctcgtggccgagaagctcggcgccgcggggcttgcgctgctgcgggaat

SEQ ID NO: 339043 - DNA, 273 bp, Zea mays
gatcgctaccttgtgtcaacagtggacgtgccagatcaaaaaccattagaaaacctccgtacaattccatctatcaataacatgacgaacataacacatcaatgcatggatttataccaattctcataaggtaaattacactttgcacatatgcatacatgacaccctcaaatacctatcaaattatacaagtctacagtattctaaatcaacaaccactctctataagtgccaaaactattattcgttgacaaatgcaactctcacgaataa

SEQ ID NO: 339044 - DNA, 368 bp, Zea mays
cgctgggccaccagctttgaccgccgcctgcctggccctccgctactgctcctcctcaccccactcccccgcaggagcggcggcggcggcggcgaggtcgtaccccacatcggcgagcggcggcggcaccgccggaggcaaaggcaagatgttcgggcgcgcgccgaagaagagcgacaacaccaagtactacgagatcctcggggtgcccaagtcggcgtcccaggacgatctcaagaaggcctaccgcaaggctgctatcaagaaccaccccgacaagggcggtgaccccgagaagttcaaggagctcgcacaagcctatgaggttttgagtgatccagagaaacgtgagatttatgatcagtatg

SEQ ID NO: 339045 - DNA, 69 bp, Zea mays
tcggacgcgtgggaaaaaaaaaaaaaaagggcggggggtaaaaaaaaaaaaaaaaaaaagggcggccgc

SEQ ID NO: 339046 - DNA, 270 bp, Zea mays
  unsure (1)..(270): unsure at all n locations
tagtnacccactcgttctctcaaataccccttcaaaacactttttgtttcattattaacaaatttgcttcccaagtcacaaaaaaaatttgttctttcgtcaacacaaaccatttttgtatttaacccgaaagcggccttggttaaaatcattttttctatccttgttctaaagaagaaacaacatttttctgtacaaattcaccttcaaggaattcaccacattgtccctttttttcaaaaaaaaacttccctctggaattaaccaacc

SEQ ID NO: 339047 - DNA, 138 bp, Zea mays
gttaatatctcccctcccttccctcttcgggtctccgccccgctccttgcctccgatccccaattcctccttcggatctcgcattcagcgcaacgcaagtgtgaaagaaaggggacgcggaagaaagatgggctcgcg

SEQ ID NO: 339048 - DNA, 79 bp, Zea mays
tgaaaaggtgtctctcttccttctgtttgaagtgcgatccctccatcaacaatttcatcaagacacaatatgaaaaaga

SEQ ID NO: 339049 - DNA, 299 bp, Zea mays
accttagcttctctcctatagacccaccccacccttactaggagactctctttcttctatttcgggttgcgtgccttcattaacaattttgtcactacacaatatctaaagaaatagctgtaaaagtgtctgctctccgatcggaaggcgcttcattggcttaacacactctatttaatgccctaacacttgcgacaaaccatctggcgaaggctatactcatgtgacgttgtgctttatatttttggcgtgacgaccgacgatctattattgtgtctcgatgacacaattcttttttt

SEQ ID NO: 339050 - DNA, 348 bp, Zea mays
ggaaaaatatccccaaaccctagctccggatctcgatggcgaaccctcgcgtcttcttcgacatgaccgtcggcggcgccccggcgggccggatcgtgatggagctgtacgccaacgaggtgcccaagaccgcggagaacttccgcgcgctgtgcacgggcgagaaaggcgtgggcaagtccgggaagccgctccactacaagggctccaccttccaccgcgtcatccccgagttcatgtgccagggcggcgacttcacccgcggcaacggcaccggcggcgagtccatctacggcgagaagttccccgacgagaagttcgtgcgcaagcacaccgcccccggtgtgc

SEQ ID NO: 339051 - DNA, 377 bp, Zea mays
gcaaagcggcagtgcgtagagaggatcgtcgaacagaacagcatgaagatggtcatcgttctcgtcgtgtgcctggctctgtcagctgccagcgcctctgcaatgcagatgccctgcccctgcgcggggctgcagggcttgtacggcgctggcgccggcctgacgacgatgatgggcgccggcgggctgtacccctacgcggagtacctgaggcagccgcagtgcagcccgctggcggcggcgccctactacgccgggtgtgggcagacgagcgccatgtaccagccgctccggcaacagtgctgccagcagcagatgaggatgatggacgtgcagtccgtcgcgcagcagctgcagatgatgatgcagcttgagcg

SEQ ID NO: 339052 - DNA, 379 bp, Zea mays
attagctttatctactccagagcgcagaagaacccgatcgacaccatgagggtgttgctcgttgccctcgctctcctggctctcgctgcgagcgccacctccacgcatacaagcggcggctgcggctgccagccaccgccgccggttcatctaccgccgccggtgcatctgccacctccggttcacctgccacctccggtgcatctcccaccgccggtccacctgccgccgccggtccacctgccaccgccggtccatgtgccgccgccggttcatctgccgccgccaccatgccactaccctactcaaccgccccggcctcagcctcatccccagccacacccatgcccgtgccaacagccgcatccaagcccgtgcc

SEQ ID NO: 339053 - DNA, 372 bp, Zea mays
gttcggagcgcacacacacacaaccagatctcccccaaatccacccgtcggcacctccgcttcaagatgcagatctttgtgaaaaccctgaccggcaagactatcaccctcgaggtggagtcgtctgacaccattgacaacgttaaggccaagatccaggacaaggagggcatccccccagaccagcagcggctcatcttcgctggcaaacagcttgaggacgggcgcacgcttgctgactacaacatccagaaggagagcaccctccaccttgtgctccgcctcaggggaggcatgcagatctttgtgaaaaccctgaccggcaagactatcaccctcgaggtggagtcctctgacaccattgacaacgtc

SEQ ID NO: 339054 - DNA, 133 bp, Zea mays
ctcatctgcgtacacggtctccctcttcctgtcagtagtagagtgagagtgaggcagcgagtgggagacaaggggaaatggggaagggagccgcagggagcgatgcggcggcggcgggcggcgaagtggaaga

SEQ ID NO: 339055 - DNA, 303 bp, Zea mays
cgtggtactatacacaaagagagggagctcgtacatgtccttctgattccttttgtggatcgagggagtggccaaccggagataatatagctagccaggctcgccatgcctcgacagaggacactaggctacgcggaagctggcggccggcttctgctcgaggaggtggccgtccttatgcgtctgttcgtgcctgccgggcgcgcggaaaccccaggtcgcgaggtcaccgagttgccttggttcacggacaaacttcactccaagcactactcacggtacttaacagttgtggacatgagc

SEQ ID NO: 339056 - DNA, 359 bp, Zea mays
gtcacgaagggcacgccgaatgcgcacggcaactgtggcacggagaccggattcctcacgcctgctggcgtcgatctcctacggaggctgcttctcaccgcttatccctgcaccagttcgagttggagaagacgaacttccaccgtcttgggaccctatatcctctcctttagttaccatgcttggaagggggtctccaagattaaacatgcttgcaagggggtctcctagatttaacatgctcttatctaaaggtgcacaaaagaaaaaatctactatagctactgcttcaaagacacatggaggctctccaaaagggaaaacaagagcaaattggaattctatgttaaagaagaccc

SEQ ID NO: 339057 - DNA, 326 bp, Zea mays
gtttgaaatgccgaaagacagccgatccgtgttgccgaaagcgcgaaactagtcttctctcctgctggcggcgtgcggaaggtcatacgccgagtcgacaagaagacatgacatgagcggcggtgctgtgttacgctctgatcgcgctgggccctgcctgtttcctcttctccggcgtccacgtcaggaagaccttgctcaggctcaccctgctctctagcaccttatttcggcttataaatttgatagttctctcggtaatatggagaggatgtcattctataaagtcacgagctcggtgggcatatgagattatgatccttaca

SEQ ID NO: 339058 - DNA, 301 bp, Zea mays
tacacgtggggcttgtccgagactcctcgagagacgctggcgcaagcagatatgatgcagtgctctatgtgtaaggacaggatagatggcgatcatatggtgcttaactctatatactagataccgatagatgacgtaggcgagacactatattaagaattgcattgccacacatgctcatttgcatgccattcatggaaattggatgcagatacagatttgcacttttggtaagccgcatttggaagtgacaacatgtgcaggtgaccataatgtgatgactaaaccttaactgcatgct

SEQ ID NO: 339059 - DNA, 376 bp, Zea mays
tgcagtgcgtagagaggatcgtggaacagagcagcatgaagatggtcatcgttctcgtcgtgtgcctggctctgtcagctgccagcgcctctgcaatgcagatgccctgcccctgcgcggggctgcagggcttgtacggcgctggcgccggcctgacgacgatgatgggcgccggcgggctgtacccctacgcggagtacctgaggcagccgcagtgcagcccgctggcggcggcgccctactacgccgggtgtgggcagacgagcgccatgtaccagccgctccggcaacagtgctgccagcagcagatgaggatgatggacgtgcagtccgtcgcgcagcagctgcagatgatgatgcagcttgagcgtgccgc

SEQ ID NO: 339060 - DNA, 371 bp, Zea mays
acgggctgtttatacctgagacaccacatgagctgggaacctgacgcgctgaacgacagcatgacattccggagccactggacaagctcgacgccgtatgcaaggtatcctgacatgttgcatcaaagcctaatcccaatgatctcgtgcacacagcttaccttcatgtgcgctgagactccatcctgatcatggacaagaggagcgtgactattctaatatgcagcaatccggtgtggaaaatactgaagctgatctgctgactaatcttgtgcctggtcaatcttgtgaacactatcatgatgcatccctgcattctagtggtgctggtacagagcacacatcgctagatctcactcaacttgctagag

SEQ ID NO: 339061 - DNA, 336 bp, Zea mays
tccattctcagccgccgccaatcccttcccgtgctccgcaaccgctgagtgagaagaagagatggccggcaagggcgatggcccggctatcggcatcgatctcggcacgacgtactcttgcgtcggcgtgtggcagcacgaccgcgtcgagatcattgccaacgaccagggtaaccgcaccacgccctcgtacgtcgccttcaccgactccgagcgcctcatcggagatgcggccaagaaccaggtcgccatgaaccccatcaacaccgtctttgatgccaagcgtctcatcggcaggaggttcagtgatgcgtctgtccagagtgatatcaagct

SEQ ID NO: 339062 - DNA, 372 bp, Zea mays
agttaatatatgagacaataggttgcaccaaataaatagtggccaaatacaaattaatttgataacatagctcacaatcacagcatcctcgtactagcttggattgtgataacatagataataaactactcaggactagcaaattattggaagtttttttgccatcgtgcaccactccaatcgatccttcttccgttgtccctactaaacctgctgaactcataccagctgatccttctgcacctgcaccaagtagtgcaaacaacgttcgtacaccagacacaaacaataagaaagacaatatgccagcaaactatattagctcttacactctaaggaatgctgtgacaagacatgtgcaggcaaggggca

SEQ ID NO: 339063 - DNA, 299 bp, Zea mays
tttctttttttttttttttttttttttttttttttttttttttttttttttttttttttttttttttttttttttttttttttttttttttttttttttttttttttttttttttttttttttttaaaccaaaaaaaccttttttaaatgggaaaaaggggacaaaaaaaaccttccaaaatgccccggggggcgttggccaaggattttaaaaaatttcacccccaaagggcttttttgcccagggaggagttttgactataaaaaaaaaaaaaaaagaggggcggagaaattggggg

SEQ ID NO: 339064 - DNA, 352 bp, Zea mays
aaagcgaaacgagcatttttacccaattcgtacgtatccccgacaaaaatctcgggatacaacccggatcatcaccgcgctaaggcagcaagaacgcacaccggctctccctacctccgcagccgaccgaccagaccgcgtcatcgccgtccagaggcgaggcgtcttcgtcttccgcctgcaggtcctccgcgctcagcagacgatcgaagccgcgcgaaacctacggccagcaccgcaacgcatcacaccctgcggttcagccacgccacgatgtcgtccatcaccctgtccttctcgggctcgatcaggaggtcgtgcagcagcccgtggtagagcctgagggacttgt

SEQ ID NO: 339065 - DNA, 101 bp, Zea mays
accccgcaaaataatccaaatgggataggcgaatttatcaataccctaaggtttttaacagcaaaacagttcaggcgccccaaaatttgactaaagcttat

SEQ ID NO: 339066 - DNA, 110 bp, Zea mays
attaacccttttttttttttttttttttcgaccaaactttttttcggaataacaaattggcacaaaaaaaaaattatcataactggcgggcaattaaaaaaattttcttt

SEQ ID NO: 339067 - DNA, 247 bp, Zea mays
gggggaaaattccctcccccgggggggggaaaaaccaacttttttccttttttttttaaagggggcagtttgggtttaaaaaaatgaaaaaacacccctttggggggtttaaaatcggggggaaaaaacattttggccccactaatggggggtttttttttggaaccttcccctcccctttttggggggaaaaaaaaaaagggggggggaccaaatttcccataataacatttttccaatttttttt

SEQ ID NO: 339068 - DNA, 332 bp, Zea mays
tttctttttttttttaatgttgcaattgcaagcgttggttgcccgtgccactaacctgtattcacatgcggaggaaaagtgttacttacaacttaaatcacaagggcactaagaaagcatagaaacaaggtacagttatcagctgtgtcacaaagaaccaattcaacagtacatcttcatcccaccaaacaacatgacagcctaaccccccccccccaaaaaaaacaccaacacaatgtgcaggggaaggaaaaacaatggcctgcagctaattcccagcaggatcttcggtggccatgcgtctccttagcttggcgcgcgtcacacggatc

SEQ ID NO: 339069 - DNA, 390 bp, Zea mays
ttttttttttttttttttttttttttttttttttttggtttttttttttttttttttttttttttttttataatataatttaatttttaattttttattatattttttttatattttatttttttttttgaagaaaaaaaaaaaaaaatattttaggttcaaaaaaaagccggaaaaagtaaaaaaaaaatttttgtttaaaaaaaaaaaaaatttttaaaatccaaccgcacagcttggtgctaattgtaaaaaacggagggaaaaaaaaaaaatttttttttttttgcctatagttgccccccaagaaaaacagaaagccgcgaaacatttttatttttttttgggacattttttttaaattatgggaagaaagagaactttttttcc

SEQ ID NO: 339070 - DNA, 310 bp, Zea mays
gcggcccccctttttttttttttttttctaaatattttttttggggaaaattaattacccccatgcaggtgccctcaaggaaaaaactggcccgggaaattttttggataaccccccaaaatcaaggtggtgaaaaccgttcccaatttttttagaaaaacggcaggcggggggggggcattcaacaaggggatgagcccccaaaacccaaccaatcccggggattttttaccgggaaatcccccaacacacctttgagaggggggggtttatttgcccccccgggggaaagaaaaaaatttttaaaagg

SEQ ID NO: 339071 - DNA, 89 bp, Zea mays
cggacccggggggcgagccgggaattgggaaccgggacctggaggcttaccagcttcccctattgcgagtagtattaaagcttggagtt

SEQ ID NO: 339072 - DNA, 192 bp, Zea mays
  unsure (1)..(192): unsure at all n locations
aaaaaaaaaggggtttttaaaaaatttaaagggggnataaaagtttttttttttttattatttttagaaggggggtaattttttgagagaattaatttttttttggattaaaaaaaaaaggggtgttggtgtttttttgggaattttttttggatttttttttttaagaataaaaaaatttttttttttggg

SEQ ID NO: 339073 - DNA, 408 bp, Zea mays
agagccagccccctctttttttttttttttttcttcttttaatactttcgattccttttttcttttataattttccctctccctttaaataatttacttaaaatttattttttttttttttcccaaacccccggggccccccccaaaaaccccccccccaccccgaaagcgccccaaattcccctaaagaaaaaccaacaaaaacccggccaaaaaccagacaaaagggccccccggaaaaaaaagcttcccccaacaaataaccccaaacaacctccccgaaaaaaaaaaggccaaaccccggggcccccaaagagggggcaaaccaacaaaaaatgggggggccccaacgcccccttcccaaagggaaaaccccggcccccccctccatataaaaacccccccccc

SEQ ID NO: 339074 - DNA, 237 bp, Zea mays
aaaaggtcctccaatagattcttcattcaaaaatagcatgatggtctacaggtctacaaaaaaaaatatagctcaggaatgctaaaaaaacaatgggggaaaagggagggagaaaaatagcggagtggtcgagttttggagtaatctaaaacacaagtaatggccggtggtggagcactgaagctttggacgtaggccgcaatgccccacccattcattggtctgatctgaaaaatg

SEQ ID NO: 339075 - DNA, 92 bp, Zea mays
aaaaaaaaaaaattcagaaatagatttttgtttttggaaagggggggattggaactcgaaacctttttttggggcatacccttctttacccc

SEQ ID NO: 339076 - DNA, 313 bp, Zea mays
agagccagcccttttttttttttttttttttttttttttttttttttttttttttttttttttttttttttttttttttttttttttttttttttttttttttttttttttttttttttttttttttttggaaaaaaaataaaaaaaaaaaataaaaaaaaaaaaaaaaaaaaaaaaaaaaaaaaaaaaaaaaaattctttttttataaaaaaaaatgtttttaatatgagaaaaaaaaaaataagttttttaaaaaaaaaaaaaattataattttggagagggggttttaaaaaaaaattagggttttttaa

SEQ ID NO: 339077 - DNA, 268 bp, Zea mays
  unsure (1)..(268): unsure at all n locations
ttttttttttttttttttttttttttttttttttttggttttttttttttttttttttttttttttttttttttttttttttttcatttaaaaacaaaaaaagggagaaaatggggggggggggggggnggantataggggggggggaaggggggaattattaaaaaaggggggaaaaaaggaaaaaaatttgttgggggaaaaaaaaaagataaaattgaatgggggggggaaaaagggttaaaaatatttaaaaattagntttaat

SEQ ID NO: 339078 - DNA, 238 bp, Zea mays
ggggacggggggggccccccggaaaatccgaaccgggcccggggggggtaccaattttccctaaagggaggccttttaaaagggggggtaattagggcaaaaagcgtgcccgggggaaaaaaggatcccccccaaaattcccccaaaaaaacaaggggaaaaaaaaaaaggtaaaaccgggggggccaaaagaggggaccaaccaaaaatattaggggtgggccaaaaggcccctttt

SEQ ID NO: 339079 - DNA, 186 bp, Zea mays
cccacccccccctgggggggaacggggtttaaattttaaaaaaaaaaaaacccttacaaaatttaaattgggcctagggaaaaaacaaggttgggacaaacaattgggggggatgcaacaaccaaataaatgtcttctggggagaaagaaacattaaaattttcggaatacctttggaggcctgaa

SEQ ID NO: 339080 - DNA, 226 bp, Zea mays
ggggacccggggggccacccaaaaaaccggaaccaggccccgagggggtaccaattttcccaaaagggaggggaaaaaaagccgggggaaaacagggcaaaaagagtccccggggaaaaaagtgaatccgctaaaaatcccaaaaaaaaaaaaacccggaaaaaaaaaaggaaaacccgggggggcccaaaaagggacccaacccaaataaattggggggggccca

SEQ ID NO: 339081 - DNA, 250 bp, Zea mays
  unsure (1)..(250): unsure at all n locations
atggtggtgtgggtgtattttttttttttttttttgagttttatatgtggttgttaaaagacaagaagaggggggaggaaagataaaaaataaaaaanaaaaaagaaaaagaaaaagggccgaggacgtctcattttacgaagtgagaaggtgtactcctacagctgaggggcgacagaataataggaaagctaaaacgcgccgccgaagcccaaggcgccaactacgtcgaataaaaggggcaagaggt

SEQ ID NO: 339082 - DNA, 261 bp, Zea mays
aaagcaaaatcattaggataggacatgcccccgcgggatcaaacccccagaaaagggcaagggcaaacaaaggaaacaaaactggaaacccttcgaaaaggaaacaaaagccccacccctgccgggctagcttgatagcttcctaatgtacaaaaaaatatactgcgctttgttttacaaaaaccaacaggacccaccccacccccttggaaaagccgggggcgataatcgaacacaaggggacccttgggcggttccccc

SEQ ID NO: 339083 - DNA, 208 bp, Zea mays
agaaaaatgtttaatatggggcaaaaacagatgccggaaatagttaaagcaaaaaaaaaggttaaggggaaaggaaaaggggtcctccaattgggggacaaaaaaaaaactcttttcagaaaagtgatgaagggcacccagaacgttgccggcgattggtgggaccgccgcaatttcttttggagaggcggcaggacccacgcgaacg

SEQ ID NO: 339084 - DNA, 220 bp, Zea mays
attaaacaaaagcgaactcactatctgaccaaatagcaaccatgatgcatcaagcgcaacttaaatatataccaaaattatgcacaaaacaagcacaacgggagaaaattacgcaagaaaagggttccactctgcgcgcggagctcaagacagacatgctaaaacgtcaccatccactaatgcctagctgacatgaggaacctactccacctggatctaa

SEQ ID NO: 339085 - DNA, 308 bp, Zea mays
  unsure (1)..(308): unsure at all n locations
ggtgcattaatatcataataaacaggataacatgggtatgtacatatgtactcctacgcgacaacagttatatagataatcagacaacgattatggtttgcacaagaacatttgatccgacagcacgaaatcccatggaatcatatcgtgctttctttttgtttcacaatataaaaaaaaccccgtgaacacaagtcatagtgccatgcagattgccacgcgtatcacatattcacatgacagaggtaaatgacagaggtaaatcagagaggtcaaccaccgcatccgccgncgcagccaccgtcacc

SEQ ID NO: 339086 - DNA, 331 bp, Zea mays
aaaaccgaagccttcctcaaattttatgggtcataattacaaggctccgaagtaccaaagtttaagggttctttcaacccccccgctaaaatcgataacatgggcggccaatcattttttggggggttttggatattatgaaaacgggcgggagtttttacaattttatcattaagtatggggctggacaaaaactcccatttactttttcgggccaaaaaaaatgggaacgctggccctgttttctgggaacatcaaccatcaaatgctcacccttattacttggaggctggaaactccatatgaaaggttcatccccctcaaccctggg

SEQ ID NO: 339087 - DNA, 248 bp, Zea mays
cctgtgcggtcgtctcgtgagttgttgaggccctctctcatctcttgtatagctgagggtggcgccatgccaggtgaatgcgatctattgactggtgctgatccagagcttccatcaactgacgctgcagatggtagactatgctttctcctctgcgatgtaagacagcaattaacagatgaaagggatgcactagctgacatggggctgtcctaaaaaaaaaataaaacgtctgctggacatttttt

SEQ ID NO: 339088 - DNA, 251 bp, Zea mays
aaaataaaaatgttttgtatttttaaatttttattttttagggacgcggggggggaaccggaaattccggacgggaacccggaggggccccaccttcccataaagaaagcggcaaaaaaagtgggaaaaatataaggtaaaaaatgtgcccggaaaaaaaaacttttttccccaatttgcccaaaaaaaaaaggggggggggaaaaattgcaaaaaaggggggcccaaaaaaaggaaccccttaaaattaa

SEQ ID NO: 339089 - DNA, 372 bp, Zea mays
aacagaaacgaatgtgatagatcacaactgctaattgttatcaccaatcgttacatacaatacaaggaatacctttgtatgaacaagaaagtcagtagcagcagcagcagctctagtcgccacatcaacggtttagcccagtccgagttccttcttcagattctcaagagcggcctctatttcagaaagaccatcatcaaagctgttcgttgacgtcttgtcatccttagcgctttttgcctgctgtccaaactgggtgtatgggtcatctccagtgacgtcctctggtctggagtcatcaatcttcaactcattctccagaaactctacaaattcctcgccaattgctgccaactcttcccaaaagctttt

SEQ ID NO: 339090 - DNA, 309 bp, Zea mays
  unsure (1)..(309): unsure at all n locations
tttnttttttttttttttttttttttttttttttttttttttttttttttttttttagcacaaaataaaaagatcggttccgatggcctcaaaccacaaaacaatttcttttggtccagggcaatgcctttggggacactgtcactgaaagcttcacatgggtcacgggtttcccagaatttatttacaaaaaaggggcgtttgtttacccacaacctttttgcccaaatgaaccatttatacccctttgattccaatacccgacagactccaaggcactggatctagacaaattttgtnttaccaccc

SEQ ID NO: 339091 - DNA, 221 bp, Zea mays
attaaatagaattgttataattatctgttcagaaggaaaccataatgattcaatcgttacttaattatatacttaaattattcagtaatttattagaactttagtaatttacgcaagagagtggatccatctcgcgcgcgggtctcaagacggtcatgctatcatttcaccatccccaaatcccttgttgtcttgagttacctcctccaccttcatcttat

SEQ ID NO: 339092 - DNA, 103 bp, Zea mays
ttctttttttttttttttttttttttatctccacgggcggttgttctgaaaacaaattttattgctcgacctcccgtgtttaagtgtgatcagagcgggctca

SEQ ID NO: 339093 - DNA, 157 bp, Zea mays
aagaaacaagaaatataccctacattcaaaatgcgtggggcctgatacagccagcctccatggtaaacacaaatggagtttaagcattttttggtatgtatgaaccaatgttcttaatacggtaaggggagacgtttgaccaccgcctggacgcgta

SEQ ID NO: 339094 - DNA, 274 bp, Zea mays
ccccaaaaccggggaacataaacccacggatcccaattcgggcttgactaagggacgaccgttccttacacaaaaccgaactaaaccttgtccaacgacaagtttttcaaaggcgagttcaaactaaaccgatcgttgctgcggtttttaaagcgccttcaggatctccttacccccaaaaatcgtgaactgcccgccttcctcgttttttggaacggggaccgtgaggtcttcggccaaaaaagcaaaccttttttagcccccccccaaacct

SEQ ID NO: 339095 - DNA, 262 bp, Zea mays
ccaaaaggattacatgttacaataagtttacattatacaattatcggagtgattacaaaagaaaatgattaaaaagaattacaatttaaaatgtataaaagatttataagttttaaaatacatgctagcttaagtgacaatcctcaatagagaaactaaagacgggatatacttatagaagaaggccgagcccaccggcacttagcaccatctgggataaacactacgttagtgttgttaattgacgaccacttggtgagca

SEQ ID NO: 339096 - DNA, 284 bp, Zea mays
aaaaaaaaaaaccaccatttttggccaaacatggttcattttaggggacaacgccaacttttttttttaaattgcctttgcaatggaaggggaaaaaaaaaaaaaaaatgcttttggggggtttaattatttcaggtgggtcccccctttcggatccgaaaaaaaatgaagttgcataccatacccggtgggcttttttgcccgggacaaagttgggggggcaagcccatgcctttttttttactggagcaacaattgggtcaaagaggtttttgggggggccc

SEQ ID NO: 339097 - DNA, 264 bp, Zea mays
gaggggaaaaaacaccatcccgaaaactcaaaattttttgacaaaaggtaagggcagccggtgtagcggcaaccagcgttagatggcaaccatgaactgcagtagctgattaactaccttacaatagaaatggaaagattacaatagttgcccgagattaacatttttttaagggagcatcctttcatgtagctggaggtacagttacttggccatatcctcccaggggggggaaagccggatttcggtttccattatttaaaa

SEQ ID NO: 339098 - DNA, 245 bp, Zea mays
  unsure (1)..(245): unsure at all n locations
tttnttttttttttttttttttttttatttttttttttttttttttttttttttttttttcatatttttttttttttttttttttttttttttttaaacgggacccaattggccaaatttttttttttcctttaaaccccccgcgtttttagggtttaaaagcgccattttcggcgctcttagaaataaatttagggggtttaaaacttttgaaaccccccatttggggcccgtgggtccccccg

SEQ ID NO: 339099 - DNA, 355 bp, Zea mays
  unsure (1)..(355): unsure at all n locations
ctcatacagccgccccccctttttttttttttttttttttcattttttttcgggggttttnncgggaatgaacgaaataatataaccttgtttgcttttcaccgtcgccataaaaggcaaacaattccccaacttttttcttaaatcccccaccccccccagctttcaaattgaaaaaaaacctttttgccctcccccagggtggaattcgcaagacgttaaattaaaccccccccctttgggggcccctggtgctcccaaaaaaattaaaaccagcccaagtttctcgacccttttctcttttctatgggccaactagctttttaaccttcaaaggtctttcaagcttttccac

SEQ ID NO: 339100 - DNA, 234 bp, Zea mays
gggcacaggacaaaataagctctgctgctggcattacactgacaatttgtaggtcatccgttcgacaacaaattttgacagaacttccaccggccaagtgcctgactgaatgaacaatctaagttgccaacaaatggcattttaagctcagaaaaaagtaaaaaatacccatggcatttttagtccatctttactccaacaaaaaccttaaatgctggtagggtacatgaacac

SEQ ID NO: 339101 - DNA, 349 bp, Zea mays
  unsure (1)..(349): unsure at all n locations
ggaaggaactaaatttctaacatggggtcgacttctgcagggacatcaaaggttagtaatacctttctgggaggctaaaatacaacatcacattgtcctttcgaatcgggtaaatactggcttgccaataaggcaggggggaaatcacaaaacggcaaaaaaaaccaggaatccaaaagggagagaatntgaagacaaaagaaacgaaattgaaactaatttacacgttgctaatctagtatctattgcccagcgagcttcacaacctccgacggacttccaagcttatccacctctgatgggccttctaattttctcaaaccatcttcacaagaattactaatgtcaa

SEQ ID NO: 339102 - DNA, 400 bp, Zea mays
tttttttttttttttttttttttttttttttttttttttttttttttttttttttttttttttttttttttttttttttttttttttttttttttttttttttttttttttttttttttttttttttttaaaaagggcctaaaaaaaaaaaaacccccattttttaaaaaaaggtaaaaaaaacccccaaaaaaagggaaaaaaaaaggccgggggtaaaaaaattttttcgaagtttaaaaaagggggggccattttttaaaaaaaaaaaaaaaaaacccccttttttttgggaaaaattcaaaaattaaaaaatttgggccaacattcccccggccccaaaagggggttaaaaaggggttggaaaaaacccttttttttgggcccccaatgggttttt

SEQ ID NO: 339103 - DNA, 108 bp, Zea mays
agtcaatcgggaaatgaatatggataagggttcggcgaatagacatacagacggtcatacaaacggccgacccgtcgagcatacagttaagaccacagttgcgaccta

SEQ ID NO: 339104 - DNA, 301 bp, Zea mays
  unsure (1)..(301): unsure at all n locations
aaaaccaaaacacttggggggaataatcttaaattttaaacttggttccaaacaaaatttttggggccgatgaaaaccagtggacaacttttagtttacgtttttagcaaccttttttccaaactccccttttttttaaagttgcaaacaaacttcttgggaggagaaaccttctggacaggctttttttccttgacaggccttttaagctttacgggaacgcgcgggcgcgggcgctctttataatttcaccnggaccccaccgggccccccttggggaaaccccaccaccacgggggga

SEQ ID NO: 339105 - DNA, 97 bp, Zea mays
  unsure (1)..(97): unsure at all n locations
tttnnttttttttttttttttttttttttttttttgttttttttttttttttttttttttttttttttnnnnnaaaaacaaaatgaattcgcccttt

SEQ ID NO: 339106 - DNA, 249 bp, Zea mays
cccgtcatcgatctcgtttcaaatccatccatcctcgtttcctccgtcccgcagcatctcaaccccatggccaagatcaagatcgggatcaatgggttcggcaggatcggaaggctggtggccagggtggccctgcagagtgacgatgtcaagctcgtcgccgtgaacgaccccttcatcagcaccgactacatgacctacatgttcaagtacgacactgtgcacggacagtggaagcaccatgaagtc

SEQ ID NO: 339107 - DNA, 233 bp, Zea mays
atcgtttcgaatctagtatactttcgcgcttatcatcatgtacggtttccgcacgagcgtttgtatgaggcgtgtcctaacattgcgcccggatcctacccatgacgcacgacccaggcagccacaagaggaggcgcgacgcagcagacgcactataccaataccactggctattcattcattgccttgaactacacagttagaatgatcatcgcatgtgacactggatcctc

SEQ ID NO: 339108 - DNA, 152 bp, Zea mays
ctcaaaccgtcgcagccgccaaaccgatggttggtggatggattatgatgatacgcaataggtacggcatgcgttctacacacgcaggacgtagggagccgagctttaagcacgaatgcggacatgctactcacaagacacttgcctatcta

SEQ ID NO: 339109 - DNA, 79 bp, Zea mays
aaccaagcgttcggttggctttcgagggaacttaacaagccaacacaaaacccaaccgaaaaaaccattttccggcccc

SEQ ID NO: 339110 - DNA, 270 bp, Zea mays
  unsure (1)..(270): unsure at all n locations
gcccgccgtcctccccgacggccgccgcttcgtgccggactctggctgcgcatccacccgcctccggtcatcctccccgtccctctcctccgcggcgccgcccggctccccgccgccgccgtcctcgctcctcgcctccgctcgggtcttctcctgccgcgcgtcctacgacctcgatgtccgccgccgcgggcaccacatcctccgcctccatttctaccccttcgtccccgccctcgccgcgtnccgcttccacgtcggcgccggggg

SEQ ID NO: 339111 - DNA, 310 bp, Zea mays
gtcgcatcccatcccactaccacccatctcgtcgtccgccgattcgatccggttcttccaacccaggggcagtgatggcgacgaagaggagcgtgggcaccctcggcgaggcggatctgaaggggaagaaggtgttcgtgcgcgccgacctcaacgtcccgctcgacgatgcccagaagatcaccgacgacacccgcatccgcgccttcgtccccaccatcaagttcctcctcgagaagggcgccaaggtcatcctcgccagccacctgggtcgtccaaaaggtgtcaccccaaagtacagcttgaagcc

SEQ ID NO: 339112 - DNA, 107 bp, Zea mays
aagtcgaccagctcactcgggacagtggccggcccgtgagttcctgaccggcgcctggacgcgtaccatgtttgcctattttgcgacggataaaagctagaccaagg

SEQ ID NO: 339113 - DNA, 399 bp, Zea mays
ccccgtccgtagcctggaatcctttaaagtcgacccacccgtccgttcaggtctacttcatcaggtaattgttagtaaatattatgtgactcgaaatgatgctggccgaggaacactaaacactaggggcttcccatggtgagccccatcaccactgcctatgacgagggcttgctcccctccctttgcgtggccaacttcaaaaactaccagcagtgtgtttcacatattgaagcagcttgggatcttgcatattccattggcagctatgtgttcagtagtggttctgaccccaagtcacagcttttcgatgggcacaacgaatcaggagctaccatatacgcaagggagaatctgttgaacaatgtcttgcatgccattcgtacatgtgttctgcat

SEQ ID NO: 339114 - DNA, 80 bp, Zea mays
gcaggcgagcgaactgacactatctggaggaggataagatctaggcgaagtcatgggcatagatgttactgggaacaggg

SEQ ID NO: 339115 - DNA, 341 bp, Zea mays
tccttaaaagcgaaccaacccgtccgttagcattgacaaaccatgatagagaaggaaataatcaagatcaaaatcaaaaagccccaattgatgaccattcaagcagaggaactcatacgggcaaagctattatagaagaatccagacctaactgcgttgatgatcataagacccatagacctatgtctcctggaacactagcactgatgtgtgatgaagaagcatttgagaaaatgtgtgacgaacaagatacaatgtttacgacttctcaaaatgctgctcctcagcagacagtaattgtcaaccataaccaatctgcactgtatgcagaacaagaaaac

SEQ ID NO: 339116 - DNA, 167 bp, Zea mays
aacagggctaacctgattgcaccacctctgacagtacctcaaatgacgatgaataacctgcggcttgcctaacgaatcctgggggcgcctgtgtgcgaacaaacacccaagactctgattgctctgacactgattctgaagaggatgactcagatgatgatctttct

SEQ ID NO: 339117 - DNA, 320 bp, Zea mays
  unsure (1)..(320): unsure at all n locations
atcgatctcgtttcaaatccatccatcctcgtttcctccgtcccgcagcatctcaaccccatggccaagatcaagatcgggatcaatgggttcggcaggatcggaaggctggtggccagggtggccctgcagagtgacgatgtcgagctcgtcgccgtgaacgaccccttcatcagcaccgactacatgacctacatgttcaagtacgacactgtgcacggacagtggaagcaccatgaagtcaaggtgaaggactccaaaacccttctctttggtgagaaggaggntgctgtgtttggctgcaggaaccctgaggagat

SEQ ID NO: 339118 - DNA, 291 bp, Zea mays
aagggctaaaaaactatggttgatccacataaaaacacgttttggacagtggactcactgagaaacgacaataacaagtctgaagcacatgatgatagtaatagggaaatcttaaatggagtcacactccagctggatcatagggctagcaatgagttgctgccgagaagcatggccaccaatgtaccatagctgcccactcagcaaaccgacgctatggacacagtcatgccatattcccccaatgatgtttgtgagggattatattcctgcatgccctggacatgaaca

SEQ ID NO: 339119 - DNA, 287 bp, Zea mays
cttttgcaaaccataattttgctcggagggtattgtaccaatctgaaaaacactcgcaaccagctaatggggtcctcaacctcaaatccacccataaaagttgacactctttctaatcaactatattatcctaaaaggcctcttttcaaaacagttatagccgactgtcttgccaggtcaaactgcactacttttggaagaaaagatgacttcacaagaccagaatatttcaatggacaaaatgcaattgtagcagtcaatgttcatcaggggtttaatcaaaagga

SEQ ID NO: 339120 - DNA, 144 bp, Zea mays
ctggaccacggttgcttccaagatcccagagtgtgatcatttaagcctggggcgcgcaaagaacacgtcggtcttctgcggcccgaacctgtacgagttcctggagaacgttcacaacatgggtgcccatggtacgggcgtcct

SEQ ID NO: 339121 - DNA, 294 bp, Zea mays
gtgggttggcttctcctccccctccgggtcgggttcgggttcgtgaggttctccggggttcggtttcgtgggtgagcggatcgagatggcggcgtcggatgttgagtaccgctgcttcgtcggcggcctcgcctgggccacggacgaccactccctccacaacgccttcagcacctacggcgaggtccttgagtccaagatcatcctcgatcgggagacgcagaggtcccgcggcttcggcttcgtcaccttctccacggaggaagcgatgcggaacgccatcgatggcatgaa

SEQ ID NO: 339122 - DNA, 323 bp, Zea mays
tcgggattctgaatctgggaccttttcagctcctgttgggtctggtggtcccggtggccttacagttccttacctaataattgccaacaaagaggatattgctccaagagatggtagaagagtgagcagtggtaatcttgctgatgttgctcgtcaatgggttgaaaaacaaggtctgcttccatccagtgaagtgcttacacttgcagataactttcctggcaattctggtttgctcacggctgccaaagaggcaagatatgataaagaagctctaatcaagttcttccgcatgttgataaggagaaggtatttttcgaatg

SEQ ID NO: 339123 - DNA, 391 bp, Zea mays
  unsure (1)..(391): unsure at all n locations
gatggccgccgtccgtaggttggattcttttaaagtggacccacgcgtccggatccatccgagcccaaaccctagtccagccagatctccaccgccgccggcgagagcacggcatcagatccgccgcgatggcgttccgccgcatcttatccacagcggtgcgccgccgctcggccatcgccgcggcagcgtccgggaacgcgcgcgaggcctccacggncgtcgccgcggcgcccggcgtgctagcccccgacgcgaccccggtgcgcgctcccgtgatgccgtacgatcgcatcgccgaagccgttaacgccaggctccggnggnttgagcacccagacccgcgcttcctccgttatgaagccccgttccgtcccacgccgaccacacg

SEQ ID NO: 339124 - DNA, 235 bp, Zea mays
  unsure (1)..(235): unsure at all n locations
ctcgatttgagttccaaaatgcaattgagaaacttccaagcaacatattcgagaagagctatcctttgagagagtttgatctaccaaaacgaatcaccgcattcttttataacgctgatgagctcactcttgtcgggatagcggnatgcatctgctagcgcgctactgccacagtattgattgttagaaaagaaaggaggttatcggtgactattccctctatcagcaccaatgc

SEQ ID NO: 339125 - DNA, 305 bp, Zea mays
  unsure (1)..(305): unsure at all n locations
ggcagtgcgtagagaggatcgtcgaacagaacagcatgaagatggtcatcgttctcgtcgtgtgcctggctctgtcagctgccagcgcctctgcaatgcagatgccctgcccctgcgcggngctgcagggcttgtacggcgctggcgccggcctgacgacgatgatgggcgccggcgggctgtacccctacgcggagtacctgaggcagccgcagtgcagcccgctggcggcggcgccctactacgccgggtgtgggcagacgagcgccatgtaccagccgctccggcaacagtgctgccagcag

SEQ ID NO: 339126 - DNA, 187 bp, Zea mays
cgtccagcccgtacgccgcgcagccaacccagcggacacgatgcaggcccacggcatcgccatccgcgcccgcgggccggtggcggcgacgcaggcccccgcgcgccgacggcaatgccgcgtgtctgcggcggcggtcggcgcgcccgccgcgcgagcccgcgtgacgcactcgatgccgccggag

SEQ ID NO: 339127 - DNA, 280 bp, Zea mays
ccgtcatcgatctcgtttcaaatccatccatcctcgtttcctccgtcccgcagcatctcaaccccatggccaagatcaagatcgggatcaatgggttcggcaggatcggaaggctggtggccagggtggccctgcagagtgacgatgtcgagctcgtcgccgtgaacgaccccttcatcagcaccgactacatgacctacatgttcaagtacgacactgtgcacggacagtggaagcaccatgaaagtcaaggtgaaggactccaaaacccttctctttt

SEQ ID NO: 339128 - DNA, 294 bp, Zea mays
gtgaagacacttactggcaagacgatcacccttgaggtggagtcctcagacaccattgacaacgtcaaggccaagatccaggacaaggagggcattccaccggaccagcagcggctgatcttcgccggcaagcagctggaggatggtcgcaccttggctgactacaacatccagaaggagagcaccctccacctggtgctccgcctcaggggtggtatgcagatttttgtgaagacattgactggcaagaccatcaccttggaggtggagtcgtctgacacaatcgataatgtc

SEQ ID NO: 339129 - DNA, 123 bp, Zea mays
aaaaaaaaaaaaaaaaaaaaaaaaaaaaaaagagggaaaaaaaaaaaaaaattaaaaaaaaaggggcggtaggcctagaaatttcgaaccggaacaggcgggttacccaattgttccttttat

SEQ ID NO: 339130 - DNA, 101 bp, Zea mays
cgtcgagtttcgcacacacaaagttatctacaggagatatgctggactgtttttttcaatatgtgtggacataactgataatgaattggcatacttggaat

SEQ ID NO: 339131 - DNA, 343 bp, Zea mays
ctcgtttcaaatccatccatcctcgtttcctccgtcccgcagcatctcaaccccatggccaagatcaagatcgggatcaatgggttcggcaggatcggaaggctggtggccagggtggccctgcagagtgacgatgtcgagctcgtcgccgtgaacgaccccttcatcagcaccgactacatgacctacatgttcaagtacgacactgtgcacggacagtggaagcaccatgaagtcaaggtgaaggactccaaaacccttctctttggtgaagaggaggttgctgtgtttggctgcaggaaccctgaggagatcccgtgggggtcgggtggtgctgaatatg

SEQ ID NO: 339132 - DNA, 315 bp, Zea mays
  unsure (1)..(315): unsure at all n locations
agcctttgacccacacccaccccccgccgggcggcgctgcagaccatggagcacgcgttcgcctttctcgcgcgcgcgctcaccactccgctcccggcacccgccgtcctcccgcggcgccgcccggctcgcgtggccgtcgccgacgcggcgccggagcgcangccgccgggcgcggtggcgttcaccaccaactacgtcgtgccggtcgacgcggcgctcgccgggatcacgcgcccgctcgtcgagattctccgggacctccacaagcgcgttccggacgccatcttgcgggtcttcctcccggcgcgcctt

SEQ ID NO: 339133 - DNA, 240 bp, Zea mays
tgaagaacagagccgccactgaggaaaccctagcgacggcggcgtgctaccggtgaccttgtctcgaataggggctggtttcctgaaggctgggcccgatgcggcaggaagtcaggctcttttgtggacattgctgggcttgggtggatttcatagattaaagctcagcacaggggggagaagatacagggcacaaacacgaagatcacatcgatgttaatattaatgatgactgggatc

SEQ ID NO: 339134 - DNA, 159 bp, Zea mays
gaggaggactaccataagaccggtccgattcccgagcccgagttcacctaccaccctggggttaagatcgggctaaacatcatccgggacgggcttcaaggtgaacgctataattaccgcaagattaaagaaacgcttgattgagtcttttaagagacc

SEQ ID NO: 339135 - DNA, 140 bp, Zea mays
ggccaagggaaacttcaagatagtatggcgaagaactattgagagcgccgcttaaagagggtgatgaaaatagatgaaggagaggacgacttttaagcttattacccaacattctcttaaaaataccatgagaaaggtga

SEQ ID NO: 339136 - DNA, 397 bp, Zea mays
cacaggccggcagatcgctcgccatggaggtgaaggtgatgagctctagacttgtcaagccgtcctatccacctggtgtgccgcaaccagacaccacccagcatgtgccttgctcggtgttcgacaagatcacataccacatacagatggccatcatctacgccttctcacctccggtgccctccatcgcggacattgagcacggcctcgccgccgtgttgggcgtgtaccgggcattcgccggccaggtccgtccgggcccggacggcgagctcggcgtgctgctcaacgaccacggcgcgcagctcatcgaggcgttcgtggacgcccaccttactgttgtcgcaccagcgaggccgtcgcctgagctgcagcagctgcaccctgggctacatgt

SEQ ID NO: 339137 - DNA, 73 bp, Zea mays
gcatgagaatcatctgacgaactgcctgaggcgcggctctctgtagactgtcataaaacataggactatgctt

SEQ ID NO: 339138 - DNA, 320 bp, Zea mays
ggccccagccccccgcggcgtgggcgtgatcccccacggtgcggcgctgcagccccggacgcgcggccggccccgatccgggctcctccggcggacgcgggcgcggcacggtggcgatgtggggcgcagtccctggcgcggcgggtccggctatggcgcgcgcgggcgcggtggcgaagcaccagcggcccctcccggcgcgagcagtgccagccctcccggcggcgcgggtgtcagccaaagcacgggggctcgggtgtggcggcggtggcccggtcgcaagccttcgcgcacgggctcgggtgcggggcaagccccag

SEQ ID NO: 339139 - DNA, 346 bp, Zea mays
aaagcattgagatgatttcatatagattcagattcagattatatttagacccatcaaacctttgagtaatataaccaataccccctaaatatactggttggtttaacctttaagtaggttcgagctgctaaatgatgcaattttaaacttgaaatatgttatgttttctatatgtcacggataaagcgttgaggtgtttccatgtgagtgactcgaatttgcaatcggtatgagtttgtaactaaaatcaatccacaaattcaggtttcacatactatgtagctatgtgtgctgaattattttaaaaaaaaacactaagttattcctgtttcgtgatgtctgtgcg

SEQ ID NO: 339140 - DNA, 264 bp, Zea mays
agacagaataccaattttttttaggggaaaatgttattgagacctcactcgacaatatacaggtcattcaattattaatgagaactgcaagcactgaagcatacggtcagtacttattggatgcttggaaatcaccaagctgtacttataatgtgtatgtggcttatgctacaacggcattgtgtactgacaaggatacaaaagctggataaagcgttattagaatctggatgaaggaggattatgcataaaccacgatatatc

SEQ ID NO: 339141 - DNA, 115 bp, Zea mays
ccggacgcgtgggtggagaggacaaaaatggggcagtacatcactctcactaaaaagatatttttgattgattggcccggggttgtatatcaaaacaatgattcagaaactgata

SEQ ID NO: 339142 - DNA, 125 bp, Zea mays
ctgcctccttccctcgatctattctccatcttgtcctccctttgctaaaaataacgggcagagcatcttcgattgacgtgccttctttctcgtcgttcgcgaggatgtgtgtaaaccggtatgga

SEQ ID NO: 339143 - DNA, 261 bp, Zea mays
  unsure (1)..(261): unsure at all n locations
cgttcttcacctcactaacaccagctagcaactctttctctcctgcaataatggccgctcgctcctcctcctcccagccgcagctggtcgcgggggcggcggtcctggcaagcgcgctgctgctgctggcggcgggggccgggacggcgtcngcggcggtgaactgcggcgaagtgacgtcgtcggtggcgccgtgcctcgggtacgcgatgggcaacgcggcgtcgccctccgcggcgtgctgcaacggggtgcgctcgc

SEQ ID NO: 339144 - DNA, 314 bp, Zea mays
  unsure (1)..(314): unsure at all n locations
cgcatagacaggcgtcttcgtactcgcctatctccgcgacccaaagcgttcccccttctcccattcttctctcatttctcaccaccgccgccgctaccccctttcgacaacaccatgagggagtgcatctcgatccacatcggccaggccggtatccaggtcggaaacgcgtgctgggagctgtactgcctcgagcatggcattcaggctgatggtcagatgcccggtgacaagaccattgggggaggtgatgatgctttcaacaccttcttcagtgagactggcgctgggaagcacgtnccccgggcctgttt

SEQ ID NO: 339145 - DNA, 266 bp, Zea mays
  unsure (1)..(266): unsure at all n locations
taatgattccacgaggccagctggcgacaacaactaccaggcatttatcctggaggcggcgtcaccgtcgccgatccctcctctcaactggcaacaatgggtgcacaggatgcaactgccctgaatgttcagcanggccgagcgaggacagctgatgaaagcctcgtccacgtncctgccgcccaggtttcacttccaggtgccctagccctagggaactttgagcaagagctcggagaagacgcgctgctgccgccggtgctgag

SEQ ID NO: 339146 - DNA, 239 bp, Zea mays
gctagtatgatgccaccgatgatgatgccaaacatgggttcaccaatgatgatgccgagtatgatgcctttgacgatgacgccgagtatgatgccaccgataatgatgccaagtatgataccaccgatgatgatgccgagcatggcgtcatcaatgataatgccaaacatgatgacagtgccacaatgttactctgattccatctcgcacattatacaacaacaacaattaccattgat

SEQ ID NO: 339147 - DNA, 232 bp, Zea mays
tactcaacccacgctttctttataaagacacctcatttcttatgacacggaagaatcttattatatggactactaattgaccttaaatgcctcttttaactacctatcttttcaaaacagacctccacaacttacctgaagtacatgctttctacaacttccaaatactattcaccactttatctcatccacaccatctaatctattacttatccttaaaaaacattcattc

SEQ ID NO: 339148 - DNA, 293 bp, Zea mays
atacgcactcaccagcagggtggatatggcacaaatcttgccccagcaaaactagttgggaagaattttacctcgcttgataaatctatatcccgcatgatgggtacaccatctgcaccacttccaccattgccacatggatctgttagcgatagagagagccactctatgcctgaagcagcaaaatttataaatagccaatcagtaatggccatgtcatcgctaatgccatctgcttcaatgcagtccatgactgagatagcagagaataatgatggcactggcaggaaaat

SEQ ID NO: 339149 - DNA, 331 bp, Zea mays
aaaaatatccccaaaccctagctcccgatctcgatggcgaaccctcgcgtcttcttcgacatgaccgtcggcggcgccccggcgggccggatcgtgatggagctgtacgccaacgaggtgcccaagaccgcggagaacttccgcgcgctgtgcacgggcgagaagggcgtgggcaagtccgggaagccgctccactacaagggctccaccttccaccgcgtcatccccgagttcatgtgccagggcggcgacttcacccgcggcaacggcaccggcggcgagtccatctacggcgagaagttccccgacgagaagttcgtgcgcaagcaca

SEQ ID NO: 339150 - DNA, 152 bp, Zea mays
gtttggaaaaaaaaaaaaaaaaaaaaggggaaaaaaaaaaaaaagaaaaaaaaaaaaaaaaaaaaaaaaaaagggcggccgccccgggaattcacagaccgggccctgcccgcgtaccatctttccctataccgagtggcattccagcttgg

SEQ ID NO: 339151 - DNA, 397 bp, Zea mays
gttggcttctcctccccctccggttcgggttcgggttcgtgaggttctccggggttcggtttcgtgggtgagcggatcgagatggcggcgtcggatgttgagtaccgctgcttcgtcggcggcctcgcctgggccacggacgaccactccctccacaacgccttcagcacctacggcgaggtcctcgagtccaagatcatcctcgatcgggagacgcagaggtcccgcggcttcggcttcgtcaccttctccacggaggaggcgatgcggaacgccatcgagggcatgaacggcaaggagctggacggccgcaacatcaccgtcaacgaggcccagtcccgcggcggccgtggaggcggcggcggcggcgggtacggtggtggccgtggaggcggcg

SEQ ID NO: 339152 - DNA, 389 bp, Zea mays
ctccagtagtagtagacatcagcactgagctctcttcctcacggggcatcagcatcacgatgatgatcgagcggtctgcagccatggctctgctcctcgctctcttactcgtgctactcttggccaccggtggtcaagccgacgccgatgagccggcaacgtcacagcagcgcgctgttccggcggagcaggcgccggcgccggcgccgaagggctacgaaaccctgagggaggaaccggcaccaaccggcggtcaccgtcaccgggagatcaagatcggcgcatgcttccccatcagcgacggcggcagcagcgctttctcctgctaccagcggtgcacgagcaaaggctacgccggcgggcgctgcgacaccctgcccagcggcttt

SEQ ID NO: 339153 - DNA, 367 bp, Zea mays
  unsure (1)..(367): unsure at all n locations
ggtatccgtgtctggcaaacttattttgaggcttgctaaatatgtaccttttgtctctgaagttgttaaataaagcaaattaacttccagtttctaaaaaaaaaaaaaaaaaaaaaaaaaaaaaaaaaaaaaaaaaaaaaaaaaaaaaaaaaaaaaaaaaaaaaacaaaaaagaagcagaaacaaaaatactattgaaagaacttaacacaagatgtgcttgtgattcccgcgtataaaagaattgcaacaatcatacaggcgtacgctatgttcagtagatcgtgcctttgcctcagtataaaaatactgcgttcgcctcgtntaatagaaaccactctccctaatgaactccctttttttttaat

SEQ ID NO: 339154 - DNA, 376 bp, Zea mays
  unsure (1)..(376): unsure at all n locations
gtatgctttgcatggtggctggagggatatgactatatgagtttacctatatattatggactatccttgttggcgtattgttttattaacgattatatttagccagttataatccgttaggtgagcagattgtttgcttgggttaccagatctcggtagccagtgggtgcggttccaggtcttctgttgatgacttatcacaagatgtgcttgtgattaccgtgtatgaggaattgcgacatcatacaggcgtatgctatgttcagtagatcgtgccttgcctcgtgtataataatactgttttgtatcgttngttggaaaagaccacactgaacaagttgagaatgacaacttcattgtccaacaacttgatgga

SEQ ID NO: 339155 - DNA, 343 bp, Zea mays
ctcacggcggcgtccatgacggtaccgagatcgtgctctggaagttgaggtatatgttgttgaccatgccgacgcagcaattagaccttgccgaccttttagctattcactcaaagcactatcttgagctgttattcctgtttgcatgaaagcaacatcgacgaacaagttgatttcattcgataaagcaaataaagacttattccttatgaatgttgaaagcgtaaaggattatttctttcagcccattacaagactagacaatcgggaggttgtttttgataaaatgatcgatgatttcaatacaatgatacttattacgaaaataaaatcaattttgtac

SEQ ID NO: 339156 - DNA, 369 bp, Zea mays
  unsure (1)..(369): unsure at all n locations
ggggcttccgtcctgttctcgtcgcacctgtttacctccgccgccgccgctattgtcccattccaatctagaacccatagtcttcttcgtgattgtgcggttctttggtgagagcatgagctcgtctacttccggaacacgagagatgtcatctccaaattctacagcaacatctattggccaagttcaaaaggtgcctggttttgccaagcttcagggtgaaaactttgtgtacttcatgcaaacttattcaatcatgttgggacgcaccagcagaagttatactgcagactttgatctctctaaatatgaatgtgggagccaatgtgtttcccgatgccatgcatgtatattctatgactntgaact

SEQ ID NO: 339157 - DNA, 175 bp, Zea mays
agtcgacgaagctcaactaatgaacaaggggccggccccggggaaatggcgggaaccggtcacttggaagcgcgtccacaccttttccttatagggaaggtggattataaagcttggcgtgtattaattggcatatagtgtgtttctctggggagaaatggtatatcggttacac

SEQ ID NO: 339158 - DNA, 396 bp, Zea mays
gcttcgccgtggtcgccgccatcgtggccctcctcgccgtcgtcgcggcggcgcaggccccgaccacagctcccaaggccgcgcccaggatggccccgctgccgcctccccctgcgcggtccccggccacagccccggcgccggccgccaagccgccggccgccaagccgccgaccgccgcggcgccgtcaccgctggcctctcctccggccccgcccaccgagggccccgccgcctctgcgccgtccgcgaaggctccgacctcgtccgtctccaccaccccggccggcgcccccaccgtcgcgccctccggctacggcggtggcgggcgccgtgatggcggcggcggctacggcggtggcggcggctacggtggtggcggcggcggctacggtg

SEQ ID NO: 339159 - DNA, 427 bp, Zea mays
  unsure (1)..(427): unsure at all n locations
agaagagctanntgacgtcgcatcgcaccgnccgtacgtaannngcttgnngatcctcttttagagtcgnnnacccacgcccgtccgnnacctgcgttanntggttaccaanncgaaggaggtggcgannggatggaaggannngattattanntaacagagggggcgcgnnnggagagggggcggctttacgtnnggacgagagtgagtgagaagggcnngtgtgtggctttactacgnnngaggtgggacgggcgtgcgtaggcttaccgggttattgaaattatggcgtactgccnnncccagacggcngnnggtacctantngaangnnagcgaagacnngaatacctanntgatgnnagcccgaaggggaatatgctttcctttccccctgggggccgcggacccgtggcangaagtggaga

SEQ ID NO: 339160 - DNA, 364 bp, Zea mays
ggaaaaatatccccaaaccctagctcccgatctcgatggcgaaccctcgcgtcttcttcgacatgaccgtcggcggcgccccggcgggccggatcgtgatggagctgtacgccaacgaggtgcccaagaccgcggagaacttccgcgcgctgtgcacgggcgagaagggcgtgggcaagtccgggaagccgctccactacaagggctccaccttccaccgcgtcatccccgagttcatgtgccagggcggcgacttcacccgcggcaacggcaccggcggcgagtccatctacggcgagaagttccccgacgagaagttcgtgcgcaagcacaccgcccccggtgtgctctccatggccaacgc

SEQ ID NO: 339161 - DNA, 216 bp, Zea mays
ctctcgcgtgcccaaaccctgcccctggcccgggcccggctctctttcccgacccttcgccacctccgcgccctcgccgcgccgctccgcgcgctcgtctcgtccccgccactagggttcacgtccgcggcgcgaggccccgctccgctccgcgcggcggtgttcgagtccgatcgcgagcaaccggaggctggtgtggaggcgggggaacaaggg

SEQ ID NO: 339162 - DNA, 397 bp, Zea mays
gtttgaccacgacgcgaccagcctccgctgctctcctactcccttgccgaagcaccccacagcagaagcgaaaacggcaggaagccagccggcgggctaggcaggcatgcttgcccgctgacgcagctgaagcgaggcgacccgcagccgccatggatccggcgtccgaggaactcgagcgccgcagccgctatctcagctcgctcatccgccgcactaagcttagcgccgtcccggctccttctcagccggagcccgagcccggggtgacgcaaccgactccggagccggagccggagtccgcggtggagaagcgcggggaggccaaggcggagccagtggtcgatgaggaggagaagcgggaggccaaacaggccggtgacgggaaggggaaaga

SEQ ID NO: 339163 - DNA, 302 bp, Zea mays
atcggtttctcaactgatgagggacggggggtctctaagtggattgatacgggatctatgtcgattgatcgggcagaggctcaatgtacgaccattacgaaggagatcacatgcagaattaggatgacatgggaggaccgtaaaccgctgaaggacctggagatgaaggtagcaactacgcagatcatggtggtgcccttatagatcctgtggacctcgatctggcacaccgacatactcttctggaacgccaaagagcaaactacatgactaactacgatctttcgcccatactgtggacg

SEQ ID NO: 339164 - DNA, 124 bp, Zea mays
aaaaaaaaaaaaaaaaaaaaaaaaaaggaaaaaaaaaaagggaggacgacaaaaaaataaaaaaaccaaaacataaaagcatacaaaaatataaataaaaaaaaaaagattagaccttcacgga

SEQ ID NO: 339165 - DNA, 384 bp, Zea mays
gaaaaataacttgattaaaagaagctgtgtctttgacattttggttgatgctctttgaaggtgccaagatctctcagtggaggtccctgtttctgcttgcctttggacaaaggaagctggggagggagcaaaggggtgactgactcagttcctttgacacaattgacaataaacaataaaggcagccgccctatgaacttcaacttctcccaggaaaagggcctcaaggcattcacattccacaaggaaaatcgctccgatatgatctgaatcgccacggtgtgatctgactactctgattgcgtacacaaagtctctgctatgaagacttcaggcttttcaggaattcaggcaccacctgaccgcagtctgcaagaagctgag

SEQ ID NO: 339166 - DNA, 344 bp, Zea mays
caacacccccggacagacgggcgcgaactcaaaccctagaaacggtagccatggattcgggaggcggaggagggagcggcgcgcacaaggcggcctcgggctccgcgccctcgccggcgcctaaccccacggcgatgctttcggcgctcatgagcaagcgcgccaagctccaggaggagctccgctccatcgagcgccaggtttatgatatggagaccacctacctacaggagactaatcaatttggaagtgtgctgaagggtttcgaatcttttttgtcatcctcaaaaaacacctctaaccttaagcgctctcggaaatttcacgctgacgagaggttattc

SEQ ID NO: 339167 - DNA, 316 bp, Zea mays
tcgaccaacgcactcgtttgaattgcctcttgaggaatggctgaccggcaacaatatatgtactttgaagtgctacaagacactatacaacaaaatggatacataatgacactaaacacgggaagccaatattacatgtatattaacagtgagccatatacatcaaggctttttaacttcaatgaatgtcgagaccagaatacaggactggcgtaactataatacataggttgggctacctgtacacctacaaaaatgtgaagacgaatttcactattgctgactaagtggcttcaactctgctaccgaagcacgg

SEQ ID NO: 339168 - DNA, 161 bp, Zea mays
aaaaaaaaaaaaataaaaacaaaaactggcggcgcaattaaccaaaaaaacacccaacaccatacctaaacaaattccaacaattcttatagccgctccactcagtactatgcgtattcgtccccaagcgctattactgtctcaaattgttatcccttcac

SEQ ID NO: 339169 - DNA, 303 bp, Zea mays
catcgatctcgtttcaaatccatccatcctcgtttcctccgtcccgcagcatctcaaccccatggccaagatcaagatcgggatcaatgggttcggcaggatcggaaggctggtggccagggtggccctgcaaagtgactatgtcgagctcgtcgccgtgaacgaccccttcatcagcaccgactacatgacctacatgttcaagtgcgacactgtgcaccgacagtggaagcaccatgaagtcaaggtgaaggactccaaaacccttctcttttgtgaaaacgaggttgctgtgtttggctg

SEQ ID NO: 339170 - DNA, 287 bp, Zea mays
cgcattttccttgcaaccgattgcctatccccctcccaaccaaagaccgatggcgcccaaggccgagaagaagcccgcggcgaagaagccggtggaggaggagcccgcggccgagaagacgaccgccgggaagaagcccaaggcggagaagcgggtccccgctggcaagtccgccggcaaggagggcggcgagggcaagcgtggcaagaagaagggcaagaagagcgtggagacgtacaagatctacatcttcaaggtgctgaagcaggtgcacccggacatcggca

SEQ ID NO: 339171 - DNA, 309 bp, Zea mays
aagaaaccagcataaaaactctagatctgtgaaggatttgaggaagaaaccaaaccgaaaccctagtgacgatgctagagttcggacctcgctctgagtcgaaacgaccagagaccgctgccttccctccccattttcctttcccatgaaccaagcagcgtatgagctttccatccctcctcatttacctatcccacctctcatatcccgttatccaaacggcacctcagggtactgcaatccagaagcaggggccctggcctcagcgcacctggatggcagggctggaggagttgaagaagaagctac

SEQ ID NO: 339172 - DNA, 167 bp, Zea mays
tcgcaccacctcgcctgcgatctccgtagcctccgtcgcgtcgagcatcgatcatgtcggcctactgcggaaagtacaaagatgagctcatcaagaatgctgcctacattggcacccctggcaagggtattcttgctgctgatgagtccactggcaccattggcaag

SEQ ID NO: 339173 - DNA, 130 bp, Zea mays
gtgttaactgagtactggaactgatattcagtgggcaaactaagagatgcatagcgagcaacgacggagctgtcacaacacgaggactctgacccaataattgctgacgacgaacgagaaaaagcgcatg

SEQ ID NO: 339174 - DNA, 399 bp, Zea mays
  unsure (1)..(399): unsure at all n locations
ttaaagtcgacccacgccgtccgattcgatctcgtttcaaatccatccatcctcgtttcctccgtcccgcagcatctcaaccccatggccaagatcaagatcgggatcaatgggttcggcaggatcggaaggctggtggccagggtggccctgcagagtgacgatgtcgagctcgtcgccgtgaacgaccccttcatcagcaccgactacatgacctacatgttcaagtacgacactgtgcacggacagtggaagcaccatgaagtcaaaggggaaggactccaaaacccttctctttggtgagaaggaggttgctgtgtttggctgcaggaaccctgaggagatcccgtggggttcggttggtgctgaatatgttgntgagtctactggtgttttcac

SEQ ID NO: 339175 - DNA, 406 bp, Zea mays
  unsure (1)..(406): unsure at all n locations
cgtccgaaaaaaaaaaaaaaacgtcccngtttaaaaaaaaaaaaaaaaaaaaagggggggggaatnntttgaaaaaaaggaaaaaaaaaaaaaaaaaaaaaaaaaaaaaaaaaaaaaaaaaaaaaaaaaaaaaaaaaaaaaaaaaaggggggggntncccccccatgaaaaccccccccccccccccggcccccccccccttaacggggggggnntcaaaccccccccgccccaaaccccccccctcccccccccccaaagaaaaatggtttcccattcccccccccccccccaccccggccccaaaaaaaaaaacccccccccccccccccccagggcccccccccccccccttgccagccccccccccccccccccccctttccgaaacccccccccccccccc

SEQ ID NO: 339176 - DNA, 248 bp, Zea mays
cacgcgaacagctagctcggatccgctagagtcgacccacgcgatcggtgacagtccagctgggacgcccggttgctaccctggcatgtgctaggccgcgtggcggccagcatgctagacgtgccctactaggaagacgacaacggtgtggtaatgacggatggctcctagctccgaaccgcagacacgggtgtacgaagagtacagctactaatacgccacatcggcaaacagcttgcccgaatacc

SEQ ID NO: 339177 - DNA, 51 bp, Zea mays
atgatgacaggaaacctggaacgccttgtgcatacacgaatcaggcaacac

SEQ ID NO: 339178 - DNA, 129 bp, Zea mays
gcgatctaggcttggatgggaataaaaccttcatggaacaccacttggccaactttatcctctattaatgaaaaagggcttctttcagggttggcttgggagcacggggcttaaaggggattgaaggaa

SEQ ID NO: 339179 - DNA, 350 bp, Zea mays
gatcacactcgtagagagaaggaaaaatatccccaaaccctagctcccgatctcgatggcgaaccctcgcgtcttcttcgacatgaccgtcggcggcgccccggcgggccggatcgtgatggagctgtacgccaacgaggtgcccaagaccgcggagaacttccgcgcgctgtgcacgggcgagaagggcgtgggcaagtccgggaagccgctccactacaagggctccaccttccaccgcgtcatccccgagttcatgtgccagggcggcgacttcacccgcggcaacggcaccggcggcgagtccatctacggcgagaagttccccgacgagaagttcgtgcgcaagc

SEQ ID NO: 339180 - DNA, 145 bp, Zea mays
gtttcagtgctaggccgatgtcgcactggcggtagcgatctgagatcgagcgaagctaaggtttttcatctagatggcgcttaatacagcggggtcagcgctgaaatgttataagacagtcagaagggtggctacaacaaaactg

SEQ ID NO: 339181 - DNA, 87 bp, Zea mays
tcgggagatcttttatgattaaaattaaggggataaaaaaggttaagggggttaagttgaagattttgattattaaaaagaagaaaa

SEQ ID NO: 339182 - DNA, 402 bp, Zea mays
atccaggacaaggagggcatccccccagaccagcagcggctcatcttcgctggcaaacagcttgaggacgggcgcacgcttgctgactacaacatccagaaggagagcaccctccaccttgtgctccgcctcaggggaggcatgcagatctttgtgaaaaccctgaccggcaagactatcaccctcgaggtggagtcctctgacaccattgacaacgtcaaggccaagatccaggacaaggagggcatccctccagaccagcagcggctcatctttgctgggaagcagcttgaggacgggcgcacgcttgccgactacaacatccagaaggagagcaccctccacttggtgctgcgcctcaagggaagcatgcagatcttcgtgaagaccctgaccggcaaa

SEQ ID NO: 339183 - DNA, 150 bp, Zea mays
cagactgcagacatgatcacgaggtgagctgatggcatggaccatgacttccagattctgacctatgcaaggaaagaagacacgactcagaggactaagaggcttcggtttcacaagacagatggttattcgctgtgactcgctgtatga

SEQ ID NO: 339184 - DNA, 396 bp, Zea mays
gtggacctggacgcggcctacgatcctgcgacagacgcaggatagatgtgcgcgctgcgaatgcgaccgacaactcgaataataaacacctgtgacgcaccagacgaacggcttggagatgagacgagagcaacacatagcggctctctagtgacgaagaggactgctttataagctccacaccgtacacaaatgccggatctgctatggcgagcgagggtgttagaaaaccaaagctacctgcacacaccatcctacaacgtgaggagaaaaaaacggctcttggcctccgtcatgaccaacggctactaccaacaatacgtcctcgcgctgaacgatgagccaccgctgatgctgatcgaccagaaacactggatggcagacagcgagctgatc

SEQ ID NO: 339185 - DNA, 283 bp, Zea mays
ttaaaatcgaaccaagccttcggttaccccgcgggcgggggccttccgggttggaaaccgattttttttgggttttgggctttttctaatttctaactaacaacggaacggtacaatggcctaatctgaaaacctaccctcgtgccggggcatgcgaaacgtgacacaagtagtcttcaagcgtacggatttcaacgacttgacggatctgcggccaatggactgactggggtcacatacgcaacctctgcctcgttggctcactctgggaccgccttcgtca

SEQ ID NO: 339186 - DNA, 344 bp, Zea mays
cagccacatcaattagatcccaagccgctggaaatgttttctgattcgcagaagaggaatgggctggaactcgtctcgggtttcggcggtgctggtatccttgttagcaacgtctcagaccatgtggctgctctcaaggctcggtatggtcccggttctaagataatgggcagtgacgcggatccttggaaagacataggaagcaggtagcaccgatagcggtagccagttctagtgcttgttttgttgctcgctgtatcatatttagttctttttttttttctgtaacttgaatgaaatcgtcaaatgaaggaaagtgaatggctttcctgcccatactattt

SEQ ID NO: 339187 - DNA, 342 bp, Zea mays
  unsure (1)..(342): unsure at all n locations
tcgaaccaacgcttccgaaaaaaacatttccgggagtccgaaccaccaccaaaagggcggcaggccaaaggttccgcttcccacagctgctagctagctagcgtttgcaagagtagcagtagcgctccatcgagcaatggccgtgatggccgaagtagtgttgaccaccggcgcggcgcttccgagcccggctcgcagccgctgccggncgcggcgaagaacgcagacgctgagaagctccagttcatcgaggagatgacctccaacgtggacgccgtgcacgagcgcgtgctgggggagatcctcgcccgcaacgccggcaccgagtacctcgccaagtac

SEQ ID NO: 339188 - DNA, 210 bp, Zea mays
gcttcttatgtgatttctggccgggttgcctgcttggtctctttggctgtgctcgctgcaccgccggggagagtagcagatgatgaccgcgtcgcggacacctttctgatcaatcaagcagggcggcagctaagtactggtatatggagtgagcagccgccgagtagcctcaatcagtgatttacagctgtagaccagccacggtgatat

SEQ ID NO: 339189 - DNA, 237 bp, Zea mays
  unsure (1)..(237): unsure at all n locations
tcccatttgaaatcaacccatcctcgttttcttcggctagcagcctctcaccctcatggccaagatcaagatcgggatcaatgggttcggcaggatcggaaggctggtggccagggtggccctgcagagcgacgacgtcnagctcgtcgccgtgaacgaccccttcatcagcaccgattacatgacctacatgttctaagtatgacactgtgcacggacagtgggaagcaccatgag

SEQ ID NO: 339190 - DNA, 71 bp, Zea mays
tcgacccacccgtccggcgcgggcaacgacggccgccgtggacctggactcttcgaacccccaaatcgcga

SEQ ID NO: 339191 - DNA, 262 bp, Zea mays
aatatatattctgtctattttgtgttttttttttaactagtggcggcgcgcaaaaatcacttgttaagctaccattttatatcaaaacccgggtaacagggaaaacaaattttccacagactacattaaaaatagcgctggataactaccaacggatgcccgtgatttaaaaccattaccaaaaaaagagggggcggggaaaacaaaagaaaaaggtaaaacttgaggggaccaacccccctctaaacaaaagcagcctaaa

SEQ ID NO: 339192 - DNA, 294 bp, Zea mays
ctttttctccctgtcttcttctcccacacagcagcagcccatgccgtccttcctctggttctgcacggcgaccagcagggagctcagctccttcttgccatggcgctaggcacccatgtagcagggacagcgcccttcctccctgctcctcccttgcgcaggcctgcttcagccgagtccccttcttcatggcgttcggcagcagggagactttcttcccacggctgcagcaagcagctctgcgcgctccccccatggcgagcagcaagccggcgcccctctccattttcccct

SEQ ID NO: 339193 - DNA, 248 bp, Zea mays
ccgtcatcgatctcgtttcaaatccatccatcctcgtttcctccgtcccgcagcatctcaaccccatggccaagatcaagatcgggatcaatgggttcggcaggatcggaaggctggtggccagggtggccctgcagagtgacgatgtcgagctcgtcgccgtgaacgaccccttcatcagcaccgactacatgacctacatgttcaagtacgacactgtgcacggacagtggaagcaccatgaagtc

SEQ ID NO: 339194 - DNA, 305 bp, Zea mays
cgagattggaacgagtaactaacctgttccagcccaaacacagccacgagcacctacatcccccgctggcacctatccttacatcgacacaggcggtccttctccgcggaagccggctggccgacgactcccttaccactatcgccgtgctcctccgcaccgtcattccctagcattccccacgggcgaggcaaagaaacattctcccaccctatccagccgcataggtggcaccgggatttctcttgcggtggcttggaccagatctgcggcgcattcggcggatctgatctcgcgtgcacctc

SEQ ID NO: 339195 - DNA, 266 bp, Zea mays
cccacgcgtccgcccacgcgtccgccaaaactggctgctttctacgtgcttctagcaagagcacgaacgagggccaagcgctccaaaaccagcgacgtggaagcgcctgcgccgcgagcatccttcctgagcgcggggccaagcagagcagtgcaagcagcatatggcgcgccgtgccagcctgctcctcgccgcggcgctgctcgtcgccgtcgctgccgcggcggtgccgccgacgtgcgagcgcatcgagtgcccggcgtacg

SEQ ID NO: 339196 - DNA, 238 bp, Zea mays
ggaagcacaagctcgatgacgagccggccgacgacacagccgccgacgccgctgaggacagcggcaaccccaagaagaagggcgcgaacaccaaaaagcagcagccggtggcaaagtatggcgccgaggcgaagtcgaaggcggttcgcgagagggagacgggtgcggaagtggtccgcggggacttcgaccggccgtccaagttcctggtggtctgtctcaacgctatccgggatgc

SEQ ID NO: 339197 - DNA, 117 bp, Zea mays
  unsure (1)..(117): unsure at all n locations
naaaaaaaaaaaaaaaaaaaacatttggagaataaaaaaaaaaaaaaaaaaaggaagaaaaaaaaaaaaaaaaggaaaaaaaaaacaaaaaagaaaaaaaaaaaaaggggcggccgc

SEQ ID NO: 339198 - DNA, 386 bp, Zea mays
tcggatggcttgacctctgatggagaggaagtaaggtgagaaatcacgattgtttgttgactttgtgaggccgtaaaaattgagatgtatttttaatatttttgtaatactaaccatgtcaaatatgtctacacggttggatgaagttgtactgctgtaccaattcactgtatttgtagactacactacgccatgctttgctaatgaaccagccatcatgttctacaaaattggaggatgaactagccatgatactttgccagtgaaccatgtcaaccgggtatgggatccccgcggggagaaaaccccgctcggggacggggacaggaaaaatctttccacgttactcttcgcggggacggggacagggatttttctcttcgtgg

SEQ ID NO: 339199 - DNA, 65 bp, Zea mays
aaaaaaaaaaaaaaaaaaaaaaaaaaaaaaaaaaaaaaaaaaaaaaaaaaaaaaagggcggccgc

SEQ ID NO: 339200 - DNA, 360 bp, Zea mays
tcgcccgtcatcgatctcgtttcaaatccatccatcctcgtttcctccgtcccgcagcatctcaaccccatggccaagatcaagatcgggatcaatgggttcggcaggatcggaaggctggtggccagggtggccctgcagagtgacgatgtcgagctcgtcgccgtgaacgaccccttcatcagcaccgactacatgacctacatgttcaagtacgacactgtgcacggacagtggaagcaccatgaagtcaaggtgaaggactccaaaacccttctctttggtgagaacgaggttgctgtgtttggctgcaggaaccctgaggagatcccgtgggggttcggtggtgctgaaatatgt

SEQ ID NO: 339201 - DNA, 295 bp, Zea mays
ctctcctcccctcgtccgtctcccttccacccttccacgctcccgccgtttcccaggggccagggccgacccacgccgcgccgggatccttagatgcggccggggcggcgccgcgagccgtgagcgcggttcctgccgtggcgatgggtttccgcgccgccgccgcggtggccgtgtttgcggcggcgggactggcggtcgccgccgccgcttccggggactcgctcggcgacctcggaggcgcggcgagggagatcgaaagcgcaccagaggtcaagaacctgggaccatgggc

SEQ ID NO: 339202 - DNA, 326 bp, Zea mays
aaattttgtcattttgttacacctggttgcactacattctgtttctctgctgtagtgaggtatctagtgtgaacattttattctagatattcctgaaattcgcattttgcagtgctatttctgtgactttgagatgcatctatcactgttattaaggcgtcgcctatgcgtgcaggcggaggtccaacgcctaggcgttcaagcggtggtccaacgccttgtctcgacttaccggtttaaaaaccatggcatctatatacaagtttttcattatcacgcttgattttgccaaatctttagtttctttgtcgtgtccttaaatttat

SEQ ID NO: 339203 - DNA, 235 bp, Zea mays
caccccggacgaggaggtcgactaaactgggttgtactccaccgacgctccactgttaatgacttcatcctctgtaacaacgccgatggcgagacaggtcctttaaacttctattggagacataaggtccgccattatggaactgattacatagtgatagttttgctaaccaacgatgtgtttttagcatacatggtatgccatgtagatagagcggatatttgtggacaacata

SEQ ID NO: 339204 - DNA, 321 bp, Zea mays
gcggcagtgcgtatagaggatcgttgaacagaacagcatgaagatggtcatcgttctcgtcgtgtgcctggctctgtcagctgccaacgcctctgcaatgcagatgccctgcccctgcgcggggctgcaaggcttgtacggcgctggcgccggcctgacgacgatgatgggcgccggcgggctgtacccctacgcggagtacctgaggcagccgcagtgcagcccgctggcggcggcgccctactaacccgggtgtgggcagacgagcgccatgtaccagaccgctccgcaacagtgctgccagcagcagatgaagatgat

SEQ ID NO: 339205 - DNA, 110 bp, Zea mays
  unsure (1)..(110): unsure at all n locations
attagctttatctactccagagcgcagaagaacccgatcgacaccatgagggtgttgctcgttgccctcgctctcctggctctcgctgcgagcgccacctncacgcatac

SEQ ID NO: 339206 - DNA, 239 bp, Zea mays
ctcggccggcacctacctcccccacttcgccgccggcgggtggagtcgggccggagcagccgctacctcgcctatgttacaccccccccccccccccccaaaaaaagacaaaaaaaagaacgagtaccaatcaagccgccagcagctcggccagccatggggcacggcgtaagctgcgctcgcacggacgacaagcacaactacttccgcgcggcacaagtcggagacctcgacgccct

SEQ ID NO: 339207 - DNA, 353 bp, Zea mays
attagctttatctactccagagcgcagaagaacccgatcgacaccatgagggtgttgctcgttgccctcgctctcctggctctcgctgcgagcgccacctccacgcatacaagcggcggctgcggctgccagccaccgccgccggttcatctaccgccgccggtgcatctgccacctccggttcacctgccacctccggtgcatctcccaccgccggtccacctgccgccgccggtccacctgccaccgccggtccatgtgccgccgccggttcatctgccgccgccaccatgccactaccctactcaaccgccccggcctcagcctcatccccagccacacccatgcccgtg

SEQ ID NO: 339208 - DNA, 69 bp, Zea mays
gggagatgagatggcaagcaagggtgatgggccggcgatcggcatggatatcggcacgacgtactcttg

SEQ ID NO: 339209 - DNA, 183 bp, Zea mays
atagcgatccacgcgttcgtccacgcgtccgtccacgcgtcggcgagcagggcctaattacgtttttctgcgccgataactttgaaaacgtgtggaacagggaaaatacattgtcgccggactcgatagtgtattggcgataagacctcatacttcctccgaattggtcgtgacaatacgcgg

SEQ ID NO: 339210 - DNA, 101 bp, Zea mays
tcggccttctgcgccttcattttggcctctgtccctttggaggtcaatctcgccttccaccatgggtgaagagaaggcccacatcaacattgtgggtattg

SEQ ID NO: 339211 - DNA, 313 bp, Zea mays
  unsure (1)..(313): unsure at all n locations
gcgcttgcccatctacctgtagccaggacgccatggcttcccttaagccggcgccatccccatggccgtgcacaaccctagtgctgcccctgtttggagctcgcccatggccgcccctttcttggtgagctcgccccctccctcattccctgctgtagctcatccctgccctatgtccagccacccttccctgcttactatgctggacgccagtcccctccctcccgggagctcacggatacggctgcagcacatcagtgaagaaggcaaaccagcgcggngctccttangtgttctatgaaatgcttgaact

SEQ ID NO: 339212 - DNA, 91 bp, Zea mays
ggtcaatgtgaatcgacgcgccatcatggggatccagccactctttctattggatgcgctcgtacaggacaccaattcctcctctatgaga

SEQ ID NO: 339213 - DNA, 212 bp, Zea mays
tcgggtgaacggtaatggtggcccgtggtgcgcgattcagtgaaacctcgaagtgaagacgcttgacaaggacatcaaagcatcacgcacgaaaggcagggattggttactatcggacttggcacacgccggaacgattgcggacgacaattacctatatggcaagtacgctcacacgatgaaggacaaatttgattagacggagcaagata

SEQ ID NO: 339214 - DNA, 269 bp, Zea mays
  unsure (1)..(269): unsure at all n locations
tcggaggcggttggcgctgcggcgcggcccgatccggcagcgccggcctcggttgccgcccgggcgccacctggggaacgcggtgccgtctcgggggacccctcatctgaggtgaaccgtgtcggcggcggtatttctaacggccacggcgacgaccgggcggctgccgcggctgagaaggctgagaaagcacggaaacgcanggtgaggagtgagttgcggcgccgactggcgggggagctcgaccaggtccgcgtgctctccaagcg

SEQ ID NO: 339215 - DNA, 93 bp, Zea mays
tgtcactcttgccgcagtattacctcttctgccgccgtgccgagaacgataaaccatgcaagccgccagccatggctgacgaggactacttga

SEQ ID NO: 339216 - DNA, 308 bp, Zea mays
tcgctctctttctttctttccttcccaaccaacaacggggccgggcgcacaacaaccaattttaccttcccttcccaacaacaattagaaccaaccgtcccggggcggaaacggtttccttccttccgcttccgaaaccttttccggcttggccggcgcttccttcaattggtccgcggttcccctccctcccgatctaaaccacccgccacccggtttcctctcccccttctttctccctaaaaccagacgctcgccccccttttctacacatatcttcttcacacgaccagcgggaggtacgagca

SEQ ID NO: 339217 - DNA, 141 bp, Zea mays
tcgaaaaaaaaaaaaaaaaaaaaaaaaaaaaaaaaggaggaaaaaaaaaaaaagaaaagaaagaaaaataaaagaaaacaaaaaaaaaaataaaaagagacaaataaaatgatagaaggaaaaatggacataagatagatg

SEQ ID NO: 339218 - DNA, 326 bp, Zea mays
tcggccagagcagaagagacggcaacccactccaggtctccaccccagccagagagccctggagcctggaggggcggggtcgcagcaaggctgaattccaggaagaagccatcgcagccgcgtgtcgcctccttccacacctcagtcacccgttctataaatacgcgccaccgcgtaaaccgcgaagaaaaagtaaaagggaggaaaagggtccggtgtggcgaccatggaaaagggcggcggcggcggaaactagatgatgatgacctcgggcgcgacgggccggatcgtgccggtgttccgctccgtgctgtcgcggcgcgctc

SEQ ID NO: 339219 - DNA, 385 bp, Zea mays
tgtaattccagtggacaaagaaaatgaatgcagcagctccagctttttgttaccattgtggattttgatagcttaatgatttcgaggtgattttactgtctactattgtcaagtccaaagtatgtttcgtgattctgttgcctctattatcttcaggtattaacgcatggccaacctggtgaggaagtaagcttggagttgatcttaagggtagttgctgatgttggccttgtggtatgacgttttactaatccacacatctcgagttttagggagaaagaaattgttttcaccattttgttaaatgtttcatgttcatgtatcatataccagagtcaaccctgtttccttttaggatgcagatgtttgattatccaaattttga

SEQ ID NO: 339220 - DNA, 411 bp, Zea mays
gcactattaaagtggaaaagaggatcaatgagattgtgaaccgcttgaataagacaaaggtggaacggaaacctgatttaaagggtatgtcacatttatttgaaagcatttctgtcgtcatttttatgtcagcaactcagcattctataatgaacatggttaagtatttttctttttgtttttgggattcataatgtgagtatttatctcacaaagaaagtgaggatgtaatgtctaggctctgtttggtggagctgtagcttttccaaaagcacctcctgaagaagctttcgggaaaagcttgggaagctgctccttgaaagcttctctgcttttagtacaacaaagtgctgcttttatcagcttgaagaaactgcttgcctgtttgggggagcctctagctttttgagc

SEQ ID NO: 339221 - DNA, 319 bp, Zea mays
caataattgaccgccgcctcctggcggcccaccagttcctattatgaggagtcttataacagctcgtcgtcatgatcatcatagctgcctgctgggagaaattgttctctgaccacaacacaccacatactacccgccggcatcataaggagagccggctgtgccgcctgaggaggcgtcctaccaacaatagctgcgcgctgactactggctgttcagcaggcaaaacagctgtgccgcctgctgtaatgaagaatccaacaccccgcgagaagaggcttgcttattattcgccaccatggtggttcttcttttcacc

SEQ ID NO: 339222 - DNA, 371 bp, Zea mays
cggacgcgtgggtcccgcagcatctcaaccccatggccaagatcaagatcgggatcaatgggttcggcaggatcggaaggctggtggccagggtggccctgcagagtgacgatgtcgagctcgtcgccgtgaacgaccccttcatcagcaccgactacatgacctacatgttcaagtacgacactgtgcacggacagtggaagcaccatgaagtcaaggtgaaggactccaaaacccttctctttggtgagaaggaggttgctgtgtttggctgcaggaaccctgaggagatcccgtggggttcggttggtgctgaatatgttgttgagtctactggtgttttcactgaccaggagaaggctgcagctcac

SEQ ID NO: 339223 - DNA, 257 bp, Zea mays
gaaggacaggtgagctcattgcacgcagtgtgattggttcatacactggacaggggctcgtgcaaagaaagatcatactctttctttgagcgcttgccatagcccaactagcatctgatatgagttgactataactgctgaacgaagtacaagccccgaaagtaatcatctaacactgctaccacaaggggcaacactttatggtgataaagtgctgagatcatagctgatgagatgtatcatgaattatacgagcg

SEQ ID NO: 339224 - DNA, 391 bp, Zea mays
ggctcggtgcccattctgccaagggccctgttcgcccgcttcgccgtgcccttcagggcctggatccgctgacggcggcaagcatgtttgctcgtgcgcggtgcatcggcgagaggaaggtgaacggggaggattgcttcatcctgaagctgagcacggaccctgagaccctcaaggcacgcagcgagggccatgcagagattatcaggcacgtcacgttcgggtacttcagccagaggactggtcttcttgtccacattgaggattcacatctgacccgaattcagtcggccgcgggaggggacgcggtctactgggagaccaccatcagctcgtccatggaggactaccgcccagtggacggtatagtggtggcgcattctgggcgctc

SEQ ID NO: 339225 - DNA, 375 bp, Zea mays
cgttctcgtttcaaatccatccatcctcgtttcctccgtcccgcagcatctcaaccccatggccaagatcaagatcgggatcaatgggttcggcaggatcggaaggctggtggccagggtggccctgcagagtgacgatgtcgagctcgtcgccgtgaacgaccccttcatcagcaccgactacatgacctacatgttcaagtacgacactgtgcacggacagtggaagcaccatgaagtcaaggtgaaggactccaaaacccttctctttggtgagaaggaggttgctgtgtttggctgcaggaaccctgaggagatcccgtggggttcggttggtgctgaatatgttgttgagtctactggtgttttcactga

SEQ ID NO: 339226 - DNA, 335 bp, Zea mays
  unsure (1)..(335): unsure at all n locations
tcggctggttgatgacctgaacctacacagccattaaaaggcttactggttgtggttgtgggtggctggctctggtgcagtgcacaggaacttccaacggagtatgtgcaagtcgtcagaagttgttcaaggcagcttgtcatcatcaccagggatacaagacatgcttcctcagtaaggtgttatcggaatttttcagttcctgtaaactgataaatcgatggtggcactgtactgataatcttccgtatggtgttattggaatttgtgtgacagttccagcggggctcctgcctcctaaatcactccctcccacattgtggggtttttgtnaa

SEQ ID NO: 339227 - DNA, 322 bp, Zea mays
ggagcagatggcggagctggtgatggcgcagtgcggggtgccgagcggcggcgaggggggcgcgtggccgccgggattcgcgtgggacggcggcgccgcggacgcgtcgcgtgggatgtacggcgatgcggtgccgccgtcgctcagcctgttcgacgccgccggcagcgtcgcggcggacccgttccaggcggtgcagcaggcgccgggcgccggtggtggtggggtggacgacgtcgccgggtggcagtatgctgctgcggctgggagcgagctggaggcggtgcagctgcagcaggagcagcaaccgcgcgatgcggac

SEQ ID NO: 339228 - DNA, 367 bp, Zea mays
tcgcctccccctccggttcgggttcgggttcgtgaggttctccggggttcggtttcgtgggtgagcggatcgagatggcggcgtcggatgttgagtaccgctgcttcgtcggcggcctcgcctgggccacggacgaccactccctccacaacgccttcagcacctacggcgaggtcctcgagtccaagatcatcctcgatcgggagacgcagaggtcccgcggcttcggcttcgtcaccttctccacggaggaggcgatgcggaacgccatcgagggcatgaacggcaaggagctggacggccgcaacatcaccgtcaacgaggcccagtcccgcggcggccgtggaggcggcggcggcggcgggta

SEQ ID NO: 339229 - DNA, 275 bp, Zea mays
  unsure (1)..(275): unsure at all n locations
attcttcaacaacaacaatgatatataatagctgttgaatctctgacngtgtatcttggacgggtgaactctcaaacgctgctgcttagacctanntgttgaccaaanttacactggagacattgaaagggaactcagcatctcttaagtctacacgttacaagcttacactattgaccaagacggtacttgtctctttgcatgtgttttaacatagatggttggtggaaggcggatggctgctataaatcatatgagagtgctggttgcatata

SEQ ID NO: 339230 - DNA, 322 bp, Zea mays
ccggggcggccgccctttttttttttttttttttttttttattcttaaattttttaaacaacccaacacttcactccattggggagactttataaaaaggtggggctatcatacacaccataaatacaactcttaaccaaaacaatatccaccttagttttcaccaaattcaaatacattccaatttaatctcttttcttatttattaaaaaaaaaataatttattacctatcactacattatcaccacataattttttaccttctaatattcaaatattttttacctagattcctcctttaacataaacaatattcttttt

SEQ ID NO: 339231 - DNA, 265 bp, Zea mays
  unsure (1)..(265): unsure at all n locations
cggggcggccgccctttttttttttttttttttttttcactttccactttttttatcccaaaccatcacncatcatcaagccgcccatttcaaacaggtggggtagcaaacaacaaacttttcataaaaataaaaattttccaacctttttatccataccacaattcaacacacatttcacccaatattattttttaccctatcattccacaaacaatcaaatccccctatattatctcaatccattacttttcccaattcccca

SEQ ID NO: 339232 - DNA, 137 bp, Zea mays
  unsure (1)..(137): unsure at all n locations
annnacaacacacacaaaaattctttatacntaanaaaaaccatacctatgtttgtttttttacaaaaaaggggccgccctaaaaaacccaaaaataccccctcccacccccctatttttttttttcaaacaatacc

SEQ ID NO: 339233 - DNA, 305 bp, Zea mays
  unsure (1)..(305): unsure at all n locations
gaaannccggggccggccgccctttttttttttttttgctccaagacacccaaatgtcaattttatacctgaagggctacaccataatcaagttgtctaaacaaaagtaacagggcaggaagcatttacaccatgctctacacatctgtgaaacagatatttcatgtaaccaaacacaagcaaaactgttccctcaatcagcaggttcctgcctccacctgcggcttttatttcacactttatttatgggctgaatcgacaaagagacccctagatccatcacaaattgtactacattgagaacc

SEQ ID NO: 339234 - DNA, 259 bp, Zea mays
  unsure (1)..(259): unsure at all n locations
cggggcgggcgcgccttttttttttttttttttttaaaacactacaataacaatttcctttcagaaccttgaaactncatatgggaggggtattccaaatgaacggccgtgtccaatatacaacaccttttcaaaatatttgcaaaattttccacattctaactttaactaactaccaaaaaaaacttttgatctttcatttagattctatttcccaacaaattttcatattgattgttaaagctatatttttcctaat

SEQ ID NO: 339235 - DNA, 378 bp, Zea mays
tccttaaaaacgaattttaaagagtgaaaggggggttttatacataaattggcggggtagcttccaaagttcatcataatttctaaaccataccgtggggtaacacagcacccttttggcaaacaaaatttatggttacccaactcgaaaaatgaaaaaaaaacttcttaaaaacatgtttaacacttattccttacaactactaaactccttggaaaaaaatatgattaagccttgaaacttaaaacactataaagattctaggggggctataattaccatgggttatttagatatgtcatagaaaccaaatttttctcttttttttttttctcaaccgtaccaattttaaattattttaacaataatttttctttt

SEQ ID NO: 339236 - DNA, 266 bp, Zea mays
gggccggccgcgccttttttttttttttttttcctatataacaaccaaactttttttttctaacaaacttcaacaaaacatagggagatcttatacataatctgggggcgtactcaacaaaacacacctctttaataatcaaaaccctatcataacccaacttattcttctcacataaaaatctctctaccccatcataaataaaaacaaatataccattacaaaattctctatccaacatattcttcaatctaaaatactacttc

SEQ ID NO: 339237 - DNA, 463 bp, Zea mays
ggcgggctttttttttttttttttgcgacaaataaacatcataatttattttttctcagccaacatccaactttcattgtggctgaacggctgagcaggccgtgcctatataattttgagaaaccatatactgtattcactatccagcttccattgtttctcacaaaggtgcccacagatggagctgcattgtttccactagatcaggaatctaacatgctctttgctgatgacattaatagatcttgatcagagcacttatagcaccaaattagatgctgtggtttgtctgaatagcaacaggcatgtccacctaaactacagttttttggcaccagtttaattcaatatcaaaaatttattccccttgacctattattttgaattactcctcaattttcaaagtcttctacaccatttgactcttttttaagaaactctttttttctctaactacattatc

SEQ ID NO: 339238 - DNA, 72 bp, Zea mays
ccgtccggattcccgggccgccgccctttttttttttttttttataacataaaaccacaaattttttttttt

SEQ ID NO: 339239 - DNA, 295 bp, Zea mays
gggcggccgcccttttttttttttttttttttttaaactccactctcaattttttttccatacaacaatacagaaaaaaaaggggtattttcaacgcccacgggggcaacaattccaaaaatttatttataaaatcaacaaaaataaattctcactccaacacacgaaactttcaccttatataacaaaatttatacatctctaccctaaacaatacttatttccaaaaaaaaatatactcttctcccttttttttttaaccaaccacctaaatttttcattcatttctttaaac

SEQ ID NO: 339240 - DNA, 264 bp, Zea mays
tcccgggccggccgcgctttttttttttttttttttttaaaataaaaacatacaattgtttttgttataaaaacaaacccttcaagagggggtattcttgttggacagggggtcaataccccaacctatatctactgtcaagctaccttaaaaatgtggaaatactcaccaaggtgtaaacacttttaaattaaaaatttcgcttaagtaccaaaaaaattacttgttaccaaaataaaacaatcttcaactacttccttcctc

SEQ ID NO: 339241 - DNA, 57 bp, Zea mays
  unsure (1)..(57): unsure at all n locations
tttttttttttnttttttnataaaangctcacgncaaactttttctttgcattgcac

SEQ ID NO: 339242 - DNA, 154 bp, Zea mays
ccggtaactgaattcccgcggcggccgcccttttttttttttttttaaacctcaaaacccaacactttttatcaaccgcacaacatacaaactatgggtgggacaaatcaaaccaaggggcggccctctataaaaactaaacatttaaccacaa

SEQ ID NO: 339243 - DNA, 241 bp, Zea mays
ccggggcggccgcgcctttttttttttactctatcctccgccgtctcgcaatcttttatggctccacttggtgcacagactatttgaacttaaatcgtgagggaccgtattaatattgtcattaatatccatatgatcacaaatgctatgaagatggttgcatcattaaagcttctggctgtttatactaggtctgaaaatatatgtgtcttgttgcaacctattcaccgccctttctttt

SEQ ID NO: 339244 - DNA, 162 bp, Zea mays
  unsure (1)..(162): unsure at all n locations
cacaagctcgagtttatattttttaagnctataatataaaacancgggggggagcgtttacatgctctggggaggataaccaccataccttaaaataatattatttgacctttacccaaatacttaacccatataccaccaaatcatatctctttagagaat

SEQ ID NO: 339245 - DNA, 371 bp, Zea mays
gcgggcgcccttttttttttttttttgaactcatgaacgtttaaatttattctcaatataacacaagcaaacaaaggcgggcgtaaattcaaaggggggaggagtgaacacaaattcctaaaccctaaaccttaaacaaacagggccttagtacaggctttaatgcaggcaccacactctaatgatgcttaagtagcactgacacgacaaatatcatccttctaggactactgacgctgcaaatatcatcattctaggacttatatcctttaaacgactttctgtaccatccaactttaagccttctataaacctcctctcccgtgtaaagctttgtgtggcctactatcttccacttccctttctttcta

SEQ ID NO: 339246 - DNA, 52 bp, Zea mays
ccttcggccgcccttttttttttttttttaaaacaataaacagaacattttt

SEQ ID NO: 339247 - DNA, 469 bp, Zea mays
  unsure (1)..(469): unsure at all n locations
gcggccgccctttttttttttttttttttttttaaaacataaacataattttccatatagcaggcagtgtactccgaccgaggccactgaaagcgatacgggcatacagtcgacgaacacacgcctagctacgacctgctcgactcgatcggaatcacaacacaccagaacagctaaattatcacccaacatccagatgattaaccaactgggaaacatgactgacgaaaggaaactaatacggagtaattattattagacgggatgatgaccctcctgatgcagatccaggcctccctctccttgtgcggntgtgctgctgctgctcttgattattacttgtcttccactgaagcaagtggcgttgccgcctggctcgtgcctgcgacgatctcctttttgggctggggcagatccttgaggaatcccttgacggccgccgccagatccttgtagcgcttccctattt

SEQ ID NO: 339248 - DNA, 111 bp, Zea mays
aaccaaacacttccatttttatatttcacacctctcaatataattgtcgacttaataaaaaaaaacggcggcccttcaaacaaaattccataaatcttaaaattaacatcc

SEQ ID NO: 339249 - DNA, 276 bp, Zea mays
aagaaatgaaccatcttttttctgggaagccacaaacatcacacaagggggctctattattgaactacgagcgatcagaaatctaacagagggcaccaccaaacatgggttgctggttgagcaaacaccaaaattaaacccctgaaggatcaaccaaaaccacacccccaacaaattgggaaacataactgcccaaacaaaacccccccctaaaaccaattcctccccccccctaatttctctcccggatagaaaatcacgcctttttttactttt

SEQ ID NO: 339250 - DNA, 467 bp, Zea mays
gccgcccttttttttttttttttagggggaatattacatttggggagagaagaaaatcacagaacttccagtaacatgagcattttcactcagcagagcagtacaaataatcagagtttcaaaatgaacaaatccatccgggtcataagcatatgaaccacagcatgatttaagaactggcaggccacacatgccagatcgaccacagctgagaacgtcacaacgtacatgttcctggatgcatgggtatcataaaaatgcaaaaccatgacattcgacatggccccagaaatagacatttcactatgagtatgaatggaacaagattacaattgcaaacatgcattgatctgccttacctctaacaaataagcatgatttcagaatcctggggtttgggcttcagtcattcagtggcacagaagtcctaacctctgattccccaaaccccttgaaaattaatcttg

SEQ ID NO: 339251 - DNA, 104 bp, Zea mays
  unsure (1)..(104): unsure at all n locations
cgggcgcccttttatttttttttatattataattataacatnagtttttttaataagaaggggagaaaaaaaaagggggggggaaaaaaaaaaataaggggggg

SEQ ID NO: 339252 - DNA, 222 bp, Zea mays
ggccgcgcctttttttttttttttttaccaaaagcaaggatctatatttcaaggaaacacaagcatcaacatcggcgggcgtattattgggccacggggggggtattctatcgctatattataacatggctacatcacgaaaggggacatcaaatctcatcgttgtccttataaccaccatgcttcacatttaactatctccctcacattccattatcttgc

SEQ ID NO: 339253 - DNA, 175 bp, Zea mays
cttcggccgcccttttttttttttatttttacaaaaataaccaccatttttttttaaactaatcaaaatttcaaaccaacgggctttatactaagaaccggggcgtctttacacaaaaatctcaaacaaaaaacaaaataacacacttaaccaaaattttaccaaaccaattaca

SEQ ID NO: 339254 - DNA, 197 bp, Zea mays
aaaccaaatgataagatcatattcaacactttggtgacattctagggggggcatttacatcacaaacgggggaatagaaactagcagcatgagaaggggacaacattagcctggacgacatcccacaccacatgggatattttgtttaatcctctctgatacaattcataacggaactatgtatgaggttgtaacac

SEQ ID NO: 339255 - DNA, 67 bp, Zea mays
cgcggccgcccttttttttttttttttttttttaatatttaatatttttttttttaaaaaaaaatta

SEQ ID NO: 339256 - DNA, 262 bp, Zea mays
aataaacacaggcggaaccagtgtgcactccacataatactctgctgttactcaggcggctacattaacaggaccagtgagttagatgatgatatctgcctgtttaagcagcggcaatacgaaagagcaactaactattcaactacggcgtgctttcagactcgtttgtagaagaggacatatgcttggtcatgcaagacatccttctcgccaacgggcacaaacgggtcgtcgtcgaaacgaattcattgcccgttgccat

SEQ ID NO: 339257 - DNA, 335 bp, Zea mays
  unsure (1)..(335): unsure at all n locations
attaangggccgggcggccgccctttttttttttttttaccataaccaaacaccacctttttttactttattacaaagatcacccacagcggcataccattgaaacgcgggtaggcgcatcaccatatcatcccattctatatctcaagtgctaacacacacaaactctctaccacaccctcaacccaaaaaaacaatatttcaacaaagaacccccttccttcccaatctaatctaaaaaattctataaacatcacgttttattactaaaacttcattcatcttcttcctcaacttattctatcttattttaaatcaaaattcttcactccttt

SEQ ID NO: 339258 - DNA, 157 bp, Zea mays
cctttttttttttttttttaataaacacaagcaggcaaaattttttacccacataataaaaagcttcaacggggcgcatacatccagacagagggggggccaataatgctcaaccaaccactaagacacacccaaaataattacaaacaattcttat

SEQ ID NO: 339259 - DNA, 413 bp, Zea mays
  unsure (1)..(413): unsure at all n locations
gcggcctttttttttttttttttttttttntngnccacatcgnctttcttttaaagaatcaaaaccgcaatctagggggggttataaagccagtggggtgggcaacaacacactacagacgttattaggaaaactttaaacataagcatgcgccccccaactcgagataacattgtccaaagcattccgttactcctttacactgctcttggtaaaagattttgatatcaaggcactgccactagctttaagaaggctgttaaaggtatgcactagcctcactttcaaatcttgcacatggacatgttcttctccgtgttttttttcattaccttggccactgatcattttaattgcttcttggaaacgttcaccctttttttacgaagagcaaacattttctaccctttttc

SEQ ID NO: 339260 - DNA, 161 bp, Zea mays
  unsure (1)..(161): unsure at all n locations
caccggaacggaaggnccggccgcccttttttttttttttttttttttttttactcacatacttttttttttatacacaaataccctaaaataggtccgctaatataatccataaaagggggccccaacacaatacatactttttaatattaattctaaat

SEQ ID NO: 339261 - DNA, 263 bp, Zea mays
aattaaaatgtgggtatatataaaaaaataggggggaaaaaaaaacataaaaaaaaatttaaaaacttaaaccattatctaaaaatacaaaactattctcaaataaacacataataaaaaaatatttaaaaaaattaaaaaatatccaaacaaaaataatatattattctcaatttataacatatttctcaaaatataacaataaatatattaaaaaatccaaaaaataaaacctacatcctccttaaaaaatttatttaaat

SEQ ID NO: 339262 - DNA, 310 bp, Zea mays
tcggccgcccttttttttttttttttttttttttttttttttttttttttttttttttttttttggaatctcaaggaaggataataatctggactggaaggacattatataactcccctttttaaccccacaagttataatacttcaaattttataaaatacaatctaatataatttttttcatttttcaacaactaaatcaatattttttccaaaattcaatatttaaacctttactttccaaaaatattttatttaaaaccttattctaaataaatattatattaccttaacaattattttttaaata

SEQ ID NO: 339263 - DNA, 456 bp, Zea mays
  unsure (1)..(456): unsure at all n locations
gcgcccttttttttttttttttttttttttgagtatccaagctttttttttcgngcatgcgacgttatantttttggagggtttcaaaaaaaaaggggggcgtcgttactcaaaacaacggcgggtctgacatacctttttctaaccgagaggcaatttacaaaacctcctggcttcatcccaaagttttcttgtttcacaagccccagtcctccttttgcattttaaaaaacttaaccaaaagttttgggaaactcacattcttttaaaatttccacccttttcaccaagatgttttgctttttttcccccccataacttaagacgattgtgggggacctttttctaggtttaaatccccccccattttttttataaattccatatcaccttttgtttatagggtgtgaatcccccagctttttgtatccctattttgaacttcaaaaatttttt

SEQ ID NO: 339264 - DNA, 81 bp, Zea mays
atctcccatttttttttaaaacaagaaaaacaaataaacgagcgctttttttaaaaaaagggcccgccaaaaaaaacaata

SEQ ID NO: 339265 - DNA, 113 bp, Zea mays
  unsure (1)..(113): unsure at all n locations
ggtctttaattcccgggtccggcggcctttttttttttttttttttttttttttttttttttttttttttttttnntnnccaaaaaaattttgattttttgaaatttcaaaaa

SEQ ID NO: 339266 - DNA, 382 bp, Zea mays
cgcggccgccctttttttttttttttttccagtttgcgtcgcgaatgccaaatctatgtcggcttctacggagtcactggctcctccgccgaggcggaggactggccgacgccgatgtccggcaggtccgtattgacggcgaaccggagcaaccccttcgtctcaacaaacctcagggccggctgcagcacgagcccgatggccactgcgccgaggctcaccagcgccaccttgagcgtcgacagcgccagtaccacgacgatcagcgccgtgggcggcaccagcatcgccacgcaccccgcggtacctagcgggacacggtacggcccgggcgcgttgggccggcgcacgcgcagcaagacgaaagcaatgaactctagca

SEQ ID NO: 339267 - DNA, 431 bp, Zea mays
gcggcggccgccctttttttttttttttttttatttttctaccaaaattttttatctatgacggcaaataccaaatcaggggcttctttaacaaaacagaggactacaacaaaccaatttcaatcatatcaccaataaccacaaacctttatcacaccattttacataacaaacccaaaaactccaatataatacaatcactatagccacaaatacaattttcaacaaaaccacctttaactttttcattaaaaacaaaaatactatcacctccgaaaatttaatcaaaaaccccacatatcctttatttccctaaagctcacaaaacacccatttctaaaaaccccttctcactttcataaataataactctaccaattttttcattatacccaattttaaaaaaataccatcccttcacaaattttctt

SEQ ID NO: 339268 - DNA, 298 bp, Zea mays
gcggccgccctttttttttttttttttttttttttttttcttatttttttttttaaaaccaccaaaaaattttcatggggtattataaaaaagagggggtgttttaaaaaaaaaaaaccaatttactacattacaactccaaaaaaatatcaaattttaccactttattcacaacacaaacttttatttcccatccccttttacgattgccaaatcctaacatttattcctttcaattaacctttccaatttttcacactttttctccaaaccataaccagttattaatctctaaaaa

SEQ ID NO: 339269 - DNA, 381 bp, Zea mays
tatcctatctgccggacttacccgccacggagggggtgtcaatctcctaggccatgcgttccctaatcccgcagaaattctcgacgcgctagtcactaaacatgtatcaagcccaagccctggctccaccccaagcacatctacaccatctagaccggcctctcgggcgagaacattcgcatgctgctgaacgacttattcataatcaacaagccccacaagctcctctcaaggtacccgccaaggacgacccacgacgccaagcaccacgtgcggcacataggtctcttgaagctcaaccgtaccagcgacgctttgctccacaccataatccttcggatccgcacgctgcgtgtccttatgcgtgtggtgtgcaagtac

SEQ ID NO: 339270 - DNA, 360 bp, Zea mays
  unsure (1)..(360): unsure at all n locations
tcttcccacgctncctgctaaatcatatcggagcacacaagaaagaaatttatttcccaaattctatggcatactcttccnnaggaaccanttatctacatcaattgtctaccctttgttttgcggtatttttaaaagcccttctcaaatctttaatacactttaattaacccttatagagtgttacaaatgtagtttctccttaatgaagatattctttaagaagcttcaatttatggtaataatatacttgtcacttattagcttccaatttgtcatattttttttcagttgcattcatttttttttatacattttaaacttctcttttcttatttttatgattttcaacttcatttc

SEQ ID NO: 339271 - DNA, 305 bp, Zea mays
ccctcattatgttttttaccacttatacataatttactcacatcctttttattctatctaccattctgaccatatttttctttatatccacaataatataaattttaaataacatattactcctatttcttaatattaatacaaactctaatcttttatttatttatactataactttttttaatttatactcactatcctaaaactatttatatccaattctcttttaattttcaatttcatatatctaaacattattcttcatactatactatccataaactatttaaacaattttttatatt

SEQ ID NO: 339272 - DNA, 130 bp, Zea mays
tcgacccactcgtccttggctagtccgcggggcgcccactcccaaacgccaaaaccctatctccccgggcagccacccaccccaagcaccgtggtgccgccttgcgctcgcccacaggcgccacgtatgc

SEQ ID NO: 339273 - DNA, 216 bp, Zea mays
tgtttatgttgccatatagtcaagtcgagacgagaccgtcctacggccgagtgtcgctcgctagctaggggtttcaccaatggaggggcccaccaccttccgtcgaggaccctattgtgcgcgcaacatggacgacgtgaaccttaccttctagaccttcccggcggtcgtggacactagcaggttggaccagattggcatgaaggacgacctact

SEQ ID NO: 339274 - DNA, 51 bp, Zea mays
  unsure (1)..(51): unsure at all n locations
taaaaanccacccacgcgaacacaaacacaaatcctatacaagccacccac

SEQ ID NO: 339275 - DNA, 345 bp, Zea mays
tttatcttcttgctcctcctaacactgggggggcactctttcgctcacgaacggctgttctcttcttactcctaccaaggccagtattcaaaaatgggtgatccaagtgagaggaatggacacggctctcttacccgtttgctattctgtgatccatatttgcctgcttctactaactacaccagggagtatttgcaggactatccattcattcatgttgatgaagtaggtcttgagcaggtacctgttgttattcacagctatcatatatgcgtagtaaaaaataagcgtatagattcagatattattgccaaggcatcttatatgaagattttaatgcatttt

SEQ ID NO: 339276 - DNA, 344 bp, Zea mays
atcaagtgcataacaccttcagggaggcccgcaggacagctgtttgtgctggaagatctatataactctggcgcaccatggtctccgtggtcgctgcacgctgttctttggcatttcagaatggcacaaggcctagcaccgtcccatatcgttttaccaacgagatgtgctgcgtgtgcacaagggacgacaaggacgctgaagtatattggcttcaatctgaattgaggggagcctgttcatatcataatgaccaccattgatgggagaacattgcagacaaagcacaccattagctacacaggtgcaacaatggtaggccatggatcctatctaaccgtttt

SEQ ID NO: 339277 - DNA, 272 bp, Zea mays
acgtaagctattatcctctatagtctacccacacatccttttttgtttacggtaactactctacctccgaacggccttcttaatatacaccagggctctctctaccccttctcaaatccttttttccatacttctccttattctacctctcgtcaacattacttgacctactactcactatcattatacatgctaatataaaaacttgaccattaatatcatattcacattttactattaatatatcacatactttcaccccattattttca

SEQ ID NO: 339278 - DNA, 195 bp, Zea mays
  unsure (1)..(195): unsure at all n locations
tagtctacccacccgtccttttttttttacctcaagttacctccatgtgcactgtttttttgttnaaaaacacacaaaaaaaaaccatcaaaaaaacaaacaaacaatacaacaccaaaaacaacactaacaccaacaacacaaaaaacaacctcccacaacaaattaaaaaaaaaaaaaaaagccccccccccc

SEQ ID NO: 339279 - DNA, 416 bp, Zea mays
tccaaatcgcgaaaccccagccgctcctcgatggcggcctggagccggcgcgacgggatggggggcgggaactacgccaggcagatggcgatgtgcttgagcatgattgcctccggcatcgggatggagaccggcggaattaagttgctcgatagaatgactgaagactctgacaaggaggagcacctggggccactgcatgatgcggcaagggcaggtaaaatggatgtttgcaaacacctggtggagaatcttgggtttgatgtcgatgttcgtgctaatgatggttcggggaagactcctttgacttgtgcagtgtcatgtggcaaagtaattgctgtgaggtatcttattgccatgggtgcagatcttgaaaaacaagatgctattggctttactcctctgcactatgctgg

SEQ ID NO: 339280 - DNA, 143 bp, Zea mays
tcaacccacgcttcctctacttgatgggctacaccaccatgaagagctttttaatactctacggggcttatcactttaccaatttcttccccttctaatagcgccaccagatccatcccttataaaatctcactcgatagctt

SEQ ID NO: 339281 - DNA, 363 bp, Zea mays
tttatggaagacactgtcacttggtgagagcgagggcccgcgtcgccgccggggtggttgctcttctcgccctctttgtcgtcccggccacggcgcacgcccctgccgagtggcccaaactcgcccaaggcgctgaaccacccaagatggcctgtcttccggcgtcgccgaccagggcccccatggactacccggcctagacttccacgatgtcgaccgcgtacgcctgctcccgctacgctgcagccacaagcaccgtatgtgcgggatttcgaaacacgatgtccccagcatgagcctgcggtattactctggacgccactcccgtcaccaataagagcacagtctcatctgccttcgcca

SEQ ID NO: 339282 - DNA, 131 bp, Zea mays
tcgacccacgcttctcttgtcttctcctccccctcttaccaagggggcttcgtgttagggttactgagggttttgtggagggtcgatggcggtggttgatgtggagtaccgttgctttttttagtgttctt

SEQ ID NO: 339283 - DNA, 297 bp, Zea mays
tttctttcttttactctagccctcccagggtgtcggttcggcggcggcgatgggtgtcgccccggacccggcggacggcggcgccggcaccggcaccggcaccggcgacgactggttcctcgactgcggcattctcgacgaccttccggccgtggactgcggggccttcccgtgggacgcgtacccgttttctttcaaccccattgtggtagtgtgctgatttgtgaattcccatgttgtttttaaggagcccaattaatgtcttcatatatgcctggtagaattaaatatttttat

SEQ ID NO: 339284 - DNA, 200 bp, Zea mays
  unsure (1)..(200): unsure at all n locations
tcgacccacccgtncgtctcccttggcgagcgtctgtgaccancaaggtgtggtagcttgtctcgagagtcaatgcattgttctacgctacataactacacacactatctcatgtgctattttggaccgctttaacagccctaataactgcaaagccatttctcactttcatgtatcacacaaaacatatattcatactt

SEQ ID NO: 339285 - DNA, 158 bp, Zea mays
tcgacccactctttcctgtacttcaacacccttctctcttaggaaagactatttttctttattcgggtgcgactctcccttacaacatcccatttttcttccttctttcactcaatttatctttctataactactttatatacatcactattctcata

SEQ ID NO: 339286 - DNA, 242 bp, Zea mays
tctacccacttttcctgtctagaccagccttcaaactattggggagggctccctctccgagaaagcagacaatcctcatctcctcctgcttcctctctctctctccctcgccgtaccttctttacaccaggactgccaaaatgaaactcgtcagattccttatgaagctaaacaatgagacggtcaccatcgagctcaagaactgcactgttgttcactgtaccatcaccggtgttgtcata

SEQ ID NO: 339287 - DNA, 167 bp, Zea mays
  unsure (1)..(167): unsure at all n locations
tcgacccacgctttcttgtttactgatgctattgntgcggtgaagtttgtacattggagccgcggggagagtttccgcccaatgatagtgtatagggtcacgcataataacacgatgtgctggctgatggtgcccattcaggcgagagcgatgttatcaacccatct

SEQ ID NO: 339288 - DNA, 290 bp, Zea mays
tgcgggcgcccttttttttttttttttttttttattatctcatatgatctattcgaacacaactgtatttaatacatcaactgaaaatacccacaagagggggtagaccctgctcaagatatcacgggcctaggcaaaaaaacgttctacatctcacattgcaacctgaaaactactatcaactcactaaagaactagcatttccagctccataaacgtgaaacaagcaaagaaaaagccgttggattgtacaagctttttgaagcatgataccatgtttataactcctg

SEQ ID NO: 339289 - DNA, 288 bp, Zea mays
  unsure (1)..(288): unsure at all n locations
acaccctacaaaacctctgtttttttcatttttanccgggttaaggccaaacaagagggtgggtgactcttgtatgggttggccagagagttaattacaaaaaaaccaaaaccattttccactttttccaaccataccaatacacattggttggtttaccaagacatcctactctctctctttaaatgctgtccaccaaccaatataacaattaacgaacggacaatggcttaccaactaaccaaatcgactcttaagtgccacacatgtaaagatgatgcatcagca

SEQ ID NO: 339290 - DNA, 411 bp, Zea mays
gcggccgcccttttttttttttttttttttattatacggtaaggaacctttcaaatgtgcacaagtatccccaaagaacggaaattcacgtcgtgcggattgctccattttccgctccaactttccatacaggtataaaaccaaaaaaccacaaaagaaaagcaatccagttaaccaaacttcaacacattattttccacccaaggaagcattacaaaaacaatttcaataatgtgattagcataacactaggattcccattttaagacaaaaccttaaattttaggccaagtaactggaatcgcccattcccacaccttaaaagtttgcccaccaattcaccataattaacttgccaatccacttagtttaaaccatttcgaaagctatttaaatttttttaaaccaatt

SEQ ID NO: 339291 - DNA, 78 bp, Zea mays
  unsure (1)..(78): unsure at all n locations
tgcggccgccctttntttttttttttttttttttttttttttttttttttttttttttaataccaagcttcacatata

SEQ ID NO: 339292 - DNA, 472 bp, Zea mays
gcggccgcccttttttttttttttttttttttttttttttttttttttttttttttttttttttttctaaaaaaaccggaaatttctcgtgttttgacgcgcccactaaatctatacatacattgatcatatttaccaacccatcacttgtttacctaatattcacttacacattgcttcaacatttatatctcaaatatattaaaacaaaataaaggatatttttataaaccaaacctttcttttatgatcaaaactcacaccacaattcccttattaaaactcaacttaaatgatcaatttcaatcttcctcaaaaatcttaaatttatcttcccccccaaatttcttttcttccattcccaccaatctatttaatcctcactaaacaaaatcctttttattaccattacttttcttcccccaccaaaaattacaacttttccttttaccctttttaacctccctatttt

SEQ ID NO: 339293 - DNA, 223 bp, Zea mays
gccgcccttttttttttttttttttttttttttttttttttttggctagaccagcaagattaccttttccatcaaggtcattttaggcaaacgacatggcaaccagttcttaccaccactcgtcagaatctagagagattgaaaaaaaaacaattcttttcttcttttggggctcccaccacaaaattacctgagtagctctcgagcaaacactaccatacat

SEQ ID NO: 339294 - DNA, 164 bp, Zea mays
aacaaaagaacttcttttaaagcaagatttatttattgagggggcgaatgccattatcataacaacccttttttttacatttcccaattactaccaaataaatcccatataacacctaagttctcccttaaaaattcccaccaataccatatagaaaaataaac

SEQ ID NO: 339295 - DNA, 158 bp, Zea mays
ggggtaattaaaaaagacaaaaggggtccttttaaaccaaacaaattacttttaaaacaaattattaactttattcaacaacaattttaaaggatcaaccacataatttacaattttgcgtctctgaaaatcctaaaactaaccaaaatatctttctt

SEQ ID NO: 339296 - DNA, 122 bp, Zea mays
ctccccacacatatatattttaacaacattaccacgaaaataatacaaagacttacttctaatacaggagaagccctcaccataatatttataccaatttatttatttattctataacaacc

SEQ ID NO: 339297 - DNA, 340 bp, Zea mays
  unsure (1)..(340): unsure at all n locations
aatcnatcttcaaacccgcattaaagctttatcagaggaaacacaccncaggagtttttataactcgggggagcancattctatcaantttcctttactnttaccnattattcnaatccccattacaaacatcttcacctaannacctaaanaacacacttttcccacntcatctataatccaanatcantntnccactttaattcctcctnttcccttaaaaattccacttntccttctaaattacatacatctatccatcattactatcatcacattaantcctatattctttatcatcaatcttatcatcaatatcaacacttcttctacctccttt

SEQ ID NO: 339298 - DNA, 219 bp, Zea mays
aacaacatccaacaaaattattttttttttaacttccatctcaactcttttagtacagttttataacattcagggacggcctaacttctaacaaaaatttaaccactacaaattttttaacaacattcatcaacaaattacattataacatatctatctccatcacttatcatcttcattcaataaaaaatcacatcaatatttacaaattcatattaa

SEQ ID NO: 339299 - DNA, 214 bp, Zea mays
attcacaatttctccattttaacacaacattttttcaacataagaaaagaacccattccctttatacacaaaaataactaataacactttacataacatacccaattttccttaatacacaatttattatttactattacctaactaaatacctccatacaattattaacacctcaatttcacccttattctctaactctaaacttacaaaaac

SEQ ID NO: 339300 - DNA, 169 bp, Zea mays
caaaaccaaacacaaaattttttgtttgtccctatttggggggaagaagaaacccccttcccaccaaattccaaaaatcaacccctttcaaaatttttacccctccctgggaaactccggtttaaaaaactaaatatatttttgtccccacaaaaccacaactcccaaa

SEQ ID NO: 339301 - DNA, 170 bp, Zea mays
  unsure (1)..(170): unsure at all n locations
cgtaccgtgtcctgaaattcccgggtgcgggcgcgccttttttttttttttnttttagtgtcaaaagagtcacttgtgatgttatatcaaatnntcagaagtgtgcataacacgagtggtatatggaaccgatgtgggaaggcatagtctacanaaacnntctggtttca

SEQ ID NO: 339302 - DNA, 476 bp, Zea mays
accggtcctgattcccgttgcgccgcccttttttttttttttttttttttttttttttttttttttttttttttttttttttttttccacccaaagggttttttttatcatttgagagaaatatacctccctttcccacaaaaacaaaatggcaaacccaccaaaaaaaattacagtcttattctttagcgggctcacaagacccttacaacgggagcggaattgcaccaaaattacaaaaggttgagctcaatgggagttatttgggttggcttctcctattgacaaatccttggaaaaaactgttgacggcaagcatatcttaaaaaaccttaaggccatttacatcctttttttcaaatacagctccatcttgaaccttcaactttactccaaacttggcggtaattttcacctttcccttttaacttaattccaaaaccaaaccagtcatttccataaaccctttaaacttt

SEQ ID NO: 339303 - DNA, 152 bp, Zea mays
cttccttattccccttccaccccccttttttttttttttttttttttttttcttattttttttttcctttttcattttttttttttttccaaagaatttttttaaaagaaaaagaaccccccaacccccttctttacttttcctccccttcc

SEQ ID NO: 339304 - DNA, 430 bp, Zea mays
  unsure (1)..(430): unsure at all n locations
cggtccgtgattcccggtgcgccgccctttttttttttttttttttttttttttttttaattttttttaaaagccattgataactttgacattagggaaacaccagaaccacggagggacattttantctataaactactgccaggtttcaagccatcaaatataaaaccttttttgaattaccttgacccaaaaagcaattatgttacatcatctaatcattagcccacatataacactcaagttgcaatatcactccaaaacaaaagtggcacctacagaaatatcaccctaggttttcagatccatgatgtcacttacaatttccccattaaaaacctttaagtactttacaatcttgttcctttaaacacattcctggtttattacctacttaatgtccttgttcttaacactaattttgttaacc

SEQ ID NO: 339305 - DNA, 149 bp, Zea mays
gccggccttccttttttttttttttttttattttaaaatgtcactttttttttatcaaattcataattttcagaacacgggattttaactcgaaagggagggattttttcccactaaacccaaacctggaactattacacaccctttta

SEQ ID NO: 339306 - DNA, 379 bp, Zea mays
ttgctgccgccctttttttttttttttttttttttttttttttttttttttttactttgcattgcatatatggttccaacgcattcttttcgcattggaaagatcgcccaatctaacaaaataatgatggcaaaccatgcctcgtacaaaacaaaggcgacgtcttccatagttgctgaacaaatatcactgcgacaaaaaattttcccaaccctaaatgatacagggtagtgtacactccaaacctttcttaacgtgcctcggtaccttaatattctactatttcaagtcaaccttttctttatatgtacaaccttaaccctttattataacattgtcatctaatcatccatcctttactcattcctctttctctttc

SEQ ID NO: 339307 - DNA, 124 bp, Zea mays
  unsure (1)..(124): unsure at all n locations
aancnaanaccactcccccaagaagaatttttttaaaaaaaaaagaaaacccttttcccctcccttattctttttcttttattcatcacacccccccaaaaaaaaataaacttcctcttttatc

SEQ ID NO: 339308 - DNA, 233 bp, Zea mays
  unsure (1)..(233): unsure at all n locations
tgcggccgcccttttttttttttttttttttttttttttttttttttttttttttttttttttttttttncccaaaacagagcatctaaagacgatggagggggtccatatttttttattatcccctaaacctatcattaaatttaaattggcgaaaaatagtgcccaaagagaacttttttaacacttcacccctaaaccatactttttactacatgttagcaagcaatttc

SEQ ID NO: 339309 - DNA, 190 bp, Zea mays
aaaaaaaaaagcaaacttatatattccctcatcatttaatttttcccattacccacataaacattataccttccttattttaccaaattcaaaaaatattccccccccaaaaatccccccccaccacaaataaatttttatgcaacacacccttaccaccctacaattaaaacttattaatttacattac

SEQ ID NO: 339310 - DNA, 339 bp, Zea mays
  unsure (1)..(339): unsure at all n locations
aaaaaaaaaagaaaacttatttatttttttttatattttaattataaaatattaataaataataaaaaataanaaaaaaaaaaaaataataaatttttttttataattaataattataaaaaaaaaaattaatataaataatttgnttttataaattaaaaaatataaatacttaaaaaaaaaaagtatattataaattattattaaaataataaaaaaataataataatatattataaaaataatatttatataaattattaaataaaaattaaatatattttataataaatataaaaattataataatataaataaaaatatacaaaaataaataaa

SEQ ID NO: 339311 - DNA, 362 bp, Zea mays
  unsure (1)..(362): unsure at all n locations
attcccccgccagccgccctttttttttttttttttttttttttttttttttttttttttttttttctttttttttttttttataaagaattttttttaaaaaagtaaaacctttttaaccccnnaaaaaacccccaacccttctttttccactattatatttaaaaaattcctcccaatcacaaaaccccatttttttaaataatcccaaaaaaaaacaccccttaattttacactcccccctccccccatatttaaacccccccaactctaacccataatcccccccatctcttctcttattcacctaaaaatcccctaattcttcttaatcttatttattacccataccttaatccttc

SEQ ID NO: 339312 - DNA, 191 bp, Zea mays
  unsure (1)..(191): unsure at all n locations
accggtcctgttttcccttttccgcctccctttttttttttttttatccaataattattcattctttttttttcanaaaggaaannanancnaaagcaaagttttttaaaaaaacaaagcaaacccatcttcctaaatccataattcaacaccccatcaccactccctcctcaaacaacacacacccccac

SEQ ID NO: 339313 - DNA, 357 bp, Zea mays
accggtccgtaatttcccgttccggccgggctttttttttttttttgcaaataagttctttgccttaactttatgtcaccgtagggcgcaaataaaacctaacgtccattttggaaacaacggtggcaagtccaaccatattatcgaaggaacaatactgtcatgtgccagacaacctttggaaacacccgcactgagttggaaactgaagatagtttgttatggccttcaagttaggacataatgccttcggtcagtgataatgcggcaagctgactggtcgggaggtttggtgtttgctgttgggccacattgcggagaacatccattgcctcagcaacctttgacttgagagca

SEQ ID NO: 339314 - DNA, 405 bp, Zea mays
ggccgcccttttttttttttttttttttttttttttaatttttttttttttcccccaagcgtttttattaatgggagcccacatcccccttgggagaagcgggaaatcatccacaaatccaaccaaatgtttagaaacataaaaaaaatagtccccactatatctacagttgcaacatataaccacatttgtcttcctaaggtaaatcttccccctaaaagttacttttttttccctaaaaatttaacctactatattctttaattgttaacctaaataatgctcaaacattttctctttatcttcttcaaaactatcatcaatattaaatatcctcctccttttcttaatttttaacacaaaactttgctttctcttttaactttattcctttcaattttaaaa

SEQ ID NO: 339315 - DNA, 141 bp, Zea mays
  unsure (1)..(141): unsure at all n locations
aaaaaaagagaaagactttttaataanttttttatttattaaaaaaaaatataatataaaaatatcaataaatattaataaaaaatatataattaaatatttttaattataaaaaaataatataataaaaaaatttttttt

SEQ ID NO: 339316 - DNA, 235 bp, Zea mays
  unsure (1)..(235): unsure at all n locations
tccccttcagccgcccttttttttttttttttttttttttttttttttttttttttttttttttatttttttttttttttttaagaaatttttttaaaaaaaaagaaagatttttaaacaatataaaantaaatattaaaaaattcattttaaaaaaaaaatttaaaaataaacaaacatttaaaaaaatttcttttccctaatttataaccccccaccccccaaaaacaccccc

SEQ ID NO: 339317 - DNA, 350 bp, Zea mays
  unsure (1)..(350): unsure at all n locations
tgcgggcgcccttttttttttttttttgaacggaaagtgtggaccaaagtttgcttcaattctgccaaattattaaaccgactgacaaaggcaaaaaaaaacgatgggtgtaanatcagacaaaatctgcccaaacattcactaaaattttgccctgagaaagaaaaccacaagcccaaaactgtcatcgtaatctttgggcgccaaccaaacgcgtttgccactatttgaccgacagcgcatttgaatctagcattggggccaaccaggaatgccagcaacaacaacgagtgcattaggtgatgaaagcacagatggattcacatacaacagctggtacaaaaaaagac

SEQ ID NO: 339318 - DNA, 361 bp, Zea mays
  unsure (1)..(361): unsure at all n locations
gtcccttaattcccgtttcggcgcgcgccttttttttttttttttttttttttttttttttataattttttttttttggaaaacaaacantatcacgagctggaactcaaaagtgtagggtgagaaaccacgtttaaaccacnaacatatcaaagggttattttgtgctactgataattcgactatagcttgcaatacattttttagcaaaagcaaactctgacccacattttctggccccccatttacacgtaactttttataaaaaacttccttatgtcctccacaatcgcaatgggctgccctttttttaacttgaagaccctttctaatacttaaagctcggtggctgtcgtgtccc

SEQ ID NO: 339319 - DNA, 102 bp, Zea mays
ccggtgccggattccggggcgggcggccttttttttattttttttattatatttgtttttttttgtttttttggtaaagataatttaattagggggggggtt

SEQ ID NO: 339320 - DNA, 103 bp, Zea mays
  unsure (1)..(103): unsure at all n locations
agattatccatttttttttacncactacatcnnacacatatctaagatatatttttaacaaaagaaagaacactccccccccccttacatcctctacactctt

SEQ ID NO: 339321 - DNA, 219 bp, Zea mays
gccggccgccggcccggcccaaacaaacaccgaaccagggagagaaaaaaaatgatagactgttattcctaacctaacctacgaggcttccaactacgggggggggggacgttggcccgccggcccccccgcgtagccgccggaaaaaccgcgttttgggccgccttcttctaacgggcatttggcccctcctttcttggccttccagttgttgaagca

SEQ ID NO: 339322 - DNA, 160 bp, Zea mays
ccttttttttttttttttttttttttctttattttttttttttttttttttgttttttttatactaccaagaaagacacttttctggttttgtgtgacaatcttcccccatatacaaaaatacaacgagtgtcaaaacactttttaaacatcacatgttt

SEQ ID NO: 339323 - DNA, 199 bp, Zea mays
aatgtaccattcataaagaaaaagttactttgcaaaatggaagactttacatttcaaaacaccatccatgacaaaacaaaacccaaattttgactcccccaattcttaactataatatagatatcgcatttaaacatgcaccccaccagtttaactcttcactcaaaccatcctaaacctctactgtctcaattggggc

SEQ ID NO: 339324 - DNA, 383 bp, Zea mays
  unsure (1)..(383): unsure at all n locations
attcccctgcggccgcccttttttttttttttttttttttttttttttttttttcattaatagcccttgtttttcattantagacagatttcttaacaacgatggggggggccatttcatacccattccaggttgagtctgctcaaatttcctagtagttaaataatcccaggtcagcgaaggccaattggctatttcttctaatcaagggtgcaaccaacacaaaatggccttcttctctcctaaatggttggcatttgtccgactttttaaaaaaaaaaaaattttgaaaatccgacacacctcaacaaatttattcttttacaattcaagagcccgacttttttaagctccttctactcatttatcccttaactcaaaaa

SEQ ID NO: 339325 - DNA, 211 bp, Zea mays
  unsure (1)..(211): unsure at all n locations
cctttccttattcctcgtgcggccgccctttttttttttttttttaaccatttactaaaccattcttttactctgnttcatctnaaacatcacggcggatttcttattagtcttagacggttactctcatcattcacttcattacaaatatttttcaaaaacattttcattttacaactaaaacaaaataaaatatttaaccctctttttt

SEQ ID NO: 339326 - DNA, 353 bp, Zea mays
  unsure (1)..(353): unsure at all n locations
ccgcccttttttttttttttttttttttttttttttttattttttttttctttttttttttttttttttgtaaggggcaaaaagaactgaagagggggtctcacaaaacttaanaaaactaaatcaatcaataatatgctatttaagtccaataactccatttggaacaaaacaccattttttttttttcccataatttctaacaaaataaccctaaaactaangggatcttaacctaaccaataattatcttcttttaaaaaccctttaaggtactttcaatttacatatctccctaaatcttactaatattccaaaaattttccttttaaaatccaccacaaatattttat

SEQ ID NO: 339327 - DNA, 115 bp, Zea mays
  unsure (1)..(115): unsure at all n locations
gctgttgaatcggcgcttattataatagaaatttagttncatacaaaagcgtcatcttctccaacatatgttgcttttnctacataaacctatcttaaagcaaaacaacatcata

SEQ ID NO: 339328 - DNA, 282 bp, Zea mays
  unsure (1)..(282): unsure at all n locations
tgcacgtaccggtcggattcccgggcggccgcccttttttttttttttttttactctagannatccaatttttatttcgcgcgcactaacgatttatttatgggttcaatctaattacaggcgggtcctttttactgttactacaaataattaacttaaaaacacccaccgacccccaactaaatttttacataacctaaattggatacacaaacatgcctactaaaaaaaaaacacgtaccaataccccctttctaacaaacgcccaccctctatttctaa

SEQ ID NO: 339329 - DNA, 238 bp, Zea mays
tcccgggccgccgccctttttttttttttttttttttttttatttttcttttttttttactctttcattttactttatatttttggtttaatatacttaaatgcagggtccctataaaataatatctactttttttctaacaaaaccccatttaacccaaaataacccccaccccacacaaaaaatatacactcttcttaacaacctaccaataaaaacccttcttcctaccccaacc

SEQ ID NO: 339330 - DNA, 296 bp, Zea mays
  unsure (1)..(296): unsure at all n locations
accgggccgggattccggggcgggcgcccttattttttttttatttatattaaaaattataaaatttttttaaaaaaattaatanntaaaaatgggggggggaatataaaaaaataggggggtaacaataaatataaaaaaacagataaagaaaaaaatgaaaatactaaataaaaaacattaaaagaggtaaaaaaaaaaaaaaataaaaaaaaaaaaaaataaaaaaaaaaataaaataaaaaataaaaaattaaaaataaaaaaaattaaaaaataaaggtagagacaattat

SEQ ID NO: 339331 - DNA, 79 bp, Zea mays
gcggccgccctttttttttttttttttttctcttacacaaatcagaaccttaacttgtgagtttcagttttattacatg

SEQ ID NO: 339332 - DNA, 116 bp, Zea mays
cggaatcccgggcggccgccctttttttttattttttaaactataaaggatacaagcttatttattataaaaaataattttattaaataggggagggtaataaaaaataagggggg

SEQ ID NO: 339333 - DNA, 270 bp, Zea mays
cggccgccctttttttttttttttttttttttttttttttggaaacgaaatggctttattcttttaactctgaaaagggccctcccagattaggcgcaaggggacactatctcaacaaccgacaccacatccatcctacaatcctccagtatacggtaacataagtaaactaggaataggaaaactttggtacggagctaatgacatcatgggcacaaatgtacacataaggaaggtatcgccagtggtggatgctcagggaacggaggc

SEQ ID NO: 339334 - DNA, 76 bp, Zea mays
gcggccgcccttttttttttttttatttattttttttattttattttattttatttattttaaataatattatttt

SEQ ID NO: 339335 - DNA, 56 bp, Zea mays
ttcatttttttctctatagctttaaatcatgtgcttccttttaggtgttcctttta

SEQ ID NO: 339336 - DNA, 154 bp, Zea mays
ataagaaccaagctttttttttccagcatgctacatctaaactctggggggccccaaaaatattagggggctttcaaacaaatctcaacatcccaactaacttatatcctccccaccctttctaaacttactagcaccagatccaaattttttc

SEQ ID NO: 339337 - DNA, 352 bp, Zea mays
gctgccgtaccgtccggattcccgggcggccgccctttttttttttttttttttattgaccaaatttgggaaaacccatatatggaaaacccatatatggtcggacaaaatggttcagtttccaagatgccaaacaatgatcaagttcacagtattttcagcacaggtcccagatctgtaccctgacattccagccagccgctactttatctgaactatccctgtccttgcgagcatctggatcttgtgcatgacttcggggttcttgaggtgccccttggcattcacggggtttttctgcaaaaccgtcaaaacctgctttatgatctgatcaatcaggatgttctggatc

SEQ ID NO: 339338 - DNA, 97 bp, Zea mays
cgtccggattcccgggcggccgccctttttttttttttttttttttttttttttttttttattttgtattgatggtaaatttttttaattttggggg

SEQ ID NO: 339339 - DNA, 245 bp, Zea mays
aattcccggggcggccgcccttttttttttttttttttaatttaaaaatacttcattttttttttttctcccatctaatcctcatctgggcgggttttactcaaggcaggaagggccaaccattctttttactaaaaaaactacccatcccactttcacacaccctattctttctttccacctttccacccatttttattccccccatattttttaataataacaaaaaaaaacaatgttattca

SEQ ID NO: 339340 - DNA, 245 bp, Zea mays
gcgggcgcgccttttttttttttttttttagccaataatgaagcagaccttcagttggagaacggagaacccatctccaagatgggcaactcaaagctctggcgagagcacatgttcagacagtcatacaccagcacgctacgaccaggcccctcatttgagacagaaacctccactgcctggtgcaagcccggtgacatacggtggagcactagccattcattgtgactgctagctatacgcaa

SEQ ID NO: 339341 - DNA, 182 bp, Zea mays
gcggccggccttttttttttttttttttttttaaactccaaagccaaaaatcttctcattattctcatcaccaaatctgggggtatcagaggttgtggcgagggagcattgcacctacaaggatgcgaacaagttacaagctcaaggcattgattaatcgcacagaggtggcggcgcgccac

SEQ ID NO: 339342 - DNA, 268 bp, Zea mays
  unsure (1)..(268): unsure at all n locations
gcgccgcccttttttttttttttttttttatttaatcnaaaattttttttttaaaacaaaaccnttttnattagagagggctattttttgaaacgggccgggatcataaataaaaatataaataattttacaacagaggccttattaaaccctacaaaaacataaatatcattaaatacctctattctttaaattcacataaactcttatacattatttttacactcataaaaatccttttttaaaatttaaatcttaatattctttt

SEQ ID NO: 339343 - DNA, 140 bp, Zea mays
  unsure (1)..(140): unsure at all n locations
gcggccgcccttttttttttttttttttttttatattataaaactaattttttaccacaaaattntccatatacgcagggattattctaatgaaaggcggcaaaccaaacaaaatatattattatatatacaataattac

SEQ ID NO: 339344 - DNA, 372 bp, Zea mays
ccgccttttttttttttttttttttttttttttttttttttttttttttattttttttattttttttttggggggtttttattaactgtagagggacttattttattttcttttttatttttttcaccacaatataacttttgttaattattttcaccataccatcaccaacgtaatttatgaactttaactccataacaagcgcccgaaaaaaccccataaaaacttagtatttgctcaccaaactcaatgaccatgtgagaggtgtgactgtacatcactgccccataatcaaaaacaatctgacaaaggcggggggtgatgatgacataagcccccaaccaaaacaccatcagggtaattcttcccccg

SEQ ID NO: 339345 - DNA, 65 bp, Zea mays
  unsure (1)..(65): unsure at all n locations
gaatnnnnggggcggcgcgcgcttttttttttttttttttttttatttttatttttttctctttt

SEQ ID NO: 339346 - DNA, 384 bp, Zea mays
cggccgccctttttttttttttttgatcattcacatggccaattttcctattaacattaaaggtgcacattgtgctataattatcattcacaactgttccaagtatctagtctttccaggacacatttcttgtgtcaagaacatatcactttctggctttctgcatgtgtttaccaagacaaggtagcaaggtctaatacatccctaagctaccctctgatataactgaacactaaatactgtgttctgtactagaactacatgaataaaaaaggagaatatgtagtaagaggcaatgaatgaaaactttggaattgtgcccccaataaataaaggcacctggttgtaatgtataattatgatacacaagtacaagatttgata

SEQ ID NO: 339347 - DNA, 388 bp, Zea mays
attccccggcggccgcccttttttttttttttttttttttttttttttttttttttttttttttttgttttttttttttttggtggggttttttttttttggagttggggggggaaacccgcaatacaattaaactggggaagaaaaaggggtgggccccaaacaaaaattttgaacttttggctaacacaccctgaaaaaacaaaaccggagaggcccccatttggcgccctcactaacaaaaacaaaggctgaatggcgaatgggagttttttttgcccccccccctttggggaacactatgcggcattttcaaccaacaatagcgttacaggggtcggctaatggggggtttgaacatttttaggaagagcaacctgcccctttt

SEQ ID NO: 339348 - DNA, 390 bp, Zea mays
attaccgggcggccgcgccttttttttttttttttttttttttattttgttttactttttttttttttgtcattttattatttttttgtggtttgtttttttttgggggggggcggggggaaacgacgggcttttttttttgaagaaaaaggggcgcccaatttttacaataataggaaccaggccggggggtgccaaaaacccttaaacaagaaaaaaaaaaaaactggggcccaaagtttttggaaaccaaatccccattactccaatacacgaataacaattggaattggggggaaacagatttaaatggcggggaaggttttcccggcggggcttttttttttttttttttccccgcgctaataggagggcaagggaacctgggtt

SEQ ID NO: 339349 - DNA, 416 bp, Zea mays
  unsure (1)..(416): unsure at all n locations
gggcgggcgggctgtntttttttttttttttttttttttttttttttctttttttttttttgccgacacgctttttccttgggcggtttttttttttttggggttaggtcttttttttttaattaaaaaaaaaccacgggcctctcccaaaaggtggggccaaaaattcccccattgggggccatgccaaaacctcccccccaagagtggggaaattagatgtgcccaacaaacccccccccttaacccttttacccgggattacaattttttgggggggggggggggaaacgaggattttccttcctacccctttaccccggcgcgcggggggggggggtttttaaacacccggttccttggcctgaggggcactgttcatcccaacccccccccccccttggggggggaaaccc

SEQ ID NO: 339350 - DNA, 360 bp, Zea mays
  unsure (1)..(360): unsure at all n locations
ggcctttgttattttttttaccaaaattaacttcttgaggcgttttttattatgcaaacactacaaactggcggggggttgtttgaaggtacgacaggagtctagtctcctgaaaccaaagcacaaagcatgttcgttgctcccagaaaatgatggataaaaccacaaccttgtggcactaccggcctcgcaatcaatcggatttcattggctccgcgtgatagctttccaggtctgtatccagctcatctgcaggcttctcaggcttgctgcctttccctcggccctggaactgggcacggcctctcccccggctctggaactgaccacgggctntcccccagctctggaactggccac

SEQ ID NO: 339351 - DNA, 236 bp, Zea mays
ccgcccttttttttttttttttttttatataaaatagcgaagcttatgctctcaattcaactgactataagtcagaggccttatctcatggaggatggggtattatttctacaatacataatcaatacacactgctagtttaaaatataatccacacctttctcgtatggcatcaagttatactataactagaatctgtcaaccacaacgatgttaaaaatccaatcaagcatata

SEQ ID NO: 339352 - DNA, 227 bp, Zea mays
gccgcccttttttttttttttttttttttgaaaagaaaaatttaccaaccatatcattcagacagcaatgcggcagacatttcacccaagtgtgcgggataccctaacattccacatacattcaagtccccctatatatcgaaaccatcactctagcaaattcccaaacagaatataaaaggtacccaatctattccttgtttgcatttttaatattgcaacaaaaa

SEQ ID NO: 339353 - DNA, 466 bp, Zea mays
gcggccgcccttttttttttttttatatataaatttattatttttttttttttttctattatcaattattatttggttgggttttatataatggagggaggagtggtaaataaaatatattaataattttttaataaataaatatttattatatataactaatttatatttatatatacactattaaaaaaattaattttattttattttaaatacatataataaaatttaaactatttatactacattctaatttaattaattttaattattatattttactattatattttatttactatatataaaataattatatatattaattactatatattatctacaatttaaaaataataatatattataaaaatattaaaacaaatttaatatataatttaatattttataaaataatataaatataaattatattatattataatattatatatataaaatattt

SEQ ID NO: 339354 - DNA, 204 bp, Zea mays
agggggagggccaaacaggggatgggcgggctaaaaaaattcttcaaattataatggcaaaaaaaaaacaccgattaccatatttttctttcataaacttattccttacactttaaacaaacaccaaatggtccccaaaacattttacaaaacacaacttcttacatatcttatatgttcaaataatatccaactttaaacccc

SEQ ID NO: 339355 - DNA, 247 bp, Zea mays
ccggtgcggccgcccttttttttttttttttaaacataacaagaaaacacatacttacaaaaagcaatcaacaatacatcacaagggaatatacatttgcttgggcggggttacacgaacaacatttatcattacacacgcaaactgtatacaacaatttcataacactcttcaagcgccaccaatttacaccacattaacctcaaccatcctaacaaatacacctccaaaaaaaaactggatccat

SEQ ID NO: 339356 - DNA, 152 bp, Zea mays
accgtcctgattcccgggcggccgcccttttttttttttttttttttttttttttaggacgttcacttaataaaacaacatatcaaacctctggggcttaaaaaatcccgacgggggggttccatttccatacaaaattgcaacaattactc

SEQ ID NO: 339357 - DNA, 351 bp, Zea mays
tcggccgcccttttttttttttttttttttttgagactggcatccttactgtccggcactaagccgtcgaatttaccagtatcccccaacaaaacagtgcggtaataagaatatgtaagctctggcagctaaaaaaaaaacaagattcacatggatttgcacccacctctttagtttagcagatgaacgaattatgcaggagagacttctaaacctgaatgaactgccaagtccaccacggctagctatagttgccggcccacaacagcacagcaatggttagctaggctaccgctcgatggccttgtacaggacgcaagtgacgaacttggagcggaacctgtgggtgta

SEQ ID NO: 339358 - DNA, 169 bp, Zea mays
ggcggccgccctttttttttttttttttttattaaacatagttgcaaaaacaaggcgaacgggatcttaaaatggggtgggtgtcaaccataatatgggtacggctcaaaacataccacacattccataattaaataacgtttcagcacattgggattgtagaagaaat

SEQ ID NO: 339359 - DNA, 148 bp, Zea mays
accggtccttgattcccggggccgccgcccttttttttttttttttcatttcaatactacattcattttttttataacactgtcacttccaccaatggggagtcataacacagtatgactgattcatcaacactaaattactcaacta

SEQ ID NO: 339360 - DNA, 258 bp, Zea mays
  unsure (1)..(258): unsure at all n locations
tttaattttattttttttttttttttttttttanttttttattttttaattttttttatttttttttattttttttttttattttttttttttttttttttttttttatttttttattattattttttgtttatgtttttttttttttattttttttttattttttttttttgttctttttgtatttattattttttccttttcttttttttttttttttttatttttttttttttattttatgttttttttttttta

SEQ ID NO: 339361 - DNA, 469 bp, Zea mays
tcgacccacgcttccttgttgtcgctgctctgcacatccagcgtggtactctttatactcttgaggggccgtttcataacatcaccacatagcattaaccatatcatgtcttaaagcctgatgcaagagcaagatcaatatcttcaacttgtatcataggatttcatttcatatattaagcattttcactacaattttttaattctatacgtaaccatttactcatttaattttacaatcatttttataattctttcttaaacttcttgaatatttatactttttttcttaatttttttttacttcaatataatttacatcatatttaaattttcatttttttttattactcttttttacattacccattctaatattttaatattttttttatattttaaattacttacttcttaaccttatttatctttatttatattttatattcttttatttttttttcatatat

SEQ ID NO: 339362 - DNA, 422 bp, Zea mays
  unsure (1)..(422): unsure at all n locations
nnncatcntcttatcttctatatactttnccctacctctgcagcgtgggccgtatccaaagtgggggggccaattataaccacnacaatcattgncaanatcaatattnnaaataactnttttntaatgatcattaggctntttgcctgngtctnnctttaaagngaggattnnnngtttngtttaaatttatnnnnnntttaatgngngngnttacataaatatattttttaatttcccacccgtttaaccttttatttattatcantnnttatttttttcattggtctttanttctctttttctttattttttnaantcattttattctttttcttagntatttttttatatattaatctttattctccttttatatataatcatattatatttctactataattattttttttaatatt

SEQ ID NO: 339363 - DNA, 294 bp, Zea mays
tcgtcccacgcgttctctgaggaagaatcgcatgtcccagagaccgtggattttgaaagtggggaggggtctcatacatcattcggctgttgttaagacatgatgcatccaccaggcgtgatgatcattatagtctatgcatataccaatcatttccttaatattgcttttccatcattgttatttacttgtccttatattatttgtaatccttattagttttttctttattacattataattgtttttatttattcttatttatttaaatttcttctatatttttttttagtc

SEQ ID NO: 339364 - DNA, 136 bp, Zea mays
tttcctgatggacttcatccccaacacggcggctctctaggactgagagggccgcctccacaaggagaccatcgaaatgctagcggcactcaccatggccgatctcccggacggacagcgccagactgaggtcttc

SEQ ID NO: 339365 - DNA, 116 bp, Zea mays
ccttgatcacactagtattgttactgacggcgggtgctggacagactgacgggtgtgccaagatcttatctaacatcaaaccaatcattatttttcacctatttcatagatttttt

SEQ ID NO: 339366 - DNA, 142 bp, Zea mays
tttatctcaacctcccaaaaagggtagcggattgttcttttccctccgactgggtcggctcacaaaaaggcggcattacaattccaccccttctgttccgccaagttcggagcgcaacgcaaggcgggcgtttgagcaagaa

SEQ ID NO: 339367 - DNA, 170 bp, Zea mays
  unsure (1)..(170): unsure at all n locations
ggaaaggggagacctggaacgaccgtcgggggtagagcggntgcgcgctgcgccgagagctggngagtggggactggggaccgaattgaaggcaagaaagtagaaacgaaccaccacaggcggcgcggaaatggatgagcgcggggagaaggaggaaggagcaacggagt

SEQ ID NO: 339368 - DNA, 108 bp, Zea mays
tcttcattatcgttgactacatgaacctcctggttggggaggtttccgtcaggggcgcgattttcgacgatggcattccgctcgagaccgatttcttcggtgggggca

SEQ ID NO: 339369 - DNA, 435 bp, Zea mays
  unsure (1)..(435): unsure at all n locations
ttgttctctgaagcatcacgagttctcctgggcgggacgcctacagagtttgggcatctctctattgttaaggccacaagagcggtngggaagctcaagaagaatgcattcntaccccttttggnccaagcctcttagctctccaccacctcttctcgcgccccttgtctttactttgttcttttcagnactcctcttaaaccggtctattcaaccactctataagtgcttttcttgctcactcatttttttgagccctttctcgtttatattttcctgttagatgtccattttttttttctacctttgttaaatcttttttttttttttgtattcagtattagtgttccataactaattttttctatcttcaaatttttttcatacttattttgttatcttaattatttgtatatatatgttatttatttcttt

SEQ ID NO: 339370 - DNA, 93 bp, Zea mays
ggtgatcagaaaaatgttctaccaattcatgcatgtaccaaaggataatataagctgctcaaaaaatcgtggttaattagagttttttgttgg

SEQ ID NO: 339371 - DNA, 338 bp, Zea mays
  unsure (1)..(338): unsure at all n locations
gggggggtccaaggaaaaaagggggtgaatcttatacaccgttcaggctcaaaggatttttgacaagtttttcaacaaccatcatccagtcaaacagaacacgacaccccttatttgtacttatcaaaaccatgcaattacgtgcacaccagttcataacatcagaaaatgttggatacacataatccggaaagcaagcttgtgagcaacannnntntgacttacttacttacttcgtaaaattgacacattttttagctaaatcactatcttttcttattccatgtctaggaacttttccttgtcttttattcttttacaatatcctttcccttata

SEQ ID NO: 339372 - DNA, 187 bp, Zea mays
  unsure (1)..(187): unsure at all n locations
tcgaccaacttattttttacagcggccgcccctttaattggggaggtgttcttacaaacgaggcaggtttccctataatgagtcntattaaatcttagcgtaatcatgatcatagctaatatctgtattaaattgttatcctatcataatttcacataatatactatccaaaatcataaattgttta

SEQ ID NO: 339373 - DNA, 124 bp, Zea mays
tcgacccactctattttcaaggcaaaagcattgataccacagtcgatgtgctcttgaagggcggtggcccttgacataacaaccaggagaggatgcatttacggtcacaattaccttgatgaga

SEQ ID NO: 339374 - DNA, 230 bp, Zea mays
  unsure (1)..(230): unsure at all n locations
tacgcttccccttccctcccgctcccattgacggcgtatctttnntngaggcgccgcttcaccagcgacgcgcccttctcacccacctcgccgaggaagtatttaccgatggagacgccactgtcttccaggaggatcaccctctcgctctccgccgcatatgcccagaagagcgcctccgccgttccggactccgnctgtcctttttcccgttccaagaacaccgcctt

SEQ ID NO: 339375 - DNA, 395 bp, Zea mays
  unsure (1)..(395): unsure at all n locations
tcgacccacccgtcctttcatatgtgcatctgcttcaaatccatcgaggctgtaaactttatctccaaggcgggccctatcaatnaccaccaatactgttacaaagccctttgcttaaaaacctatgtaatagtagccctctgccaatatggcttcgtcctggaaaaaaaccaaattgtaaaatcttattctatctntcattttctctactaaggagttttatttgtgaaatataattcttattattattacgaatagcttttttttatttattaaatctacatctttaatgttttatttttttgtgtatctctattaatttttatttanctttaattgttcatttatttatattgtaatttttttatataaatttcatcatttttatatagaat

SEQ ID NO: 339376 - DNA, 128 bp, Zea mays
ttaagtaaatgccttgtttcattctaaatagcgaaggacaacttatagggcggcccgtccacaaacaaccaccttctacctatatgcatactacttttcactatatacagtctactaagaacttgtca

SEQ ID NO: 339377 - DNA, 198 bp, Zea mays
tcgactccacgcgtcctgtgccccagccacaacaaggctaaatcagggttggttactccaagcgactgggcgaagactcattcttctttttctaatatcttccaacctacattgctcgcgcgtctactccctatgatctattgtttgtagtttgttttttctactctttttctatttctttttttttattattaattt

SEQ ID NO: 339378 - DNA, 354 bp, Zea mays
  unsure (1)..(354): unsure at all n locations
tcttttcttttttgttaaaggcaggtgcagcgtggggggaagaagccaagggggggggggnannnnncagagaggcatagctttgcaatggatcttccgttgggaatgctgntgtcgctgctgctggtcctctccgtcttgtcctcgtcatcttcgtcggctgcttacacgctcgccgtcagctctttgttctcactgcctgtttcttcttcttgtcaatgctcaagactccctattcaattctcactcaacttaacttctatacatttccccggtagctgaacaagtatctttttcttgttttaacctctttttttctttcttgttcatttcttttttttattttttactttt

SEQ ID NO: 339379 - DNA, 69 bp, Zea mays
tcggcaccacgcgtaccggccgtcgacaactcttctttaccgtccgagagccggaagcaccacacgcgg

SEQ ID NO: 339380 - DNA, 192 bp, Zea mays
tgctttgttactcccgtgaaggcgccgggggggggggaccataccttatggttgtttacaaagctcgaaacctaggtcatgatacccctcacaaccacgatcctgaccatcgatctccgcaccgagccatattgcattccgtccccattctgcgtgaggtcatggatgaggctgtcttcattgtcttctctc

SEQ ID NO: 339381 - DNA, 100 bp, Zea mays
  unsure (1)..(100): unsure at all n locations
tatgtaatgcctcgcctcattatacattgggccgggcccctcagatcttgggtggctcatttctaccacccatcgacctttatgccagcctnggattatt

SEQ ID NO: 339382 - DNA, 242 bp, Zea mays
  unsure (1)..(242): unsure at all n locations
ttaaagtctacccacccgttcgtaatactaaatctgtactcnaaaaaaatggctgggcatactacatatgctcgagggattatactcanaataatntngatttttccatttctattattgcctcaaagctacaatctttcatacatatctaaatataatcaattttatccaactttattatacacacttaatctttttctttacactctcattatttttcatggcttttccctacaattcca

SEQ ID NO: 339383 - DNA, 246 bp, Zea mays
  unsure (1)..(246): unsure at all n locations
agaagtcgaccaacccgtccggccgaccaggctccctcgcttctgttcgcggccgtcctcgcgttcctctgtggcgcttatcgncagcgccatatccgtcaccttcacactgggctacatcccttcctacctgtatgcgacgactgggtggactacccacaccctatcttacgcgggcgaagagcgctcaccagtttgcttggatctttaagcttcggaagatgacgaggtggacagagaattctg

SEQ ID NO: 339384 - DNA, 89 bp, Zea mays
tgaggcggcgtgccgttctcgatccaggcgcccgaggagaaaatcgagatggactcgcccgccctttattcccgcttcacttgccgaag

SEQ ID NO: 339385 - DNA, 257 bp, Zea mays
  unsure (1)..(257): unsure at all n locations
tgtatagagaaggaaaaatatccccaaacggtagctcccgatctcgatggcggagcgcgctcgcgtcttcttcgacatgaccgtcggcggcgccccggcgggccggatcgtgatggagctgtacgccaacgaggtgcccaagaccgcggagaacttccnngcgctgtgcacgggcgagaagggcgtgtgtcaagttcgggaagcctctccactacaagggctccacctttcatcgcgttatcccttagttcatgtgc

SEQ ID NO: 339386 - DNA, 177 bp, Zea mays
tcgacccacgctttcttttctccaaagatgactccaataggggtggtcatcttactaacatgggggggtacaaatctctcatttctcacattgtccgtcacgttttgaagccagtattcttattacatatataagtaagcttacgatttttttactatcattgaataccttatcttt

SEQ ID NO: 339387 - DNA, 76 bp, Zea mays
ttcgtgaccagcgaggcgagatcgggggcggggagcctgagcacgggtgggagcatctgaatccgtcgccgtcatc

SEQ ID NO: 339388 - DNA, 156 bp, Zea mays
ccttttttttttttttttttttttttttttttttattttttttttaaaataataaattttttattaagaaagttttattaaaaaaataaaagattttataatattaatttataaaaaaaaaaataaataattaattaaataaaataaatttataat

SEQ ID NO: 339389 - DNA, 167 bp, Zea mays
ttcatccaattttttcacaaccattaattccacactaatcctctcaaccttcatttcattccatacattcttaaaataaaagcgtaagtatcaaaaataactctaactactcacccccataatttcttccacaatttcttcattcaaaactttaattgaccatgacc

SEQ ID NO: 339390 - DNA, 280 bp, Zea mays
ctttttttttttttttttttttttttttttttttttaatttttttattaatatatttttttttttttagaaagttttttttaaataaaaagaaggtttttttttttttttttttttttatttttttattaaataaaaaaaattttttttttaaatttaaaaaaaaaaaattctataaaaataaaaaaaaaataaaaaaaataaaaatttttaaaaattataaataacaataaaatttaaataaatataaaaaaattattaattaaaaaaaatatataatt

SEQ ID NO: 339391 - DNA, 453 bp, Zea mays
gcggccgccctttttttttttttttttttttttttttttttttttttttttttttttttttttttttttttttttttggtttttttttttgggaggggggaaaaaccataggggccgaaaaacccatttgggaatggatttgaaaaaaaactgggttacaacggggggttttagattaaaaaaaacgttaaagcatttcccccgggggtttaaaatttttaaaaaaaattttttttgggaagctttttttgctttggaaaaaaaatttggaattacataattagccaaatttttgaaattctcaaatctaattggttccccctttttttatcggtcttttgaacaaactaacttttattaaaaagggtgctttggccttattttttgaaccctttcccttttttaaaaaaaaagaacccttacttttccttgaaaggtgggtttttttttatt

SEQ ID NO: 339392 - DNA, 335 bp, Zea mays
  unsure (1)..(335): unsure at all n locations
agagcgtcgcgccctttcttttttttttttttttctttttcccctacacatttttttttttccacttccacctcttccctagagagtttttttattaaagaaagaaagacancccaataacaatattccctttttttacctcttataaaaaacccccatctaaatatttccctctttttctttcccattaaaaaaactttaaaaattatccccttttttaaaacccttaaaaaaaatacactttttctatttcttctcccttctatatttttcccccttatttcttttcaataattcttacttattattcccccatttttaaaccctacttttaa

SEQ ID NO: 339393 - DNA, 253 bp, Zea mays
aagcggtcggcctttttttttttttttttttttttttttttttttactcttttttttctttctttactttttttttttgggatgtttaattcgtaaaaaaagcagtcttaaatatttcccaatccaacaattttacaatttttaaaatttaacaattttccaaattcacaaaaatcacttaattccctttttaattatcattctccaaaacacttaatccctaacttttttatttttttttacaaaataattt

SEQ ID NO: 339394 - DNA, 219 bp, Zea mays
ccggtcccttattcccgttgccgccgcccttttttttttttttttttttttattaatttaattttttttttttatccttttctcttttcccaaggagggttttttaaaaaaaccccgagcctcctttcttctcccccatccaaaccacccaaatcccccctctttctctctctcccccccccctaccccctaacccccacccccctatctccccccccc

SEQ ID NO: 339395 - DNA, 188 bp, Zea mays
tcccatagcagccgcccttttttttttttttttttttattatcttctaaatctttttaatttaattacactctttttctcaaaaagttttttttaaaaaaaaaaaagcccctctcctctcttctctcaatctttatcctcacccacttcatacttaccaacttacacttcttcttttattacttaaaa

SEQ ID NO: 339396 - DNA, 370 bp, Zea mays
gcggccgcgccttttttttttttttttttttttttttattttcttttttttttttttttattattattttttttggttgaaacaatcccttttgtggtgagtccaaaatatctttttttacaaacattttttaccttttttacttttcaatttccatttttctttttttccaaaaaaaaaaaatttttcctcttttcttctcctttattacaaataaaaccctttttttaaaaatctcttaatcctattattttaaattttcttctcataactaaacccttaccttcatatttttcctttctttctttaaatttttcttattttatcacattatttttttttttttaactccttatatttctaccttttt

SEQ ID NO: 339397 - DNA, 248 bp, Zea mays
cccttttttttttttttttttttagaaattattaaattttttttataaaatataaaaaattaattaaagaaagattttttttaaaaaaaaaagaacacaatttttttaaaattaacaaataaattaatatattataatataactcataaattattaaaaaaaaaaaaaaaaaaataattttaaaaaaaaaataaaaaaaataataaattaaaaaacattttattaaataatataataaatactttaat

SEQ ID NO: 339398 - DNA, 248 bp, Zea mays
  unsure (1)..(248): unsure at all n locations
cggtccggccgcccttttttttttttttttnttnnnnnnncaagaaaatcattctccgactcgattttactgatcacagaaagattatctgggggggaaggggaggccttttcctatataaaccaccaccttaaccagccttatttttttcaataacccctttacaatgcaagggaattaacaacttttacaacattaagtgttttaaaccaaacaattctttaaaacaaacacccattacccttttt

SEQ ID NO: 339399 - DNA, 453 bp, Zea mays
gccgcccttttttttttttttttttttttttttttttttaaatgtttttttttatttattttaattttttttaaagatggtttttttttttttttgggggaaaaaaaaaaaattcccttttcccttcctctcgggtcaaaaaaaaaaaacatccccctttaaccttctttttccccctctaaactttcccaaacctttccttacttgcttaaggtccccccctttttttttttccccaaaaaaaatttttttcaatccccccctttttttaaacagggaccccctcacccccacctctttcttggggcttttttttccccctctttattttttttcccttcacccttttaacccccccagttttcttttttttaaactttttcccaaacattatttttttttctttgtcctacccctttttttcttttttttttcttttttttctcccttttc

SEQ ID NO: 339400 - DNA, 179 bp, Zea mays
ggaagcaaaatttcatttccttataattataaattcctaacgcacgatttttatagtccttgggaagccaccattccaaaactgcccaactaaaagtaaaaaaacatatttattcccacccaaactacatttggtcaaccagtaaataccactgccttattacttataacattgttgtg

SEQ ID NO: 339401 - DNA, 301 bp, Zea mays
gcggccgccctttttttttttttttattttttttttttagtaaatttacttcacattataaaccatttcattaaggagagcttttttttcaacacgggagacatcaacatactgcttcctatatccaacttcctaaacattataacataaatctataaccatttacaatctcttcaataactatcatcaaccataactcctcaaccttacatatctttcgaaaatataaaatgtaatattttctaaaaccataatttcgtacattcaatcaattttcaaatcaataacttattctttctcc

SEQ ID NO: 339402 - DNA, 164 bp, Zea mays
ccggtccgggattaaccgttcggccggcctttttttttattaatttaatacatttaaattttaattttttttttaattatatagaactaaaatttaggagggggtttttttaagaaggagaggaggttataatattttattaaaatctaaaaaaaaataaataa

SEQ ID NO: 339403 - DNA, 429 bp, Zea mays
ccgtaccggtctgaattcccgttgcggcgccctttttttttttttttttcattcattcttttatttatttcattcattcatttcacccatgacaaagatggtctctttttatttccgagcgaggatttactggacattgtcatgatgttcagattagaagaatggcgcacgttggggaattcccttgcgtctgtgacgagcaaccctttttggtggtgggtcttcgtagttcttgtcattgcagctgttttggtcatttgtagtacttgaaccaacattgtcaatcctagccacatgatccataccattggaccgagggttgttgccaaccatatcttgcataccagtttgcatatttaagcctctaagattgcatccaagagagcagaagcgtaatgcatcaagttgcacacggctacatgtttcaca

SEQ ID NO: 339404 - DNA, 67 bp, Zea mays
ataaaatataatatttttttttattaataaaataataaaattgggggggggttttttaagggggggg

SEQ ID NO: 339405 - DNA, 442 bp, Zea mays
gcgggcggccttttttttttttttttttttttttattttttttttttttcagccaaccaccaaacccatgacgaggaggggtttatcagtgaaaaagtgggaacttgaaaacccaagatttttgcgaagacattatttctggaaccaatgtataacgacagaacatttttttgcatatgttagcactggccgatccgagtaatattactagtacataataactggccttcaaaactaaaggccacatgcgaagggaaacaccatgtccaaaccaagggcaacttcactccatggaagaagaggttgggcccgctcctaatccgttggcgccaccacgcccaaagccaggccttctgaatgatggctggaactcatgaggagctccacttttttcgccaccaaatgcaccatgagcaccacgaggaccaccactttacccatt

SEQ ID NO: 339406 - DNA, 91 bp, Zea mays
gcggccgcccttttttttttttttttttttctttacttttttattttttttatttacttttcctctaatttctaagagggggttttttttt

SEQ ID NO: 339407 - DNA, 405 bp, Zea mays
aataaaatatttttttttatcaacctttccaaaccaactgtgggttttttatcaccagagaggggtcacccatcaattcttataaaatacattccccaaaatgtaaccacataaatttatctttactctttttccaaccccactcaacctatttcacatatatataaaaaaccaaccaaactccataaattttcttagaataaaacccttagaaaaacactttttttccaatataagtcgaaaaacaatattattccccctataaaatcaataaaaatattctttatactctaaaatcttataaaattctctattattgcttttttcccccttcttctcatttgtaaacttcacaatcttttttcttctctcactcttaaataaaaaccttttcttaatatctaa

SEQ ID NO: 339408 - DNA, 135 bp, Zea mays
attcccattccagccgccctttttttttttttttttttttttttttttttttttttttttttttcttttttttttcctcttagaaaatttttttctaataaaaaaaaagacatccttcttccttcctctttttcc

SEQ ID NO: 339409 - DNA, 463 bp, Zea mays
tgcggccggccttttttttttttttttttacatcaaataccacagagatttttccactcaagaaggaacttacttactggaggggctccctatctacatgacgggaaacagcttaccttctctgttcatcatcccaaagttaatattatctccactgcttccaatgcgtccactacaaccaattcctttccgtttatcatccagctcgtttggaacagcattattactgaccggcaacccccgatgaacatgaataccatgagcaacaccatcagcacaaataatatctacattatcagccaccccttggcccaatcactattataggactagaggagctttccctgtactccctacacgtaaaccacggtttcctccatgttcttatcgattctgagtgctagctcaccctgttgagaaaccatatacctcaactgctttaagtttatttctcaactcatat

SEQ ID NO: 339410 - DNA, 176 bp, Zea mays
agcggccgcccttttttttttttttttttaaatcataatataaattcaatttctttatgtaacacacaaaacttaacatgacaggcttcttagacagagcggagggctcctaccctatccacaaaacaaattctacctctctaataactagttacacttacacttttaattcataa

SEQ ID NO: 339411 - DNA, 258 bp, Zea mays
  unsure (1)..(258): unsure at all n locations
cggnnncggattcccaaatcgtccgccctttttttttttttttttttttttttttatttctcttttttttttttcttttttttttttttcccttaggagggtttttttttataggaggaagcttcctccaaaacaataaaaacaaaagagctacccacaaccacaattcctcatccactatacacttcccaactacttagaaaaactaaatccccctcccaaactctaaaaccaaatttgtgccttaaaaataaaccc

SEQ ID NO: 339412 - DNA, 84 bp, Zea mays
cttttttttttttttttttttttaaatattatatatattttttttttaaaatatatatttattttaagaaagagatttttatat

SEQ ID NO: 339413 - DNA, 172 bp, Zea mays
ccgccctttttttttttttttttttttttttttttttttttttttttttcttatttaattttttttttaagaaaatttttcttataaacaaaaaaattttttttacatttcttatcaactacttattatttcctcttacaccaaatccaccaaaaaaaaaaaaccccccccc

SEQ ID NO: 339414 - DNA, 302 bp, Zea mays
atttcagccgcgccttttttttttttttttttttttttttttctatcttatttttttttttatttatttttcattctcaaaaaaaattttttaaaaaaaaaaaaaaatcttctattttcttctttttatatatattaataatccttaataattaacatctcccacctaactataataatatactatttattatttatttataccacctataatttttttacactaaataatttatacttataaaacaaatattacattttcttacataaaactaacctccttcatattttatttttttttat

SEQ ID NO: 339415 - DNA, 132 bp, Zea mays
cattcgaagggcatattttaaagacaaacagattttaaacacccaccttaataacctctccccatccatatacacaactcaaaatttttttccaatcacaaaataatcaccccttaataaaactaacaattt

SEQ ID NO: 339416 - DNA, 264 bp, Zea mays
ccgcccttttttttttttttttttttatttttttttaattttttttttatttttaaccttttttttttggggggggcaaaacatgggctaggggggtaccattcccaatatttatccccaaaccgttaaaaaggggtaacttaacaattaaaccatacttttatcctttccaaaaaaacaaccaataacttgccaaaaaccttaaacaatatttaaaattaaacttttacaatttgctttttttgggttataataaaccccaag

SEQ ID NO: 339417 - DNA, 414 bp, Zea mays
gcgggcggccttttttttttttttttttttttttatttttaacaaacgaatttctgctttactaacctctttagtttagttggcacgacagaacaacgggggggaggtttacatagttggacgtatcttactgttcacaacatgaaccacgttaagttttcaggtttgggtgggaataaatgttgcttcaagagccgtgtgtcgttcaatacacagcatttagacaactcttatcacacaattactgatcacagatatttggaaggaacctacctgtaggcaagctttatgagcgagcttgaagtatagtattaaaaggattgccagtgtgagagccctaataatttccccaatgatccacttgttcctatccattctttttgacatttgagtcagaatcttttttgcttttgc

SEQ ID NO: 339418 - DNA, 380 bp, Zea mays
tgcggccggcctttttttttttttttttttttttttttttttttttttttttactccggaatgggcatcactgtataacgtggaaactttttaagggcggaacaaacagcatcaggcacctttttttcctgctccaggggcttgcagatcaatatcaatccctgcctgccttgccaccaccaccaccaaccagtagcaggggcatcagacatggactgtcttcggttcaaaaaaaacgcagagatgccattgacacatcaaaaatgccggggacatgtggtttctttctaccggaaagaattccaacaccacccacaaaaaaatcaggcgttattcgcccgtgacagaacctttagggacagggggcccccactttagtt

SEQ ID NO: 339419 - DNA, 242 bp, Zea mays
aaaaaccccattccctctgggtgatgtccatatataagagagagggctctttaataaacttccatatcactcccacaatgataagctctacctaattctattccatcctagtcaaccatccttaataactatatacccaattccaatccttcccaacttatttcaccttaaacatactacacaaattcctctaatttattacatctacaaaatttctccccaattattaataaattcaccat

SEQ ID NO: 339420 - DNA, 155 bp, Zea mays
cggccccctttttttttttttttttttttttattaaaaaccaatttttttttttaaaattaccttttatattgagggagttcttctactaggagggacccctctttatttttaaacaatcacattataaaaatttatttctctaaacactttcat

SEQ ID NO: 339421 - DNA, 385 bp, Zea mays
tgcagccgccctttttttttttttttttttttaataaataactaaataattatagagaaggcctaaatggcaaaagtcgggacccctgggtaacagggggggatatatctattaatatattatttcataaacaccctattggtaaaacgctaaccacaatcatgatcaaaacacagataatgattatcaacatttcataatggctacgttttaattcaaacggcactcgtacttccacttttgttccattttcgaagctcttgcaatactctgttttaccgccttccattttcttttccgtcttttgggattagaaccttctttcatggagttcaccttgtttaggtatatatttcctatttttaatacacttatatattttttt

SEQ ID NO: 339422 - DNA, 128 bp, Zea mays
gtgtccgccgtcgtgcgctcgctgcccctcttcctcgaggcctttgccggcgaagagcgcccagtcgcccaccaggatgaagtttgttgctgtctacctgcttgctgacctcgcttggtacttcagcc

SEQ ID NO: 339423 - DNA, 98 bp, Zea mays
  unsure (1)..(98): unsure at all n locations
ttttgagnatcganggnagaggcacgggggggggantttaatgaatgggncagagcctttaaaaagaaagactataanaaagcgtatctgtttcttaa

SEQ ID NO: 339424 - DNA, 122 bp, Zea mays
  unsure (1)..(122): unsure at all n locations
ncgacccacgcgttctacatatgaccactgatttcacaatgaaaagggagacaatgccttcatggctagaactgctgcttgcaacacaaatctttacgacttgtgcttaccatcttcttgct

SEQ ID NO: 339425 - DNA, 165 bp, Zea mays
tttttcgtttgttcgctacccctccccgaccggggcgctacgagacgccgcgcgatccgacccattccaacgccgacgactcctttctgccttcttcggccatgtcgtacggcgaccgcgtcatcatcttctaggactcctagtaggatagcgagtacttttatt

SEQ ID NO: 339426 - DNA, 211 bp, Zea mays
tagaccattagctttatctactccagagcgcagaagaacccgatcgacaccatgagggtgttgctcgttgccctcgctctcctggctctcgctgcgagcgccacctccacgcatacaagcggcggctgcggctgccagccaccgtcgtcggttcatttaccgccgtcggtgcatctgccacctccggatcacctgctcccttcggtgcatt

SEQ ID NO: 339427 - DNA, 309 bp, Zea mays
  unsure (1)..(309): unsure at all n locations
ttaaaattccttaccaaaatctcctccccctgaagtcccgaagctcgcggaagcgccgagatgtaccatcccacgagaggcggcgtccgcggcggcagagatcaattcaaatgggacgatgtgaaggttgacaagcattggtagaattaccttggtcatagggttatggctctctttggaatattgttagaaaggaattgtttttcttctgtttttcttcngattatttaatttcttcttttgttgtgtttttattatttttttaattcttttaatatattatgttttattatatatatttatatattt

SEQ ID NO: 339428 - DNA, 115 bp, Zea mays
tcgacccatttttccttgttctttgacaccctcttcctgggagtgggagagttagagtgaggcagcttgcttcatacaagggtaaatgttgtaggtagcgcatggtagctaaact

SEQ ID NO: 339429 - DNA, 270 bp, Zea mays
  unsure (1)..(270): unsure at all n locations
gggtcttcagaccattagctttatctactccagagcgcagaagaacccgatcgacaccatgagggtgttgctcgttgccctcgctctcctggctctcgctgcgagcgccacctccacgcatacaagcggcggctgcggctgccagccaccgccgccggttcatctaccgccgccggtgcatctgccacctccggttcacctgccacctccggtgcattttccaccgccggttcacctgccgncggcggttcatctgttaccgtcggtcca

SEQ ID NO: 339430 - DNA, 146 bp, Zea mays
tcgacccacgcttcctttctcctactacggcactaccccatccccggagcttgtccaccttcccgggttccgcgttccaacctaccccctctcgtcacttatggtgcccagccgctcgctgcgcaactactagcgcaccgtcccct

SEQ ID NO: 339431 - DNA, 350 bp, Zea mays
  unsure (1)..(350): unsure at all n locations
cggaannaccgggccggccggcctttttntnnttctaaccaaaaacttctaaaaacattttcatgctttcaaaaggcatgagcctataaagccgcgggggtctacttctgatctacgcgcgttcaatacaaacactatacaaattcccaaacatttcttcggccattccttcttcctaaaagacctcaatgtgttccccaatttgccagtttcatcatcggaaaactggaaattaaatcttccacaacttactttgcagacaattataaaaaaaaaaacccaattccgtatcaacatgactttaattacagaggtctaaggcaataatgccccggtatgcgatctttatt

SEQ ID NO: 339432 - DNA, 202 bp, Zea mays
  unsure (1)..(202): unsure at all n locations
accgaaagaacgaggcccacacggaacccattctgcacaaaagaggaggacaacacccagacaagcctggagataacacggggaaaccaaacggcaaatgagaagcacacaaccacccaacgcgaccccaacaagccggcctaaatcttggagattcgccgaggntgcgacacagggcgccaaccgaaaccctgaggaagga

SEQ ID NO: 339433 - DNA, 292 bp, Zea mays
gcggccgccctttatttttttaataaatataaaaaaagaaaaaacaattttatttataacaaaaacaagcggtaaaagaaagggaaacaaaaaaagacgggagggggctaataaaactaaaagcagtaacagactacaaactaaataaatgatatttaactaaatgcataaaattatactaaaagaactaggagaggaagtctaataaagaaaaaataagaaaaaaaaaaaatcaaaaattaaatatataaaataaaatatgaaaaaataacaatttaaaatataaataaaa

SEQ ID NO: 339434 - DNA, 346 bp, Zea mays
  unsure (1)..(346): unsure at all n locations
cccggaanncccggggcggccgccctttttttttttttcctttagagtcgacccacgcgccctttatttttacgctatgctgaacaaagtactacaggagacagttttgccaaagggtggcgccattgataaattgcaatctcgtctggcattttcacttaacatccaagatgttatgagaaatgcgatccaaagagcccaggatgaacttatttgcattacccccaaagctaagctgttgctgcttcatgtatcatgtagcccctgcatattttatatcctactatcctaaccacactgccgcatattctttttatctaatcaaacttgatttggggcccttttc

SEQ ID NO: 339435 - DNA, 235 bp, Zea mays
acagcagacacaaatcgtcttttttctactgttgaaaaggaaaaatcaatacctgagggcctctaaacatccaagagcgtgaagtaaattccgagtagaggtccaactttcaaggctctccctatctctagtccacaatcgtgccttttggaagctcgtacaggttcacattaattccattttatttttattaatcattctctcctatttatcttgcttttcttctttttccttt

SEQ ID NO: 339436 - DNA, 446 bp, Zea mays
gcggccgcccttttttttttttttctttagagtcgacccacacccacgctgattaacgcatatgaacattttacccaatgtgaggttataataaactgaaggcggttgagatggaactcaaaacccacaaacaactctgaaagaaaatgcacaaattaaccgtggaactgcaaagggggcgttggtgcatcaggggggtctatggagagccaatagcacggcaacggaccgcctctcaagcagttgcacagcttgaaaggcgaatgacacacttcgtggcccggggaaccatgcgcgaccggtgccgtggtttcgcccttctggaacttggccatcgcaagctttttagccctcttttcatcctgggtttttttgagccgctccttgatcttacgtaaagcatcttctttaccaataattcggcccttcgttttttcaaccctttt

SEQ ID NO: 339437 - DNA, 371 bp, Zea mays
atattctatttactcttccgtttgttttactcctcccccaccaaatcattttcgggttttttaaaaactccggggagcgccaacaacggttagcttatccaaatggcggccaaccaccccaaaaaaaaaaattttttggcggaaaagaaaaagacaaaaaaaaccactccgtacacaacacccccaacaactacggcgtccttctcgagtccaacaacatcctttatccctagaaacaaaacacccacatctttaagctacaacaatctttaaaataaaaaaaaaaacacggaacaaaaaaaatatcatgaaccgaaaaaaccaaaactttcgaaacatcaccaacaacttggtccaatcccaacaaaatt

SEQ ID NO: 339438 - DNA, 59 bp, Zea mays
cgaccggaataccgggccgccgccctttatttttttatcctataaaaaaaatttaccct

SEQ ID NO: 339439 - DNA, 216 bp, Zea mays
atagtctacccacgcgttctatttcgagacagcggcaccatacccgggggggcttttataaagctgagcgagcgctcaaaacgagcgttgcggctcaagtaccctacattcattgtggacaactgctccgtacttttcctgtacctgaaccgacagttttaacctgctcccgtcaagaacaacattatccattttctattttcttacgacttaatt

SEQ ID NO: 339440 - DNA, 132 bp, Zea mays
cttaacactacacaataacagtaacaaccccaaacaaaacttctcgatggaatgacaagtcatttatttcaaaaccacatacaggattaaccacaggctgcatcatttctttttaccaactcccttcataac

SEQ ID NO: 339441 - DNA, 354 bp, Zea mays
tttccagcatgccaataaaataatatctgtgggatattctaaccacaactgggatattccttaaatagccaactgatgtccttcaacttcctgccgctcatacttagaaatgactgttatggctacttccttactccacagttcgattgctaccaacaagacatataccattagcgtttccaaatacagaagcagcttgcatagaaagttcaactccccatgtaggaatttattctttaccttttctgggctgatatttccttcattaacctgctgaggtgccgtctgatttcatcacccatcttatccttcattctcattactttttcacttcctttactcctctttttccct

SEQ ID NO: 339442 - DNA, 282 bp, Zea mays
  unsure (1)..(282): unsure at all n locations
ccggacctngaaaaccggggcggccgccctttaaatttttggtttngcaaccaaattatattattctttgacatnaaaccaaacaaacanctnggcggagccactttaacagaagaccaggcaaatctaaatcattctaaacaacaacgctgcaacaagggcaggtctttttttcccaggaagaagcagcaggcttggaacacgaaaaccagcatccatccatcattaaacaactagagaatcgaaacatatcatgcgggcataacatctagagtatgtgct

SEQ ID NO: 339443 - DNA, 129 bp, Zea mays
ccggaccggattcccggggcggccgcccttttttttttttttattttattttttccactctattgtttttttatctttttatactacaccaggtggtctttttttaaacagagggggggtaaataaaat

SEQ ID NO: 339444 - DNA, 156 bp, Zea mays
gaccgattcccggcgccgcccttattttttttttttttattttttttctatcatttttttttcactttcatctatttatatcttgggtattttacctaaaggcagcccaaacaacaaaaaaacaacaaactgaaaaacccaacctaccaacaaacc

SEQ ID NO: 339445 - DNA, 195 bp, Zea mays
cctactcctcgcccatcgatacgagggttttttatatggaccggggcacccacaacaaacttaataacttttatgctcaccactatctcaaaacttatgtatctatatactccataactaataataactattatttctttacattaattattaaatattttatttttttttattatttattcttatatactcatt

SEQ ID NO: 339446 - DNA, 214 bp, Zea mays
  unsure (1)..(214): unsure at all n locations
gtccgnattcccgcgccgccgcccttttttttttttttctttatattctacccactctttcgtttcatatcagcatattttcatttcttggcgggtatcttagaacagaacggcgggaacatcgtcatcgttctcgtcgtgtgcctggctctgtcagctgccaacgcctctgcaatgcacgatgccctgcccctgcgcggagctgcagggcttg

SEQ ID NO: 339447 - DNA, 295 bp, Zea mays
ggataaacacaccaccatacccacttctcttggattggtacaggcgattttttgggggctcgaaaacgctcaagggggggacctctactctatctacacagatcagacgcacgcaccacctggtctgttgggaatggacccgtccactccgatcaacaagcgaagcaaccgtcaactaaggctctaaatctcctaccctccgaccctcataataccgatcaagcatggcgacacctactcccaattctgcgagcagatcataacactccaatctcggtccctaccccccagtacc

SEQ ID NO: 339448 - DNA, 349 bp, Zea mays
  unsure (1)..(349): unsure at all n locations
aanngaaaaacaagacaaaacctcggggatttattttaacttgggcaaaaaaaaaaaaaatgactgctcttggcatgctgagataaataagaactgtcacttgagtggcttggggggtcactttttcgtgccccccacccgcgggccacgtgaggcactatgtgcatataatacccgccacaggtaaaaaaaagatcaaccgtctaatggtgaaaacttcccctcaaaaaaataatattattttaaccacccatccacaatgccaaaaccccttttctttttttttctccggaaaataacctggcataattttttaaccttcctaccccttttttggcaaggggggttt

SEQ ID NO: 339449 - DNA, 90 bp, Zea mays
aacccaaaaaaatcctcaacccacttctcaacaaaacttgcaaacccaaaaacctccacctccctcaacaccaaaacacacaacacaaac

SEQ ID NO: 339450 - DNA, 327 bp, Zea mays
  unsure (1)..(327): unsure at all n locations
atattctacccacgcttttttttttgcacacnaaaactttatttacttggtggtttatacaacaaaaccggggcttaaaatttttatacttaaaatttttaaaaaaagaataccccctaccttttttaataaaaaacaccaaattaattaaattaagcacccacatatcaaggtatctaaaccttttttctattcccccatcattacaaaaaactttttttttttaccaaacaaaaaccctcttattgaattttcacactaatatattgacttccccttcccaaatcctttattaacaaaaccttcattttataaatatctcttccc

SEQ ID NO: 339451 - DNA, 286 bp, Zea mays
  unsure (1)..(286): unsure at all n locations
cgtccgnattcccgggcggccgcccttttttttttttttttttancaacaatccacactttttttaataaaacaccacacaggccccccaaaagagcaaatttaaaacgcatccgggggcccacaaaaaacccctgcacataattcaatagaccaaacccaacaaaaaaaaacaactcattccttacatctcctccttttaccaaaaaaatgagccaaatttaccaacaccatccagcctaaaccctataaaccccaaataaaacaaacttactaaccaccttcat

SEQ ID NO: 339452 - DNA, 235 bp, Zea mays
gcggccgccctttttttttttttcctttagagtagaagcaggatagaaattttttcacagtcagacaataaccatgtatggaacataggtttacatagcatggggacaaataccactatctgtgtgattcggcggctgacaacgcacgcgggtgcgggggacggctaggcgtgttagctgaccctaaaggaggagtaccgagcgctcatctactacagctgggcgaacaaggcca

SEQ ID NO: 339453 - DNA, 176 bp, Zea mays
cgtccgattcccggcgccgccctttttttttttttttttaatcacaaagcttttttcacccgaaagaaatcccaggggcggaattctaagggggggggggtcactcatggtaatatttaacataaagctcaccacctgctgtatagaaacacaaacctcatttatacatccaaata

SEQ ID NO: 339454 - DNA, 269 bp, Zea mays
cggccgaattcccgggcggccgcgccttttttttttttttttttttttcatcgcgaacatatcgttcttttttgtctccccaaaacttacattagacagaaagttctagagtggtggcacgtaccatctgtgcataaagattaaggtaaccaactgccttagcattgcccttatagcaagataaaaacctatgtaggacccgatcaaactgacatttcaaggacacagatgggacctcacaccttaggaggtgccaagacctgatggcg

SEQ ID NO: 339455 - DNA, 159 bp, Zea mays
ccgcccttttttttttttttttataaagccaatcatcacttgttttattaataactcaaaggaacaaaaaaagggggattttaaaaacatgtcacggcaccacaacagctcgttaaaccaaaattacattgtcctcaaaagttcaaatatcaacataca

SEQ ID NO: 339456 - DNA, 232 bp, Zea mays
gccgccttttttttttttttcttttagaggggacccacgcgtccgttttttttttccttgcaaccgattgcctatccgggtgccaaccaaagaccgagggcgcccaaggccgagaagaagcccgcggcgaagaagccggtggaggaggagcccgcggtcgataagacgaccgccgggaagaagcccaaggcggtgaagcgggtccccgctggcaagttcgtctggaaggagg

SEQ ID NO: 339457 - DNA, 247 bp, Zea mays
  unsure (1)..(247): unsure at all n locations
gcgccgcccttttttttttttttttttacatcaaacatagacctattttagactgcaaactgnanaaagcancaacaggatgacatcagactggcggccggaacacatacattcaacaacccattatactacagacagcctacacaggccacagacactactgtaacacagccacaattattctagcacacactagacaacacacgcaccggaaatcccactacctctactacccacacttgttgac

SEQ ID NO: 339458 - DNA, 266 bp, Zea mays
cgaatacccgggcggccgcgctttttttttttttttactcacaagtaaccaggtttaaatatggtgtgtaatacagagcattatggtggcacgcgtattattccaacacttgggggggcccttatgaaaagagagatgctaggaaaaaaacgcgataataattaataaaggacgctatgcttgcgcatgctcagtcagacattggaatggttaaggcataggaacacagctctataaactacaccaccgggaccattactcgaatg

SEQ ID NO: 339459 - DNA, 209 bp, Zea mays
gggcggccgcccttttttttttttttctttatactccacccacgcgtccttttttttttcgctaactgccaggggcattggcggctataatgtcacctaaagtcgagtcactatccctcgtaatacaaccacctgactgggaaaacaccagccatcccaacagaaacctagagcaccacttattcctaacgacagctacgccattgcca

SEQ ID NO: 339460 - DNA, 472 bp, Zea mays
cggccgccctttttttttttttttttttttttttttttttttttttttttttttttttttttttttttttttttttttttttttggaatcattcattcagaaggaaaaagggaatgagacctcatacatagttggttcaaagtcccgacataagacatgatcagaaatttataatgcagcagcctatgaccaggccctttttttgggtaaggcacccccactttcttgcgcaagcggggtgacaaatgttggaacactacccacacaggggctgggtgtttaacccaaacaccactcgaaagttcaaaaaaccccgatgcattgcaccctgccttttttatttggggatcgccccaccccgcaaaatttttattaggggccccgctaggagtttctttcgttcgttcaccaaggggggattttccagcgctggttgtgcccctcgcaccaatttcagagcacgatttcggta

SEQ ID NO: 339461 - DNA, 313 bp, Zea mays
ttcccgagccgccgcccttttttttttttttctttatattttatccattctttcttttttgatcacaaaaccttaaaacctccgggtgatctttttgtgtggcggcgagcaaaaacatttagttctttttccatacggcttactgcgcaagaacggtaacgagaggactgtggccatggctaagaggctcctcccctctcagaaccagttgctggtcgagaagccggttcaacccaacaataccgcctgcggtatctctcttcctgaaacatccaaaccccttaatgcttctaaaatggctactgtttcccct

SEQ ID NO: 339462 - DNA, 414 bp, Zea mays
gcggccgccctttttttttttttttattttttttttttttttttttttttttttttttttttttatttttttttttttgtttttttttttgttcggggggtcctcctttttttttttttttttttttttttttgaggaacgaaaacttttttatttttgaaaagttaaacaccggccgtaggtattgggcccccttcgtaagatcacttattttacaaacaacctttaaaggttaggcccttgtcacctaaccaaaccgaacctggaacacttaccaatttaatccacctccctgaatttgggaccagaaccggttcccctcttaaggggcattcttattcttttcagaaggaaatccgttttcgaggcccttggcttggtaaatttttgcgatgatgggggtgcaaatcccct

SEQ ID NO: 339463 - DNA, 306 bp, Zea mays
cgccctttatttttttattctttttattttatctactctttttttttttttttttttttaattttttttttgggtttttttacaagggatggcggggctttttcttttttataataccgcacccatccaacgaagcagaggatctcaaaaaaagcaaacgccaaaccagaccacaaatcgtgtggcgttacctgaaaaacacacacagaacacaaccactgacacagaagttcccatacatgcaccaaagccacccactgctgaagcatcagcccccccaaaaaaaccaaaagcgaaaccaactca

SEQ ID NO: 339464 - DNA, 127 bp, Zea mays
ggcggccgccctttttttttggatactttagagtcgacccaagcggccgttgtgttcccaaaacccaaaccctagcacacgcgcggtgtgtgcgcaacagaagggggggcggggggagctggaagag

SEQ ID NO: 339465 - DNA, 235 bp, Zea mays
gattccccggcggccgcccttttttttttttttttttataggcgacccacgcgttcgtttttttagtgcgtagagaggatcgtcgaacagaacatcttgaagatggtcagcggtctcgtcgtgtgcctggctctgtcagctgccagcgcctctgcaatgcagatgccctgcccctgcgcggggctgcaaggcttgtacggcgctggcgccggcctgactactatgatgggcgccg

SEQ ID NO: 339466 - DNA, 373 bp, Zea mays
acgggcggggcggcctttttttttttttttcccttgtggagccatagatctcattcattattggattacaagaaggtgccaggaaatgggctctgtcaccatccgcgcgtagaagtggaatattgcttcctggagatgtcagaatttgattggcttcagccaactgctcatttatgcaaattttgacgaggttattcacgatccaccatgaattagggctgtttttgccagttcccgggatcactaacacattagaacacatggttgatgcgtggctccccactgcataggccatccaactgtctatattaggggccaaattcttaacagccttcttgctatatgagactcccaaaccaaaacttatagcatt

SEQ ID NO: 339467 - DNA, 159 bp, Zea mays
cgccgaaaaacgagcgggcgccccccccttttttttttttatataactcactcatctttttttttttaccaacagcacctatcatccaggcggcattattatcaagagcgggccgccccatactaagtacattctctgctgactcatgtaccgaggcga

SEQ ID NO: 339468 - DNA, 433 bp, Zea mays
ccgggacggaattcccggtcggccgcccttttttttttttttttttttatattacctacacttttttttttttttttataaggagggccacaacaacccttttctttagttttagtggggcgtcaaaatttccaagacaaaagaaggtttttattgtttactacaagctcttttatgttttgctatagcagcacaagcctgcaggtagcattatcaacacatacccttctcggctttttcgcccatttgtttggcccgccttaatatctcattggagctactatcttaccggaccaaaaacttggtttcctccctcctatcccggggaggtaactttgcaaatatccttcccacattaacttacatgcttctggtttccattattccgataggcttcttaagccctgctattaatttttgtgtcgggctacct

SEQ ID NO: 339469 - DNA, 234 bp, Zea mays
ggcgggccgccttttttttttttttttttatattcgacccacgcgtagttttcagcaacttcgggtggtcacaaaccgggaaaaatttgaaacaaacgggggctcaatgctgtcagggcaaactaatgtatacagaaccttaataaccgcgagaaccatgaatgcatagttcgcgtgttatgtaacggtagcaaaccaactttcaacataagaaagctcgcaagctgcatcact

SEQ ID NO: 339470 - DNA, 159 bp, Zea mays
tcgacccactcttcttacggaaccctacccgagcatcagccatggctttcgcggcgcgcgccctgcgccgcctcccgcttcacctctccccctcgatctcccgctccttctgcgcggttttccctgccgccgtcttggctatcctttgccccccttctt

SEQ ID NO: 339471 - DNA, 224 bp, Zea mays
ccgagctgctgtgggacgagtacgcgctcgcgcagatcttggaccccccggccgacgtggccgccgaccacgccttgttcgccgtgcacccgtccctaaccagctcctggccgtcggcgacgacggctccgatctcatgatgttctcgccgcccccggccgccgcatcaagcgggaagcgcaaggcgatggtggcgatgaacatgagcccagctgacgagtgcg

SEQ ID NO: 339472 - DNA, 169 bp, Zea mays
actcgttttttttttttattaagatcgaatccgcacaggtggagttcttttacgcctggggcgacgtggccaatctccccgcgtcaaccgcctggctgatgcataacaatctgtatcagggaatctgcttcatcatctaggactgtaccaatttctgtcgtaaacataa

SEQ ID NO: 339473 - DNA, 114 bp, Zea mays
tcgacccaacgcgtccgctctagccaacacacacataatacctctcattccattccattccatctcaaaggataaaataatgggcggtctctcaccaagcttttgggcctctct

SEQ ID NO: 339474 - DNA, 318 bp, Zea mays
  unsure (1)..(318): unsure at all n locations
tagttctagatcgcgacggcgccctttttttttttttntnnnntggggggggtntnntttntnntntttgtttttgtgtntgttttttttggtttttgggtttttgtgttttttttttttttttttttggttttgtgtttttgttttgttttggttttttttttttttggtttttgtgttttttttttttttttttttttttttttgtgttttttttttttgttttttttttttttttttgttgttttttttttttttttgttttttttttttttgttgttttggtttttttgttttttttttttttttttgtttttt

SEQ ID NO: 339475 - DNA, 283 bp, Zea mays
ttcttttatgttggtgccgctcccacgagcgcaccaggacgccggcttggaggtacttgcacacaagggtcgagctcggacgtcgtagcggctcggagggcctttgtcagtacatgctccacccctgctggcatgccggctcggatgttgaacgatggccacaccaccgagcgtgctgtctttaatgtcacacttgttgtttatccggtgattaagctgtcgcctcacgatgggtgcttcttcaccctagtattcaaaggcccgttattatgagattgtgtag

SEQ ID NO: 339476 - DNA, 106 bp, Zea mays
ttcttttatatatataccgaaaatagcctcactatgtagattccatgggctcaaaggtgggaaatgggggctattgggtctctatttgtttggctcttggtgcttt

SEQ ID NO: 339477 - DNA, 123 bp, Zea mays
  unsure (1)..(123): unsure at all n locations
cctaccttcgccccccccccctggggggttcggtgtatattagtgctgcgctcacctagacccagtttaatttttnccgctagggaagcagcagcagaagctccttcttgaacccccaccttc

SEQ ID NO: 339478 - DNA, 157 bp, Zea mays
aaagttgctagtgagtcgagaagagagagagaggcgtccggaattcatcgccagcgatgtctccttccgccttctccccctgcccggtcttcttcgtctctgctccctcgctcgcgccccttcattttgtgcatctttacttaccttcttttgttct

SEQ ID NO: 339479 - DNA, 266 bp, Zea mays
cagtcttttgcaaactcagagagggacccgatggcacccaaggcggagaagaagccggcggcgaagaagcccgcagaggaggagcccgcggccccggcggagaaggcccccgctgtgaagaagccgaaggcggagaagcggctcccggcgggaaaatccgccggcaaggaaggcggtgttgacaagaaggggcggaagaaggccaagaagagcgtggagacgtacaagatctacatcttcaaggtgctgaagcaggtgcacccgga

SEQ ID NO: 339480 - DNA, 104 bp, Zea mays
  unsure (1)..(104): unsure at all n locations
tcgaccctctcgttctctctctactagcctcgagtggccgncaggagacagatcgttacgccaagcgagcggggcccccaaatgtcccccaagcgaggttgcag

SEQ ID NO: 339481 - DNA, 110 bp, Zea mays
tctgtttgttagcgaccgcaccggcacgggggggaggcattcatcgccatgcgtgtagcccagtccaaaggaaccctatccatgagcgccgccttcaataagctcttcca

SEQ ID NO: 339482 - DNA, 279 bp, Zea mays
tctacccacgtcgtcttgtcgcggcgacctcctccgccggcagaagagactgtctcaggggagccgagttgccgggcgtgccgaatggcgggagtgcgctcgtgaaggtagcgctgcttggctgttcgaatttgtattttattttattatttttttctttgattatgttattaattatttctatattttttttttttcttttatgatttaatttattgttttttttttccattattttcttttactttttttttatttatttatcttattgtatttatt

SEQ ID NO: 339483 - DNA, 209 bp, Zea mays
gaaaactcccaagacttcttcttcctctgcggcgctgcgcagaggaacgacgtctgtggaatacaggtttgggacatgataaccatagtggatggcctgaggatgcaagtggatggccaagagatggagggtcaggagttgggggagctagtgggtcaagggaaggagaagctggtgtgtctggaagcgggggagttggaggtactttt

SEQ ID NO: 339484 - DNA, 204 bp, Zea mays
tctacccacgcgtcctggtcttcacaagactatgcaagatcctaagcggctttctttaactggtaagacattttttccaccttttcccttcatccgccacatatcttactctgattcctaccatgacaatcccttttgcttttaacctatttacctctttatttatttatcaaacaattcctatatttattatttagcataata

SEQ ID NO: 339485 - DNA, 318 bp, Zea mays
tcttgattgaatccccaaatctcgcacacctggaagccttcgaggcccgaaagggtagctcctcggcctccccgccgcttccacccatggctccaggactgcagcgcttcactgacattgccgacgacggcacgccccagctcgacgccgcgtccggcgaggagctggtccgtgtggaccgcaccgtggctgtcgcccttggcccccgctcgccggagtcctcgttgactctgttcgcctccaccaggagggtgattttgctttttcgatggcggggatgaggttttgtcttcctttttgtttcttactactcttttt

SEQ ID NO: 339486 - DNA, 116 bp, Zea mays
tcgtcccacttcttttcttccagcctccaacacttttgacaaaagaaattgttaaaggggagtaagtgctgttgcacaaaaccctatcacagtcgcattcatcatggctatgtcca

SEQ ID NO: 339487 - DNA, 61 bp, Zea mays
tcgacccacgcagtcctgctgttctacggtgagagagaaagtggaggggggggatgaaccg

SEQ ID NO: 339488 - DNA, 303 bp, Zea mays
tctttctcatctactacatgaatggtgtaatgttgttgatgatagaaagcatgtaatgttcggtggttttcgctatagtgtctagtatttttacgcttgattatttttacaatatgattatttttttgagttttttatttcctttacttcattatattgattatatctatatagttgttttagttttttactatccttttatttttctttctttatattacattttttttattttatttttttttatttatttttatttattattttttttatttacttttatttattcttttatttctattt

SEQ ID NO: 339489 - DNA, 272 bp, Zea mays
  unsure (1)..(272): unsure at all n locations
tttcttctcatcacaggcagttcgagagagagagagagagagagagagataaagatgtccnggttcgtccaccaccaccacaaccagccggctcccccggcgtctggccccatccaggagttcaagatcttctgccgcgccaactagatctactgcctggccgttcgcgactgcgcctattttttttccccttcctatctcaatgacttactttcctgttctttgttcttgtacttttctcttttagttccactttttattatacttttctt

SEQ ID NO: 339490 - DNA, 277 bp, Zea mays
cctaagctcctatcctctatattctacccactttttctatttaatcccccttggtaccaaaagagaacttttatacccaccaaggttacctctccacaatctctttctatcttccaattttccaatgtcataaactaactacattattaccttatctctaatactcatactttcaattaatcttaccattacacatacaacaattaatctttatacatattatttttatttttttttatctcaataattttaccattcttttcttaatttcatactt

SEQ ID NO: 339491 - DNA, 363 bp, Zea mays
  unsure (1)..(363): unsure at all n locations
ccgcccttttttttttttttctttttattttatttattctttctttttcaacccttccctttttacccttggcgggtttttttaaaagaccgtgcgcctcctacaaacaaaaaaaaagaagatgagctactacggacaccaaaccaaatcggcttcccccctaacaaacctacccaaaaaaggactgctacccgccatcaaaaacccaacaaccggctaccccccgccggcgcagggctaaccaaacacaaggctacccggaacagggttacccacatcatgtctaccccccgcattacgcgcagccccctncacagcagcagcagaagcaacggccttccttcatggaaagatgcttggctg

SEQ ID NO: 339492 - DNA, 233 bp, Zea mays
  unsure (1)..(233): unsure at all n locations
ccctcggccgnccttttttttttttttttttttaattttttcacccttcctcctttcccccaccatatttttctttaagaaccttttttaaaacactcgggccccccttatttttttttttttccaccccaaaactcttccacaccacccccccctctcccccatacaaactctacaaatcaatcttcccataacccccccacaaacatcttcttaaaacccacaatacactc

SEQ ID NO: 339493 - DNA, 59 bp, Zea mays
  unsure (1)..(59): unsure at all n locations
cgggcggccgncctttttttttttttttaattaaactttttatccactttctttttact

SEQ ID NO: 339494 - DNA, 250 bp, Zea mays
accttaaaaaaaaatttaaaaacccccccccccttttcaaaaccattccaattaaaaccccaaatcccttttcctacacaaacaattctcccccccctaaaccccccccttttcacaaaatacccacccccccccccccttttcccaaacataaaaaactctaaccacccccgtcccccaaaacaacctaaaatacccccccccataaccaaaaaaaacccccctcccaaaaccccccttttttccccct

SEQ ID NO: 339495 - DNA, 467 bp, Zea mays
ccgtagccgttatatagttcggtgcaaaccacaaagggtttttgtccggcacccaagcacaccacagggatacgggcgcaagtagcatgaaagacagctctgcaataagatagtgcatcaaatcatttttacatcaggatgcttccatgtacagtaggcagactgatataactagctgaagcgaagagcatgtcgtcatccttttgttatgatgcttgatatccgctcaaagaacatgcggcacattttcatgctgaatcttatgtcttgcctcatccaatcaacggctatcctttccagtgtgcccaacgaggagagcttatatgaccattcatcagatgtttctagccaggtgaggatgaaactgtaaccactagcttcatgagatactgaaaccgaaaatatttctgttccatcatttactgagatcttcatgcgaactaaagattgaagcagcaaagaaagca

SEQ ID NO: 339496 - DNA, 288 bp, Zea mays
  unsure (1)..(288): unsure at all n locations
cccgggcggccgcccttttttttttttttttttttttttttttttttttttttttttttttntttttttttnggaaaaaaaacgttttttttttcaagtagacaaggatccaaattgcaataaatcacattctctcaaaaaaaaacaaggattttctacccgttcacagctttacactctaattaaaactaaacaacccctcttgctattcacacaacttttttccccattgcacttccccattgccattaaatgaacacaagcttctacaaatcctttttggatgat

SEQ ID NO: 339497 - DNA, 273 bp, Zea mays
  unsure (1)..(273): unsure at all n locations
gcggccgcccttttttttttttttttttttattctaccattttttcctttttttttgtcnccattacngctacttctggtgggccttttctcattgtggggggataaaaacctccaccccttttttcaactttatttccctttcaaccatcttttgactccaaatcaccagggaaaagttcgggaaacactcccctttttaaccccatactaaatagcctccgagaaaaatcccaccccaaaaaaggaactttttgctccccttttttttttc

SEQ ID NO: 339498 - DNA, 362 bp, Zea mays
  unsure (1)..(362): unsure at all n locations
ccggncctgaattaccggtcggccgcccttttttttttttttttttttggaaaaaacatgtccagttttttcttgttataacagtttattcttcagccaatttgacgcaagcgcaaacaacacaactaacgggaaaaaattgggcgacatctcgtgatttccatttctttttgagccccaacctgtgaaagaacatgtcttacatccttcattaaaaaaaaccattttaacactagctatgactgtcccccaaaaaatacctttattttttcgcctgagctccagtgccggttgaatcctatcacacgccacaggctttgctaaacacagtgcctaaaatgcctgccttccacaggggcaga

SEQ ID NO: 339499 - DNA, 310 bp, Zea mays
  unsure (1)..(310): unsure at all n locations
acctatccaactttttttttttacaaccccaagactctnattagcggggtctaccccacgaggggggggctcttttccctttttctcctgggggaacaaacccctcttccttcactcaaaaaagggcctccaggggatgtgaccacctgccccctccccccatggggaggcgggccccatttttcctcaatccacccccctaaaaaaccccacttgccagcttccgcccgcctttcccccacaacaaatttttttccagggggcccccccccccccccacccattgggccctggatccctttctccaacc

SEQ ID NO: 339500 - DNA, 489 bp, Zea mays
  unsure (1)..(489): unsure at all n locations
gcggccgccctttttttttttttttttttattatgtacacatgtacctgttgtattataataaatggcaacctcgcggcagtatacactgtatatgatatcacagtacctgagttccaccttccacttgtatccatggcaatactatatctaaannnacatttcagttgataaaggcgtctatacgtcancttgcatatagtggaaggcttacacgaaaggaaacaataattctcggtaatggccntgaaagtgaaaagagcacagnnnggatatattcttttaccatggggcgtanncctcttgtgtaataaggtgtccccgcaacctcatgaagtcttcatggctcgggaaaattggtagtttggtcaccggaaccacagggattagcttcaatcatgcttcttcagnctcagcaaagcattatattgtctttgcagattttgtatcaccataccttcgagaagctgctcattttccctaaaaattc

SEQ ID NO: 339501 - DNA, 231 bp, Zea mays
atattctatctactcctcctaatatttttattatatatttttttttttcgggggtttttttaagttgagggggggtctttccaacaccccaacccccttataaaaaaaaaacactcaccacccatccacccaaaccaaaaaccaccataaaagtgcaccaaaatcaaaaaaacctgcccaagattacaaccccaaaactaaaaaaaccacctggatcacaaaataaaaacc

SEQ ID NO: 339502 - DNA, 291 bp, Zea mays
  unsure (1)..(291): unsure at all n locations
tncacnnnnncngagaaatcacaagggggaaaactgcaatggcattagctcacagagtaacaaatggcaagggcaaggttactgggttacagaacccatggctttgattcagatcccaaggttgggttacaggacccatggctacgattcattgttagttaattcagccagggttttaaaaacccatgctcaatgcagctgtaatgaagttggacatcgcagaattgtggttaccttccaaggacctgttgtaacttgtctaaaattttgtttccgcttctcccatttttt

SEQ ID NO: 339503 - DNA, 60 bp, Zea mays
cgtccgaattcccgggctgccgccctttttttttttttttaaaaagggtaaacataacag

SEQ ID NO: 339504 - DNA, 100 bp, Zea mays
tgcggccgccctttttttttttttttttctacacttcaaaaatattttttttttatgaacataatacctttttcacgggggcaactaaataacatggagg

SEQ ID NO: 339505 - DNA, 185 bp, Zea mays
  unsure (1)..(185): unsure at all n locations
ccgcccttttttttttttttttttataaanataaaaagaaacaatatttctttttttacatttcaaatgttcatgcaggatatttcttacactggcgctgccacccaatataattcttaacacattattactcaatcatcatctctatatgactaaactaacttactaaccaacaactatactac

SEQ ID NO: 339506 - DNA, 169 bp, Zea mays
gcggccgccctttttttttttttttattctatttaaattcagacttttctattactactataccaattaaactactgagaatcatttaaaaaagcaggaagactccactctcctcttataatcatcatcaatttcctttttgttcttcataatttactattctacacac

SEQ ID NO: 339507 - DNA, 339 bp, Zea mays
ttgcgccgccctttttttttttttttttttttcatattcttttttttttctattatagattggactaaaaaattaagggtgcacctccattacaatgatgggagatcatacttaaagtttatataaatttactttaaaacattatcatgtaaaattactatcataaatgattctattttaaaaacccaaccatattattaatatctattctcacatttttcatgtactaatcctattatatttttctttaatcccaacatatctacttttactttatctttactattttctattatatattaaatctaattaacagttacctttatttttaatcttttt

SEQ ID NO: 339508 - DNA, 152 bp, Zea mays
  unsure (1)..(152): unsure at all n locations
annnagccattgcatagtcttatttaaattacagcagtgaaaacccagctacataattatttgaccaagggcgcaaactacataaacctgcacatttctacaacttttagccagacagtgataactgaaaactgctactactactttcacct

SEQ ID NO: 339509 - DNA, 187 bp, Zea mays
gggggggggggccttttaaataaaaataaaaaaaaaaaaaaaaaaaagatttagtaagagaaaaaaagggaaaaaaggggggggttaaaaggggagggaggaaaaaaatcaaaaaaaaaaaaatagggaagagggaaaaaaaagaagaaggggagaaaagagaaggagaagaaagaaaaaggaggga

SEQ ID NO: 339510 - DNA, 129 bp, Zea mays
attaattcttcccttccttttttttccaaacaaaccaccaaatccatcgggggcatgacacgcacgaaaaaggggggcgtacaggtaccgctcaacacaacataatttgctcttcggcataattacaaa

SEQ ID NO: 339511 - DNA, 404 bp, Zea mays
tgcggccgcccttttttttttttttttttttttttttttttttttttttttttttttttttttttttttttttttggggggtggctcttaatggaaacagtccacaaaacaagtccaactccctgacaacacttttttgcccaagggtcttaccaaaaacaaggcttaaagggggagggttgttctaggcatcgctccaaaagtttatgttcttggacaccagtttcaatacctaacccttgtactggtttacaaaaggggacttgacccatatttcaaggcttgagcgatttggccacccccatccttgaaggcgcacttaccacctttggatcatactcagctgaaagaggcacgagggactttggcctccactcatgccgacagagaaaaccgacctttcc

SEQ ID NO: 339512 - DNA, 469 bp, Zea mays
ccgttcctgaattaccgtgtgcggccgcccttttttttttttttttttttttttttttttttttttttttttttttttttttttttttttttttgttggtttttttttttttttggggggttttttttttttttttttttttttttttttttttttttttttttttttttttaaaaaaaaaacggggggtaaaccccccccccaaaaatttttggtttttttccccccaaaaaaaaaaaacggggaaaaaaaaaaattttatacccaaaaattggccccggggcccttcctcacccattgttaaaaaaaaaaaaatctttttaatttgtggaagaaaaaaaaggaatctctattatttttaaaaaaaaatttgtttttttaaaaccaccaaaaaaaaaaatgtttgtttttaaaaaaatctcccccccccccttttttataaataataataataaaaatgcctttctat

SEQ ID NO: 339513 - DNA, 141 bp, Zea mays
aaaaaacacaccattttttttttcattaagaatgacataaatcatcgtgagcttttcatatacacagccgaagtcatttcccttttacaacctacacattacaacattctatcctaactcaaaccctataccttttttaat

SEQ ID NO: 339514 - DNA, 419 bp, Zea mays
gcggccgccctttttttttttttttttttttttttttttttttttttttttttttttttttttttttttttttttggggaaacaaaatatccggggggcgaattgcaaactttttttggacagatgcacatacccccaccctaacctgaaacacacccacattttgttacattattgtggccccaagaaggcaacctaaacaaaactctttaagttacaactggctaagcactacagggccttacaagaaaattcaactttagccaatttaaggttccacagttccttatcaaaaaccaaagaaaccaagcttagtccccctttccttttaaaaggtttcaaaaatttgtgttatttttgccacagggagcaattttccagttcctgaaccaatctcccccataaaatttgccaggacg

SEQ ID NO: 339515 - DNA, 252 bp, Zea mays
  unsure (1)..(252): unsure at all n locations
aaaaataaaaaaattttttttttttaaattaaaaaaaaaaaattagtagggtatttttaataatattaggagctatattattttataaatttattaaatcttaattnaaatatattatatataataattattttaaatttaattcaatatataaaaaataaatatttttttaattaataaatataatatatattttatgaaatataaaataaatataatataaaataatattaattattattatttttttat

SEQ ID NO: 339516 - DNA, 274 bp, Zea mays
ggccgcccttaatttttttattctttttattttttccactcttcctttttttttttttttttttattttttttttgggcggtttttttttttttgtgggggggtcttcttttttcttttctttttttccgggggacccccaaaaaaaagaacccccccacccccccaaaatgttacaaaaacaataaagcccccccttatcaattttccccccctcctaaataaccccccccaacaaaccgttcaaaagaaaaaatcccccctgtcacgggccc

SEQ ID NO: 339517 - DNA, 411 bp, Zea mays
  unsure (1)..(411): unsure at all n locations
cgggcggccttnntttttttttttttttttttttttttatttttttttttttttttttttattttttttctttcacgtatggttttttttttttttcgggcgcactttttttttttttttttttcctttcccagagaaagcgccccccccacaaaccccgtttaaaaaaaaatccccaaccccccgggcttttttgccggggggtccccaaaaaaaaaaaaaatccctttttttttcccacaaaaccaccactttgggccccccccttttttcccgggaaaaacaacgggtgctttaaaaaaaaaatttaaaaccccgaaccccaattctcttgcgggttgtttaaaaaaacctattttttttttttatggttccccccccccataaccccgaaatttacaaaaccccccc

SEQ ID NO: 339518 - DNA, 218 bp, Zea mays
  unsure (1)..(218): unsure at all n locations
acacccacgtggactcgggggaccagcgaacacacacgaggcaccaggtgcatacgtgcgcggggtcgctctacactgaggtgctcctcctcctnntnctgctcccggggcgggcggcctacttttacacctcctgctggtgccagggccgggaggacgtatcggaggtggctcccattaagctcgccctacacggtacggcagacaccgtccaccta

SEQ ID NO: 339519 - DNA, 247 bp, Zea mays
ttagagattggagggaggcccctgcccaaggcaagagaaaccgcggcgcgcggagagggaggaaggtcagacgcagacgggcgaacaagatgagggagatcatcagcatccacatcggccaggccgggatccaggtcggcaacgcctgctgggagctctactgcctcgagcacggcatcgagcacgatggcaccatgcccagtgatttctcggttggcgtcgcacatgatgcctttaacacgttctt

SEQ ID NO: 339520 - DNA, 150 bp, Zea mays
  unsure (1)..(150): unsure at all n locations
tcgacccacgtggccgaggtggtggaggatacaaccgtggcagtggtgattatggttctggaggtggtggtttcnaccgagatggtggagactataattctggtgggcgtggtggtggaagcagaggtggaggangctacaatttaagtg

SEQ ID NO: 339521 - DNA, 90 bp, Zea mays
gaagagctatgaccccccatgcactcatacttaatcctttatcctctacacccgacccacgtcttttttacactaaaacaacattcttca

SEQ ID NO: 339522 - DNA, 416 bp, Zea mays
  unsure (1)..(416): unsure at all n locations
acgacccacgcgnccgtttgactctaagctcgccggctctcccagggggcaccggacaccgggcgcggtggacaccaccaagccaatacgataccaggtcccatggctcaagaaccgcacgacaaacggcgagagcggggacatagacactaaccccaggccccgtttccccaaccccgtgcgacctaaacaagcccaggtcacctccttgcagtactccttacaccgggcgcaaccgacggcgccggcctgggcgcgcatcaacagggcagccgacaccgacggggcccgacctacctcggagatcgaggagcggctcgccggggtgcccgaggacgcgctcgccaacgccggccaagagtacgtgcaagggaaggcacacacgggggagagcaagggggcgaagagcggaggac

SEQ ID NO: 339523 - DNA, 116 bp, Zea mays
tcataccattagctttatctactccagagcgcagaagaacccgatcgacaccatgagggtgttgctcgttgccctctctcttctggctctcgctgcgagcgccaccttcacgcata

SEQ ID NO: 339524 - DNA, 73 bp, Zea mays
  unsure (1)..(73): unsure at all n locations
tttctctttcccctccnacctcccacggtccgaccatcccagggccgccgcgcgggggtctttccgtacacct

SEQ ID NO: 339525 - DNA, 208 bp, Zea mays
tgctggtgttcgccagcggcccgccatgtcctcctccaccgcgcgcgggcgcgccgcaacctcgcctacttccgcgccaactacgcgctggccgcgctcgcgctcgtcttcctcggcctcgtctaccgccccgcgtccatgctcgcgttcctggcgctcttcatcgcctggctcggcctctacttcggccgcggcggctgggagcctg

SEQ ID NO: 339526 - DNA, 136 bp, Zea mays
tctcagaccattagctttatctactccagagcgcagaataacccgatcgacaccatgagggtgttgctcgttgccctcgctctcctggctctcgctgcgagcgccacctccacgcatacaagcggtggctgttgtt

SEQ ID NO: 339527 - DNA, 387 bp, Zea mays
caagcaacatagaaagtggaatacagtagcaacaatagagcaacaatggcggccaagatattttccatccttatgctccttgctctttctgcatgtgttgctaacgcgaccatttttcctcaatactcacaagctcctatagctgcccttcttcccccataccttccatcaatgaccgcttcagtatgtgaaaacccagcccttcaaccctacaggctccaacaagcaatcgcaacaagcaacttacctttatcacccctgttctttcaacaatcgccagccctatctttggtgcagtcattggtacaaaccatcagggcacaacagctgcagcaactcgtgctaccagtgatcagccaagtagctctggcaaacctttctccctac

SEQ ID NO: 339528 - DNA, 64 bp, Zea mays
tcgctatcgtcatggtgtacgccgccggcggcaagcttttcgacaggatctgtagcgccgggag

SEQ ID NO: 339529 - DNA, 377 bp, Zea mays
aaaatttgaaacaaaggatgattctaaaagttcaaaaagtttggaatctcttcaaggagtacaacatgtgacttctatgctgacaaagaatggtgcggtcttttgtaaagactatctagccagaatcaatgtttcacatgaccttgttgagtctgagttgtacaaaaggtgtatatccttgctgggagacttgggcgtaacaaaagcctctcatttggttaggaatggaattcaggataacgaaaatattggaaaaatgtctacaaattatggacacctcaaccctttcagttcacgttacctcaagagtgacagtactatctttcagagggctttggcccttcttaacaaccagactcgtaagggtttatttactg

SEQ ID NO: 339530 - DNA, 404 bp, Zea mays
cttcagaccattagctttatctactccagagcgcagaagaacccgatcgacaccatgagggtgttgctcgttgccctcgctctcctggctctcgctgcgagcgccacctccacgcatacaagcggcggctgcggctgccagccaccgccgccggttcatctaccgccgccggtgcatctgccacctccggttcacctgccacctccggtgcatctcccaccgccggtccacctgccgccgccggtccacctgccaccgccggtccatgtgccgccgccggttcatctgccgccgccaccatgccactaccctactcaaccgccccggcctcagcctcatccccagccacacccatgcccgtgccaacagccgcatccaagcccgtgccagctgcagggaacctg

SEQ ID NO: 339531 - DNA, 210 bp, Zea mays
ttttatttttaaaagctgggcttttttacaggttttgtgtgcacattaggggggttacttctgagcagcaaaaaagcgattctattgcgtctaatctaaacctcaagaagctcaaggccctcacaataaaaccttataccttttgtatccctgtctctaataacacatacattgtatacctgtaggctatgaatatgccgccattatata

SEQ ID NO: 339532 - DNA, 65 bp, Zea mays
  unsure (1)..(65): unsure at all n locations
gcgacccacgcgnccgtttaagttttcaaagcggggctattgcacgggggtggtgtgcacggaag

SEQ ID NO: 339533 - DNA, 179 bp, Zea mays
tcgacccacgccttcttttttttttcgccccgcacttctttactgggttacctccttccccgggggggcccaatccttcccttggctttttttacaaaccattatacccggtgccggagattaacgttccaaagctatttctcaacatttccttcagctagagcagagattgtcttatc

SEQ ID NO: 339534 - DNA, 303 bp, Zea mays
agcggccgccctttttttttttttttttttccaatcacaacacaaaatatttcttccaataaaaacaggtgctaaaaagcatcatcttcctgctcaacagggaccagttaacaatgctctaaaatccctaaatatctttcaaaacccatgccacagcaacaaaacgctcttctactcagtagaaaaatagctctattctatttgcccccttctttcctatacctttatcccaaatttcatttcttctatctctagcccttacaaactttcttactttcctgcccacatataccttgatctgtt

SEQ ID NO: 339535 - DNA, 153 bp, Zea mays
gaccacccccccgcccaaattttttgaaaagaatagaatatttttaggtgggaggatttaaaacaaaggagaagatctattttttatttggagtacaataattgaggaattttttagggatatattaacgtgtgttgatagaataatgtatta

SEQ ID NO: 339536 - DNA, 176 bp, Zea mays
gccgcccttttttttttttttttttttaattatacaatacatctttttttttagcacaaaaccatattccttatggggccctttaatataagtaaagggtccaatttaacccttttcatttaaatatatcccccactatatactctaatcaattcattccttaaaaacctaatccc

SEQ ID NO: 339537 - DNA, 63 bp, Zea mays
tcccagacggccgccctttttttttttttttttttcttttttttaatggttttttttctccaa

SEQ ID NO: 339538 - DNA, 354 bp, Zea mays
  unsure (1)..(354): unsure at all n locations
gcggccgccctttttttttttttttttttttttagaggagacggttttttgaacagggcgactttaaaattgcagtttgattaatggagaacggggagggtacacagagagaaagttgacggtggaaggaataaggaaaaaaaaagactggtctacattgatttttttgtacagaactttccacaccaagggaaggatttttttttgacaaacattctaacataacatatttcaaccaaccaacaaaattcaatgttaatgtgagattttgtatggcccccaatttagccccaccccccgaaaaggagaaagaattagnanggccttttttttttttgtttttggattatnaaa

SEQ ID NO: 339539 - DNA, 265 bp, Zea mays
caattctaaaaataaacgttccaacaacaaagaaagaaactttccttcaactaaaattctaaataaagaacttcattcttattcaatgttaacactcaacataattcaatctttaaataaatttttttctccatcaaaatcttaatttaccaatttctcaatttcctctccacacttatttatcaaccattctttttaatcatttaaccccctttccttttaacatccatctttcttatttttttctttctcattcctaatttta

SEQ ID NO: 339540 - DNA, 312 bp, Zea mays
  unsure (1)..(312): unsure at all n locations
ctaccnncnnctaaaacaagctcttttattattcattcattcaatacnaaaaagaagtctatatcacatacagtagaaggtttctntcttctctcatcattctttattcaaattntatattttaactacactattaccaatttccttcttttaattcattcaaccctttctttcttccatttaaactttataataaatttttctaacactttactttactatattctctactatataatcaataatctcctccatattaactttatatatatctcctatatacaatttataactccttccttctttttattt

SEQ ID NO: 339541 - DNA, 310 bp, Zea mays
  unsure (1)..(310): unsure at all n locations
ccttattccccgacagccagccctttttttttttttttttttttattttaaaaaaattttttttttnannatncnaccanaattctaatagatttttttaaaaaaagaagagaaatcatctccttccatttaaaacttntaatcttccccttttcattttttctcaaatacacctccattaaaatattctcatatttatattatttttacttttattaaatatttcatatttccctttatttttccaattttttcctccaaaaattcatttctttattttcattcttttatttccctttctcaaacctat

SEQ ID NO: 339542 - DNA, 187 bp, Zea mays
  unsure (1)..(187): unsure at all n locations
aattccaaaagacccatttaatttctttaacagatacccannctttctccaagtactctcttataaacaaacatagaatcacatttcacactttacttacaaacattctcacaaaacatacaatactcatatcttactcttaacacaataatcctctctttctctttacctctccccttcccatcac

SEQ ID NO: 339543 - DNA, 107 bp, Zea mays
  unsure (1)..(107): unsure at all n locations
acaaaaaaanaaaaattttttttataccacacttccacaccccacaaagaaaattctctagaaaagaaaagaaaaaactactttctcatcacacaaaccctattctc

SEQ ID NO: 339544 - DNA, 213 bp, Zea mays
  unsure (1)..(213): unsure at all n locations
cccttttttttttttttttnnannntataaccaaaaaattttttttccctaccaacacatcatatacaaagaaanttttccagaaaaaaagaaccccccttccccanttcaacaaaaaaacacaatacccaaaatcaaaaaaaaacaccttccataacaaaaaacctacaaaacccaaacaaaaaatctaacataacacacaaaaccccacac

SEQ ID NO: 339545 - DNA, 465 bp, Zea mays
  unsure (1)..(465): unsure at all n locations
aataaaaatttttttttttnacatnncncttttttttaaaaagattttttcaaaagaaaaaagataccctttctcccctccccttcttcttctctcctctccttctctcttcctctcctcctctctttcccccctctttctcctttttccttcctcttttcttctctcctcccactcctctcccacctcttctcttctcttctccacttccctcttctttctcctcttctttttttccccatatattcttctcttcatcccctttctcttcctccttcttcttctccctttcttacttctctattcttcctttcccttctcctcttcctcctgtcttttccctcctctccttccttattctccttcttctctcatcttttctcccctcccttcttcctctcttcactctacttccctattctctttctcttacctcttctactccctttcccttactccttctct

SEQ ID NO: 339546 - DNA, 190 bp, Zea mays
  unsure (1)..(190): unsure at all n locations
cctccacctccnncccccccagaagacctttttttacaataaatagtattctccccccctttattttaatccttccctcatttaccctaattttcccaccaacaccactttcataaatatactacctcccttcccaaatttaaccaaaacctatttccaaaatgcttcccatccttatttttcccctcta

SEQ ID NO: 339547 - DNA, 151 bp, Zea mays
  unsure (1)..(151): unsure at all n locations
cctcataaaccantttttttaaaagaatctttctaaaaaagaaagaaacccaacccctctctaacctcttcaccccccaatttatttaatttaccccccactttatcccccaacaaatattttccatcaattcctcaccttttcatttcat

SEQ ID NO: 339548 - DNA, 249 bp, Zea mays
  unsure (1)..(249): unsure at all n locations
attacttataattatttaaaaaagaatatttctccaaaataaagaataatcacctcanttcttctttttctcatacaaattaacctatttctcacattcatattttcattttatcaataatttacaaactcttcaaacttaaaattatatacaattatttattatttttacctcttcccattctttcttcaattattacactctttattccataatcttttttcaactcttttacttaaattttttttc

SEQ ID NO: 339549 - DNA, 335 bp, Zea mays
  unsure (1)..(335): unsure at all n locations
caaagattctttatcccacggaataaaatcnnatctaagaacctttctaaaaataaaaaagacgtctttcacctcccctaattctattcatcacaatctattcactcattcctcttttattttaatactactcaatttactttcccattaaattcaaaacttctaaaattctccactttccacattcataactttctaaaccaataactttcatcacaatttataattccattactatattgcaatcctttaatcccctattcactaattccaaccactaatcttacataaaaataaaatcttcttaaatcctcttactctctaatatccatacc

SEQ ID NO: 339550 - DNA, 365 bp, Zea mays
  unsure (1)..(365): unsure at all n locations
ctntaaannagccctaaatttttcccttaccagtaacacccccctacagaactttttcaagagaaagacaagacactcatcccaaattcacatccatgattaccgacatttcccttcattttcctatttcaacttccttgcaaaccatatctccttcctcatctcttctatccacacattttatctactccaaccgctcctatctacctatattctacctcaattataccttcctactctccctttctctttacattaattcccttcacctttttactttctttctcatttaatcttttccaaatagcaaaaaataaattctcttccattcttccttcctttccatttccttttttttaccctct

SEQ ID NO: 339551 - DNA, 178 bp, Zea mays
attaaaaaaaaaaaaaaaaaaaaaaaaaaaaataataaaaaaaaaaaagaaggaaaggaaggaaaaaaagaagaaaaaaaaaaaaagggaaagaaaaaaaagaaaaaagaaaaaaaggagaaaaaagagaaagaaagaaggaaaaaaaaaagaaaaaagaaaaagaagggaaagaaaa

SEQ ID NO: 339552 - DNA, 288 bp, Zea mays
  unsure (1)..(288): unsure at all n locations
ccccnccncccccncccccaaaagggccttttttgagaaccaatggcccccaaanctttgttcaacacaacatcattcaaatcctttactggaattaaacaaaatgcttaacgaacagggccccaaaaactttcccaagaaaaattctttttttttgggccctcaaaacacaaaacacggggcccatttacctttcacataaaaagagtcggccttaaaccccttaaaaatggcccgacctttcttgtaggccgcctcacctttcggtccacaagataaaactttatc

SEQ ID NO: 339553 - DNA, 327 bp, Zea mays
  unsure (1)..(327): unsure at all n locations
caaaaaannccnattnacggtggctttcttctcaggcagacggggcttctgcccccccaccaaaaacccccccttctttcttccccccgtcaccccaccccaagaccccctggggcacaccctctttctctttaccccccccccattttattgcccacagagggggggacccccaacccaaaaacccctccgggcaacccccggggggaaaaaaacttttcttcccctattaaccccccttgggcccccccccccagggaaaaaccctccccccccttttttccccccccgcctttaaaaaaaccccccccttctgggagccccccc

SEQ ID NO: 339554 - DNA, 158 bp, Zea mays
aaagggaagggtttttttttgagagttttttttttggggtttgagaaaaaaaaaagaactggaaaaacccaatttttaaagggccaccacctttcttgaaaaatataaaaaagcccccccctttaaatgatccaggggaaccaaaaaaaaaattgggg

SEQ ID NO: 339555 - DNA, 173 bp, Zea mays
  unsure (1)..(173): unsure at all n locations
attcccgcagcagccgcccttttttttttttttttttttattcattttcntttttttttttttttttattttttttttttttaagggcctctttccaccccaaaaggagcttttcccctcatttccatcccattttatcatccctttaacccatcatttaacccccaccccca

SEQ ID NO: 339556 - DNA, 318 bp, Zea mays
cctccatcttacctccttctactttttccttctccccccctcctccagagaactcttctataaacaacagaagtctctcttcttcccccccttcttctctctatttcttttttcttaaatccttcttttttttccttccattcttacttcattccttccctcccccaccctttcctacatcattttcctccttcatatcttctattacttcctcccttttttcatctattcctcctctacttcttttttcttctctttactttttttattcttcatttttttcttcatatcttctctatttcttctttttttcctttc

SEQ ID NO: 339557 - DNA, 239 bp, Zea mays
  unsure (1)..(239): unsure at all n locations
cgcggtcaggagcagcatcgacagcgccagctccttcttgtatatcctgttgtgcttctccttcttcttcttcacggtggtggcggcggcggcaagatccttcctcgacattcnttntnatttttttttttttttaattacttttattctatttttttattttactctatttacatactttcttttctctttttcttctctttttattcttctttttttctcattttttttattttttt

SEQ ID NO: 339558 - DNA, 252 bp, Zea mays
  unsure (1)..(252): unsure at all n locations
agcagccagcccttttttttttttttttttttttttttttttttttttttttttttttttttttttttattnantagagagttttttttgacaaaaaaaaggcccatcatttttcccattcatatgttaaataacccataccccaattccctctttaatttacctaacccctaaattaaaagtttatttaatcatttaaattttaccccaatactatcattatttcttaagttatttattcaaaccttttta

SEQ ID NO: 339559 - DNA, 307 bp, Zea mays
  unsure (1)..(307): unsure at all n locations
ccgttctttttattttttttttttactnntagaggaccagaggtttgaacgcactcaattctggncagattaagtccatgttagaattatgtcggttgtaaccgaaaaggcctaaccatttaaaaaccattaacacactctcaatggcacgctagctaacccaccatattgcacgtttccagcaccttgcacacgtggcctaaacacacggacgcatctcacttgctacaacaactgttaactagttagctgagtggacgcttgatggaaggagggagtaaagccatcagcctcagttatttttcca

SEQ ID NO: 339560 - DNA, 353 bp, Zea mays
aaaaaggaaagagtttctaagggaatttcacttacaacacaagagtaatatcctcaagcttatgacaaactttttattccctcactgccaccccacccatcccttgcaaaacccctgcatctaaaaaaaggacagggattgcttgagaaccccaaccatgatgaacaggaggaggttgctcccaagccccttcatccttcacaagaaggcgaatttctacctttatcattaccccgaaccttcaagtcccggatctggggtccttgcccgtggtcgcctcaaggccctttaaccctcattccacctttgccctagtctgttttcttttgaatttaattattcaacccttacca

SEQ ID NO: 339561 - DNA, 395 bp, Zea mays
aaaatgataagagtccaaattttaactttaaatatatgcccatggaaaaggggttttcatgtgctggaacgggaccttgtgatttctattaagtttcaactctagctaaccacaacataataagagttgggtctaaaagaccatgttttacattctccaatatgcagtacaacaccgtttagattgaggcacgtaacagcaagccaatgcatgaatcatccgatgggcgtgttctaatggcctgcagtagaccaaccagagcccttgcgatactccttggcggccatattctacttggtcatggttcctacgccgatgaggaccttgctaccttggtgaacgcgctcaaaacccataactcgcccttaaaaacgtacctgtccttgatgattgct

SEQ ID NO: 339562 - DNA, 308 bp, Zea mays
atattataaaaaatccaatttttttttttaaggggcaactacatatacgggggccaacacattaagacagaaggatttttttcaggttcaaagagcaatcaattatttgtaaaacccaatccactcttaaaaggattggatcggattcttttacaaacaacccaagatttgatggttgatgacccattttttcacaaacggacggtcccacacatttctttggagtagtacaaattatttgccggtcacctaatgatcaatcctcattgatcagtgcttgtgcttcttgggcttttttactatcatta

SEQ ID NO: 339563 - DNA, 475 bp, Zea mays
  unsure (1)..(475): unsure at all n locations
cctgccgtaccgtccgnattcccgtgcggccgccctttttttttttttttttttttaaacccaggacctttatttcctggtcccaccaaaaaaaagcctaaaagcataccttaatgggtttggtgtttggccgaaaaattttaccattaccctgttaccatttccaaattaccgggaaaccaaccttgccccttccgttttttttggtttgcccaaaaaaaaaaatcaagaagtggccccctaggtgccagcttttccaatccgtattttttggcctgtggcaattaccattcctcccagtgggaaagcacatttttcttaatggattaagtaacctggcctaaccttccgtgaaggctattccaggctctgccccgccttggaaccgttacccctgaaagggtcccagttcttcggggggttacccaacttgtcccttgcccaattgagtccagtgtatgcaccacaaccttgt

SEQ ID NO: 339564 - DNA, 392 bp, Zea mays
tcccgggcagccgcccttttttttttttttttttttttttattataaaaagtcatttctttgatagtaccaaatgttaaaaaggggaaaaacaattggcgaagtgggaagcaaaaaagcagtacagcctcagataacaataagtctgaacggtacaatatagtttgcgtttttcactataatagccagccatggatcttcaatcgtcatcaccaaaggtggtcttttttcctgtactagctgtaccagcggtctgtttgaaaggcgtacccctttcaccacggcttttgtttcccctttcaccattggcttcaaattcacttccatgtataccacctatgtcttttttactacttctcttctttgcctccattgatgcatttcattttttct

SEQ ID NO: 339565 - DNA, 211 bp, Zea mays
ttatcacccaccacaaaacggcctattggtttttatcccaatccatatatagattggatgagattaagagagtttaaattcttaacaaaaaaaaaaaaaaaaaaaaaaaaaaaataaaaaaataaaaaaaaaaaaaaaaaaaaaatataaaaaaaaaaaaaaaaataaaaaattttttatatttttaaattatatatattattttaataaa

SEQ ID NO: 339566 - DNA, 342 bp, Zea mays
ctcacgcgtgcgaccgaatctgtgagccatgtctaccaacaagggcagcgcggccaagggcggctgagggaaaaagaaggtggtgaagaacgagacccagctcgggatggcctatatgaagggccacaacttctatgagtggtactgccaggtcgtttttaactctgcaatgctttaccactataacatgtcctgctccgatatattgagggcaccaacgtcgggcgtatgcagcgctactggacagattcttatgcagcagccttaaggtaccctcgaccctaaaccatattatctgcaccctcttgatgatcctaacttcctaccttttgaagatgcttc

SEQ ID NO: 339567 - DNA, 203 bp, Zea mays
tcttcgctgactttcctcgccttctccgccgagcgcgagactcctatctcgggggcaccgcaacacacatagcaacccctacttccggtccgatccgcgctctcctttccgttgcttcaataatggataggaatgacacctgcaggttcttagttcgacgctaaacactatgattctaacatgcaagtatctttgatcacctc

SEQ ID NO: 339568 - DNA, 339 bp, Zea mays
ctctgcggcaagtactacagggtgtgctgcctcagtatcatcgacccaggtgactcggacatcatcagtaccacccctggcacccagtgagccagccccggcacccattgcagctgcttcgcctttctcaaaatgagatgagatgtagcgctccggccctatgtccgtttccttttttatcttttagctatgtaattttgctaccatgtgtccatctaccatactgatagtacctcttattatggctgctatgcaaggcatatccatggttttgtttgtaatataaaatatatattaaattatataaaataattttattatatttatgggcgggcgccc

SEQ ID NO: 339569 - DNA, 134 bp, Zea mays
cagtcgacccactcactcttttttttttccgtcccaatctcttcacccggtggccttacaacgtaccagcgttccctatatttagactcatattagactagcttaatcatgattcataacctctttactatcct

SEQ ID NO: 339570 - DNA, 146 bp, Zea mays
tcgacccacgcttcctcctttctgctctgctcccatcccagggagcccgactccgcccaaaagcctagccccatccccttccccccgcccatcttcgcctactaccagacgcgcgccgaacaccacaccgttgtaactagcgaact

SEQ ID NO: 339571 - DNA, 233 bp, Zea mays
  unsure (1)..(233): unsure at all n locations
tgtcgatcccacgtcgtctcgtccggtctctcctctgcatcaatccgtcgtctcgtcgcttgtcatccatccatccgttcaaatcgaggangtgatggggggaccggtagacccacgtgatcatggatgaggattctcaatcggcatgcagcatgtccgtcttcctctcgccacccagtcgccgttcctccttcctcgtccctccgttcttccgcggacaccctgtcctcgtc

SEQ ID NO: 339572 - DNA, 70 bp, Zea mays
tctagtttctgtggcggacaatgattcttcaggtgtcttttcatatcctggggaggagccatctatcctt

SEQ ID NO: 339573 - DNA, 381 bp, Zea mays
tgtcctgacatgaggcaattacatggaaagtccctcgttgaagtaaacagaagtttccttgaaaaacacaatgcttccttgatgcaccgagcagctggtgctgaaatgatgtatctcttagagccaaataagaagatggaggcaattaatttaattgaagattcaacaaatattacatcatcagggcatagtttgcttggtccttgaaaaacatggcaaattcaagattgtattgatgtttataaattgctggagacagtctttggtgatcatattttttcttttggtgtgtggtttttgttttctttttttttttttgttttgtaatgtcttttttttattttattgttttattatttttttttttcttttctttttttt

SEQ ID NO: 339574 - DNA, 389 bp, Zea mays
  unsure (1)..(389): unsure at all n locations
ctggccatgtcgttctataagaaactagtgatcgttggcttcgccttaaccttgctccttgtgtcattccgaatggatgcgactgcaaagctttgcagtacgacaatggagagactcatttgcggcggagcaagtcgaggcgacgtgaacagggcatgcgatgaaacgtgcagatccaagggctacacgggtggcggcttttgcaacatgaaaatacaacgctgtgtttgtcgcaagccgtgtgtccaggaggagcaaacagaggcgcgcgccagagacgaagcatncggcgctggagatatgatgagccggacgatggcagattgagtgatgcgcatgacagatgtttagccaccatatatatatatatatatatatatataaggaat

SEQ ID NO: 339575 - DNA, 78 bp, Zea mays
tctctttaaccctagtcgggcttcatacatccggcagcgcgttcctttttcttcggggggggtaactctcttttgctg

SEQ ID NO: 339576 - DNA, 209 bp, Zea mays
ttttctctctcagcgcgtcgcccgccaccacaggctgacattttcactaatcgatgacgttcaactttcaatcatgtctgacttcgatgtctaacctttcgttgcctccatctctcccaataagatgacgttccttaagtacagctacctctacttttacctacatactcttcttaacattcccacggacgacctcattcagctctttc

SEQ ID NO: 339577 - DNA, 294 bp, Zea mays
  unsure (1)..(294): unsure at all n locations
cgacccactcttttttattaaacacactcctacncaatacgtgcggctgaattaaaagacgtgggggggtccacagagtctaactacctctgcatctacttcgacgaccgtaccatacgcatatgggacaatcagcccgtactcaccgttggcgcccaggcagtcgtcgttttcaacgcaaactgttacattcgcgtgctcaaggggctcaccaacttcgactatagcgctaacttcaaccctcataccatctcgcagatcgctttcggaggattttattgttccgtgcgcata

SEQ ID NO: 339578 - DNA, 393 bp, Zea mays
ttaaaacagagcgaagccaatggaaggactggaggagggaagtagcgtgatagtgatgccgtagtggtcgagctcgcggcggagcagagaccagagagtgagagcgagcagagcaaccaaagcgtaggcgatctcaacgcgaagcggaattgattgcgcccaccaccacgtcttctccccctccgtccgacccgtcctcaagtcaccaggccaccatcattgccgccatcccgccgcccggccgcgggagcccagctacgcattcataactgtttctctcttggcttctcggcgaagtgttgcggttgcgggtactggagtgcggagagcagcgcggcgcgagggaggaagccaccacccaccaccaccttcattaaaggcgctcacgcgccg

SEQ ID NO: 339579 - DNA, 299 bp, Zea mays
  unsure (1)..(299): unsure at all n locations
acttactcacaccaatctccgcccccgcattgcgtcgaacacctggtgttcgctggcaccgaccccaccgaaccgtaccttcaccaacaacaccaccagtccaccaccacccaccttccacatgtgcacacgctcccttcttccgttcaccaccgttatatatcccggcgcccctttcttccttccccgtccttccctccgnctacgnccccgcccactccttgctgtcaccacttctgtcacctnttgccgcgccgacgcatccttcatggaccccgtttcacatggtgtctaacccc

SEQ ID NO: 339580 - DNA, 94 bp, Zea mays
tagtcgtcccacgcgtccctaattttacaaaaaaaaaaaaaaaaaaaaacgaaaatttttttaaaataataagagccccccaaacacacacttt

SEQ ID NO: 339581 - DNA, 288 bp, Zea mays
ttatcctatacagttaacccactcttccctttttttattcttctcctaccataactctgggtgagttttatatatgagggggggcggtcttcaacatacttgttttcttttaatacacatttctttttttatcggtttcactattgtctctttttcagcatttttcaattcttcacagctcatttctaccaatctttttattgtttatctttactgctgtgattttttacttaaactaattcaaatcatttatcatcctttctatattttttcttgattctataactt

SEQ ID NO: 339582 - DNA, 230 bp, Zea mays
tctccgctgttaggttctaccaggagaccttcggcgtccctccggccacgcgagctcgccgaaatggtcgcccacaggttccatcagtaccaggtggtgggttgtgcgctttctacctcaaccgatgagcaccctatgatctaccgtatgaagctttgggtcaccatcgtgggttgtgcctagttcatttttttttttcttttttgagatagtttatgttggtgattatg

SEQ ID NO: 339583 - DNA, 181 bp, Zea mays
tcttctttataacaagcttgccatgcaggagttcatgatcctcccaactggtgcctcctcgttcaaggaggccatgaagatgggagttgaggtgtaccacaacctgaagagcataatcaagaagaagtacggtcaggatgcgacaaatgttggggatgaaggtggtttattacctatacat

SEQ ID NO: 339584 - DNA, 287 bp, Zea mays
tcgtcccacgcgtcctctctcttcctctctgcctctctctctcaggggcgactagggacagccgctgcctccctactcctggtgcccaggtatcctttgccggcgacgagcacccggtaggggtatgggaatggaggtcgttggtgctgaatcaacaccagcagaggtaaaaatatccaacggagaattgaatctattgcaagagaaggaaagcacagcaactgctaaagaacgtgaggaggcatctgtatatggttcagaaacaactgcgaatgcaactgatctga

SEQ ID NO: 339585 - DNA, 289 bp, Zea mays
  unsure (1)..(289): unsure at all n locations
atcctcnanantcnacccactttttcttttctctctcccaattcccctcaagggcgagttttttacccaagataggaagcgcccttccccctctccattctcattcttattctcnttttctttctttcctctcccccaatcttcagatatagtctcctttctttttctatctccatatctctcttttccttttctctttcctttctcctcttctcttttctcctctcgctcagccacgccactgcaaccaacatttttctttatcttttctctctttttatttttcctt

SEQ ID NO: 339586 - DNA, 83 bp, Zea mays
  unsure (1)..(83): unsure at all n locations
caccanctaagagctatgcacgcacgctgtcacgcgtgcttgagtcctctagagtcgacgagctcactagtgacagcggccgc

SEQ ID NO: 339587 - DNA, 389 bp, Zea mays
catgagggtgttgctcgttgccctcgctgtcctggctctcgctgcgagcgccagctccactcatacaagcggcggctgcggctgccagccaccgccgccggttcatctaccgccgccggtgcatctgccacctccggttcacctgccacctccggtgcatctcccaccgccggtccacctgccgtcgccggtccacctgccaccgtcggtccatgtgccgccgccggttcatctgccgccgccaccatgccactaccctactcaaccgccccggcctcagcctcatccccagccacacccatgcccgtgccaacagccgcatccaagcccgtgccagctgcagggaacctgcggcgttggcagcaccccgatcctgggccagtgcgtcg

SEQ ID NO: 339588 - DNA, 316 bp, Zea mays
ctttgggagtcggtaagcagcacgtcttgtggagaatgcactagacttcggggtcaataaatctccaggcatcctcaagtacaacctgggcacccgggaaaccactgccattagctgcccgactatgacgaatcctcacgttgcactcatggtggcagagggtggtgggctgggatgcgccaccattaggtcatccaagctctgcctgtggtcacaagaggttggtcctggtggtggccatagcggatgggcactagacagaaccattgagttaagcacgctcgtccctgctggtcattccatacgtgaatttgat

SEQ ID NO: 339589 - DNA, 408 bp, Zea mays
tcgacccactcgtcttttttaaatcgcaaacaagtcaagatcctgtataagtttttggtaaggtcagcaaatccacatgggatagagaataatcgaacaagaccgtaggtggattcgactatttggtaatcttggtcgtttggagtctaggaagagaggaaaatgctatgtattttagcgatgtgcattgtagccaactaaaacctcgccaaagcattggatgtgcatgagacacgtaccattgcttctacataaaaaaataaaatatataaaataatggggggggggggggggaaaatttttattttaaaataaaattaaaataattattaagaataattataaaatatatttttttattttaattatttatgatttgttttttttattattagttattttttttat

SEQ ID NO: 339590 - DNA, 431 bp, Zea mays
  unsure (1)..(431): unsure at all n locations
cacgcggcgtaagctgatccttagagtcacccactcgtccgcggtgcgtgggcggacgcgtgggttgctttgagacgtgaaaagattggggcagcagcccntttctggcgattttctgctgcttcttatccagaccttatagaggcattaccaaaaaaaccgcttacatctgtaaataagacagtgaatggcagttttgttcgaccatccaatgctgggggcgatgtttatcctgtggaatcttacgagagctcagctaaccaagtacttgatgctcactggggtgttctggatgatgatgatgcaactggactttgctcgcataccctctccatccttgtgaatgattgtcctggtgttctcaacattgtaacaggagtctttgctcgcaggggctacaatatacagagccttgctgttggctcagctga

SEQ ID NO: 339591 - DNA, 249 bp, Zea mays
tcgacccactcttcttattacactctatatttccctgagaaagggccttacctccaagagatactgcactcttatcgatcccccttaacaccctgacttcatcaaaaatattttcactcacactaacctaactaactattcttttcttattatttcctcatccactcatttttttcaaacttgcatctccaacaataaccatacccgtttacatactcttcttgctttcacacttcatacacatccaaa

SEQ ID NO: 339592 - DNA, 347 bp, Zea mays
tgactgccatatcacatcccgctagtccatctcccttgagacaggagtggaatcgcatcgcttccatgggcagctcctcgaatacctactcaagcatgctggccacgtacacggcggtgacgagggaggacatggtcataggcagggactcgtcaccaccatccttcaaggagaacgaatggatgctcggctaccacgaggcgatcctctacgatgtcaaggtgctaaggatcgaataccatgaagacgtacggcgcttcttcgtccataatctcggttgagaataacaactgcgatgaatagcttgctaatgaccgcttgttggaattgactgaggaaaacgtgcg

SEQ ID NO: 339593 - DNA, 266 bp, Zea mays
  unsure (1)..(266): unsure at all n locations
ncgacccacttcttctttctttaccactccctgcccccaagagaaagagtcctataaaaaaagtaaagcttatctctctccctctctcttatcttcttccaccaactcattctttcttcctacttccttttctaatacttttttattctatctttttcatccttacccttcattcaccatcccttttcacttacttatttatcctttcataccatatacccctcttctttattccttctatcttctaacttacttctcttttctct

SEQ ID NO: 339594 - DNA, 400 bp, Zea mays
tcccttatcgtagcaagaggatgatgatccggagaaccgactcgagatccatccgtagccccgacgaaaacacgacgaggcaaaggcaagcgatcgcattctatgagggaggatcgtgccgaacaggccagtacttcgcgatcgcgttagctttccctatcccgaagagcgatggcggccagagcggagcagggcttctgggttcttaccggaccaacggaagacggcgcgcgccagcaggaagtgggttccgcgaccgatgggcggcctggcgtgtggtgtggcgaatccctcaccggcagagatgggaattgggttgcggagcggagtggagcggatcggattggattggaacacagcgcaacatccaacgagtgttttcgtcgtcgagcgatgagtc

SEQ ID NO: 339595 - DNA, 176 bp, Zea mays
cacgcgtcgtaagctgatccttaaccccatctttcaggctgcaagactgtgggtatcggggaaggggtccctcacaagttctctactacattgaactaaagagcacaaacccaatcaccacccaggacatacatacgtcagccaagcctaacaccgtacaccttcttatactatag

SEQ ID NO: 339596 - DNA, 419 bp, Zea mays
  unsure (1)..(419): unsure at all n locations
gacccacgcgncctnaaataaaaaaaaaaaaaaaaaaaaaaagaaaaatatccaaaaaaaagaaagaaagcataaccancccactacaaaaaatacaaaaatacaaataatcaacaatactccactacattcacacccttattcaattataccccttctccttaaaattccactatcaccaattaccaccccctttccaacttcttatcttttcaacttttattataacctttccttccctttctttaacatcctatactaactttcctttttctctcctctacatttttctcctcttattcatcttttaattaccccccttttccaacattacccacaccattttctttcctttttatcttaatttttcttctaatattacagactatctttcctttcttttttatttctttctttat

SEQ ID NO: 339597 - DNA, 436 bp, Zea mays
  unsure (1)..(436): unsure at all n locations
nctacccacttcttctgttttacccacctctcctctttcaggccagttcctatttaaaaaaaatggaacccttccctctttccctttattatctatctcactcatcatttactaactcataccttcttttttttttccacaccctcacttttttctacttctcaatctttccttccattttcctttcattttctccaatctttttctttcttcctctccattcttattttattatttaaatttttacatcttctctccttttattcatcccttttttccttctcttacttaagatataaactctcattttacttctctctttttctaattacctacaacttttgcttttttttttcatttctttcactttctcttcttatcttttttttttctttttattttactattttccttcattttattctattttatcttt

SEQ ID NO: 339598 - DNA, 404 bp, Zea mays
  unsure (1)..(404): unsure at all n locations
tctctccctttcccgtctcttcnttcttcccccgtccacttcttggtccgagccgcgtctggggtctcggcatccctgcttcgatcgatagaatagctggatcagagcatattaggaggttagcagtaaaagtcggtagagtgcttttcttcttcctcgttggtggctagagggacgggggagaactacaacagattggaggctgcaagttctcgggaggagccgggcttctcttgcggcggcaaacatgaggaagctcttcttcgtctacctcgtcctcctgctggccgctgcagtagttcacggtgaagatggtgcgtacattggcgtgaacattggcacggccatgtcgtctgtcccggcgccgacgcagatcagcacgctgctccgctcgcagaacattc

SEQ ID NO: 339599 - DNA, 234 bp, Zea mays
  unsure (1)..(234): unsure at all n locations
tcaacccacttcttctggtctcctgtatctgtcctcttggcgagggtttttatagcaggtagatatgacatgctcnccctaccttcccatggctctgaagtcttcattggtggcctgccccgcgacatcactgatgatgacctcctttagctgtttctgccgttgtgagaaatatatttggtgatgttttcctttgttatattctcatatgttaacatggttttctttttttca

SEQ ID NO: 339600 - DNA, 105 bp, Zea mays
tcgaccaactcactcttgcctgagctcgctccgtgaatctctggacgatgccttactgcaaagcagctagccctatagcaagtctgattttagctcagcatattg

SEQ ID NO: 339601 - DNA, 380 bp, Zea mays
  unsure (1)..(380): unsure at all n locations
gcgttcttaatcctttatcctttttattctacccacttttcttgtactcactcacatctnaccccaaaaaagcttttccttataatagagaaagcgtccatctccttcctatttcccattatttctttcattcatacccaatctttatcttatattccctattctcattcccttttcttttctttctataccttctcatacactttcatttcttttctcattataaagataccaatatattatgatttccttctcaatatatttttttcttttcattctattactcttttcttctttattttcttaatttttactactatttctattcattttcattactactttcctttctttttcaatttttttattttctttttttc

SEQ ID NO: 339602 - DNA, 273 bp, Zea mays
tcgacccactcttcctggccgccctttttttttttttttgggtttttttttttatatgaagcaaacccttttgatttcaattcatccaggacaacttttgttttggatattataatagtacatagatagtacccaacatgggtaactaatttcgccgcacgcctagcacttgatctccttaagaccattagagaaatttagttatgtcttattagaggcaccatccttttaatatgcgaataccacaaacacaattatctttttggtctttcc

SEQ ID NO: 339603 - DNA, 190 bp, Zea mays
tcgacccactcttcttttcacttatcatacctcacctacggtcggtttccattactggtaaggaggcatcctcatatcctataagactccaacctgcatatatcatgtttgaattaatcaacatattctcctaataactcaccccttattctgcctacatttgatcccctgacaaaagtttacctactac

SEQ ID NO: 339604 - DNA, 468 bp, Zea mays
gcggccgcccttttttttttttttttgatggaataaatacatatgtttttttataccaagctaaaaggacaaataggtggaaataactatagagatgattattaatatgagtatcacaatctaaaactgaactgttgttatacctatcctttcagaattcagaggtcccgactggtcaatatgaaactaaattctccaatggactccaacaccccatcgtgacggacagaagagggctcaccgtcaccgcctagaagtccatctgcagccacttcttgtagtaaacgcaggtgctgggtgagatgatcccctccggcgagcactcatgaatcctggggcaaaccccacaagggattccctccatcatccctccctgcggagccccagtgaccagccggtagcacattgtgccggccctgacggcgctaaaatcccccgcgccggtgctcttgacctcctcgagcacct

SEQ ID NO: 339605 - DNA, 269 bp, Zea mays
accggggcgggcggcctttttttttttttttttttttttttttttttttcttttttttttgggcggcaacataggatacatggggggtttaattcaaaacccagggcatcccacttcaggtcttcaggcttggcaagggaagatttttcgagaaaaccctggaaacaactggctttcgttttcggaccttgatttccacacctgccatgccccttaaaagcctggtgggtttgcttttcacaatcccggttaaccttctttggtttttg

SEQ ID NO: 339606 - DNA, 435 bp, Zea mays
cgggcggccgcgccttttttttttttttttttttttttttttttttttttttttttttttccacaatattttttttttttttggggtttttttaaaaagcaacaaaactttaattaacccaaaagtcccccaaccccccaaaacaaatgtcaggcatggaaattggaaaccaaagcagggcttgttttaattgctacataaacattaaaattgggccacttttttttataacagtttttgtagacccacatgttaaacttaacacccaaacagggggccaaaaagcttaaaaaaaaaatttccccttcccctttttgtctccacaaatcaaaaaaggcttgcttttttggatggcgcccttgaaatagtgttttcatttttgcccctgcatcttaaaaaacaattttttgggggtcttgcctctttttggaaaaa

SEQ ID NO: 339607 - DNA, 285 bp, Zea mays
ccgggcggccgccctttttttttttttttttttttttttttttatatttttttttttattccttcccctcttctttaggtggctttcttttaaaatccatctaccccactaaacccaccatatattatcaaccaccaatttcaataaaaaaaccccctataaaacccaaaacacgctcactaattcaaaaaccacttaaccccccaaaaaaaaaacacactttcttaaaaaaacacacctcaaatcaccctcctgtatttagacaaaacaaatcatcaactccaa

SEQ ID NO: 339608 - DNA, 364 bp, Zea mays
attgattcccgggcggccgcctttttttttttatttttttttatttttttttttatatcgaaatcaaggaaattttaggggggcatctttacaggactgattcgcccataaccctcccatctaaaattacacgaccatcctggatagatgatctaacaacataagaagacacagtttggactgttccttaatactgtaggaacagttccacaggccaagcacaaaattttttatccatttcttctggacccaacttgacacgtcatgccaataactatttgtgcctcaacttttaatcacacccgcttaaaagtcacactgcatacttgggagccctcaatttctccaaacattatggtatgat

SEQ ID NO: 339609 - DNA, 396 bp, Zea mays
ccggggcggccggcctttttttttttttttttttatattttttttattttcattcattaccccacataacccatcttcgggtgggtttttttataaaatgggtacccccaacaataccctttataatttttttttttgacccaaaaaaaaccccaaccccaccaaactttaaccctcttctaaaatgttttcccacaaacacaaccccccctttaaaaagtcccacttccccttaaacaaattaaaagcttaaaacttttttccccccacaaaaaccccccccataaaacatactctataaaaaaaaccccccccccaaaaaaaccccggcgcccaaaaataccatctacccccccccctctcttccccaaaaaaaaatacccccctcctccccct

SEQ ID NO: 339610 - DNA, 60 bp, Zea mays
  unsure (1)..(60): unsure at all n locations
tcatgtcgacgtcatatgcttcttctattagtgtcancctaannattcaattcacttgnn

SEQ ID NO: 339611 - DNA, 461 bp, Zea mays
  unsure (1)..(461): unsure at all n locations
cggccggccttttttttttttttttttttttttttttttttttttgttttttttnncntttttttttttttttggttgttttacagcacacaagaacgggaattaaataaacaaactgcaaaaactttaaaatacaacatccattttacgtattttatttgtctacaggatgccctcaggggggtttcaaatgtaaaaaccacatttcgtttgagcaaattagtttacaaagtgataaaaccaaaacattttgttggagcaaattagtttacagagtgttaaaaccaaaacaagcttaaggctggcttcttataagggaggctggttttgttgtttgaaacacttaatttttaacagacaattttctccaccttttccaaaaaatcctttatctttgatgggcttaaaactttaaactcacggccaggttaaataattcccatttcaatgttgttggaaga

SEQ ID NO: 339612 - DNA, 370 bp, Zea mays
aattaccgagcggccgcccttttttttttttttttttttttttttttttttttttttgtacatccttcacctatttctttttatttgttgggtttttttttaaattttgtacccaaaaaaatttttttattttcttaatcattaatttttatatttttttcatttcttttctctaaaaaaaaaaaaaaaatcttttccccaaaaaaaataaaatacaaaaaaacacttaatcccaaaaactcccaacaaaaaaaaaccccccccaaaatacaaaattaaaaatttttataaaaaaaaaaattaatcccaaaaaaaaacacttttccaaaaaaaaaaaaaagattaacataataaaaaaactaaatctaaa

SEQ ID NO: 339613 - DNA, 163 bp, Zea mays
  unsure (1)..(163): unsure at all n locations
ccgccctttntttttttttttttttctttattttttttttttaatccatcattccccccgcctttaatttcccagagggcttttctaaaaatactgggccgccccaacaaacctcttcccttaataaaaaaaaaacacctccttaatctaacccaaaccccat

SEQ ID NO: 339614 - DNA, 387 bp, Zea mays
  unsure (1)..(387): unsure at all n locations
gggcggccgcccttttttttttttttttttttttttttttttattttaaatntttatttccacccnaaantataatttttagaaagttttttaaaaaatttaagccaccccaacaaaacccttctaatttaaattataaacttaaacattttttttttttaaaaaccaaaataatcaaaataaaaaactactttaataacaaccataaaaaaaaatttccccaaaatgaaaaaatcctccccccctttaaaaaaaaaaaaccatacaaaaaaaaaaactaaaaataatatttttcaaaaaaaccaaataataaactcaaaaacaaggaggatccttacaaacaaacttttaaaacaacaaaaaacacacccctttatatttatttat

SEQ ID NO: 339615 - DNA, 427 bp, Zea mays
  unsure (1)..(427): unsure at all n locations
attaccggtgcggccgcccttttttttttttttttttttttttttttttttttttttttttttaaccnttttttttttttttggttggggccttcaaaccaccgggatttatattcaagtgaaatttttttcagcatttacaaccttatttgtactcgcgtccgtccatacaaattaaacctaataaagcacaatgccctttttccccaactaaaacccacccaaatacaccccccaaaaaaagcctaacggcagttgacaaacttacttccagcgttaaatgttcctaaaatgtaccttatccccaagctaccccttttcctttggatttacaaagaacttgaaaaactttccaacccctacaaggaacaacaaggcacttcaaatcttgaatttttgccccgtttaactactttttaccgaactc

SEQ ID NO: 339616 - DNA, 416 bp, Zea mays
  unsure (1)..(416): unsure at all n locations
gcgggcgcccttttttttttttttttttttttttttttttttttnngttttttttncnnttttttttttttttggtggggaaaattggggggcattactgttttacccatctcgtgatttacctttcgaaaccgcagcgacaattcccaaaaaaaaaagggggggaaagataaccggggcaaaaaagagccaaaaaaaaaagccgggggataattaatgctgcgggtcgtctattattattggaatgaggatgccgcccgcggccccctctgtggcggtggtggggcaagccaagccagggcattttttcactttacccggggggggagggtgaccccctcccccaccgggagcttgcaaatctcaacccggtcctcggtgggaaaccccttttttaggaccagccccaaatctcg

SEQ ID NO: 339617 - DNA, 299 bp, Zea mays
ttttcttcatgcctgcgcattatccacacgggagcgtaatttttgatttcattcgaccagacacatggacacaccacaaggactgttaaaacaatgtcagtacccaacgttaaataaatagaaagaaagaaaaataccggcacatgccgtaccagcaaataatcatgaaccatgtcatgctaaccaacacctgcgaatattgattcatgcttgccacgcatggtctggctaggcgtgaaacgcgcacttggcgagcggtccacccaaaaggcacctgttgccgacgaacgacttagcgc

SEQ ID NO: 339618 - DNA, 385 bp, Zea mays
  unsure (1)..(385): unsure at all n locations
cggccggctttttttttttttttttttcaaatttatatacttaaaanngttagtaatggcgatacaaataaatattgggggtgtaattgtagaaaaacaatgctaattgataaaatgacagacccaatttatacagcccagacaggtagcccatgaggcccatctcgacgagtccatatgaacaaacagttagggtttgaaccctaaccgttcgtctctccttcctggtggcggtcgcccaaggccctggcggcgcggtcgagcgggcaaccggccctggcgtgtgggcagcggcctcagtgcgtggcccatacggcttggcccctcgacggtgcgcaccctggcggtgcggggcgcggtcccacaagtgtgaggcttcgccatg

SEQ ID NO: 339619 - DNA, 220 bp, Zea mays
  unsure (1)..(220): unsure at all n locations
acctncctaanattcccccaacaanattttttttttttgtttctttttaaaaaacgatggccccccaaacaaaaacaaaaaatttttttttaacccacccccccaaaactattttcccttcccctaccataatatctccacccaatttttttcatcatcaaccccccccccaaatatcattcctatcaactcacatttttcataaccaaaatttcctccc

SEQ ID NO: 339620 - DNA, 445 bp, Zea mays
  unsure (1)..(445): unsure at all n locations
cttttttttttttttttttttttaggtttttttttttttttttttttacccccanaananaattttaaagtaggtttttttaaaagtagggccccccaaaaaaacctcttttttatttttatttttttttttttggggaaaaaaaaaaaaaggccttttaatcccttccccccaaaataatggccccttttaaaaaaaaaaaaaaaaaaacccccaaaaaaaccccgaaaaaaaaaaaaaacccccccccccccccccccttttttttttaaaaaaaaaaaaaaaaaaaaaaaattttttaaaaaaaaacccaatggggggaaaaaacccccccccccaaaaaaacccccccgccccccccattttttgccccaaaaaaaaccattctcaaaaaaaaaacccaaaaaatcctctttggggaaaaaccccccaaattgtttgtccc

SEQ ID NO: 339621 - DNA, 375 bp, Zea mays
  unsure (1)..(375): unsure at all n locations
ttttttntttttttttttttttttttttttcngtttgtcattacccccccnnnnnnnnttttagaagatttttttttaaaaggggggcccccttaaaaacaanngcaacaaacccagcaaaaaattaaaggggaaaaaaaaaaggcccaacaaaaaaaaacccccaaccttgggggtctggcaatacttgttacaagctacaaacaccaccattatttttaccaaccgaacaccggaaaataaaaaaagcggtttgggggaacaacccgccccttttccattgaaccccaaaaacatctcatttatcaaaggggggggaaaaataaccccccctcccccgcaaaaaaaggccccaaaaccaaccaccccaccccc

SEQ ID NO: 339622 - DNA, 350 bp, Zea mays
  unsure (1)..(350): unsure at all n locations
acaggnccggaaaaaccggggcggccggcctttttttttttttttttttcanttcttttaaaacatacctcatctgcgaattaataaattaatgggggggttatcaacaagatagataaacccatcctgctcgtacatactcctagatagcacagctagttataccacccacccaacaaggcatgcaattagctaaactgcttggagaaacattattctactaataatattattactaaatccaaaacagatgctggggtcgttcacagttacagcactccctcgcttgggctggtgcttgacccccctaaatcccttctacggcatactcccacctacaccaacatgag

SEQ ID NO: 339623 - DNA, 485 bp, Zea mays
tgaaaaaccggtgcggccggtcttttttttttttttttttttttttttttttttttttttttatacaattaatacgacttcatctcagtgggtttattttgaaggggtacaaaaataccttcggactttacaaagagagcgagaagataagatgcaacaccttagaaggctgagagaactcggtccagtccgttctccaatcgtgtcaatgtatgtcactatgtatgtccatgttcctctatttatagttagagggtacagctttatgtgaatttacaatggtctcttgacggtctcatgcgaaatgcaggcaggaggcagcattgtcttctgatgctaagctccagtaatgttagtttggaagatttatatttacccaccggccaccggtacgtaccataatgcagaaaaatgatgctactccaggtgggtctttaaccatttgcattgtcgaggagtcaccatcttctctgaaactgtccttt

SEQ ID NO: 339624 - DNA, 392 bp, Zea mays
  unsure (1)..(392): unsure at all n locations
ggaataaccggagcggccggcctgtttttttttttttttttttttttttttttttttngtttcatttcccccaaaaccagtatagctatgggtggggtcctttttgtttgacgacggggctatgaatttaccaactccgaaaaacagtttgtaaatcatcttccccatccaagttgggattggggagaagccaattaaggcccagatgaactagcctacttattaaggctaagatgcgtttagggcatcaagttgaccctggagctcctcgagatcatcatcatcatcaatagcgctggaactcactggagcagctggtcctgcgtatgaatcagggttgggaagctgacggacaagaccttccggtgggatatttggagtgtttataaagc

SEQ ID NO: 339625 - DNA, 272 bp, Zea mays
  unsure (1)..(272): unsure at all n locations
ggcggccgcccttttttttttttttttttttattttaattttcaatnncttcntacaaccncataacatttttatagggaaggttttttttaaaaaaaaagcgccccacaaaaaaaaacccaatatcaaccttcttatccttcaacaccaccaaacaaattcattcccgacctcacaaacactaccaatccatgacaaacaacttagcacaaccaccaaccacaacccaacatccctcaacccacttcacctactctaaaacccctccacca

SEQ ID NO: 339626 - DNA, 429 bp, Zea mays
  unsure (1)..(429): unsure at all n locations
gcggccgccctgtnttttttttttttttttttttttttttttttttttttttttttttttttttttttttttttttagggagagaattttcatgggctcatgacaatttttacccataaacatgcccaccagtggtctcgcgattcaaagggggttgtacagggggggcccccgtttaaaattagaccaccggcaaacaaaattagggaaaaccaccccttaaaaaaaccggggaaaacaaaccctgaaaaaaaaatttgaaccttcgcatgtttcagggatgaccattacacgggtatttggggggtacgaccggtggccaacaaggacaccttacccgggcaacgaaaggagcacattacttatctttaaacacggttatgacaatgggaagtcttctgcctgtaccaagctaagtaaaggggggga

SEQ ID NO: 339627 - DNA, 406 bp, Zea mays
  unsure (1)..(406): unsure at all n locations
ccgcccttttttttttttttttttttttttttttttccttttgctaattacaccctttanattttttttgggggggttttttttgaagtttggtccccccccaaaactcttttttctcttcttttttgggaaaaaaacaaaccattttttttacccccccccccaaaaaaaaaccccccccccaaaaaggaattcccccccccaaaaataaaacccccaaccccccccaaaattcaacccccgggcctaaaaaaataacgcccttttttccccaacatcaaataaataccccccccccaactttacaaaaaagggggacagagctaggggccccttcctaaaaaccccacccccaacaaaaagcccccctctcgtcgctggtttctttatccccccatcaacaaaa

SEQ ID NO: 339628 - DNA, 379 bp, Zea mays
  unsure (1)..(379): unsure at all n locations
gccgccctttttttttttttttttatttatttttttcccttgngtantcccccccgttactcatcattagaagggttttttaaaaaaagaagaccccccccaaaacanncccccaatataaacacaaactaaccaccaacccgtttgacccccaaaaaaccccaaatatcttaaatccccccaaaacccccccaaaaaaatccccacacctttaaaaaaccccccacaacccccccattattcccccccttaaccccccccaaaaaaaaatttctaaaaaaaccacccctccccccccaacaaaaaaccccaacccccccgtctaaaaaccctaaccccccccttaccaaacacccaaaaaacaccccccccccccttt

SEQ ID NO: 339629 - DNA, 413 bp, Zea mays
gccgcccttttttttttttttttttttttttttttttttttttttttattttttcttttttttttttttttgggggaggttttatttggcatctcccctctccaattatcttgggcacgggttgcaatagttcccgcttgcaaaccaaactagcaatcaaattttacacaatcgatccacgagggacaagcaacaaataccacgggagctcaagctctcaactcccggatgtagctggggctcatctggttgaccttgggcgacaccccaccggcgaggtgcgcgtccttcacaaccctgttcaatttgctttccaacgggctgaaaggcacctggtccccaaaccgctttttggccccccccaggcaccccaagtaactttcccgctggtttttccaatgaggcatcctgct

SEQ ID NO: 339630 - DNA, 466 bp, Zea mays
  unsure (1)..(466): unsure at all n locations
cggccgcccttttttttttttttttttttttttttttttttttttttttgtttttcctaccnttttttttttttttgggggtttttttttggggggttgttgtccttttttttcccccacaacccatggttcctttggaatgggaccaaacccccaaaaacgggttcaaaccaaaaccccgggttccttgggggggggcaaaaccccaggggcgggttcaaaacaaaaaccttggccatgttttttgggcccccccggttgggaaaataaacccctggaacaaatttttgggcggcccccaaaaaccaaaaaggccctttttttttgtgggggggggggccccccaccccccccttttttcctggggcccccccccatttcctttttttttttttttccccttttgggagtcccaagtttttttttaaaaaccttaaggccccccttttccttcccacccctaaaa

SEQ ID NO: 339631 - DNA, 321 bp, Zea mays
  unsure (1)..(321): unsure at all n locations
cggccgcgccttttttttttttttttttttttttttttttttttnnntnntttttttccncgaaacaggatgaaatgtggtagcttattttataacacagaggctcctatttgtttggggaaatttaaatgtgcaggaatctggctactgtaggcttacacaacaatgcaatctgtttctgttaaggaacgcaggaaggaactatcagagaccaacgatcgttgggtggtgttgtggctgagccttctcagggcttgtgccccatcctattctgcttcctatgtctttttatgcctttaccttcatattaatgacatccca

SEQ ID NO: 339632 - DNA, 351 bp, Zea mays
  unsure (1)..(351): unsure at all n locations
ccggcctttttttttttttttttttttttnntttttgaaccgatacatagttcaaatgtgcagcacagctttacgacggtcaacttacaaggtttgctgtctcattggtgtatccctttcatgctacatcctgcgacctactgataagtatgcaggagcaaaaaaaaaaatgccaatataaagctgttacatctaacaaatacacctcaacagagaaaaggatgcacatggcaaataccatgtaccaattacaatgtcaatataattctaatatgttgacctggatcctgattgatgttctcgagataattgcccatatgtgtccttggggaaaaacactcagcccccaac

SEQ ID NO: 339633 - DNA, 439 bp, Zea mays
  unsure (1)..(439): unsure at all n locations
cggggcggccgcccttttttttttttttttttttttttttttttttttttggtcnttttaccannntttttttatttgggtgtggtttaacaagaaaaaccccggtcccctttatatttttctataaacagtttatcttaaacccaacgacctgataacacaatttttacccaatcacccgttacttcattcactacaccacaatttttataaacccatcttggcccatttccccagcaaaaatacataaattttcattaatcccaatcagcacgttttgttttttcccggtccttgtaacaaccccttttgttttcccccgttcccaaagttgggaccttacttacctcccccttttaaaaacgcccacttgtacctctaatatttttagacccttattgacttttttttccttcaacaacaggaccattttaagggg

SEQ ID NO: 339634 - DNA, 452 bp, Zea mays
  unsure (1)..(452): unsure at all n locations
gccgccctttttttttttttttttttttttttttttttttttttttttttctncctttttttttttttttgggtggtttttttttggagggggggccctcttacccccaaaaaaaaccccctcaaaaaagggtcacaaaacccccgactgatttgtcttaacccaaaaccctggattttgcttgaaacccccatagatggcccaccgaaaggccgggttccaaaaccagcccttggccccctgggaaaccgggaccaccaaccaagatgggacatttttccatgaacccaccccttgaaaaaacctaacacaactatgccggcccccccatccacaatccccattaacccacttggatctctgccccaatttttggggcctccctttaaacccccccaagcccttttttttccacttggcccctaaaagccccctcttgcgggccctccttg

SEQ ID NO: 339635 - DNA, 420 bp, Zea mays
gcgtccgcccttttttttttttttttttttttttttttttttttcattttttttttcccccccccctattacttttgggtggggttttttagaaaatggggcccccccaaacaacttcccttttcccccccccaaaaaggcacccaaaaaaaaaaacccccccagggaaaaaaaccaaaaaaattggggcccccaaaaacccccccccaaagaaaaaaaccccccccaaaccccccaaaattaattttcccccaaaaacccccccaaaaacccccattttcaaaaagccccccaaattttattccccccctttcaaaaaacaaaaaaaaaagggccccaaaaaacgaggggtggaccaaacccccccttcggggccccaaaaccctcccacccaataatataaaccccctataccccccc

SEQ ID NO: 339636 - DNA, 456 bp, Zea mays
  unsure (1)..(456): unsure at all n locations
cggaatnaccgagcgtgcggccttttttttttttttttttttttttaggtgtttttttttnntttatttcccccngnaaancaattttgggggggtttttttttattgttggtccgcctttatatttcttctttttccccccaaacccccttttttaaaaaaaaacaacccccggggaaaaaaaaaaattttttttgggaattaaccttaaaaaaaaaacttaggccccccaacttttttccccccccttttaaaaaacaaaaaaaaaaaattggtataaaaaacccccggggcccccctttaaaaaaccaaaacttttttaaacccccccaaaaggggggggttttttttaaaaaaaccccaaaaaccaatggggggttacccctttgcccctttccaaaagggggtcaccaatttttattaaactccccaaaaaaaatccctagaaaaaccccc

SEQ ID NO: 339637 - DNA, 311 bp, Zea mays
  unsure (1)..(311): unsure at all n locations
gccgcccttttttttttttttttttttttttttttttccattttgttttaacccccggnnttttttattatataaagtttttttaaaaaaaaatcagccccccaaaaaaccttaacaaataatttttaaaaaaaaacaaacaaacaccaataacatcattttaaacccaaaaaaaaaaaaaaaaaaaccccccccctcttataaaaaaccaaaaaaaaaaaaaaaaaccccccccccaccccaaaaaaaaaaaaactaaatatatacacacccccctctaaaaaaaaaaaaaaccataatttacccaaaaa

SEQ ID NO: 339638 - DNA, 298 bp, Zea mays
  unsure (1)..(298): unsure at all n locations
ccgcccttttttttttttttttttttttttttttttctttttttttttaccacccnananantttttttgggagggtttttttaaaaagaaggcgcccccaaaaaacccctcatcaaccactaaaccaaaaataaataattctttccctacacaaaaacagacccaaaataacataataaaaataaaaaacaaaaaacccacaccacaacaaataacactaaaataccacacccaaaacaataacaccaagcagtgcataaaaagagaacaaccaaaaaggaaaaaccaatgccccac

SEQ ID NO: 339639 - DNA, 311 bp, Zea mays
  unsure (1)..(311): unsure at all n locations
ccgccctttntttntttttttttttnttttttttttccnntttttttatacncccgnnnncnnnnncttggggggtgttttttaaagggaggggggcccccccaataatccaaaaacaaaaaaggggggaaaaaacccccccaaaacccccttttaaaaaacccaggggaaaaagggggcggacaaaaccaaaaagtctaaaaacacaaggggtgaaaaccccaaccggggaaaaagaaacaaaaaaaccctgaaataaccccaaaaagaaattttttaataccaataacaaaaaaaccctccccacccca

SEQ ID NO: 339640 - DNA, 465 bp, Zea mays
cggggcggccggccttttttttttttttttttttttagttaccactgaaatgtttaattattaaaaaaatcagcagtgaagggaacaaattttgtgaatccgagttctttgcatcctaaaaaaacagaaagaaaagcacccaacagaatcaaaccgctgaggacaagggatacagtgcctttgttccaatgtagagttgatcagttgaggcagaatcatcatgcctctgttcttgctccataagcttccagtacttgaggaatctcttcctggtgcttatcaacgtacctttccttgaacttcttttccggcattgtcagatggctcatcctgatgccttttttgatgacaccacgggacgccagtatatgaagcaccctgtacctcggcagtacccgcttctcgtggctgaaggaaagaatagtcgggtacgacgacagaacatcagggttccagccaagcttt

SEQ ID NO: 339641 - DNA, 219 bp, Zea mays
  unsure (1)..(219): unsure at all n locations
cgccttttttttttttttttttttttttttttttttttcattncttaanttcaacctcaaatttttttttagagtgtgttttttaaaaaaaatgtcaaacaaaaaaatttttatttaaattatattataaaaatttttttattaaaaaaattttaaaaattaaattaccaaaactacaaaaataaaaaaaaaacaacattaaccacaattaatatttat

SEQ ID NO: 339642 - DNA, 455 bp, Zea mays
gcggcccggccttttttttttttttttctgacaaggctttcttgctagctttttttgggcaaatgacgaacaagtaacagggggtgttctcttcagaaaaccaacacaaacactaagtgcttaaacacgcatccaccaaggatcataaatcaccattctttttatcaaaggtgaacttcaccttcaaatacatattacataatgctttacacatgcatcaagagctatataacaccattccatggccattgtctgattctaccaattgcacgacaacttgctcatcatcaggcactgacttatctgacaccattgacgatacaaaggggccgattttatcctttccatgttgccacagctttttgttcaaatataaagacaaggttggctcgggtcccttgcttagtttgccaaatgccgccatagtaccttcaaacctatatttatctcgccta

SEQ ID NO: 339643 - DNA, 144 bp, Zea mays
caaaaccaaccccaaccaccctcccaactgcactgaatggcaagaccccctgtacggccataaccgcgtgtgggacccacagcccacatgcacccctaccccctctcgttctcctcctttcccactcccctccctcaacttaaa

SEQ ID NO: 339644 - DNA, 426 bp, Zea mays
  unsure (1)..(426): unsure at all n locations
tagcaaccataaatagcttactaataacacctgcatggcttgntcacggcgtgacattaagtagggggggcgaaccacacccctcaattgctgaatcatgcatcttgtatttttttctaacaaaaagatacctaataactttctctcttttccccccttctctgagaaacggtacgcctgtccgtggctttcattaggttcagcaaaacatcttcgccagcaccggcaacagcctcttttatttctgtggccacaagaaccctgtccatctttcgcaggaacctgttttccactagctcgacgcacatgaccaccattcctcctttgtgatcctcattaacagaatgtattatgtccacttcaaattcgttaatttaacataaacattctaaatgttgccccacacttccattaacctatttatca

SEQ ID NO: 339645 - DNA, 387 bp, Zea mays
  unsure (1)..(387): unsure at all n locations
cggcctttnttttttttttgcacaatgttaaaactatcattgctcttattctgtgaaagaattcacacgttctggaagatatcttaaatgagaggggcctccaaataaaagcaaaaaacatacaattcccatactgcttacaaaattggagaccaatatcaggatcctgtcagattaatagttcaattttcacctgaaatggcccttccacaacattaacagtttctttaatggatattgccttttttcgatgatcaacatctgtctacattttatccacacaacctctcttaatatcctgctttctcactttcaccgtagatggctggggaccaccctttattattcctaaaccatcttttttaacatctacaattacaccaaata

SEQ ID NO: 339646 - DNA, 415 bp, Zea mays
gacaggctcagttgggcttttggaggaggtgatgaaggttgtaacatacgatgtacgtaaaggttaatgaggataaaaagtgttcaactagtgttatctgcagatccatgttttgacttggacaaaaatggacgctgtgtgtgcacacaacatacaatttatttatgatgtgcacttattgacgaggcatttatacgtctatgatcgatcccactcactttacagaggtaattttatatcgggaagcctatttaatgctggatattcacaattattgtactgtggaacatgaaaactgctacaaaaatgttatataataagaactgttacattaagtaatgctgtactggctaatgttactgtagcatctcataatgaatctggtgcgccattagcgtcaacgtcacgcttattt

SEQ ID NO: 339647 - DNA, 279 bp, Zea mays
tggacgcgtgcgccgacacatgctcaaaatcagacttcactggaagatgagaggcaggaagactgagaagcgtgtacaagggggtgtacaacaccataggacgggcgatcgcggagcactgttgatcaggacactagagcatacagacggtcgttacgggcgctatgggcacaatactggaagccaggtaaaaaacagagcatattgttgggcttttgggtactgaggcttgacctaacattgcagaacattaaggcatgggttggaggctgtttgata

SEQ ID NO: 339648 - DNA, 372 bp, Zea mays
tatttttaaaaaaaaaaacaaaacacctaatagggcgcaattttttaatttgagggagagaaatccttatatagcaacaaattacaatgaaaaacaaggcctggccctcctgctcttcatgaccatcctaggaagcttcccaatttctccatacatctgcgaacattaaaccttttctgcaaattcgacaaactctctctcctaaaaaaaatcaatatccgaacacatttcctactaatatacaggccgcaatcattatttgacaatcctagattgtctaacaacttaccaatacaacaagaattcacattgcccttcatttccaattgcaaggcgattaaaccttatgactcccctctttataccttaatc

SEQ ID NO: 339649 - DNA, 53 bp, Zea mays
gggcgcttgtagcggtaccacttttccctatacagagtcatattaaagctcgc

SEQ ID NO: 339650 - DNA, 387 bp, Zea mays
tctttttcatcgatctcgtttcaaatccgtgcagcctcgtttcctccgtccggcagcatctcaaccccatggccaagatcaagatcgggatcaatgggttcggcaggatcggaaggctggtggccagggtggccctgcagagtgacgatgtcgagctcgtcgccgtgaacgaccccttcatcagcaccgactacatgacctacatgttcaagtacgacactgtgcacggacagtggaagcaccatgaagtcaaggtgaaggactccaaaacccttctttttggtgagaaggaggttgctgtgtttggctgcaggaaccctgaagagatcccgtggggttccggtggtgctgaatatgttgttgagtctactggcgttttcactgacc

SEQ ID NO: 339651 - DNA, 204 bp, Zea mays
tcaacccacccgtttgtttctctcccaccaaccaacgaccttggcctggccattttcgatgagggcggcctttcccttcctccccacatacccatgcccgatttacactattgactccgccccaattctgataacaaacccctccgcctaagcatgtctcctcccagtctaccccatccagcacagagagggagaattactcac

SEQ ID NO: 339652 - DNA, 295 bp, Zea mays
tcttattaggcgggggacaggaatacccaggagccggagcaaggtcaaggcctcaggcgtctcactcgccaacggcagcgacagcggcaggtctggaatgttgccgatgtcgaacccttcagctaatcccacacagcttacaattttctatggtggatcagtatgtgtgtatgactcggtgccaccagaaaaggccgagacgagcatgcttatagttgtggatgtaactgatctgatggccaccaaatgcagcgctgtcactgtttttaagatttcaatggtacatacagccact

SEQ ID NO: 339653 - DNA, 312 bp, Zea mays
  unsure (1)..(312): unsure at all n locations
ncnacccacgctttcttttttagccaacacacacataatacgcgccgcctccttttcattccatctcagccgatataataatacccnttctctccaccaagcttttcgtgatccttctcctgctcttttgttacaccgccacgcaacgccctccttttactatggtgtcacctaagaagaacaagtcccacagcttccacttcaacgcacctagctctagttacgccaactgctcaaacttctgcctgacctaatatttcacactctgcttcttcaaagtcctacaccaccgcttcttctgcaccaattact

SEQ ID NO: 339654 - DNA, 504 bp, Zea mays
  unsure (1)..(504): unsure at all n locations
agtcgacccacgccgtccgtgtgcttacctctgacgatgcaggatgcacgcgggcgcgacccttctgcatgccaggtgtgccgaccaggtctcgcctccattcgtctccacgctcccatgagagccgcgcgcggtcgggagatctcacgccatacactaccgtccaaccccacgtgtctttaccgcaacacaccatttgctccgacagcagctgctcgccacgtggcagtctgccagtcccagcggcgagataccatttgccaaagagagggagcgcgcctctacctggcgctcatgcaggggcaccatattcgaatcgcggatcactccctgcactatgacgagagtaggattttcgaatctgcagttaggctctatcactctatccagaatctacgacgctgacattgttgcatgtctttggcgatgccataccgaaactctggaccaatgcacaagntttaccctttgaggctctcagtttcgtttgaagggtcacactaa

SEQ ID NO: 339655 - DNA, 197 bp, Zea mays
caaaacaacaaaactagcaaaccccgcgcctttattaaaacctaacgccgcccctaacaaaaccactactaccttaccctattctaccatttccaccatcactatctatcccaaaaattaattatcctatattaccatttccaaaacacactcctcacaactacaatacatcttcttcacccaaccaccacaacttt

SEQ ID NO: 339656 - DNA, 423 bp, Zea mays
tacgtcgtcggccgtcctccaccgccctccaggtacgtcgccggccccctcctccctcctccctccgccgccacccccaaagccgccgctgccgccagctactgcctctcccgtaccgccgccgccgtcgtacgagcaggccgtagggtttcgagtttggagttctgcctcttcctactgcctctccccaaggtccccactcgcatccaaggttgtacgagcaggccgccagctactgcctctccccaagtgtatttgctctctgctgcatataaacaagatttttgaagtaggaatatcagagcatctggcaattaagttgcaacatatgaacattgatttgattggaaaggcaaattcttctattacagcagagctggattacatgtcagacctggttcatatggcctgtgtaatgcaagg

SEQ ID NO: 339657 - DNA, 219 bp, Zea mays
  unsure (1)..(219): unsure at all n locations
ttgctgntaggttctaccaggagaccttcggcccgccctttttttcactgcgagtctcgggcgaaatggtcttcccacaaggtttccatctagtaccacggttggtggttttataattgatttattcttttcttatttttttttcttgccttcttttatatattattttttattatatctttcatttctcttttttaaatattaatcttttatttttat

SEQ ID NO: 339658 - DNA, 283 bp, Zea mays
caacccacgcgtttgttttcctttgatccaccaactatttcggggcgtttttaaaaggcaaaggtggccaaccaactacaatacaaattagaaatatacccagttccaccaacttgttcatccattccagataattgacatcacaatgtttcacatacgttcactaggccatgccaatgcattaataccatcacatgattgcgtaataatatgctcctgtttgatagtgacacggagaagtatagcaccctttgaagacattctttcgagcatcttcacgaat

SEQ ID NO: 339659 - DNA, 350 bp, Zea mays
tcggtagcgatgactgcaatagtgatacgaaccggatcatctgcggccaggggtaactccggacccttcgtgaacatgggcaccgacactaggcgaaattcgaacccgtccttcctcgacgacaaggacgccaaggtggtggagaacgagcaccggcgcactggcaggatacggcatagtgacggcgactactgtcggtaggctgcatcaccgctggaacgcgaaaccacggcgcgctcgacatgactagtaaggccgacttggaggtcttcttgaccgccgaacgctccggctacgaggcactggccgacgccaaggactggggagtccacgcaaactataccttagtc

SEQ ID NO: 339660 - DNA, 103 bp, Zea mays
aaggtcaggaaggtggacatgcttgatggcgtgaccatcctccggtccgagaaggtcaaggatgagctcatccttgacggaaacgacgtcgagctcgtatctc

SEQ ID NO: 339661 - DNA, 352 bp, Zea mays
  unsure (1)..(352): unsure at all n locations
tctttgtttaagcaaaangcaaagactcaagaaaagcagttccaatcactagattgggagagactaccattgagacctaggaaggaagaaggagctaaggagataggccgcatcgagaacaacaccgccgttctcgtccaccccctcgacgacgctaaggtacaagaagaggatgaagcacacaccttcttcccctggtcctactacttccccgctagtcggatctctcgctccatcgtcgctgccaaacgacaccatgtgctctcccttttcaccgcatcttagaaccttaacacccccacctacgctgtgtgcgggatccgagggcacaagcaagaggatccgatcaatg

SEQ ID NO: 339662 - DNA, 231 bp, Zea mays
tttatcttaacacacacataatactctccatgggcgtgccatttcatctcaaaggatagcataatactcaatctctccaccaagcttttcgtggccctccttctgctcgtttgttacaccgtgacgcaaggcggtccaatgactatcgtgtcctttaggaagtgcgattcgcatagcttcctctttcaagggaccttgctcgagggacgccaactgcccaaacgtcttcct

SEQ ID NO: 339663 - DNA, 280 bp, Zea mays
cctttttttttttttttttttttttttttttatttttttttttttttttttttaattttttaaaatgtttgtaaaatttaaaaaaatttgctaaattaaaaaatataatatttttttttttctttttattaattattattttattatttattttaatcaaaaaataatatttttatttttttttaaaaaaaaaattaaaaaaatatattttttaaataatataaaaaaaaaaattataaaaaaaaccaaaataaaaaaaaaaaaatttcatattatatat

SEQ ID NO: 339664 - DNA, 407 bp, Zea mays
gcggccgccctttttttttttttttttttttttttttttttttttttttttttttttttttttttttttttttttttggtgttttttttttttttggggggggaaaaccaaaacttaaaataaaaatggcagtcaaaaaaacccaacccaaccagttcataataaataccgccccaaaaaacaccttttttttttttgttttaaccaccctatttacatttaattacccaccacggccccaataaaaaaaaccaattttttctttttttatttaaaaaatttttcacgaaaaaaattttaattaaaaacctttggcccttccaaaacccaaacaaaaaaaaaggtgttttttaaaaaattctaataaaaaccccccctttaaacaaataaaaaaaaggggacaaatt

SEQ ID NO: 339665 - DNA, 186 bp, Zea mays
  unsure (1)..(186): unsure at all n locations
atatataaaaacattactcaaccggncttgttaaattaaaacactggcttgtcnccnnaacctcaaacaacaaacacttatacaatataactttaacatacatttaactaatatcatcaactctttttncacctatcatctctaaattattctacaaaccaatctcttttttctttccatttttta

SEQ ID NO: 339666 - DNA, 273 bp, Zea mays
attcccggtgcggccgcccttttttttttttttttttttttttttttttttttttttttcccgctcaattacaacattaattaacacggactaacaaggggatcgggggcgtccctttttatcttttacccaggcttgacacaaacaactcttcaaatttaaaggccaaattacaggtaatccaaaattggactattgaacatcgatcgaactctttaaatactttacacaaaagctatttagctttacaccatcatcttgtcacacaccttc

SEQ ID NO: 339667 - DNA, 66 bp, Zea mays
  unsure (1)..(66): unsure at all n locations
tttttcttgcatgcgacgncataactcttctctggtgttatctaaattcaggtcgggggnccaaaa

SEQ ID NO: 339668 - DNA, 324 bp, Zea mays
  unsure (1)..(324): unsure at all n locations
tttaaaatttnnanaaataaaatttttttaaaatttttttttttaatttttttaaaaaaaaatcgtctgtaaaatttaaaaattcctgccccaaaaaaannacccaaaaaatttttaaattttccactttttttttccctcttcaacttaaaaaccactttttaaaattaccttttttcaccatattaaaaaaaaaaattccaaaccccttttccaactatttctttttttaaacccttttttcttttcaatatcttattaactttttatcctcctaaaaaactctatttccctttatttctttttttttttcaaacttttttc

SEQ ID NO: 339669 - DNA, 303 bp, Zea mays
  unsure (1)..(303): unsure at all n locations
atatataaaatttctacaacatctctttttaaaattgcataaatnnnnnaaccccgcgantataaataaatagcatggtccnaaaacatataaaacattaataatctnctaccaatgggaaaacaaccataacaacattaacttaattaatcagttcccacgactatttaaaaacaaacatcctttaacaagaagtttctaattaaatcatttctgcttctgtgcaccattattatcagaataaacattcattttctactacttcccactccccttcaataacaacattcaccttttatcaac

SEQ ID NO: 339670 - DNA, 73 bp, Zea mays
caaatcaaaataccaccccacacaatttaatagtgtcaaccaatcatttcccaacctcgtatacacatatttc

SEQ ID NO: 339671 - DNA, 281 bp, Zea mays
aattccccgcgccgccgcccttttttttttttttttttttttttttttttttttttttttttttttttttttttttttttttttttccgttatatttaaaaaacccccgccctccattttacacctcaaattttttttatctttccctccttcttacccccccacactaatatcttctccccatactcctcaccccccccccccactctacccctattaccaaaaaacacaaccacccccctctctccaaaaaaacccccccctaacacaacaaccccccc

SEQ ID NO: 339672 - DNA, 420 bp, Zea mays
gcggccgcccttttttttttttttttttttttttttttttttttttttttttttttttttttttttttttttttgttggcaaaataacaaaaaggggtgggttaccctaaaaacactttaaattcattttccaccaaacaaattaagattccctaaaacaaaaccttaggattctcattaacacttaaacaaccccattaaagaaaaccttcccaaaaacacccttttaaaatcttccctggtttcccaacaacttttcctttccaccattaaaaacaattttaccctctcttttttacttaaagtaacaaccccggtttaacttttttaaaccccacttttctctctcaataatctttttgccgccatggaactttaacttaaccccacccaaatttttttttttcttggcaaaatttt

SEQ ID NO: 339673 - DNA, 105 bp, Zea mays
  unsure (1)..(105): unsure at all n locations
gcgggcgcccattatttttttttaaaaaaaaaaaaaaaaaaaatttaattttaaanagaaaaaaaaaaaaaaatggggggggggaaaaaaaaaaagggggggggg

SEQ ID NO: 339674 - DNA, 436 bp, Zea mays
  unsure (1)..(436): unsure at all n locations
tcccggggcggccgcgcctttttttttttttttttttttaaaaaatttttttttttttttatagaaactttatttggtataccaaaggatggttattttgcaactccccgcttgcgtaatnaaaagcataaaccttgacaaggtaatgactaatgagttatgcaaatgagtaatgacatattccctcaattttgtggtgatcgtgggttccaacaatgtgcaatgcaactgtatttttttttgaaacaaagggaaaagttttcataccaacacaggcttcatatcatggtgagtggtggaaacaaattatatttttaaaattcttcccttactatccattacattctctctccaatctattatttctttttaaacacattctttttaatcatattaactactctatgaaccctttatttaaaatcctataatttcg

SEQ ID NO: 339675 - DNA, 69 bp, Zea mays
ccgccctttttttttttttttttttttttttaaaaattttttttttaaattaacgtgaaaaaatataat

SEQ ID NO: 339676 - DNA, 276 bp, Zea mays
  unsure (1)..(276): unsure at all n locations
attcccggggcggccgcccttttttttttttttttttttttttttttttttttttttttttttttttaaaaaaacccaaaaacccccggatccattaaatatggcgtgcggggccnttcactttattaccaactaatcactccctaaataattctctctctcctccctcaaaaaaagaccggttaaccactccttcctttgtgcttaaaaaccttttggccccaaccccacccccttacctttccctctcaacaccactcataaccccttcttctt

SEQ ID NO: 339677 - DNA, 199 bp, Zea mays
  unsure (1)..(199): unsure at all n locations
cggtccttaattccccgggcggccgccctttttttttttttttttttctatcatataatgatttcttttgcaaacaacacccctaattccttgtaccgacaaaaacaaagattgttttccatnnaaacaaatattacatataacattaaaaaaacattcctcattattttctcaaactaacatataccatttaattatt

SEQ ID NO: 339678 - DNA, 314 bp, Zea mays
  unsure (1)..(314): unsure at all n locations
ccgcccttttttttttttttttttttttttttnggcacaaatgatttgtaaactagccatgcaattctgttgcgggaggagacaactttgtgaatgcggggacttccttaaatacaaaaagtttttctgttgcaaatacaaactatgaactttttaaatatttggagaacccgacaacttaatttttttcttcaaccacctttgtccccatccctttcaagccctcttcaaggattcttcctactgtgacaatgtaatttattttctccttttcattctttttatcgattcctttttctggctataccttaaaa

SEQ ID NO: 339679 - DNA, 343 bp, Zea mays
  unsure (1)..(343): unsure at all n locations
cctgaccaaatttcggggcgggcgccctttttttttttttttttaaaattcgaattcaaatttctttacaaaactatggcaaaatcacctgctggtgcatataaacatgaggggtgcgctggcttnnannaaccctacaaatttncggtgccccaccantcacaaatctccaaaacccatacaccgttttaagatctccgcttatttttcttctccttcaaaaggttcatgaggtaaactccatatacctttacgaccttgaaaccgacacctttaatatttcccacaccatggcccttaccacctaatccagcaatcatcaccttaattttctcctccattt

SEQ ID NO: 339680 - DNA, 391 bp, Zea mays
  unsure (1)..(391): unsure at all n locations
ccggacctaaaaaaccggggcgggcgcgccttttttttttttttttagcaaaatactattatagcttattttgttcatagaaactggangancatggcgggtaatcacacacgagcggctgtcccaantttttacanncacaaaactaccaccnacactcattcttnanctaccnacnaatctananctacttacaatattacnattttatcaaaatccattaaaaannnnaatctatanncnnaatttaannnnnaatctcnccaacnacaaancaancaaactacttctttnccttccttaccacacccttcctnncctnancnncaacaacaacaaccttcttcnnnntttccaccttcttaaaaaccccccctacctttcccttctt

SEQ ID NO: 339681 - DNA, 61 bp, Zea mays
ccccttttttttaaaaaattaaactttatattattctaactttttttttttatacaccaac

SEQ ID NO: 339682 - DNA, 465 bp, Zea mays
accgaaattcccggggcggccgcccttttttttttttttttttttttttttttttttttttttttttttttttttttttttttttttttttttgttgtttttttttttttgttttggggaaaaaaaaaaaaaccatttcttttttttcataaggccccccaactttttcaaattatcaaacaaaaatgcccccttttcctttcttttaaaaaccctccaaaacctttaaaacttcaccctttttaacccttacaaaaagggacttactttttttttaaaaaaaaaattacttaggcctttttaaaatttatttccaaattttttcgcccacaataaaaaccatttttggcaaaacctcacacacccatttcttttttacccccaacccttttaaagggggtaccccaattaaaccattcccaatcccctctccccattttcaaataaccatcctcttcttttttt

SEQ ID NO: 339683 - DNA, 321 bp, Zea mays
  unsure (1)..(321): unsure at all n locations
aataattaaataaaacacttttttacccacccncactcancattcctgctcgataaaaaaaaaatttttggtcgtaactntacaaaaaaatttnatncactttnttccaacatcaacaccattttttcttcatctttttcattgactattctaaaaactttttaaaatccacccactttaatatttccattcaacttattttcaccttaattaccctttttcccttcctactccatcaataacttctcatacaaaattttttccactcaacccaactttttattactttacttccttttctccccacttaaccttactttt

SEQ ID NO: 339684 - DNA, 255 bp, Zea mays
  unsure (1)..(255): unsure at all n locations
cccgccctttttttttttttttttttttttttttttttttttttttttttttaattttttaaaaaaaaatttttctttaaattacccactttttgcttcccnaaaaaaacccaaaaaaaaaaaaatttaatttctatctttttcttccttctctaattttttttttcttttccccatttttttttttatttttccccccttatatccttttttttttcctttcccctctttttcctttctctttcttcctttttt

SEQ ID NO: 339685 - DNA, 98 bp, Zea mays
  unsure (1)..(98): unsure at all n locations
aaacaatacaaatttcccccttctcatttaaaaatatttcctgcccaaccttaaaatacctnaaaaaaattccaaattttcattacatcttttttacc

SEQ ID NO: 339686 - DNA, 198 bp, Zea mays
aaccacaaacataattcgctttaatttctccatggtacactgataacagcgttcaagtaacttataacattgctggcgaaaaaataaccatccaacaaaaataccaaatactatcaaagcatgcatgaagtaggttccacaatagcataacattaagttgtatttgctcaacagtaacttcttaactaaatttttttt

SEQ ID NO: 339687 - DNA, 430 bp, Zea mays
ggccgcccttttttttttttttttttttttttttttttttttttttttttttttttttttttttttttttttaaaagggaaaaaccaaaaattgagtgggggttaaaaaaaattacattttccgaatttaaaaaaaaataaccataatttttaattcacccaaaataactaaccgaaaaaaacccttttaaattggaaaaccttgccacctttttttttttttgccttttctgtaaaaaaaaaaacccaattaaccctttttccccgtggcaagaccaaatcccaaatccaacctttaaattattcacgggggtccctttattttaaaacttaaacccttttttcttggaggtacaccttttttttcaaaaatacaaattttaaaaatacaccttttttttaaatgctctaaacaaaattattttttttt

SEQ ID NO: 339688 - DNA, 225 bp, Zea mays
  unsure (1)..(225): unsure at all n locations
ctacctaatcattttttttataacaccaacacatacatacaatgtccgaaataaaaaaaataccgctctcaaacacaanaattttacaccacaancaanttaaataaatttcactccttaacttctttacctttccctacctataacaataatttttttttatttccacctacataccattcaaaccttattttctttataaccttatatccactttatatttat

SEQ ID NO: 339689 - DNA, 334 bp, Zea mays
  unsure (1)..(334): unsure at all n locations
ccaaaattcccggtccggccgccctttttttttttttttttttttttttaaaaaaattttttttttttttattaaacacaaaaaaacggcacgaaataaataatcgcttggttcggggancanncacaaaaaactatcttaaacattctaacctaaaaaatacacatcacattcctttttttctttcaaaaaatatcttatcaaacaaccccttttaaataaaaacatccaacaccaccatttttttcgcacaacccattaagtctttattttcttttaattcataatttttcggcccaagtaaaatttatttttacccattttacctattttt

SEQ ID NO: 339690 - DNA, 360 bp, Zea mays
aaaaaaaaaaggcggtaatttttaccaaacggggggtcatttccataaaaccatcaaggaaaacctatgcctcctataaatcagtgctataaactacagggctgacaaactttatcataacatttttaaggaaaaatcccacccaatgggagtaataatatggtacccacaaccctcctttaataaaatttgacaaattgcaaaaccatccccaagtgaaactttaaaaaaagtttttttaagaaaaccattttccctttcccccacaccattaatttattcccagaggttaaccaccggaactccaccgactcttcccctttatgacttgttcagacttttcccgttaaaggtgaattc

SEQ ID NO: 339691 - DNA, 236 bp, Zea mays
  unsure (1)..(236): unsure at all n locations
cgttcgttaaaataaaaaaccctcgcccccnncacaatttcctattaaacttatacaacaaaaaaaacatcccctttcccccccaaatattatactacaacctatcctctttttttataaaaaaattcttcccccccctaatcttacacaccccccccccaaccaatttccttttacacctccccccacaaattttcaatcaatctcttcatactattaaaaactctccccccctt

SEQ ID NO: 339692 - DNA, 262 bp, Zea mays
  unsure (1)..(262): unsure at all n locations
actaacaatcaatgtgttctctttttatatacttttattttgcaaattgcaatggacggcgacacctaagcgatcggtcggtggaaaanaatagagaatcaatttctggaaacaaggagttgatcccgccgacgaggaagatacgctaggcctggactgcacgctctctcgcttggccacgtgcccgcaccgccgcgagccattgccaccagatcggctgcgcgcacgccatggccgctgaggctcgcctaggctgtgcccc

SEQ ID NO: 339693 - DNA, 186 bp, Zea mays
cgttaaaaaaaaaaaacccgcccgcaaaaaacaaaaaaaacaacccctttctcccccctctccaacccccataaaaactccttaaaatccccccccaaaaccaaatttttttcctccctttacacaccaacccccccaaaaaaccccaaaaaccccaacttaaacccctccaaaaaccaccccctt

SEQ ID NO: 339694 - DNA, 219 bp, Zea mays
  unsure (1)..(219): unsure at all n locations
aaccgtctctatattacttccccccgccccccntttaaaatttttttttttttacccccttcatctctttttttctttccctatcacccccccctccccccccccttaattttttttttttctccccctaccccctccccctcttcccttctttttaaaccctttacccccataacccccccccttctcctctcctcactttctttccctcttacaccc

SEQ ID NO: 339695 - DNA, 379 bp, Zea mays
aaacactaaccattaatttggtgggaatacaaccaaattgcgtttggttcataacatatcctccataattgacttctaacattaaaagtgctaaaaacacaaatagcaaaacttttaaaattcaaccaaaaacacccacccttttttttttaattggaaattatccgacagtgtcattatccaaccaccccacaaacttttcaactgtacctccctaagaaaaaggtctttttccccttccaagttgttttcctttaaggccttttcttttggtgtgtcatgcccttatcacccaattcaataatcttttttccttttttatttttcccccccaatctctttttctctcttttaactcactttttctatttctcccttt

SEQ ID NO: 339696 - DNA, 340 bp, Zea mays
atcacaacaattgaacaatctcacacgttgggacttttccctaaacgggccggcaatcaccttccccaacacaaggtgcgacttccaaacacccgtgctttttaatgaccatcaagttaacccttaaatccaacaggcttaaaaatgcacacacaaaaaaacaatttactcaatccaaaataggattcatcgaatgcctgaatcgattgaattcaggctaaaattataacaaattctttttttctcaggtcaactcatatcaaatagcaaaccgattgtgcggcgccccctcccattcaaccttttaaaatttatcatcaacttgttcaattttcggggt

SEQ ID NO: 339697 - DNA, 477 bp, Zea mays
ttccgaattccccggcggccgccctttttttttttttttttttttttttttttttttttttttttttttttttttttttttttttttttgttggttaaaaaaaaaagatgtgtggttttttttatttttttttttttttttttttttaaaaaaaaaattttaaaattttttacaaactgggaaaaattttccctttcaaaaataaaaaaaaaaaaatttttttttataaaaaaaaaaaaaaccccccttttaaaaaatttaatttttaaataataatctttcccccttttttttgaaaaaaaaataaaaatattttttttttaaaaaacaaaattaacaaaaaccccctataacatatttatttttttaacaatctataacacaacaaaaaaacctccctctccaaaaaaaaaattttttttttatactcctaaatacttatatattaaaaaatcaaaaaaaatattttatctataa

SEQ ID NO: 339698 - DNA, 206 bp, Zea mays
attcccggggccgccgcccttttttttttttttttttttttttttttttttttttttttttttattttttttttttattatatttttgttaataataaataaatttgtttaaaaacaaacattctaaatatacaattttttttctatcttttctcaaataaattttttttatatatccctatcaattcattttacctttttttttt

SEQ ID NO: 339699 - DNA, 321 bp, Zea mays
cggccgccctttttttttttttttttttttttttttttttttttttttgatcaatcaaaaaccaacaggataaatttgcattagacataaccacatttcgtggggccatctaaaccaaataaacatttttgagccgatccttttccaaaaaaacttttcgtaaacatctttaacaatccacgtaccgtagtttttgtaaaataaaagacactaacctttataacaccaaaattgatcagggccctccaaaattacaaagtacttgactaaaaagctgcaactttgttgcaatacttaacttctttgctttcttcggtgccc

SEQ ID NO: 339700 - DNA, 460 bp, Zea mays
  unsure (1)..(460): unsure at all n locations
cggacctanattccccgggcccccgccctttttttttttttttttttttttttttttttttttttttttttttttttttttttttttttttcccccgcttttaaaaaccccccccccgtccctctattttttttttttttttttttttttttttttctttctcttttttttttaaaccaccccccctccccccccccttctccccccacacattttttttttcccccaaccccctcttctttccacccccccccccccaaaaaaaccccccccccccccccaaaaaccccccccttttttctccccatcccaacaccctcttccccccccccccctttcccccctttctttaacccccctccacccccccccctctcttttccctcttttccaaccccccttcctccctttccaaaaccccttcccctcccccaatttttaaaaaacccccccccccccc

SEQ ID NO: 339701 - DNA, 323 bp, Zea mays
aattccccgtcggccgcccttttttttttttttttttttttttttttttttttttttttttttttttttttctatattttaaattctttttttttaaaaaaccttgcctaaaacaaaaaaattttataatctcctctaaccctttcttttaccacccttattccaatatatttctccttaaaattccccacttttcctcaaaattactttttttatttcaacaccctttttcacttcactttcccccctctcacccatcaataattcataacctctcctttcttatccacccttatttttttctctttctcttcccttttttt

SEQ ID NO: 339702 - DNA, 327 bp, Zea mays
  unsure (1)..(327): unsure at all n locations
actattgaactcttctactttttattttccaaacaatttaattcttactaaaattataaaaattctgggttggttcaccttacaaacgcggggggtgatcncatccatccaaatcacaatacaaaaaatctgaagatttcattttatcacccaaaacgtactgattaggtctctcacaatacttaagggaactaaaacagacaataatatcccatttacgtgcaggaacttcatttgaaacaaaacaccactttgatattgtccgatgatttatacttgtataccctttaagcttatgggatctcgaccttaccattatccatctcc

SEQ ID NO: 339703 - DNA, 370 bp, Zea mays
  unsure (1)..(370): unsure at all n locations
atacccgggtcggccgcccttttttttttttttttttttttttttttttttttttttttttttttttttttttttttttttttttttgttggttttttaaaaaaaacgcgggcccaaacanncaaaaaaataaaacacccttttttttttttcaaaccccacaaaaaaaacaacgggggccttgcaacaaacaaaatcaaatcgacccatccccaccaaggcgataacataacatattttcccccgcggcccccccaggaattacttaatttaaaccggccctggcccccacccaagggtggttccaaaaaaaacaccttgcccgaaaagccccaccccttaattgcctaaaaaaacattttttaaaacc

SEQ ID NO: 339704 - DNA, 142 bp, Zea mays
  unsure (1)..(142): unsure at all n locations
aaaaaccttcgtaaattatacaacaccccccgcccntcacattatattccaaaactttcatccaaccccatatcatttttcaaataacataaaacctttatcacataacaattnttttcttttactaaacaaattaccaaaa

SEQ ID NO: 339705 - DNA, 358 bp, Zea mays
aaataaaaaatttttttgtttttttttttttttttttttttcccccaaaacccttccaaaatttttcccaaaaaaaacaccccccccattcctattaaaacttttttttttttacccccctaccccccaaaaaaaatttcttttccctttttttccccaaactttttaataaaaaaacccccccctttccccaaaaaatattttttaactaaatcaaaaaaaaacctctttcacccttttattaacccctcttatttaattttaacacttttcccccacaccccccctttacaaaatttttcttttttttttttaaccccccacatattctttttcttttaccccccccataattttt

SEQ ID NO: 339706 - DNA, 231 bp, Zea mays
tatctaacccacttcctgtggtcttcggtagcgtccttttcgccgccgtcggggccgtctttcatcacactgtccctcttgttgtgatatctatgagagagagaaacagctcgatcgatcaagaacaccaacgaggctctagctccagatcgacaatgccgttcgcagcctcttggacgttacagcagctatacagccgtgtggccaccaacgttaggcccttatctgtgt

SEQ ID NO: 339707 - DNA, 166 bp, Zea mays
tcgcgcgcgtggaatctggctgtccctacccgcaggctggtgccagccacctgcctcggcatcgtcaagctgcccgctccgtgccggctcccgcgccctcgcgcagaccgcgccgggtggcgctaactgcctgaggcgccgctggacgtggcatccccggcggggg

SEQ ID NO: 339708 - DNA, 213 bp, Zea mays
tggacccacgcgtccgttttagaccattagctttatctactccagagggcagaagaacccgatcgacaggatgagggtgttgctcgttgccctcgctctcctggctctcgctgcgagcgccaccttcacgcatacaagcggcggctgcggctgccagccaccgccgccggttcatctaccgccgccggtgcatctgccaccttcggttcacct

SEQ ID NO: 339709 - DNA, 125 bp, Zea mays
  unsure (1)..(125): unsure at all n locations
cttaaccttgattcctttaaattcgacccacccttccgaataataaaaaaaaaaaaaannnnaaaaaaaaagaaatatattaaaaaaaaaaagtgaaaaaaaaaaaataacctaaaaataaaaat

SEQ ID NO: 339710 - DNA, 147 bp, Zea mays
tgctacctttctatgccttgctacacatcgggggttgcattcggacagagagcgcttcacacctcggtatatggctgatcacagacgccccatgttgcagttgaggcaccaaccctagatgtcggagagccaacggaccatgattac

SEQ ID NO: 339711 - DNA, 338 bp, Zea mays
gagtcgacccacgccgtccgttttgagctacttcgtctctctcagtggccgacgacgtgggtgtactgccagtgcgccccaggctctgatgcctccatcttacgggccacttcacgtggctacgagcacacacctgaggattatggattgtgctggggccagaagcgcgccggagatgctgatgcaagtgctgctggtggcgtctgctgtggcggcgttcctggggggctacgtgcgcgcggacttccagctcatgctgctcgtctacgccggcggcgatgtgctcacagcgctcgtaaccgtccccaactggcccttcttcaaccgtaacccgttta

SEQ ID NO: 339712 - DNA, 117 bp, Zea mays
gtcactcggatcggtgtgcgtggctccgcagtccctttcttcgccagtccggcggctcaactccagccgccgtgtgccccttctctccccacccgttgcgggccctctcgcgcgccg

SEQ ID NO: 339713 - DNA, 383 bp, Zea mays
ctttaaccttggggagtccggacctcccgaagccgccgaacagatggcacccaaggcggagaagaagccggtggccaagaagcccgcggaggaggagcccgcgacagagaaggtggagaaggctccggcggtgaagaagcccaaggccgagaagcgcctcccggcgggcaagtccaaggagggcggcgagggcaagaaggggaaaaagaaggcgaagaagtccgtggagacctacaagatctacatcttcaaggtgctgaagcaggtgcaccccgacatcggcatctcgtccaaggccatgtccatcatgaactccttcatcaacgacatcttcgagaagctcgcggccgagtccgtcaagctggcgcgctacaacaagaagc

SEQ ID NO: 339714 - DNA, 87 bp, Zea mays
gacttgtgtctactttccagcagagtgacggtcgacaactaattgacgctgacaggctggacttgagagagctgctacacgagctac

SEQ ID NO: 339715 - DNA, 209 bp, Zea mays
  unsure (1)..(209): unsure at all n locations
tgaccattagctttatctactccagagcgcgagaagaacccgatcgacaccatgagggtgttgctcgttgccctcgctctcctggctctcgctgcgagcgccacctccacgcatacaagcggcggctgcggctgccagccaccgccgccggttcatctaccgccgtcggtgcatctgccacctccggttcacctgccacctncggtgca

SEQ ID NO: 339716 - DNA, 206 bp, Zea mays
atattttcttcacacagaacctatcaagcgacgagggtcattctgcgctcctgagggtgttgaccggtaaaataattcttctcactttgtacaggccattcctggagcatcccacaagctgcagtttggaatcgacctaactttcaaggaagcatgtctcgccaactcgataatcaacctcttgtgtaatgatacactttcatctt

SEQ ID NO: 339717 - DNA, 84 bp, Zea mays
tcctgcttatcaaacaagtatctacagctctagaaagattttttagagtgatgcgggcgcttataaaatatggctaatatcgcc

SEQ ID NO: 339718 - DNA, 208 bp, Zea mays
ttttctcatgactccgcgttacgagacaatgacgcgcctgtcaataagaaatagtgcaaaacatgttgcatagaaaagagactttcgacttggttttccggtgtgctgctcgaaatatagcaccaatactgaagggctcattcgattaggtacttatcattaaaagtttgacgcacaaagaatataatgccgtgataaaagaacttac

SEQ ID NO: 339719 - DNA, 389 bp, Zea mays
tcttttttcctccgtcccgcagcatctcaacccggtggccaagatcaagatcgggatcaatgggttcggcaggatcggaaggctggtggccagggtggccctgcagagtgacgatgtctagctcgtcgccgtgaacgaccccttcatcagcaccgactacatgacctacatgttcaagtacgacactgtgcacggacagtggaagcaccatgaagtcaaggtgaaggactccaaaacccttctcttttgtgagaaggaggttgctgtgtttggctgcatgaaccctgaggagatcccgtggggttcggttggtgctgaatatgttgttgagtctactggtgttttcactgaccatgagaaggctggagctcacttgaagggtggtgcca

SEQ ID NO: 339720 - DNA, 423 bp, Zea mays
attagctttatctactccagagcgcagaagaacccgatcgacaccatgagggtgttgctcgttgccctcgctctcctggctctcgctgcgagcgccacctccacgcatacaagcggcggctgcggctgccagccaccgccgccggttcatctaccgccgccggtgcatctgccacctccggttcacctgccacctccggtgcatctcccaccgccggtccacctgccgtcgccggtccacctgccaccgccggtccatgtgccgccgccggttcatctgccgccgccaccatgccactaccctactcaaccgccccggcctcagcctcatccccagccacacccatgcccgtgccaacagccgcattcaagcccgtgccagctgcagggaacctgcggcgttggcagcaccccgatccctggc

SEQ ID NO: 339721 - DNA, 260 bp, Zea mays
tttgtcttccatacacccgctctgattctataagtcaatttttataatgttccaagcgtttcaccttacaaagaccgtcccaagcaactatgattctttaagcgatttcatatataaaattgaatgggctgttttccttgatgttctcttcaactagttgtataggtgtgacaccaattattttatttattatttttgaaataaaacatgtcaactaatggtaggttggaaactttaatacctgtttgataaatttcata

SEQ ID NO: 339722 - DNA, 257 bp, Zea mays
ttcttcttttcagccgcctccatcactcttaccgatcatttttagacaggatggcgggcttccacttccttctctctctgacacgctaccttttctctcgccccttccgcatataatggctacatccttctcaccacctaccttcgcacctacaagatcatttattacttctatgtcaaagtgaactattccgttcacaaagttatgccctacatgatttaccacttccttacccgttctcttctgtaacttaacca

SEQ ID NO: 339723 - DNA, 391 bp, Zea mays
tcctcaaaagccgacccacccgactgttaattcaaatagagggagctcgtccatggcgtgctgttttcaatagtcgatggggggagtacccaaccgttgataatctatctagccagcctttccatgccttgccagaggaccctcgcctccgctgcggctgacggtcgtctgctgctcgtggaggcagcggtcctgctgtgcctgtccgttcctccggggcgcgcggcacccccggtcgcggaggttccggatttcctttttttcactagcaaacttcctttcaaacacttctcctgttacgtaacaatttgttctacatgatcaaccaaagaaacacctgttccactaccctgccgcctctttataagaaccccaaactttgatccctgtg

SEQ ID NO: 339724 - DNA, 109 bp, Zea mays
taactacaccaccgccaccattatcatggagcttattttaaaaacaatccaggccctcccaactacctcaaccttcactcatacaaacttaatctactactaccaacca

SEQ ID NO: 339725 - DNA, 376 bp, Zea mays
ccgcccttttttttttttttttttttttttttttttttttttttttttttttttttttccttttttttttcgctgcagcacatcgcacaggacaggacaccactatcacattccgaagggtccagaattcgaccacactttcacaacccaccacaccaaattacgaggggcacagctccagacgacgagcagagcaaaccgtcactcggcgctttcacgatgcatttcactaccccttgacaggcacaaccttgacctggtccagcacggggccgtaaagcgagactccttcggtgaccttgttgtggaattaggagctgtaaaaggtgaggccgtttctgtccctcttcttctattatctatactcctatttttt

SEQ ID NO: 339726 - DNA, 282 bp, Zea mays
gcgcgccctttttttttttttttttttttttttttttttttttttttttggacaagaccaatctcatatctgagcagttctttttagtaataagaatggccatatttttcaaaaaccaactcctgcataaaaaggactggtataccgagataatctcaatagggtacactacaaactgaaaatgcaattactaaaaaaagcttcactcgctgagttttgtataaatctcttagcacgccttaatcatccaaggacagggaatattctttttacttgttcaaa

SEQ ID NO: 339727 - DNA, 284 bp, Zea mays
aatcgatcaatcctttagttgttttcataatggcgccatttttcctcctcaatgcggggtttaagaacatgtcgggggggccaaaaccactttaccaccttttttgaatcactcctttcaccacatgcccacttcttgtatccttgccggctagtcccttataatcttattccacaattctttataatattttttattattttcaactccatctaattcatctcttacatacctcattatatatctactttttttttttatttattatacatctacttcatttt

SEQ ID NO: 339728 - DNA, 256 bp, Zea mays
tgcggccgcccttttttttttttttttttttttttttttaagggcgactttttgccttcaaataacaccgattcgaggcggtctataaccagatgccgaaggtcaaaaaaaaaaaaaactttttgttactatatattgagaggatcataaaacccttcttttaattttgagctgctaaagcattatattcacttggggtaacttcggtttgacctaaaacttcaagtgggtaaatggggattctaattattcttcc

SEQ ID NO: 339729 - DNA, 219 bp, Zea mays
ctaaaaaaaggcggcaattcatgaaatagagggcgcgaacaaattttaaacccccaaaccaaaatgaatttctcatgccccaacatataccttttcaaataaaaggataccactttgttcctcttctcaataattcttttacttcaccttaaaactaaatcctatttcttaggcttatatacctgtgcctccttttccttttatatctatcaacttccc

SEQ ID NO: 339730 - DNA, 286 bp, Zea mays
cggccgcccttttttttttttttttttttatttttttttttttttttttttttttttcaggaaaaaataaaaagtggaattcccccctcaacgagggggtagtttttacccttcattcaccacacttttcgtatcctttggattaaaaataatgttaagctcgacagaatccaaacattaaatccatccaaatttaccctgttaaattacacaaatgcttatcctgcgtattattttgttgtaaatacctttctaatttcaaagtattattttatcctgtcccccc

SEQ ID NO: 339731 - DNA, 279 bp, Zea mays
cttttatcttcttttttttttatttttttttttttccatatgaaccgaaacaacatatatccatggtcgggaaacaggataggaacggtggtctaatcaagcatatactctcaaaaaaaaaaggataagaatcgaacatgattgctttagccgatcgacgtcagattcactgctaatatgtccaaagacacctgtcaggacacgtcactatatccaggtcctcaactatgcagcactcaaactcaatcaaatcagccggaagcagttagacccttttca

SEQ ID NO: 339732 - DNA, 298 bp, Zea mays
  unsure (1)..(298): unsure at all n locations
gggccggccggccttttttttttttttttttttttnnnaccaacccaaaatttattttcatccaaataaaattacttataaggggtcaaaaaaacacaacccgggggcacaatatattaaggttcaataaccgcaagattgtcctaaagcaaaacaccatttcaggaaactgcctaaacagaaacccttcatcaggactgtttggacacaaaccaacacggtagtgcggccaagatttctcagggtgatatagagctcatctcttcttggaaacaccaacggtctttccacgcctacc

SEQ ID NO: 339733 - DNA, 405 bp, Zea mays
cgcggcgcgccctttctttttttttttttttttttttatgattctttctttttaatctataaacagattgcacaactcacgagagagctggttctgggttttgatggcaaaaaccgactacaaaaccaaagatcaacagcattgtagataactcagttatcaagaccctgcgacaggcttatatttcgataccaactcggtcaataatcctgctcaaccttcacactctgcagcttcgaattcagctcgtcctcattatcctcaacctcttcatcgtcatcatcaggctctccatcaggctcattctcatctagtgggcccagcactttcaggggtttcttaccagccttcaaaattttctccaccttatcgatcccttcaccagaaatgaaaatttcattgatg

SEQ ID NO: 339734 - DNA, 243 bp, Zea mays
  unsure (1)..(243): unsure at all n locations
atataccgtcttgatttaataaaattccgcccgcgccccaactttttacatcatatttactttaaaaactctcacaaccccccccctatttaaattaaacccctttcnaaatttataaaaaacataccccccaattattacaaattaaacattttttttataaaaaaaaattctntcccaccccccctcttttttttttccctataaaaaaaaaacccccaatccccccccctcctttttttt

SEQ ID NO: 339735 - DNA, 333 bp, Zea mays
attcccggggcggccgccctttttttttttttttttttttttttaaaaaacatttttttttctacaatttactattttaacccggcgggattaaaaaaaatgcttgccgcgcttaaaataaaaccccatttcatatctttatttttacttttaccacactaatcctaaatccaaacctaacttatttttcttaaatctattcattcctttatttcttattacctatccaaacattattcttctcatcccttatcccatctatcaaacactatcatctattattcacacctttacatctttttctttcatattatcattatttatttccttttt

SEQ ID NO: 339736 - DNA, 245 bp, Zea mays
aaacgccggggaacttttccaatgccgtaggaaacaaaaatcttcttcttttcacccatgttaacttttataatttttgctcttcccatatcctttgaacccctcactactgttattaccctcctccccttttattaatctcctccttatcccaactaatttttacccctcttcttccacccctttcttttttttttttctccatcaaaatatacaatatcgcctccactttttttttttttctt

SEQ ID NO: 339737 - DNA, 272 bp, Zea mays
  unsure (1)..(272): unsure at all n locations
gccgcgcgccctttttttttttttttttttttttttttttgaccttttttttcaaatttccataaaaaaaatctgtgggggccaaataaaaaataaggcggcggcccaaactaacccaaactctattaaacgtttcaaccaccttataaactcatctaacatancattagcaaactcttcacatatatggcaactgttctaaagaacactacctcctacatataaggcaaacaattcaatcccataacttaaatattctctcccctcttttt

SEQ ID NO: 339738 - DNA, 188 bp, Zea mays
gcgggccgccctttttttttttttttttttttttttttttttttttttttttttttttttttttttttttttttttttgtttgttttttttttttttttgggggcccccacttggggggggaaaaaaaccaacaaaaagggccttgcaatttttttttcctttttccccccagatttattccccattt

SEQ ID NO: 339739 - DNA, 283 bp, Zea mays
  unsure (1)..(283): unsure at all n locations
aagnaaaaacccagcccgctttttaccaaaggggggggggtgttcaactaaatccatccattttctaattttttttaacatcagcagttttaaacaaaaagggaggaagtctgggggtttgggaaccaaaacaaaccgggaaaatacttcagcttttcattacaaaaggcattacggaaaaccctataataaataagttgactcccagcggattcataacaacaaaaccggttcatttattttccccaccattaccacatcatttttttacattacaaacaaa

SEQ ID NO: 339740 - DNA, 340 bp, Zea mays
  unsure (1)..(340): unsure at all n locations
ggaagcagcaagcaatatactaatactgataaacatgttcctcgtcatgcattcataagacaaaagtagtgcttcctttggcagaaatcatgctggaataataaataacctacttgatattgaagcattcatagcttgttcttgctcttgctaactatctatttctaatacctctgctgcttcatgttgggtataattgcacatcgtgtaactgtagccctgtataagcacttcggatgatggagtgtgaggaagcgccnaggatggggaatgggacaagatcacgggggctggggtggcatctctgctgttaacacgaggcaacaagtgggggtgagga

SEQ ID NO: 339741 - DNA, 381 bp, Zea mays
  unsure (1)..(381): unsure at all n locations
gcggccgcccttttatttttttttttttttttttttttttttttttttttttttttttttttttttttttttttggtttttttttaaaaaattttggtggttttttttttttttttttttttttttttttttttttttttttttttttttttttttaaaaaaaaaaccctttttttaaaaatctcaccattttttaaaaaccccccatattnttcccccccccttttccaaaaccctaaaccaaaaaaactttttcccccaaaaataaataatcccccaaatcctccccctcataaaaaatatttccaaaaaaaaaaaaacaaacccccctaaaaaaaaaaacaaacttctatattatataaaaacttcacttctccttat

SEQ ID NO: 339742 - DNA, 387 bp, Zea mays
cggccgccctttttttttttttttttttttttttttttttttttttttttttttttttgggcttccaaatttcccccaaagcatttttgggggaaggggttcatacaactgcagggtgacataaatcatcaatgatgttcatgatcaccataactactggatcttgatctatgtgcaacctatatgcatcagagcattttcagagagtatagctaactttactcccttgatctcatcccaaagacgaccaactcatgggtcaatcctgtcctctctgttcacttttccaagaattcttggcagcttttgcagatgaaccactagaatctccacctttatctttaggcttcgagaagaatggatcccatttgtgagggccaattgcct

SEQ ID NO: 339743 - DNA, 297 bp, Zea mays
  unsure (1)..(297): unsure at all n locations
cgcccttttttttttttttttttttttttttttttttttttttttttttaannttttatttttaggggggggggttcaaacacgctcaaagagtgggttaactttccatcatttctttgtacatataacctttcaattccattaaagatgatttattttgaatgatcatataaattctattattaaacatccattctattcaaaaacttatttgagggctctttttttgtcctattatcaagtttcttcaaaaccaaatgaaattaacctattcctccctcaaaaatcttgtttttt

SEQ ID NO: 339744 - DNA, 373 bp, Zea mays
  unsure (1)..(373): unsure at all n locations
accggncctgattcccgggcggccgccctttttttttttttttttttttttttttttttttttttttttttttttttttttttggagaaagaaaggggtattttcatcgacggggtggaatggaaaatcccccacaggcctaaggggaggcatatgatgagctaaaccccttttcaaatcacaacagctggcatgatgtgccgtccctgctactgctgctagctactagggccctaggcacagccaagggccaacgaatgatttatcaccgaagccaatgggtcaaactgctggtgttaccaaccggccgccgtttcattttcagatgaaacatcgtgcttggatgacagcttctgtttccggccgttcctcc

SEQ ID NO: 339745 - DNA, 327 bp, Zea mays
  unsure (1)..(327): unsure at all n locations
atgaaacaacatcattgcatcaaggggggcaatatacatgtatgcacggtggcaaactacaancaaatactaatattaaacccacaccatatattacccgttccaactcataattcctcatctattcttaacacctgttcttcaaccactcctccttataacctcttcattacttatctcttctgataatcacctactcctctttttaaaatatttttcctttactatatatttttttatatttttatttcatacattatttttttcctatcttatctatatatatactttcctccctattatcactataataatatctatatacaa

SEQ ID NO: 339746 - DNA, 297 bp, Zea mays
  unsure (1)..(297): unsure at all n locations
ggccgcccttttttttttttttttttttatatttttttttatattttttttttataaataannaaaaacacaaaacacggggttatacatacacaaggggggcatccaaaataacacnacacaacccctcttccaatttaccccccgtttcacccaaatatttccctaccaacccaacaataattaacaccctcatcaagaataacttttaacttgttaccaccaaaaatttttttctcatgaccatttaacatcacctctaaaaaaccaaaaaaaaaaaaaccccacattttattt

SEQ ID NO: 339747 - DNA, 346 bp, Zea mays
gcggccgcgcttttttttttttttttttttatttttttttgaatgaaattacattgcatggggccatcactttaacagcgatggtttctacactttatgggttggggttatttacatacatcatagaaagtaaaaccaaaaaaaaactcaaatgggagatggctcaaggtgactaaacgcagacactgcctccgcataagaaaacatttctttacagtataatgagttccttctctctctttttcttcaacatttctgttgaaggtatttttacatcacgatgcatctttttttcttccattcacttttggacagaagtggggcgttggacctccttgaaccaaca

SEQ ID NO: 339748 - DNA, 128 bp, Zea mays
cctttttttttttttttaatataatattttattattttttttttttttaatattattatttataaaaaaggaggggattaaaaaaaaaagggggggaaaaaaaaaaatatataaaaaaatatatttat

SEQ ID NO: 339749 - DNA, 409 bp, Zea mays
ggccgccctttttttttttttttttttttgccgtagcaacgcacggtcaccctactagtatgtcattatgttcttagactgtctccagcatgtagggtgaaataggggacatgaaactatagatgatactgtttgcaaagtgatgtttgaaataggggatgagaaaaggaatgtgatataaatctgctggaggtagcctttgagctcactactcgcagttgagctttgagctgagctgttgaacatgtctggtgagtaggctaatctgtgctagctgagtggtccccagagaaggcgcttccaccgcccgagaaagaaaatgccgaggacccagactgcgaaacggcggcaccacccacacccaggccacggctcctctgaatctgccgaagcctgaagatgtctcgtg

SEQ ID NO: 339750 - DNA, 488 bp, Zea mays
tccgccgcccttttttttttttttttttttttttttattttttttttttttttttattttttataattttttattgtggttatataaaaaaataagggctggttttaaataatttatatataatataatttatattatatataattatattaactaatataataatttattaaatattaaaaaaattataaatttaaatataaatatttataaatttataaatattctataaacttatattattatttttatttataaattattaatatatatataatattataataaatctattattttatatcttataaaatacattattatataaataaatattaaatataatatttattataatacaaaataataataaatataacatataattatatatataaataaataatacaataataatatattttactatataaatttaacataattattaattatttattaatatatattatctaattactatatat

SEQ ID NO: 339751 - DNA, 271 bp, Zea mays
tgcggccgcccttttttttttttttttttttttggaatgcaaactgttattacaaaacataccataccagataccgcgagggaaagatgggacgcaggggtgggaacaaaacatatcatacaaatccacggggggttttgttagttccaaatttccgaattccagtcacttcacccacagcatcgaggaagtaaaagcttattccacgactcatctagcaaaacacggtggcaagcctattcccaaaagtccatgtgcggaggagtaaacc

SEQ ID NO: 339752 - DNA, 378 bp, Zea mays
cggattcccgggccggcgcccctttttttttttttttttttttttttttttttttttttttttttttttaattttttttttttttttttggtggaaaaaccccaactggggccgggcttatttaaactcggccttttatttttagcaaagtgaacaaaaccaatgggggggcatttgtcatttaataatcttaaaaatcttgtaaacagatttaaaggtcccctaaaaaccagttgtcccttcaagatccaagaacaatttaacctcttgaaaagactaacccttttataataactgtccacaaaaatgttttccttttcttcaaaagagtggttcacttttttttaaaaattacttttttgaggaaattttgttttt

SEQ ID NO: 339753 - DNA, 262 bp, Zea mays
  unsure (1)..(262): unsure at all n locations
gcggccgccctttttttttttttttttttttttgaaatcgctagacttttttaacatgtagttatttatgaaggacgggggaaatttttccgatgggtcgggtaaactatcnaatcaccatccacttctccatattgatggatggcttttgtccccatcattcatctactgaaataacataggtctaagtagatagagatgtcaatcaaccatctcaaaagggttcaatcagggattacaattcttctgattcataaagcaa

SEQ ID NO: 339754 - DNA, 325 bp, Zea mays
  unsure (1)..(325): unsure at all n locations
gccgccgccctttttttttttttttttttctttaattttttttttttttttttttcttannttttttttttttttttggtttttttttattaaaggagagccctccatttttatttntcaaacacaattccatcttttcaaattccttcccacaacaacataaaaccccactaattccccccactttacaaaccacacccattataattgtcatgtttctacactaacactacacactaactatactaattaaacttatcctatcaaaattaatattattttccaacaacatacaaatctctatattaaaaaaataaaccccata

SEQ ID NO: 339755 - DNA, 496 bp, Zea mays
  unsure (1)..(496): unsure at all n locations
gcggccgccctttttttttttttttttttttttttttttttttttttttttttttatttttatttttttatttttttggtttttataaaaaaattggaggttattataaataatatttattatttttttttatatttttttttaaaaaaaaaaaaaaaaatacttttttttaaaaaaaaaaaaaaataaaaaaaaaaaaaaaaattaaaaaaaatttttaaaacccccccaaaaataaaaaaaaaaatnatcaataaaaaaacaaattttttcaaattataattaaaataaaaaccttttattaaaaaaaaaaaaatttctccccccaaaaaaaaaaaaaaaaaaatttatccaaaaataattttttttttttttataaaaaaaatttataaaaaaaaaaaaactatctatttataataaatcaaaaaatctaaaaaaaatttttccctaaaataaaaaaaaattattaaaataaaaaattaattttatatatttt

SEQ ID NO: 339756 - DNA, 135 bp, Zea mays
ccctttttttttttttttttttttttttttttttttttttttttttttttttttattttttttttttggttgttaaataaaaaaaaagggttggttaaaaaaaaaaaaattataataaaaaatatataatttatt

SEQ ID NO: 339757 - DNA, 331 bp, Zea mays
ccggggcggccgccctttttttttttttttgaagttttgattgctcaccgtttggatttatatagctagctttgcagcagcagaggcgaactcgctgtgattaacgtgagagcagacaatagtttcgaactggtggacaaaaatgagggagagagatagaggaggggacactgatcgaagataaccagcgtgggactgctacgcgaggagccagaagtccctgcgatgcttgctggagacgaggtagccgccggagctcctgcggcgcacggccagcgccacgcacggcgcgtgctcgatgcagtgctccaccacgccgccgtcagccctg

SEQ ID NO: 339758 - DNA, 143 bp, Zea mays
  unsure (1)..(143): unsure at all n locations
gaacaaaacatatcatacaaatccacgttttgtgttcgaagncccaaattaccgaatgccattcttttaacccacagcggcaacaatataaacccttattccacgactcatctatcaaaacacggttgcaagcctatccccaa

SEQ ID NO: 339759 - DNA, 128 bp, Zea mays
  unsure (1)..(128): unsure at all n locations
ccgcnccaccaccaactacttccgcacgtcatttttaaattccgggcagaacattacaaaacaatntatntatctataaatcaatatccatcatccacacattcctaatataattcacaccaccattc

SEQ ID NO: 339760 - DNA, 253 bp, Zea mays
taccggtctctgattcccggtgcgccgccctttttttttttttttttttttttttttttttttttttttttttttttttttttttttttttttttttggggaacccatgggtcggggggggaaaatccaatcttacttacccttccattcaacataatatcttttttatagtgccacctaaattaaatccactggccctctttttaaaacttctatactggaaaaaccctttctttacccaactaaatctcct

SEQ ID NO: 339761 - DNA, 355 bp, Zea mays
aatggatgggcaaactcaacacgaacggggcttttgcaatgcggggggcaatcaattaacaaatggaagaaacaatgcttacggcaatcgccttcctacatactgcaatcaacacagctaaacagaatcaatgttcaagctgcccctaatgtacaggctactgagccaactgagggctcctaacaacagtgcggtgtacaaagacacggtgtcagcaacaagcctagtcttattaggccggtaccccatgaaacctaaattacttccttcagcccgactcctgggtcgactttaaaggaacccagcttacctactcgttcctgcgacctcataatttttttttattgtcacctaa

SEQ ID NO: 339762 - DNA, 52 bp, Zea mays
cctttttttttttttttttttttatctattcatatactttttttttttttat

SEQ ID NO: 339763 - DNA, 270 bp, Zea mays
cgccgccgccgcggtgtccggcgacgccaggtgcagcggccccacggttaataccgggcggccggacagctcgcgccggatcttgtccagcgccgcgccggggattccctcgaacgtgttcagcaccacgcccgacgacgaggcctgcacggtctctgcgttccctttgatgaaacggagcaccgaatagctgtcgcttacgaccacacctattatgttctatactcgctggtgctccagatccggtaccacattattcagacgcttttt

SEQ ID NO: 339764 - DNA, 497 bp, Zea mays
ggccgacatttttttttttttttttttttttttttttttttttttttttttttttttttttttttttttttttgtggcaaaattttttaaaaaggtgggcccaaaccttcaaaaaaaatattaattttttttaataaaaatttattttaaaatataaaaattgaatttatttttattgattatttatattttatatataaaataaatatatattattattttatttattacaaattttatttataataatttatatttttaacttaatataattatttttatatcttattaatttatattttatttatttcttatatttattattttatattaataatacttattttttttttatatttaataataatattaatatattatatttataatatttctttttatattattttttattatatattaaatttatttatttaattttaattattatttatattatttaattatttttattttattattatttttatttatta

SEQ ID NO: 339765 - DNA, 285 bp, Zea mays
attccccgggccgcgcgccctttttttttttttttttttttttttttttatttttttttttttttttttttttttttttttttttttggttttacacaaatattggggggttataaacaaatattactaactctttcatacaaaccaaaatctcttcaaaaaaaaaccaaaacaaaattcacctaccactcaatacaaaaaattaacaaaaaaaaccctcacaattcacaaacctaacaacataaaaataaaaccccaaataaaaaaaatcactaaaattcaaaa

SEQ ID NO: 339766 - DNA, 437 bp, Zea mays
accgtccggattcccgggcggccgcccttttttttttttttttttttttttttttttttttttttttttttttttttttttttttagcaagaggggctggatacatgggatgcatggttgcaaacttttatacaaaacagttttaaacagagcagtagcatggaacacaccaaattccccatgctttggtctgcatactttccgcttagctatgctgtgaactacccatctggatttgctcctctcctatggaaaccgttggagtttaatgaaacaagcaacagcaacatggtcttatgccggatgtagcatacaactcattacaaaagattgcatggaacccattaacctcttcctaatgaatgaaagacccgttcttttacgaaattattttcccagcttgttttaaatttaaacgaaaaacttttttttaaccc

SEQ ID NO: 339767 - DNA, 356 bp, Zea mays
gcggcgcgcccttttttttttctctttacattgttaagtgccaacaactggttatgagaaccatgagggtctccgattccagctcaccatcaagctctgggggggcgtcacatggctttgctttcatcacccgcccgcgcaacgtgctacaagaacccacgtcgaccatcaatcatatcacaaccaccaacactatgcacacaggagcaaccatgttcgctatacttaccaccagacacaatacaaaataacggagcatgtatggcgacgattaccagttcacacataccgtcgaataactagcgaacactgcatgaaacttcactttttctacaccggggtttaaacccccacaa

SEQ ID NO: 339768 - DNA, 238 bp, Zea mays
gccgcagcagcagccagagccaagggacaccaccgttaatctgtgtgtgaggcattgtgcatgctgctgctgctgctgcttcttggatttcccctcctttctccgatatgatcctctctgccaagtgtattttgttttccttcgtttcttgtactaccttcccttgtgttcgtttatgcgattgcgattggacttcaaaaaaaaaaaaaaaaaaaaaaaaaaaaaaaagggcggccgc

SEQ ID NO: 339769 - DNA, 100 bp, Zea mays
ttgaaccacaccctctttgtactgttgcctcccctggaattccccacgggtaccttcaagcgtaccagggttgcctataatgagtcctattataacttgg

SEQ ID NO: 339770 - DNA, 191 bp, Zea mays
  unsure (1)..(191): unsure at all n locations
tcaacccacgcttctctccccagtccccgatcccaanctntgcgtcgaaccatttttatccaataaagaacgacctttaatctttccaccggcattaatcgctcttctctttcttactccttccatttcccttggctttgttccatcataaccaattaccgcgttgcctttccctatacccacaaatttct

SEQ ID NO: 339771 - DNA, 98 bp, Zea mays
tcgaccagctcactagttacttttgacggcccgagaatctctgaccggtggctgcatgcttaccagctgtgggtatattgaagtcccttagagcttgg

SEQ ID NO: 339772 - DNA, 295 bp, Zea mays
tacggtttcggcagctgctactggaaggtggctgggagtaacaaactcctggggctcgacacgcgttccatggtgttctcctctttcgatatcccgtctggttacggccagcaagattctgtcgttgtggaggcagcggaaggcagattcagaatgttcactctccacaacagcatgatttctgctgcatcttacctggttcatgctgttcgggtaatccgcgaagaaggcaacaacctttggcaggttaagaggagagtcaggttgccgtcccaatatattttcagctttgcag

SEQ ID NO: 339773 - DNA, 141 bp, Zea mays
atacacagcacgcacgcgtacttaatctctcttcctctacaccatcccactttttttttttcaacaatcggtattctaagtaggtcttaatcaaaaagaccaaggcctatttctttccttctttctccaacatacgattct

SEQ ID NO: 339774 - DNA, 122 bp, Zea mays
gttcattggacccgggattgggatcgggtgtcggtggcggctgcgggttcggcgtcgggtgggggttcagaggaatgcctcttaacatgttcggcttgggtatcggtgggggttgtggatct

SEQ ID NO: 339775 - DNA, 251 bp, Zea mays
tttcgcttttttcttcggtggctctacccgtggggcgtatctaatggaccgggtgtcaagttattactacggccacataataaaggtgcactttgtatcatggaactgctatatcacacaaatttggtttaaatctattgatcttatcccacatgtttgtagaacattaacacatattccttctaaagttaaagatatttaactgtaataccacacacatatagtttattcatctcttctgttatccaaaa

SEQ ID NO: 339776 - DNA, 280 bp, Zea mays
ttccatttatcaagctcgaccctttcagacgggagctggatgtctcgtaggggctgcggccccataccccgtacctcctcactaccttccgttctatcttcatcctcaacaacacccagctcaactcgtacgccttccttcattacaaccaccaccccttcgtccacgacagcaccgtggacatcctctgttaaaatggattagccgattaccacaactattatttccggttttgtgcctactgagcccatcttattctgcgtcctctagcatatggcca

SEQ ID NO: 339777 - DNA, 89 bp, Zea mays
tcgacccacacgtccttttttttattcataatcaatatcttttggggggaagaggttttctcacacgggaaaggcccaacccacaaaaa

SEQ ID NO: 339778 - DNA, 385 bp, Zea mays
  unsure (1)..(385): unsure at all n locations
gatcagcaaagcggcagtgcgtagagaggatcgtcgaacagaacagcatgaagatggtcatcgttctcgtcgtgtgcctggctctgtcagctgccagcgcctctgcaatgcagatgccctgcccctgcgcggggctgcagggcttgtacggcgctggcgccggcctgacgacgatgatgggcgccggcgggctgtacccctacgcggagtacctgaggcagccgcagtgcagcccgctggcggcggcgccctactacgccgggtgtgggcagacgagcgccatgtaccagccgctccggcaacagtgctgnccagcagcagatgaggatgatggacgtgcagtccgtcgcgcaacaactgcagatgatgatgcagcttgagcgtg

SEQ ID NO: 339779 - DNA, 367 bp, Zea mays
tcgacccacttctttctttttttcttaaagctcgaaattcggggggggcttaatatctggaagggagcctgtgcattcagaacataacccatatgaccagatcatatcccatagcctcttcccctcatgcttcaactcagctctgttctactctgctcactcactcactccagtacccgtcattttccttctcacatttctcaacctcatcctcatcatcctcctcgccgatctccatcactgcctctcggaaccgtttgacatcatccaatgccgccttccgaaacatagcaatgtccactgcgccagctaccatatggttacccttcaatttgagctgctccgtcggttcattctgcattgtata

SEQ ID NO: 339780 - DNA, 175 bp, Zea mays
  unsure (1)..(175): unsure at all n locations
ttacggttggcgagcaggggcacggcggcctggtacgccgcatttgaacaggcaggggcacatcnaccgtcatcccaggctgctctaattatgcccatagcaagtccctatagtatattattatccgcttacaattccacactccttacaatccataatcataaaatttaaattc

SEQ ID NO: 339781 - DNA, 160 bp, Zea mays
tctacccacgcgttctttgttgcatcggcagcaagaaaccttgggacagcgtagcatagatcgcggcggtgatgtcttccaaggtgaggacggatctggacgtgggcgccgacggcgtgtccgttatcaccatctacaattcgcccgtcatcttcctctc

SEQ ID NO: 339782 - DNA, 155 bp, Zea mays
agatcagcaaagcggcagtgcgtagagaggatcgtcgctcagaacagcatggagatggtcatcgttctcgtcgagtgcctggctctgtcagctgccagcgcctctgcaatgcatatgccctgcccctgcgcggcgctgcatggcttgtacggcgc

SEQ ID NO: 339783 - DNA, 340 bp, Zea mays
  unsure (1)..(340): unsure at all n locations
cagtcaacccactcgtcctttatctttattatcacatttcctannacatttcgagaatcttttcaacatgaagagggtcatccttctcttcttttccctctctctgtcatctaccatctcctctccaatccatattcccttcccctactcagatcttcactccttatacctcacttactccttccttactactatgatgttccccttttatctttacccctactcttagttcctctatctaccactcttcctccctcttacatcctcttccctctcctccttttttaccctttctaccgccattttcccttctcttccactacttttactttctcctttc

SEQ ID NO: 339784 - DNA, 417 bp, Zea mays
tcgacatggaatcttctgcgatacaacaattcgtatctacagaagggaacgatgtttccacaatgcagattgggccgcgagtttctacatcctcgctactggctcacatggtttgggcttggtgtactctggctttgggtacagcttccttatcctgttctctgctttctcggcacgcgtattggcgcaatggcgcgaccattcctgaaacgtcgtgaatctatcgcccgtaaaaacctggaactttgtttcccgcagcattctgcggaagaacgcgagaagatgattgccgaaaactttcgttcactcggcatggcgctggtagaaaccggcatggcatggttctggcccgacagtcgcgtacgtaaatggtttgatgttgaagggttggataaccttaaacgcgcacaaatgcaa

SEQ ID NO: 339785 - DNA, 374 bp, Zea mays
tcgacccacactttcttttttttacagctcacagctatcaccaaagagcgggtatcctgaccgctcggaaacgccccctagcttatccctaagccctccaacctcagatcaatccgcagtatctatggcgcccatggcggagaaaaagccttctgctaatatgcccgtggaggaggagcccgctacggacaatgcggcgaaggctcctgcagggaagaagccgtatgcggacaagcgcctccccgccgtcaagtccggcaccagcctgggcaagaacggcaagaagaatagccaaaaaaaagcgtttttaccttcaagatctacatctttaaggagctcaagcaattgctccctcgacattctgcttttttttc

SEQ ID NO: 339786 - DNA, 273 bp, Zea mays
  unsure (1)..(273): unsure at all n locations
tcgtcccactcgttctgattttttagcccgcacccaccnnctacgaatggttctaacgccgaaagagcggtgtccccccttctcccttaaccctccaacatccttctcttcaatgcgtacgctctcgacaatagcgtccacctccttttctccttctcttccacgcaagatagatcaaactccctttctactaaagccattattctttctaccttcttacgtatctttctttccttcaaaggaccattcccaactttcaacatcttctactgc

SEQ ID NO: 339787 - DNA, 101 bp, Zea mays
ttttcaataatttttcattaacacccacttttaactgcctaattttaaaagtagtttgtctcaaaaaaaaaatatatttttattctaccaaattatttata

SEQ ID NO: 339788 - DNA, 185 bp, Zea mays
acgcccacggcgggggtttaacgcaacgtgatgccttcaaccataggggcggtaactggggaacggcggttgtttaattacgcctggggcccaggattttttgccggcgacgagcacctgccagctgcaggggtatgggaatggaggtcgttgggactattccaccaccagctgaggtgaaagta

SEQ ID NO: 339789 - DNA, 461 bp, Zea mays
tcgacccacgccgtcgactatcatggggggggtcttcccttggccgggagcccggcccaatgacccaacccacatgcccccgttccgcccccgtaactgacgcctgctccttcagcaccccgttgtccaccccccccctccccgccctcgacacccgggactcgctcgcccgaccgtgatgctcggtctacaacacccgccatcccccgctgtcgtcgctcgcgccatgcgtgtgatgccccgaccacgatagtcgtcgtgcctggtaccgcccgtcgagacaaccccctcctcgctcaccgaccgcggatgcccctcctcgatgcgtgcgatacctgggtcacgacagtcgtcgtgcctagtaacgcccgccgggacggccgtgagcggggcggtgggcacacagaccagccctctagggctactaggtcattctctctccttttttgcgttgggtatgc

SEQ ID NO: 339790 - DNA, 76 bp, Zea mays
taaaggccggggtataaaaaaacaaaaaaaaagaaaaaaaaaaaaaaaaaagggcggcctccgggaaattccgacc

SEQ ID NO: 339791 - DNA, 162 bp, Zea mays
gggtcacagccggaacgcggggcagccaaccaagcggacacgatgcaggcccacggaatcgccatccgcgcccgggggccggtggcggagacgcaggcccccgcgcgccgacggcaatgccgcgtgtctgcggcggcggtcggcgcgcccgccgctcgagcc

SEQ ID NO: 339792 - DNA, 158 bp, Zea mays
gtccacgcccgcccacaggccacaccgtccatcctcttcctcccgtgccgcgcatctgtcggctgccgcgcgcggcaagctaatccatggatctgcactacggcgcccgggtcggggaggccatggcggcgggctaggatatctacaacgtcaccgcg

SEQ ID NO: 339793 - DNA, 455 bp, Zea mays
caacgcgtccgctcgctctcgccatcgcatcgcgcacagtagacactcaaaatccgattgccgagggggagaaggcggagaccgttgcaacggctagttgcggcggcccgatggacccgtcgtacgatggcagcgcccccgccgccggtggaagcgccgacgaccatggccaaactctctgggattggacagtagagcattgtgaacccaacgattcaagtcatgcagatgctactaaattcgtgtgggattgcctcaatcaagatgacgatgagctaatgggattgcttggaaatcaaaccccgttgagagactgccgtgatttctttgctgaccttggtgatttcacatgcaaggagaccttggacctggaggaatctcgggaatcaaagcggcggcgcacattagagtacccttcagagtctagtcagtcagaagttgtgacttatgatgct

SEQ ID NO: 339794 - DNA, 180 bp, Zea mays
ttaaaaccctaaaccctcgctacccggcggcggctacaagctcttcgtcggttcagcaccatgaggccaccggctagaggaggacgtggtgggaggggtggcaggttcgatggcggcggccgtgggggcggcggcggcggccgtgggtttggcggtggttgaggcgtgagaggggacagg

SEQ ID NO: 339795 - DNA, 264 bp, Zea mays
ttaaaagtccaaccaacccttccgctgtttcctaatcggcatgagcggcttcttggcggtggtcgacaaggtcggcacctttctgctgtgggtgctgttcctggtctagcataccgccaccaggatcgtttgcaagactacttgacagctcatctaaacaacattatgaccaccatcaataatcttcgattgttcttctcacatggatataattctaatcatattcataccttttctagccgagatcttcataatcctttcaaa

SEQ ID NO: 339796 - DNA, 509 bp, Zea mays
gagagcttgacgtcgatgcacgcctccgtaggctggaatcctttaaagtcgaccaacccgtccgtttcgagaggcgacccgagggcaagaagtgggggcggtgctgcggtggcttgccatggttataaaaagtaacggatcgcgactaggatagaaagcacaaggcctgccgctttcactcttttattcccattccacacacactaactccgtcgttgcgtttggctaccgtacgtcgttgttcgtgcgcgctgcctgccttagcaggctgctccgtctctgcgcctactactttgtcttcgagttcgtgccttcttgtgtctatcgtcgatctctcgagacgtctttgtgcctacctttctactatttctactcgcgctccattcttctttacatgtatcggatttgcgccattcgactttcatgatgtttcattttttttatttttttgttattaacttgttcatattatctttcttattttttattttattttttttataatttta

SEQ ID NO: 339797 - DNA, 232 bp, Zea mays
aaccctatagagtggacccacgcgtcccgatcagagaggggctccttcttctggaccttagggacgccccttcgcggccgcggacgacccgaactgcgccgtggtggccgtgcactccaaggccacctacgacgagcagggggcgaacaacaagagcagcagcaagctgatggagatcgacatgtaggggatcagcggcgggccctgccgttgcatcgagacgaacatcaag

SEQ ID NO: 339798 - DNA, 372 bp, Zea mays
tttcagaccattagctttatctactccagagcgcagaagaacccgatcgacgccatgagggtgttgctcgttgccctcgctctcctggctctcgctgcgagcgccaccttcacgcatacaagcggcggctgcggctgccagccaccgccgccggttcatctactgccgccggtgcatttgacatttttggtttatttgtcatcttttttttattatcttttttttgttttttcttcttttgtcttgtacttttttattcttgtctatctttttcctttttgggggtgggggtgtctgtattttttctttcttttactctctattattctctgtcttttatttctttttattttttttctattctttcttttt

SEQ ID NO: 339799 - DNA, 450 bp, Zea mays
tatggctcagaaaatggcaactgttgagcgagtagaagagcttctcgagaagctgcgtgctgcttcctgggatcatgctgtcaaagatatggaagatctgaaagtttttgcgaaagattctgtatcctcttgtagctaattatttgtctcattgtgaccttatcttctgtagtgaacttctgatagagtcttaattttatctttatgtggatgaatcattgtctatttttatttcttctcttgttttttattctctttttaatatttattctattttagagtggagtatttttaatattttattttatatctttactttttctatttcttacataatttgtttatttttctttaaaatacattactttttcttaatttttcattttcttactttttttctctttctattttttttatttttttatattctattattattctttttatctt

SEQ ID NO: 339800 - DNA, 169 bp, Zea mays
agagctgtgacgccgcatgcagcgccgccgtacgtaggttggaatcctatagagccgacccacgcgtttgtcttttacgcgttaagaacctttaaaatttcccccactcgccagtcgcagcagcacctgtagccatggacgccagcggagccggtagcaagggaaagaa

SEQ ID NO: 339801 - DNA, 385 bp, Zea mays
gccttccatgaggaaattcttgctggctgggggcttcagcaaggggcagacccacttagccgcgaacatcttcaaagggatcgacgccagggtcctgagcgaagacctgggcgtcagcatgcacgtcgcacgagaagctgcagagccggcgtgaccagcgatggcgagatcgtgcgcgtggagccggagcacggctttcaccagctgaatccggctccgccgtacgctgggcctcctggccatcgccctatacctcatatcgaagccgcccatgaccgcgggcacggcacactctgtctcccactgccaggtggcgctgtgcgtttcgttcacgctcggctacggtcttaacgtcatcatgacggtgcgcaacctcaacacagcg

SEQ ID NO: 339802 - DNA, 191 bp, Zea mays
gtaccatttccccatctcccagatccaattggcgagttcttcctcctctgccgccatggcgctctctgtggagaagacctcgtctggacgggagtacaaggtcaaggatctctcgcaggcggacttcggtcgcctcgagattgagctggccgaggtcgaaatgcccggcctcatggcgtgccgcgccgagt

SEQ ID NO: 339803 - DNA, 58 bp, Zea mays
ttttgaaggaggttgctgtgtttggctgcaggggcccttatgagatcccatggggttc

SEQ ID NO: 339804 - DNA, 437 bp, Zea mays
  unsure (1)..(437): unsure at all n locations
tagaagagctacgacgccggatcgcacgcgtacgatagacgtctgggactctctatagagcgccaccacaccgcctcgcgttagagaagcgtgtctctcgttcaagaatgaggggatggaacaataaagtcgacatacagggggtgtcggaactctcctatccgtatccaagggctcggctgctnnngctgtgctttgnngtggtgtctgaccaacccatctgtgattgcttcctgggtacccacgtgtgcctgtatttcttggtgctgctttctggcacccaactgtatctcaaatgtgtctganntattgtaggnngccggatgagtctggtctttacgctnngttgagttcttctcacnatgatgtggagagtagacctcttgtcaacattggcataagtaagagggactcaatgggtgatccctcaattattg

SEQ ID NO: 339805 - DNA, 262 bp, Zea mays
tagaaggaaaaatatccccaaaccctagctcccgatctcgatggcgaaccctcgcgtcttcttcgacatgaccgtcggcggcgccccggcgggccggatcgtgatggagctgtacgccaacgaggtgcccaagaccgcggagaacttccgcgcgctgtgcacgggcgagaagggcgttgggcaagtccggtatgccgcttcactacaagggcttcaccttccaccgtgtcattcctgtgttcatgtgccagggcggtgactt

SEQ ID NO: 339806 - DNA, 265 bp, Zea mays
aggggatagcatcgtcatcgcaaaatgcaggctctcctgctccccgcgcgggccgcgccgccgacgccggcgatgcttcggcagcgtgcggtttctgcctccgcgtgtgcgtcgcaggtctgccgccccctattcggtgccgttagttgcatttcttgtggtgttcatggaagcgtttttctgtaaccttatagttgtctatctgtttattattctcattattttcatttatttattatgtgttattttaatttttttttatatt

SEQ ID NO: 339807 - DNA, 277 bp, Zea mays
tgtgtccacctgcgcttcgcctccttcctgtgaatggcggcgccccagcaatccgctcccctgtccgggtcggcgcccaagaggcatgaaggcgatggccacagtacgcactggcaccgcaggacacattggatatgatctgggtcccatgaatgaaggcggagtttgccaagcacgccgagtaccttaacaccctgaatgacaagagagaaaggcttgtgaaagctagtctgtatattacaatgaacagcataaaggttatttttcatgtccacag

SEQ ID NO: 339808 - DNA, 227 bp, Zea mays
gggtccgggtccgggaggtcctccggggttcggtttcgtgggtgagcggaccaagatggcgccgtcggatgttgagtaccgttgcttcgccggcggcctcgcctgggccacggccgaccactcccttcacaacgccttcagcacctactgcgaggtcctcgagtccaagatcatcctcgatcgtgagacgcagaggtcccgcggcttcggcttcttcaccttctcca

SEQ ID NO: 339809 - DNA, 453 bp, Zea mays
gcgacccaagccttcgcattgatggcgaagaatttggaggtaaaggagggttattcaattaacctaaccttttttgagaacccgacctttgaagacacaaagctaacaaagacctattcctttgttgatgatggaccacccacaataaaagcttttaaaattaagtggaaggatggaatgggacctgcaaatggaaatggtattaacaagaagggaaacaagcggccattagtagtggaaagttttttcttctggttagtgatacagagctcaagagtcttgctgatggtgtgcaagatgaggtgtctgatttcataaatgaagacttgtggtctattcatttgatgtactttaacattgatgttgtatattatattatatagagttatattatttctatattatttataattatgatatatattgtttttttatttatatattcttttttta

SEQ ID NO: 339810 - DNA, 217 bp, Zea mays
ttcgcaagccactccgaggccaagtctagggtttgggaatctgtaggaggggagaggggagcgcgctcagggtcagggaggcgaagatgatcgaggtggtgctgaacgaccggctggggaagaaggtgcggctgcagagcgacgaggtctaccccatctacgtccccgaccccctcatcacctcctcataccttacttacctctataagtactacac

SEQ ID NO: 339811 - DNA, 307 bp, Zea mays
ttaacaagtaatcatggggctgaaccaaaaaaagttcttggttcttatggagggccagaacgagcacactgcagctattattatggacatagaaggtgttgcgcatggtcaggcccatttgccatgtactcatggcggcgttcaacatggtcccgcacttagcggcctttctgatctcgactgcacgtagattgctgatcctgtgcttgccttacttgaacacgacggggacgctcgcggattcctgttgcggcccgctcaaggacgccgtacagaacgaccttaagtgcctttgtgacctttacgt

SEQ ID NO: 339812 - DNA, 130 bp, Zea mays
tttcggttgtagatgcagaggcgggccggcatgagaggaggggcggccggcggcgtgaggactgaggggcggccagtggcgtgaggattgaggggcgggcggctgcatatgagggttaggttatggttta

SEQ ID NO: 339813 - DNA, 79 bp, Zea mays
  unsure (1)..(79): unsure at all n locations
agagatatgtgancgcacatgcagcgcgtacgtgctcttggcctctatagtcgacgagctcactagttttagttgccgc

SEQ ID NO: 339814 - DNA, 446 bp, Zea mays
ttagctcaagaaggtgaagaagagcaatggcgcagatgcttgccatcaacgaggtataccgatcctttctcctctttctatggtatatgaataggtgtggatcgatagataattctcgcttgagttgccattgctgattacatgctgtcaaggttatgctctctttggccgtatcagcgatatattgtttttattacatgctttgttttgctattatttgaatagttttatttttattttcatttagttctatttttctttattagttattgatttttttatgttttttgatagattccttttttattatcgttattttattttatatttttttttttatattgtttattatctctatttattctatattaatttggtatatattatatttattttatatttttttctctatttatttaactattttttattttttttcatatatt

SEQ ID NO: 339815 - DNA, 223 bp, Zea mays
ttcgtcccatcttcctctgaagaagccacaggggggcgctactttctctatggcgggccgtatcttcggcgtctcgctgcgagttgccatcatatccgtccccctcgccaccaagttcaacctgatgtttggcgtttgagagcgatttgctgcatcttatgaggaactgcatttccccgctcctgtgactgtctcatcgaccgtctgggttacctagcaacac

SEQ ID NO: 339816 - DNA, 199 bp, Zea mays
tcgacccacttcttccttttttttcaacactccctcctacagcaaacgattccattctagacctaatcaggtacccctacttcctcactatacctcattccattccattcaatatccattcattctttcatacatccatacatccatccatccactatacaaaaagttgaatcccacccaccaatcactcactagatca

SEQ ID NO: 339817 - DNA, 423 bp, Zea mays
agagaaggaaaaatatccccaaaccctaggtcccgatctcgatggcgaacggtcgcgtcttcttcgacatgaccgtcggcggcgccccggcgggccggatcgtgatggagctggacgccaacgaggtgcccaagaccgcggagaacttccgcgcgctgtgcacgggcgagaagggcgtgggcaagtccgggaagccgctccactacaagggctccaccttccaccgcgtcatccccgagttcatgtgccagggcggcgacttcacccgcggcaacggcaccggcggcgagtccatctacggcgagaagttccccgacgagaagttcgtgcgcaagcacacctgccccggtgtgctctccatggccaacgccgggcccaacaccaacggctcccagttcttcatctgcaccgtcgcgacccctt

SEQ ID NO: 339818 - DNA, 250 bp, Zea mays
gggaggtcatccccaaacagttcacagaccgcgttgggaccttgattagagaattctgagctcacaccgactctatggtcaagatgctagccgacctctcatactctaaccgtgtcacttccgtcatgtggggaagctactctgcaagtggttcctccaaggcttggctggccgacaagatgcatcacatttgcaccgcctgagaaactagcttagaacggctacactgctcttctataccgggcaggct

SEQ ID NO: 339819 - DNA, 159 bp, Zea mays
tcagcaccgactacatgacctacatgttgaagtacgacactgtgcacggagagtggaagcaccatgaagtcaaggtgaaggactccaaaacccttctctttggtgagaaggaggttgctgtgtttggctgcaagaaccctgatgagatcccgtggggtt

SEQ ID NO: 339820 - DNA, 253 bp, Zea mays
caggccacggacaacggcggccgaggcttccgtgcggctcttggcagattgaacgcccactcaagctgcgccggctgctaggtcaacgcggcttagatagaccctgctttcctcccgggcaaatccaagttggccaaatgccgacaccagagaagccagagctgaccgtagtgctcctcgagtgcggcgagagtggccggtacctactgcggcacatagtgtcctgacagccactacacgccaaccagggcgt

SEQ ID NO: 339821 - DNA, 250 bp, Zea mays
tctacccactcttcctcgtttaacatccaacctccctcaagaagaggcctttttataaccggtaaagacgatctccaccctctccttcctacacaccatcttctccctaaactcccatgaatatcaccactgcgtcaatacccatcaacccctctacaacatactaataattacatctatgtcttcacctaatccaaagcacaatctcttctcatgctttatctaatgccatccattaattcttacacct

SEQ ID NO: 339822 - DNA, 290 bp, Zea mays
gatggattagccagctgctgctcagtagaaacattgctctgctggctaatctatcattgaatgatggcgtcgtctccagctgaacgttaatgtttctgatgtttcggaagtgctgccagtttttgcttgaatactaccctatctagagtgtaatgactttgtttacttggtttgttggagttttagctgctcctattactaggggttggttttgtcttgactttgttattttggttgcatggataatcgtttcgtttggatcaaataaaaaaaaaataataataaatagg

SEQ ID NO: 339823 - DNA, 170 bp, Zea mays
  unsure (1)..(170): unsure at all n locations
tattcaacccacttcttttctttctcttctacttcctcacttcctgtagggttctttataaataagaagaagagtncatcttccttcatctttccttacataaatagttattcaacctcccttgcttacaaccattatattatccttattaccatgttccaacttttaca

SEQ ID NO: 339824 - DNA, 161 bp, Zea mays
tattctacccacttcttcctctcttattaacttccttacttccgggaagagttcttaaaaaaaaggagaacattcaatctacattcatcatccttaacttcatccatttcttcatcctccctttctaccaaccattatatcatctatatctccttttttca

SEQ ID NO: 339825 - DNA, 272 bp, Zea mays
gtggatgtcgtaccggacgttcactacagtgactcctgcacacacacgtccggagattacggcccaagtgcaaaccctatccatgcggtggtagatatggccgccacagagcgcgacgcattctctgacgaggcggcgcccaggttgaccctcgacgagttcatggaggacatcatggccgtgatgctggaagcggactaggcgctaaacgatgaccctggcgatgagaagacctaccccggcaagtcacatatgcgccacagcgatcattg

SEQ ID NO: 339826 - DNA, 424 bp, Zea mays
ttgtattgtatacctctgtcatctctccagcgacggtcttttacgacggtgacgcgaatgcgaaccggagtagtggaagcagatgcggcattcatggccgtgatggagaagctcaagatctttgtcgtttaggagcccgttgtctagtgcttcttccttatatgtggattttagttttcctcttccaacataacctccttatctatgctatttttattctttttctttgtattattgttttttccaacatattattaatttatcgtataattcatcatttttctctattttattttatttttttttttattaaattacttttatttattattatttttcatttatgtttttctctttattttgtttttttttttcattttatattttttttatttttctttatcttttatcttttttgtttttt

SEQ ID NO: 339827 - DNA, 409 bp, Zea mays
ccgtcatcgatctcgtttcaaatccatccatcctcgtttcctccgtcccgcagcatctcaaccccatggccaagatcaagatcgggatcaatgggttcggcaggatcggaaggctggtggccagggtggccctgcagagtgacgatgtcgagctcgtcgccgtgaacgaccccttcatcagcaccgactacatgacctacatgttcaagtacgacactgtgcacggacagtggaagcaccatgaagtcaaggtgaaggactccaaaacccttctctttggtgagaaggaggttgctgggtttggctgcaggaaccctgaggagatccccggggggttgggttggtgctgaatatgttggtgagtctactggggttttcactgaccaggagaaagctggagctcacttga

SEQ ID NO: 339828 - DNA, 318 bp, Zea mays
  unsure (1)..(318): unsure at all n locations
tcgacccactcgttctttgtggtcggcctcctcttctcttgacccacactcttttcatagagggggcggctgcacaggccaatgctgcagctgtcccgcagtctgtgctgcggaagcacaagcgggaggagcattggccagcggacacgaaagagtaagcgctcgcggacaggaagaatgcgcttgagagccgatagaacatatttgcccgcgccaagcattacgcccaggagctccacgcccacgatannntttgtcaattcgttgcgcgggccatcgccccgacggcacctgggtacatcagctacaggacgggac

SEQ ID NO: 339829 - DNA, 337 bp, Zea mays
tttatcaccactacctatatctactacagagggcgtcataacccgctctgagacacgacgctgtcgctcagtaccaaagcctctaccgactctcattgcgagcgccacctgcacacatacatacggagttttgcgcttcgatccacccacgtctgcccattttccaccatcgtggcatcggccatctactgatcacctgacacgttattggcatgtcccaccgacagaactccttacctcggcatatcacctggcaaaccacgaccatgtgcccacaatctgtttcatccaaaaaacgccaccattacgcttccgatagacacccatgaacattctc

SEQ ID NO: 339830 - DNA, 323 bp, Zea mays
tcgacccactctttctatcgacccctcttcctatcgaccggggggctttcatttacatgatacccaggcattttttctccgtttctctacttttccagttttataccaacacacccactttatcaatcctctcatgtgacctgaaacttgattctgaagacctgcccaacacctaaaataatatacctaaagttttacttaatccatctaatgctattattcttatatatacacatttacatgtaagacataaatataactctgactttctatttgttcatatattagcacgtcattctccttatccaaaactaatacattta

SEQ ID NO: 339831 - DNA, 193 bp, Zea mays
tcgacccacgctttcttgacgaattggaatacggaaagcgagaggtgatggatctcgccgaggcccggcagcatcagcggctcatcgtcggcgcggcgctgctgctggcaaccgcggccttcctcaggctcctcctgggctcccgctcccggggcggcatgcgcctgccgtccaccattcctgtggcgcctgt

SEQ ID NO: 339832 - DNA, 53 bp, Zea mays
tctcccactcgtccgaaagataaagtccaccatcctttcctactcatttgggg

SEQ ID NO: 339833 - DNA, 111 bp, Zea mays
  unsure (1)..(111): unsure at all n locations
cctagctttcgctccatggccgacggcgatccggagccggcgccagcgccggcaccggcactggctaacgagaagctccatgtgcgggcgggggnctacgttgattatact

SEQ ID NO: 339834 - DNA, 289 bp, Zea mays
tcgagccacgcgatcgcgtcacttgcagagaaggagggagctcgcacggggctacgcacacacatcagaggggggtcgtcgatgtcgcggtgggctgcggtgctggcgctggccgcgggcaccgccatcgccgtggcgtccgtggccccaagatacatgtacacggtcttgacatgaagagcaggcctgctgatgagcctggctcctggcctgaagtacgtgcaggggcagggccgcgcgccgccgcacgactgttgtagtggcctgcgcccggtgccagggaagagac

SEQ ID NO: 339835 - DNA, 363 bp, Zea mays
gggggggggaaagctgttcctttatagttgtcccacgcgttctttctcccgcagcgaaagagggtgctcgcgcggggctacgcacacacagcagagggtggtcttcgatactcgcggtggtctgcggagctggcgcttgccgcaggcacggccatcgccgtggcgtccatggcggagcaggcgacatgaacgcggacaagacggagtgcgcggaccatctgttgggcctggcgccgtgcctgctgtacttgctggggcaggcccgcgcgccgccacccgactgttgttgtgggctgcgccaggtgctgaggaagagccccaagagcctgtgcctgctcatcaaggacaaggtctacctcaacc

SEQ ID NO: 339836 - DNA, 203 bp, Zea mays
cacaagtgcaacatggcttgaaaggccgctggtggtactcgtggcgggggcaggatgacttgcaaccttaaaacttcttgcgccaaggcaacttgtgtggcaaattccagtctttgtgggaaggaaccccttcttcctggggccgagaaccttccggggttatattccggggggaacttttcaacaaggggccaaatttttgc

SEQ ID NO: 339837 - DNA, 347 bp, Zea mays
  unsure (1)..(347): unsure at all n locations
tcgacccactcgtcctttctttttcacaatccctccccatcaaagagctgggttttctcgaagccactgtggtgcatcnatcactgcaagattcctcgagcctaccccaggcgagccgacaaataaaccttgctacatgcgcaccgctcacaaagctattcctgcagctgataactcaaattccacctataaaaaaagcctttcccgcatcaatatctatatcgtcgaaatttacagcagatccatccaagagctactgttctgacatcctttatccctccaatacaataaaaatgtgaacctgttattaaataccctgtaccagcataccatatacttacatattc

SEQ ID NO: 339838 - DNA, 401 bp, Zea mays
  unsure (1)..(401): unsure at all n locations
tcgtcccacgctttctgtagaccgagacctctnagggggagctgttttcaaaagggggaggggcgattcgctttgctcgcatggtggatcatgtcgctgtcgatgttggggagctcgttttcgtcccgagtctgttaggcatcagtgctattgtccggcggcaatgatgaaaccatcgcgctttctgggatggtggattgccgcatttgccaatacttggtcctcgttattaacctctatagcccctgtgctttcttctactgtcccatatattcctcatggattgttttcaactctccttcattttgaaatgatatataatttctttatatttttcatttacttcttccaatcctggttactctgtcctaaccccatttacatccatcattattctttcc

SEQ ID NO: 339839 - DNA, 236 bp, Zea mays
  unsure (1)..(236): unsure at all n locations
tgtgtccgcggatcggacggctgccaccgggggccgcatgttaacctgccggcgtaaatccacctcnaccatcctcgctgtccaacccttgctcgctgcgccgccgtctccgacatcgttccttcgtccccacgagcaacctataatccgccgtcgttgagatgactctttatcaggatcttctatctgtcgactagctactgtcagattcatacacctacaaggagctcgagaac

SEQ ID NO: 339840 - DNA, 151 bp, Zea mays
  unsure (1)..(151): unsure at all n locations
tgttgttttttttttcaatttanaacatggtgagcatttataaaaacatgggggggcctacaaacatttttttttaaattaactttttattatttttatacactttattaaccttatctactttcttctcataatacacattatatttttt

SEQ ID NO: 339841 - DNA, 189 bp, Zea mays
cgatccactcgagcgccaagcctagggaaggtgaggagcgatggcgcgcggcgtggtgtcggcgaagggcggcgcggtcgcgggcaagaagaaggggtcggtttccttcacgatcgactgcaccaagccagtggaggacaagatcatggaggtcgcctcgttcgagaagttccttgaggagcgcattaa

SEQ ID NO: 339842 - DNA, 431 bp, Zea mays
taaaagtcaaccaacccttccgtttactccttggccgaacccttggcctaaaatgggtcatttcgtttgtaagtaccattggaaaaaaaaaaaaaaaaaaaaaaaaaaaaaaaaaataaaaaaaaaaaaaaaaaaaaaaaaaaaaaaaaaaaaaaaaaaaaaaaaaaaaaaaaaaaaaaaattaaaaaaaaaaaaaaaaaaaagggcgccccccccggaaattccgaaccgtaccctaaaggttaacaatttttcctaaaaaaaagccaaaaaaaacctgggcgaaaaaatggaaaaaattttttcctgtgaaaaattgttatcccctaaaaatttcaaaaaaaaaacaacccgaaaaaaaaaaatttaaacccttgggtccctaataagggacctaaccaaaataaattgcgttgccctaaattcccctt

SEQ ID NO: 339843 - DNA, 414 bp, Zea mays
ataacgagttcatgttgcttgcaaggaaatgattacattggaaaaacagacggggctacttgaggaagaagagaaagaaaaacgtgaagaagaagagcgcagggataggaggagaacaaaagaaagagaaaagaagaatagaagaaaagagaggctgaaaggaaaagacaaagataaagaaaaaatattggttcggtcaaaaaaaccaggtctttcaacattttctccgagcagccaagcagcaccaagtagtaatgagtctcaggatgttctagacttgagatattcagatagcgaagaggaagacaatgttgtggtcagggaacactatcctgattcttcagctgatcaatcttcaagcaaggatactgatgaacgaagcaatgagcatgaatgcagtgcaacagcagaatt

SEQ ID NO: 339844 - DNA, 120 bp, Zea mays
gcctactaactttgcagatgtatgcattaagtgagtgagaaactaagatgatgaaggctatggtggacttttgacctgcacaagagggccacagacacaggttctactgcagagaggatt

SEQ ID NO: 339845 - DNA, 210 bp, Zea mays
tcgacccactcatttgatacttccatcaaccctccaattccacacggggacctcctagcttgccagcggtccctatatacagtcttattatactcaagctcaaacattgacataactccttcctatgtaaaatgattatcctgtcacaaattaacacatcattctaaccgaaaataaaaagttttaagactgatccaactaatacgacct

SEQ ID NO: 339846 - DNA, 294 bp, Zea mays
ttatctcgtttcaaatccatccatcctcggggcctccgtcccgcagcatctgaaccccatggccaagatcaagatcgggatcaatgggttcggcaggatcggaaggctggtggccagggtggccctgcagagtgacgatgtcgagctcgtcgccgtgaacgaccccttcatcagcaccgactacatgacctacatgttcaagtacgacactgtgcacggtcagtggaagcaccatgaagtcaaggtgaaggactccaaaacccttctctttggtgagaaggaggttgctgtttt

SEQ ID NO: 339847 - DNA, 433 bp, Zea mays
  unsure (1)..(433): unsure at all n locations
tcttttaaagtggaccaacccgtccgagtccattagctttatctactccagagcgcagaagaacccgaccgacaccatgggggtgttgttcgttgccttggctctcctggttttggctggaggcgcaacctcaacccatacaagcggcggctggcggctgccagccaccgccgccggttcatctaccgccgccggtgcatctgccacctncggttcacctgccacctccggtgcatctnccaccgccggtccacctgccgccgccggtccacctgccaccgccggtccatgtgccgccgccggttcatctgccgccgccaccatgccactaccctactcaaccgccccggcctcagcctcatccccagccacacccatgcccgtgccaacagccgcatccaagcccgtgccagctgcagggaacctgcggcgt

SEQ ID NO: 339848 - DNA, 53 bp, Zea mays
  unsure (1)..(53): unsure at all n locations
ggcggnttnaggaggggaacagatacagggggggttttataaggggggggggg

SEQ ID NO: 339849 - DNA, 122 bp, Zea mays
aagtaggctttttagtttgtactctagtgtggttttttttttttttattattatatttatttttgtttttatgctacaaatattaactcttttcatgccgttattattgatcctcttaattt

SEQ ID NO: 339850 - DNA, 293 bp, Zea mays
ttggtaccctttagagtagccccacgcgtccgttgtgcccaccggcaccgttcagtgctagcgcgcgctcatggcgtcgtttggccggctcctcctcgtcgccggcctggccttcctggtgctgctgctgggtgcccaggatcacgggcgtggagagcaagcgaccggcggcggcccggccgttggagcagcatccgccgtcgctgctcctcccgcgcgggaggctgtaatcatcagccggcaccagcattcgcagccgtctgtcgcggcgttggctgaaagcaagcggttcc

SEQ ID NO: 339851 - DNA, 292 bp, Zea mays
taaaccctagcacacgcaccatggcggcgcagcagaagatccggtggggggagctggaggaggacgatggcggggacctcgatttcctcctcccgccccgcgtcgtggtcggacccgactagaacggctctacgaaggtcatcgagtaccgtttctacgacgacggccacacggtttgggttactaccactacctgcgttcgtatactagctcgggcgctcctttaccgtattgccatcttgcgccttctgtggtctaagtttgttgtcgcccttaaggaggtcgtgttctt

SEQ ID NO: 339852 - DNA, 187 bp, Zea mays
cctctaaagtggaccaacgcgtccgttttgttcccccgttgtagttcgagtgttcgacccggcggccggcggcgacgcgctcgtggtttccagcgatgtcggcgcaagcgggtccagggacgtacttcccggcggctgccgcaagagacaagcggcgggagaggaaggaggagctgcggcgccacct

SEQ ID NO: 339853 - DNA, 285 bp, Zea mays
ctctgtcttaacggcccctgatttttttgcgagacctctgtcctaaacgcagccggtgggcggagccggtaactatcactcgcccctcctcaatcctgctccggtcggaaccctagcccttcctgccagcggtgggcggcgcttggccatgtatccgtcaggggccatggtgggggcggtgcccgcggcgcgccctagcgcgttgtctcggttgtagaaggccttgagccactttgctcatggggcccgactggtccgtttcctttaaatttgtttcgtgggggg

SEQ ID NO: 339854 - DNA, 84 bp, Zea mays
tacctgcgccgcccctccggccacgcgagctcgccgaaatggtcgcccacaggttccatcagtaccaggtggtgggtaatactc

SEQ ID NO: 339855 - DNA, 187 bp, Zea mays
ccgcgccttctccccaatctggggggatatcagatccggcggggcgcgtatataactactttaagtctatcttgctgacatttagagtccaaagttccaaaataacatcacaaagaggggttctgttccagttaccactgttaaaatgagcaataactaccctttttttacctattattccttgtat

SEQ ID NO: 339856 - DNA, 408 bp, Zea mays
cggacgcgtgggttcagtagcaatcttagaacagttctttggcaatgttttatcgaaaagcggcagcaacctaccaacttatgttgagaaccagccattgaaaactgatgatgacatgatcacttctgtgccagaatcatccaaatttgctcattggtttcttgatgaagacttgaaacctgcagaagacttatcttcaaagagcctgctctccatgattgtcaaaaatgaaaattcagagcttatctcatttacatcctctacgcctgccaatggagttcttgaacaatacatccattctgatgttccagaggcagttcctattatgacatgtgaggatcttgagcagacgatgttagcacaggttagcaatagcagctcaactcagataaatgctacaaaggagca

SEQ ID NO: 339857 - DNA, 316 bp, Zea mays
tttcatttccacatcaacatcaacacgagggcgcgtgccgccgccgccgcccgggcgccccctcctaaaccccgcgacgacactgagcgagccgagccccggcgaccaaccatggccttctccgctaaaccccactgctcctgctccaccaccaccaaaccccccacccccgtcgcccacctctctccacccccgtccctctccgtccgcgccgccgcctgcgccccgcgctccgcctatggcctctttgccgacggcgtgggctgaggcaaggcgttccccagcactggtcgacttctcgcttgttcccagcgca

SEQ ID NO: 339858 - DNA, 389 bp, Zea mays
tatgcaaccaccgcctccccgatctcgtcgagaggaagcccaatcccgaaaccgtcgccgtattccaatggcgcccaaggccgagaagaagcccgccgccaagaagcctgcggaggaggagccggcggcggagaaggccacggcggggaagaagcccaaggccgagaagcggctccccgcgggcaagtccgcaggcaaggagggtggcgagaagaaggggaagaagaaggcaaagaagtcggtggagacgtacaagatctacatctttaaggtgctgaagcaggtgcacccggacattggcatctcgtccaaggccatgtccatcatgaactccttcatcaacgacatcttcgagaagctggcggcggaggcggccaagcttgcgcggt

SEQ ID NO: 339859 - DNA, 407 bp, Zea mays
tgcacacacacacaaccagatctcccccaagtccacccgtcggcacctgcggttcaagatgcagatctttgtgaaaaccctgaccggcaagactatcaccctcgaggtggagtcgtctgacaccattgacaacgttaaggccaagatccaggacaaggagggcatccccccagaccagcagcggctcatcttcgctggcaaacagcttgaggacgggcgcacgcttgctgactacaacatccagaaggagagcaccctccaccttgtgctccgcctcaggggaggcatgcagatctttgtgaaaaccctgaccggcaagactatcaccctcgaggtggagtcctctgacaccattgacaacgtcaaggccaagatccaggacaaggagggcattccttcagaccagc

SEQ ID NO: 339860 - DNA, 237 bp, Zea mays
ttttctttgccagttctccttcacaaggagcggcaaccttacaatgcagggcggcttcttaaaatttttctaccaacgaaggatgcggcttcttaccttcctattcttatggcaaaagatcgaaagattctatgcatccatgactttgctaaattcacaactgtatgccttcaagtttacattttgattcaacaacaaaaccatgatgcatttgctttaaaatacccaagattcttt

SEQ ID NO: 339861 - DNA, 177 bp, Zea mays
ccttcctttgcgagcccggttttccttcttccaattcaattgttccgggcttttttttttttttccttctcctccccccgtccggggccggagatccacggtttccattttccagatcgcagttcattcagttgctctgttacctttacacggtctgcatgcctttattgggtctgc

SEQ ID NO: 339862 - DNA, 324 bp, Zea mays
ctaccgccgccggtgcatctgccacctccggttcacctgccacctccggtgcatctcccaccgccggtccacctgccgccgccggtccacctgccaccgccggtccatgtgccgccgccggttcatctgccgccgccaccatgccactaccctactcaaccgccccggcctcagcctcatccccagccacacccatgcccgtgccaacagccgcatccaagcccgtgccagctgcagggaacctgcggcgttggcagcaccccgatcctgggccagtgcgtcgagttcctgaggcatcagtgcagcccgacggcggctccctac

SEQ ID NO: 339863 - DNA, 156 bp, Zea mays
ttatctaacgaagtacctacacgtgtacgggagggggcctattgccagtgcgatatgccatacactcatcatgacttcactgtgtcagtgcatgcacttgcaggggcacactgccatacatctggcgtggctataacgcatatgaacaggcccaaa

SEQ ID NO: 339864 - DNA, 94 bp, Zea mays
ttatcttaagaagtacctacacgtgtaccggagggggcccattgccagggcgatacgcgctacactcatgaagaatttcctgtatcagtgatgc

SEQ ID NO: 339865 - DNA, 323 bp, Zea mays
ttatatccatccacagatgtgaacgtttccgtctgcggctcacaggacgtccagcatagctgactactgatgcctgacttgtggtgagctcatctagcatgatgtcttcgcttggacgagatggctggtgatgcatgttgttgatctagatcctgacccgaattgcatgatcctgacctacatgaacaggcccttcagtttatctagcactggtgcgcatctagtgtctatatatatacgacgtgctgataggcgacgcattttccatgccatcttttgcgcactacaacctttcataagaactagacaaggtgagatctcta

SEQ ID NO: 339866 - DNA, 78 bp, Zea mays
gttgatggtacggtcagacttttcatgcgcaggatacatcttgaaccgggcgcgaccaagacataatttttcatctac

SEQ ID NO: 339867 - DNA, 235 bp, Zea mays
tcgacccacgttttctttcctctcctggtgctaccctttttggcgcgctagtttagagtccgcgccggcggccaaaaacaaagatggaggtcgtctaaggcacaaagctgaagggaacgaaacacatacaggttttctactgttaagaatgcgaggagctcggcctcaagattcccaagctctacaacgccgttcagctctaatgcattaactgccggagcttcaaagatggatt

SEQ ID NO: 339868 - DNA, 122 bp, Zea mays
tcgacccacgcctcctttttctttttatctaacaaaccgaatcacaggggtggaatcctatatgaggggggttatctattccaacactaagttgattcaattgatagactaaatgaaccttc

SEQ ID NO: 339869 - DNA, 401 bp, Zea mays
tcgtcatcgatctcgtttcaaatccatccatcctcgtttcctccgtcccgcagcatctcaaccccatggccaagatcaagatcgggatcaatgggttcggcaggatcggaaggctggtggccagggtggccctgcagagtgacgatgtcgagctcgtcgccgtgaacgaccccttcatcagcaccgactacatgacctacatgttcaagtacgacactgtgcacggacagtggaagcaccatgaagtcaaggtgaaggactccaaaacccttctctttggtgagaaggaggttgctgtgtttggctgcaggaaccctgaggagatcccgtggggttcggttggtgctgaatatgttgttgagtctactggtgtttcactgaccaggagaaggctgcagctc

SEQ ID NO: 339870 - DNA, 322 bp, Zea mays
ttactttttttttttttcgtcctgggaatttcttacgggtaccttcatgcgtaccaggggggccaaaaacaaacacattatagcttgccataataatgacaacagctgtaaccgggaaaaaacattatccactgacaatattacatatcatactagacggatgaataaagtgtaaaattttgggtgcccaaagcgataaaaaacggaggtggggtgaaaaaaagaaaaatgggcaattttcaaaaaacaaaacgtgtttggaactatttattctctaataaaacaacgcgcgaaaaagagaacatttatatttattacctaa

SEQ ID NO: 339871 - DNA, 282 bp, Zea mays
tcgacccactttttctttttaaggggttgccacttattcaggggggggacatcatccaagaggggcgccctataatacaaaaacatgatcgaggccatgatcttgtagcatcatcttatgcacttggtgagattccattttttgacgtgacctaatcacattacttcgccagctttgtcacctaacttgagattttttggattttttagatcctgagacaccttaagtagcaaagatcataattcatatgcgcttttatattctttggatgtaaaaaagaat

SEQ ID NO: 339872 - DNA, 486 bp, Zea mays
  unsure (1)..(486): unsure at all n locations
gataaatataaaaaaataaaaatttttttttaaaaataantataataaaaaaataatgtggtagggtaaaaaaaaaataaaaaagagtatggaaaaaataaatataaatatataaataaaataaattaaaaaaaaataaaaaaaaaaaaattaaaattatataataaaataataaaaaatataaaaataataataaaaaatatataataataaaaaaaaaaaaatgaaaaaattttaaaaaaaaaaataaaataaaaaaaaaaaaataaataaaaaaaattaaaaaaaatatagaaaatataaaaaaaaattaaataaataataaaaaataatataaaaatttataaaaaaaaaaatattaaaaaaaaaaaaaaataaaaatataaataataaaaatataaaattaaaaaataaatataaaaaattaatataaaaatattattataaaataatataaaaaaatttatttaataaaaataataatat

SEQ ID NO: 339873 - DNA, 280 bp, Zea mays
tcgacccactctttcttcttttcgggcggagaggttccgggtttggggggtgttttttgggagaggcgtccccttaagaagtccaagaatgggaagcggaaatccaaggatggcatgctcaatattgtcatggcgctggtcgctccctcaactctttcttcttagctcctttccctctataccgtttgttgtttctcttccctgaacaatctaatcttgctatttcattttttgcctccagattattgttaatctatttaatttttttttatattattta

SEQ ID NO: 339874 - DNA, 369 bp, Zea mays
tcgacccactcttccttttgtcagtggtcacaacactacacgaggggctttatcagaagcgaggtacccaaaactccctttaaagtccgagctctatccaacccatgaacgggatcccgatgcccacggcggcctcggttctcgccgcagcggcggcctctccccctctgacgtggcagatattgacttctcttcttcccgcgttacattcactggcgaacccacctcccgcactgctcccacggtcgcccgctcctcctctccgtgcctcctccgatccccgcgatatctgtgctggagcctccttccggaggacaccattttcttcggcggctgcattatgttgaggtgtggaagcatagtccactg

SEQ ID NO: 339875 - DNA, 144 bp, Zea mays
tttccttgcgccgacggcccgagcagccagggccggccatcatgcgagccgggccggctccgcgcctatatccgccgtccgctcgtcccgaggccgcgagccgctccgcggctactaccctccgtccgccgtctgcccgtccag

SEQ ID NO: 339876 - DNA, 123 bp, Zea mays
cgacgtaagctgtttccttagagtctcccacttttttgtatttaacaactcctcccaaatgcagggttcacttacttacgggctgggcgccaaacaccaaaactcctatttccgcactaaaca

SEQ ID NO: 339877 - DNA, 380 bp, Zea mays
tgttctttttacatcaaccgcaagggcccgctgatcgtgtacggcaccgagggcggcaaggtcgtcaaggccatccacaccgggaaggttgcggaaggccggacgcgtgggtggtgagcggcgggctggtggtgcgggtgttgctgctggcgccagtgagatgcgcgggctagatctggggcagtgggttggtgctcggcttgcccatctgtgctccgacctcccttcccgtgggcacgttccggcgccggcatcttggcggatccggccgaggaggatgacgagggtgtcgctgccgggggcaggcacaacggcgtgtttggcgggccgcaggttagctcggcgcgcggccatggatgcgttcgcttggagcggcggtg

SEQ ID NO: 339878 - DNA, 364 bp, Zea mays
taccgcctccccgatctcgtcgagaggaagggcaatcccgaaaccggggccggattccaatggcgcccaaggccgagaagaagcccgccgccaagaagcctgcggaggaggagccggcggcggagaaggccacggcggggaagaagcccaaggccgagaagcggctccccgcgggcaagtccgcaggcaaggagggtggcgagaagaaggggaagaagaaggcaaagaagtcggtggagacgtacaagatctacatctttaaggtgctgaagcaggtgcacccggacattggcatctcgtccaaggccatgtccatcatgaactccttcatcaacgacatctttgagaagctggcggcggaggc

SEQ ID NO: 339879 - DNA, 384 bp, Zea mays
ctgcagttacttgattggttatttagcataaacgaacaatatgtgcctccaaataaggcttgaattgtttatttgtgtaagagaatgcaggcataaatacaaccaatcacagagaggggggccctggggatggtaacaataacgttagatacttgaggggcaccttaaacattcaaggattttggaaacccctctcgtagcactaaggactgctccttcgacacttgggcttgtacagaaatctccacaaatcgccaagttcgtgctcttgtcccaaacgcacttatcatctccactaattgcaatggctgggaaagcagcaccccatctgtgagctttcataaaaattggccgtggaatgcttaatccagtcgcctggaattt

SEQ ID NO: 339880 - DNA, 138 bp, Zea mays
gtttggtttcgttcccctgcaatgtaatcatgtcgtgactctcaagggattattccgctctgctcttatggtctctgttttctatttaatgattgttattaccaaaaaaaaaaaaaaaaaaaaaaaaagggcggccgc

SEQ ID NO: 339881 - DNA, 342 bp, Zea mays
tcgacccacgctttcgtgcatcttaccgctcatcgcccccgtcgggggcttctttatacttctcggggggtcccacaactactccaaccaaactatacacaaggagctcaactaatggaacaaatgctggaatatgctcacggacagacttgatgagaagaattcaggattcctccacatactgacgtccggtttctgcacaagagaccgacgcattccaccacaaggctgtgccaaatataccgagtacactgacggaaacatccgaattgcgctcaaatccaatatattttagcacccagaagattattgcttatttttttttcacaagcattatccccc

SEQ ID NO: 339882 - DNA, 238 bp, Zea mays
tcgacctggaccgcccgcgccgctactttcggttcgtctactccaacgacgtcgtgccgcgggtgccctacgacgacgccgcgctcctgttcaagcacttcggcctgtgcctctacttcgacagcttctacagggcggcggcgattgctgaggagcccaacaagaactttttctcgccgctcttcttggcgcccatgtacgccaacgcggcctgggtgctgtttcgcggcttcctcat

SEQ ID NO: 339883 - DNA, 272 bp, Zea mays
tcttctcgctggtgtcccctctctctcacccatggcttcttcggcggcggggactgaggtagttacttacttcctgcggaactactacaaccttctgcaacaaaccccctatttcgtccaccatttctacagctaatccagcaccattgtccgcttctaccacctcactttcacgaccgtagcttccaacaacatgatttacatacactcactcatcatgtttttgaactttacccaaattgagatctttactgccaattccttttactcat

SEQ ID NO: 339884 - DNA, 405 bp, Zea mays
gtataaaaccccaccccatctgcgtcgaggggtttcctcgaagcctcggatcggcgccgagaaagcatctccagggggatttttgggaagaagtagtggttgagccatgggcaaccttcacgccaaaggtgctggtacgggcgccaaaggtgctggagcagcaaacacttccatctcgaattctggggactcgatgtccaatgccgctacaccttctcccgtagagcaggcaaccttcaagtgggtcattgatggcttttcctccctgcttgacaaggatcaaggatggacatactccaacgtatttgagctcatgggtgtagaatggtatctgaaactgaatccaaagttcgaagtcagtaatgaggagtgtgtttctctcatgcttgaactgtcgcagagttc

SEQ ID NO: 339885 - DNA, 240 bp, Zea mays
tttttatttttaacaactatattattcaaattcttggggattactatcagaaagagaagggagacttcttccatactctaatcctgctttctacattacccaagagaaacactaatctctcgaccagtgtgtagattcatccttcttcaatgccaccatcaacttccattctttatgctccatcatgccttccttctgctgatatcattcctttacctaacaatactattatacacaaaa

SEQ ID NO: 339886 - DNA, 252 bp, Zea mays
tttctctttcccctgtacccgcgtggtcttcggtcttgccaagtttcacgtgggggctcgcttccccccaaaacttttttcgtttgcagatcggctcatttttgttctgcaattgctttttcattcttatataatatctatttattttttcatttctttagttattattctttagtttttttattctttaacttgttttctatttcattattatttttataatctttattcattttctttatactttatttt

SEQ ID NO: 339887 - DNA, 208 bp, Zea mays
  unsure (1)..(208): unsure at all n locations
tcgacccacgcttttctttctaggtcgtcgccaaccccnacatggtagagcttattatgcaggtgggcggcgtctgctaggctcctttccaggctgccctctccggggagctgctgtcgcgcggtacaacatccggtgtccctcgcgaggtcttcttctttgtggtcgacggtcaaagttacaagtttcttgtcgcagcctctcttgt

SEQ ID NO: 339888 - DNA, 125 bp, Zea mays
  unsure (1)..(125): unsure at all n locations
tcgactctcacgcgtccggacatttcaccacctgtagcccacctcgctgtcgagtctcaacccagcgacggaatggcctcatttntatcttaccccaaggacgcccaagaaggcctacttcttct

SEQ ID NO: 339889 - DNA, 181 bp, Zea mays
gttacttgaaagagaggatactggaattcagagcagttgggaagttaagagagacttcacaaggcatgatcatatgtctttctgggccaccaggagttgtgaaaactagtattggtcgttcaattgcacgtgcactgtaccgccatttctacaggttttttgttggagttttggctgatgt

SEQ ID NO: 339890 - DNA, 112 bp, Zea mays
ctgacgcgtgggctcgcctcgagatcttagcgagcagctccggagagcgccagcgagccccctgatccctcctcgccgccgccgccaaccgaccgggggaggagaggagggg

SEQ ID NO: 339891 - DNA, 318 bp, Zea mays
gtgcgctcggtgcagctgctcaagattgacggctacagcgccaccgctgccatgagcgagttggatttcatcaaatccagaaggaacctcgctggccacgagtgggaggtccttttctatcctcagttcagccgttacggtggctgcatagctttgaagctcgtccttgtcagtgaacccccgagggacatggacaagctgttgagggcgagcctgagatgccgccttggttgccctagccagccgcattttcatgcctccatagagaagagcgtgttccatgtatttaccagtgacttttagatgctcgtctgttgt

SEQ ID NO: 339892 - DNA, 435 bp, Zea mays
tctagcagcaagaccagctgccatggcaccctgaaaaatctcgcagccgagctcctcttccggtcgccgctcctccctgcgagctccctgttcctgtcttcctcacggctgcgcgcaggagtttcctcccagccatggccgccagcccccggcgagctcgggttcttctccctggccgccctgctccctgtccacggcgcccaggaattccagcagcagcagggagtcgtgctcccctccatggcgagcagcaagccggcgccctctccatttttcccctgctccatggcgccccctgctcctccctcggcgcgctgaagcttcccccatggcagcgagcttgcagttgccgatggccagcgccctgcacattgtccgatcccctcttcttcccaaacagcgggcgacgttcatcttcctgcttccagatgggct

SEQ ID NO: 339893 - DNA, 287 bp, Zea mays
gcggatcgagatggcggcgtcggatgttgaggaccgctgcttcgtcggcgggctcgcctgggccacggacgaccactccctccacaacgccttcagcacctacggcgaggtcctcgagtccaagatcatcctcgatcgggagacgcagaggtcccgcggcttcggcttcgtcaccttctccacggaggaggcgatgcggaacgccatcgagggcatgaacggcaaggagctggacggtcgtaacatcaccgtcaacgaggcccagtcccgcggcggccgtggaggcg

SEQ ID NO: 339894 - DNA, 310 bp, Zea mays
cttgggatgcattttacaaagctgttgacccaagtgggattgaggagggccttcaaagtctgcgtgtaggtggtgtgccaccaaggtttctgattatagatgagggtttgcaagaaactggtgactaaatcaaggaagtgttttaagccctccttgtgcatactgtgtttgtgcttaggctggcttttcttaaagtgtttcattatttcattggttatatctatgtgtttcttttaatccttgttttttcttttatatatttttatgtgtattacttcgttatgcatcttgttttatttttttttttatt

SEQ ID NO: 339895 - DNA, 302 bp, Zea mays
ttatttaaaaaaaaaaataaaaaaagagatagggaaaaaaaaaaaaagaagaagaataaaataaaataaatatataatattataaattaaaatataataaaataaataaataaaaggggcgtccccccctggatttccggcccgttcccttttgttttcccaatttcccctattggtagtcttttttatacctcgtgctaacatagtctttttcttttccctgggttaaattattatcccttaacttttcccttcacctctcttcccgattccttatactttattcttctgttgtcccttat

SEQ ID NO: 339896 - DNA, 189 bp, Zea mays
tgttgttgtgtggctgcgcagcgagctgcttgagcagcggcgtctctaggtagtcgtgtggcgtcccttccctacgagccccaccagctgtggtgggaccgtctggcgccgcgggccttggcaccgtcctccgtcgccaaccgcggcataggcttcgtggtggtcctccagatggcgctccatgggctc

SEQ ID NO: 339897 - DNA, 392 bp, Zea mays
gctctcattggaccccaggaagcaatcgcgctgatcggggccgccgcctagcggtgccgtgcgggttagggcgcgaggctggcgctagctcgagctcgcggctgccgcaaggtgctggaaatgtgaggagtatgtcctcgatacgatttggatatgttagaagccagctcctctgttctggcaccatttgctaggattttgttatggtgtttattaggcagccatgaaaagtctgatatgcttcgaacagaagatggacatcaggcaatgggaaatgggtgcaactgcaaggagaacagattaacattacattagtggtcagcgacatgatccatttaacaccactcaaggtccacataagtccttagcggccatgggtgtttcgcagcgga

SEQ ID NO: 339898 - DNA, 336 bp, Zea mays
tcgttcgagtcacgataggaggaagactggaagaggaggctagcacgtttgcggtgcccaccctcaccgtccactccaaaaccccaaatccagttccgttccaatcgccgagaagggcagctaaggggagaaaaaaaaggaaaacgattgcggctgccgtcggctagaacagcggctcggtctagggcgagtgctagttttacctgcgctactactttggtcacatgggctagttcggtcacgagttcctcgagttcgagttccttcctgtcgtcatgcttcgttactcctacattcttaactacatgatctacaccattatccgcatggaggttt

SEQ ID NO: 339899 - DNA, 282 bp, Zea mays
tcttacacggtctccctcttcctgtcagtagtagagtgagagtgaggcggcgagtgggatacatggggaaatgggtaagggagctcatgggagcgatgctatcttctttttactttctatggttattttttcttttcgttttttttttttttctttttctctattaatttctatttctttattttttattttttctctttttttttttttttatttttccttttttataacttattctatttacttattttcatttctcatgcattattttacttttttttt

SEQ ID NO: 339900 - DNA, 224 bp, Zea mays
tgggggaaaaagatgctcgccagaaccatcggaggcgccgtccgaacccgcctggcgccgtcccttgcgagccttctctgccgcggctacgcgtcccccgccttctccgtcgacgaccttgtcatcgacgaggacccgccgcgcgccgtctcgacgtccgttgccgccaccaccgtggcggtcaccgtgccgaccctcctgcattcgcgcgtgctcatttacga

SEQ ID NO: 339901 - DNA, 128 bp, Zea mays
tcctacttgcgttgtgtggcctgttttgtattggtttcctattttgtattcgtttttatttatttttttgttttcttttttaatttatttctatatttttgttcattatgtattataatttttatttt

SEQ ID NO: 339902 - DNA, 142 bp, Zea mays
aaaataaaaaaataattaatatgagatgttattaataaaaaaaggggtaaggaactaaaaaaattaatttattaataaaatggtctgttttccccagtttttcttttccgttacctttatttcttcctatttttcccaattt

SEQ ID NO: 339903 - DNA, 151 bp, Zea mays
tctcataaagtcgccggtgccgcctaccaccgggtacaccgagggcttggtgttgtgggagcccccaaggacggacacggagcccctgttgccgcggtggcggagcgagatcttggccgccagcaggttgtggagcccgtctaagctcgtc

SEQ ID NO: 339904 - DNA, 233 bp, Zea mays
tgcaaatctcacgcacagaaacaccaaagccggaaaggcccaaactcaccacggcccaatggagaacggcgactaaaccctcgcctcccccacggccgccgccgagacggacgcgctcaacggcggtgtcgcggaggaggagcaggtccccatcacccaccccgcaaagtcctacgtcacgctcgccgacgacaaccccgctcctaacggcggcgtcgtgaaagaggaggagg

SEQ ID NO: 339905 - DNA, 161 bp, Zea mays
gtttcttcccattagccaggggtaaaacgggaaagacggagaacgaagaggaggggggcgacgtctccggcggtcggaggcgacggggatgagtcggaaggaggcggagccggcaggacaggatgggtcttcttcgtcggccactgatgggggaggaggaa

SEQ ID NO: 339906 - DNA, 98 bp, Zea mays
tcgacccacgcattcgtttgagttgtcctcccgctacttttcgacgggggcttccagaggttctacggggttctatatcgagtcttatcagatctaga

SEQ ID NO: 339907 - DNA, 153 bp, Zea mays
ttaaaatatgtattaactttaaaaaaaaaggggaagttttaaaattaaaagggggatatataaaataataatatatttaatttatattattatttgataatattttatattttatatttttaaataaaaaattaaaaaaattggggcgccccc

SEQ ID NO: 339908 - DNA, 322 bp, Zea mays
tcgacgacgaagacgacgcctgcggctgatgatgatcccggcaggtcggcgctggccaccagtcaaccggcgttcgcaatcgcgttattgtgttcctggtggtttatgcgagcgttttgcgttcgcgtaatttttcattctttccttttttttccttctccgatttcgaagtctctttggaaggtggatcgatgcgttgcgtacgttactgctctgctctgttcatctgtgtaacgcgcgatcagcatgccggcatggttttagttgaactctgtgaactattcttttgcctcaaaaaaaaaaaaaaaaaaagggcggccgc

SEQ ID NO: 339909 - DNA, 304 bp, Zea mays
  unsure (1)..(304): unsure at all n locations
aaaaaaaaaaanaaaaaaannnagaaaaaaaaattaaaaatttaaaaaaaaaaaaaaaagggagaggaaaaaaaaaaaagagagaaaaaaaaaaaaataaaaaaaataaaaaaaaaaaaaaaaataaaaataaaataaaaaaaaaaaaaattttaaaaaaaaataaannaaaaaaaaaatataataataaaattnaaatttaaaaaaaaattaaatttatttaaaaaaaaaaaaaaatttataaataaaaaaaaattaaaaaaaaaaaaaaaaaaaaaaaaaaatttataaaatgnnntttttt

SEQ ID NO: 339910 - DNA, 192 bp, Zea mays
tatctgatccagctcccctctcgtggggacgggagctataaggagggcacagagctctcatcaggctttttggctcggcccatggctctcgccacgagggacccaacgcgctatcctgtgtagctgctgctcctagtcatatgcgccgtccgttatcttggatactgatgtaaacgctgtcagcgctaatcc

SEQ ID NO: 339911 - DNA, 345 bp, Zea mays
tcgacccatcttctttcgagccggaaggaattaggggcagggtggaattctgtagaggcggcgccctctttatgcacgcatggaggacctgatcgtggaggagctcgtctccaacctttttacctacaaagagcagctactcgaggtcaagaagcttatcaaggagaaaaaggatgatgcttgaatttctgaatatattgatatggagaaggagctttcaagaggtcataacgttaaccgaagagattttggtatctgcaaagcatactgagagtgcccataatgttgcatgtctatcaccgactagcttttcatcttgtagtgcagtctgagggactggatgac

SEQ ID NO: 339912 - DNA, 55 bp, Zea mays
ggtgacctgcaggctaaccacgtttccctatagcgaaacgtattagagcccggcc

SEQ ID NO: 339913 - DNA, 247 bp, Zea mays
gtccggttctcctgctctatggatctgcggggcacgggctccatcaaaagcgacctggtccgccgaaactacatgcactggaagcacgcactaaaggggatcgcgttgatgaatatacacacaatgatggtggcgctcatcattcactatggggtatttattgtggcacttacaacggactctacgaggataaacagtcgtacataataactgggcgaaaactccaacaatggcaggcgatctatac

SEQ ID NO: 339914 - DNA, 99 bp, Zea mays
  unsure (1)..(99): unsure at all n locations
tcgaccagttctactttttacagcggccgcccctncaatggcggaggggtacctgcaggcgtgccagctttccctataatgagtcgtattaaagctcgg

SEQ ID NO: 339915 - DNA, 360 bp, Zea mays
gttggcttctcctccccctccggttcgggtgcgggtgtcgtgaggttctccggggttcggtttcgtgggtgagcggatcgagatggcggcgtcggatgttgagtaccgctgcttcgtcggcggcctcgcctgggccacggacgaccactccctccacaacgccttcagcacctacggcgaggtcctcgagtccaagatcatcctcgatcgggagacgcagaggtcccgcggcttcggcttcgtcaccttctccacggaggaggcgatgcggaacgccatcgagggcatgaacggcaaggagctggacggccgcaacatcaccgtcaactaggcccagtcccgcggcggtcgttgaggcgg

SEQ ID NO: 339916 - DNA, 305 bp, Zea mays
tttatatttttcccacagaactcatctctcgagcacagttgtaatttatagatagactggcgaaaaactactagaaatcattatacttcataaacaaacattttgtactctgttctaagttacttagtcacattatcaaacatctttttgacaaaaattacttattatcttatatataatttctaaactttaactataatttaattattatttcatcacaattcctattaatcaaacacaactatgtctttctcaaattcttaaattctgaattttctttttatattataattgtttattcaaat

SEQ ID NO: 339917 - DNA, 270 bp, Zea mays
aaaaaaaaaaatataaataatataaaagaaaaaaagggagggaaaaaaagggaagaaaaaaaaaaaaaaaaaaaaaaaaaaaagaaaataaaaaaataaaaaaaaaaaaaaaaaaaaaaaaaaaaaaaaaaaaaaaaaaaaaaaaaaaaaaaaaaaaaaaaaaaaaaaaaaaaaaaaaaaataaaaaaaaaaaagaaaaaaaaaaaaaaaaaaaaaaataaaaaaaaaaaaaaataaaaaaaatataagaaaaaaaaaaaaaaaaaaaaa

SEQ ID NO: 339918 - DNA, 335 bp, Zea mays
  unsure (1)..(335): unsure at all n locations
ttctgttccgagatggacgacnagagcgaggcgagagcaatgccgcggcggcccacgccgccgtcgccacccccgtgggaggcgctccacctcgtcgcgccgttcctcgacgccgcatccctcgcggcggcgtcctgcgtgtccacctcgtggcacaccgccttcgccgcggacgacctctgggcgcggctctgcgcgcagcacttcccctccgcgctgggcctcctccccgacaccgacagcgaccggcggtgctcctcatcaccccaccgacgcctgttcaagctgttccgctccgcgtccgtccgctgtcgcgcgcttccggccccgcgcct

SEQ ID NO: 339919 - DNA, 181 bp, Zea mays
tttttattagcattcgggacatgtttggtgtgatgacgcggtgatgagccttaccaaattttggctcttccgaaccctgtgtgatgcgaagatgttggcaagttctagattttggtttcttgccaatttgccatgccaacttgtgggcaatcacagaagcggtagactcatgtaagtttgc

SEQ ID NO: 339920 - DNA, 405 bp, Zea mays
aaaaaaaaaaaaaaaaagggaaataggtggaaaataaaaaagggaaaagagagaaaaaaaaataaaaaaaaataaataaaaaagaaaataaaatgaaatatataaaaaaataaataaataaaaaaaaaaaaaataaaatataaaaaataaaaaaaaaaataataataaaaaaaataaaaaaaaaaaacaaaaaaaaaaaaaaaaaaaaaaaaaaaattaaaaataaaaataaaaaaaaaaaaatagaaaaaaataaaaaaaaaaaaaataataaaaatgataaaaaataaaaataaaaataaaaaaaataaaaaaaaaaaaataaaataaaataaaaaataataaaataaaaattaaaaaaaaaaaaaaaagaaaataaaataaaaaaaataaaaataaaaaaaa

SEQ ID NO: 339921 - DNA, 288 bp, Zea mays
ctcaaccaactcattgaacatctcaataagcttctcaacgatcatagtgttgaaaatctatctaaagaacctcacgttgaaagagagctgattcttataaagctaaacttataacctgatcagcacccttaggatcatggttttagttgacattttcacagcaaaagaagttgatatatctgagaaaacacttaccatagaggtagctgcagatccatgcaaaatagctgcattgcacatgaaattaacgaaaatcgttatcaaataaattagcataacatgaaaaat

SEQ ID NO: 339922 - DNA, 351 bp, Zea mays
  unsure (1)..(351): unsure at all n locations
gtgttgannttcctcgaggtcttcaacctggtgggcttccgtttgggcagcttcaatttttaaaactaagatgtcacaatagccaaggaagtganggtacaaactgcacggtctattacaaacctcctgctgataagaaatggcacttcaaaggtcgccttcctccaaagaagacgcagncccttcaaaggtcaacctccnaacctaagagtgcttcacnnggtccccaacgtccaaggggagtccaaagagacccgcagcacttcaaagggtctcctcctaaggggacgtggtagatcaaaggtcaaggggattaggagtcggtcccaggagccccagatgatagaaatc

SEQ ID NO: 339923 - DNA, 263 bp, Zea mays
  unsure (1)..(263): unsure at all n locations
cctctcaccatcggcgcgctactatagataattgtctggtgcctacaaaaacaccaccttntnttnattcctccattcttcacctnttgcttccttttacatcttcatttttaactaacatttttttttctttctaattcattacacttcaccctctattactccttctacttatataaatcctccttcaataactccttcttcatatattctcatccctttaatttcaccttcacctactattactttactttcctccactt

SEQ ID NO: 339924 - DNA, 152 bp, Zea mays
tcgttccacgcttccgtgatacccaaccaacataacccccctgacgtctatttatacaacctggtgtgctctacaccacccccattccttacaccctctacactcctccaacataagaaccctaatcttccctccctccgactcccccacct

SEQ ID NO: 339925 - DNA, 71 bp, Zea mays
  unsure (1)..(71): unsure at all n locations
gcctctgaaagttcggagccgccggcccgtccggggncctatccgactcccgtgcgcaaggccaatagttt

SEQ ID NO: 339926 - DNA, 299 bp, Zea mays
atttgttctctcttttctctagacaaataagcttgttggtttagaaggtgcaactaaatatacttttgaaattgctctgttttgtgacctgccttgtctcaatcatactattgttgtgtctgccgaatactattgggatattgataaatcaaattttctatcctgaatgtacagtatgctagctgcagtgccttttgttctgtgcccggtagatgcggtcaatgcaagattgtatttatcagtcatcatctgtggaagtttgtatgcttgcacttgggacacaatttcttcatttgctt

SEQ ID NO: 339927 - DNA, 125 bp, Zea mays
tcttctggttagtagctcttgctctagccttgggtggctaacattcaggggactgggcaccttccttctactctcctcctccctgcccagttcttaataaccccacctcagatttattagttcct

SEQ ID NO: 339928 - DNA, 314 bp, Zea mays
gtcttctcgtcttccccggctcaggcaacctccagctgcagcggcggcgatgggggtgaagaacctctgggacatacttgactcctgcaagaagaagctcccgctccagcacctccagaacaagaaggtgtgcgcggatctttcctgctggctcgcgcagttctgcagagccaaccgctccccggccttcctcagggacaaggtgtaccttaagaacctcttccaccgcattcgagccctcatcgccctcaactgcagcctcattttcgtctcagatggggcgatttcttcagtcaaattggcttcttataggc

SEQ ID NO: 339929 - DNA, 93 bp, Zea mays
  unsure (1)..(93): unsure at all n locations
gcgcagatcatcgatggcaaggccatcgccgccgacgtccgccgcgaggtcgccnccnatgtggccttgctttcgtagtccacggctcgtgcc

SEQ ID NO: 339930 - DNA, 351 bp, Zea mays
tagagagaaggaaaaatatccccaaaccctagctgccgatctcgatggcgagccctcgcgtcttcttcgacatgaccgtcggcggcgccccggcgggccggatcgtgatggagctgtacgccaacgaggtgcccaagaccgcggagaacttccgcgcgctgtgcacgggcgagaagggcgtgggcaagtccgggaagccgctccactacaagggctccaccttccaccgcgtcatccccgagttcatgtgccagggcggcgacttcacccgcggcaacggcaccggcggcgagtccatctacggcgagaagttccccgacgagaagttcgggcgcaagcacaccgtccccg

SEQ ID NO: 339931 - DNA, 61 bp, Zea mays
cgtacataaacttccatcctctataatctacccactctttcttttcaacaccatcaccacc

SEQ ID NO: 339932 - DNA, 176 bp, Zea mays
tctacccacgctttctttttcaataaaactaaaaaattctcctgggtgacctcatcactccgtgaggggggtcgacccctactttcctaactccaatagcttttcaattttcttataatattccatctatttattaaattctcatctgtccctatattatttcatttatatactat

SEQ ID NO: 339933 - DNA, 95 bp, Zea mays
tttttcagttaatctgacagatgagatccaaggtgagtcctattacaggcttactagtgctctttagaaatgcataaagctgagatgtttgtctg

SEQ ID NO: 339934 - DNA, 65 bp, Zea mays
ttttctaggaattctagtcaatatgagatccaagggtggggcctatctgaggatgagaggggctt

SEQ ID NO: 339935 - DNA, 126 bp, Zea mays
tcgacccacgcattcgttttttttgaccggcccaggaatagcctaacgtgggctttatgcatactagcgggggctataataattattataagatcttcggggattgattttcataactttttcatg

SEQ ID NO: 339936 - DNA, 395 bp, Zea mays
ttcggagatctccgccgccatggagacgctggccagcgccatgcggcgcgagaaccgccggtccaaggccccgccctcctcctctgcttcctccgccctcgcctcgggcagggtccctctcgtcatggccttcctctcctgcctcgcctggctctacgtcgtcttccgttagtggcatgtcgctcttactcttttgtttcttttctttcttcttattgttattcttttcttgtttcaaattgttactttttcattctttaattatatattttattcgtttgttagttgtcttctttattttttattttatattttattttctttaactctttttcattctttttcttctttacttatcttatattctttacatatttttttatttaatatttatt

SEQ ID NO: 339937 - DNA, 347 bp, Zea mays
tttccggcgacgccgcctttgaccgcccgcgcagcgtctccgtcgatgcgggggtcaacttatacttcaccgaccttttctatggtgtcgttcttatgttttagttacttctttacacttttacaattttttgtatgttttctattttttaattaattatattaattcttttcttatttttttttttattcttttttttattaatatttattattttttattaatcttatttttttttttttatatattttttttttatttttttatttttttattagtgttatattattttttttcttttatttaaattatctttatttattttcatattttatttatttattttt

SEQ ID NO: 339938 - DNA, 415 bp, Zea mays
  unsure (1)..(415): unsure at all n locations
attagctttatctactccagagcgcagaagaacccgatcgacaccatgagggtgttgctcgttgccctcgctctcctggctctcgctgcgagcgccacctccacgcatacaagcggcggctgcggctgccagccaccgccgccggttcatctaccgccgccggtgcatctgccacctncggttcacctgccacctccggtgcatctcccaccgccggtccacctgccgncgccggtccacctgccaccgtcggtccatgtgccgtcgccggttcatctgccgccgccaccatgccactaccctactcaaccgtcccggcctcagcctcatccncagccacacccatgcccgtgccaacagccgcattcaagcccgtgccagctgcagggaaccttgcgcgttgcagcaccccgat

SEQ ID NO: 339939 - DNA, 508 bp, Zea mays
catgtttagacaggatgccggctggccacggcctgcgctcgcggacacgcgaggtgttttccccccccttccttatgaaggtctactttccgttcaccacctacctctgcacctacaatatcggctattacttctgatttaaaggtttatctgttcctttccacaattaatatttctcatacatttttttatatacttttcttctcctaatctcattttttcaaatctttacctatatactcgtactttttattttttacaatttcttaatatatttttaacaattaataacttcttatttttttatattatattatggtgtctgttcgttagtttagttatctttcttaatttacttatttattttatctttcatttttttattaactatttttatttttattattgttttatttttatttattttcttttcttttttttactttatttatttttattttattatatttcatttattttttttaattttcgttttatttttttatct

SEQ ID NO: 339940 - DNA, 313 bp, Zea mays
cgcagcatctcaaccccatggccaagatcaagatcgggatcaatgggttcggcaggatcggaaggctggtggccagggtggccctgcagagtgacgatgtcgagctcgtcgccgtgaacgaccccttcatcagcaccgactacatgacctacatgttcaagtacgacactgtgcacggacagtggaagcaccatgaagtcaaggtgaaggactccaaaacccttctctttggtgagaaggaggttgctgtgtttggctgcaggaaccctgaggagatccccgggggttcggttggtgctgaatatgttggtga

SEQ ID NO: 339941 - DNA, 137 bp, Zea mays
tttattatatcaacccgacggccaacatcaaggtgggaatcaatgtgttcgggggggacttaaggcatgtgctcaatgaggatctgcattgtgactacttattgctcgattttgtgaacgactattttatatgtttt

SEQ ID NO: 339942 - DNA, 181 bp, Zea mays
tacgaattccagctgacccactccaactgcggaaaatcccacgaaagatgggggacgcggcaacacggaagaagaggacctcgacagaccgtgcgacgacttcatccttcgttctcggcctgcgatccgttttgcatctccaccacatacaccggctaacgggcgcgtggacacctgtttg

SEQ ID NO: 339943 - DNA, 129 bp, Zea mays
tcgacccacttctttttgtctcccgcaagcaccgatttagtgtactgggctctccgacgcgcggggggggaactccctactacatctgaaccatgttcggcggctcgatccttgacaaccttctcgagc

SEQ ID NO: 339944 - DNA, 269 bp, Zea mays
tcacccaccgtcttattatatccggtcagcctttcaggcgctcaccccgcgtgggaccccgacccgcccccgctgtctgttggtcccctttgccgcgtgtgcgttggccggtggttccgatgagggggttgctgcgtggagccgtgccggcgtctctcgctcgccttggctaacggggccgggactggtgccgcataacagttctccttggcaggaccgatttcacacctccctgctttactgattttccccgtgcgctgtcaattatc

SEQ ID NO: 339945 - DNA, 92 bp, Zea mays
cgactgcgcaaccggcaccaaccttcgccaggttttcgtgggctctttcaccgatacaaccatcctccaggctacttatattcggatctaac

SEQ ID NO: 339946 - DNA, 404 bp, Zea mays
  unsure (1)..(404): unsure at all n locations
tcgcagaagaacccgatcgacaccatgagggtgttgctcgttgccctcgctctcctggctctcgctgcgagcgccacctccacgcatacaagcggcggctgcggctgccagccaccgccgccggttcatctaccgccgccggtgcatctgccacctccggttcacctgccacctccggtgcatctnccaccgccggtccacctgccgtcgccggtccacctgccaccgccggtccatgtgccgccgccggttcatctgccgccgccaccatgccactaccctactcaaccgccccggcctcagccttattcccagccacacccatgcccgtgccaacagccgcatccaagcccgtgccagctgcagggaacctgcggcgttggctgctccccgatcctgggcca

SEQ ID NO: 339947 - DNA, 406 bp, Zea mays
aaaaaaaaaaggaggggagaaaatataaaaaaagaggaggagggaaaataaatttttaataaaaaataaaataaaagaattaaaaaataaatatgtaaagtaaaaaaaaaaaataaaaaaaaaaaaagaaaaagggataaaaaaaaaaaaaaaaaatacaaaaaaaaaataaaaagaaaaggaaaaaaaaaaaaaataaaaaaaaaataaaataaaaaaaaagaaaaaaaaaaataaaaaaaaaaaaaaagaaaaaaaaaaaaaaaaaaaagaaagataaaaaaaaaaaaaaaaaaaaaaaaaataaaagaaaaaaataaaaaataaaagaaaaaaaaaaaaaaaaaaaaaaataaaaaaaaaaaaaataaaaaaaataaattaaaaaaaataaaagaaaagaaaa

SEQ ID NO: 339948 - DNA, 173 bp, Zea mays
gggttgggaatcttttagaagggagaggggggcccccccaaagtcaaggaggccaaaaaaatccaaggggggcctaacaaacccccttggaaaaaagtgccggtttatagccaccagggccacaccatctgcgacccccaaaaaattgttggggcgccaaccgggaccccccc

SEQ ID NO: 339949 - DNA, 264 bp, Zea mays
ttttcttgtttcacagagtgaaaacttatcggggtggcgtctgccattgccggtggcaggcatggtctgggcctaattccacccgttgagcactatcatcctccttgaaacctacagatctgtggcctccaaggccctcgttaataggcaacaagccggtcatatggacaccgtcgcgcccctgcaactgatagcctgcgccggcgacgccgtcaataagctgctgttcgaaccagcaggcgcaggacctatctgtgaattgcc

SEQ ID NO: 339950 - DNA, 57 bp, Zea mays
  unsure (1)..(57): unsure at all n locations
aaaaaaaaaaaaagaantaaaaaaaaggagaaggattaaaaaataaaaaggaagaag

SEQ ID NO: 339951 - DNA, 337 bp, Zea mays
  unsure (1)..(337): unsure at all n locations
aaaaaaaaanaaataagaaaagttttaataaaaagagaagggaaataataaaaataaaaaattantaataaaaaaaaaaaataaaaaaaaataatataaaataaaaaaaataaagaaaataaaaaaaaaaaaaaataaataataataaaaaaaaaaaaaaaaaaaatataaaaaaaataaaaaaaaaaaataaaaaaaaaaaaaaaaaaaaataaaaaataaaaaaaaaaaaatataaaaaggtaaaaataaaaatataaaaaaaaaaataaaaaaaaataaaataataaaaaaataaaaaaatattaaataaaaataaataaaaatataatataat

SEQ ID NO: 339952 - DNA, 115 bp, Zea mays
ttgttttctaccttgccatgcacaaattcagactgcttccatctggtgcctgggggatcaacgacaccataacaatggtatgttaggagatccacatcctgactgtgcactatct

SEQ ID NO: 339953 - DNA, 400 bp, Zea mays
ggcgaaagcaccccacaagagttccttgacttccttgccaagtttcagaggacatctaggaacttcgcaaagaggcaacttacctggttccgcaatgagaagatttaccactgggtcgatggctcgaaaccatttgaggcgcttgttcaatttgtctgtgatgcttaccatggctgcagtgcaaggatggttcctgaatcacttgaaatgaaaagggaaaattgcgtgctcaaaagccgtgatctcaaaacctatcgctcaatgaacagggtgtttcttgggggtgatgactgctctcacgttttgaattggatcaggagaacacagagcaaatgaaatctagatctactctcttatcatgtttttttttcaaacatggaaattgtctagctttttggtg

SEQ ID NO: 339954 - DNA, 157 bp, Zea mays
  unsure (1)..(157): unsure at all n locations
tttcatagccgcggaaaccctacccacccgggccgctcacgcaccgggcgcgcgcagcctcctgtcgcgtgcctgccttctacaccgcccaaagcgattggatctcgagatcgtntggtgccacgtttgatgactgggattctgaagattttcagcc

SEQ ID NO: 339955 - DNA, 125 bp, Zea mays
ttttgttttttatgtcaaagttgaagatagcgtgaatcttgacttagctgggggaattgagatgctcgatatgccgtcaaggtagccaaggattgtacaatggtttgtatgtaatcaggtatggt

SEQ ID NO: 339956 - DNA, 80 bp, Zea mays
  unsure (1)..(80): unsure at all n locations
gcggccgccctttttttttttttttttttttttttnnaaatttatttttttttatttttttttttttttttatttttttt

SEQ ID NO: 339957 - DNA, 302 bp, Zea mays
gcggccgcccttttttttttttttttttactaaaatcctgccttcgtattagatggataattggcataaatagtacgaattctctgcttccattaaagaaatctgaaatattgtcagcttctccctgccaacacccccattgcgcgcctgaaattcagccactagaagcataaaaacaccagttcatcgcatgacgcagtccttaaccaatgtctgtcctcctgtgaagcactctagatgaatattcagaaaacgtgggttctcctcgctttgggacactgttacagaaccttctataattt

SEQ ID NO: 339958 - DNA, 391 bp, Zea mays
gcggccgccctttttttttttttttttttttaaatgaagtgatcctggaattcagataaactttagggagttcaataggcgttacagatttttcaaggaataacactgccaccaccccacgctttgtccaggatattacagatgcagtaatgccaggctaggaatcaaaggtcacaacattttactgcctggtgacacaaatactaccaatctgtagaagatgaagctcattatctgaactgaaattacttataacctgaaatcactgataaaggtgcaagtgcaacagtattggacacatggacactgcagctattttggtcagcactcattttacaaacaaacaattacttgcgactgtattttcaagtgaaagaaatttcgaaaatag

SEQ ID NO: 339959 - DNA, 258 bp, Zea mays
gcggccgccctttttttttttttttttttttttatttatttttttttattttttttttatttttttttattttatattttttttttttagaaaaaacaacgaaaacatccatatattttttcaattaccccttaacaattcatgggaataaacaacccttaaaccaataggtgttgaaacccctccccaattttacttacactaccctttatacgtacataaaaccattttttggacgcaatgggattaagggcaaca

SEQ ID NO: 339960 - DNA, 91 bp, Zea mays
  unsure (1)..(91): unsure at all n locations
aaatccaaaaattccaaaacagaccaccctttttttttttttttttttttnttttttttttttatttttnttttttaaaaaaatattaatt

SEQ ID NO: 339961 - DNA, 101 bp, Zea mays
gcggccggccttttttttttttttttttttattacatgtaatttcatcagtggcaatttctgtttgtatacttatacaaaggggaactttttaattaagac

SEQ ID NO: 339962 - DNA, 79 bp, Zea mays
gcggccgcccttttttttttttttttttttaatttaattttattaaatttaaattaaatttttttggaacaacatatca

SEQ ID NO: 339963 - DNA, 284 bp, Zea mays
aggagcagagccagccctttttttttttttttttttttttttttttttttttttttttttttttttattttttttttataaaataattttttttatattttataattattttatattttatatatttatatattttatataattttaaaaaaaaaaaataaaaaaataataataataaatataaataaaaaaatttaataaatataaataaataaataattaaatataaaatttttaataaaaatataaaaaaataaaaaaaaattaattttttataaaaataa

SEQ ID NO: 339964 - DNA, 114 bp, Zea mays
gcggccgcgccttttttttttttttttttttttttttggaaactaaactaaacggatgaaagtgtttgtgtacctaggtaaccttttttataagagaaaaaatgtgagaaatat

SEQ ID NO: 339965 - DNA, 341 bp, Zea mays
gcggccgccctttttttttttttttttttttagccaataatgattcattcattcagtaggagaaaggagatgagatctcatacatagttgattcagagtacagacataagacatgatcagaaatttataatgcaacatcctatgaccaggccctttttttgagtcagtcacccccaatttcttgcgctagcaggctgacaaatgttggtacactagccacacatgggctagttgtttaacgctaacaccactcttgaagtttgatgaccgaaattcatttttaccctgccttctttttatttttgggttcggcctaaatccatcagtaattttttatttat

SEQ ID NO: 339966 - DNA, 184 bp, Zea mays
gcggccgccctttttttttttttttttttttttttattttttttttttttttttttaattttttttttatatttatttttttttttttatttggaaacacaaaaaaaattttacaaatctttgtaatttatttaaaaacaacaccttttgattaaaaaatcccaccctcttacctgctattaaa

SEQ ID NO: 339967 - DNA, 129 bp, Zea mays
agcgagccagcccttttttttttttttttttttttttttttttttttttttttttttttttttatttttttttatttttttttttattttttaaaaaaaaacatcttaaatatttaacctaaaaatttt

SEQ ID NO: 339968 - DNA, 178 bp, Zea mays
gcggccgccctttttttttttttttttttttttttttggactagagcttaatttttttactaacaaaaggtggttatgccgtctgcatatatctgatacccatgtgaacctggtaaacattcacgcaacggtgtgctcattaggatacaaaaacatttgccgggcaattcattaatat

SEQ ID NO: 339969 - DNA, 274 bp, Zea mays
gcggccgccctttttttttttttttttttttttatattatttatagtggaccctaatattttttcattattgaaaggttgtttatagattctaattgtacactttacaggttcaaaatttcctgcattgtttaagctgtagggtctattctaccagaataagataatttttagtttatcctatttattcaagggtgtctctatatataattagttttctgtaactgaaacgaatatttaacttaatcaggactattatattttattcattatta

SEQ ID NO: 339970 - DNA, 133 bp, Zea mays
gcggccgcccttttttttttttttttatttaattgtaaataaataaaagggatcttgacctctgaattcaacattaggcgtttaacacggtaaaacaagctcaaaggttggcctggagcctattctaaattcc

SEQ ID NO: 339971 - DNA, 319 bp, Zea mays
gcggccgcccttttttttttttttttttcatttattttttttttttttttttttttttttttttttttttttttttttttttttctttttattttttttttttttttttttatatttttttatttttttttttttttctttttttttcttttttttttttttttttattttttttttttttttcctctttttatttttttttatttttttttttatttttttttttttttcttttttttctttttttttttttttttttttttatttttttttttttttttcttatcttaatttttttttttttttatttttttttttt

SEQ ID NO: 339972 - DNA, 146 bp, Zea mays
  unsure (1)..(146): unsure at all n locations
gcggccgccttttttttttttttttttttttttttttttttattttttttttttttatttttttttttttattatttaatnttttttagacccagttaaacaaattttataacccaaaaagggcttttgtaacgaaacaaattttt

SEQ ID NO: 339973 - DNA, 126 bp, Zea mays
gcggccgcccttttttttttttttttaatattttttttttaaatttttaatttttattttttttttttttttatttttttattaattttttttatttttttttttattatataatattttttttta

SEQ ID NO: 339974 - DNA, 221 bp, Zea mays
gcggccgccctttttttttttttttttttttttattttattttttattttttttttttttattttttttaatttttattttaattttatataaatttatttattaagaaaggaaagcccggttttttatattaaatgataaaaaaaggttacaaaaatgagggtcaggggaataaaacatgcctgtaaggggggataataaaagtaaacaagatgttttcc

SEQ ID NO: 339975 - DNA, 264 bp, Zea mays
gcggccgccctttttttttttttaataaaatattatttaattttaattattttatttttttttttattattctaattttatttttaattttttatatatatttttttattattttttttttatatataaattttaattttttatatattattaataaatttttttatttatttttttttaatattaattttttttttatttttttatttatttttatttttttttttttattttttatataatattattttttttattttatta

SEQ ID NO: 339976 - DNA, 252 bp, Zea mays
agcggccgcccttatttaaaaaaaaaaaacaaaaaaaacaaagaaaagaaaaaaaagaagaaaagagaaaaaaaaagaacaaaaaaaaaaaaaaaacaaaaaaaaaaaaaaaaaaaaggaaacaaaaaaaaaaaaacaaaaaaaaaaaaagaaaaaaaaaaaaaaaaagaggaaaaaaaaaaaaaagcaaaaaaaaaaaaaaaaaaaaaaaaacaaagaaagaaaaaacaaaaaaaaaaaaaaaaaacaaaa

SEQ ID NO: 339977 - DNA, 76 bp, Zea mays
gcggccgcccttttttttttatctttaatatatttttatttttaaatttactattcatattttttactaattattt

SEQ ID NO: 339978 - DNA, 102 bp, Zea mays
gcggccgcccttttttttttttttttttattttttatttttttttttttttttcttttttatttgttttttttattttttttttttcttttttttctttatt

SEQ ID NO: 339979 - DNA, 213 bp, Zea mays
gcggccgccctttttttttttttttttttttttcttccatagtaagattaaaatggttgggcgaccggaaagtatcgaagagacattatagttcacgacatcaaaaacttgacgaacattacaatgttttccccctaaagactgccttgaccaagctgaattcaacatctagcctgcgttgccgaacccggagtattttataatcccttttag

SEQ ID NO: 339980 - DNA, 408 bp, Zea mays
gcggccgcccttttttttttttttttttttttttttttttttttttttttttttttttttttttttttttttttttttttttttttttcccccagccaaaaaactttttccatgcaaaatcttttaggtgggggtacctgaaaacggccttccactttgggcaaatttaaagctggtttggccaaacacagaaaacagcacccccccccaggggggccttgtttaatgcccccaaaacgccgaaagaccccccagaaatccctacagcttctttccctttctaccgccttttttgtaagtgttttccggggggcccggggaaacaccctaaagggcgccgttttttatcccaaaacaggcaagccccctgggggtaaattgggccccatgtccgggggttttgttttt

SEQ ID NO: 339981 - DNA, 254 bp, Zea mays
gcggccgcccttttttttttttttttttttttttttttttttttttttgtttttttttttttttttttatttttttttttttgccccaagggactcaatgaaaacactgaaatgaaggcataacaattcccctcccaaacaaaccacacttgcaatgttcaaaaccccaactggtccaaggtaaaaaaaaaataaaataaaataaaaaaaagggttagatgccaccacccatgccaacatttttttggacccct

SEQ ID NO: 339982 - DNA, 122 bp, Zea mays
gcggccgccctttttttttttttttttttttttttatgacagtggtatttttaattataacttaataaataataactaatttaataatatatatgataaaattatttaaaataatttattaa

SEQ ID NO: 339983 - DNA, 337 bp, Zea mays
gcggccgccctttttttttttttttttttttttttttttttgggttttttttttttttttttttttttttttttggaacataataaaaggataacatcagttgctccaatggaacacacatgactgttcaaagcttggaaagggcaaaaaatttttagggaatggaaatttttctagacagaccatgtggagggataaaaacttgggatgtgtaatgggcgggttttttgaccaaatacatggaaataccatgccttgtttcggtatcttagtaaataaaccttttcaggttgttttatacaaaaaaaaagtcgctctttttatttcccacgttttt

SEQ ID NO: 339984 - DNA, 52 bp, Zea mays
gcggccgcccttttttttttttttttttttctcttgcggacgcgtgggagga

SEQ ID NO: 339985 - DNA, 348 bp, Zea mays
gcggccgcccttttttttttttttaattaaataaaaattaagaaaaatattaaattatattataaataaatttatattattatatattaattattaatatataatataaaatataattatatttaaaaaaaaaaataatttatattataataaaaaataaaataataataattttattatttatataaaattattaataaatatatattaaattataataaatatttattattaataaaaataatattaaattaaaaaaaataattaaatattaaataatatttaaataataaattattaaattattttttataatatataaaattttatatttataactttaataaa

SEQ ID NO: 339986 - DNA, 149 bp, Zea mays
gcggccgcccttttttttttttttttttattggagaatttttttacaaagggagggtgttaagctttactgattaaacagagcttcgtgaaaacggtttgacttgcatcatggtatcacctccctaaaaatcaattaaatatttatgtt

SEQ ID NO: 339987 - DNA, 56 bp, Zea mays
gcggccgcccttttttttttattaaaatattaataaaaatttatcaataattttta

SEQ ID NO: 339988 - DNA, 399 bp, Zea mays
gcggccgcccttttttttttttttttttttttttttttttttttttttttttttttttttttttttttttttttttttttttttttttttttttttttttttttttaaaaaaaaaaaaaaaaaaatcttattttttaaccccttttgtatatttaacacccaaagaagtttaaattttttttccaaaaaaagattatatttttttttatttgataaaaaaaataaaatgttttcttattaaaaaataaacttacccttaacaacaacctttttttttttttttttaatccaatttgtaataaactttattaaattttaatgataaaatttattttttttttaattatatttttttattttcattactattatttagaattttttttttttattaattat

SEQ ID NO: 339989 - DNA, 207 bp, Zea mays
gcggccgcccttttttttttttttttttttttttttttttatttggtttttttatttttttttttttaacaaaaaaaatgggccatgggcacagggtattagtttattgtctaaaaaacaaggttggtattaaaactcctaacgcttaaaagaggaatctatggtttaaaaaacatttgtggcctcctttattagggatatgaaaaa

SEQ ID NO: 339990 - DNA, 90 bp, Zea mays
gcggccgccctttttttttttttttttttttttttttttttttttttttttttttttttttttttttttttatttattttttttttattt

SEQ ID NO: 339991 - DNA, 362 bp, Zea mays
  unsure (1)..(362): unsure at all n locations
gcggccgccctttttttttttttttttttttttttttttttttttttttttttttttttttttttttttttttttttttttaattttatttttttttttttttnaggacccgggggttaactttaaaagatcaaaacttacgaacgcgggcatgcaaaaaaaaaattttttaatagggccaccaaaaacaaaataaagggccggggtttaaaaacggcgtaacgggaaaaaccctggggttaccaaaataaaacgccttgaaaaaaaaccccttttcgccaggtggattaaaaaaaaaaaggccccaaccaatcgcccttacaaaaagatggccaaccttaatggtaaatgggaccccccct

SEQ ID NO: 339992 - DNA, 392 bp, Zea mays
gcggccgcccttttttttttttttttttttttttttttttttttttttttttttttttttttttttttttttttttttaaaaaaaaaaggccattccaagctggttgtttagaaaactacaggcgttacataaaaagaaaaatgtcccaacgttttttttcaaacagcaatgcaacaaactttgcccccaaatgggctttttaccgttgctttccaaaaactttaaagtccccctatttttggaaaccatcatttttgcaaatccccaaacagaatttaaaaggtccccatttttgcctgggtagaattttttttgttgcaacaaaaaaggaaactttccccgtttaaaaggtggtttaaatttcttttttcccagtttggggaaagaaaaa

SEQ ID NO: 339993 - DNA, 91 bp, Zea mays
gcggccgcccttttttttttttttttttttttttttttttttttggtttttttttttttaaaggaaagatcgtaatagaggaagggattta

SEQ ID NO: 339994 - DNA, 216 bp, Zea mays
gcggccgcccttttttttttttttttttttttttttaaaattgttgtttttttaataattttgtttaattttttaaaaagaaaaaaaaccttggaccccattttgaactttatatatcaatcaaacaatttttggactaaaatttctagaaaaatattctaaaataacttcccgtattaaactcttaattaaataccttcaggaaaaattcaactt

SEQ ID NO: 339995 - DNA, 59 bp, Zea mays
gcggccgccctttttttttttttttttaatgaatccaacgggggaacaggaaaattgcg

SEQ ID NO: 339996 - DNA, 57 bp, Zea mays
gcggccgccctttttttttttttttttcaaaaatattatttttaatatatattaaaa

SEQ ID NO: 339997 - DNA, 130 bp, Zea mays
aacttaacctcggttattcgatatttccggcaatttctagctaaccataatagtacaagcaaccgccacccctgaaacataaaccaacttaatggccctagaatgtgaagtgagaaaattgatagaaaaa

SEQ ID NO: 339998 - DNA, 373 bp, Zea mays
gcggccgcccttttttttttttttttaaaatatgagaattccggggcaattgattggaagagttacataacattacagctgggaaaactaaacgcgaggcatttttaacaaaaaaaaggtttcgtttttctgcgattctaggttaccatattggacaaaaccggggcgcggaacattaaccaaaaaaggggctttaatgtgatttccaaaaccccttaaaaaccggttattaaaaccccttgttccaattttcaccggtttattttaccggggaaaaagggctttggaggttttgtttttttttccccgcccccttgggggcttgggttaaaagtaaaaccctaagttttttccccctaaaggttgggcggaa

SEQ ID NO: 339999 - DNA, 389 bp, Zea mays
gcggccgcccttttttttttttttttttttttttttttttttttggttttttttttttttttttttttttttttttttttggaaacaaaaccatcccagccgggttccattttaccattttattgaccaaacaaaaaggggttggcaagggaaagggttacattggcctttaaacaagcttttggggccattaaaatgcttcatgggaattaaaacaggccctgcccttaataacaaaaggggacagaaaaaaaaaaccctacccctttttcattttgtcaactgcctgcactttattggcattttcaacgaccggggaagcctcagcacctttcataactgtgtccgaacttgaattgcgggtttctgcaattgctgacggtacgggg

SEQ ID NO: 340000 - DNA, 455 bp, Zea mays
  unsure (1)..(455): unsure at all n locations
gggaaggngggccggctggaggtgccggtccgttattgccggggcggccgtcctttttttttttttttttttgcggaaaaatggttcaggctcataaatggatcttatacatagatagtttaaatcgggaacaggtcgattacctaagaggctcataatgcgacttcttcatctgagctagacacgatcatatgctaccccaaggtgccaagcaggtgctttccaatcttccagtttttattccctagtccctatgttcatagtcctatggccaagcgttaaaattcttaaaagaaattctccagctattggcttgtcatcgaatgtccagaggtccatattggttccaatatcctgtgatccattcaaggttcagaaggctataaattggatctcttgcacctgtctttcataagaaaccttatttggtatccaatatttgtcatcccatcatt

SEQ ID NO: 340001 - DNA, 270 bp, Zea mays
gcggccgcccttttttttttttttttttttttttttttttttttttttttttataattgaggataaatgaaaatatatattgatttttttttttttcctattaaaaaaaaaaaaagcaccctaatttaggatggaaataagttctgaaaggggacaaaaatctaaagcaaaaaccatgctaattactttaaaaggaaaaaaaccgagattaaacatacatataatgacaaccatttttttaaaaacttttagggtttgtgaggtaataaa

SEQ ID NO: 340002 - DNA, 330 bp, Zea mays
  unsure (1)..(330): unsure at all n locations
gcggccgcccttttttttttttttttttttttttttttttttttttttttttttttttttttttttntatcgagaggaaaatcaacaagggcaacgttcatttacaagaagaagatgaaaaaaaaaaggcccacagagcatgagagcaaccgttttacatacacccgaggaaaaagggggtacaactccccctaatccattgtataactcgctcacgaataaagacagacacccttcatttgatctcccctggtccttttataaacaactaggcccttgttctgttgttgaatcgccagcgtgatataaatcaatattttgtggttccca

SEQ ID NO: 340003 - DNA, 52 bp, Zea mays
gcggccgcccttttttttttttttttttttttttttttttcggacgcgtggg

SEQ ID NO: 340004 - DNA, 227 bp, Zea mays
gcggccgccctttttttttttttttttttttttttttttttagtttttttttttttttttttatttttttttttttttttattttttatttaattttttttaatttttggaaaaaaaaacgtcttgactgaaaaaaaaactggcgttaccaactgtgtttaaacaaaaaaaatttttaatttttataaaccgtttttaatttatttgaataaaaatcccagttaaaa

SEQ ID NO: 340005 - DNA, 400 bp, Zea mays
gcggccgccacccagtggcaccgggtcaagtggaccagcggcatggtcaagctgctcgtgtcggccgtgtcctacatcgacgaggacgtcgacgcggactacgggaccagcagcgggaggaggaagcacgccatgctcaagaggatgggcaagtggaagctggtctcctcggccatgactgagagggggctcgctgtgtcgccgcagcagtgcgaggacaagttcaacgacctcaacaagaggtacaagaggctgaccgagatcctcggccggggaagggcttgccagatcgtcgagaagccagagcttcttgaacaggtgagcctatctgcgaagcttagggaggaggccaagaagcatctcaacttcaagcatctgcactatgaggagatgtgctcct

SEQ ID NO: 340006 - DNA, 136 bp, Zea mays
gcggccgcccttcttttttttttttttttttagccgagcaacgcgtcatgaataagagttaacatcgctcccatttcacattttgagatcaggaacatccaagttgcgctattattcttagaattgggcattttcc

SEQ ID NO: 340007 - DNA, 394 bp, Zea mays
gggcggacgaccatttttttattataaatatttttaatttagacacgtgggcaacgcatgggtaaactttaaagaccaaagttaatactcagcaagcgattaatatctttcttatgtgaaactaaattaaattatggccgtgttaacaacatgtaactgggaaaacttggatgtactaaatatatgactaataatcaaagaaattataatcatatatattattagaataataaatcagtataatattattcttttaataatattgatttatacataaaattttttttttactcaataccattaatatattaattttataaattcggattactattaatatatattcattagatataaaatactaacataaatatatctaatttaatatatatta

SEQ ID NO: 340008 - DNA, 165 bp, Zea mays
gcggccgcccttttttttttttttttttttttttttttttttttttttttttcttttttttattttttttttttttaaaaaagaaaggttgccattatgatttaaaacatgcttattttttaacccaaataatatgttcattttttaattccactcccattttta

SEQ ID NO: 340009 - DNA, 234 bp, Zea mays
gcggccgcccttttttttttttttttttttttttatttttttttttttttttttggaatcaaagtatttttggttacaccgaaaactgctgttcaaattcatgaaatttttgggttctttttccaggaaagggcttctttagattgaacacttgtagaaaacaccaagttgggcttcaagcaaggctttcaaccatagtcttttaccaatattttaaaaacttacacgccttat

SEQ ID NO: 340010 - DNA, 394 bp, Zea mays
tgcggccgcccttttttttttatttaattttttaatataatattataacttttatttttattatattaatatataattttaaaataaatttaaatatataagaaataaagaaaataaaataaattattaaaaacttattaaaataatataattatgaaaaaacattacaatattaataaaaataaaatgtaattataaaaataaattaataaaaatataattataatatttataaaataaataattaaattaaaatttaaaaatttataataatatttaaaataataaaaataattttaaaaattctaatatataataataaaataaatacataaaaataaaaaaaaaataaaaaaatatttaatttaaaaaaattataataataattataaat

SEQ ID NO: 340011 - DNA, 87 bp, Zea mays
ataggaaactggtacgcctgcagtaacaataaggaattccagaggcggacacacttttttttttattatatataaatatttatattt

SEQ ID NO: 340012 - DNA, 65 bp, Zea mays
gcggccgcccttttttttttttttttttttttaaaataacgaaaagctaatttatattattaaaa

SEQ ID NO: 340013 - DNA, 288 bp, Zea mays
gcggccgccctttttttttttatttttttaattttatttatcttattttttatttttatttttttttatatattaaatttttttaaaatttataatttttaaaaattttataatatttttattaatatatattattattataagaacatttttaaaaaaaaaaaaaattacaaataaaaaaaaataacttttaataaaaagtaaaatatcaataaaaaaaaaaaaaataaaaatttttctattaaaacaaaaaaaaaatataaaacatctaaaatagataaatttaat

SEQ ID NO: 340014 - DNA, 283 bp, Zea mays
gcggccgccctttttttttttttttttttttttttttttttttttttttttttttttttttttttttttttttttttttttttttttttttttttttgggggggcccaccgaattttggaacaaaaaaggggtccttaaaccccatttttgttccctccagtgggaaaaatttttagcaagctcaagctaaaaggtgggggggggtaaaaaaatttttttttttgcgcaaaaatttttttcttaatttgaacatttgtgcaaaaaaaaagtttttgtcttttt

SEQ ID NO: 340015 - DNA, 187 bp, Zea mays
gcggccgccctttttttttttttttttttttttttattttttttatttttatttttatttttttttatttttagcagccaaaagcattgacttttaaaaaaaaaaaaccttccaaaattcaccagagcataacagggggggatttgcaaaacctcgggtacgggttccaaatttaatgggttgaaaa

SEQ ID NO: 340016 - DNA, 60 bp, Zea mays
gcggccgccctttttttttttgcttttattcttcagaccagcatgattactttttccatc

SEQ ID NO: 340017 - DNA, 75 bp, Zea mays
tgcgtccgccctttttttttttttttttatttttcttctcaagagacacaatattaaatttttacttcatatcat

SEQ ID NO: 340018 - DNA, 246 bp, Zea mays
gcggccgccctttttttttttttttttttttttttttttttttgagattggaacagggccttattcaggatgtgttacaatttacgctctgttagggtacacaaggcagcctgatcgaaaattaacaatttttcggggggtaaacaacaggaattgttttcgatgggggtacaaaactgattcaagctccagtttcatgtttacaacactgtcagtttttttgtctttgttttgcacttaaggcac

SEQ ID NO: 340019 - DNA, 358 bp, Zea mays
tgcggccgccctttttttttttttttttttttttttttttttttttttttttttttatattttttttatctttatttttttttatttatttataatttttttaatatttttttttattattaatttatcataaaatttatattttttttttttatatatatatatatttaatttattatttttttatttattattttatatttaatttattattatttaatatatttaatttttttttatttttttttttattttaatttatatttttttttatttttaaatttattttttttttatctttttatttattttaatttattatattttttttatttattatatttatttttatttttaa

SEQ ID NO: 340020 - DNA, 132 bp, Zea mays
gcggccgcccttttttttttttttttcttttactacttctttttttatttttattctttatcttattcattttattaattctcttttcattactctctatccaaaaaaaaaatatcatttccctttatttct

SEQ ID NO: 340021 - DNA, 286 bp, Zea mays
gcggccgccctttttttttttttttttttttttttttttttttttttttttttttttttttttttttttttggcatgaaaaaaagaaatgccgcctaactttggtgcatgctttgcattacacaatccaccgagagatgtggatttcgcggggcacgggttttgcagcgttttccagctgttcattactggccattccaggaaggccccaaatttgtttgggatgacaaatttttacgttctgttcaacctgacacgttttaaccatctggaaagttttcttcaca

SEQ ID NO: 340022 - DNA, 81 bp, Zea mays
ctttttttttttttaaaaattattaataaattttaattaaaatatttttttaaaataaaaaaaaaaaaaatttaatataat

SEQ ID NO: 340023 - DNA, 378 bp, Zea mays
gcggccgcccttttttttttttttttttttttttttttatttatttttttttttttttttcaaatgggaaagctttcccacctgattttttatcattaaacacacgaacttctgaaaacagagcaaatgtgcagtcttggaaggccgagcttctcttcttgaggagaaagaaaccaattcggcaggcagacttggttaatattttataaatgatactctcattcggagtaagacttataagcaactgcatgcttattggacaaatagtaagtttggctgtccagacatatggttgttgtacattcaactgtatttttcatccatgttcgtggtgttcctccctttacgcgttgtaaatttaagcttggacttttattt

SEQ ID NO: 340024 - DNA, 300 bp, Zea mays
gcggccgccctttttttttttttttttttttttttttttttttttttttttttttttttttttttttttttaaaaccaactggtacattacgattgatagaaaaaagggtttcaacagcacttggatagaccagtatgaccaatgttgtttaaaaacctgcactttacaactaaaaggaaacaagtcataaattggtcccaaactctgagggacaattaaatccatatactggagcaaaaaccaaaagatgtgagtttgttcccaatccccaaaagaggagtcattttttcttttatacc

SEQ ID NO: 340025 - DNA, 295 bp, Zea mays
gcggccgccctttttttttttttttttatttttttatttttttagggggattttttttattttattgtgttttttttaattatttactttcggccctttgtttaaataccctgggggaacaaaaaagccccggcctcttttgggataaacatctcataataaatttaatttttacccccgttttaaaaaaaaaaaaacgcttatgatactttggcatttgttgtttggttggtacccttctcaccaacaatgggcctccctctgtggctcctcactcatattggtcttccaccca

SEQ ID NO: 340026 - DNA, 153 bp, Zea mays
gcggccgcccttttttttttttttttttttttttttatttttttttggtggttttttttttaacttgcacagtggtagaaatattgattggttggatttcatgcacatgattttcccagtagctttcgacaacttttttgtttatacacaagc

SEQ ID NO: 340027 - DNA, 102 bp, Zea mays
gcggccgccctttttttttttttttttttttttttattttaagtgggttttttttttttttttgtaggttttaaaaaatttatttttttttatttaaggggg

SEQ ID NO: 340028 - DNA, 246 bp, Zea mays
gcggccgccctttttttttttttttttttttttttttttttttgttttttttttagaggcacatgatgaattaaatattaaagcactaataagtttattggtccaaccataaaactcattacccatacttatataagttagaataacacatatttaactcattgtacattgtcagattacccaacacattataacaggtgttgttgaatcaaaattatatttagtggtattaaatcttttccgtag

SEQ ID NO: 340029 - DNA, 102 bp, Zea mays
tgcggccgccctttttttttttttttatttgaagcaacaacgtaaacagccataattattctcaataacccggtagcattgcagggaaataacaacctttac

SEQ ID NO: 340030 - DNA, 69 bp, Zea mays
tctacccactcttccttagaccacaaaggcatccaaacaccgggggcttcataactttctcgaggctcc

SEQ ID NO: 340031 - DNA, 422 bp, Zea mays
agcaatagctatgactgcacacgcacgcgtgcgtgagctcggtagagttaacccacgcgcacgccgtcatagatctcgtttcaaatccatccatcctggtttcctccgtcccgcagcatctcaaccccatggccaagatcaagatcgggatcaatgggttcggcaggatcggaaggctggtggccagggtggccctgcagagtgacgatgtcgagctcgtcgccgtgaacgaccccttcatcagcaccgactacatgacctacatgttcaagtacgacactgtgcacggacagtggaagcaccatgaagtcaaggtgaaggactccaaaacccttctctttggtgagaaggaggttgctgtgtttggctgcaggaacccttaggagatcccggggggttcggttggtgctgaatattgttgt

SEQ ID NO: 340032 - DNA, 503 bp, Zea mays
  unsure (1)..(503): unsure at all n locations
tcgacccactcgtcctgtgaagccgccgccgctgcagtgtccatagccaccgcaggagactgagatggggggttttttctcaatatatattttttctttttttttttcttttttcttttcaatatatatttatttctttctcattgccaacgnnaggcgttgctttttctttactataatatttatttctcattctaccttttttttctttcatataccttttgtttttctattccatttattattttttgtgtttagttccctttctttttacttttttctctatttttcttatattttttgctttattcatatttattttaatttctcttattaatttgtatttttttattttgtttatttttatatttctatttattctttttcttttaattctttttagtttattttatatttttttttattgctatacatttttttttttacttttttatttttttttttatttatttttcttacttctttttttttttttattataa

SEQ ID NO: 340033 - DNA, 192 bp, Zea mays
tgtatacctgtggacgaacaaccctagtacgagtctagggatgctcagaggggccgtgtgtgctgtcctactgctaaactcccacgtgtgcttatggagggcatggaaaggactgtctagacctaccgtggtagcctcatgcactggattttcattcctcagacattggatagcctcatgttacttcatgac

SEQ ID NO: 340034 - DNA, 161 bp, Zea mays
tcgacccacgcttcttttatacccgaagacgtacaaccaaaggcggaccctactttttctcagcggggcgcccactgctgaccatccatctcaattcccaactatggttacgcatctcacacaaactcatcattagtattttccgacaataccataattca

SEQ ID NO: 340035 - DNA, 93 bp, Zea mays
tttctttctcttagaaataacggccaacttcgcagggctgaattactaattcaggaggcaccctctgttcctcatctcaatcaccatctccgg

SEQ ID NO: 340036 - DNA, 98 bp, Zea mays
  unsure (1)..(98): unsure at all n locations
tctttnctctctttagcatagaccctctatatggaacgtccaactttgcacatggaggccccaccttattagccatctttattaatcacctccgtact

SEQ ID NO: 340037 - DNA, 345 bp, Zea mays
tctcttttcaaatccatccatcctcgtttgctccgtcccgcatcttttcttccccatggccaagatcaagatcgggatcaatgggttcggcaggatcggaaggctggtggccagggtggccctgcagagtgacgatgtcgagctcgtcgccgtgaacgaccccttcatcagcaccgactacatgacctacatgttcaagtacgacactgtgcacggacagtggaagcaccatgaagtcaaggtgaaggacttcaaaacccttctctttggtgagaaggaggttgctgtgtttggctgcatgaacccttatgagatcccgtggggttcggttggtgcttaatttat

SEQ ID NO: 340038 - DNA, 481 bp, Zea mays
tcgacccactcttctgttatactcgaagacgaacaaccagattgggattctattaattcagagcggccatccctctcctgttcttcttctttattcccttcattgtttattcatctcttacatcctcacttttatattttataactattccaatcactcttttattttcatttacttcatttttaatgtctttatttatttctaattctttcctttattttcaattttatttctatatttcctaaatttatcccctttattttaatttatttatattccttcactcactttaattttccttcaattattctaattacccttactatcctatttctctcccttttaatctctttctttttcttttaactctttattccaattacttctatttcatttttaatctctttcttttcattatacatctttttctatatttctatttttctcattatttatttactttctacttaatatttctatt

SEQ ID NO: 340039 - DNA, 170 bp, Zea mays
taattggcggatgcgggagtggtggtggtgctcgtggtctctcaccggagcaccctgtacagcatcatcgctgctgcattagatagtgccatagttggagctggtaactatccctcccccctccgttcccgtaccgctcgcatccgtttgtcaagcctgctcagtgccca

SEQ ID NO: 340040 - DNA, 119 bp, Zea mays
tgggagcaccgacgtaagctgatccttaagcgacctgtctcactttgttgagagcgcccgggaattcgaaccgggccacaggcgtaccagtgtcctatatgtgctatagagctagcgaa

SEQ ID NO: 340041 - DNA, 132 bp, Zea mays
ataccttcaaatctgcatgcatcaagaccgcgtatatatctgttaagggccgagcctcttcttatgccccattctatggtacacatatttttctcacaggcccgtaagctgattgagactttgagaatgacc

SEQ ID NO: 340042 - DNA, 180 bp, Zea mays
tctacccattctctatgtattttcgaactggtaatcccaagatgtctacttatacacacgcagactttgaatccatacataggatatagatttgctcaaagtacactctaactaatttgttctacttttaaaggtccttgaggtcttaagtacattattcacaaagctaccataaactat

SEQ ID NO: 340043 - DNA, 82 bp, Zea mays
ggtgtatgtggaggctgttgctgtcgccgttgaggagacggtgacggtggacgatgatgtggaggatgttgctgtctccgtt

SEQ ID NO: 340044 - DNA, 275 bp, Zea mays
tcgacccacagcgtccgtctagatcgcgagcgaccgccctttttttttttttttttttttttttttttttttttttttttttttttttttttttttttttttttttttttttttttttttttttttttttttttttggacttgaaaaaccaaaaatcgtttaaaaaaaggggcccaaaacaaaagcaaaaaaggtcaatgtccaaattttttaaaaacaacggaaaacggcccatttatggaactataaaatttttttttttggctttttttttc

SEQ ID NO: 340045 - DNA, 217 bp, Zea mays
gcggccgcccttttttttttttttttttttaattatttatttattgttttttttttttttttttttattttttttttttttaggatatgaactggcattaaaaactgtataagcactgcccaacaggcgggaaccacattttttaaaactacaggtttttttaacacaaattgtttagtcaggaaaacactttcatgttaaattttgtttttaaaac

SEQ ID NO: 340046 - DNA, 69 bp, Zea mays
attttttttttattatataaaaataaaaaatatattttttattaataaaaataatatatataataatat

SEQ ID NO: 340047 - DNA, 448 bp, Zea mays
gcggccgccatggtggtggtcacggtggccgaggacgtggactgggccggcgtcagtatggttttcgatctttatccttgtttggatgatgctttttaaatttttgttattttatttattttttatttttttattttgtttttttaattttttttttttatttaatatttatttcattattatattttttattttattatattatttttttcttttttatatttctttttatttttttattttttattttataatatttctattttattattttttttatttttttttttttattttttttttcttttttatatatttttttaatttttatattattttttttattattttttattttattttttatttatttttttttttttttaattttttctatttttttttatttatttttatttttttatctttttattttttaatttttttt

SEQ ID NO: 340048 - DNA, 251 bp, Zea mays
  unsure (1)..(251): unsure at all n locations
gcggccgcccttttttttttttttttttttttttttatatattttnttgggtttttttttgggcttttaaaatccagggaataataccagcccacacggacttaatgccaattaggggaaacacaaagcaatggggaactaattcgaacacttccagccttctaatttaaaaaaagaagtgggggaacaggaaattagcttcaatatttgcacggtacaattttagcttttgacagctttgagcatttaaa

SEQ ID NO: 340049 - DNA, 421 bp, Zea mays
gcggccgccctttttttttttttttttttttatataataaataatatgtggtggttttatatattaatatttaaaaaaatttaaaaatattaaaaaaaaaaaataaaattattattattaaacaaattatatttttaattttaaataaattagtatattaataaataataataaaaaatatatttgtattaaaataatatatataaataaattattataatatattaaatataatatattatatataataatatatatatatgtttataaatattatatataatatttaaataaaaattatttatatataaatttaaatattatttatatttaatattttattttatatataaaatatttaaatattatttatttaaattaattatattaattgataatatatttaatttatattataata

SEQ ID NO: 340050 - DNA, 325 bp, Zea mays
attccttttcattttattttttattttttttttccttcccattaattatatttcatttaacttttttttttatccttttaatttttttttttttttttctttatttttttttttttttttttttttttttttttttttttttaattttttttttttttttattttattttttttcttttttttttttttttttttttttttttttttttttttttttttttttttttttcttctttttttttttttttttttttttttttttttttttttttttttttttttttttttttttttttttttttttttttctttttttttttttttt

SEQ ID NO: 340051 - DNA, 335 bp, Zea mays
  unsure (1)..(335): unsure at all n locations
aanaaaanaaaaaataanaaaaaaatatttaaaataaaaatataatatttaaaaataataattaatataataaaataataaattaaaaaaaaaaattaaatataaaaataatattataaaaataatatatataataaaaaaaaaaataaaaaaaaaaaaaaaaaaataataaaaaaaaataaaaaaaaaaataaaaaaataaaaaaaaataaaaaaaataaaaaataaaaaaaataaaaaaaaataaaaaataaaaaaaaaaaaaaaaaataaaaataaaaaaataaaaaaaaaaaaaaaaaaaaaaaataaaaaataaaattaaaaaaataaaa

SEQ ID NO: 340052 - DNA, 348 bp, Zea mays
gcggccgccctttttttttttttttttttgagagtagagattattattacacgacctaaactgcacaatataattgccagatcgagatgaaacgaaattcctaataaactgaattcaggtgacgggaagggaaacatccgcactgagtagatgtgcaattaccgcaccatcgcaaatgcaaggatgagacgcccgcccacaacacataaatctttgcaaataacaagtatgaagttcgatcaagatgttcatttgctgtggactgccccgaatatgcatagccccattcggtgtttacacgggtaaacaccacaactggtgattgtccggaaatttcttcttgatggc

SEQ ID NO: 340053 - DNA, 323 bp, Zea mays
  unsure (1)..(323): unsure at all n locations
gcggccgcacggacggcggcggaaggggaccccacaccgcgcgcccttctggtcctgacccaccaccggcaatggcgatcggtcgagttactccactagcgagcatcgaggcaatcaagagatcgataggggaataatggagggaggggacgatcgccgtntnttctccgcgccgtcccgccccgccgcgcgcttnttcggttcggttgtccttatatatacgtaattagaaacagaatagcaaaggagagagaaaaagatactgtccgcccaactagagaaaggagggaagatatagattaacaggttgaaaagcgagctga

SEQ ID NO: 340054 - DNA, 153 bp, Zea mays
  unsure (1)..(153): unsure at all n locations
gcggccgccctttttttttttttttttttattgnaaactttccaagattggcttctttcatatttatttccatcaattattcctgaggacaaacccaaaaatgacccccaataatgcatgtatacgctgatcctacttaacaatggcaatatc

SEQ ID NO: 340055 - DNA, 268 bp, Zea mays
  unsure (1)..(268): unsure at all n locations
ctggccgcctgcggtaccggactgtacggacttcccggggcggccgaccttttttttttttttatnataatgcaaacctgccaaggggnnaanntttaacaaattanccgggggtaaaaagccaagggaacaacaatggcctacattttaagtttgcggtgcatgtgttatttgcggaatccctttaggatgccctagatgactcatgtgagactggttttaccccatggtgaactcaataattgttgcaaggaatttttcttttacc

SEQ ID NO: 340056 - DNA, 430 bp, Zea mays
cgaacaccttttttttttttaaaaaaaataaaaaatatatttatattataaaaaaataatataaaataaaaaaataataaaaaataattaaaaaattaaaaatatttttattatataaattaatatataaaaattaaaaaaataaatataaatattaaaatattataaattttatataaattaataataaattaaaaaaaataaaaaattttaatatataaaaatataataaaataaatttaaatataaaataaatatttatatataaatttatattatatattattataatatatataatttaattttaatttatttaaattaacatattataatatatatttattatataaataatatatttctaattaaaatataattatatataaaattttataaaattattataaaataaaatctaaaatataat

SEQ ID NO: 340057 - DNA, 358 bp, Zea mays
gcggccgcccttttttttttttttttttttttttttttttattggaacacatggaactttattgtctgaccttagaacatcacgaatgcttatgtacacaagagtatgaatcaaattacaaactgtaaagctagtaaaatgtagcaccccatcatattttgagtggatcacattgcgttcaccctagcagcttgagtgcaaaacaaagccgctcagttttcaatgtacacccttttcgcgaacaacaccgctcagtttttaatgtacacccaatcccattcacgaaaaactttcacctttccatttttttgcacaacagaagtgtttactaacaactttcacctccatttttttttac

SEQ ID NO: 340058 - DNA, 66 bp, Zea mays
gcggccgcccttttttttttttttttttttttgagtttaaaatggggaatttttgttagtgattga

SEQ ID NO: 340059 - DNA, 180 bp, Zea mays
gcggccgccctttttttttttttttttttttttttttttttgtttgttaacaatgccaaaaggttaacatattcttcattatttttgtattgcaaaaggtgaaatagcaagatggtaccaaattaattgattaaagtgcacatgcttacagatttcaacagtttacacgatttcagtaac

SEQ ID NO: 340060 - DNA, 223 bp, Zea mays
  unsure (1)..(223): unsure at all n locations
gcggccgcccttttttttttttttttttataacacnnnaaaaannnaggaaaaagataaagcttgctggactgatcaaactcggaaaaagaaatattctagtgttatttcctcaccccgaggctgggaaaaataaatacatcgaattatttgaaaaggaatacaggggcacagacagatctttgtttgacagatcttaattaaccgctggcagcttttggggc

SEQ ID NO: 340061 - DNA, 75 bp, Zea mays
gcggccgcccttttttttttttttttactctaataagttgcaaaaaacaaattgcaggatacaatttaccaaggt

SEQ ID NO: 340062 - DNA, 127 bp, Zea mays
  unsure (1)..(127): unsure at all n locations
gcggccgcccttttttttttttttttttntaaaanaaaaattattggggcagnnaagggattccacaaaaccattaaattcaacaatatgacgaattgctgaattagaactagaaacataacatggg

SEQ ID NO: 340063 - DNA, 310 bp, Zea mays
gggaaagctggaacgcctgcaggaaccggcccggaaaaccgggggcggccgccaataaaaattttatcgacaaaaaaagaaccagagagagaaaataaagggaaaaaaaaaaaaaacggaaacaaataaaaaaaaaaaaaaaaaaaaaaaaaaaaaaaggaaaagaaaaaaaaaaaaaagaaaaaaaaagaaaaagacaaaagaaagaacaaaaaaaaaaaaaaaaaaaaaaaaagaaaaaaaaaagaaaaaaatggaaaagaaaaaaaaggaaaaaagaaagaaaaagaaaaaagcaaaaaaaagaaaa

SEQ ID NO: 340064 - DNA, 447 bp, Zea mays
  unsure (1)..(447): unsure at all n locations
gcggccgccctttttttttttattatatatataaaaaatatatatattgtttaatataataattatcattaaaaattttttaattataaaatttaattattataatatttttataataatatttattttataattaaatattttatattattttatttatttttttaatactatttaataaaatttaatattaatataaattaataaattataatattattacttataataattattaancctnncntacttaattattataataacattatttatacaataatattactatatttcatatattataaaatcattatttaaatatatccataataatcttcattataatttaaatataataaaatttatatatctattattattacaatatatatattactaacgaaatatcaaattctactatatgcatatatacatagtattata

SEQ ID NO: 340065 - DNA, 152 bp, Zea mays
ccggccgccctttttttttttttttttttttttttttttttttttttttttttttttttttttttttttttttttttttggcattaaaaaatgctttaacatgtcttgcttttttggaggggctgggcttgagcattcattagtcaaaattt

SEQ ID NO: 340066 - DNA, 240 bp, Zea mays
gcggccgccctttttttttttttttttttttttttttttttttttttttttttttttttttttttttttttttttttttttttttttagaaagcaacaaagactcgatggattttatattcacattgctttaagcgattttttcacaaacacacttagaaacacattggattaaatatgcagcataaaagggttgatcgaactttgatttttacaatggcttgttttccataccttaacg

SEQ ID NO: 340067 - DNA, 458 bp, Zea mays
  unsure (1)..(458): unsure at all n locations
ccggccgcccttttttttttttttttttttttttttttttttttttttgtttttttttttttttttttttttttttatttttttatttttttttttttttttttttttttttatttttttttttttttttttaaaagaaaantgggggaacccccccaattttattttatttaaaaaaaaaaagtttttttaaaataaaaaggccctttaaaaatttgcccctttttttgggttgtattaaaaaaaaattttcttttcctccaaactttaaataagtctccccccccgaataaggttttttttttacccttttaatctttttaaaaataatattttttacaaaaacaaaaaaaaaaaatatttttttcaaaaaaaatttaccctttaaaaagtatttttttgtttttaaaaaaaaattattttaccataactttatttacatttaactctattttata

SEQ ID NO: 340068 - DNA, 391 bp, Zea mays
  unsure (1)..(391): unsure at all n locations
ggaattcaggggcggacgaactttttttttttttttntattaataaaaaataattgtgagtgggtatatggaaaaatagataaaataattataaagtgttttataaaaaaaattgatataaagaaaaaataaaaaataaaataatgtaaaaaaatattataataaaatataaaaaaaaaataaaattaatataaaataaaaaagaaaaatttaaattaaaaattaataattataaaaaaaaaaaaaaaataataattaaaaaaaaatatattaaaaaaaaaaaaaaaaatgtaaaaaaaaaaaatttattaaaaaagtataaaaaatgggtgtaaaatttaaaaatattataaaaaaaaaaataataaattatagaaaaaatttttgtgtg

SEQ ID NO: 340069 - DNA, 210 bp, Zea mays
gcggccgccctttttttttttttttttttttttttttttttttttgttttttttttttttttttttaaacccataacttttttattaaaaacaccaaggggggaaaattttcacattgtttgggcacaaagttttggaaaaggtatacaggcgccaagtttcccactaaatgttgatctttttgttaaggtgtcttaatggaaactaacc

SEQ ID NO: 340070 - DNA, 200 bp, Zea mays
  unsure (1)..(200): unsure at all n locations
ccggccgcccttttttttttttttttttnttttttntnnnaaaaggttcaaataaaataataataatgggtaaacgccgagacatgataatttggaacaattccatttcagacattaacttggaagacagccctttccattgggcacaggcgcaaagctgttaattggttattatttccttgaaagttaaacataaggcc

SEQ ID NO: 340071 - DNA, 85 bp, Zea mays
gcggccgccctttttttttttttaaaaataataaattttttttgtatttgttttttttataattttatatatattttttaaattt

SEQ ID NO: 340072 - DNA, 309 bp, Zea mays
  unsure (1)..(309): unsure at all n locations
tgcggccgcccttttttttttttttttaataaaannaaaataaaaggggcgngtatgtaaaaatactgatataatatgattcaaatccatttaatgacattacatagtttattatcccttcttttctaatggttacattcttattaacatttgcatgtacacctactcaccatacaataaaaattccctcagtaacatttattttttattattgtgacacaataatagtaaagctaatgtaaaaaaattttaacatacttgtctctaccaaaaccaattaccatgtttcgaaagcatttgttatgttat

SEQ ID NO: 340073 - DNA, 293 bp, Zea mays
  unsure (1)..(293): unsure at all n locations
gcggccgccctttttttttttttaatanaaataattatattgatgggttattttttatttattttaatattttttttttaaatttagtttttattatttattttgttattttttttttttttttataattttttatttttttttatttttgttttatatttttattttttttgtttatttttggttgtgatttttttgtattgtttatttttattttttttttaattagttttttttaatttattttttttttttttttttttttttttttttttttttttttttatttattt

SEQ ID NO: 340074 - DNA, 229 bp, Zea mays
gcctccaggtcccgaatctcgcgattcccggcgcggtcgccctttttttttttttttttttttttttttggggtgaggtcatttttcaaatccacatacacatttttaaattcataaactgatttccattacacaatacacacaaacacattaaacccaaaccatattattatccggggacaaattacaaacattctcttattatctttacttaaaaattagttttttc

SEQ ID NO: 340075 - DNA, 251 bp, Zea mays
  unsure (1)..(251): unsure at all n locations
gcggccgcccttttttttttttttttttttttttttttttttttgggtttttttttttttttttttttttttttttttttaaatatttttttttttttttttttttttttttttttnnaagccaaaaaaaaaattttttgtttaaaaaaaattttttatttttttcctggcaaaataattggggttttaaaaattttaaaatttttttttttaaaaatttaataaaaccccttttaaccttttgcaagttt

SEQ ID NO: 340076 - DNA, 205 bp, Zea mays
ttgcggccgccctttttttttttttttttttttattataaaaatggggtttgtttttttaggaaaactaaatattttagtataaacaatacatattcttttctttcacaaaaaagggcattccatggaatacctaaaaatacccctgtcgtcgcccctgttctttttttacaaatattcccacgagcatggagggtttaatactc

SEQ ID NO: 340077 - DNA, 305 bp, Zea mays
  unsure (1)..(305): unsure at all n locations
cggtaccgaattccaattgcgggcgcgctcgccctttttttttttttttttttttttttnggagcgggggacaaaacttcaattacacacgacacatttctgaatggcattgactgagttccatttacacatttactcgcgaaccccatttaacttgattcatagtttaagctggggcataatttaaactttccttacttttttttgtctagagtttgtttttttatcacaatttaaatttttggatcgttggttttttggaggccaaaaaataaaaactttctttacttttatagttaaccttt

SEQ ID NO: 340078 - DNA, 406 bp, Zea mays
gcggccgcggtggcaggactggcccgaggcgagattttggcgatgctgatgctcacggctttgagggggggtatggtggcggcggcggcggttttggggactgttgagttgtttgctttgtaaatgttgaggtttttattttctattgttgttttatttatttttattcttatttatatttgttatttttatattggtgtcttttttttattttttatctcttttttttattttattttattttcttccatgtgggcgtactttttatatttactttttttttctggtctttttatttcttaattattttttactactttgttttgttttttttttcatgtttaatatattcttattttctttttgtactattctcttatatttttaattattttatttttttatt

SEQ ID NO: 340079 - DNA, 141 bp, Zea mays
tcgacccactcttctctttccgcctcatcccgccgcaaggagaggggtgttcatgagacatctgcggagaacctaaatttcctcctaaagctgctcctgccaagaagggtgttgccaagacccatgccttgaaggttgcca

SEQ ID NO: 340080 - DNA, 146 bp, Zea mays
tcgacccactcttccttggaccaaccatgacttggaacgtgcggcgtcttaattcgccagcagagaggatcataaaaggaagggaaccaaacaaatatgggcttcttcatcttgatgctctactcgctctacgacgcgaacacttt

SEQ ID NO: 340081 - DNA, 225 bp, Zea mays
tcgacccactcgtctgtatctttttccagagtttagtttccagagccagaagctttataaagacaggagagctacaatcattcatcttaaggcaaccttctgatgcccttccatctaacagcgaacgctttgcaacaaattctgtcaaaatgacttatggaactagaaagacactaatattgcgagagattcctgaaagtgatgtgatatctatacttttcttac

SEQ ID NO: 340082 - DNA, 179 bp, Zea mays
  unsure (1)..(179): unsure at all n locations
tcgggatcacccaccacaaaacggcctattggtttttatcccaatccatatatagattggatgagattaagagagtttaaattcttaacaaaaaaaaaaaaaaaaaaaaaaaaaaaaaaaaaaaaaaaaaaaaaaaaaaaaaaaaaaaaaaaaaaaaaaaannntttttgggcggccgc

SEQ ID NO: 340083 - DNA, 255 bp, Zea mays
tcgtcccactcgtcctgttttttctagtggctgagccattttacaggcgctcctcctccagcacagaggccccttcactcgcactcccattcctgctgaggccgacgcctccatcccctcccatcttcttcgagacaccaagtcccatggctgctgtcctccagccccaagctgtgactcaccccgtatgtgttcaatggaatatgctgttaaatgctactgtttgcttccccgtcccgcatcattatttgcctt

SEQ ID NO: 340084 - DNA, 117 bp, Zea mays
atagtagagtcgacgcgctcacttttgacagcgggcgtcccgttaatgggggaccggttcctgcaggcggggacggcccccatatagcgagtattattagaccttgaccataatcat

SEQ ID NO: 340085 - DNA, 57 bp, Zea mays
ttctacccacgcgtccactcacacgtaacctaccatcataaagaaatttttactcaa

SEQ ID NO: 340086 - DNA, 199 bp, Zea mays
  unsure (1)..(199): unsure at all n locations
cctgagcgaaagaccttttgtacatatgtgaggggcccaaatcctcnntttctctgttagaagcccatactaatgctagtctagatcttggattgcttcttgcacagttcaaattcatcatattgcacagttcctctcagttatatattaggcattacataatattttcatcaaatgctacttgctaaccgtattcctt

SEQ ID NO: 340087 - DNA, 135 bp, Zea mays
tagtctacccacgcgtcctcgcttacgaaattcaatagcacagcgaagaccgtttttgaagaagatgcgggcgcatctccatgtcggcgttctacagcgtgggccactgccggttctacgtgatcactgtggtct

SEQ ID NO: 340088 - DNA, 241 bp, Zea mays
aaaaagaaaaaaaaaaaggaaacaagagaaaaaaaaaaaaaaaaaaaagaaaaaaaaaaaaaagaaaaaaaaaaaaaaaaaaaaaaaaaaaaaaaaaaaaaaaaaaaaaaaaaaaaaaaaaataaaaaaaaaaagaaaaaaaaaaaaaaaaaaaaaaaacaaaagaaaaaaaaaaaaaaaaaaaaaaaaaaaaagagaaaagaaaagcaaaaaaaaaaaaaaaaaaaaaaaagaaaaaaaa

SEQ ID NO: 340089 - DNA, 371 bp, Zea mays
gcggcagtgcgtagagaggatcgtcgaacagaacagcatgaagatggtcatcgttctcgtcgtgtgcctggctctgtcagctgccagcgcctctgcaatgcagatgccctgcccctgcgcggggctgcagggcttgtacggcgctggcgccggcctgacgacgatgatgggcgccggcgggctgtacccctacgcggagtacctgaggcagccgcagtgcagcccgctggcggcggcgccctactacgccgggtgtgggcagacgagcgccatgtaccagccgctccggcaacagtgctgccagcagcagatgaggatgatggacgtgcagtccgtcgcgcaacagctgcagatgatgatgcagcttgagc

SEQ ID NO: 340090 - DNA, 181 bp, Zea mays
tgttctcacttgccactccgattttcctcggtgagactcctatgccggaccgtgtctccaattctctggtgcgagtgacatctaggtttccagacgccttcggtgagtacagggaaggaagtcgtcatggctgacgactaacaggctgagatacaatgtggaggcttctaatcgtgtttct

SEQ ID NO: 340091 - DNA, 243 bp, Zea mays
aagttgctgccaactagatggggtggctagcttattagaacttgaacatgtttctagcttgcttttttgttgatggatggttcaagcactagggaagccatattttcctagtccctcttgttgtaatgatcttttagtaaccacttgtaatttgattttcaagtgtctgttacctatattgctcttttagttcttaaatgttaaagaggtatatgagtcatttaatttggctcagaaattttg

SEQ ID NO: 340092 - DNA, 89 bp, Zea mays
  unsure (1)..(89): unsure at all n locations
tctgtgttttatnacgaggatcaacggcaagccgcgggcgagattaggttacctatttcagggggggatcgggctacatagctgaagac

SEQ ID NO: 340093 - DNA, 390 bp, Zea mays
tcggacgcgtgggcggacgcgtgggcggacgcgtgggcggacgcgtgggcggacgcgtgggcaacactggacctgcaattgagtgtaagttgctccaggttttcgttggtctaactgactcttcgacatctgtacaaaatatagttgatgctatcaaaagttcaggtgctattgtcagtttaattcagtttgttgaagcacctcaaagggaagtacgcatgaattccatcaagctcttgaataacatatcaccttatatgggtcaagaacttgctgatgcttttcgtggaaacttcagtcaactaagcagcttggtcaaggtaattgtcgataacaatggtatttctgaagagcaagcagctgctgctggccttgtagctgatctttcca

SEQ ID NO: 340094 - DNA, 269 bp, Zea mays
ttcttcttcttaagtggaatcctactagactgggttgcgtgcttattagaacatgaacatgttgcaagctgggatgattgttgaaggatgggacaaggccgaggaaggccaaaccttctcagaccctctccgtggaactatctagaagcaaccatcttgcaatcgggggcccaggttgcagttacctatatacccttcttgagcaccattgggccgtgcgtgtgagtctagaagaggcacgagaaatttgtggtgaaagtagttgccct

SEQ ID NO: 340095 - DNA, 52 bp, Zea mays
tcttcacttcttcttctgctatggacaaattcggcgtcgcgtcatgcatcga

SEQ ID NO: 340096 - DNA, 93 bp, Zea mays
tcgacccactcttctcgtcaggagcgacagggagctgcagaggggatttagtcgcaaggatggggcaattgcttccactaggcagttcgtgag

SEQ ID NO: 340097 - DNA, 75 bp, Zea mays
gcggccgccctttttttttaaaattttattacttaaattcaaaaaaaacgataaaaaaaaaaactacaatttaat

SEQ ID NO: 340098 - DNA, 67 bp, Zea mays
gcggccgcccttttttttttttatatatataatttttattacgacggaagagaaatttaattgaaag

SEQ ID NO: 340099 - DNA, 296 bp, Zea mays
gcggccgccctttttttttttttttttttattataataagcaagcggagagatacatctatatttcacaactgggaattcaaatctaagaggtccattacattctcgtcgctccggttttatatgagtatgcaagctagctactagtcgggttgggtgggagaccgttctaattttttttatttaattttctatatgatttcttttttatttatcctatctatttattcttatctttattttatttttatattttttattattatatattatctttattttttattattttttttt

SEQ ID NO: 340100 - DNA, 140 bp, Zea mays
  unsure (1)..(140): unsure at all n locations
gggaaagcgggaacgccggcaggaaccggaccggaaaacccggggcggacgcagccgcaggagaaaacaaaagacaacacaaccggcanaaggacgccggcgggacaaaaaagaaaagaccaaaacaggacgacagacag

SEQ ID NO: 340101 - DNA, 171 bp, Zea mays
gcggccgccctttttttttttttttttttttttttataaaatattgatattgacaaggaaaatggagactcaaagctttcttgtcactacagattattacagtactccatccctgcaagcatccgcttgatacccggtctggtcttaggtttccatgtaagttgaacaaac

SEQ ID NO: 340102 - DNA, 368 bp, Zea mays
gcggccgccctttttttttttttttttttttttttttttttttaaggaatagcctaagggatggcattaacatgtttgcactgaagcataaagcgaggtaaaggcgtgcgagttaatacaatacaaaaccataaagcatgaactttagtttacacttcttcttattttggccaattgtatttacaaggtatgacgcttctgttgataactgcacaaagtccacctaattgacaggcgccctttggtacatatcattttgactggaaagttaacaaatggaatacggattcgtttatatccacgttttcccttcaatgcttaggttttttttgttcaatgtataaccgactttgatgatcacatcttct

SEQ ID NO: 340103 - DNA, 205 bp, Zea mays
gcggccgcccttttttttttttttatataataataatatttattgtgcagtagtaactctatgactgtattaacattctctataataagcaagttcaatactactcttaacccttgtacactaaatcttgtataatttcttttttacgtgttattacattctatctttttactaacaattttgttttcattatttaacctttttc

SEQ ID NO: 340104 - DNA, 77 bp, Zea mays
gcggccgccctttattaattttttttttttataattataatagggggttttaaggggtatttgaccacataagcata

SEQ ID NO: 340105 - DNA, 82 bp, Zea mays
gcggccgccctttttttttttttttttttgaaaaaacaatgggaagacatgttagaaaaaaagggaattgttattttacgaa

SEQ ID NO: 340106 - DNA, 118 bp, Zea mays
gcggccgccctttttttttttttttataattaaatttaaaggtgaggcaaatacgtccataatatatttttctttatacaactattcaacaatatggttacatctttacatacaaata

SEQ ID NO: 340107 - DNA, 123 bp, Zea mays
gcggccgcccttttttttttattttgacagaaaaagcaagcatgagaaatttatctaagcaagcatgttgtctacagtaatccgttcatgctgcatggcatactattcattcttaaaagaaag

SEQ ID NO: 340108 - DNA, 255 bp, Zea mays
  unsure (1)..(255): unsure at all n locations
cggaccggaaaacccggggcggccgcccaannaaaaaaaaaaaaaaaaaaaaaaaaacaaaggggaggacaaaaaaagaggaaaaaaaagaaaaaaaaaaaaggaaaaaaaaaaaaaaagaaaaaagaaaaaaaaggaagaaaaaaaaaaaaaaaaaaaaaaaaaaaaaagagaagagaaaaagaaaaaaagaacagcaaaaaaaaaaaaaacaaaaaaaaaaagagaaaaaaaaaaaaaaaacaagaggggggg

SEQ ID NO: 340109 - DNA, 436 bp, Zea mays
  unsure (1)..(436): unsure at all n locations
gcggccgccctttttttttttnnntttttnntngatcngagggtggtattttttttgttnattttattttaattgttcattaaatatatttatttatattttagatttttgtatagtatatatttttttttttttttttattttttatattatttttattttattttattttatatttttttttattttattttttttttttttttttatttatttttaatttttattaattttttttttttttttatttaatttttcttttttttttatttttttatatttttttttttatatttatatttttttatttttttatttttttttttttttttaaatttttaataatttttttttttttttttatgtttttttttttttatttttatttaatttttattttaaatttatttagaattttttaatttttattttaatt

SEQ ID NO: 340110 - DNA, 500 bp, Zea mays
gcggtcgtccttatttttttattattaattaattattaaattatatatggataaaataataaaattataaattattaataaaaataaataataataaatatataattataattatatattaataataattatttaaaatttattttattttaaaatattaaattaatttaaatattatattaaatatatataatcaataaaattatatattataattaaataaattatgttaataatttaataattataatatattattaatataagttaattaataaataatattataaaaatataatataataaatattaaagaatattaaaaatataataaatattgtaataattatttaaaatatattatataaataaattacattgataaatatattataataaaaatatatatctataatataaaatatatatagatatatattatgagaaatattataattaataaaatattttatataatataaatataatattaatataat

SEQ ID NO: 340111 - DNA, 596 bp, Zea mays
  unsure (1)..(596): unsure at all n locations
gcggccgccctttttttttttataaaattaaagccgatacttcaatataccgtagcttctatctctcttnatattattaattaaacaataaatatataataaaaatttataaatataattctattattattaaaattcttaaacttaatttacttttcatatattaatatatatataatataatataatatatattttatatatcatattaaaaattttttaaatatatttaataattattatatctatatatatattataattcatattattatatatatatatacatatttattatattaataaaatatatattattatcatttaatattaataatatatacttataatataataaaattatatatttattatattatatttatttataatcaaataataattattcataaaaataatatatataatttatatatacaatattaaatttattataaatatatattacttattttatatatatattttaattaatatattatattattatttaaataatattatttattatatattatatatataatattaaatcaatattcttatattatattacaaatacatatatatattta

SEQ ID NO: 340112 - DNA, 53 bp, Zea mays
gactcactataagggaaagctggtacgacctgcaaggtaccggtaccggaaat

SEQ ID NO: 340113 - DNA, 73 bp, Zea mays
gcggccgccctttttttttttttatatttttgaaaggagggcaggggcagggctctctttaggagggaaacta

SEQ ID NO: 340114 - DNA, 117 bp, Zea mays
gcggccgcctttttttttatttgattttattattttattatttttgttttttataaaatttagtattatttgttataatgtttttaaattttttttttttatttttttttttttttt

SEQ ID NO: 340115 - DNA, 117 bp, Zea mays
gcggccgccctttttttttttttttggagcgaaaaaaagggctaggggcaaaacttttgaaatagtatgtccgataaaagtttaacgattaacaaccactactatactctcctttat

SEQ ID NO: 340116 - DNA, 240 bp, Zea mays
gcggccgcccttttatattttttttttttttttttttttgacaccaaagatgaagttccactggaatgacgggaccaattatgatttcttttcccgttaataatttggtgtagttataatgaaatcatgtaaagaaaaatcatactcagctttttactagtcactattgtatttacgatgactctgcatgtaacaacttcagtttattgatatctgtcattgtcagttctttatatcttt

SEQ ID NO: 340117 - DNA, 133 bp, Zea mays
gcggccgccctttttttttttattattatcaggaggatactcctacaggctgaactaactatcaagtttccacttacattctatatcatcttcaattaagctaaatgtgcttgatcaaataataatatcattt

SEQ ID NO: 340118 - DNA, 158 bp, Zea mays
gcggccgccctttttttttttttttaattattatcattagggcaggaccagcaagaattcctgatccattaaaatcagtctaggcaaacgatcatttcaatgagtgtttaccactactagtcagaatttagagagattgaaaaaaaaacatttctttt

SEQ ID NO: 340119 - DNA, 96 bp, Zea mays
gcggccgcccttttttttttttttttatgaacgcatgaatctgtggattaatattcactcatcctgcttttagtttaacggataagaaccaatcat

SEQ ID NO: 340120 - DNA, 92 bp, Zea mays
gcggccgcccttttttttatattatttcttatatatcaagaaaaaaagtaagattttaatgtatagacaaatgactaataatttcaaaccca

SEQ ID NO: 340121 - DNA, 319 bp, Zea mays
gcggccgccctttttttttttttttttttaatgaataacataagggtgtttttgtcttccggcagaagtcaattctctatcaatctgcatttaattacattcggatgtatcaggattccattgaacataatttattatcctttgttgttatcctttatttaaactttgttgaccttttatggtattataaagttcaaattctttgttttcttgttaaattgggttgttattcttgataatcaaaaatttttatgtttggtaaagttttatattattttatatcacttacttttattttttttaaatcgagttttttttt

SEQ ID NO: 340122 - DNA, 378 bp, Zea mays
gcggccgccctttttttttttttttttttatttttatttatttttttttttatttttttatgttattatttttttttattttttttattttttttaaaatttatttattttttatttttttaatttttattttttttttttttttttttttttttttatttttttttttttttttattatattttttttttattttttttttttttttttttttttttttatttttttttttttttttttttttttttttttttttttataatatttttatttttattttatttttttttttatttaattatttttttttttttttatattttatttttttattttttttttttatatattttttttatttttttaattatattttat

SEQ ID NO: 340123 - DNA, 353 bp, Zea mays
gcggccgcccttttttttttttataaaataatatattatttttatttgtgtgtttttttaaaatactcggtttgtttttcttaaatttttgattagttcatttatttattttttaatttttttattaattttattttattttttttttatttttatattttttattttttatttttaattatttttttttttattaattttttatattttttttttttttttttaattttttttaatttaatttgtatatttaattatttatatattatttttttaattttttttttattttttatattattttattatttttattttttttttttttattttttttatttttttttaattta

SEQ ID NO: 340124 - DNA, 66 bp, Zea mays
gcggccgcccttatttttttatatctatttactctatttgccaaagcgaggtcatccacgaattaa

SEQ ID NO: 340125 - DNA, 51 bp, Zea mays
ctgcaggggcggccgcccttttttttttttttttatgaacgcatgaatctg

SEQ ID NO: 340126 - DNA, 214 bp, Zea mays
gcggccgccctttttttttttttttttttgcaaaatcgactctatttagtaagaatcaatgtgttctcttttgagatacttttattttgcaaattgcaatggacaacgacacctcagcgatcgttcgctggaaaagaatagagaatcaatttctggaaacaaggagttgatcccgccgactaggaagatacgctaggtctggactgcacgctcg

SEQ ID NO: 340127 - DNA, 275 bp, Zea mays
gcggccgccctttttttttttttttttttttttgtcgaacaaaacatatcatacaaatccacggggggttttgttagttccaaatttccgaataccagtcactttacccacagcagtttggatgttaaagcttattccacgtcttatctagctaaacacggttgctagcctttcctcaatagtccatttgctgatttgataactttatcctttctagtgttacaccaaggttttaaacttgttgacatgcaattgcttgctgattttttttttgt

SEQ ID NO: 340128 - DNA, 508 bp, Zea mays
gcggccgcccttttttttttttttttttaataatattttttaaagcagcataaaagtctagatcgaacttttatatttacaatttttttatatttattacttaatctataaaaagtaattttcttttaagttctgttttttgttaaaatcttactactttttattacattaaatcttcaatatttaatatttgtaaaattttcttttattatttatatattcacattttaatactctattttatttagtactttcttattgtataaacttatatatgaatttattattttataatttatatttatattttatattaatatatagcatcttaattatttttttaaatattttaaatatatttactatcatttttcttttttatcaatttatttaatttacaaatttaataaattaatataatttattatattacttatatttttttatttattatttgattaattatattatttttcatatattttctatacatatattaatttttttt

SEQ ID NO: 340129 - DNA, 113 bp, Zea mays
gcggccgccctttttttttttttttttttttacacggaaattttggttaggatatctgattcaacttctactaatccattacatcatgaaacttatataagtaaaattaattt

SEQ ID NO: 340130 - DNA, 353 bp, Zea mays
  unsure (1)..(353): unsure at all n locations
gactcactatagtggaaagctggttacgcctgcaggtnaccgtgtccggtaattctccggggtcggctcgcccttttttttcttatattaaattaatagaaaaactttaatttgttttttttttttttaattaatatttttttcttctttttttttttttttttattttttattaattattttttttttttttatttttatgtttattttttttttttttttttttttttttttatttaattattttatatttttttttttttttttattttttttttttttttatttttttttattatttttattttattttttttttttttttcttttttttttattttttattaattttt

SEQ ID NO: 340131 - DNA, 76 bp, Zea mays
gcggccgaccttttttttattatttaataaaaaatattaatgggggtatattaaataataaagagttaaataatta

SEQ ID NO: 340132 - DNA, 442 bp, Zea mays
gcggccgccctttttttttttttttttttttgggaatacaaatatatcactcacaccaaaaacggaggttacaaacacaacagtttaagcacgaagctaagcttctaaaaaaacaagacgactatagttttagcaaaagcatggttttcaaaactacaaggttgtgacgtccaaacaccttagcattcgaaaaccaaaatatttaaaaaatcatggtatatactatgcatccgaatagggccataaacattggtctctttttctattgtataacccctttcatgaaactatattgcaaggtgatttaccaatgtcgcaacttactcttcatcaaatcttcttgtgtaacctgtgttaattttgtgaatcgaagcaacaagaaaattgtttcacagccatattctatcactttagttaattttccctgacaaagcttgccatg

SEQ ID NO: 340133 - DNA, 438 bp, Zea mays
  unsure (1)..(438): unsure at all n locations
tagggaagctatacgccacccctgcacgtaccggtattcaattcccggggcggccgccctttttttttttttttttnnnnnttttttttttttgttatttttttgtttttttatttttatttttatttatattttttttttttttttttttatttttttttaatttatattattatttttaatataatatattttttatttttaaaaataattattttatattatgtttataaaaataatttttttttttttatattttatttttaattatttttattttaaaaatttattattatatgtatttttattattttaaattattatttttttatatttatttataaatattatgatttatttttataatatttttttatataaaattttttttttttgtatttttatttttatttataatttattatatattattttttt

SEQ ID NO: 340134 - DNA, 70 bp, Zea mays
ccggccgccctttttttttttttttttttatttaataataatatggggggggacacaagcgataacttgt

SEQ ID NO: 340135 - DNA, 85 bp, Zea mays
aaacgccacacctaccggaccttaattcccggtacacccaccctattttatttttttttataacaactaaaatttaacaatacca

SEQ ID NO: 340136 - DNA, 304 bp, Zea mays
  unsure (1)..(304): unsure at all n locations
cggcccccctttcctttttttttttttttaataaaaaaaaaaaggggggggatnnnngtaaaaagattatataatttaaataaaaaatatttatattttattttattttaattaaaatatttatttataattttataataatataattatttaataataaattaatatgttaaaaaataatattttttttaaaccaaaatatttaaaaaaatattgtttattctttttatcccaatatggtcataaaacaatggtccctttttataaatgtataacccctttcattaaaatatattttaaagtt

SEQ ID NO: 340137 - DNA, 273 bp, Zea mays
gcggccgcccttttttttttttttttttttttttttttttttttggggttttttttttttttttattaaaaaattttttttttattttttttttattttttttaaaattatttttttatttataattttattttaaaaatattttttttaatgtaaatttttaaatttttaaatggggaataaaaaaattgtataaatttttaatagtttttattttattatattaaagagtgtttattattatttaaattaatattatttaattaattttat

SEQ ID NO: 340138 - DNA, 196 bp, Zea mays
  unsure (1)..(196): unsure at all n locations
agagctangacggcgcacgcacgcatacttaaactctcatcctttaaaccacacccactttctatttaacacacacataatactcttcgagccattccattccatcttaagggataaaataattatccgttcattcaccaaccttttatacgatcccctcccactaattttttacaccgggacgcaaagcgagcca

SEQ ID NO: 340139 - DNA, 226 bp, Zea mays
tctgtattccattccagaaccatacttcgggggcccccgccgacgagctggggcggccatatacggcgaaagccctattccagcccttgggcggggatagataggttagttactatcaccaaaacccaaggcgggccagtgactatgctgtggtcatggaaatacgtgttgcaaattttttgctttaagggacctcaattgagggacgcctacatttcaaactttt

SEQ ID NO: 340140 - DNA, 190 bp, Zea mays
ttaaacatacatgcaggtctccacatacgtgggttagccatacaacagaggacattccacccactatcatctggcacacactgatgtcactttccagcttaacaactaaaccatacatcacatgtcgtcgccttttccagtcatagatagactaacctacactaatctcaacaggattttgtaccaggtg

SEQ ID NO: 340141 - DNA, 169 bp, Zea mays
  unsure (1)..(169): unsure at all n locations
tcgttccacgcgtcctgtttctggccatatacaactgctgggtccgtgtgaaactgaatggggtgcgtgtnctcctccattggttgtagcatctggagtggatgagcgtacacttaagtgagaaggttgtttgtgtttccatttttttcttctcttttaaatttttttt

SEQ ID NO: 340142 - DNA, 83 bp, Zea mays
ttatctcatatatgcaggtgtacatatccgggggtgtgccatacaacagtgggctttccacccacttttttcttgtgcacact

SEQ ID NO: 340143 - DNA, 240 bp, Zea mays
  unsure (1)..(240): unsure at all n locations
ttacacatctacgcaggtgtctgggggtggggcatattatagagggggtcaaactagtaataatcatgttccaatnannttttttttttttttacattaaatattttttttttattttatttttattatacatattattaatttaataatttcatatttctttttttattttaaatttattaaatgttttttttttataaattttaattttttattatttttttagttttataatttttt

SEQ ID NO: 340144 - DNA, 217 bp, Zea mays
tcgacccactctttctttacacataaatccaccaatacgggggcgtatattacccatacgagagtttaccatccattcaccatattcaagaactcactttattttcctatccatctcaaccattaatccttccttaacatatgtcccctatttcccaaatcaattttatcttaaactctttatctaattttttaatcaatctttctatcccatattt

SEQ ID NO: 340145 - DNA, 127 bp, Zea mays
tctttacacataaatccaggtgtacgggggagcgttttcgtcatacgggagagtactttccatccaatattttatgacacacactgatttctcttgccttctctactattatgtctgaaaataacat

SEQ ID NO: 340146 - DNA, 215 bp, Zea mays
  unsure (1)..(215): unsure at all n locations
tttatttttcaatccaggtgtacacatccgtgggttagccatacaacagaggactttccacccactatcanctttcacacactgattttgttgtcctgctttacaatttaaccttccatcacatgcgcctcctttccctagtcatattgctcctaacctacaccaacctcaacaagcttttgtatccatgtcatctcatttcttaactgttttcc

SEQ ID NO: 340147 - DNA, 298 bp, Zea mays
  unsure (1)..(298): unsure at all n locations
ttacctatccatccaggtgtacacatccgggggttagccatacaacagaggactttccacccactattttctggcgctcactgattttgctgtcctgctctacaattaggccttctattacatgtgtcttcttttcttatacatttttcaccctacctacattaangttttcaggcttttttcccatttcatcttattccttacttgcttcttttgtttttatttttcctcttatctttttttttgattttattttagattttctttttattttttggtttttttttctttttttttt

SEQ ID NO: 340148 - DNA, 238 bp, Zea mays
  unsure (1)..(238): unsure at all n locations
tcgtgtattattatctatccacgggttcacatacgggggctactcatacaacagaggtccgtccacccactatcttctctnnttcacttattttcctttcccgctctactattaaaccatatttctacatgcgtctcctatcccctttcatttttagctcttccttcaccaaccttaataagcttttgtcccattttatctttttccttaactttttttcttttgctattaatttccc

SEQ ID NO: 340149 - DNA, 124 bp, Zea mays
tcgacccactcgttctgtacacatccatgcaggtgttcgggggcgtgttttacccatacgggagagttctttccactcactattttttcgcattcactgatgtcgctgtcctgctcaacatttt

SEQ ID NO: 340150 - DNA, 145 bp, Zea mays
tctgtatacataaatccaggtgaacgggggcgtgtattagccataagagagaggtctttccaaccaatattttttggaacacactgatgtcgatgtcctgctctacaattatgccatccataacatgtgttgtctttttctattc

SEQ ID NO: 340151 - DNA, 79 bp, Zea mays
ttagacgtcaatgcaggggttggggggcggggatgagtcataagggagaggactttccaatcactatgtctggcgcaca

SEQ ID NO: 340152 - DNA, 204 bp, Zea mays
ttaaacttaaatgcaggtgtaggcatacgtgggtggggcgtacaacagaggacaggccacccaatatcatctggcacgcactgatgtcgctttcaagcttgacaattagaccatacatcacatgcgtcggctgtctccagtcattgatagactaacctatactaatctcaacaggattttgatccaggtgatgatatacctaac

SEQ ID NO: 340153 - DNA, 52 bp, Zea mays
tctcctaatgctaccagccaagccctaattagtgcaagttctaacgaccatg

SEQ ID NO: 340154 - DNA, 111 bp, Zea mays
ttatttttaaatgcagctgttggtattcgtgtgttggtagtaacacagaggtccgtccaaccaaaattatcaggcacacacttatttcgatttcctgctcaacttataaac

SEQ ID NO: 340155 - DNA, 318 bp, Zea mays
caatccagctgttcttatccgggcgtgggttgtaacacagaggtcctcccactcaatatcttttggcacgcacttatttcgttttcctgctcatttattagaccatccattatatgcgttgttcttttctatgtcattttttgatttatctattctaaccctttcttgctatttgttccattttatcttttttctttcttgttttttttttttcagattattctttttattttttttatttttttctatatttatttttttttttctgtttttcttttctttttggttactctttatattaatttcttcttctttttt

SEQ ID NO: 340156 - DNA, 361 bp, Zea mays
gtaaatttcaatccagcagaacaaatccgggcgggctttataacacagagggctgtccacccactatcttctggcacacacttatttcgttttcctgcttaacaattattccacccttcacatttgttttctttttctatttatactgatcctaatttatacctatctcattatgtttttgttttaagtcattttattttatactgtaccctttatttatttttaattcatttttaaccatattcttaaattttaacttttatatataccttttttttttatttgtatattttatttataatttttatatttcttttcattttttttctttttaattattatttttaatctaaattttttt

SEQ ID NO: 340157 - DNA, 104 bp, Zea mays
tctgtacatataaaagcaggtatccgggggcgtgtacttttaaaaagggggtgtcattttcaaatatatgttactcatttaaatttttttcattctcaattatt

SEQ ID NO: 340158 - DNA, 105 bp, Zea mays
tcgacccacgcttcctttacatatcaatccacgtgtactggggcgtttattactcataaaagggagtttcctcccaatcaaaattttttatgtactcaccttatt

SEQ ID NO: 340159 - DNA, 197 bp, Zea mays
tcgttagatgttactgcacgagtcctaatgagtgtatggctcatacaagagagttctgtccatccactatcttctggaactcactcatgttgcatgtcctgctggacgattaggcacgtacatgacataggtcggcgatctcctgacattgtgtgactaaccctcaccaatctgaataggtttttgtcccaagtgat

SEQ ID NO: 340160 - DNA, 252 bp, Zea mays
gtaaatttaaatgcaggggtaggaatacgtgggtgggtcctaccacagaggactgtccacccaatatcatctggcacacactgatgttgttgtcaggcttgacaattaaactatacatcacatgcgtacgctgtctcctgtcataggtagactaacctatattaatctgaataggattttgttccatgtcatcttatacgtaactgatttcctgacggtttgattgacctactaacatttaagtgatcttaa

SEQ ID NO: 340161 - DNA, 365 bp, Zea mays
ttttctgatggttcgagccaagccctagtaaggggatgttcgacggaggaaggtgcttcccagcacgttctcaattgcatctctctcattgttcatttcaagttatgatatctatggcttgtatctatctatcattccatctttttatatattattaaattttattataatttttttttttattttttgtcttcttttttttattcatcttatttttatattttcttattttttattttttatctttacatttatttttttaattttatattttattatttattatacttgaattatttattaatttttttattttttttatttattattttatgttttatcgttgggtttttgtattatttttt

SEQ ID NO: 340162 - DNA, 70 bp, Zea mays
ggatttataaatggaggggtaggaagaggggggggggaaataaaaaagagggggggccaataaaaatcac

SEQ ID NO: 340163 - DNA, 167 bp, Zea mays
  unsure (1)..(167): unsure at all n locations
tcgacccactcgtcctttcatcatcaaaccacctgtacacattctgacggtgcttctttaaaaaagggttttccatacaatatcattcttnttcacatttattattattatttcccttcttccctttccactttttctatcattttttaatattatttttttttttt

SEQ ID NO: 340164 - DNA, 142 bp, Zea mays
tcgacccactcttcctggttatttcactccaacaaaactggggcgttttttactaataagggggggttcaaaccaatcaaaattttttcataacttactaatttcattttcttttttaattatttaacccttctaaatatta

SEQ ID NO: 340165 - DNA, 181 bp, Zea mays
ttaaaaccctaaaccctcgctacccggcgggggctacaagctctacgggggggcagcaacataaggtcaccggctagaggaggacgtggtgggaggggtggcaggttcgactgcaccggacatgggggcggtggctcgcagacgtgggtttggcagcgtgagatgccgtagaagggacagg

SEQ ID NO: 340166 - DNA, 175 bp, Zea mays
  unsure (1)..(175): unsure at all n locations
ttattatttctaaactggttatttcaaagtgaggggatattttaaacacgggtgtgttttattataatcatttatattattattttttcttataatatatctntttttaaattttctttttatttatattttttatttatcatattatttttttataactaatttttctttttta

SEQ ID NO: 340167 - DNA, 159 bp, Zea mays
tctttttgtaaaactagtacggaaatggcgcgcaggcgttgttcctaacgcgacggtaagatgtaagcaccaagcaatccacttttctggaggagagcaacttcctggaccatctccaggagagcgagcgacatgcgctcgtcgagctccacgacaagg

SEQ ID NO: 340168 - DNA, 100 bp, Zea mays
tcgacccactctttctgtttatattaccccaaaatctccgggtctttttatttaaataaagggggggacaattaaacaaaatttatattttactcactta

SEQ ID NO: 340169 - DNA, 132 bp, Zea mays
tcgacccactctttcttttatatctcaccatcaaatccccggggcggttattttataaagatgggggggctacctaacaaaattctataaattactcttctatatcaattccaatctttacctcaattttat

SEQ ID NO: 340170 - DNA, 397 bp, Zea mays
tcgacccactttttctcctaatcccaccagcaaatccccaggtgcgcctatttcgagcgagcgtgtggctacctttcaaggtccttaagattctggtcaaaggcggtgccaatctttactccaaggtttttcgtgacaacatccatttcattactaatctctctatcacttttctttcttataggtgtttcttaaatctcatatcttttcatatctactaatttactattttttatcttttagattttttattatttctttattttttactatttttacatattcgaggttggtgtattttatatatttttttttaattttatatttttttttatatttattaaaaattttttttatatattttttaatttttttataatattctttatatttattt

SEQ ID NO: 340171 - DNA, 381 bp, Zea mays
ttattattcaaagcaggacctagatgaagtaggcgatgtttacaacagaggtgaggccaattaaactcatcgggcacacgatgatcttgttcacggagtcttccatttaattttctccggcaggggttgtttagatattttcttttttatagtatccttatttagttctggtttgctttttgtcttttttatctttttttttttatttttttttttctttttttatttatttttttttttcattttaattttttttttttatttatatttttttttactttgatgtcttgttcttttttttataaattactttcttatctttatttatctttattttatttttgtttttttttcgttgttttatttttttttttcttattt

SEQ ID NO: 340172 - DNA, 232 bp, Zea mays
tttatattcaattcaccactcacctaacgggggggatcaaaacaacagaggtggggccaattaacatcatctctcactcccttatctcgaccccatgggggatctcattactatccacaacagccattccctttttcatgtcgcattctcatgcttctatctttactgctctttgctttttatccattttgactttttggtaaccctttactataccattgttttatttttt

SEQ ID NO: 340173 - DNA, 281 bp, Zea mays
tcttttttcacaggagcagtcaccatacgtgggcggtctataaaacaacggtcgggccaaacaatatcatcaggcactcacttatctcggtaccaggtgtgaccactttactgtcctcaacattggttctctttttcttgtcctatgttattatacccaccacaagcatttttttcttatttttcattgttgacatttttgttttctttttgtctattctctcgttgtttcttttaatttttctccatatcttatttctaatatttttttatactatattt

SEQ ID NO: 340174 - DNA, 268 bp, Zea mays
acttccacacttacaaaaagggggagttctaaaaaaggagggtcgtgccaaacaacatcaacattcactaccttctcgcggcgccacaagctatcacatttctctacacctcttcttttcactttttcttgtcctctttaaattttactttttttaatcttttttattttttttacatttcttttatttattatttcttttttttttcttttttttttttttttttttttcttttattttttttttttcttttattatattttttttt

SEQ ID NO: 340175 - DNA, 119 bp, Zea mays
tttaaatttcaccagcaaatccccatgtcgggggttttctagcgatcaggggttttcccaacaagggtcttaatggtcttgccaatggcggtgccaagcgtgacctcaaggctctacat

SEQ ID NO: 340176 - DNA, 129 bp, Zea mays
ttcaaattccaccagcaaatccccaaggggggcgagttcgagcgaccaggggtgatcccagcaagggcggtaagggtctggccaaaggcggtgccaagcgtcaccgcaaggtttttcacgacatcatcc

SEQ ID NO: 340177 - DNA, 234 bp, Zea mays
ttattcttcaatcatcgtcccagcagaagcaggggattcatatgacgctggtcggggcattccacctcatctccaacaacatctacttgcacacggagcgcttcttttacatgcacctcacttatgttctctacattattttccttggtaagacctctgacatgctctagttggccttcagtgccattgttgccattgagaatccccttgacattatcgtgcattctgttatgc

SEQ ID NO: 340178 - DNA, 203 bp, Zea mays
  unsure (1)..(203): unsure at all n locations
ttaatatttaatggacggctaggaagaagggggcgatgtctacgacggaggtgatgtcattatagatcatcgtacacactcttttcttgttcacagaggtgtacacttaactgttcaatgcaggcgttcacttgcttaagtcctaggttctggacgctaaaatgatctgggttttcttttgancaatggtagctattaggtag

SEQ ID NO: 340179 - DNA, 205 bp, Zea mays
ttaatatttaatccagcgctaggaagaagtaggcggtgtcttcgacgggggtgagggcatattagatcattttacacactaatttcttgttcacagaggtgaagacttaactgtaccatgcaggcctacacatgctcaattcctaggtaatggaggctataatgatcgcggttttcttttgagcaacggttactgttaggtagcc

SEQ ID NO: 340180 - DNA, 352 bp, Zea mays
  unsure (1)..(352): unsure at all n locations
tttgttttggnngnacggttnnncaaaggggggggggttttttttggggggggaggggttattaaaatttttttaatttttttttttgttacttttaatatttttattttttaattttttaatattttttttttattttttatgttaaatttttttttttttattttttttttttttatttgattttttaattttttatttagttttttatattttttgttttctttatttttttttttggttttttggatttatctatttttaaatttttattatttttttttttttttataacttttttttttctctattttttttttttatatttgtattttttttttttattcttttt

SEQ ID NO: 340181 - DNA, 55 bp, Zea mays
ttatttttcacaagaggagtcggataacgtgggaggtgtatatcacagtggttgg

SEQ ID NO: 340182 - DNA, 243 bp, Zea mays
  unsure (1)..(243): unsure at all n locations
gcggccgcccttttttttttttttttttttttttttttttgtttttttttttttttttttttttttttttttttttttncactaccaacatcagaggcgcgggcttgcggtcaaaaacccagttgggcacccccccccccgaacccgaacccaactttttggccccgggacgcccccagccaaaaataaccccccttttacctggggggaccccccggcccaaagccaacaaaattactaggc

SEQ ID NO: 340183 - DNA, 328 bp, Zea mays
  unsure (1)..(328): unsure at all n locations
aaaggagaaggaaagaaaaatttttttatttttataaaaannnaaaatnaattaaaataaattagggtttaaaataataaaggggaatgaataaaaaaaaataatttataaaataaaaagtataaaaaaaaaaattaaaataaaaattattaaaaaaaataaataaaataaaaaaaaaaatttaataaaaaaaaaaaattaataaaaaaaaaaaaaataaaaaaaaataaaaaaaaaaaaaaataaaaaataaaaaaaaaaaaaaaaaaaaaaaaaagaaaaataaaaaaaaaaaaaaaaaaaagaaaaaaaaaaaaaaattatatat

SEQ ID NO: 340184 - DNA, 53 bp, Zea mays
gattacttaaacagatcgtggtgtaacctagagggcaccacctgattgttctt

SEQ ID NO: 340185 - DNA, 183 bp, Zea mays
gcggccgcccttttttttttttttttttttaacaatatcgtcatcatcatcgtcaccgttcattcatcagataaacaaatggtggtggtggtagtactgtgatacaggagagaagcagcagcagcagcaaactatgggcggatgctcctagatgactagcatatatggatgcggtgcgcggca

SEQ ID NO: 340186 - DNA, 281 bp, Zea mays
gcggccgcccttttttttttttttttttttttttttttcttttttgagaaggtacatgcttcatatttaccaatataagaacatggtagtctgttgtctcggtgtattaaattatgttacatgaaaattgacaaacagaagcaaattcttaagccaaaactgcatacattccactggatcctttagatccgcaacaacccaattatttacatgcaacttttttttccactagctttcatatgtgaagagcggtcatacggagttttccgcttgtatggacc

SEQ ID NO: 340187 - DNA, 409 bp, Zea mays
gcggccgccctttttttttttttttttttttttttttttggagataagagtgacacgctgacaagcaaaggtgaaccaggttttacagattgatcaagaaaagcaacagacgtagtaagtaccattcttagcgaacttatctgatcaatatcaaggtgagtaacttctttcatcgaattattaaatccatcatcggttccctttgatgactgatttctttccaaaacattaataacttcctgctgaatattatctctcctggaaatggtaggggaacctgcaggcccactcttaattttgttttacttgatttccttttcactactagaaaatattggtaatgcatccattttttagggaataactggtaataatctttggggaattaagttttatttgttactttttt

SEQ ID NO: 340188 - DNA, 385 bp, Zea mays
gcggccgcccttttttttttttttttttttttttggcttaaaaaggcgatacatgcgtattaagtgtttaaaagtccagcctcgccataaaaaatgtatttggcaaactatccaatctacgcacatgcaacatcgcaccacgtacgtcaacgtgagtttttatacttcatgcagggttgtttggacttcagatgtacactaaatatctataccttaccagtggagactaccatctaaaacctgtttattctgggatgctttatctatagagcttctttgttgtcaagcttttttcatgttgacgtaattgatatttggattgctatttaaagactgatttgacaacatacaacccggttagttggaccctattttttttttcttg

SEQ ID NO: 340189 - DNA, 240 bp, Zea mays
gcggccgcccttttttttttttttttagtgaaaagttcgattatgcataggcaataaactaattacctggcatctcaaaatatttaggttatagagtattaaacactttaactaccaattgtgacacatactaacctggaaaaaaactatcattggtgctcagttcttttattagagtacactgcatatatcagatgtttaaaactaaacatggttcacgtttaattattcaataaaata

SEQ ID NO: 340190 - DNA, 342 bp, Zea mays
gcggccgcccttttttttttttttttttttttggacatcaatttacctctgttcattctgccagaattctcatgcatggatctcaagagaggatatgtagcatcagcatacaattaaaactggaaatcatacgctggacatattggtcaagtacaacgcgatgaaaatggctgaaggattacataaatctaactgttgtaaaactaggcagaacagcatcatattcccaagggagcagcacagagagcatgcagagctccaggcgtagaaccgtgcccaaacaagtctagcacccggggagtttgacggtccaacttcgaattcccttctttcacaccacca

SEQ ID NO: 340191 - DNA, 345 bp, Zea mays
gcggccgccctttttttttttttttttttttttttttttctacaggcaaatggttaagcaattccgattcgtcatctggaacattttttccagagaacattgatatgaactaatctgaattattaccaaatgtctctaaacaacaaagaaaagaaaagagtcccacagaatagaatagacaatagaatgaaaaaacaaacaaatccgacgaagaaaactatagtggcaactgggttcaggcgcgagtggcccatgaagcttcaacggtgggcccaactgggtctgtgaatgtaggtggtacatttcattgcactgcgtcgcttatttggaatgaactttattgat

SEQ ID NO: 340192 - DNA, 119 bp, Zea mays
gcggccgcccttttttttttttttttttttttttttttttaatggtgggtttttttagtggtttttttttttttatttttttttttgtgtttttttatttaatttactggccggtgtaa

SEQ ID NO: 340193 - DNA, 420 bp, Zea mays
gcggccgccctttttttttttttttttttttttttttttttttttttttttttttttttttttttttttttttttttttttttttttttttttttttttttttttttttttttttttaaattaaaaaatttttttaaaaattaaaaaaactttttaaaaaaaaaaaattgttttaaaaagtttgaaataaaggggataaaaaaaaaattttttttaaaaaaaggttttttttaaaaaaattaaaccccgaaattaatttaaaaatttatgtaccaggagaaaaaactattttaattttaaaattttaaacctttgggggcggggggcctttaaaaagctttgggcatatatttcgagtttttaaaatttttgggggtttatatttttttttttttttaaaaaaagtgaaacagaaaattt

SEQ ID NO: 340194 - DNA, 177 bp, Zea mays
  unsure (1)..(177): unsure at all n locations
tataaaaaaaatagnantgaaggtacagatccggaataaaggggcggacgaccttttttttttttnnaacaaaaaaaaaataataaaataagaaataaaaaaaaaaataaaatgttaataaaaaaaaaaaatgaacaaattaaaaaaagaaaatatttaaataaaaaaagatataag

SEQ ID NO: 340195 - DNA, 432 bp, Zea mays
gcggccgacctttttttttttttttttttttttttttttttttattttttaatttttatttatttttttttttttaaattattattttttttttaatattaataatttttatatattttattttttatttagggggaaaaaaaaaaaactaaatttttaaaaaaaatttagagggaaaattataaatttaaaacaacactctgagaaaaacaatttatttaaaaacaaaataactgacaaaaaaaaagtctaaatataaaaaaggaaaaaagtcaaaaaaacaaaaaaattatattaaaaaatcatttcttaattaataaatttaacaaaaagtaaatataaataaaataatatttctaaaaaaataaataataattattataaaaaaaacattgatttaaattttaaaaaatttaaaaaacttattatttt

SEQ ID NO: 340196 - DNA, 287 bp, Zea mays
  unsure (1)..(287): unsure at all n locations
gcggccgccctttttttttttttttttttngaagtcgtaaaatgaaggccctgcacaagcagcaggtccgcgtgtgaaaaacagtagcgccctaatgtgaagcatgctcgaagctcaaagccaaaaaaaaaaaagataagagcttccgaacaaatgttttgacccatacattatctacgcaagaaacccatggcttggtaaacattgatcagggtgatgtctgctatttaaacagctgttactggtccttttaaaaggacattacccaagtaggctggatcaaacat

SEQ ID NO: 340197 - DNA, 179 bp, Zea mays
gcggccgcccttttttttttttttttttttttttttttattggggggttgtttaaaacatattctgagggtggaaatgaaaacaacaaacatttatgaccatatcggacaaacctatgttataattaatcttggtcattaggtgttaccaccaatattctgtggcctattttaccattt

SEQ ID NO: 340198 - DNA, 247 bp, Zea mays
gcggccgcccttttttttttttttttttttgttgaggccggaggcgaacactaccgcgctgaacagaatcattacaacggaaccgaaagacgatatgatagagcatggccatgcgatctagagaagttacagcataatgggggacagcccatagatctacatgattttgtggcaggaaatgtaataaggcatatgtgagtcgttgatacaatgtgagtccatgaacttttgcaacttggcatgacta

SEQ ID NO: 340199 - DNA, 320 bp, Zea mays
gcggccgcccttttttttttttttttttttttttgggtcgctgacacacgctagcgcgctggtggatttattttcactcaagcccagttcgctattacagaccatggccatttcaagcacagagctcacagcagtgtcagcgacagcccacagctctgctgcatttcgaggcggataaccggatacggatcaggcgacgcggcggcacagcgtgagcccgtcggcgatggcgacctggcagacgtgaacgcggggatcggcggccacggccgcgttgaactccctggtggccgcagcgagcgcgcggtcccgcttggaga

SEQ ID NO: 340200 - DNA, 93 bp, Zea mays
gcggccgacctctttttttttatttttttcgctttttgccacacaaccggggcgatgtgtttactggtataagaactatagttataaacattg

SEQ ID NO: 340201 - DNA, 126 bp, Zea mays
gcggccgcccttttttttttttttttttttttttttttttttggtgtattttacataaaaggggaaccctggggctttatactttcaaacacttttacatggttctaaacattacgggtaaatgaa

SEQ ID NO: 340202 - DNA, 381 bp, Zea mays
gcggccgccctttttttttttttttttttttttttttttttggcaagaaaaatagcatatcactattgaaaaatggaccaataataatgcaaaagaaagatgttacaattggagaaaagagagaagaggaaaagcacaaactagttacaaatgagattataactgctgtatctagctccatgggtcgtcccagcctttgggcccctcccttttgacaaaatctacaatggccacaactgcttcttgcactctgttggacagagcatggtttccccattttatctcgactttctctgcacctcccagcgccctacataaacttgttaggtgagcccctttattaacatatatagggacatattcattctccattgaataaat

SEQ ID NO: 340203 - DNA, 64 bp, Zea mays
  unsure (1)..(64): unsure at all n locations
ggaacgccggaaggaaccggaccggaaaaaccggggcggacgacctttttttttttttnnnnaa

SEQ ID NO: 340204 - DNA, 482 bp, Zea mays
  unsure (1)..(482): unsure at all n locations
cggacgacctttttttttttttttttttttttttttttttttttttttttttttttttttttttttttttttattattttatttttattttttttttaaattatattttaaaaatttttaaaaaaatttaaataanaataaaaaaaaaaataataaaaaatatatatataaaatttatatataatttatattataaaaatataaaataaaatatttttttaaaaaaaataatatttaaaatataaaataattattaataaattaatttaataaaaataaaaaattattatatttatatattttaaatatattaattaatataaataataattaaaataatttttatataatttaaaataaattataaataatataattataaaattatatattatattataatatattttaataataatttataataaaaaataaaaatattatattataatatataatatattatataaatttataatatt

SEQ ID NO: 340205 - DNA, 265 bp, Zea mays
  unsure (1)..(265): unsure at all n locations
gcggccgccctttttttttttttttttttttttttttatttnannannttttaaacaacttttaatggtttccaccaaacgatttttagctttttaacaacacacaatctacaaaagtttttttcacagtttacaacccacagcaactttttccacagtcacagcccacagtaactttttttacagccaaagcccaaccaaacagaccctaagttggtcgccatcccctctaaatgcctataaggacacacaaaatttgagcacc

SEQ ID NO: 340206 - DNA, 88 bp, Zea mays
cggccgcccttttttttttttttttttaaggttgatccatatggtggtctaaactaactataattttaattgacattaattataaatt

SEQ ID NO: 340207 - DNA, 175 bp, Zea mays
  unsure (1)..(175): unsure at all n locations
gcggccgccctttttttttanttttttggaaactaatttattaaaatagggaaaatacttataatttgaagaccattaacaatctccctcaaattgcttacttaaataaaaacgccttatcaatctaacaatataatttttattaattcaatcattcaaacaatgtaggcaaaaa

SEQ ID NO: 340208 - DNA, 62 bp, Zea mays
  unsure (1)..(62): unsure at all n locations
gcggccgcccttttttttttttnnnnnaanangatgcaacaccttataaattgaaataacca

SEQ ID NO: 340209 - DNA, 278 bp, Zea mays
gcggccgcccttttttttttttttttttttttttttttattttttttttttttttttttttttttttttttttttttttttttttttttttttttttttggactacacaacaccattgcatacaagggaatttgaacatttaacccattttgggggtccggaataaatttttggggcaaaggaccggggaggaaaatttgaactgttccacaaccaggggaaaaaaaactgtcccatttgaatttgccccggttcccttgtttggaaatttatttttt

SEQ ID NO: 340210 - DNA, 416 bp, Zea mays
gcggccgccctttttttttttttttttttttttttttttttttttttttttttttttttttttgggaccggaccgtacagtttgatgacatgttattttcacgaaatccaaccaggccattttatggtacaatgcgcagagcattttatgctatgtcctttggacccaaaaatttaagcacatgaacgtcccaaaaccaaaagaaaaacacttcagatacaacaaatttttttgaggttggtgcgagggaacaccaatacaattattgaccttttcaaggactcccctgatccccttttttacaatctgttgcttttcatgagctttataaactcgccgaaggctgtgtcggagtcatgcggaccaggggaagactcgggatggtactggagagacataagctttattttggagta

SEQ ID NO: 340211 - DNA, 471 bp, Zea mays
gcggccgacctttttttttttttttttttttttttttttaatttatttttttttttttttttttttttttttttttttttatatatttttttttttttttttttattttattattatttttttaaattataattttattttttatttttaattttttggggaaaaaaaaaaaatttaaatgtaaaaaaaaaacaaatctaaaataataattaaaaagataaaaaaaaattaaaaaaattattcgacaaaaaaaaaacaatttttaaaaatagtttaaaaaatcacaataataattgtataaaaaagggaaaaaaaaataaaataaaatttttttattatgaaaaaatataaattatttttttataatttgaaataatataaaatttaatattatataatttctatataaaatgatatatacatatttttaataaaatattattagtttaaatgatatatatatattataaa

SEQ ID NO: 340212 - DNA, 107 bp, Zea mays
  unsure (1)..(107): unsure at all n locations
gcggccgcccttttttttttttttttttattttntttaaaaacgactgttattggagatgtaataaaggcagaagccagttgttacagacacggtttaagtttttta

SEQ ID NO: 340213 - DNA, 205 bp, Zea mays
gcggccgcccttttttttttttttttttttttttttttttttttgagggtaaccaatttaacgaatccctgactattattaacaagaattcggggtcttgctatatatacaccttgctatacagtggcggagccggcctgaaatcgacaccgttgcctgacccatccaaacgttcgggtgctaggccgttcgatgagcccaccca

SEQ ID NO: 340214 - DNA, 228 bp, Zea mays
gcggccgcccttttttttttttttttttcaagaatgcacatgcaatgcaaataatggtatggtactctgctggagatgctatgtgatgccttggctagcattattacaaactcattagcaccaatcaaaactatttgttcataaatcatgatggtgattatgcaatttgataatctggtatttttacataatatattaatattatatatctttgtttgactgtatttt

SEQ ID NO: 340215 - DNA, 283 bp, Zea mays
  unsure (1)..(283): unsure at all n locations
gcggccgccctttttttttttttttttttatntaaataaaaaagtgggccaatgtaacgcgcctgatcttattggtcattccaaacaacccacactaacagcaaccatattaagaatgcatcgctgttattacccagacgcaaacatgccaacccaacgtacgctgggcaatgtgtgcggtgtacacgactcgccgtccgtcacccccaaccaatttgaaagccaaagcctaacgcccgcccacgaatacacagattactcacaggccacactttccataagt

SEQ ID NO: 340216 - DNA, 305 bp, Zea mays
gcggccgcccttttttttttttttttttttagtgaccaaatattggaattaaacttcctgaaccatacgcatgtcatacaagcaaatgcagagttccagttatgttcagaacaaacgttcacaagggttttgatttcagcagcacagattgctctcccctaagttcatggcatgatacgcggcatgcagagcataaatctaccatgatcccacagcgccctgggctgggttttcgaagtgagtgaagccccagtaggtcttcaaggaatatggtgggtagatgggtgatccttcacttgtgatct

SEQ ID NO: 340217 - DNA, 238 bp, Zea mays
gcggccgccctttttttttttttttttttttttttttggggcattaccgacactgtaagccgttcttttaccaaaatttactttactgatggaaggagttcaacagttcgttgcaattgatgaatggtgatacagattagcacacgcctatttgtagtacaagcttacgctacacaggtgcaaatggtactccggtctttttggccagttccacgactctgtaaaaagtgcataaaac

SEQ ID NO: 340218 - DNA, 248 bp, Zea mays
gcggccgcccttttttttttttttttttttttttttttttttttttttttttttttttttttttttttttttttttaatttttttggaagcaacaatttaaaccgccaatatttttctaaataacccggttggaaggcaggggaaaaaacacacttaaaaaaaacagggggggaaaaccaaacaattctttaaaacagacccacataacacaaaagcgggagcaactttgggaaatacacctgaaaaa

SEQ ID NO: 340219 - DNA, 241 bp, Zea mays
  unsure (1)..(241): unsure at all n locations
gcggccgcccttttttttttttttttttttttttnntaaanaaatggggggggttgttttgcaaagaaacatgacacgtgatattttagaaatagttaaattaaccatgctgtgtgatcaggcatgtacaatggatttggactaacagatttacaatttgttcttccctaagttctatggcatgttacacgagttttgcatatggttaatctaccatgattcccaaagcgtccctgggttg

SEQ ID NO: 340220 - DNA, 348 bp, Zea mays
gcggccgcccttttttttttttttttttttttataatttatttttgttttttttttttttttatttattatttattatatttttttttctatttttattaattatttttttatttataaaatttttatttttaatatcttattttttttttatttttaacaagggaacaaaaaaaattttttaaggtttattataaacattaaaaaaacaatgttctaccttaataaagggtaaaagttagaaaaaaaaaaatttgcagactttaattttgataattaaaaacggcgggacaaataaataaaattaattcttcaaaaaaataatatttaataaaacgttatttacttt

SEQ ID NO: 340221 - DNA, 209 bp, Zea mays
gcggccgccctttttttttttttttgaagcaaagcaagccaataatgattcattcattcagtaggagaaaggagatgagatctcatacatagttgattcagagtacagacataatacatgatcagaaattcataatgcatcaacctatgaccaggcccttcttttgagtcaatcaacccccattttcttgcgccagcaggctgacaaat

SEQ ID NO: 340222 - DNA, 274 bp, Zea mays
  unsure (1)..(274): unsure at all n locations
gcggccgccctttttttttttttttttttttttnnttantaacaaaaaagatttagataaaaaatattacagaaaagacataaaagtctataacattgttttagaggacgcaagggagcacaatattggtcatgtgtttttcaaataacacatttgtgcctatttaaaatagcaaaacagtgcctgcatatgaccaatcttattttctaagtgcatgctacttctttcttttttttattaatatttttttcgtaattttgatatttttttattt

SEQ ID NO: 340223 - DNA, 417 bp, Zea mays
  unsure (1)..(417): unsure at all n locations
gcggccgccctttttttttttttttttttttttttttannnnttggggtattgttttttttttatatttatattttttttttattaatttttttttaatgaaaggaaagggggggaatgttaattaaccaacttggttaaaaaaattcaaatgggatacaatttctaattaattattcaaattttaattcaaccaatttgaaaatcgttttggccaaaaatcaaagcaatttctgatttaatttattccgccccacccttgaaaaaaaaagtttttttttttgttaattttaacgggccttttaattcttaaaaaaaattgttttttttaaaaaatttttttattgttgaaaaaatctttttgttcctttttaaaatttttgttggaatcttttttggtttttaaaaaatatttttt

SEQ ID NO: 340224 - DNA, 203 bp, Zea mays
gcggccgccctttttttttttttttttttttttttttttttttgggagggggttgtatttaaaatttttttttttttataattatttttttttttggggaaaaaggttataaaaaaaaaaaaaaagtgaagatttaaaaaaattaatgtaataaattaaaaaactaattatttaaaaaaaaacaagcctggttaatttttttg

SEQ ID NO: 340225 - DNA, 427 bp, Zea mays
gcggccgccctttttttttttttttttttttttttttttttttttgttttttttttttttttttttttttttggaccagattaaaacagctgcataaatttaagaaccggaaatacactttactttttttttaaacctttacgcttctcaaattagacacgagatcactgtttgcacatgcttgggctaaaaattgaacctaatagcttacatttgcatgatgcgatgaacactaagaggggtaaccttttacacactgggaatgtacaaagcgtttgtcatttacgatcagtttattttcggccacacctgcaacttaaccgagatcagggttttcccaacaacttctgcaccgtttgagcgagcctgggcttgcttttgatgccctggatccaccttgcgctgatccggacgttttaaaggcttt

SEQ ID NO: 340226 - DNA, 277 bp, Zea mays
  unsure (1)..(277): unsure at all n locations
gcggccgcccttttttttttttttttttttttttttttcgnnctataaaacattgttaagctactcattttcctttacatgctaagggttcacaaaactacagcctcaaaggtctgtcagctatcctttgagagcaaacgaaagtttggtaggggatcccaaaagaaatccagcttgtaaattgtacccccggttttttaaaaacccgctggagggctttttggttccacccaaccatgctttaaaaaaaaggccgaacggggaatcaaattttttt

SEQ ID NO: 340227 - DNA, 401 bp, Zea mays
  unsure (1)..(401): unsure at all n locations
gcggccgcccttttttttttttttttttttttttttttttttttttttttttttttttttttttttttttttttttttttttttttttttaactttaaaaaattttaaattaaaaaaaaatttttattttaaaaaaaaaaatattaaaaatttttttnnnaacccacccccaagaagaaaaaaaccaaaatatctaaggtcaaaaaaaaaaaaaactccccccaaccttcccaaaaaaaaacccaaaaaaaaaaatacccccctcaaatatctctcccccccacctaaaaaaaaaagggcccccccaatttccccgggaaaaaaaaaatacccccccaaagggtcccccccacccaaaaaaatgtttagagggcaccccgcgctggggcccaatattattt

SEQ ID NO: 340228 - DNA, 371 bp, Zea mays
  unsure (1)..(371): unsure at all n locations
ngcggccgcccttttttttttttttttttttaaacttcaatttagtgacatttaaataatataattatatttacattttattttaaaccaaaatgttttttaaacgaaaaataactttcttagtaccaggttctccagtttaaaatgttcccaggtaaaccggaaataaatacccacccaaatttcctggcccattttttaaaaaatggttcttttttgggagttttaggggggggggaaaaattaaaaattaaagttttttcttgtttaaatccccaaagtttttcgggttaaaaccccccgcttctctattatgtgcccctaaaaaaaaaagataacaacttttttttttttcttttttgagggttttt

SEQ ID NO: 340229 - DNA, 408 bp, Zea mays
gcggccgccctttttttttttttttgcaactggaattaactgaagtctggtgaaatgtcaaaggactacaacagatgatatgattgctaaaagaccaaaacaattgatttttcatctccaattttatgaatccaacttcgcaatcccatactatgataaactgcaaaattacaaacgtcacgccatttattgaacaaaacctctgacaaactatgaatcggccacgtcatccaacagcagattgaagatgaaggttgcatcaaagtttgactctgaccctaaaccgacagagggcatttcgaagcggaaaacggactcacaaatcagctctagccgagcttccaacggctaagggccctggcgacgggcggcgtgagcgcgatagtgatggggatcctcacgggcaac

SEQ ID NO: 340230 - DNA, 323 bp, Zea mays
gcggccgcccttttttttttttttttttttttttttttttttttttttttttttttaacaatgtaccaaaggcatgttttaaggatgaagcaagtcgataaaatacagaagacgaaattctcattggtaaaaatagggccgtaaaatcccacgacttcaagcccaaggacccattgctatgctactggacattagcaggcagccaaaactaaaaactctgccacagaacatggaattacaagttacaatcccagagtttctttctgcaatcacgagttgatataaagcttctacattccttttgcatactgatcgatcagata

SEQ ID NO: 340231 - DNA, 416 bp, Zea mays
gcggccgccctttttttttttttttttttttttttttttttttttttttttttataagccttgcaagcttttcaatgccatggaattcatgatccaccaaccagaccatttgttgcctagcactacatttcacagcagcaataatgtccaaaacttgtccagaaacttgctttctgtgtgccataagcccaaaatactatgagctagcgttctacccaaaacaacaacacaagacttgtcacgtatgaattcaaacacctagtacacggatatcaacttttgtccatgttataattttcactgcctcggttgacctttggattcttgtcttcagctttagaagcacctttttcaaccgagtcttacaatgccttcaggaacgacaccaccgtgaacttatttttgtcaggggcaac

SEQ ID NO: 340232 - DNA, 449 bp, Zea mays
gcggccgcccttttttttttttttttttttttttttttttttttttttttttttttttttttttttttttttttttttttttttttttttttttttttttttttttttttttttttttttttttttttttttttttttttttaaaaaaaattttaaaaaaaaaaaaaaaatttttttaaaaaaaaaaaaattttaaaattccttttccctaaaccttttttttataaaaattttaaaaaaaaaaaattttttaatttttttattaaatctatatttttttttaatattctaaaattttttttttttttattaaaaaaaaaaaaaattattttttttttttttaaaaaaaaaaaaaaaatttaaaaaaaaaattttttttttttaaataaaaattttttttttaaaaaaaaataataaaatttttttttttaaaaaaaaaaaattttttt

SEQ ID NO: 340233 - DNA, 56 bp, Zea mays
gcggccgcccttatttttttttaaaaaaaaaaaaaaaataataataaaggaatatt

SEQ ID NO: 340234 - DNA, 64 bp, Zea mays
gcggccgcccttttttttttttttttaattatattaataccatatttatcgggttaatttatta

SEQ ID NO: 340235 - DNA, 385 bp, Zea mays
gcggccgccctttttttttttttttttttttttttttttttttttttttttttttacagggcaaaatatcagtactagcattcaggaaagcaaatgctacatttgtttcttggattggcaaagcccagcacatggtctgatgatgaccaaaagttattcatgaattgaacacaagtttattatgatgattttcaacatccacactgttttgtgcagctcatttgattcagcgcctaccacccctttttttacttttcctccggctgttcttgtcatccgaattactgtttgacgcaaacttagattcagaagattatgatgatgtgctgcccctcctgggccttttttttttttgcttccttttgtgttgccgctttttgttttt

SEQ ID NO: 340236 - DNA, 413 bp, Zea mays
gcggccgcccttttttttttttttttttttttcagcaaaaaaaatccaatgaatttatctacccacagttgcacagatcagtacagccacatgcttaattgaggaaccatcgagccagacttagaagatcaatccaagtacgatatgggtcagttatgtgaagccattcccaccttaatatgagggcataccctaccaagctcagtagggtgacagatcaatctgttcaatggcccataccgacaaacaggtgttaatggagaagaatatcggaattgcagagtgtgtgacctttaccaaggtagcccgcccagcttaaattaacatgttgcccatccaagtgggaattttattcacaattatttacaagtattcaaccggctggttcttaatccttactggttttaagcttt

SEQ ID NO: 340237 - DNA, 294 bp, Zea mays
gcggccgcccttttttttttttttttttttttattttttttttttttttttttttttttttttttttttttttttttatttataattatttattttttattttatataaaaaaaaatttaattaataataaaaaaaaaaaaataaaaaaaaaaaaaaaaaattattataatattaaaaaaaaattttaaaaaaaaataaaaaataattattaaaataaaaaaaataaaatataatatataaattaaataaatatataatattaaattaaattataaaaaaaataatatattaat

SEQ ID NO: 340238 - DNA, 316 bp, Zea mays
gcggccgcccttttttttttttttttttttttttttttttttttttttttttttttagaacaaaaaagcggcgttcgattttcccatttggggggggcaaatttcacggaaattaacaacagagacttgttgttaatattccaatattaagattaccattattcacataggaagcatgttttttttatgtccgaatataaaagcttttacaagcaaacaacacttaggaaccttcttgtaaggaggagtttcaaaactacgggatcgcaaagagaagcaacttaattcttgttgtccttgacgtgaaggctttttg

SEQ ID NO: 340239 - DNA, 165 bp, Zea mays
gcggccgcccttttttttttttttttttttttttttttttttttttttttttttttttttttttttttttttttttttttttttttttttttttttttttaaaaaaaaaaatttaattaaaaaaaaaataaaaatgaataaaaaaaaaaaaatatttggttttat

SEQ ID NO: 340240 - DNA, 432 bp, Zea mays
gcggccgcccttttttttttttttttttttttttttttttttttggttttttttttttttttttttttttttttttttttttttttttttttttttttttttttttttaaaccttaaaaaaaaaaaaattttttaaaaaaaattttttttgggaaaaaattttaaaaattaaaaaaaattttgggggggggtttaaaaagggtttaaaaaaaaaaagggcttttgggaaaaattgttttccaaaaaaaccttttgggtttttaattaaccccctctttttttttccactagaaaaagtttaaaaataaggggggtattttttgggccttcccacttcggaaaaaaaaaatgttttctttttaaaaaatttaaaacccaaacttttttacaaaaaaatgtttttgtgggtaaacaaaaatttttttttaaaaa

SEQ ID NO: 340241 - DNA, 423 bp, Zea mays
  unsure (1)..(423): unsure at all n locations
gcggccgcccttttttttttttttttttttttttttttttttttggtttttttttttttttttttttttttttttttttttttttttttttttttttttttttttttttttttttttttaannnnnntttaaaatttaaaaaattaaattaaaagttnnggccaaattaaaaaaaaaaaacaaaaatggcccattcccaaaaatttaaaaaaattcaaaaaaaattttttaaaccagaaaatttcttccacatttcggaaagtaaaaaaaaattttaaaaaaatttttaggaaaaaagttttaaaaaaaaaaaaattagccaaaattttttttaacccaataaaaaaaaataaacccctttttttaaactttcttggttagaaataaaaaattgcccttttttttaaagggtttttctttttc

SEQ ID NO: 340242 - DNA, 133 bp, Zea mays
  unsure (1)..(133): unsure at all n locations
ccggccgccctttttttttttttttttttnantnnttantttnnnaaacggggnggctttaaccatttcattattacaacacttttaacttaacaatcctcgccctctttacaaaaatcaccacccttttaat

SEQ ID NO: 340243 - DNA, 214 bp, Zea mays
tcccgggccggccgcccttttttttttttttttttttttttttttttttttttttggttttttttttatttttttttttccaaaccaaattttttaatattaaatcttaaaaattaaaaaaacttaaaattttaaaaattacagggccaaaattttaaccccaaataatgttaagtaaggtgggaacaacacccagaaaccctttgcacttttt

SEQ ID NO: 340244 - DNA, 72 bp, Zea mays
gcggccgcccttttttttttttttttttttttttttttttttttgtttgcgttttttttttttttttttttt

SEQ ID NO: 340245 - DNA, 447 bp, Zea mays
gcggccgccctttttttttttttttttttttttttttttttttttttttttttttttttttttttttttttttttttttttttttttttttttttttttttttttttttttttttttttttttttttttttttggttttttttttttttttttttaaaaaaaaaactttttttttttttttaaaaaaaaaaaaggggttaaaaaaaaaattttaaaaaaattttttttaaaaaattttaaaaaaaaatttggaaattttaatttttttaaaggggctgttttttttttaaaaaatttttaaaaaaaaaaaaaaggcccttttttttttccccaaacccgtttttaaaataaaaaatttgtttggaattttttttttaaggccctttaaattggtttggccaaattttttttttttttttttttgggccccttttaaaacacattttt

SEQ ID NO: 340246 - DNA, 173 bp, Zea mays
gcggccgcccttttttttttttttttttttttttttttttttttggtttttttttttttttttttttttttttttttttttttttttttttttttttttttttttttttttttttttttttttatattgtttttttttttttttttttttttttttttttttttttttttttt

SEQ ID NO: 340247 - DNA, 446 bp, Zea mays
gcggccgccctttttttttttttttttttttttttttttttttttgttttggttttttttttttttttttttttttttttttttttttttttttttttttttttttttttttttttttttttttaaaccaacaaaaaaatccaaattggaatgtccaatttaaaaaaacactaatgttttaaaaaaaaaaaaatttggggccctcaaaaattttactaggtcttaaaaaaaaaagggccttcctggaaaaaaaaattaaactttttattaaaaattttacttttttttttttttggggcccccaaaaatttgaattttgaaaaaaaaaagtggtattatttttttggaacatgtggaaaaattttttttatttttaaaaaattttttttaaaaattttctcttttttttacccctctttctataaaaataaaaaaaaatttttttt

SEQ ID NO: 340248 - DNA, 237 bp, Zea mays
gcggccgcccttttttttttttttgggttttttttttttttttttttttgttttttttttttttttttttttttttttttttttttttttttttatttattttttttttgtttgtttttattgttttttttgttaatattaatgggattaaaaattaaatgtggggggggaaaaaaaaaaaaaatattttgtccccccgggaaaaaacccccacaaaaaacaccccccccccggttt

SEQ ID NO: 340249 - DNA, 198 bp, Zea mays
  unsure (1)..(198): unsure at all n locations
gcggccgcccttttttttttttttttttttttttttttttttttttttggggtttttttttttttttttttttttaaatnntttttttttttttaaattcctttttttttatttttttttttttttttatttnttttttttttttattataattttatttttttttaattatatagggggacaaactttttttttttt

SEQ ID NO: 340250 - DNA, 442 bp, Zea mays
gcggccgcccttttttttttttttttttttttttttttttttttgttttttttttttttttttttttttttttttttttttttttttttttttttttttttttttttttttcccccccaagaaaactaaaataaaaactgggtaaaaaaaaaaaattaagggccaaaaaaaaaaacgtgcccaaaaaaacaaaaaaagttaacggaaaaaaaaacccaatgccaaaacccccctaaaaaaaaaagtacaaaaaaaacttctgggggaaaaaaacctccgcccaaactaaaattccctgaaaaggccttaaaagataaaaaaaaaaattctttttggagcgcccaaaaaacccaaaaaaagttccaaaaaaaaaacatggggcccctaaaataattaacctgcgaaaaaaaaacctttttaaagaggaaaaaaaccggaggaa

SEQ ID NO: 340251 - DNA, 466 bp, Zea mays
  unsure (1)..(466): unsure at all n locations
gcggccgccctttttttttttttttttttattttannnnatttttggtttttttttttttttttttttttttttttttttttttttttttttttttttttttttttttttttttttttttttttgggccctaaaaaaaaaaaataaaaaaggggttgtattaattaaaaaactttgttgggggggtatttttaaaaaaaaaaattttaaaaaaggggggcaaattttataaaaaaaaaattggtcccgggttttaaaagatttatttttttataaaaaattcctccggggggttataaataattctttttggtggagagaaaaaataatttttcaaaaatattttgaaccacgttaaaaatataaaagggataacccctttttattaaaaaaaaatcttataatctaaatattaaaaacggctaaaaaatattagtgactaataataaaaaaaatatttttttttt

SEQ ID NO: 340252 - DNA, 153 bp, Zea mays
gcggccgccctttttttttttttttttttttttttttttttttttgttttttttttttttttttttttttttttttttttttagcccgcttgggatgtgaagcaaagattcatttcaacaagggttgccgtctgcgttgtattagcccggggg

SEQ ID NO: 340253 - DNA, 256 bp, Zea mays
  unsure (1)..(256): unsure at all n locations
gcggccgccccttttttttttttttttttttttttttttttctttttttttttttttttttaccttttttttttttttttttctttttttttttttttttccttttttttttttttttttctttattttttttttttttttttttttttttttttttaaaaattgaaaacccaaaaaggattcctttaaaaaaaccacaaacccttgggcgaacccctgggcggacccttggcccgacccttgggtcnactttaaa

SEQ ID NO: 340254 - DNA, 334 bp, Zea mays
gcggccgcccttttttttttttttttttttttttttttttttttttttttgttttttttttttttattttttttttttttttggggcaaaaatagtacatttttgcaatccatcaacaataaaaagcgtttcaacacttgcttttagcgcagattccattcaacacccaaacgggagttacaaatgagttttttgtatttacacgggggtcgacaataaacacccggatggggactttcaaactattcagggtccacaaaaagcagttttggaaacttaattcatttttgaaaggtgacgggcctcccaaacaaaaagcctttggaaattagac

SEQ ID NO: 340255 - DNA, 288 bp, Zea mays
gcggccgcccttttttttttttttttttttttttttttgtgggtgttttttttttttttttttttttttttttttttttttttttaaaaaaactgaatatttccttttttgaactaaaccctattcccttttacaaacaaaaataaaattttgcaaaaacatttgacaatttataatataccgggcccaaaatttgtggaaaaaaaaggggcagcaacccccttccctataaatccctttgtccccacccccccgccccttgggggtgggggtatctttactgttcaa

SEQ ID NO: 340256 - DNA, 196 bp, Zea mays
  unsure (1)..(196): unsure at all n locations
gcggccgccctttttttttttttttttttttttttttttttttttttttgtttttttttttttttttcaacnttttttttttaaggaatgatacctttttgacatgtaaaatttataaaaaagggccttttaaaaacttaaagcatttaccattttagggcacctgtcaatttattggtagactacataatacata

SEQ ID NO: 340257 - DNA, 102 bp, Zea mays
  unsure (1)..(102): unsure at all n locations
aataccgactcactatgagggaaaggctggtgacgcctgcaggtacccggtctcggaattctccggggccggcccgcgccagggatngaaaaacctctccct

SEQ ID NO: 340258 - DNA, 255 bp, Zea mays
ggtatatagcagaaattttattggtgcgatttacaggttgtgctcataatttttacattattacacacggaatagtttcttttttggctcgttagtggtgcaaaaaggcacccaaaccttttggctacaaacccctttttttcttttccaatccccccccaagcggttttggggggggggagattttttttttccctccaccccttgaaagagcaaaaggggggggttaaaaaccaaatatttcccccccccggg

SEQ ID NO: 340259 - DNA, 446 bp, Zea mays
gcggccgcccttttttttttttttttttttttttttttttttttgggtttttttttttttttttttttttttttttttttttatgggaatgaatcctttatgaaaggtaaaatgtataaaaaagggcttaataaaaatataaagttttaatcatttaagggtatctgttaatttataggatgacttaactaatactactacttttaaaaattcctctataaaacaaattattctatggcatattttcactcaacccttataaccctattaaatttattaatggttgaaaacccttttttatttaaattcttcacaaacttttattttcttgaattttttttataaacacctttctttttatttctaacattttactttcaaaaaaatatttttttttacatacctatattaaattttttttctactctcttaaaatttttctccta

SEQ ID NO: 340260 - DNA, 381 bp, Zea mays
ctatagggaaagctgataggcctgcaggtaccgggccgcagttccgcgagtggcgggcgcccgtcgtctttttttttttttttttttggtagatagcagagattttattggtgcgatttacaggttgcgctcataatttttacattattacacacggaatcgcgactcggaggtcgagtcaccactgccggccccggcgcggcggctacctaatcctactacattcctacgtcgccatgactcactagcctcgcgtccttatgatggttatggagccgcgcccgggggtgtgcaagcgcgtgaagcccgcgacggccttgcccgagatgcccggctggtccgcggacacgcgccgggcgcacgcgaacttgctcacggggt

SEQ ID NO: 340261 - DNA, 160 bp, Zea mays
gcggccgccctttttttttttttttttttttttttttttttttttttttttttttttttttttttttttttttttttttttttttttttttttttttttttttttttttttttttttttttttttttttttttttttttttttttttttttttttttttt

SEQ ID NO: 340262 - DNA, 326 bp, Zea mays
tttttatcctagcaagagaccaaaggccggagaggtccttcagcatgcctggtgtcatcgatttacatttttttcacttcctgttcgtccaaaagttttattactttctagaacacctccatgtgttgttttcttaggcaatttattgttcagttgttttttgttgacttctatcttgaactcaatcttactttgtaattttattttttttcttccccaaattttttttgtcaattttttttcttatcattcattttttctatattttttgtttgttaagatattttttcttttctcattttttttttttcctcaatatatttttt

SEQ ID NO: 340263 - DNA, 190 bp, Zea mays
  unsure (1)..(190): unsure at all n locations
ttatacatttttcacactacttncttttcacaagcattttttgttatgtctttttttttctaattttttttttatctcatattttttgtttgttgttttttttctttatatttttttgtttttctatttttttttttaatatttttttttttctgttattttttttttaattatatttttctttttttat

SEQ ID NO: 340264 - DNA, 168 bp, Zea mays
  unsure (1)..(168): unsure at all n locations
tgtcttctcgaccccccattccctccctgacgatgccgacaacgcgaaggccgcggcggctcatgcgaggccgtagttgtttcatgtggttgttgtgttcttttttgtcttttttcttctcttttcttatttttttttgcttttttttttttttaaanattttttttt

SEQ ID NO: 340265 - DNA, 102 bp, Zea mays
tcattatcacagatcatccacagagaccatgtggcgtgtaagagacaagagagtgggagagaggggggatatatggcagacatcgcgttgctggtgacggag

SEQ ID NO: 340266 - DNA, 225 bp, Zea mays
cattgtgttgactgcagagaagatcccgtggatatttgctactcaaaaaggaaaaaaaaaaaaaaaaaaaaaaaaaaaaaaaaaaaaaaaaaaaaaaaaaaaaaaaaaaaaaaaaaaaaaaaaaaaaaaaaaaaaaaaaaaaaaaaaaaaaaaagggggggacaaaaaaaaaaataaaaaacggaaaccttaagacaaaaaaatataacctaaaaaaaagggggg

SEQ ID NO: 340267 - DNA, 118 bp, Zea mays
acaagtaatctgaatggctttggagtgcataatcaataatcaaataaatacaaagcttttggccttattaaaaaaaaaaaaaaaaaaaaaaaaaaaaaaaaaaaagggcggccgccct

SEQ ID NO: 340268 - DNA, 192 bp, Zea mays
  unsure (1)..(192): unsure at all n locations
ttccctcccccgcccctctcgcgcgggacctttctccctggggacacctaccctcacncattcttgtcgcaatggcgctagcctcccaaggcattaccctgcgtccctgcagcgggtccgattccacagcggaggcggcctcttactgcctcgcgcgcggtccgcgcggatgagcatccccaccgggctagc

SEQ ID NO: 340269 - DNA, 125 bp, Zea mays
  unsure (1)..(125): unsure at all n locations
tcgttttctatcaatgaccacttcagtatttgaaaggccagccttttaaacctacaggctgtaacaaacaaanccaacaagcaacttacccctattacccccgtttttttaacacatcccagccc

SEQ ID NO: 340270 - DNA, 417 bp, Zea mays
  unsure (1)..(417): unsure at all n locations
ttataatcaatcatcccattctttttttttatcatatccaaaatctacaaggtaggctcctaataatcattgtggcaccaaaaaaaccntatacacatacatttatttccttcatccttatcattcaaattatttcttccttttatctaattcttttatctattcttcattctcttatatattcttaacaaatcttttttcattatttatcttttcaattttctctttttatattatttatatattatacattttatattttttcattatatatattatataataatttaaatatataattctttatatacttatacacttttatcttttaactttttttttatatttattttatttttatctttatttattatttttatattctttcttaacattttttttatttataaaatttta

SEQ ID NO: 340271 - DNA, 197 bp, Zea mays
  unsure (1)..(197): unsure at all n locations
tcgcttgttctacaaacgcctaaatgtggtgcttgaagaaaagtgggagagggtcgagaatccttatattncctaagtgttggaggtatttagtatcaaaggcttgtttatgtgtcgttttttttgtctttatttatattttattcattattttatttattttctttattttttcttatattttattatttatatat

SEQ ID NO: 340272 - DNA, 64 bp, Zea mays
atttcgatctgtggctaaggagttgcggtttggtttggccgtgctcgtgggtcgtgtagatgtc

SEQ ID NO: 340273 - DNA, 270 bp, Zea mays
  unsure (1)..(270): unsure at all n locations
tcgacccacgcttcttcaaacacacaccatcccagctccgagatgtcatcctgcggccggcgggagtagccgcgtcacgttctctttttatgaccgttacatcaccattttctcttctgagggactcctgtaccaagacgatgtcttctttcatggctttttaattcatgcatttattttattttattctttttttttcttcttttattttattttttttttattctttcttattttattaatnntttttttatttttattctttttttt

SEQ ID NO: 340274 - DNA, 334 bp, Zea mays
  unsure (1)..(334): unsure at all n locations
tcgacccacgcttttttgcaccactcgcatcgtgtgctcaggcagatccccgtcccgcatgggctaaggccaggttagnngtcattgaagacgatgactgcttctgcagctgctggtgtgcagatggaggctgcacgcccttgcattttggcctcgccaggaattcttaccgcacgtttagcagtttctaggactgattgcatgctcagtaccactgctatcattcctcaaaatcagctgctccaggcctttaatgtttaagtctcattgattttgttgattgttctatttttttatattttcttccaccatttttttttttcctttatttttt

SEQ ID NO: 340275 - DNA, 102 bp, Zea mays
acaagtaatctgaatggctgtggagtgcataatcaataatcaaataaatacaaagcttttggccttattaaaaaaaaaaaaaaaattaatttaaaattaatt

SEQ ID NO: 340276 - DNA, 253 bp, Zea mays
  unsure (1)..(253): unsure at all n locations
aagctcggagagcaagggcatcggggggaggcccagatatgcatgtagagaagaaggaattctnncctggagaatataagattgtagatcttgttcttccaaacacatctgatagttacaggttgttctgcatgatatttttttctagagacttttatgtgactcgttgcttatttccatactcttctttagatattattgttttttacaaattttttttttcatactttttttttccttaccttatttttat

SEQ ID NO: 340277 - DNA, 94 bp, Zea mays
tcctttaaagtcaacccacccgtccgtgagaggtccaccaaccttgactggtccaggggcccaaccctacttgaggctttggacttgatcaatg

SEQ ID NO: 340278 - DNA, 292 bp, Zea mays
  unsure (1)..(292): unsure at all n locations
tgaatcctttaaagtcaaccaacgcgtccgttttactgaagttttgtcgatctcgaatgatattatttgaaaagactttgtngacaaaaaaaaaaaaaaaaaaaaaaaaaaaaatnntaaataaaaaaaagaaatgaaaattaaatattaaaagaacaaaaaagaaataaggacctatttataacttaatattgaaccttggtgtctttatatgtttaaatctttgtgccatatgccttatttcttgcttccataatttttttcttataaatnggcaatttggttttatatt

SEQ ID NO: 340279 - DNA, 146 bp, Zea mays
ctcttgctcgcactcgccgagaacgaatgaaagcgcatgaagccccagcgggagcgccaacccacccccgaatcaaacagggcgcctgccgttcgcctcgactcgcgctcccgtcagctatagtcggtacaagccactttggggaa

SEQ ID NO: 340280 - DNA, 83 bp, Zea mays
tctttttcatcaaaccagtgttttgagaaaggggtcgagactcttaaaaccggggggggcgaactcattcaacacacatacac

SEQ ID NO: 340281 - DNA, 188 bp, Zea mays
  unsure (1)..(188): unsure at all n locations
tcattcataccaggttggcctaaaataaatcntattataacttgtcttaatcatgtttatagctgatacctttttcaaattgatatcctctcacaatttctcacaacatactatcctttatcataaagtttaaagctctatttgcctaattatatagcattcttacttaaatttactttttttaattt

SEQ ID NO: 340282 - DNA, 328 bp, Zea mays
  unsure (1)..(328): unsure at all n locations
atctactccagagcgcagaagaaccggatcgacaccatgagggtggggctcgttgccctcgctctccttgctctcgctgcgagcgccaccttcacgcatacaagcggcgtttgtggtttctagtcaccttcttctgtttatttactttttgtgtttctttttttattttntattttttttatgtcttttttgtttatatctttctttttctctttctttttatttattgtttgttttttttctatttcttattttttttttcagtttttaatttttttttttttttttttttttcttatttctgttaatatactttcttctttttttt

SEQ ID NO: 340283 - DNA, 136 bp, Zea mays
  unsure (1)..(136): unsure at all n locations
tcttcccacttgtcttcttacgcctgggcnnacncnaagggcgggctctttttttaacagcgtttgccacacaacctaacttcctactctctcttttttttttactcaaatttttttacacctatcattaaacttt

SEQ ID NO: 340284 - DNA, 237 bp, Zea mays
  unsure (1)..(237): unsure at all n locations
cagtcaacccactcctacttttgttttccccctcttatctaattaacaaaagcgttttttttccaattagcatgcctacacactaacnccaactttttccatccattacaatatttacattnttnctcctactccacatatgacattcacatactatcatctatttttaatatctctttatttcttactatacttactattaattatctattcttccatacattatatatttttttt

SEQ ID NO: 340285 - DNA, 175 bp, Zea mays
  unsure (1)..(175): unsure at all n locations
gtcccgctccccaccccgccaccaccgacgctgggatgaaggccgtgccaggcgacagcgccgcgcccccggtgcccatnccnatgccgatgccggcgaccaagatcaccattnnngtttccgcggggggcggcacggaggcagatctcctcaggaagaggccggacaaggggtg

SEQ ID NO: 340286 - DNA, 285 bp, Zea mays
  unsure (1)..(285): unsure at all n locations
gcgacccacgcgttcggaccacaccttcttggtttcacttcggttggctggcattttggcccggccggtcggttcgaaaccttgcgaggcccgaccatgggcaccggcccggggtccgtccaccaggaactcgacaaggcttgcgcccagggtggcaaggttgacccgaacaagnngaaccagaaagtccggttcattaaccttgtgtcacgcttccttaatggggaaggcggaccaaatcggttgagccaggttcagaccccttccggttagggtgggggggcc

SEQ ID NO: 340287 - DNA, 155 bp, Zea mays
tttctaattcatctcatccatacatacaccgcccggccctccaacaacatagccccaccaaccacctcctcaccctcacattcattaactactcctttcaccattttccctcatcttaatctagcactccgtcgctctatacaaaaatcctaccc

SEQ ID NO: 340288 - DNA, 123 bp, Zea mays
  unsure (1)..(123): unsure at all n locations
tagtctacccactctttctcacttctccagataaagaaatagggggtgctcatatattccaacgcagccggactataaccactcctnttacattaacaaattccattacctcaccaaacacta

SEQ ID NO: 340289 - DNA, 455 bp, Zea mays
  unsure (1)..(455): unsure at all n locations
ttctattttacccaccggggctccacacgaggagaggtctactcccgtgcgggaggctcaaccgccccgccggcgcctattccgattccgatctcgtnnaccaataacaccattcctttttttctgaatatctatatntataaagatctttttctttaagtaactgcaacaagttccaatatccttattttaacaatcataactcaatagattcttatgatttcctaattcctaatactattttgtttaacattaacttattttatttattcaatacaacatttatttatttatatattctcttataacttctatttttaatatttttaattttatttatttgttaatatatttatctatattaaataatctttaatattatattaattatataataattattatatatattaataatttttatattttaatatttttatttattataattaatt

SEQ ID NO: 340290 - DNA, 251 bp, Zea mays
gcggccgccctttttttttttttttttttttttttttttttttggtttttttttttttttttaacgggaactcatgacatccatacatagattcagagttgacaccaccagtggacccaacatacccaaagtttgtgaccacattccaccattctacgacattacgatcattttgacaaacgccataattctttgaacccaattttatttcacaaaacgaccgaggcgaactgccgttccttaaaccacgc

SEQ ID NO: 340291 - DNA, 343 bp, Zea mays
gcggccgcccttttttttttttttttttttttttttttttttttgggttttttttttttttttttttttttttttcccagggcgcatttttgcaccaaaacaactgcatttcacagtaattttcattgttcactgaaaaccaaaaccttaaatttaggtttcaaaggctaaacatgggtaaaaacacaagaaaaaaatacgtctgccaaaaacgttgttctagggcaggggccccaggatacaagctccactcaacggtgggccttggcaacacgcctaattccgtcctttttttgatggcgttccttgtggaagagcccttggcagcttttattaacttatt

SEQ ID NO: 340292 - DNA, 191 bp, Zea mays
agcaggccgcccttttttttttttttttttttatttttttaatttaataaggcttttataatatataagtaaaataatttaaaatttttaaacatatatttatttaaatttttatttatccatatgttataataataataaataatacaaaattgaacaacttatatttttattatattatacttttatta

SEQ ID NO: 340293 - DNA, 235 bp, Zea mays
  unsure (1)..(235): unsure at all n locations
gcggccgccctttttttttttttttttttttttttttggggttttttgtgtataatataaaanattattaataaatttaatagttaggagaggaaaaaaatatagttaagcctattattgcttaatttgttgaatatttggggaggccaaaaaaaacccggggaaagtcgtaaagggattttgacaacccttctgtttctcaaaatttttctattagggatttcccccagggggc

SEQ ID NO: 340294 - DNA, 319 bp, Zea mays
gcggccgccctttttttttttttttttttttttttttttttttttttttttttttttttttttttttttttttttttttgggggggataacattccaaaacaaggacaacgttttacacacaaggactgttgtacacctgctttgtcgatgacaacccgagaaacatcctgtgctaccaaaatagtctcgggtgtttcttaaaaacaccaacttgccctcgtaggaggaacatccaatgtggttggccttttgaaaatatgggccaacattttaagtttgtgtttaggggcggtggacaggaggcaacagcaaagccaa

SEQ ID NO: 340295 - DNA, 356 bp, Zea mays
agagagcagagccagccctttttttttttattttttttttttttttttttaaggttaattttttttttttttttatttttttttatttttttttttataaattttaatttaaatatatttaaatttattttttaaaaaaatttattaatttttaaattataaatattattaatagtgtaataatataaaaatttatttttatataggtaaaaaaatattaaaaaattgaatgttgtataaaaataattaaaaaataaataagtgtaattaaacacaataaaataaatttaataaaataaattctataataattatttatatataaaaaaaaaaattttaaaattaataattatttt

SEQ ID NO: 340296 - DNA, 300 bp, Zea mays
agagcagagccagcccttttttttttttttttttttttttttttttgttttactttttaaatattttgtaaatacatatttttcttttttaaatttatttatttttttaattaatttattatttttttaaaaaaaaaaaaaaactcaaaaaattagtacttttccagaaacaaaaaaataccaatgtcttaaaaaaaaaaaaaaaggtgggcccacaaaaaaaaaaaaaattcaaaaattaaaacaaaaaaaaaaatggggggaaagggtccccccctcattccccaaaattatcaaaaa

SEQ ID NO: 340297 - DNA, 97 bp, Zea mays
gcggccgccctttttttttttttttttttttaaagccaaaactgatatatgatcatgcaccagtgcttcaccttatttgcgcacaaagaaacaaaaa

SEQ ID NO: 340298 - DNA, 281 bp, Zea mays
aggagcgagccagcccttttttttttttttttttttttatatttttttttagtttatttttttttttttttagatttttttttaatattttttattatatttaattttattttatataaatttatttaaatttttatttattttataaacgaaaaatgaaaaaaaaatataattttttaaaaaaaaaaaaagttaacaaatttttaaattatttaaaaaaaaatatggtttattaaaaatttcttcaaataaaaataaaaaaattcatgtgccaaattttt

SEQ ID NO: 340299 - DNA, 252 bp, Zea mays
  unsure (1)..(252): unsure at all n locations
gcggccgccctttttttttttttttttttttttttggnctagcagaatgagagtcactggtaaaataaggaagttgtatttgttttccaagatgacaacccttacaatggaaacttcattcagatcacgtatgacctaaacaacctgattttattatggtggacagacgcgagccatacaaatgacctagacggtgatgccattgggcaaaagaggcggctcgaactgaggctgcagaaagcacacgggtcg

SEQ ID NO: 340300 - DNA, 407 bp, Zea mays
aggagcgagccagcccttttttttttttttttttttttttttttttttttttttttttttttttttttttttttttttttttttttttttttttttttttttttttttttttttttttttttttttttttttttttttttttttattattttttttttttttttttttatttttttttttgcaaaaaaaattaatgtgttaatttatatatttattttatttttttaaaaaaaaatattatcatttttttattttaattttaaataaaaagcatctattttttttttttatctaattaaaaaatatatttgaccttaaaaaatatgtttattattaaaaataataaattatcttttttttttttttataaaattttggattaataaataaaatggatttatattttt

SEQ ID NO: 340301 - DNA, 179 bp, Zea mays
gcggccgccctttttttttttttttgaacacagcatatccggcttgcagtttcacgggatactgggggaaccagttcattgtccattcagtcattgcaaattggtccactgatcatggcccaccagatttccaggaacccctttcaagggaaccttgtttccccacaaaaaacacgttt

SEQ ID NO: 340302 - DNA, 383 bp, Zea mays
aggagcaggccagcccttttttttttttttttttttttatttttttttttatattgattttttttatttttttgttttttttttttttttttattttttttttttttttatttttttttttttttttttttcttataaaaaaggaaaaatgtttaaattgaaaaaatttttttttttttaatataaaatggtaatattatagattgtaaaaaaaaaaaataacaacatagggggaatggggaaatattttatttaatattatcgtcataaaagaataaaataatgttttatgatagggtttaattataaaaaatatttttttttaatgtataaactcattttatttaaaatttagttatatagttgtattttattttaaatat

SEQ ID NO: 340303 - DNA, 104 bp, Zea mays
aggagcaggccgcccttttttttttttttttttttttttttttttttttttgggggatttaatgtaattttttttaaatttttaactttaaaattttatttttt

SEQ ID NO: 340304 - DNA, 77 bp, Zea mays
agggaaagctggtccgcctgcaggtcccgtcccggatttccgggggcggccgttgccactggggagctcgtcgcctt

SEQ ID NO: 340305 - DNA, 175 bp, Zea mays
gcggccgccctttttttttttttttttttttttttttttggggggggttagggccaacttaatatactaccttgtctccatgtcgaacataatgtttaagaggatccatagttattgcagagttcccataaggctcatacatggattaaataggatgttgttccaggcattatgg

SEQ ID NO: 340306 - DNA, 143 bp, Zea mays
gcggccgcccttttttttttttttttttttttttttttgggatgggtgttttttgggggggggaagagtaataggtttgagatatttaatatggaagggtaggaaatgaacggagaaaagggtgagaagaaaggggggaagag

SEQ ID NO: 340307 - DNA, 329 bp, Zea mays
  unsure (1)..(329): unsure at all n locations
actcactatagaggaaaggctggtacagcctagcagagtaccagagtccgagatattccaggggcaggcccagccctnntttttttttttattatttttttatttttttagggcagagaggcaacatcttgtaatgtggcgattctattccaataggccatgcgatcacatggcacatggcataccaaatccaatgcgttaaccatgatttgacatatgctattttacacgtacttattcaatgagagtgagagagtaactaaaggttgccgatacaaagtgaactacttcttgaactactcattgcttagttgtcacacttttcactc

SEQ ID NO: 340308 - DNA, 228 bp, Zea mays
tgcaggccgccctctttttttttctttttttcattaaattttcctagtttaggttcactttcttgcaatccttcattttttttatttctatctcttaaattcaattaattttctttttttttgaaaaaataatctcaccaccccccaaaaaaattatctctcccactaaaaaacccaaactcctttttttctttcccaaatcttctaatttttttttggcacctcttt

SEQ ID NO: 340309 - DNA, 219 bp, Zea mays
gcggccgcccttttttttttttttattttatattttttttttagggatatatttttattgttgtaaatattttatatatttaatattataatttatataataattttttatattattaatttttttttaaaaaatcgaaaaaaagtacctttataataaaaaaaaaggtgggcgaaaaaaaaattggggagaaaaaaaaaaaacacttgtgagaagggg

SEQ ID NO: 340310 - DNA, 340 bp, Zea mays
gcggccgcccttttttttttttttttttttttttgaccaaaaggtgggtgggtgggattagatctttttgcacagaagagcaatgttcacacaatggcgagcacagcactacaatcagctacacaatcaataataagaggaaatgcaaacgatccttcctagtaagcgcatcaacaatccttcctagtaagcgcatcaaccgatgcacattcatttgtcagcgagcatctatgagcaccagcgcatatcagaggcccaatggggccacgaagcggtcgcgcgaacctcatatgcctctgagatctgtttgaacttggcctccgcttcttttttgtagctg

SEQ ID NO: 340311 - DNA, 303 bp, Zea mays
gcggccgccctttttttttttttttttttttttttttttttttgttttttttttttttttttttttttttttttttttttttttttttttttaaagccaaaaaggggtgggttataccctttaattacccacccgggaaagttccctccttgttgggaaaaaccaaaccttaccccgcccaaattgccgggtctatttgagaagtgttttaccttcctttataaaagggatgggaaaatttccctttttttttaaccccaagctcgggccttttaattaatttttgggggttatttttttttt

SEQ ID NO: 340312 - DNA, 305 bp, Zea mays
  unsure (1)..(305): unsure at all n locations
gcggccgccctttttttttttttttttttttttttttttttttttgttgtttttttttttttttttttttttttttttttngcctcagccaaaaaactttttccttgcaaattttttttggtgggggtacctgtaaacggccttccacatagagcaaatttaaagctcgttttgacaaacacaaaaaactgcacccccccccaaagagggcttgttttatgccgccaagagccgtctagagccgccagaatttcctacagctttttttccctttttaccgcctttttttggagtttcttccgggg

SEQ ID NO: 340313 - DNA, 387 bp, Zea mays
ggaaagctggtacgccagcaagtaccagttccatatttccaaggagcagagccagccctttttttttttttttttttaatttttatttttttaaaagaattttttttaaaataaataattcttttaaatatatataaaaataaataatttaaaaaaaaaaatataaattaaaataaaattaattattataaatatttatataaaaaaaaaattaattttaaaaaaaaaaaataaattttttaaaaaatataataattttaaaatttaatataataaaaatatttaatttattatatatcattaataaaatttttatattaattatttaaattaatataataaatttaattaattttattaaaaatatataaatataaattaatttaa

SEQ ID NO: 340314 - DNA, 315 bp, Zea mays
gcggccgcccttttttttttttttttttttttttttccacccggaaaaagcagtcccaggtcaatggcggatgacagacaacctttacctctcgctctaccctgacttcgacgacgctaacttaagacgacgacgcgacgctaacttaagacgacgacactaacttatttattaataaccatgaccttgacgacattcgagaacgatctcctctcccccgtcttggagagcatgcgcttcatttggagctgggaggcccgaataagatctccgagtctagccttttggaacggaacagtttgtccatctccggag

SEQ ID NO: 340315 - DNA, 132 bp, Zea mays
gcggccagcccttttttttttttttttttttccttctctttgaagggttttatttgtaggaaattaacttctatatcaaatcacattatattttttctaacaacccttttaaaaaaactttgtttaatctta

SEQ ID NO: 340316 - DNA, 202 bp, Zea mays
aggagcggccgccctttttttttttttttttttttttttttttagggaagttttttaattgaggggagattttatattatatatattttttaaatttaatataatatataatttataaaatttatcaaataaaaaattaataaaatatcaaatttattatatttatcttaaaaataaaaatgatataaaaaaaaaataataa

SEQ ID NO: 340317 - DNA, 448 bp, Zea mays
agagagcgagccagcccttttttttttttttttttatttttttatattttatgtttttttttaattttatttttttttttttttttttttttttattttttttaaattttttatatattattttttttttttttttttaaaaaaaaaaatttaaaaaaaggagcccgtaaaataaacaaaaccacaaaaagtgggttgatacaataacaaaaaccggcaaaaaaaaaaaaaaaaaatgtccccttataattttaaaaaaaaaaataatcgatagaggggctccccttattattaaaaaaataaaggattaaaattttattaaaaaaaaattcccaaaaatataaaaataccaaaattcgctctaaacaattagatatttgaaaaaaaaatatttaaccacatatgtagagtaatattatttattataaaacacaatattaaaattata

SEQ ID NO: 340318 - DNA, 368 bp, Zea mays
gcggccgccctttttttttttttttttttttttttttttttttttttttttttttttttttttttttttttttttttcaacaagaggaacgtccagttttttcccgtttttttttccacaaaaaatgcccccttaaccaaagtccttattacttaaaaaggaaaaccaaaattccaggcgggaaaggggaatctggggttgccataatgtttgcccttacaagaaaaatatctaaaatgtttgaagctagaatgctgatcctaaccctcgaaacatgggcagcttagggaaacataacttcaaagttgggctgcccccccgaaagaaaaaatcaaaacagttctggctctaagaactttttgctaaaa

SEQ ID NO: 340319 - DNA, 392 bp, Zea mays
gcggccgcccttttttttttttttttttttttttttttcttttggtaggggtttttttgttgggggggggggttaggccccccaattgaaaataaattgggtgaccaaattaggggcaacgcttctttggaaaaaagtgtaacatgccaactttccttctttacggtgcaatccaatcccatagaaccagtggtttttacagacccaaagatgcacgtcttcaggtcgacaatataaccagtttccacatcttgttcaatacgaacacatgttggctgccaaactttttccacagattcgagtaactctgacagggtttttccctcaccttatctaaccgtctaaatcatatagagtgcgtcccttgcgtttgatgggtttcttcgactttt

SEQ ID NO: 340320 - DNA, 62 bp, Zea mays
agcggccgccctcccttttttttaccttacaccctttcctactaaagaagggactttatttc

SEQ ID NO: 340321 - DNA, 288 bp, Zea mays
gcggccgcccttttttttttttttttttttttttttttttttttgtttttttttaataatagtttattttttatttattattttataatttttatataataattgatatttatttatttttgatggttttttattttatattttttttttattttttattttttgtatttttttttattttatttattttatttttattatatattatttattttttttatttattttttattttttattttttttatatatttaatatttatattaaatatatattttttttttttt

SEQ ID NO: 340322 - DNA, 352 bp, Zea mays
ggcggccgccctttttttttttttttttttttttttttttttttttttgatttttttttcactattccaattctatattgggtagttttttaaacacctaaaaccgcccccttattcccttaccattaccaaaattttcaacacattacataaaataaccccatatcaaaactaacattcatagcttttaaaaaattatacccaaaaacctaaacaacccttacctaaacaaaattcaaaatatataagtctcactaaaatcatttttttatctatcaaagcccttccctaaaaaaaatcacaatcttttatcatgccaaaaacacagctcgatttgggcctaaataaaaat

SEQ ID NO: 340323 - DNA, 433 bp, Zea mays
  unsure (1)..(433): unsure at all n locations
cggccgccctttttttttttttaaataataanataaaacaaaaaattttttataagaaannaaaaanaaacaaaggagaatttataaaaaaataaaaacacacaaataataatattatattaataaaaaaattaaaattaaaaaaaaaataaaaattaaaaataaaaatatatataataataattaaaaataaaaataaaataaaaaaaattaaaaaaataaataaaaaaaaaaaataataaaaataaaaaaaaaaaaaaaaaaaaaataaaaaataaataaaaaaaaaaaataaaaaaaaaaaaaaataataaaaattaaaaaaaaaaaaaaaaaaaataaaaaaaaaaaatatatatataaataataaaaaataaataaataataaaaaaataatataaaaataaaaaatataaaaaaatataaaataata

SEQ ID NO: 340324 - DNA, 125 bp, Zea mays
gtccggtattccggggcggccgcccttttttttttaataaagaaggaaattaaaaaaaaaaatttttttataaaataaaaaatataaataatagggggggggtttaaaaaaaaaaaagggggggg

SEQ ID NO: 340325 - DNA, 377 bp, Zea mays
tcccgggcggccgtccttttttttttttttttgtgtttttttttcttttttttttttttttttttttttttttttttttgggggggtttttttatttttgggggtgcttcaaaaaaaataagttaattttctctaaaaaaaaaaaaaatgtttgggaaaatgagtgttcccaaatccccctcatggtgggtgggctccctttttcccgcggtttttggaccaataaaaaccacgcccctcctttttttttgttttaccatggccttgttcttaatctacccctttttaaagcttgctttttactccccccctatcttcacatttccctgtttttcttttcttgcccttatttttttgttttcccttctcctttttta

SEQ ID NO: 340326 - DNA, 174 bp, Zea mays
gttgggggaaaccaatccaatccttttcttcattatcaaacaggatcaaaaggggcggctatcatacacagcaaagggacaactctgaaccaaaacaatatccacgtgagttgtcaccaaattcaaaatcattccagttgaatgccatgccttattcatgaaaaagaaaaagag

SEQ ID NO: 340327 - DNA, 139 bp, Zea mays
gcggccgcccttttttttattattttaagttttgttttgaaaggtctttttttttttttctggaatggtgttattaaccaaggttggaacattgctgatgttgagggttaaggcattttatttcctcatatacattaca

SEQ ID NO: 340328 - DNA, 355 bp, Zea mays
  unsure (1)..(355): unsure at all n locations
cgccagcacctgccggtccgtaattgccgcggcggccgtccttttttttttttttttttatttaatatggggtcggtatctattacaaaacatcaagtacaagaccaagtttggaactagataatccatagaggctcaaaaaaatggatgtgtgggaaaatggcaagtgtccaagcactcgtgtctcctggaaattctaagcctaattggaaaatttagaacagccggtacacctttcccatagtgctctttaggtacaagcattttacattctgccaattctattttcaagagcgactcgaggaagntgacactcatttggcacattctggaagatctgttatttatccatgcc

SEQ ID NO: 340329 - DNA, 96 bp, Zea mays
  unsure (1)..(96): unsure at all n locations
tgcggccgcccttttttttttttttttattttttatttnttttttgaaaagtctaattgtattttattttcgactataaattgtgtttggacgcta

SEQ ID NO: 340330 - DNA, 223 bp, Zea mays
tgcggccgcccttttttttttttttttattttttttatttttattttttttttttttttttttttttttaaaaacggggggcccccaatttttactggcgaggtgtataacaggcttcgcacccaaaaaaccagtttccagatcactttttatagggtaatcggacagctgcaaactctttctcctatttttaaggcacataaagccggtttaactgcccctt

SEQ ID NO: 340331 - DNA, 223 bp, Zea mays
cggccgcccttttttttttttttttatttattaaactattaattttttttttctttctcatcttctttctttttgttgggttttttttattatctgggggttctcttctttcttcaaacttttcacctattctatatttcttctaaaaaacaaaaaaaacaccccgggttataaaaaaaaaccccctctaaaaaacccccccaaaccctgcgaaacaattaca

SEQ ID NO: 340332 - DNA, 451 bp, Zea mays
tgcggccgccctttttttttttttttttgttaagtataaatagatgcatgctttgcatgttacagtcttatcatcttcccgtagagatctacgacgttgacacggcgtacgtagacgactacgtacgtaccgcgcgcgtacgtacattacatacaccagatcgaccaagaccatcacaccaccataattattagcatgcatgcattgtcagatccaatgcaaacaacagctactactacttgattcgacactgaactgaactgagacaaggctacgacgcacacgagagagacacgcattaataatccaacaattaaccaactaaacgaccaactatagcagacgacgatgcctgcatctgcatgcttgagctgccagccacttgccaccaaactgtcgtacgtcatccgagctagctaataagaagctagcagggtgtgtacggtgcatg

SEQ ID NO: 340333 - DNA, 183 bp, Zea mays
tgcggccgccctttctttttatatcaattctttataaattgataaaccgtttttttttttttttttcttttttcactatagttggagtttttttttatattttagggcgatccatacccatctatacccaatagtaattaaaacaaaaaaagggggctattaaaaatctatctgtttggccct

SEQ ID NO: 340334 - DNA, 254 bp, Zea mays
cggccgcccttttttttttttttatttttattttttttatttttttggttttttttgcccaccacacaacagaaaattggcataaattttctactaattggtgccccagaatgtttgaatttattccaattgataagttttggttggttaaaacaaaaatatgtcactatgaatgcatatcaaaggtgctcttactagccctctgtgttcattgtcatctatttatacttcattgttatccacttatagctctc

SEQ ID NO: 340335 - DNA, 329 bp, Zea mays
tgcggccgcccttttttttttttttttttatttttcaaacaataaacttattcttcttacgaacatcaatttcatctgatccatgtctcaaacttaacgggggctgaatgcatctcctggtcttgagctcagagttataaatgtccacctgttcttaaagaattccatctcatgattcatgtaacatgaaacatttgtccattttttagatggagtatattttatttaagatcattccctatatcccatgcccttagttttcatactatatctttcatttaaactgtatatgttaattacattactatttataatgtcatctattcacc

SEQ ID NO: 340336 - DNA, 86 bp, Zea mays
gcggccgccctttacttttatatatataaatatatctatattattgaaaaaattttttttttttttctttatttagtttatcattt

SEQ ID NO: 340337 - DNA, 104 bp, Zea mays
tcggaatcccgggcggccgccttttttttataaatgttaacaaataaacagggttctttttcaaaggcgcactttaggggggcacgaaagcatggggggaaaaa

SEQ ID NO: 340338 - DNA, 333 bp, Zea mays
gccgcagtaccgtccgtattcccgtgcggccgcccttttttttttttttttttgtttttttttttttggctcaatttcaatccaatttattcctcatcgagatacgtggaagactggggatgtctggggctccatcggtacagtatgttcccgaaaacgttttataagataaagtgagcctgtgtcttgttttaacttgtgggactagaacccatgcccgttgtagaataatcggagcttgcccttgtttgtattggaagacttcctttccattccttgtaaccaacttcgttcgttaaatactttgagtgtgctgttctttgttgctaattg

SEQ ID NO: 340339 - DNA, 150 bp, Zea mays
gtccgtattcccgggcggccgccctttttttttttttttttactttacttaattatattttttttttttttttattatttttattttttgtttttttttttctggggaaaagggtctgcaaaaaacctcttattcaagtttaaagatgct

SEQ ID NO: 340340 - DNA, 188 bp, Zea mays
tgcggccgcccttttttttttttttttagaaacagctcattagctattttatctttctaacaccaacaagggtagtaacaaggcttgtatccatatatggcggaccagatgttcggataagttttaaattacactctggttgtaacgtaaattactcatctatattgaccatgcatactttgcgagca

SEQ ID NO: 340341 - DNA, 205 bp, Zea mays
tgcggccgccctttttttttttttttttttatttttaaatttttttggaggttttaattccgaggtttaacaattcatggagattggaactcaagttttgaatttggggaataacccctttcaacataacattacaatgtttgcatgacctacgtaactagaggctggatttaaccaggccatccaacaagtccacaattgctag

SEQ ID NO: 340342 - DNA, 177 bp, Zea mays
gcggccgccctttttttttttttttttttaatttaggaaatggcacttttttttggtaatttttcaacaggaacacacaagaggtttatactactgggcagagtgagcaaagttgttcgctctataataacacataggtatatcgtggatctgcatgatatatgtccaaacaaccat

SEQ ID NO: 340343 - DNA, 411 bp, Zea mays
tgcggccgccctttttttttttttatttttattttgttaactttatttttttttttggctaaccctttccatcaggtctgtcatttagcaataataataatggggacaaaaatgcttttttgttaccaatcacacttaccccaagcattacagattgcatcaagccatccacgttcaaaccagatgccacaccgccaaacctacaggacttgagcatcagtgttcaacttctctgcgatgctgattttgagcccctgtgattgcttgacaggttttcccacgcaagggttttctgaatttttgcatttaaaagcttaatcaaagcaacccgttacaattttggcaccgtatcaataaaatcaagtatgaaccttccaaatctgttgtggtgtgccacgcttttctttcaca

SEQ ID NO: 340344 - DNA, 287 bp, Zea mays
tgcggccgccctttttttttttttttattttatcaaaacaaaaaaaaggctttttcttatcccttaatacagagatactagtgcttcaagttcaattcgccgtacttgtggtagcctgtaagaaaatgttactagcaaaccattacaaaagttacacaaagggctcttggaaactttagattgttgttggtccggttcttgtaaccatggatcattctccggatcaagggttgacagaatctgggtcattgacattccaccatatcacaacgtttttttttgccttc

SEQ ID NO: 340345 - DNA, 270 bp, Zea mays
gcggccgcccttttttttttctatttattcatatatttaattatttatttttttattggttatcggaatcaaaaacataaacaaccattttgcaggcagtgtgttgcgaccgattccacggaaagctgatctttcatacagtcgtctaacacacgcctagcttcgacctggttgactcgatcggaatcacatcacaccataacaggtaatttattacccaacatctagatgttttaccaactgggaaacattgctgaccaaaggaaactt

SEQ ID NO: 340346 - DNA, 63 bp, Zea mays
cggccgccctttttttttttttttttaattctttaatactgaatttttttttttttaaataaa

SEQ ID NO: 340347 - DNA, 449 bp, Zea mays
cggccgccctttttttttttttttttttttatccaaagaaaacattttttgtcttattgcaaaatcctgacagcgaccagaaaaactgagacattgtgtgaccatagtacgaggcatcaacacatccgttctgaaacacatgtcctttaacaatctaaagcacagttgacagataaacaacgtcaataactttaggtggccttgtcagccttggaggctgtggcagcagcttgacccctgagccttccagtccttcttgcggcaattgagaccaaccttttggccagggggagcgtttcggcggtcatgttatgcgtgaccgtttgtttggtggttaccatcctcgaggggatgcgttcactggggttaatggccacactctggccctttggccagtttttctttttaaaaggtgcttgtggtcctgttaccagccttaggtttggttt

SEQ ID NO: 340348 - DNA, 373 bp, Zea mays
tgcggccgcccttttttttttttttttttttgcagaaatcctaatctggtgtgtgcgcaatctattcacgcattcccgtttcagtttaatactactcaagtgatgagcccagtaaaatcaaaacttcgaaatgtctccacggcccacagccatagcagctaaacgaataactgggagacaaataaatgcaaagataaagtagaatcgttttaatccctgtcgactaatgccaaccactaattgtacatgtgtctagaatttggtgacatagtaatactctgctagagccttaccagtcccaaatttgtcggacactggcatccgctacacggggtccgacgctacgttcgcctgcagacgacccaagatttct

SEQ ID NO: 340349 - DNA, 138 bp, Zea mays
tgcggccgccctttttatttttttaatttttatcatttatctttatcttttttttttttttaaagagaaccataacagtagtcctaaatccaccatacacaagtcaaatgggtgggcaggtgttcttataccaataac

SEQ ID NO: 340350 - DNA, 139 bp, Zea mays
gcggccgccctttttttttattttatttttccgcatataattccatcacattttttttataaaaaaattacatagcttgcgtgcggtatatgcctaaagagaggcgggaccgtctaacaaagcgcaattatatttaggc

SEQ ID NO: 340351 - DNA, 316 bp, Zea mays
tgcggccgccctttttttttttttttttttacatcaaaaccgccagataactttttttttttgcactataaaaccacaggcgaggaatgttccaaagaacaaggggtgacttaacaacaagatgcaattacaaatataacttggtgacagcccatttggcagagcctccctataggctaggcacttgctaccttaagataaagcgtaagaaaagttatcttcttaatacatatttttttctaggacttccttcggtctcgaaatttttgtatttatgcctagtacattttttaaactaataccgtcggtttatata

SEQ ID NO: 340352 - DNA, 398 bp, Zea mays
tcgccgcagtaccgtccgtattcccgggcggccgccctttttttttttttttttttttttcaaccataacatttttttttttttttttttttttatttttttattgttctttttattttttttgtttgaaaaaagaccgccctacaaatttcaatgaaggggggttttctcaaaccgaaaagtttgaccttttttttcccaagaaaatttccaaatcgggggggcgcccatcaaaccactttttttttggttggaattgggttaaaatttggctctttcccttcattttccccggggccgtttttcatccttacccccatcagggcctgtccaatattttggggtggcatctcttaattgtggagaggaatggcctttccccgtgtttttttttatgt

SEQ ID NO: 340353 - DNA, 157 bp, Zea mays
gcggccgccctttttttttatttaatttttaattatatctatttttttttttttttttttttttattcttttttttttttttggaaagcgggccctccatgtcaggtggtaccttctccgcgctactcgcgttgtttcttttatttcatactttttt

SEQ ID NO: 340354 - DNA, 164 bp, Zea mays
gcggccgcccttttttttttttttttttttattttacaattaattttttttgtttttttttaatgaaaatattaaattggtttttttatattttattggggggttatttaaaaaaaaaaaattatctacttaagaaagatatcttgtaggaaaccaaataattt

SEQ ID NO: 340355 - DNA, 227 bp, Zea mays
cggccgccctttttttttttttttttttttcaaacgtttcaatgttttttattaaactttccatggcatgcatccttcaggttcttagtgcatgcttgttgggaagaaatgaagatatgaacataaattgttcagtaggcatttgtggcccatgagacatttaaaacatgtgccctattacttgctagaggtaacatttaattcaaatggacagttttaatttgcat

SEQ ID NO: 340356 - DNA, 51 bp, Zea mays
gcggccgccctttttttattttatataaaaaaaaattatataatttttttt

SEQ ID NO: 340357 - DNA, 406 bp, Zea mays
tcccgggcggccgcccttttttttttttttttttttttttttttttttttttttttttttttttttttttttttttccccggaggatgggattcacttaacctttccgatttggcaactgaatcaaggcgtttagccgtcttaccctcgaaaaagaggattgattcatcgttcatagcaataaaaaggtctggctcaaggacaaacatacaatccatccaacatttgggtccatgttaatccaggggggggggggggccttggcttactttttccagtggcccaaaattaaaggggttctgcataggtaataactttgttttttaccatttcattcattccattttttccggttgggagacatgaaacgccggaaatgcaacccaaggcaaatggttggttggatg

SEQ ID NO: 340358 - DNA, 324 bp, Zea mays
ttcccgggcagccgcccttttttttttttttttgagatgatttatttagagtctttttactttaatgtttagcagaacacatgaggggtactggcacgcttagcggtgtcctgcacaagagaagcaaggtcacacaaggcactgttataccctatacacttaaaatttatgttgcacaaagcaaaatcagataggctaaacccatacgtctggattcgcattccaactgttgattggacttaatcaacggtctcgaagaaagcctttccaggagcacgcttctcaagtcgttcatggttaccgagcattttttctctgacacct

SEQ ID NO: 340359 - DNA, 301 bp, Zea mays
aaatccctaaactatttataactgcaaaaagaattttcagagttcagttcaccttatttttgggacagggtacaaactttttactattatacctttccctcctttccattcattattataaacattcattaattaaaacaaaattaatttgcttcgtaaattatttcactaactttctaacctttgttcaacaatctatgggttatatctttataccttcttcttacttattctccattaaaataaaatatttattactccccataataaatttacttcttcaatttacttatttaccatt

SEQ ID NO: 340360 - DNA, 392 bp, Zea mays
cggccggattcccgagcagccgccctttttttttttttttttttttttttttttttttttttttttttttttttttttttttttttttttttttttgtttttttttttttttttttttgttgtgggccctaaaaagcccaataaaacgcttgggggggcccggccccccttgccaattaattccgggggaacaatcccagtccatttggtcttgggggaacacaaagaattggggtcctttttggcccccttccagccttttaacaaaaaaaaagaggggtggggggcccaattcggtttcattttttgcccgggccttttttgacggcccaaagcttttaaaactttggggctggaacaattttgccccccccttcaaaaatttctggccc

SEQ ID NO: 340361 - DNA, 364 bp, Zea mays
cccttttttttttttttttttttttttttttttttttttttttttttttttttttttttttttttttttttttttttttttttttttttttttttttttttttttttttttttttttttttttttttttttttttttttttttttttttttttttttttggaaaaaaacttttttgaaaaaaaaaagggggaaaaaaggttaaaagggaaaaaaaaaaaaaaaagggttaatttttaaaaggttaaaatatttttatttttaaaaaaaaaagtttttaaaccccccaaaaaaaagaaactttattaataaataaattaaaatgaggggaatattttataaaaaaaaaaaaaaagagctagagtt

SEQ ID NO: 340362 - DNA, 172 bp, Zea mays
  unsure (1)..(172): unsure at all n locations
ggggttggggagacagatttaggggggccaaagcagggtttggaaatacanngggtttttaaaagaggttaatggaaattttaagggggatttttaaattacattccaggagcaccaaatgtgaaagagacaaaaagtcctataacccttttttctcccgaactctttattt

SEQ ID NO: 340363 - DNA, 437 bp, Zea mays
cgccagcaggtaccgtccgtattcccgagcggccgccctttttttttttttttttttctttagaggatccaatttttagaggaaactcatataacatttaaattggaccgagtaatcatgtacttgtttcatacacacggtcctcaacacaagggcatcctcaaatcctgtgaacagacagaacctaattagggtaacagcctttctagattgaacgaacaactcaaggattgcgaaatacagaccggtcagcgttgatgacaacgctcaaggacgccaaccaaacacggacgagccacgtgggtcaacacttatcctggtcgaagtggtggctacaagaatcctgaccgttacacttatcagcgccctttaccccatttcttttcttttctttggtttcgttctttgcatgtacgatgatttcccccgagatggtc

SEQ ID NO: 340364 - DNA, 185 bp, Zea mays
ataatataaacctttttttaggttgttttattttatacaaaaaggggggcggcccacaacaaatttttcaaattcaaaaatccgtttattatagcctataaatttgttattttaaatttaggggaaaaggaaattttttaaatctataaccaaatttaaaaattaccctttaaattaacccgtaa

SEQ ID NO: 340365 - DNA, 70 bp, Zea mays
ttccttagattacttattacttcttgtagttcttagtttataaattatggcttttgtgaaggcctttttt

SEQ ID NO: 340366 - DNA, 424 bp, Zea mays
agcagtacagtccgtattccagagcggccgccctttttttttttttttttttttttttttttttatttttttttatttttttttttttttttttaattatttttttttttttttttattgtggtttttttttttattttttatatttttttatttattttattttttatttttttttttatttaaaaaaaaaaaaaaaaaaatttaaggggggggaaaaaaaaaaaaggtaaaaaaaaaggggggcccctaaaattaaaaaaaaaaaaaaaaaaaactcttgttaaaaaaaagtgttttattgagggggtggggataaaacatcttagagaggtaggtggataaaaaaaaataatataataatcaccctctaaataatttaataaaatataaaaaaaaaaaattagataaattaaccatttttc

SEQ ID NO: 340367 - DNA, 181 bp, Zea mays
aagagcccaagcttttttttgcaacgggctatccatagaagaattggtgactgtgtcacaccgagaaggagatgaccctttgtactcttgcatgtcgcattgaacaactcacgctttcatcacaattacatacaggacacacaccaaaccttggtgcacttgcactttcttacattcagta

SEQ ID NO: 340368 - DNA, 392 bp, Zea mays
gccggattcccgggcagccgccctttttttttttttttttttttttttttttttttttttttttttttttttttttttttttttttttttttttttttttttttttttttttggggtttttttttttttttttttttttttttttttttttaaaaaaaaaccccggcggttttttaaattaaaaagaaaagggggttttccccccggccccccccaaaggtgggttttctctaaaaaaggggccccctatccaaaaaaaacccgaagggggggggggggcttaaaaaaacccccccaataagggtgaaaaaaaattaggaaggttttgttttttcccccaaaaaagggccccccaatggtgtatttttttggcggagaaaaaattgaaaaat

SEQ ID NO: 340369 - DNA, 449 bp, Zea mays
gccgcagtaccgtccggattcccagtcagccgcccttttttttttttttttttttttttttttttttttttttttttttttttttttttttttttttttttttttttttttttttttttttttttttttttttttttttttttttttttttttttttttttttttttttttcaaaaaaaaaagatttttcccaaaaaccccggggtttttttttcccaaaaaaccaaattttttttgtggggaaaaggggggattttttttttggggggtttaaaaaaggggggggaaaaaagggccccaaaaacgcccctcctccattttttttagggggttatggggggggtttttcctttttttctcgccttttttttaaaagagaataaacacgtgccccccaagagaggaaatatcctttaataacaaaaaatactgttttttttcattggagg

SEQ ID NO: 340370 - DNA, 136 bp, Zea mays
ccaatcgcttccaacgacctttttatatccaacaccttcacctgacaaaccggaaaaattaatttaactcttaggaggttctccatccaccaatcctatcattttgttactcaattcccttacctcaattatccat

SEQ ID NO: 340371 - DNA, 343 bp, Zea mays
gccgcaggtaccgtccggattccagggcagccgcccttttttttttttttttttttttttttttttttttttttttttttttttttttttttttttttttttttttttttttttttttttttttgggtttttttttttttaaacccaaaagcccccggttccattaattttgactaaaagggggggtcacttgattcccaactaaaaaccgggtaataaatactcctcccccccgccgagaagagggggggttaaccactccggccggggggctaaaaagccttggggggcaaaccccacgcgctgggcggtggtttattaaaaccaaggggaactgaggggg

SEQ ID NO: 340372 - DNA, 420 bp, Zea mays
agcggccgccctttttttttttttttttttaaaacagaaataggagctcctatatttccaatgaccaggacttcaatagtgaccaagtgctgggcacatcagtatcccatgtatctgagacactgaaacttcaacccgacaacaactacaccaggacaagggctgcacttaattagtaacacgctgcagcctgcagaacacctacaccagcatacaaccttattatcccacgtacactggcaataaccaccttatttatcaccccgtacatcgggcaatacaaccttattataccttgccgccaaaattgactccctacgaaaatacgcaagcagcacaggcactgggtgccttctctataccaagcacacgaacgcaagacgagatggcgatgctacgcgctcgtttttgctattggaa

SEQ ID NO: 340373 - DNA, 326 bp, Zea mays
agagcggccgcccttttttttttttttttttttattcatatattttttttttttttttttttatttcttttatttttttgggtttatatattgagaaaaggaggattccaatcaatttagccacactcctataaccctacaacgttccacactaaaacaaggcaacagctaattaatgacgccagcaaaccagcggaacacccacaccaagacaaacccccatgatgaaacaaaaaaaaacaccccccaccacatatacccccccacaaatcaggcaactacacgtaagaacacgtagccagcaaaatctacaaccgagcaaaaac

SEQ ID NO: 340374 - DNA, 317 bp, Zea mays
agagcggccgcccttttttttttttttttttttttttttttttttttttttttttttttttttttttttttttttttttttttttttttaacaatttaaaagagggaaaggcctaagccaatacatttaacacttcggaacccccccaaatgcttttaaaaaaaccccctccttttggcatctaaagcctttttctggaaagttctcatgactaatacgattagatcgcgttacctaacatcgtaatcctcattgtttggctctgatattccctgtgtgttaaatgggaagattgcacccgcagttactaaaacaaa

SEQ ID NO: 340375 - DNA, 429 bp, Zea mays
cggtccgatttcccgggcagccgcccttttttttttttttttttttagtaaaataaaagtggtgttagctaaatagagagtgataggcgcgaatgaatccaaacatcttctcaacttaaaggccagccatattctaaaaaattaaaaaaataaaaaatataatttgtagcctttaaacggttaaaaactagctaacatgatatatgtatatagattagaatatgtcatgtcgctaaagtcagcaactatcgacctaaccgaccgtctaacacgttggctccaacaattaccagcgatcggtatctaattatatgtcatacagtcattctgtttgctgcggtatggttacgcatctttgaaaaaacttgacccttccagtttatgccattacccacataaaattcacctttttacaccacctctttgttc

SEQ ID NO: 340376 - DNA, 414 bp, Zea mays
agcggccgcccttttttttttttttttttttttttacaacaatctaacaaaaatcatgttatgcatgacatttttcatctgattccttgggcaatgcagtgagcatatttaggtaacaaggagtataagcacaaggtatttaggtgtgcgattgcaaaagcatacatattcaaattccactcaacagtacatttagaacagtgcctcataaactactgacagaaaaatgttgccatggaatggcaccatttattatttcattattatccacaacaagttgatgcaaagcttgatgattttgcaatggaaataagcatggtctcgcaagggatgagagaacttgatgcacattggcgatcaccatatgatgcaacccaaccttatatacatggggttggctgactttatatgatt

SEQ ID NO: 340377 - DNA, 374 bp, Zea mays
agagcagccgccctttttttttttttttttttttttttttttttttttttttttttttttttttttttttttttttttttttttttttttttttttttttggagtattattataaaaataaaaatttatttaaataagtaaatatttaaaatatgaaaaataaattttttaagttaaaaaaaggaaaaaaaaaaaaaaaaaaaaaaaacggccccccaaaaaaataaaaaaaaaaaaaaagggggggagaaaaaaaaaaaaagttaaaataaataaaaaaaaaaaataaaaaaaaacaaaattgctaataaaaaaaaaaataacccattattcaaaaaaaaaaaaaaaaaaaatacccagtttattaagtgaag

SEQ ID NO: 340378 - DNA, 398 bp, Zea mays
gccagcaggtaccagtccgtatttcccagagcggccgcccttttttttttttttttttttttttttttttttttttttttttttttattatactttttcttccttttaaaattttattttttatttaggggccaatcgggaaaccacgagaacctgttgttactgtccaaaacacaaatatttcccatcccccttttttaaaaccaaccctttcccttcaatgaaaaacaatttttttgaaataaaaaaaagcccacccaatataaattgtcttaggccctattattgaaaaaaaaactaagtaaacctttttcaaggaaacatgcaacaggcgggggttatactatccccccgtaaaaaaaattgactttccttataaataacccctattgggaaaa

SEQ ID NO: 340379 - DNA, 271 bp, Zea mays
gattccagagcggccgcccttttttttttttttttttttttttttttttttttttttcttttttttttttttttttttttttttttgggttttttgaccaaaacggagggtgcatcccatctttcaaggcccaaaatatttaatctatcaaaaccccatcacccaatccgtcagggtgtccataaaaaaaaacaaaactctttccattgagaaacaacgaaattttaaaccccatgaattaacaaaaacccgttttcctctaaaaacaaaa

SEQ ID NO: 340380 - DNA, 56 bp, Zea mays
tctttccccttccttccaacgccttagctcttttttagtgtaacctaaattcaatt

SEQ ID NO: 340381 - DNA, 211 bp, Zea mays
agcggccgccctttttttttttttttttttttttttttttttttttttttttttttttttttttttttttttttttgttttttttttttttttttttggggccccccccgaacaacggccaaaaaaaaaaggccccttttggcgaacccccccccttcagttaaaaccaaatgcgctttaccacactttttttttccccccccaaaagcaa

SEQ ID NO: 340382 - DNA, 187 bp, Zea mays
atcctattggagcatttcataaaggcctatggagcactaaaataccaactccctttttaagtaattcgccaaagactttatacaccgtccccaaaaaaaaaagccaccaacaaaccccaattcccccccccccggggaacaaaaaaaaacccacccaccccttaggcgcgaccacactaccctacac

SEQ ID NO: 340383 - DNA, 277 bp, Zea mays
  unsure (1)..(277): unsure at all n locations
ccggccggattcccgagcagccgccctttttttttttttttnttttaagcaacatgtcgatcctttttttttttccttcaaaccacagcgctcagcatgatgcatgcattcgcgacacaaatgcactaagcaagcaagcagagttcaatgtatgttacatggtcaatctttctcaaacccgatcatttgaattgtcaggaggccccaatcaaacttggtctcaatccaccagcaaactggacgtcatactcctgtgctaaagtgtgcttggactacg

SEQ ID NO: 340384 - DNA, 217 bp, Zea mays
aaagcaaaaacttaaaggggaagcccgggattcactcaatgggaatagaggcggcttgcatttacacttctcgaaggacccaaaaccaatccggaagattctgcatttaggagtcccaacatttcagcataacacgaatagcaaaacctgccatcgcttaacataaaacgtcttaccaagtcctaaaggtcaattatttaaaatatcagggtgaaat

SEQ ID NO: 340385 - DNA, 214 bp, Zea mays
aggagacatgggtgcaaacagaggaaaaacagggcccgagtagatgaaggaaggacgttctgtcaaacagggcgtgtgtgatcatctacatgacatctttcacgccgccaccaagaatatacatggcggatgggacctctgctgcatccagcacgggatacacatcaaaggatcccaaggcatctatacaacagctggagcagacaatgatact

SEQ ID NO: 340386 - DNA, 344 bp, Zea mays
gaggaacttagaagtccagagtaccttgccgaaggtatagatttaagaagaggcgctcaagcaaccggcatgacacccatatagcttgccctttctctgtgtgatctttggtacatgtatggatgcacagctcgacctgcgtacaccgtatgtgaggtgacgaatggctacaacacctttgtcttaacataaacatgccaactgggactacgttgagcaaaaatctctcgcatgaatatatactctgctgactacattatttcaggacaccgtatttctcagcccctaggaaagggcacaattcactgcaaggtcgagcttattatcaacttctagaatgcctt

SEQ ID NO: 340387 - DNA, 60 bp, Zea mays
caacccacccgtccgttttcatctcatgcctaactccctccctgtggttccatcgtgatc

SEQ ID NO: 340388 - DNA, 230 bp, Zea mays
gacttccatgcacgcggcaccttacctaagctcctatacatgtagacccaccccaccctttctatctcttcccaattccacaacatacggggcttctttctatgcctgtgggcagccacaacacatctgtctatgccagatcatcattaatcaattctgtacccctgaccgccacgcatgtttaacagcacccttcctatcctgcctatcacttagacttaaccttattt

SEQ ID NO: 340389 - DNA, 97 bp, Zea mays
tagagctagcaaaacattgggaccacatacagtgcgtgcttctacgtctgtgttcccaaagaccacaactaaatacacgaggatgaaggggtccact

SEQ ID NO: 340390 - DNA, 74 bp, Zea mays
cgacccacgctttcttttttttcttaggaacaagtacatgcgggggttttttattaactatggggcccactcca

SEQ ID NO: 340391 - DNA, 160 bp, Zea mays
tctttcgctagtgggcgaccgccgccgcgtccgtccgtcaggtgcccaggtgtagcctcgtccgccccttcgtcaggtcttcgttagacccctcgtcgactagcacccaccagacatgcattagagcgcgcattaaaaataatatctgttcttaccggcg

SEQ ID NO: 340392 - DNA, 326 bp, Zea mays
agctcatgagacgagcctggtcaggatagggaagcccatcccgagcctatcgcggtgtctattccctccgcaaccgaggtacagcgattgcgggcgtaagctccgcgctgcagtgggtatacctgtccgtctacaaaagggtcgtcttctttggatgggcgcaggtgcatgactacgcgctcctgacgctgagaatgagcgggcacaagggcgcctatgacgccgacaagagggcgttgttgttcgcgcagacagccgccaatattgagatcgatgatgggctcgtaaggaaggagagggctccgatctgtgcaactcttacacag

SEQ ID NO: 340393 - DNA, 201 bp, Zea mays
attttccaagcacgctgctgccagggtctgcaggcgtgcaagcacgcatcagcgtgtgcacaagcgaaatggcggcgacggcagccgtgccttcttggcgccgggcattcgcggagctcttgctggtcctgcagctgcgcggcgcgcggtcggcgacgttcaccatcgcgaacaactgcggctacacggagtggccggggc

SEQ ID NO: 340394 - DNA, 379 bp, Zea mays
tcgcaacttcacagcgtatcatcgttttccatcgctcctactcctatcatccagaaaatctgagcggtattgatggcgcccaaggcggagaagaagccggcggcgaagaaggtggcggaggaggagccctcggagaaggcggctccggcggagaaggcccccgcggggaagaagcccaaggcggagaagcggctacctgcgggcaagtccgccggcaaggagggcggcgacaagaagggtaggaagaaggcgaagaagagcgtggagacctacaagatctacatcttcaaggtcctgaagcaggtgcaccccgacatcggcatctcctccaaggccatgtccatcatgaactccttcatcaacgacatcttcgagaagc

SEQ ID NO: 340395 - DNA, 133 bp, Zea mays
tagattttgaagactatctctcatatttcaatgccaaaggcgttcggcacagggctttaaaaattcaaatattaatttacaacttcacaagttgtatgcaaaacaacatctacttatataaccacataagtag

SEQ ID NO: 340396 - DNA, 291 bp, Zea mays
aattacccgagcgcgatgcggtcgtccaatgggcagaccacgctcaaatcctttctcttcaagcccaggtatgccgtctgattcgcatccatcccaattttcgccccctccgggccagcacttcaatctccgttccttgcattctcctattcgtgtgttagggttgtcgatggagtaccgtcaccaccgccggcggcggtgatggaggcgccgatctgttcgccggagccgccgaaacgggagattgtcagagtcaccaagacgaccattaaggagaaggcgagcgcgttc

SEQ ID NO: 340397 - DNA, 51 bp, Zea mays
tcgacccacgctttcttttctccggacgccaagaacatacacgggcttctt

SEQ ID NO: 340398 - DNA, 115 bp, Zea mays
gatcctttaaagtggaccaacgcgtccggcggaagccgcgaggtgaacaaccgccctgatttggaaaagccccgtgaggggaagccaaaaagtcctgggcttaacttgtcccagg

SEQ ID NO: 340399 - DNA, 183 bp, Zea mays
tgcttcttctccgttgccgtatgcccctggcgggagcgccatccacagctgctggaataaaaatgacagaaaagaaactttatagttcgatgaatgggcagtttgccgtgggtttggaataatttggactttgtcttctttcgctactgttgtcgtaccattgtcttaatcgatttgtggatt

SEQ ID NO: 340400 - DNA, 93 bp, Zea mays
aaataaaaaaaaataaaagtgaaaaaaaataagaaaaaaaagaaggaaaagatagaaaaataatatgaaaaaaaaaaagataaaataagggag

SEQ ID NO: 340401 - DNA, 429 bp, Zea mays
tggtaccctatagagtaaccccacgcgcccgttctcggttggcgccgatcacgtccttcttgtggctcgttaaaccatcttatgtatctcgctgtgcgtgcgtgcgttcatgcacccgtgcaggaaactgccgggatctgtggagggccaaaaagcagggtcgcgtcaaactcaaaccaaaactgaaactggggaggatttggcaaacgcagggggtcaggaacgcaccgcgtgctctccttgcaagctgttgcacatgcactcgatctgatgagcaacaccttgcaagggggttggttcgggcattgactctcttgctctgtcctcccgtcgtcgacctgccactctctcctcggtccatggccgggctgtagtagaagctcgttcgtcagctagctagctaggagcttagaccatgcatgcatgcat

SEQ ID NO: 340402 - DNA, 316 bp, Zea mays
tcgacccacgcttttttttatgtagtagcgaccaactaacaacgggggcgctttcatactctccgggggggcgtccaccatacccaggctccgcttagcgttaggcccgcggttgaggcggccgtcggcataggacgcactggccgcggtcactctcttccttcagccacgtaacgcccgtggcggctgcgggggctggggagctggagccgccggacctcacccgcttagacaacgccgcgcgcatctcgctattcccgcaagtagccgatgacttcgagcccaagattcgtcaggttgtggattgttttgggca

SEQ ID NO: 340403 - DNA, 265 bp, Zea mays
tcgacccacgcttttctttctcacacctgctcgctttcactccggtcgtgtgactatatagtcccgggctgtcgttacaaatcctttctagccccgacgatggccaccgtcgctgtgtccttcgacgagaagctctacatgcttcgcgccaaaattttcaagctctaccagatcagctagaactttaagtccggttcatcaacctcgtgtcacgctacctcatttgtgaagcggatcacttcgagtggagcaagatccataccct

SEQ ID NO: 340404 - DNA, 165 bp, Zea mays
actcttgcgtcggcgtctgcagcacgaccgtgtccagatcatcgcccacgaccagggtaaccgtaccacaccctcgtacgtcgccttcaccgactccgagcgcctcatcggaaatgcggccaagaaccaggtcgccatgaaccccatcaacaccgtctttgatgc

SEQ ID NO: 340405 - DNA, 51 bp, Zea mays
  unsure (1)..(51): unsure at all n locations
tttcctttagacatagcgagcgtgccctataaaaaatcntattatagcttg

SEQ ID NO: 340406 - DNA, 267 bp, Zea mays
tcggccgccctttttttttttttttttttatagattattttatttttttttttttttttggacaaaaaggtatacgacttgtgtttaaagaataaaaccgggggtgattctagtacagggaaccctcggttctacactcatggaaaaccctattcatggtctactttacgattgtcgaaagaggcactgcatacattctagtgaccattaccactgtcacgcctgcctctggattttggagtacatggggccccttacccttgtagg

SEQ ID NO: 340407 - DNA, 205 bp, Zea mays
cgtccgtattcccgggcagccgcccttttttttttttttttttttattttataataattattatttttttttttgaaaaaaaatttataggggggttttaaaaaaaaaaaggggagaggattatttaataatttataataattaaaaaaaaagaagtataaaaaaaaatattgtaataaaaaaaaatttttaaaaaaataaaatt

SEQ ID NO: 340408 - DNA, 83 bp, Zea mays
accgtttccttaattcccggtgccggccgccctttttttttttttttttttataaatcatcaaactttttttttgtttttaaa

SEQ ID NO: 340409 - DNA, 280 bp, Zea mays
gcggccgcccttttttttttttttttttagttgcgttaaagcagttttttttccttaaaattggcaccttcaccatccggacatagtacatggatgaaggggacgctcctgcccaatgttgttcgcatgcacacatcgcattttcttctgtaccattttaattgaaccaagctaatttcttttcttattcaacctaaaaggattcataattccctaattcctgcacaactaatctagcatattcacaggaaaagaatgtacaaggcaatattacaaaatc

SEQ ID NO: 340410 - DNA, 252 bp, Zea mays
cctgcacgtaccgtccgtattcccgtgtcgccgcccttttttttttttttttttattttttttagagcacgttttttcaaaatattataaggcaaagacaacacaggacattcttttttcgctacgggtcacatatccacaagtttataaacaataataagtacagccttctaacatctacaatcttttcataaacgcttgaatctcccttgcttcacctttataaactctaatgtaccttcatcttacttt

SEQ ID NO: 340411 - DNA, 79 bp, Zea mays
tagcggccgcccttttttttttttttttttttttttattttttttttcattttttttttttttttcatattcttaatat

SEQ ID NO: 340412 - DNA, 377 bp, Zea mays
tgcggccgcccttttttttttttttttaggatccacccatctcatatttctttgtcttcccccacgcataatctcatctcaagtaactcaaacattgatgcgggggggtatttaaatcatttgcatatatgtcaatcaagtactttattgcctctcctattcctcatatcatcatcatattatctaatgcatgacaagattgtctattttaacggccaatttacattttcttgcattccttgctgtgtaattacccatatacactcatattattcatatctttcctctaattttgtaaatatttttcttatcctattccttttttgtttttgtctttacatttattttttcacctttctaaattctcttttgtttat

SEQ ID NO: 340413 - DNA, 172 bp, Zea mays
  unsure (1)..(172): unsure at all n locations
gcggccgccctttttttttttttttttttttttttttttttttatntttttttttttttttacccaaattcaattaataagacgaaatttcttttgaaccgcagggacacttgccatcaactatttaaggaattagaaaaaggttcacattaagtctagcaaattagcacac

SEQ ID NO: 340414 - DNA, 194 bp, Zea mays
  unsure (1)..(194): unsure at all n locations
tggcggccgcccccttattttttttttttttttttgtttgttcatntatttttttttttttttccaaagnagttattnncttacctgggttctacttttggngacgagggggtttaacaatctaaagtgattgaaaaaaaaacagttctttcttgcttttggtgctcccacgccaaattcaccttatttgtttt

SEQ ID NO: 340415 - DNA, 304 bp, Zea mays
tgcggccgccctttttttttttttttcttttttatatttatttttttttttttcatttaatccaaccgatcttttttatttgccgcaatttatttaaaatgagggggcggacgaaaaattaacatacttgctttccttatatctcctccaactcataaaaaacagctcttttacaccataacatctttccccaaccaaattttaaaatgtggctcatactgttagcttctattgatccttatgcctgtatgtttcattattccattcatccaaaccattattctctgatttctttatgcataat

SEQ ID NO: 340416 - DNA, 244 bp, Zea mays
gcacgtaccgtccggattcccgtgcggccgccctttttttttttttttttttttcatcatttattttttttttttttttttctttttcttaaattttatttggttctttttttcattcacagagggaaacatacacattaaaaaataacagataccacactgtcgtacataaaaattccaaaactttaaacaactttaaaaaaatattaagccaaaatttcaaagataatacaatttatttacc

SEQ ID NO: 340417 - DNA, 353 bp, Zea mays
cggccgcccttttttttttttttaattatttattttaaaaaattttgtttttaaaaaagaaaaataaaaatttaaaggagaagtattataaaaaggaaggacatattaaaaaaaaaaaaaaaagaaatataaaaaaagagaaaagaaaaaaaaaaaaataaaaagataaaaaaaaataaagaaaaataaaaaaaaaaaaaaaaaaaaaaaaaaaaaaaaaaaaaaaaaaaaaaaaagtaaaaaaaaaaaaaaaaaaaaaaaaataaaatataaaaaaaagaaaaaaaaaaaaaaaaaaaaaaaaaaaaaaaaaaaaaaaaaaaaaaaaaaaaaaaaaaaaaaaaaaaaagaaa

SEQ ID NO: 340418 - DNA, 430 bp, Zea mays
cggccgcccttttttttttatttataaaataaaaaaaaaaatttaattttttttttaaaaaataaaaaaaaaattaatgagagggaaataaaaaaatggggaagataaaaaaaaaaaatttaataaaaaaaaaaaaaaaaaaaaataaaataataaaataataaaaaaaaaaaaaataaaaaaataaaaaaaattaaaagaaatataaaaaaaaaaaaaaaaaaataaaaaaaaaaaaaaaaaaaaaaaaaaaatataataaaaaaaattaaataataaaaaaaaaaaaaataaaaaaaaatgaaaaataaaaaaaaaaaataattataataaataaaaataaaaaattaaataaaaaaaataaaaaaataataatattaataataaaaattaattaataaaaaaaaaaattacaatttaaaaatataaa

SEQ ID NO: 340419 - DNA, 206 bp, Zea mays
tggcggccgccctttttttttttttttttttctttttccaacaacaccaattttatttatcaaagttccgaacagagttacacaaggcttctactacagtctgggtggtaccatacataattaacacccagtttccaggttccttaccagttaaaatagaaaggcagttgtctaagatgagacttgctttactcatcacacaatcc

SEQ ID NO: 340420 - DNA, 363 bp, Zea mays
tgccgccctttttttttttttattttttatttattaacatttttttttttaatatcacaatggcaaactaaaactttggcgaaacactaataaaacaggggcagtgtttttcttcttctaaacatagttcttcaagaaattcaaaaacctttcctttcatcctatgtttcaaccttttttgtcttctcccactgcccatattacccttcttttaaaaagtttattttgttctctccatcatctattcataatatttttccagtctaataccactacacccttcaaacatggataccaaaataactcatgtacttttcctcccacttttcttcatcctttccttttttccaaatattcaacctt

SEQ ID NO: 340421 - DNA, 205 bp, Zea mays
tgcggccgcccttttttttttttttttttttttatttttttagtaattttttttttttgggaccaaccacttttatttgggtcacatgttcaacatcttagggggtaccacaacaaaatggatattttaatgttttcctaatgtctccctaaagcattgttctcaaatggaactaatacaattcgttttacaaagcttacttaaa

SEQ ID NO: 340422 - DNA, 259 bp, Zea mays
tgcggccgccctttttttttttttttttttttttttctttttttttttttctctttttttactttttcctttttttttgggtttttttttctgaatggggggaaaaaaccacttcatacaaatttttttttttggtcactcctaaaaaaaacctattataaattttgcctaccataacttctaatcttaattacaatacttcttcaaaatcaattacccattttttcttcatcattatataatcttactatctcccccc

SEQ ID NO: 340423 - DNA, 362 bp, Zea mays
cggccgcgcttttttttttttttttttttttttttttttttttttttttttttttttttttttttttttttttttttggtttttttttggggggggggggagataccataccagatcccacagtgaaaggggggccccaaactggcgaacaaaacattttatacaaatccacggggggttttgtttgttccaaatttccgaattccagtcactttacccacagcaggggggaagtaaaagcttattccacgactcatttagcaaaacacgggggcaagcctatccccaaaaggccatgggcgggggagtaaaccttagccttgcagtgctatcaccaagggccgaaacaagatgacccccaa

SEQ ID NO: 340424 - DNA, 365 bp, Zea mays
  unsure (1)..(365): unsure at all n locations
tgttctgccgcccttttttttttttttttttgaacataaactgtngctatgctttatttttgtataaacgaaacaatcatcaaatagccttttctttaaaagggggggaggcaaacctatctaattacgcattttttccacatatatcctttcaagctttatttcattctatacattctttaaataaagtttttttttcaaaaataacacttaataatcatctccataatagctttaacatatatctcatttttaattctatgtccttaaccttacctagtccttaaacatattccttattcattactcaatttaacattcttatcctctacaccaattttttctaacccccttcttcttttttt

SEQ ID NO: 340425 - DNA, 129 bp, Zea mays
ttgcgtccgcccttttttttttttttttttttcaaatcattacgaaaatcttatttttttcttaaaatgggagattcgagtgttacataatattttattgaaacaggggcgatctaaccccatctatcc

SEQ ID NO: 340426 - DNA, 249 bp, Zea mays
gcggccgccctttttttttttttttttttttttttttttattttcttgcttctttacacaccatacgttcgaggagcagggtcatcacatccatcgggcgggcttgccaatctattatcaatctactgtacagtttagtgccatgcctcaattattctaatccataatgtagttttctttctaaatatgtaaggatatcccaccaatatgtcttgcttagacatattctacaaattttcaattaataat

SEQ ID NO: 340427 - DNA, 264 bp, Zea mays
tgcggccgccctttttttttttttttttttttttttttttttttttttttttttttttttttttttttttttggcccaaccagtaacgagtagataatagggggaccacatcaaattttttccaaaattcaaaccaggacaacaaattgtgctactaaactcgggacaaagtgatgactaaatactgtcgactgaacaaacacaacggttgcacttttctgatggcaacacgtagggccacaatttttgttaaaccttgaatcc

SEQ ID NO: 340428 - DNA, 319 bp, Zea mays
gcggccgcccttatttttttaataaataattaaaaaaaattaaaaattttttttataatagaataaaattaaataaggggggggataaataataaaagggggggtataaataataaaatagaaaaaaatagaaaaaaaaatggaaaagaaaatataaggaaaaaaaaaaaaaagtaaaaaaaaatcaaaaaaaaaaaaaaataaaaaaaaaaaaaaaaaaaaaaaagaaaaaaaaaaaaaaaaaaaaaaaaaaaaaaaaaaaaaaagtaaaaaaaacaaaagaaaaaaaaaagaaaagaaaaaaaaagaacagtggaat

SEQ ID NO: 340429 - DNA, 425 bp, Zea mays
cgtccttattcccgctcggccgcccttttttttttttttttctttattttttctcttttcccgcttttaactagcatgaattaactgaaaattgttaagccttttacatattgttgaagcttaacccttacccaaaatatcccaaatacatttttctcccgtgtttccacatatctgttattacacctttattttcatccattctacttttgtgcttttataacgtttaacttgcttttcttttctttacactggatatttttaatctcttttaatttttttttttttaaaatttactctattttgcttttctttctttatcatttacaatatttccttatcttttttctcaccttattattaactctaatatttatactaattttttttttattcttttccatatatttctttttttttaatat

SEQ ID NO: 340430 - DNA, 86 bp, Zea mays
ccggccgaatccggggcggccgcccttttttttattatttcattttttaatataatagatagattttttttttaaatgtaagaaaa

SEQ ID NO: 340431 - DNA, 154 bp, Zea mays
tgcggccgcccttttttttttttttttttttttttttattttttatatatttttttttttttttgcccaaatctaaattgcatggtatttctgcaattgagcggaggacaagaacccccacagttcgccaaattttccaataccatatatgcat

SEQ ID NO: 340432 - DNA, 357 bp, Zea mays
  unsure (1)..(357): unsure at all n locations
tgcggcgcgccctttttttttttttttttttttgctaacccaaggagattcttttactgtatatggagnttatgctatacagagcgtgtctcgtaatagatatgccgatacatcatcctcacggtcttcccctaagaaacacttattaggacatattgtttgttatgcctcatgtgcagaatgcattatttttgtgtattctatcattccttcaggtatttttactgtcgttatgacaggcagcatccatttatttaagattttctccttttaaggaatgtcttttcattcattatttattatcttttttattttttgataatgcaactgtaagtgtatagtgtctcttattttttc

SEQ ID NO: 340433 - DNA, 60 bp, Zea mays
ttccctttgcggccgccctttttttttttttttttatcttaaaaaacttatactcttttt

SEQ ID NO: 340434 - DNA, 250 bp, Zea mays
tttttctttctcttgcattctacgtcatatcgtgttgtatattttcacctaaatggaggtcactctccttctttttacaacttctttactttgtaaaccctttcgtttcctaacttaatctcctttcttcacattctcctttttccatctttcttaatatctattaggcctctactcgatcttctcttccaactaatttctcattcttaatttctattgtttctctcccttttatctcttctttaatctc

SEQ ID NO: 340435 - DNA, 387 bp, Zea mays
gcggccgcccttttttttttttttttttttttttttttttttttttttttttttgcctccactactttgacataaaaaggctatgtaataattaattaaggggacatgctttgcataagcctatagcctatataccccctcaggcatggtatacggccgggatacgtcgtactgttgttttgcaagctacatgaggtttttacacaaaacacatgcatgaaacgtacgacgagtagcattttttaactatacacggtgtgtgttgtatccttagacggcggtcatgctcaaggccagtctgtactcttttttttcctgtgcacaaatgaatttgcacaatgcctgtggcttattatcttctaacctgtgcaaaacaagccctatttc

SEQ ID NO: 340436 - DNA, 62 bp, Zea mays
agtgcggccgccctctcctctttttttttacttctataaaaaacacaaatctttcttttttt

SEQ ID NO: 340437 - DNA, 285 bp, Zea mays
tgcggccgccctttttttttttttttttttttttacgcaaaaacgtactttttgagaccggccggccggagactcttgtctttattacacacatgcgctgtgtgtcgttcaacggtgtgacttgggacaaaaaaaagaatttatttgacacgcaggttataacgacgcagcataagcagcacgcgctggcgttttacacacacacacacacacacacacgagttcacgtcacgagcacggacggacacgaacacactttcgttagcatcgcatgttatctatgac

SEQ ID NO: 340438 - DNA, 251 bp, Zea mays
  unsure (1)..(251): unsure at all n locations
ggccgcccttttttttttttttttttctccannaacgaaagaaacacttttgtgtgcaagctgcactgctaaaatagggcagcattaattagtaccaattgtgaacacagataattcacatgattacaaactcaaagtcgtgcggacgtgacgcaaggttatctacatatagcatgttcacggcagctattacctacgagacgggttctctacttgcttttcacgactaacaacataaacagtttataagc

SEQ ID NO: 340439 - DNA, 337 bp, Zea mays
ccggaccgaattcccgggcggccgccctttttttttttttttttttttttaatgaaaagtcactttttttaaacaatttgtaaaggtaccatttctacaaaaaaagaacttcacacatgagctggtagtgccaatagcaacaagacccccaaaaattagctccacgcgatgcacacagctttcgatctatgtctgacagaggatcatatactgatctgtcatattggtacagaaattgaagctctataaacttatgctgtcaggtttcctgtctatggccttcattgatccaaatgtttacacgtttgcttcatttatctgttttatgcatttggaa

SEQ ID NO: 340440 - DNA, 57 bp, Zea mays
ccgccgcccttttttttttttttttttaattttaatttcttttaatttttttttttt

SEQ ID NO: 340441 - DNA, 57 bp, Zea mays
gcggccgcccttttttttttttttattatttttattattataaaattcttttttttt

SEQ ID NO: 340442 - DNA, 57 bp, Zea mays
cgaaaaacccggggcggccgcccttttttttttattttaactatgatacaaaagaag

SEQ ID NO: 340443 - DNA, 176 bp, Zea mays
gcggccgcccttttttttttttttttattctatttttctctaacaatttttcaatgggtggaacgaatccactagacgggggcagttacaaaacaaaggggccccccctacaaagctctggaactcccaccggatagagcaaaaattggggccaacggtcggaaaaacgatcggat

SEQ ID NO: 340444 - DNA, 255 bp, Zea mays
gcggccgcccttttttttttttttttttttttttttttttttttttcgggaacaagattcactgttactaccatttctaaggagaacaatcacccaggcgcaacatatgcaggtagtatgcttgccagcatcttttcattgcagaaaaaaaaatggattacatccaggaacgcagcaacactacgacccacagcgacagagacgtatcaccctaagcattccccagctacgaagaggcgcctagccttcgaagcc

SEQ ID NO: 340445 - DNA, 122 bp, Zea mays
  unsure (1)..(122): unsure at all n locations
accggccggattcccgggcggccgcccttttttttttttttttttttctttaccgaaacacattttttttgttacagnacacagaacacatatatggaaacgacacaggagctctagggccc

SEQ ID NO: 340446 - DNA, 133 bp, Zea mays
  unsure (1)..(133): unsure at all n locations
aagaataaattattttatgtacctggccggtaccacctaaccnnancacagtcttgctgctaacagtcgacgttacctttgatcagctgccatttcgatcacctgccacagttttaatctatacatttacact

SEQ ID NO: 340447 - DNA, 351 bp, Zea mays
  unsure (1)..(351): unsure at all n locations
gcggccgcccttttttttttttttttttcttatttttcnctttttttttattttataaaggctatgattaaaactgggtgcttccggtataacaattacatgctttgagagaacaatcgctagatgctctagnaattttttttgaaaggctcgcattgtgaagaaatcaattctacatagaactggggccattcattcattcttttatttatttcattcattcatttcacccatgacaaatattattttgttttatttcccacaacatttactggacattgtcatgatgttcaaattagaagaatggctcacgttagggaatgcctttgtgtttgtgtcgtgcaacccttt

SEQ ID NO: 340448 - DNA, 213 bp, Zea mays
  unsure (1)..(213): unsure at all n locations
cggaaaacccggngcggccgccctttatttttatcttgaaccataatgcttacgggggggggttttttttatttgacgntatgaggcaagacgagggagattacctggtccatgggaaacagtttaggcaaacttcattacaaccggagcagaccaccacacggctaaatctagagagatgggaaaaaaaacaggattgcactagcttaaaaa

SEQ ID NO: 340449 - DNA, 313 bp, Zea mays
  unsure (1)..(313): unsure at all n locations
ccggnccggaanacccggggcggccgccctttttttttttttcttttcttttcttttatttttttttttttttttttattctttttttttttttttttttttaaccaaaaaagcgccgggatataaattattatgttcattacacccctaaccaaacactttagaatttataccataacagggaaggtcaaaacttaaccgccacaaattccaccaaagattttaaagaagtttatctttttaggaccacaactaccaattgctgtgcgtactagaggcatcccccgggaagtttaaacccggtctcgggggg

SEQ ID NO: 340450 - DNA, 60 bp, Zea mays
  unsure (1)..(60): unsure at all n locations
cccggggcggccgccctttttttttttatttnaatctaccttaactgacctttttttttt

SEQ ID NO: 340451 - DNA, 357 bp, Zea mays
  unsure (1)..(357): unsure at all n locations
gcggccgcccttttttttttttttttatttaactaacggagacaaacttttttttagaccancanggccgcccagtggtgacattattgcactctgttaaaaaaaaggactactagtacaataaggtaagaacttgattaacttccttctatgctgccacaaaacacaatttgacattcccaaaggcagacagacttctatttgtgcgggggcaanggatgttacattgtccaaggtataccagtgtcatctatgattaataaaaacttgccttgatttatgtaaaaaaggacaagccctgaacatgtntttaatgtactataaaaacanagttaaattaaggagaaggtactttgg

SEQ ID NO: 340452 - DNA, 153 bp, Zea mays
cgtccggattcccgggcggccgccctttttttttttttttttttttttttttttattatttttttttttttttatttttttttttttttttggggtgtaaatttaataaatagtgggaatattattatttaaattaaatattaaaatagggtt

SEQ ID NO: 340453 - DNA, 367 bp, Zea mays
gcggccgcccttttttttttttttttttttttttttttttttttttttggaaactaactacgtttccaccttcgatttctgattctcaagcgagcaggagcaaccgagcgagccttcactatggcacaagtctgctgaatccgttatcgaatatttgtcgcccgctaactcatttttaaaacaagaacggagagagtactatgtgtctgggttagctagaacatctactttgctccacacttcactaggtcccaagtcgtctggttacacaaaatcaggacccaaatgctgtcttctcgcccgcttctgcccgtcaaggcgaccccaactagatagggaacctgcaggatccatgacttgggtcttt

SEQ ID NO: 340454 - DNA, 212 bp, Zea mays
gcggccgccctttttcttattttttagtgcatttgtacgcgggggcgccttttttcaatccgacggagcacatacccagggggggttcactaaacaaggggccgcccccaaaacggcgaattagtccccatcgtccgactttagttgcaagccgaattcgggtggacagtggcctaaaaaaggatggtactcggtatttcgttagggaccgg

SEQ ID NO: 340455 - DNA, 259 bp, Zea mays
  unsure (1)..(259): unsure at all n locations
cccgggcggccgccctttttttttttttttttttctattnttttctaaacgaagttttttgtaactttcttttcttccttctcttaggagcttatacgccgagcaaaagatatatatatcatacgtatgacattattattcactatgatgcctgtgtttgtccaaactgggcggtgacaacggtggaacagcatttacattagtatcgttgtaagcaagttcaacggcttgcagttattttctgcctgaagccattgaa

SEQ ID NO: 340456 - DNA, 198 bp, Zea mays
accgtccggattcccgggcggccgcccttttttttttttttttaatcaatactaatgtcaaactctatattatgatctcgagagaagaggtacaacgggataatttaacccataagggggctaactacactagctaataacttgagatgtatcaacctgaaatttatttcatgattaaccacacaaattggataaagc

SEQ ID NO: 340457 - DNA, 51 bp, Zea mays
atcccgggcggcccccttttttttttttttttactttcttccctttttttt

SEQ ID NO: 340458 - DNA, 469 bp, Zea mays
cggccgccctttttttttttttttttttttttttttttttttttttttttttttttttttttttttttcccgatcagaatgcaacgctgcaaagtctggataacagcagcaactccagtgattagattcctgggtgccaagccaactgccaagacgtacagtcatgagtccaaaccatggttacaatcaaagagaagcgctcggaaatgagcaaggggaaagcttgttcaccattccctcacggctcaactaatgggggttcaacacaaaaaaaggccccggtgtttgcaaacagtttctggtccacgttttctttataccgctggattttatttcgaccacttactccttattgcccaaactattctgggggcgggaaaaattggctttcatacataaatgcatggggcatcaagggtaataagtcggatatggtgcctttttcccgggtccatattttattttcttt

SEQ ID NO: 340459 - DNA, 62 bp, Zea mays
cggccgccctttttttttttttttttttttttttttttcttttttatttttttttttatttt

SEQ ID NO: 340460 - DNA, 69 bp, Zea mays
cggggcggccgcccttttttttttttttattacaatacgacaaatttgcaacttttttttttatttact

SEQ ID NO: 340461 - DNA, 96 bp, Zea mays
  unsure (1)..(96): unsure at all n locations
ngcggccgcccttttttttttttttttttttttttcatttttttttttttttttttcaaaacacggggttctctcttccacaaaaataaaacagca

SEQ ID NO: 340462 - DNA, 122 bp, Zea mays
  unsure (1)..(122): unsure at all n locations
cggccgccctttttttttttttttatttcnttatactttattaattttttttttttttcatttttttcccactaggaggttatttaacacgaaaagcggcccccaacccctaatcaaattat

SEQ ID NO: 340463 - DNA, 154 bp, Zea mays
gccgccctttttttttttttttttttttttttttttctttccttttattatttttttctccttttctttttttaggggaatactttaacaacctgggggtcctactaaataactacccccacaccccaactaattccctttaaccctcaaaaac

SEQ ID NO: 340464 - DNA, 112 bp, Zea mays
ccggtccgtattcccgggccgccgcccttttttttttttttttttttttatttttacatcatttttttttttttttttttttttcttttcttttgcgtaataattacttccc

SEQ ID NO: 340465 - DNA, 144 bp, Zea mays
ccgtccgattcccgggcggccgccttttttttttttttttatttttttttcattttttaaatttttttttattaaataaataattatttggggggggtttttagtacgaatgttggggtatatttttcttaaaaaaaacccaaa

SEQ ID NO: 340466 - DNA, 368 bp, Zea mays
  unsure (1)..(368): unsure at all n locations
agagctangacggcgcatgcgcgcgtacggaagcctgtagagccgacccacgcgnccgtgggcttcggctataaaacacgccaccggcgtggctcctgcttccccagtgttctgctcgagcaccgcagaaaaagaaaaagaaaaggcaaaggcaaaggaatcccaatcaggcaagcaaaaggaagaaccagctgctgcggagtgcggagatgtcgtcgcagctgatcgaggagcaccggtcgggcgcggaggtgcacgtcgggcacgagctgtgcgagcgcaagtcgcgcgagttcatggtggagctgggcctccccgacgggctcctcccgctgcccagcctggacgaggtgggctacaaccggtcg

SEQ ID NO: 340467 - DNA, 405 bp, Zea mays
taccacgtgacagcaccatcccgcctcatcgcgacggggatatatggaggaggagggggcaaaccctaccgccgatccgggcccagatcgccatggccgcccccaacagcaacgacgcggccagcgccagtggcaccggcccggctggtgaggaggacatctccatcgaggcgttggcgcggcgcgtgcaggagcacatgaccctcagttccaaccccgccgctcgccgccacaagttctgggaaacgcagaccgtcggccagttacgcgacgtcgccgacacatcgctaccggacgggcccatcgagccgcccacgccactctccgaggtgcgcgccgacccctacccgctacccgacggcttcgagaggctcacctgcgaccctgatgacgacgcgcttcttg

SEQ ID NO: 340468 - DNA, 205 bp, Zea mays
  unsure (1)..(205): unsure at all n locations
gcgacgaagctgatccttaagtcaccacgcgtcgcggggttcacggccgcgctaatgcgccgcttcgatgctgggctgtatctactactttggctgcacgtattgtgttggacgcataagaagacgtgtactttagtagttggtttgtagaccaacctttgggaataaaataaaatcccccccanggaaaaaatttgttggtttt

SEQ ID NO: 340469 - DNA, 225 bp, Zea mays
taaaaataaaaaaaaaaaaaaaaaaaaaaaaaaaaagggaaaaaaaaaaaagggggagagagaaaaaaaaaaaaaaaaagaaaaaaaaaaaaaaagagaaaaaagaaaaacaagaaagaaagataatgtatagatgaaaacggacagaaaaatgggaggagctggcggaaacagaaaagggcgggaacttttaccagaacacaaaaatgaactgagtggaaggag

SEQ ID NO: 340470 - DNA, 272 bp, Zea mays
aacaacctaacttcaatggctacaactctgcatcgggtatgatacgcatgtggtgcgggactaccaatggcttccaggaacatcttcgcgggtggcaactggaaatgcaacggtactggcgaggacgtgaagaagatcgtcaccgtgctcaaccaagccgaggtgccctctgaagacgtcgtcgaggtggtctagagtactccttaagattatctgatctaattaagaagatgttgatctttaactttgacgtctcacatcaaaactgatgg

SEQ ID NO: 340471 - DNA, 394 bp, Zea mays
ggcttctcctccccctccggttcgggttcgggttcgtgaggttctccggggttcggtttcgtgggtgagcggatcgagatggcggcgtcggatgttgagtaccgctgcttcgtcggcggcctcgcctgggccacggacgaccactccctccacaacgccttcagcacctacggcgaggtcctcgagtccaagatcatcctcgatcgggagacgcagaggtcccgcggcttcggcttcgtcaccttctccacggaggaggcgatgcggaacgccatcgagggcatgaacggcaaggagctggacggccgcaacatcaccgtcaacgaggcccagtcccgcggcggccgtggaggcggcggcggcggcgggtacggtggtggccgtggaggcggcg

SEQ ID NO: 340472 - DNA, 98 bp, Zea mays
tcgacgagctcactagtgacagtggacgccccggcaattacggaccggcacgtgcaggagtaccagctgtacatatatttagtgatattagagattgg

SEQ ID NO: 340473 - DNA, 371 bp, Zea mays
  unsure (1)..(371): unsure at all n locations
aaaaaaaaaagggggggggggaaaaaaaaaaaananaggggaaaaaaaaaaaannaaaannaaannaaaanananaannnaggggaaaaaaaaaaaaaaaaaagaaggggnggggnnaaaaaaaaaaanaaaaaaaaaaaaaaaaaaaaaaaaaaanaaaaaaagaaaaaanaaaaaaaaaaanaaaagggggagaaaaaaaaaaaaaanaaaaaaaaaaaaaaaaagaaaaaaaaaaaaaaaaaaaaaaaaaaanaaaaaaaaaaaaaaaaaaaaaaaaaaaaaaaaaaaaaaaaaaanaaaaggaaaaaaaaaaaaaaagaaagaaaaaaaaaaaaaaaaaaaaaaaggaaggggagggggggaggagg

SEQ ID NO: 340474 - DNA, 401 bp, Zea mays
  unsure (1)..(401): unsure at all n locations
ctctcttttgagagagggggaagtaataggggggaaaaagctagcaggggggtttccttgatcccatcatcgtgctacagatcctttagttctagcaaggaggaggaaaaagagagagcaagcccatggatcccagccagatgatgttccccatctggggggcgccgcctcccgccgccttgaagccgccctccgatgaccacgccgccgcccccaacgcgcaggcgcagcccttcctcccccctcccaatcccaaccgcggctggaagcgcaagaatcccgccgccgccgnctaccagccaccggccctcggcgatctccaggtgcagaaccgcgccaaggctcgccgctggttcaagaacagcggnggcggcaaccccaaccaaagccgcaagtatttc

SEQ ID NO: 340475 - DNA, 275 bp, Zea mays
  unsure (1)..(275): unsure at all n locations
gcgacccacgcgnccggccgccgcaaagacaaacanacgcggggggggcgcgccggaggaggggaggcgcanggccaagaacaagaccggggacaacgcggngaacaggaccggcaagacgggggccaagaacgcccacaacagcgacgacgaggagagcaagggccggaacaaccgccncacgagcaccggcgacaggaacaacaggangaagaacgacacggaggacaagcaggggcagaacaagaaagngaaggcgaacgacancaaaagcc

SEQ ID NO: 340476 - DNA, 129 bp, Zea mays
  unsure (1)..(129): unsure at all n locations
aaaaanaaaaaaaanaaaaaaaaaaaattttattttaaaaaaaaaaaaaaataaaaggggaaataaaaaaaaaaaagggggtgaagggtaaaataaaaaaaaaaaaaaataaaaggagtcctaacctct

SEQ ID NO: 340477 - DNA, 344 bp, Zea mays
taactattattgacattgacttaaacgctgacggaggacaatttatctcttgaagtgacacaaccagaatcaatattagtgagaacactataattaggttggataggctgcgacaagttcttgtatctaaccaggtttataccgaagcattcacatgcccgcgtgtaaggtaccacccacgtgaagcatcatttgttgcacagtccaatgagaactacattgctattatttcagaaaggtcacccttcaagctgaacaagtacacgcggtttgaatgacatggaatgcgcggtttccgattgaaaacccagtatgcgcttggacaaaaagatctattgtttgca

SEQ ID NO: 340478 - DNA, 365 bp, Zea mays
  unsure (1)..(365): unsure at all n locations
acgcgacgaaacctgggttcctttaaagtcgttccactcgtcttttattttccaccccgcgcctcccagatcgggcggggttgtgtattaacctcggccgtctacttcgcagctaaggggaggggaaagtttaaggcgaaacccacaagcctccgaaacttcttgacacataacgagatcgctgctggtacataaggtcggccacacaactttaagaagaactgcgataatgaagatgaggaaaaagacaaagagaagagtctgactaaaaatgtgaagagcattctcacgttaagactaaacataaacgcactgatggtatgatatatattgaaaatacaaactcngtgaatgctaccaatata

SEQ ID NO: 340479 - DNA, 285 bp, Zea mays
  unsure (1)..(285): unsure at all n locations
ggcggggccggcgcgacgacgacggccgcggcggcgggggccggggcggcggccgcggccaacgccagcaacaacgacnacnaggccggcgcgggcgcgggcgcggacaccnngacgccgacgcagggcaccaggangccgancnncnnggnccngagcgcgccaacccggacgccggcccnggncnccaggaccaggacganggggaacacgccggaccaacagacgncagagccggccgcggaggggncgaccgcgagcgcggacgcggagacggaggcccgg

SEQ ID NO: 340480 - DNA, 119 bp, Zea mays
aaaaaaaaaaaaaaaaaaaaaaaaaaaaaaaaaaaaaaaaaaaacaaaaaaaaacaaaaaaaaaaaaaaaaaaaaaaaaaaaaaaaaaaaaaaaaaaaaaaaaaaaaaaaaaaaaaaaa

SEQ ID NO: 340481 - DNA, 427 bp, Zea mays
  unsure (1)..(427): unsure at all n locations
tcgacccacgcttcctctcaacacagcacaggcagttctagagagagatatttagagagagagataaatatttccttcttctttcaccaccaccacatccagccttctcccccttcgtctttccccaaccaggtgttcaagatcttctgccgtgccaacgagaacttcttcctttccgtccttgactgctccgtcttgctttccccgttcatccctaatgactaccaccatctactttacatgttcatgcgctttatcacccttttcatttactaataattcatgccggcggtggggctctttaacaattccacatagtctcgtcatcatatcacttttcttttctcattctctaccctnttcaagcttctttccttattatttcctcatctaataatactcttatcttttcttatttaaattatct

SEQ ID NO: 340482 - DNA, 259 bp, Zea mays
ttatatagagcccacccactttttttttagttctacatacgttgtctaactgcatttttaattcgggagggcggcctccctattccaaaccctaaacctaaaccttttacccgtcgccgacaacatcacctacacctccgacgaccacaggccctatcccatctaaaccgacattcttctcggactgaaacaatatcccaccactactatgtcagtaaggagaatgagctcgacctctcctccaactatgtctttacca

SEQ ID NO: 340483 - DNA, 111 bp, Zea mays
tagtcgacccactctctttttacaactatcttccacctaattccggtctctttcctataggggggccacctctccccaacacaacttttataaaattttttcataatcata

SEQ ID NO: 340484 - DNA, 317 bp, Zea mays
  unsure (1)..(317): unsure at all n locations
tcctctaaancnacccacctttttctcccatcccaacaacacanctatcaccagcctttttaaaaaccacaggccaaccccataacctcttcctcnctttctccctctactcaactccactatctacacttctaccatcttactcactccctccctcccttatctcaacttcactattctctcatccaccatctcacatattcacataaaacatttcatttcacaactaatcccaccaatcacaaatcatatatattcattcttcctaatcctttacctaacaccaactataagaccattcttttttcttttatcac

SEQ ID NO: 340485 - DNA, 141 bp, Zea mays
tagtctacccacgcgttcgctctaatcaaccaccccacccccccccacgcttctttctaaactgagaagcgtcattttatattttcttacacccaccccatcccccttatccctatctaacttctactacaaccaacctct

SEQ ID NO: 340486 - DNA, 412 bp, Zea mays
gtttctggatcctcattgtttacatcaccgccaagggaagggaaggagtgaggatccagaaaccaagttgccagccccttgaatttaccatattttgtcactggtttatttctaccataccatctgatagtggacagccaagcgactttcctttcatcatttctatctctctcgatcaatgattatttatgtactgctataataatctgccgcgtgctggcaaaattctgcctccctagaacaaccaatggcatttggtttgctggtaaattatctcttggctccgtgtgttccctgtggctgtctgtctataatttatgttcattattttgttccggagaccgaagaatctgaggacttgtatgtatctgggatcaagatgtgaatctcgcatgtaccagatgacagaact

SEQ ID NO: 340487 - DNA, 372 bp, Zea mays
  unsure (1)..(372): unsure at all n locations
cttttatcctttataatcnacnanctttttattttcatcaacacaccccaaatattccgcacgttttcttaaaaaagagaaacaacttttcttatcatttatttnttttaaatctttatcataatcattaacataactctttcctattttaaattgtcatccactcacaattttacacaacatactatctctaaacatatatcttataatccttcttttcctaactatttaactaacttcacattaattatcttactctcactttcaactttacattcatcaaaacaatctttccatctattataaataaataaacaactctctattatacctcttatcttaattattcaccaattaatttaattttcacca

SEQ ID NO: 340488 - DNA, 142 bp, Zea mays
tctacccacccgtccgttctcatcggcgccgccaagctctctctcacgtgcttcttcctctccctgcccagctactcctactcctccaaggtctcctactttctacaaggcgcgggcaccttctgcctcttcctgcccgagg

SEQ ID NO: 340489 - DNA, 306 bp, Zea mays
ttatcaaattgataacaccatacactcaccggaggcttcctgaattggtgggggcactatcaacaacacctaattggatctacactacacatcactccaacaaacagcaacatttgtgtctcttcgccatactgatcgacatgttacggcctattaacacttctaactgtcacaacatctctggcactattccatcccatgaaaaccatcacgaaacaccctacaccaagattgttgtaatactattcaatatccacccttattacacagtgcttgcgattgctgacatcattaggaaaaaaatca

SEQ ID NO: 340490 - DNA, 196 bp, Zea mays
tcgaccaacgcattttttttggtaaaggtctctctatccccataccggttcctcaccgccggcgagaggtacgtattcgtgcgccacctacacttccgcccgacatggccgatacctgcacgtatcagattctggtgcgtctcctacacgggcgcaccacatgcctgcgcttatcaacgcccaccgattccggcgc

SEQ ID NO: 340491 - DNA, 229 bp, Zea mays
tttttaaaaaatacggcctccatcatatctttaatttacttcacaaacttatattcttataccttcatcatccattttttgagaatttatacaaaaattttatttctcaacctctattaaacaccataactcaatttctccatttatcccttaaacaactttattacttcatttattaacaacctatttatcatatttaacaactcttcttcaattcaatcctttatta

SEQ ID NO: 340492 - DNA, 227 bp, Zea mays
  unsure (1)..(227): unsure at all n locations
aaaacnacccacncttcncttcttatccacactcctctnctccaccaaagctttcttttaaaagaagaaagatccccctcattcttttacttaccatctttctctcctcccttacaaaaaaaaatccctcctacattacgcatatctattcctttctcaccctcaacatatacatattttactatacctactccaaacacccctttatattcatatatttatacacc

SEQ ID NO: 340493 - DNA, 417 bp, Zea mays
tttcatttgtctttgttgggatctccttgcgagcacccgatgatagtggagattggtaaaacgttgattttcatgtgtttgcacatagaatattttgactcttggtgaactgtcggcagctgatacgaaagatggttcaagcaccgccgaggactccataattgacatagacatgttctattccacgaacttgtagaaagtttcaagatttgctctgttgcattttgtgttcagtattgcattcagtgttttgatatataatctagacactgcagaaatggaaagatgctgatggaggagacagacacggatgatagcatctcttttgttacttctgtaaaagtaaatgcaaaacgtgtactttcaaaggcaaagtctgcatgctccatgttccttggccttggggagagcaccata

SEQ ID NO: 340494 - DNA, 102 bp, Zea mays
  unsure (1)..(102): unsure at all n locations
ncgacccactcttttttccttccgcatcaaatcacatatcgccggattcttactccgagccgggaactaattcattattaccctctccttcttacactaact

SEQ ID NO: 340495 - DNA, 197 bp, Zea mays
  unsure (1)..(197): unsure at all n locations
ttaaactantatcctctatantctacccaacatccttcttcttctccactcaccaccatctccacgaccttcttttaacacggatgccctcccatacccatntccacttaccttctcctccaccttctcctaacacctacattctctctctttaccatcacacaccctctctttttttttttatcttccacttacac

SEQ ID NO: 340496 - DNA, 163 bp, Zea mays
ggcggccgccctttttttataattttttaaacagatttgaacaacggaatttacattccgaaacacaccgccagcgacagacaaaggccggcaaggtcgctcccattttcacgccccaattaagcggccacaggtggccatcaaagctaaaaataaaataaaa

SEQ ID NO: 340497 - DNA, 52 bp, Zea mays
accggcctgaaaaaccgggcggccgccctttttttttttaattttaaagaaa

SEQ ID NO: 340498 - DNA, 93 bp, Zea mays
cccgggcggccgcccttatttttttcttttattttttaaacctcttttttcttttttattttttttacatttattggtgaattcttttttttt

SEQ ID NO: 340499 - DNA, 296 bp, Zea mays
  unsure (1)..(296): unsure at all n locations
tnnnnnnnnntngggncccagcaacaatgtttcgaaccccaccaatatgaaacactcgcaatatttttttttttcccaagtttggggggggaagaccccccaatttaatcctgtggctttgtgggggttctcccccaacattatttaaacacagtttcggacaacagggttgcggttttagatgatgaataacaaacggggacaaaacgggttaggtcacacatttttttaaggggggcctgggggtacatttttgcaactaaacccacatgcatgtgggttttctaggggggggg

SEQ ID NO: 340500 - DNA, 188 bp, Zea mays
  unsure (1)..(188): unsure at all n locations
cttttttttttttttttntcagtaaaacgttttttcactttttttnttattttttttgtttggtcttaggtttttttttttgaagaaaaaggtctgtagttagttcaatgtttccctttctgggtgggggccccaaattgtacctactcccccacttgggatgctctccctgttttgcccacattcct

SEQ ID NO: 340501 - DNA, 258 bp, Zea mays
  unsure (1)..(258): unsure at all n locations
ggccgcccttttttttttttttttattttaatnatttcaaagcctatttttcgaggcaaaagtccttaacattgacaaatggaacgaactgtattacaacaacaaggctacagtgttccaaagctacagttaaaaccaagcggtaattggattggcctttttacaccgtaaggaaaacagctctagtgctctattttatgtaaaagaattacaactcttgttttagtccaactatttttccaataccatgtacttact

SEQ ID NO: 340502 - DNA, 152 bp, Zea mays
  unsure (1)..(152): unsure at all n locations
cggccgccctttttttttttttttttattttttttaattttttaaatttttnananaanttatttatagataaaaatgaaaaaaaaaaaaagtaataaaaattaaaaaataataaaaaaaaaaaaaataaaaaaaaaaatttaaaaaataaa

SEQ ID NO: 340503 - DNA, 330 bp, Zea mays
gcggccgccctttttttttttttttttacagaaaaacgtttttacactttttgggataagcgtttggataggtacacacgtttcctcttttgaagaaaaacgtctgtgttgagtcattctttccgtatcagggttgggtttacaaaaggtacctcctgccctattggggaggctctgcctggttctcctaaatccctgagaatggaaaaacgggggttatttttgggggccccacaatttcaaaggcttttaaaattttcctttgttaacaaaaaggttttttcaagattggcccgttgtacttagccaacattttttgggatggggcct

SEQ ID NO: 340504 - DNA, 150 bp, Zea mays
gcggccgtcctctttttctttttttttttagcatcaaatattttgtctatcttcgattataacgtcaaaacaaacgttgtgcaaggcattgaggatttcatgggcaacattgtttacttgtgtccgaatctatctaatgttcataatttc

SEQ ID NO: 340505 - DNA, 177 bp, Zea mays
ccgcacgaccgccggattccgggcggcgcctttttttatttaatttttaatttattttttggcatctgaacaaatgtaatctgcttatatgagcattgaaacatctcccgttagaaaattgataggattacacatccttatctctgtttcagacctttaaatgacatacaaactaat

SEQ ID NO: 340506 - DNA, 280 bp, Zea mays
tgcggccgccctttttttattttattttgttgacctcggtgcagttttttttattattaaaaaaggaaggagcagcattcataggtgtagcttacagtatcgatcatcttgaaaccaaaaccaaaagaaaaaaaattacaggtgggctgggggatttgcaatgccttaaaggttattgttttttcatgtctacaggaagttttctgatgtatcaatttcctgtcataagtcatttacttattttggaactccatccttttgagttgagtcttcattgtct

SEQ ID NO: 340507 - DNA, 164 bp, Zea mays
  unsure (1)..(164): unsure at all n locations
accacaggncaaaaaaacaccaaaagaaagcccaaagggagggggcggcggccacaccaaaacaacaagacacccacggngcaaaaacaaaacaaaaaaaagagggaaagcgacaaaaggccgcacatagaccaaagggccaaaagcaaacgagagaagggcag

SEQ ID NO: 340508 - DNA, 195 bp, Zea mays
aaaaaaaaagaacaagggaacccggagggggggaaaaaaaaaacggagaaaaaaaaaacacgaaaaaaaaaaaaaaaagaaagaaaaagaagaaaaaaaagggagggcaaaaaagggggaaaaaaaaaggaaacaccaaaaagacaaaagaaaaaagggaaaaaaagggaggagaccaaagagaaaaggaacacc

SEQ ID NO: 340509 - DNA, 325 bp, Zea mays
  unsure (1)..(325): unsure at all n locations
ttgtcaagatgagaaccttttgttcttttttataatcaatttgtcgataacgaaagtggcattcactggaagcatttacaggcatgctttacacatctgtgaaacagntngntcatgaaaccaaacacaggctaaactgtttccttaattatcaggatcctgcctatatctgcggcttttatttcacactttatttatgggctgaatcgtcataaagacctcttgattcattacaatatgtattacattgagaactctgttgctatgccccgggaacaattaaccttctctctgccattgtgtggtaaacggtgtgttgaccttg

SEQ ID NO: 340510 - DNA, 357 bp, Zea mays
gcggccgccctttttttttattttttattttaatataaaattttttttttttttttttttttttttttttggaagataattgttcgtatttttttctgtgggaaaactttaggagttttggccgagctttctgcaaaactggatgggctcatcgaaaacctctagggttaaatgggaaagaacccccccgctttggttttggaaaatagacttaaaaggtttaccctttcgccggattttttcccaatagttgagggccaaatccaggctttgtaaaaggatccactaattcgttcattgggtcagggatgtttggcgaacccctctttcaaagttttcagccaatttacatactgg

SEQ ID NO: 340511 - DNA, 165 bp, Zea mays
gcggccgcagcggcgcagcgccgtggccgcggcaaccctggccccttgttcctgatggacgtgaggccccgaaccctcgcgtacttcgtggttgcttccttcgccctcgtgtcagtcacattcgtggtgtatactggtgggtggtgggaggaggtggaaggagag

SEQ ID NO: 340512 - DNA, 287 bp, Zea mays
tgcggccgcccttttttttttttatattttctttttttctttttttttttttttttggggggcataacaaaatttggtccttattgaaaactggctcagcctggagtcacgtttaaacaaaacctggcagcttgcttgcctttgagcaaatactcgcaagttccacattacaggaagattggcgaaactacattcaaaaccgggcgttccttacaatgtctggttcaaaggcattcactactgactgcaaactcagaagaaaggggataaccgttgggacatcattt

SEQ ID NO: 340513 - DNA, 364 bp, Zea mays
cggaatggccggtgcggccgtcgctctgttcgtggtaatcaggacacccagttttcgattttttgtgcacataaatactgggtgcaagggtatatttttacaaggccatgggtaccaaaatgtttgagtggtctaccatacatctatcttgctgacccttacatcctacacagaaaaattgttgtcgtgtggtcacagcaacccgcctgtgctactctttttttttcactcagattcattttattacaccttaagcccttaacttggggtgcataaaaggatgttctcaagaagcatatttacgtcaggaaagaatacacaccgtgtccagtacatgtttatatatactctatgcacacataag

SEQ ID NO: 340514 - DNA, 230 bp, Zea mays
gcggccgccctttttattttttttttaatataaaacactattttttgatttttttatactcatttttaattagagatttttggtgtttttttttaatgggtattttgtattattttattaattttattgggcccaaaaaaaaaaaagggcccgggctaatttttttctgggcaaaatttattcaaaaccggcccttgtgggctcttttaataggattaatatttattttc

SEQ ID NO: 340515 - DNA, 373 bp, Zea mays
cggccgcccttaatttttattttatttattttatataatttttttatatgtttcacgttaatatactgtaccgaacttcaatctgctttttacaaattacaacacaacattagcacgaccaaacagatttaaattcaggtatgggtaccattatgccccggattactaagaccaaacgacacacacatttaccacacatgcaatgattcaatgcatgtttatactagcacatgcttgcacacatattttaccgactagttattgcagaaatattggaaccatgcaaattttacaaaatgcaatgcatatatagtagtttaacatgcatattattcatttgtcttcaaactcatatcacttttagtacttgtct

SEQ ID NO: 340516 - DNA, 137 bp, Zea mays
cggccgccgacaccagggagcccggcgacgccagaggcaccgagcccacggacaagaccgggcggccggacagcacgcgccgaagggcggccagaaccgagcccccgagcccgcaacaagccagacccgcccgacac

SEQ ID NO: 340517 - DNA, 192 bp, Zea mays
aaacacccggttcggagggtgggcttggttccttactattttcaagggcgccacttcaaaaatactcctaaaagcttatttcaaggggaaccatcctgccctcggagtgcgtggtacattaaaattgtacaccatgcttgcgactttaaacatactatttccgcctagagcttggggaaaacaaatctcttt

SEQ ID NO: 340518 - DNA, 377 bp, Zea mays
cggccgccctttttttttttttttttttttcagcataccgttaatgattaatatttcagatgacctctagtgcttgcgttcaccttacatcacctaaaactaactagcctcgaagacaacaaacgtcacttgaaaagagtttcgagtattcattggccaacatggcaaggcaccaggctgttgtacacaaggaacccattggcaacaataaggctcggaaagcataatattggttgttcatatttcgtccccggtttaaagggcactttctctgaatataggaaaccccatgctctttatactctgttttggagaaccacatttgcttggtacgacccaagagatgctagaatgctccctccaattcaaacactgat

SEQ ID NO: 340519 - DNA, 180 bp, Zea mays
cggccgccctttatttaatattataaatatatgttaaacgctcatattttattttttttaagaaattcaaattctggagaatatggatatttaataggggggtagggcccacaagaagaacctcaaccccaaaacccttaaaagggagttccacacctacaaaaaaataaaaaaaagaaa

SEQ ID NO: 340520 - DNA, 97 bp, Zea mays
  unsure (1)..(97): unsure at all n locations
gcggccgccctttattttttttatttttattaantttcatataatttttcttttttatttttttctttttctttattcttttttgttttttttaaaa

SEQ ID NO: 340521 - DNA, 244 bp, Zea mays
aaaaaaaagggaaatggaagattaaaagatgggggggaaaaaaaaaaaaaaatttttataaggaaaaaaaaaagaaaaaccccagatttgggggggaaaaaacccaaaaaaaaaatatgggaagggagattaaacaaaaaacaaaaagaaagggggagggccgttctccactgggtagaataaggaaaaaaaaaaaaaagggataaaaaaaaaaaaaataaatttgggaaaaagctctaccgag

SEQ ID NO: 340522 - DNA, 361 bp, Zea mays
  unsure (1)..(361): unsure at all n locations
ngcggccgccctttttttnttttnttttgacgaatattttcattataaattatgatgacatggcagngatgtgccaaagcatttgtgatagatacaatagtcattagaaggaacacatcataagcattcatatcgtcaaggaatattacacattacaaccaaaatatcgcatgaatttgttcactgcaaatattttttgcttcttgatctcaagttcatcttaaagttgttgaacctttgcagaaattgacgctatggagcttttcttggatgcagaccgaagaccaacattgcataggaacacactggagcccggtacgatattagaaacaacttttgtaggatatattggttgttatcc

SEQ ID NO: 340523 - DNA, 366 bp, Zea mays
  unsure (1)..(366): unsure at all n locations
ngcggccgccctttntttatattatttattttttaataattttttttttttttttttttttttttatttttttttttttttttttttgggcaaaacatgtgctacatttttaccatttccaataataacccccaactgttaaaaagggtaaactttacagattaaccagtctttatgcctggccaggatggcaaccgttttcgtgccaaaaaccttgaacaatattgaaaattaatctttctcagagtgcttatcttgggataaaataaaccgtaagcattccttgccacacttatacgaccccctccattttgttttcaccaacgtttgcctaaagctgaggctttttaatctttttcttaaaaa

SEQ ID NO: 340524 - DNA, 89 bp, Zea mays
ccgcgaccgccgaattcccggcgccgccttattttatttatatacaaatcatctttttaattttttttttctcactaattcttcttata

SEQ ID NO: 340525 - DNA, 370 bp, Zea mays
cggccgccctttttttttttttattatttttttttatattttatattttttattttttttatattttttttttttttttttttttttttttttttttttgttttttttttttgggggccccaaaatcttttttggggtatttttaaaatccttaccgggcccccaaaatctggcacaagttttcaccatagtcccatccatcccggaacccgttttttttaccctttaattaatccccgcggggggttttttaaaacaacaaccattctttggggggccttgtaaaccttggggggtggggaatatatctgttttttgagcctttcaaattccttagcccaatataaacccccctttttgtcgggggggg

SEQ ID NO: 340526 - DNA, 394 bp, Zea mays
  unsure (1)..(394): unsure at all n locations
accgcccggaatcccgggcggccgccctttttttttttttttnntttatgttgaaattcataatttttttttttttttttttttttaacagggctcaatggatgtaactccatccgttccaaactaccataagaaaacatcatattgttttgctacaggttcttattggctgaaccagtaacgatgtccaaacagtttattgtattagggcctgtccacgttacacttcacataaaaagctcacaccccacagtgtccggcattacttaagtcattttctgtacaaagcgacaactcaattggggcttcgattattaatccgcgacgccaagtctgttaacgctggattcccttctaaagccccatatttaggcgctttccagagcttaaatgc

SEQ ID NO: 340527 - DNA, 144 bp, Zea mays
  unsure (1)..(144): unsure at all n locations
ccggcccggaatacccggggcggccgcccttatatttnttttntttttaaaatacatcacttgcattttttatttttttattcttttcaattttttttgtaaatgatttttttttattattttttgggccccgggggccccctt

SEQ ID NO: 340528 - DNA, 334 bp, Zea mays
gcggccgcccttttttttttttttattttctttatttatttttttatttttttttaatcacctctatttttggttttttttttttttaatcggggggaataataatttttatttcttcctcaggttggtgggacaaatccccaaaaaataaaagaaaagtgttttggtttttcccttgtgtaacccagggccaatttttttttttaaaccttaacctcttccacatacgttgggtgtcctccaagcccaccccttgtttacttaattttatttgggagtttttttaccaacctacacgaattttgataaccggggatgggattctttttctaaa

SEQ ID NO: 340529 - DNA, 284 bp, Zea mays
  unsure (1)..(284): unsure at all n locations
gcggccgccctatttagtttgcttgtgtttttttgttgtttttacatggttacgccgggaaccgtcttaaatcatgtagggttattacaaaacaatgttggggctcaaccagttacgtgaagataatagggagacgacatcaaatatcttccaaaatttaaacctggtcaacaaatattgctactaatcccgatacagagtgtttacttatttctgttcactgattaaacaccattgttttactattcttaattnntcacggggggccactttttgttttaaac

SEQ ID NO: 340530 - DNA, 373 bp, Zea mays
  unsure (1)..(373): unsure at all n locations
gcggccgcccttnttttttttttttattttttttttttttcttttttttttttttttttttttttttttttttttttttttttttttttttttgggttaaaaggcgggctttgtttcgaagaaaccaaaaagtttctcttgggaaacccttaatgtttaaaaaaccacaaatctgttttttggggggctgcccctccaaaacctgggagggggttgtttttcaggggccattcatgaaaaagggtttttctgccccccatgcttgaataagaatggtttattacttttatttttgcccccccctggtcccattttagaactccatgcctcaatctcttttggctttttccattggggtggccttaaagccccc

SEQ ID NO: 340531 - DNA, 239 bp, Zea mays
gccgcccttattgttttaattagtaaaattatttttatttgaagggtttttactttttttcattgcgtagctacatagtgctctgttttattttatcctgattctagtaatttttttttggatcccgatttaaaaattttattcccggagcgaaacccaacttaatggccttgtcacccatcccccgtttgggccgctgtgcgtccccccaaatagtaccccacccagagtatttttaa

SEQ ID NO: 340532 - DNA, 198 bp, Zea mays
gtccgaacagtactaattaggcttgcgccaaaatagtgttcacagattacattctaacgaatgaaagtattaaaatgaataaaaaatgatgaaaacaagcgatttgaggctaatactcaaataccacagatatacactatgaggacgatctcacaggtacaagcaggcaaacaaaaatgtgcgaagaagaacaacggg

SEQ ID NO: 340533 - DNA, 138 bp, Zea mays
  unsure (1)..(138): unsure at all n locations
gccgccgtaccgntcggaattccggggcggccgccctttttgaacttatgtgagcttcgtgtttttaattgtcattaaaggcgccaacagagtacattggggttccattcacagatcaatgggcacacactcacagag

SEQ ID NO: 340534 - DNA, 183 bp, Zea mays
  unsure (1)..(183): unsure at all n locations
ccgtaggctgggttcctttaaagtggaccaacgcgtccggggtccaagagcacggtgggcgagatcccgctgctgtctacccgcgcgggtccgcggtacggctaggcgtggcggcagcggctcaaggaggagtaccgcgcgctcatcgnctacacctcggtgaacaaggccaaggacaacgac

SEQ ID NO: 340535 - DNA, 283 bp, Zea mays
tcgacccacgcttcttcttgaagagtatccgtagatatacaggaggttttttcatcggggcacagaaggcacttagttgcttcttatccttccctgtaatactatggtgatatcatttttatgtcgtcatagttggcaatatttgtctaattttcgctttatgtgcatgttcatgtttttttattcatattcttataaaagcttaatctgacttgtacttctattttttttcttcatatttattcttttttacatttttattcttttcactttattttttttt

SEQ ID NO: 340536 - DNA, 368 bp, Zea mays
  unsure (1)..(368): unsure at all n locations
cttcagaccattagctttatctactccagagcgcagaagaacccgatcgacaccatgagggtgttgctcgttgccctcgctctcctggctctcgctgcgagcgccacctccacgcatacaagcggcggctgcggctgccagccaccgccgccggttcatctaccgccgccggtgcatctgccacctccggttcacctgccacctccggtgcatcttccaccgccggtccacctgccgtcgccggtccacctgccaccgccggtccatgtgccgccgccggttcatctgccgncgncaccatgccactaccctacttaaccgccccggcctcagcctcattcccagccacacccatgcccgtgccaaca

SEQ ID NO: 340537 - DNA, 271 bp, Zea mays
gtcttcagaccattagctttatctactcgagagcgcagaagaacccgatcgacaccatgagggtgttgctcgttgccctcgctctcctggctctcgctgcgagcgccacctccacgcatacaagcggcggctgcggctgccagccaccgccgccggttcatctaccgccgccggtgcatctgccacctccggttcacctgccacctccggtgcatctcccaccgccggtccacctgccgccgccggtccacctgccaccgccggtccatgt

SEQ ID NO: 340538 - DNA, 127 bp, Zea mays
  unsure (1)..(127): unsure at all n locations
tcaacccactcgtccttcttcatcatttcnccccctccnccaacgccgacttcctacctgagatagaaaccccatttncaaaattcctgctatattctatctccagatcaaaaacaaaccgcaccct

SEQ ID NO: 340539 - DNA, 352 bp, Zea mays
  unsure (1)..(352): unsure at all n locations
tcgtcccacgcttcttcttctctcggcatacggcctctagagacggggttctttctagagacgagggggcgtgccncccatccnccctctgccctctccccacccatctactatctccatcctccctcctccctcgtcccacccgtcgactacctcgtctccttcgtgcgcggtcctcggctagctccttcttggcgctgggtaacgtgctcttctgtgctgtgcatatccacccgctcccctccttgttctgtgcttccacttgtcccttcgtcactgaccaagggcgtgcctgccttccctcctactgtcaataccacattttgcattacccttgctgctttcttttatc

SEQ ID NO: 340540 - DNA, 184 bp, Zea mays
  unsure (1)..(184): unsure at all n locations
accttatgagcagccccacgtgccccgaagaagagttccttctgacctggcggaagtcncacnccaccttcaaggacacatgcgaggagctgggctcccacccacccaaagaggacaccatactgcgcgccgtcatacccgcacgtcagagcgaggccgcatgcatcttgcaccttgccaccgc

SEQ ID NO: 340541 - DNA, 169 bp, Zea mays
ttcaacccacgcgtcctttttttccaaacaccttaccttctccagaagaagacttttctttcaagaagaaaagacctccctacactgagcacccttaaatcctccccaaatcatcactatatttctcaactctttaaacatcccaacaattcacccctctacaaatcat

SEQ ID NO: 340542 - DNA, 253 bp, Zea mays
tctacccacttttcttctctacagaagggtgtgtccctcagtgcagggctttctatcaaagctggtaggcccaccttattcatatctcttcttcttttcttcttgaaccgtttacttttgtactcgattaccttaagatctctcttttcttattcacacagcttctaccgtccttcgctttccttatctctttcagattctcgactatttctcgtctatctcttctcttatattctttttattcttctatttt

SEQ ID NO: 340543 - DNA, 268 bp, Zea mays
cccgtgctccgcaaccgctgagtgagaagaagagatggccggcaagggcgatggcccggctatcggcatcgatctcggcacgacgtactcttgcgtcggcgtgtggcagcacgaccgcgtcgagatcattgccaacgaccagggtaaccgcaccacgccctcgtacgtcgccttcaccgactccgagcgcctcatcggagatgcggccaagaaccaggtcgccatgaaccccatcaacaccgtctttgatgccaagcgtctcatcggc

SEQ ID NO: 340544 - DNA, 134 bp, Zea mays
ttttgattcccaaatacttacacgctgctgcgtcctcattcaagaggaggcggaccctccaacctctggactcgtaccctacttgcttcaatcactacatcaactaccatcctgccagcgtcctcccacttcct

SEQ ID NO: 340545 - DNA, 385 bp, Zea mays
acccgatcgacaccatgagggtgttgctcggggccctcgctctcctgggggtgggtgcgagcgccacctccacgcatacaagcggcggctgcggctgccagccaccgccgccggttcatctaccgccgccggtgcatctgccacctccggttcacctgccacctccggtgcatctcccaccgccggtccacctgccgccgccggtccacctgccaccgccggtccatgtgccgccgccggttcatctgccgccgccaccatgccactaccctactcaaccgccccggcctcagcctcatccccagccacacccatgcccgtgccaacagccgcatccaagcccgtgccagctgcagggaacctgcggcgttggcagcaccccgat

SEQ ID NO: 340546 - DNA, 316 bp, Zea mays
tctctcaaccaaatctccctccatcgccggagagagccctagaagccgacaagaaagaaaccgaccgccgacgccgagcaccctcggttccttgcttgcccggcgcccaatctagacagctctttctcgttcgtctgtatccatggccgcctcgagcaagaccatcgctgtcctcctcgccgcgctgctcctcgcgctggtcgcgtccgcggtggccagcatgaagctggaggaggaggacgctttcctggtaagcctttcgccggtgggtgggggggggcgggtcttattcttatcccttcctttctgtactctc

SEQ ID NO: 340547 - DNA, 164 bp, Zea mays
  unsure (1)..(164): unsure at all n locations
tctacccactcttcttgtcctaagcctnctccnntctctacaaagatccccttcacaaataaaagaaacgcgccctcccttcacctttcttctctctctcacacctactcactcttaccttcccccttccccttccataatttacccctcttatttcccttttt

SEQ ID NO: 340548 - DNA, 429 bp, Zea mays
  unsure (1)..(429): unsure at all n locations
cccnccccctcttcttttctcctttccccttcttctttctcctctctcttcctctccccttatccccccccccttccctttccctttttcctttctctctccactcttctctcctccttctcctctcccttcccccctattctcttctcctctttttttccctttcctcccctcccttcttcttccctttcctcttccttttcctcctctcttctcttccctccctctctcctcttttctctctctctttctccctccttctcctcctttccttcccctctctcttctctcccttttctctcctttcttcctctctcacactctcttcttctctctcctcttccatctctctccccttcccttctattttctctccccttttctccttcttcctctcctcatctctctttctctctttctccatcctct

SEQ ID NO: 340549 - DNA, 100 bp, Zea mays
  unsure (1)..(100): unsure at all n locations
tctacccactcacttttttcagccgccgccccggcaattccggagaggctcttacaggcgtggctgcgttccctattccccntcnctttataccttagca

SEQ ID NO: 340550 - DNA, 366 bp, Zea mays
  unsure (1)..(366): unsure at all n locations
tattctacccacccgtcttttttctttccgnaccncaccntatctaagataagactccaatccaggataagaaggccattccccacccncctttctcatttccatctccttcctctccctcctactctcaccttattcttcctcttccatcatcttttctttcttctttcctcccactccctcttcctttcttctttttcaccctcaccttctctctcttcctctttcttcttctcttcacctcccccacctccttttaccttacctctttccccccttactccttcttttatcttcttgtccttccctccccttcttctttcttactctcctctccattttccctattcttcattttttttcttt

SEQ ID NO: 340551 - DNA, 378 bp, Zea mays
  unsure (1)..(378): unsure at all n locations
cctcntctttttttcttcccttttttttttctatctccattctttttttccttctctttcttttatttctttttctctccttctttttttttttcttcttttctttttttctccttcttttttcctcttctacacctttttttatttttttttttctcttttttcttttttttctctttttttttctttcttttttatattttcttttttttctatttttttttctttctttttttctttactcctctttctcttttttctccctcccctttttttttctctcttcctccttatcctttctttcttctctctcttttttttttttttttttcttttcttcttttttctttttttttcctttttttcttttttttcttc

SEQ ID NO: 340552 - DNA, 293 bp, Zea mays
  unsure (1)..(293): unsure at all n locations
tcttacagttggtgaacgtggggtcgtgcgtgtgtggtgcttggagagtagagtgtgcgtgttcnagcagcaaacatctgatgtaactgttaactcagagaacgaggaaaccaggaggggctttacatctgcntgtatgttgccaaatgatcaaagattgctatgtgttactgctgatcagcagtttttgttctattgtcccaaaaaaactgatgatggggactttgaactgtctctatataaacgacttataggttataatgatgagattcttgacctggaagttatcgggg

SEQ ID NO: 340553 - DNA, 180 bp, Zea mays
  unsure (1)..(180): unsure at all n locations
tagtcnacccactcttcctgtctaaccaaccccccccctctccaaacaccttctctctaaaacaaagaaaggccccccacnnccnctncaccataccataacatacctctattccataccactcctctactttcatccccaccccaattccttccttttcccattccatatcttcttttt

SEQ ID NO: 340554 - DNA, 310 bp, Zea mays
  unsure (1)..(310): unsure at all n locations
tcaacccactcttcctactcaacgcccacccaaatccnccaagaagcttcctttataaaaagaagaggaccacctctanccnncctctctttccccaatcctcctctactctatttcactttcacaatctcaatgcaacaaccccttctttccttccaccctcattgctctccttcctcataactcaaatccaccccattcctacccttccccaacattctatcttccccttctctcaacttttctataccccttttccacctaatttctcaccaccctattttctcaccatcttatcttattttatcct

SEQ ID NO: 340555 - DNA, 284 bp, Zea mays
accgtccgtattcccgtgcggccgcccttttttttttttttttttttttttttttattataaaaaatactatccaataatatattttagttcttggacgtattgaaaattatacaaacagcgacatatagagtggtcaagtataattaatgcatgccactctgttcacagaaactctgccatagttacagttcaaggcaccaaaactgttacagctatgcaaaaccatttatttttcatcatttctgggcctcctatttgtattcaaggaggtgtttttgatct

SEQ ID NO: 340556 - DNA, 439 bp, Zea mays
ggggggaaaaacttttgatattatcaaggcagtaataaaatcagcaaaagaatacatatacactcttatatcaaccggagaccagatcatccacgcataacacaatcgtgttaaggccaagacggccaaataagcatgtccggtaaaaagactcgagtgaaaactgcgtacaaggcctccagggtaaattcaaatgtaaaaaagaattgaacattctactgcaatcacacgtgtgctgctgcggttgtacattttacatacattccagatgtggctgtcacaagccaatcatttccatgcgaccgagtcgatcctattccttgcagatttgtacaagcttagcctcttgaccaaaggattcctctttttcaacaaagcgggggtcctaaacaaaatggtgcctaagtaggtttttttctctgttttccaaattagcttt

SEQ ID NO: 340557 - DNA, 204 bp, Zea mays
  unsure (1)..(204): unsure at all n locations
ggggcggccgccctttttttttttttttttttttttttttttntntttttttttttaggaaaaaccaatttttttttttttgggaaatcacaacaagcccacaccgccaagagtttaattttggggcccttaagcacgggcattccatgcacattctaagagttcaaaagcccacccatattaagttcttacaaactagccatt

SEQ ID NO: 340558 - DNA, 77 bp, Zea mays
cggatcggccgcccggtcgccccttttttttttttttttttttgaaaaaaactttttttttttttcaattctttttt

SEQ ID NO: 340559 - DNA, 359 bp, Zea mays
cggccgccctttttttttttttttttaactacaacttcagtcacattactttgacaatgtcaaaccgggtttcgtgaactctgcaaaacatccctagttggacaacagcgtagaataataaagcctagagtctatgcatttcctctctctctctctctctctctctctctctctctctctctctctctctctctctctctctctctctctctacacaaacaaggatatctctggtggttggacaaaggagaagatggcttccccgaagacctcgttcagagaccccaagagatgaccggtgtcctggtcctccttccaggcttgcctaagcactgcagaaactctctgcgcgagatcac

SEQ ID NO: 340560 - DNA, 346 bp, Zea mays
gcggccgcccttttttttttttttttttttttttttttttttttttttagcaggcagtgtactccgaccgattccacggaaagggatacgtacatacaggcgacgaacacacgcctagctacgacctgctcgactcgatcggaatcacaacacaccagaacagcttaattatcacccaacatccagatgattaaccaactgggaaacatgactgacgaaaggaaactaatacggggtaattattattagacgggatgatgaccctcctgatgcagatccaggccttcctctccttgtgcgggtgggctgctgctgctcttgattattacttgtcttccactgaaac

SEQ ID NO: 340561 - DNA, 52 bp, Zea mays
  unsure (1)..(52): unsure at all n locations
ggcggccgtcctttttttnttttttatttaatatatgtaaaaactttaattt

SEQ ID NO: 340562 - DNA, 282 bp, Zea mays
gcggccgcccttttttttttttttttttttttttttttttttttttttttttggcagtaacggagaaatatgtcaattaccaagagtgtgcgagctttttaagtccgtaagcagtttttactgcaaatcatatcatggcacgtttgatgactacacaaacaaacaacattaccaaaagtggatattaatccgatattttgctttatttttctttctaaaactagcactacccatgttatacccctcgcctttatttttgcgcggtactcagcacagtgatga

SEQ ID NO: 340563 - DNA, 358 bp, Zea mays
acgggcggccgcccttttttttttttttttttttttttttatttttttttttttttttttttttaatttttttttatttattaatttattttttaataggttttaaataatataattaataatatatatataataaataaataatttattaaaatatttattattattaataaaaaaaaaaaaaataaatttaaaaatattatttttgggttatttattaattataaaaaaacccattaaaaaattagtaaattatatataataaaaaaaatataattattttatataaataaaattaattataaaaataaaataaattaacaaacttaacaagtatataataatttaaataaaatta

SEQ ID NO: 340564 - DNA, 270 bp, Zea mays
ggccgccctttttttttttttttttttttttttttttttttggggggttggtggtttgacatgcatttgttggctgggatgtagccatgaggagagggggattctacctaattatgccattgaatggaattggaccatattttatacagatttttaccttcagttcttttgaaaaaaaaaaaaaaaaagggcggccgcccttttttttaattttttttttttttacctaaaaccaaattaacaatgccaaaaggttaaaatataattttt

SEQ ID NO: 340565 - DNA, 342 bp, Zea mays
cggccgcccttttttttttttttttatttttttcttttttttttttttttttttttttttttttttttttttttttttttttttttaaattatattttattttttatttttaatttttattttttttttttttttttttttttattttttattaaatttttttttttttattttaaatttttataaatttaaataaaaattataaaaatatttcttttttttttgtaggaaaacaaaaaataaaataattatataaaaatcataaattttttttattgagctcgaaaaaatagttaaataaaaaaatttttatttaatataaataaaaaaagaatataaata

SEQ ID NO: 340566 - DNA, 224 bp, Zea mays
  unsure (1)..(224): unsure at all n locations
tgcggccgcccttttttttttttttagatttttttttttatttttatttttttttttttttttttnttatttttttaataatttatgtttttttttatacttggtgggtttttttaaatattatttatttaattatatnatttttttgaaccaggagccaaaaaaaaaggggggtaaaaaaaatatctagtttttggcctaatattaaaattattccccctaac

SEQ ID NO: 340567 - DNA, 277 bp, Zea mays
cccgggccgccgcccttttttttttttttttttttttatttttttttttttttttattttcttttttttcattttttgtttttattttttatttctttttgctttggctttttctatctactctttctttttttcttctaaaaaaaagggccagcccgttaacaggtgggcccccaccctccttaaaccatatggttttgcccttggggttttcccaacattcccgtaaacccaccttatttttcaaccacctaaaacatttttatccttcccaaaa

SEQ ID NO: 340568 - DNA, 279 bp, Zea mays
accgtccgtattcccgggcggccgcccttttttttttttttttttttttttttgatcactataccattttttgtctgataatacaaccgaattgcaaatagttcatgacatatgctccataattgacttctaacattaaaagtgctaagaacacaaatagcaaaactttgaaaatgcaaccagagacaggcacgcttgttgtcttgattgggaatgatcggacagtggcagtatccaagctcccgacgagctgttcagcggttgcggcggatggagtgg

SEQ ID NO: 340569 - DNA, 339 bp, Zea mays
cggccgcccttttttttttttttttttttttttttttttttttttttttttttttttttttttttagctagcaccatctctttgatttattatttctttggcaacggatggtctggttccaaatcttgaatacacacgtactcgtacgtcgttttgttgcaaatcggcatggaaatgggctaacacaggcacaactcacaaatggtccttttattacgggtggccagatccagaaccacccgcgccctttacaaccttattgaccggcgaaaaattctggttttccagccccaggcttcttgccttttttaacgccttattggcagcttcttagaccgg

SEQ ID NO: 340570 - DNA, 382 bp, Zea mays
cggccgcccttttttttttttttttttttttttttttttttttttttttttttttttttttttttttttttttttttttttttttttttttttttttttgaaccaaaaaattgacccttttagggggatcaacgaaaccaaacccatttttcataaacaataattataataatggtgttaaaccagaaaacactgttttaaaccctaacaggtgtggttgttaaaccagcctttactggaaaagggtaaaaaactttgactaaaccttaaaagttttttaataaaccacaattcaacggtgctttttttgtaggcaagacaagcacggttttcttcccaaaaagggggcctttttttttttgggcaccctgttcccacccac

SEQ ID NO: 340571 - DNA, 197 bp, Zea mays
tcccgtgcggccgccctttttttttttttatttttatatttttttttgatttattttttttttttttctatagttaataattggcaaaggggtaacttgacaaatatgaatgggcgcgtttattttaaacattactttttaaaaatgcaagcttccattttttatttttttccattttaaattggtctaatgactaa

SEQ ID NO: 340572 - DNA, 340 bp, Zea mays
  unsure (1)..(340): unsure at all n locations
accgcccgtattcccggtcggccgccctttttttttttttttttttttttttttttttttatttttttttttttttttcctcattnnttatgggacccacagtcacagcattttcgaaattggaaatcgttgaaggaatgcaaatttttcaactccttgggggggaaaaagagcagtcccaattcaaaatggtggctttcaccgtcctgaactttcaaattcaaatttaccgtcctgcattttaacctgacctcccccggttaacccctgagcgggcccatttttcctagccctaccttgtaccctgttaattccctcaataaggcgtttttgttttttt

SEQ ID NO: 340573 - DNA, 352 bp, Zea mays
gcggccgcccttttttttttttttacagttttttctatgcacaatagagttaccagatagatcatccagatacagttcaagtttctgaaacgcaactatccacggagcacctggatacggccccagggagagagacagagcaagggaaaaggaaaaaccaacttatgcgcaatagataccaaaaagctgattctgaaaagcaaattagtagatgaggtcatgaacactggtcagactaacttcctaccctgtactctatacgggctttgctgcattcttcagccatcttgagttttctgtcttctgcagttgtttcctcgtactcatgggagcagcagcatgtctttatttc

SEQ ID NO: 340574 - DNA, 391 bp, Zea mays
cggccgccctttttttttttttttttttttttttttttttttttggatctagtcatcaagatcgattaaccatacaaaagattagaatcgacaccactgggtatcaagtcttgtactagatggcacgtaccacgaaccgaacaacctaaaacaaccatgtgcaaacaaccaagacaaaggaagtgacactgagacccactaatgtatcaaagccacgcgacacatgcgagtccagtctaggtatctcgggtcagtgaactcacaagctgctccgctgtgttgtacactcctagaaaggctgcatataacaagacgacagaaaccacccgggaatgtctcggtttacggttgttagcctttggcactcgctcgctgtcttaaagacgcggtg

SEQ ID NO: 340575 - DNA, 353 bp, Zea mays
cggccgccctttttttttttttttttttttttttttttttttttttttttttttttttttttcaatcttctcaggaaagccatgagacaaaacatttattttacgccccaaataggaaagggccccgaatcctttccctggggatcctccagggctgttttgggaagttaattttataaacaggtccattattctattcttttctaaagaaaactccaaccacgagccgagacggtttactgttctacagtttaaacgcctgttaaacccctgacgagtttccgttcagccatgtcttttggatgggggttagcacaaagccctttggggattcagccttcaaaatcaaagca

SEQ ID NO: 340576 - DNA, 233 bp, Zea mays
  unsure (1)..(233): unsure at all n locations
cgtccgtattcccgtgcagccgccctttttttttttttttttttttttttttttttttttttttttttttttttttttttacttttaanaacctgtctataaataaattaaaggggagagggggtcacccaaactttattatatagtataatttataatagaattcaaataaaaaaaaaaaaatttcattttataataacaccacataattttattccaaaatctacattttt

SEQ ID NO: 340577 - DNA, 51 bp, Zea mays
ccgcccgaattccgggcggcgccctgttttttttttttattattacattac

SEQ ID NO: 340578 - DNA, 429 bp, Zea mays
taccgtccgtattcccgggcggccgcccttttttttttttttttttttttttttttttattttttttttttttttttttttttttttttttttttttgttttttttttttttgtgccgggcaaaatttaatttttttttaaaaccaccctacgaaattggggcaattgggaaaaagtgggtttaaaacaacattttgcaaattttgttaattgttggaacccgaatggggggggtggtcttaaaaaccaaataaaccgttggggcaccccttgtagtgcttttaaattccggggattaatcccttcccccacggccttaaggccaattgggggcaaaaaaaagaattggggaactaattttgaacccttccggccttctaattaaaaaaaagatgggggggaacgggaaatctttacataaattgcggg

SEQ ID NO: 340579 - DNA, 407 bp, Zea mays
gtaccgtccgaattcccgtggcggccgcccttttttttttttttttttttttttttttttttttttttttttttttttttttttttttttttttatttggggataccaaccggtacattacggttggttgaaaaaagggtctcaacagcacttggattgtccagtttgaccaattttttttataaacatgccctttgcaactaaaagggaacaaggttttaattgttcccagactgcggggggcatttttaacccgctccagttgctaaaaccaaaagattagagcttgtcctcaaactcaaaaaggggtgttattttttctttcaaacccttccttttggggaatttcagcaccaggggggccccctgggggccacccttctaaagatccctgcccatactttttc

SEQ ID NO: 340580 - DNA, 369 bp, Zea mays
cggccgccctttttttttttttttttttttttttttttttttttttttttttttttttttttttttttttttttttttgttttttttttttttttttttggttttttaaaaaaccgaagtcttttcctttttttttaaattgggcaaaaaaaaaaaaagctttgcctccccttgcctttggtgaaccccccgtttttttttgggagccaattctttttttcgggggggtatttaaatattcccgggggaataaaaaaacctccccctgggggggggctagctaccccttgggttcccccttttggggccccaactgggttagggtgggggccctccccccccccgggggttttgtgtccttagccattt

SEQ ID NO: 340581 - DNA, 168 bp, Zea mays
tcccgtgcggccgcccttttttttttttttttttttttttttttttttttattttttttttttttttgtaggaacaatatataaagattggggaaaaaaaaaaggtggaaagaagttttaacttattttttagaattattatataataggggattcctaaaataaaaa

SEQ ID NO: 340582 - DNA, 283 bp, Zea mays
cggccgccctttttttttttttttttttttttttttttttttttttttttttttttttttttttttttttttccccagggacaagaatttttttttttgggggggggtttaacctttaattaaacccttcgggggtaatataacccattgattccaaattcatgctggttgtagcaagggtcttctggggccgagggtgaaaacagcaccaacaactggcacagaggggcccacaaaaaaaacacagaggggcaacaacaaaaaccgggcgaacgaagtaaac

SEQ ID NO: 340583 - DNA, 383 bp, Zea mays
taccggtccgtattcccgtggcggccgcccttttttttttttttttttttttttttttttttttttttttttttttttttttttttttttttttttttttttttttttttttttttttttttttttttttttttttttttccaaccccaattgggatttttttaaaaattcccccccccctttgtccccgggcaaccctttttccccggcccaaaaagtccggggaaaaaaaaaaaacccctttttccggggggggggaatttaaaaggaaaaaaatttgtaaccggcctttttccccttaaaaaccgtttttttggaaacccccccagaaaggacagggccccccattttttgttctccccggggggttttgggggcctttt

SEQ ID NO: 340584 - DNA, 151 bp, Zea mays
gccgccctttttttttttttttttttatttattttttctatatttctttttgatgctaccgccggagattccttccttctgctgttgtgtgcaatctcgaatgggtttttttctctactcccaatgcatcaaggtatctttttccttgtcc

SEQ ID NO: 340585 - DNA, 406 bp, Zea mays
cggccgcccttttttttttttttttttttttttttttttttttttttttttttttttttttttttttttttttttttttttttttttttttttttttttttttttttttttttttttttaaaaaaaaaaccggcccctaaaatttgggggccactttcccccaaaaccaattttccatggacctccaaaataaaaacaagtgggggtttaaaggaaaagccccccttttgcccccctttttgccccaaataaattggcccggggttccaaaaagaggtgaaaaacctttccaacggtttttaaaaaatgtatccccccccccccccccccccttaaaaaacccccctgtgtaatcccaaacatcttggttccacaaccggggggatctcggggggttttttttttt

SEQ ID NO: 340586 - DNA, 377 bp, Zea mays
  unsure (1)..(377): unsure at all n locations
caatcttaactttttttttttttttttcaatttaataannaaatttgggctgggtatttaattaatttctatgaattctcataaaattttaatttccccccccacccccccccacccaccctcccacccccccaaccccccgcccggctttaccaacaccaacccccccccccccccccaactccccccccctcccaacacccccctaaccccccccccccccccccctttacatccccacccccacctcaacaccacccccccccccccccccccccttgataattacacccccttnntccccatccccccccccccccccccccctccccccccccctcccccccacctacctcccccctccccacactcccccc

SEQ ID NO: 340587 - DNA, 148 bp, Zea mays
  unsure (1)..(148): unsure at all n locations
ccgcccttttttttttttttttttaactttataaaagtttttttttttttttttatacgccaanttttnttttttagtttattattaaattgaaacctgaataacccatcatggaaggagagagagagagagagagaggatttatggc

SEQ ID NO: 340588 - DNA, 316 bp, Zea mays
aagtcgacccacccgtcctttacttttagttctaggaacgtcatccccaggtggggatccttcttaatgtgggggtggaacctattgacctgcttgccacagcatgttattttccaaaaaatatttaggaacaccatactgctatgcttccattatttattccaatgctttttaaacaatatcttactttgcttctagccttaatgaaggttccaccaacatcccatcatcagctgaccttgatttttctgcaaactacattaatctcaaattttataccatgcctcctgggaggagcttttaaaaaaatttgatt

SEQ ID NO: 340589 - DNA, 138 bp, Zea mays
tccgtctgatcagatccagcgcctaacccggcgggtccggcgacggtgagtggccggcgttcatgacaccggccgcggcgtggtgcgcgcagcaccgccttcggttccttctaccgttcctttttctcgcgcccgttc

SEQ ID NO: 340590 - DNA, 356 bp, Zea mays
  unsure (1)..(356): unsure at all n locations
aaaatcctttattattntcccactccctttttttctttttacactccncacctactcccgaccggtttttattaagaggcccgcgccccacaaactcacacaccacctacatctacccctcccctctccctattcctcctcccacatacacttttcaatcactttttttttttttaatttattctcaatctacccctcattctcccctcctcactcttttatttaccttcatatcatctatcattcaccaatcaattttaatttcttattcttttttctttatatactttattctcctttttttttccttatccaatccatttttccaaaatttaatcccaccctatttatttttt

SEQ ID NO: 340591 - DNA, 380 bp, Zea mays
  unsure (1)..(380): unsure at all n locations
ttttgttcttaccgtttccatcgatttccaggaatgttgagcaccagaggtgctgggtggtcacancaattaccacacgcaagattatcattctcatggttgcgacagcagccatagccgctctctttcccagctgaacgaccgcgggcaagaactgaatgtgccaaacgcagtgccaggagatccagcccaactgcgacgcatggatcaagacgataggctaccccaagggcgggaagtgcatagcgccacactaccacaactgctggtgctgggtggggccaccgtcctacaactcctataaacaacttaatggaacgcctgcagggtctttttacaaccgcacgttacatttttgacgactttaatttgttttgtct

SEQ ID NO: 340592 - DNA, 54 bp, Zea mays
  unsure (1)..(54): unsure at all n locations
aactcnacccactcttccttatacaactaactaaacncttcttcacgggtactt

SEQ ID NO: 340593 - DNA, 387 bp, Zea mays
  unsure (1)..(387): unsure at all n locations
ggagacgcagaggtcccgcggctgggggtgtggtcaccttctgcacgggggaggcgatgcngaacgccatcgagggcatgaacggcaaggagctggacggccgcaacatcaccgtcaacgaggcccagtcccgcggcggccgtggaggcggcggcggcggcgggtacggtggtggccgtggaggcggcggctacggcggtggcgggcgccgtgatggcggcggcggctacggcggtggcggcggctaccgtggtggcngcngcggctacggtggtggtggcnnctgctactgcggtggcaaccgtggcggcggctacggcaactccgacgggaactggaggaactgaacggtggggcccgcgcggccaagttatcctgttcgctacc

SEQ ID NO: 340594 - DNA, 307 bp, Zea mays
  unsure (1)..(307): unsure at all n locations
tcgacccactcttcctttcaacccaaagttcccnctgatccacatggcctacatcggcggcggagggggccactcctaacccaatcccgtccattaactcaacacatcttctctacctcaataacaccttcaaaaaagacaaacattcctacttctctaaccaccacatattatatatgttccctgctctcacaaaatgcatacactacacaagtcttcttacacttcaaacaagcaccaccatcttcttctccatactcatacttaacaaaaacaaaaatgttatgtagctggagcacattctcta

SEQ ID NO: 340595 - DNA, 323 bp, Zea mays
  unsure (1)..(323): unsure at all n locations
taaacttgaatcctttaaagtcaacccacccgtctctacttttccgccaccccctacanctaagggagaggatgtcataatatgggggcgggacatcaaccaccccaagcacttctccctcctttttcttcccatgaagcactcctcccttcacctctacaaggtgaactcatttcctatttatgaccccaaaaaaccttgccatttcacttccttccttgctacaatgctgtcatcactcacattgttccttagcttgaaaagccaatatccaaactccataataaggaaacctgttgatgctgttaccatgattgaaaccc

SEQ ID NO: 340596 - DNA, 342 bp, Zea mays
acatcctgcaacacgaggacaagtggtgcatcctacagtccgttggagatgccagaaattgattggaaccttgagaatacacagattgtttgtaagttgtttgtcgaacaagttggcaaagggaatcgaccaaacacttaccttaattcagttgggtacgctgaggtggagaaaggattcaaagataggacaggtattgatgttacaaagtcacaacttaagaataaatgggacaaatttgaaagaagatttcaaggcatggaggaaacttaagttgctgcaaacaagaacgggtggaaccgtgaaaagggcactattgatatggatgatgattggtggaaa

SEQ ID NO: 340597 - DNA, 206 bp, Zea mays
ttatctacccacttttttttttacatcctccaacacaactacaggtgcgttatactacagggtcgtgcgggataccacaaatttattataacctttataattcacacattctttctaatttttttatccatacaatttactataattaattttctcatcacttaccataattcaattatcttccctttatttttataaattattta

SEQ ID NO: 340598 - DNA, 166 bp, Zea mays
tagctcttttattgcaaaaaaataaaataaaacaagagaataaaaaaaaagaggagtgctgatttccaaaacaatatacgaaccgtacaaaactaagtctatcaaatcctttataccttcagatttttaagctagtcgtcttattaatcttacctcattcttaact

SEQ ID NO: 340599 - DNA, 428 bp, Zea mays
tccttatttgactcctcagctaccacccccgccggcccacccccgtctcgcccctgcatgtgggcggcctcgagctctgcttaaatcacagctgtgttcgtttgtggggtgatcctcccccctgtcggattcttttactttctagctctttgactgttgagaacttttgtgtcttattcctctctttattgttctcttttcttgttttgcacttttttgtttttttatttttttttttttttctagattattttcttttctttcatgggggggtggggggggggggtttacctttcttattatattatttttttctttttatcttctctccttttttcatttcttctttttttattttttttattttttctttctattttatcttttcttctttctctctttttttactttattctttattttttttt

SEQ ID NO: 340600 - DNA, 358 bp, Zea mays
  unsure (1)..(358): unsure at all n locations
tcgacccactttttttttaactgctccctgnncccccccggctggcttccccatgtgggccgaccggctcccaaccccactttctgcgcgcgcccgagcccagttcggccgtgacctctctgtccgaatcgcggcaaggaggcctgctcgcggctgagccctcctgtgcgcgcgagccctatagcttggctgaccggggcccccttgctgcgcgcgcgccctaccgagccgtggccatggcgtccagccaggaaccgcccctgcccatgctttcctgcggtgaagtgcccggttgcctacagccatgcttcttccccactctccatggccacctgctactctgcgtcctacctttctg

SEQ ID NO: 340601 - DNA, 406 bp, Zea mays
gcatagacaggcgtcttcgtactcgcctagctccgcgacccaaagcgttgggccttctcccattcttctctcatttctcaccaccgccgccgctaccccctttcgacaacaccatgagggagtgcatctcgatccacatcggccaggccggtatccaggtcggaaacgcgtgctgggagctgtactgcctcgagcatggcattcaggctgatggtcagatgcccggtgacaagaccattgggggaggtgatgatgctttcaacaccttcttcagtgagactggcgctgggaagcacgtcccccgtgctgtttttgttgaccttgagcccactgtcatcgatgaggtgaggactggcacctatcgccagctctttcatcctgagcagctcatcagtggcaaggaggc

SEQ ID NO: 340602 - DNA, 188 bp, Zea mays
gtgcatgggagaggaaaaaaaaaatctaggcctagcatccacagcggtaggattcgggggttccaattgcagcggcaagccagacagcggcggacggtgaagtgggtcaacgacaccaagggcttccggttcatcttccccgaggacggcacacgaacatctcttcgtgcaccaatcgacgatcaagt

SEQ ID NO: 340603 - DNA, 383 bp, Zea mays
accccgtcatcgatctcgtttcaaatccagccatcctcgtttcctccgtgcggcagcatctcaaccccatggccaagatcaagatcgggatcaatgggttcggcaggatcggaaggctggtggccagggtggccctgcagagtgacgatgtcgagctcgtcgccgtgaacgaccccttcatcagcaccgactacatgacctacatgttcaagtacgacactgtgcacggacagtggaagcaccatgaagtcaaggtgaaggactccaaaacccttctctttggtgagaaggaggttgctgtgtttggctgcaggaaccctgaggagatcccgtggggttcggttggtgctgaatatgttgttgagtctactggtgttttcact

SEQ ID NO: 340604 - DNA, 390 bp, Zea mays
  unsure (1)..(390): unsure at all n locations
cgaattcccgnngcgccgcccttttttttttttttttttttttttttttttttttttttttttttttttttttttttttttttatttttggttggtttttttataaatgggggcggcgttttttttttttnggggaaggttccccttcttatttttacaaaccccttttattccatccccccaattcaaaaagtttcgggagaaaagtttaaattaaaaatgggtaacaaaattatttttttaaaatttttccaaaatgcctttaaattaaaattgcccaattcccaaaccgggttgtattttttttaggcaaaaaaaacaacccccctcttatttatttttttggggtgtttttataaaaccatttttgtttttgcggaaaaacccccc

SEQ ID NO: 340605 - DNA, 73 bp, Zea mays
  unsure (1)..(73): unsure at all n locations
cggattcccgngccgccgccctttttttttttttttttttatttttttaccttccacctttttatattttttt

SEQ ID NO: 340606 - DNA, 255 bp, Zea mays
gcggccgcccttttttttttttttttttttaactaacccagcaacaacttttttaaattttaactgaccaactgatcaacagtttctaagtaacccaattatgaccaagagaaagggcgaagaagaagatgaaacaatattaataataataccggactcccctataacggacactaccggactcccttataacggacactggactagtaacttattgaacgcacctttcgacgcccaaaacggtatgaatgaatg

SEQ ID NO: 340607 - DNA, 299 bp, Zea mays
  unsure (1)..(299): unsure at all n locations
gaattccgggcggccgccctttttttttttttttttnantntagaagatccagatttttttttttttcttgtcacgttttaccttttggttgggttacccttattttagggggggaaaacccaaaggggtttaaggggccggctttaatttccaatgccaaattttggggcgtttaacaaggtgttgttggggggaatcccccaaaatttccccgggcccaaacaaagggtttttaaaaacaaaaactgggtttgaaggccaaaaggattatgccaggaggttaagttttcttcttctt

SEQ ID NO: 340608 - DNA, 266 bp, Zea mays
cgcggccgccctttatttttttttttttttttttttttaggcaagcgaatcctatgtagatctgggtacagaaggaaacggcatgcttacaaggcattggcgaaccctacactaaaagaaaaaagaacaaaatatgattgggaaaccaaaccactgaatctttaaacaggctccatggtagggtaggtagtactgacaccaacccattcttttgtacaagcactccccattgttcatcctcatactttcttcatatatttcacttt

SEQ ID NO: 340609 - DNA, 84 bp, Zea mays
cggccgccctttttttttttttttttttttttttttttttaacatttttttttttttttttttttcggacgcgtggggggactt

SEQ ID NO: 340610 - DNA, 432 bp, Zea mays
ccggccgaattcccgggccgccgcccttttttttttttttttgacaaaaggttccgggcaaaacgttttgttcaatttgtcagaagcacaaacacagctgacggtaaaaattgggacaggcggtctgaacattcatctatttatgagctcccagctctgaaagaacagatcttacatcctacatgaagaaaatttaatctcacactagctatcactcttcctcagaaaatagcttcattatttcagcagagctccaatgccgtttgagtcctatcagaccacaaacatcgctaaacaaagtacctcagaagcctgccttccacggtaacgggaggcagcatactcaaaatctctcaccaaatctgaaaaaaacggtcccagtaccagcattgtgatctacgatgtactcttcccttaccaacccaagcttga

SEQ ID NO: 340611 - DNA, 55 bp, Zea mays
cgcggccgcccttttatcacacctttaaacaaaaaaacccacacccttttatttt

SEQ ID NO: 340612 - DNA, 441 bp, Zea mays
  unsure (1)..(441): unsure at all n locations
ccgccgccctttntttttttttttttttttttttttttttttttttttttttttttttttttttttttttttttttttgggggttttttttttttttggggtggggttttttttttttttttttttttttaaaaaaacccttttttcattgggaggtggggtaaaaacccccggggggggtaaatatttttttaacaaaaattgttttggtaaaaaaatctttccccttttttgtttttagagggggggaaaaaacacaggtgataattttgggctgccccattataaaacattaaaagtttttattttttttgttaaggggtgcccccaccctttctttttttttggggccccccaaataatccttttttttttttttttccctttttgtgggtctcaagttatttttttgtgagacttaaaaacgggcttttctttttt

SEQ ID NO: 340613 - DNA, 458 bp, Zea mays
gcggccgccctttttttttttttttttaaaaaagcttattccaatttttttttctgtgcttcaataatagactcatcggacacgcacaacacgtctaggcgaggcaaccaaacacaaccttaaatactaaaatagaataaaatacagggactaaacagtagtccataaaaaccaaacacttgttagctgcagcgacctaacatcatcaatcagtactcataatcttttcctatttgctcaaagttgcagatacacggaattggaactgcaattttgcaaggcttatcatagcatctgttccttgacaccaaggtaatctagcatctacatataccttacagaagtgctaaaacccagtgagagcaacacacagaacagtaatcaagttactggagctcaaaagaaaaactgcgagggagacatcgggggccagtccttcaagaaccaccagaaagact

SEQ ID NO: 340614 - DNA, 331 bp, Zea mays
  unsure (1)..(331): unsure at all n locations
cgaattcccgcgcggccgcccttttttttttttttttcaggaaaaaataataatctgcacttattttacattgnataggtccccttttcaaccggacgagtgataatactccagagttcataaagtacaacgtaagacaatttgcttcattgtacaacaactaattcaattattttgccaaaatccaaattgtaggccggtactttncagaaacattttattcaagcgcttataccataaacaaatgggggaactttaacaagcactaatgaaatatcgagacaaacatttgagagcagcaaaaacactgcagaatcgaaaaaactcaaac

SEQ ID NO: 340615 - DNA, 284 bp, Zea mays
  unsure (1)..(284): unsure at all n locations
tcccgggccgccgcccttntttttttttttttttttcttacctttcttttcaaacttatttttattgtntaacatatagagcccatagagcgggttcatttattcattacaccgcatagcatttttataatatccccatcacaactccacaagacccataaacaccattaaaggtttacatcttacaacaaaaagagtatctaattattaaccaaaattattgtgcatagctatcacaaccaccatccttcttcatgaaccgttatgcttcaactttatataaa

SEQ ID NO: 340616 - DNA, 144 bp, Zea mays
  unsure (1)..(144): unsure at all n locations
ccgccgccctttttttttttttttttttttataattattcaatcttttttatttttaaaannananacaaaaacgggggcccattcccaaacatcggggggccaaacattttaagggcccctgaaaccacaaaagccccataac

SEQ ID NO: 340617 - DNA, 461 bp, Zea mays
cggattcccgggcggccgcccttttttttttttttttttttttttttttttttttttttttttttttttttttttttttttttttttttgggtggtttttttttttttttggggggggggcccaaactagtttaaaaaatttgggtaaaccctgtaaacttgtgtaaaaaaagggggttgggcgaaaacggttccttttttttttacacccccaaaaaaaggggtccccaaaccccctttttgttttttccgggggcaaactttttttgcagggtgaattaagctgtaggggtcccttacaaaaagctggggggggggaaattatcttccccccccccccaaagttgggtgctttctttgccctgcccggttaaacaaaaaaaaagtttgttttgtttttagaacaattccgcaacaggggggagggttggaatttttttgggggtttttacacggggggg

SEQ ID NO: 340618 - DNA, 60 bp, Zea mays
ccggaccggattcccgggcggccgcccttttttttttttatttctcaactacacccctca

SEQ ID NO: 340619 - DNA, 348 bp, Zea mays
  unsure (1)..(348): unsure at all n locations
gattcccgggcggccgcccttttttttttttttttttttttttttttttttttatttttttttttttttttttaaaatctattttacggggggggaaaaaaacattggggggggaaataaaaactttttctctccccataaaaaacccagggcccctttttccccgtctcttcattacggaaatcaaaatgtttnttcccaggggcatattaactttggccccaattttttccagattttttttaaaacccacccaacaaaaaaaattcttccggaaatgagcctttatataaaaactcttccttttaggaaaaaaacattacttggtaacaatgccccaaattgggg

SEQ ID NO: 340620 - DNA, 79 bp, Zea mays
  unsure (1)..(79): unsure at all n locations
tttttttttttttcannnnatttttctttttttaatttttttattttttctttttaactaaaaaaccgccgcacacatt

SEQ ID NO: 340621 - DNA, 277 bp, Zea mays
aaaaaaataaaatgggagggggagaaaaaaaaaaaaacataaaaaataaaaaaataattacaatcaaaaaaaaaaaaaaaaaaaacataaaaaaaaacaaaaaaaaaaaaacaaaatataaaaaaaaaaaaaacaaataaataaaaaaaaaaaaataaaaaataaaaaaaaaaaaaaaaaaaaaaaaaaaaaaaaaaaaaaaaaaaaaaaaaaaaaatataaaaaaaaaaaataacaaaaaacaaaaaaaaacaaaaaaaaaaaaaaataatataat

SEQ ID NO: 340622 - DNA, 109 bp, Zea mays
  unsure (1)..(109): unsure at all n locations
gatcaaaacaactcaccttattatantttttctcaaatctaccctaatccgccgttattataacaaaacacgcagccccctacacacctacctataattaatttttctc

SEQ ID NO: 340623 - DNA, 203 bp, Zea mays
gttcgcttccggtccattttttattttattcaaagaaacacacgccatggcggcggtacacggtgacggcgcggatttgcacatgttacgcacgcaacactacagtagacgcagtctgcatagtatgcacccgcacacagctcgaatcataaactaaaagctatagcgccacgcctttcacggccatccctgcggtcggccgg

SEQ ID NO: 340624 - DNA, 152 bp, Zea mays
  unsure (1)..(152): unsure at all n locations
cgaattcccgggcggccgcccttttttttttttttttttttttttttttttttnttaaacatttctataattattctcaaataacccggtagcaatgctgaggggaattaaacaactggggacgaacatcaggtgttgtaaaaaccacacaa

SEQ ID NO: 340625 - DNA, 484 bp, Zea mays
cgccgcagtaccggccggattcccgggcggccgcccttttttttttttttttttttttttgatcggaacatggcacgctgcattattgttgtatcccaacccaatcataatgaaccagcaacgcacgagcgactgcgactgatcagatgagccagcaaggcacgacgaggttgggcggcttgggcaccttcgccgcccatcccgcgatcaagtgctccttggtgggcttagtcttgatgaaagattcgcggctgaacatagcctgggtgtaggcgtggacgctggacatgctttttggcaccttccagcccttgaaatgctccagcgccaccaccaggtggaagagcttcggcgccaggctgaggtcggcggctgttactctcttcccgcttatgtagggacgcccgtgggctttgagatgcttcttcagcgcctgcagttcacgcacaagtgctcttttcgaaccgtcgtcggtggcattctt

SEQ ID NO: 340626 - DNA, 147 bp, Zea mays
attaaaatccgccgcccttttcttaacataaacaccaaaaaaccaatcaaaaaatccccttcccccataaacaaaacaaaacaacacattacactaccccatacaaaatcccatctaaacaaccccaccatccttccccaaccaaca

SEQ ID NO: 340627 - DNA, 394 bp, Zea mays
gcggccgccctttttttttttttttttttttttaatcaccaccaaaagggtgcttgcaattctcttaatagttctcacatacagagtacaactcaaatacatggtgagcctgggaatgccttaaacatgtggcagatccccaagacattgacaatggctactacttggtagcacccaatcgcacggtataccatgcagactgttctaccatgcagactgttctggtaataagctcttaaaacatcaagaaaatttgtaccaacatgactgatgccctaaataaatagctttgaatcaccaccattcaacctaccaatggtacacaaattttgaagaaatcagttgcagagtcgactagtttccatagacagcgccatttgagttcaaagaggct

SEQ ID NO: 340628 - DNA, 70 bp, Zea mays
cggccccccttttttattttttttttttttttttttatctttccttttttttttttataaaatatcctaa

SEQ ID NO: 340629 - DNA, 486 bp, Zea mays
  unsure (1)..(486): unsure at all n locations
cgcggccgcccttttttttttttttttttttagtatgtgcgcgatatcgcagttgtctttctgaacaaatatagatctttacacacccacaaccaatatgaggcgatcatcgtgatggtaattacaaggaaaattgctactgtctgcaagcaataacatcaagattgatgaatgacaccgcccagctgcgcgaatcaatcaaacgatgcggacataggtgggcaagatgggcccggctgccaccagcccgtccccggcggcctcctgctccgtgaggaagaggtcgtcggtggtcctgagcgcggcgtgcgcgccgaccagcgcgcccccgaccatgacggatcccacgacgttccanncnactcttgtgaagagcaaggcgacgacggtgaccccgcaaagcgcggcgagcacggtcccgtcgtctaactccgttcccaggaccctgagcgggtggtttccccgcgcgaagtataaggaagaacc

SEQ ID NO: 340630 - DNA, 99 bp, Zea mays
actaacaaacattttttttttctataataatttacataatcaaccgcctaattaataaaaatagggccgccttaataaattttttacaattcaccctac

SEQ ID NO: 340631 - DNA, 168 bp, Zea mays
acgaagagaagttgttatttccactcattttataaacgactgatacctatctacgaaggcttatctaaacttggaggaggcccaaataaccccaaattaaacactccacaaccgttacactggcaaacaacaaccgagcaaaaatcaacaacaaaagataaacatatc

SEQ ID NO: 340632 - DNA, 112 bp, Zea mays
cggccgccctttatttttttttaaaatttttattttaaatatattaatttatttttttaataatttttaaaaaaaaaggggggggaaaaaaaaaaaagggggggggaatatt

SEQ ID NO: 340633 - DNA, 434 bp, Zea mays
  unsure (1)..(434): unsure at all n locations
cgtccgaaatcccgggtcgccgccctttttttttttttttttttaaataatttaacaaaattttttttttaaannngaacataaaaaaaaggggggatattaaaaaaaataggggggatcatatattaaaaaataacaaaaataatntaaaatttttaaaaaaataaaataataataaaaattaaaaaatattaattaaaaaaaaaaaaaaaaaaataaattataaaaaaaaaaaaataataaaaaaaaaataattataaaaaaaaaataaaaataaatataaaataaaaataaaaaaaaaaataaaaaaaaaaataaaaataaaaaaaaaaattttaaaattattaaaaaataaaatattaaatattaatattaaaaaataaaaaatatataaaataaaaaaaaaaataaaaaaaaataaaaaaaaataaaat

SEQ ID NO: 340634 - DNA, 265 bp, Zea mays
caccacccttttttttttatctacaaacccacaaaaacccgccgcctttttcaaaaaaaaaccgccgcaaacaacaaataatattcttttcaaatccaaattttacaacccctctaatataactctatctcccccatcactaacaaaaaccttttgaaaaccattttcaccccttcccctcttcttatataaaaataccccccccttgcccccccaacatttcccccctaacaacccttctctttttttctttttaacaaatttt

SEQ ID NO: 340635 - DNA, 449 bp, Zea mays
  unsure (1)..(449): unsure at all n locations
ccgtcccgattcccgncgcgccgcccttttttttttttttttttttttttttttttttttttttttttttttttttttttttttttttttttttggttttttttttttttttggtggggttttttttttttttttttttttttttaaaaaaaaaaccatttttcccccctttttttttttttttccccaggtttttaaatttttggggtttttaagccctaaaaatggcccattttaaagggttttttttaaacataacccaaaattccttattggggttttaaattttagggggcccccaaaaaaaaggaaaacaaattttttgcccctttgtgaacaaactttaaagcccctttcccttatttagaaattaaatcccaaatggtttttgggggttttttttgaaagggataaaaaaaaattttggtccaaaaagggtcttttttttt

SEQ ID NO: 340636 - DNA, 343 bp, Zea mays
  unsure (1)..(343): unsure at all n locations
cgaattccncgaccgccgcccttttttttttttttttttttttttttttttacattttttttttcaaaaccagcctaacaataacagaagcgttttaatcacattatcctgcaacctttacaattccttttgttttaaaacacaacaatattttattatatctcctttatataatttacaaatccaaaactttaactatttttaattgtcatttcctcatattatttttataaatctaacaganaataaattaataattataaatttctttatctctaaattgtttttttatttttttttaaatatttttttttttttatattatattctattttttctattt

SEQ ID NO: 340637 - DNA, 328 bp, Zea mays
  unsure (1)..(328): unsure at all n locations
cggccgccctttttttttttttttttttttttttttttngggggtgaactcgccacaaaccaaataatcagcaaaagggatttccatggcatctcagcaggcacaaccttaggtaaaagcttgagatggagaaactaaaagtttccaacagcgaacacaaagagtggctggggctggcctaggaggggaggaagaagagtgccatcacacgaaaaccatgacctcacagcattggtgcagtaacatttcactatttagagcctatgatcaggcttttgtctcctgagctacttcttcaaaagtctcttcaggaacaagctctggaaca

SEQ ID NO: 340638 - DNA, 164 bp, Zea mays
cggacatggcacgctcccgtaggttgggttcttttaaagtcgaccaagccgtccgtttcacacgggaattttggggaagggttaatggttggcggttggcctgcccggcctaaagattttggcctgctcccgctgtgttgaggacccctagaatggcgggggtt

SEQ ID NO: 340639 - DNA, 243 bp, Zea mays
cccatctacccactcacttaacaggaggtgtctcttccaaccaaggagggttatacactattcctactttccacttcctgtactcgagtactaaccatcatctattctaccctaatcattaaaaaaatctgcttttttttttccatattcctacttacctacaatatttattattacgtttatttctttctaaattttttcttccaaattaattatttttctcaaattcttttataaattgaa

SEQ ID NO: 340640 - DNA, 100 bp, Zea mays
tagtctacccacacgttccctcgatctcaaacgatcaccaacaattaaagagctcttactaccacctaagaaagccctcccaccttcctccttctttact

SEQ ID NO: 340641 - DNA, 177 bp, Zea mays
tctctctcttaaccttttaaccctcatcctatttcctaaaaaaatatataagggctctctaactctcatatataaaaaccacatacaccaacacaaaaacaaacaaacacacaccaaatcacaaactttaataaacaactcatctagcttccccccccgcttaaaacaaccctcttc

SEQ ID NO: 340642 - DNA, 265 bp, Zea mays
gttgggcgcttggcttattgcacaggtcgagttcgtaggtagtacgactgtcagggaggaagaggcagggaagacaatttggagaccctacggagcatacctggggggagcacgcccgtcacacgtcaggcaaacaggacaggaggttcccagataaccgctgtttgctgcagcctgggatggacccctgctgctcaacacaaagggtactttattggtcctagctagggggccaatcaagcaactctacggaaggacggatcga

SEQ ID NO: 340643 - DNA, 398 bp, Zea mays
  unsure (1)..(398): unsure at all n locations
tcttacgcgtggtcttttaacggtcattctatttcaatttaaaaaaagggggggnaanaaaaaaaaaaaaaaaaaaaaaaaaaaaaaaaaaaaatattaaaaaaaaatttnatacaacataaaaataaaaaaacaaaaactttaaaagcccccccccccgtatttcccaacccttcccctcagcccccccaattttcccttttaaaaattcctttaaaaccattccaaatcatttcccataccttttccctttgaaaacttttttccccttccaaattccccacctttccccacccggaaccctaaattttaaaccccggttcccccttttgccccccctccccccctaaatccctttgcccccccccccccttttcacttgaaaacccctttccccc

SEQ ID NO: 340644 - DNA, 254 bp, Zea mays
aacctttatcctctatattctacccacgcgtctcctactcttttgcttttaacggtcattctatggcattttataaaaaaaataaagaaccccaccacacccctaattaaataaaaaaaaaataaaaaaaaaccaaaaaaacaactacaacaaaaaaaaaaataaacccaaaaaaatataattcccccccccctttaattcctttccttttctctttttttctccccacctttccccataattctcccttttaa

SEQ ID NO: 340645 - DNA, 279 bp, Zea mays
  unsure (1)..(279): unsure at all n locations
tagtcttcccactcttcctgnttctaattacagagatctattgagaggagattttttcaaatctaggatggatcttcatttcctcaaccaacctatagttacatttcatttttttttttgctctcgttccctgtcttttctacctcatcttccttcctattccattcttcttcccatgctactctttatacccttcttctttcttcacctacccttttctctaatgatctctctattcgcacttttccatattctttattagctttaatcaccttctct

SEQ ID NO: 340646 - DNA, 58 bp, Zea mays
tcaacccacgcgtcctttcttatttactcccttgcccacaaatacgcggccctcacta

SEQ ID NO: 340647 - DNA, 361 bp, Zea mays
  unsure (1)..(361): unsure at all n locations
tattctacccactcttctctgttcattcactaccttcccaacaanttgagaaggtttttttttcacaaaggcggccacctttatctccttctttatcacaacatcacttacttttctattatttcccacaacttatccaccctcattctcaataattatttctatctatcttttcaaatatacattatttttactaacaaactttccattctcctcatccaataataccatttaaatcttacttaattttaattattctcttctttttttttacatattactataattgatattcttttataccatttctattctttatttaaacttttcatattaacataaattattctattattaaaaa

SEQ ID NO: 340648 - DNA, 401 bp, Zea mays
tctcttatacccttctatctagacttaaggagggggctctgttaggttgcgggagccctctaccgatcccatagggtcccgctcatgctcattatgtcaggaactacactggcaaaatatctgtccacaagaatgctctacttcagttatacgtttgcattccaatgaaccttgccatctttttttcatatcgaacacacccctcttagtcgccctgatgcccaacgttatatatgacaaagcctgcttaaacatattgtgaattattctactggaacacaaccatcttgccttaccatgtaacgatataagtgtcacctacatgacaacatgctatgttactacattgatatatacgagagctcatcccaggtgaatcttgttcaatgcttacctacata

SEQ ID NO: 340649 - DNA, 125 bp, Zea mays
tagtctacccactcgtcctttttaatacccttctctctttttataaggaggggactcttattaattaaaagaaccctcatactatcccattcttatcctttatctctaaatatattatttactct

SEQ ID NO: 340650 - DNA, 170 bp, Zea mays
tagtcgacccacgctttctgctattcttcatttcgtacattagggcgggcaaccttacagggtggggagggtcatcattctcttcaatctcactactatatcaacttccatcgcctctgtaatgcatattcccttcccacttctctaccctcataacttgtacaactctt

SEQ ID NO: 340651 - DNA, 265 bp, Zea mays
tattctacccacgcgtctttctcttttcttatcctcattttaacaccgagcggctcacattataaccaaaacggtactctacctaaacaataaattatttcaattaaataaacacaatactctcaacaatttcttccattcaaagacaacaactacttcttcataatccattccccaactcatctttgctactctaccctacactcaaatactcattcctacttttaaacaaaactaaatttaccatatattattaatatcatca

SEQ ID NO: 340652 - DNA, 169 bp, Zea mays
gtcctatcacatccctcgctcaaaaataggggggtcttactactatttatagcgggtctcacactatcacaaacaaatatctcatcccctacatactcaaatacaacaacctatctttgtcttatgctataactattatttatgacactaataatcactatttaccaaa

SEQ ID NO: 340653 - DNA, 263 bp, Zea mays
ttcttttaataaaaatctagccaaaacggggagggcctacttcatatacaggggggccaaacaactccccacccaaaaaacccaaaatacaacaagcttaaaaaccaacaattatgggctcctccctgtccttttccagtccgctcccacgccccgtcaacgtttccctatagacctctgccaccaatctaaaggaaactattcacacaaataatgccccaccaaaaactatcccttacacaaatgccatcaaaacaaataac

SEQ ID NO: 340654 - DNA, 285 bp, Zea mays
  unsure (1)..(285): unsure at all n locations
accgtccgnattcccgnngcgccgcccttttttttttttttttttttaaaaaatttataaattttttttttaaaagncccaaaaaaccaaaagggggtattttatatcataatatggatatattcaaaaacatatattatactaatttattattatataattatttaatatatttttattttaaatatatacatcattaattatcattaattatacaattattatttaaaaaattaatttatttatttaaatataataaaataaataatattatataatattaaa

SEQ ID NO: 340655 - DNA, 359 bp, Zea mays
  unsure (1)..(359): unsure at all n locations
accgtccgnattcccgggcggccgccctttttttttttttttttttgagaatatgtttaaagttttttttaattgactgcaaacatctggatgccagatatttcttcaggatcaggcaggcaaaattgttacaaggtattgtcatataatcccgcatattgcaccatattctacattttattaccctatcttattttttaaaaatattcctttatttttatatttttcaatattttacatattttataattttttacatttttttttgttattcgattattatatcaattatatactttcttttcttatttttttataataatttttcttaattattatttaaatcttttactttttat

SEQ ID NO: 340656 - DNA, 322 bp, Zea mays
cccgggcggccgccctttattttacttgaaagagcttagtgaatacgtttggaatttttttatgaggcccggaacacgaaacggggaggggtagtaggcagaagacgagcgcgtaaaaagaaaccgatcacccgtgctgatctgaagttaacatttgccaacccgaaagcagcgcacttccacaaccgctgaagcctgcaaagctacctgacagaatgacatgaagcatcacatgaaggacatccatgctaagctgtcaagataggtgcccgccaccaaaagccatattcagttcatagtatagcaatctggaaggatccat

SEQ ID NO: 340657 - DNA, 117 bp, Zea mays
tgtatggttctcgccctgttgcggtactttaagcgcagtgtaatttttctcatctttttctttttgcgtgttttatgctttcttttttttatctcttcttttttcttcttcttttat

SEQ ID NO: 340658 - DNA, 57 bp, Zea mays
  unsure (1)..(57): unsure at all n locations
ccgaaccggagtcccgggcggccgcccttttttttttttnnnaaaaaaaatttcaaa

SEQ ID NO: 340659 - DNA, 324 bp, Zea mays
accattggaaaaaaatacggtttttttacgagagagagacgaatcgaatcatttggtacagactgttcttgcccggcacggatgctcgtacaatcatctcacgaagatcttgatggggggtagttatcaaaaatttttacataataaaatataatattcaatacatatatattatatttattaatattaataataaataatttatatataatttatatacattatttataactattttaataattttatcataatattttaacatttatatattataaatattttctaaattatatttaacaattatttattaaactattattt

SEQ ID NO: 340660 - DNA, 108 bp, Zea mays
cggccgcccttttttttttttttttttgcaagaaacacacgtgatccaggtttattttcacaggcatgcgacatcatcacaaatgtatagagtgacctaaaagcaagt

SEQ ID NO: 340661 - DNA, 58 bp, Zea mays
ccgccgccctttttttttttttttttttcttataaaaatttataatattttttttttt

SEQ ID NO: 340662 - DNA, 258 bp, Zea mays
  unsure (1)..(258): unsure at all n locations
cgccgtaccgtccgnantcccgggcggccgccctttttttttttttttttttttttttttattttttttttttttttttttactttattatataaaatttttggatataaaaaaaaaaggtgtggttatatataaataaatttccactatatcaccatcttttaaaaatgagttttttacatcaaccaacaaaattttcccaatgagctaaaaataaacaatggtgttatataatactaaaaatttataaatttttgt

SEQ ID NO: 340663 - DNA, 409 bp, Zea mays
ggccgcccttttttttttttttaacaaccacaacctcatattttacttttttttttaaaacagaagcaaaacaacttcgacgacgataacacaaccacaggaggaattacatattctaccttcttgttcttttagctagttgcttttttatatttttataatttttaaaatattaataaattttattacttattattaaaatattttaatatattttataatttctataatatttattgatattattaacttattttatatttttttaatattttttatatttatttattactattatatttatattattaatttaatatatttataaatatcttcaattattcttttcttaaatattttcagaatttattttattatattaatttccattaatatttattatattatt

SEQ ID NO: 340664 - DNA, 466 bp, Zea mays
gggcgccgcccttttttttttttttttttttttaattttaatttttttttttttattattaattaatatttatattaaggaggtatttataaataaaaaaagggcactaatttaaaaaaaaaataataaattatataattataagcaaaaaaatattaaaaaaaatttattataaatataataaaaaataaaaaaaaatataatataatttaaaataaaaaaaaataaaaaaaataataaattaataaaaatataaataaaaaaataataaatctaaaaatataaataatacaataataaaaaatttaataaactaaaaaaaaaaaaattctaaattatacaaataaaaaacagattaataaaatataaaattaaactacaaaaaaattccaaaaaaaaagctataaaacaaaataaaattcaaaaaaaaaattataaatatttaacaaaatataaatctcacaat

SEQ ID NO: 340665 - DNA, 76 bp, Zea mays
ccgcctaccgtccgtattccccggcggccgcccttttttttttttttttttttttttttttattattttttttttt

SEQ ID NO: 340666 - DNA, 164 bp, Zea mays
  unsure (1)..(164): unsure at all n locations
cggaanncccggggcggccgctcttactttttagctttctttcactagatgatccaagcctttttttttttttcatgccacgccatacctaagggggtgtgtgtcaccttaaaacaattgactcccccggctttttcataatccttatgcaccttaaaaactat

SEQ ID NO: 340667 - DNA, 229 bp, Zea mays
cggccggattcccgggcggccgccctttttttttttttttttttttaatgttcacggcgccctttttttttgaccaaagacaacctatttaatgcatttaggtttcatatagaagatggcccccaaactgcccattttaacgctgtcagattcttaactaaaatactccaggattttgtaattaacgaaaccacatgtatttttccaagtataccttccctttcttaaa

SEQ ID NO: 340668 - DNA, 51 bp, Zea mays
cggggcggccgctgtcactagtgagtctcgtcgacttctagaaggatccaa

SEQ ID NO: 340669 - DNA, 135 bp, Zea mays
  unsure (1)..(135): unsure at all n locations
cggccgccctttttttttataanaaangggctaattttaatcagcaatgtagttgtacgcaccagcaaaaagaaataggggggatccatctacataaaggggggacgccctaaaaataacataaccacagcgacc

SEQ ID NO: 340670 - DNA, 386 bp, Zea mays
  unsure (1)..(386): unsure at all n locations
ccgccctttttttttttttttttttnttnggcagttcaagtatgattttttttgccacacggcacaaaacagattggcataagccaatgggatatgggtatagaaacatgagtaaaaaggtaaacacaaatcatgaataaactcggctctttatgatttgctttaaaaccatatgacagtattttaattaataaaaattttgatgtcctttttgttcatacatatatctcttaatgtttattataatattttttgatattatgtacttcttttattataccattatgatgatataatatcattatttttttattattctaattttttccataaaatttttttttgattattctattttgtgtatttttttattgttattttataat

SEQ ID NO: 340671 - DNA, 371 bp, Zea mays
taccgtccggattcccgggcggccgcccttttttttttttataaaaaaaaaaatataaaaaaattttttttttataaaaaaaaaaaaataaaaaaaaagggggaaaaaataaaaagaaaaagaatgaaaataataaaaaaaaaatgaaaaaaaataaaaaaaaataataaataaaaataaaaaaattaataaaatataaaaaatataaaaaaagttaaaaaaatttataatataaaaaattataaaattaaaaaaaatttaaaaaatataaaaataaaaaaaataaaaaaaaataaaaataaaaaaataattaaaaaaaaaaaaaaatataataataaaaaaaaaaaaaataaaaatatataaaaaaaata

SEQ ID NO: 340672 - DNA, 55 bp, Zea mays
cgcgcgcgcgtcgtcgtcgtagggttagttaccctgacttcttggagggcgaggg

SEQ ID NO: 340673 - DNA, 411 bp, Zea mays
cggccgccctttttttttttttaaaaaacaataaaaaaaacacataattttttattttaaaaaataaaaaaaaacataggggggaaaataaataaatacataggagaggctaaaaaataaaacaaaaaaaaaaataaaataaataaaaaaaatataaaaaaacgaaaaaaaaatacaaaaataataaaaaatgtacaacaaaaacaaaaaaaaacagaaaaaatgttaaaaaaaaaaaccaaaaaaaaaagaaatacaaaaaaaaattaaacacaaaaaaaaaaagtgaaataaaaaaaagaaaaagaaataaaaaaaaaaatcaaacaaacaaaaaaaaaaaaaaaatagtaaaaaaaacaacacaaaaaaataaaaaaaaaaaaacgagtataaaaaaataagacacac

SEQ ID NO: 340674 - DNA, 53 bp, Zea mays
ccgcagtaccgtccggattcccgggcggccgctgtcactagtgagctcgtcga

SEQ ID NO: 340675 - DNA, 132 bp, Zea mays
  unsure (1)..(132): unsure at all n locations
attaaacacataanaatttttttttacgcacccgagaaaaccaacaggggggcttaattttacaaaataattcccccaaatcacaaatttaatcactattcttttttttttttccttctttaacacatattt

SEQ ID NO: 340676 - DNA, 93 bp, Zea mays
cacataattactcaatcatcgccgctaaatgactcaactagctagctagcctacgtctatactacaacacatagtttcttcaatattggacac

SEQ ID NO: 340677 - DNA, 52 bp, Zea mays
gccgcccttttttttttttttttttaaaaaaacaattctctcaccttttttt

SEQ ID NO: 340678 - DNA, 260 bp, Zea mays
  unsure (1)..(260): unsure at all n locations
atcaccaagctcttcgacctttattttcagctagccngnngcactngccaaggaggagattgtacttccctcgactgctctctatatcgctcctcttcttacagatacagctacagaagtgctccttgactagttattgccatagtaacccacgctataactactgccgaatctcatccctttttgattgttccacaccctttttccattgggtaacatgattataatttcacccttactcccattttttattctaaaaa

SEQ ID NO: 340679 - DNA, 388 bp, Zea mays
ggtgtctctggaaattttgaaagaatacatgtgttggcgcttcttgtgctggcaagaatgtcaatcactccgtgcccgtctagaagaaggactggaaaagtgtgtagggattactgtccttagacggataagatctaatatttgttggcgacttttaagtggaatggatgcaagtagggatgtcaaactctacatgcctcaggtcattgatatcttcaaagatgcatttatggattctactgatgagcacagtgacatcatctcagacatggttaatggcaaaaatggagaccaagagaaggattttcgaggaatgtattgtgcactgttaactgcaagcacacatgttgtctctgctgcgattcttgaagtgcgcatcgaacaaatc

SEQ ID NO: 340680 - DNA, 409 bp, Zea mays
aaaaaaaaaaaaaagggtgcccaaaaaaaaataaaaataataaaaaaaaaaataaaaataataaaaaaaaaaaaaaaaaaaaataaaaaaaaataaaaaaaaaaaaaaaataaaaaaataaaaaaaaaaaaaaatataaaaaaataataaaaaaaaaaaaaaaaaaaaaaaaaaaaataaaaaaaaaaaaaaaaaaaaaaaaaaaaaaatataaaaaaaaaaaaaaaaataaaaaaaaaataaaaaaataaataaaaaaatagaaataaaaaaaaaaaaaataaataataataaaaataataaattaaatataaaaaaaataaataaaatatattaaaaaaaataaaaaaataaaaaaagataatatttataaaaaaaaaaaaaaaaaaataaaaaataaaaactaaaa

SEQ ID NO: 340681 - DNA, 320 bp, Zea mays
ttactgatcccatccaatcacatccgatcagatcacgtctcagtctgagggcgtgccgttaaccaatccatacaacccaccccaacgcacaccgacgacactagagttgctcaggtaccgctagccggcggcgcccaagattaattagcccacttcatacactcctcacttggcctaacgttctcctatccgtacgtctcactaaagctatttgcttgcaactaacagatccatcgtcttgaacaacacactttttgtattgagtaagaccttctaccagcccagcatctaatgtacctgcttatgggcgaagcctgcat

SEQ ID NO: 340682 - DNA, 300 bp, Zea mays
  unsure (1)..(300): unsure at all n locations
aaatcttcccactcnttctactaaccctaccnccnaccnccggccctgttattattttaaaaatgcgtctgccacacnacacaaantaancncaattaccttcccttcaaccattatctcttcaattccactattcatatataccttacttcctactctttcatnaaccacactttccccctctaatacctcaattctcttcanttcatctatctcatccttcaattcaccaccaatttctttcttacctctactacttccaccaccaacttttacctcacctattaattcattcccact

SEQ ID NO: 340683 - DNA, 274 bp, Zea mays
aaaaaaaaaaaataaaaataaaaaaaaaaaaaaaaaaaaaaaaaaaaaaataaaaaaaaaaaaaaaaaaaaaaaaaataaaaataaaaaaaataaaaataaaaaaaaaaaaaaaaaaaaaaaaaaaaaaaaaaaaaaaaaaaaaaaaataataataaaaaaaataaaagaaaaaaaaaaaaaaaaaaaaaaattaaaaaaaaaaaaaaaaaaaaaaaaaaaaaaaaaaaaataaaaaataattaaataaaaataaaaaaaaaaataaataaaaa

SEQ ID NO: 340684 - DNA, 193 bp, Zea mays
agctggaatcctttaaagtcgacccacccgtccgttcgtttccaagaccatcctcaaccggaggacgcggaggtcccgcgggtgggggtgggccaccttctccacggaggaggcgatgcggaacgccatcgagggcatgaacggcaaggagctggacggtcgcaacatcaccgtcaacgaggcccagtcccgc

SEQ ID NO: 340685 - DNA, 107 bp, Zea mays
  unsure (1)..(107): unsure at all n locations
ctctanagnctttcacctcactttttactttttccgccccgaaaattccccacgcgcatcgtttcatatttaccaggtttccgtatacacaaacntattaaancttc

SEQ ID NO: 340686 - DNA, 227 bp, Zea mays
attggtctgtttttattttaatgtggtcagcataacaaaaaaaaaacatttttttaattcccattttaataaaaaccatttcaacaataaaaacacattttccacacactactttacaaatatcccttaaaaccatacaacaactacaaattttttattacaataaccataaaaaactatcactctcaaaaataaaaaaaaaatataatatcttaaaaaacaaacct

SEQ ID NO: 340687 - DNA, 247 bp, Zea mays
  unsure (1)..(247): unsure at all n locations
atcctctaaagtcgacccacccgtcttttctgtatttgtcttctcgaaaaacatttgtgttgggagattcaattgacggtaggagaaataaataccaacanangcttaaagtttaatgccccaataatattgatgatgtgcacatagatgcagctcaataaatacattctcattcatataagctaggacatggtccatcttttatttctgtttcaagaatagtagcaccttctattgattattgctc

SEQ ID NO: 340688 - DNA, 380 bp, Zea mays
  unsure (1)..(380): unsure at all n locations
tcgacccactcttcttaccgctccaggctccacctctctgccatgtgacaccaacactcaggggagggttcctccaaactannnaacnactgatagctatccacctcgtctcaagcaccctctggcgtccccctccccccgccgcgtgcctgctagccgctgagatccggggttctgacctcgcctccttctgctgtatttgctggttttcagagttgatgctaaacatgcttatttaactaaactagaaatttgttaccgagactttttaaccaggcagcatcatagttcaatttgaaaacatgtcatccaagaagatatattttgatcacaaagacatggtccatgattctgccatcgactactatggcaagcccctt

SEQ ID NO: 340689 - DNA, 285 bp, Zea mays
ttcaactctttccaccacgcgttctctaacgaccgggacctccaccaagcggtggggagtcactattgcacgagcagtttccacatctatacaccgtaccgccgcatcctataacacatgttcgactcgcttttacaaacgactcgaccaagcccatgacgcacaacatcatggacatcacctcgctcaagaagttcctacaggagcccatcaactacccctgcggaatgacatgatacatcaccgactctgtgaccatctcccgcctgaagaccatggtcaccg

SEQ ID NO: 340690 - DNA, 201 bp, Zea mays
  unsure (1)..(201): unsure at all n locations
tagtctacccactcgtctctttcgacctgatccaatatacgncgatccagtttccatggggggtgtggaagagagataacnaatatgatgtcaagtgtccaggccgctgtctatggtagcaaggactgctagcttaccccaggactgttccttgagtttttgtactacaaggtcactgttcacaatcatctgtgaattttt

SEQ ID NO: 340691 - DNA, 151 bp, Zea mays
ccccgtccgtaagctggaatcctttaaagtggaccaacccgtccgaaccatttttggttccaattaaaccgaacctttgtgaatatgaaaggggggtgggcctccactttgatggccatccttatgaaggcctctccggtttccagatata

SEQ ID NO: 340692 - DNA, 234 bp, Zea mays
gccacatgggtgttttaccatgtgactcgaagggtccatccctgggggagagacgcgcagacctactagttcatgccaagcaggcgttgagaccatgatcaccgttcccgatggagctaaaaccacttgacgtacagctgaagcatcgatctagagaagagcgcatcctatgcttccttcttttgtagatccgcctcgcggggccaacccggcggacgttgttgtcctcagccc

SEQ ID NO: 340693 - DNA, 409 bp, Zea mays
tcggtgacaaccatgctacaataccagacaaggctccagatgcacaactcacaggtgacaaccgtgccacaataccaaacaaggcacaggttgtagagcctgcacatgcagagcaggtgcctatgcagtcagaaagggctgcagaaaagacatggcagctgtgtcttaatcagctctcgcacattccttcttttgctccaggtgaacaactaacagacgaaaaggttgtagagcctgcacatgcagagcaagtgcatcttgctcagctctcgcccagtccatcaagggagagggcccgtctcagtcagtttgctccaggtgctcaactcacagatgaagaagcggctgcactagaggaagaagaccatcctcaaattgaccttctggatggtttgcggcgcggaggccc

SEQ ID NO: 340694 - DNA, 136 bp, Zea mays
ttattttattggaaaaaaaaaataaaaaaaggggggtattaaaaaaaaaaagggtaggggctaacaccccgttattttcttaccgatacctatatgcgtaccaacttttcctataatgagtcgtattaaagcttgg

SEQ ID NO: 340695 - DNA, 458 bp, Zea mays
  unsure (1)..(458): unsure at all n locations
agaagagctgngacatgcacgccacccttacctaagctcctatcctgtagagcccaccagcttactatggccaaggagacctccggtcagttcaggatcagcaccgggcgaggggccgacatttctataccgtggcggattacaagttggcggagatatacaggctactgacggctctgaaaagcaagagcgacgagatccatggccaaaaaagacgcgacgaaacaatgctgagtgctctctcagaagaaatcgaccaactcaatgccaagatcgacgagctatccagcgcgagaaacgacctgtccgaaaagaacgcgcagaaagacaaggaactggccggaatcagtgaaaaggacatgcagttgcaagacaagactgctgagatcacttcgctaaaataaagagcttgtatctctcaaggaccaagtgaaggcgcacctggacgaactgcacgg

SEQ ID NO: 340696 - DNA, 185 bp, Zea mays
acgctgacgcttcgggaatgacaggacgggactgatcttcgtgctggatttccatctaagccaccatattaggacacaccccatgcacgagcattgtattatcacgtattatatgacgtacatgttaaaggtcgacactatgtactggccgtggaggaacaatgaagacaaggtgaaggactaat

SEQ ID NO: 340697 - DNA, 107 bp, Zea mays
gaaacagaagaggaaaaggaatccatggcggcgacgctggcgaggagggcggggcgctccgtggcaacgaccctatgatgcgcgtccaggtacttagcatcatgggc

SEQ ID NO: 340698 - DNA, 151 bp, Zea mays
tcgacccacgcgattctgttcttttttacatatcaagaacattccagacagcgataaagaatgcgcgggtgtggatatacacctcaaggcactctatttacatactgatgtatgtttactctaccaaggaactagagaggtcatatctcat

SEQ ID NO: 340699 - DNA, 259 bp, Zea mays
acagttagagtagacctacgctttcatcctgtaccgccccgacatggagatgctattccgcgcaggctgctaggtggcccgtcgaccgatactatcgacatctagggttatgacaatgaggtacgatggccaagtagctcgtcgggcacgtaaggttgaagccgcaaggacgctatcctcggagggaccgatgaaatcatagtcgagaaaaagcacgataaagtgaacgttgacatgaaatcctaccggaacaacaacg

SEQ ID NO: 340700 - DNA, 252 bp, Zea mays
ccacacccactcgtcctagctcacgcgatcgcccacccatccgtatcccggtagactaggtgaggcgaggacaggttgcccaccagcttctggtattggtgcccttcaaattccattatcaccaaatcatggggcgcgctatcccaactcccagctactagcaccccaagatctaccgactgaagaaaccacccaccaacaaaggccatcccaagagcaagttcggatgctttctgaggccaccataggagg

SEQ ID NO: 340701 - DNA, 65 bp, Zea mays
tagtcgacccactctctctagttttttttcgcgccacgaattcacgacgctggcttgaaatccaa

SEQ ID NO: 340702 - DNA, 381 bp, Zea mays
aatcctttacctttaacccattcctacttttatgttattgctgaaaaaatatcacattgggcggttatttaaaaagaggggggccaccttaaactattgctaccttcaaggtttcaactcctcctcatgcttatgacgttcatgatcgtcttacaaaacttctccattccaatgttacccctgcaattgctcaatttacaccgatattttatcgaggttcttgcaaatttatctaactgcaaataacttgcaactcaaccatatgttgatttattttcttgttcatgcatcctcattttagcctgaattcaattacatcatcaactttgccactgtcacgcttttatcttctctacttttttgactttcattgcacctgta

SEQ ID NO: 340703 - DNA, 406 bp, Zea mays
gacgacgaggacgatcccaagaaccgccgcgcgagcaacagcgaggcgcgcttgccgcccgtgtctgctggctcgggtcccgtgtcctcgttcctcccgcctccgaagcactcgctcgggctcggcgccggctctggcgcgggagcgaggaggtcggcaatcgatacggctgcgccggagaagccaaatctcggcaccgctctgccttcaagctcggttgccaacacaggagccccggaaaggcctgacaccggcgcaaccgacgaggacgattcggaggatagtggcagtgagggtgacatgcctgcgccggagctggaggatgagcatgaaaaccagcaggcttttaatgccgcaaccggggagcagcagcaaagctatgatgctggagccgggagcactagtg

SEQ ID NO: 340704 - DNA, 252 bp, Zea mays
ttttcttacggcaacgcaacccttgcagcgggaggccctcacagcagccaggggtgggacgcaggagcccctctctgtggagggcacgatgcgcggccacaacggcgaggagaccgcgatcgcgaccccgatcgacagcacggccaatatcgagtacaacttccgccacaggttcttgactcatgtgcgacctagccaacccggtccactccaccctggtatccggcgccaccgccgactactgcgtcccct

SEQ ID NO: 340705 - DNA, 198 bp, Zea mays
aatcctcttgagtctacccacgcgtttttttaatattattatagtgacattcaaatgggatgggtacacataacaagggggggggcgcatacacttaatctattccctctatatgaattttacacacacattacatctacatcacactatactatatcttcagacacctattaccatataataaattactcacatcca

SEQ ID NO: 340706 - DNA, 293 bp, Zea mays
taatttttaaaaaaaaaaaaaaaaaaaaataaaaagaaaaaaaaaaaaaaaggggaagataaaaaaaaaaaaaaaaaataaaaaaataaaaaaaaaaaaaaaaaaaaaaaaaaaaaaaaaaaaaaaaaaaaaaaaaaaaaaaaaaaaaaaaaggtggggtttctccccaaaaaatatcggcgaggactatagggatggacactttcaattattggaagggctttaaagtttatggtaaaatatagcaataaaatattttttggaaaaatattatttcgtcaataaatcaaaaa

SEQ ID NO: 340707 - DNA, 373 bp, Zea mays
caaatccatccatcctcgtttgctgcgtcccgcagcaagtggggccgggtggccaaaatcaagatcgggatcaatgggttcggcaggatcggaaggctggtggccagggtggccctgcagagtgacgatgtcgagctcgtcgccgtgaacgaccccttcatcagcaccgactacatgacctacatgttcaagtacgacactgtgcacggacagtggaagcaccatgaagtcaaggtgaaggactccaaaacccttctctttggtgagaaggaggttgctgtgtttggctgcaggaaccctgaggagatcccgtggggttcggttggtgctgaatatgttgttgagtctactggtgttttcactgaccaggaga

SEQ ID NO: 340708 - DNA, 214 bp, Zea mays
taggtatactcttcggcgacatccccagggctatctcttgagggaccgaggggtggaactcacactcaccacggtgcaactagggattgctaggccagtacacaaatctattccataatgcaccgtaacacagaggctgccaacaactaatataagtgatacgcttaagtatatgctgccaatgcaacctatgatggagcttataatggagctg

SEQ ID NO: 340709 - DNA, 216 bp, Zea mays
tttaacaaaccgcggccactccaaggaaggtgatcttcatcgaagggacggggggaccgcaccaggggatctcacctggctgactgtttttttaaacaactcctttcgggagaagcagcccacgaacggtattgctaatgagcgtctcaccaaggcacccagcaaccattacaaataacacttctacaggtgctcaggctaaacaaacaagaaaac

SEQ ID NO: 340710 - DNA, 394 bp, Zea mays
tgaagaacccgatcgacaccatgagggtgtggctcgttgccctcgctctgctggctctcgctgcgagcgccacctccacgcatacattctgctgctgcggctgccagccaccgccgccggttcatctaccgccgccggtgcatctgccacctccggttcacctgccacctccggtgcatctcccaccgccggtccacctgccgccgccggtccacctgccaccgccggtccatgtgccgccgccggttcatctgccgccgccaccatgccactaccctactcaaccgccccggcctcagcctcatccccagccacacccatgcccgtgccaacagccgcatccaagcccgtgccagctgcagggaacctgcggcgttggcagcaccccgatcct

SEQ ID NO: 340711 - DNA, 256 bp, Zea mays
  unsure (1)..(256): unsure at all n locations
gagcccacccacgcgtcctacatatcctggcaagtttcgctcagggggtacttgaatttgagacaggaggtatctccatccaagtactatgtcgcggagcatctttattatgaaaaacgagtactacctgcttgggtaaacgtgctttacattttcagcttccacttatcaccattggaatgaatagtagngaacaattcttctgatgctcgggctaaaaaaacaagaaaactgaaaccaaccccccaagtggcag

SEQ ID NO: 340712 - DNA, 205 bp, Zea mays
  unsure (1)..(205): unsure at all n locations
cccactctttttttcactccctctcacaaanaacaacgaaaccctataacaaagggggggcggcacacactcccactccattatcaacgacaataacttcttttccgnaaacccaacaaccaccgccgcctagcgcctccgctctacggctccacttcccgccccctcacgccagtccgtccccgacttcgctttcgcgaccgca

SEQ ID NO: 340713 - DNA, 154 bp, Zea mays
cgcgcgtacataaacttaaatcctctatattctacccactctttttttcttaccatataaccaccaacagggagcggtatcaaaacaagatcgggagccacaaaaatcaacctctttaccacttcctattttcttttttaccaatcccacatct

SEQ ID NO: 340714 - DNA, 347 bp, Zea mays
tcgtgcctcctcagtgctccggcgcctagcgagctgctcctgcccccgccggggccgtgcacgcacagccggagcaggagcagcgctgcccgcctttaccgttgcccatggagaactctgccgccgccgccgccgcccggccgtgcctcacccgcgcagccgccaagcgctcagccgtcgtcacggctgtggccgtcgccgccaagcgcaagcgcgtcgcgctcagccagctgcccacgctccccaacgccgtgctcggcgcgcacgacgacgacgacgacaagcccgtcaagaagcagcgccttcttcccggcgtcaagcccaagcccaagcccaaggcagcgccc

SEQ ID NO: 340715 - DNA, 104 bp, Zea mays
tcgacccacgctttttttaactcccggactcgaggagatcggggcgattattaaagggcgcgcggggctactactcctggtctcgacactactcgttcattatt

SEQ ID NO: 340716 - DNA, 379 bp, Zea mays
tttttatgccaagccgtgggtgggattaccgggggcactcttactgggaggacgcgggatggcttctgctgatagtcagttggtagttgccgtcgaggggaccgcggcgctttggccctactggtccaccattgtggcggagtacgtctagaagatcgtgaggagcttttgtgcaagtgaactgcctggccagaagcttgtgtgtactccgtctgaacttgcattagttgtttttcatacccatggaccttacagtgcttttgatgtgcagcgaagtggatggacaaaaaatgtcgatgctttcctatcatggttatcttgaatatcgttcattgttggaggattctaataaacttttactttataaatttttttctta

SEQ ID NO: 340717 - DNA, 384 bp, Zea mays
tcgacccacgctttctttaaggacgacgcccagtccgcccacgcgggcatcttttctcccgggggcaggctgaatatctattccagtctaaatggagtcctaccgattgcagctgacaagtcacagaaggcttcatcaactaacgttagtactgactctagtggatctagagctggcctgtttagaacacccatatcatgtggtgtgcatagtgcaactttcgcccacggtctacccccgccggctttggctgttcgcaatttgatggaacaggcgcggtttgcccacctgtgctctgtcatgtctggcatgcaccaccgccgtactggatatccgtttggttcacttgtcgactttgctaactattcaatgtgccacccaatt

SEQ ID NO: 340718 - DNA, 78 bp, Zea mays
aacaagtcaatgtgaatgagagagagaggaaggtaattgctctgccaccccgcgagacgcctgagcatccacacccac

SEQ ID NO: 340719 - DNA, 226 bp, Zea mays
tcgacccacgcttccttattatactaccaaccatctcgtggtgcggctattctattcgggtgggggggcccaccctcagacctcgataccaataggtgcgtggccacccttcgtgacctacctctgatcatgatgtaaaggctgacgcgctccctgctgtacattccggttctcgatgcttactttatttctgcctggacctccatcctcacctctgttcctacca

SEQ ID NO: 340720 - DNA, 352 bp, Zea mays
aatataaaataaaaaaatataaaaaaaaataaaaaaaaaaatataaaaataaaaatataataataaaaaaaaaaaaaaaaaaaaaaaaaaaaaaaaaaaaagaaaaaaaaaaaaaaaataaaaaaaaaataaaataaaaaaaataaaaaaaaaaaaaaaaaaataaaaaaaaaataataaaaaaaaaaaaaaaaaaaaaataaaaaataaaaataaaaaaaaaaaataaaaaaaaataaaaataaaaaaaaaaaaaaaaataataataaaaaaaaatgagaaataataaataaataaaaaataagaaataataaaataaaaataaaaaaaaaaaataaatataaatataaat

SEQ ID NO: 340721 - DNA, 441 bp, Zea mays
  unsure (1)..(441): unsure at all n locations
gctcaaaccacgcttcttcggncctacaacgacgtcgctgtccgcctcgccctgctgccatggacccgtctccacgacgtcttccacgtgggtctcctcaaaaagttctagggactaccaccggaggttcctctgtccctgctgctcatccaccatggggcggtgatcccggagctggaatgagctgtcaagacacgcatcgctcgctgggtgcgccaggtcttggtacagtggaagggccaaactgtggcgtcagcaacttgggaggacatcgagccgttcgtcaccaagtatcctactttccagcttgcggacgagctgcctctcgaggaggggagagatgtcatgtggggactcaagtatgccaggtgccgtatggctagggatgtgcggcgggcggctgaacgtgcggctcatgcagaagctgagcgcagcaacacg

SEQ ID NO: 340722 - DNA, 404 bp, Zea mays
  unsure (1)..(404): unsure at all n locations
attcccttaaaaatcaggngaggggtagactgtatctggagtatgcgcggatatgttatattactgatgcacttgacatatgtttcttatctgatgagtcaaaacaagttgctacgataatcaagaacatgctgcagcttgctttggagttacgatcatgctttcatagtgtgacacttgtgatttatcagtaaatcaactcagtaatttgcaataccttataaacttctctcaggtggatgtaattagaacaaaattcgaggatcacatcaaagatctctatattttgcattcgaaatcttcaaaatataccgtgcttgggcttttccggtttctggcggttttttgaactacaattgagatcattctacgaaagtcagcaaagatatggacaacttctattt

SEQ ID NO: 340723 - DNA, 344 bp, Zea mays
aaaaaaataaaataaaggaaaggtttttttaaaaaaagggggtcttaaaataatattaaaaaaaaaaaaaatataataaaaaataaataattattaaaaataaaaaaaataaataaaataaattttatataaataaaaataaaaaaattaaaaaataaatataaaaaaaaatataaaataatatattataaaaaaaaatttataaaaaaataaatataatataaaaataaaatataaatattaattaattataattataataaaaaataataaataaataaaaattataataaatataaattataaatataataataaatataataaaattaaaaaaattataa

SEQ ID NO: 340724 - DNA, 336 bp, Zea mays
ttcttcttctccccctccggttcgggttcgggttcgtgaggttctccggggggcggtttcatggataagcggatcgagatggcggcgtcggatgttgagtaccgctgcttcgtcggcggcctcgcctgggccactgacgaccactccctccacaacgccttcagcacctacggcgaggtcctcgagtccaagatcatcctcgatcgggagacgcagaggtcccgcggcttctgcttcgtcaccttctccacggaggaggcgatgcggaacgccatcgagggcatgaacggcaaggagctggacggccgcaacatcaccgtcaacgaggcccaatcc

SEQ ID NO: 340725 - DNA, 433 bp, Zea mays
ttcattacaatggtgaagatcctagatcacataaggatcctttggttctttctacgtttcatggttcttgtggcatcctttgttggtcatgcacagataataagaggtgaaaccaaagaggacaacgacaccaagagcatgacgatgacaacaatgagaccaggaagctatgtaactagcatggatgaaaaatctagcttgtgctttgaggatataaaaactttatggtacatctgcagaacaacttatcacctttataggacattgaaggattgcctgtcgcattgcaacagtatgtgatgcaccatgttggaaaaaaagaactaataagaggccatgctttctcaagattgtagattgagatggtgaagatgttctacccaatcatccatgcatgtaccaagggataaaaaaactataagaataattatta

SEQ ID NO: 340726 - DNA, 368 bp, Zea mays
tcgacccactcttctgtctcacgcgtccgaaaccaccccctgagcggcgctcttttttgtcagggacagcagagaccacccccttccggcacactgtctctaccacctgactccatcaccgtgcctgtctgtgttctaggtacaataagagcatagagatccagtatctatcataagctggtagaataggatgagcaccacatctgcttcttctttgaaccccaacgcgccgctctttattccggcggcttatcctcaggtgagaggactactaccccgatttgttttagctcgtcaacaccaccgccttttctcttgacctctttttcatctgctccagctccacaaggccttctgctaatactttt

SEQ ID NO: 340727 - DNA, 441 bp, Zea mays
ttcacgcgttcgcacacacacaaccagatgtgcgcgcatattcacccgtcggcgacgtgcgcttcaagatgcagatctttgtgaaaaccctgaccggcaagactatcaccctcgaggtggagtcgtctgacaccattgacaacgttaaggccaagatccaggacaaggagggcatccccccagaccagcagcggctcatcttcgctggcaaacagcttgaggacgggcgcacgcttgctgactacaacatccagaaggagagcaccctccaccttgtgctccgcctcaggggaggcatgcagatctttgtgaaaaccctgaccggcaagactatcaccctcgaggtggagtcctctgacaccattgacaacgtcaaggccaagatccaggacaaggagggcatccctccagaccagcagcggctcatctttgctgggaagc

SEQ ID NO: 340728 - DNA, 57 bp, Zea mays
cctctagagtcgacccacacgttttttacacggactccctcttcctctcaatggtga

SEQ ID NO: 340729 - DNA, 207 bp, Zea mays
  unsure (1)..(207): unsure at all n locations
tgatggacgaggtcgaggacatcttcgtgcgncacgtgggcacgctacagccggcgcaaggccataaattacctgaggcccgcgcagcgcagggactctcacgccggcaccttcttcacggggctcatggccggctgcttcgccgcgctgttcgtgggctactgcgcatgggcgcacatggcggggatgtacaactactactctacc

SEQ ID NO: 340730 - DNA, 163 bp, Zea mays
ttatactttctatatggcatagctgttctgtggaaatgtatcctacaattccacacatacaccgtaagcataaatgtaacctgggtcctaatgaggacaactaataattgcgtggctactgccgtttagtcttaacctgcttccactgataatgaatggcaac

SEQ ID NO: 340731 - DNA, 51 bp, Zea mays
tcgacccacgcttcttaaatcttttcatccctcctgtaattctatttccat

SEQ ID NO: 340732 - DNA, 248 bp, Zea mays
acgacccacgcgtcttctaatgtctgccagacataaccacacggggatcacgggaattttttcagggttgagcgggataaaactacttatgtaaagcatgatcttggcattaaatgcctgtcaatgaaagttactgtccatcgcttcaaggtaaacaaaactttgtctgttgataaatgttgatgataattcactccattccgttctatatttacaaatcgaacagaatgtccaagatgaaaaacata

SEQ ID NO: 340733 - DNA, 199 bp, Zea mays
tcgacccactcgttcttaaaaatttactaaccaaaaaaaaacatagcctaactggaaaaatataccggatttacggatattaaaaaaatattaaaaaaattactttatcatgatcataaaatatatactgtttaaaatttgttatttctctaacaatatcacacaatattacttcccataatcattcattaaaattcct

SEQ ID NO: 340734 - DNA, 389 bp, Zea mays
acgaagctggatccttagagtctacctttcgtttttcactacagcgaactcccggacagggggctttggaggaggtggggggtgcccatagccttcaagctggtcaccaagcccgcggcggcgtctcccgctgcttctcactgtatagatctctccctgtgtccttatgttactagccgcgttgccttcttaccatctcccatgaacaattggctcctcacggccaacaactccgcatcgcccatggctaaagaagagaggtttgatcgaatttaaaaattatcatttaatatcatcagacaagtttcgattttactagaatacaacattatatttgtacttttggagagagcacaattttgttacaacgctgacacatatgatatcaa

SEQ ID NO: 340735 - DNA, 397 bp, Zea mays
taatttttgaaaatcacgcaaagtcatgtgctgttcaatgttcaaggctaagcagcattcatgtggtcaccctcacccgtctagtactgttcatggagcctaaccgtaagcgacaggttattcatcataactaacaggccatatgggaacaggatgggaagcggttccttgtatgtggtctagcgggcctgtttccattacacttgtctagctggctgctcagatttgtagcttaccttttttctgttcagaaacagatgcctggaagcctttactgtgttcgtgttgccaatttcagatattcgctgacatggaggaagtaggtgtgcgtccggacgaggatacagcgagacggatcggaaaggcattcgtggctttcggcccaagagaaaaagag

SEQ ID NO: 340736 - DNA, 247 bp, Zea mays
tcacccacgcgtttcttcacttttacgcccacacttaccctgggatcggggacttctgacggggctccgagaccatcatacatgccatccaaactcgaaccgtcacagactgtagaggtcttccgtcctactgaccagctgacaggtcagaacatcctcttcaatgtcccccaagatccctccgccttgtcttttctcaaaaatgatcttaaagaacattatcaagtacacatgcatggactgaaca

SEQ ID NO: 340737 - DNA, 270 bp, Zea mays
  unsure (1)..(270): unsure at all n locations
tgaagcataccaccgcctccccgatctcgtgagaggaagcccaatcccggggccgtcgccntattccaatggcgcccaaggccgagaagaagcccgccgccaagaagcctgcggaggaggagccggcggcggagaaggccacggcggggaagaagcccaaggccgagaagcggcttcccgcgggcaagtccgcaggcaaggagggtggcgagaagaaggggaagatgaatgtatagaatcttgtgtgagactttcattatctacattttt

SEQ ID NO: 340738 - DNA, 256 bp, Zea mays
tctacccacgcgtcctttagattttctagtcccttatctaaatccgcaatggggaacttttaggtgttgcgccttacaaactaaattttctatctaaatgtttagtccaatgctgtttgttcaatcaatcttaccaaaaatgattttattatattctctatttctatttcttaaagactactatctttcatattttactattttcattcttccactgttattcttttattttttaaaatttttataatgtatttct

SEQ ID NO: 340739 - DNA, 449 bp, Zea mays
aaaatataataatataaataataaaaaaataaaaaaataaaatttaaataaaaatataattaaaatgatagttaaataaaattgataaaaattaaaaaataataaaaaaaaaataaaatataaataataaaataataattaaaaaaaaaaaaaaatataaataaaaatattaaaaaaaataaaaaaatataaatataaaaaaaataaaaaatttaaaaaattaataaaatataaaatattttaaaaaataaaaaatatatatataaaaggatagaataataaaaaaatatataattaaataaataataaataaataaaaattattaataaattaaataattataataaattataaaaaataaatattaaatataatataataaataataaaaaaaaatagattaataataataatatataaataaatataataaaatatataataatat

SEQ ID NO: 340740 - DNA, 53 bp, Zea mays
  unsure (1)..(53): unsure at all n locations
ccgggcggccgcccttttttttttttttanaaataaaataaaaaaaatttttt

SEQ ID NO: 340741 - DNA, 348 bp, Zea mays
  unsure (1)..(348): unsure at all n locations
cggccgcccttttttttttttttnnnanaaaaaaaaaaaaaacaaaaaatattttttttttataaaaaaaaaaaaaaaaaaaaaaaaggtgggaaaaaaaaaaaaaaaaagagggggggtnaaaaaaataaataaaaaatantaaatataaataataaaaaaaatataataaaaataaataaataaaaatataattaataataaaaaaaaaaaaaaaaaaaaataaaaaaatataattaataaaataataaaaaataaaatataaaaaaaaaattaaaaataaaattattaaaaaaaatataaaaaaaaaaaataaaaaaaaaaataaaataaaataaaaataaatat

SEQ ID NO: 340742 - DNA, 344 bp, Zea mays
ccgtccggattcccgggcggccgcccttttttttttttttttttttttttttttttcggtttttttttttattcgaaatttttaattatttttgggaatgggacattgggggggggcggaatttttgggggaaacagaaaataagctgctctatttttcgccgtctgtctccgcagcactatgagggctccgaagtatcatgaattcaggaggaggggggacaactggccacgcaaggcaccaagctttttatagcgcgtattagggtttctgcaaacgtactcagtaagaccgcgatctagatagcatggcccgccgcattacgggtaacaagaatgtggccc

SEQ ID NO: 340743 - DNA, 406 bp, Zea mays
cggccgcccttttttttttttttttttttttttttttttttttttttttttttttttttttttttttttttttttttttttttttttttttttttttggggggcaacttaaaaaatttttttaaaaaaaaaaatgttttttaccaaaaagggttttttattttttttacacaaaaaaagtttgtaaatgattaaaattttgaccggataaacaactttttaggattatttaaacctgcctttcttttaacaagaatatcctactgttaataaaaagtttttatatgcgcttaaaaactttttagcaatattcaaatttatattttttgtaaacaaacttttaatgaattttttaaaaatttctagaaaaaaaaaatttgtttattttggatcaaaaattttttttt

SEQ ID NO: 340744 - DNA, 328 bp, Zea mays
gtccggattcccgagcggccgcccttttttttttttttttttttttggaaacaaaaaaacagtttttctgtgtggaaaacacataaacacattgggggctagacattgacggctgggggcgtgttatcggcccatataacagccaggaacttgtggctaaataacggaattgatttcaaacagacacatactctatacctgacggggttattaaattgtgggtaagtgaaacgaccacgctcctttaggcctgctcattctgggaggccggctccagaataagtcgctgcacctgctgcacttgcttatacgtcttgtgccaattttt

SEQ ID NO: 340745 - DNA, 152 bp, Zea mays
gcaaacagaaaacaatttttttacatttatgacaggcaaacatttacaaagagaatttttttacacgggacgatttatatataaaagtcaatatcattcttattcaaatcaaatccttgttcatttctcatacattacttctccattaaata

SEQ ID NO: 340746 - DNA, 84 bp, Zea mays
  unsure (1)..(84): unsure at all n locations
aaaaaaaanaaaanaaaaaaaaaaaaanttttttaaaaaaaaaaaaaaaaaaaaaaggggggaaaaaaaaaaaaaggggggggg

SEQ ID NO: 340747 - DNA, 462 bp, Zea mays
  unsure (1)..(462): unsure at all n locations
caacaactcaacacgcaaacttcttttattttcttttcaacacccaacaaaacggcagtggtctttttaaaaaacggggggggtataattcacattttttgcgcaaaaaacaatatatttgacacctatattttttataaaagtcatatttttttctttgagaaatataaaaaaaatcctccagtaaaatttccctgctttatttatttaacaactctttctttanaaaattaacaactgggatactctttttttggccaagaaatttatttataantttttaaacactttccaattcatgaccattgtttttaagcaaaaaataacttattactacttttgtttgccattattaaaaaaaatactttttacttattgggggactaaaaagaaaaaccctcccttcccaccctcccccgattatttaaatccccacattctattgcaattacattttttgtt

SEQ ID NO: 340748 - DNA, 130 bp, Zea mays
cttccgaatttccgggcggccaccttttttaaaataaaaaattttaaatacaattttttttttttatcaacaaacaaaacaaaattttgttaaatataaaaaaaatagtcggtgctattataaaattaaa

SEQ ID NO: 340749 - DNA, 397 bp, Zea mays
cttttttttttttttttttttttttattatttatttttttttttttatattttttttttaatattttttttaatattatataaaaaattgggggcctttatactaatatcataataaactatattatacctttaaatatacacacaaaaaaaaacaattataaatttaaaaatcaaaaaataattttttattaaatatatacaacattaaaaaaaaacttttttaaaaatttttaataataaaaaataccaacttattttatataaaaaaaaaaaaattttttattttataaaaacaaaacttataataatcccatctaaaataataatttacccttttaatattttaataaaaaaaattcatttacttaaaataaaaatttatataatattttctt

SEQ ID NO: 340750 - DNA, 116 bp, Zea mays
  unsure (1)..(116): unsure at all n locations
gggcggccgccctttttttttnaaaaaaaaaaaaaaaaaaaaaaaaaaaaaaatttatttttnnaaaaaaaaaaaaaaaaaaaggggggggggtaaaaaaaaaaaagggggggggg

SEQ ID NO: 340751 - DNA, 447 bp, Zea mays
  unsure (1)..(447): unsure at all n locations
anantnnatnaannagagaaatgataaaaataaaggagaagggtgtataattaaataaaaataatttttattaataaattagttaatttaaaattaaattaaattaaaaattgaatttatattatataattataaaaaaatttatattataataaaattttaatttaaaaattttgtaaaaagttttaatattattgtattaatatattaattaaaattttaaatttttaaatataaataaatatattaatatattatataaaatatttttaataattataaatatagttttatataattaaatataagtatttattaaaaatttataatataaatattattataatatataatataaaaagttttaaaatttatttataaaaattaatatattaatatatttaaataaatttaaaataattaataaatattttaaattatatattt

SEQ ID NO: 340752 - DNA, 103 bp, Zea mays
  unsure (1)..(103): unsure at all n locations
tcccgggcggcgcctttttttnnnanaaaaaaagacnanntttagtttaaaaaaaaaaaaataagggggggaaaaaaaaaaggggggggaaaaaaaaaagaaa

SEQ ID NO: 340753 - DNA, 403 bp, Zea mays
aattcacgggcggccgcccttttttttttttttttttttttttttttttttttttttttttttttttttttttttttttttttatttgggggttaaatattttttttgggggggaaactttataaaatggaaaaaaatttaaaaaaaggaaaaattatttaaaaaattacaaacaataatattttggcgattacaaaaaaaattcaaaaactttaaatttagggaaaaatattgaaaatttgggaaaaaggatacaaatttgaaaaatcaaagtttaattataggggaataaaaattaatatcatttgtattaggaaaaaaaaaattaaattaagtgatacgatagttaaaactaatgtaatggaaaaaaaagataatgtaatataaaaaatggagtgtaaaa

SEQ ID NO: 340754 - DNA, 228 bp, Zea mays
cctttttttttttttttttttaatttttatatttaatttttttttttttaattttattttatttaattatcttaaaataaaaaaaatttcgggcttcttattaataaaataaaaaaaataatttatatatttttaaaaaaaaaataaacaataaaaaataaaaatccaaaaaaaaaaaaaaaaaaaaaaaatccacaaataaataacaaaaaaacaaaaatataatat

SEQ ID NO: 340755 - DNA, 219 bp, Zea mays
tcccgggccgccgcccttttttttttttttttttttaaaaaacaaacaacaacttttttttttataaaaaaaaaaaaaaaatatctcttctttattaaaaaaaaatctttggctcactaaacatattatatacaatcctcttatttttatatactatcatttacataactttatttactccttttttccttcacaaaactctatacattatcttaatta

SEQ ID NO: 340756 - DNA, 202 bp, Zea mays
ataaaaaataattttcgtccattatctaacaaaccaaaatctttattaaattcatactataattataactcaacaaatttaatttttatttttttttctaaataccctttcatataaatatctaatttcttacattctatttcttatatttaatatcttatttaattttattctatcttaaaatatttttattatataaaat

SEQ ID NO: 340757 - DNA, 322 bp, Zea mays
cggccgccctttttttttttttttttttttttaaatttaaacattttttttttcattaatttaaaatatattttattacaccttattcatttggatcgggcgcaataattcatcattccaaattgcttcatcaaattcatactaaaacaatacccatacaaactgaatagaaactcccctcctcacaacccctgacgaggaatccacatattctgcatccctggacgcctcttacaggaacttcctgtattaccgacctgcatcctcgtccttcatatggaattcacgtacaatccccttgtacaccaatatggcgacaccc

SEQ ID NO: 340758 - DNA, 124 bp, Zea mays
  unsure (1)..(124): unsure at all n locations
anaaaaaatataaatatatttgtttggataatataaaaaaaaacgccgctcnttattatacaaatctctataattattacaaattttttttccccacctatttatctcttccaaattttttttt

SEQ ID NO: 340759 - DNA, 321 bp, Zea mays
tcccgggctgccgcccttttttttttttttttttttttttttaaattattttttttttttaaaataacccaattcaattatgcagttccaaaaggtacacaagggtgattcaaataaatgactactctttgcacatacccaagagatgaatttatacaaactatccaatggaactttaatactaaaattagatttttaaaattgcaaatactttaaaaaatcaacagctatcattacttcaagtattcatttttttttaaagttaaaacactttttatattaataatttacatttttaatttttttattccatacaattta

SEQ ID NO: 340760 - DNA, 289 bp, Zea mays
tcccgggccgccgcccttttttttttttttttttttaaaaaaaacacacaatttttttttatgacccaatcttaaaaatctgcagggtatacacaatacaagctgggggcacattcactaataatatataaacacaatgcctaaattcacatttaattaccttaacaaaccttataacaattttcaaacacccaatctaaccatctttaaaatcaaacataattgtaatgatattttatcttttatattattctcatcttattattcaccatttttattattaactttt

SEQ ID NO: 340761 - DNA, 101 bp, Zea mays
ggcgggcggcctttttttataaaaaaaaaaagaagaaaataaaaaaaattttttaaaaaggaaaaaaaaaaaagggggggaaaaaaaaaaaggggggggat

SEQ ID NO: 340762 - DNA, 370 bp, Zea mays
  unsure (1)..(370): unsure at all n locations
aaactaaaacaccgataagtattnnctcanttataaaacagcgttaaataacaattgcgctataatacacaaaaaacttgtggcatttatattttatattacattaccctacgacgaatttatgttatatctactaataattataattatatttatttaaaacatatttaatttatttaataatcttattcataaattatattttatttattttttattatttaaattattttaattttcaatttatattatattataattaatttatattatatacatttttataaaattaacttatattacactataatacctttcattatattacctctttataattatatatattattttctatcatttaaatata

SEQ ID NO: 340763 - DNA, 325 bp, Zea mays
gcggccgccctacttttctacaccgacggaagtcgagaatgaagtttttttactccacaccgcagagcaacaaccgcggcgaactttcaacgagcagggcgggactcaataatacaaaaccacaccataacaaaatcgaatttatcaactacaacaatcattaatccaccctctatagactaaaaacaattaatacaaaaatttaattaaattttagtgccgaacaaaacctaacaccaccataattattaggttttctactagtcaaatacctcaaattttatacagttatacaaaaaaataaatgactgtttacttcttcttg

SEQ ID NO: 340764 - DNA, 423 bp, Zea mays
gcagtaccgtccggattcccgggcggccgccctttttttttttttttttttttttttttttttttttttttttttttttttttttttttttttttttggtgttttttttttttttttgggtggtttttttttttaaaaaacaaaaaaatttttaaaaccaaaagtgttaaaagggacagattttaattaaaaatgcaaatactagagcatttaaaaaagggtttttggaaggaaacacccaaatttttcccgggaaaaaaaaaaaggtttttaaaaaaaaaaacctggttttaatggaaaaaaaattaatgcaagtaaatttgttttttttttttttttgacagaaataatttgcaccttttgggggaaccttatataattttttttacaggggggcaaattctttgggtgttttgaaaaata

SEQ ID NO: 340765 - DNA, 401 bp, Zea mays
cggccgccctttttttttttttttttttttttacaatttactattttattttatttgattttacaaatactaaaatttgtttttctatttttgcctcacgggcaacaattaacaattttgtaacattttctcaccaaaaaaggcctgattggccgaattctctaacctgaacccataccttctacgccgaaagcaaaaggaagcgaactatgatggacccgaacgctatgaatagatcataaactggacccagcccacaaagaagcccccctgcctctggccagaagcttcaccaacttctgaaacctgagacacaaacaacccttgcgagtctaattgatgcaccatatcctacaacatcatcgcacattttcttttattcctcaagtccggtgctaagg

SEQ ID NO: 340766 - DNA, 296 bp, Zea mays
ccgccgccctttttttttttttttttttttaaaaaaaaaaaaaaaattttttttccaaaacatcagttcacaaaatccaggcgcattttaaacaacgggggcggatttaaaaatactatgttctcccggaaatgcacaaacaacacgaacatgcaaaacttgtaacaacttgttatgattattcaagataaaacatattgattgattctcttttctttcaacataaactgttcattcttaaaacttaactaccttttcctctctatttttcactcctactcatttatataacttct

SEQ ID NO: 340767 - DNA, 439 bp, Zea mays
cggccgccctttttttttttttttttttagaatacatttaaggccttggcatggcttcagaagttcagattaacaaatgatggagcaagagcaactatttctggtgtttcaacacaaagaatggggatatggggatatctatctcctacacgttacacactgggctccaaaatgacacctctaggtcgctgttgccactaccgagaataaataatggattatgggtgccctgctaaggtagctacatgtaaaatctggggcgattgaccccgtaatgcttcatcttggagatctgactgaaatacaccttccgcacaaggcgagccttgataaaactcgtgatctttgcgtcctgatctttaaaggaaaccggtttcgtgtaaaggtgcttgaagcttgctaacaaaccaaactggatctaggccttcaattcaaatta

SEQ ID NO: 340768 - DNA, 74 bp, Zea mays
gccgcccttttttttttttcactcttataaaacaaaaaagaccctttttttttttcacaatcccaaaataacat

SEQ ID NO: 340769 - DNA, 470 bp, Zea mays
  unsure (1)..(470): unsure at all n locations
ataaaaaaataaaaattaatttgtggataaaaaaaaaataaaggtgggaaaataaaaaaaaaaaaaataaaatacattataatatttttaatatttattatataaattaaattataattattattttataaaaatatatataatttttaataaaaataattataaataaaataattaatttatatttaatatataataaattatttttaatataattatataataaaatatttataaaataattttttatatattaattaaatattaatataaatataatntaaaatatatatataataattattattattatatatataaatatttatataatttatctataataatttaatataaaataatatttatatattaaaataaataatattaattaaatatctttaactataattataaatacttattactttataaacttatattataatataaatataataatattaata

SEQ ID NO: 340770 - DNA, 150 bp, Zea mays
aaaacacaattaccttatttttttttttttttcttttcttttcttatatttttttttttttttacaaattggggggccttcttaatctttatttccaccacaaaaaaaccatacataaaatcgccacccccaaaaaaaaaatcaaacaaa

SEQ ID NO: 340771 - DNA, 442 bp, Zea mays
  unsure (1)..(442): unsure at all n locations
cgtccgnnatcccgggccgccgcccttttttttttttttttttttttttttttttttttttttttttttttttaaattttttttttttaaaaaggaaaaccaaatgcatttattgggcatccatattgaaatcgaataaaaataccgatatccattttaaccgtttcagcaaataccaataattcggatcttcaaacattcatttccagtcctacttataagtgtctgatccaaacttcccaacaacattgggctcaaattatattttcccttatatttaaaatttttcaccattgcaactgcaaaattatgttttccacaaccatacccaccaccctgtgacaaacgatttcaacaatattaaccatcaaaagccatttttatcactcccgggtttacttcaaattttttttttacttttcacctcttttaaaaaccccca

SEQ ID NO: 340772 - DNA, 361 bp, Zea mays
gcggccgccctttttttttttttttttttttttttttttttttctcactttggttactgacagaaatgtgaatgcagtcacagaatttggtttattaaagatgggatcatccggctgtttcaaaagctattcgagctcaaactcatcaacaagccttcataaactaccgaatccaaaaccgatagaactctccaaaaggctacaaaaagaataacccgtatgataccagggttgctgttcctaaactcgttaatcgccaccactgaaaaaagtggggattatgatccataccatgaaatggtccctaatgactcattggagtctggccggtagaagatgaagtcattatgttcagtgtttc

SEQ ID NO: 340773 - DNA, 93 bp, Zea mays
cccggaacgaccgcccttttttttttttttttttttcatatttactactttaattttttttattataaaaataataaaaaaaatttctgttat

SEQ ID NO: 340774 - DNA, 381 bp, Zea mays
  unsure (1)..(381): unsure at all n locations
ngcggccgccctttttttttttttttttttttttttatatattattttttttttttttttttttttttttttttttgttttttttttttttatttttggtggggtttttttttcgaggagcggggtttttaaaaaattggatacccaaaaggaaagggtttttttcaaagttttaattttttttctcggaaaaattacatggggtttttaaaactccttttttttaggagggggggggtttttcaaatttctaacaaaaaaaaaatgtttttttttttcccccaaaatttttttaacttaaattcaaagggataccgggtttttttttttttttttactcttaaaaaacacaccttcctctttttttttttacccagaaaa

SEQ ID NO: 340775 - DNA, 133 bp, Zea mays
  unsure (1)..(133): unsure at all n locations
cggtccggattccggggcggccgcccttttttttttatnnaaaaaaaaaaaattgaggaacattttttgatggacactaaaaaagacaacaagaaggggcggggaaaaaaaaaaaaaaagggggggggacaaa

SEQ ID NO: 340776 - DNA, 433 bp, Zea mays
ccgccctttttttttttttttttttttttttttttttttttttttttttttttttttttttttttttttttttttttttttttttttttttttttgggggtttttttttttttttttttttttttttttttttttttttttttttggggaaaaaaaaaaaacccggagggggaaaaaaatggggggggattttaaaaaaaccaaccgggaagattgggggccccccccaataaaacccctttacccccggttttttacccaaaaaaaaaaaaaatttttttaaccccccaaaaaaatatcccgggggttaatttgggcgaatctcttttttggggggtaggccccaaaaaaccaaaccggttttttttttttttaccccccatggttttccccctgtgtttataaaaaaataagattcttgttcgggggggtt

SEQ ID NO: 340777 - DNA, 277 bp, Zea mays
ctaaaaaaaaaaaaaaattttttttttttttaaaattttaaataatattttttttttatatatataaaaaatattgggaaaattttttattattttttttttaaataaattttatatttacacaaatccataacacatttttaaaaaaaaaaaaaaaaaaaaacccttttataaaaaaaaagggcgccacaaaaaaaaaaacccccccccgatcaccaaaaaaacaaaaaaaaaacccaccccacaaaaacactaaaaatcacaaaaaaaaaaaaca

SEQ ID NO: 340778 - DNA, 405 bp, Zea mays
tgcggccgccctttttttttttttttttttttaaacagatttttttgcccttaaagcaacgattacaaaccagaccgcgcgtgaatgaaatgcaaagacaggggggggggtcaaagggaaaaaactgctaggcaatttacaacctacccgacgaagcggggtggatttgtcttacataaatggacttgtgcaccctggtttattcaaaaataaacacgtgacaacgtcattcgagccggctttttattactggagcatgaggaagaaactgcgccttttgtcccacgtgggcatttgcccaaactataatgcatggcatggccaccggggagcgaatgatgggcaccccatcaagcatatccaccgtactggcaattgtgaggtcgaggtgggtttttataacca

SEQ ID NO: 340779 - DNA, 280 bp, Zea mays
acgccgccctttttttttttttttttttttttttttaatattttttttttttttttttttttatttaaaaacaaaatgttatgttcttattagggtaggggaaaaaaacaccataattatattttcttttaatttcactaggaaaaaattgctccctaaaaaagtaaaaaaacttattttttccgtcgcaaattaaattaggttaatccttaattcccattttctgattaataaaaaaattttaatgattgattttttttttataaaaaaaaatttaaaa

SEQ ID NO: 340780 - DNA, 404 bp, Zea mays
caggcgtcttcgtactcgcctatctccgcgacccaaagcgttcccccttctcccattcttctctcatttctcaccaccgccgccgctaccccctttcgacaacaccatgagggagtgcatctcgatccacatcggccaggccggtatccaggtcggaaacgcgtgctgggagctgtactgcctcgagcatggcattcaggctgatggtcagatgcccggtgacaagaccattgggggaggtgatgatgctttcaacaccttcttcagtgagactggcgctgggaagcacgtcccccgtgctgtttttgttgaccttgagcccactgtcatcgatgaggtgaggactggcacctatcgccagctcttccatcctgagcagctcatcagtggcaaggaggatgcag

SEQ ID NO: 340781 - DNA, 387 bp, Zea mays
  unsure (1)..(387): unsure at all n locations
gcgacccacgccgnncgtacctttttgtcttttgttgtcgacttccgcggggnggagagtagatccggagagggtcggggagagtaccagtgatccttattgtcgacggaggaggctgttgtggctgaggacccggagaccgaggngccagtggaggtntaggaggtttatgttggntgaggtgntcaatgtgaagaaggtgcccaaggtgaagaaggcgcctaaggagaagaagcttttcgcggtgaaaaaccggcggcgcacccttcctacgctgagatgattgtagaggcgatcgctgcccttcaggagaggaagggttctagctctgtggccttaaactagttctttcaggggaagcatggtggtaagctccctaccaacttt

SEQ ID NO: 340782 - DNA, 402 bp, Zea mays
ccactctccttcatgtagcaggcacatgagcagaaccagctgcgttttttcacggctgcggcgtctacactgtggcatacaagctgctactcgtggcttccttgcacgacagagagtgcgagagatgcgccggcagatgctcgaggcagccttggtgacggttgacctcggcacacgggggcgcgacctcatcctgtcagacggccatcaacagtggcaccaggccgctatcttcaagtgcgagtatggtatgtgtcccgcgggcgacgaacttcaactctacgacagcggcggtagggaaggcactcacctcatcatcaacaagggcgcactatttagtgccaccacattccgctaccggccgtcacgagggcgcctccgctggttattgttgcgacctat

SEQ ID NO: 340783 - DNA, 375 bp, Zea mays
ctggcttctcctccccctcttaccaagtcctgttcgggttagggttacttaggggtttgtggaggggcgatggcggcggctgatgtggagtaccgttgcttcgtcggcgggcttgcctgggccaccagcaacgagtcgctggagaatgccttcgcctcctacggcgagatcctcgactccaaggtcatcaccgaccgggagacggggaggtctcgcggcttcggcttcgttaccttctcctccgagaactccatgctcgacgctatcgagaacatgaacggcaaggagctcgacggccgtaacatcaccgttaaccaggcccagtcccgttgcggttgcggtggctgcggtggctactgcggttgttgtggtggt

SEQ ID NO: 340784 - DNA, 165 bp, Zea mays
cggtcagagacccgcctccgtctctgaatcggccgctgccgctaccgccgccggcggcgacgaccatgccccgcgccgctacgggtgcgatcactgcggcgttcctgcgcgcgcaggccccgcacatggcgccgctggcatcgcgcatcgcgcgcgcgttccccg

SEQ ID NO: 340785 - DNA, 233 bp, Zea mays
ttgtgttttctatggagtttggacaacatccggtagattcccctaatggcttagctggtcgcctattaagctctgctgcaggtcccagttttgcagatctcacttcctcaatcaacaatttacaactggagttgtgttcaattctttaggccagtcttaactgtctctgatgattacgaagaatccaatgcttgaagagaagagtgtgaacaaatcgtactagattacatcac

SEQ ID NO: 340786 - DNA, 395 bp, Zea mays
ttttgatggaacctctagtaattcatctcgttatggagatttcttcgaagactattctagcatgaatggaggtcgccaagatggcaagcttcatggtggataccagagacgtacacagagtagaaactctcctcttgcagcttctccaggctcagcaaagtcattgtcgcaaggtgttgctagggacagcttctattcaacgtttcacactaccccagagaggaggaaattctccaaagaggaatacgaagcattcacgagagaggagacaaagaaagctatgaaccaactgttgtcctcaccagatttcaacaggtgggcgttggctaacgcggacagaatatctgtggctccacccagaggaaactacagcagcagcaacagcaaccagcagc

SEQ ID NO: 340787 - DNA, 163 bp, Zea mays
gagaaccctgaggacatgggtcggcctaatattgtggtctacggttactgcaaaaagtgactatgagggggcaaagtgattttgtctacaggatcccagtctgtgggacagagatcagttactacattgcttaagtctgcaccatgcttgtcgtgtagataat

SEQ ID NO: 340788 - DNA, 90 bp, Zea mays
aaaaaaagggcgccccaaaaaaaaaaaaaaataaaccaaaaaaaaacgcccccccacccaaaaatccaacacatacctcaaaccaacaac

SEQ ID NO: 340789 - DNA, 112 bp, Zea mays
  unsure (1)..(112): unsure at all n locations
cgacgaagcgggatccncagattttttagcttttagtgcatcggccgccccggaattcggcgggttttttatgcgtccggctgccctaaagagtcgattaagcttggcgtat

SEQ ID NO: 340790 - DNA, 344 bp, Zea mays
tatattttttttttttttctttttttatcttttcttttttttttaatttttttttttttcttttttatttattttttattttctcttttcttctttttttttatacttttactattttcttttttattttttctttttatttttttttttttcttttctatttttttttttatattttttattttttatctttacatttttctttttttctttttttatttttttttctatttttatatttttttttcttttttctctcattttttttatttctttttttttaatttttttttctttctcttatcttttttatttttttctattttttattttttttctttttt

SEQ ID NO: 340791 - DNA, 147 bp, Zea mays
  unsure (1)..(147): unsure at all n locations
gggggtataaaaaaaaaagaggggcgacacaaaaaaattntaaatataatacacaacaacaataaaaaaaacacagacaaaaaaaaaacaaaaaaacaaaaaaaaaaaaaaagaaacaaaaaaaaaaaaaaaaaaaaacaacaacag

SEQ ID NO: 340792 - DNA, 410 bp, Zea mays
tcgactctacgcgtccgttaacttatagagttgtcttggctatgtgttgtcgtctggccctaagattttgtcttgaaacaagtttaaaattaagattatttgtaacaagtgtttaagattactcgtggtgaaaaaaaaaaaaaaaaaaaaaaaaaaaaaaaaataaaaaaaaaaaaaaaaaaaaaaaaaaaaaaaaaaaaaaaaaaaaaaaaaaaaaaataataaaaaaaaaaaaaaaaaataaaaaaaaaaaaaaaaggggggcccccccggaatttccggaccggaccctgaggggttaccagttttccttttaggggggggtttaaaagcttggggaaataatggaaaaagttttttcctgtggaaaattgttttccgttaaaaattccaaaaaaaatacaacccgg

SEQ ID NO: 340793 - DNA, 259 bp, Zea mays
gaaaaaaaaaaaaaaaaagaaataaaaaaaaaaaataaaaaaatacaataaaataaaaaaaaataaataaaataaaagagaaaagaaaaaaataaaaaaaataaaaaaaataaaaaaaaaaatgaaaaaaaaaaaaaagaaaaaaagaaaaaaaaaaaaaaaaaaacaaaaaaacaaaaaacaaaaaaacaaaaaaaaaaaaacaaaaaaacaacagaaaaaaaaaaaaaaaaaaaaaacaaaaaaaaaaaccaataaa

SEQ ID NO: 340794 - DNA, 215 bp, Zea mays
gggcggccgccctttttttttttttttttattttttcttctcactttcttttataattttaaaaagcacacctccgtaaaaaaattcctgggcccagctttggtattgccccaacattgccacaaagatggggataatgcctattcaaatgatccatatgtcgatgtaaacagctaaaaaaatctttttttttagaacaatgcttggctacatgg

SEQ ID NO: 340795 - DNA, 250 bp, Zea mays
cggccgccctttttattgtgtttttttaatttagagcttccaattaataatttttttttccgggcaaattccattggggagctcaccacagaacgtgcggtacttgggtctattaagcgccaggttcaaaaaaaaaaaaataaaccccgacatactggtggaggcaccgccgtgaaaaaaaatcccggctcatatcaaaactcactaactgtgaagttgcgatatttaacatacgagctgtcaaatgaac

SEQ ID NO: 340796 - DNA, 286 bp, Zea mays
  unsure (1)..(286): unsure at all n locations
gcggccgccctttttttttttttttttttttttttttttttttattttgtattttttttcttatgaggatccaagcagaggaagactggccccatatgggattcgttttttttagaacaaaatgaaggaaaccggggtcatggatttagccaaaaaaggactgaaacccccatcccgattcaatgttggatttngacaaaatttaaaaaacaatgaggggggcgtttatattgtatacaacccaaataacggcgggcttctcaaaatcacatcatttattgtagcc

SEQ ID NO: 340797 - DNA, 103 bp, Zea mays
cggccgccctttttttttttttttttttttttggatatgaataaatattatttttagaacgctcttttccacaaacacgataagtgggggatagagactcatc

SEQ ID NO: 340798 - DNA, 428 bp, Zea mays
  unsure (1)..(428): unsure at all n locations
cggaatacccggggcggccgccctttttttttttttttggacatggaacaaccgacgttcataataatcttttctgntnaccaatccacgttcaaaacgccacgcaagatttacccccgcagaacacaatcaatctagccttgcaagcttctcaatgccatggaatccatgatccaccaaccagaccatctgttgcctagcactacatctcacagcagcaattatgtccaaaacttgttcagaaacttgctttctgtgtgccataagcccaaaatactatgagctagcgttctacccaaaacatcaacacaagacttgttacgtttgaattcagacacctagtacacggatatcaactttcgtccatgtcatcatttccactgtcttgctcgacctctggattcttgtcttcagctttagaagcacct

SEQ ID NO: 340799 - DNA, 293 bp, Zea mays
gcggccgccctttttttttttttttttttgagtgaattccaatttcttaataatgaagggatccaaacgccccggtgcagagaatgattgaaatgagcgttacctgtaaaagaaccgtactggacaactgtttccacacgcggttttgttaggatagaaagggattagatcacattcctagatcagtccaacccgttaccttgaaaactattgttccacggattcagttagcagctactggttgttagctatggcctactcttagtcagcttcttacaccatgtaagaagcat

SEQ ID NO: 340800 - DNA, 118 bp, Zea mays
cggccgccctttttattatataaaataaataaaaaaatacaaattttttaaggaaaccacaccgaggtacaaaactagaaacagaaagacaagcaaagccagaaaaccgacaaaccaa

SEQ ID NO: 340801 - DNA, 266 bp, Zea mays
cggccgcccttttttttttttttttttttttttttttttttttttttttatttgggctaaatgctcatacggccacagggacagtcacacagacacagtacgagctttcacaatttacaaaggcgccgtcccctggccagcactacacgatcctgatcaagtgatcatgccagcacggccgcggccagggagagcagggacgtggcgacagccttggctactgagcttgcggagagggccttttgttcggcgttagggttcggtaa

SEQ ID NO: 340802 - DNA, 226 bp, Zea mays
cggccgcccttttttttttttttttttttttttttccagccaatatgttaaattaacactgaaccatgcatattctgaggttacttcagaaaagaacattaacttagttacctggtaaaaattttcatttagtggccgagaagcatgggaacagaaaaaaaaggcatacgaaaccaaggaaaaatgtttatgcctatttgattagttaaacaaggagaaaagttgt

SEQ ID NO: 340803 - DNA, 471 bp, Zea mays
accgtccggattcccgggcggccgccctttttttttttttttttttttttttttttttttttttaatattttttttttttttggggaggaaaaccggacaggaatatttgttcggaattgcctacatgagagtacaaattacacaattgttactttaaacttctttgatataaacagagtaagtttgtcaacgataaacagagaaaatatttattgggattctgctagtgttggaagctgcattccaggcctttgtgtccagcttttgataaattagaaattcttaattgcctttttcctaattattttttgagaagcttttaaagcacttttcacctttgggaaatgacaattattgtttgtgtcacatcaatctcttactaaattttataattttctctttccctctaacaaaaatatagttataagtatttttttctttatttgtcacttgcgactattttttaattt

SEQ ID NO: 340804 - DNA, 306 bp, Zea mays
gccgccctttttttttttttttttttcatttgtggattctttattatttatttaaaaaaaaaccctcctgttgcaggggtttatcaaagagataaaaggtccacaaaccatgtttcaatcgaacaaagcatggaaacccccacacaatttcccattttcatacagttcagggtttaagacacaagaacagacatgtgggttgttacatggccatggcccaaccgttgaagccatttcttattgggtgggaaacaaggaacatgacttgcacactcctgtttattttggaaagggggggggggaaac

SEQ ID NO: 340805 - DNA, 243 bp, Zea mays
ccgggcggccgcccttttttttttttttttttttttatttattatattatctttaattattttattaactacccctatcaaatgggggcaagcggaaagatacaattattttccacaaccgggactataaaattaagagggcctatacaaatcgccgcgccggattcaaagagaaggccctctagcatctaggcggggagggggggggacttgggaaaggacccaataaataactccttttaa

SEQ ID NO: 340806 - DNA, 398 bp, Zea mays
gcggccgcccttttttttttttttttttttttagaaagaactaaatttttgattggagaacgtataataacacgagggccctgaactgaacagtacccggaaattcacattgaatctctttgttcgagattcttcttcagtctttcacgctcaacatctcatctcttctcatctatctattttatagacagggtaccagggaacgctttctcgacttcgctccacttgctaccgatcgtctttgcctcgagtccgtcaatctcgtagcgcacctcctccatgtgttcgattatgctgcttacggcaacctgcacgccctgtatggcctccttgagggccgggtcatactccgcattcgtctcggcgtcctctgtgccggcggccttcgtgatctcctt

SEQ ID NO: 340807 - DNA, 316 bp, Zea mays
cggccgcccttttttttttttttttttttatctttttatacttcatagtctttttcatagcatcaattttaaaaacggggcaggggcaccggttcaactggaatgccctaaaaacataagtgcacaaagcatatcaaatttgctccaaaatatgttgtctggcattgggcttacatactttggaaaaaacccgcacaagacgtttcaaagtgatgtctcaacgcctatttccagtctttggtagtgggcttggcttcttattttcaaccatgttgtgcgtcctatgggggtacagtgtctctctcaggaacagggg

SEQ ID NO: 340808 - DNA, 213 bp, Zea mays
ggcggccgccctttttttttttttttttttctttcacgaatcactcttttatactttaaaaaaaaacccccctgatgcaggggttaatcaaagggaaaaaagttcaacaaacgatgtgacatcgcaacattgttttgtataagcctacacaatatcccgtttccatacaaaacacttttcatggggggggaacaagacatcttgttggtataa

SEQ ID NO: 340809 - DNA, 349 bp, Zea mays
  unsure (1)..(349): unsure at all n locations
accgtccggattcccgggcggccgcccttttttatttaatataaaaaaaaaaattaattaataaaaaagaaaaaaaanaaaaaaagaagggggaaataaaaaaaagaggggggaaaaaataaaaataaaaaacaataagatattataaaaaaaaaaaaaatatataataaaaaaaaagaaaaaaaataaaaaaaaaaaaaaaaagataaaaaaatataaaaaaataaaatgaaaaaattaaaaaataataaaaaaaaagaataatataataaatatatattaaaataataaacaaatataaaaagaattaatataaaagtaaaaataaaaaaataaatataaatgaaaa

SEQ ID NO: 340810 - DNA, 256 bp, Zea mays
  unsure (1)..(256): unsure at all n locations
ggcggccgccctttttttttttttttttttttttatttacntacttcttttttttttttttttactaaacatttcaaaataatggtgcatgccaaaccaaaaaaggggctgctgatatttaaacaagatttcagaaaactctttaactgtttgataactgaccgatgctaaacttgccataagttaaagaaaagacctcttaataataagactctctcttcaattggttgttgaaacagtaaaacatttttttttt

SEQ ID NO: 340811 - DNA, 183 bp, Zea mays
ggtgcaaaaaaactaatctgcttggtgtccgtacccattggtaatgggcaaccagaatcattcatagtctttaaatcaagggtttgcctttcaaaacaaatttcttcccaagaacacatattttcaacccgcacttgaacagacttaccaggtaacaataacttacgggcctacatgaaggcg

SEQ ID NO: 340812 - DNA, 345 bp, Zea mays
cggccgccctttttttttttttttttttttttttttttttttttttttttttttttttttttttttttttttttgttttttttttttttttatttagagggccaaaataaatactttgagaccatatataaagatcaccaaccagagagaggctcttgtttctataacacaatttgcagcattcataccaattgttatgtataaaaattacaagattcttaatttagaaaatatttaaaatcattattatcacttgggaatacttatgcttaataaaaaacgaagctgtcgaactgtaggaggctgccaaagtcgctggattgtgccttgatgagcctctcctgg

SEQ ID NO: 340813 - DNA, 150 bp, Zea mays
gaattcccggggcggccgcccttttttttgtgtttgttaaggaaagatgacactcgcttttatatgcaagtaaccaaagtctggaagaagctatgatgaaaggtacgaatataggacatgaaaggaaggaatataggagatgatggagag

SEQ ID NO: 340814 - DNA, 52 bp, Zea mays
cacacctgcatgcaaccatataggtcttctatagggagacctaaattcaatt

SEQ ID NO: 340815 - DNA, 66 bp, Zea mays
  unsure (1)..(66): unsure at all n locations
gggggggcggcctcttttttttttatttnatttgtctattcaaacccctccattttttttttgccc

SEQ ID NO: 340816 - DNA, 277 bp, Zea mays
ggaaaacccggggcggccgcccttttttttttattttgaataaaacattgagtcaggcaaaaatgataaccagcgacactttattgttcagggcgatactagtcaagaattatgcgcttcgtatagagaggttcaaataaaatagtaaaaccaaagctattaacggcaacataaattcttgggcgcccaagctttaaagtaccagtatacatactctttgatacagaagcatagcagaagatcatctagctgtcatagcatcaaagcttaatattgt

SEQ ID NO: 340817 - DNA, 468 bp, Zea mays
ccggggcggccgccctttttttttttttttttttttttttttttttccgctaaattttttttgatccaaaatatccgtgattttttgttaaagaaattaaaaagaaaaatcaaaaaaaatatcacaggatcctcatcctttcgccgccctttacctaggatatttctacgcagcagcttcttattttttggccgcacattgtcttcttccacacacggcagactccagctccctctgccgaccggaactccctgctcggcgttcctctgcttgtccatcttccctgtgcctagacatggcgcctccttttccttgctcctgctcggttccatccatggccggaaccctttcctaacgagctccccatggcgcccccgctcctggattgccccagttcgcggtgcccccttattccttgctccagatcgatggtccttgtttcccctggccaacgttcttcccagccat

SEQ ID NO: 340818 - DNA, 180 bp, Zea mays
gcggccgccctttttttttttttttttaaattccaatagtaacgattcctggttatttaacttatacggccacagtgggaccataaatatcaactgacgctagtatagactgtattatctatatatcttatcttaaagtaaaattaccgactaattttacaattgtttgttatacattat

SEQ ID NO: 340819 - DNA, 163 bp, Zea mays
ttcccggggcggccgccctttttttttttttttttattttattttttttctattttataattttttattctcctaattttcatattgggtttattataataaaattggggttttccccaccaaaactttaccaaaacttcccacaatcgcccataaaggcccc

SEQ ID NO: 340820 - DNA, 410 bp, Zea mays
gcggccgccctttttttttttttttttttttttttttttttttttttttttttttttttttttttttttttttttttgtttttttttttttttttttgggggaaaaaaaaaaattttgggggttaaacagggcccggtttaaaaacctgccaaaacttggggggggggggtggccaacccccccctggggttttgaaacttacaggtaccgccaccatttgggggtcttcctcctacacggtgcccccaaaacaaaaaaatttttggctgtaaaatttaaaagccctttacggccctgggccctttattgcctggggggcaaccatttcaatcgttttccttggggcccttgctcggtttctcttgagcttgtgggaccgggccaatctcctttttaaaggtttcctttt

SEQ ID NO: 340821 - DNA, 382 bp, Zea mays
gggcggccgcccttttttttttttttttttttttttttttttttttttagaaattctaaagcaggccaatgaaatttccagattccaatacaacctatgacccaaacaaaagtagcactagatcagcatgaatacataagccagtgcagatcatagcagagattcgttaccaggcaagccaaaatcagtgacaaaggaggcagacccacactttacattacaggtagctaagcaaaagcaccatcagccagatctactaataattaatcgttgattggttgataatcacacagcaaccattattcggtttattcgagcagtcttgggacgaaaagggggcccgattggaattaaaagggccaggcctagaaggggaaccaaa

SEQ ID NO: 340822 - DNA, 189 bp, Zea mays
aaaggaaatcaactttgctaacatagaccatagaaggaagaaaattcagttatcaaagctggaaaaaccacaagccacaacagatgataccacaacaattcagacacattttggcttctactaacactctttaactcatagaagaattggtcttgaaacaactaacttgacggcgtcagcctaattagt

SEQ ID NO: 340823 - DNA, 270 bp, Zea mays
gcggccgcccttttttttttttttttgcactactaaacaatcatttttattgactcgtacgcgtcacttgctccatggtacagacaacggagttcaaggggctcaaaagtaacacatgtagcaaaatttaacaatgaaacaaatataccaaatactatcagagagcctgcatggggcgggttccacagtagcagaacatcaagatgtgtgtgctcaacggtagcggcggaaggaaagggtctggttgcgctttcaggtgggccttctgga

SEQ ID NO: 340824 - DNA, 433 bp, Zea mays
cggtccggattaccgggcggccgcccttttttttttttttttaataaatttttaattatttttttttttttttttttttttaatttatttatttttaatttttaaaaaaatttataaattaatataaaaataaaaaaaattaataaaaaaataaaaaaaattataaaaataaaaataaaaaaaatatgtaataagaataattataaataaaaataaaaaaaaaaaaaaaatttaaaaaaaaaaaaaacaaataaaattatataaaataaaaataaaataaaaatataaaataaaataataatataaagatattataaaaaaaaaaaaaattataaaaatataaaaaaaaatataaaatgtaaaaaaattaaaaataatataaaaaaataatatataaaatattaaaataaaaaaaaaaaaatatataatataa

SEQ ID NO: 340825 - DNA, 209 bp, Zea mays
atactatatttttttttttttttttcaggcaattcccggcccaatttattccggcccacgccgggaaaaaaaaggttttttttcttggtaatttaaaggggctggtccatggctaagaaaaatggttttcccttgaaaggtttttttcctgggggaaggaccctttgggggcctttgaaaaacttgttgtggggcccttttggggtttt

SEQ ID NO: 340826 - DNA, 153 bp, Zea mays
ccgggcggccgcccttttttttttttttttttttttaccttttttaaaaacggaataatacttttctctaagcattacaataggtcattcatgtcattgatcacactgacacattttcccaatgatgatacttgacatattattacctaatta

SEQ ID NO: 340827 - DNA, 436 bp, Zea mays
cggccgccctttttttttttttttttttttttttttttttttttttttttattaaatcctaattttttttaaaaatttggttttttttaaaatttttttttttttttaaatttttttttttttttttttttttttttttttaaaaaaaaaaaaaaaaaaaaaatccccaaaaaaatttaaaaaaaaaaaaattaaaaaaaaaaaaaaaaagggtaaaactggtcctggttaaaaaagggaaaaaaaaaaaaaaaaaaaaaaccccccgaaaaaaaaattggaatggggaagcccaaaaaaaaaacaaaaaaaaaaattttaaaaaaaaaaaaaaaaaaaacccctaaaacccttttttaaaaaaaaaaccgaaaaaatccttatttttgaaggcccaaaaaaacaataattaaaaaaaaaaaaagattgggggatt

SEQ ID NO: 340828 - DNA, 309 bp, Zea mays
aaaaccccaaacaacaaaaaagggggggggttttaaaaaattttttttttccaaaaaacacccccgacaaggaaaacccccggggggattaaaaaaatttaaaaaaaaaaaaaacagacaaaaaaccaggataacccccggaaacaacagggaaaaaaaaaaaaaaaacccatggggccaaaaaaaaaaaaaaaaagggtaacccaaccataagggccacacaaccccagggaaaaaccaacaaccccagaagcccccgccccccccgggaaaaaaaaaggggggacaccccaaaaaaaaggggggaaa

SEQ ID NO: 340829 - DNA, 459 bp, Zea mays
  unsure (1)..(459): unsure at all n locations
ggattcccgggcggccgccctttttttttttttttttttttttcaaaataaaataacagtttttttataanccacagagactttaacgggggggtatattgcgagtttttttgtcccaaaacaaaccaaccacaaacaagaagataaaacccaaaagcacttaaaaaaaacaaaaaccagcagcggggacacaaaaatagtccgaaacaacaaccaaacgagaacttaaaaataacctcaaagaaccacaacgggaaaaaaccaaaaaaaaaacctgaaaaaaacaccaccctccagaaagggggaagggggaggacaaaagggcccaaccacaagataaacacgcgggggaaaaaaacaccgggaaaaaaaaaaaaaagtggggggagacccccacgatgaaaaagaaataagaaaggggggaatcaacatacaaatggtaaccacaaaaaaaataaa

SEQ ID NO: 340830 - DNA, 391 bp, Zea mays
ttcccgggcggccgccctttttttttttattttttttaatataattttaataatttaaataaattatatctttatattaaaaataggggaggatttttaagaaattttttttaaaaaaaacccaacacaacaactacaaaaaaaaaaacaccaatcccaaaaataaaaaaaccgggcccccaaaaaaaaaaaataaaaggtccccacaataaaaaaaccccaaaaaaaagaacccccccctatttttttataaaaaaaaaaacaacaaaccccttttcccaactatgagcccgggaaaaaaaaaaaaaacttccaaagaacaacataaaaaaaaaaaaagttacaatatttaacaaacccctccccccacgacaaaaaaaaaaaaaaatac

SEQ ID NO: 340831 - DNA, 361 bp, Zea mays
  unsure (1)..(361): unsure at all n locations
ccggnccgtgattcccggggcggccgccctttttttttttttttttttttttttttttttttttttttatttttttcataantttttttttttggttggttttttaaaaggggtttcacatactaaacaaggcgggccagggtgcccccatgccgcaaccaggcacacgggtcctggttgaacccaccccctgaattacctttgggactaccagcaatggaagggttgttacacccacagagcaagcctccaggaagggaattgcaagaacagattcattattcggggcttacaagagccgggaattaaagatctgttgccaaatttgtcaaaacatacaaactgcaacatggggcccctt

SEQ ID NO: 340832 - DNA, 237 bp, Zea mays
  unsure (1)..(237): unsure at all n locations
cggccgccctttttttttttttatttttctttttaatttcctacacctttatatatttttttacaaagaanaccccgggggggcaagcacaaaagctttattataacaatatcgcggggtccacaatgacagtcatgacagaaacatttttccaggcccaggggagaaaagaaaatctagttgggaagggggcttaaaacaacaagggaggccctgggacagcccccaacgcaatcc

SEQ ID NO: 340833 - DNA, 361 bp, Zea mays
cggccgcccttttttttttttttttttttttttttttttttttttttttttttgacaaaaaaatggaaggtgaattgatatgtggtattcatttttatgcatcacggtaccttgatttggtctaaaggggggcctttaccattaacaagacttttaccacacaaaagcaagggagatttggatgaaaaaaaaagaggcatacttcatgtaaaatcccaccagcacgccctaccaaattcttgatcatgacataaccagtcccacaggcacaaataagggtggttagagtttttaacaggtcccttttaatggcatggtttaacaacagcaggcatgtatcaaaatcatgaggactcctttt

SEQ ID NO: 340834 - DNA, 319 bp, Zea mays
ccgtccgtattcccgggcgccgccctttttttttttttttttttttatattatataaaatttttattattatacaaaaacaaaacaaaataaggggttttttataaaaatttttttatctaaaaaacaaaatatattaatataaaaaataaataaaaaaattaaaaagataaaaaaaaaaaaaaaaaaataaaataatatcaaaaaaaaataaaaaaaatacaataaaaactaatcataaaatatacaaaaaatacaaaaaatattcaaaaattaaaaacataaataaaaataaaaaaaaatataaaaaataatatact

SEQ ID NO: 340835 - DNA, 366 bp, Zea mays
  unsure (1)..(366): unsure at all n locations
cgggcggccgccctttttttttttttttattttattttaactncaattaacgttttgttgtctcaaccgccgcagcgaaagggaaggagggcttgtccaaaagttttttatcattagcaaacgccaaaaccgaattaacagaactacaatacagcatgcgcatacatacctaacgtaggaaacaaaaaaacttaaactacgtcatctgatgcataaacatacacaacaaagtcaccagccctagaggcattcaactcacgtgcacaagaaacaaagcacagaaaggacgggcttaaagaaatagtatagactgcaaacacctgagagcaccaaaaactggatgtcaaacaatacaaaaccctaatc

SEQ ID NO: 340836 - DNA, 146 bp, Zea mays
aaaaaccaggaaaggggagcatccaatcatgttttgtgacccaaaacacaaccctgggaaagggtaattccccgacctgacaagcgacaaccggaactggcaggaagatcaaaccatttcaaccactcactaacgaaaggggtaga

SEQ ID NO: 340837 - DNA, 327 bp, Zea mays
  unsure (1)..(327): unsure at all n locations
cggccggaataccggggcggccgcccttttttttttttttttcttttttacttttttttctttaattagggtcaacaaaccaaaaacccattaggggggtttgttcgcaaactttttcaaggcatcaaacagnaggacaccaaaatgtttgtctgggctctatttccattaccgcaaaaaaacatacaacacgcaccttaagtggcagcatgcactaatgaccggagggaacaaaacggggggctttcttaaaccggctcagttcttatagttcttttgtgccccaactgccttctttttggcgggcaccaagatggtttttgttca

SEQ ID NO: 340838 - DNA, 227 bp, Zea mays
taaaaaaatttttacccaaaaacaccccccacaacaataccaataacactacaacataatcaaaaatacaaaaaatttaataacaaccccaccccccacaaaaaaaacacaaccaaaaacccccaaaaaaaccacccaacaccccaaaactaaacccccacagaaaaaaaaaaaaaacaaaactaaatccacaacacaataacctcaactaccacccaacccccccc

SEQ ID NO: 340839 - DNA, 463 bp, Zea mays
ccgtccggattcccgggcggccgccctttttttttttttttttttttttttttttttttttttttattttttttttttttttttttttttttttggttttttttggaacaaattttacataaatcgcatcatcaccctttccgaaaggggcacaaattttaaagagttgagctgcccaggggttgtttgtaaaattgatttttgaagcatgatggttacaggttaccccccccctcccgggttttagcccatcccaaatacaattccaattttttgggggggcataccgtctccatcaatgaactcaaatggcggtttgaagatccaccctcattgactgctttgggagaagcctccttaaactaaagagcacgttccctaagcgcctttggcccagtttcataaaaagacataagttttttcacagcccgggcaatatccttttttccgaacaaaccaccct

SEQ ID NO: 340840 - DNA, 316 bp, Zea mays
  unsure (1)..(316): unsure at all n locations
ttcccgggcggccgccctttttttttttttttttttttttataatttttttacttttttttttntttccacgcaaacccaaccatatggattgcattcattacacactttttgggggggagagtttttccaacggaccccaatgcaagagtgcaatagctcccaacaattgcaatagctacgtcaacagcaagaggtggttgttttaaagaaaggaagtaacctcttgtccatccacatttgtttttataaaggggcttttataaatctctttttaaacattcaagcggtaataaaattttttcaaaattccaatg

SEQ ID NO: 340841 - DNA, 417 bp, Zea mays
  unsure (1)..(417): unsure at all n locations
ttcccgtgcggccgcccttttttttttttttttttttttttnanttttttttnnttttttttatttttnaaananaanaaaaaaagggggggtttttttaaacaaaaattttttgggggcccgcaaccaccaaagcccccaaaacaactttttccgggtggcttatccaaccaaacgggggggatcccagcccccaaattttgggccccccaacctttgaaccgccaaatacctttggggccccaaaggcttgcctttttagtccccaaaagccccccccttggttcccacccccacctttttgcgttttttggccccccaaaaaaaggagccggggcctccaccggggctcttggtttttttgggccccgggccagccttttctccctctaggaaaattccctctacggggtggcc

SEQ ID NO: 340842 - DNA, 271 bp, Zea mays
  unsure (1)..(271): unsure at all n locations
aggagcggccgccctttttttttttttatatatataaaatnatntactacaataanattaattatacaaagaaaaaaaaaaaggggggggtttataaaaaaaatttaatattcgaaaaaaaaacaggaataaataaaaaaaatgaaaaaaaaaaaacaccgctagcaaaaaaaaaaaagagaaaaatgtaaaaagtgaataaaagaaaagaaaaaacaaaaaaaaagggaaaaaaaagtaaaaaaaaaacaaaaaataaaaattaataatg

SEQ ID NO: 340843 - DNA, 342 bp, Zea mays
  unsure (1)..(342): unsure at all n locations
ttcccgggcggcgcgcgctttttttttttttttttaataaaaatggtccgaggttctttattaattacgaccaccacaacacggggggaatttaacaaatggtttttgatcccacaaaacgnccaagacgcaattgacacagttacaccatatcaactcaacactaaggaacagcatcaccaacagcccattcactgttcaaacaaaaaagaaaaagaaagaaaagggtcacaggcatgtgtcccgaaaggtgacagtcaccaacagctatatgacatctgttttttgaacaaattatacagtgttccccagcagctaaccacttccaaaatagagccaaaa

SEQ ID NO: 340844 - DNA, 463 bp, Zea mays
cggccgccctttttttttttttttttttttttttttttttttttttaatattttttttttttttttttttttttggttgttttttttttttttttttttttttttttttttttttttttttttttttttttgggcccccaactagaaaaataaaaaagggggtaaggggggccaaaaggttaaaaaaatttattccagtttttgaaaggggagaaaaaacccccaaaaaagggttagggggtaaaaaaacaccttaaaaaatgggggggcctaattggggggtttttttttggggccaggcccacccctatggggcccccccggggggggggggccaaacccaaagggggtttttaatttgttttgaaccacgagggcccaaggatttaaacttgttaacagggttttaaacccccagttttttaaaagcgctctcctaaaaaacagggtgggaaagtttttg

SEQ ID NO: 340845 - DNA, 468 bp, Zea mays
gcggccgccctttttttttttttttttttttatgattaaaactggttttcttcacagcaacaaatacatactttgggagaacatatgaccaataatttatgtattgtgttacaaaagatatataatatgaataaataaatatatcatataacagatatctatgatcgaggttttaaacagttgatgcatttatacaaaccatgacaaatatgatatttaatgatagataacaaaatagactggacacagtcatgaatcacattattacataaaatgggtgacgcgcgacaaaattccacgcctctttgaagggtaatatttttctgaaaaggctttccgacctgtaattatttaagaaaatggacccattgtttgaaccatatgccagtatttttccgccaagggaaaaggttcacttcacatggaaaccccacactccatgtctcttaaaccgcgtgtacttgttca

SEQ ID NO: 340846 - DNA, 490 bp, Zea mays
tcgacgcacgaccgtccgaattcccgggcggccgcccttttttttttttttttttttttttttttttttttttttttttttttttttttttttttttttttttttggtttttttttttttttttttttttttttggggaagaccagcaagattacctgttccaaaaaaaaaaggttagggaaacgacattacaacggggggggacccccccttgttagaatttaggggggtggaaaaaaaaacaggttttttttggtttgggggcccccaccaaaaaaaaacctgggggggttttgggcaaacaccaccatacatttattggggccggccaaacattgtaacaaaagggagctgggggctttttttgctccacaagaaaaaatccccaatcttttttttttttaaggggggttcactggggccctgaacttttttccggggtaaaccgggggattaccgggctttttcttgtttctgagcaggtgggtga

SEQ ID NO: 340847 - DNA, 448 bp, Zea mays
cggccgccctttttttttttttttttttttttttttttttttttttttatattttttttttttttttttttttttttttttttttgggggaatttgccccattttaaaacctccggagggaaaaagggggggggggcctttggttttaagtcttaaaaaaccccaaccaaggtgttttcttccaaaagggaagggaacctcccagtttgtttttaaaacaaaaaaccaaactacttttcccctgggttgggggccctacaaggtttgttcggacccccaatgtgaagctggcaaaaaccctcaaaaatttctttggccttttaaggggccccctggggggcaatttaaccccaaagggtccggttggccataaggggcacccccacctaaaaaacctgggggccccaaaactttttaaacttttggggggggtaggcccgggccaatt

SEQ ID NO: 340848 - DNA, 241 bp, Zea mays
ttcccgggcggccgccctttttttttttttttttttcttttattttttctttccctaaataaattttttaccacaaaaaaaccacagggaggggtgtttttaacaaatttatatttctccatcattcaaaaccagtggccaaacctttaaaaaaatctaatattgtttcactttttaaacaacaaataaacaaatatttttctttaacaaaccatatttatagaatactaatggacctata

SEQ ID NO: 340849 - DNA, 324 bp, Zea mays
cgggcggccgcccttttttttttttttttttttttttttttttttttttttaataattattcctttatattttaaaaaaaagggtttttttaaaaattatttttatcctaaacaacccaacacaatatattattaaatttataactaattaaataataacaaataacaaaatacctactcaatcttacacaaaaaaaaaaatccccacaccaacaaaaaaaccaacacactcaccaaaacaaaaaaaaattacccaattcccccaaattacaaatttccaccacatcaaaaacaacaccaattaaaaaaaaaaccaaccaccac

SEQ ID NO: 340850 - DNA, 197 bp, Zea mays
  unsure (1)..(197): unsure at all n locations
ccggtcccggattcccgggcggccgcccttttttttttttttttttttatttttttttttcttttttatanttttttttattaaaaaaaaattagggggttttttaaaaaattttttcttccccaaacacacaaaacaacaatcaccaactaaaaaaataccactaacttagaaaaaaaaaaaaaacaccaataagc

SEQ ID NO: 340851 - DNA, 457 bp, Zea mays
  unsure (1)..(457): unsure at all n locations
gtccggattcccgggcggccgccctttttttttttttttttttttttgatttattcaataaaattaatttttcaaaaataaataaaatattatggtgttttattaatnaaattatttattatcccttcactccaacatacccaccaaaattttataataataacatcaatacaaaacataaacaattaataaataaaaaatataaacaaaataataaacaaaaaataaaaaaccaaaaccaataaaaaaaaaaaaataacaaaaaaaaaacaaaaaaatcaaaaaaaaaaaaaaaaaataaaaaatcataccaaaaaaaaaaaaaaaaaaaaaaattaaaaaaaaacaacaaatctcaaaaaaattaaaacaaaaaaataatataaaaaaatttataaacccttcaccaactaaaaaaaaaaaagaaaaccatacaaaaaaataaaaacaccccccc

SEQ ID NO: 340852 - DNA, 183 bp, Zea mays
ttttaaagttaaaaaaaaccccaaaacaagggaaaaaacaggagcaataaggggtaaccgaagggcaaaacccaaggcccaataaaaaaaaaggccaaaagcaaaagagaaaacccgcgggaaccgcaacaacaaaaaccaaagcaaaatctaaacagggggaaaaaaaaggacccccatccc

SEQ ID NO: 340853 - DNA, 320 bp, Zea mays
  unsure (1)..(320): unsure at all n locations
ccctcccccccccccccatcncncgttggaaaaaaaaaccccccccccccccccggggggggaaccccccaagtccccgccccccccaaaacaaaaccaaaaaaggccccccccttcaccaaggggcgttttaaccccgtgggacccaaaaaaaccccccccccaaaaggggttcacacccccccaacaaccgtttaaccccccaaaggggttgaaagggggcccccggaaccaccccccccaaaaaccacccaggtggggggacaccttccccccaaaaccccttaaaaaaaaaaaaagggcattgttccccccccccc

SEQ ID NO: 340854 - DNA, 413 bp, Zea mays
  unsure (1)..(413): unsure at all n locations
gggcggccgcccttttttttttttttttctactcaataatatccaaaccttcaaatanattcttacaacacaacacccccggggggggtcattaaaattttttttctttccaaccccccacaccgaccaaacagctaaaactacacacccaccaacacaataaaaagccccaaattaacaaccccccacctggcaaaacaatgcctatacccaaaccaaacaacatcaaaacaactccccaacctaaaaaccaaagtaactaaaaaaacccccccgaaccccacacaaaacacctggaaaaaaaacaccctctaaccagccccccataaatcaaaaaaacaaccccaccaacccctttccaaaacaatacacaaaaaccaaataaaatgtgaacccccaccaaacattatcat

SEQ ID NO: 340855 - DNA, 405 bp, Zea mays
ccgtccggattcccgggcggccgccctttttttttttttttttttttttttttttttttttttttataattttttttattttttttttttttttggacggaaagggaactatttttgggtttaaaccggctccgggaggagggaaaaaagagactatgctaaggggccctttggcaacgctcgggcttgccacaaacagccctattacgatatctggactgtattacaggactaatcacaacatgtttaaactgcaaagatgctgcaaaagcattctgcatatacatacatttaaatgccccgttattgccagttcccaaactggtgctgtttgggggaaccaccaccccggggggttgttgatcctttgcctgtaccgggccccccatatggaccaccccggtg

SEQ ID NO: 340856 - DNA, 120 bp, Zea mays
  unsure (1)..(120): unsure at all n locations
ccgccgccctttttttttttttaaaataaaaaaaaattaattaaaaaaattttnttaaaaaaaaaaaaaaaaaaaggggaggtttaaaaaaaatttttatcacacaaaacccccaancag

SEQ ID NO: 340857 - DNA, 240 bp, Zea mays
  unsure (1)..(240): unsure at all n locations
ttttttttttttttttttataaaaaaaaattcaaaaaatgctcaaaaaccccaccannaancacaaaaagggggggttttttaaaaaaatttttttaccccccaaaaaacacaannnnnagnaaaanaaaaaaatatcaaaaaaaaaaaataataaaaaaaacaacaaaacaaaacaaacaaaaacaaaaaaaaaaaaaaaaaaacaacacaaaacaaaaaacaaaaaaaaatatcaact

SEQ ID NO: 340858 - DNA, 239 bp, Zea mays
  unsure (1)..(239): unsure at all n locations
aanaaaatannaaanatgcctccctatcgaaaaacanngcaaacaaagaggcattctttacaggttatatatcccttcccaaccaangggctaaacaaacaacaacctttgcatagagaatcccatgatgatacaaccatgaaaaagatccaaagtttctagaaacaacagaccccatgaagacaccccaactagttgtacaccatatacttaggtgttaccccgaacttctagaaacc

SEQ ID NO: 340859 - DNA, 190 bp, Zea mays
  unsure (1)..(190): unsure at all n locations
acnnnnnaaaaaaagggggtttttaaattttttacaaaaaaaaaaaacaaannattaaatataaaaaatataaaaaaaaaaaaataaaataattttaaaaaaaaaaatataaataaaataaaaaaaaaaagaattaaacccttaaaaaataaaaattataaaaaaaaaatataaaaaaatcttataatta

SEQ ID NO: 340860 - DNA, 217 bp, Zea mays
  unsure (1)..(217): unsure at all n locations
gtccttattcccgtgcgccgccctttttttntttttttttaaaatttacaatggctacaatacaaacaaacattgaggggggattttaaccaaattatatctcccaaaaacacctagaaccaaaaaaaaattacaactccactaatacaacaagactaataccctccaacaaacaaacaaaaaaaccctcctcacgccactttcttcttaacaaaac

SEQ ID NO: 340861 - DNA, 140 bp, Zea mays
  unsure (1)..(140): unsure at all n locations
gccgcccttttttttttttggccaatctaaaaccacnagcaacgccctcnccttcccccnaagaaacaaacaaaagtgcggtttttaaaagattttttaaccctcccaaaccccccgagnnaaaaagaaacaccagcccc

SEQ ID NO: 340862 - DNA, 178 bp, Zea mays
gcccgcccttttttttttttttttttttttggcccaagccatccattattctttcagccctacacaggcacaagccggggaacaattcaaggcaggttttcaaaacacatgacgcaccacaggtgacaacacacacagcgctctcacacagggccacaccacacacaaaggggggggg

SEQ ID NO: 340863 - DNA, 301 bp, Zea mays
ccgtcctgattaccgggcgccgcacccgacctggaacgccacgctccgcttctgcgcctagctcattcgccggctccctccacgtactgctgggtgcctagcgcgccctctttgaccgcgacgtcagcgaggtccacatcccgatgtccgagctactatccggcaccctcaacagtcccgaaccacgcaagttcgttgcctacaaggagcgcaagacctaatccagcaagccgcacaaccatgtatacatctaccacaaaatcaaggaggtccagaccctctacaccattgctatcgagaa

SEQ ID NO: 340864 - DNA, 394 bp, Zea mays
attccatattataaataattaagggggaatttttaaagattttttttatcctaaaaaaaccccaagaaaaattatacattaatacccaaaaacactaataaaaaattcccactaataaacaacccaacgtccaccaacaaaaaaaaaaaaaacacccccccccccccaaaaaaaaaaaaaatctataaaaaaaaaaaaaaaaaaaaaaaaaccccccccccaaaaaaaaaaaccaaaaaaaaaaaaaccccccccaccaaaaaaaacaaacccaaaaaaaaaaccccacttacaacgaggaaaaaaaaaaaaaaaagccccacaactccccccctcaaaaaaaaaaatccacactaaaataaaaataacaccccccccccaaaacacacaaaaa

SEQ ID NO: 340865 - DNA, 255 bp, Zea mays
ttaaaaattttaacaaaaaaaaaaaaaaaaaaaaaaaaaaaaaaaaaaaaaaaaaacaaaaaaataaaaacaaaaaataaaaaaaaaaaaaaaaacaaaaaaaaaaaaaaaacaacacaaaaaaaataaaaaaaaaaaaaaaaaaaaaaaaaaaaaaaaaacaaaaaaaaaaacaaaaaaaaaaaaaaaaaaaataaataaaaaaaaaaaaaaaaaaaaaaaacaaaaaaaaaaaatagtaaaaaataacaacat

SEQ ID NO: 340866 - DNA, 294 bp, Zea mays
  unsure (1)..(294): unsure at all n locations
cgtccgattccgggcggcgcctttttttttttttttatataaatttttaaatttgtttaacaaaaaaaataaaagggaattttaaaattttttttaaaaaaaacanannnngaaaaaaaaaaaaaaaaaaagggttgaaaaaaaaaaggggaaaaaaaaaagaaaaaaaaaagagccaaaatgggaaaaaaaaaaagttaaaaacaaaaaaaaaaaccaaaatttaaaaaaaaaaaagaaaaaaaacaaatttgatttttttagacaaaaaaggaggaaaaaaaaatatttaag

SEQ ID NO: 340867 - DNA, 286 bp, Zea mays
  unsure (1)..(286): unsure at all n locations
tccgtcctattcccgtcgcccccttttttttttttttttttaattttaaatttttttttttttaaaanaaattggggtttttaaaaattatacaancaaacaagcttaataaacaaaaacatattttataacccatcccaaattaacccaaacatctccccccaaaacccaaaaaaaaaaacccataaatttccttgccaaaaaaaatttgttaacccaaccacaattaaccaaaaaaaaacttccacacccatcccccacttatttttaaaccaaaactttccaa

SEQ ID NO: 340868 - DNA, 444 bp, Zea mays
gggcggccgccctttttttttttttttcttatcaagccttttggcccttcgtcctactcccacgagggccctcaccagcaggggcttatcgaaatacctttcacacaacaaaaaccaaccgaatgtccggaacaaaaacaaaatatgttgggatgatcaccaacatggggtgacaaccaccacaaaacgatcggttcaaaccacacgacaactattggctgaaaactacaataacgagccggaaaccaaacgcccaaaacaggacaaccctcacattctcacctctaaacacaatgaaagccgggcccaccacaccctaaaactaaccacctgcaaacttggaatacaaaactaaaccgccccccgacactgacaagggatagctcatgccctactcgtccaaaagaacccagccaaacattacaacccatcccaaggaccgcc

SEQ ID NO: 340869 - DNA, 350 bp, Zea mays
  unsure (1)..(350): unsure at all n locations
ccgcccttttttttttttttttttttttaaatattttttaaaaaaaattttttaccccananaaanaattaaaaagagggttttttaaaaaatttttttccccccaaaaaccccccnnnnatatttacaaaaaaaaaaaaaaaaacctaaaaaaaaaaaaaaaaaaaaaacccccccccccaaaaaaaaatcccccaaaaaacccccccaaaaaaccccaaactcctctccctgcccaaaaaaaaaaaaaaataaccaaccaacaaaccaaaccccaaaacccaattccctacaaaataaccaaaaaaaaaatcccccccccccaaaaaaaaaaaaccaatccaaacccc

SEQ ID NO: 340870 - DNA, 408 bp, Zea mays
  unsure (1)..(408): unsure at all n locations
cacaaaattggtgnatccccccacanacnnacaaaaaaaaagagtttttaaaaaatttttttccccccaaaaaccccccnannannnaaagngnaaaaaaaaaaaaaaaaaaaacataccccaaaaaaaaaaccccaaaaaaaaaaaaaaaaccccaaaaccacacccgcccaaaaaaaaaaaaaaaaaccacaaaacccaaaaaaaaatccaaaaacaaaaacctataaaacccccaaaaaaacaaaaataaaaaaaaaaaaaaataaataaaacccccactaaaaacacaaaaaaaaccaccccccacaccaaaaaaaaaaccaatcctaaaaaaaaaaaccccctacccccaccacaaaaaaaaaaataataaaaaaaaaaaaacaccaacaacacaaaacaaaa

SEQ ID NO: 340871 - DNA, 370 bp, Zea mays
  unsure (1)..(370): unsure at all n locations
tcccgggccggcgcccttttttttttttttttttttttttttttttttttaaattcncttttttttccncnnnnnnnntnnnccaggggggtttttgcaaaacttttttctcaacccaagggtttatacatgctataaaatagtcccgcccaataccaccaatgactgtttggaatgtctgaccaacaaaaagggaaaatttctacttctagctgataaataaaaaagcggggctggcaacaatgaacccaattgtctcaacccagttccatctaattatcttgggggctacttctgcatgaccaaattttttatcgccgaccaagcgacccagtcacaatcttttggccatttccactaatatccaaac

SEQ ID NO: 340872 - DNA, 101 bp, Zea mays
ctttttttttttttttttattaatttaaatatttaaaaatggtttcgtaaacccaaaaaaatattaaaaaaagaaatttttaaaaaattttttcccccccc

SEQ ID NO: 340873 - DNA, 389 bp, Zea mays
tccgtattcccgggccgccgcccttttttttttttttttttttttttatatttttttaattttttttttttcataaattaatttttttatgggggggtttttttaaaatttttttttctctaaaaaacaattatttttttttttaataaaaaaccccaaaaaacccgcccaaaacccttacaaaaaaaaaacaaaaaaatagaatcaacaaaacaaaacttttatttcaaaaccaaaaatccctaccccaacctcccaccccatattttttaaaaaaaaaaaaaaaataccctccccccccccctaatcaaaaccataacccaaaaaaaaccccctaccccacccctaaataaaaaaacccaatcccccccaaaaaacccccccccccc

SEQ ID NO: 340874 - DNA, 371 bp, Zea mays
  unsure (1)..(371): unsure at all n locations
aggatgtaaataccctcgcattattnnatangtgacanncctaagaccnaaactactgccgggggtggttcctgtctgatattattttgtagtttagcagtttaaggtcgaccgcacccggtgtcttcctgacatnatttcaatcgccacacgcggcattggaaccgcatgctctcgacggtgaagcatcgtctctctgtcgacgaccgaagtgaaggcgaggtgggtgnngaatggatgtgtcgccanntggtgcgtcttggttgccgacccccgatgtgtgaagaagtgcggcccgccatctctctgcgcgtaagaagcacgaagtctctccgggcccatcatcctgggtgacccacccctgacgttct

SEQ ID NO: 340875 - DNA, 342 bp, Zea mays
ccttacttttttttatccttatcattccatttagtcctgcgtcccactcccccttttttttcattaccggagggacatttttaaaatttttttttaccacaaaaaaacccaaacaccccttatccaagtacaaaaccaaaaaaacccaacttcaccttaaatccaaaaccccaaaaaaacaaatggttcaaacaaccacaaaacccaaggtaaagcacaaaacaataaaccccaaaaaccgccactaaacaacccaaacaccctacatcccacccaaatcacaccaaacacaaaacaattcaaagagaaaaccccccccaaacccccctaaaacacaaaaac

SEQ ID NO: 340876 - DNA, 317 bp, Zea mays
  unsure (1)..(317): unsure at all n locations
gccgccctttttttttttttttaaattnaaattctttcaacatttttcgttacacccaaaacataccacaacacgtgggctttttaaaaatttttttggcccaaggaccaaccacaaaaacaaaaaaatctgccaaccacaaaaaccagggaaaaacattccccccagaatataaaaaaaaaaaagacccccaacctcccttcaaaaataaaaccaaaccacctcccaaatcttgggcaaataccaagatcccccaaacccaccaaaaaaatccttcctaaaacaaaatcaaaagaacctaaaaaacggcgaaaaac

SEQ ID NO: 340877 - DNA, 219 bp, Zea mays
  unsure (1)..(219): unsure at all n locations
attnaaaaaaaataaaaaaaacncctaacaatcaanngggcacaaaaaaagggggagaattttaaaaaaattttttcccccaaaaaacaccaanngngacaaaaagtaccacacccacacacaaccaaaaaaaacttattacactacacccaaacacaccacacccatacccacaaaaaaacacccacacttcaacgcacccacaaccactccaccaaa

SEQ ID NO: 340878 - DNA, 470 bp, Zea mays
accgtccggattcccgggcggccgccctttttttttttttttttttttaaatttttttaatgtgagtcagccgctccttataaacgacaggggggtggcaaaaccaaacttcttttgtatcgcaacaacaaaacggtgtattgcagcataggcaacacaaggaaaatccagaaaccactacagtaaatagtagacaaaaaataccaaattccagttacggtaccacaacaagaccaaaaaaacacaatttcattggatccttttgccgcatcctccgcgttcatcatcaatcatcaccaaaagtagtcttctttcctgcactgggagtgccagcgctgtgcttgttaccaaagccacggccaccacgttcttggccgtcatccctaccaccacgttggccaccgaatttggcgccaccattcctgcccccagatcttttaccaaatttaccaccaccacgccggtcacca

SEQ ID NO: 340879 - DNA, 403 bp, Zea mays
  unsure (1)..(403): unsure at all n locations
accgtccgtattcccgggcgccgcccttttttttttttttttttaacaaacttaaaatttttatttttcacacanacccaaaaaagggggccctcccaagttttttaataacaaaaacacccacgcccgacgaacataactgatacatcctaccgaataaaggaccagaaacaaaaaaaaagagaatggtaacacagggctccaaaaaaagctcgctatcacaagtaacaatgcgaggacgatcttcccgaataagcaggcaaacaaaaatgcgtaaaacaacgaacaaaggggcgcaaaacctcatcaattccaaaatcaggggccaccattaaaatccatttttttagggcatgcccccactgacaaaacaaaaaaactttagagaaaaagctaaacacaa

SEQ ID NO: 340880 - DNA, 158 bp, Zea mays
ccgcccttacccttcgacagccggatcaagccactagggcccacgtcccacaccaacaagaagccacaaagagggggggccacatgaaaatttgtgcggacagaaacacaacagacagaacaaaaaagcaaaaacaaggccgcagagactacaccacc

SEQ ID NO: 340881 - DNA, 150 bp, Zea mays
cacatcaaacactctaaacctgcgtaaacacccacgaacaacccaaaacagggggggttcttaaccagttttttttccccacaaaaaccccaccatgaaaaacctttcaaaaccaaaccacaacaacaaaccgtcctaccaaaaacaaaa

SEQ ID NO: 340882 - DNA, 59 bp, Zea mays
  unsure (1)..(59): unsure at all n locations
gggtccggaatttcccggggcgggtccgcccttttnttttnntttttttttnntttttg

SEQ ID NO: 340883 - DNA, 230 bp, Zea mays
  unsure (1)..(230): unsure at all n locations
aaaaaatatagaaaaattttttnttacaaaaanaaanaanaaaaaaaggggagagntttttaaaaaatttttatacccacaaaacacccccgacatataccacaattacaccacacaacattaataaattcaataacctttccaaaacataatccagacaacagataaccaccaaaataatacctacaacatccaaaacactaaagcccaccaaaatccaacaatataac

SEQ ID NO: 340884 - DNA, 255 bp, Zea mays
  unsure (1)..(255): unsure at all n locations
ccctaccgtccgattcccgcgcgcccccttttttttttttttttacaaaaaccctaaaccanctcaatcacaaaacaaaaaaacaggggactttaaaaattttttcccccacaacccacccanaaacaccacaaaaaaacccacaacaaaaccacccaaaccaaacacatcataccaaaatacccccacaaacaaaccttcccaaaaaaaaacacaccccaccacaaccaaaacacaaaaaaacccaaacaaaaa

SEQ ID NO: 340885 - DNA, 339 bp, Zea mays
ccctttttttttttttttttttttaaatttttttattttttttaattttttttttttttttttatattagggggttttttttaaattttttttaataaaaaaaaataaattaattttaaattttatatatttttttttttaaatttttttagaaaaaagaaaaaaaaaaaattttttaaaaaaaaaaaaaaaaaaaaaaagaaaaaaaaaaaaaaaaaaagggtaaaaaaaaaatttttaaaaaaattaaaaaaaaaaaaattaaaaaatggtgtggggttaaaaaaaaatattttttttaaaaaaaaaaaaaaaaaaaaattttataataatattaag

SEQ ID NO: 340886 - DNA, 377 bp, Zea mays
  unsure (1)..(377): unsure at all n locations
aaaaaaactttaatttcttnanaannnaaaaaaataagggggttttttaaaaaatttttttccccccaaaaaccccccaaaaaaaaaaaaaaaaaaaaaccccaaaaaaaaaaaacaaacacaagggaaaaaaacaatttaaaaaaaaaaccaataaaagggaaaaaaaaaacccaaaaaaaaaaaaccccaaaaaaaaaaaaaaaacccaaaaaaacccaaaaaaagggctttccaaaaaaaaaaaagacagacaaccccaccccaaagaaccacaaaaaaaaacaaaaaccccgatctccctgaaaaaaaaaaaaaaaaaccccccaaaccccacaaaaaaaaaacaactataaaaaaacaccaaaaaaacaacc

SEQ ID NO: 340887 - DNA, 191 bp, Zea mays
  unsure (1)..(191): unsure at all n locations
aaaaaatattaaaaaanngttttttccacccnancnaaaataatatggggggtttttataaaatttttttcccccccaaaaccaaacagaaccgacaaaaaaaaaaatacaaacaaacaacaaaataacacaaaaatacaaaaacagaacaatcaaacatcaaaaaacattcaaaaaaaaatatccaaaaa

SEQ ID NO: 340888 - DNA, 264 bp, Zea mays
  unsure (1)..(264): unsure at all n locations
ttcccgggtcgccgccctttttttttttttttttttttttttttttttttttaattttttttttttnnnnnnnnnaaccaaaaacggggggcaaatttattggccttttttaaacctccccaccaaaggtggggccggttgggtcaatacctggtggaaaaaaacattgggtggccaacccaatcaacccccttagtccaaccttcctttaatttttgacaaatttgggggttttgggccccccaaggaataaaaccaattttt

SEQ ID NO: 340889 - DNA, 210 bp, Zea mays
acatcaacacttaaaccttcgtatcacctacaaatacaaaacaggggactcttaaccagttttttccccaacaacaccgacacaaaaatctccaaaacaaaacagacaacaaattcactacaatctcaaacaaattacgaccaatacccccaccatcaaacacacggagcactaactcatacaacacccaggccacaaccagtacaaacc

SEQ ID NO: 340890 - DNA, 386 bp, Zea mays
accgtccgattccgggcggcgcctttttttttttttttgcggacatccatcagatttttaataacgaataagaaatgcgagaacgcaaaattcattcttatagagggagtgcactgcaaactgagacaagaaagcacaaactgatggcggtgttatcgcactgtacatttcttaggtcacatcttccaagaaacatagatgatcagggttatccaatgggcacaaatacttcgcatgcttagagaggtgttgatttctaggaacttattttagtctatccattttattccattcaagtctctgaattaccaaatactaaactaaataagtttgattccgtgttggaattagggacttaaatgaaaaaatggagactaaattaatcc

SEQ ID NO: 340891 - DNA, 426 bp, Zea mays
ttcccgggcggccgcccttttttttttttttttttttttttttttttttttcctttttttcattttttttttttttattttttttggggggtttttttatttttttttttttttctttggggaccgggggcaaatataaaacctcggaagggcccacactggatgggggccgggaaaaaataaagggccccccccaaaacctttttaactaaaaaaaaaattttggccatttaaaaaggctttcataaccataaaaaggggccaaaaaaacaataatttgagaaacatttttaacaccagggggggcaaaaaaaaaccccccaacatttcacccccccccttgggtggggaacccggaaaactttttggtaaccacaatttccatttggccaaaaccctcaaaaattttcttggccttgggggggg

SEQ ID NO: 340892 - DNA, 398 bp, Zea mays
tcccggtcgccgccttttttttttttttttttttttttttttttttttttttttttttattttttttggacggggggtttaatctaattttctctaaaagccacaacatattcgggccccgaaacattacagcgaaaataaatgccgtccctaggtttaagggaaaacagcacgtgtggggggggatcatctggcagttttacaaacaggcctatttagagaatgagtccaccttgcacaaaaaaagtggaggtcaagaataatatttcaagccccctaagcaaagcaacaacaaatttcagttcccgagcattttaaagaattctgtttaacatgcatgccattttgaaccggttttattttcgaaaagggaattttatccgtgggttagttttttt

SEQ ID NO: 340893 - DNA, 285 bp, Zea mays
cgtcctgattccgggcgccgccctttttttttttcgatcaggtttttagctttatgtttacgacacagcaccacagggggagatcttcaaatttattggcaaacaaacgaaaacccacttatacccggcagagcaaccgaaaatgccaaaaacctcaacaaatggaaaaataaaccatcacagagctagctgggtaagataaacgaagcatgcacgcgacactatggcccccccatcttgcttaccagaagggccaaagctgaggcattcagccttggctcaaca

SEQ ID NO: 340894 - DNA, 343 bp, Zea mays
ttcccggtgcgccgccctttttttttttttttttttttattttttttttactttggtcctaaacaacataaagacataattggcacgggtcttttttgaaattttttaatctttgctcccagaagcaaagatcaaggcatagcgttcttctaaactcaggtttgcacagaacgggaaaattttcaacatgaacacacaataggttcatactactgctcagtgtgagcaaaattgttcgcactagagtaacacagaaagaccaaacaaacaacctagtatccgcccttaatatcattgaccacatcttacgggatgggattgactatctctatggtattcccct

SEQ ID NO: 340895 - DNA, 294 bp, Zea mays
  unsure (1)..(294): unsure at all n locations
attccccctanattttttttattaggggggttttttaaaaaatttttttcccccccaaaccccccccnnaaaaacccaaaacccatgcaaacccaaaaaccttaaaaaaaaaaacaaccacccccccgtttaaaaaaaaaaagtaaataaaaaaaaaccggccccccccaaaaaaaaaccccacccaaaatggttaaaaaaaccccaccccccaacaacaccatccaaaaaacccaaaagggaaaaaacgggatcccaaaacaaaacttaccagccaaccccctcccccccccc

SEQ ID NO: 340896 - DNA, 285 bp, Zea mays
  unsure (1)..(285): unsure at all n locations
gcggccgcccttttttttttttttttttttnnnntttaacgacggtttttttcttcttagaaacagaaataaaaacatgattttatttatcacagattttcaacggtcaacgcacaacagaaagggcgcaccacgcacgggcctgcactacaacattagaaacagaaacaaaaacatgatttcatttatcacagattttcaatctgcgtcctgcgctgcgctgcgctgcctgcatcaatgccaaaccaaaatgcatgctgttcctcgagactccaagtctgttcc

SEQ ID NO: 340897 - DNA, 101 bp, Zea mays
  unsure (1)..(101): unsure at all n locations
cgtccgccctttnttttttttttttttttttttttttttttttttttttttttttttnnnnnnnnnnnnnnnnnnnngnngnnttttttnnnttttttttt

SEQ ID NO: 340898 - DNA, 58 bp, Zea mays
  unsure (1)..(58): unsure at all n locations
ngcggccgcccttttttttttttttttttttatnttttttttttttnttttttttttt

SEQ ID NO: 340899 - DNA, 332 bp, Zea mays
  unsure (1)..(332): unsure at all n locations
gcgggcgcccttttttttttttttttttttttttttttttnnnttttttttttttnnnnnnnnnnnnnnnnnnngggggggtttttttggggtttttttgtttnttttttttnngnnttgnngggggggaggggttgggggggccgcccggtttggttaaggtgggaagggggttcccggggcccttttggggttttgggggttnggcgcggttcaagggagggggggggcaaataaaaaaaaaaaaattttaaggggaatttaagggaggggggcttttaaagggggggagggtttttaaagttgggggggttttgggagagaagaacccc

SEQ ID NO: 340900 - DNA, 322 bp, Zea mays
  unsure (1)..(322): unsure at all n locations
gcggccgccctttttttttttttttttttttttttnttttnnnttaatttttatagcaagcattatatgctatttaggcgttcttaaaatatactggatctcaaaacttagtttacaggtgctgcgatctcatgagtgctgaatagatggggcccaaggnacaaaannnaaaaaaaaaaggcttcaattttttaagggggagaaactagctaacatattcgaccttgaatttgctagctccacaatcaagtcaagtgctgtttcaaatgaaagttgggcggttcttagttttggggataccaatcccccaaagactgataat

SEQ ID NO: 340901 - DNA, 190 bp, Zea mays
  unsure (1)..(190): unsure at all n locations
agcggccgcccttattttttatttttaacggtagagntcagacagcgagaattcttgtcnggagacaagcaaccngggcgggcgggaactaaaagaaggtgaagcaagcacaacangaggaaccggagcaaccgacagaaagaagaggagggagcaagggggagagacaagcaggcaagcccccaaacag

SEQ ID NO: 340902 - DNA, 254 bp, Zea mays
  unsure (1)..(254): unsure at all n locations
gcggccgcccttttttttttttttttttttttntttttttnttntgtttttttaaaagctaanggattacgagcggaacttatagtccaaaaaaatatttcaatacaaaacataaataatccaaatttaaaacattggtgccggaaacgttttgagaggcaaggctgcctgaaaagggacataaaaaagctacggctataatacttcgacaaaaaggcctcgatcaacatgctgatataattcaatggttcctt

SEQ ID NO: 340903 - DNA, 503 bp, Zea mays
  unsure (1)..(503): unsure at all n locations
gcggccgcccttttttttttttttttttttttgggaagttaatttgttttttttaacaacttcagagacaaaagggacatatntagcaagcctcaaaataagtttgccagacacggataccatatatgcatatggaacgatgaaaaggcgttgaactgaaattgatcaaacaaatgttaaatcatcatgggaggattatgaaacccatcatgaaaactccgagtgctgtctgtcaagggcagcgcatttaatatctgtgggaaagcttatcctgctccttgtaccacatggcgtatctgcatagaagcattgaaacgaatcagaatcatcgctgccaatcatatgaattctgcaaccccctaatctaacgaggaagatcagttgttcacgattttggcctacaacaaaaggaaattcaatgaatcaagctgcatttttagaattgagtataatttatttgggcaaccaaatagaacaggataaacacagatatggtcaaccat

SEQ ID NO: 340904 - DNA, 54 bp, Zea mays
  unsure (1)..(54): unsure at all n locations
gcggccgccctttttttttttttttttttttttttttttttnnttttttttttt

SEQ ID NO: 340905 - DNA, 203 bp, Zea mays
  unsure (1)..(203): unsure at all n locations
gcggccgccctcgctgtggtgactcgatccttcgncatgtctcaaccgtatgattgctccaccnggngcacgnncnaagggaacgcaagnngagaggaactttatgaagagaaacaaaaacagncagaagagcacaaaggcgangaaganggnngcagcaccaaagcnacgggcngnncagacgaggaccgaaaagacacgcg

SEQ ID NO: 340906 - DNA, 290 bp, Zea mays
  unsure (1)..(290): unsure at all n locations
ngcggccgccctttttttttttttttttttttttnnntttttttnnnntttttttttanacccaacnaaaccancanngggagcgagataacacaggattaccacaaacatagnncgcnncaannncnccaggggacaccgaaaacagagnncaaggagccnngaacaaagggagcaaaannaaacgaggcaacaaaaaaaccaaanaccancagagcangcangaggnaggnnccacagaagcagaacaacaagnnngaagngcccaacgggagcggcggagggaaagg

SEQ ID NO: 340907 - DNA, 53 bp, Zea mays
  unsure (1)..(53): unsure at all n locations
gcggccgcccttttttttttttttttttttttttttttttnnntttttttttt

SEQ ID NO: 340908 - DNA, 310 bp, Zea mays
  unsure (1)..(310): unsure at all n locations
aaaaaaaaaaaggggggaaaaaaaaaagaaaaataaagaaaaaaaaaaaaaanaaaanaaaaaaaaaggaaaaaaaaannnnnaaaaaaaaaaaaaanaaaaaggnanaaaaannaaaaaagaaaagaaaaaaaaaaggaaaaaaaaaaagaaaaaanangaaaannaaaaaaaaaannngaanaaaaaanaaaaaaaaaaaaaaaaaaannaaaaaaaaaaaaaggagaaagannanaaaaaaaaaaaaaaaaaaaaannnaaaaaaaaaaaaanggaaaanaaaannaanaaaaaaaaaaaaaaaaaa

SEQ ID NO: 340909 - DNA, 231 bp, Zea mays
  unsure (1)..(231): unsure at all n locations
agcggccgccctttttttttttttttttggtagtgtctttcacttccactgtaagtggaaagagagancanaancacccacgacgggggaaacacaaaaggaagcacaaggaagggagcacagacggcngggaagcncaaaagaaangacagncaacaaaaccaagacgcacgaccccaanacacnggaagaccagaagagaacgccacacaggagggcgagagagagaca

SEQ ID NO: 340910 - DNA, 55 bp, Zea mays
  unsure (1)..(55): unsure at all n locations
cggccgccctttttttttttttttttttnaaanaaattaatttaaattttttttt

SEQ ID NO: 340911 - DNA, 232 bp, Zea mays
  unsure (1)..(232): unsure at all n locations
agcggacgcccttttttttttttttttttttttttatattttattaaagtttttttttttnaaaaaaaaacacggnnnggagggcaaaaaaaaaaaagggaaaaaagaaaagggnacaggacncnnggaaagaaaaaagaaaaaaggggaaagaaaataaaagaaccnaccaaccccaaaaccaagaagcccaaaaaggggagaacnaaaaaaaagggagaaaanncnccag

SEQ ID NO: 340912 - DNA, 252 bp, Zea mays
  unsure (1)..(252): unsure at all n locations
cgggcggccgccctttttttttttttttttttttttntttcttgagaattatttttattnncgagnnncagaccaaaagtggggtaaatcagaaagggtgtgctaagaaaaaaaaagatgcagaaaaaaaaggatacaagcgttcgaccgttcaagagaaacaaacgtaaccaaatattggggtaaacagcaacagcaaatacaatgtaaaataaaaaaaatcaagctatttaaaaaacagggccaagaata

SEQ ID NO: 340913 - DNA, 211 bp, Zea mays
  unsure (1)..(211): unsure at all n locations
ggaattaaaaaaaaaaannnnnngggaggcaaaagacaaaaaaaaaacaaaancnttttaaaaaaaaaagaaaaatgtgaagcgccaaaaatattggtgattccaacgaaaccaaaaattgggaaataaaaatggttcataaaaatttttaaaacaagggttagcctggaaaaactttttttaaaacctggaaacattttaagatccaacc

SEQ ID NO: 340914 - DNA, 266 bp, Zea mays
  unsure (1)..(266): unsure at all n locations
cggccggaattccgagcggccgccctttttttttttttttttttttttanaaattttaatntattttttttttnaaanannaannaannnaagggggggggaaataaaaagaaatttttgatattcaattanaaaaaataaaaaagtttttatgtgtataaaaaaaaaaagggtttttaaaaaatggaaaaaagntnggnaaaaaaaaaaaagggttgnaatattaattaaaaaaaaaagggttttttttgataaaaaggataatt

SEQ ID NO: 340915 - DNA, 424 bp, Zea mays
cgtccgtattcccgtgcggccgccctttttttttttttttttttttataaaccaaagccttttctcatggaagatcatgtatgatttctacaagacataatcaatacacactgcgagtataaaatataagccacaccttcctcgtatggcatcaggttatagcagaactagaatctgtcaacgacaacgatgtgaaaaatccaaacaagcaaataggcttcctgtatcttccaatgggatagaactagtcatcatccttgtagggggattcctccgggacttgcttgataagtatcacccgcatcttataggcattatccccgcgaagcatgttacgtacccatttcacctccgtttttatagacaccatttccaatgcccccctaataacttcacttaacaaattgcaatactgaatggcctt

SEQ ID NO: 340916 - DNA, 144 bp, Zea mays
gacctaaaaggtttgtaacaaccttcatcacccgttggttagacaataataagaaaaattatttggagattcggaagaaacaaattttgatgttcatatttgatgttatagtgtattactggtgtatgggggtcagtgccactt

SEQ ID NO: 340917 - DNA, 280 bp, Zea mays
  unsure (1)..(280): unsure at all n locations
aaataataaaaataccctacnttttttaaananaanantatttgggggggttttataaaaaatttttcctcccccccccccccccgcaaaaaaagaaacacaaaaaccacacccctcccatcccccctaaaggaaacaacaaacccaaccccacccccccccccccaaaacccccccccccccccacccttacccaccccaccccaaacccccacacaaacccccccccccccccaaacacccccaccccaaaaccccccccccccaccaaaaaccaaaa

SEQ ID NO: 340918 - DNA, 103 bp, Zea mays
ataaaaaacatctttttttttttttaaaaaaaaaaaaaacgagagggggtttcttaaaaaaatttttcgtccacaaacaaaaccaagaaaaaacactctcaaa

SEQ ID NO: 340919 - DNA, 107 bp, Zea mays
  unsure (1)..(107): unsure at all n locations
ttcccgggcggccgccccgttttttttattnnngcacaggtaaacaaaagggcaattgaatgggacaaaacgggcngacaccaagggcggggctcataacgagccac

SEQ ID NO: 340920 - DNA, 241 bp, Zea mays
  unsure (1)..(241): unsure at all n locations
ccgccctttttttttttttttttttcaagacataaagggcanagtccccttttattanngantataaactgagggggtgtaattcgatgtgttttgtaccctatcaagcacagaaggcaagccacatgtatttacactaattgatttgcctactgatttactataaattatatatctgatcactataatttttatgttattttcataaaattatcatttttcttttaacttatcttctgtt

SEQ ID NO: 340921 - DNA, 333 bp, Zea mays
  unsure (1)..(333): unsure at all n locations
cggatttccagggccggccgcggccgctgacctggaaggcctcttcaacgtcccgttgcaatattctattcgttgagaggacaagcgcctggaggaccaccttgccgatgtgcaggaagtctacgcacaacaggccaggggtcctagcacggatgcaaagcaactcnttccacttccggggccgccgccgccttaaggggaagcgtaatctggtggtggccattcccgaccaggtcaactgttctaccgggcggatacacattgaaacgggttgcttctacctggcacaactaggggaaggagaactggtgcttaggctgtcactagagatgc

SEQ ID NO: 340922 - DNA, 213 bp, Zea mays
  unsure (1)..(213): unsure at all n locations
aaanaaaaaaacgcaagaacttaattttttatgnncaacacacgcaaaagcaaggactttatagaagataccacccctcccaacatcaaaacataaccaacacaaaaacaaacaaaaaactaaaagaagcttaacataaaaggacaacaactacaaataacagagcaaacaaaatgcatccaccataaaactcaaaataataaaaatataaac

SEQ ID NO: 340923 - DNA, 232 bp, Zea mays
  unsure (1)..(232): unsure at all n locations
attattggcaaacacctgagagactccgtgattctcatatgggnccctgcnagcgacggccttattaaaacctgtgttgctaccaaaccggacggcagggggcatattgtagcctatcctgctttcattttttacaaattccttaacccattatcatctactgtagtgaggtagtattatattttccttgtctccttttcttcatcttctatgattggtcatctctcatctt

SEQ ID NO: 340924 - DNA, 79 bp, Zea mays
  unsure (1)..(79): unsure at all n locations
ccctttttttttttttttaataaaataaaaaaaannacattccatctttcaaaacaaaaaaaaaacggaagggttttat

SEQ ID NO: 340925 - DNA, 296 bp, Zea mays
  unsure (1)..(296): unsure at all n locations
atgcaacgncatagctctgggagaggtgccacctaaatttaattcacccgccagacanttacaacggacccgactgggacaacccacacattacccaacataaagcacgaggggcacataccccttcccaacactatggaaatagttcaacatcacctctgaaacaccacctttttacaatgccccacttgcatacaggcgagtccactccttcgctgtctcaaaagcttcagcttcatttgatttccagagtttcgcaatgttgtctgagagaggatcaatctgaatttggggca

SEQ ID NO: 340926 - DNA, 177 bp, Zea mays
acaaaaaaacaaacaaaaaaataacaaaataaaaataaaaaaatacaaataaaaaaaaattaaatcaaaaaaaaaacaaaaaaaataaaaaaacacaaaataaaaaaactaaaatttaaaacaaaaaaaaaaaacaaaaaaaaacaaacaaaacaaaaaaaaataatacaatactaa

SEQ ID NO: 340927 - DNA, 364 bp, Zea mays
tccgtattcccgtgtgcgccgccctttttttttttttttttttttttagagtataatatatggtttgtttccccaactacagctacaaggttggcgggtttcaaatgatccgtgtattatcgaaattttatttctgacactaaggactgaacaagaagctaaacaaaaacggctacaacatttacaccacaacatttctagcatgtcgtggtagggaagtgcaaaaggcaaagtaatgcttaaccacaactcaattggcgtggctgtaactagtgttcagaagattgcaacttaagattctgatggttctcagcaccaaccgttttaatccgctacatattaagacatacttatgctcaggaag

SEQ ID NO: 340928 - DNA, 222 bp, Zea mays
ccgcccttttttttttttttttttttttttatttaaattttgtcgaacaaaacaaatcatacaaaaccacggggggtttttttaaatttaattttcccaattacaaccacttaacccacagcagctaggaaataaaaacctatttcacaactcatataacaaaacaccagaacaagcctattcccaaaagaccactatcggaagatttaaccttaacctttc

SEQ ID NO: 340929 - DNA, 111 bp, Zea mays
tccgtccgattccggcgccgccttttttttttttttttgaaaccacacacccgtgctttatacaagaaaaaaggaggttactaggcatgtttccggaacagcacaccgtgt

SEQ ID NO: 340930 - DNA, 371 bp, Zea mays
gcggccgcccttttttttttttttttttttagtttgagttcattcatacttactttaatcatggaagcaatgaataaaaacccaggcggtaggtacacacactgctgagctcctctgcaaaacaacaaggaagcagcgaccaaagcatgctatgctgctgtcaaggccttccatggtacaaaatctcatacgaactgaaccagcagcagtcaagcgaccattcattcatcatctaaatatataagtcagcccagccagtcgtatatccagatacaacaaccccggcaacggcagggcgctcctccacgcatgcatgcattcgcgagcgacgtcggtgcgcctcaagccatggcgatgcagacagcaacaca

SEQ ID NO: 340931 - DNA, 197 bp, Zea mays
  unsure (1)..(197): unsure at all n locations
gccgccctttttttttttttttttttnnnnanatttaacagaaaagctccttcacccatccgacaggnaaaaaaaacacagggttccaaaagatatttgtttcaccccaacacaaacacggaacanncacagaatacacaccagaccccaacacatgagaccaccctagaggacccaaacatacctacccaaccaac

SEQ ID NO: 340932 - DNA, 365 bp, Zea mays
gcgccgcctttttttttttttttagtttgtgtaattaatcttttttttgtctccaaacactaattttaggagggtgtctcaattcattcttttttaaacaaacattttaggggcgctgtacaacaaaagctccataaacaacttttacgggatgcattatccaacagaacggttgagatacaagactcagaatattgagacacgaaactattgaacagcaaaattcttcaggtgctccaaagtcatgcttatatagtaccaaaaagctacaggtttgtttccatacttcacttttttgctttctttggcaccccattagatggagctggggctgcgacaggtgcttgtaggtattttgggccctg

SEQ ID NO: 340933 - DNA, 299 bp, Zea mays
  unsure (1)..(299): unsure at all n locations
cggccgcccttttttttttttttttatatatttgaatancttctcntttctttttaggacccaactaccaatggggggattacccagaacgttacttaaacaaacataagnnaagggngnngattacccattacggtactaatatgggaatgaaaaggcatcattggatctttcacctaggactggggcagggcgacttctggttagcctttgccttttcttatcaggggattcaaatgctggtttcccccaagaaacttgaggaaattgaacaggaagggaacgtatttatgcttcct

SEQ ID NO: 340934 - DNA, 197 bp, Zea mays
  unsure (1)..(197): unsure at all n locations
atattatacactanatatactcaaacataatatattaaagaggggttttatataaaattttttcccccccaccaacaccaagcaaaaanactnaacttgttttaaaaaaaccaacaacaatgaaatggcccaacccaataatacacctcacccacaacacaaaatcaacaaaaaaccccaacccaacaacatacaaa

SEQ ID NO: 340935 - DNA, 392 bp, Zea mays
acgtccgtattcccgggcggccgccctttttttttttttttttttttttttttggaggcggagattttttttcctcttcctcttctatctttactgttacagaaataacggacaaagtaaaagtgatgaattacctatactacttgtctgtgtgataattacatgttacagttggttgatctcccagtcctcacatacactaacgtctatggtcatcgtcttgttgccgtccttccctgtcccgggagacgacagcaccctgcagcaattccgtctcggagacttgtcccacaatgcgggatcgggcttcttaaccacgagcacgctgtccagcagggagtcggggtccgggatcttccaccggcaaaccgggcgtgcctcgccccgccgcc

SEQ ID NO: 340936 - DNA, 393 bp, Zea mays
  unsure (1)..(393): unsure at all n locations
tccctgtcagccgccctttttttttttttttttttttttatnctaatgcagattatgnctcttctatggacatgcctagacaaaggttgaggacataaaacacaatttcaaccactctgaaacacctataaatctggtgtgggtgaaaaacacatgcttcaggtggttgatctcccagtcctcacatacactaacgtctatggtcatcgtattgttgccgtccttccctgtcccgggagacgacaggaccctgcagcaattccgtattggagacttgtcccacaatgcgggatcgggctttttaaccacgagcacgctgtccagcagggagtcggagtacgatatctttcaccgtctaaccgggcgtgcttttacccgacttcgtcaccgttg

SEQ ID NO: 340937 - DNA, 393 bp, Zea mays
tcccggtgcgccgccctttttttttttttttttttttttttttttttttttttttttttttttttttttaaatttttttttttggtggggtttttttttttaaaaaggcgaaaaatccaagggcgcattttggcacaaaaaaaacgggttttaaaagaaattttaatgggtcacggaaacccaaaaccttaaatttggggctaaaagtctaaacgggggaaaaaccccaagaaaaaattcccccggccaaaaacgtttttttggggcaggggccccaggatccaagccccactaaagggggggcctgggaaacaccctaaatttggccctttttttggaggggcaacctggtggaaaacccctgggcagggttgatcaaccctttgggagggc

SEQ ID NO: 340938 - DNA, 328 bp, Zea mays
  unsure (1)..(328): unsure at all n locations
ccctttttttttttttttttttttaaatnttaaaatttttccttttttttccccaaccatttataatgaaggtattttttaaaaaatttttttttcaaaaaaaaccaaaaaaaattataatattaaaaaaaaaaaaaaaataaaaataattttatctaacaaaataaaaaaaataaaaaaataaataatacacaaaatataaataaaactacatttacatataattaaataaaaaaataataaataacaaaaaacaataactaacatataaaaaaaaacttccaaacaacaaataattataacataaactcaaaataaataatacaac

SEQ ID NO: 340939 - DNA, 72 bp, Zea mays
  unsure (1)..(72): unsure at all n locations
atttttactcgttcttgcgacgncanagctctggggggtgtcacctaaatttatattcactgcccaacgaca

SEQ ID NO: 340940 - DNA, 358 bp, Zea mays
  unsure (1)..(358): unsure at all n locations
ccgccgtaccgtcctgtatcccgggcggccgcccttttttttttttttttttactttaacttaaaatgtcagctacaataaaacaggccaccaacaagggggggtatcttgaaacttattttaacaccaagacaaaacgggntacagcgagcgcacatgagcaaaccctggccagacacaacataatcgcccagcaacacataccactttcgtcccttggcgctaaagccaaagaggacccaacagaaagcccgttccaacaatggctaaatcagaatgcataatcatacaaacgatgactgaccgccctaaagcacggaacttaatttgacacaacggcccgtgacagctgcaagcc

SEQ ID NO: 340941 - DNA, 183 bp, Zea mays
  unsure (1)..(183): unsure at all n locations
atatattctaaaaacgcgtaccnttanaannaaaanannaaaaaagggaggttaatatgaaaatttttttttcacaaaaaaaaaaaaaaaaanngggaaacacccaccaacaccacagacactccaaacgaaaaaaaaacaacctccaaaacactctaccccaataaaaaaaaaaacaaccac

SEQ ID NO: 340942 - DNA, 416 bp, Zea mays
  unsure (1)..(416): unsure at all n locations
tccctgtgcggccgccctttttttttttttttttttaatacaacagnatttttcttgactcataccgcaaaaacaaacgagggggccagaacggggaaaacatccgccaggaaaacccaccacaacacagaaacatctgagacacaaaagtgggaacaagccaatgactataaaaatggtgcagacgagggcgagcagaccctgaactaaaaacaggaaaaaaaaggggagcggaacccacacggcccaagtgtgtgtggcctcaacataccttcgactgaggcgatcacacgtcatagactgtatccagcctgacggatatatatccgtaaaggaatacactgtttacattgaggggcaggggagcaaaagcttgaaagggcgcaaaagcgagatcgtgggctaaagctctaaca

SEQ ID NO: 340943 - DNA, 362 bp, Zea mays
  unsure (1)..(362): unsure at all n locations
cggctcgcccttttttttttttttnnntttttttttttggggtttttaatatgaacaaagccgaacccccttgaattattgtcccttgaaaattatcttagaaacgcatccatcccttcgcggggcttattatccagccatataaactagctacaacctaattcctcaagcactatgctcttcgaaactactagaaggacatgttctcgccgcctagaattcagtaacaaatcaataacccacttcttggagtccacgatgaacctggtcttcttacctagggtggtggtgattgcattttcttcctccctccgcatgtcccccattttcttccccttgcggtgtgcgagtaagtactgatt

SEQ ID NO: 340944 - DNA, 443 bp, Zea mays
  unsure (1)..(443): unsure at all n locations
cggccgcccttttttttttttttttttttttttacaaaaattttgttctctttataaaaanttattatttttggtggggtttatttaaatttttttttttgtaaaaaaaaaacaaaaaaagtaaaggtaaaaaaatttggcaaaaataaaaaaaaaaagcttataaaaaaaaatgttaaaaaatggggaaattgtctgaatagagggaattttgggccaaaaaaaaaaatttccaggttaaacaaaattttatgaaaccacataaaaatttttaaaaaaagggctaaaagttttaaaagataataaagttttggggaagggttaatataatctaaaaaaaaaaacgtttgaaaaattttttaaaatttttgcctacaaaggtttaaaatgtgccaaaaaacaaaattcaccttattttaaaaaaaaaaaaatcttttcttaaa

SEQ ID NO: 340945 - DNA, 176 bp, Zea mays
  unsure (1)..(176): unsure at all n locations
aatgaatcacagatttatcncacanacnnanaaaaagaaacaaagggggctttttataaaaaactttttacccccaaaaaaaaanntaagtagccaacaaaaataccaaatcccattcaaaacaagcataaaatccaattccaccacaaacaatacaacactctgtgaatacacaa

SEQ ID NO: 340946 - DNA, 320 bp, Zea mays
tcctctagagtccacccacgcttctttttataaccatccttacaaaattacacacggtgtttatataaataactggggcggcttataaaactttcaaatctttaaactacaatatcaatccatcatacttattcaaatattataattttatccctcaatattattctctttaattaccaattcttataccaattataatttttccattaacttaattaaacctttttcaaaattatacaatatatatatcatacactctcccttttatcaatatattaacatttataattccatctataaatttattacaattcacccaa

SEQ ID NO: 340947 - DNA, 123 bp, Zea mays
aaaataaaaaaaaaaaaaaaaaaaaaaaaaaaagggaaaaataaaaaaaaagggggggtaaaaaaaaaaaaaaaaaaaaaaaaaaaaaaaaaaaaaaaataaaaaaaaaaaaggggcggcccc

SEQ ID NO: 340948 - DNA, 465 bp, Zea mays
aaaaaatcctctacatcacccaccccatctttctattcacccgcctacttcctctctccggctgggatctatacaataggggggcgggatttacttccaccattcctatcccctctacccctactactcttaccacccctcacataacaacccacaattaccattccccttctatcatatcttaaccaaacctattcaacttccagtttagttttttaaaccctcaactttccataaatctgttattctatttcactttctaatatttttatctcttcctcaattatgctctctctcttattcaactttcatttcctaattcttttttacctatattaatactatattatgttgtaaaataacattaatcaactcttttaaccccccactttatctttattatttcacccaactttttattattttttaattaacatttaatcctttcttcttcatatttacatt

SEQ ID NO: 340949 - DNA, 413 bp, Zea mays
  unsure (1)..(413): unsure at all n locations
aaacacccaaaaatcttcacccgttcgttctttaacaagaggagctgccgctataataatccttcaacattcatccttcactactaaagactcctataatacctcctttctgcttctttatcttcaattttactttttcattccattcctcacaaccctactttattatattctaccatctaacacntttaacatatttatcatcttattagatcaaaatcacttctttccttctttttacatttccttattaactctattcaagtgtaagtcttatcataaattctcattcattacttatattttatacttatgatttataacatttaatttctcataactactcttataacattttatattatttataacatattctctcttttatcattttatttaaaactttccattta

SEQ ID NO: 340950 - DNA, 357 bp, Zea mays
  unsure (1)..(357): unsure at all n locations
tcgacccactcactcttaatacttcccccaccttgaattcattccggctgtctttattcatacgagggtcgcctatatacaaccactttacttcttcncctcatcacataactacttgtttcccaagttcaattcctataccctcacaatcactcttaacatactatccaacctcctaaagccctaagtcatttttgcacattcttagcgcaaacttactattaattgaatccagctaacttcctgcttatcaattttcatatccactcactcaacttcttaaattaatctctcacacttcttagaccctttattatagaaatgcacgaacaacaatttatttttttcactaacaaa

SEQ ID NO: 340951 - DNA, 100 bp, Zea mays
tcgacccactcactctttatatcttccaccccaggaattcctcaccgcgaccttcatgcgtagcggggttgcctataatgaaacttattacatcttcgcc

SEQ ID NO: 340952 - DNA, 302 bp, Zea mays
tctttaaaaactaatatggtacaactacagtggtttatctccagaagagggaggcagataccagtggtagatggttatttctgcagttgcagtacatcttgatcatgtaacttaagatctagcgctacagcctacatgtaagtgtactatcttgctgatcgatcagacaacagcatcacctaacattcctgtgatttttattcagttaccagtgctgatttcaaaagtcaacaatgtcatatatctaagaatggaggtagtacaatttatttgtgatttttatttgaccgatcactggattt

SEQ ID NO: 340953 - DNA, 140 bp, Zea mays
tcttttcgccaactacaactcccaaaaccctgcctacatataaatgcccgctagtctccaataatttccattctaaaacactcccaaccctctcttctaatctactacttcttgtatttactatctacatcaacctactt

SEQ ID NO: 340954 - DNA, 263 bp, Zea mays
  unsure (1)..(263): unsure at all n locations
cgcccttttttttttttttttttttttttttttttttttttttttttttttttnttntttttttttttttttttgaaaggaaaaaaatatttttggggtagttaaattaacatttgataaaaaaaataatttataaaaattttttattttttttttaaaataaaatttacaatttcacaataaaaaatttctccaaaaaaaaattcacctatcccaaatatttttaaatatttaaaattttttactgaaaaaatattccttct

SEQ ID NO: 340955 - DNA, 296 bp, Zea mays
tgcggccgccctttttttttttttttttttttggaacaataagcaaggctaactgtatcaattgaagtgtcaagaattcaagctgttactacaactcgtaactgctctatcttttcggtgaactaaacgccacaaatatctagtacgccttactactacgcagtgaagtcttatacttcacaagcagaaagacgtgaacaacagtggttcgtttctggtgaagccaactgaagtcgtattgcagtaagcataccatggcaagttgtaccaacagatagccatgctctcaagcagag

SEQ ID NO: 340956 - DNA, 233 bp, Zea mays
tcccgttgcggccgccctttttttttttttttttttaaaatttattatagaaatacatttattttttttcgtttcatttttatagcagatgaggaataaagaagctgggggggggtgaacaaacttaacactattttatgaaacatgctttaaaaaaaaaccccttttccttttttccaagagtttgcctcaaccccaactcgggcggtgacttccaacactacaatcaattt

SEQ ID NO: 340957 - DNA, 216 bp, Zea mays
  unsure (1)..(216): unsure at all n locations
cgattcccgtgtcgccgcccttttttttttttttttttttttttttttttnttttttttttttttttttttnnggaaacgaaaattaaatatcagcttttgttaaacgatggaaggggggtttccttgttgatctatcaaactggccgaattaaatgtgccggagggcagttcaaccaagctggatccctgaacatcacaggatccccaacaatgc

SEQ ID NO: 340958 - DNA, 416 bp, Zea mays
  unsure (1)..(416): unsure at all n locations
cgtccgnattcccgtgtcgccgcccttttttttttttttttttttttttttttttttttttttttttttttttttttnnntttttttttttttgggttttgtttttttgggggtgggaaagggggaacttttttttcataaacattccatttccaattggcaattttttggaacttggggccccccaaattttttttgtttttttgttccccccaatttcctaattttttgttaaaccacaccagctttttttttgccctcccaaactttgaaagaacccttttggattttaacaaaacacaattttttgccttcactttttatgaggaaaatcctttccccctgttttgtttaaaactaaacccttttgaaaaaaaacccggaaatgccagtgttttttcaaccaaccccccccc

SEQ ID NO: 340959 - DNA, 328 bp, Zea mays
  unsure (1)..(328): unsure at all n locations
cggtccgtatttcctgttcggccgcccttttttttttttttttttttttttttttttttctttttttttttttttttttatnaancnttttttatagccgagccaaaaataaatactggcaggcctaaccatttttttcaccaaataaacatattcacacaaatcacttttttaccccatacccttaaaattcatttttcccaaaacaaaataccatattcttacccaaaacctttgtattccctctccaaccctttattttacttaaaccaccacccttccttattcctttccaaaaaccccctttttaatttttcctcttttaccc

SEQ ID NO: 340960 - DNA, 442 bp, Zea mays
cggccgccctttttttttttttttttttttttttttttttttttttttttttttttttttttttttttttttttgttggttttttttttttttttgggtgggggggccgcccaaacagttttttccccagttaaaaaaggggttcaaatgggggggggaaaaaaataacccggtttaccaaatttttctggaaaaaactgttcccgaacccttaaaaaaaagccttgttgttccccaaaactggtgacaaagcccagttccttagttcttggtgggggcaagaatttccaattgggaccccaacttttcctggggtgccttttgggccttgacacccagtttggccaattgttttttttttttgggggaaacctggggctttttcttccttttttcccaaaaggccccggggggtggaggggtgttccccccccccttttta

SEQ ID NO: 340961 - DNA, 52 bp, Zea mays
  unsure (1)..(52): unsure at all n locations
gnnngggnagggactcgaatttcagtttcatcattagacacaaaaattattc

SEQ ID NO: 340962 - DNA, 469 bp, Zea mays
  unsure (1)..(469): unsure at all n locations
taccgtccgtattcccgtgcagccgccctttttttttttttttttttttttttttttttttcttaatttttttttttttttntnttngggacccaagggggggtttaattacacacacagacgggcccagattcgtttactggtttacacaaaaacccaaggttcctttgctcaatccggcggtttttagcagcccaacaaccccacttgagaaattcatactagttactggctggatctgcatcaccacaagtcccaaacaatttgggcattcattccgatccatcctttaacaaagcgcttataatactaatgtgccgtgccaaacaacaagaacactccacccaacaagaaactgaaggcccaaatattccacactcactactggtcgcagtttgcacaatccaaccccaaaaaaaaaggggggggggggggggggggggtttaattttttattcctcaatttttt

SEQ ID NO: 340963 - DNA, 252 bp, Zea mays
  unsure (1)..(252): unsure at all n locations
cgccgccctttttttttttttttttttttttttttttttttttttttttttttttttnttttcnnnnnttnaaacaatgaacattttcttataaatagggagggacattttcaaggtaaagccatcaattacagatgtttgtcttattagataagtacacaggttgtttaaaagaagatggtttatttacaggtggatttcaaatatttccccctaagagctttcttggtcaaagaacatcccagtttttct

SEQ ID NO: 340964 - DNA, 324 bp, Zea mays
cggccgccctttttttttttttttttttttttttttttttttttttttttttttttttttttttttttttttttttttgtttttaggaaagggaacacaggtcattttttattgattcggatgggtcccgaaagcccagagaaatcaagaaaaattagacttgggggctcccccgggcttaaatgaacaaaagctttcatggggatcaaacctttattcggggatgcaaaaatatttttgggtccaacccttccacaattcataccctgtgagcctttttagatctttgagggaggaaacaggtccccctggacgtaatctttt

SEQ ID NO: 340965 - DNA, 361 bp, Zea mays
aaatattcaatcataggagggtttttttttatggggggcgggacgataaaatgtaccattcataacacaaattaaaaacatgttactctgcgtcagaaaacacaggtaaacactcatcattccaacaacttcaaaaaaactacataatattattataatggattaacactacttggccattctaacttcacatcctaaaaaacaatatccactccaccacttcccttgttttaaatatttttcttcacccttcactacaaaaaattcatagtattggctttacagtaaaaaaaaaatttacttcttagactccacccttaccatcaataatgtgtcactaactaaaatactttcaaccctc

SEQ ID NO: 340966 - DNA, 113 bp, Zea mays
  unsure (1)..(113): unsure at all n locations
atcttaataaaaaannaaatttttctcntttttttttttttttctctttagaaaggtttttttcaaccacgaggagacaccctctttttttntaaacatccactttaaaattt

SEQ ID NO: 340967 - DNA, 136 bp, Zea mays
  unsure (1)..(136): unsure at all n locations
annnnnncaccnaatctattgtatttaattccnnatcataaacatggcatggaaactttacatatggggcatgctttacatcctcctctctatatcaaaaatagacccatacattatttattactccactacactt

SEQ ID NO: 340968 - DNA, 368 bp, Zea mays
cggccgccctttttttttttttttttttttttttttttttttttttttttttgctggggacaaggggcccctttataatcagagctgttaaagctggcggcaactcaagacgttaggtgttcaatcacctccaaaatcattttgcgtcgactaggaaaacatggggaaaaaatatcgcagagggaaacttctgcactaatacaaacctttgtttgcaatcatcggggtggggttggctcttaatggaaacattccacaaaacaagtccaactccctgacaacacttttttgcccaaggatcttaccaaaaacaaggctaaaagggagagggttgttctaggcatcgctccaaaagtttatgttcttgg

SEQ ID NO: 340969 - DNA, 379 bp, Zea mays
cggccgcccttttttttttttttttttttttttttttttttttttttttttttttttttttttttttttttttttttggggttgttttttttttttggtgggacgacatccaacttcgatgaatagccttgcaaataaaaacagggtgtttttaacaacatttttggcccattggggggttccaacatttttttacaaaattcaaaatgggaacccccaggttctgcccccaatggggtggccccctccagggttttctcaaaataactcaaccctttagcccccgcggactttttttttaccggcttcttaattttttttgcccttgttacccttttatttttgacccttttggccgatttttttattatccttttta

SEQ ID NO: 340970 - DNA, 444 bp, Zea mays
cgcctgcaggtaccgtccgtattcccgggcggccgcccttttttttttttttttttttttttttttttttttttttttttttttttttttttttttttttttttttgtttttttggttttttttgttggtttttttttttttttttttttggaaaaaaactttttttttttcatttcaaatggtcattcaggggattggttaaactggcccttgcccccatgggggtgggggacacatttttacccaaacatcgccccttaaagacccaacttggttggttgcccggggtttttctacaacacaatttttttttaaggggggacaccccccgcaacaacctaagggccttgagttggtttttgtaagccccaaatttcccgaagttggttggcttttttggccgccaaaaaaccccggaactggcccctttttgggtttttttt

SEQ ID NO: 340971 - DNA, 334 bp, Zea mays
  unsure (1)..(334): unsure at all n locations
ataataaaaaaaaggaattattatttttttaattaaataaaaaaaaaatttatatttaaaaaaaataaattttttaaaaaaagaaaagaaaaaataaaattttttttaaaaaantaaaaaaaaaaaaaaaaaaaaagttatattttttaaaatttataaaaaattaattaaaaaaaaaaaattaaaaaattaaaattnttttaaaaaaaatgtaaataaaaaaaaaaaattataattgggaaaaaaaattaaaatataataaaaaaaaaaaaaaaaaaaataaaaaaataaatatataataaaagttaaaaaaaaaaaaaaataatatataaaa

SEQ ID NO: 340972 - DNA, 198 bp, Zea mays
  unsure (1)..(198): unsure at all n locations
ttttttttttttttttttttttttagattttttttttttttttttttnaantttttttttttttttgtgttgggttttattgaaaaagaggtaaaagaaaaaaattaaaaaaaaatattttaaaaaaaaattataattaatttntaaaaaaaaaaaccccttttttttatttttataaaaaaatgttataataatttt

SEQ ID NO: 340973 - DNA, 451 bp, Zea mays
  unsure (1)..(451): unsure at all n locations
cccttttttttttttttttttttttttttttttttttttttttttttttatttttttttttttttttgttttggttttttttaaaaaataggaggagaaannaannttttaaaggggaaaaaaaaaaaattaaaaaaaaaaaataaaaattttataatataaaaaattggaaaaaaaattttttgggtaaatttaaaaaaaattaaaaaaattataaaaaaaaaaaaaaaaaatttttttaaaaaaaaggggaaaaaaaaaagagtataaccatgtaattaattattaacaccctacccaaaaaaaaattccctcttcaccacctaaaataaaacacctttcccctccttcttaaaaaaacattttaaaaaaaaccaaatccaaaaatggcttgaaaaaaaacaccttttaaaacaaaaacaattaacaaataacaaaaccccctttttct

SEQ ID NO: 340974 - DNA, 227 bp, Zea mays
cttaaatcaatttatttttttcaggggtgttcatatacaacaacggtccgcgcccccaaataataaaacaacaaaacccttccaacaaaacagacaaaagccccaccctcccatatcccaacatttcacactacaacaacacccatcacacacaaaacttgttactcccaaaacaacacactgctaaaccaaactcccaaccacatcattcctactaagcaaccccc

SEQ ID NO: 340975 - DNA, 296 bp, Zea mays
  unsure (1)..(296): unsure at all n locations
ccgccctttttttttttttttttttttttttttttttttttttttttttttttttttttttttttttttttttttgggttgttttttttttgggttgggtgggtttttttnnggggggggaataaaacctcccccacccttttttatttttttcccccttttaaaaaaccaaattccccggttttccaacccccttgttcacattttggggggggtttttttgaaaacccccaccaaggggagggcccaaaaaaaaaaccctgttttccattttttttttttgtaaaagcattttt

SEQ ID NO: 340976 - DNA, 421 bp, Zea mays
cggccgccctttttttttttttttttttttttttttttttttttttttttttttttttttttttttttttttttgttgggtttttttttcgaggcggagaaagtggcaccccacctgcaaattaattagctttggcgggggaaaaacggttaaaatcgctaatttttaaacgacaaattcccccacccttggaaccccaaggggtcccaaaacccaaagtttgtttttttggcaacaaaaaagctggggatcccctgatgggcgaaagcccccccccaaaaattccccaagcaaaagggggtccctccccctgggccccctacttaacaggggggggcttggtgccggtggaaatcccgaggcggggcaaggccccaacggtttgcccggggttgcatacccccattgttttcgaatttta

SEQ ID NO: 340977 - DNA, 423 bp, Zea mays
  unsure (1)..(423): unsure at all n locations
tgcaggtaccagtcacgaattccaagagagtccgcccttttttttttttttttttttttttttttttttttttttttttttttttttttttttttttttttttttttttttttttttgaggggggagaaattaatttaaaatattaaaaaaaaaattttttaaaaataaaaaaaaaaaaaaaataaccccaaaagaaaaaaaaaactaaaaaaaaaaaaaaagtaaaaaaaaaaaaaaaaatgganaaaaacaaaaaacgccataaaggagaaaaaaaaaaaaaaagaaattaaaaaaattacaccaaataaaaattttcataataaaaaaaaaaaaaaaaactccccaaaaaaaaaattaaaaaaaaggggttaaaaaaaaaacgaaagataaacacttaataaagaaaaaaaaaaagggag

SEQ ID NO: 340978 - DNA, 372 bp, Zea mays
  unsure (1)..(372): unsure at all n locations
cggccgcccttttttttttttttttttttggagcgtgccacgcagcaattttcgtttcattactacgtacttgacaacggctacaacagcaactggtcacagcncggaaaaactcttctcccctcccctgcgtcgcacgcatcgcatcgcatcggagtggaggaagagaggccatcaccatgttattcgtacgtggttctgccctactaccactagcagcaccggtagtctgtctctgacccatcctattcctatgcatgctcccgtgcggcacctcagggatcagcctgtcgtcgtcgtcagggctgggccggtttgcacgcccccgccgtgacggccttcgatacgctgaagaaaaggggggcccgaccc

SEQ ID NO: 340979 - DNA, 183 bp, Zea mays
ccgcccttttttttttttttttttagcagggaaggcacggattcatttatattccaaaacaagggccccagagctaagattcccattacaatcgggcggcgtttatgaatcaagcatgctatctactggcctttgatcaccctacgagaacattaacgatttcacaagacatacatatgcttt

SEQ ID NO: 340980 - DNA, 319 bp, Zea mays
accgtccggatcccgagcggccgcccttttttttttttttttttttttttttttttttttttttttttaatttttccattttctttttctagtatttaattttaatttgtgccgaggccacattaattcaacattcatttcatcaaaactcaccaccacccattttcacaatacacaccaaaaccaatcccaacatttttaaccaaaaaaaaaaacatcaccaaactctccaattctataacaacacgcaaccacttccccccccgaataaaccccaactctactaacaacaacccaaaaaccccccccctccctttaa

SEQ ID NO: 340981 - DNA, 271 bp, Zea mays
gcggccgccctttttttttttttttttattctcaataacccggtagcaatgcaggggaattaacaactcttacaacatcaggtgttgtaaaccacacaatacttcagaacagacacacataacacgatagcaggagcaactctcggcagatcacgggataagggcagcacactggcctgatgctgcgtcatcagcaaacttctctagtactcgtcaccctcgtcgccatcctcgccctcatcgaactcagcaccgacctcctcgtagtcct

SEQ ID NO: 340982 - DNA, 256 bp, Zea mays
cgcctgcgtaccgtccgtattcccgtgcggccgcccttttttttttttttttttttttttttttttttttttttttttttttttttattttttttttaagggaaaagctttgtttcttaccatgtgagtcattccattattactgattgagagacatgaaacgaccgaaatgcaatccaaggcaaatggatggatggatggagatgactaccgaaagaaagggttcactctgatctggcggcgttttgttccacct

SEQ ID NO: 340983 - DNA, 458 bp, Zea mays
  unsure (1)..(458): unsure at all n locations
attaaatatatttatttttttttttttttatttattnnanattttaagtttttttttaaattaaatgaaaaattttttattatttaaaaaatattttaaaattatttttttttttttngggaacccaaggaccccccccccccccaaaaaaaaaaaaaacccccccccccttttccaaaaaaaaaaccccccccccccctaaaaaaaaaccaaaaatttcccccaacccccccccaaatattccccccccccccaaaaccctaaaaccccaaaaaaaaaatttctcctcccccacagataccccccccccccacccttttttctccctacaaaaataaaaaaaaccccaaaaaaaaacacacccttacccccccttttcccccccccccaatttaatttttcccacccaaaaaaaaccaccggcccccccccctaaaaaaaaaaaaaatttccccccc

SEQ ID NO: 340984 - DNA, 369 bp, Zea mays
tcccgtagcggccgccctttttttttttttttttttttttttttttttttttttttttttctttaatcttaaatcattttattcgggcatataatttcataggagggggcatcaccaatttacacattgaataatgtaagttctatttctcatacaacacaaatcttgcataaccaaaaattcttataaattgcgaggggccaccgataattttgtcacacattcaataaaaacccaaacgccactcaggatttttttctcccggatcctctttgcttattttcacaggatttgaatataaaagagtctagcagacactgaactatatgctaattaacacatgaaacccccccgaggattctttttttc

SEQ ID NO: 340985 - DNA, 141 bp, Zea mays
tgcggccgcccttttttttttttttttttttttttttttttgggaggaaacctcattatccatcctgtaaccatatttcttcagtaagcacaatagcattttccatcaaccaaaggcaggaacgaaaacaaatatcgtaag

SEQ ID NO: 340986 - DNA, 149 bp, Zea mays
ttaaaccaaggaacctgttttataccaatggatggggtggatcttcttaatttaaagatcaccccttctataaatttacagccaaacatttttcactttgttaaccaaattccaaccaaagctttttcaaaaattataagcaccccctt

SEQ ID NO: 340987 - DNA, 344 bp, Zea mays
  unsure (1)..(344): unsure at all n locations
attaattagtttttataaaaaaagaaggagggattataaaaattttcattaaaataatttaataatattattaaaaaaaataatattaaaaaatnaaatttaaaaaaaaaaaaataatttaaataaaattaaaaaaaaaaatataattaaaataaaattatattatttataaataaattaaaaatatnnnnaaaaaaatttaaaaaaaatatatataattataataattaaataaaaaattgttaatattaaaattaaattaataatataaaataaaatattaattataaaaaaaagttttataatatatataaaaaaaaataaataaattataattataaata

SEQ ID NO: 340988 - DNA, 166 bp, Zea mays
ctcattcaccgcttgcctatggactcaccccgttgtaactttttacgacgggcgccctactttcaaaacaaaatgttccttgacatcgacaccataaaccttattcttcctatctgaagctcgcaagcacgaatcactaatatactcctcctcaaggctactaaca

SEQ ID NO: 340989 - DNA, 140 bp, Zea mays
agagctagacaggggccggggacctaagctctatacattaaccaaccacctttttttaccccagacaattcctaccgggggtttttatcaactcgggccacttcaataaattcatcataccacggcaccggcacccctcc

SEQ ID NO: 340990 - DNA, 186 bp, Zea mays
cctttacaatgcaaataccctgcccctgcgcggggctgcagggcttgtacggcgctggcgccggcctgacgacgatgatgggcgccggcgggctgtttccctacgcggagaacctgaggcagccgcagagcagcccgctggcgggggggccctactacacccgttgtgggtagacgagcggggggg

SEQ ID NO: 340991 - DNA, 164 bp, Zea mays
  unsure (1)..(164): unsure at all n locations
tcgacccacgcattcgctaatatctgcgaccaacaaaatatncacgggcgttttttataatccgcagcgcccacaacactcaacttaactttaactccttccacacatacaaataccatccgacctctgcacataaattaacaccccgcaacacacatctccac

SEQ ID NO: 340992 - DNA, 517 bp, Zea mays
  unsure (1)..(517): unsure at all n locations
cgtcgacccacgccgtccgtttaacacnnaacaccgcactcacaactactccagcggggaatctcgtnccagcccgcgagcccgggagcagtaggtagatatttgtcgcnnaggggaacgggacggacgcccgtcgacggatagcgagcgacggtcgcgtcacccagcnnggagtaccaccctatcanatctctccnatcaagcgccnnntccacggcttgcaccaaattctaagaagaagcgcacctcnnaacgcctattaagcgagtatcacgcgaacgtttgcaccagannaggccatgggcacccaacggacccgtcaggaattcgatgtgaagcttcaaccaagcacatnnctggagcagcgggatcacggaagcgtgctcgcggagggttcgtgtgaaggatctgcccgcaagaaggaaccgatgaggaggatgcccaaggaggaacctctactcccttgtcaaccgtcgccggagatctcctgccgaggggcttgaaaagggctggggac

SEQ ID NO: 340993 - DNA, 191 bp, Zea mays
aaatctctctctctctccccattccccacccaacaccactactccatttccaatcccagctcccatacgtcaatctattattccaaaaatcctacctttcccatcccatttctggccgctacctcacaccttctcctcctcctaccaaaaaaacgcctccttcatcttcctcctaataccttatctacatt

SEQ ID NO: 340994 - DNA, 405 bp, Zea mays
ttaaagtcgacccacccgtcctgtttaggcccagctgcagcttcaagatttgtggcaactttaagggattccggtgatgctcttcctgtagccattggtgctatgaatttattacctgacctgcgttcaaagcagcttcttgtgcatttcttcctcaagcgtacagttgggaatctatcagatgctgagattgcacggcttaatttgtgggcattaggtctccgtgttctttccttattgccattgccatcacaacagcgttgttcttctctgcacgaacaccctcagttgatcgtagaagtactgttgatgatgaaacaactccagtctgcttctttgattttgaaagaattttcttccttgagggatgataagttaattattgcgtatgctaaaaaagcaatc

SEQ ID NO: 340995 - DNA, 254 bp, Zea mays
  unsure (1)..(254): unsure at all n locations
tctacccacgcgttcttctcctctaaaaactctnctccaacgcgcgcttttttctacctggggggcggccctaaaaccctaaaacccccccccttcctaaccacaaccaacaccttcgtcttctttcccaccactcaacatccatacctcatcttccacttcaaaaaccacctccgcaccatcgcttctaaagtcttgtctccgtcgctcatctccacccccatgccgaaactccacttttatacctacacctt

SEQ ID NO: 340996 - DNA, 416 bp, Zea mays
ccgaagctgatccttaagcgcccacctccgattagctttatctactccaagcgcaagaacccatcgacaccatgaggggttgctcttccctcgctctcctggctctcgctgcgagcgccacctccacgcatacaagcggggctgcggtgccagccaccgccgcggtcatctaccgcgcgggcatctgccacctccggttcacctgccacctccgggcatctcccaccgcggccacctgccgccgcggccacctgccaccgcggccatgtgccgccgccggttcatctgccgccgccaccatgccactaccctactcaaccgccccggcctcagcctcatccccagccacacccatgcccgtgccaacagccgcatccaagcccgtgccagctgcagggaacctgcggcgttggcag

SEQ ID NO: 340997 - DNA, 457 bp, Zea mays
  unsure (1)..(457): unsure at all n locations
tcgacccacgccgtccgccgtcatcgatctncgtttcaaataccatccgtggcttcgtttcctcgcggcgccggaggcgatctcaactccctatggcccaagatctaagattcgggatcctaatgggttcggcacggatccggaagggctggtggccacgggtggcctctgcagagtgaccgatgtcgagctcgtcgcccgtgaaccgacctccttcatctagcaccgactacatgancctacantgttcaagtaccgacactttgtgcacggaccagtggaaagcacccattgaagtcaaggggtgaaggacttccaaaacctctttctcttttggtgaagaaaggagcggttgcttttgtgtttggcttgcaaggaaccccctgaggaagatctccgtgnngggttcggttgggtgcctgaaatatgttgttgaagtctaccctggtgttttcac

SEQ ID NO: 340998 - DNA, 243 bp, Zea mays
  unsure (1)..(243): unsure at all n locations
cgacccacgccgtccgctgtggcctctgcatttgctttggcttgctggtccgcttcttccanccgaccaagggcgatcccgcgccatggattcgcgccgaccccgcgcggggcccgccttgccgtgctctcctcccaacctccgtggtgcaggggctcgaggaggctggcggggcttggagagggtctgccggtatctcgcgccggcgcctcgggccctcgcgcacggctgcgcttgctcgtg

SEQ ID NO: 340999 - DNA, 204 bp, Zea mays
aatcctctagagtcgacccactcattcgttaattctttccatctaattatttcatgcccccttttattatatacccacccgcgcctatacaaaaaaatcataccaaccttccacaataacaactataccatctatctttcaaaaattttttttcatacacaatataatataatatacaattacacaccttaatatcaaaaccct

SEQ ID NO: 341000 - DNA, 117 bp, Zea mays
  unsure (1)..(117): unsure at all n locations
cagtccacccacgcttcctgatcccctgatcataatattcanccggcgctattttataaacgccgccgcggccccatccnnataaatactaatccctctccaacagcaaatatctac

SEQ ID NO: 341001 - DNA, 180 bp, Zea mays
gtaagctggatccttaatcacagctatatgacagcggcgccggaattcgaccgggcctgagcgtaccaggtgcctataatagtctattaactgcgtatatggcatagctgttctgggaaatgtatcgtacattcaaacatacaccgagctaaggtaagctggtgctaatgaggactatac

SEQ ID NO: 341002 - DNA, 283 bp, Zea mays
  unsure (1)..(283): unsure at all n locations
actcactttttatattttcccncccccnaattacnnaccgccgctttttattaaaccacgcccccctataataaataatattaaatcttctcntaatcatccccataactatttcctatataaaataattatcccctcacaatttcatacaacatactacccncaatcataaaatacaaacccctcccttcctaatcacttaactaactcacattaattcccnttccctcacttcccccttttcaaacacaaaacctttccttccaatttcattaatcaatcc

SEQ ID NO: 341003 - DNA, 196 bp, Zea mays
  unsure (1)..(196): unsure at all n locations
gatcctatacagtcgacccattccacctttgatgttaaaggacccgggaccacccccggctgggttcttatcggcgggggaggcgctttctctaattangacatccatggcgccgcagccggaggatgatattatgaacgagaagaatccccccccgctcgacgaggatgacatctcgctcctcaaaacctataga

SEQ ID NO: 341004 - DNA, 223 bp, Zea mays
  unsure (1)..(223): unsure at all n locations
aaagagaantcccacatcaacattgtggttattggccacgttgactctggcaagtcgaccaccacaggacacctgatctacaagcttggaggcattgacaagcgtgtgatcgagaggtttgagaaggaggctgctgaaatgaacaagcggtccttcaagttcgcatgggtgctcgacaagcttaaggcttagcgtgagaaaggtatcaccattgatatcgctc

SEQ ID NO: 341005 - DNA, 476 bp, Zea mays
gcggccgccctttttttttttttttttttttttatttttttcttttttttttttttttttttttttttttttttttttgttttttttttttttatttttggttttttttcagaacaaacaaaatcgaacccggaatatccccgcggggaatttaaaaaacttgttacaaaaaatcttaatttaaaaagtggtcaaaaaaaaaaatttgggggcagagaaaaaccaattgaccagaaaactttttagggtgacgtaaaaaacaaccccatgtccaaactctcctaaaaaaaaaacttggaaaaaaactttttgggagaaagaaccttctgccaaaactaaattcccttgacggggctttaaaggttaaaacaaacattttttttggggtggccgggaacctccaggggtttcccaagaacgaacttgggggccctaagtattttcaccttggggaagaaaacactttgaagggggaa

SEQ ID NO: 341006 - DNA, 245 bp, Zea mays
gcgcgccggaattcgcggtgcggccgccctttgttttttttttttttagactcattaatgagaaccactttggtttttggctttgatgagcttgttgaatctgggttccagggatacaggcgtggacaatattctagggtggaaaatatattcgggacactagcacatcacaaaccctgtttactgacaggccgtacaaaaacacatactacgggatttgcaattggttgcaagatttctaaatt

SEQ ID NO: 341007 - DNA, 431 bp, Zea mays
cggccgccctttttttttttttttttttttttttttatttttttatttttttttttttttttttttttttattaattatttaattttttttttttttttggtttggttatttaaatattaaaaatatattttattaatttttttttttattaacaacatataattattttttttaaaaaacaacaaaaaaacatgattttttttccccccacacaaaaaaaagaaaaaacttttttttgaccaaaaaaaaaagtaaaaaaaaaaaacctccaagacttcctaaaaaaaaaaaaaaagcgagagaccccacatcctttcccctaaaaaaagccagaacaaaaggttccaatacaaaaaaattatgtccttaatataatgtcaaaattccccctctaaaaaaacaaaaaaaaataaaaacccggcattccttt

SEQ ID NO: 341008 - DNA, 195 bp, Zea mays
  unsure (1)..(195): unsure at all n locations
tgcggccgccctttttttttccatttttttcttataaatgattcataaatttttttttttttgcnnttatgttttttttatggtgtttcctttatcaaaaggggtgtggggacaaaaaagcctgcaacttcccccgagggcatcccaacattgtgggcgcaccaaaagattcttttaaaagttccccccccatag

SEQ ID NO: 341009 - DNA, 478 bp, Zea mays
  unsure (1)..(478): unsure at all n locations
ngcgggcgccctgtgttttttttttttttttttttttttttnnnnnntttttttttttttttttttttttttttttttttgttttggggcataaacaatgggggcttggtttttcgttttgtggggggcttcaaacaaaaaaaaaaaaaattttttttggccgggtaactggaaaatgaatttttttagtttcttccccctgaatttaaaccattcaggggggccggctaaaacaaaccccccaacagggagtttttaacaaaatttcagatcttcttttttttttttgaggtggccaggtttaaccacccccatttttccaccccggggattttcttcatggtttcccggaagactttaaaaacttgggcgaatttttttttaagcccacccttccgtttttttatgtagccggaggggaaccaaccagtttttcccctgtttttacctttgggccattcattttttgacacctttt

SEQ ID NO: 341010 - DNA, 398 bp, Zea mays
cggccgccctttttttttttttttttttttttttttttttttttttttttttttttttttttttttttttttttttttgttttgggattatattatcggtggtgggtaggcaaaaacttaaaagccattgttacctgtggcttttttgaaatcccatacccacaatcaaactttgggggcttttaactgctgaaaggttaatatctttgaaaaatgaaaccttgtttgaatgcccttgccccaaaaagcaattttttaacatttttgaagcatagggccaaatataaaactcaaggtgcaatagccctccaaaacaaaaggggcccggccagaaatattcccctagggtgtaaaaaccatgttgggggggacaatgtccccattataagccttggggg

SEQ ID NO: 341011 - DNA, 466 bp, Zea mays
  unsure (1)..(466): unsure at all n locations
gcggccgcccttttttttttttttttttttttttttttttttttttttttttttttttttttttttttttttttttttggttttgtttttttttttttgggggtttgtttttttanaaaaagaaccccaggctttttttccggttttaagattaaccaaaattttcaccgtcggcatttttggccaagggttttatttaaaaagccctaaaacaaaggttttaaaagaaaaaaaaactttttttttaaaaaatccccccggattttggcctttccccccacaaaaaaatttttttttttaccccaaaaaaacagtttttagaggggcaacccccttctcccacccttgggcagtcgggggggggttttttttgccccaccctggggggccacccagggggggtccggtgcccccccccaaaggggcgggggccccagtttgtccccaccctttcccggagggaacc

SEQ ID NO: 341012 - DNA, 241 bp, Zea mays
gcggccgcccttttttttttttttttttttttttttttttttttttttttttttttttaaaaaacaagtgacacaacacggacactttcaacatttaaggggataacattgccaattccaccaacatggtttttttactaaaacatattgccttaaaatattacccggattaaaactttgggggggttggccaaaaaaagcggtttattcttcaaccaggttgaacccattttcttaatcc

SEQ ID NO: 341013 - DNA, 427 bp, Zea mays
cggccgccctttttttttttttttttttttttttttttttttttttttttttttttttttttttttttttttttttttgtttttttttttttggggggggaaaaagacactttttctggtttttaaacacataaacccattgggacaaaaacccttacaggttgggacatggtttgggcccattttacaggcaggaacaggggcctaaacaacgggtttccttttaaagatccaactgaacttggccggccgggggttgtcctttttggccctgtcctcggggcgcttcggggcccggggcattcttggggcggggccccaaacaaagtccctggccctggggcccttggcggagaggccggtttccagggttttcaggtttcaccgtttgacaagggactctgcgatttccgcgttgtcccggggg

SEQ ID NO: 341014 - DNA, 369 bp, Zea mays
cggccgcccttttttttttttttttttttttttttttttttttttttttttttttttttttttttttttttttttttggggtggggggactccactggggggttgcatttatgggaacaaattagggggtggtttggtgggttttacaccgggtaaaaccttatttttgggggcttacttatacttttaccgatttttaaacttttcttttcacaggccatttttcataaaaaacggtttttttgggaaccatattgatgaactaccctaggtttgactcatatgggcaaccaaaacactgtttccccgttttgtatgggacatttcactgtttttaaaggataatttgaatatattttgtgggaaccc

SEQ ID NO: 341015 - DNA, 478 bp, Zea mays
  unsure (1)..(478): unsure at all n locations
ngcggccgcccttttttttttttttttttttttttttttttgaaggcaatacgtcatctttaggcaaccgaccgaagcaaaaactgaatcacaaacaggacactgaggtcaaattgcgttgctagatataccgagattatgatataagcagtctcctttcaagttggttgacttcataaggcattaaacagttccctacgttgagttccagctaagtcaaacaacaacaacaaaaaatctcccaaaagggtcacagttccgcccagccacatcatccacggacaacattctgaaccaagcgcaagggctcagttctccaaatcatcgccttcatcgtcatcatcaccatccaaatcatcatcatcttcatctccttcaaattcatcgtcaacctcattgttgaagtacttcaaaggattaggccacaaatcttccttgatgatctccgccacctcatcttgcacaccatcagcaagac

SEQ ID NO: 341016 - DNA, 379 bp, Zea mays
cggccgcccttttttttttttttttttttttttttttttgttttttttttttttttttttgtttatcttttgtggtttttttttggaacggggggttatttaattgagttttttaacagtctaataaggctaaaaaagcttccgcctttttacaaaaagtggcctgggggattagacatttaaatcagagccttaacaagggtgcaactattgtttttatgtttcggccactagccttctttggtttgccttttaacaggagcaaaatgtttttggatttttcccctccctgcactcaaattcattggggggggaaccagttgccattttaaaaaccatcccgtgcaggcggtggaaggttgacctccccttgggtggg

SEQ ID NO: 341017 - DNA, 360 bp, Zea mays
cggccgccctttttttttttttttttttttttttttttttttttttttttttttttttatttttttttttttttttttgtttttttttttttttatatgggatttaattttaattaatatttaattataaattatattttttttaaaaaaaaaaaaaattaaaataaaaggaaaaaaaaaaaaaaaaaaaaaaataaaaaaaaaaaaataaaaaaaaaaaaaaacttaaaaaaaaaaccaaaatataaaaaaaaaaaaaaaaaaaaaggcctaaacataaaacctaaaaaaaaaatgtaaaaaaaaaaaaaaaaaaagaaacccgacaatataaagaaaaaaaaaatatatatatatagt

SEQ ID NO: 341018 - DNA, 429 bp, Zea mays
cggccgcccttttttttttttttttttttttttttttttttttttttttttttttttttttttttttttttttttttggtttttttttttttttgtttggtttttttttttttttaaaaagaaaaccggcccaaatttttttttttccccggaaaaaaaaaagggcccaaaaattggcgaaaaaaaaaaaacggggttgggtaaggccccccaaacccaaacctggtaaaaaacaaaaccccctaaaattgtccagggttttccccaccaaaagggggaccaaacccccccgggggggcaaatgttttgacaggactagttccccttcccaaaaaaaaaaaaaaagttgttttaaaaccccgggtggtttttaccccaattgggcaaaccccccttttgtgcctcccgggggggggcggggccccccca

SEQ ID NO: 341019 - DNA, 476 bp, Zea mays
gcggccgcccttttttttttttttttttttttttacgccacaatggatttctttcagattccattactattaaaaatgactaagtttaacgttgactcgccaagtctaacacaaccatcctctttaccaaggtttaacctcatccactttcttcttttcaatatatataaaaaatcagtagttcgtttaaacaacagcaacaataatgacaactcaaaccagtttcatccgttggtatcctttttgcagagcttctgacctggctttttataatgagcgtcgtcataatgccatatcctgagaactacgagatagaatcatagaagggcgagcagttcagcatacagcacaacatgccaatgttcattcttccctcctcaaccccaaattctccttttctgagccttaacctcaagcaacctcccataagttagcatgctacgaccaattagagacgcagaggatatcaggatcac

SEQ ID NO: 341020 - DNA, 232 bp, Zea mays
gcggccttattttttttatttctctatttttctctatttttttttttttttttttttttcttttttttgttgttgggttttttttttttttgtgggggggttttttttttttaaaaaaaaacccgctccaaattttcttttttcccccttaaaataaaggggcccaaaaattgcggtaaaaataaaaccctggtttgttaattacccccaaacccaacccgggttaaaaact

SEQ ID NO: 341021 - DNA, 465 bp, Zea mays
gcggccgccctttttttttttttttttttttttttttttttttttttttgaacaagcagaacagtttacagtgatacgaaattgttcacagattcacataggtaacaaagttacaactctgattattgtcatacatgttcaactcgaatatgtggaaaactgtttcaaagcgaaaatgatactaacgaaaactgagacgacaggactcattacgcagacacaactcacatactcaacaaatacggctgaaggtgtccgatgacaaacacaaccaacgataatagtaaacatgtacgactcagttgtccgacgtccacctgctagttgctctttttagtttctaactcgtaagcattgcgaagccaagcgattcttccttcctttgtctccaagtttgcaaaaacatttctatacttcttatgaatcagaagatgcgtggcaaacaaatgtatttcgctcccttca

SEQ ID NO: 341022 - DNA, 212 bp, Zea mays
  unsure (1)..(212): unsure at all n locations
ttcccgngccgccgcccttttttttttttttttttttttttatactaaatatttatttttttttttttatttaataatttaattttggtttgttttttctaacaaggggtaggattcaacatcaatacactaattaaacaagaaaactttccaccaacaacaaattcaatacaacaaaagcacccaaaaaaccacaaagcactcaccaaccc

SEQ ID NO: 341023 - DNA, 445 bp, Zea mays
  unsure (1)..(445): unsure at all n locations
cccgccgtaccgtccgnattcccgggccgccgccctttttttttttttttttttttttttttttttttttttttttttttttttttttttttttttttgttttggttanttttttattgggtttgggggccccaaaggaacacacattactgaacaaagcttggaaggggcaaaaaaatttcagggagggaaatttatcaggcccccccccttcgggggaaaaaacttgggattgttaatgcccggcgggtttgcccaaattcaaggaatcccccggcttggttacgggttctaagaaaaaaaacccattcagtttggtttaaacaaaaaaagggtgcccttttaatttccccaccctttaaattcaattcataaaccctctgatcctccctaaataaatggatccccaagcctttcatcccttggcccccctttttggggactt

SEQ ID NO: 341024 - DNA, 440 bp, Zea mays
cggccgccctttttttttttttttttttttttttttttttttttttttttttttttttttttttttttttttttttttttttttttttttttttttttttttttttggggaccgaaaaaaatgtgtttgtttacggcccccgtttacacttgtttttttaaaagtttttgcagcattgttaaatttttaaaaaccgggaattttttgtaatacctgccaaatgcaaaacccaatttcaatggattactttaacagggaaattgtttctggaaaaagtttttgtttgaaaaaaaaattttgggcccaacctaacaaaaggtaacacgttttttttattagggacgcattttttaaacggtggggccaaaaggttggtgttctttcaaagagcttcacagggggacttgtttgggggggggggccattttctccgttttttt

SEQ ID NO: 341025 - DNA, 400 bp, Zea mays
  unsure (1)..(400): unsure at all n locations
ttcccgngccgccccccttttttttttttttttttctttttctctttttttttttttattttttttttttttttttttatcattatttcttttattattttttttggggcaccctccatttttaaataacctttcattttttcatttactttgagaaacccccccccttggtatgttaaaaacccccaagaacgatccccccccccccaacaaaaacaaatcaactccccccggggaaaacccctttcccaagccccactatcccttaaacccaccactaaaaaattccaccccccccacctccccttaaaccctcccccctttaaggagaaccaaatagccttatatactnaaaacccaaatccccccacccccccccttttatagggtcaccaaaccc

SEQ ID NO: 341026 - DNA, 461 bp, Zea mays
  unsure (1)..(461): unsure at all n locations
ngcggccgccctttttttttttttttttttttacaaaaaaaaagagaatatttgtacttaattgctgaaaacgattttaatcacagtgcatgcactccttagtgttgagggtacttatgacacgacgcgaggaacaagacaataatctggacagctaattgctgtctgttgacaaaaacaacgactaaagtagcatgacttctagcgcttagctccagaccaaaacggacttcctaacacctgaatagactgaatgaagaaagccacgccccctgtctcgccgcattaaacgcggcagctgatctagttattcccaccgttactgttacacttgtcagggtgctagagcccggtcctttctctttcttcctttactttttcggcacgttcgtcgtctttccctcgtaagctctaaattgggtgctccctttatgngtccaatttatgtctttactgcacct

SEQ ID NO: 341027 - DNA, 287 bp, Zea mays
  unsure (1)..(287): unsure at all n locations
cggattcccgggcggccgcccttttttttttttttttttttttttttttttttttttttttttttttttttttttttttttttttttttggtttgggtttttttttttagggggtgggttttttattttttttttttttttnntggagggggnaaattaccaaataaaaaaaaacccccccccaaaatgggaagttttttttttcattgcccaaaaaaaaaaatttaaaaaggaaaaaaaatttagttacttttttggggggagggtattcaaaaaaaccgtatatt

SEQ ID NO: 341028 - DNA, 296 bp, Zea mays
gcggccgccctttttttttttttttttttttggtccaaccaatttttttttttttccaatttcatctacggagatcctggttaaaagcgaacgaagactacaaactagatgtgctcaccgcattgcaccctgctatgcagggtaggagcacactgcatttgttatgaaaaacaagctgttttacatccacaagcaaaaagccggtggagagacccttttcttacgagaaagagctattctatatgggggaccggaggacaccaaaacatgccttatcctagctccatctggatggg

SEQ ID NO: 341029 - DNA, 431 bp, Zea mays
  unsure (1)..(431): unsure at all n locations
ngcggccgccctttttttttttttttttttaccatttaattaaggaacggttcagtttcaaacccttggtttcaattgagagtgcgagttccacaaacaaagggaattgctaccctaaacatatacagccacaggagcatgagaaataaaatattggacaaacatggtttctatactcagaacagattattgttagagctcaaaccaacaattagtaatcaagtattgacctccaaatcaacaaccgttacaaaatctgtggtcgttttgccggcactccactgttcgtaccaccatcattcatttacaaccatctacaggttgttgtggtagttgttaacaccggcgtaagagttataggtagtgtttgcgaccgacccttgttacacggacgacacgattgtgatgcacacggtctttagcttcttgag

SEQ ID NO: 341030 - DNA, 288 bp, Zea mays
gcggccgcccttacttgtgtgctcgttttcttttgaggatccattttttttttctcgtgcttgctttttaagccggcaatttggtggtatatacacaaagggggacttccgggggggcccccgcctttaaatgggcaccggccagaggggttcacatacaaaccagcattgtttggtggtttgctcgcggttagcaaatgatcaaacaaaggcgtcaaaaattcccccctcaacggttgcccatttttaaaggtacaataataaaacggtgcttcaacttcccaccca

SEQ ID NO: 341031 - DNA, 385 bp, Zea mays
tgccgggcgccctttttttttttttttttttttttttttttttttttttttttttttttttttctttttttccatttaaaccggtaatttttttttaataaaaaggggggggtatttccaaaaattacccggttttaattgggggccccttgggaattttattttcaaaaaaaccttttttactgttttggtgtccaaaccgaatgttcaaacaagtgtttaaagaattctttcattaaaaggttacaattcttaaaggtacaattaaaaaaccgtgctccaaataaccaacaaatttacattttaactacaattcacattaaaatttgcaacacgaccgagctctaaaaccttctattataactgtcttgaaaaccttttttta

SEQ ID NO: 341032 - DNA, 223 bp, Zea mays
  unsure (1)..(223): unsure at all n locations
aacancctgaagaggtttttttcaaaagggagggggggaaattccccccaaaaggggaaccttttaccttcccaagggggaaaaaaggccaaaactttaaagaaccaaaaccacgccaatattaattacaaacctgcccccccccaattaaaatcaaatcccaagtgaccgtgttcggggcccaaaaccaaataaaaatggtccgtgaacccccccctgggcc

SEQ ID NO: 341033 - DNA, 345 bp, Zea mays
accgtccggatcccgggcggccgccctttttttttttttttttttttttttttttttttttttttttttttttttttttttttttttttttattttttttttttttttatattattaaattttatttatttttttatttaaaataaaaatttttttaaatttaattaaaaaaaaaataaattgttaaaaaaaaaaaaaaattaaataaaaaaaaaattaaattaaaaaaataaaaatctttgtaaaaaaaaacttattgaaaatttgattaaaaaaaaaaaaaccataactaatctacttttaaaaaaattgttcattttaaataaaaaattggaccccctcttt

SEQ ID NO: 341034 - DNA, 320 bp, Zea mays
cggccgcccttttttttttttttttttttttttttttttttttttttttttttttttttttttttttgggctacacctccgggttcattattcaccaagggtaaaaattaaatccacttagcccaggagcatccatccaattttaacccggattccttcaaccttaacccaataaataacctttggttaacaccgccaaaaccaacatgggtggaaggggcacctttcttcagctacaaattggttcattaatacatggtaacaagaataaactagacaagggcatagggtttcaatttttttagaatagcataataaac

SEQ ID NO: 341035 - DNA, 394 bp, Zea mays
cggccgcccttttttttttttttttttttttttttttttttttttttttttttttttttttttttttttttttttttttttttaaaaaaaacattttttatttgatttagccaagaacaggttacatgtaagcggggacggaaacaagggatacatacacggccaattagaagaaactggaaatagcagatgccaccctgggggggtcatgcaaggggggggacattactggcctttccggactaacattgggtttaaaacattgaaacacccccgggaatagaagttttaccctaaggggtaacctaacttcttttaatccagacagaacagagcaattcgaccaaaccaccgactttatgccggacgcgggggtcgactttagaggatccaa

SEQ ID NO: 341036 - DNA, 475 bp, Zea mays
accgtccggattcccgggcggccgcccttttttttttttttttttttaatttttttttttaattttttttttttttttttattttaattttttttttttattttattttatttttgtgttacattctatatttatttttttattattgcttactaattgtttaaaaaaaattattgataatgcttcaaaattatagatcatttcagttgccagcttttttaaaaaaaaaaaaatggaagtcgataaaaaaacaaagttttaaggagaaaataaaaattttaacattaaaaagaatatgtaagcagcataaataatacatagttttacacccaaattggttggcttgataacctaatactggacgcaactttcccgcgttaaaatatgcgcaaaagtattgaaactattacttttaaatgaaaatcctaaaaaaaattactctcggtattaaaaaagaatgttctataaaaatatt

SEQ ID NO: 341037 - DNA, 423 bp, Zea mays
cggccgcccttttttttttttttttttttttttttttttttttttttttttttttttttttttttttttttttttttttttttttttttttttttttttttggggggctttaccacagacagaataaaacccccatccttatgttcaaacacaaaatgttttgtgtcaaaaaaaaaactgggacaaaaaaagttcatacccgggggagtttttcaaacacacgtggaaaaaaaaaaggttttttgaaggctggagctgggctacaaaaaaggaaagcgggatcactgttcccccacatttgccagtttggttccaccataaattttttcccccttccaccctaatccaggatgcgacgggcccctttttttgcccttaaaaccacgggcattccggagggggggcttaaaatcgggggaataa

SEQ ID NO: 341038 - DNA, 476 bp, Zea mays
cggaccgtatccccgggcggccgccctttttttttttttttttttttttttcttttttttcttttttttttttttttttttttttctttttttttgtgttgtttttttttttttttggtttgttgggaaaaaaaaacattttgttccaccccatttttttttttttccacccccccccccgccccctaaagggggaaaaaaaagcccccccccccccccagggggggggctttttttccggccccaaataaaaagggtaaaaaaggggccgcccccaaagaacccccccgggggggggggggggaaaaaaccccggacccagggggggaaacacaaaagggggtctaaaacaggccaatgtttcggggcccgaggaaacaccccccctagggggggcccatgggggcaaaaaaaaccccccccccccgagaaaagagatcccctaaaaccccccccccctacccccctttaaaccc

SEQ ID NO: 341039 - DNA, 81 bp, Zea mays
gcggccgccctttttttttttttttgaagcaaactacactggtatatttaaggcatactcacacaacaaacttcggagaat

SEQ ID NO: 341040 - DNA, 100 bp, Zea mays
  unsure (1)..(100): unsure at all n locations
cggaccggaanggaaggcccggggcggccgccctttttttttttttttttttctcttggtgctttttctagatggggatatcaaaattgtaacatttaaa

SEQ ID NO: 341041 - DNA, 448 bp, Zea mays
cggccgcccttttttttttttttttttttttttttttttttttttttttttttttttttttttttttttttttgttttttttttttttttttttgggaaaataaatttttgaaaataggggattaccttttaaccccaatgcccaaattttctaacccggttcaaaaacaacccccccccttccaaagtaaaaattttcttgaccccagcttttaaaattacagggggaaagggcccccttttttcctttttgggggaattaacggcctttttgggggaattggccttcttgggccccccctttttaaggggttttttgggcaagaacccccggtttatttttggggggacccccccctgggccaaggggacccccgacaaaaattttcccagctctcttttttttgggatgggccaaaaccccttgcgcgggaataaaccggttttt

SEQ ID NO: 341042 - DNA, 436 bp, Zea mays
cggccgccctttttttttttttttgacacatcgcaggtacttaaaatttttaggaaaacaaaagtctgatactacaatgattttttaaaaagaaaaaacaattagcaacacttctaaaggttcacaaaactggcccagcttgcacctcggtccacaaaacagggcttatagctacagaagaccaaaaattccaaaccctggctggactagggtttaagcttataaaaccattatcgtagattggcagcaagacatgaaactgatttaacattggctacatgggtaaccaccgcacccttagttgtgacggtgccgaaagcaccgatgaggtcgggcatatgaaattacattgaggtctggttagtaagatcctgcaccaacttaatcatactcattgaggggcctcccagctgcattttgttcgcaattaggatac

SEQ ID NO: 341043 - DNA, 384 bp, Zea mays
cgccgcccttttttttttttttttttttttttttttttttttttttttttttttttttttttttttttttttttttgttttttttttttaataatttggtatttttttttttttttttttttttttttttttttttttttaaaaaaaaaaaaaaaaaatgaaattttttttttttggtgaaaaaaaaaaaaaaatttaagtccccaaaaaatttcttaattttggtttggggtttaaaaaaaaaaaaaatttaacttctcaaacattctcaacatgggttacaacagaaaattaaaaataaataatatacctttttttttttggtcctttttaaaaaaaaaaaacccaaagggaaaaccttttttttaaaaataatattctccc

SEQ ID NO: 341044 - DNA, 348 bp, Zea mays
accgtccgaattcccgggcggccgccctttttttttttttttttttttttttttttttttttttttttttttttttttttttatttttttttttttgttttttttattttttttttttttttttttttttttttataatttttttatttttttttttaaaaaaaaaaaaaaaaacttatttttaaaaaaaaaaaagttggaaattttaaaaaattgaaaaaaaaaaaggaacgtgtttttttaaaaagggtttttaaaaattttttaaaaaaaaaaattggtttttgtaataggatttaaaaaaaaaaaaaagtccaaaaaaaggggtgttaaagagggggggccttt

SEQ ID NO: 341045 - DNA, 446 bp, Zea mays
  unsure (1)..(446): unsure at all n locations
ttcccggngcggcncgcccttttttttttttttttgaaatataatgaccgttaaaagttttttttttacaaccactactatacacccgtgataggttttagacaaggggggtcgaaaaaaaattataaaaagcacttccgggggcgtatcccaatggtgattgaatgtttccataaaactgcgcgcgctttcaaaagggagcttattaactcgttgctgaaaatgtgaggaaccaccacggctaaaaccgatgttttaaaaagctttatttgtaccgccaggacaaaaaagccaccaagccacagatacattcatttgggaaaagccaacttaaagagggccaaaactccaacacccttttttagggtggaaaccccgttctttgtgagataagactaaaacaccttgccgttcctttacaaaaacgttttagttccccatttttt

SEQ ID NO: 341046 - DNA, 360 bp, Zea mays
cggccgccctttttttttttttttttttttttttttttttttttttttttttttttttttttttttttttttttttgtttttttttccgcccccccaattggtttggaccggttcaaatcacaacccaccaaaaaaaggggcccctgccccccttatacctgtgttaaaacaactgggaaaaaaacggccaccaatttttttttataacacgtaatccccccccacagggggttcacaagggatttgagattcccggccaaagtgttttttatttgttaaaataaaaacccttaaaaaaatttttttttaaaaagattttgggggttttttttccccattttaaggggggaatttttttt

SEQ ID NO: 341047 - DNA, 353 bp, Zea mays
ttcccgggcggccgccctttttttttttttttatttttttttttacatagaactgttttcttttattcattcttttatttatttcggtcaggtcatttacccattggcggagagaaaccacttataaattcccactacattaaaaaagacactcgccagcatgtttcccattaccataaaaagcgcacaccagggttacctaattttcatctgggacgggcaacctttttcaacccaaccttttctaatttagtgactttgaagctttaactaacatttcctgtaaaatatctcaacattttgttttctttttacatgatttatactataataccttggggtgctgaaaaaca

SEQ ID NO: 341048 - DNA, 467 bp, Zea mays
ccgtccggattcccgggcggccgccctttttttttttttttttttttttttttttttttttttttttttttttttatttttttttttttttggtgggtttttttttttttttggtggtgttttaaaaaaaaaaaaggggtacaaagaaaggtttaaaggggcccgaaaatttagggggggggggcccatctttttccaccctcaaaaggtgcaccaaatccagggggaaaaaggtgttccaaaaaaggggaactcaagggtttaccctaaaaaaattaaaaaaacgcgggggacaatttttggtaagggtaaagacttatgatcctttttcacttaaagaaagctcttggggtaaaaggaagggggggggaaaatgtataaaaaaggtaaacttaatgggggtggtgaaaaaaccattgttatgggaactttgggggggttaagaggaacaatttaaaaaagggggg

SEQ ID NO: 341049 - DNA, 482 bp, Zea mays
  unsure (1)..(482): unsure at all n locations
ttcccgnngcgccgccctttttttttttttttttttttttttttttttttttttttttttttttttttttttttttttttttttttttttgtttttttttttttttttttttttttttttttttttttttttttaaaaaaaagccccccaaattttttggggggggggtccttccttttccccctttaaaaaatgcccccctttccggggaaaaaaattttctccaccatttgaaatttaaggttttccctttaaaaaatttaaaaaccccgggggcaaattttttttaaagaaaaaaaaataaaatctttttttttaaaaaaaattattttcttaaaaaaaaaaaggttttttttttttttaaaaaaatttaaattttttttttttttttaaaacctttttgtgggtaatttttgggggtttaaaaacaacttttttaaaaaaaggaggggtttgttttcccaccctttttttttgtgggg

SEQ ID NO: 341050 - DNA, 466 bp, Zea mays
gcggccgcccttttttttttttttttttttttgtttttttttttttttaattgtatcaatcatattttttttttttttttttttttttttttatatcttttttatttttttttttttttttttttattttttttttaaactattttttttgttttttttttttttttttaaaaaggtgcccccaaatcctttttcccccccaaaatttcaaaaaattggtaatttgggccccaatcctttggccccaaaaaggaaaaaaaaaaggcgggcgggaaaccttggggtatttgggcaaggacacctcccttctttctgagcacccccgggggggttcccccccgggggccccggtgaaactccaaagccagattttccctcacctgcctccccggaacaggggcttaaatattttaacccgcccaaaaaaaaaagggggatattccaaccggccccgccgaaaattttc

SEQ ID NO: 341051 - DNA, 173 bp, Zea mays
cgccgcagtaccgtccggattcccgggcggccgcccttttttttttttttttttttttttttttttttttttttttttttttttttttttcttttttttttgggggaggattcaattttatgggggggtgcatgctactttaaatttttttaaagtgtaaccaaaattcaatc

SEQ ID NO: 341052 - DNA, 464 bp, Zea mays
cggccgccctttttttttttttttttttttttcgcttcatctcatgcattttttttaccttttcctttcatcatttctacatgatcagatcccataagatacagagcctagctggctccttcaatttatacaaggaattacagtttttagttcaagcaaaaacctcaaaattggtttgacaaagttgacaacctgtggggagggtgaaaaaatagccccacaggtgggggaaaagccaacatcatgggcaatgatgcaaccaaagaaaaaaaaagagtattacccatgccctccacacaaattgatcagcccatattcatttttagtcggggattgtacaaacaatatctggggaagagaaagatatcctagcagtctcagcgatcctgagagccatgatggatttgtatgctgcgagctctgcgatagtcatgagagactgggctctgttgcgcagttgaata

SEQ ID NO: 341053 - DNA, 436 bp, Zea mays
gccgcccttttttttttttttttttttttttttttttttttttttttttttttttttttttttttttttttttttggggttttttttttttttttttggtgtttttttttttttttttttttggggaaggaaattttttttaaaaaaggggcttttttttaattaacttcaaaaaaaaaaccctccttttttctttccaaacaccgccctttttttttaaaaaaaaatttttttttttttttaagaccccccccccccccaaaaaaaaaaaagggtttttttttttttttgcccaccccttgggggggggcccccctctccccccaaaaaaaaaatgggtttttttttggttttatcccccccaaaaaagaaacccccctttttttttaaaaagaaaaaaaaggggcgggccccccccaaaaaatatttttaaaaa

SEQ ID NO: 341054 - DNA, 404 bp, Zea mays
accgtccggattcccgggcggccgcccttttttttttttttttttttttttttttttttcgttttttttattttttttttttttttttaattttttacaaacatgccacatttggggttttttttttaaacaattcttttccaaaaggctggccccccctgggggcccctcctcgttttgaagaccgaaaccattttgttaacaaaaagccccgagaggcaaggataaaccattttttttgattgttgacccttggtgggaaaaaccaagttgcccaagcttttgcaccccttgggaaaacttggcctttttgacggttcaggggaccaacaccggtttattggtgacctccaatggggatcacaggaagtttgccccgggggctaggactgttatttcaaaaa

SEQ ID NO: 341055 - DNA, 381 bp, Zea mays
cttcgttcattcgaccagcaccggaaccatagtgtcacgtacatacatattgtgggttccactcctaccacgtttagagccggtaaaaatccacccttgcaaaaatgaccttgcccgaagaaaaaaacatttttatttgctggcgcattagtgcagatgtaccactcaatcccccttgccaataccttacaaaattggatggggcagagaacgctctcttgaccgaagcatccatcctagcctgatcataggctactcacagggcttcgggtgctctatagaagatgggtctcgaaacctaatgctgaaacctgacctgcttatcttgccatgagatgacacttaaatgggggagctctccatcatggactccctttgggg

SEQ ID NO: 341056 - DNA, 430 bp, Zea mays
cggccgcccttttttttttttttttttttttttgaaaccaagtcgataattagcacgtatattcaatgtcagcacaagcagtaaaacttcatacaagtcagcgcaccactgtacctagatcataataagtagacagcgtaagattctaacagcaagatcagcgtaaaacatcagttctctagtactactgtgcatggcataatgtaccgaccaaaaggtagaaacgctgaacaactgctgacttctctgcatggaatctggcttcattagcttatgatccatccatctccacaacgacaggagcaaactgcgctaacatggaaacaaaagtttcactaaggtgtgtgtaagagagaaatgctaattaatgctatagatcatttgatctcgatccagatttacctcgtcatcttcatcaataaggttcact

SEQ ID NO: 341057 - DNA, 458 bp, Zea mays
  unsure (1)..(458): unsure at all n locations
tccgggggcggccgccctttttttttttttttttttttttttttttttttttttttttttttnnntttttttttttttttttttttttgtttttttttttttttttttgggttttttttttttttttttttttgaaaaccacaccccccgggggttttatttttctttaaaataagccctttttttttcccttttcaaaaatttttcttggaatttgaaaaacccgttttttattggggttaccgttccaagaacttaaagttttttaaaatttccaaagccgggggggggccccaattttaaccctttttttttggcccttaaaattttaattttttgtgggatcccagggggggccaagggaaattttttttaaaaaatttttttttttggggggtgaattaattttggtttttgggggggagcctttttttttttggggggggggaggttttttt

SEQ ID NO: 341058 - DNA, 245 bp, Zea mays
gcggccgcccttttttttttttttttatgacgacgcttattttacaggcatattccagtgattaacatgacccaaataaacataacgaatctctcgaacctttatccacgccacgcatacatataattaacgaattaagagagtttgaagaacaagaacactgacaactcatgatttggacttaaaactgaagtggcggagaggattgtgttgtcgggcatgcatgcgaatgcaccttctagttg

SEQ ID NO: 341059 - DNA, 230 bp, Zea mays
  unsure (1)..(230): unsure at all n locations
gcccggaattccggggggggccgcctttttttttttttttttttttttttttnttannctttttttttttttttattttttctttttttgggttttttttttttgggaaagccaaccggaccgggttttttatttaaagcaaattaactttggtcgggggcccttccccttggatggggtccaaaaattttcccgggatttttttgggcccccaaagggggacttttttt

SEQ ID NO: 341060 - DNA, 455 bp, Zea mays
gcggccgccctttttttttttttttttttttttttttttttttttttatattgggtcacgataatatactgtaccgaacttcaatctgctttttacaaattgcaacacaacatcagcacgaccaagcagatgtaaatccaggtatgggtaccatcatgccccggattactaagaccaaacgacacacacatataccacacatgcaatgatacaatgcatgtatatactagcacatgcatgcacacatattttaccgactagttattgcagaaatataggaaccatgcaaattttcacaaaatgcaatgcagatatagttgatataacatgcatattcatgcatttggctccaaactccatatccactttttcagtacttggacttccatatgccatccatctctatggtggtgggcggggaccctgggccggtcacagacatcattgacgagatc

SEQ ID NO: 341061 - DNA, 387 bp, Zea mays
cgggcggctcgtccttttttttttttttttttttttttttttttttttttttttttttttttttttttttttttttttttttgtttttttttttgggagggggggggccacaaaattttatttgcaaaaaaaaaccaaacccccctgaaaatttgggcttacaaaaaaatctaaaagcttcagcgggggcaataatggaagataaccttccaatcaaaaaaaacccggtttttgatggggggttcccatgacttccccccctaaaccgaccacttttagacattacctcctggatgaaactggtgtgggcttaaaagggacatgggaaagcaccgcttgggggcccggtttttaactctaatttataaataacggggacgggttctt

SEQ ID NO: 341062 - DNA, 208 bp, Zea mays
accggaactgaaggggcggctcggcctcggccttttttttttttttttttactgaataatttaatcttttttttaacatttatggtttcttttttccagggtgggtctctttaaatgaaggggggggcccctaaatagaacatacacatttgcatttaccaagtgtacaaattgttgatggtttattaaaccaaaccattgcttttcc

SEQ ID NO: 341063 - DNA, 439 bp, Zea mays
gcggccgccctttttttttttttttttttttttttttttttttttttttttttttttttttttttttttttttttttttttttgtttttttttttttttcggggggtctcttttttttttttcttttttttttttttttttgggggaaaaaaccttttttttctattggccccaacccaactttttttttgcacacaccccccccgtggtgcaccccctttttcacccactttttttttccccctttattccccccctttttttttgcccgggcctggaactttttgataggcccccccctctctccctaaaagggggagggtttccctccccgcaaaccctctttttttttcaccaaaaccgggggggggaaggggttcttttccccccccacctttgtggggcccccccaatataaaaaaccccccaaaacttttcc

SEQ ID NO: 341064 - DNA, 255 bp, Zea mays
  unsure (1)..(255): unsure at all n locations
cggaatccccggagcgggcgcggtcgcccttttattttttttttttttttttttaattttttttgcatttcaaataggganctaaagagaagctgaagaaaaattacacttctttggttgggtgaatgaagcctgaaagagagagggagatgacggggggaaaaacgaaaatttgatccaacaaaacaatgccctgaaaagaccaaaaaaaagagcgaaaattaaaaaaaaattaaccaaggagaaacaggattc

SEQ ID NO: 341065 - DNA, 272 bp, Zea mays
cggccgccctttttttttttttttatttttttttttttttttttttttttttttttttttttttttttttttttttttggtttttttttttttttgtttgggtttttttttttttttttttttgaaaacaaaaaaaaacttatttcagggcccattttagcgggggggttttccacaatgggggccggggggggaaaaaaaagggaaaaacattgcccaccctaaaattaaccttgggcccccaaagggccccccccccaaaattattttgg

SEQ ID NO: 341066 - DNA, 434 bp, Zea mays
tttttttttttttttttttaaaaaaaaaaaaaattttttttttttttttttaataatataatttttttttaaaataaaaaaaaaattggtggttatttaaatttaaatattaatttaaaaaaaaaaaaaatttttaaaaaaaatattttaaaaaaaaaaaaatttcacaaaaaaaaaaaaaaaaaataatccccccccaacaattcaaaatattaaataaatcaatactacctaatctaaacactaaaaaaaaaaaaattaaaactcaaaaaaaaaaaaaaaaataattaaaaaaaataaaaaaaaaaaaatataaaaaaaactaataaaaaaaaaaaaaaaaaaaaatattttattataattaataaaaaacacaaaaacaaaaaatttatataaaataaaataataaaaaaaaagaaaaacaaatatataat

SEQ ID NO: 341067 - DNA, 483 bp, Zea mays
gcggccgcccttttttttttttttttttttttttttttttttttttttttttttttttttttttttttttttttttttttttttttttttttttttttttggggggttttttttttttggggggacaaaaaaaaccaattggccccaaaaaaatccggggcccgttaaaaaaaaaatttgaacccccccccccaaattttgggggccccaacccccccccttgttttggtacataaaacccatagcccgtttttaaaaaaaaaaggggggggccttcttcccccccccctttttgaaaaattttgtttacccccctttccaatgtttggcatttgggggggcctttttgggaccggggaataatttgcccccatgttttgcttttgggggggcctgaagggccccctcactgataaaagacttggtgccccatttgcaagggaccccaaattttgggcccaattttgggaacctgccccattt

SEQ ID NO: 341068 - DNA, 355 bp, Zea mays
gcggccgccctttttttttttttttttttttttttttttttttttttttttttttttttttttttttttttttctttttgttttttttttttttttgggggggaaaaacccacgcccagccgggctccaaaagttaacttgaatcggcacatacataaaaatggggcactcagcctaaacgggagcagcagcaaaaggaaacccttaaaaaaggtaccaccattttttggcgagcaggggagcccccacggaagccaacagggggggcgccgtaattggaggaaaactcccccccccccgggaggcgagggccattatggctccagtgggaggagcggaatggaatggggtgggc

SEQ ID NO: 341069 - DNA, 487 bp, Zea mays
  unsure (1)..(487): unsure at all n locations
gcggccgccctttttttttttttttttttttttttttttttttttttttttttttttttttttttttttttttatattttttttggttttttttttttttgggtgggttttttttttttttttttgnnaaaaaaaaaaaaaaacctttgttttttccccccggaaaggccccaaaaaaaggttccttttttgcaccttttaccccccgggtggataacgggtttttttccaatatacaaacgttgggggggaaacaacccctttcccaaggttgtttttttttccccctttttttaaaggcccctttccttccaaaatttttttaaaaccccggaactggaatcttaggtgtttaaaaaactcccgccccagccttgaaaggcccattattgggggcgccctcttttttaaaaaaaacctccccccccttttttttttttaaacccccaaaaggtttgaaaattgcccccctttacaaaaatttgcc

SEQ ID NO: 341070 - DNA, 405 bp, Zea mays
accgggactgaatggcgcgggcggccgcccttttttttttttgtttttttttttaggacaaacatggctgtttgtattagggatagataaacgagtggtggccgaacaaagtacccaagcggtccacttaataaaggcttcaggtgcgccttagattaatactactgaagcgatgagcccaaaggtccttaaaaagactttttgccttttggttaaaactacccaggggggaaaggaaaaactgggttccaaactgctgcttttatggggtggtagggacgctatctccgggctcgagaaacatggactaaatgtacatgtcggtctaaatttctcaattattatgagtctgcttgagccatacccttccgacatttaaaatgtatgttacagtggtccagttct

SEQ ID NO: 341071 - DNA, 328 bp, Zea mays
accggattcccgagccgccgccctttttttttttttttttttttttttttttttttttttttttttttttttttttttggattttatttcattggagttatattgcatgagagggggggccaaacccaaaacaaagccccgccaacataaaacaaacaaatggaaacccacgtggcaaaaacctgaaaaaataacaaccggcaacctttcaccctggagccaataattcagaaaattaaattaccggttcccccaaaacaagaaccctacagaataaacgcaaaaaaaatattataaccaaccaacttaacacaaaaaccgagggaaa

SEQ ID NO: 341072 - DNA, 373 bp, Zea mays
cggccgccctttttttttttttttttttttttttttttttttttttttttttttttttttttttttttttttttttttttttttttttttttttttttttgggtgttttttttttttttttttttaaaaaggcaacaaaaaaccaggtttttttggttgggacttaaaaaatttggggggaaccggccccttgctcccaaaaaaaagtaattgtctctttttacgaggctgaaaaaattaccgaatttttttaattttttttgctgggggggttaaccccagggggggaacaaacatgggacgggtccccttttttgccccggaggggccccccctcggatgttattgaggggggaggaaaaagccagcccaa

SEQ ID NO: 341073 - DNA, 369 bp, Zea mays
gacggattcccgggcggccgccctttttttttttttttttttttttaaaaaaaaaattttttttttttttttttttttttttttttttttttaaatttttaatttttttggcccctttcttttattttttccaatttttttaaaattttttaacctttttaaaaaactccacaaactccaccaaatatacagacccccttgtggacataacacaaaaacccaaaaataaacaaatgcaaccccccccccaaaataaccacggtaaccaaaaaacccaacaaattacaaaaaaaccaaaaacccacaaacatgaccacaacccctccttaaaaacaaatcccttaaccacaacccaaaaaaccctggacc

SEQ ID NO: 341074 - DNA, 435 bp, Zea mays
gcggccgcccttttttttttttttttttttttttttttttttttttttttttttttttttttttttttttttttttttttttttttttaaacgaaaatttggcccccctcctgtaaaacaacttttaaaacaatggacccccattttttacaaccaacctttttgggggaaaaaaaaaattgtccaaaccaaccggggaattattgaaataattcgaattaccccccggtttaccgggacagattaacacccctttttttcaaataaactttggggggaacccccttgggcccgggaatataggtgggtggcaaaaaaaaacaaagccccgattggacgggcgccgggataaagatgttctggcgcaaattttttttgcccctgttaccaaaaggggccgggatggggtgcacccctttcaaattttttattggc

SEQ ID NO: 341075 - DNA, 388 bp, Zea mays
gcggccgccctttttttttttttttttttttttttttttttttttttttttttttttttttttttggcacaattaatcacaaaactcacttgtacatgttcgtacaaatgaagaatgatgacattaaaacatttcagctggatgggaaacaaactaccaaaaattttgctggcaccaaagcaatttaaaccatttaagcctttcattggaaaaggggggcaaaccaattatgggcttccttggatttttaaaccccttgggtttcccaaattttgtttcctacaaaatggggggaccaaacttaaggggccctttaagcccaatgcccctttaagcacctgttattaagaggtccatttggaagtttgacctttttcaaacaggtttt

SEQ ID NO: 341076 - DNA, 418 bp, Zea mays
cggccgccctttttttttttttttttttttttttttttttttttttttttttttttttttttttttttttttttttttttttttttttttttttttttgggggaaaaaacaaaaccggggcccccccgtttaaatttgtaaaaccaaaatcccccccccaaaacccatttttgggccccggctttcctttaaattttgggcggggaggggccccccccaaagggtgggggtccccaaaagggggaaaaattttttttaacccttcccccccccctttggggtttctaaaagccccgttacccctttttttgaggggaaaacccccggggggggggggggccccattcccggcccccccggttttacccggttttggggaaatggaaacccccccggggggggggccgcccttttaggg

SEQ ID NO: 341077 - DNA, 442 bp, Zea mays
cggccgccctttttttttttttttttttttaaaattttttttttttttttttttttttttttttttttttttttttttgttttttttttttttttggggggaaaaccccaaaaatttttaaaaccaaaagggtttaaagggaccgactttaattacaaatgcaaattcttgagcggtttaaaagggggtgggggggggaaacccccaaacttttcccgggacacaaaaaaaggtttttaaaaaccaaaacctggtttgacgggcaaacaaatttttgcaagcagatcagtttttcttcttcttgggggcggaattattgccgccctttggggggaccttcttgtagtcctttttcagggggggcaggtccttgggtgccttggaaaaattccctttcttaatgcccttgccgacgtaccaatggaaaaacgcgcgcttgggg

SEQ ID NO: 341078 - DNA, 444 bp, Zea mays
  unsure (1)..(444): unsure at all n locations
accgtccggattcccgggcggccgcccttttttttttttttttttttttttttttttttttttttttttttttttttttttttttttttttttttttttttttttttttttttggggggttttttttttttgaaaaaccggtaggggttaaagccaaacaaaaatggtggaaatgccaaaaaaaaaaggggtcccttgtttttttgggggggttgaccaaccggcttgcaaaaaaaaatttttgaagggcccttttcaaaactccctttaaccaaaattggccccaggggggccgggtttaagtggaacccccttaaaaggggggttgtttgtaancagaaggggcccaaaatccggggggggtaataacggggggggtttcctggggaagcccagggggttggattttcttccggaatttaactccggggggaagggccgggc

SEQ ID NO: 341079 - DNA, 137 bp, Zea mays
gttaaaattattttttttggggggtattaattttaaacaaaaattacataaattaaaaaccttaacactaaaaatttaaaagatacaaaaaaaaattttatcagatcaaaaaaaaattattataacaaaaaagagac

SEQ ID NO: 341080 - DNA, 456 bp, Zea mays
cggccgcccttttttttttttttttttttttttttttttttttttttttttttttttttttttttttttttttttttttttttttttttttttttttttggttttttttaaaaaaaacttttttagaccttaaaaaattggggggggaaacttaaaacacaaagaaacgtttgtttcggggccaaaacttaaaagtcccaaaccccagacaaaaccgttttctcccaaccccaaaactggaagcttaaaaaccccttttgggggggttggccccccccctgaaaaaaaacccgcccccaaaaaaggtttttagctccgggcccccctcaatggccttgatcaaaacaaaatccacaacctttggggcatcctttttaaaaacaagcaaggacttggaaccccccttttttggcaaaaaaagctcgccccggggctttttaaccctttggttttttc

SEQ ID NO: 341081 - DNA, 432 bp, Zea mays
cggccgccctttttttttttttttttttttttttttttttttttttttttttttttttttttttttttttttttttttgtttttttttttttttttgttgttttggcaaaaaacacaacccccaattttttgggggggttataaaaaaaaaatttgggttttcggggggaaacaaaaacttggtaaacaaaaaattttcttgctcaaggcccaagggggggggggccccccttaaacattggtttttggtttttttacaaaaaccaacccccgaacaggccctccagggggttttcccaaatacatttttacctgggcggggccccattttatgggggttacccgggccgggaaaagtgtttacaaaaaggcccctttcaatggacaaaatggggaacctttgcttttgctaccccttttagcccggggggg

SEQ ID NO: 341082 - DNA, 436 bp, Zea mays
ttcccgagcggccgccctttttttttttttttttttttttttttttttttttttttttttttttttttttttttttttttttttgtggttttttttttttttttggggggtttttttttttggcggggaaattttcccaaaaaaaaatgggggaaaaaaaaaaaggggggtccggaaaaacagttcccttttttgacccaaaaatttttcaaacaattcccccccttggaaaagggggaaaaaaaaaaaagggggcctccccccaaaaggggtcctgaaaaaaaaaaacatcttggggggggcccagggcaaattttgaaaaaacccaaacaaaggggtttggggaaatctcatttttaaccccaaaaggggccattttatcacggggggggtttgtgcacctaaaaaaaaacttctttggggggggtttttggag

SEQ ID NO: 341083 - DNA, 343 bp, Zea mays
ttcccggagcgccgcccttttttttttttttttttttttttttttttttatttttttttttttttttttatttgtatgaccaactttctcgtaattaacatcaaagtggcgggtttacatcaaattttttgataaaaaacaggcacatacgaagcaaggggttggaaaaaccaaaaaaaactttaaccagcaaatcagattcccaaaaaaaaaaattaagcgtaaattccataccggctccaaaaaaggaaaaaattcttaatggccgggcaaacattgccataaaaatttattgggtcacccaacaactttgggggtgtcaaacaaaaccttaaagttggcc

SEQ ID NO: 341084 - DNA, 480 bp, Zea mays
ttttttttttttttttttttttaaataataatatttttttttttttttttttttttttttaaatttttttgtatttttaattaaattggggggttttaaaaaaaattttattttaataaatataaaaataaaaaaaaaataaatttaatgataaaaaaaaaataaaaaaaaaaaaaaaaaaacttaataaaaaaataaaaaaaaataaacttgttaaaacaaaaaaaaaagaaaaaaaaaaacaaaaaaaaaattaaaaataaaaaaaaaaaacaatagtgtaaaaacaatataaaacaaaaataaaaaaaaaaaaaataatatatttaaagaatagtaattatactacaaaaaacaataaaaaaaaaatataaaacctcaataaaaaaaaaaataaaaaaaaaaattgtataatttaaatttataaataaaaatacaaaataataaaataaataaaaaaaaaaaaaaaaaatacataat

SEQ ID NO: 341085 - DNA, 366 bp, Zea mays
ccggggcggccgcccttttttttttttttttttttttttttttttttttttttttttataaatcttataggtttaataaaacttgaggggctttgactctttgaagaaattaaaatagattacagtttaaaatggaggtaataactgcacgcgcatgggcatggataacaataatcgacaccagcctcaactattactttcttccttgcattggggagaaaaaaactgttgctatcgaacatatatagcaactcactcggtgcatagcaactgcatgcacaaattacggaaagacacgaagcatattagactacctagatatcgcggtgctcactcaaatcagcacggaagaaagcccgttgacca

SEQ ID NO: 341086 - DNA, 400 bp, Zea mays
cggccgcccttttttttttttttttgaacaattcatctatattatactctacaccaatgagaaaccgagccgacgaattgagtatactgatgcgatatatgaagacgctaagcagccttcatattcattcctttggtcttattatggtatggcttgtttttgccagcatgcatgcatatgcgccagcccagcttcacgtacatggtggacagtactagtggtccttgctgcagcatcgacgatcgatcgagaggagccattgcagtcggcggtgtcgctagctgccgagctcatcatcatcggcggcagggtagtgcagcagggtctgcgtgcacaacagccttggcgccgccaaggaacctctccatggcgtcgatgacgtgccgtccatgcgcgtacc

SEQ ID NO: 341087 - DNA, 340 bp, Zea mays
gcctgcacgtaccggtaccggaatggccgccgcgccgtccttttttttttttttagtaacactggttaatgggccggcctgcattatctctgaaccagaaatcagaaatacagcgcacaacccaaaaccatgacatcgctcggctttgttgccattcatcagaaaccacccctaggttttaaaacaggtaggaaaccaatagaattttgacgtgcatcacctggtgaatgtggggggatccgggtattattattattattatcataaataggcgatcttagtccaatgccctggatctcaatggaggctgtgacaaaagagcagacatgcttatacattg

SEQ ID NO: 341088 - DNA, 345 bp, Zea mays
accttttttttttttttttttttttttttttttttttttttttttttttttttttttttttatttatttttttgaattttttttaaatttttttgttataaaaatttttttttttttaaaaaattaataaattttttttttttttaaaataattttttaaaaaaaaaaaccgggggaaaaataaaaaaaaaaaaattttaaaaacccccttttgccaagaaaaaattttataaaagaacaaaaaaaaaaaaaatacttgcccatttttcaaaaaaaaaaaaagaaaaaaaacctctctgaaaaaaaaaaaattaacttaaaaaaaaaataaaaattgcccagatt

SEQ ID NO: 341089 - DNA, 312 bp, Zea mays
  unsure (1)..(312): unsure at all n locations
aaaaaaaactaaattaaccaantttggtatcaacaaggtcccttaccaccattggccattatgtgcattaccatcacaagcacacaagcactaagggcctgacagtcgcccaagtccggatcaacggatgcagagtcaacatatgcacaggcgaatgggcaccctggacacacttaccaaccaggtgtgaaggcttcactaccctaattaggtccaggcctgtcgacagctacgataggtacatcatattctatcggaaaattcggcaaagacaaattgtctcaatctaaatcatgaggggaagactggata

SEQ ID NO: 341090 - DNA, 333 bp, Zea mays
  unsure (1)..(333): unsure at all n locations
anncaataaaaatataaaaaaaggtttcccaccccaaaaaaaaaaaaaaatggggggattttttaaaaaattttttaccctcttaaaaaaaaaaaaattttttagacaccangacaaataaaaatataaataaaaatataaaaagacaagaaaaataaaaaaaaaattaataatcaaataaataaaataaataaaattaaaaaataaaataaatatagtaaaaaaatataataaaaaaaaaaaaaataaataaaaaataatcaaataaaaaaataaaaaaaaacaacaaaaataaaacaaacatataaataaaatattaataaaaacataata

SEQ ID NO: 341091 - DNA, 54 bp, Zea mays
  unsure (1)..(54): unsure at all n locations
ccgcccttttttttaatgggaaaataaaaaaaatttaaaaacacntttcacttc

SEQ ID NO: 341092 - DNA, 224 bp, Zea mays
aagtgtcctgtagtctgagacaaggcatggcacaagataacagcttcgcctgcttcttctttagctacctcggattctcctcccgacatggcaaaaattgctcgcgaagttgaccctctaccggacgattctacccccgagttcaaaatgtatatggttggagctgagaatcggaacatgccaaaatgccacgctctgaacatgaccacacaccttgttcccat

SEQ ID NO: 341093 - DNA, 181 bp, Zea mays
  unsure (1)..(181): unsure at all n locations
ccgcctttttttttttttttaaaaaaaaaaaaactaaaaaannnnttttnatttatacaaaaaaaaaaaaaaggggggaccttgaaaagggtttttttcccccccaacaccccgaaaaaggaaacgaaaaaaacaaggaaatgaaaacaaaaaacaaaatctaccacaaaaccacacaact

SEQ ID NO: 341094 - DNA, 140 bp, Zea mays
  unsure (1)..(140): unsure at all n locations
cttctcctcctccgacggcgacgacgtgntccattccgtccactgcctcgacgacgcaccccaccgacgagggcaccccgcgccccccccacggagctcccagccccccggactccgataagccggtcgtcatgtttggc

SEQ ID NO: 341095 - DNA, 136 bp, Zea mays
gggaaaaagggacgacatcaaatatttcaaaataaaccggacaacaaagggcacaatctggacagaggtacaatactgcgactgtaaacacaaggtgactagcgaggaacacggaggcacaatttgttaaacctga

SEQ ID NO: 341096 - DNA, 74 bp, Zea mays
acaatgaactcgtgcatgcgacgacataactcgggggaagtttcaccgaaatttagtgcactgtccgacgccgg

SEQ ID NO: 341097 - DNA, 305 bp, Zea mays
  unsure (1)..(305): unsure at all n locations
aaaaaaaaattaaaacatattaaattttnnnnnanaaaaaaaaaaagggggggattttaaaaaattttttttcctaaaaaaaaaataaaaaagccaaaagggtaacaaataacttttacaaaattttttttttgcaaaaggggaaataccaaaaaggccccaaaaaaatagaaaaaagggcccaggctaacaaagcttaaaaggtcacacaaaaacagtaacgaccaaaaaaaaaatttgtaaagaaaaaaaccaggtattgttaaaacaggcccaagaacgcataatttttttttggcaaaaac

SEQ ID NO: 341098 - DNA, 168 bp, Zea mays
  unsure (1)..(168): unsure at all n locations
gccctttttttttttttttttcataacaaattataaaaacagnttgccatatntnaaananannnanaaggggggnntttttaaaaaattttacctttttttataaaaaaatggtctccacatataaaaaatccctaaaggaaaaataaaacgccaattggtgcaatt

SEQ ID NO: 341099 - DNA, 54 bp, Zea mays
  unsure (1)..(54): unsure at all n locations
tttttttttttttttttttaaaaaaaaaaaaaaaancaaaatttcattttnnag

SEQ ID NO: 341100 - DNA, 415 bp, Zea mays
gggcggccgcccttattaaaaattaaaaaaaaaaaattaaaaaaacttacaatccccgacccaaaacaaagggggaatttaaaaaaattttttcccctcaaaaaccaaaaaaaaaaaaagaaaaaaaataaaaaaaaaaataataataaaaaacaacaaaacaaaacataataaacacaataaaaacaaaaataaaaaaaaaaaaaaaaaaacaaaaaaaaaaaaaaaaaaaaataaacactaatacaaaataaaaaaacaacaaaaaaaaaaaatgaaaaataaaaaaaaaaaacaaaaacaaatacaaatcaaaaaaaaaacaaaaacaaaacaaaacaaaaaatataaaaaaacaaataaatacaccaaaaacaaaaataaaaaaaaaaacacaaaaaaacaaaaacaaaaa

SEQ ID NO: 341101 - DNA, 168 bp, Zea mays
aaaaaaagaaaagaacacaaacaacgtaaaaaaaaaaaaaaaaaaaaaaaaaaaataaatagaaaaaataaacaaacaacacagaaaaaaaaaaaacacaaacaaaaaaaaaaaataaaaaaaaagacaaaaaaaaaaaaaaaaaaaaaaaaaaaaaaaacacaacac

SEQ ID NO: 341102 - DNA, 397 bp, Zea mays
  unsure (1)..(397): unsure at all n locations
tttttttttttttttttttataacagatttttaaaaaatnnttaatataacgcaaaaaaaacaaaaaagggggggttttttggggtttttttgtttttttttactcagggtagctttgtttcgaaaaaccccaccacgaattttaaaaaactttaaaaaaaaaacttattgtaagggggggggccccacaaaaggccccagcggccggtgtaactcaaaaaaaaaaaaccttgtccccaattgaaatgttgtgaaaaaaaaaagccccaaaaccccggggggggatgcgaaaaatagccggggaggacaaataaaaaaattttcacaacccctgaaaacccactgggttaaccaggaaaaggggggtttcaatggggccccaaaaaaaagggtgggc

SEQ ID NO: 341103 - DNA, 459 bp, Zea mays
gccgccctttttttttttttttttttttttattttttttaaaaaatttttaattttttttttttttattattatttgggttttttttttttttttttttttttttttgaaaacccaatttttggcattaaaaaaaaaatcggccccaaaattgcccccaggggccaacaacccacaaaaaactgtttggccacactggccccccatagttaacctaaggcttcccccctaccaaaaaccccaggaaagggggccccccccggggcaaaaaaaaaacttgggatccaaaaaacaaaccctctttatttgtccttacaagggccccaaataaacaataacccccggactttatttttttgccacaaattttgggggggggaataggccccttccccggggatcccccttgccaagtaaatttcctttgggatagaggcaccccccttaaaagggggggccc

SEQ ID NO: 341104 - DNA, 219 bp, Zea mays
  unsure (1)..(219): unsure at all n locations
ttttttttattttgaaaaaaaaaaatttaaaacccacggtggantttttnnnaaaaaaaaaaaaagggggaaatttaaaagaaattttttcccttcccaccccccgaangcaagacaaaaagggaaaaacccggcggaacccaacctaaaaagccggcaaaaaaaaacaaaaaccgaagggaaaagagaagaaaaaaaaaataagacgcaccctcccac

SEQ ID NO: 341105 - DNA, 502 bp, Zea mays
taccgtccggattcccgggcggccgcccttttttttttttttttttttttatgggacagagaagctgtttattttcacccatttctatacccaaaatctgatgttctaatgttaaaatatcataaaaacaagtgaaacccagtgtgatagtgtacaatgtcccctcttttttttgcatcccatgaaaaaagcagtttataactgtcttcgatagcccttcaacgtgttctggaagctaccatccaggcatccagcaattttaaagaagtcaaaaaattgcagattgttcagcaaatgcaaaagatcaacactaatttctaatagtacctgattcaagggtatacggatgggaacgcagacacttaagacacataactcttgactatttcttctgttggtcttgttcatcatgcttttgccatggattgagagcttctttcatagcttgggcctctagactgcttttccaagctccgttttcttaccccaagacagttacctt

SEQ ID NO: 341106 - DNA, 296 bp, Zea mays
  unsure (1)..(296): unsure at all n locations
ccgtccgaattcccgggcggccgccctttttttttttttntttttttaaaagcaaaaccaaaactttgntatattccatncatacccggaacggggccaatttcaaagggttttttctcactccaaaccagaccatatggagagctagttcagtcttgcccaaacatacaaacaaccagaaacagacaactacaccccgtggtctaaacaacaaaaaatgacaatgagaaacaaatctccatattattaattaaatttaaataaaataataaaactcaatattatacaacaaaagc

SEQ ID NO: 341107 - DNA, 139 bp, Zea mays
  unsure (1)..(139): unsure at all n locations
gcggccgccgtgcctttcgccaggtttctggcttaagcagactctgangtgnttcccacaaaaggannncagcagggcggctgccttagatatacgctttttatagcccaacaccaggggtcagattagaataaaaact

SEQ ID NO: 341108 - DNA, 212 bp, Zea mays
  unsure (1)..(212): unsure at all n locations
cccgagcggccgccctttttttttttttttttttttttaaaatanaatttatntttattttaaaaaaannnnnananaggtagggttaaaaaaaaaccttttcgaatgattaaaggaaaaanaaaaaaagattcttncaccccggcaacagtcaaactcactttccgggagcaagaacgaaaacttttaataaactagcattgcaacaccct

SEQ ID NO: 341109 - DNA, 303 bp, Zea mays
  unsure (1)..(303): unsure at all n locations
cggccgcccttttttttttttttttttttaggaaanattttcttacctttattttnanaanannannnaaaaaaggggaggttttggtggcaaaggttacagaacatacacccggacaaaacatagaaagctgggattccgaaacccacatagatacatttgagcaaccctttggacgcgcaaaacaaaaaacggagtataaaaaactgaggcagcaagacagcaattcctaacgtcacttatttccaatctctgacaaaaaaagaggggcgggcacaggcacgctacaaacttaccagcctt

SEQ ID NO: 341110 - DNA, 269 bp, Zea mays
  unsure (1)..(269): unsure at all n locations
ccgcccttttttttttttttnntttanaatanttaaaaaaaaagtttacttcttccaacaaagacnncaacaaagaaaggttatatccacaaactgtcccatccttcccaaccaanaaacccttacaacccataaaaaaaaccaaccctcatgataaaacgtacaacacacggcccggtaatgcaaaacactacactaatagcccagtacttttttcaaacacccctacaccccccgaagaaacaaattccccaaaaaaaaccacaccc

SEQ ID NO: 341111 - DNA, 343 bp, Zea mays
  unsure (1)..(343): unsure at all n locations
ccgccctttttttttttttttttttttttttttttaaattttaattttttttnnnnnnntattntttataggagggtttttttggaaaacatttgtacctttcctacagggaaaaaacaacaagccccggaaatttccatgcacaatattaaaaaacattatttntttggataaaaaaaaaaaccactgtttttccaggcaccaaagtccaaacattaacatcccggtatttattgaataaaaaactaaacctggggcatggtaaccgaacctataaaaaagaaacaagcttaacaaaacagcagggtgataaagaaaaccgcccaattggttcagcgggatt

SEQ ID NO: 341112 - DNA, 296 bp, Zea mays
cggccgccctttttttttttttttttttttttttttataaatttttattttttttttttttatattttttattgggggggttttttaagaagttttttgggttaaaaaaaaaaagaggtttttaaaattatttaatttataattggggggggaaaaaacggggtgggttttggggggatgaaaaaaaaaaaaaaaaaaatgggggggggggggtaaaaaaaaaaaaaaaaaaaaggggggaaaaaaattttgagttggggggaaaaaaggggtaaaaaaaaaaaaggggggtaaaa

SEQ ID NO: 341113 - DNA, 257 bp, Zea mays
  unsure (1)..(257): unsure at all n locations
agcagccgcccttttttttttttttttttttttttttttttttttttttttttatcttttttcgnnacaaaacaatttttaaaggattcttcaaaaattttttagacaatccaccccatatctctcccatcagatgccacacatccaccgaggaaaaaaagggccccccaacgaggacccaagaggtgaacctccaaaaacctactaaaaacaaggcgcaaccccccgcggggctcgacttgtgaagagccaacctt

SEQ ID NO: 341114 - DNA, 351 bp, Zea mays
  unsure (1)..(351): unsure at all n locations
tcccgggcggccgcccttttttttttttttttttttgacctaagtataaatagtttctttgatcatcaaacaacaaaacaattgaaatctatatgtaatgttttgcgctacctctcacagttngcaccccccgcacgagtcacaccaatccatatgactccagtgcgtgggttactgaactttcctgtgtatggtacagatgatgtaatctcttcatttaggattggaagaatatcgacctgagatgtgataaacaggcgatgcagagcgtctgcatcattggatgcagaagatagctcctttagctttaataccggatctgaactttcgggatggagataaacctttgca

SEQ ID NO: 341115 - DNA, 302 bp, Zea mays
  unsure (1)..(302): unsure at all n locations
tcccgagcagccgccctttttttttttttttttttacnaaggtcagaaaaaactgcnnctcccagaacaaaaaagancagggggggggtcataggaaggttttttgttccccaccaccccaaataaacggaacacatgcccgaacaactactacccataacaaaacatgtacacacagggcaactacgtacaagaacgacaccagcaataaattgagtaggagcgtaacgtactaagaagaacaacaacacattaaatcccataggtggcacaaccagacaaatggtctataacgagctagg

SEQ ID NO: 341116 - DNA, 434 bp, Zea mays
cgccagcacgtaccgtccgtattcccgggcggccgcccttttttttttttttttttttgaacaacaaaacatttttttatttatccagtaaactgtcctaagcaaacagcatgggtaaaaactgccttgatttagtgttaaatcacttcaagaattgcaaatgcagcaacacctctactctatgcacactgccccactgttcatgtaagtgaacttgcaaatctcctcaaagaaatcatctccagcagcatggcaattcttcatctgcgagatcctaatgatcatccttcttagcctcacgctgtacctgacaacggacttgagggtgttcagcttctgcttagcattgagagatgaccgcacggtgaccacgacctgctccaagaaaggtatcacgaagcttgaatccaaattcttcaggctgttttcctgac

SEQ ID NO: 341117 - DNA, 346 bp, Zea mays
  unsure (1)..(346): unsure at all n locations
cgtccgtattcccgggcagccgcccttttttttttttttttttttatttantttanattttttagaattccgcaagaacnnccttcatcaggggacttcttcaggggccttttggcttaaagcaatacaagtccatcacagtttcaagtcacatgcactgcttgataaaaataagtcaccgaagaaacagatggtacaagcatcgtgccatcgcaaatcttatactgggacaagaacacaggctccaatcttgttggctcataatgtaaacgcttcttaccacatgatgggagttgagcccatattggaaaaactagtaagggcattattccttggtttgcccttt

SEQ ID NO: 341118 - DNA, 380 bp, Zea mays
  unsure (1)..(380): unsure at all n locations
ccgccctttttttttttttttttttttttttaataaaaaaaaaannattttattattttttaaatttttttttgggaggattttttaaagatttttttttttaactcaaaaatataatggggggntatttagaagggaaaaacacccccccccaaactaaaatacccaaaaaaacaggggggggcccaacttacccaaccaaaaaagccccccgggggggagttatacaagggggcccaccttaaaaaaacccaacccgacggggtaatgccgcccccaaccaaccccggaggggcgcgccccccccaatataaaaaaaaaaacccaccctaaatccccaacttttggcacccccccaacaagaaaaaagacgccctggg

SEQ ID NO: 341119 - DNA, 337 bp, Zea mays
  unsure (1)..(337): unsure at all n locations
cgccgtaccgtccggattcccgagcggccgccctttttttttttttttttttttttttatttaaatttttnttttttttnaaaaaannnnaannnngaggggaggatcaaaggttttttttaataaattccagaaaagaaaagggnnttgagtaaatttgtgggatggaaataaaaggngnnagattaaatattttaaatttgtgattactggggtatttgttaaaaaaagatttgatataggaacaatttttagttttttttttaagataaaaatggagttgaactaaaatagaaacatgcactgctgacaattaacgaagtccatcatacatttc

SEQ ID NO: 341120 - DNA, 323 bp, Zea mays
  unsure (1)..(323): unsure at all n locations
tcccgggcggccgcccttttttttttttttttttttttttttttttnttttttttttttttnnnnggaaaaaaaaccatggaagggtcccattatattagttcttaaaagggccccaaatggccaatccataaaaggcataaaactagcatggcactctccccaaatttttgccaggacccaaatttcttatttctttggaccccaaaaggcctttggttcattaagaaacccttttatgttcatgccccttgaccctttggtaaatgggtcctaatcctttgaggacattgcccctattaccggccggaataagagggtttt

SEQ ID NO: 341121 - DNA, 216 bp, Zea mays
  unsure (1)..(216): unsure at all n locations
ccgcccttttttttttttttttagccatataatgagttcttaatacctcaattacacgccacannaagntcaacgggggggttttctgaaaggtttttataagcaacaaaaaaccgcgagcacanaagcggggtgagcaaaaactagagcgaaaaggagcaataggcgggaggaccaccatcagacccccgcgaagcgcctagacgaactcctgga

SEQ ID NO: 341122 - DNA, 464 bp, Zea mays
  unsure (1)..(464): unsure at all n locations
tcccggtgcgccgcccttttttttttttttttttttttttttttttttttttttttttttttttttttnnnnnttttttttttgggttgtttttttaaaccagcccttttaaaagggccattcatactttgcacgggtgctaaaattacaacgcttttaaaattcaaatacatacaagggggacagtccaagccaaattttttacttttagtttttccggccccgcacaacaaaccaataatgtttgacaacccattttacaaaccaggtgttacaacaaacacagggggctcgcacatggattggggccccaacatacaaaggggggggcctttccccaagaagactttagggccgatggaaacaaacaaacgttttatgcaaatctgccacacattttttgggaattgggggggacattttttgggactaggtaacccccaggaatttttgaaaccctaaaa

SEQ ID NO: 341123 - DNA, 273 bp, Zea mays
ataaacttcaaacagctgaggtttaaaaccctccaaccaacaaggaggaatggtgtgggggggtgtttaattctttccacccaacaaagacaaagatacgggggtaacatagaggtctctcacaagatatcactaacatagctggacaaaaaaaatagatggctcgcggtgcttgaaaaaggttcattgatagcattgcagaacatcatcacttcagcagcaccaatggtagttccattggaaggtttagctttaagcgaatgggtactcgat

SEQ ID NO: 341124 - DNA, 90 bp, Zea mays
aaaaagtttttaagccacataaaacccccagcacataatcaatgatagcaaaaaccagaacaataaggaagaataagccgcaggaccacc

SEQ ID NO: 341125 - DNA, 318 bp, Zea mays
cggccgcccttttttttttttttttttactggaattagttcattatttagtgcaaaggccaaagtagttacacaaacatgacgaatcaaccaggagcacactgcccaaagattacggtaccagcatactaataactcatggactgaacaataaaacaaactgcaactgctggatagcacggaattgaaggatcaacctggcaaatgtaaatactagtgcatagctgaaatacacagatatctctgttctgcctcaaggaaacattcctcagtaacgatcatcataagcacgagctgccccttccctgctgggacgatc

SEQ ID NO: 341126 - DNA, 458 bp, Zea mays
  unsure (1)..(458): unsure at all n locations
accgtccggattcccgtgcggccgcccttttttttttttttttgtgcaccatggttgcctttatctttaacaaaatgtggntacaataaacagacatgctgccactcagaagtcagaaggccgctgaggttgttctctgaaacatcagactaccgagagttcctagcttcacattcttcttgggccaaaaagtctaactcatttcaacagaaacattttctcctagaggctaagatgcctactatcggaactgccagacaaacggactctcgctataacctctaccaatctaccatcatcactaagccactgcagaagtgaaacatgcaaaaccatacgtcgtcagacaacagactgccacttcaatctctatgtcatcattcgtcgctgtagaagtgaacgtgccaacaccatttcaccagtcgtcatcagaaagcttgtcgctttaagctgtccat

SEQ ID NO: 341127 - DNA, 418 bp, Zea mays
  unsure (1)..(418): unsure at all n locations
cagccgccctttttttttttttttttttttttttttttntttnttttttttcttttttnnnnnnggggctaaagggggggcgtttccattaacaagacttttaccacacaaaagccagggagatttggatgaaaaaaaagaggcctacttcatgtaaaatcccaccagcacgccctaccaaattctcgatcatgacataaccagtcccacaggcacaaataagggaggtcagagttctcaacagggcccttctaatggcatggtttaacaacagcaggcatgttgcaaaatcatgaggactcctttttctcttccgcggcctccttaaatgtctctccagggacaagctcaagaacgtcatcatcatcgtcctgaacagccccagcgcttgcaccagcctttggaccaaaaacaccaa

SEQ ID NO: 341128 - DNA, 382 bp, Zea mays
  unsure (1)..(382): unsure at all n locations
tccgggggcggccgcccttttttttttttttttttttttttntttnntgggagcctcaatgtcacattgatttttgacaagtttgcaacagccttaattttaattttaagagggttacagggagtttgaacagatgccctcacctgcctcatttacaactctgcaaaactggacatcaaaagggatttagagctgcctgaaacagatgaaaatggcactactctctcgtccaataagctttacgcttggtggtggtcacttgctaatcaggtgctgggacagtttgtccctcaccctgactccattctcatcagctagctggcacacttgctgcctgtacttagcgtcatgatcgctcggccacgcctgtgcctcgtccact

SEQ ID NO: 341129 - DNA, 338 bp, Zea mays
cggccgccctttttttttttttttttttttttttttttttttttttttttttttttttttttttttttaatttttttttttgcatatatgcgaattaactcgagcgctgctcgcactcagcagttcaacgttcaaaacaggctttgttccatgacatattatttaatattttaattcattaacttgcgggggcccgccaaatttttggtacgccttccttcctttttttctggtcccgttggggttttttttccccccccgggccccgggggggggcattccttccatcccttgtgccaaaaccacggggggctttgccccttgcccccccccccggg

SEQ ID NO: 341130 - DNA, 231 bp, Zea mays
  unsure (1)..(231): unsure at all n locations
tccagagcagccgccctttttttttttttttttttaaaaaaaaaaaaaatccnatccnttttgaagggaaaaangaaaagaaggggagtttacgaaagttattttgcccccttcaccccccaaaccnganaccctaacaaactcatgcctcataacacctaatgtaaacaactctaatacttatccccgactagccagccaaacaatatttcaagctacccaccaaaccct

SEQ ID NO: 341131 - DNA, 252 bp, Zea mays
  unsure (1)..(252): unsure at all n locations
agcggccgccctttttttttttttttttttttttttttttttttttccttttntttnnnnnnnncccagcaagcaagcccattcattgacaaattatgggtggggccccaaccaacccccccaggcacacttcatcatcgaacttgtccgtacacacaattgcaaaccagccctctccgttgtcgcacccattcatcattacaagatcttctactgtcatggcaaatataaatctcatgtcggagattcagc

SEQ ID NO: 341132 - DNA, 385 bp, Zea mays
agcggccgcccttttttttttttttttttttagaaagtaaaaatttcagttgtgttaaagatctagacgatcaagcatcaaataaattcatcaataatctgctacatatgacaagcaacctgggtctactcggtcgcattgtgtaacatcgagtttattcccggcatgcgcatgccccagccgcccgcccaccaaacaatccatcagttcagccgcggtgtcgccacggcctgctgcgatgccccatctgcctcagcctcggcggcggcgaggcattgcttggtgcacatgcaggtggcgacgtcgcataaaccgccggtgtagcgcatcgcgatgcatatggggatgcagatcgcgtttttgccccagcaggggaccttgatca

SEQ ID NO: 341133 - DNA, 193 bp, Zea mays
  unsure (1)..(193): unsure at all n locations
cggccgccctttttttttttttttttttttttaaatttaattttttnttttttnaaannaannnnnnnnnnnnancgggcgaattgcaagaatgcttgtttccatataaacccacacatgggcctaaaaaagaataaacaacaccctggtcaaagttcaaaagagcctatccaaacaaaaaactgggggccct

SEQ ID NO: 341134 - DNA, 163 bp, Zea mays
  unsure (1)..(163): unsure at all n locations
aaaaaaaaaaaaaaaattccctcnnttcttnnanaannnnanaaaaaaggggggtttttaagaaattttttcaccccaaaaacccccccanaaaagcccccccccaaccgaataaccccgccaacacacctctcaaaaaacccacaaaataaacccccaccac

SEQ ID NO: 341135 - DNA, 303 bp, Zea mays
  unsure (1)..(303): unsure at all n locations
ccgtccgtattcccgggcagccgccctttttttttttttttttttggcatcatatcatatttattccattcatgcgagggnaagagncataggggagttcattgcaaaatattttttttgtctcataccacaaaatgatgtagctattgcgtctctgatatggtagcaaaaaatagcaatactattgcccatagcattgaaatgcaccaccacattctgtgaccgccagcgctcatggtgacttgctttcagtgggggagccaccgcggtcagcatcatcagcatcgtcatcagcagaatcat

SEQ ID NO: 341136 - DNA, 283 bp, Zea mays
  unsure (1)..(283): unsure at all n locations
tttaaaaaaaaatnataaatataaaaataaaaaaattaataaaaaaataaaaaaataaaataagtaagaaaaaaataaaaaaaaaaaaaaaaaagaaaaagggaaagagaaagaaaaaaaaaaagaaaagaaaaaaaaaaaaaaaaagaaaaaaaaagagagagaaaaaaaagagaaaaagagagaaaaagagaaaaaaaaaaaaaaaaaagaagagaaaaaaaaaaaaaaaaaaaaaaaaaaaaaagaggaaaataaaaaaaaaaataaaagataaagaaaa

SEQ ID NO: 341137 - DNA, 232 bp, Zea mays
aaaatataaaaaaaaaaaaaaaatataaaaaaaaaaaaaaaaataaaaaaaaaaaaaaaaaaaaaaaaaaaaaaaaaaaaaaaaaaaaaaaaaaaaaaaaaaaaaaaaaaaaaaaaaaaaaaaaaaaaaaaaaaaaaaaaataaaaaaaaaaaaaaaaaaaaatataaaaaataaaaaaaaaaaaaaaaaaaaaaaaaaaaaaaaaaaaaaaaaaaaaaaaaaaaaaaaaaa

SEQ ID NO: 341138 - DNA, 291 bp, Zea mays
  unsure (1)..(291): unsure at all n locations
aaaannanatatttttatattattnnnncaaanaanaaaaatgggaaaatgttaaaatttttattaaaattttttacaaccaaaaaaacaaaannnaaaaaaaattaaataaaatattaaaaaaatataaaaaaaatatataaaaatatataaatattatatataaaaaaaatattaaaaataattataaaataatattaataataaatttatataaaatatttaaataattatataaaaaaaaaataataataaaataattaaaaaataaatataataattaatagataa

SEQ ID NO: 341139 - DNA, 318 bp, Zea mays
  unsure (1)..(318): unsure at all n locations
ccannacaagcaacaagcgacattgatcccaaagctgtccatgatctaaacaacacaactaacagcatggagaagctgaggaaaatccaaggaagagcaaaatcattccttcttcttggaagggggctggccttggcaatctcaacaatcgtccccgcttcggccgccctaataacctcggccgccctaatggccacaacaacaccaacctcggcggcaataatggccgtggcaccttcctccttaacaatagcctcaagaaccacaacttcaacaaacggaacacccccaacctctttcccaaagaaaaccccccca

SEQ ID NO: 341140 - DNA, 221 bp, Zea mays
  unsure (1)..(221): unsure at all n locations
tccgtccgtattcccgtgcggccgcccttttttttttttttttttttgaagcaaaannttttgtgcttattattanaagaaccgaacgcaggatagtgagagtttttatgaattttttacaacaaaaccgccccacgaagagtaaaaaaacatatgtatacagacacaaactacattatggtaaccagtaaataccactgtttgagtacttataacattgt

SEQ ID NO: 341141 - DNA, 447 bp, Zea mays
  unsure (1)..(447): unsure at all n locations
gcggccgcccttttttttttttttttttttttttttttttttttttttttttttttttttaatatttttttttttttttttttttttttttttttttttttttataaaaaattataaatttttttttttttttaaaattaaaatttttttttttttttaaaaaaaaaaaaaaaaaaaaataaaaaaaaataatttttatttaaaaaaaaaaaaaaaaattaaaaaatttttntaattaaaaaaaaaaaaaaaaatttataaaaaaaaaaaaaatttttaaaattataaaaaaaaaaaaaattataaaaaaaaaaaaaattttttnaaaaaaaaaaaaaaaaaaaattttttaaaaaaaaataattttaaaaaattttaaaaaattaataattttaaaaaaaaaaaaaaaaaaaaatttttaaaaaaaaaaatnttttattattaaaa

SEQ ID NO: 341142 - DNA, 258 bp, Zea mays
  unsure (1)..(258): unsure at all n locations
cgtccggattcccggacggccgcccttttttttttttttttttttnaanaaaattaanaaaaattttattttatattnngnaaggaaaancaagggactttggggaataaacaatccaaattaagggttaaaacaacggancaactcaacttaaatatgattaactcaaatacttccaacaaaacagcttaagggggcaatgcttagcttttaatttttgagctggaatggaacaaaacaaaaagttttgggcattta

SEQ ID NO: 341143 - DNA, 497 bp, Zea mays
  unsure (1)..(497): unsure at all n locations
gctgccgtccgtccggattcccgggcggccgccctttttttttttttttttttttattnattaatttttcaatataacgaacgccaaanntacaaacacaactggccaccttggttgaggtttaagcacacatcacatactagacgagaaaatacaaacagagtttttctgactgatggattattnaacagtcatacaatgttgtagtgtaattttatttttttaaagttgtaaatttatggaatctttatttttatattgttattatactttttcaaaaaataagtgtattaataattttattttcttttttttaacaaatatatttttatgtttttttaaatattcttgtttatagttctcatatttttttgttattatatatatattttattttaattttattgtaattttatgtgctatttattatagatttatatttttttatttattaaatcatttttctctgattatatatatatttatataaaattttt

SEQ ID NO: 341144 - DNA, 267 bp, Zea mays
  unsure (1)..(267): unsure at all n locations
tccggaaattcccgggngcgnngccgctgtcacttanngtgagctcnngtcgactctttagaggatccatagtcttacttttatcgcgtgcatgcngnnacgtcatagctcttgctattagtgtcancctannaattctaattcactgtgccgnntcgttttaccaacgnnntcgtgacctnngggaaaactcnnctggcgttacccccaacttnnaatcgccttggcagnnnacatcccnncctttcgcccaggctgnngcgtaat

SEQ ID NO: 341145 - DNA, 289 bp, Zea mays
  unsure (1)..(289): unsure at all n locations
gcggccgcccttttttttttttttttttttttttttttttttttttttattattttttttattttaanaatttttattggttatttttttttttttttttttaaaccaaaaaaaaaaaatacnttataaattaaaatttttaaaaatttntaaaaaaaaaaaatttaantaatttaaattggttaaaaaaaaaaaattattaaaaaatattntatttaaaaaaaaaaaaaattaaatgtaaaaattaaaattattaataaaaaatattttttataatttaattatatat

SEQ ID NO: 341146 - DNA, 345 bp, Zea mays
aaaatataaaaaaataaaaaaaaaataaaaaataaaaaaaaataaaaaaaataaaaaataaataaaaaataataaaaaaaagaaatatatgaaaaataaaaaaaaaaatttgaaaaaaaaaaaaaaaatttaaaaaaaaaaagaaataattataaaaaaagaaaaaaattaataaaaaaaataataaaaaataataaaaaataaaaaaaaataaaaaaataaaaaaaaaatataataaaaattaaaaaaaaaaataaaaaaaataaaaaaatatttataataaaaaagaaaaaaaaaaaaaaaaaaataaatatataaaagaaaaaataaaaaaaaataaataaa

SEQ ID NO: 341147 - DNA, 464 bp, Zea mays
gcggccgccctttttttttttttttttggagaacaagataaaaacatatatatatgtgtgatatatagttggaacaaagtaagcatttgaaaagaaataaccatttcaagaatgaagttgcaataacattagttatgctgagtccaaggcaataagaaactagttcagcaaccgaaaatacaaactgaaactcagcagcatgcgatatatgtcgaagaattattccctgctggctatatatatgaaaccaaattattatgatgcatgctgcaacaacagtttagctagcaccggccggcccgcggagaggatcggactagtagagataacggagggtggtgacataggaagctacacgctgcggaagcttaccccacactgaagctatatagcacgtgtgacggcgacgaacatggaacgcaccgaaatgcctttgggagcttccgaagcggaagaacaccgta

SEQ ID NO: 341148 - DNA, 450 bp, Zea mays
  unsure (1)..(450): unsure at all n locations
acccggagttccgggggcggccgccctttttttttttttttttttttttttttttttaaacaaatataaaaatattaccaaananaaaaacacagggcaaggggcaaaataataatgtatacatctaacaaaaccgaacaagatnaaaggacaagctaacaaccaagacaacactattgaaacaactacgaaaacactggaataaacacccaaatccaatgcaaaacaaagccaacaacgaaaaagaaagagctaactttacaaaaaattacaagcatggaaaaaaaagaacatagcataggataccaaaaaaactccagggtaaaaagaactcaaaaaaaacaccaaaaaagggaatgatcaaatctaggcggaaaagctcaaaaaaaaatctgataaaacaataaaaaatgcgatcaaagaacaaaaaaatagaaaaaaatagacaaa

SEQ ID NO: 341149 - DNA, 187 bp, Zea mays
cggccgcccttttttgttagtttgttgactttagaggatcgtttcaaaatcacgcggacaggccaggaagagcaatggggtagagaaacatgcacttaacaaccaaaccgaagcaagacaaaaataggaccgagaaaacgcgtgacaataccaaaccaaaacgcctggcagaacaaaaagattacgg

SEQ ID NO: 341150 - DNA, 201 bp, Zea mays
  unsure (1)..(201): unsure at all n locations
accgtccgtnatcccgggcggccgcccttttttttttttttttttttattttaattgttttttttattattgaaaaaaanaaaatttaagaaaagggggaaaattaaatgtattttttaaaaatgaaaaatatgaaaaagagaatattaatagaaaaagaaaatgtagaaaggaaatattataaaaaaaaaagaattggag

SEQ ID NO: 341151 - DNA, 211 bp, Zea mays
  unsure (1)..(211): unsure at all n locations
aaaaaaaaaaaccaggggatttccctctttgcccgccaaaaaaagggggaccaggcctggggggggcggcccgcnntngggaaaattctcctttctaaaaaaaaaaaaagggacccgcttttgggggggggcccccctttttttttttttttgaaaagggggaaaacccttttgggggggggggggggtgcttatgggggcccgggggggg

SEQ ID NO: 341152 - DNA, 250 bp, Zea mays
  unsure (1)..(250): unsure at all n locations
gccgccgtccgtcggattccgggcggcgccttttttttttttttttttttgatttttttttatgttnnanatnaaaatatagtngtgtaaaatgtattaattttgtaaaaatngggaagtaaaatttggacaaaaaaatttgttgtagagaaaataaataagggttttaaaattaatatagtagatataaaaggggatagggaaatanggggtaggtataaaaggaagagttaattgtaaaatgtaaggg

SEQ ID NO: 341153 - DNA, 114 bp, Zea mays
tacaacggtatgactggtaaaacaaaaaggggacaaaactaaaccttaaaaaaaacaacgcccctacaaaaaaaaccgggccaaaaaaaaaacccaaaccaggggccaatcccc

SEQ ID NO: 341154 - DNA, 139 bp, Zea mays
  unsure (1)..(139): unsure at all n locations
ccccccctaatattttttctttcagaaacccaaaacccgggaaattggncatacnntatacattttttcaccccaaaacaccagctttacacacccacaggtgacaactcctaaactgattggtcagaagacttaacac

SEQ ID NO: 341155 - DNA, 460 bp, Zea mays
  unsure (1)..(460): unsure at all n locations
ccgggcggccgcgcggtctttttttatataaaaataaaaaaaaaaaaaaaagtatatatttatataaaanaanaaaaaaaaggggnnagggaaaaaagaaagagaaaaaaaaaaaaaaaaaaaaaaaaaaaaaaaaaaaaaaagagaaaaaagagaaaaaaaataaaaaaaaaaaaaaaaaaaaaaagataaaaaaaaaaaaaaaaataaaaaaaaagaaaaaaaaaaagaaaaaaaaaaaaaaaaaaagaaaaaaaaaataaaaaaaaaaaaaaaaaaaaaaaaaaagagaaaaaaaagaaaaaaaaaaaaaaaaaaaaaaaaaagaaaaaaaaaaaaaaattggaaaaaagaaaaaaaaaaaaaaataatgaaagagaaaaaaaaaaaaaaatgaaaaaaaaaaaaaaaaatataaaaaaaaaaaaagaaaaaaaaaaaaaaaaaaaaaaaaaaagaa

SEQ ID NO: 341156 - DNA, 106 bp, Zea mays
  unsure (1)..(106): unsure at all n locations
attaataaaaaaaaannttttttnttttttttnnaagccgagaaaacatacacaggaacattgtatacggaatttgaacatttggatccggatgctacaatttaac

SEQ ID NO: 341157 - DNA, 384 bp, Zea mays
  unsure (1)..(384): unsure at all n locations
ttttttttaanntttttttttttttttttacttatttttttttatatttattttctccatttttttgtaaatgttttattttaatagatttttaacaaaccaaaaccaaatataaaaaaaaataatcacgaaaaaaataattaaaaaaaaaaaaaaaaaaaaaaaaaagaaaaaaagaaaacaactaaaaaaaaaaaaaaaaaaaaaaaaaaaaaaaagtaataaaaaacctaaaaaaaaaaaaaaacgacaaataccccagcaagggaaaaaaaaaaaacaacaccatataaggacaaaaagtattcactagtatataaaaaaaaccgcctggcaaaaaaaaaaaatataaagaaaacaatcccacaaaaatatcataataat

SEQ ID NO: 341158 - DNA, 187 bp, Zea mays
ccgaacaaaaaatactcgtcttggaaaacaatacacaaagccagttgaaaaaaaaacaaagaggcccgcacccatcgtcaaaaaaaactgaaaacattcagaatgtcgaaggcgactcgcgctgaaaaaaaacacctagttcaaaaaaagaaacggaaacccgcagctaaacagattatcggggggg

SEQ ID NO: 341159 - DNA, 453 bp, Zea mays
  unsure (1)..(453): unsure at all n locations
ccgtccggattcccgggcggccgccctttttttttttttttttttttttttttttttttttttttatattttttaaannnnggncatgaaaccattaccattttgaaattcaaaagatagatgactgtacagnttacactggagcagtttaatatggcctagcagttagcttgaataaggcgctaaatatttctggtgcctacatgcttggtgaaaaaaaaacccatggagattccagaataaatattgatgcaaatgaataagaactagaggcttgcaagtacatacgattgtgtgttttcaaacttacacttatccttaacctgggcttgtggtttatagaaatagattttatcttcttactttaagtttagattattgtattttcatagaatcttaaatttttttatattccacctttaaaaattgactattacattactatttttttta

SEQ ID NO: 341160 - DNA, 258 bp, Zea mays
  unsure (1)..(258): unsure at all n locations
ccggccgccctaaaaaaaaacaaaacgccancnacggacaccataactctttcagacaaaccagggnnaaaagggaccaggcaccaccaaccgggcaccaaagcccccaaaaacacctaatnaaatttacctngtaaatacccaaaatcaaaaggggcggaagaaaaaaaaaagcaaaccaacacacagggacaaaccaggaaaacactaacaacacaaacacacgaaaagaaacaagcaccaaaaaaaaaaaacaac

SEQ ID NO: 341161 - DNA, 229 bp, Zea mays
  unsure (1)..(229): unsure at all n locations
cggccgccctttttttttttttttttataataatnatttntttatcgaataacaaacgnnnaannnancnggaaaaggggcaaatttacaaaggacaaagaggccccgacaaaaagcaaaggaaagagagaagagtaaaaggaacccgacggaatcaagagaaaaaagaacgctaacaaaaaaacgaccccctaaaggaacgacgaacccacttcaaaactaacaaaat

SEQ ID NO: 341162 - DNA, 391 bp, Zea mays
tttttttttttttttttttaatgcatttttttttttatgtttttgagcaaagtgtccttggttttggggttttttttttttttttttttttttattaaaaaccaaaggggcttaaagggcccgactttaattacaaaggcaaattctagagccgttcaccagggggtggggggggggaacccccaaacttttcccggggcacaaaaaaagggttttaaacaccaaaacctgggtgggcgggcaaaaagattcatgccagcagataagtttttcttctccccgggggcggaaatattgcccccctttggggggaccctcttgtaattcctttttcaggggggggaggtccctgggggccttggaaaaaacccccttctttatgccccttccg

SEQ ID NO: 341163 - DNA, 480 bp, Zea mays
ccggaccgcacggtccgaatctgccgggcggccgccctttttttttttttttgtgaagcaaagatacaattcaacattgtctgccgtctgcgtagtagtagccagtaggaaagaagaaaaacgacccgagtccagatatccatgctagtagaattttgccacaaacgtccacgatgacttgtgcacaatcccagacacaggagacccacgttgcgcaactacgatccatgtatggccagaggggaaaaaaaaccccggtaaaatcagcataagcatacatacatatccaatcaaacacatctggagatgactgtcacaatgcagcaactcgagctttgcatttctcctagcaggcacatcgaagcgttcggtcttccaagtcgccagcaacattcagtaactggagtcaacgaggacgaagtatcagcggatacgtacagcaccagccactgctccaacacacggaaagcaatggccctt

SEQ ID NO: 341164 - DNA, 266 bp, Zea mays
  unsure (1)..(266): unsure at all n locations
cggcaggcccggggcggccgccctttttttttttttttttttttttttttttttttttttttataattttttatttaaaaatttttttttttgtttttgggaaaatttttaaagatttttaaaacacnaaaggggggattttttttgggttaatttttatttattttttatttgatgttatttatatattttaattaattggaaatatgggggggggcgcaataaaaaaacaccaaacttaccgttttcacagggcggnnnnnggg

SEQ ID NO: 341165 - DNA, 296 bp, Zea mays
  unsure (1)..(296): unsure at all n locations
ttcccggggcggccgcccggtcgttctttttttttttttttttttttaatgcaaatttttattatttttgttagngagcaaagtgtcccgaggccgcggggcaattgtggacactttctgacacaaccatcgacggaacgggagtcaaatagaaagactgcccaaaaaattcctacagcacatacgattaaacacggggggcaccgtggagaccaccgactggactaggaggcacatgttgcaggctagacagggcaagaaggtgacgaaaacaacctgcacgcaccaagaaccgc

SEQ ID NO: 341166 - DNA, 364 bp, Zea mays
gcggccgcccttttttttttttttttttttttttatataatttttttttatatttataaaaaaaattttttaatgggttttggttttaaaaattattttttttttataaaaaataaaaagggaaaaaaaaaaattaaaaaagaaaaagggaataaaaaagttttaaaaaaaaataaagggaataaaagtaaaaaaaaaaatggaatgaaaggaaaaaaaaataatttgaaaaaaaaaaaaaattaaaaagggggagaaaaaataaataataaaaatatataaaaataaaggaaaataaaaaataaaaaaaaaaataatttatgagttaaataatagaaggagaatttataaaaaataattgatg

SEQ ID NO: 341167 - DNA, 400 bp, Zea mays
  unsure (1)..(400): unsure at all n locations
cgcggccgccctttttttttttttttttttnnnnnaatcaccaccattaatcagcacccacaaanggcaccaanaccaggggattttatcaagcagagtggtgaccctcaaaccaaccacccacncannncattccgagcaaaccaaccaccggacttagccccacatacacaaacaatccacggaggaaaatcaaaacagagcctagcagcagatataacaagagtctgacaaaccgccccaatcatggggccaacagttccatcgccgccacattcatcagtcgctgataacaggcgacgccgaccttgaccgtgacccaggaggtgacatggacgctggccggggtgacctatgatgaccgcgccgaggctccccaatctccccgcctgctggggac

SEQ ID NO: 341168 - DNA, 153 bp, Zea mays
gcggccgccctttttttttttttttttttttgaggccgtattaacctcccttaataagtcaattcctccaggggccatagggcaaaaggcaatccaggtccttcacagtttcaagtcacatgcactgcatgataaaaataagtcaccgaaaaa

SEQ ID NO: 341169 - DNA, 318 bp, Zea mays
  unsure (1)..(318): unsure at all n locations
accgtccgtattcccgcgcggccgcccttttttttttttttttttattttttatttttannnnntaaaataaanatttccaaaaanannaaaaaaaaantttgggttttttttaaaaattttttttaccttaaaaacccgtgnntnnntnnaccaaaaaaaaaaaaattccccccaaaaccgtttaaaaaaaaacctaaaaccaaaccaacccctattcccaaaaacaaaaaaaaaacccccaaagggaagcaaaaaccaaaggataaacaaacccacacccccccacccaaaccaaaaaaatttccaaaataagaaa

SEQ ID NO: 341170 - DNA, 376 bp, Zea mays
  unsure (1)..(376): unsure at all n locations
ccggccgccctttttttttttttttttttttcctttttttttttntttttttggacaaccgcatgacaaaatggattggcttgcaaatgacccaactgcttgaaaaaatagccttttcatctcacaaacatgctacagccaatccgggtaggttcacatccaggaattacaaaacttcacttactgctgagtgcggaacaaaacctaacacgaccataattatgacattgcaactagacgaccacccagagttcaggacagtaatacagaaatataaatgactgtttacttcttcttggcgtcaccagccttggtcttcttgacaccacggatcttcttggccctgttcttccgctctttcatttgcttgcgggac

SEQ ID NO: 341171 - DNA, 343 bp, Zea mays
  unsure (1)..(343): unsure at all n locations
accgtccgnattcccgggccgccgccctttttttttttttttttttttagggtttttcgacattaatcacttccattctcaaccnacccgccgggcgggaattttagcacatggaaccaacccctaaactctacagtccaatggatcattcaggccagtggtaacactgccactgacacccatggggaagcatgacaccttattaccccaccatcgcccctaaattacccaactaacaacctagccccccgctatacgacagcacatactgtccccagctggggacaccaccagaagcttcccaaaggcatggactagggtacttccggccgcacaacgccgt

SEQ ID NO: 341172 - DNA, 187 bp, Zea mays
  unsure (1)..(187): unsure at all n locations
ccgccgccctttttttttttttttttttttcaaaaattaataaacttaataattttaaactgtaantatataaaggggggtatttttaaacagattcaaaacattttaaagngaaaaaccacacaattatcaaaaacaaaaacccggacccctctaatccccctgggaaaaacaccaaggcccaaca

SEQ ID NO: 341173 - DNA, 84 bp, Zea mays
gcggccgcccttttttttttttttcgacaaaccccaaacacccagcacaaaataaaaaacccgacacacaacgcaaacgggggg

SEQ ID NO: 341174 - DNA, 324 bp, Zea mays
  unsure (1)..(324): unsure at all n locations
ccgtccgnattcccgcgcggccgcccttttttttttttttttttttttttttttttnnnnttaaataatttttttanaaaaaaanaaaaagggggggacatttaaggcggtttatcgactcttaaagggggttaactggaaaatttcaacaacaaaaacaaccgggaaccggcgccttttaaagaagcaacttaagttaccatataaagaacctacaggggcaaagccctacaaatcgaactttataagacacatttaatcaccttacaaaccgcaagggttaataaatcaaacacccggagcttaacaaccccccccctttaa

SEQ ID NO: 341175 - DNA, 239 bp, Zea mays
  unsure (1)..(239): unsure at all n locations
accgtccggattccccgacggccgcccttttttttttttttttttgancgganagcaaccactaagtccntttattaaacactgaaaatgaaacggggaatggcactgcccattttttaattctataacccaaaaaagttttattgcgagaccaaaacgaacaaggggatatcaaactcacagcacccaaactcaaaactttatgcccatttaccgcacgggctgctggttgtaatgac

SEQ ID NO: 341176 - DNA, 277 bp, Zea mays
  unsure (1)..(277): unsure at all n locations
ccaacataattttttaaatgtncaaagctaaaggggggatttttgagcgggttttttcaaaacaaaacccccggggcatttaacttgttcaaaacatgtttaaaagctgaatggacattgccaacggactcttggnagacccccaaaaaaaaaaacaataatttcaaaggaataaacctaaaaaatggggggaaacaaaaccaaaacaaacatgccggacgccttgatctgctcaaaaaaaaccaaaaataacttcccgcgcaccccacctcttttt

SEQ ID NO: 341177 - DNA, 425 bp, Zea mays
ggcggccgcccttttttttttttttttttttaaccaagaatttttttctttttgataggaaacagcagtaaaaatctcgctctctgaataaagctgcagtgttgctgctagtgaagcttgtacatttgatcctaaagatgtgttgaggaaaaccaacttcagaagctccaaggcatttgcaacagccaatgatttccatatgcctctttcaataatcttatttcggtgatccttaatgattttttcttgaggtttgcagaagacttccatgttttcactttctgcatttgaatgtctgcatgatttttcaggatcacagaacccgctttctgaaactgcactcgttttggtttcacctagtatagcctgattattctaaaatgaaaaaaaacattattgacaaatatatgtctgtgtatcgggct

SEQ ID NO: 341178 - DNA, 124 bp, Zea mays
  unsure (1)..(124): unsure at all n locations
accaacataatanattctgacccacaaaaacaaaacgcggggcccacaaaaaaagattctagctaacctcaaaccccccgcacaggaaacaaacagtatcacccccaaggcccacaaactacaa

SEQ ID NO: 341179 - DNA, 253 bp, Zea mays
cgcggcgcgtctttttttttttttttttttccccaattttaaaccacctttatatttccaagcggcccctaccctaagggaacgtttttgtgtccaggtccaccaaattttaaaaataaaaaccaatctatttggctggccctggatctggaaaacctgcaggacggctggaaatgacaggagttccctcgattggatggggaataaagtctccctcaagctattttgcaatggctgacgggattttccaaat

SEQ ID NO: 341180 - DNA, 370 bp, Zea mays
  unsure (1)..(370): unsure at all n locations
taccgtccgtattcccggggcgccgccctttttttttttttttttggacgcaaactgtcgaacaaaatanattatacaaatccacggggggttttggtggttccaaatttccgaattccagtcacttcacccacagcagcgaggaagtaaaagcttattccacgactcatctagcaaaacacggtggcaagcctatccccaaaagtccatgtgcggaggagtaaaccttagccttgcagtgctacaccaaggtccgaaacaagatgacacgcaaagctggcagaacctgagtagcagcagcagcagcggatctaggcgtcatcgagggcaaggacaccaggtagagtcttgccttccaagagttccaagc

SEQ ID NO: 341181 - DNA, 450 bp, Zea mays
taccgtccgtattcccgggcggccgccctttttttttttttttttttttttttttttttcttctttactatttttttttttttcttttttttttttttgtttttttttttttttttttttttttttttaaacttttttttaaaaaaaaaggggccccccccccccaaaaaaccaatttcaacaggcggcccctttttggttttgaaaacaaggaacccccccccaacacccccttattcccaaaaaataaaaaaattctttttggggctaataaaaaacccccccattggtgtcctccccccccttttttttttccccacattctctttaaaaaaggggaaatttttttttgatttcccccccccacaaaaaaagattaaactttttaaaaaggttttttactcattttttacaaattttacggaaaaaacaatatttgttggggaacac

SEQ ID NO: 341182 - DNA, 161 bp, Zea mays
  unsure (1)..(161): unsure at all n locations
ggncnggccgcccnnttttttttnntttttttnnttttcttgatacatatatatggcggtatgtantctcttctnnttgttcacccctttnnttgatgtaggggtgccctggagnaanttttgcnttttgatggcntnntttgcnnttgagccccttttgc

SEQ ID NO: 341183 - DNA, 335 bp, Zea mays
  unsure (1)..(335): unsure at all n locations
taccgtccgnattccgggggcgccgcccttttttttttttttttttttttttttttttttttttttttgtataccgaccattgacgacgaaaggacataacgcagtgctgagaacacgatatcttatccatatccccaaagcaacaccacatataacataacatgggaagctgaataaatgtcagttacatcaaaatagcatctgacaaagcccacgaaaccgtgcgatacactttccctccccccccccccnccnnnnnnaaaattttttaaaaacaggggggtacagagatttaaaggggtgcattaaagttaaagccaatccgaaggtaatc

SEQ ID NO: 341184 - DNA, 464 bp, Zea mays
cggccgccctttttttttttttttttgtgtgaacagtgcggggtactgttcatctatttatacgcaatcgtaaggctttgtgcattattacattcatgtcctcaataattacatacagggtttacaaatgtcacatggacaataacgccatttgtatttaataacttgagcaacaccttctccttacatcgtctccctatttcgccgtgatgaagcctgcttgatgaagcgtgcttcatcgcacttctcttgtgatatgccgaagcttttctggtgacaaagctcctatagtattcagtaatatgctaaaagcaaatggttagccatctttttgaggaccttcggaagaggaaggcccccaacatcgccctgtaacacctaaggtgttagctctagggtttcgctcaacacactcacaaacctatcatcacatgtgtttttctttgggacataaatcaccacac

SEQ ID NO: 341185 - DNA, 487 bp, Zea mays
  unsure (1)..(487): unsure at all n locations
gccgccctctattccttcttgcgccactaaactttccgcacgataataaaaccccncgcgncacacaaaaaaagagggggattttaaaaagaatatttacacccccaaaccacccaccanttaaacaaaacaaggcctacaacaaaaaagacaaaccaacacaaccagtagaaaaaaaatgacaaatagctaaaacaaaaaccataaaaacctaccacaagccaaaaataaaatgataaacaagaaaaacaccacaaccaaaaaacaacgacaacaaacaataaaccaaaacacaaattccacacaaaaccacatataaacaataaatcactacaggacatcaaaacaaaaaaaactaaaaactaacaaaaacaattatactaaacaactaaacctccacaaaacacaaaaaaaataccaaaaatacaataactcaaatctaactacaaaccaaaaaaaactaataaaacacaaaaacaaaacaaaa

SEQ ID NO: 341186 - DNA, 150 bp, Zea mays
  unsure (1)..(150): unsure at all n locations
gaaaacccananangaagaacccatatagaggcgacaaaacccccaaaccccaaaatgcgaaacaatgatcaagtccacagcacttccagcacaggccccagatctgaacccggacaatccacccaccgtctacttcatccaaactaacc

SEQ ID NO: 341187 - DNA, 529 bp, Zea mays
  unsure (1)..(529): unsure at all n locations
tcccggtgcgccgccctttttttttttttttttattanaaaatttataaaaataaataatatttaatannaaaaaaaaaaaaaaggggatttttaaaaaattttttatattataaaaaacaggaaaaaaaaaaaaaataaaattaaaaaagaaaaaataaaaaaaaaaaaaggaaaatataaaaaaaaaaaaaattaaaaaataaaagaaaaaaaaataaaaagaaaaaataaatgaaaaaaaaataattaaataaaaaaaaatagatagtaaataaaaaaatataaaaattgattaaaatataaaattataaaataataaaaaataataaaattgaataaatattttagaaaaaaaaaataaatataaataaataaaaattagaaaaaaaataagataaataaataaaaaaaaaaaaatattataaaatattatttataaataaataaaataaatataaaaattattaaaaagatataaaaaaaaatataaaaaatatgtgtaaaaaaataatataaaaaaataaata

SEQ ID NO: 341188 - DNA, 70 bp, Zea mays
gtcgccgcgctacggtccgtattccggggcggccgcccttttttttttttttaagcgaacacagctaaca

SEQ ID NO: 341189 - DNA, 505 bp, Zea mays
taccgtccgaattcccgggcggccgcccttttttttttttttttgaagtcatctttcatgctttaggttttattaaatttttgccgcgcaaacacggtatttcacgacgaagcattttaacaatcaaataatacatccgcgacaaatccctacgacgtacaaaataactatcgcagccacatctgtatccgatctaacacaaaataacgcatcggctcaccatatcaaactttggtcggggttgctgcacgtgtggcgcgaaggcgaatgcgtcgtcgcgcatgggagaccaaagcgaagccggagggcgtggctcgctgctgcgattcgtcgagcacccacgcgcgaggcgaaggagcaggctgctgtggcgtgcagcttgctgcgcaggtaggcggtggagctcgctgctggaattttatgggcgccctggacagtgagctgggcggcattggcctttcgccatgggtggagcttgcatgggaaaaaatgctgccatgggaga

SEQ ID NO: 341190 - DNA, 359 bp, Zea mays
gccgcacgtaccgtccgtattcccgggcggccgcccttttttttttttttttttttttttttttttttttttttgtatttttttttttttttttttttggagggggaacaaattcctcagtttaattcctttggatcataagtatcaacaatcgaacaattcctaaatcctaacatatgaaaatttaaatgttaaagggtggagaggggagaacccccccgcaaataagcaaacaaacaggaacttactagcaaaggtgcaatttcctattttccccgaaccctcgaccacgtttttttttagcgcaaacccaatagtttacagatgccacaacccccgatgagagcgcgttatttttt

SEQ ID NO: 341191 - DNA, 181 bp, Zea mays
  unsure (1)..(181): unsure at all n locations
cgccgcccttattatttattttttctactcaacagtatccaagctaatagtctcccacacgcgacaccaaaccacggggataatttcaccgaaatttaatccacctacacaacccanaacaaccacaatgaccaaaaaaaccctcacaacacccaacttaacagaacagcaccacataacc

SEQ ID NO: 341192 - DNA, 85 bp, Zea mays
gcgggcggcccttttttttttttttttttttttttttttttttttttttttttttttttttttttttttttttttttttggaaaa

SEQ ID NO: 341193 - DNA, 53 bp, Zea mays
ccccggccgcccgcccttttttttttttttttttactatagaaaatccaaaca

SEQ ID NO: 341194 - DNA, 70 bp, Zea mays
aaaaaaaaacaaaacttcctttccgagatgggcggacccaccaaggattcaaaggtctactcaaaatccg

SEQ ID NO: 341195 - DNA, 217 bp, Zea mays
  unsure (1)..(217): unsure at all n locations
aacacnnnnnnnncaancaacgggaaaccaaaccagaattccttttttcttaaaacccccgccgcgaaaaaagtgttcaccaaaaaaagggtccaaaggggataccccggcacacccaccataaatagagcagcgccggggcacaaactgcctctggatcctacacacaagaccgggaccatccgtttataccacccccaaaaatttggggccaggg

SEQ ID NO: 341196 - DNA, 142 bp, Zea mays
tcccggcgccgccctttttttttatccataaccaaataccaacgataattccaacacacaaacggggcttttaagatttattccttacaccccacacggcaactttaaaaccccccaaaacccaaaaaacgctacaaacaac

SEQ ID NO: 341197 - DNA, 388 bp, Zea mays
  unsure (1)..(388): unsure at all n locations
ccggtccgnacacccgcggcggccgcccttttttttttttttttttttnntttttttccccgttgattttttcccccnnnnngggccgcgtatgggggcttattatggatgtttgttaaaagggcaccaaattggcaagctaacaacttaaggaagaaaatcacagacagggccacagataggaaactcgaaatgacaggacagcgtttactgattaaaacacaaatattctgcacttaaaacacaaatgttcttagggcttggtccccaatccccactcaaggagagatgtcttgtggaagacctagggtgggaaacatttgcaggcgccgattgcaggaatagctccaacacaaacagtccttacaggtcaatgacccgtgaaagc

SEQ ID NO: 341198 - DNA, 454 bp, Zea mays
cggccgccctttttttttttttttttttttttttttttttttttttataattttttttttttttttcattttacgggggttttttttttcaatatttaaagatgggggcattaaacaaccaaaatggcccaaaacatagcccctccagttttgaagcatggaacgatccaaaaaaaaccggaccatgctcctaaacaatccggttaaaaaactgggtacagaaggggtacaaacaaaagtttcacagtttgatgattttgaaaaaggggactttgttgcaccgaagaaccttaccccttgggcttgccaaaaaacctttgtttttaatgggaaggttggaagcgaccgcccccaaatttggacgatgggtcgaaaaacttgaacttgatctccctcaaccccagcccgggaagttttttttaggagggaccgggggggggaaaccacctttttt

SEQ ID NO: 341199 - DNA, 477 bp, Zea mays
gcggccgccctttttttttttttttttttttttttttatctcccattttattattttttttttttttttttttttttttggttttttaaaaaaagctgggggggattcacatcccccgcaaaaaaatggtcaaaaaaaacctttccgggaaaaaggggggccctttttttttcccgattattccccaaaaaaattttgggccggccttaaacccaaaaatttggggttcccggttttcccctccctcccttaatttttttatggactctaaacccccaaaaaaattttttctgaaacaaccaaaaaaaaaatttggtttctcccacccaaaaaaatattttttttcccctcccccccctgaaagcaaaaattggccctcttttttttttcctcgggggccttttctgacatttttttaaaccaaaaaaacttttttttcccccctgggggaaaatttttgggggaaaaaaatttttt

SEQ ID NO: 341200 - DNA, 420 bp, Zea mays
gcggccgccctttttttttttttttttttttttcaaaacctcccctttaattatttttttcatcaccccactcttttggggtttttttaacaagggggggggcacccccaacccccccaaagaatttaaacctctaaatcaccccccccaaaacccaataccccaagggcccataaatcaactaccaaaaaaatcaatgtccgaaaaaaaccacccaaaaacccccgcccaaaaaaaaaaacccccccctcatcatatccaaagctctcttctttcccagcaacttcaaaaatacacccccaataaaaacccctagttccctccaaaaaattctcccaactctacgaattatttccctgcccccccaaagtttaccaaaaaaaaacctcctcttcccttccaaccttaaaaaattaaaac

SEQ ID NO: 341201 - DNA, 124 bp, Zea mays
agatcacgggataagggcagcacactggcctgatgctgcgtcatcagcaaacttctctagtactcgtcaccctcgtcgccatcctcgccctcatcgaactcaacaccgacctcctcgtagtcct

SEQ ID NO: 341202 - DNA, 402 bp, Zea mays
  unsure (1)..(402): unsure at all n locations
gcggccgccctttttttttttttttttttttttttgcaattaacgcccatacatcngtttttttaggacctaaagccttagttggcatcttacaacatgctagggggctgacagggcctctcttattggtgcgccacaacctttggcagtcatacccacatcatgtcaccaggaagtaccccaaacaaagcatcacactcaaacctcactcatacaccgtatatcaccacgttcaggatatcgtttacaaccaaacaatcaaaccagggacacagcaactgtaggtacatcagccctcattcatacagggcctttacaggttcacgccaggaacatgaaccccttcaggtgcaccacaatcaggccactttcgaccttgctcagcttcagaatcaagttctg

SEQ ID NO: 341203 - DNA, 427 bp, Zea mays
gccgccgccctttttttttttttttcttttttataacattcaacccccttaataatttttttttaagacctaaaccattgggggtattttacaacaggtaggggcccccacaaatcttacactatttctctctcacaacctttttctttaataaaaacaaaaaattcctggggccccccccatcacaaaaaataagggaaccccactaaaacaccaaaaaaaccaacccccaaatattgtttaaaacccaccacttataccgccccccccccccggagggggcaaaaacccaaaaacacccaccccctgggaaaaaaaaaaaaaaaaaaaagaagtgaaaaaaaaaaaacacactttggccatattaaaaaaaaaaaaaccccaaaataaaagcctggtccaaaaaattcaaaaaaaaaaacccctt

SEQ ID NO: 341204 - DNA, 384 bp, Zea mays
gcggccgccctttttttttttttttaaggagaataatgcattgcatgaggagcttatacgtttcaatgactttcaaaaactttccatggcatgcatccttcatgttcttagtgcatgcttctttttaagaaaagaagaaatgaacataaattgttcagcaggcatctgtggcccacgagacaataaaaacagtgcccttcacttgttagaggaaacattttattcaaaaggacagattaaaattgcagacacaggaaaaccttcaacaggacagcctctgcattccgatgatgcttttatccaaaaggctgctagaagtcaagtggttgcctcaagaacgcctcatttgcttcgccctgttcctgattgagatatcaagcacct

SEQ ID NO: 341205 - DNA, 325 bp, Zea mays
gcggccgcccttttttttttttttttttgaaaatccaaacgttttgcaaagacttctatactggaaccaatgtataaatatggaacatttttttttgcatgtcagcactagccgatccggaaaacattactagtacataataaccgtccttcaaaattaaacgcctcacgggaggggaaacatcatgtccaaactaagggcagcttcactgttcactccatggaagaagaggtcgggccagcgccaaagccgctgccaccaccacggccaaagccagacctcgcgccagaactcctgaaagatggctggaactcaacaaggagct

SEQ ID NO: 341206 - DNA, 449 bp, Zea mays
ccctttcttttttttttttttttttttttttttttcttctttttataatttttttgttttttcttttttatttgtgggttttttaacaagaaaggggggaaaaacacaccttttaaaaccctctacaattaaaaccctttttttttccaccccccaaaaaaaaaaaacatacaaaattcccaacttgcataatacccaaaaaaaaaatacccaacattttaccaaatccaaaaaaattcttaataggaaatgtgacaccccccaaaaaaaaaaaataacccccccaacaaaattcgtaacccggagtttttccctttaaaaaaccaaatacaccctcccattccccaaaattaaaaaaaaatctttttttttatttttgtgggaaacccctttgtcctctaatttaatgatataaaaaaaaaatttccccacccccaagtgctttttta

SEQ ID NO: 341207 - DNA, 325 bp, Zea mays
  unsure (1)..(325): unsure at all n locations
gcggccgccctttttttttttttttattttttttttttttttttttttttttttttttttttttttttttgggcaacaacgattttttttttctcatcatttttaattgggtgcctngcccaaacaaaaacattgacaacccactgttacacaacgcaaccagccagttaagttagccagtcagcccgcccgcccaacaagctttagcttgcagcctttgcacacactttggtggactggacctccatgggttttcatccgggtatgcatgcttttctccggcgggtccatgcatttttttttggcccccccaccggggaagagg

SEQ ID NO: 341208 - DNA, 428 bp, Zea mays
cggccgcccttttttttttttttttttttttttttttttttttttttttttttttttttttttttttttttttttttttttttttttttttggggataagccgctggactaaaaagcttttgcagaaactgtttgaatttttaaagctttgaaatgaaatgtggcacacatggcctttgagtttggcaacaagcagacaaaaggcttcaagaaaacaccccgaaagtgaaacgggcgaactccccccaaaagttgtgaattgccgggttgggtttaaaaattgcccttttaaattcaatggccgtttcctgaataaactaaaaccgggccaaaacccaatttgttttttttttttttcaagaaaaaaaaagtttttttttcccccattttttttctttttttttaaaagaaaaaattttggttttttt

SEQ ID NO: 341209 - DNA, 406 bp, Zea mays
  unsure (1)..(406): unsure at all n locations
tttttttttttttttttttttttttttttttttntaaatttttttttnnnnnnanntnntttaattttttttggggttttctcccggggagggggcagncaacacattttcaatttccttttacctttttttcctttcctttttttttttaaaaaaaaaaaaaaatttttcccccccccccaaacccacaaaaaaaaatggcccccccctttttttagaaaaaaaaaacacaaaaagggctgcactttttttataaaaccccccaaaaaaccccccgggaaaaaccctctttaaaaaacaaaaattattttttctccccctatttaaaaaaaatccttttggcccccccccccttttcccccccaaaaaaaaaaacatttttaacccccaaaaattttttctcccc

SEQ ID NO: 341210 - DNA, 267 bp, Zea mays
gcggccgccctttttttttttttttttttttttttttaagatcaaaaatttttttttcaaagctcttcagattatcttcaggccttgcttaattttgtttgaaaatattttgtacacttcatttgtgtcctgtgaggttacccacctaaagctggagcatgaacactcgtaataacctccgacctgttggtattcaggctggttattgtcgccggctattctaccacggcccctgaaactgcgacctcttccacgggcatatccatt

SEQ ID NO: 341211 - DNA, 388 bp, Zea mays
cggccgccctttttttttttttttttttttttttttttttttttttttttttttttttttttttttttttttttttttttttttttttttttggaaaaaaaaaaacccactttgatgaaaaagggagggtccgggtacagtacaaagttcctaccctccgggtttgaaaacttttcttatgacaaggacagggttcaccgaaaagggaagtaccccttttactaaaacataactgattttcttacagacgactgggactaaacacaaaccccccgttgggggcccttattaccacaaattggtcgatcgccaccaatttttttttaacaacacgggacagtttttgaccacagggggtttttcctttaaaggttccaaatattgggga

SEQ ID NO: 341212 - DNA, 99 bp, Zea mays
cggccgccctttttttttttttttatttttttttttttttttttttttttttttttttctttttacgtacacttttgcggacgcgtggggttactttat

SEQ ID NO: 341213 - DNA, 92 bp, Zea mays
gcggccgccctttttttttttttttttttttttttaaaacatctttaggcataatgcaaaatcctgacagcgaccacaaaaactgagacaat

SEQ ID NO: 341214 - DNA, 250 bp, Zea mays
  unsure (1)..(250): unsure at all n locations
tcccgggcggccgcccttttttttttttttttttttttttttttttttttttattttttttttttaattttttaattaatattaaatttttttaaaaaatttttttttttaaaaaaaaaaataaaaaaaataaataaaaaaaaaattaatattataaaaataaaataattaaaactaaaattaatttaattttttttaattaaaaaaaaaattantannaaaaaaaaaannttactaaaattaattttat

SEQ ID NO: 341215 - DNA, 102 bp, Zea mays
ctcgaaggaaccttttccaatacgtaagattctgcatctaggggttccaacaattcaacataacccggatagcaaaacctggcaacccttaacataaaaacg

SEQ ID NO: 341216 - DNA, 417 bp, Zea mays
gcggccgcccttttttttttttttttttttttttttttttttttttttttttttttttttttttttttttttttttttggaccacatataagggactttatttgcgctgattcgccatcacaaaagttaatcggtgggaacgatccaattcttaaaaacatagcaatcagccatcacaatgatgtggtcggatccagaacaaaaaccagccaccacgatacaaaggctttttggggattcatggcaatcacaaattttaagggaagcccaattcaaatttgattgacttagcagtgttcaaatatagtttggaaagcgttatgtaaacaagacaccttaccagtccaagccttttaaaaatgtgtcgccgaggcccatcacactgaaagatcttaggtaaatcaaatgaaaagcttt

SEQ ID NO: 341217 - DNA, 361 bp, Zea mays
cggccgccctttttttttttttttttttttttttacaagaacttttattttttatttttcccacaagaaccgtgttcggcattaactatgagtgcacatgaacgggacaggacaggaacccaacgggaaattcaggggaacgatccaattccaaaaaacattcaacttcgccatgagaaggatgggggtggttccataatataaaccagccccaacgatacaaaggcattttggggtttcatggcgataacaaatataaaggggagcccaatcaaaaggtgttagtcctggcagcgttcaaatttagtttggaaaggcgtttgtaaacaagacaacatactaggccaagtctttgaaaaat

SEQ ID NO: 341218 - DNA, 81 bp, Zea mays
  unsure (1)..(81): unsure at all n locations
tcccggggcggccgcccttnntttttttttttttttttttttttttttttaaaaaaacttattccagtgccagtaatattc

SEQ ID NO: 341219 - DNA, 372 bp, Zea mays
cggccgcccttttttttttttttttttttttttaccttttagtgaaagtttttgttactgagacctggtccctggtgaggtattcagaaaacctgcgggtttccaggctatttggttgggcacgtatcaaggaggaaaaccccgtttatgagggccgctcggcccaaagaacgatgcgggggacaagccgggtttacaacccacgcgtgggtgcgctctagagggttcaaacccccgtcgaatgcgtgccacccgtacctctttttggggggggctaaattaaatttcctggacgacgcggttcatccctgggaggggcaaaatcttgggggccccaacccaaacaccttgcatgaaaagcaggtcccccaa

SEQ ID NO: 341220 - DNA, 278 bp, Zea mays
  unsure (1)..(278): unsure at all n locations
cctttttttttttttttttaccnttttaaaaattttttctttttttttgggaagatttttctgtacaacttttgaaactattgatcagatgttggggatattatttctttttctgtttttgaaaaaacagcaaagcttttttttaaacccccctttcgcaaaatttttaaaaaaaaaattcccccccaaaaattttcccaaaaaatgaccccccccccttttttaaaaaaaaccttaaaaaacgggggggcccccttgtaaaattttttttttttccc

SEQ ID NO: 341221 - DNA, 275 bp, Zea mays
cggtccggatcccgggcggccgcccttttttttttttttttttttttttttttattttttttttttttttttttttttttttttttacacctatgagagtttttttcttgcggggggcaaattctaaaaaagcataaaaatcagaaaatgcccaaaatccaaacaaaactaagaaatggaatccacaacaaaaacccttctcttaaaaaataaaacccccggggaaattacttcgcgaacaaacaaattagaaccgttgcacaaaaacgctcccg

SEQ ID NO: 341222 - DNA, 438 bp, Zea mays
cggccgccctttttttttttttttttttttttttttttttttttttttttttttaactttggtgcatccaaaattaatggcacttcatttgcttattggggggtaaagtgtttgaacaacaaatagaaaaacaagctttttagcaggagatggaccttcaactggggcagcccaaccccaaaagcataaacaaggggttaaatgcaaaaaaggaacctgattgttcaggattcaacaaacaagaagccgccttataaaaaaaaggggttggctattttgtttgtcttaacaaagacaaccggaaaaactccaaccatgtaaaatgacaggggaggggggcaacacccttgtcaaacaaaacacccccgaaactttttacacaaaaaaaaagctgcaaatattttcctggagcaactgagaaaattttttttacattaa

SEQ ID NO: 341223 - DNA, 336 bp, Zea mays
gcggccgcccttttttttttttttttttttttttaacgatggcaattttttttttttttacttgtttttttctccttgggcggataaccccctccttgagttccataatttcctttaaacaaaaacggtctcaaaaacctttttccccacgggaccaacttggtataaaaaaaaaaaattttttttttttttttttttcaaaaccaaaggttttgtcgttcctgttgtcccatcactctcggggaggaccccccgcccccaaaggcccctcgcctccctggccaaaacccgggtttttctcccttaaaaatgttttgtatttttgcggggcccccc

SEQ ID NO: 341224 - DNA, 92 bp, Zea mays
  unsure (1)..(92): unsure at all n locations
cttcncaactttattttannggggtnnntccnnnnagnaagagggaccaacacacttttattaattaaactgggtaagaacagaactaaaga

SEQ ID NO: 341225 - DNA, 320 bp, Zea mays
  unsure (1)..(320): unsure at all n locations
gcggccgcccttttttttttttttttactgttttnnngggagcaagaaagttattatcgtcaccggaatgtcccgacaggtctcaggtttacgaatcaaaacacttgaacagtgccgcgacagcacaattcaccgtgccaaagtgaaaagcaaatgaagacaggttcacttcagattacatggcgtgaaaagaagaaaaaaaaaaggcatctgattctgtcctcctctcgagtgagaatgcacaaggcgataaagggcctgggtggccatatgaccagacactggaagaggggagcagttggtacagagatgatgatgaa

SEQ ID NO: 341226 - DNA, 405 bp, Zea mays
gcggccgccctttttttttttttttttttttttttttttttttttgtttttttttttttttttttttttttttttttgttttttttttttggaaacaatccacgaacaatttttttgaccagggaattgcctgccccgttcggacagggttataacacttgcaaacatattctttggttaacaggttgggacaacaaattattggccaaaacttgtgctttgccaatcacagaagatggagccccttttttaagccttcctgggtgggatctgagaatcggccttttttttaactggtttttccttttccaacaagaatagctttatttggcctggggggtgatttaagggttgattcgttctttaccccggtttttcctggggtgctttttttgggcctggtta

SEQ ID NO: 341227 - DNA, 185 bp, Zea mays
  unsure (1)..(185): unsure at all n locations
cgtccggatcccgggcggccgcccttttttttttttttttttttttttttttttttttttttttttttttttttttttttttttttttttttatgtttttttttttttttttttttttttaccaaaaaaaaagaaaaaaatgaattaaaaaaaagggtggaaactttnaaaaagcggggtatttt

SEQ ID NO: 341228 - DNA, 107 bp, Zea mays
  unsure (1)..(107): unsure at all n locations
gcggccgccctttttttttttttttttttntttctacctaacactacgcatgtacaaaaataaatttagctcgccccaaaggtgagcactagggagctctacacact

SEQ ID NO: 341229 - DNA, 134 bp, Zea mays
gggacgcaaactgttgaacaaaacatattatacaaattcacgggggggtttgttagttccaaattttccaatttcagtcactttacccacagcagcgagggagtaaaagcttttttcacgacttatttttcaaa

SEQ ID NO: 341230 - DNA, 98 bp, Zea mays
  unsure (1)..(98): unsure at all n locations
gggggccgccttttntttttttttttttttaatagcaagcggagagatacaactatatttccacaacagggacatcaaatctaagaggaccattacaa

SEQ ID NO: 341231 - DNA, 257 bp, Zea mays
  unsure (1)..(257): unsure at all n locations
gtccggattcccgggcggccgccctttttttttttttttttttttttttttttttttttttttttttttttannnannnntttttttttttttggggtgggaacaaaaaccttggtcattttttttttggctcggttcatagcgggggccacccaaggggacaaccggggttcccacccctttttcaaaggtgggacgggcccttaccccgtgaccgaagcgaacggttaccccattcttttgtttggttagataac

SEQ ID NO: 341232 - DNA, 424 bp, Zea mays
accgggaatgaccggggcggccggccttacttgtgttcttttcacatatagcagacacaggctaaactactcgtgcgtgcataaaaatactatgtttatggggaaatgcacatacaacacaaacatccaagacttgcaacaacttgacatgatgatgcacgataaaacagatcgatggatgctctgtcctctaaacataagctgagctactcaaaacttaactacagttgccgatcactgagtcacgccaagccactttgagaatgtatgaaactcggggcacgcgctgtccgagaccatggactcgtaccatgccttgcagcagccttaaccttggcatgcattcccgtaagctttgcctcttggagtcgagcttcgtctttctggtcttcacaccagcagccttattaagggtggacaattt

SEQ ID NO: 341233 - DNA, 321 bp, Zea mays
gcggccgccctttttttttttttttgagcgaagacacagatttcagggaatttatatacacacggcatggtgtaaactgccaacgaatttgtgtttacaaacgcttgaaacggcaaaccagctagaccaaaatcagctacatttactcgtatacgcaattcaattctctgaagtctgaataccaagccacattgtgcagccaaaaagcatgcgaccagaggtacgatataactaacagtagaggtcgaagcagcacgaatggcagacggctgacacaggcgctttagcggttggtgagtgggtccgacgagttgggcacac

SEQ ID NO: 341234 - DNA, 124 bp, Zea mays
  unsure (1)..(124): unsure at all n locations
gccggattcccggacggccgcgcggtcgtccttttttttttttaaaaatttaaaaaaaaatttttttttttttnnnnnnnnnnnnnggaaaaaacagtattcttcggctggatttattagggcc

SEQ ID NO: 341235 - DNA, 394 bp, Zea mays
  unsure (1)..(394): unsure at all n locations
cgtccggattcccgggcggccgccctttttttttttttttttttattcaagataaatttattgttgntgctcaatctacatctgaccgtgaagggtcacttttacgaagggccgtacctcaaggaacgagctggccggtcacacaagtcctaacccaaaatattgacagttaggggcggaactaggattacaatataaatggggcgacaaaaaaatggctactaacgatcaacagtgcaaagaatactggacctggcttaacatacgaaacgtgaattccgcttacgcacaaaccgacacgattgaccgtccgaacgcacgcggatccagcgcacttacccgcggattcgcccacctggcttctgtgcacgcagggcacgtcatgccgggtacg

SEQ ID NO: 341236 - DNA, 376 bp, Zea mays
ccgtccgattcccgggcggccgccctttttttttttttttatttggaaaatatcttttttttatcaagtgaacacttatgaaggttcatagtccgaaatgatatcataaagactaacacaaaatccccagtgaagatatttgcagttctagctaaaagaatgctctaagatgcaacacccttgcccttcttctctggagcttttcattaaactcggctctttaccctaagatgtaccccagctcggccactgccagactggagaaatcaggcacaatctcccactgcaattgctcttaatatagtgtcagtcacggcctgcttcgctttcaacttctctgacatggtactctttttgttcctactatgcctcaccc

SEQ ID NO: 341237 - DNA, 313 bp, Zea mays
  unsure (1)..(313): unsure at all n locations
tcccgggacgccgccctttttttttttttttttttttaacgacattgcgccactngtggtaagttttcataacgagaacgcggtcggcaaaataaccataactgttattctctgaccacccgccaaagagaacaactgccagcacttggccctgatagccaaagacaattatactatacaagaatatatggtgataaaaacttcaggcttggagaaatttgaagcgtgcaacgcgccaaggcgagtgacaggcaaggcgactcgggcggccttacatcctcctgaccaacccgggcggttttcaaccttgcca

SEQ ID NO: 341238 - DNA, 72 bp, Zea mays
  unsure (1)..(72): unsure at all n locations
aaatttgaagtgtcatcagacacanaaacacggggaagggtcacctaaaattaattcactgtccttccaaac

SEQ ID NO: 341239 - DNA, 367 bp, Zea mays
ttcccgggcggccgccctttttttttttttttactttaataaattgaggaaagattttaaaatttataataaagaaaaaaaaaggggtattgggaaaagtttttgtgttctgtttattctaaaaattcggatacttggtggtccgaacgtagatagtttatcatcctcgtagtggcacggaaggaaaaaaaaaaagaaaaaaagagcgcgggggggcagaccccccaacctataaaaaaaaaaaaaaaaagggggggaaaaaaagaactaaaaacaaaaatagggggggggggggggaaaaaaaaaaaaaaacggcggggggggggggggggaggccccaccacaaaacaaagaaaaaaattttcta

SEQ ID NO: 341240 - DNA, 445 bp, Zea mays
  unsure (1)..(445): unsure at all n locations
cggattcccgggcggccgcccttttttttttttttttttctaaaaacaacttttatttattttttannacaaacaaatttattggggattttgggatactttttttggttaaaaaaacatccgaaagaacaacacatacaccggtgagcggaacaacaggaaacggggcggctccctttattgtatccacccaaacgggggggcaattcccctgggacctgtggccaataacaaacggggcgagcataaaagtgcccccccacccgacaaaataccaaatgcaggacccatcccaatactgcaggaaagggactagagaaaccctaggggacccggcccacccccccggtgtgccgatggaccaccaccaatattgcccctgcagcggacccgaaagtatttaccacattccgagacaaggtaaccattgtttccatggacgggg

SEQ ID NO: 341241 - DNA, 270 bp, Zea mays
gcggccgcccttttttttttttttttttttttttttatttttttttaaatttacaagggctaacataaccatataccaaaatgacagacctgagctccgacataacatattcatataaccaaaataaccaattcaaggcaattaaatccaccccctagttcagctaattatagagcagcacctaaaattccaataaagtaaacaaagtaattgcattctagagataggtatcaagcaaaaattgccagcaatttctgaatcatcagaaac

SEQ ID NO: 341242 - DNA, 447 bp, Zea mays
  unsure (1)..(447): unsure at all n locations
gccgccctttttttttttttttttttttttttttttttaattttttttttttttttttttnnnnnnttttttgagggggcggaagggcccaagggccaccccactcctggcaacgctaggacattttatacttgggtcctcccatcgggcaggggcaggggggaaacaccaaattatgcgaatggcatacaaaagggggggtaaaaggaagggggcaaacttgtttgggtgtcaacgggttttaggccagattggctggctaatactagatttttaaatccccagggccggttggttttaccttgaccaacctgggaagtgcccaccttattttagtcttttttttcgatgggggggcgttttttttcgggtttcccccaggggaatcttccgtggttccagccttttttggaaacctgggactgggaggattttcttttagcttta

SEQ ID NO: 341243 - DNA, 388 bp, Zea mays
cggccgccctttttttttttttttttttttttttttttttttttttttttattttttttttttaaaatatttattttgggtttttttattctcatttttttttctttcttcctaaaacacattttcctttcctattccaaaaaaaaaaaaaacccctttttcccccccccggcacacccccccgggctatttttttataccccgggccccggacacgggttcacaaagcacccatcacctaaccccagggcccccccgggggtttttcccccccctttttcacccaaaaaacccccccctcgccaaaaacttcttggccggcaaatgtatccatctggaaaaccccccttctttgacaaataaattccccccccggaaaccccccccc

SEQ ID NO: 341244 - DNA, 319 bp, Zea mays
  unsure (1)..(319): unsure at all n locations
taccgtccgnattcccgggcggccgccctttttttttttttttttttaataaaaaaccttttttaattaatataacaaanaaaaacaatgcgacattggcaattttttttttttttttttctcccccaccccccaaaaagcacaatttttttctttagaatcaaaccaaaaaaaaatcttacagggtagaaaatacactatactcccacagcataaactcgaataaagactgctgtagctaagcccgcactaaatacccatcaacactcactgaaaaactaaccctgaaccaaaaaccaacactgacttctaaaaaccc

SEQ ID NO: 341245 - DNA, 363 bp, Zea mays
taccgtccgattcccgggcggcgcctttttttttttttttttataaacacttttttattttttgagacgaacattgcgcatatataaacacatgacatgtaaacaaccaattcgccccgagacactatattgaactagtacgtacgttaacgtttaagcacccaaactgggaaaacaagtcgacagacagtaccacacatagaaatactccatttcgcatctcgcccatagtgctctgtaccgtctcccctttggcgccagggaatcatggcgcttttgacttgaccagctggcgatgacaggtggcaggaagtggaggtggcacggcagcagcagagaagtgtcaggtggccgggtgagttc

SEQ ID NO: 341246 - DNA, 401 bp, Zea mays
  unsure (1)..(401): unsure at all n locations
ttccgggggcggccgcccttttttttttttttagaatagaaaacattgtattttttttcaaatcgacatccaaacggagcataagggncttttcgcccactatgtccagtgtccactgaccccttgttgaactgtacatgactacagatactacagatacaaagaatccttcagcaattggatccaaaaacattgctttaactggccactaaaatgttaagaacagcatgtagatacaggggcagacgccagaacttattaactcttgttacaggaggaaagctaggcagggcccacttgagaccggtgctcatacagattgatctagctttcgtaccgccaacattgcagatggctgggaaaaaatgcggtgcagggaccgcaatgcggcgagaaaagag

SEQ ID NO: 341247 - DNA, 381 bp, Zea mays
  unsure (1)..(381): unsure at all n locations
ttcccgagcggccgcccttttttgtttttttttttactttagattttccaagcttttttattttgtgnttgcgacgacaaaaattttgtgtagtgtgacctatatttttttactggccgtctttttacaacgttgtgactgggtaaacccaaacgggggcaacccccccgccgtggaaacatggggggggggaaaaaaaacccgttttttttggggtggggggcgcccacaaaaaaaaacaggggggggggctggaagaaaaacggcacacactttgtggcggcgcaccaaacacgtgaaaaaaggggggtacgcgctgttttacctccacaaaaaaaaaccccctacctcttttttttttaaaggggggcccaggggggc

SEQ ID NO: 341248 - DNA, 406 bp, Zea mays
  unsure (1)..(406): unsure at all n locations
cgtccgattcccgggcggcgcccttttttttttttttttttataatacaccaccttagagtcaccatgcatagacacgccttgtgtcggagaatacattcaaaccagaattattcttgcgccacgtaaaacagacggcgtgtctaggtctggaagcatactaaacatgtagagcatatatcacacatcgcggtcgcataaacacacaaattacgcgtttgcctctggacgggttgctgcaaaccatatccctaggccgctctgcgaagccaaccctagcttgccatagtcgaagacgggtggtagactcnatgaaaacatacccaagatccagagagggcacggggtggtgggatatccatagctgggaatcgtgatgcactgggcagctgtctcaccaaccttaa

SEQ ID NO: 341249 - DNA, 373 bp, Zea mays
  unsure (1)..(373): unsure at all n locations
cggccgccctttttttttttttaaaaaaataaaaaattatnttttaanttaaaaaaaaaaaaaaaaaaaatgggattgggtaaatttaatttaattttttttattttttaaaaattatgttattttttttttttattaatatattatttttttttttttttttaatttaatttaaaaaaagaaaaaaaggtaaaatatggggggaggaaaaaaggaaaaaaaaaaaaaaaaaaaaagtattaggataaaaaaaaaaaaaaaaaagggaaattaaaaaaagggggggggaggagtaaaaaaaattaaaaaaaaaaaaaaaatgtataaataaaaaaatatgggaaaaaaaaaaaaaaaaaaaatttaatttttt

SEQ ID NO: 341250 - DNA, 268 bp, Zea mays
  unsure (1)..(268): unsure at all n locations
ccgggcggccgccctttttttttttttaaaaaatttaaaaattaattaataaatttttnncccaaaaaaaaaaatgggaaaggttaaaataaaattaattttttccccccccacaaaaagggtaaattaaggaaccaaaaacaaaaataaacaatgctgttaaacaaaaaacaaacccacacggaaaaattaaaaacaaaataaaacaaaaaaaaaaattttccattaacaaaaaaaaaggacacaatacacaaataataaaataact

SEQ ID NO: 341251 - DNA, 411 bp, Zea mays
ccggaccgtgattcccggggcggccgccctttttttttttttttttttttaaaaattttttttttttttttttaaaaaaaaaatttttttggtattgtttttttttttttttttttttaacaaaacccaacccaaaaaaagcattaaacatggcccctgttttttgcaaccaccccttaaaaaaaaaagggtaaaaccccccaccaaacctgatggggagatgacaaaaagtttccaaccctgggccaacacccagtggaaaagctcataaacggaaaaaaaatttacctaccatccacgggcgactggaaatactaattttttaaccccccaacaccgcaaaaaaaaaaataaccaaacttgttgaaaaaaaattttctaataaaaaaaaacctcgcacccaacccaatt

SEQ ID NO: 341252 - DNA, 484 bp, Zea mays
  unsure (1)..(484): unsure at all n locations
aaaaaaaaaaatttaaaaaaaatattaaatgtttttaaaaaaaaaaaaaaaagggaaaagttaaaatttaatttattttttttaaatcaaaaaaggaanaaaaaaaaaaaaaaaaaaaaaattaaaaaaaaaattgaaataaaaaaaaaaaaaattaaaaaaaaattaaataaannntnntaaaaaatattaaaagaagaaaaaaaaaaaaataaagagaaatataaaaaaaaatataaaaaaaaaaaaataaaaaaaaaatataaaaaaatagatttatatataaataaaaagaaaaataaataatatattaagaaataaaaaaaataaatataaaaataaaaaaaaaaataaataaatagtataaaaaaaaaaataaaaatattaataaaaaataaaaaataataaaataataaataggaataaaaaaataaataaaatatgtaaatatataaaaaatagaataatatataaaataaatata

SEQ ID NO: 341253 - DNA, 410 bp, Zea mays
  unsure (1)..(410): unsure at all n locations
tccgggggcggccgcccttttttttttttttttttttacanaattaacgaaatacattcattgtctttgngcgcaaaaaaatcaacgcagttgaacaatttacaattccaaactttcgaacaaacataaggcaatgcgcgacaatcctaccataggcataacaaaaaggattggctttacagcataaagcattccaaacttaattttgcacaaattgtacagcctggacaaaggagacatctctctttggctatatagtcagtgcggggaaatcattaagtgatccagctgggaagaaatatccctctagacttatgtcagcaatatatggaaccgacggcccactgttgccacatttggctttggtcataatacacagaaggcgtcgcctttttctttaggtagcactt

SEQ ID NO: 341254 - DNA, 381 bp, Zea mays
taccgtccgattcccgggcggcgcctttttttttttttttttttttttttttttttttttttgtcggcagagacggaaaaaaaaataggttctcggatatattaaggggctaagcagaacgaagtcacaaaacctatacaaacatttgagccccaatgatgcatggcactgccactttgcagccatacagcacatagctacaacaaacttggaggtggctccactaagaattcctattgcattgctactgatgttacacctgggggcatccgaagactataccgggaggtggagagcaggaacccggatcgaccttgcagaggacgccgaaaggggaaagcgggcggaggctgccacagatcagcgaccttgtcgcacgga

SEQ ID NO: 341255 - DNA, 281 bp, Zea mays
  unsure (1)..(281): unsure at all n locations
ccgccgtaccgtccggattcccgggcggccgcccttttttttttttttttactttaaaaattacatttttttttttgcagaaggngaaatagcaagaagggaccaatttaattgatatatgtgcacaggctaacagagctgaacagtaaacacaataacagctacgaccacaaacaaaacttggaatgatgaaaactagggattgctaaagcaggcgcaggatcgtattatttattataggaagcatctttgttgaccttagcgccgagtggatacatatt

SEQ ID NO: 341256 - DNA, 344 bp, Zea mays
gtagtggatcaaccatgacgacctccgccagcctgtgtcatattttttctatagtggcgccaactaaaaataatctactcgccgttgtacaacaacgtgacggctgaaacaacggcggcaccacacataataatcgtgtagcacatcatccttttttcagctggtgtcataataaagaggagggcaccgatggtcgttcttaacaacagttgagcatgcatgatgaatgatgcgacccgcgctgcagcgcatcattcaccgcggctggtgtggtgtctacccgcatgaccactactatagttagcagcctagtagccgctcctttttttgttttccctcctttt

SEQ ID NO: 341257 - DNA, 331 bp, Zea mays
gccgcccttttttttttttttttttgggggagaatcaactacatggttttgtttttgctaggacacatacccgagcggcacattgcatagcatgtgaactccaggccacctaatgcgagattacttggtactagcaaatattccgaactgtatgcagcagcacgcctatcactctatcctaactcctacacatgggacatgtagaaatcttttacagaacttagctcttgcaagacacatatatggccctcggtaagggacagaaataggcctttttatttggtacaaggcaaaaaagaggctcctaaaccaggtctgtctgaatctttaa

SEQ ID NO: 341258 - DNA, 213 bp, Zea mays
tcccgggcggccgcccttttttttttttttttttttaaaaaaattaaaaagaatattatatttttaaaaacaaaaaaaaacaaaggggcatgggactaccaaattttaatttttaccccccaaaaacaaggggaaacaaaacggaaaaatcggacacgaaaccacccctaaagaaaacaaacccctcataaacttcggggaacaccggtgaag

SEQ ID NO: 341259 - DNA, 385 bp, Zea mays
  unsure (1)..(385): unsure at all n locations
cggccgcccttttttttttttttttctgttggtaacttcattaccattttagatgatcggtctttcaggacagtcacataataaacgccttggtgtccacggccaccacccaccagtgtcttattaaccgggcaaaattgcagggcctgttaagaattaagatcctaccctcccctcctgccccggccacggccaccacgccagccgcctcgtccgcagcctcctcccctacccccacggccgncgncgccaccaccaccaccacccttgtggtggccaccagacttcttgccattgccaaccttcatgtcctcaaggagaggcagtatgttgtccacacacttgcggaagctgaagtcatccgaggatccgtcgatcctgcgga

SEQ ID NO: 341260 - DNA, 314 bp, Zea mays
  unsure (1)..(314): unsure at all n locations
gccgcccttttttttttttttttttataaaaaaattccgaacagaattctggttagctnataaanattccgacttggacactttgtagtaagggaatatgtttgcacccacaaactggcatgaaatcccccccaaaacaaatagcaaaactttttaaggaaaaaaacctcgggacaataaaagggccccttgaactttaaacgcaaaatcccaaaagaagggcaccaatagacccggcaaaaaaccccggggagacccgaaccttgtccgggaccggggggaacggggaataaaccgggaaactggatttcaaa

SEQ ID NO: 341261 - DNA, 138 bp, Zea mays
  unsure (1)..(138): unsure at all n locations
ccgcccttttttttttttttttttaataaaaaattcacaacccaatttcccattttttannaanagcaanacctaccgatnacgggggatataataacagcgatcttaaanccngggtagaagcaggcatgtctacac

SEQ ID NO: 341262 - DNA, 326 bp, Zea mays
gcggccgcggtcgctgacctctgaagcctgctccacgttccgttttttgttgccgaagcgatgggtgaagagcggcattgacttccaccttgacgttaaacacgaagtctaagcacaacatacacttgtccttgttccataacatgaacaccatgtgcactctaacgctccaacgtcgtcttcagctgtatggtcatctcgcttgaccctatcccacaccaagcacacatttcatctgactcgtgtgaaattcatcgccgttgacattgttttgctgaacccagtgtactgcaggcttacttatattttcgaaccaatgggacctc

SEQ ID NO: 341263 - DNA, 437 bp, Zea mays
cggccgcccttttttttttttttttttttttaaattttttttgaattttctaaccacgagtatttcatcaagccctacatgtcatctgccatccgaattggactttctactcactaaaaatttcctagtactcagatttgggatttttataatgaattgtgcaaaagaacacttacagctccacctccaccaaacagcgtcatcatgtttcaggtacaggatgttcgaagctatttgtgggagcgagtggtacgtcgagtaacacagagacagctaaggttcaagcacagcttattataatattatatatatatttataaatatatatataaaataaaggaagaaattgcacgaattttaagggaagccgttcgcaagtacaacttcatttgattccaaatgccgttaataaatgcttaacactccatgcgaattta

SEQ ID NO: 341264 - DNA, 286 bp, Zea mays
gcggccgccctttttttttttttttatttttttttttttttttttttttttttttttttaatattttcatttgtttatttttttttttttttttttttggaaaaaaagggacacccgaaaggggggcttgaagttaacttttccaaaaaaacagggcacgccgtaaaaaaagttaacagtccacaattacaggaacaaccccattcaaaatttggggatggagggacaagtcacgttttgcaaaaacccattccgggttaacggccggttgcatcatttttttttg

SEQ ID NO: 341265 - DNA, 221 bp, Zea mays
tctttctcttgcttgcaacgcaatagctcttgggttggggtaaccaaaattaatttaattggccgcggtttaccaccgtgggaactgggaaaccctgggggtacccaaattaaatggcttggaagacattccccttttggccggtgggggaataacgaaaagggccggacccatcggcctttccaacaaatgggcaaaccggaatgggaatgggacccgcc

SEQ ID NO: 341266 - DNA, 239 bp, Zea mays
ggccgtcctttttttttttttaaaaatttaaaaaaatttttaatttattaaaaaaaaaaaaaaaaggggatttgtgggaaaaacattggtaatcgaaaaaaaggaaaccccggagggcaaagggaaaaatactttcccaaaccaaggggaccccaaaacaaaatttaaaaatacacaaaaacaaaaacaacccgattacaaatctaacaaacacgggccacgcccggttttccaaaaac

SEQ ID NO: 341267 - DNA, 426 bp, Zea mays
  unsure (1)..(426): unsure at all n locations
cggccgacctttttttttttttttttttttttaaatttttttttttnttttttttttaaaaaattttttttttttttttttttttttttttttttttttttttttttaagggaaaaaaattttaaaaaaaatatttgaaaatttttagtttggaaaaaaaagaaaaaaaattttgggggttattcaaaaaaaaaagggttttttaataaaaaaattttaaaccttccgaagaaataaaaaaacttccaaaaaaaaattttaatttttgggtgaaaaaaaaataaaaagggggggggaaaaaaaaaaaaaattgccaactaaaaaaatccccctttttttttttttttgaaaaaaaaaaaattaaaatttttaacctttttatttttttttgaaaaaaaaaaataattaaatcccaaagaccttttt

SEQ ID NO: 341268 - DNA, 474 bp, Zea mays
  unsure (1)..(474): unsure at all n locations
taccggaccgnattcccgggcggccgcccttttttttttttttttttttttttaattttttttatattttttgacaactacaacttatataagggggctaaggcactgtattaaatgaaacatctnnccaaatgggatgcaaaatcaatatataaagtactgcaagaagcccatcagcgtattaaaaaatatgtatgatctttaaggcctccaaattttatcccaacaattgtcaaccaccttttgaactcttttagtctgacaaactcctgtcactatggtataccaaatgacagcctccggcacaatatatttagccagcatgaccataacaacatctcctgctgccctatatttatttttatagcatagtctcatgaccaggccctttaagaattcccttcctttcccctttaaaactccaattttccgaaaaaaatttggattttattgggtctggataaacatttgatc

SEQ ID NO: 341269 - DNA, 296 bp, Zea mays
  unsure (1)..(296): unsure at all n locations
cggaccggattcccggggcggccgcccttttttttttttttaaatttaaaaaaattattattttnttttttaaaaaaaaaaataatggggntttttttttttttaacgtataattcccaaaaaaaaccggccccgtaaaaaaacttatatagaggggttccaaaaccctggcccaagaataaaacccccccccaaacccaaattttctaccaaccaaacattatctaacaagggtttttggtcaaaacaaccccggtttaaaacccaaattttataaagggcccccctcacaaaaa

SEQ ID NO: 341270 - DNA, 473 bp, Zea mays
taccgtctcgattccgggcgcgccgcccttttttttttttttttttttttttttactgcagtttaatttaaacactgaatcctcgaagggacttgcgagtacaagtgatgtcataacgcataaggtgacatactgaacagcagaattggtaaatggtccactgacgggaaatcaagatagaaaccaaatattcctagaacagttcagtctttaaaacttgaaaaacaccggcaagtcaatgtgagccccatcattgacaaaagcagaactataacatgccaactcacaaaaaccgtgttagtaatagctgaacatagtggaattatatgtttcctatctacagcacccaaaaaagcaacctattccaaggaacaagaatggggatcctttaaaacagacatgtatggcaaccacttaaaattgatcttacttagagcccacattaaacacccctctttcctaaaaattccttt

SEQ ID NO: 341271 - DNA, 110 bp, Zea mays
  unsure (1)..(110): unsure at all n locations
cctttnttttttttttttttactttagaggattcaagtttttttttgccacactgcaaaatattggaagactgtcataatatccaacattgaacagaggaccatggagag

SEQ ID NO: 341272 - DNA, 184 bp, Zea mays
  unsure (1)..(184): unsure at all n locations
ngcggccgccctttttttttttttttctttttgtgctcaggacaacaatttttgtgctaaaagtaacaaaaaacgagtaccagacctaacaagcattgtagttactaagatgccaacagggaacgggctaaaggaagggagagctggctgacagaggaggagagttcgcgttacgcaaaaactg

SEQ ID NO: 341273 - DNA, 345 bp, Zea mays
ccaaaccatgcgaattttttttttttactttttcaactagtttcaggcggttaaaaaaatatctttggacaaggcggcaaaaccgggagcaggtttgtataaaagtttaagggcagcacatgcacccagcaaaatttgggcctgtaatgttcaacaaacccctagggtcccccgagcaaagtttgagacattccggggaaaaaaaaattaatttgggaagcacttttttccgggggggaagaaaaaaacttgttcgaataacaaggcttggagtttttaatttaaggggggggtgttaatgggggggattaggaaaacaccgcggggggggaattcccaccttgg

SEQ ID NO: 341274 - DNA, 96 bp, Zea mays
  unsure (1)..(96): unsure at all n locations
cggccgccctttttttttnnnnnnnnnggagcttacataacacttattatttatataactgataacattacaagacagaaagtacaactagacaca

SEQ ID NO: 341275 - DNA, 68 bp, Zea mays
aggttaaaccacaatatttttatttttggcaaacacaaccggaccacaccggcgagaggttaaatttt

SEQ ID NO: 341276 - DNA, 137 bp, Zea mays
  unsure (1)..(137): unsure at all n locations
gtattaaaaacaganaatttttgcttgggggggttctttgaaaaatttttttgctttttncncaaacaacacaaaaaccccttttttaaaacccaaccaacttggaacttaaccttcctcaaaatattatagctcct

SEQ ID NO: 341277 - DNA, 195 bp, Zea mays
  unsure (1)..(195): unsure at all n locations
gccgtaccgtccggattcccgtgcggccgcccttttttttttttttttntnnnnttttttttttnttnttttttttttttttnnnnngggcacgcaacacaggggaatctcaccaaatatggaaaagggaggcgaggccacacacaacaaggggtaggggtaggggcaccaccaccaccacatgccatgcttttt

SEQ ID NO: 341278 - DNA, 418 bp, Zea mays
ttcccggggcgccgccctttttttttttttttttttttttttttttttttttttttttttttttttttttttttttttttttttggtggggaacaacaaaatacgaaacttcctttccgagattggctgatccatcaaggattcaaaggtttactcaaaatccggtttccaaaaggtttactcagtacaacgtttccattaaaaacacacccgaacgaaaaatttcattaacaattcttttcgaaagaccaggatcctcgttatttattgctcccaaaagttttgcactactcccatgctagtcgccctgtactcctgtaagcctagccggaaccgacaattatttttttgatggggatgaaaataaccttaacaaaaaaccccacaaagcccatgacgaccaacccgatcgccgtcc

SEQ ID NO: 341279 - DNA, 194 bp, Zea mays
aaggcaagagaaactgtttcaaggaaatctgatattcctcacattcaatagaacgacaacatagtccaactgaaagcagtttgaacagcacctcaagccctactgatcataactaagatccgataggtttagttgtcaccggcatattcaaacatacatgttagaatcaaattacattcacattttctcacttt

SEQ ID NO: 341280 - DNA, 390 bp, Zea mays
  unsure (1)..(390): unsure at all n locations
attccggggcggccgcncttttttttttttttttttttttaaatgtcacttttttgtatttttanncanaattgtncatagggcagggttttttttnggagaccaccaaaattacctggcccaaaaaaaacaggttagggaaaccacatttcaaccgggggcgcccaccacttgtgtaaatttatggggattgaaaaaaaaaaaccaggttttttttgttttggggctcccacaaaaaaaacacctgggtagcttttgagccaaaaccacccttaatttattggggcccggccaacattggaacaaaaaggcggccggggttttttttttttcccaaaaaaaaaatcccactctttttttttttttaaaggggttctcttgggcccctaa

SEQ ID NO: 341281 - DNA, 237 bp, Zea mays
  unsure (1)..(237): unsure at all n locations
tacgggtcggattccggcgcggccgcnctttttttttttttttttttttttttttttttttttacatagaagggtgcgccaaagcatcaggtcacaaaatccaagcacagttcagacaacgggttcgaatataaaaatactatgttctcgcggaaatgcacaaacaacacgaacatgcaagacttgtagcaacttgttttgatgatgcaggataaaacagatggatggattcttttt

SEQ ID NO: 341282 - DNA, 193 bp, Zea mays
ttcccgggcggccgcccttttttttttgttagcttgttacagcaaggaaaaatgattactactgcatgcaaaacacataaacacattgcgacaaagacactgacatgctagccacatgacctgagcacatatcacaggcagcaacaagtgcctaaacaaccgcttccctatcaaagatgcagctgaacttgac

SEQ ID NO: 341283 - DNA, 94 bp, Zea mays
  unsure (1)..(94): unsure at all n locations
ccgttacgattttcaatccataccaatacatttgcttacagatatacacacatgcacaacatngaccaagcttaaacagattaatccacaaaat

SEQ ID NO: 341284 - DNA, 104 bp, Zea mays
ggatccttcaagcaatacttagagcggcgggagtacttataggagtaccaccattctgaaacatagtagcgccaggacgaaatataggagcgtgcaaaaacata

SEQ ID NO: 341285 - DNA, 282 bp, Zea mays
  unsure (1)..(282): unsure at all n locations
accgtccgnattccccgcccgccccccttttttttttttttttttttaaaaactaaaacatttaattaatactccaacacacaaacnncccagcgccggcttcttttaaaaatttttttttcctcaaacacaccacaacactctaaaacaccccaaacaaatcaaaaaaacatccacaaaaacacccaaatcgctcaaaaaaacaccataaaaaaaaaacccccccaaaaaacacaacccccccccccccaatattcaaaaaaaaaataaccaccccccttt

SEQ ID NO: 341286 - DNA, 410 bp, Zea mays
accggccgaattcccgggcggccgccctttttttttttttttttttttttttccccgagtagatatttattagttaatgaagctcgtgttcccaaaccaacgattaggatttaatgtgaatttgtaaaaacataacaaattactaagcgacggatcataataattgaatattcatcgaagtaaaccataatgtttatgaaaaggattctataatgaatgtaccttgatgaagcaatttttccctgaccagatatgtagaagttaatgaagcccttccttttttccaaagcaaagataaagatttacttgatgaagcaggtttttttcccttgaccagatatgtagaagttaatgaagcccttcctttttccaaaacaaagataaggattttatgaaggacgcggcgcgga

SEQ ID NO: 341287 - DNA, 433 bp, Zea mays
  unsure (1)..(433): unsure at all n locations
ccgccctttttttttttttttttttttaaaatttttctcncgctttggatatccaccccaaaanaaacaaacaggggggcattaattagaggacttttccggatacaaagatccggaggtggaaaagtccggccagtactctcaaaagaacgagctcctgactggccggaaagcgttcgacaggtgagcaagtacagcgctgcgacacttgaccctgcaacaaacaaaaacgatgactggtgcagcttctaagcaaggtcccagctatcgttggtccagtgggcgtcgccccagctgcacgacatcgaccagatgacgctggaggggctgtgccacgcgaagtcctctgcgtccaggtaagctgttgacgggtttagttgctgttcccgcctccagccatttgtgcggtgttccaaattggccggtttccggt

SEQ ID NO: 341288 - DNA, 382 bp, Zea mays
ccgtccgaattcccgggcggccgccctttttttttttttttttttttattcatactcgttctatttataattttgcgttcaaacgaactgcgaagaaacgtgatcgcgatctattatcagtcaccccctatccctgctcccctcccactcattttttccccctttgctcaggcgccgacccgggcgacacgacggcgacaccaagtgcgcggacgcaataatcctgtccgtccttacgcccaggcccggccgtcgtacaatcatctcgtccccagcgcgcgcgccttgggctgtcgggcaccatcagccgggcgacgcgcaatggggtcagctagccccgctccgatccggtgaccacaggatcccaagccaccgtacccgc

SEQ ID NO: 341289 - DNA, 155 bp, Zea mays
tcgtatataaaaataatttacaaaaattttaaaaaaacataaaaaacacaaataagggggtggtttataatatatatcatctgactttttttaaaatcttttattttaaatctttcatactgttgtttttgttgttatttaccaccttcatttta

SEQ ID NO: 341290 - DNA, 293 bp, Zea mays
caacagcaacaacagttcctaccagcactgagccacctagccatggtgaaccctgccgcctacgtgcaagagcagctgcttgcatccaacccacttgctctggcgaacgtagttgcaaaccagcaacaacaacagctacaacagtttctgccaacgctcagtcaactagccatggtgaaccctgccgcctacgtacaacaacaacaactgctttcatctagcccgctcgctgtgggcaatgcacctacatacctgcaacaacaattgttgcaacagattgtaccagctctgac

SEQ ID NO: 341291 - DNA, 145 bp, Zea mays
gaccaactactaactatataaagaacagtactggtccaagaatggcatccaaaacatgaggcctgatgatgctccttggtccttctgcatgccctggttccgctagcattctcgcctgatgcatcacacgactcacatagttaac

SEQ ID NO: 341292 - DNA, 279 bp, Zea mays
atcagcaaagcggcagtgcgtagagtggatcgtcgaacagaacagcatgaagatggtgcatcggctcgtcgtgtgcctggctctgtcagctgccagcgcctttgcaatgcagatgccctgcccctgcgcggggctgcagggcttgtacggcgctggcgccggcctgacgacgatgatgggcgccggcgggctgtacccctacgcggagtacctgaggcagccgcagtgcagtccgctggcggcggcgccctactacacccggttgtgggcagacgagcg

SEQ ID NO: 341293 - DNA, 420 bp, Zea mays
  unsure (1)..(420): unsure at all n locations
cagaaacacaccaagcgaagcacattagcaacaacctaacaacaatggctaccaagatattatccctccttgcgcttcttgcgctttttgcgagcgcaacaaatgcgttcattattccacaatgctcacttgctccaagttccattattacacagttcctcccaccagttacttcaatgggcttcgaacacccagctgtgcaagcctataggctacaacaagcaattgcggcgagcgtcttacaacaaccaatttcccagttgcaacaacaatccttggcacatctaacaatacaaaccatcgcaacgcaacaagaacaacaattcctaccagcactgagccacctagccatggtgaaccctgccgcctacttgcaacagcagttgcttgcatcaaacccacttgctctggcanacgtag

SEQ ID NO: 341294 - DNA, 359 bp, Zea mays
ccaacaagcaacatagaaagtggaatccagtagcaacaatagagcaacaatggagaccaagatgttttccctccttatgctccttgctctttctacatgtgttgctaacgcgacaattttccctcaatgctcacaagctcctatagcttccctttttcccccataccttccatcaattatagcttcagtatgtgaaaacccagctcttcaaccatataggcttcaacaagcaatcgcagcaagcaacatacctttatcgcccttgttgtgtcaacaatcgccagccctatctttggtgcagtcattggtacaaaccatcagggcacaacagctgcagcaactcgtgctacctgtgatca

SEQ ID NO: 341295 - DNA, 453 bp, Zea mays
attgagaccaactagcaacatagaaagcacaatagtgtaccaacaatggcagccaaaatattttgcctccttatgctccttggtctttctgcaagtgctgctacggcgaccattttcccgaaatgctcgcaagctcctatagcttcccttcttcccccgtacctctcaccagcggtgtcttcggtatgtgaaaacccaattcttcaaccctacaggatccaacaggcaatcacagctggcatcttacctttatcacccttgttcctccaacaatcatcagccctattacatcagttacctttggtgcatttattggcacaaaacatcaaggcacaacaactacaacaacttgtgctagcaaaccttgctgcctactctcagcaacagcaagttcttccattcaaccaactagctgcattgaactctgcttcttatttgcaacaacaacaacta

SEQ ID NO: 341296 - DNA, 456 bp, Zea mays
gaaagtggaatacagtagcaacaatagagcaacaatggcggcgaagatattttccatccttatgctccttgctctttctgcatgtgttgctaacgcgaccatttttcctcaatactcacaagctcctatagctgcccttcttcccccataccttccatcaatgaccgcttcagtatgtgaaaacccagcccttcaaccctacaggctccaacaagcaatcgcaacaagcaacttacctttatcacccctgttctttcaacaatcgccagccctatctttggtgcagtcattggtacaaaccatcagggcacaacagctgcagcaactcgtgctaccagtgatcagccaagtagctctggcaaacctttctccctactctcagcaacaacaatttcttccattcaaccaactgtctacactgaaccctgctgcttatttgcagcaacaacaactact

SEQ ID NO: 341297 - DNA, 438 bp, Zea mays
caacaagcaacatagaaagtggaatccagtagcaacaatagagcaacaatggcgaccaagatattttccctccttatgctccttgctctttctgcatgtgttgctaacgcgacaattttccctcaatgctcacaagctcctatagcttcccttcttcccccataccttccatcaatgatagcttcagtatgtgaaaacccagctcttcaaccctataggctccaacaagcaatcgcagcaagcaacatacctttatcacccttgtttcaacaatcgccagccctatctttggtgcagtcattggtacaaaccatcagggcacagcagctgcagcaactcgtgctacctgtgatcaaccaagtagctctggcaaacctttctccctactctcagcaacaacaatttcttccattcaaccaactgtctacattgaaccgt

SEQ ID NO: 341298 - DNA, 441 bp, Zea mays
cgcagctggcatcttacctttatcacccttgttcctccaacaatcatcagccctattacagcagttacctttggtgcatttattggcacaaaacatcagggcacaacaactacaacaacttgtgctagcaaaccttgctgcctactctcagcaacaacagtttcttccattcaaccaactagctgcattgaactctgcttcttatttgcaacaacaacaactaccattcagccagctatctgctgcctacccccagcaatttcttccattcaaccaactgacagctttgaactctcctgcttatttacagcagcaacaactactaccattcagccagctagctggtgtgagccctgctaccttcttgacacaaccacaattgttgccgttctaccagcacgctgcgcctaacgctggcaccctcttacaactgcaacaatt

SEQ ID NO: 341299 - DNA, 434 bp, Zea mays
caacaagcaacatagaaagtggaattcaggagcaacaatagagcaacaatggcggccaagatagttttccatccttatgctccttgctctttctgcatgtgttgctaacgcgaccatttttcctcaatactcacaagctcctatagctgcccttcttcccccataccttccatcaatgaccgcttcagtatgtgaaaacccagcctcttaaccctacaggctccaacaagcaatcgcaacatgcaacttacctttatcacccctgttctttcaacaatcgccagccctatctttggtgcagtcatttggacaaaccatcaaggcacaacagctgcagcaactcgtgctaccagtgatcagccaagtagctctggcaaacctttcttcctactctcagcaacaacaatttctttcattcaaccaactgtctacac

SEQ ID NO: 341300 - DNA, 458 bp, Zea mays
agaccaacaagcaacatagaaagtggaatccagtagcaacaatagagcaacaatggcgaccaagatattttccctccttatgctccttgctctttctgcatgtgttgctaacgcgacaattttccctcaatgctcacaagctcctatagcttcccttcttcccccataccttccatcaatgatagcttcagtatgtgaaaacccagctcttcaaccctataggctccaacaagcaatcgcagcaagcaacatacctttatcacccttgtttcaacaatcgccagccctatctttggtgcagtcattggtacaaaccatcaaggcacagcagctgcagcaactcgtgctacctgtgatcaaccaagtagctctggcaaacctttctccctactctcagcaacaacaatttcttccattcaaccaactgtctacattgaaccgtgctgcttatttgcagc

SEQ ID NO: 341301 - DNA, 224 bp, Zea mays
gggccttcagaccatataactttgtgtactccagagcgcagaagaacccaaccgacaccatgagggtgttgctcgtcggcctcgctctgctggctctcgatgcgagcgccaccttcacgcatacaagcggtggctgcgggtgccagccaccgccgccggttcatctaccgtcgccggagcatttgccacctccggttcacctgccacctcttgagcattatcca

SEQ ID NO: 341302 - DNA, 453 bp, Zea mays
  unsure (1)..(453): unsure at all n locations
attagctttatctactccagagcgcagaagaacccgatcgacaccatgagggtgttgctcgttgccctcgctctcctggctctcgctgcgagcgccacctccacgcatacaagcggcggctgcggctgccagccaccgccgccggttcatctaccgccgccggtgcatctgccacctccggttcacctgccacctccggtgcatctcccaccgccggtccacctgccgccgccggtccacctgccaccgccggtccatgtgccgccgccggttcatctgccgccgccaccatgccactaccctactcaaccgccccggcctcagcctcatccncagccacacccatgcccgtgccaacagccgcatccaagcccgtgccagctgcagggaacctgcggcgttggcagcacccccgacctgggccagtgcgtcgagttcctgaggcatcagtgc

SEQ ID NO: 341303 - DNA, 464 bp, Zea mays
ccggaagcgtccgagaccaacaagcatcatataaagtggaatccagtagcaccaatagagcaacaatggcgaccgggggattttccctccttatgctccttgctctttctgcatgtgttgctaacccgacaatatactcctcaatgctcacacgctcctatagcttcccttcttcccccataccttccatcaatgatagcttcagtatgtgaaaacccagctcttcaaccctataagctccaacaagcaatcgcaccaagcaacatacctttattacccttcgtgtaacaatcgccagccctatctttggtgcagtcattggttcaaaccatcagggcacagcagctgcagcaactcgtgctacctgtgatcaaccaagtatctctggcaaacctttcttcctactctcagcagcaacaatttcttccattcaaccaactgtcttcattgaaccgtgctggtta

SEQ ID NO: 341304 - DNA, 431 bp, Zea mays
  unsure (1)..(431): unsure at all n locations
gggtcttcagaccattagctttatctactccagagcgcagaagaacccgatcgacaccatgagggtgttgctcgttgccctcgctctcctggctctcgctgcgagcgccacctccacgcatacaagcggcggctgcggctgccagccaccgccgccggttcatctaccgccgccggtgcatctgccacctccggttcacctgccacctccggtgcatctnccaccgccggtccacctgccgccgccggtccacctgccaccgncggtccatgtgccgccgccggttcatctgccgccgtcaccatgccactaccctactcaaccgccccggcctcagcctcatcctcagccacacccatgcccgtgccaacagccgcatccaagcccgtgccagctgcagggaacctgcggcgttggcagcaccccgatcc

SEQ ID NO: 341305 - DNA, 356 bp, Zea mays
caacaagcaacatagaaagtggaatccagtagcaacaatagagcaacaatggagaccaagatattttccctccttatgctccttgctctttctacatgtgttgctaacgcgacaattttccctcaatgctcacaagctcctatagcttccctttttcccccataccttccatcaattatagcttcagtatgtgaaaacccagctcttcaaccatataggcttcaacaagcaatcgcagcaagcaacatacctttatcgcccttgttgtgtcaacaatcgccagccctatctttggtgcagtcattggtacaaaccatcagggcacaacagctgcagcaactcgtgctacctgtgat

SEQ ID NO: 341306 - DNA, 222 bp, Zea mays
gggtcttcagaccattagctttatctactccagagcgcataagaacccgatcgacaccatgagggtgttgctcgctgcggtcgctctcctggctctcgctgcgagcgccaccttcacgcatacaagcggtggctgcggctgacagccaccgccggcggctcatctaccgccgccggtgcatctgccacctccggttcacctgccacctcaggtgcattttcc

SEQ ID NO: 341307 - DNA, 375 bp, Zea mays
  unsure (1)..(375): unsure at all n locations
ctgggtcttcagaccattagctttatctactccagagcgcagaagaacccgatcgacaccatgagggtgttgctcgttgccctcgctctcctggctctcgctgcgagcgccacctccacgcatacaagcggcggctgcggctgccagccaccgccgccggttcatctaccgccgccggtgcatctgccacctccggttcacctgccacctccggtgcatctcccaccgccggtccacctgccgccgccggtccacctgccaccgccggtccatgtgccgccgtcggttcatctgccgccgccaccatgccactaccctactcaaccgccccggcctcagcctcatccncagccacacccatgcccgtgccaacag

SEQ ID NO: 341308 - DNA, 287 bp, Zea mays
atcagcaaagcggcagtgcgtagagaggatcgtcgaacagaacagcatgaagatggtcatcggtctcgtcgtgtgcctggctctgtcagctgccagcgcctctgcaatgcagatgccctgcccctgcgcggggctgcagggcttgtacggcgctggcgccggcctgacgacgatgatgggcgccggcgggctgtacccctacgcggagtacctgaggcagccgcagtgcagcccgctggcggcggcgccctactacgccgggtgtgggcagacgagcgccatgtacc

SEQ ID NO: 341309 - DNA, 205 bp, Zea mays
gctttatctactccagagcgcagaagaacccgatcgacaccatgagggtgttgctcgttgccgtcgctctcctggctctcgctgcgagcgccaccttcacgcatacaagcggcggctgcggctgccagccaccgccgccggttcatctaccgtcgccggtgcatctgccaccttcggttcacctgccaccttcggtgcatcttcc

SEQ ID NO: 341310 - DNA, 362 bp, Zea mays
  unsure (1)..(362): unsure at all n locations
ctgggtcttcagaccattagctttatctactccagagcgcagaagattccgatcgacaccatgagggtgttgctcgttgccctcgctctcctggctctcgctgcgagcgccacctccacgcatacaagcggcggctgcggctgccagccaccgccgccggttcatctaccgccgccggtgcatctgccacctccggttcacctgccacctccggtgcatctcccaccgccggtccacctgccgccgccggtccacctgccaccgtcggtccatgtgccgncgccggttcatctgccgtcgccaccatgccactaccctactcaaccgccccggcctcagcctcattcccaggcacacccatg

SEQ ID NO: 341311 - DNA, 115 bp, Zea mays
aaatctcctctatccatccctctctatctatatatgtaataatgcagtaagacgacacacattatcatgtgtggtatgaccaataatatatgcatcataataaagttttggtttt

SEQ ID NO: 341312 - DNA, 126 bp, Zea mays
agtgtaccaacaatgtcttccaaaatacattgcttacttatactcctgggtccttctgccaggggtgttaccgcttccattttctctcaaatgtaacaatcctgcatatcttccctgtttccccga

SEQ ID NO: 341313 - DNA, 436 bp, Zea mays
attttgagcattcagaaacacaccaagcgaagcacattagcaacaacgtaacaacaatggctgccaagatattatccctccttgcgcttcttgcgctttttgcgagcgcaacaaatgcgttcattattccacaatgctcacttgctccaagttccattattacacagttcctcccaccagttacttcaatgggcttcgaacacccagctgtgcaagcctataggctacaacaagcaattgcggcgagcgtcttacaacaaccaatttcccagttgcaacaacaatccttggcacatctaacaatacaaaccatcgcaacgcaacagcaacaacaattcctaccagcactgagccacctagccatggtgaaccctgccgcctacttgcaacagcagttgcttgcattaaacccacttgctctggcaaacgtagttgc

SEQ ID NO: 341314 - DNA, 232 bp, Zea mays
  unsure (1)..(232): unsure at all n locations
tctaccctactcatccccatgtatagggccttttttctctcggggggacccaaagaacaaacccacaaccccctctttcttcaatattaatttaaactttatttcaaactctaccccttctttttcaggttgttctacagcaacaccaataccatcattattaataggggntttttatataaaaaatacaatgcatatacaaaattctttccacttttttttaactttttta

SEQ ID NO: 341315 - DNA, 440 bp, Zea mays
ctagcaacatagaaagcacaatagtgtaccaacaatggcagccaaaatattttgcttccttatgctccttggtctttctgcaagtgctgctaccgcaaccattttcccacaatgctcacaagctcctatagcttcctttcttcccccatacctctcaccagcggtgtcttcagtatgtgaaaacccaattcttcaaccctacaggatccaacaggcaatcgcagcaggcatcttacctttatcacccttgttcctccaacaaccgtcagccctattacagcagttacctttggtgcatttgttggcacaaaacatcaaggcacaacaactacaacaacttgtgctaggaaaccttgctggcctactctcagcaacagcagtttcttccattcaaccaactggctgcattgaactctgctgcttatttgcaacaacaacta

SEQ ID NO: 341316 - DNA, 413 bp, Zea mays
gagaccaacaagcaacatagaaagtggaatccagtagcaacaatagagcaacaatggcgaccaagatattttccctccttatgctccttgctctttctgcatgtgttgctaacgcgacaattttccctcaatgctcacaagctcctatagcttaccttcttcccccataccttccatcaatgatagcttcagtatgtgaaaacccagctcttcaaccctataggctccaacaagcaatcgcagcaagcaacatacctttatcacccttgtttcaacaatcgccagccctatctttggtgcagtcattggtacaaaccatcagggcacagcagctgcaagaactcgtgctacctgtgatcaaccaaagtagctctgcaaacctttcttcctactctcagcaacaacaatttctt

SEQ ID NO: 341317 - DNA, 346 bp, Zea mays
caactagcaacatagaaagcacaatagtgtaccaacaatggcagccaaaatattttgcctgcgtatgctccttggtctttctgcaagtgctgctacggggaccattttcccgcaatgctcgcaagctcctatagcttcccttcttcccccgtacctctcaccagcggtgtcttcggtatgtgaaaacccaaattcttcaaccctacaggatccaacaggcaatcgcagctggcatcttacctttatcacccttgttccttcaacaatcatcagccctattacaacagttacctttggtgcatttattggcacaaaacaataaggcacaacaacttccacaacttgg

SEQ ID NO: 341318 - DNA, 416 bp, Zea mays
  unsure (1)..(416): unsure at all n locations
ctgggtcttcagaccattagctttatctactccagagcgcagaagaacccgatcgacaccatgagggtgttgctcgttgccctcgctctcctggctctcgctgcgagcgccacctccacgcatacaagcggcggctgcggctgccagccaccgccgccggttcatctaccgccgccggtgcatctgccacctccggttcacctgccacctccggtgcatctcccaccgccggtccacctgccgccgccggtccacctgccaccgccggtccatgtgccgccgccggttcatctgccgtcgccaccatgccactaccctactcaaccgccccggcctcagcctcatccccagccacacccatgcccgtgccaacagccgcatncaagcccgtgccagctgcagggaacctgcggcgt

SEQ ID NO: 341319 - DNA, 114 bp, Zea mays
acgagcctcatttatttaatagcgcagaagaactagatccccaccatgaggttgtagctatggtgctattgctatactgattctggctgcaagcgccacctccactcatacaaa

SEQ ID NO: 341320 - DNA, 382 bp, Zea mays
atcagtaccattaattatcattcatcttagtattataggcaccaaatctaatttgcaacattgattatctaactccagatactatgaatcttgttcttgatgttcttgcttttcgttttaaaatattctttatttttataaccttttttgttaatctttttaatctctttcttttttatttttttctttttgtatgtttgtttatttttatttttatttttttttctttttttcttttttattttataatattttatttatattttttattgtttgtttttctcttcttctatatttgtttattatatgttttgcttgtttttttttttttttatatctattattattatttttttttttctattttatatattttattttt

SEQ ID NO: 341321 - DNA, 362 bp, Zea mays
gaaacacaccaagcgaagcacattagcaacaacctaacaacaatggctaccaagatattatccgtccttgcgcttcttgcgctttttgcgagcgcaacaaatgcgttcattattccacaatgctcacttgctccaagttccattattacacagttcctcccaccagttacttcaatgggcttcgaacacccagctgtgcaagcctataggctacaacaaagcaattgcgggggagcgtcttacaacaaccaatttcccagttgcaacaacaatccttggcacatctaacaatacaaaccatcgcaacgcaacagcaacaacaattcctaccagcactgagccacctagccatggtgaaccct

SEQ ID NO: 341322 - DNA, 419 bp, Zea mays
gccggttcatctaccgccgccggtgcatctgccacctccggttcacctgccacctccggtgcatgtcccaccgccggtccacctgccgccgccggtccacctgccaccgccggtccatgtgccgccgccggttcatctgccgccgccaccatgccactaccctactcaaccgccccggcctcagcctcattcccagccacacccatgcccgtgccaacagccgcatccaagcccgtgccagctgcagggaacctgcggcgttggcagcaccccgatcctgggccagtgcgtcgagttcctgaggcatcagtgcagcccgacggcgacgccctactgctcgcctcagtgccagtcggtgcggcagcagtgttgccagcagctcatgcaggtggagccggagcaccggtaccaggcgatct

SEQ ID NO: 341323 - DNA, 335 bp, Zea mays
cattcaaccaactagcagcattgaactctgctgcttatttatagcagcaacaactactaccatgtcagccagctagctgatgtgagccctgctgccttcttgacacaacaacagttgttgccgttctacctgcacgctatgcctaacgctggcaccctcttacaactgcaacaattgctgccattcaaccaacttgctttgacaaactcaacagtgttctaccaacaacccatcattggtggtgccctcttttagattgcttatgagttaataggtcaataatgaagttttttggatgatgtttgtgggtccaaaaaaaaagaaggtcatttctt

SEQ ID NO: 341324 - DNA, 448 bp, Zea mays
cacagctatacccaccatcgattggcaacccatgcagacaggcggcagccattaacaaggattaaaaaaaacagggagaagatgagacggccacggcttcttctactaaggtttgcaggaagacgcggtgtatataaagagcgtgtggttcacgaaagacgtagacacggtaaaggcacaacgaagaagagagatcaactactcatgcaagcactgcggtatttaatttaggttcttaggaacaaaaacaccaagcaccaactttgtacatattaatggacgccatgcacatggtgatcgatcggtctatatagaaagacaggcgggtactagagaggttgtgtggtgtccaagctacacacgggatgctactaactagctgcaggcaagggcgaggaatggcaagcctttcatgtgctcgggcggacggtgttgtccgttccggcgc

SEQ ID NO: 341325 - DNA, 165 bp, Zea mays
gtactacgggtgccgcgaatgagcctcgcttggctgcaaacatcttcctaaaggggcttgggcgaaggcggtactgctacggatactactcttgcacagtgatcacaagctcgtatagactgacttccatcgctatacctatagaagggccgtatatgtggtgtg

SEQ ID NO: 341326 - DNA, 266 bp, Zea mays
gaccaactagcaacatataaagcacaatagtgtaccaacaatggcaggcaaaatattttgcctgcttatgctccttggtctttctgcaagtgctgctacggcgaccattttcccgcaatgctcgcaagctcctatagcttcccttcttcccgcgtacctgtcaccagcggtgtcttctgtatgtgaaaacccaattcttcaaccctacaggatccaacaggcaatctgagttggcatcttacctttattacccttgctcctccaac

SEQ ID NO: 341327 - DNA, 438 bp, Zea mays
gcaattagctcatcgactccagattggagaactcgacaccatgaaggtgctgatcgttgcccttgctctcctggcgctcgctgcgagcgccgcctccagtacaagcggcggctgtggctgccagacaccaccgtttcatctaccgcctccgttctatatgccgcctccgttctatctgccgccgcagcagcagccgcagccatggcaataccccactcaaccaccgcagctaagcccgtgccagcagttcggatcctgcggcgtcggcagcgtcggcagcccgttcctgggccagtgcgtcgagttcctgaggcaccagtgcagcccggcggcgacgccctacggctcgccacagtgccaggcgctgcagcagcagtgctgccaccagatcaagcaggtggagccgctgcaccggtaccaggcgacatacggtgtggt

SEQ ID NO: 341328 - DNA, 449 bp, Zea mays
ctagcaacatagaaagcacaatagtgtaccaacaatggcagccaaaatattttgcctccttatgctccttggtctttctgcaagtgctgctacggcgaccattttcccacaatgctcacaagctcctatagcttcccttcttcccccgtacctctcaccagcggtgtcttcggtatgtgaaaacccaattcttcaaccctataggatccaacaggcaatcgcagctggcatcttacctttatcacccttgttcctccaacaatcatcagccctattacagcagttacctttggtgcatttattggcacaaaacatcagggcacaacaactacaacaacttgtgctagcaaaccttgctgcctactctcagcaacaacagtttcttccattcaaccaactagctgcattgaactctgcttcttatttgcaacaacaacaactaccattca

SEQ ID NO: 341329 - DNA, 143 bp, Zea mays
catggagccacgccaccgatatttaggttcagcaccatacctagggagctgcttatcttcatcctaacaacaactgattcccaaggatattactcctccttgctcttcttgcccttcttgagagcgtaacaaatgcacgcatt

SEQ ID NO: 341330 - DNA, 192 bp, Zea mays
ctcatatgcgtacacggactccctcttcctgtcactaaccaagttagacaaaggcggggcgtgggaaacaagggggaatgggactggcaacccaagggatcaatacgctaactgtcgtcatctagagggcagacaacatttccgcgatgctcttatgcaagaacaccctcaagatcatgcccttcaagctcc

SEQ ID NO: 341331 - DNA, 413 bp, Zea mays
ggatcgtcgaacagaacagcatgaagatggtcatcgttctcgtcgtgtgcctggctctgtcagctgccagcgcctctgcaatgcagatgccctgcccctgcgcggggctgcagggcttgtacggcgctggcgccggcctgacgacgatgatgggcgccggcgggctgtacccctacgcggagtacctgaggcagccgcagtgcagcccgctggcggcggcgccctactacgccgggtgtgggcagacgagcgccatgtaccagccgctccggcaacagtgctgccagcagcagatgaggatgatggacgtgcagtccgtcgcgcagcagctgcagatgatgatgcagctggagcgtgccgctgccgccagcagcagcctgtacgagccagctctgatgcagcagcagcagcag

SEQ ID NO: 341332 - DNA, 361 bp, Zea mays
gcttcaacaagcaatcgcagcaagcaacatacctttatcgcccttgttgtgtcaacaatcgcgagccctatctttggtgcagtcattggtacaaaccatcagggcacaacagctgcagcaactcgtgctacctgtgatcaaccaagtagctctggcaaacctttcttcctactctccgcaacaacaatttcttccattcaaccaactgtctacactgaaccctgctgcttatttgcagcaacaactattaccatttagccagctagctactgcctactctcaacaccaacaacttctttcatttaaccaattggccgcactgaaccccgctgctttattgcaggagcaaatactactacca

SEQ ID NO: 341333 - DNA, 96 bp, Zea mays
tcgcccacacataacgaccacgcgttctaatattttgagcattcacaaacacaccgagcgaagcacaggatcatcaacctaacaacattggctacc

SEQ ID NO: 341334 - DNA, 389 bp, Zea mays
  unsure (1)..(389): unsure at all n locations
attggtacaaaccatcagggcacaacagctgcagcaactcgtgctacctgtgatcaaccaaggagctctggcaaacctttctccctactctccgcaacaacaattgcttgcattcaaccaactgtctacactgaaccctgctgcttatttgcagcaacaactattaccatttagccagctagctactgcctactctcaacaacaacaacttcttccatttaaccaattggccgcactgaaccccgctgcttatttgcagcagcaaatactactaccatttagccagctagctacagcaagccgtgcttccttcttgacacaacaacagttgctgncgntctaccagcagtttgcggctaaccccgcaaccctcttacaactacaacaat

SEQ ID NO: 341335 - DNA, 435 bp, Zea mays
caacatgcaacatagaatgtggaatccagttgcaacaatagagcaacaatggagaccaagagattttccgtgcttatgctccttgctctttctacatgtgttgctaacgcgacaattttccctcaatgctcacaagctcctatagcttccctttttcccccataccttccatcaattatagcttcagtatgtgaaaacccagctcttcaaccatataggcttcaacaagcaatcgcagcaagcaacatacctttatcgcccttgttgtgtcaacaatcgccagccctatctttggtgcagtcattggtacaaaccatcagggcacaacagctgcagcaactcgtgctacctgtgatcaaccaagtagctctggcaaacctttctacctactgtgcgcaacaacaatgtcttgcattcaaccaactgtctacactg

SEQ ID NO: 341336 - DNA, 321 bp, Zea mays
ataggtctagatcgctagcgatcgagctagtttattcacgctactacacacggggaagggggactattgcattgtttcagcggctcctaaatcaatgctgccagcagtagatttggatgatggacattcagtacatctcgcagaagctaaacattatgatgcatgattgagcgttccgctgtcgtcagtagcatcatttacgagccagctatgatacaatagcaacatcagatgttgccaacccagtatttaaaacgcactgccattatgatatcataaaacatgccggccatagcttgactgtaccattaccagttccat

SEQ ID NO: 341337 - DNA, 278 bp, Zea mays
accacgcgtcgaagcgaccaactgcatcatagaaagcactttacgcttttacaatcgctccaaaatagtgtagctttcgtatgctccttgggctcactgcaacgactgttaccgcaaccattttaccacaacactcacaagctcctatagcttacttacttcccccatacctatcaccacgggtgtcttcagcatgtgaaaacccaaatcttcaaccctacatgatccaacatgccatcgcaacaagcatcttacctttatcaccctcgggccttcaa

SEQ ID NO: 341338 - DNA, 450 bp, Zea mays
attcagaaacacaccaagcgaagctacctatcttcgacttaacaacaatggctaccaagatgttagcccggcttgcgcttcttgccctttttgtgagcgcaacaaatgcgttcattattccacaatgctcacttgctcctagtgccattataccacagttcctccgaccagttacttcaatgggcttcgaacacctagctgtgcaagcctacaggctacaacaagcgcttgcggcgagcgtcttacaacaaccaattaaccaattgcaacaacaatccttggcacatctaaccatacaaaccatcgcaacacaacagcaacaacagttcctaccagcactgagccaactagatgtggtgaaccctgtcgcctacttgcaacagcaggtgcttgcatccaacccacttgctctggcaaacgtagctgcataccaacaacaacaacaattgg

SEQ ID NO: 341339 - DNA, 404 bp, Zea mays
attttcagcattcagaaacacaccaagcgaagcgcactagcaacaacctaacaacaatgggtgccaagatattagccctccttgcgcttcttgcccttttagtgagcgcaacaaatgcgttcattattccacagtgctcacttgctcctagtgccattattccacagttcctcccaccaggtacttcaatgggcttcgaacatccagccgtgcaagcctacaggctacaactagcgcttgcggcgagcgtcttacaacaaccaattgcccaattgcaacaacaatccttggcacatctaaacctacaaaccatcgcaacgcaacagcaacaacagtttctgccatcactgagccacctagccgtggtgaaccctgtcgcctacttgcaacagcagctacttgca

SEQ ID NO: 341340 - DNA, 449 bp, Zea mays
ttttgagcattcagaaacacaccaagcgaagctacctagcaacgacttaacaacaatggctaccaagatgttagccctccttgcgcttcttgccctttttgtgagcgcaacaaatgcgttcattattccacaatgctcacttgctcctagtgccattataccacagttcctccgaccagttacttcaatgggcttcgaacacctagctgtgcaagcctacaggctacaacaagcgcttgcggcgagcgtcttacaacaaccaattaaccaattgcaacaacaatccttggcacatctaaccatacaaaccatcgcaacacaacagcaacaacagttcctaccagcactgagccaactagatgtggtgaaccctgtcgcctacttgcaacagcaggtgcttgcatgcaacccacttgctctggcaaacgtagctgcataccaacaacaac

SEQ ID NO: 341341 - DNA, 442 bp, Zea mays
caattcttctaccctacaggatccaacaggcaatcgcagcaggcatcttacctttatcacggttgttcctccaacaatcatcagccctattacagcagttacctttggtgcatttattggcacaaaacatcagggcacaacaactacaacaactcgtgctagcaaaccttgctgcctactctcagcaacagcagttacctttggtgcatttgttggcacaaaacatcagggcacaacaactacaacaactcgtgctagcaaaccttgctgcctactctcagcaacaacagtttctgccattcaaccaactagctgcattgaactctgctgcttatttgcagcaacaacaactactaccattcagccagctagctgctgcctacccccggcaatttcttccattcaaccaactggcagcattgaactctcatgcttatgtaca

SEQ ID NO: 341342 - DNA, 67 bp, Zea mays
gccgacccacgcgtacgctagctacttcctactctcagttacaacaacttcttccatttaaccaata

SEQ ID NO: 341343 - DNA, 447 bp, Zea mays
ggtcttcagaccattagctttatctactccagagcgcagaagaacccgatcgacaccatgagggtgttggtcgttgccctcgctctcctggctctcgctgcgagcgccacctccacgcatacaagcggcggctgcggctgccagccaccgccgccggttcatctaccgccgccggtgcatctgccacctccggttcacctgccacctccggtgcatctcccaccgccggtccacctgccgccgccggtccacctgccaccgccggtccatgtgccgccgccggttcatctgccgccgccaccatgccactaccctactcaaccgccccggcctcagcctcatccccagccacacccatgcccgtgccaacagccgcatccaagcccgtgccagctgcagggaacctgcggcgttggcagcaccccgatcctgtgccagtgcgtcgag

SEQ ID NO: 341344 - DNA, 428 bp, Zea mays
agatattttccctccttatgctccttgctctttctgcatgtgttgctaacgcgacaattggccctcaatgctcacaagctcctatagcttcccttcttcccccataccttccatcaatgatagcttcagtatgtgaaaacccagctcttcaaccctataggctccaacaagcaatcgcagcaagcaacatacctttatcacccttgtttcaacaatcgccagccctatctttggtgcagtcattggtacaaaccatcagggcacagcagctgcagcaactcgtgctacctgtgatcaaccaagtagctctggcaaacctttctccctactctcagcaacaacaatttcttgcattcaaccaactgtctacattgaaccgtgctgcttatttgcagcaacaactattaccattcatgcagctagctact

SEQ ID NO: 341345 - DNA, 391 bp, Zea mays
caacaagcaacatagaaagtggaatccagttgcaacaatagagcaacaatggcgaccaagatgattttccctccttatgctccttgctctttctgcatgtgttgctaacgcgacaattttccctcaatgctcacaagctcctatagcttaccttcttcccccataccttccatcaatgatagcttcagtatgcgaaaacccagctcttcaaccctataggctgcaacatgcaatcgcagcatgcaacatacctttatcacccttgtttcaacaatcgccagccctatctttggtgcagacattggtacaaaccatcagggcacagcagctgcagcaactcgtgctacctgtgatcaaccaagtagctctggcaaacctttctccctactct

SEQ ID NO: 341346 - DNA, 52 bp, Zea mays
ctagctactgcctactctcagttacaacaacttcttccatttaaccaataag

SEQ ID NO: 341347 - DNA, 115 bp, Zea mays
caacaacccatcattggtggtgccctcttttagatttcttatgagttataggtcaataatggagttttttatctgatgtttgtggcttcccagaaataagaaagtacatttctag

SEQ ID NO: 341348 - DNA, 119 bp, Zea mays
  unsure (1)..(119): unsure at all n locations
gggaaaaccacgcggacgccacacgtacgatagctactgcctactctcattaacaacaacttcttccatttaaccaataaggagccctgtgcggtgcctncacaataccaaatactcaa

SEQ ID NO: 341349 - DNA, 429 bp, Zea mays
attgagaccaactagcaacatagaaagcactttattgtaccaacaatggcagccaaaatatgttgcttcggtatgctccttggtctttctgcaagtgttgctaccgcaaccattttcccacaatgctcacaagctcctatagcttcccttcttcccccatacctctcaccagcggtgtcttcaatgtgtgaaaacccaattgttcaaccctacaggatccaacaggcaatcgcaacaggcatcttaccattatcacccttgttcctccaacaaccgacagccctattacagcagttacctttggtccatttggtggcgcaaaacatcagggcacaacaactacaacaacttgtgctagcaaaccttgctgcatactctcagcaacatcaatgtcttgcattcaaccaactggctgcattgaactctgct

SEQ ID NO: 341350 - DNA, 418 bp, Zea mays
gaccaactagcaacatagaaagcacaatagtgtaccaacaatggcagccaaaatattttgcttccttatgctccttggtctttctgcaagtgttgctaccgcaaccattttcccacaatgctcacaagctcctatagcttcccttcttcccccatacctctcaccagcggtgtcttcaatgtgtgaaaacccaattgttcaaccctacaggatccaacaggcaatcgcaacaggcatcttaccattatcacccttgttcctccaacaaccgtcagccctattacagcagttacctttggtccatttggtggcacaaaacatcagggcacaacaactacaacaacttgtgctagcaaaccttgctgcatactctcagcaacatcagtttcttccattcaaccaactggctgcattgaac

SEQ ID NO: 341351 - DNA, 231 bp, Zea mays
cgcgaaaccaactaagaacatcaaaaggacgccggcgaccgaacaatgaatggcaacatagggtagttgctgatactgcttgctcattctgcaagtcttcgtactgctatcagtgctcgacaatgccaacacgagcgtatcgatctcctgcttgccccatacctcctaccagcacatcctgctatgggtgaatacccaattggtgaacagtacagcatccaacaggcattc

SEQ ID NO: 341352 - DNA, 276 bp, Zea mays
gcgcacaaaatcaaccaaaattataaaaaacaggtcatacacctaacaaacaaaggcaacctctggtaatttgtgacactaccacgtcatactataacacgaaaaactacaaccactactcaacaactctaacaacaaactctcattaccctacttccctcataaaacataccagaaaaagtgtttgaatgtattaacccaccatttgaaccttatcacattcaacacacaacttgcttctcacattttttaatcataacatctattaataataac

SEQ ID NO: 341353 - DNA, 133 bp, Zea mays
acgctgcccctccccgcgccgttctttttggttttccactcctcagtccccgccgacgccaaaacccgcatgatggggtcgtcgtcgccgcgaaacatatggctatgaatcacatacacctgttctactggtc

SEQ ID NO: 341354 - DNA, 313 bp, Zea mays
gcgaatgaggcgcattagcaacctaaaaaggacaatcgcgctcgaaccatggtagccacaatgggtagcttgggtatgctccttggtgtgcttgcaagcgctgctaccagaaccacatatgcacaaagtttacaagatcgtatagttgcttttattgccacatacctataaccagtggcgtctgtaacttgagaaaactcaaaacatcaaccttgcagggtccaactggcaaaacaagcacgcgtggtacgtgtattacaacagctaattgaacaaccgtaagacctattacagccgcaacttacggtgcatg

SEQ ID NO: 341355 - DNA, 371 bp, Zea mays
ggtcttcagaccattagctttatctactccagagcgcagaagaacccgatcgacaccatgagggtgttgctcgttgccctcgctttccttgctcttgattgaagcgccacctccacgcatacaagcggcggctgcggctgccatccaccgccgccggttcatctaccgacgccggtgcatctgccacctacggttcacctgccacctacggtgcatctcccaccgccggtccacctgccgccgccggtccacctgccaccggcggtccatgtgccggcgccggttcatctgccgccgccaccatgccactaccctactgaaccggcccggcctgagcctgatccccagccacacccatgcccgtgccaaca

SEQ ID NO: 341356 - DNA, 125 bp, Zea mays
aaaataaaaactattaaataaataaaaatatataaaacaaataaacaaaaaaataaacaatgggaaaataaataaaaaaaaataaatataataaatataaataaaaaaaaaaaaataaaaaaata

SEQ ID NO: 341357 - DNA, 351 bp, Zea mays
attttcagcattcagaaacacaccaagcgaagcgcactagcaacaacctaacaacaatggctaccaagatattagccctccttgcgcttcttgcccttttagtgagcgcaacaaatgcgttcattattccacagtgctcacttgctcctagtgccattattccacagttcctcccaccagttacttcaatgggcttcgaacatccagccgtgcaagcctacaggctacaactagcgcttgcggcgagcgtcttacaacaaccaattgcccaattgcaacaacaatccttggcacatctaaacctacaaaccatcgcaacgcaacagcaacaacagtttctgccatcactga

SEQ ID NO: 341358 - DNA, 374 bp, Zea mays
tattttgagcattcagaaacacaccaagcgaagcgcactagcaacgacctaacaacaatggctaccaagatattagccctccttgcgcttcttgccctttttgtgagcgcaacaaatgcgttcattattccacaatgctcacttgctcctagtgccattattccacagttcctcccaccagttacttcaatgggcttcgaacacctagctgtgcaagccaacatgcaacaacaagcgcttgcggcgagcgtcttacaacaaccaattgcccaattgcaacaacaatgcttgccacatctaacaatacaagccatcacaacgcaacagcaacaacagttcctaccagcactgagccacctagccatggtgaaccc

SEQ ID NO: 341359 - DNA, 415 bp, Zea mays
caactagcaacatagaaagcacaatagtgtaccaacaatggcagccaaaatattttgcttgcttatgctccttggtctttctgcaagtgttgctaccgcaaccattttcccacaatgctcacaagctcctatagcttcccttcttcccccatacctctcaccagcggtgtcttcaatgtgtgaaaacccaattgttcaaccctacaggatccaacaggcaatcgcaacaggcatcttaccattatcacccttgttcctccaacaaccgtcagccctattacagcagttacctttggtccatttggtggcacaaaacatcagggcacaacaactacaacaacttgtgctagcaaaccttgctgcatactctcagcaacatcagtttcttacattcaaccaactggctgcattgaac

SEQ ID NO: 341360 - DNA, 409 bp, Zea mays
  unsure (1)..(409): unsure at all n locations
caagcaacatagaaagtggaatccagtagcatcaatagagcaacaatggagaccaagataggggccctccgtatgctccttgctctttctacatgtgttgctaacgcgacaattttccctcaatgctcacaagctcctatagcttccctttttcccccataccttccatcaattatagctncaggatgtgaaaacccagctcttcaaccatataggcttcaacaagcaatcgcagcaagcaacatacctttatcgcccttgttgtgtcaacaatcgccagccctatctttggtgcagtcattggtacaaaccatcagggcacaacagctgcagcaactcgtgctacctgtgatcaaccaagaagctctgacaaacctttctggctacttctttgcaacaacaatttctt

SEQ ID NO: 341361 - DNA, 177 bp, Zea mays
aaaagcgggagacaaacaaaaatataaaaagcgaaatactttttcaactttataacaacaattacaacctgtttattttgcataacttaactacttgctctttcaacacataatactaactcaaccatatttcctcaatactcacaaacttctataattacccttcttccaccatac

SEQ ID NO: 341362 - DNA, 441 bp, Zea mays
caactagcaacatagaaagcacaatagtgtaccaacaatggcagccaaaatattttgcctccttatgctccttggtctttctgcaagtgctgctacggcgaccattttcccgcaatgctcgcaagctcctatagcttcccttcttcccccgtacctctcaccagcggtgtcttcggtatgtgaaaacccaattcttcaaccctacaggatccaacaggcaatcgcagctggcatcttacctttatcacccttgttcctccaacaatcatcagccctattacaacagttacctttggtgcatttattggcacaaaacatcagggcacaacaactacaacaacttgtgctagcaaaccttgctgcctactctcagcaacagcagtttcttccattcaaccaactaggttcattgaactctgcttcttatttgcaacaacaaca

SEQ ID NO: 341363 - DNA, 261 bp, Zea mays
aagctcacatctagggtacatcgctcctgggttcgccactcgtgggatgggctatgctactgtcatctgatgacagggtacaaaccaactgtgggacgacaagcacgaatatcacgactgatgatggcggaactactatgtagatatacaaataaatatacccataataagcgtccgtatgtggatataatgtaccagaaattttggactaccgattgtaaatacaaaaataaaaggctgcctgtgtagaaaacctgttta

SEQ ID NO: 341364 - DNA, 368 bp, Zea mays
  unsure (1)..(368): unsure at all n locations
cccacgcntccgtccactcatccgcccacttgtacctttacacatcctgtacttctcgcgggcctactgttatgctgcgggctacctacaggcatctgtatctcttcgtccaccgctttccatgggaaaaacatggctgaatgacttatctacaagaacaccctcaagatcatgcccttcaatctccgcccgttcgaccttaatatgaccccgtgcgcatcatcgtatctttcattggccgttccactagaacctacctatcttagatccccttacagcgcttcttcattaactagccttgttttcaagcttccttccgatgctaatagttgtgctgaatgtcgacttgctaactatatcagtcccat

SEQ ID NO: 341365 - DNA, 420 bp, Zea mays
attagctatatctactccagagcgcagaagaacccgatcgacaccatgagggtgttgctcgttgccctcgctctcctggctctcgctgcgagcgccacctccacgcatacaagcggcggctgcggctgccagccaccgccgccggttcatctaccgccgccggtgcatctgccacctccggttcacctgccacctccggtgcatctaccaccgccggtccacctgccgccgccggtccacctgccaccgccggtccatgtgccgccgccggttcatctgccgccgccaccatgccactaccctactcaaccgccccggcctcagcctcatcctcagccacacccatgcccgtgccaacagccgcatccaagcccgtgccagctgcagggaacctgccgcgttggcagcaccccgatcctg

SEQ ID NO: 341366 - DNA, 131 bp, Zea mays
aaacacatcaagcgaagcgcactagcagcaacctaacaacaatggctaccaagaggttgaaaactacttgcgcttcttgcgctttttgcgagcgcaacaaaagcattcattattccacaatgctcacttgc

SEQ ID NO: 341367 - DNA, 390 bp, Zea mays
attttgagcattcagaaacacaccaagcgaagcgcactatcaacgacctaacaacaatggctaccaagatattagccctccttgcgcttcttgccctttttgtgagcgcaacaaatgcgttcattattccacaatgctcacttgctcctagtgccattattccacagttcctcccaccagttacttcaatgggcttcgaacacctagctgtgcaagccaacatgcaacaacaagcgcttgcggcgagcgtcttacaacaaccaattgcccaattgcaacaacaatccttgccacatctaacaatacaagccatcacaacgcaacagcaacaacagttcctaccagcactgagccacctagccatggtgaaccctgccgcctacttgcaag

SEQ ID NO: 341368 - DNA, 346 bp, Zea mays
cttccgaagacatcactctcgatgatcaaagctatgacacaaaccacaacgcgaaagccaagagtgacgacaaggtaggtatcctgtcacaccatcaaagtttcatcttcagcacaaagcaactctattactgacagacaccacccgatactaaccgcatacggaatatattcctcctccgtttctatctcttccacgtgggaagcacatctcattgaagactcctactgatacaaccattattatacaagtccagaactcggtatccagtgataacgggaaagccaacattccggaccttagaacaatttgcaccagatcagcaacagctgattattgctgggaa

SEQ ID NO: 341369 - DNA, 396 bp, Zea mays
  unsure (1)..(396): unsure at all n locations
acgcataaatacaccaagcgaagctacctagcaacgacttaacaacaatggctaccaagatattagccgtccttgcgcttcttgccctttttgtgagcgcaacaaatgcgttcattattccacaatgctcacttgctcctagtgccattataccacagttcctccgaccagttactttaatgggcttcgaacacctagctgtgcaagcctacaggctacaacaagcgcttgcggtgagcgtcttacaacaaccaattaaccaattgcaacaacaatccttggcacatctaaccatacaaaccatcgtaacacaacagcaacaacagttcctaccagcactgagccaactggatgtggtgaaccctgtcgcctactngcaacagcaggtgcttgcat

SEQ ID NO: 341370 - DNA, 66 bp, Zea mays
tcccttgcatgcggcgggatagctcttgtgtagcgtcacctaaattcactggactggccgttacaa

SEQ ID NO: 341371 - DNA, 285 bp, Zea mays
acgtctagatcgagagcgggcgcccttgtactgttaccttccgccgtcgtcttttgtcggaaggcaactccacttatctatatagaaaatgaaactcgccaccacccatgactcatatgaaagcctctgtgaggcattatcacggttaagccttatcacaactacctagcttaatggatcccttaataagggaaagtgcgagtgcaaactcattccacattccattccagatcagacgtacccagaatatgcatggcatccatgtaagcagacaacacttctgaa

SEQ ID NO: 341372 - DNA, 408 bp, Zea mays
attggagaactcgacaccatgaaggtgctgatcgttgcccttgctctcctggcgctcgctgcgagcgccgcctccagtacaagcggcggctgtggctgccagacaccaccgtttcatctaccgcctccgttctatatgccgcctccgttctatctgccgccgcagcagcagccgcagccatggcaataccccactcaaccaccgcagctaagcccgtgccagcagttcggatcctgcggcgtcggcagcgtcggcagcccgttcctgggccagtgcgtcgagttcctgaggcaccagtgcagcccggcggcgacgccctacggctcgccacagtgccaggcgctgcagcagcagtgctgccaccagatcaggcaggtggagccgctgcacccggaccaggcgacatac

SEQ ID NO: 341373 - DNA, 455 bp, Zea mays
tattttcagcattcagaaacacaccaagcgaagcgcactagcaacaacctaacaacaatggctaccaagatattagccctccttgcgcttcttgcccttttagtgagcgcaacaaatgcgttcattattccacagtgctcacttgctcctagtgccattattccacagttcctcccaccagttacttcaatgggcttcgaacatccagccgtgcaagcctacaggctacaactagcgcttgcggcgagcgtcttacaacaaccaattgcccaattgcaacaacaatccttggcacatctaaacctacaaaccatcgcaacgcaacagcaacaacagtttctgccatcactgagccacctagccgtggtgaaccctgtcgcctacttgcaacagcagctacttgcatccaacccacttgctctggcgaacgtagctgcataccagcaacaacaacg

SEQ ID NO: 341374 - DNA, 292 bp, Zea mays
agccttccgacacaattacatctatgcattctacaaattataacaacaagctcgacacccaaaaggtggggctctttggcctccccatacatgatatcataataaacgcattctacaagcatacaatcagacagatgacccttacaaccacccacaaccagatatctatagacaacagatcatctaccagctacgaagacctaacacctacttttcatctgaaaccaccagtccaattgtcggcgacaaccaatctttcactgaactatcatgaacgcaacaatgttcatat

SEQ ID NO: 341375 - DNA, 351 bp, Zea mays
aaacccgggtcgacccgcgccttccgattgatagcagatatgacaacactgaacttggctctgaagcaacacaccccctccaatgggggcctaaatactctgcgttatgggcaatgctcagtattttatccaccaaagttactccggcctgaccaagccccttgagaaacctataacatcactcgccatggaaagaagggataagaaactcttctagaacctctcttccttccattggaaccatctatgctacattacgcaaaaatggacacctgtgtacaataaccaaattgccggtctcatctacgatctatgatacttaaaacaatatatgctcttttctacccacag

SEQ ID NO: 341376 - DNA, 412 bp, Zea mays
attgagaccaacaagcaacatagaaagtggaatccagtagcaacaatagagcaacaatggcgaccaagatattttccctccttatgctccttgctctttctgcatgtgttgctaacgcgacaattttccctcaatgctcacaagctcctatagcttcccttcttcccccataccttccatcaatgatagcttcagtatgtgaaaacccagctcttcaaccctataggctccaacaagcaatcgcagcaagcaacatacctttatcacccttgtttcaacaatcgccagccctatctttggtgcagtcattggtacaaaccatcagggcacagcagctgcagcaactcgtgctacctgtgatcaaccaagtagctctggcaaacctttcttcctactctcagcaacaacaatt

SEQ ID NO: 341377 - DNA, 117 bp, Zea mays
gaccattagctttatgtactctacagcgcttaacatctcgatcgacaccatgaggatgcggggtaggagccctagctctcctggcttttgcttgcaacgccaattacacgcatacaa

SEQ ID NO: 341378 - DNA, 396 bp, Zea mays
  unsure (1)..(396): unsure at all n locations
gaccattagctttatctactccagagcgcagaagaacccgatcgacaccatgagggtgttgctcgttgccctcgctctcctggctctcgctgcgagcgccacctccacgcatacaagcggcggctgcggctgccagccaccgccgccggttcatctaccgccgccggtgcatctgccacctccggttcacctgccacctccggtgcatctcccaccgccggtccacctgccgccgccggtccacctgccaccgccggtccatgtgccgccgccggttcatctgccgccgccaccatgccactaccctactcaaccgccccggcctcagcctcatccccagccacacccatgcccgtgccaacagccgcatncaagcccgtgcagctgcaggaacct

SEQ ID NO: 341379 - DNA, 407 bp, Zea mays
aggcaatcgcagcaggcatcttacctttatcacccttgttcctccaacaaccgtcagccgtattacagcagttacctttggtgcatttgttggcacaaaacatcaaggcacaacaactacaacaacttgtgctaggaaaccttgctgcctactctcagcaacagcagtttcttccattcaaccaactggctgcattgaactctgctgcttatttgcaacaacaactaccattcagtcagctagctgctgcctacccccagcaatttcttccattcaaccaactggcagcattgaactctgctgcttatttacaacagcaacagctaccaccattcagccagctagctgatgtgagccctgttgcctttcttgacacaaacaacagttgttgccgttctacctgcacg

SEQ ID NO: 341380 - DNA, 169 bp, Zea mays
cgtgcgtgtgaaatcacaagcacaccacgcgtagcgcactagcagcgtcctagcaactgtgggtagcaagatattagccttgcttgcgcttctagccctagcactgatgcgcaccaaatgctttcatgcttctatagtgctcactcgatcctagtgccatatattccac

SEQ ID NO: 341381 - DNA, 441 bp, Zea mays
cttgagaccattagctttatctactccatagcgcagaagaacccgatcgacaccatgagggggttgctcgttgccctcgctctcctggctctcgctgcgagcgccacctccacgcatacaagcggcggctgcggctgccagccaccgccgccggttcatctaccgccgccggtgcatctgccacctccggttcacctgccacctccggtgcatctcccaccgccggtccacctgccgccgccggtccacctgccaccgccggtccatgtgccgccgccggttcatctgccgccgccaccatgccactaccctactcaaccgccccggcctcagcctcatccccagccacacccatgcccgtgccaacagccgcatccaagcccgtgccagctgcagggaacctgcggcgttggcagcaccccgatcctgggccagtgcgtc

SEQ ID NO: 341382 - DNA, 270 bp, Zea mays
acgcccacgcttaccaccacgcgtacccccacttttaccgccacgcctcccggcctttcaattcgggttaatttaaaacactaaaaagcctttatttgctatcttccaacttgatttcttgttcattgtatccaatttacagaattccctcctgacccacatttaaaaaattaaaatccttgctttctgacttaacaattggtcttctacacccataagaagttgaaaaaatgcttaagccccttttattacttggcccaatgaccttga

SEQ ID NO: 341383 - DNA, 389 bp, Zea mays
gaaaaactagaaaaggctcctcccgaccgcaacgcccctcatctccctcgaccccgacatggccgacccgatggcgcccaaggcggagaagaagccagcggagaagaagccggcggccgaggagaaggcggagaagacgaccgcagggaagaagcccaaggccgagaagcggctgcccgcgtccaagtcctccggcaaggagggcggcgagaagaaggggaagaagaaggccaagaagagcgtggagacctacaagatctacatcttcaaggtgctgaagcaggtgcaccccgacatcggcatatcctccaaggccatgtccatcatgaactccttcatcaacgacatctttgagaagctggccggcgaggccgccaagctggcgcggt

SEQ ID NO: 341384 - DNA, 65 bp, Zea mays
ggggctttataccattaactttatctactcccgagcgcaaaagaacccgatccacaccgtgaggg

SEQ ID NO: 341385 - DNA, 357 bp, Zea mays
acacacacttgagccccacccgtgccgctcccgccccgcatcccttagcctgacgctggcgccgcctgatggccatgtacgccgccccagaacgccgcgtggacatatgcggcggccgcgtggagggcgcgtgcaccgactacttgctcgacacccacgccgcgtaacccaccgtcccgacgctagtccagaggtgcgccccggcgtgcgccgactgggggaaagacggccgcttactggcgctggactggtgcgactccacccctgagctgtccaggctcgcgcgggcctcatttgcgcttcaccgccgacgggctgccggtcatagaggagataccaggcgacaaagggtgctat

SEQ ID NO: 341386 - DNA, 436 bp, Zea mays
gggtcttcagaccattagctttatctactccagagcgcagaagaacccgatcgacaccatgagggtgttgctcgttgccctcgctctcctggctctcgctgcgagcgccacctccacgcatacaagcggcggctgcggctgccagccaccgccgccggttcatctaccgccgccggtgcatctgccacctccggttcacctgccacctccggtgcatctcccaccgccggtccacctgccgccgccggtccacctgccaccgccggtccatgtgccgccgccggttcatctgccgccgccaccatgccactaccctactcaaccgccccggcctcagcctcatccccagccacacccatgcccgtgccaacagccgcatccaagcccgtgccagctgcagggaacctgcggcgttggcagcaccccgatcctgggc

SEQ ID NO: 341387 - DNA, 382 bp, Zea mays
  unsure (1)..(382): unsure at all n locations
ctaaatcatgtggagctcaaaaggggatcggttcatccaagaccgtcgatctgccactacgccccggagtggggacttgcaccatccagctattatgttcctttcttccccatcatcggtatcccttgatgactatctcagtggattagagacagtgtaatagcagtaattaatgtcataagtatttgtgagaaagacgtgtgatatatatatttatatagttcttcgctgctatatatataataatatagtttgtgagtgcagactcgtaagattttatgtaatttctattaattatgtgtattaattaaaagtggagagtttgatgtaatatctttgtttcttgtttaatactagcatatagcagtttatagtaaanaaa

SEQ ID NO: 341388 - DNA, 435 bp, Zea mays
caacaagcaacatagaaagtggaatccagtagcaacaatagagcaacaatggcgaccaagatattgtccctccttatgctccttgctctttctgcatgtgttgctaacgcgacaattttccctcaatgctcacaagctcctatagcttcccttcttcccccataccttccatcaatgatagcttcagtatgtgaaaacccagctcttcaaccctataggctccaacaagcaatcgcagcaagcaacatacctttatcacccttgtttcaacaatcgccagccctatctttggtgcagtcattggtacaaaccatcagggcacagcagctgcagcaactcgtgctacctgtgatcaaccaagtagctctggcaaacctttctccctactctcagcaacaacaatttcttccattcaaccaactgtctacattgaac

SEQ ID NO: 341389 - DNA, 460 bp, Zea mays
gggtcttcagaccattagctttatctactccagagcgcagaagaacccgatcgacaccatgagggtgttgctcgttgccctcgctctcctggctctcgctgcgagcgccacctccacgcatacaagcggcggctgcggctgccagccaccgccgccggttcatctaccgccgccggtgcatctgccacctccggttcacctgccacctccggtgcatctcccaccgccggtccacctgccgccgccggtccacctgccaccgccggtccatgtgccgccgccggttcatctgccgccgtcaccatgccactaccctactcaaccgtcccggcctcagcctcatccccagccacacccatgcccgtgccaacagccgcatccaagcccgtgccacctgcaaggaacctgcggcgttggcagcaccccgatcctggccagtgcgtcgagtttctgaggcatc

SEQ ID NO: 341390 - DNA, 310 bp, Zea mays
cccacgcgtccgtaatgctaccagcccacaaaaccaaccttccttccctccgttccatctcgcggcgtctgtataggtatagccaaccgtccaacccattgctactccacaccgatgcgatgctcccatcgccgccggcgacctcgccggcgcggctgcacaagctggtgacctcgcagcaggacccgctcctcgcgctggagctcgtcaacgtcacctccccgactaccacgccgcaccctgccacgctccactctctcctgctccgcctcgcccgccgccgcgaccacctaccccacgcgctcgcgct

SEQ ID NO: 341391 - DNA, 451 bp, Zea mays
tctatatagaaacacaccaagtctaaacgcactagcaacaacctaacaacaatggctaccaagatattagccctccttgcgcttcttgcccttttagtgagcgcaacaaatgcgttcattattccacagtgctcacttgctcctagtgccattattccacagttcctcccaccagttacttcaatgggcttcgaacatccagccgtgcaagcctacaggctacaactagcgcttgcggcgagcgtcttacaacaaccaattgcccaattgcaacaacaatccttggcacatctaaacctacaaaccatcgcaacgcaacagcaacaacagtttctgccatcactgagccacctagccgtggtgaaccctgtcgcctacttgcaacagcagctacttgcatccaacccacttgctctggcgaacgtagctgcataccagcaacaacaacgtc

SEQ ID NO: 341392 - DNA, 370 bp, Zea mays
atttagaccaactagcaacatagaaagcacaatagtgtaccaacaatggcagccaaaatattttgcctccttatgctccttggtatttctgcaagtgctgctacggcgaccattttcccgcaatgctcacaagctcctatagcttcccttcttcccccgtacctctcaccagcggtgtcttcggtatgtgaaaacccaattcttcaaccctacaggatccaacaggcaatcgcagctggcatcttacctttatcacccttgttcctccaacaatcatcagccctattacagcagttacctttggtgcatttattggcacaaaacatcagggcacaacaactacaacaacttgtgctagcaaaccttgctg

SEQ ID NO: 341393 - DNA, 432 bp, Zea mays
  unsure (1)..(432): unsure at all n locations
aattttcacctccggtggtttggtaaaggtcaaggttctcttttgcagcacagaaaatgggcgtacatcttttgttcggcaactagaaccagattggcatattgacacaaatcctgaaatagtttctcagttagctaggttcatcaaatatcaacttcacgtttctcctaccaggcctgaaaggactgcgcctaatgtcttcagttgtccatccttggaacacttctttggatgcgtttgacgcgtgatccggtaaaaagatgcaaatatgtttaaaagttgttctttactaccctttggtcattatgtgcgaccctttacattttctttctttaggcacccttgtgctgatatgtcagntttttaggataatggagaagttatttgtttgaaatctgtgtagggttcacatttgaacttttttgaaaccgg

SEQ ID NO: 341394 - DNA, 245 bp, Zea mays
atcatagtttgctttatacaaaatctggcaactactcatctacatttgtttacatggacgcgggtattcagctctgccgagggtttccgataattgtgggcacttaagcgttatcgggtcgaagaaaaaagctagcatgccgtgcatattattaagagggcttgggtgctggggttcaagagttgcaatccactccattcaatgaactgcccaaataaaaggtaaaagaattttttctggtctta

SEQ ID NO: 341395 - DNA, 458 bp, Zea mays
gagcattcagaaacacaccaagcgaagctacctagcaacgacttaacaacaatggctaccaagatattagccctccttgcgcttcttgccctttttgtgagcgcaacaaatgcgttcattattccacaatgctcacttgctcctagtgccattataccacagttcctccgaccagttacttcaatgggcttcgaacacctagctgtgcaagcctacaggctacaacaagcgcttgcggcgagcgtcttacaacaaccaattaaccaattgcaacaacaatccttggcacatctaaccatacaaaccatcgcaacacaacagcaacaacagttcctaccagcactgagccaactagatgtggtgaaccctgtcgcctacttgcaacagcaggtgcttgcatccaacccacttgctctggcaaacgtagctgcataccaacaacaacaacaattgaacag

SEQ ID NO: 341396 - DNA, 357 bp, Zea mays
ggaaaccggccgcgcccgccgtccgactgcatattcttattcatacttagtttcttctgtcccatttggccctctgcggagtgtttactctgctgcggggtccagatacttgagctcactccgccgccattgagtcgaagaagaaagcaggcaaacataaccgataagatgagttttcgaaggctttgaccggcagaaacaccggttaccgatcaaatgtcatgttgatggaagggtttttctcattgtgagcttcttctgcatcttgtgtgccaattcacctctgttcttttggttgcctaaattgctgctttatgttttgtggcatcgttggattaagatttgtttgaacattta

SEQ ID NO: 341397 - DNA, 427 bp, Zea mays
  unsure (1)..(427): unsure at all n locations
aaaaaaaatacatgcatttcaatactaggacatccttccactttgaaaaacgattgtctgggatcttattggattaaattcagtttctagtagtaaaagtattatggaggccattgtactaggagttagattgcattttgctctcgaaaaacagaaaaattaatctctgtatgttagatcaaaaagcaaataggtcttttttgttaaaaatttcatctatttctactattaaaaattagtatgccttgtaaaataacacaacaattacacgtggctgtcatgtgttaatataaagagattagttcttaattgtagaaattgatgaattttttaacagaatcatcaatttgcgttttaatttaacgtacaagagttaatntgtttttgttcatttttctaataaaggggagtaaatgtaacttaactc

SEQ ID NO: 341398 - DNA, 205 bp, Zea mays
aaaaaccggccgacccacacctcggatcaataagctcaatgaaagtcgaagtctttacccacaaatcttcaacgatgacgatcatgaatatttgcatgctgatactcatctatcttactacgggtcctgaaatactacgaccatatttttgattaatggctcgacaagctgcatattagcaacgccttcttatctcatataccta

SEQ ID NO: 341399 - DNA, 356 bp, Zea mays
cagaccattagctttatctactccagagcgcagaagaacccgatcgacaccatgagggtgttgctcgttgccctcgctctcctggctctcgctgcgagcgccacctccacgcatacaagcggcggctgcggctgccagccaccgccgccggttcatctaccgccgccggtgcatctgccacctccggttcacctgccacctccggtgcatctcccaccgccggtccacctgccgccgccggtccacctgccaccgccggtccatgtgccgccgccggttcatctgccgccgccaccatgccactaccctactcaaccgcccccgcctcagcctcatccccagccacacccatgccc

SEQ ID NO: 341400 - DNA, 345 bp, Zea mays
  unsure (1)..(345): unsure at all n locations
gcaacatagaaagcacaatagtgtaccaacaatggcagccaaaatattttgcctccttatgctccttggtctttctgcaagtgctgctacggcgaccattttcccacaatgctcacaagctcctatagcttcccttcttcccccgtacctctcaccagcggtgtcttcggtatgtgaaaacccaattcttcaaccctataggatccaacaggcaatcgcagctggcatcttacctttatcacccttgttcctccaacaatcatcagccctattacagcagttacctttggtgcatttattggcacanaacatcagggcacaacaactacaacaacttgtgctagc

SEQ ID NO: 341401 - DNA, 313 bp, Zea mays
attatatatagcgactgccgatcgcaaagaaacccgcttaacaccacgagggtgcggctggatgccttttttatagtggctcttaaaatgaacgtaaccgccaggcatacaaaaaggtgttgatggtgaaagccagggccgccgccacataaaccggcggcggtacatatgccatatcccgttgagctgacacatcaagagcggctgccacggtcggtcctacagacggcgccgatgcacctagggccgaagggacctgtgccggcgccggttcataagccgcgggggcgatgtcactaccctaattaatagc

SEQ ID NO: 341402 - DNA, 423 bp, Zea mays
gtaggccgcaccggacataacaccggagcgcacgcggggagcccgcgtagagtgccggggcgaccaggccaactaacgccattaaggatgaaggtggcggaggggactcggggttagtgctggcggaccagattgacctgaacagcctggaccagcagttggagcgccatctcacccgcgcctggaccatggagaagcgcaaggtggaggtctacgacggcgctggcgccggcgccaggcacgaccagcatgtcccggagcacgccgagggaggactgggagatcgaccccgacaagcttgtcgtcaaggacgtcatcgaccagggcaccttttgtaacgtccaccgtggcatctactacgctgacgacgtcgcagagaaactacttgattgctgagaggatgggcatagatcagaacatgac

SEQ ID NO: 341403 - DNA, 373 bp, Zea mays
gggtcttcagaccattagctttatctactccagagcgcagaagaacccgatcgacaccatgagggtgttgctcgttgccctcgctctcctggctctcgctgcgagcgccacctccacgcatacaagcggcggctgcggctgccagccaccgccgccggttcatctaccgccgccggtgcatctgccaccttcggttcacctgccacctccggtgcatctgccaccgccggtccacctgccgtcgccggtccacctgccaccgacggtccatgtgccgccgccggttcatctgccgccgacaccatgccactaccctactcaaccgccccggcctcagacttatccccagccacacccatgcccgtgccaacag

SEQ ID NO: 341404 - DNA, 388 bp, Zea mays
tgctgcttatttgcagcaacaactattaccatttagccagctagctactgcctactctcaacaacaacaacttcttccatttaaccaattggccgcactgaaccctgctgcttatttgcagcaacaactattaccatttagccagctaactactgcctactctcaacaacaacaacttcttccatttaaccaattggccgcactgaaccccgctgcttatttgcagcagcaaatactactaccatttagccagctagctacagcaagccgtgcttcctttttgacacaaccacaggtgctgccgttctaccagcagtttgcggctaaccccgcaaccctcttacaactacaacaatttgtgccctttgtccaacttgctttgacaaac

SEQ ID NO: 341405 - DNA, 329 bp, Zea mays
ataatataaatattaataaaaaaatttaaatatttttttttttttttttattaatataagaaaaaaaaaagaaattaaaaaaaaataaaaaaataaatataaatattaaaaaaataaataaaaataatatttattaataattaattataataaataaaataaatatattaattaaattaatattataaagaattataataattaaaatatattaaaatatataaattatatataattatataaaaaaataatttataatatttaataatataaatatatatttataaatatatatataaaatataaaatatttaatttaaataattata

SEQ ID NO: 341406 - DNA, 283 bp, Zea mays
gcagcattgtcaatggtttacatatcgggagcaccggttatgttcgttgggtgtgggcaggcatatacagacctgaagaaacttaacgtcaaatcaatcgtcaagacactgctgaaatgagtgaatgctttatcaaaaaaccaccccacattttatttgcaatgctcaaccaactcttttgttaatgactttggcctgtgattgcatgtttactttaatggaggtgcattggtcccttgtaactgttaagtttgttttatgtgagatcttaaaattattccta

SEQ ID NO: 341407 - DNA, 425 bp, Zea mays
aagcaacatagaaagtggaatccagtagcaacaatagagcaacaatggcgaccaagatatgttccctccttatgctccttgctctttctgcatgtgttgctaacgcgacaattttccctcaatgctcacaagctctctattcttcccttcttcccccataccttccatcaatgatagcttcagtatgtgaaaacccagctcttcaaccctataggctccaacaagcaatcgcagcaagcaacatacctttatcacccttgtttcaacaatcgccagccctatctttggtgcagtcattggtacaaaccatcagggcacagcagctgcagcaactcgtgctacctgtgatcaaccaagtagctctggcaaacctttctccctactcttagcaacaacattttctttcattcacccaactgtctaca

SEQ ID NO: 341408 - DNA, 389 bp, Zea mays
atccagatcagcaaagcggcagtgcgtagagaggatcgtcgaacagaacagcatgaagatggtcatcgttctcgtcgtgtgcctggctctgtcagctgccagcgcctctgcaatgcagatgccctgcccctgcgcggggctgcagggcttgtacggcgctggcgccggcctgacgacgatgatgggcgccggcgggctgtacccctacgcggagtacctgaggcagccgcagtgcagcccgctggcggcggcgccctactacgccgggtgtgggcagacgagcgccatgtaccagccgctccggcaacagtgctgccagcagcagatgaggatgatggacgtgcagtccgtcgcgcagcagctgcagatgatgatgcagcttgagcgtg

SEQ ID NO: 341409 - DNA, 286 bp, Zea mays
gggagtttgttccgattgctacagaagaatgctgccggagttaaaaagaaaccgggtgttcatattgctcttgaaattgcacgacgcatgaaatatctttcacatttgcatcccaactatggctcattgtaaactgaaatttttaaatcttctatttgattaaaatctgactgcaaaggttgccaattttggtttgtaacggttcaaccatgccacgtttctcactactaagactgggaaaggaaccccttattggatggccccaaaaatttttcccaatgaaccc

SEQ ID NO: 341410 - DNA, 422 bp, Zea mays
tagcaacatacaaagcacaatactgcaccaacaatggcagccaaaatatttcgcttccttatgctccttggtctttctgcaagtgctgctaccgcaaccattttcccacaatgctcacaagctcctatagcttcctttcttcccccatacctctcaccagcggtgtattcagtatgagaaaacccaattcttcaaccctacaggatccaacaggcaatcgcagcaggcatcttacctttatcacccttgttcctccaacaaccgtcagccctattacagcagttacctttggtgcatttgttggcacaaaacatcaaggcacaacaactacaacaacttgtgctaggaaaccttgctgcctactctcagcaacagcagtttcttccattcaaccaactggctgcattgaactctgctgctta

SEQ ID NO: 341411 - DNA, 265 bp, Zea mays
gtgcttctagatccacagcgggcgatcttcaggatccacgctcacgcacccgtgcatgcgacgatataactcctcctatgcgcgtcaccgacattcaagtgacctgcccgacatgcgtacaactgttccgacatggcaaaaccgcgtcgtatacccatcttaatagacttgcatcacatcctcacttcgacgggcgtcgaacaaccaactaggcccgcacccatccaccttcccaacacttgcgcaggctgaatgacaaatggcg

SEQ ID NO: 341412 - DNA, 427 bp, Zea mays
tagcaacatagaaagcacaatagtgtaccaacaatggcagccaaaatattttgcttccttatgctccttggtctttctgcaagtgttgctaccgcaaccattttcccacaatgctcacaagctcctatagcttcccttcttcccccatacctctcaccagcggtgtcttcaatgtgtgaaaacccaattgttcaaccctacaggatccaacaggcaatcgcaacaggcatcttaccattatcacccttgttcctccaacaaccgtcagccctattacagcagttacctttggtccatttggtggcacaaaacatcagggcacaacaactacaacaacttgtgctagcaaaccttgctgcatactctcagcaacatcagtttcttccattcaaccaactggctgcattgaactctgctgcttatttgc

SEQ ID NO: 341413 - DNA, 226 bp, Zea mays
gcgaattgccaggcaggcacgcttgagcggagggtttgacgaccgaataccgacccgcgcggtggcttggtacgggatcggcacaggaccccaaaatgtaagatccttgctggccgcgcaccagagaacgtatacacttatttgttgacagtagcgcgccaactgggccctgtgattctagagtggatcaggataccgaaagactggacgatggtgcgtgggagct

SEQ ID NO: 341414 - DNA, 355 bp, Zea mays
cagcaaacaagagttcgcactacctctttttccatctgggctactactgatcgggcggcgctgctgttgtaatcgaacgtccaacattatgttagcctaactcgcgtttatggcactaccttttataagaaaaaagatcactggaggccgcacatggcattttaacatgacagcacacaaatttctataatttgtgttgcaatgcatgagggcctacctcaaaccatcaataatagcctcgatgatctctcgataaaaggctaccatcagctacttgataatgactacatgcagccaaatgaacattaatctatattgctagatgtgcatcaacagcatcattacatggaaagaa

SEQ ID NO: 341415 - DNA, 423 bp, Zea mays
atccagatcagcaaagcggcagtgcgtagagaggatcgtcgaacagaacagcatgaagatggtcatcgttctcgtcgtgtgcctggctctgtcagctgccagcgcctctgcaatgcagatgccctgcccctgcgcggggctgcagggcttgtacggcgctggcgccggcctgacgacgatgatgggcgccggcgggctgtacccctacgcggagtacctgaggcagccgcagtgcagcccgctggcggcggcgccctactacgccgggtgtgggcagacgagcgccatgtaccagccgctccggcaacagtgctgccagcagcagatgaggatgatggacgtgcagtccgtcgcgcagcagctgcagatgatgatgcagcttgagcgtgccgctgccgccagcagcagcctgtacgagccagc

SEQ ID NO: 341416 - DNA, 199 bp, Zea mays
gctggctagctagctagttgagtcatttagcggcgatgattgagtaataatgtgtcacgcatcaccatgggtggcagtgtcagtgtgagcaatgacctgaatgaacaattgaaatgaaaagaaaaaagtattgttccaaaataaaaaaaaaaaaaaatataaaaaaaaaaatataaaaaatgtaaaaaaaacaattatt

SEQ ID NO: 341417 - DNA, 429 bp, Zea mays
acttcaatgggcttcgaacatccagccgtgcaagcctacaggctacaactagcgcttgcggcgagcgtcttacaacaaccaattgcccaattgcaacaacaatccttggcacatctaaacctacaaaccatcgcaacgcaacagcaacaacagtttctgccatcactgagccacctagccgtggtgaaccctgtcgcctacttgcaacagcagctacttgcatccaacccacttgctctggctaacgtatctgcataccagcaacaacaacgtctgcaacagtttatgccagcgctcagtcaactagccatggtgaaccctgtcgcctacctacaacagcaacaattgctttcatctagcccgctcgctgtgggcaatgcacctacgtacctacaacaacagttgctgcaacagattgtaccagctctg

SEQ ID NO: 341418 - DNA, 58 bp, Zea mays
cgcaaattgcaccaataaatccatcgagaggccgtcgacaggggaattaatggcgtcg

SEQ ID NO: 341419 - DNA, 337 bp, Zea mays
  unsure (1)..(337): unsure at all n locations
cgcgagnnggagcatncagaaacacaccaagcgaagccaccgagcaacgacggaacagcgagggcgagcaaganaanagcccngcgagcgcaaanggcccanggagggagcgcaacaaaggcgagcacnagggcacaaggcncacaggcgcccagagccaacanaccacaggagcnccgaccagggacnacaaggggcgncgaacaccgagcagggcaagccnacaggcaacaacaagcgcnggcggcngagcgacaacaacaaccaangaaccaacggcaacaacaaggcggggcacaacnaaccanacaaaccancgcaacacaacagcgacaac

SEQ ID NO: 341420 - DNA, 122 bp, Zea mays
  unsure (1)..(122): unsure at all n locations
cccacgcgnccgcccacgcgnccgcccacgcgnccgggnagaccaagncncnnnncaggacagggggggngggagaccagangcggangagnnncnaganncacnanggacnaacaacaggc

SEQ ID NO: 341421 - DNA, 422 bp, Zea mays
cagaccattagctttatctactccagagcgcagaagaacccgatcgacaccatgagggtgttgctcgttgccctcgctctcctggctctcgctgcgagcgccacctccacgcatacaagcggcggctgcggctgccagccaccgccgccggttcatctaccgccgccggtgcatctgccacctccggttcacctgccacctccggtgcatctcccaccgccggtccacctgccgccgccggtccacctgccaccgccggtccatgtgccgccgccggttcatctgccgccgccaccatgccactaccctactcaaccgccccggcctcagcctcatccccagccacacccatgcccgtgccaacagccgcatccaagcccgtgccagctgcagggaaccttgcggcgtggcagcaccccgat

SEQ ID NO: 341422 - DNA, 166 bp, Zea mays
gagagagcccgaacagacgatcttccaacaaaccagcataaggacggccttcatgttcggggcgttgcttgttgtattagctgccactactcaagaagagacagatgtgctactgctggtggatgctaaagttctacggcgtttctgtctgcatgctgacaacgat

SEQ ID NO: 341423 - DNA, 266 bp, Zea mays
gcgagctcacggccggcggcgtgccttggcgcaagcacaacagcagctccctccgcggggcgccctccctgctcggaagaccaacaccaccatcaacagcagcagcaccgcgccaacgaggcttccctccggtgtgtgagtgcacgcgcgctcgtgatggcagcagccccggcggagtagtcctccacgtaggggtctccggccgtcagcagaccgaggtcgcggttcggcgacacgaccctgacgaaagtcgtcgtgggcgggct

SEQ ID NO: 341424 - DNA, 212 bp, Zea mays
gaccaacatgcaacatagaaagtggaataccgtatctacaattgagcaacaatggcggccaagagggtttccatccttatgctcctggctcttcctgcatgtgttgctaactcgaccatttttcctctatactcacaagctcctatagctgccctgcttcccccataccttccatcaatgaccgcttcagtatgtgaaatcccagcccttca

SEQ ID NO: 341425 - DNA, 134 bp, Zea mays
tgcctgcgcacgtgtccatattaacactgggtaatcaaagccacagggctgagatactccagagcgcggaagaacccgatcgacaccatgagggagttgctcgaagacctcgctctactggctctggatgggag

SEQ ID NO: 341426 - DNA, 386 bp, Zea mays
  unsure (1)..(386): unsure at all n locations
gaaagaggaanccagcagcaccaaaagagcaacaacggcgaccaagaaagggggccaagcgggcgccaagcggcggcggcaggggaagcgaacgcgacagagaccccncaaggcccacaagcggcaanagccggccancgaccgccagaccgcccagcaaggacagcnacagnaggagaaaacccagcccagcaacccaaaaggcnccaacaagcaagcgcagcaagcaacaaaccnnaagcacccnggcnncaacaancgccagccccaacnggggggcagncanggggacaaaccaacagggcacagcagcngcagcaacncgcgcgaccggggaacaaccaagnagcgccggcaaaccangcgcccaacacncagcaacaaca

SEQ ID NO: 341427 - DNA, 433 bp, Zea mays
  unsure (1)..(433): unsure at all n locations
caacaagcaacatagaaagtggaatccagtttcaacaatagagcaacaatggcgaccaagatattttccctccttatgctccttgctctttctgcatgtgttgctaacgcgacaattttccctcaatgctcacaagctcctatagcttcccttcttcccccataccttccatcaatgatagcttcagtatgtgaaaacccagctcttcaaccctataggctccaacaagcaatcgcagcaagcaacatacctttatcacccttgtttcaacaatcgccagccctatctttggtgcagtcattggtacaaaccatcagggcacagcagctgcagcaactcgtgctacctgtgatcaaccaagtagctctggcaaacctttctccctactctcagcaacaacaatntcttccattcaaccaactgtctacattga

SEQ ID NO: 341428 - DNA, 376 bp, Zea mays
cccgttccagcacagagccagcccatttattatcaacttgaccttcccgaagtgcgtccgttcggccgaccgcccggccgctttttgagtcaaggtcggccgcgcgccactctgaatccccaaggcaccacaccggcggacaaccttgagaagaagcaccggcaacgacgacgagctatcactagcagtcagtcacagccgggcaagattgattctgacgaacagccgatgatgatgcacgggaacgggcacgggcacggtcactgtcgtgtgcacccggcgttctccagctccgacttctccggcgagatgaaccagtcggccgtgtgcgaccccttctccagcccgctctacagatttcactttgagaagaccg

SEQ ID NO: 341429 - DNA, 413 bp, Zea mays
taccggattggatgtcgaggtagacccacgcgtgcgcccaacgaccatgagcttgatgtactcgattacgcagacacttatttgacacgatggggacggtcccgtgcccttcttatcatgatcgtggtacaagcgcggaatcacgcttgagatcgggcgttagcgctgcaaactcatgccaaatcgggtcatatacagccggcgggacatctgaacacatcggttaacctgccagttcgggtgaatctagcaccaccggtcgaccttggacctcgggtcaagcgaccacggggggcccatggcggcggagctggtccgcgtctcggcgtagatcccgagcacagttctcagcaccttcgggctgatcaccatctgcatcgacatccatgtctgcttcgacgtgctcgcgcact

SEQ ID NO: 341430 - DNA, 394 bp, Zea mays
ctgggtcttcagaccattagctttatctactccagagcgcagaagaacccgatcgacaccatgagggtgttgctcgttgccctcgctctcctggctctcgctgcgagcgccacctccacgcatacaagcggcggctgcggctgccagccaccgccgccggttcatctaccgccgccggtgcatctgccacctccggttcacctgccacctccggtgcatctcccaccgccggtccacctgccgccgccggtccacctgccaccgccggtccatgtgccgccgccggttcatctgccgccgccaccatgccactaccctactcaaccgccccggcctcagcctcatccccagccacacccatgcccgtgccaacagccgcatccaagcccgtgcc

SEQ ID NO: 341431 - DNA, 335 bp, Zea mays
gccccgctgtcagcctaaaacgcagactcaccaatgcccgtgccaacagccctatccgagcccgtgcttgctgtatgtaacctgctgggtctgcctgaccccgttgctgggcctgcgcttttagcttacgactcattagcgcagctagacggcctagccctactggtcgcctcatcaccagccgctgctgcatgagaattgccagcacttcatgcccatggggtcggaccagcagttgcaggcgatatctggcctgtaccaccactgcatcctgcagaatcggcagcgcagcatccggtgcggggttttgttcgcagcacctatagaccactgac

SEQ ID NO: 341432 - DNA, 408 bp, Zea mays
aaccattaccttatctactccaagctcagaatacccgatcgacaccatgagggtgttgctcgtgccctcgctctcctggctctcgctgcagcgccacctcacgcatacaagcggcggctgcggctgccagccaccgccgcggttcatctaccgccgcggtgcatctgccacctccggttcacctgccacctcgggcatctcccaccgcggccacctgccgccgccggtccacctgccaccgcggtccatgtgccgccgccgttcatctgccgccgccaccatgccactaccctactcaaccgccccggcctcagcctcatccccagccacacccatgcccgtgccaacagccgcatccaaacccgtgccagctgcatggaacctgcggcgttggcagcaccccgatcc

SEQ ID NO: 341433 - DNA, 368 bp, Zea mays
agctcatcgactccagattggagaactcgacaccatgaaggtgctgatcgttgcccttgctctcctggcgctcgctgcgagcgccgcctccagtacaagcggcggctgtggctgccagacaccaccgtttcatctaccgcctccgttctatatgccgcctccgttctatctgccgccgcagcagcagccgcagccatggcaataccccactcaaccaccgcagctaagcccgtgccagcagttcggatcctgcggcgtcggcagcgtcggcagcccgttcctgggccagtgcgtcgagttcctgaggcaccagtgcagcccggcggcgacgccctacggctcgccacagtgccaggcgctgcatcagc

SEQ ID NO: 341434 - DNA, 424 bp, Zea mays
aagcaacatagaaagtggaatccagtagcaacaatagagcaacaatggagaccaagatattttccctccttatgctccttgctctttctacatgtgttgctaacgcgacaattttccctcaatgctcacaagctcctatagcttccctttttcccccataccttccatcaattatagcttcagtatgtgaaaacccagctcttcaaccatataggcttcaacaagcaatcgcagcaagcaacatacctttatcgcccttgttgtgtcaacaatcgccagccctatctttggtgcagtcattggtacaaaccatcagggcacaacagctgcagcaactcgtgctacctgtgatcaaccaagtagctctggcaaacctttctccctactctccgcaacaacaatttcttccattcaaccaactgtc

SEQ ID NO: 341435 - DNA, 427 bp, Zea mays
attgagaccaactagcaacatagaaagcacaatagtgtaccaacaatggcagccaaaatattttgcgctccttatgctccttggtctttctgcaagtgctgctacggcgaccattttcccgcaatgctcgcaagctcctatagcttcccttcttcccccgtacctctcaccagcggtgtcttcggtatgtgaaaacccaattcttcaaccctacaggatccaacaggcaatcgcagctggcatcttacctttatcacccttgttcctccaacaatcatcagccctattacaacagttacctttggtgcatttattggcacaaaacatcagggcacaacaactacaacaacttgtgctagcaaaccttgctgcctactctcaacaacagcagtttcttccattcaaccaactaggttcattgaactct

SEQ ID NO: 341436 - DNA, 408 bp, Zea mays
gctttatctactccagagcgcataagaacccgatcgacaccatgagggtgttgctcgttgcccgggctctcctggctcgcgctgcgagcgccacctccacgcatacaagcggcagctgcggctgccagccaccgccgccggttcatctaccgccgccggtgcatctgccaccttcgggtcacctgccacctacggtgcatctcccaccgccggtccacctgccgccgccggtccacctgccaccgtcggtccatgtgccgccgtcggttcatctgccgccgtcaccatgccactaccctactcaaccgccccggcgctcatcctcatccccagccacacccatgcccgtgccatcagccgcattcaagcccgtgccaactgcagggaacctgctgcgttggcagcacc

SEQ ID NO: 341437 - DNA, 346 bp, Zea mays
accggcggggagtcccacgcgcgagccacaccttcgcgacactgccatgtgcgacaggacaaacagagacacgagcagcaacagacggagccatgagcggcaacctcatccacacttccagggctaggacgagctccatcaaccacaacagacctaagcgaacatgaagcatggccagtagataacacaacggcaacaatgtcatagcccggagcggcaccagactacaaggcgcatctgtggcttctatagcagtagctcaaatctaaaaaattgtcatgaattcctaatgcagcagtgcagccctttgacaatggcttttctccaatcacgtttgatacaacca

SEQ ID NO: 341438 - DNA, 323 bp, Zea mays
accggggcgggacccacggcgcgagccacgcgagcggccaagcgaacgcacgcgggcatgcgacggcacacccctcctatagagggacctaaatggagcccactggccgccggcgcacaacgcgagcgccggaggagcacgagcgggccccggagaagtctgactacagcccataggctaccggcgaggtaggatatgctcggagcgggcaataccgcatcctccttccaaccactgcccaggcttaccgccaatgcacactcctctaccggtgcctaaagctgggatgctgtggcgaggaacgccaaagcagccctgtccat

SEQ ID NO: 341439 - DNA, 424 bp, Zea mays
acgccattagctttatctactccagagcgcagaagaacccgatcgacaccatgagggtgttgctcgttgccctcgctctcctggctctcgctgcgagcgccacctccacgcatacaagcggcggctgcggctgccagccaccgccgccggttcatctaccgccgccggtgcatctgccacctccggttcacctgccacctccggtgcatctcccaccgccggtccacctgccgccgccggtccacctgccaccgccggtccatgtgccgccgccggttcatctgccgccgccaccatgccactaccctactcaaccggcccggcctgagcctcatccccagccacacccatgcccgtgccaacagccgaatccaagcccgtgccatctgcagggaacctgcggcgttggcagcaccccgatcct

SEQ ID NO: 341440 - DNA, 423 bp, Zea mays
gaccaacaagcaacatagaaagtggaatacagtagcaacaatagagcaacaatggcggcgaagatattttccatccttatgctccttgctctttctgcatgtgttgctaacgcgaccatttttcctcaatactcacaagctcctatagctgcccttcttcccccataccttccatcaatgaccgcttcagtatgtgaaaacccagcccttcaaccctacaggctccaacaagcaatcgcaacaagcaacttacctttatcacccctgttctttcaacaatcgccagccctatctttggtgcagtcattggtacaaaccatcatggcacaacatctgcagcaactcgtgctaccagtgatcagccaagtagctctgtcaaacctttctccctactctcagcaacaacaatttcttccattcaac

SEQ ID NO: 341441 - DNA, 427 bp, Zea mays
caaagcggcagtgcgtagagaggatcgtcgaacagaacagcatgaagatggtcatcgttctcgtcgtgtgcctggctctgtcagctgccagcgcctctgcaatgcagatgccctgcccctgcgcggggctgcagggcttgtacggcgctggcgccggcctgacgacgatgatgggcgccggcgggctgtacccctacgcggagtacctgaggcagccgcagtgcagcccgctggcggcggcgccctactacgccgggtgtgggcagacgagcgccatgtaccagccgctccggcaacagtgctgccagcagcagatgaggatgatggacgtgcagtccgtcgcgcagcagctgcagatgatgatgcagcttgagcgtgccgctgccgccagcagcagcctgtacgagccagctctgatgcagcagca

SEQ ID NO: 341442 - DNA, 429 bp, Zea mays
gggtcttcagaccattagctttatctactccagagcgcagaagaacccgatcgacaccatgagggtgttgctcgttgccctcgctctcctggctctcgctgcgagcgccacctccacgcatacaagcggcggctgcggctgccagccaccgccgccggttcatctaccgccgccggtgcatctgccacctccggttcacctgccacctccggtgcatctcccaccgccggtccacctgccgccgccggtccacctgccaccgccggtccatgtgccgccgccggttcatctgccgccgccaccatgccactaccctactcaaccgccccggcctcagcctcatccccagccacacccatgcccgtgccaacagccgcatccaagcccgtgccagctgcagggaacctgcggcgttggcagcaccccgat

SEQ ID NO: 341443 - DNA, 410 bp, Zea mays
agaccaacaagcaacatagaaagtggaatccagtagcaacaatagagcaacaatggcgaccaagatattttccctccttatgctccttgctctttctgcatgtgttgctaacgcgacaattttccctcaatgctcacaagctcctatagcttcccttcttcccccataccttccatcaatgatagcttcagtatgtgaaaacccagctcttcaaccctataggctccaacaagcaatcgcagcaagcaacatacctttatcacccttgtttcaacaatcgccagccctatctttggtgcagtcattggtacaaaccatcagggcacagcagctgcagcaactcgtgctacctgtgatcaaccaagtagctctggcaaacctttcttcctactctcagcaacaacaatttc

SEQ ID NO: 341444 - DNA, 250 bp, Zea mays
  unsure (1)..(250): unsure at all n locations
gagaccaacaagcaacagagaaaggggaanccaggagcaacaanagagcagcgagggcgacgaagaganggncccngcgcaagccccaggcnncgncagcaagagaagcnaacgcgacaaggnncccgcaaagcgcacaagcnccnanagcancccnncnncccccaaaccncccaacaaaganagcnncagnangcgaaaacccagcncnncaacccnanaggcgccaacaagcaancgcagcaagcaa

SEQ ID NO: 341445 - DNA, 417 bp, Zea mays
caactagcaacatagaaagcacactagtgtaccaacagtggctgccaaaatattttgcctgcttatgctccttggtctttctgcaagtgctgctacggcgaccattttcccgcaatgctcgcaagctcctatagcttcacttcttcccccgtacctgtcaccagcggtgtcttcggtatgtgaaaacccaattcttcaaccctacaggatccaacaggcaatctcagctggcatcttacctttatcacccttgttcctgcaacaatcatcagccctattacaacagttacctttggtgcatttattggcacaaaacatcatggcacatctactactacaacttgtgctagcaaaccttgctgtctactctcagcaacagcagtttcttccattcaaccaactaggttcattgaactc

SEQ ID NO: 341446 - DNA, 423 bp, Zea mays
cgtcagcctagcaattagctcatcgactccagattggagaactcgacaccatgaaggtgctgatcgttgcccttgctctcctggcgctcgctgcgagcgccgcctccagtacaagcggcggctgtggctgccagacaccaccgtttcatctaccgcctccgttctatatgccgcctccgttctatctgccgccgcagcagcagccgcagccatggcaataccccactcaaccaccgcagctaagcccgtgccagcagttcggatcctgcggcgtcggcagcgtcggcagcccgttcctgggccagtgcgtcgagttcctgaggcaccagtgcagcccggcggcgacgccctacggctcgccacagtgccaggcgctgcagcagcagtgctgccaccagatcaggcaggtggagccgctgcacc

SEQ ID NO: 341447 - DNA, 420 bp, Zea mays
aacaagcaacatataaagtggaatccagtttcaactattgatctacaatggagaccaaggtatttttcctccttatgctccttgctctttctacatgtgttgctaacgcgacaatttttcctcaatgctcacaagctcctatagcttcccttttttccccataccttccatcaattatagcttcagtatgtgaaaacccagctcttcaaccatatatgcttcaacaagcaatcgcagcatgcaacatacctttatcgcccttgttgtgtcaacaatcgccagccctatctttggtgcagtcattggtacaaaccatcatggcacaacagctgcagcaactcgtgctacctgtgatcaaccaaatagctctggcaaacctttctccctactctccgcaacaacaatttctttcattcaacc

SEQ ID NO: 341448 - DNA, 76 bp, Zea mays
ctcggcctacctcaacttccagccacacaagtgcagcatcaacatgggagcagaggacccaggtagatcggttagc

SEQ ID NO: 341449 - DNA, 404 bp, Zea mays
attttcagcattcagaaacacaccaagcgaagcgcactagcaacaacctaacaacaatggctagcaagatattagccctccttgcgcttcttgcccttttagtgagcgcaacaaatgcgttcattattccacagtgctcacttgctcctagtgccattattccacagttcctgccaccagttacttcaatgggcttggaacatgcagccgtgcaagcctacaggctacaactagcgcttgcggcgagcgtcttacaacaaccaattgcccaattgcaacaacaatccttggcacatctaaacctacaaaccatcgcaacgcaacagcaacaacagtttctgccatcactgagccacctagccggggtgaaccctgtcgcctacttgcaacagcagctacttgca

SEQ ID NO: 341450 - DNA, 317 bp, Zea mays
ggtcttcagaccattagctttatctactccagagcgcagaagaacccgatcgacaccatgagggtgttgctcgttgccctcgctctcctggctctcgctgcgagcgccacctccacgcatacaagcggcggctgcggctgccagccaccgccgccggttcatctaccgccgccggtgcatctgccacctccggttcacctgccacctccggtgcatctcccaccgccggtccacctgccgccgccggtccacctgccaccgccggtccatgtgccgccgccggttcatctgccgccgccaccatgccactaccctac

SEQ ID NO: 341451 - DNA, 437 bp, Zea mays
cagaccattagctttatctactccagagcgcagaagaacccgatcgacaccatgagggtggtgctcgttgccctcgctctcctggctctcgctgcgagcgccacctccacgcatacaagcggcggctgcggctgccagccaccgccgccggttcatctaccgccgccggtgcatctgccacctccggttcacctgccacctccggtgcatctcccaccgccggtccacctgccgccgccggtccacctgccaccgccggtccatgtgccgccgccggttcatctgccgccgtcaccatgccactaccctactcaaccgccccggcctcagcctcattcccagccacacccatgcccgtgccaacagccgcatccaaacccgtgccagctgcagggaacctgcggcgttggcagcacccccgacctgggccagtgcgt

SEQ ID NO: 341452 - DNA, 91 bp, Zea mays
ttaacaaaaaacttaacttatccgtctagtctaaaaaccccaaccaaaccattcggggggtggttctttgcctggcttttctgcgcttttt

SEQ ID NO: 341453 - DNA, 88 bp, Zea mays
gtgaagacactcactggccagacactcaccctagtggcggagtctgcgcctacgattaacaatgtgcaggccgagatccatgacatgg

SEQ ID NO: 341454 - DNA, 310 bp, Zea mays
cacaggggtcacgtcagtctcctactaatttcaatagcacagcgagagcctcggaagaagaagaagcttgctgagcgccatggcgtgttccaactgcgagtgccaccgccggttcgacctgatcgtggtgggcgcgggcatgatgggcagctgcgccgtctactctacgtcctctcgtggctcgcgcagtgctggttctggtgcggttctacctgcttcaccaccggggcttctagcacggcgagtcgcgcaccatgcgagccacctaccctgaggcgcactaccctcacatggtgcgcctgtcctggcg

SEQ ID NO: 341455 - DNA, 390 bp, Zea mays
ctgggtcttcagaccattagctttatctactccagagcgcagaagaacccgagcgacaccatgagggtgttgctcgttgccctcgctctcctggctctcgctgcgagcgccacctccacgcatacaagcggcggctgcggctgccagccaccgccgccggttcatctaccgccgacggtgcatctgccacctccggttcacctgccacctccggtgcatctcccaccgacggtccacctgcctgcgccggtccacctgccaccgacggtccatgtgccgccggcggttcatctggcggcgtcaccatgccactaccctactcaaccgtcccggtctcaggctcatacccagccacacccatgcccgtgccaacagccgcatgcaagcccg

SEQ ID NO: 341456 - DNA, 81 bp, Zea mays
atccatatcagcaaacggcaggcttataaggatcgccgaacataacacatgggaaggtattttctcgcgtgccctgtctct

SEQ ID NO: 341457 - DNA, 239 bp, Zea mays
cccacgcgtccgaccagaagagcggcggcgcgggcggacaaggagcaggcggaggaggagttgtgccaagccacaatgggtatctcgcgtgactcgatgcacaagcgccgagccaccggtggaaagcagaaggcctggaggaagaagcgaaagtatgagcttggtcgccagccagccaacaccaagttgtcaagcaataagacagtgaggagggtccgtgttcgtggaggtaatgtgaa

SEQ ID NO: 341458 - DNA, 392 bp, Zea mays
ctccagagcgcagaagaacccgatcgacaccatgagggtgttgctcgttgccctcgctctcctggctctcgctgcgagcgccacctccacgcatacaagcggcggctgcggctgccagccaccgccgccggttcatctaccgccgccggtgcatctgccacctccggttcacctgccacctccggtgcatctcccaccgccggtccacctgccgccgccggtccacctgccaccgccggtccatgtgccgccgccggttcatctgccgccgccaccatgccactaccctactcaaccgccccggcctcagcctcatccccagccacacccatgcccgtgccaacagccgcatccaagcccgtgccagctgcagggaacctgcggcgttggca

SEQ ID NO: 341459 - DNA, 377 bp, Zea mays
caactagcaacatagaaagcacaatagtgtaccaacaatggcagccaaaatattttgcttccttatgctccttggtctttctgcaagtgctgctaccgcaaccattttcccacaatgctcacaagctcctatagcttcctttcttcccccatacctctcaccagcggtgtcttcagtatgtgaaaacccaattcttcaaccctacaggatccaacaggcaatcgcagcaggcatcttacctttatcacccttgttcctccaacaaccgtcagccctattacagcagttacctttggtgcatttgttggcacaaaacatcaaggcacaacaactacaacaacttgtgctaggaaaccttgctgcctactctcagcaac

SEQ ID NO: 341460 - DNA, 346 bp, Zea mays
ctccagagcgcagaagaacccgatcgacaccatgagggtgttgctcgttgccctcgctctgctggctctcgctgcgagcgccacctccacgcatacaagcggcggctgcggctgccagccaccgccgccggttcatctaccgccgccggtgcatctgccacctccggttcacctgccacctccggtgcatctcccaccgccggtccacctgccgccgccggtccacctgccaccgccggtccatgtgccgccgccggttcatctgccgccgccaccatgccactaccctactcaaccgccccggcctcagcctcatccccagccacacccatgcccgtgccaacag

SEQ ID NO: 341461 - DNA, 333 bp, Zea mays
attttgagcattcagaaacacaccaagcgaagctacctagcaacgacttaacaacaatggctaccaagatattagccctccttgcgcttcttgccctttttgtgagcgcaacaaatgcgttcattattccacaatgctcacttgctcctagtgccattataccacagttcctccgaccagttacttcaatgggcttcgaacacctagctgtgcaagcctacaggctacaacaagcgcttgcggcgagcgtcttacaacaaccaattaaccaattgcaacaacaatccttggcacatctaaccatacaaaccatcggaacacaacagcaacaac

SEQ ID NO: 341462 - DNA, 437 bp, Zea mays
gaccaacaagcaacatagaaagtggaatacagtagcaacaatagagcaacaatggcggccaagatattttccatccttatgctccttgctctttctgcatgtgttgctaacgcgaccatttttcctcaatactcacaagctcctatagctgcccttcttcccccataccttccatcaatgaccgcttcagtatgtgaaaacccagcccttcaaccctacaggctccaacaagcaatcgcaacaagcaacttacctttatcacccctgttctttcaacaatcgccagccctatctttggtgcagtcattggtacaaaccatcagggcacaacagctgcagcaactcgtgctaccagtgatcagccaagtagctctggcaaacctttctccctactctcagcaacaacaatttctttcattcaaccaactgtctacact

SEQ ID NO: 341463 - DNA, 447 bp, Zea mays
gagaccaacaagcaacatagaaagtggaatccagtagcaacaatagagcaacaatggagaccaagatattttccctccttatgctccttgctctttctacatgtgttgctaacgcgacaattttccctcaatgctcacaagctcctatagcttccctttttcccccataccttccatcaattatagcttcagtatgtgaaaacccagctcttcaaccatataggcttcaacaagcaatcgcagcaagcaacatacctttatcgcccttgttgtgtcaacaatcgccagccctatctttggtgcagtcattggtacaaaccatcatggcacaacagctgcagcaactcgtgctacctgtgatcaaccaagtagctctggcaaacctttcttcctactctccgcaacaacaatttcttccattcaaccaactgtctacactgaaccctg

SEQ ID NO: 341464 - DNA, 406 bp, Zea mays
ctactccagagcgcagaagaacccgatcgacaccatgagggtgttgctcgttgccgcgcgcgctcctggctctcgctgcgagcgccacctccactcatacaagcggcggctgcggctgccagccaccgccgccggttcatctaccgccgccggtgcatctgccacctccggttcacctgccacctccggtgcatctcccaccgccggtccacctgccgccgccggtccacctgccaccgtcggtccatgtgccgccgccggttcatctgccgccgccaccatgccactaccctactcaaccgccccggcctcagcctcatccccagccacacccatgctcgtgccaacagccgtatccaagcccgtgccagctgcatggaacctgctgcgtttggagcacccctat

SEQ ID NO: 341465 - DNA, 297 bp, Zea mays
tcgttggagccctatcccaatgtcgttcgggctttcaacaactgctacatctctcgcgagctgagcgctttctttcccgggcatcatgcctcctgttatgctgttgaatatgcatctaacatgagtattcttaatggcttgtggcttcaagaagcatcatcttcttggctatctgatcctgaggaatgtcatggtcaattatctccaaccctttcctgctgctcctggttagctgcgccatctccttcgccttgttcattacttttgtggcgccgtttgatacgattcttactcact

SEQ ID NO: 341466 - DNA, 153 bp, Zea mays
actagttctagatcgcgagctgccgccctttttttttcatcttttttattgggagctttctggtcctttttgcggctctttcacctacaaacacctctgcaaacacaaactctgccccttcactcgacatcattacttgtaccgatccatagc

SEQ ID NO: 341467 - DNA, 83 bp, Zea mays
aaaaaaaaataaaaaaaaataaataaaaaaataaaaaaaaaaaatataaaaaaaatgggaagggataattaataaaataaatt

SEQ ID NO: 341468 - DNA, 442 bp, Zea mays
atagaaagcacaatagtgtaccaacaatggcagccaaaatattttgcctccttatgctccttggtctttctgcaagtgctgctacggcgaccattttcccgcaatgctcgcaagctcctatagcttcccttcttcccccgtacctctcaccagcggtgtcttcggtatgtgaaaacccaattcttcaaccctacaggatccaacaggcaatcgcagctggcatcttacctttatcacccttgttcctccaacaatcatcagccctattacaacagttacctttggtgcatttattggcacaaaacatcagggcacaacaactacaacaacttgtgctagcaaaccttgctgcctactctcagcaacagcagtttcttccattcaaccaactaagttcattgaactctgcttcttatttgcaacaacaacaactaccattcag

SEQ ID NO: 341469 - DNA, 436 bp, Zea mays
attttgagcattcagaaacacaccaagcgtttcgcactagccacgacctaacaacaatggcggccaagatattagccctccttgcgcttcttgccctttttgtgagcgcaacaaaagcgttcattattccacaatgctcacttgctcctagtgccattattccacagttcctcccaccagttacttcaatgggcttcgaacacctagctgtgcaagccaacatgcaacaacaagcgcttgcggcgagcgtcttacaacaaccaattgcccaattgcaacaacaatccttgccacatctaacaatacaagccatcacaacgcaacagcaacaacagttcctaccagcactgagccacctagtcatggtgaaccctgccgcctacttgcaagagcagctgctcgcattcaacccacttgctctggcgaacgtagttgc

SEQ ID NO: 341470 - DNA, 449 bp, Zea mays
attgagaccaacaagcaacatagaaagtggaatccagtagcaacaatagagcaacaatggggaccaagatattttccctccttatgctccttgctctttctacatgtgttgctaacgcgacaattttccctcaatgctcacaagctcctatagcttccctttttcccccataccttccatcaattatagcttcagtatgtgaaaacccagctcttcaaccatataggcttcaacaagcaatcgcagcaagcaacatacctttatcgcccttgttgtgtcaacaatcgccagccctatctttggtgcagtcattggtacaaaccatcagggcacaacagctgcagcaactcgtgctacctgtgatcaaccaagtagctctggcaaacctttctccctactctccgcaacaacaatttcttccattcaaccaactgtctacactgaaccct

SEQ ID NO: 341471 - DNA, 297 bp, Zea mays
gaccaactagcaacatagaaagcacaatagtgtaccaacaatggcagccaaaatattttgcttccttatgctccttggtctttctgcaagtgttgctaccgcaaccattttcccacaatgctcacaagctcctatagcttcccttcttcccccatacctctcaccagcggtgtcttcaatgtgtgaaaacccaattgttcaaccctacaggatccaacaggcaatcgcaacaggcatcttaccattatcacccttgttcctccaacaaccgtcagccctattacagcagttaccttt

SEQ ID NO: 341472 - DNA, 420 bp, Zea mays
gaaacacaccaagcgaagcgcactagcaacaacctaacaacaatggctaccaagatattatgcctccttgcgcttcttgcgctttttgcgagcgcaacaaatgcgtccattattccacaatgctcacttgctcctagttccattattccacagttcctcccaccagttacttcaatggccttcgaacacccagctgtgcaagcctataggctacaacaagcgattgcggcgagcgtcttacaacaaccaattgcccaattgcaacaacaatccttggcacatctaacaatacaaaccatcgcaacgcaacagcaacaacagttcctaccagcactgagcacctagccatgtgaccctgtcgctactgcacagcagtgttgatcaccacttgttacaacgagtgaacacacacacactgac

SEQ ID NO: 341473 - DNA, 331 bp, Zea mays
cgttacattaggtgatctggttgtgaaggttctggaatttattgaagctacaaaggagccagggcttaccttcatggttgcaaaatttgatggcattcttgggctaggctttcaagaaatctctgttgggaatgcaacaccagtgtggtataacatggtgaaacaaggtctcatcagcgaccctgttttctctttctggtttaaccgacatgctgatgaaggagaaggtggtgaaattgtgtttggtggaatggattctagccactacaagggtgatcacacgtttgtcccagtcactcggaaaggatactggcagttcaacatgggtgat

SEQ ID NO: 341474 - DNA, 447 bp, Zea mays
agaccaacaagcaacatataaagtggaatccagtagcaacaatagagcaacaatggagacggagatattttccctccttatgctccttgctctttctacatgtgttgctaacgcgacaattttccctcaatgctcacaagctcctatagcttccctttttcccccataccttccatcaattatagcttcagtatgtgaaaacccagctcttcaaccatataggcttcaacaagcaatcgcagcaagcaacatacctttatcgcccttgttgtgtcaacaatcgccagccctatctttggtgcagtcattggtacaaaccatcatggcacaacagctgcagcaactcgtgctacctgtgatcaaccaagtagctctggcaaacctttctccctactcttcgcaacaacaattttttccattcaaccaactgtctacactgaaccctgc

SEQ ID NO: 341475 - DNA, 245 bp, Zea mays
gttctcgcctcgtcgtccccaatcgtcgtctagagtttaccgatccttcttccacgacctggaccgttggtgccagggccggctcgcatactgtgcttgtactgcccccgccccgtcatggattcgtgccgagctcaccatcgaacatgttctgtttagagatatttcatgggttcatttcatgtttactaagctctttttattgaacagttccttttacttttacggtgacattaccactaaca

SEQ ID NO: 341476 - DNA, 444 bp, Zea mays
accgcaaccattttcccacaatgctcacattctcctatagcttcctttcttcccccatacctctcaccagcggtgtcttcagtatgtgaaaacccaattcttcaaccctacaggatccaacaggcaatcgcagcaggcatcttacctttatcacccttgttcctccaacaaccgtcagccctattacagcagttacctttggtgcatttgttggcacaaaacatcaaggcacaacaactacaacaacttgtgctaggaaaccttgctgcctactctcagcaacagcagtttcttccattcaaccaactggctgcattgaactctgctgcttatttgcaacaacaactaccattcagtcagctagctgctgcctacccccagcaatttttttcattcaaccaaactgcaagatttgactctgctgttatttacaacagcaacagc

SEQ ID NO: 341477 - DNA, 351 bp, Zea mays
cagaccattagctttatctactccagagcgcagaagaacccgatcgacaccatgagggtggtgctcgttgccctcgctctcctggctctcgctgcgagcgccacctccacgcatacaagcggcggctgcggctgccagccaccgccgccggttcatctaccgccgccggtgcatctgccacctccggttcacctgccacctgcggtgcatctgccaccgccggtccacctgccgccgccggtccacctgccaccgccggtccatgtgccgccgccggttcatctgccgtcgccaccatgccactaccctactcaaccgccccgggctcagcctcatccccagccacaccca

SEQ ID NO: 341478 - DNA, 357 bp, Zea mays
tttcaacattcataaacacaccaagcgaagcgcactatcaacaacctaacaacaatggctacgcaagatattagccctccttgcgcttcttgcccttttagtgagcgcaacaaatgcgttcattattccacagtgctcacttgctcctagtgccattattccacagttcctcccaccagttacttgaatgggcttagaacatccagccgtgcaagcctacaggctacaactagcgcttgcggcgagcgtcttacaacaaccaattgcccaattgcaacaacaatccttggcacatctaaacctacaaaccatcgcaacgcaacatcaacaacagtttctgccatcactgagccacct

SEQ ID NO: 341479 - DNA, 450 bp, Zea mays
attgataccaacaagcaacatataaagtggaatccagtatcaacaatatagcaacaatggggaccaatatattttccctccttatgctccttgctctttctacatgtgttgctaacgcgacaattttccctcaatgctcacaagctcctatagcttccctttttcccccataccttccatcaattatagcttcagtatgtgaaaacccagctcttcaaccatataggcttcaacaagcaatcgcagcaagcaacatacctttatcgcccttgttgtgtcaacaatcgccagccctatctttggtgcaatcattggtacaaaccatcagggcacaacagctgctacaactcgtgctacctgtgatcaaccaagtagctttttcaaacctttctccctacttcttcgcaacaacaatttttttcatttaaccaactgtcttcactgaaccct

SEQ ID NO: 341480 - DNA, 336 bp, Zea mays
attgagaccaacatgcaacatagaaagtgcaatccagtgccaacaatagagcaacaatggcgaccaagatattttccctccttatgctccttgctctttctgcacgtgttgctaacgcgacaattttccctcaatgctcacaagctactatagcttacctgcttcccccataccttccatcaatgatagcttcactatgtgaaaacccacctcttccaccctataggctccaacaagcaatcgcagctagcaacatacctttatcacccttgtttgaacaatcgccagccctatctttggtgcagtcattggtacaaaccatcacggcacagcacc

SEQ ID NO: 341481 - DNA, 358 bp, Zea mays
gtcttcagaccattagctttatctactccagagcgcagaagaacccgatcgacaccatgagggtgttgctcgttgccctcgctctcctggctctcgctgcgagcgccacctccacgcatacaagcggcggctgcggctgccagccaccgccgccggttcatctaccgccgccggtgcatctgccacctccggttcacctgccacctccggtgcatcttccaccgccggtccacctgccgccgccggtccacctgccaccgccggtccatgtgccgccgccggttcatctgccgccgccaccatgccactaccctactcaaccgccccggcctcagcctcattcccagccacacccatg

SEQ ID NO: 341482 - DNA, 421 bp, Zea mays
attttcagcattcagaaacactataagcgaatcgcactagcatcaacctaacggcaatggctaccaagatattagccctccttgcgcttcttgcccttttagtgagcgcaacaaatgcgttcattattccacagtgctcacttgctcctagtgccattattccacagttcctcccaccagttacttcaatgggcttcgaacatccagtcgtgcaagcctacaggctacaactagcgcttgcggcgagcgtcttacaacaaccaattgcccaattgcaacaacaatccttggcacatctaaacctacaaaccatctgaacgcaacagcaacaacagtttttgtcatcactgagccacctatccgtggtgaaccctgtctcctacttgcaacagcagctacttgcattcaacccacttgctct

SEQ ID NO: 341483 - DNA, 378 bp, Zea mays
cccacgcgtccgagaccattagctttatctactccagagcgcacaacaacccgatcgacagcatgagggtgttgctcgttgccctcgctctcctggctctcgctgcgagcgccacctccacgcatacaagcggcggctgcggctgccagccaccgtcgccggttcatctaccgccgccggtgcatctgccacctacggttcacctgccacctccatgtgcatctcccaccgccggtccacctgccgccgccggtccacctgccaccggcggtccatgtgccgccgcctgttcatctggcggcgacaccatgccactaccctactcaaccggcccggcctaagcctgatccccagccacacccatgcccgtgccaacag

SEQ ID NO: 341484 - DNA, 378 bp, Zea mays
cagaaacacaccaagcgaagcgcactagcaacaacctaacaacaatggctacgaggatattatcccttcttgcgcttcttgcgctttttgcgagcgcaacaaatgcgtccattattccacaatgctcacttgctcctagttccattattccacagttcctcccaccagttacttcaatggccttcgaacacccagctgtgcaagcctataggctacaacaagcgattgctgcgagcgtcttacaacaaccaattgcccaattgcaacaacaatccttggcacatctaacaatacaaaccatcgtaacgcatcagcaacaacagtttctaccagcactgagccacctagccatggtgaaccctgtcgcctacttgcaac

SEQ ID NO: 341485 - DNA, 444 bp, Zea mays
cagaaacacaccaagcgaagcgcactagcaacaacctaacaacattggctaccaagatattgtccctccttgcgcttcttgcgctttttgctagcgcaacaaatgcgtccattattccacaatgctcacttgctcctagttccattattccacagttcctcccaccagttacttcaatggccttcgaacacccagctgtgcaagcctataggctacaacaagcgattgcggcgagcgtcttacaacaaccaattgcccaattgcaacaacaatccttggcacatctaacaatacaaaccatcgcaacgcaacagcaacaacatgttcctaccaacactgagccacctatccatggtgaaccctgtcgcctacttgaacagcagctgtttgcatccaaaccacttgctctagcaaacgtagttgcaaaccatcaacaacaactac

SEQ ID NO: 341486 - DNA, 151 bp, Zea mays
gttctagatcgcgagcggccgcccttttcttttctttcttaataaatatattatgggctggggctatatatgatccatgcttacctaccctcgcatcctacttcatatctattttatatttgttacctaaattcaattcactttctcgcct

SEQ ID NO: 341487 - DNA, 433 bp, Zea mays
gcaacatagaaagcacaatagtgtaccaacaatggcagccaaaatattttgcttccttatgctccttggtctttctgcaagtgctgctaccgcaaccattttcccacaatgctcacaagctcctatagcttcctttcttcccccatacctctcaccagcggtgtcttcagtatgtgaaaacccaattcttcaaccctacaggatccaacaggcaatcgcagcaggcatcttacctttatcacccttgttcctccaacaaccgtcagccctattacagcagttacctttggtgcatttgttggcacaaaacatcaaggcacaacaactacaacaacttgtgctaggaaaacctgctgcctactctcagcaacagcagtttcttccattcaaccaactggctgcattgaactctgctgcttatttgcacaacaac

SEQ ID NO: 341488 - DNA, 379 bp, Zea mays
gcaacatacaaagcacaatattgtaccaacaatggcagccaaaatattttgcttccttatgcgccttggtctttctgcaagtgctgctaccgcaaccattttcccacaatgctcacaagctcctatagcttcctttcttcccccatacctctcaccagcggtgtcttcagtatgtgaaaacccaattctttaaccctacaggatccaacaggcaatcgcagcatgcatcttacctttatcacccttgttccttcaacaaccgtcagacctattacagcagttacctttggtgcatttgttggcacaaaacatcaaagctcatcaactacaacaacttgtgctaggaaaccgtgctgcctactctcagcaacagcagttt

SEQ ID NO: 341489 - DNA, 339 bp, Zea mays
agaccaactagcaacatagaaagcacaatagtgtaccaacaatggcagccaaaatattttgcttccttatgctccttggtctttctgcaagtgctgctaccgcaaccattttcccacaatgctcacaagctcctatagcttcctttcttcccccatacctctcaccagcggtgtcttcagtatgtgaaaacccaattcttcaaccctacaggatccaacaggcaatcgcagcaggcatcttacctttatcacccttgttcctccaacaaccgtcagccctattacagcatttacctttggtgcatttgttggcacaaaacatcaaggcacatcatcttc

SEQ ID NO: 341490 - DNA, 397 bp, Zea mays
ccagagcgcataataacccgatcgacaccatgagggtgttgctcgttgccctggctctcctggctctcgctgcgagcgccacctccacacatacaagcggcggctgcggctgccagccaccgccgccggttcatctaccgccgccggtgcatctgccacctccggttcacctgccaccttcggtgcatcttccaccgccggtccacctgccgtcgccggtccacctgccaccgtcggtccatgtgccgtcgccggttcatctggcgccgccaccatgccactaccctactcaaccgccccggtctcagtcttatacccagccacacccatggccgtgccaacagacgcattcaagcccgtgccagctgcagggaaacctgcggcgttggcagcaccc

SEQ ID NO: 341491 - DNA, 370 bp, Zea mays
aacaaatgcgttcattattccacagtgctcacttgctcctagtgccattattccacagttcctcccaccagttacttcaatgggcttcgaacatccagccgtgcaagcctacaagctacaactagcgcttgcggcgagcgtcttacaacaaccaattgcccaattgcaacaacaatccttggcacatctaaacctacaaaccatcgcaacgcaacagcaacaacagtttctgccatcactgagccacctagccgtggtgaaccctgtcgcctacttgcaacagcagctacttgcattcaacccacttgctctggcgaacgtagctgcataccagcaacaacaacgtctgcaacagtttatgccagcgctc

SEQ ID NO: 341492 - DNA, 414 bp, Zea mays
gccgccggtgcatctgccacctccggttcttctgccacctccggtgcatctcccaccgccggtccacctgccgccgccggtccacctgccaccgccggtccatgtgccgccgccggttcatctgccgccgccaccatgccactaccctactcaaccgccccggcctcagcctcatccccagccacacccatgcccgtgccaacagccgcatccaagcccgtgccagctgcagggaacctgcggcgttggcagcaccccgatcctgggccagtgcgtcgagtttctgaggcatcagtgcagcccgacggcgacgccctactgctcgcctcagtgccagtcgttgcggcagcagtgttgccagcagctcatgcaggtggagccggcagaccggtaccaggcgatcttcggcttggt

SEQ ID NO: 341493 - DNA, 263 bp, Zea mays
caagctcctatagcttccctttttcccccataccttccatcaattatagcttcagtatgtgaaaacccagctcttcaaccatataggcttcaacaagcaatcgcagcaagcaacatacctttatcgcccttgttgtgtcaacaatcgccagccctatctttggtgcagtcattggtacaaaccatcagggcacaacagctgcagcaactcgtgctacctgtgatcaaccaagtagctctggcaaacctttctccctactttcc

SEQ ID NO: 341494 - DNA, 282 bp, Zea mays
attttgagcattcagaaacacaccaagcgaagcgcactatcaacaacctaacaacaatggctaccaagatattatccctccttgcgcttcttgcgctttttgcgagcgcaacaaatgcgtccattattccacaatgctcacttgctcctagttccattattccacagttcctcccaccagttacttcaatggccttcgaacacccagctgtgcaagcctataggctacaacaagcgattgcggcgagcgtcttacaacaaccaattgcccaattgccacaac

SEQ ID NO: 341495 - DNA, 445 bp, Zea mays
gcgagctgcccttcttccaccataccttccatcaatgaccgcttcagtatgtgaaaacccagcccttcaaccctacaggctccaacaagcaatcgcaacaagcaacttacctttatcacccctgttctttcaacaatcgccagccctatctttggtgcagtcattggtacaaaccatcagggcacaacagctgcagcaactcgtgctaccagtgatcatccaagtagctctggcaaacctttctccctactctcagcaacaacaatttcttccattcaaccaactgtctacactgaaccctgctgcttatttgcagcaacaacaactactaccattcaaccagctagctactggctactctcagcaacaacaatttctttcatttaaccaatttgccgcactgaacccctctgcttatttgcagcagcaaatactactaccattt

SEQ ID NO: 341496 - DNA, 310 bp, Zea mays
atcgcagcaggcatcttacctttatcacccttgttcctccaacaaccgtcaggggtattacagcagttacctttggtgcatttgttggcacaaaacatcaaggcacaacaactacaacaacttgtgctaggaaaccttgctgcctactctcagcaacagcagtttctttcattcaaccaactggctgcattgaactctgctgcttatttgcaacaacaactaccattcagtcagctaactgctgcctacccccagcaatttctttcattcaaccaactgggagcattgaactctgctgcttatttacaac

SEQ ID NO: 341497 - DNA, 350 bp, Zea mays
agaccattagctttatctactccagagcgcagaagaacccgatcgacaccatgagggtgtggctcgttgccctcgctctcctggctctcgctgcgagcgccacctccacgcatacaagcggcggctgcggctgccagccaccgccgccggttcatctaccgccgccggtgcatctgccaccttcggttcacctgccacctccggtgcatctcccaccgccggtccacctgtcggcgccggtccacctgccaccgccggtccatgtgccgccgccggttcatctgtcgtcgtcaccatgccactaccctactcaaaccgcccggccttaagcttattcccagccacaccca

SEQ ID NO: 341498 - DNA, 454 bp, Zea mays
gagcattcagaaacacaccaagcgaagcgcactatcatcaacctaacaacaatggctaccaagatattatccctccttgcgcttcttgcgctttttgcgagcgcaacaaatgcgtccattattccacaatgctcacttgctcctagttccattattccacagttcctaccaccagttacttcaatggccttcgaacacccagctgtgcaagcctataggctacaacaagcgattgcggcgagcgtcttacaacaaccaattgcccaattgcaacaacaatcctgggcacatctaacaatacaaaccatcgcaacgcaacagcgacaacagttcctaccagcactgagccacctagccatgatgaaccctgtcgcctacttgcaacagcagctgcttgcatccaacccacttgctctagcgaacgtagttgcaaaccagcagcaacaacaactgg

SEQ ID NO: 341499 - DNA, 413 bp, Zea mays
aatagtgtccaacaatggcagccaaaatattttgcctccttatgctccttggtctttctgcaagtgctgctaccgcgaccattttcccgaaatgctcgcaagctcctatagcttcccttcttcccccgtacctctcaccagcggtgtcttcggtatgtgaaaacccaattcttcaaccctacaggatccaacaggcaatcacagctggcatcttacctttatcacccttgttcctccaacaatcatcagccctattacatcagttacctttggtgcatttattggcacaaaacatcagggcacaacaactacaacaacttgtgctagcaaaccttgctgcctactctcagcaacagcagtttcttccattcaaccaactagctgcattgaactctgcttcttatttgcaacaa

SEQ ID NO: 341500 - DNA, 448 bp, Zea mays
ctagcaacatagaaagcacaatagtgtaccaacaatggcagctaaaatattttgcctccttatgctccttggtctttctgcaagtgctgctacggcgaccattttcccacaatgctcacaagctcctatagcttcccttcttcccccgtacctctcaccaacggtgtcttcggtatgtgaaaacccaattcttcaaccctacaggatccaacaggcaatcgcagctggcatcttacctttatcacccttgttcctccaacaatcatcagccctattacagcagttacctttggtgcatttattggcacaaaacatcagggcacaacaactacaacaacttgtgctagcaaaccttgctgcctactctcagcaacagcagtttcttccattcaaccaactagctgcattgaactctgcttcttatttgcaacaacaacaactaccattc

SEQ ID NO: 341501 - DNA, 404 bp, Zea mays
attttcagcattcagaaacacaccaagcgaagctcactagcaacaacctaacaacaatggctacgaagatattagccctccttgcgcttcttgcccttttagtgagcgcaacaaatgcgttcattattccacagtgctcacttgctcctagtgccattattccacagttcctcccaccagttacttcaatgggcttcgaacatccagccgtgcaagcctacaggctacaactagcgcttgcggcgagcgtcttacaacaaccaattgcccaattgcaacaacaatccttggcacatctaaacctacaaaccatcgcaacgcaacagcaacaacagtttctgccatcactgagccacctagccgtggtgaaccctgtcgcctacttgcaacagcagctacttgca

SEQ ID NO: 341502 - DNA, 156 bp, Zea mays
ccatggattggtttttctgattctactttctatattttctatcgccacatacacacatactatcactacctgcatatggcaaccaccaacacagttaatgtaccacatcctgtacatgtggcacttatctataacctcccacctaacttttatctc

SEQ ID NO: 341503 - DNA, 422 bp, Zea mays
ggcaatcgcagcaggcatcttacctttatcacccttgttcctccaacaaccgtcagccctattacagcagttacctttggtgcatttgttggcacaaaacatcaaggcacaacaactacaacaacttgtgctaggaaaccttgctgcctactctcagcaacagcagtttcttccattcaaccaactggctgcattgaactctgctgcttatttgcaacaacaactaccattcagtcagctagctgctgcctacccccagcaatttcttccattcaaccaactggcagcattgaactctgctgcttatttacaacagcaacagctaccaccattcagccagctagctgatgtgagccctgttgccttcttgacacaacaacagttgttgccgttctacctgcacgctgcgcctaacgctggca

SEQ ID NO: 341504 - DNA, 398 bp, Zea mays
  unsure (1)..(398): unsure at all n locations
cgcgtnncgttgagaccaactagcaacatagaaagcacaatagtgtaccaacaatggcagccaaaatattttgcttccttatgctccttggtctttctgcaagtgttgctaccgcaaccattttcccacaatgctcacaagctcctatagcttcccttctttccccatacctctcaccagcggtgtcttcaatgtgtgaaaacccaattgttcaaccctacaagatccaacaggcaatcgcaacaggcatcttaccattatcacccttgttcctacaacaaccgtcagccctattacagcagttacctttggtccatttggtggcacaaaacatcagggcacaacaactacaacaacttgtgctagcaaaccttgctgcatactctcagcaacatcag

SEQ ID NO: 341505 - DNA, 325 bp, Zea mays
cacgcgtccgcgctctcaaagagctcgtctactaccgctccactttcttgaccactcgcaattgcatccgggaggagctgaatgcagagatcgacaccagatcccagccgtctgaagagggaagaatagacggtatgactgctgcgacgccgtcgctctgcaccgccgcgcgcgtgctgtgcccatgcacgtttctcgcgctgctgctctgcttacagctcctgcacacatcgcatgcttacaagctgcgcggcgtcgttggtggctacgacgacaagaaggtcccgctggccgttatcgcgccggctgacccctctcatgagct

SEQ ID NO: 341506 - DNA, 418 bp, Zea mays
  unsure (1)..(418): unsure at all n locations
gggtcttcagaccattagctttatctactccagagcgcacaagaacccgatcgacaccatgagggtgttgctcggtgccctcgctctcctggctctcgctgcgagcgccacctccacgcatacaagcggcggctgcggctgccaaccaccgccgccggttcatataccgccgccggtgcatctgccaccttcggttcacctgccacctccggtgcatcttccaccgccggtccacctggcgacgccggtgcacctgccaccgtcggtccatgtgccagcgccggttcatctgccgncgccaccatgccactaccctacttaaccgacccggtctcagcctcatccccagccacacccatgcccgtgccaacagccgcatacaagcccgtgccagctgcagggaacctgcggcgttggc

SEQ ID NO: 341507 - DNA, 432 bp, Zea mays
  unsure (1)..(432): unsure at all n locations
caacagcaacatagaaagtggaatccagtagcaacaatagagcaacaatggcgaccaagatatgttccctccttatgctccttgctctttctgcatgtgttgctaacgcgacaattttccctcaatgctcacaagctcctatagcttcccttcttcccccataccttccatcaatgatagcttcagtatgtgaaaacccagctcttcaaccctataggctccaacaagcaatcgcagnaagcaacatacctttatcacccttgtttcaacaatcgccagccctatctttggtgcagtcattggtacaaaccatcagggcacagcagctgcagcaactcgtgctacctgtgatcaaccaagtagctctggcaaacctttctacctactctcagcaacaacaatttcttccattcaaccaactgtctacattga

SEQ ID NO: 341508 - DNA, 431 bp, Zea mays
  unsure (1)..(431): unsure at all n locations
acgcgtncgcagaccattaactttatctactccagagcgcagaaaaacccgatcgacaccatgagggggttgctcgttgccctcgctctcctggctctcgctgcgagcgccacctccacgcatacaagcggcggctgcggctgccagccaccgccgccggttcatctaccgccgccggtgcatctgccacctccggttcacctgccacctccggtgcatctcccaccgccggtccacctgccgccgccggtccacctgccaccgccggtccatgtgccgccgccggttcatctgccgccgccaccatgccactaccctactcaaccgccccggcctcagactcattcccagccacacccatgcccgtgccaacagccgcatncaagcccgtgccagctgcagggaacctgcggcgttggcagcaccccgat

SEQ ID NO: 341509 - DNA, 432 bp, Zea mays
cttctaccctacaggatccaacaggcgatcgcagcaggcatcttacctttatcaccctggttcctccaacaatcatcagccctattacagcagttacctttggtgcatttattggcacaaaacatcagggcacaacaactacaacaactcgtgctagcaaaccttgctgcctactctcagcaacagcagttacctttggtgcatttgttggcacaaaacatcagggcacaacaactacaacaactcgtgctagcaaaccttgctgcctactctcagcaacaacagtttctgccattcaaccaactagctgcattgaactctgctgcttatttgcagcaacaacaactactaccattcagccagctagctgctgcctacccgcggcaatttcttccattcaaccaacttgcagcattgaactctcatgcttat

SEQ ID NO: 341510 - DNA, 140 bp, Zea mays
  unsure (1)..(140): unsure at all n locations
aaaaaaacacgccacgacggacgcgttcnatactatactatactttatgattcaaggtctccaccatcatttcaaccaaaaggcgtgggtttatttatatatctatctcttttttcaaactccacttatgcctaaccata

SEQ ID NO: 341511 - DNA, 374 bp, Zea mays
ggtcttcagaccattagctttatctactccagagcgcagaagaacccgatcgacaccatgagggtgttgctcgttgccctcgctctcctggctctcgctgcgagcgccacctccacgcatacaagcggcggctgcggctgccagccaccgccgccggttcatctaccgccgccggtgcatctgccacctccggttcacctgccacctccggtgcatctcccaccgccggtccacctgccgtcgccggtccacctgccaccgacggtccatgtgccgccgccggttcatctgccgccgccaccatgccactaccctactcaaccgccccggcctcagcctcattctcagccacacccatgcccgtgccaacagcc

SEQ ID NO: 341512 - DNA, 435 bp, Zea mays
gagaccaacaagcaacatagaaagtggaatacagtagcaacaatagagcaacaatggcggccaagatattttccatccttatgctccttgctctttctgcatgtgttgctaacgcgaccatttttcctcaatactcacaagctcctatagctgcccttcttcccccataccttccatcaatgaccgcttcagtatgtgaaaacccagcccttcaaccctacaggctccaacaagcaatcgcaacaagcaacttacctttatcacccctgttctttcaacaatcgccagccctatctttggtgcagtcattggtacaaaccatcagggcacaacagctgcagcaactcgtgctaccagtgatcagccaagtagctctggcaaacctttctccctactctcagcaacaacaatttcttccattcaaccaactgtcta

SEQ ID NO: 341513 - DNA, 420 bp, Zea mays
gccaaaatattttgcttccttatgctccttggtctttctgcaagtgttgctaccgcaaccattttcccacaatgctcacaagctcctatagcttcccttcttcccccatacctctcaccagcggtgtcttcaatgtgtgaaaacccaattgttcaaccctacaggatccaacaggcaatcgcaacaggcatcttaccattatcacccttgttcctccaacaaccgtcagccctattacagcagttacctttggtccatttggtggcacaaaacatcagggcacaacaactacaacaacttgtgctagcaaaccttgctgcatactctcagcaacatcagtttcttccattcaaccaactggctgcattgaactctgctgcttatttgcaacaacaattaccattcagccagctagttgct

SEQ ID NO: 341514 - DNA, 406 bp, Zea mays
tattattgagaccaactagcaacatagaaagcacaatagtgtaccaacaatggcagccaaaatattttgcttccttatgctccttggtctttctgcaagtgttgctaccgcaaccattttcccacaatgctcacaagctcctatagcttcccttcttcccccatacctctcaccagcggtgtcttcaatgtgtgaaaacccaattgttcaaccctacaggatccaacaggcaatcgcaacaggcatcttaccattatcacccttgttcctccaacaaccgtcagccctattacagcagttacctttggtccatttggtggcacaaaacatcatggcacaacaactacaacaacttgtgctagcaaaccttgctgcatactctcagcaacatcagtttcttccattc

SEQ ID NO: 341515 - DNA, 429 bp, Zea mays
ctgggtcttcagaccattagctttatctactccagagcgcagaagaacccgagcgacaccatgagggtgttgctcgttgccctcgctctcctggctctcgctgcgagcgccacctccacgcatacaagcggcggctgcggctgccagccaccgccgccggttcatctaccgccgccggtgcatctgccacctccggttcacctgccacctccggtgcatctcccaccgccggtccacctgccgccgccggtccacctgccaccgccggtccatgtgccgccgccggttcatctgccgccgccaccatgccactaccctactcaaccgccccggcctcagcctcatccccagccacacccatgcccgtgccaacagccgcatccaagcccgtgccagctgcaaggaacctgcggcgttggcagcaccccg

SEQ ID NO: 341516 - DNA, 391 bp, Zea mays
attgagaccaacaagcaacatagaaagtggaatccagtagcaacaatagagcaacaatggagaccgagatattttccctccttatgctccttgctctttctacatgtgttgctaacgcgacaattttccctcaatgctcacaagctcctatagcttccctttttcccccataccttccatcaattatagcttcagtatgtgaaaacccagctcttcaaccatataggcttcaacaagcaatcgcagcaagcaacatacctttatcgcccttgttgtgtcaacaatcgccagccctatctttggtgcagtcattggtacaaaccatcagggcacaacagctgcagcaactcgtgctacctgtgatcaaccaaatagctctggcaaacctttc

SEQ ID NO: 341517 - DNA, 409 bp, Zea mays
gcattgcagatgccctgcccctgcgcggggctgcttggcttgtacggcgctggcgccgggctgaggacgatgatgggcgccggcgggctgtacccctacgcggagtacctgaggcagccgcagtgcagcccgctggcggcggcgccctactacgccgggtgtgggcagactagcgccatgtaccagccgctccggcaacagtgctgccagcagcagatgaggatgatggacgtgcagtccgtcgcgcagcagctgcagatgatgatgcagcttgagcgtgccgctgccgtcagcagcagcctgtacgagccagctctgatgcagcagcagcagcatgtgctggcagcccaaggtctcaaccccatggtcatgatgatggcgcataacatgccgggcatgggtggactct

SEQ ID NO: 341518 - DNA, 334 bp, Zea mays
ccgagcggacgcccttttttttttttttttttttactttttttttttttttttttttttgttttttttttttttttttttttttttttttttttttttttttttaaatttttttttttttttttttttttttttttttttttttttttttgggaaaaaaaaattttttttttttatttaaaaggggaaatgagggaaatggtaaaaaaaaaaatggcaacaagggggggggggaaaaaatttttttttaaaattggcgcgaaaaaaaataaaataaatttttgggaggggggttattaaaaaaaaaaaaatttttaaaggggggaaaacccccc

SEQ ID NO: 341519 - DNA, 187 bp, Zea mays
ctcttacaactgcaacaattgctgccattcaaccaacttgctttgacaaacctagcagggttctaccaacaacccatcattggtggtgccctcttttagatttcttatgagttatagttcaataataaagttttttgtctgatgtttgtggcttcccagaaataagaaagtacatttctagattctt

SEQ ID NO: 341520 - DNA, 425 bp, Zea mays
gcaacatagaaagcacaatagtgtaccaacaatggcagccaaaatattttgcctccttatgctccttggtctttctgcaagtgctgctacggcgaccattttcccgaaatgctcgcaagctcctatagcttcccttcttcccccgtacctctcaccagcggtgtcttcggtatgtgaaaacccaattcttcaaccctacaggatccaacaggcaatcacagctggcatcttacctttatcacccttgttcctccaacaatcatcagccctattacatcagttacctttggtgcatttattggcacaaaacatcagggcacaacaactacaacaacttgtgctagcaaaccttgctgcctactcttaacaacagcagtttcttacattcaaccaactaactgcattgaactctgcttcttatttgc

SEQ ID NO: 341521 - DNA, 410 bp, Zea mays
atcagcaaagcggcagtgcgtagagaggatcgtcgaacagaacagcatgaagatggtcatcgttctcgtcgtgtgcctggctctgtcagctgccagcgcctctgcaatgcagatgccctgcccctgcgcggggctgcagggcttgtacggcgctggcgccggcctgacgacgatgatgggcgccggcgggctgtacccctacgcggagtacctgaggcagccgcagtgcagcccgctggcggcggcgccctactacgccgggtgtgggcagacgagcgccatgtaccagccgctccggcaacagtgctgccagcagcagatgaggatgatggacgtgcagtccgtcgcgcagcagctgcagatgatgatgcagcttgagcgtgccgctgccgccagcagcagcctgtacg

SEQ ID NO: 341522 - DNA, 312 bp, Zea mays
ggcacggcaaaccatgacctctacctactacagatcgcacagcaaccatatcgacaccatgatgggggcgatggacgtacttactttcctgaatatttgtgggagcacacagctcaagcattcaatcagctagtggtggtgacacccaccgcctacttgtaatatacggtcgcattgaaatatgtgactttgggttaatctgccacctacctagcatatccaacagacggaccaaatgcattcgtcggggcaaatgcaatcgtcggtgcatgtgctacacgacggataatctggtggcatacaacaagccac

SEQ ID NO: 341523 - DNA, 399 bp, Zea mays
attttgagcattcagaaacacaccaagcgaagctacctagcaacgacttaacaacaatggctaccaagatattagccctccttgcgcttcttgccctttttgtgagcgcaacaaatgcgttcattattccacaatgctcacttgctcctagtgccattataccacagttcctccgaccagttacttcaatgggcttcgaacacctagctgtgcaagcctacaggctacaacaagcgcttgcggcgagcgtcttacaacaaccaattaaccaattgcaacaacaatccttggcacatctaaccatacaaaccatcgcaacacaacagcaacaacagttcctaccagcactgagccaactagatgtggtgaaccctgtcgcctacttgcaacagcaggtgc

SEQ ID NO: 341524 - DNA, 369 bp, Zea mays
gtgtggtgcgtgctcgcatgtgttgccgatgcgcgtgcaggcggagttcatcgaggcgctggggcccgatttgggcctcggcatgacaccgagcaggctcgacgacggcgggcctggtctaagccgaggaggaagctgagtttgacggcccaccgatggtccacctgtcttcagacatccttcgtacggagcttaatttgctcaaggacgacgcgctccctgccggtggcgactagtctgttggcattatctggcttgaagaccaagacagcgaggatggccgtctcttgggaggaagagataccggtgtttacccagctgacatgaacgcgttgtacgctgactgccttggtggaaacgtgaccgagc

SEQ ID NO: 341525 - DNA, 358 bp, Zea mays
gcattcagaaacacaccaagcgaagcgcactagcaacgacctaacaacaatggctaccaagatattagccctccttgcgcttcttgccctttttgtgagcgcaacaaatgcgttcattattccacaatgctcacttgctcctagtgccattattccacagttcctcccaccagttacttcaatgggcttcgaacacctagctgtgcaagccaacatgcaacaacaagcgcttgcggcgagcgtcttacaacaaccaattgcccaattgcaacaacaatccttgccacatctaacaatacaagccatcacaacgcaacagcaacaacagttcctaccagcactgagccacctagccatg

SEQ ID NO: 341526 - DNA, 199 bp, Zea mays
  unsure (1)..(199): unsure at all n locations
acgggannggaagaccgggccgacgcacgcgttcgagcattattcaaaaacacacgaagcggttcgcactaacagcatcaataacaactgggtagtgaaaatatatgaccgtccttttgctcttttccctttttgagagcgcaccacatacgtgtatattattacacagctctcactgtgcttatagcgccaataccac

SEQ ID NO: 341527 - DNA, 372 bp, Zea mays
  unsure (1)..(372): unsure at all n locations
cggaatcccaagacgacgccacgcgtacgtatcaacatacatagtncaaccacacttacagtatttataccattagtgttaatccactaggtgtggcgtaattaccctcgttactctatcaggaagctcttctatctcctcttttatttgactatggttacaacaatacctttctcccatgacagccgtgggattttattacccacatatacaatgctacatgtaccaacaggccatcataatgaacatcttactcacattacaattaacccgtatacaacaatatccttttatgtaacagtcatgcttaatgtatctgtatctgcaaataatccggggacagtaaatataacaacatttgctttcaactat

SEQ ID NO: 341528 - DNA, 402 bp, Zea mays
attgagaccaactagcaacatagaaagcacaatagtgtaccaacaatggcagccaaaatattttgcttccttatgctccttggtctttctgcaagtgttgctaccgcaaccattttcccacaatgctcacaagctcctatagcttcccttcttcccccatacctctcaccagcggtgtcttcaatgtgtgaaaacccaattgttcaaccctacaggatccaacaggcaatcgcaacaggcatcttaccattatcacccttgttcctccaacaaccgtcagccctattacagcagttacctttggtccatttggtggcacaaaacatcagggcacaacaactacaacaacttgtgctagcaaaccttgctgcatactctcagcaacatcagtttcttccattc

SEQ ID NO: 341529 - DNA, 386 bp, Zea mays
ggaaaccttgctgcctactctcagcaacagcagtttcttccattcaaccaactggctgcattgaactctgctgcttatttgcaacaacaactaccattcagtcagctagctgctgcctacccccagcaatttcttccattcaaccaactggcagcattgaactctgctgcttatttacaacagcaacagctaccaccattcagccagctagctgatgtgagccctgttgccttcttgacacaacaacagttgttgccattctacctgcacgctgcgcctaacactggcaccctcttacaactgcaacaattgctgccattcaaacaacttgctttgacaaacccaacagcgttctaccaacaacccatcattggtggagccctctt

SEQ ID NO: 341530 - DNA, 420 bp, Zea mays
tggacgtcagcctagcaattagctcatcgactccagattggagaactcgacaccatgaaggtgctgatcgttgcccttgctctcctggcgctcgctgcgagcgccgcctccagtacaagcggcggctgtggctgccagacaccaccgtttcatctaccgcctccgttctatatgccgcctccgttctatctgccgccgcagcagcagccgcagccatggcaataccccactcaaccaccgcagctaagcccgtgccagcagttcggatcctgcggcgtcggcagcgtcggcagcccgttcctgggccagtgcgtcgagttcctgaggcaccaatgcagcccggcggcgacgccctacggctcgccacagtgccaggcgctgcagcaacagtgctgccaccaaatcaagcacgtggagccg

SEQ ID NO: 341531 - DNA, 328 bp, Zea mays
acgcgtcgctaaacctgagccaccgcctccggagtcgcgtccggtgggacttagcgtggggagcccctcagggctagcggcgagaagtcggaaaccgataccctcctccttacggggagggagaaactagcggagagcgaatcagtcaaggggccgagaggacatgatcaaggagcgtgtggaagacacgggacaatctaagcggcggagaagtacggaagaaccatggcgcgcattgtgtgtcgccgaagtcgcaagcaggcaggccgtggtacagggtcgaccgtcataagaaaccgatggacaaggagaggatgaaaatacttat

SEQ ID NO: 341532 - DNA, 197 bp, Zea mays
agaccattagctttatctactccagagctcattttatacccgatcgacaccattaagggggggctcgttgccctcgctctcctggctctcgctacaagcgccacctccactcatacaagcggctgctgctgctgccaaccacctccgacggttcatctaccgcctcctgtgcatctgccacctcctgttcaccttcc

SEQ ID NO: 341533 - DNA, 366 bp, Zea mays
cggacgcgtgggtgagcattcagaaacacaccaagcgaagcgcactagcaacgacctaacaacaatggctaccaagatattagccctccttgcgcttcttgccctttttgtgagcgcaacaaatgcgttcattattccacaatgctcacttgctcctagtgccattattccacagttcctcccaccagttacttcaatgggcttcgaacacctagctgtgcaagccaacatgcaacaacaagcgcttgcggcgagcgtcttacaacaaccaattgcccaattgcaacaacaatccttgccacatctaacaatacaagccatcacaacgcaacagcaacaacagttcctaccagcactgagccacct

SEQ ID NO: 341534 - DNA, 404 bp, Zea mays
attttcagcattcagaaacacaccaagcgaagcgcactagcaacaacctaacaacaatggctaccaagatattagccctccttgcgcttcttgcccttttagtgagcgcaacaaatgcgttcattattccacagtgctcacttgctcctagtgccattattccacagttcctcccaccagttacttcaatgggcttcgaacatccagccgtgcaagcctacaggctacaactagcgcttgcggcgagcgtcttacaacaaccaattgcccaattgcaacaacaatccttggcacatctaaacctacaaaccatcgcaacgcaacagcaacaacagtttctgccatcactgagccacctagccgtggtgaaccctgtcgcctacttgcaacagcagctacttgca

SEQ ID NO: 341535 - DNA, 416 bp, Zea mays
caacaacttgtgctagcaaaccttgctgtctactttcagcaacagcagtttcttacattcaaccgactagctgcattgaactctgcttcttatttgcaacaacaacaactaccattcagccagctacctgttgcctacccccagcaatttcttccattcaaccaactggcagcattgaactctcctgcttatttacagcatcaacaactactaccattcatccagctagctggtgtgagccctgctacctttttgacacaaccacagttgttgccgttctaccagcacgctgcgcctaacgctggcaccctcttacaactgcaacaattgctgacattcaaccaacttgctttgacaaacctatcagtgttctaccaacaacccatcattggtggtgccctcttttagatttctta

SEQ ID NO: 341536 - DNA, 425 bp, Zea mays
caacatagaaagtggaatccagtagcaacaatagagcaacaatggcgaccaagatattttccctccttatgctccttgctctttctgcatgtgttgctaacgcgacaattttccctcaatgctcacaagctcctatagcttcccttcttcccccataccttccatcaatgatagcttcagtatgtgaaaacccagctcttcaaccctataggctccaacaagcaatcgcagcaagcaacatacctttatcacccttgtttcaacaatcgccagccctatctttggtgcagtcattggtacaaaccatcagggcacagcagctgcagcaactcgtgctacctgtgatcaaccaagtagctctggcaaacctttctccctactctcagcaacaacaatttcttccattcaaccaactgtctacattg

SEQ ID NO: 341537 - DNA, 408 bp, Zea mays
gtgtcttcggtatgtgaaaacccaattcttcaaccctacaggatccaacaggcgatcacagctggcatcttacctttatcacccttgttcctccaacaatcatcagccctattacatcagttacctttggtgcatttattggcacaaaacatcagggcacaacaactacaacaacttgtgctagcaaaccttgctgcctactctcagcaacagcagtttcttccattcaaccaactagctgcattgaactctgcttcttatttgcaacaacaacaactaccattcagccagctacctgctgcctacccccagcaatttcttccattcaaccaactggcagcattgaactctcctgcttatttacagcggcaacaactactaccattcaaccaactagctggtgtgagc

SEQ ID NO: 341538 - DNA, 429 bp, Zea mays
  unsure (1)..(429): unsure at all n locations
actttatctactccagagcgcagaagaacccgatcgacaccatgagggtgttgctcgttgccctcgctctcctggctctcgctgcgagcgccacctccacgcatacaagcggcggctgcggctgccagccaccgccgccggttcatctaccgccgccggtgcatctgccacctccggttcacctgccacctccggtgcatctcccaccgccggtccacctgccgccgccggtccacctgccaccgccggtccatgtgccgccgccggttcatctgccgccgccaccatgccactaccctactcaaccgccccggcctcagcctcatccccagccacacccatgcccgtgccaacagccgcatccaagcccgtgccagctgcanggaacctgcggcgttggcagcaccccgatcctggccagtgcgtcga

SEQ ID NO: 341539 - DNA, 337 bp, Zea mays
tgatggagcaaacacaaacacggcagggtcaaaatattcccatggagctcccagcggtggggacaaaaatgtgcggcccaaatgccctaaccgtcttacttgtgaacacgtggctggccaaattaaggacaaagcgttgacgatcaccgatgcacgttcacgcatttcaacacatcctggtaacggttaggctatgactgaaccaacatgtgtcagcaaatgtccatcttcggtcattggaaataatggtctcacagaaacaaaccgtcgaaattagtcaaaaggtgctgcaatatgtcatgctgaatgccgccccttcgaatttatggcgaccaac

SEQ ID NO: 341540 - DNA, 269 bp, Zea mays
cagaccattagctttatctactccagagcgcagaagaacccgatcgacaccatgagggtgatgctgggggccctcgctctcctggctctcgctgcgagcgccacctccacgcatacaagcggcggctgcggctgccagccaccgccgccggttcatctaccgccgccggtgcatctgccacctccggttcacctgccacctacggtgcatcttccaccgccggtccacctgccgccgccggtccacctgccaccgacggtccatgtgcc

SEQ ID NO: 341541 - DNA, 190 bp, Zea mays
actcgtacaagatcgcgagcgtgcactctagcagactcaaccttacttccgcgcgcatgggaaatcatagcttatgtacagtgccacctaacatgaatttactgtccggcactttacaaactcctgacttgaaaaaccttgacgatacgaaacttattggccttgcaccaaatctgcgtttcgccaggtt

SEQ ID NO: 341542 - DNA, 319 bp, Zea mays
caactagcaacatagaaagcacaatagtgtaccaacaatggcagccaaaatattttgcgtccttatgctccttggtctttctgcaagtgctgctacggcgaccattttcccgaaatgctcgcaagctcctatagcttcccttcttcccccgtacctctcaccagcggtgtcttcggtatgtgaaaacccaattcttcaaccctacaggatccaacaggcaatcacagctggcatcttacctttatcacccttgttcctccaacaatcatcagccctattacatcagttacctttgggtgcattattggcacaaaacatc

SEQ ID NO: 341543 - DNA, 463 bp, Zea mays
gagaccaacaagcaacatagaaagtggaatccagtagcaacaatagagcaacaatggcgaccaagatattttccctccttatgctccttgctctttctgcatgtgttgctaacgcgacaattttccctcaatgctcacaagctcctatagcttcccttcttcccccataccttccatcaatgatagcttcagtatgtgaaaacccagctcttcaaccctataggctccaacaagcaatcgcagcaagcaacatacctttatcacccttgtttcaacaatcgccagccctatctttggtgcagtcattggtacaaaccatcagggcacagcagctgcagcaactcgtgctacctgtgatcaaccaagtagctctggcaaacctttctccctactctcagcaacaacaatttcttccattcaccaactgtctacattgacccgtgctgcttattgcagcaacact

SEQ ID NO: 341544 - DNA, 478 bp, Zea mays
ggtcttcagaccattagctttatctactccagagcgcagaagaacccgatcgacaccatgagggtgttgctcgttgccctcgctctcctggctctcgctgcgagcgccacctccacgcatacaagcggcggctgcggctgccagccaccgccgccggttcatctaccgccgtcggtgcatctgccaccttcggttcacctgccaccttcggtgcatcttccaccgccggtccagctgccgccgccggtccacctgccaccgccggtccatgtgcccgcgccggttcatctgccgccgccaccatgccactaccctactcaaccgccccggccttagcctcatccccagccacacccatgcccgtgccaacagccgcatccaagcccgtgccagctgcagggaacctgcggcgttggcagcaccccgatcctgggccagtgcgtcgagtttctgaggcatcagtgcatcccgacggcga

SEQ ID NO: 341545 - DNA, 240 bp, Zea mays
atacagggttccacccacgcgtccgcttctatcaataccatcaatcatgattcatcctattactataagcaccaaatcaaatatgcagcgtgaggcctttaacttcatatgccatgaagctagtgcttgtggctatcgctgaaatcgcttccttgtgaagtgtcttttgatcacttacatgtcaatgattcttgtggtcaacaacagagccatgagctttagcttaatacacaacctctt

SEQ ID NO: 341546 - DNA, 310 bp, Zea mays
agaccattagctttatctactccagagcgcagaagaacccgatcgacaccatgagggtgttgctcgttgccctcgctctcctggctctcgctgcgagcgccacctccacgcatacaagcggcggctgcggctgccagccaccgccgccggttcatctaccgccgccggtgcatctgccacctccggttcacctgccacctccggtgcatctcccaccgccggtccacctgccgccgccggtccacctgccaccgccggtccatgtgccgccgccggttcatctgccgccgccaccatgccactaccctac

SEQ ID NO: 341547 - DNA, 438 bp, Zea mays
tgagaccaacaagcaacatagaaagtggaatacagtagcaacaatagagcaacaatggcggccaagatattttccatccttatgctccttgctctttctgcatgtgttgctaacgcgaccatttttcctcaatactcacaagctcctatagctgcccttcttcccccataccttccatcaatgaccgcttcagtatgtgaaaacccagcccttcaaccctacaggctccaacaagcaatcgcaacaagcaacttacctttatcacccctgttctttcaacaatcgccagccctatctttggtgcagtcattggtacaaaccatcagggcacaacagctgcagcaactcgtgctaccagtgatcagccaagtagctctggcaaacctttctccctactctcagcaacaacaatttcttccattcaaccaactgtctaca

SEQ ID NO: 341548 - DNA, 469 bp, Zea mays
  unsure (1)..(469): unsure at all n locations
gacccacgcgtcggagcagtcancaacacaacatacaaagctctttatgtactaacaatcgccaacaaaaacggatactttcgtgtgctcttgggcctctctccatgtgttgctacccaacccatgctttcacaatgctcacaagctcatatagcttctattctcattatatcacagttactaccagcgttttctatgttggaatacccacacgttcatccctacacgatcctacaacaactcgcagcatgcatctataccattatcaccactccatcctccaacaaccgacaaccctattacacaaatttcccaatgcacattatcacagcccaacaataacggcacatcctatacgacatcttgcgcttaaccatcgtgaagcctactgtctacttcctagagcatcttcattcaaccaacccacttgatctaactatcgtagttatttagccacaacattaccatt

SEQ ID NO: 341549 - DNA, 434 bp, Zea mays
cagcattcacaaacacaccaagcgaagctcactagcaacaacctaacagcaatggctgcgaagatattagccctccttgcgcttcttgcccttttagtgagcgcaacaaatgcgttcattattccacagtgctcacttgctcctagtgccattattccacagttcctcccaccagttacttcaatgggcttcgaacatccagccgtgcaagcctacaggctacaactagcgcttgcggcgagcgtcttacaacaaccaattgcccaattgcaacaacaatccttggcacatctaaacctacaaaccatcgcaacgcaacagcaccaacagtttctgccatcactgacccacctagccgtggtgaaccctgtcgcctacttgcaacagcagctacttgcatccaacccacttgctctggcgaacgtagctgcata

SEQ ID NO: 341550 - DNA, 463 bp, Zea mays
atttgcactcatgcatcacaaaacatccttctatcagtaccatcaatcatcattcatcttagtagtggaggcaccaaatcaaatctgcaacatcaattatctaactccaaaaaccatgaagctggtgcttgtggttcttgctttcattgctttagtatcaagtgtttcttgtacacagacaggcggctgcagctgtggtcaacaacaaagccatgagcagcaacatcattcacaacaacatcatccacaaaaacaacaacattaaccaccaccacaacatcaccagcagcagcaacacccacaacaacaagtttacatgccaccacaaaaacatcagcaacaacaaggaagttatggtcaacaaccaccacaaccaccggagcacccacaaccaccaccaccaccggtcccacaacaacattaattgtgaaggccacaacaacattacccacaattacaaggg

SEQ ID NO: 341551 - DNA, 303 bp, Zea mays
cccacacgcgcgatgtccgctcattcatcacataccatccttctatttttaccatcaatcataacacatcttacaactgtagcttttaaatcatatcttctacattaattatctaacttcaaaaaccatcaaccaattactttcatttaactcttccatttcattactataactacatcttccatcaaacacactacttttcacctaccctcaacaacaaattcatttaacccaacttacatctatatactatcctgcttatttacaacaacatcaactactaccatacaaacatctattttt

SEQ ID NO: 341552 - DNA, 441 bp, Zea mays
gccagcagttacctttggtgcatttattggcacaaaacatcagggcacaacaactacaacaacttgtgctagcaaaccttgctgcctactctcagcaacagcagtttcttccattcaaccaactagctgcattgaactctgcttcttatttgcaacaacaacaactaccattcagccagctacctgttgcctacccccagcaatttcttccattcaaccaactggcagcattgaactctcctgcttatttacagcagcaacaactactaccattcagccagctagctggtgtgagccctgctaccttcttgacacaaccacagttgttgccgttctaccagcacgctgcgcctaacgctggcaccctcttacaactgcaacaattgctgccattcaaccaacttgctttgacaaacctagcagtgttctaccaacaaccca

SEQ ID NO: 341553 - DNA, 372 bp, Zea mays
cagcaaagcggcagtgcgtagagaggatcgtcgaacagaacagcatgaagatggtcatcgttctcgtcgtgtgcctggctctgtcagctgccagcgcctctgcaatgcagatgccctgcccctgcgcggggctgcagggcttgtacggcgctggcgccggcctgacgacgatgatgggcgccggcgggctgtacccctacgcggagtacctgaggcagccgcagtgcagcccgctggcggcggcgccctactacgccgggtgtgggcagacgagcgccatgtaccagccgctccggcaacagtgctgccagcagcagatgaggatgatggacgtgcagtccgtcgcgcagcagctgcagatgatgatgcaac

SEQ ID NO: 341554 - DNA, 290 bp, Zea mays
ctgtacggaaaaaccgatttgtcatcctccccaatgacttcgaaaagggcttccgaaccaacgtgggggagcccgtgacagactttgatttctacaaatgagtcatcccaaagtgttgaacttgtttctttctgcaaatgagtcaacccagagtgtcgaactcgactattgtttatcaattcgattatgtcttaccatcaactgagtttatggatagatgccattacaaatattcaagtttctcaacgattatgcgtgttctgtaatgattcttacgccaagtaccaacc

SEQ ID NO: 341555 - DNA, 204 bp, Zea mays
gctcataccggcagtgcctacatagcatcgccattcaaaacagggctcagaccgtcattccactcgggatgagcatccctatagcagccacctactcacattctttgcagatctcataccacagcacctgactgtaatgttcgtactgtactagctaacaacatcaccactatgatgctgtccgggtgctctacacttacgaaa

SEQ ID NO: 341556 - DNA, 445 bp, Zea mays
tagcaacatagaaagcacaatagtgtaccaacattggcagccaaaatattttgcctccttatgctggttggtatttctgcaagtgctgctacggcgaccattttcccgcaatgctcacaagctcctatagcttcccttcttcccccgtacctctcaccagcggtgtcttcggtatgtgaaaacccaattcttcaaccctacaggatccaacaggcaatcgcagctggcatcttacctttatcacccttgttcctccaacaatcatcagccctattacagcagttacctttggtgcatttattggcacaaaacatcaaggcacaacaactacaacaacttgtgctagcaaaccttgctgcctactctcaagcacagcagtttctttcattcaaccaactagctgcattgaactctgcttcttatttgcaacaacaacaactaccat

SEQ ID NO: 341557 - DNA, 132 bp, Zea mays
tcggcgatgattgagtaataatgtgtcacgcatcttcatgggtggcagtgtcagtgtcagcaagagcactgaatgaacaattgaaatgaaaagaaaaaagtattgttccaaattaaaaaaaaaaaaaataaa

SEQ ID NO: 341558 - DNA, 92 bp, Zea mays
gcaaagggtaacatccaaaaggtgtatgcgggaccgtggatcccttgaccgtctgtgaatcatgaaaacaaaataaaggatttcaacttggc

SEQ ID NO: 341559 - DNA, 394 bp, Zea mays
ctgggtcttcagaccattagctttatctactccagagcgcagaagaacccgatcgacaccatgagggggttgctcgttgccctcgctctcctggctctcgctgcgagcgccacctccacgcatacaagcggcggctgcggctgccagccaccgccgccggttcatctaccgccgccggtgcatctgccacctccggttcacctgccacctccggtgcatctcccaccgccggtccacctgccgccgccggtccacctgccaccgccggtccatgtgccgacgccggttcatctgccgccgccaccatgccactaccctactcaaccgccccggcctcagcctcatccgcagccacacccatgcccgtgccaacagccgcatccaagcccgtgcc

SEQ ID NO: 341560 - DNA, 372 bp, Zea mays
cagcaaagcggcagtgcgtagagaggatcgtcgaacagaacagcatgaagatggtcatcgttctcgtggtgtgcctggctctgtcagctgccagcgcctctgcaatgcagatgccctgcccctgcgcggggctgcagggcttgtacggcgctggcgccggcctgacgacgatgatgggcgccggcgggctgtacccctacgcggagtacctgaggcagccgcagtgcaacccgctggcggcggcgccctactacgccgggtgtgggcagacgagcgccatgtaccagccgctccggcaacagtgctgccagcagcagatgaggatgatggacgtgcagtccgtcgcgcagcagctgcagatgatgatgcagc

SEQ ID NO: 341561 - DNA, 383 bp, Zea mays
atagagagcacaatagtgtaccaacaatggcagccacaacatgtagcttgcttatgctccttgggggtgctggaagtgttgataccgcaaccattttcccacaatgctcacaagctcctatagcttgccttattcccccatacctctcaccagcggtgtcttcaatgtgagaaaacccaattgttcaaccctacaggatccaacaggcaatcgcaacaagcatcttaccattatcacccttgttcctccaacaaccgtcagccctattacagcagataccttaggtccatttggtggcacacaacatcagggcacaacaactacaacaacttgtgctagcaaaccttgctgcatactctcagcaacatcagtttcttccattc

SEQ ID NO: 341562 - DNA, 418 bp, Zea mays
gctgctacggcgaccattttcccgaaatgctcgcaagctcctatagcttcccttcttcccccgtgcctctcaccagcggtgtcttcggtatgtgaaaacccaattcttcaaccctacaggatccaacaggcaatcacagctggcatcttacctttatcacccttgttcctccaacaatcatcagccctattacatcagttacctttggtgcatttattggcacaaaacatcagggcacaacaactacaacaacttgtgctagcaaaccttgctgcctactctcagcaacagcagtttcttccattcaaccaactagctgcattgaactctgcttcttatttgcaacaacaacaactaccattcagccagctacctgctgcctacccccagcaatttcttccattcaaccaactggcag

SEQ ID NO: 341563 - DNA, 423 bp, Zea mays
attcagaaacacaccaagcgaagcacattagcaacaacctaacaacaatggctaccaagatattatgcctccttgcgcttcttgcgctttttgcgagcgcaacaaatgcgttcattattccacaatgctcacttgctccaagttccattattacacacctcctcccaccagttactttaatgggcttttaacacacacctgtgcaagcctatatgctacaacaagcaattgcggcgagcgtgttacaacaaccaatttcccagttgcaacaacaatccttggcacatctaacaatacaaaccatcgcaacgcaacagcaacaacaattcctaccagcactgagccacctagccatggtgaaccctgccgcctacttgcaacagcagttgcttgcatcaaacccacttgcttttggcaacgtag

SEQ ID NO: 341564 - DNA, 373 bp, Zea mays
tcagaccattagctatatctactccagagcgcagaagaacccgatcgacaccatgagggtgttgctcgttgccctcgctctcctggctctcgctgcgagcgccacctccacgcatacaagcggcggctgcggctgccagccaccgccgccggttcatctaccgccgccggtgcatctgccacctccggttcacctgccacctccggtgcatctgccaccgccggtccacctgccgccgccggtccacctgccaccgccggtccatgtgccgtcgccggttcatctgccgccgccaccatgccactaccctactcaaccgccccggcctcagccttaatccccagccacacccatgcccgtgccaacagacgca

SEQ ID NO: 341565 - DNA, 362 bp, Zea mays
tcgccaacaagcaacatagaaagtggtatccagtagcattatatagagcaacaatggagaccaagatattgggggtccttatgctccttgctctttctacatgtgttgctaacgcgacaattttccctcaatgctcacaagctcctatagcttccctttttcccccataccttccatcaattatagcttcagtatgtgaaaacccagctctttaaccatataggcttcaacaagcaatcgcagcaagcaacatacacttatcgcccttgttgagtcaacaatcgccagccctatctttggtgcagtcattggtacaaaccattatggcacaacagctgcagcaacttctgctacctgtgatc

SEQ ID NO: 341566 - DNA, 218 bp, Zea mays
cctctccctttataccacaaatcttattttcaatctacttgtctatccatttccaattctccacttcttaatgcttacatccctcaacctacgctcactgcctcgcagcttaacaccatccaatcacacatcttccattacctacaacatcaccacacacacatttctcctactaccacacctgtaacccttccctacttcaacactcttcatcacca

SEQ ID NO: 341567 - DNA, 395 bp, Zea mays
attttgagcattcagaaacacaccaagcgaagcacattagcaacaacctaacaacaatggctaccaagatattatccctccttgcgcttcttgcgctttttgcgagcgcaacaaatgcgttcattattccacaatgctcacttgctccaagttccattattacacagttcctcccaccagttacttcaatgggcttcgaacacccagctgtgcaagcctataggctacaacaagcaattgcggcgagcgtcttacaacaaccaatttcccagttgcaacaacaatccttggcacatctaacaatacaaaccatcgcaacgcaacagcaacaacaattcctaccagcactgagccacctagccatggtgaaccctgccgcctacttgcaacagcag

SEQ ID NO: 341568 - DNA, 438 bp, Zea mays
gtcagcctagcaattagctcatcgactccagattggagaactcgacaccatgaaggtgctgatcggtgcccttgctctcctggcgctcgctgcgagcgccgcctccagtacaagcggcggctgtggctgccagacaccaccgtttcatctaccgcctccgttctatatgccgcctccgttctatctgccgccgcagcagcagccgcagccatggcaataccccactcaaccaccgcagctaagcccgtgccagcagttcggatcctgcggcgtcggcagcgtcggcagcccgttcctgggccagtgcgtcgagttcctgaggcaccagtgcagcccggcggcgacgccctacggctcgccacagtgccaggcgctgcagcagcagtgctgccaccagatcaggcaggtggagccgctgcaccggtaccaggcgacata

SEQ ID NO: 341569 - DNA, 216 bp, Zea mays
tacctcatcccagttaaatcgaatcaggggtggtcatggaggccgtgagcaccgaccacacattggaattgctaattccgcagcgccgccagatgcaaccgatccatgcagcgaccgtcggcggtaggcaatcgtgtgaaaaacgcgcgtcatacgatgccggagtggtcatgatgtgctaccaatgaggggattatgacctaattcgatccagag

SEQ ID NO: 341570 - DNA, 357 bp, Zea mays
  unsure (1)..(357): unsure at all n locations
gcgatataacacntattttttccacacttcaccacaaacccatcctccgcctccttgggacccacttcacatcctcccaacccactcacgccactcacgccaccatgcactatacatcccatgcctctaagcccaccccaaaggagatcaatgatccacacgctctctttcacctcacacccaactatcacactgcactgttcctcacactacctaaatctaatccattgcacacacctgaatatcagattaaagctatcgcatagccttccaagaataacccgccgttttctcaattcataaaccactctccacctccaaaagctaccactgataatgctatacaccaaatatctt

SEQ ID NO: 341571 - DNA, 420 bp, Zea mays
gctgctattgaactctgtttcttatttgttacaacaacaactaccattcagccagctgtgtgctgtctacccccagcaatttcttccattcaaccaactgacagctttgaactctcctgcttatttacagcagcaacaactactaccattcagccagctagctggtgtgagccctgctaccttcttgacacaaccacaattgttgccgttctaccagcacgctgcgcctaacgctggcaccctcttacaactgcaacaattgctgccattcaaccaacttgctttgacaaacccaacagcattctaccaacaacccatcattggtggtgccctcttttagatttcttatgagttatagttcaataataaagttttttgtctgatgtttgtggcttcccagaaataagaaagtacatttct

SEQ ID NO: 341572 - DNA, 457 bp, Zea mays
gaccattagctttatctactccagagcgcagaagaacccgatcgacaccatgagggtgttgctcggggccctcgctctcctggctctcgctgcgagcgccacctccacgcatacaagcggcggctgcggctgccagccaccgccgccggttcatctaccgccgccggtgcatctgccacctccggttcacctgccacctccggtgcatctcccaccgccggtccacctgccgccgccggtccacctgccaccgccggtccatgtgccgccgccggttcatctgccgccgccaccatgccactaccctactcaaccgccccggcctcagcctcatccccagccacacccatgcccgtgccaacagccgcatccaagcccgtgccagctgcagggaacctgcggcgttggcagcaccccgatcctgggccagtgcgtcgagttcctgaggcatcagtgc

SEQ ID NO: 341573 - DNA, 439 bp, Zea mays
agaccattagctttatctactccagagcgcagaagaacccgatcgacaccatgagggtgttgctcggtgccctcgctctcctggctctcgctgcgagcgccacctccacgcatacaagcggcggctgcggctgccagccaccgccgccggttcatctaccgccgccggtgcatctgccacctccggttcacctgccacctccggtgcatctcccaccgccggtccacctgccgccgccggtccacctgccaccgccggtccatgtgccgccgccggttcatctgccgccgccaccatgccactaccctactcaaccgccccggcctcagcctcatccccagccacacccatgcccgtgccaacagccgcatacaagcccgtgccagctgcagggaacctgcggcgttggcagcaccccgatcctgggccagtgcgtcga

SEQ ID NO: 341574 - DNA, 487 bp, Zea mays
accgtccggcaacatagaaagcacaatagtgtaccaacaatagcagccaaaatattttgcctccttacactccagggaatttctgcaagagctgctacaccaaccaatctcccgcaatgctcacaagctcatatagcttcccttcttcccacgcacctctcaccagcggcgtcttccgtatgtgaaaacccaattcttcaaccctacaggatccaacaggcaatcgcagctggcatcttacctttatcacccttgttcctccaacaatcatcagccctattacagcagttacctttggtgcatttattggcacaaaacatcagggcacaacaactacaacaacttgtgctagcaaaccttgctgcctaacttcaacaacagcagtttcttccattcaaccaactagctgcattgaactctgctttttatttgcaacaacaacaactaccattcagccaactacctgttgcctacccccaacaatttc

SEQ ID NO: 341575 - DNA, 242 bp, Zea mays
gtcaacaccattatctaaatctactccagatcgcagaaaaacgcgatcgacacaataagggtgttgtgggccaccgtgtctagtttgtgtggcattagtagagccagatggacacatactagtggtggcttgagttgcaatccacgggggagcattgatgtaaggacgtcagggcatttgagacctacgattgatatgagacgatctgtgcatttgtcatcgagtgtatacttgacgacgag

SEQ ID NO: 341576 - DNA, 451 bp, Zea mays
caactagcaacatagaaagcacaatagtgtaccaacaatggcagccaaaatattttgcctccttatgctccttggtctttctgcaagtgctgctacggcgaccattttcccacaatgctcacaagctcctatagcttcccttcttcccccgtacctctcaccagcggtgtcttcggtatgtgaaaacccaattcttcaaccctataggatccaacaggcaatcgcagctggcatcttacctttatcacccttgttcctccaacaatcatcagccctattacagcagttacctttggtgcatttattggcacaaaacatcagggcacaacaactacaacaacttgtgctagcaaaccttgctgcctactctcagcaacaacagtttcttccattcaaccaactagctgcattgaactctgcttcttatttgcaacaacaacaactaccattc

SEQ ID NO: 341577 - DNA, 446 bp, Zea mays
cacgctcgagccacgcgtccggcgttcacacacacacctagcgaagcatattagcaacaacctaacaacgatggctaccgagatattatccctccttgcgcttcttgcgctttttgcgagcgcaacaaatgcgttcattattccacaatgctcacttgctccaagttccattattacacagttcctcctaccagttacttcaatgggcttcgaacacccagctgtgcaagcctataggctacaacaagcaattgcggcgagcgtcttacaacaaccaatttcccagttgcaacaacaatccttggcacatctaacaatacaaaccatcgcaacgcaacagcaacaacaattcctaccagcactgagccacctagccatggtgaaccctgccgcctacttgcaacagcagttgcttgcatcaaacccacttgctctggcaaacgtag

SEQ ID NO: 341578 - DNA, 257 bp, Zea mays
  unsure (1)..(257): unsure at all n locations
gcaacagggaaagcacaannttttaccaacatttgncaccaaaaaaaaccgcgccattattcgcgaattaagaccgcgccacggccgcaacaacaaccatctcccccaaaacctcgccggcacccataacacaccgccttccctcgaacctctcaccagcggtgctcctggagcatgaaaacccaacccggcaacccccccaatccaccacccaaccacagccggcagagcacctacaccaccccagctcccccaac

SEQ ID NO: 341579 - DNA, 479 bp, Zea mays
gcaacatagaaagcacaatagtgtaccaacaatggcagccaaaatattttgcctccttatgctccttggtctttctgcaagtgctgctacggcgaccattttcccgcaatgctcgcaagctcctatagcttcccttcttcccccgtacctctcaccagcggtgtcttcggtatgtgaaaacccaattcttcaaccctacaggatccaacaggcaatcgcagctggcatcttacctttatcacccttgttcctccaacaatcatcagccctattacaacagttacctttggtgcatttattggcacaaaacatcagggcacaacaactacaacaacttgtgctagcaaaccttgctgcctactctcagcaacagcagtttcttccattcaaccaactaggttcattgaactctgcttcttatttgcaacaacaacaactaccattcagccagctacctgctgcctacccccagcaatttc

SEQ ID NO: 341580 - DNA, 476 bp, Zea mays
gcaacatagaaagcacaatagtgtaccaacaatggcagccaaaatattttgcctccttatgctcctgggtctttctgcaagtgctgctacggcgaccattttcccacaatgctcacaagctcctatagcttcccttcttcccccgtacctctcaccagcggtgtcttcggtatgtgaaaacccaattcttcaaccctataggatccaacaggcaatcgcagctggcatcttacctttatcacccttgttcctccaacaatcatcagccctattacagcagttacctttggtgcatttattggcacaaaacatcagggcacaacaactacaacaacttgtgctagcaaaccttgctgcctactctcagcaacaacagtttcttccattcaaccaactagctgcattgaactctgcttcttatttgcaacaacaacaactaccattcagccagctatctgctgcctacccccacaatt

SEQ ID NO: 341581 - DNA, 408 bp, Zea mays
ccgggccgcaccacaccgtccggggtcttaagaccattagctttatctactccatatcgcagaagaacccgatcgacaccatgaggggtgtgctcgttgccctcgctctcctggctctcgctgcgagcgccacctccacgcatacaagcggcggctgcggctgccagccaccgccgccggttcatctaccgccgccggtgcatctgccacctccggttcacctgccacctccggtgcatctcccaccgccagtccacctgccgtcgccggtccacctgccaccggcggtccatgtgccgccgccggttcatatgccgtcgccaccatgccactaccctactcaaccgccccggcctcagtctcattactagacacaaccatgcccgtgccaacagcctcatacaagcc

SEQ ID NO: 341582 - DNA, 217 bp, Zea mays
caggaccccataccatttctcaactttccacacccaaaaaacgggaatcgcgcgtgatttatagctccatccctctatctcctgactatcctaacaccaccacatccactcatacgatccgacgctacatgattccatccaccgatgacccatcattcaccaccaaccaagcctctgccacttccggaccatatgccacgtcccatacatataacac

SEQ ID NO: 341583 - DNA, 342 bp, Zea mays
catccttctatcagtaccatcaatcatcattcatcttagtagtataggcaccaaatcaaatctgcggcatcaattatctaactccaaaaaccatgaagctggtgcttgtggttcttgctttcattgctttagtatcaagtgtttcttgtacacagacaggcggctgcagctgtggtcaacaacaaagccatgagcagcaacatcatccacaacaacatcatccacaaaaacaacaacatcaaccaccaccacaacatcaccagcagcagcaacaccaacaacaacaagttcacatgcaaccacataaacatcagctacaacatgaagttcatgttcaacaac

SEQ ID NO: 341584 - DNA, 280 bp, Zea mays
ccgggcttccatttattccccacctactttctcaacctttccagcattactgataccccggctcgcacgtcaagtcgaggcaagctctcgactcacaagcaccaccgctcccctgtccgtctccgcacacctactgtgctcactgcctgcctgcctaccacatcaatcagtgtgaccatccagcacattcccatgacgtgccacgccagcctgatgctgccggcgatcgccgacgttatgctctgctgacccctagcgcaatgcgggcagcagaactaca

SEQ ID NO: 341585 - DNA, 414 bp, Zea mays
gcaacagcctaacaacaatggctaccaagatattatccctccttgcgcttcttgcgctttttgcgagcgcaacaaatgcgtccattattccacaatgctcacttgctcctagttccattattccacagttcctcccaccagttacttcaatggccttcgaacacccagctgtgcaagcctataggctacaacaagcgattgcggcgagcgtcttacaacaaccaattgcccaattgcaacaacaatccttggcacatctaacaatacaaaccatcgcaacgcaacagcaacaacagttcctaccagcactgagccacctagccatggtgaaccctgtcgcctacttgcaacagcagctgcttgcattcaacccacttgctctagcaaacgtagttgcaaaccagcaacaacaac

SEQ ID NO: 341586 - DNA, 258 bp, Zea mays
cgggaccaacaagcaccttaaacagtgttctccagcagcaacaatacaggaacaatttgcgccataatattcctcatcctgcttctcgtcgttctatcgagctcagcagatgcctccaccattccacatcgctaattagatgctactgtcgctgttctacatctcctatacctagcatctatgaccggctcagaacatgcaaacgcgcacgcctacccgttccagctagagcttgcagtctgcgcatgccacctacct

SEQ ID NO: 341587 - DNA, 443 bp, Zea mays
tagcaacatagaaagcacaatagtgtaccaacaatggcagccaaaataggttgcttccggatgctccttggtctttctgcaagtgttgctaccgcaaccattttcccacaatgctcacaagctcctatagcttcccttcttcccccatacctctcaccagcggtgtcttcaatgtgtgaaaacccaattgttcaaccctacaggatccaacaggcaatcgcaacaggcatcttaccattatcacccttgttcctccaacaaccgtcagccctattacagcagttacctttggtccatttggtggcacaaaacatcagggcacaacaactacaacaacttgtgctagcaaaccttgctgcatactctcagcaacatcagtttcttccattcaaccaactggctgcattgaactctgctgcttatttgcaacaacaattaccatt

SEQ ID NO: 341588 - DNA, 442 bp, Zea mays
ccaacaagcaacatagaaagtggaatacagtagcaacaatagagcaacaatggcggccaggatattttgcatccttatgctccttgctctttctgcatgtgttgctaacgcgaccatttttcctcaatactcacaagctcctatagctgcccttcttcccccataccttccatcaatgaccgcttcagtatgtgaaaacccagcccttcaaccctacaggctccaacaagcaatcgcaacaagcaacttacctttatcacccctgttctttcaacaatcgccagccctatctttggtgcagtcattggtacaaaccatcaaggcacaacagctgcagcaactcgtgctaccagtgatcagccaagtagctctggcaaacctttctccctactctcagcaacaacaatttcttccattcaaccaactgtctacactgaaccct

SEQ ID NO: 341589 - DNA, 513 bp, Zea mays
caacaagcaacatagaaagtggaatccagtagcaacaatagagcaacaatggagaccaagatatttgccctccttatgctccttgctctttctacatgtgttgctaacgcgacaattttccctcaatgctcacaagctcctatagcttccctttttcccccataccttccatcaattatagcttcagtatgtgaaaacccagctcttcaaccatataggcttcaacaagcaatcgcagcaagcaacatacctttatcgcccttgttgtgtcaacaatcgccagccctatctttggtgcagtcattggtacaaaccatcagggcacaacagctgcagcaactcgtgctacctgtgatcaaccaagtagctctggcaaacctttctccctactctccgcaacaacaatttcttccattcaaccaactgtctacactgaacccttgtgcttatttgcagcaacaactattaccatttagccagctagctactggctactctcaacaacaacaactt

SEQ ID NO: 341590 - DNA, 336 bp, Zea mays
  unsure (1)..(336): unsure at all n locations
gtacaattactccccactcgaggctcagattcaaactgccttagccgaccaccgccatggaagctacggtgccttctgcggcgaagtctggatgtccttggcaaccttccagaaagagcgaggcggcagatctgaagcagcaatagcagaaggtggcagcgaacgcccctcccgatgcctacaaccagcgccgctatggcttcaacaggacgatctcctgcatgacgagcaccatcaacttgtcgcccgcgttgaggcagacacgtctcttctacagcaccctcgacatgctaaccgagaatattagctangnacaggcacgttcccactcttgga

SEQ ID NO: 341591 - DNA, 506 bp, Zea mays
catcaatcatcattcatcttagtagtataggcaccaaatcaaatctgcaacatcaattatctaactgcaaaaaccatgaagctggtgcttgtggttcttgctttcattgctttagtatcaagtgtttcttgtacacagacaggcggctgcagctgtggtcaacaacaaagccatgagcagcaacatcatccacaacaacatcatccacaaaaacaacaacatcaaccaccaccacaacatcaccagcagcagcaacaccaacaacaacaagttcacatgcaaccacaaaaacatcagcaacaacaagaagttcatgttcaacaacaacaacaacaaccgcagcaccaacaacaacaacaacaacagcaccaacaacaacatcaatgtgaaagccaacaacaacatcaccaacaatcacaaggccatgtgcaacaacacgaacagagccatgagccacaccaaggacagagccatgagcaacaacatcaacaacaatttcagggtca

SEQ ID NO: 341592 - DNA, 330 bp, Zea mays
gcacgctgcgcctaacgctggcaccctcttacaactgcaacaattgctgccattcaaccaacttgctttgacaaacccaacagcaatctaaaagagggcaccaccaatgatgggttgttggtagaacgctgccaacaagcaacatagaaagtggaatacagtagcaacaatagagcaacaatggcggccaagatattttccatccttatgctccttgctctttctgcatgtgttgctaacgcgaccatttttcctcaatactcacaagctcctatagctgcccttcttcccccataccttccatcaatgaccgctttagtatgtgaaaac

SEQ ID NO: 341593 - DNA, 338 bp, Zea mays
gtggaatccagtagcaacaatagagcaacaatggagaccaagatattttccctccttatgctccttgctctttctacatgtgttgctaacgcgacaattttccctcaatgctcacaagctcctatagcttccctttttcccccataccttccatcaattatagcttcagtatgtgaaaacccagctcttcaaccatataggcttcaacaagcaatcgcagcaagcaacatacctttatcgcccttgttgtgtcaacaatcgccagccctatctttggtgcagtcattggtacaaaccatcaaggcacaacagctgcagcaactcgtgctacctgtgat

SEQ ID NO: 341594 - DNA, 452 bp, Zea mays
ctagttctagatcgcgagcggccgcccttttttttttttttttttttttttttttttatttttttggttttttttttatatttttttaaccaaaaaccaaacatctttttttttttttttttttttttttttatttttttttttttttttaacacccttttttaaaaaatcgccaccccttttttttgtacaattttttgttcaaaacattaaggcacaaaagctttaaaaactttttctaccttttaaaaaccaaatattttttgcaaaactttttctctacttttaaaaaaaaaaatttttttcttttaaccaaatttttaaatttaacccgtctttttattttgctctaccactttttccttttaacccggttttcatttcctacttttaaaaaaaacaacttttttcatttaacccaattgccctccttaaccccctttttttttttt

SEQ ID NO: 341595 - DNA, 366 bp, Zea mays
  unsure (1)..(366): unsure at all n locations
gtcttcagaccattagctttatctactccagagcgcagaagaacccgatcgacaccatgagggtgtggctcgttgccctcgctctcctggctctcgctgcgagcgccacctccacgcatacaagcggcggctgcggctgccagccaccgccgccggttcatctaccgccgccggtgcatctgccacctccggttcacctgccacctccggtgcatctcccaccgccggtccacctgccgccgccggtccacctgccaccgncggtccatgtgccgccgccggttcatctgccgccgccaccatgccactaccctactcaaccgccccggcctcagcctcatccccagccacacccatgcccgtgcc

SEQ ID NO: 341596 - DNA, 470 bp, Zea mays
attttcagcattcagaaacacaccaagcgaagcgcactagcaacaacctaacaacaatggctaccaagatattagccctccttgcgcttcttgcccttttagtgagcgcaacaaatgcgttcattattccacagtgctcacttgctcctagtgccattattccacagttcctcccaccagttacttcaatgggcttcgaacatccagccgtgcaagcctacaggctacaactagcgcttgcggcgagcgtcttacaacaaccaattgcccaattgcaacaacaatccttggcacatctaaacctacaaaccatcgcaacgcaacagcaacaacagtttctgccatcactgagccacctagccgtggtgaaccctgtcgcctacttgcaacagcagctacttgcatccaacccacttgctctggcgaacgtagctgcataccagcaacaacaacgtctgcaacagtttatg

SEQ ID NO: 341597 - DNA, 343 bp, Zea mays
gtcggcgctcgcgcggtccttcggcgcgtacttcccgcgctcttcggcgcaggtgcgccccgccggcgcgcgcgccgccgcaggtcgccgagctgctgcgcgccatcgagcagctccaggagcgggagtcgcgcctccgcgtggagctgctggagcagaagatactcaaggagaccgtcgccatcgtcccgttcctggaggccgagctcgcggccaagaaggccgagctccagaggtgcagggacaccgcggagcggctggaggccgagaacgggcggctgtgcgccgagctcgacgccgccgcgctcgaggtcacgagcaggaagcagaggatcgtcgagct

SEQ ID NO: 341598 - DNA, 346 bp, Zea mays
atggttttagcattcataaacacaccattcgaagcacattaccaacaacggtaacaacagtggctatcaagatattatccctccttgcgcttcttgcgctttttgcgagcgcaacaaatgcgttcattattccacaatgctcacttgctccaagttccattattacacagttccttccaccagttacttcaatgggcttcgaacacccaactgtgcaagcctataggctacaacaagcaattgcggcgagcgttttacaacaaccaatttcccagttgcaacaacaattcttggcacatctaacaatacaaaccatcgtaacgcaacagcaacaacaattcctacc

SEQ ID NO: 341599 - DNA, 450 bp, Zea mays
ctcctatagcttcccttcttcccccataccttccatcaatgatagcttcagtatgtgaaaacccaggtcttcaaccctataggctccaacaagcaatcgcagcaagcaacatacctttatcacccttgtttcaacaatcgccagccctatctttggtgcagtcattggtacaaaccatcagggcacagcagctgcagcaactcgtgctacctgtgatcaaccaagtagctctggcaaacctttctccctactctcagcaacaacaatttcttccattcaaccaactgtctacattgaaccgtgctgcttatttgcagcaacaactattaccattcagccagctagctactgcctactctcagcaacaacaacttcttccatttaaccaattggccgcactgaaccccgcttgttatttgcagcagcaaatactactaccatttaaccagc

SEQ ID NO: 341600 - DNA, 250 bp, Zea mays
acacatagctcaccaactcacaacaacattctacctccatcaccccactccatgcctctactctgcttccaacaccctcccccactaaacaaactaccacctctattacatccgcttactacctaacaacaacaaacatttaacaattatcaactaaccataattcatcacacatcaccatacatctcaacaacaaacttaacaaagaccttaactaacaaattaaattaaaataaaaaaacattcttcc

SEQ ID NO: 341601 - DNA, 444 bp, Zea mays
ggggcttcagaccattagctttatctactccagagcgcagaagaacccgatcgacaccgtgagggtggggctcgttgccctcgctctcctggctctcgctgcgagcgccacctccacgcatacaagcggcggctgcggctgccagccaccgccgccggttcatctaccgccgccggtgcatctgccacctccggttcacctgccacctccggtgcatctcccaccgccggtccacctgccgccgccggtccacctgccaccgccggtccatgtgccgccgccggttcatctgccgccgccaccatgccactaccctactcaaccgccccggcctcagcctcatccccagccacacccatgcccgtgccaacagccgcatccaagcccgtgccagctgcagggaacctgcggcgttggcagcaccccgatcctgggccagtgcgt

SEQ ID NO: 341602 - DNA, 447 bp, Zea mays
gcattcagaaacacaccaagcgaagcgcactagcaacaacctaacaacaatggctaccgagatattaggcctccttgcgcttcttgcccttttagtgagcgcaacaaatgcgttcattattccacagtgctcacttgctcctagtgccattattccacagttcctcccaccagttacttcaatgggcttcgaacatccagccgtgcaagcctacaggctacaactagcgcttgcggcgagcgtcttacaacaaccaattgcccaattgcaacaacaatccttggcacatctaaacctacaaaccatcgcaacgcaacagcaacaacagtttctgccatcactgagccacctagccgtggtgaaccctgtcgcctacttgcaacagcagctacttgcatccaacccacttgctctggcgaacgtagctgcataccagcaacaacaacg

SEQ ID NO: 341603 - DNA, 320 bp, Zea mays
  unsure (1)..(320): unsure at all n locations
ctgggtcttcagaccattagctttatctactccagagcgcagaagaacccgatcgacaccatgagggtgttgctcgttgccctcgctctcctggctctcgctgcgagcgccacctccacgcatacaagcggcggctgcggctgccagccaccgccgccggttcatctaccgccgccggtgcatctgccacctccggttcacctgccacctccggtgcatctcccaccgccggtccacctgccgccgccggtccacctgccaccgccggtccatgtgccgccgccggttcatctgccgncgccaccatgccactaccctac

SEQ ID NO: 341604 - DNA, 486 bp, Zea mays
gcaacatagaaagcacaatagtgtaccaacaatggtagccaaaatattttgcttccttatgctccggtggtctttctgcaagtgctgctatcgcaaccattttcccacaatgctcacaagctcctatagctttctttctttccccatacctctcaccagcggtgtcttcagtatgtgaaaacccaattcttcaaccctacaggatccaacaggcaatcgcagcaggcatcttacctttatcacccttgttcctccaacaaccgtcagccctattacagcagttacctttggtgcatttgttggcacaaaacatcaaggcacaacaactacaacaacttgtgctaggaaaccttgctgcctactctcaacaacagcagtttctttcatttaaccaactggctgcattgaactctgctgcttatttgcaacaacaactaccattcagtcagctagctgctggctacccccagcaatttctttcattca

SEQ ID NO: 341605 - DNA, 172 bp, Zea mays
cccccacttaaaaaactatcttctccaatatacccgcttactaactatctacttgaatcatttatccccgatgattgaaaaataatatctcacccatcaccatacctttcaaaaacaaacctagcaaagacctaaatgaacaatttaaattaaaataaaaaagtattgatcc

SEQ ID NO: 341606 - DNA, 486 bp, Zea mays
caacaagcaacatagaaagtggaatccagtagcaacaatagagctcctatagcttcccttcttcccgcataccttccatcaatgatagcttcagtatgtgaaaacccagctcttcaaccctataggctccaacaagcaatcgcagcaagcaacatacctttatcacccttgtttcaacaatcgccagccctatctttggtgcagtcattggtacaaaccatcatggcacagcagctgcagcaactcgtgctacctgtgatcaaccaagtagctctggcaaacctttctccctactctcagcaacaacaatttcttccattcaaccaactgtctacattgaaccgtgctgcttatttgcagcaacaactattaccattcagccagctagctactgcctactctcagcaacaacaacttctttcatttaaccaattggccgcactgaaccccgctgcttatttgcagcagcaaatactactaccattt

SEQ ID NO: 341607 - DNA, 62 bp, Zea mays
attccctttatctactccacagcacagaacaaccttatcgacaccatgacggtgtggctcgg

SEQ ID NO: 341608 - DNA, 429 bp, Zea mays
agcttcccttcttcccccataccttccatcaatgatagcttcagtatgtgaaaacccagctcttcaggcctataggctccaacaagcaatcgcagcaagcaacatacctttatcacccttgtttcaacaatcgccagccctatctttggtgcagtcattggtacaaaccatcagggcacagcagctgcagcaactcgtgctacctgtgatcaaccaagtagctctggcaaacctttctccctactctcagcaacaacaatttctttcattcaaccaactgtctacattgaaccgtgctgcttatttgcagcaacaactattaccattcagccagctagctactgcctactctcagaacaacaacttctttcatttaaccaattggccgcactgaaccccgctgcttatttgcagcagcaaatactacta

SEQ ID NO: 341609 - DNA, 437 bp, Zea mays
attgagaccaacaagcaacatagaaagtggaatccagtaccaacaatagagcaacagtggcgaccaagatattttccctccttatgctccttgctctttctgcatgtgttgctaacgcgacaattttccctcaatgctcacaagctcctatagcttcccttcttcccccataccttccatcaatgatagcttcagtatgtgaaaacccagctcttcaaccctataggctccaacaagcaatcgcagcaagcaacatacctttatcacccttgtttcaacaatcgccagccctatctttggtgcagtcattggtacaaaccatcagggcacagcagctgcagcaactcgtgctacctgtgatcaaccaagtatctctggcaaacctttctctctactctcagcaacaacaatttcttacattcaaccaactgtctaca

SEQ ID NO: 341610 - DNA, 98 bp, Zea mays
cttttagattacatatgagatgtactcaacaatggtgccctcataccggcatgtgtttcctagagataatcaatatattgattgagatttatcttgat

SEQ ID NO: 341611 - DNA, 444 bp, Zea mays
agaccaactagcaacatagaaagcacaatagtgtaccaacaatggcagctaaaatattgggcctccttatgctccttggtctttctgcaagtgctgctacggcgaccattttcccacaatgctcacaagctcctatagcttcccttcttcccccgtacctctcaccaacggtgtcttcggtatgtgaaaacccaattcttcaaccctacaggatccaacaggcaatcgcagctggcatcttacctttatcacccttgttcctccaacaatcatcagccctattacagcagttacctttggtgcatttattggcacaaaacatcagggcacaacaactacaacaacttgtgctagcaaaccttgctgcctactctcagcaacagcagtttcttccattcaaccaactagctgcattgaactctgcttcttatttgcaacaacaac

SEQ ID NO: 341612 - DNA, 435 bp, Zea mays
  unsure (1)..(435): unsure at all n locations
ccgacccacgcgtgcgccaactagcaacatagaaagcacaatactgtaccaacaatggcagccaaaatattttgcctccttatgcgccttggtctttctgcaagtgctgctacggcgaccattttcccgaaatgctcgcaagctcctatagctttccttcttcccccgtacctctcaccagcggtgtcttcggtatgtgaaaacccaattcttcaaccctacaggatccaacaggcaatcacagctggcatcttacctttatcacccttgttcctccaacaatcatcagccctattacatcagttacctttggtgcatttattggcacanaacatcatggcacaacaactacaacaacttgtgctagcaaaccttgctgcctactctcagcaacagcagtttcttccattcaaccaactagctgcattgaactct

SEQ ID NO: 341613 - DNA, 120 bp, Zea mays
  unsure (1)..(120): unsure at all n locations
agaccattagctttatctactccagagcgcagaagaacccgatcgacaccatgagggtgttgctcgttgccctcgctctcctggctctcgctgcgagcgccacctncacgcatacaagcg

SEQ ID NO: 341614 - DNA, 441 bp, Zea mays
attgagaccaacaagcaacatagaaagtggaatccagtagcaacaatagagcaacaatggagaccaagatattttccctccttatgctccttgctctttctacatgtgttgctaacgcgacaattttccctcaatgctcacaagctcctatagcttccctttttcccccataccttccatcaattatagcttcagtatgtgaaaacccagctcttcaaccatataggcttcaacaagcaatcgcagcaagcaacatacctttatcgcccttgttgtgtcaacaatcgccagccctatctttggtgcagtcattggtacaaaccatcagggcacaacagctgcagcaactcgtgctacctgtgatcaaccaagtagctctggcaaacctttctccctactctccgcaacaacaatttcttccattcaaccaactgtctacac

SEQ ID NO: 341615 - DNA, 455 bp, Zea mays
cgattgagaccaactagcaacatagaaagcactatagtgtaccaacaatggcagccaaaatgttttgcttccttatgctccttggtctttctgcaagtgttgctaccgcaaccattttcccacaatgctcacaagctcctatagcttcccttcttcccccatacctctcaccagcggtgtcttcaatgtgtgaaaacccaattgttcaaccctacaggatccaacaagcaatcgcaacaggcatcttaccattatcacccttgtttctccaacaaccgtcagccctattacagcagttacctttggtccatttggtggcacaaaacatcagggcacaacaactacaacaacttgtgctagcaaaccttgctgcatactctcagcaacatcagtttcttccattcaaccaactggctgcattgaactctgctgcttatttgcaacaacaattacca

SEQ ID NO: 341616 - DNA, 440 bp, Zea mays
attgagaccaacaagcaacatagaaagtgtaatccagtagcaacaatagagcaacaatggggaccaagatattttccctccttatgctccttgctctttctgcatgtgttgctaacgcgacaattttccctcaatgctcacaagctcctatagcttcccttcttcccccataccttccatcaatgatagcttcagtatgtgaaaacccagctcttcaaccctataggctccaacaagcaatcgcagcaagcaacatacctttatcacccttgtttcaacaatcgccagccctatctttggtgcagtcattggtacaaaccatcagggcacagcagctgcagcaactcgtgctacctgtgatcaaccaagtagctctggcaaacctttctccctactctcagcaacaacaatttcttccattcaaccaactgtctacattg

SEQ ID NO: 341617 - DNA, 413 bp, Zea mays
gtatgtgaaaacccagctcttcaaccctataggctccaacaagcaatcgcagcaagcaagatacctttatcacccttgtttcaacaatcgccagccctatctttggtgcagtcattggtacaaaccatcagggcacagcagctgcagcaactcgtgctacctgtgatcaaccaagtagctctggcaaacctttctccctactctcagcaacaacaatttcttccattcaaccaactgtctacattgaaccgtgctgcttatttgcagcaacaactattaccattcagccagctagctactgcctactctcagcaacaacaacttcttccatttaaccaattggccgcactgaaccccgctgcttatttgcagcagcaaatactactaccatttagccagctagctgcagcaag

SEQ ID NO: 341618 - DNA, 425 bp, Zea mays
cagaccattagctttatctactccagagcgcagaagaacccgatcgacaccatgagggagttgctcgttgccctcgctctcctggctctcgctgcgagcgccacctccacgcatacaagcggcggctgcggctgccagccaccgccgccggttcatctaccgccgccggtgcatctgccacctccggttcacctgccacctccggtgcatctcccaccgccggtccacctgccgccgccggtccacctgccaccgccggtccatgtgccgccgccggttcatctgccgccgccaccatgccactaccctactcaaccgccccggcctcagcctcatccccagccacacccatgcccgtgccaacagccgcatccaagcccgtgccagctgcagggaacctgcggcgttggcagcaccccgatcct

SEQ ID NO: 341619 - DNA, 396 bp, Zea mays
  unsure (1)..(396): unsure at all n locations
caaagcggcagtgcgtagagaggatcgtcgaacagaacagcatgaagatggtcatcgttctcggcgtgtgcctggctctgtcagctgccagcgcctctgcaatgcagatgccctgcccctgcgcggggctgcagggcttgtacggcgctggcgccggcctgacgacgatgatgggcgccggcgggctgtacccctacgcggagtacctgaggcagccgcagtgcagcccgctggcggcggcgccctactacgccgggtgtgggcagacgagcgccatgtaccagccgctccggcaacagtgctgccagcagcagatgaggatgatggacgtgcagtccgtcgcgcagcagctgcagatgatgatgcagctngagcgtgccgctgccgccagcagca

SEQ ID NO: 341620 - DNA, 148 bp, Zea mays
  unsure (1)..(148): unsure at all n locations
gcaacgnagaccggggcgcgcaccgcccgcaagggaggaacaacggggagaaaaacagnggacgaaccgaggcggcgggcccggccgggggggagcgcgacgcagcaacgccggcccgggcgacaggacgcgacaggnccgcgggcgc

SEQ ID NO: 341621 - DNA, 403 bp, Zea mays
gtccatttggctaaccgagtcttgatgtaggacgaacaacacaacctccgaactaaggcgttggctattgtgtatgttgacagatcacaggatgctaacaggattggactaacacactgaagatgcaacgacctctaatgaatacataacacgagcttacaagtccaagactccagaccaacagatgccactaatgaaatacataagacctacaagatgggttgtaaagtgggagcaccattgacacacagttggatcaccgacggctcacagatgtcgcaccgctggaacacaggtggctcactgcgggcacacagttggcgcaccggcggcacacagttggctaaccggaggtacacagattgcgcacaggacatccaacacagttttctgacagaatgca

SEQ ID NO: 341622 - DNA, 432 bp, Zea mays
cggacgcgtgggtcagaccattagctttatctactccagagcgcagaagaacccgagcgacacgatgagggtgttgctcgttgccctcgctctcctggctctcgctgcgagcgccacctccacgcatacaagcggcggctgcggctgccagccaccgccgccggttcatctaccgccgccggtgcatctgccacctccggttcacctgccacctccggtgcatctcccaccgccggtccacctgccgccgccggtccacctgccaccgccggtccatgtgccgccgccggttcatctgccgccgtcaccatgccactaccctactcaaccgccccggcctcagcctcatccccagccacacccatgcccgtgccaacagccgcatacaagcccgtgccagctgcagggaacctgccgcgttggcagcacccc

SEQ ID NO: 341623 - DNA, 396 bp, Zea mays
gcctagcaattagctcatcgactccagattggagaactcgacaccatgaaggtgctgagcgttgcccttgctctcctggcgctcgctgcgagcgccgcctccagtacaagcggcggctgtggctgccagacaccaccgtttcatctaccgcctccgttctatatgccgcctccgttctatctgccgccgcagcagcagccgcagccatggcaataccccactcaaccaccgcagctaagcccgtgccagcagttcggatcctgcggcgtcggcagcgtcggcagcccgttcctgggccagtgcgtcgagttcctgaggcaccagtgcagcccggcggcgacgccctacggctcgccacagtgccaggcgctgcagcagcagtgctgccaccagatc

SEQ ID NO: 341624 - DNA, 415 bp, Zea mays
caacaagcaacatagaaagtggaatccagtttcaacaatagagcaacaatggcgaccaaggtattttccctccttatgctccttgctctttctgcatgtgttgctaacgcgacaattttccctcaatgctcacaagctcctatagcttcccttcttcccccataccttccatcaatgatagctttcagtttgtgaaaaccccacctctttaaaccctataagctccaacaagcaatcgcagcaagcaacatacctttatcaaccttgtttcaacaatcgccagccctatcttttgtgcagtcattggtacaaaccatcagggcacagcatctgcagcaactcgtgctacctgtgatcaaccaagtagctctggcaaacctttctccctactctcagcaacaacatatttctttca

SEQ ID NO: 341625 - DNA, 365 bp, Zea mays
gggtcttcagaccattagctttatctactccagagcgcagaagaacccgatcgacaccatgagggtgttgctcgttgccctcgctctcctggctctcgctgcgagcgccacctccacgcatacaagcggcggctgcggctgccagccaccgccgccggttcatctaccgccgccggtgcatctgccacctccggttcacctgccacctccggtgcatctcccaccgccggtccacctgccgccgccggtccacctgccaccgccggtccatgtgccgccgccggttcatctgccgccgccaccatgccactaccctactcaaccgccccggcctcagcctcatccccagccacacccatgcccgt

SEQ ID NO: 341626 - DNA, 389 bp, Zea mays
ggtcttcagaccattagctttatctactccagagcgcagaagaacccgatcgacaccatgagggtgttgctcgttgccctcgctctcctggctctcgctgcgagcgccacctccacgcatacaagcggcggctgcggctgccaaccaccgccgccggttcatctaccgccgccggtgcatctgccaccttcggttcacctgccaccttcggtgcatcttccaccgccggtccacctgccgccgccggtccacctgccaccgccggtccatgtgccgccgccggttcatctgccgccgccaccatgccactaccctactcaaccgccccggcctcagcctcattcccagccacacccatgcccgtgccaacagccgcattcaaacccgtg

SEQ ID NO: 341627 - DNA, 430 bp, Zea mays
gcaacatagaaagcacaatagtgtaccaacaatggcagccaaaatattttgcttccttatgctccttgggctttctgcaagtgttgctaccgcaaccattttcccacaatgctcacaagctcctatagcttcccttcttcccccatacctctcaccagcggtgtcttcaatgtgtgaaaacccaattgttcaaccctacaggatccaacaggcaatcgcaacaggcatcttaccattatcacccttgttcctccaacaaccgtcagccctattacagcagttacctttggtccatttggtggcacaaaacatcagggcacaacaactacaacaacttgtgctagcaaaccttgctgcatactctcagcaacatcagtttcttccattcaaccaactggctgcattgaactctgctgcttatttgcaacaa

SEQ ID NO: 341628 - DNA, 385 bp, Zea mays
cagaccattagctttatctactccagagctcagaagaacccgatcgacaccatgagggagttgctcgttgccctcgctctcctggctctcgctgcgagcgccacctccacgcatacaagcggcggctgcggctgccagccaccgccgccggttcatctaccgccgccggtgcatctgccacctccggttcacctgccacctccggtgcatctcccaccgccggtccacctgccgccgccggtccacctgccaccgccggtccatgtgccgccgccggttcatctgccgccgccaccatgccactaccctactcaaccgccccggcctcagcctcatccccagccacacccatgcccgtgccaacagccgtatacaaacccgtgcc

SEQ ID NO: 341629 - DNA, 430 bp, Zea mays
tcgacccacgcgttcggcaacgagcaacatagaatgtggaatccagtttcaacaatagagcaacaatggcgaccaaggtattttccctccttatgctccttgctctttctgcatgtgttgctaacgcgacaattttccctcaatgctcacaagctcctatagcttcccttcttcccccataccttccatcaatgatagcttcagtatgtgaaaacccagctcttcaaccctataggctccaacaagcaatcgcagcaagcaacatacctttatcacccttgtttcaacaatcgccagccctatctttggtgcagtcattggtacaaaccatcatggcacagcagctgcagcaactcgtgctacctgtgatcaaccaagtagctctggcaaacctttctccctactctcagcaacaacaatttctttcatt

SEQ ID NO: 341630 - DNA, 380 bp, Zea mays
gctggcttctcctccccctcttaccaagtcctcttcgggttagggttacttagggttttgtggaggggcgatggcggcggctgatgtggagtaccgatgcttcgtcggcgggcttgcctgggccaccagcaacgagtcgctggagaatgccttcgcctcctacggcgagatcctcgactccaaggtcatcaccgaccgggagacggggaggtctcgcggcttcggcttcgataccttctcctccgagaactccatgctcgacgctatcgagaacatgaacggcaaggagctcgacggccgtaacatcaccgttaaccaggcccagtcccgtggcggtggctgtggcggcggtggctacagcggctgtcgctgcggctgcg

SEQ ID NO: 341631 - DNA, 480 bp, Zea mays
  unsure (1)..(480): unsure at all n locations
ntccgattttgagcatttcagaaacacaccatttcgaagtacattagcaacaancctaacaacaggtggctgcgaagatattatccctccttgcgcttcttgcgctttttgcgagcgcaacaaatgcgttcattattccacaatgctcacttgctccaagttccattattacacagttcctcccaccagttacttcaatgggcttcgaacacccagctgtgcaagcctataggctacaacaagcaattgcggcgagcgtcttacaacaaccaatttcccagttgcaacaacaatccttggcacatctaacaatacaaaccatcgcaacgcaacagcaacaacaatttctaccagcactgagccacctagccatggtgaaccctgccgcctacttgcaacagcagttgcttgcatcaaacccacttgctctggcaaacgtagtttgcaaccagccacaacaacagctgtaacaattttttg

SEQ ID NO: 341632 - DNA, 438 bp, Zea mays
tagcaacatagaaagcacaatagtgtaccaacaatggcagccaaaatattttgcttccttgtgctccttggtctttctgcaagtgttgctaccgcaaccattttcccacaatgctcacaagctcctatagcttcccttcttcccccatacctctcaccagcggtgtcttcaatctgtgaaaacccaattgttcaaccctacaggatccaacaggcaatcgcaacaggcatcttaccattatcacccttgttcctgcaacaaccgtcagccctattacagcagttacctttggtccatttggtggcacaaaacatcatggcacaacaactacaacaacttgtgctagcaaaccttgctgcatactctcagcaacatcattttcttccattcaaccaactggctgcattgaactctgctgcttatttgcaacaacaatta

SEQ ID NO: 341633 - DNA, 373 bp, Zea mays
tgggtcttcagaccattagctttatctactccagagcgcagaagaacccgatcgacaccatgagggtgttgctcgttgccctcgctctcctggctctcgctgcgagcgccacctccacgcatacaagcggcggctgcggctgccagccaccgccgccggttcatctaccgccgccggtgcatctgccacctccggttcacctgccacctccggtgcatctcccaccgccggtccacctgccgccgccggtccacctgccaccgccggtccatgtgccgccgccggttcatctgccgccgccaccatgccactaccctactcaaccgccccggcctcagcctcatccccagccacacccatgcccgtgccaaca

SEQ ID NO: 341634 - DNA, 253 bp, Zea mays
tgagcgttcataccaatagcggaatgtactacagaacacaaagaaaaccgacagacaccatggggggggcgtggctctgccatcttctaccgcctctggaatgcagatccacctcccctgatccaagctgcaggtgttgtacgcaactaccgccggcctgacaactatcatcggcgccgcatgtctgatctcctactcagatgacatgacgcatgcatattgcaccccccttgcagcttgcccctactaccac

SEQ ID NO: 341635 - DNA, 476 bp, Zea mays
gcgcccacgcgtccggcgaagcgcactatcaacattctaacaacaatggctaccaagataggggccctccttgcgcttcttgcccttttagtgagcgcaacaaatgcgttcattattccacagtgctcacttgctcctagtgccattattccacagttcctcccaccagttacttcaatgggcttcgaacatccagccgtgcaagcctacaggctacaactagcgcttgcggcgagcgtcttacaacaaccaattgcccaattgcaacaacaatccttggcacatctaaacctacaaaccatcgcaacgcaacagcaacaacagtttctgccatcactgagccacctagccgtggtgaaccctgtcgcctacttgcaacagcagctacttgcattcaacccacttgctctggcgaacgtaactgcataccagcaacaacaacgtgtgcaacaggttatgccagcgctcaatcaact

SEQ ID NO: 341636 - DNA, 364 bp, Zea mays
gaccattagctttatctactccagagcgcagatgaacccgatcgacaccatgagggtgttgctcgttgccctcgctctcctggctctcgctgcgagcgccacctccacgcatacaagcggcggctgcggctgccagccaccgccgccggttcatctaccgccgccggtgcatctgccacctccggttcacctgccacctccggtgcatctcccaccgccggtccacctgccgccgccggtccacctgccaccgccggtccatgtgccgccgccggttcatctgccgccgccaccatgccactaccctactcaaccgccccggcctcagcctcatccccagccacacccatgcccgtgccaacag

SEQ ID NO: 341637 - DNA, 101 bp, Zea mays
  unsure (1)..(101): unsure at all n locations
cggaannnnccgggtccaccccaacgcgtccggcacgcggtacccaggcgactcttcgtgcatggtctctccagtctcatccctcgcagcagcagcacgca

SEQ ID NO: 341638 - DNA, 334 bp, Zea mays
gtagaatattagggggtacattgcccccttttgcccctccctaaaatctcccctgtgcagttgggtttccggaggactctgagggcggtctattccttcttccccatatctcactttcgccgccctccctccccgcttttgttaccacttcttcttttttcattatttatgtatgatggtatctctgtgctttattttttccctctcattacttctcttatttttttaccctactttctctttactcttactttcatatccctttttcatttttattcttccctttttcttcttcgtccgatttttttcattatatttctttactatgtttttt

SEQ ID NO: 341639 - DNA, 332 bp, Zea mays
  unsure (1)..(332): unsure at all n locations
ctagttctgattccagctgccgccctttttttactttttctttcaatatttttttcttagagattctctttattctttttgcattctttttttcccctccaacagacacacaaatctcaccatctctgttatctaactacaccccccacaccttccaaattttttatccccacaatgacataacccaaatatgcaaccatttcgttcccaaaaacatttttctactcataatccaccactacacccctcattttacccccccccccccctccctttttttattcaaaaaattccccccatcggggaccaaaacaaaangcctcttttcctac

SEQ ID NO: 341640 - DNA, 290 bp, Zea mays
gaccaactagcaacatagaaagcacaattttgtaccaacaatggcagccaaaatattcaggttccttatgctccttggtctttctgcaagtgttgctaccgcaaccattttcccacaatgctcacaagctcctatagcttcccttcttcccccatacctctcaccagcggtgtcttcaatgtgtgaaaacccaattgttcaaccctacaggatccaacaggcaatcgcaacaggcatcttaccattatcacccttgttactccaacaaccgtcagccctattacaacaat

SEQ ID NO: 341641 - DNA, 387 bp, Zea mays
cagcctagcaattagctcatcgactccagattggagaactcgacaccatgaaggtgctgatcggtgcccttgctctcctggcgctcgctgcgagcgccgcctccagtacaagcggcggctgtggctgccagacaccaccgtttcatctaccgcctccgttctatatgccgcctccgttctatctgccgccgcagcagcagccgcagccatggcaataccccactcaaccaccgcagctaagcccgtgccagcagttcggatcctgcggcgtcggcagcgtcggcagcccgttcctgggccagtgcgtcgagttcctgaggcaccagtgcagcccggcggcgacgccctacggctcgccacagtgccaggcgctgcagcagcagtgct

SEQ ID NO: 341642 - DNA, 298 bp, Zea mays
ctagttctagatcgcgagcggccgccctttttttttttttttttttttttttttttggaaactggggctttaaatatagtatagatatgtagacgttgacccaatagagaatgcaagacccgccatgcaagacccgccaacggatcatagcatttcatgcaacctaacggcggatcctatgttattaattttccaaaaccgctgaactacagacagattgtgtagtctactgtgcctattattgagctattacatgcatctatggagtgtgaagtgtctgtctataaagtaagctaaa

SEQ ID NO: 341643 - DNA, 442 bp, Zea mays
agaccattatctttatctactccagagcgcataagaacccgatcgacaccatgagggtggggctcgttgccctcgctctcctggctctcgctgcgagcgccacctccacgcatacaagcggcggctgcggctgccagccaccgtcgccggttcatctaccgccgccggtgcatctgccacctccggttcacctgccacctccggtgcatctcccaccgccggtccacctgccgtcgccggtccacctgccaccgccggtccatgtgccgccgccggttcatctgccgccgccaccatgccactaccctactcaaccgccccggcctcagcctcatccccagccacacccatgcccgtgccaacagccgcatccaagcccgtgccagctgcagggaacctgcggcgttggcagcaccccgatcctgggccagtgcgtcgagtt

SEQ ID NO: 341644 - DNA, 459 bp, Zea mays
tattgagaccaactagcaacatataaagcactatagtgtaccaacaatggcagccaaaatgttttgcctccttatgctccttggtctttctgcaagtgctgctacggcgaccattttcccgaaatgctcgcaagctcctatagcttcccttcttcccccgtacctctcaccagcggtgtcttcggtatgtgaaaacccaattcttcaaccctacaggatccaacaagcaatcacagctggcatcttacctttatcacccttgttcctccaacaatcatcagccctattacatcagttacctttggtgcatttattgtcacaaaacatcatggcacaacaactacaacaacttgtgctagcataccttgctgcctactctcagcaacagcagtttcttacattcaaccaactagctgcattgaactctgctttttatttgcaacaacaacaactaccatt

SEQ ID NO: 341645 - DNA, 360 bp, Zea mays
caacaagcaacatagaaagtggaatccagtagcaacaatagagcaacaatggagaccaagatatttgtccctccttatgctccttgctctttctacatgtgttgctaacgcgacaattttccctcaatgctcacaagctcctatagcttccctttttcccccataccttccatcaattatagcttcagtatgtgaaaacccagctcttcaaccatataggcttcaacaagcaatcgcagcaagcaacatacctttatcgcccttgttgtgtcaacaatcgccagccctatctttggtgcagttcaattggtacaaaccatcagggcacaacagctgcagcaactcgtgctacctgtgatc

SEQ ID NO: 341646 - DNA, 390 bp, Zea mays
gggtcttcagaccattagctttatctactccagagcgcagaagaacccgatcgacgccatgagggtgttgctcgttgccctcgctctcctggctctcgctgcgagcgccacctccacgcatacaagcggcggctgcggctgccagccaccgccgccggttcatctaccgccgccggtgcatctgccacctccggttcacctgccacctccggtgcatctcccaccgccggtccacctgccgccgccggtccacctgccaccgccggtccatgtgccgccgccggttcatcttgccgccgcccaccatgccactaccctactaaccgcccggcccagcctcatcccagccacacccatgcccgtgccaacagccgcatccaagcccgtgcc

SEQ ID NO: 341647 - DNA, 399 bp, Zea mays
ctagcccaccgccgtgctgactcccctagccaggcacgacgtctaagagagcaggggcgggggcggcaacctgatgcccagccccccgtgggggccatggagctcgtcctcgtcaagcccgcggcaggagctctcgtcgaggtgggctccgggtccgttgccggcgcgggctcgatcccggcgatggtggcggcgcatcaggagattttgcacgaacaggtggaccagctccaacgcctcgtcgtcgctcagtgccgcctcaccggcgtcaaccccctcgcccaggagatggctgtcccggtgcattgtttataagatggtaagggccaaggatctgttgatccaaaagcagttaatgcatgcagtcactttttgctttgaagacatttttggcaaaaa

SEQ ID NO: 341648 - DNA, 342 bp, Zea mays
ctacagcttgaccccgcgacgacgcacttttacgccagtcgtcctaccggcatcggacagggtgcgcactcaacaatggtccgatctgccactccgagcccccactgctgatctcactgctgcccatccaggaactagccgcgcgcttcgcgcttgtggaaatactaaataggccgacatgcgctttaaatgcacgcagaacctgtccagctgtccattgtagggggagcatctctaacagaactgatggtttcatatgctccaatacaagaaagtttgattgtgcactactcacaacctatttttgtcccccgttccttcttgctgttaggatgataccgc

SEQ ID NO: 341649 - DNA, 233 bp, Zea mays
gtgtcttaacaccatcagccctatttactttatagcgcataaaaacccgagcgaggccaggagggtgttactaaactccctcactctacatactctacttgcgagctccacctccactcatacaagaaagctctcataggtcagatcatcctctaacacgcatcgaccgccaaaattgcatacttcatctaacgtgtcacctacgacctcccaggcacatgccaacaaccgac

SEQ ID NO: 341650 - DNA, 358 bp, Zea mays
caacaagcaacatagaaagtggaatacagttgcaacaatagagcaacaatggcggccaagagattttccatccttatgctccttgctctttctgcatgtgttgctaacgcgaccatttttcctcaatactcacaagctcctatagctgcccttcttcccccataccttccatcaatgaccgcttcagtatgtgaaaacccagcccttcaaccctacaggctccaacaagcaatcgcaacaagcaacttacctttatcacccctgttctttcaacaatcgccagccctatctttggtgcagtcattggtacaaaccatcagggcacaacagctgcagcaactcgtgctaccagtgatca

SEQ ID NO: 341651 - DNA, 124 bp, Zea mays
  unsure (1)..(124): unsure at all n locations
tccgtccgcatgacgcattatgtctttatctacctccagtagctcatnaagtaaccccgatccgactnaccatgagggtagggtgctctggttgccctcatgctctcgtggcttctcgctgcga

SEQ ID NO: 341652 - DNA, 290 bp, Zea mays
ataccaacaagcaacatagaaagtgtaatacagtagcaacaatatagcaacaatggcgggcgggatattttccatccttatgctccttgctctttctgcatgtgttgctaacgcgaccatttttcctcaatactcacaagctcctatagctgcccttcttcccccataccttccatcaatgaccgcttcagtatgtgaaaacccaacccttttaccctacaagcttcaacaagcaatcgcaacaagcaacttacctttatcacccctgttctttcaacaatcgccagccc

SEQ ID NO: 341653 - DNA, 431 bp, Zea mays
gcgaatattttgagcattcagaaacacaccaagtctaagcgcactatcaacaacctaacggcaatggctaccaagatattatccctccttgcgcttcttgcgctttttgcgagcgcaacaaatgcgtccattattccacaatgctcacttgctcctagttccattattccacagttcctcccaccagttacttcaatggccttcgaacacccagctgtgcaagcctataggctacaacaagcgattgcggcgagcgtcttacaacaaccaattgcccaattgcaacaacaatccttggcacaattcttaacaatacaaaccatcgcaacgcaacagcaacaacagttcctaccagcactgagccacctagccatggtgaaccctgtcgcctacttgcaacatcagctgtttgcattcaacccacttgctct

SEQ ID NO: 341654 - DNA, 185 bp, Zea mays
taacaatttaactttctatatcctttcatttaacaatcacgatctacatcccatgaacaagctgctcttatttcatcttcaccccttttctccataaccctactagagtcctcaaccaactcgccttattattctaaactagtctactttttaaaagtttgatatatccataatccctttattta

SEQ ID NO: 341655 - DNA, 390 bp, Zea mays
attttgagcattcataatcacacctagcgtttctacctagcaacgacttaacaacggtgggtaccaagatattagccctccttgcgcttcttgccctttttgtgagcgcaacaaatgcgttcattattccacaatgctcacttgctcctagtgccattataccacagttcctccgaccagttacttcaatgggcttcgaacacctagctgtgcaagcctacaggctacaacaagcgcttgcggtgagcgtcttacaacaaccaattaaccaattgcaacaacaatccttggcacatctttaaaccatacataccatctcaacacaacagcaacaacagtttctaccagcactgagccaactagatgtggtgaaccctgtcgcctacttgc

SEQ ID NO: 341656 - DNA, 425 bp, Zea mays
cccacgccactctccctactcccttcctctttctctatctccctctctctagctcggcatgcagcagcagccccccctcccttggagctagcgaccgagccctcccatgctcctccctcaccttggcagctcttccatggcgtcaccccctcctctacggtagcaaggtgtaggaccgagagatgctgatcgtgcaagtgatgaggtgccaaccacaagatgcagttggtggatgacctgaagaatggtggaattaaccagtggatgctcgccaagcgagtatcccccagcaaacactaatttctaagtgttaaattaaagatggtcgagagggttactgcttccgcaggagaggaccaagagtagcgtggccaggcttcgccattattactcgccgaagaatcctaaaaaaagaaacaccttca

SEQ ID NO: 341657 - DNA, 349 bp, Zea mays
gaacaatttaaatgaaaagaaaaatgtattgttccaaaaaaaaaaaaaaaaaaaaagaaaagtaaaaataaaaaaaaaaaaaaaaaaaaaaaaaaaaaaataaaaaatttaataaaaaaaaaaaaaaaaaaaaaaaaatggggcggccgttttaaaaattcaaaacttacttccccttgcttccaaagcaataatttttttttatttacccctaaattaaattcactgccctgctttttaaaacttcgatatttgaaaaaccctttttttaccaaatttaattactttgtaaaaaattccctttttttttccattttgcttatataaaaaaaacccccaaccattttcc

SEQ ID NO: 341658 - DNA, 400 bp, Zea mays
tgggtcttcagaccattagctttatctactccagagcgcagaagaacccgatcgacaccatgagggtgttgctcgttgccctcgctctcctggctctcgctgcgagcgccacctccacgcatacaagcggcggctgcggctgccagccaccgccgccggttcatctaccgccgccggtgcatctgccacctccggttcacctgccacctccggtgcatctcccaccgccggtccacctgccgccgccggtccacctgccaccgccggtccatgtgccgccgccggttcatctgccgccgccaccccattgccactaccctactcaaccgccccgggctcagcctgatccccagtcacacccatgcccgtgccaacagccgcattcaagcccgtgccagct

SEQ ID NO: 341659 - DNA, 252 bp, Zea mays
gaccattttcagcatctacccctgatcacttaagaaccctatcgacaacacctgggtgtggggggttgatatgactgtcctgtttttcgatctaaacaccaccttcagccatacaaacctcgagtgtcacttccacccacctacctatgtttatgtacactccattactaatgatgaacttaaggtttacctgccacctccggtgcatcttcgacctgcagtccacattaccgcgccagtacacctgacacc

SEQ ID NO: 341660 - DNA, 306 bp, Zea mays
gtctaagggcacatcttatgaagactccattcgcagcgttcatctgtcgacgtaggtgagaagtgcactcaagttatacatctactaaagagcaagacatttgaaagcttattggccacctgtgttactgttgatgcaagcgaaagtcgtctgctggagcctataaaaacagctctgaggtcactcaccgcactatccgagccaatatgatttcttctgccccatggcatacattttcatctttggcatttaaagaattgaaccatataaaaaataaagacaggagcactttttcagtaatttcaa

SEQ ID NO: 341661 - DNA, 440 bp, Zea mays
caactagcaacatagaaagcacaatagtgtaccaacaatggcagccaaaatattgggcctgcttatgctccttggtctttctgcaagtgctgctacggcgaccattttcccacaatgctcacaagctcctatagcttcccttcttcccccgtacctctcaccagcggtgtcttcggtatgtgaaaacccaattcttcaaccctataggatccaacaggcaatcgcagctggcatcttacctttatcacccttgttcctccaacaatcatcagccctattacagcagttacctttggtgtccaatttattggcacaaaacatcatggcacaacaactacaacaacttgtgctagcaaaccttgctgcctactctcagcaacaacagtttcttccattcaaccaactagctgcattgaactctgcttcttatttgcaacaac

SEQ ID NO: 341662 - DNA, 336 bp, Zea mays
aacaatggcagccaaaatattttgcctccttatgctccttggtctttctgcaagggctgcgtacggctaccattttcccgcaatgctctcaagctcctatagcttcccttcttcccccgtacctctcaccagcagtgtcttcggtatgtgaaaacccaattcttcaaccctacaggatccaacatgcaatcgcagctggcatcttacctttatcacccttgttcctccaacaatcatcagccctattacaacagttacctttggtgcatttattggcacaaaacatcaaggcacaacataactacaacaacttgtgctagcaaccttgctgctact

SEQ ID NO: 341663 - DNA, 408 bp, Zea mays
  unsure (1)..(408): unsure at all n locations
ccaacaagcaacatagaaagtggaatccagtagcaacaatagagcaacaatggcgaccaagatattgtccctccttatgctccttgctctttctgcatgtgttgctaacgcgacaattttccctcaatgctcacaagctcctatagcttcccttcttcccccataccttccatcaatgatagcttcagtatgtgaaaacccagctcttcaaccctataggctccaacaagcaatcgcagcaagcaacatacctttatcacccttgtttcaacaatcgccagccctatctttggtgcagtcatttgggntacaaaccatcagggcacagcagctgcagcaactcgtgctacctgtgatcaaccaagtagctctggcaaacctttctccctactctcagcaacaacaatt

SEQ ID NO: 341664 - DNA, 382 bp, Zea mays
agaccattagctttatctactccagagcgcttaagaacccgatcgacaccatgagggtggggctcgttgccctcgctctcctggctctcgctgcgagcgccacctccacgcatacaagcggcggctgcggctgccagccaccgccgccggttcatctaccgccgccggtgcatctgccacctccggttcacctgccacctccggtgcatctcccaccgccggtccacctgccgccgccggtccacctgccaccgccggtccatgtgccgccgccggttcatctgccgccgccaccatgccactaccctactcaaccgccccggcctcagcctcatccccagccacacccatgcccgtgccaacagccgcatccaaacccgtg

SEQ ID NO: 341665 - DNA, 393 bp, Zea mays
tgcagcaactcgtgctacctgtgatcaaccaagtagctctggcaaacctttctccctactgtccgcaacaacaatttcttccattcaaccaactgtctacactgaaccctgctgcttatttgcagcaacaactattaccatttagccagctagctactgcctactctcaacaacaacaacttcttccatttaaccaattggccgcactgaaccccgctgcttatttgcagcagcaaatactactaccatttagccagctagctacagcaagccgtgcttccttcttgacacaacaacagtttgcttggcgttctaccacatttgggtaaccccaaccttacacacacaatgtgccttgtcaactgttacaaccacagctctacacacacatat

SEQ ID NO: 341666 - DNA, 430 bp, Zea mays
ccaacaagcaacatagaaagtggaatccagtagcaacaatagagcaacaatggcgaccaagatattttccctccttatgctccttgctctttctgcatgtgttgctaacgcgacaattttccctcaatgctcacaagctcctatagcttcccttcttcccccataccttccatcaatgatagcttcagtatgtgaaaacccagctcttcaaccctataggctccaacaagcaatcgcagcaagcaacatacctttatcacccttgtttcaacaatcgccagccctatctttggtgcagtcattggtacaaaccatcagggcacagcagctgcagcaactcgtgctacctgtgatcaaccaagtagctctggcaaacctttctccctactctcagcaacaacaatttcttccattcaaccaactgtctaca

SEQ ID NO: 341667 - DNA, 436 bp, Zea mays
gcaaagcggcagtgcgtagagaggatcgtctaacagaacagcatgaagatggtcatcggtgtcgtcgtgtgcctggctctgtcagctgccagcgcctctgcaatgcagatgccctgcccctgcgcggggctgcagggcttgtacggcgctggcgccggcctgacgacgatgatgggcgccggcgggctgtacccctacgcggagtacctgaggcagccgcagtgcagcccgctggcggcggcgccctactacgccgggtgtgggcagacgagcgccatgtaccagccgctccggcaacagtgctgccagcagcagatgaggatgatggacgtgcagtccgtcgcgcagcagctgcagatgatgatgcagcttgagcgtgccgctgccgccagcagcagcctgtacgagccagctctgatgcagcagcagcagcagc

SEQ ID NO: 341668 - DNA, 372 bp, Zea mays
ccgatcgacaccatgagggtgttgctcgttgccctcgctctcctggctctcgctgcgagcgccacctgcacgcatacaagcggcggctgcggttgccagccaccgccgccggttcatctaccgccgccggtgcatctgccacctccggttcacctgccacctccggtgcatcttccaccgccggtccacctgccgccgccggtccacctgccaccgccggcccatgtgccgccgccggttcatctgtcgccgcccctatgtcactaccctactcaaccgccccggcctcagcctcatttctagccctaacaccatgccgtgccaacagcgatcaacccggccgctgcaggacctgcgcgtggagacccatct

SEQ ID NO: 341669 - DNA, 393 bp, Zea mays
attttcatcattcataaacacaccatgcgtttcgcactatcaacaacctaacaacggtgtgtaccaatatattagccctccttgcgcttcttgcccttttagtgagcgcaacaaatgcgttcattattccacagtgctcacttgctcctagtgccattattccacagttcctcccaccagttacttcaatgggcttcgaacatccagccgtgcaagcctacaggctacaactagcgcttgcggcgagcgtcttacaacaaccaattgcccaattgcaacaacaatccttggcacatcttatatacctacaaaccatcgcaacgcaacagcaacaacagtttctgccatcactgagccacctagccgtggtgaaccctgtcgcctacttgcaac

SEQ ID NO: 341670 - DNA, 238 bp, Zea mays
gcggcctctggcttctcacgtaagtactaatgttttccctccaaccacctccacctagagcctgggtaacaatatctttcgcattcatccggctcattctagctaagctctacccccctttctcctcaaccttttatatcgatctcgcacagacgttcgaccccgtctagacttcatctaactttgccatttacgccatttacccctctgaagccgttcgctcactctcctccccgca

SEQ ID NO: 341671 - DNA, 398 bp, Zea mays
attttgagcattcagaaacacaccaagcgaagcacattatcaacaacctaacaacaatggctaccaagatattatccctccttgcgcttcttgcgctttttgcgagcgcaacaaatgcgttcattattccacaatgctcacttgctccaagttccattattacacagttcctcccaccagttacttcaatgggcttcgaacacccagctgtgcaagcctataggctacaacaagcaattgcggcgagcgtcttacaacaaccaatttcccagttgcaacaacaatccttggcacatctaacaatttaacaaaccatcgcaacgcaacagcaacaacaattcctaccagcactgagccacctagccatggtgaaccctgccgcctacttgcaacagcag

SEQ ID NO: 341672 - DNA, 198 bp, Zea mays
ttcccataaataatcattaatctttttatcttacccaccaacacatatatctaaagacaagtgtctatctacaaaaaccacttatcttgcccttattgatcctcctatcattactttaccctcaagtctactttcaacaccaactacttgcatccaacccaattcactaactcaataccattactcatttaccatcat

SEQ ID NO: 341673 - DNA, 383 bp, Zea mays
agcaaagcggcagtgcgtagagaggatcgtcgaacagaacagcatgaagatggtcatcgggctcgtcgtgtgcctggctctgtcagctgccagcgcctctgcaatgcagatgccctgcccctgcgcggggctgcagggcttgtacggcgctggcgccggcctgacgacgatgatgggcgccggcgggctgtacccctacgcggagtacctgaggcagccgcagtgcagcccgctggcggcggcgccctactacgccgggtgtgggcagacgagcgccatgtaccagccgctccggcataccaagtgctgccagcagcagatgaggatgatggacgtgcagtccgtcgcgcagcagctgcagatgatgatgcagcttgagcgtg

SEQ ID NO: 341674 - DNA, 407 bp, Zea mays
  unsure (1)..(407): unsure at all n locations
gtaccatcaatcatcattcatcttagtagtataggcaccaaatcaaatctgcaacatcaattatctaactccaaaaaccatgaagctggtgcttgtggttcttgctttcattgctttagtatcaagtgtttcttgtacacagacaggcggctgcagctgtggtcaacaacaaagccatgagcagcaacatcatccacaacaacatcatccacaaaaacaacaacatcaaccaccaccacaacatcaccagcagcagcaacaccaacaacaacaagttcacatgcaaccacaaaaacatcagtcnaaacaacaagaagttcatgttcaacaacaacaacaacaaccgcagcaccaacaacaacaacaacaacagtcccaacaacaacatcaatgtgaaggccaacaac

SEQ ID NO: 341675 - DNA, 435 bp, Zea mays
  unsure (1)..(435): unsure at all n locations
gagaccaactagcaacatagaaagcacaatagtgtaccaacaatggcagccaagagatttggcctccttatgctccttggtctttctgcaagtgctgctacagcgaccattttcccgcaatgctcgcaagctcctatagcttcccttcttcccccgtacctctcaccagcggtgtcttcggtatgtgaaaacccaattcttcaaccctacaggatccaacaggcaatcgcagctggcatcttacctttatcacccttgttcctctaacaatcatcatccctattacaacagttacgcnttttggtgcatttattgcacaaaacatcagggcacaacaactacaacaacttgtgcttgcaaaccttgctgcctactctcagcaacagcagtttcttccattcaaccaactaggttcattgaactctgcttcttatt

SEQ ID NO: 341676 - DNA, 412 bp, Zea mays
cgcttcttgcccttttagtgagcgcaacatatgcgttcattattccacagtgctgacttgctcctagtgccattattccacagttcctcccaccagttacttcaatgggcttcgaacatccagccgtgcaagcctacaggctacaactagcgcttgcggcgagcgtcttacaacaaccaattgcccaattgcaacaaccaatccttggcacatctaaacctacaaaccatcgcaacgcaacagcaacaacagtttctgccatcactgagccacctatccgtggtgaaccctgtcgcccttacttgcaacagcagctacttgcatcacccacttgcttgcgaacgtagctgcataccagcaacaacaacgtctgcaacagtttatgccagcgctcagtcaactagccatggtg

SEQ ID NO: 341677 - DNA, 371 bp, Zea mays
attttcagcattcataaacacaccaagcgaatcgcactagcaacaacctaacaacaatggggaccaagatattagccctccttgcgcttcttgcccttttagtgagcgcaacaaatgcgttcattattccacagtgctcacttgctcctagtgccattattccacagttcctcccaccagttacttcaatgggcttcgaacatccagccgtgcaagcctacaggctacaactagcgcttgcggcgagcgtcttacaacaaccaattgcccaattgcaacaacaatccttggcacatctatatatcctacaaaccatcgcaacgcaacagcaacaacagtttctgccatcactgagccacctagccgtggtg

SEQ ID NO: 341678 - DNA, 383 bp, Zea mays
gaccaactagcaacatagaaagcacaatagtgtaccaacaatggcagctaaaatattttggctccttatgctccttggtctttctgcaagtgctgctacggcgaccattttcccacaatgctcacaagctcctatagcttcccttcttcccccgtacctctcaccaacggtgtcttcggtatgtgaaaacccaattcttcaaccctacaggatccaacacgcaatcgcagctggcatcttacctttatcacccttgttcctccaacaatcatcagccctattacagcagttacctttggttgcccatttattggccaaaacatcaggccaacaactcaacaacttgtgctagcaaaccttgctgtctactctcagcaacagca

SEQ ID NO: 341679 - DNA, 395 bp, Zea mays
gggtcttcagaccattagctttatctactccagagcgcagaagaacccgatcgacaccaagagggtgttgctcgttgccctcgctctcctggctctcgctgcgagcgccacctccacgcatacaagcggcggctgcggctgccagccaccgccgccggttcatctaccgccgccggtgcatctgccacctccggttcacctgccacctccggtgcatctcccaccgccggtccacctgccgccgccggtccacctgccaccgccggtccatgtgccgccgccggttcatctgccgccgccaccatgccactaccctactcaaccgccccggcctcagcctcatccccagccacacccatgcccgtgccaacagccgcatccaagcccgtgccagc

SEQ ID NO: 341680 - DNA, 404 bp, Zea mays
caactagcaacatagaaagcacaatagtgtaccaacaatggcagccaaaatattttgctggcttatgctccttggtctttctgcaagtgttgctaccgcaaccattttcccacaatgctcacaagctcctatagcttcccttcttcccccatacctctcaccagcggtgtcttcaatgtgtgaaaacccaattgttcaaccctacaggatccaacaggcaatcgcaacaggcatcttaccattatcacccttgttcctccaacaaccgtcagccctattacagcagttacctttggtccatttggtggcacaaaacatcaaggcacaacaactacaacaacttgtgctagcaaaccttgctgcatactctcagcaacatcagtttcttccattcaaccaactgc

SEQ ID NO: 341681 - DNA, 366 bp, Zea mays
gcaacaacaagaagttcatgttcaacaacaacaacaacaaccgcagcaccaacagcaacagcaacaacagcaccaacaacaacatcaatgtgaaggccaacaacaacatcaccaacaatcacaaggccatgtgcaacaacacgaacagagccatgagcaacaccaaggacagagccatgagcaacaacatcaacaacaattccagggtcatgacaagcagcaacaaccacaacagcctcagcaatatcagcagggccaggaaaaatcacaacagcaacaatgtcattgccaggagcaagccaaacagactacaaggtgcagctataactactatagcagtagctcaaatctaaaaaattgtcatga

SEQ ID NO: 341682 - DNA, 386 bp, Zea mays
  unsure (1)..(386): unsure at all n locations
actggatcaatgcataacatgggtgtaccaattcagcctgtgaaccttgctattagggcaggatctcgtcatcatcccactgaggacccagaggttcaagaagtcgacaggagtcaagtctcaaacaacaagggaaagaagaaggttgcccaacgaggaaagtcattcaccaaggaggaagatagagcaatttgctcagcgtttttgcatgttagcacagatcctattgtatgaactaaccaatctgcagctgggtattatacaagaatgcatcgacacttcatggagaacattggagtgtgnggtagtaataggactaaggtttccatagaaaatcggtggaccacaattcagaaggccgtcaataaattttgtggtttctttgc

SEQ ID NO: 341683 - DNA, 356 bp, Zea mays
  unsure (1)..(356): unsure at all n locations
attagctttatctactccagagcgcagaagaacccgatcgacaccatgagggtgttgctcgttgccctcgctctcctggctctcgctgcgagcgccacctccacgcatacaagcggcggctgcggctgccagccaccgccgccggttcatctaccgccgccggtgcatctgccacctccggttcacctgccacctccggtgcatctcccaccgccggtccacctgccgccgccggtccacctgccaccgccggtccatgtgccgccgccggttcatctgccgccgccaccatgccactacnccnctactaaccgcccggctcagctcatccagcacaccatgncgtgcaacagcga

SEQ ID NO: 341684 - DNA, 370 bp, Zea mays
tgagcattcataaacacaccaagcgaagctcattatcaacaacctaacaacaatggctacggagatattatccctccttgcgcttcttgcgctttttgcgagcgcaacaaatgcgttcattattccacaatgctcacttgctccaagttccattattacacagttcctcccaccagttacttcaatgggcttcgaacacccagctgtgcaagcctataggctacaacaagcaattgcggcgagcgtcttacaacaaccaatttcccagttgcaacaacaatccttggcacatctaacaattatccaaaccatcgcaacgcaacgcaacaacaattcctaccagcactgagccacctagccatggtgaacc

SEQ ID NO: 341685 - DNA, 441 bp, Zea mays
gacgtcagcctagcaattagctcatcgactccagattggagaactcgacaccatgaaggtgctgatcgttgcccttgctctcctggcgctcgctgcgagcgccgcctccagtacaagcggcggctgtggctgccagacaccaccgtttcatctaccgcctccgttctatatgccgcctccgttctatctgccgccgcagcagcagccgcagccatggcaataccccactcaaccaccgcagctaagcccgtgccagcagttcggatcctgcggcgtcggcagcgtcggcagcccgttcctgggccagtgcgtcgagttcctgaggcaccagtgcagcccggcggcgacgccctacggctcgccacagtgccaagcgctgcagcagcagtgctgccaccagatcaagcaagtggagccgctgcaccggtaccaggcgacata

SEQ ID NO: 341686 - DNA, 450 bp, Zea mays
cactagcaacatagaaagcacaatagtgtaccaacaatggcagccaaaatattttgcctcctgatgctccttggtctttctgcaagtgctgctacggcgaccattttcccgaaatgctcgcaagctcctatagcttcccttcttcccccgtacctctcaccagcggtgtcttcggtatgtgaaaacccaattcttcaaccctacaggatccaacaggcaatcacagctggcatcttacctttatcacccttgttcctccaacaatcatcagccctattacatcagttacctttggtgcatttattggcacaaaacatcagggcacaacaactacaacaacttgtgctagcaaaccttgctgcctactctcagcaacagcagtttcttccattcaaccaactagctgcattgaactctgcttcttatttgcaacaacaacaactaccattc

SEQ ID NO: 341687 - DNA, 409 bp, Zea mays
gcattcagaaacacaccaagcgaagcgcactatcaacaacctaacaacaatggcgaccaagatgttatccctccttgcgcttcttgcgctttttgcgagcgcaacaaatgcgtccattattccacaatgctcacttgctcctagttccattattccacagttcctcccaccagttacttcaatggccttcgaacacccagctgtgcaagcctataggctacaacaagcgattgcggcgagcgtcttacaacaaccaattgcccaattgcaacaacaatccttggcacatctaacaatacaaaccatcgcaacgcaacagcaacaacagttcctaccagcactgagccacctagccatggtgaaccctgtcgcctacttgcaacagcagctgcttgcatccaacccactt

SEQ ID NO: 341688 - DNA, 122 bp, Zea mays
tcgtgtaaaacgaattgcgtaaattggccaaacgatcagaactccatcacaatagggggccatcggggaacttgcttaaatatagcacccgacatcccctctggcaatcaaacgttttgcct

SEQ ID NO: 341689 - DNA, 422 bp, Zea mays
cattagctttatctactccagagcgcagaagaacccgatcgacaccatgagggtgttgctcgttgccctcgctgtcctggctctcgctgcgagcgccacctccacgcatacaagcggcggctgcggctgccagccaccgccgccggttcatctaccgccgccggtgcatctgccacctccggttcacctgccacctccggtgcatctcccaccgccggtccacctgccgccgccggtccacctgccaccgccggtccatgtgccgccgccggttcatctgccgccgccaccatgccactaccctactcaaccgccccggcctcagcctcatgcccagccacacccatgcccgtgccaacagccgcatccaagcccgtgccagctgcagggaacctgcggcgttggcagcaccccgatcctgg

SEQ ID NO: 341690 - DNA, 463 bp, Zea mays
attgagaccaacaagcaacatagaaagtggaatccagtagcaacaatagagcaacaatggagaccaagatattttccctacttatgctccttgctctttctacatgtgttgctaacgcgacaattttccctcaatgctcacaagctcctatagcttccctttttcccccataccttccatcaattatagcttcagtatgtgaaaacccagctcttcaaccatataggcttcaacaagcaatcgcagcaagcaacatacctttatcgcccttgttgtgtcaacaatcgccagccctatctttggtgcagtcattggtccaaaccatcagggcacaacagctgcagcaactcgtgctacctgtgatcaaccaagtagctctggcaaacctttctccctactcttccgaacaacaatttcttccattcaaccaactgtctacactgaaccctgctgcttatttgca

SEQ ID NO: 341691 - DNA, 361 bp, Zea mays
ccagattggagaactcgacaccatgaaggtgctgatcgttgcccttgctctcctggcgctcgctgcgagcgccgcctccagtacaagcggcggctgtggctgccagacaccaccgtttcatctaccgcctccgttctatatgccgcctccgttctatctgccgccgcagcagcagccgcagccatggcaataccccactcaaccaccgcagctaagcccgtgccagcagttcggatcctgcggcgtcggcagcgtcggcagcccgttcctgggccagtgcgtcgagttcctgaggcaccagtgcagcccggcggcgacgccctacggctcgccacagtgccaggcgctgcagcaacagtgc

SEQ ID NO: 341692 - DNA, 395 bp, Zea mays
caactagcaacatagaaagcacaatagtgtaccaacaatggcagacaaaatatgttgcttccgtatgctccttggtctttctgcaagtgctgctaccgcaaccattttcccacaatgctcacaagctcctatagcttcctttcttcccccatacctctcaccagcggtgtcttcagtatgtgaaaacccaattcttcaaccctacaggatccaacaggcaatcgcagcaggcatcttacctttatcacccttgttcctccaacaaccgtcagccctattacagcagttacctttggtgcatttgttggcacaaaacatcaaggcacaacaactacaacaacttgtgctaggaaaccttgctgcctactctcagcaacagcaatttctttcattca

SEQ ID NO: 341693 - DNA, 351 bp, Zea mays
cagaccattagctttatctactccagagcgcagaagaacccgatcgacaccatgagggtgttgctcgttgccctcgctctcctggctctcgctgcgagcgccacctccacgcatacaagcggcggctgcggctgccagccaccgccgccggttcatctaccgccgccggtgcatctgccacctccggttcacctgccacctccggtgcatctcccaccgccggtccacctgccgccgccggtccacctgccaccgccggtccatgtgccgccgccggttcatctgccgccgccaccatgccactaccctactcaaccgccccggcctcagcctcatccccagccacaccca

SEQ ID NO: 341694 - DNA, 439 bp, Zea mays
  unsure (1)..(439): unsure at all n locations
ggtccagcangcgtgcgctggcgncaacaacaaagccatgagcagcaatttcatccactacaacatcatccacaaaaacaagaacattagccaccatcacatcatcaccatcatcatcaacaccaacaacaacatggttacatgcaaccacaaaaacattagctacaacaagaagttcatgttcaacatcaacaacaacaaccgcagcaccaacaacaacaacaactacaacaccaacaacaacatcaatgtgaatgccaacaacaacatcaccaacaatcacaaggccatgtgcaacaacacgaacagagccattagcaacaccaatgacagagccattagcaacaacatctacaacaataccagggtcatgacaatgcatcatcaaccacaacaaccttagcattattagcaaggtcagtaaaaattacaacaacca

SEQ ID NO: 341695 - DNA, 347 bp, Zea mays
ctacatcgcgagcgaccgccctttattctcattttcttcattcgcaccaccaaaggctcagaagggttatgggaaataggataacactcacattgatccacatttcattctacaaagactgagcacagatgtttagtgcattattgcaacgctttgaggatctgctaacatctgaaccaaaggaggccctctgaacggcagctgtcaccgcttttacacttcatcccccgatccgtcgaaccctttgaggccatccaacaccgcacgtgcacgatcatgagcctgcctatccaccgccacaaactataggctcacagcactgaccacggctcatatccagacgatgc

SEQ ID NO: 341696 - DNA, 188 bp, Zea mays
cgcgggcgcccgatcgacaccatgaggattttgctcatttttctcactttccaggctcaagctgccagcgcgaacttcgcgcatacaaccagcggctacagttgccaaccaccaacttcagttcatctaccgacaccggtgcatttgacaactgcggctcacctgccatctacggagaatctaccaca

SEQ ID NO: 341697 - DNA, 328 bp, Zea mays
acgcgtccgcaccactgggtcttcagaccattagctttatctactccagagcgcagaagaacccgatcgacggcatgagggggttgctcgttgccctcgctctcctggctctcgctgcgagcgccacctccacgcatacaagcggcggctgcggctgccagccaccgccgccggttcatctaccgccgccggtgcatctgccacctccggttcacctgccacctccggtgcatctcccaccgccggtccacctgccgccgccggtccacctgccaccgccggtccatgtgccgccgccggttcatatgccgtcgccaccatgccacta

SEQ ID NO: 341698 - DNA, 409 bp, Zea mays
ccaatccagatcagcaaagcggcagtgcgtatagaggatcgtcgaacagaacagcatgaagatggtcatcgttctcgtcgtgtgcctggctctgtcagctgccagcgcctctgcaatgcagatgccctgcccctgcgcggggctgcagggcttgtacggcgctggcgccggcctgacgacgatgatgggcgccggcgggctgtacccctacgcggagtacctgaggcagccgcagtgcagcccgctggcggcggcgccctactacgccgggtgtgggcagacgagcgccatgtaccagccgctccggcaacagtgctgccagcagcagatgaggatgatggacgtgcagtccgtcgcgcagcagctgcagatgatgatgcagcttgagcgtgccgctgccgtcagcagc

SEQ ID NO: 341699 - DNA, 459 bp, Zea mays
gagcattcagaaacacaccaagcgaagcacattagcaacaacctaacaacaatggctaccaagatattatccctccttgcgcttcttgcgctttttgcgagcgcaacaaatgcgttcattattccacaatgctcacttgctccaagttccattattacacagttcctcccaccagttacttcaatgggcttcgaacacccagctgtgcaagcctataggctacaacaagcaattgcggcgagcgtcttacaacaaccaatttcccagttgcaacaacaatccttggcacatctaacaatacaaaccatcgcaacgcaacagcaacaacaattcctaccagcactgagccacctagccatggtgaaccctgccgcctacttgcaacagcagttgcttgcatcaaacccacttgctctggcaaacgtagttgcaaaccagccacaacaacagctgcaacag

SEQ ID NO: 341700 - DNA, 404 bp, Zea mays
caacaagcaacatagaaagtggaatccagtagcaacaatagagcaacaatggcgaccaagatattttccctccttatgctccttgctctttctgcatgtgttgctaacgcgacaattttccctcaatgctcacaagctcctatagcttcccttcttcccccataccttccatcaatgatagcttcagtatgtgaaaacccagctcttcaaccctataggctccaacaagcaatcgcagcaagcaacatacctttatcacccttgtttcaacaatcgccagccctatctttggtgcagtcattggtacaaaccatcagggcacagcagctgcagcaactcgtgctacctgtgatcaaccaagtagctctggcaaacctttctccctactctcagcaacaacaatt

SEQ ID NO: 341701 - DNA, 353 bp, Zea mays
cagaaacacaccaagcgaggcgcactaacaacaacctaacaacaatggctaccaagatattatgcctccttgcgcgttgttgcgctttttgcgagcgcaacaaatgcgtgcattattccacaatgctcacttgctcctagttacattattccacagttcctcccaccagttacttcaatggccttcgaacacccagctgtgcaagcctataggctacaacaagcgattgccgcgagcgtcttacaacaaccaattgtccaattgcaacaacaatccttggcacatctaacaatacaaaccatcgcaacgcaacagcaacaacagttcctaccagcactgagccacctaaccat

SEQ ID NO: 341702 - DNA, 454 bp, Zea mays
attttcagcattcagaaacacaccaagcgaagcgcactagcaacaacctaacaacaatggctaccaagatattagccctccttgcgcttcttgcccttttagtgagcgcaacaaatgcgttcattattccacagtgctcacttgctcctagtgccattattccacagttcctcccaccagttacttcaatgggcttcgaacatccagccgtgcaagcctacaggctacaactagcgcttgcggcgagcgtcttacaacaaccaattgcccaattgcaacaacaatccttggcacatctaaacctacaaaccatcgcaacgcaacagcaacaacagtttctgccatcactgagccacctagccgtggtgaaccctgtcgcctacttgcaacagcagctacttgcatccaacccacttgctctggcgaacgtagctgcataccagcaacaacaacg

SEQ ID NO: 341703 - DNA, 299 bp, Zea mays
  unsure (1)..(299): unsure at all n locations
accaagcgaatttacgagcacaaccnaacgcaanggcnagcaagatatagcccnccnagcgccacacgccccnacagagagcgcaacaaangcgnncacnannccacagagcncacncgcncccagngccanaanaccacagaaccncccaccagaaacaacaaggggcgccgaacagccagccgagcaagccgacaggcgacaacaagcgcaagcggcgagcgacaaacaacaaccaanngcccaaaagcaacaacaagccacggcacaacnaaaccaacaaaccaacgcaacgcaac

SEQ ID NO: 341704 - DNA, 358 bp, Zea mays
ggcgtacgagctcctgcctactatcaccaaaaacaactttttgcataggttcactagaagcaaactgcaccggggtgctgaggaagaacagagcatactacgaccgtttatccagatagacctaccaagagtccattggttgttaagacagccacaagcagctgcccacctacgagcagtctgctgctcttctctacaccttttggatactacgatcttttctgtaatgttgccttctgagacgcaccaaccgatgtgctgccgttgaacgccacatggtagttggcgccctctatcagattgctgattaatccccacaagttcatgaccggaaccggatgacttatctagatcccca

SEQ ID NO: 341705 - DNA, 383 bp, Zea mays
aagcaacatagaaagtggaatccagtagcaacaatagagcaacaatggcgaccaagatattttggctccttatgctccttgctctttctgcatgtgttgctaacgcgacaattttccctcaatgctcacaagctcctatagcttcccttcttcccccataccttccatcaatgatagcttcagtatgtgaaaacccagctcttcaaccctataggctccaacaagcaatcgcagcaagcaacatacctttatcacccttgtttcaacaatcgccagccctatctttggtgcagtcattggtacaaaccatcagggcacagcagctgcagcaactcgtgctacctgtgatcaaccaagtagctctggcaaacctttctccctac

SEQ ID NO: 341706 - DNA, 395 bp, Zea mays
attgagaccaactagcaacatataaagcacaatagtgtaccaacaatggcagccaaaatatttggcttccttatgctccttggtctttctgcaagtgctgctaccgcaaccattttcccacaatgctcacaagctcctatagcttcctttcttcccccatacctctcaccagcggtgtcttcagtatgtgaaaacccaattcttcaaccctacaggatccaacaggcaatcgcagcaggcatcttacctttatcacccttgttcctccaacaaccgtcagccctattacagcagttacctttggtgcatttgttggcacaaaacatcaaggcacaacaactacaacaacttgtgctaggaaaccttgctgcctactttcaacaacagcagttttt

SEQ ID NO: 341707 - DNA, 266 bp, Zea mays
cgtccggtgccgtgcccctaactgatactgacacatctggcctacattacacgatcccgcccgctaggggcctttcgggggcattttatatcttgtactctcttcaccagatatgaccattttgcaattagaatttgaagcccttaactcgataatcccgttacaagtgcatctgtattcactgaccatattagctttctttagattgcttctcaactgccaagcttcatacaatccagtccaccgtcttgttgattgattaaaca

SEQ ID NO: 341708 - DNA, 287 bp, Zea mays
gaccaactagcaacatagaaagcacaatagtgtaccaacaatggcagccaaaatattttgcctgcttatgctccttggtctttctgcaagtgctgctacggcgaccattttcccacaatgctcacaagctcctatagcttcccttcttcccccgtacctctcaccagcggtgtcttcggtatgtgaaaacccaattcttaaccctataggatccaacaggcaatcgcagctggcatcttacctttatcacccttgttcctccaacaatcatcagccctattacagca

SEQ ID NO: 341709 - DNA, 460 bp, Zea mays
caacaagcaacatagaaagtggaatccagtagcaacaatagagcaacaatggcgaccaagatgggttccctccttatgctccttgctctttctgcatgtgttgctaacgcgacaattttccctcaatgctcacaagctcctatagcttcccttcttcccccataccttccatcaatgatagcttcagtatgtgaaaacccagctcttcaaccctataggctccaacaagcaatcgcagcaagcaacatacctttatcacccttgtttcaacaatcgccagccctatctttggtgcagtcattggtacaaaccatcagggcacagcagctgcagcaactcgtgctatctgtgatcaaccaagtagctctggcaaacctttctccctactctcaacaacaacaatttcttccattcaaccaactgtctacattgaaccgtgctgcttatttgcagcaacaac

SEQ ID NO: 341710 - DNA, 364 bp, Zea mays
attttgagcattcagaaacacaccaagcgaagcacattagcatcaacctaacaacaatggctaccaagatatggtccctccttgcgcttcttgcgctttttgcgagcgcaacaaatgcgttcattattccacaatgctcacttgctccaagttccattattacacagttcctcccaccagttacttcaatgggcttcgaacacccagctgtgcaagcctataggctacaacaagcaattgctgcgagcgtgttacaacaaccaatttcccagttgcaacaacaatgcttggctcatctaacaatacaaactatcgcaacgcaacagcaacaacaatttctaccagcactgagccacctagccat

SEQ ID NO: 341711 - DNA, 375 bp, Zea mays
  unsure (1)..(375): unsure at all n locations
gcaacatagaaagcacaatagtgtaccaacaatggcagccaaaatattttgcctccttatgctgcttggtattgctgcaagtgctgctacggcgaccattttcccgcaatgctcacaagctcctatagcttcccttcttcccccgtacctctcaccagcggtgtcttcggtatgtgaaaacccaattcttcaaccctacaggatccaacaggcaatcgcagctggcatcttacctttatcacccttgttcctccaacaatcatcagccctattacagcagntacctttggtgcatttattggcacanaacatcagggcacaacaactacaacaaacttgtgctagcaaaccttgctgnctactctcagcaacagc

SEQ ID NO: 341712 - DNA, 351 bp, Zea mays
gaccattagctttatctactccagagcgcagaagaacccgatcgacaccatgagggtgttgcgggttgccctggctctcctggctctcgctgcgagcgccacctccacgcatacaagcggcggttgcggctgccagccaccgccgccggttcatctaccgccgccggtgcatctgccacctccggttcacctgccacctgcggtgcatcttccaccgccggtccacctgtcgccgccggtccacctgccaccgccggtccatgtgccgccgtcggttcatctgccgtcggcaccatgccactaccctactcaaccgccccggcctcaacctcatccccagccacacccatg

SEQ ID NO: 341713 - DNA, 457 bp, Zea mays
attttgagcattcagaaacacaccaagcgaagcgcactagcaacaacctaacaacaatggctagcaagatattatccctccttgcgcttcttgcgctttttgcgagcgcaacaaatgcgtccattattccacaatgctcacttgctcctagttccattattccacagttcctcccaccagttacttcaatggccttcgaacacccagctgtgcaagcctataggctacaacaagcgattgcggcgagcgtcttacaacaaccaattgcccaattgcaacaacaatccttggcacatctaacaatacaaaccatcgcaacgcaacagcaacaacagttcctaccagcactgagccacctagccatggtgaaccctgtcgcctacttgcaacagcagctgcttgcatccaacccacttgctctagcaaacgtagttgcaaaccagcaacaacaacaact

SEQ ID NO: 341714 - DNA, 404 bp, Zea mays
caacaagcaacatagaaagtgtaatccagtatctacaatagagcaacaatggcgaccaagatgggttcccttcttatgctccttgctctttctgcatgtgttgctaacgcgacaattttccctcaatgctcacaagctcctatagcttcccttctttccccataccttccatcaatgatagcttcagtatgtgaaaacccagctcttcaaccctataggctccaacaagcaatcgcagcaagcaacatacctttatcacccttgtttcaacaatcgccagccctatctttggtgcagtcataggtacaaaccatcagggcacagcagctgcagcaactcgtgctacctgtgatcaaccaagtagctttggcaaacctttctccctactcttaacaacaacaatt

SEQ ID NO: 341715 - DNA, 463 bp, Zea mays
caacaagcaacatagaaagtggaatccagtatcaacaatagagcaacaatggcgaccaagatggtttccctccttatgctccttgctctttctgcatgtgtggctaacgcgacaattttccctcaatgctcacaagctcctatagcttcccttcttcccccataccttccatcaatgatagcttcagtatgtgaaaacccagctcttcaaccctataggctccaacaagcaatcgcagcaagcaacatacctttatcacccttgtttcaacaatcgccagccctatctttggtgcagtcattggtacaaaccatcagggcacagcagctgcagcaactcgtgctacctgtgatcaaccaagtagctctggcaaacctttcttcctactctcagcaacaacaatttcttccattcaaccaactgtctacattgaaccgtgcttgttatttgcagcaacaactat

SEQ ID NO: 341716 - DNA, 257 bp, Zea mays
tattcaattcagctgttttacaccgcattacatacccatcattcattaagatccgctcgtaaccatcctcaaattaatataccaccttctctacataaaatacagatgccacttccttctttaccttatctctaacacgaaagagtttgaattacttgctcattctataccatgtcttgcgccagactcttcaacctcaccaccccataaaactctcctcatgttcttgctaaccctttccattccctgccttatcc

SEQ ID NO: 341717 - DNA, 239 bp, Zea mays
ccaaaaccacctatctcacccctcctcctttttttcacgtcccccgcctctatgcgatcgggtgcgggtctatgggcatgggaatgtcctcctccttgcactcatcttcggccacggctcaccaccagcaatattacccgcggcagacaggacggagcagtctcgtgccgctcgccgcgctcatcaaggatgaggcccgcactgagcgccaatccatacactgcggcgaaagcaggatc

SEQ ID NO: 341718 - DNA, 417 bp, Zea mays
cgtccgttagctttatctactccagagcgcagaagaacccgatcgacaccatgagggtgttgctcggggccctcgctggcctggctctcgctgcgagcgccacctccacgcatacaagcggcggctgcggctgccagccaccgccgccggttcatctaccgccgccggtgcatctgccacctccggttcacctgccacctccggtgcatctcccaccgccggtccacctgccgccgccggtccacctgccaccgccggtccatgtgccgccgccggttcatctgccgccgccaccatgccactaccctactcaaccgccccggcctcagcctcatccccagccacacccatgcccgtgccaacagccgcatccaaacccgtgccagctgcagggaacctgccgcgttggcagcaccc

SEQ ID NO: 341719 - DNA, 356 bp, Zea mays
attgagaccaactagcaacatagaaagcacaatagtgtaccaacaatggcagccaaaatatttggcctccttatgctccttggtctttctgcaagtgctgctacggcgaccattttcccgcaatgctcgcaagctcctatagcttcccttcttcccccgtacctctcaccagcggtgtcttcggtatgtgaaaacccaattcttcaaccctacaggatccaacaggcaatcgcagctggcatcttacctttatcacccttgttcctccaacaatcatcagccctattacaacagttaccttttgtgcatttattggcacaaaacatcagggcacaacaactacaacaacttgtgct

SEQ ID NO: 341720 - DNA, 378 bp, Zea mays
gctagctactgcctactctcaacaacaacaacttcttccatttaaccaattggccgcactgaaccccgctgcttatttgcagcagcaaatactactaccatttagccagctagctacagcaagccgtgcttccttcttgacacaacaacagttgctgccgttctaccagcagtttgcggctaaccccgcaaccctcttacaactacaacaattgttgccctttgtccaacttgctttgacaaacccagcagcctcctaccaacaacacatcattggtggtgccctcttttagattgcttattagatgtaattcaataataaagttttttggatgatgtatgtggccaaccagaaataaaaagttacatttccagattc

SEQ ID NO: 341721 - DNA, 372 bp, Zea mays
tgagcattcataaacacaccaagcgaagcgcactatcaacgacctaacaacaatggctaccaagatattagctccttcttgcgcttcttgccctttttgtgagcgcaacaaatgcgttcattattccacaatgctcacttgctcctagtgccattattccacagttcctgccaccagttacttcaatgggcttggaacacctagctgtgcaagccaacatgcaacaacaagcgcttgcggtgagcgttttacaacaaccaattgtccaattgcaacaacaatccttgccacatctaacaatacaagccattacaacgcaacagcaacaacagtttctaccagcactgagccacctagccatggagaaccctg

SEQ ID NO: 341722 - DNA, 426 bp, Zea mays
atcgacaccatgagggtgttgctcgctgccctcgctctcctggctctcgctgggagcgccaccggcacgcatacaagcggcggctgcggctgccagccaccgccgccggttcatctaccgccgccggtgcatctgccaccttcggttcacctgccacctgcggtgcatatcccaccgccggtccacctgccgacgccggtccacctgccaccgccggtccatgtgccgccgtcggtgtcatctgccgacgacaccatgccactaccctactcaaccgtcccgggctcagtctcattctcagacacacccatgcccgtgccaacagacgaatccaagcccgtgccagctgcatggaacctgcggagtttgcagcacccctatcctaggccagtgcgtcgagcttctgaggcattagtgcaaaccgac

SEQ ID NO: 341723 - DNA, 419 bp, Zea mays
accaacaatggcatacaatttattttgcctccttatgctcgttggtatttgtgcaagtgctgctacagctaccatttttccgcaatgctcacaagctcctatagcttaccttcttcccccgtacctctcaccagcggtgtcttctgtatgtgaaaacccaattcttcaaccctacaggatccaacaggcaatcgcagctggcatcttacctttatcacccttgttcctccaacaatcatcagccctattacagcagttacctttggtgcatttattggcacaaaacatcagggcacaacaactacaacaacttgtgctagcaaaccttgctgtctactcttagcaacagcagttttcttcattcaaccaactagctgcattgaactttgctttttaattgaacaacaacaactaccatt

SEQ ID NO: 341724 - DNA, 314 bp, Zea mays
caattttccttccaaaaaccctaccaaagaaattttggaaattttaatactcccttctcctcttccccttttaacaaacacaaccaaatctttccttttttcccaaagctcaatatcttccaaaaccattatttcacaattgcttacaccatttacttcaattgccctccaacaccccactttccaaacccaattcctacaacaaactattctcctcaacctttttacataaaacaaataccccatttctacaactattccttttatattctaacatacaaaccatcccaacgcaataattacaacagttccta

SEQ ID NO: 341725 - DNA, 468 bp, Zea mays
  unsure (1)..(468): unsure at all n locations
ccaactagcaacatagaaagcacaatagtgtaccaacaatggcagccaaaatattttgcctccttatgctccttggtatttctgcaagtgctgctacggcgaccattttcccgcaatgctcacaagctcctatagcttcccttcttcccccgtacctctcaccagcggtgtcttcggtatgtgaaaacccaattcttcaaccctacaggatccaacaggcaatcgcagctggcatcttacctttatcacccttgttcctccaacaatcatcagccctattacagcagttacctttggtgcatttattggcacaaaacatcagggcacaacaactacaacaacttgtgctagcaaaccttgctgcctactctcagcaacagcagtttcttccattcaaccaactagctgcattgaactctgcttcttatttgcaacaacaacnaactaccattcagccagctacctgtg

SEQ ID NO: 341726 - DNA, 446 bp, Zea mays
ctgggtcttcagaccattagctttatctactccagagcgcagaagaacccgatcgacaccatgagggtgttgctcgttgccctcgctctcctggctctcgctgcgagcgccacctccacgcatacaagcggcggctgcggctgccagccaccgccgccggttcatctaccgccgccggtgcatctgccacctccggttcacctgccacctccggtgcatctcccaccgccggtccacctgccgccgccggtccacctgccaccgccggtccatgtgccgccgccggttcatctgccgccgccaccatgccactaccctactcaaccgccccggcctcagcctcatccccagccacacccatgcccgtgccaacagccgcatccaagcccgtgccagctgcagggaacctgcggcgttggcagcaccccgatcctggcccagtgcgt

SEQ ID NO: 341727 - DNA, 91 bp, Zea mays
ggacaaaatatgaacccggaccacactacgctgctccgccatggcaaaaccgctccaaggactggagctagatggtggtcgcgctgaccgg

SEQ ID NO: 341728 - DNA, 427 bp, Zea mays
gggtcttcagaccattagctttatctactccagagcgcagaagaacccgatcgacaccatgagggtgttgctcgttgccctcgctctcctggctctcgctgcgagcgccacctccacgcatacaagcggcggctgcggctgccagccaccgcctgcggttcatctaccgccgccggtgcatttgccacctacggttcacctgccacctactgtgcatcttccaccgtcggttcacctgccgacgccggtccacctgccaccgacggtccatgtgccgccgccggttcatctgccgccgccaccatgccactaccctactcaacgcgcccggccttaaccttattcccagacacacccatgcccgtgccaacagccgcattcaaacccgtgccagctgcagggaacctgcggcgttggcagcaccccg

SEQ ID NO: 341729 - DNA, 291 bp, Zea mays
ctcaagactctaactatgatattagcacaacaatagtgacattgaataaccatgccttggctctagaggagcgttcaaaggcagaaattgttcacagtgctgagattggccagtttgcagcaggaatccttccccaaaaatctgaactgtctaactgtgaaactgacagaggacggggttcggaacctgaagcatacgagtcactcataggagaaccgtgattgcacactgatgggggataataatctgtaccatatccgtatatcctctgataacgtgctggccacttca

SEQ ID NO: 341730 - DNA, 212 bp, Zea mays
  unsure (1)..(212): unsure at all n locations
cggntgtcaaacaattacctcccttttccaccgtttacgctcgaactccacacaaggggcgtgatggtcgatttcgccgctctcttggtacacaatctgatctacttctctcagacaagcgtctgctgcgtctgccagacaccaacgttatatataccggatacctgctatataccaggtgcgctatctctgccatcatagtattaacacat

SEQ ID NO: 341731 - DNA, 342 bp, Zea mays
gcaattagctcatcgactccagattggagaactcgacaccatgaaggtgctgatcgttgcccttgctctcctggcgctcgctgcgagcgccgcctccagtacaagcggcggctgtggctgccagacaccaccgtttcatctaccgcctccgttctatatgccgcctccgttctatctgccgccgcagcagcagccgcagccatggcaataccccactcaaccaccgcagctaagcccgtgccagcagttcggatcctgcggcgtcggcagcgtcagcagcccgttcctgggccagtgcgtcgagttcctgaggcaccagtgcagcccggcggcgacgcccta

SEQ ID NO: 341732 - DNA, 457 bp, Zea mays
gaccattagctttatctactccagagcgcagaagaacccgatcgacaccatgagggtgttgctggttgccctcgctctcctggctctcgctgcgagcgccacctccacgcatacaagcggcggctgcggctgccagccaccgccgccggttcatctaccgccgccggtgcatctgccacctccggttcacctgccaccttcggtgcatctcccaccgccggtccacctgccgccgccggtccacctgccaccgccggtccatgtgccgccgccggttcatctgccgccgccaccatgccactaccctactcaaccgccccggcctcagcctaatccccagccacacccatgcccgtgccaacagccgcattcaagcccgtgccagctgcagggaacctgcggcgttggcagcaccccgatcctgggccagtgcgtctagtttctgaggcatcagtgc

SEQ ID NO: 341733 - DNA, 470 bp, Zea mays
aagcaacatagaaagtggaatccagtagcaacaatagagcaacaatggagaccaagatattttccctccttatgctccttgctctttctacatgtgttgctaacgcgacaattttccctcaatgctcacaagctcctatagcttccctttttcccccataccttccatcaattatagcttcagtatgtgaaaacccagctcttcaaccatataggcttcaacaagcaatcgcagcaagcaacatacctttatcgcccttgttgtgtcaacaatcgccagccctatctttggtgcagtcattggtacaaaccatcagggcacaacagctgcagcaactcgtgctacctgtgatcaaccaaatagctctggcaaacctttcttcctactcttcgcaacaacaatttctttcattcaaccaactgtctacactgaacccttgtgcttatttgcagcaacaactattaccattt

SEQ ID NO: 341734 - DNA, 468 bp, Zea mays
agaccaactagcaacatagaaagcacaatagtgtaccaacaatggcagctaaaatattttgccggcttatgctccttggtctttctgcaagtgctgctacggcgaccattttcccacaatgctcacaagctcctatagcttcccttcttcccccgtacctctcaccaacggtgtcttcggtatgtgaaaacccaattcttcaaccctacaggatccaacaggcaatcgcagctggcatcttacctttatcacccttgttcctccaacaatcatcagccctattacagcagttacctttggtgcatttattggcacaaaacatcagggcacaacaactacaacaacttgtgctagcaaaccttgctgcctactctcagcaacagcagtttcttccattcaaccaactagctgcattgaactctgcttcttatttgcaacaacaacaactaccattcagccagctatctg

SEQ ID NO: 341735 - DNA, 473 bp, Zea mays
  unsure (1)..(473): unsure at all n locations
ganccaggccgncccacgcgtccgattgagaccaacaagcaacatagaaagtggaatccagtagcaacaatagagcaacagtggagacgaagatattttccctccttatgctccttgctctttctacatgtgttgctaacgcgacaattttccctcaatgctcacaagctcctatagcttccctttttcccccataccttccatcaattatagcttcagtatgtgaaaacccagctcttcaaccatataggcttcaacaagcaatcgcagcaagcaacatacctttatcgcccttgttgtgtcaacaatcgccagccctatctttggtgcagccattggtacaaaccatcagggcacaacagctgcagcaactcgtgctacctgtgatcaaccaagtagctctggcaaacctttctccctactctncgcaacaacaatttcttccattcaaccaactgtctacactgaaccct

SEQ ID NO: 341736 - DNA, 394 bp, Zea mays
caactagcaacatagaaagcacaatagtgtaccaacaatggcagccaaaatattttgcctccttatgctccttggtctttctgcaagtgctgctacggcgaccattttcccgcaatgctcgcaagctcctatagcttcccttcttcccccgtacctctcaccagcggtgtcttcggtatgtgaaaacccaattcttcaaccctacatgatccaacaggcaatcgcagctggcatcttacctttatcacccttgttcctccaacaatcatcagccctattacaacagttacctttggtgcatttattggcacaaaacatcaaggcacaacaactacaacaacttgtgctagcaaaccttgctgcctactctcagcaacagcaagttcttccattc

SEQ ID NO: 341737 - DNA, 371 bp, Zea mays
cagaccattagctttatctactccagagcgcagaagaacccgatcgacaccatgagggtgttgctcgttgccctcgctctcctggctctcgctgcgagcgccacctccacgcatacaagcggcggctgcggctgccagccaccgccgccggttcatctaccgccgccggtgcatctgccacctccggttcacctgccacctccggtgcatcttccaccgacggtccacctgccgacgccggtccacctgccaccgacggtccatgtgccgacgccggttcatctgccgacgacaccatgccactaccctactcaaccgccccggcctcagcctgatccccagccacacccatgcccgtgccaacagccgca

SEQ ID NO: 341738 - DNA, 349 bp, Zea mays
attgagaccaactagcaacatagaaagcacaatagtgtaccaacaatggcagccaaaatattgtgcctccttatgctccttggtctttctgcaagtgctgctacggcgaccattttcccgcaatgctcgcaagctcctatagcttcccttcttcccccgtacctctcaccagcggtgtcttcggtatgtgaaaacccaattcttcaaccctacaggatgcaacaggcaatcgcagctggcatcttacctttatcacccttgttcctccaacaatcatcagccctattacaacagttacctttggtgcatttattggcacaaaacatcaaggcacaacaactacaacaac

SEQ ID NO: 341739 - DNA, 477 bp, Zea mays
cagaccattagctttatctactccagagcgcataagaacccgatcgacaccatgagggtgttgctcgttgccctcgctctcctggctctcgctgcgagcgccacctccacgcatacaagcggcggctgcggctgccagccaccgccgccggttcatctaccgccgccggtgcatctgccacctccggttcacctgccacctccggtgcatctcccaccgccggtccacctgccgccgccggtccacctgccaccgccggtccatgtgccgccgccggttcatctgccgccgccaccatgccactaccctactcaaccgccccggcctcagcctcatccccagccacacccatgcccgtgccaacagccgcatccaagcccgtgccagctgcagggaacctgcggcgttggcagcaccccgatcctgggccagtgcgtcgagttcctgaggcatcagtgcagcccgacggcgacgccc

SEQ ID NO: 341740 - DNA, 475 bp, Zea mays
ctaacaacatacaaagcacactagtgtaccaacaatggcagccaaaatattttgcctgcttatgctccttggtctttctgcaagtgctgctactgcgaccatttttccacaatgctcacaagctcctatagctttccttcttcccccgtacctctcaccagcggtgtctgtggtatgtgaaaacccaattcttcaacattataggatccaacatgcactcttagctggcatcttacctttatcacccttgttcctccaacaatcatcagccctattacagcagttacctttggtgcatttattggcacaaaacatcagggcacaacaactacaacaacttgtgctagcaaaccttgctgcctactctcagcaacaacagtttcttccattcaaccaactagctgcattgaactctgcttcttatttgcaacaacaactactaccattcagccagctagctggtgtgagccctgct

SEQ ID NO: 341741 - DNA, 433 bp, Zea mays
  unsure (1)..(433): unsure at all n locations
gtccgttcaagtcttattcttcaaccatgttggtgttttcgggatcccgaaaactttgggcgcgcctgcgccggccttggttccttccgcngctaaaaaccaaaaccaccctctctcgttgcgcgcgcgtttctattgtctacaggtagactttcctcacacgctggaactttttgattttgtgtgtcactacaaaattgtcttttggctttgattcgagagttacagtgactgctatattgattgcgacgatgcacccccgccgcgcggatccgatcatggggccagtcgccccgccactgtccgcgccaacagaggcgcagacctcgccgtcttctagcacttctagcggatggagaggaaagtggaaataagcaatggagctatagatgacggtccactgcagaaatctctacttccttcatttgaatct

SEQ ID NO: 341742 - DNA, 211 bp, Zea mays
attggttttaaacagagaccggcccttctaatgtaccaaaccttacttcccctgggggcccaggggataattatatcttaggaggacctaaattaatttacctgccgcccgttttccaccgtagggacgggaaaacccttgcggttccccacctaagtgcctttgaatgaaatcctcttttggcaacttgtcttattaccaaaaaggccgg

SEQ ID NO: 341743 - DNA, 122 bp, Zea mays
gcggtgcgatataaatctcactgtcacctcaactttgttctgctgtgtatgtagctcacggaggagggatgcagtgtgcacttgcgttgtacacgaactcttgtcctaaccagataagatct

SEQ ID NO: 341744 - DNA, 315 bp, Zea mays
aatattttcagcattcagaaacacaccaagcgaagcgcactagcaacaacctaacaacaatggctaccaagatattagccctccttgcgcttcttgcccttttagtgagcgcaacaaatgcgttcattattccacagtgctcacttgctcctagtgccattattccacagttccttccaccagttacttcaatgggcttcgaacatccagccgtgcaagcctacatgctacaactagcgctagcggcgagcgtcttacaacaaccaattgcccaattgcaacaacaatccttggcacatctaaacctacaaacca

SEQ ID NO: 341745 - DNA, 454 bp, Zea mays
attgagaccaactagcaacatagaaagcacaatagtgtaccaacaatggcagctaaaatatttggcctccttatgctccttggtctttctgcaagtgctgctaccgcaaccattttcccacaatgctcacaagctcctatagcttcctttcttcccccatacctctcaccagcggtgtcttcagtatgtgaaaacccaattcttcaaccctacaggatccaacaggcaatcgcagcaggcatcttacctttatcacccttgttcctccaacaaccgtcagccctattacagcagttacctttggtgcatttgttggcacaaaacattaaggcacaacaactacaacaacttgtgctaagaaaacttggtgtctactcttaaaaacagaaatttcttccattcaaccaactggctgcattgaactctgctgcttatttgcaacaacaactaccat

SEQ ID NO: 341746 - DNA, 108 bp, Zea mays
gcggttaggcacacccatgcacgtgccaacatctgtatccaatccagtgccaggtacatggaacctggggtgttggtatttccccaaaccttggccagtgcgactatt

SEQ ID NO: 341747 - DNA, 368 bp, Zea mays
ccaacaagcaacatagaaagtggaatccagtatcacaatagagcaacaatggagaccaagatgttttccctccttatgctccttgctctttctacatgtgttgctaacgcgacaattttccctcaatgctcacaagctcctatagcttccctttttcccccataccttccatcaattatagcttcagtatgtgaaaacccagctcttcaactatataggtttcaacaagcaatcgtagcaagcaacatacctttatcgcccttgttgtgtcaacaatcgccagccctatctttggtgcagtcattggtacaaaccatcagggcacaacagctgcaggcactcgtgctacctgtgatcacccaagtagc

SEQ ID NO: 341748 - DNA, 443 bp, Zea mays
tggacgtcagcctagcaattagctcatcgactccagattggagaactcgacaccatgaaggtgctgatcgttgcccttgctctcctggcgctcgctgcgagcgccgcctccagtacaagcggcggctgtggctgccagacaccaccgtttcatctaccgcctccgttctatatgccgcctccgttctatctgccgccgcagcagcagccgcagccatggcaataccccactcaaccaccgcaagtaagcccgtgccagcagttcggatcctgcggcgtcggcagcgtcggcagcccgttcctgggccagtgcgtcgagttcctgaggcaccagtgcagcccggcggcgacgccctacggctcgccacagtgccaggcgctgcagcagcagtgctgccaccagatcaggcaagtggagccgctgcaccggtaccaggcgacata

SEQ ID NO: 341749 - DNA, 302 bp, Zea mays
  unsure (1)..(302): unsure at all n locations
gctatatctctatctctctatctatagcagcttttcttacgtacccaagcatacgagcacatagatgttttataatatcacctatatacaattcactaaccncaattcaacaaccactggactacaaaaacactaccgctacaaacctcaatatactcaaatcacatacccctcattacagctctcttaatatagaagagatcataaccatatagccctttacaacacactctcaccaacaatttcgcatactacacgcccaatattactccatttttagcgcctcatttaacgcttacact

SEQ ID NO: 341750 - DNA, 475 bp, Zea mays
gttggcacaaaacatcaaggcacaacaactacttcaacttgtgctaggaaacctggctgcctagtctcagcaacagcagtttcttccattcaaccaactggctgcattgaactctgctgcttatttgcaacaacaactaccattcagtcagctagctgctgcctacccccagcaatttcttccattcaaccaactggcagcattgaactctgctgcttatttacaacagcaacagctaccaccattcagccagctagctgatgtgagccctgttgccttcttgacacaacaacagttgttgccgttctacctgcacgctgcgcctaacgctggcaccctcttacaactgcaacaattgctgccattcaaccaacttgctttgacaaacccaacagcgttctaccaacaacccatcattggtggtgccctcttttagattgcttatgagttatagttcaataatgaaagtttttgg

SEQ ID NO: 341751 - DNA, 64 bp, Zea mays
tcggatggatagaggagatttccctctctatctatatatgtaataatgcagtaagacgacacac

SEQ ID NO: 341752 - DNA, 455 bp, Zea mays
  unsure (1)..(455): unsure at all n locations
aagcaacatagaaagtggaatccagtagcaacaatagagcaacaatggagaccaagatatttggcctccttatgctccttgctctttctacatgtgttgctaacgcgacaatttttccctcaatgctcacaagctcctatagcttccctttttcccccataccttccatcaattatagcttcagtatgtgaaaacccagctcttcaaccatataggcttcaacaagcaatcgcagcaagcaacatacctttatcgcccttgttgtgtcaacaatcgccagccctatctttggtgcagtcattggtacaaaccatcagggcacaacagctgcagcaactcgtgctacctgtgatcaaccagtagctctggcaaaccttttctcctactctccgcaacaacaattcttncattcaaccactgtctacactgaaccctgctgcttatttgcagcacac

SEQ ID NO: 341753 - DNA, 95 bp, Zea mays
caacatcttcaacaagaaaaactaggaattggaagtatgcctgttgatgggggcatacccaaacggatttgggggagctgaacagacagcgaaaa

SEQ ID NO: 341754 - DNA, 457 bp, Zea mays
attcagaaacacaccaagcgaagcacattagctacaacctaacaacaatggctgccaagataggatccctccttgcgcttcttgcgctttttgcgagcgcaacaaatgcgttcattattccacaatgctcacttgctccaagttccattattacacagttccttctacatgttacttcaatgggcttcgaacacccagctgtgcaagctcttaggctacaacaagcaatggatgtgagcgtcttacaacaaccaatttcccagttgcaacaacaatccttggcacatctaacaatacaaaccatcgcaacgcaacagcaacaacaattcctaccagcactgagccacctagccatggagaaccctgccgcctacttgcaacagcagttgcttgcatcaaacccacttgctctggcaaacgtagttgcaaaccagccacaacaacagctgcaacagtt

SEQ ID NO: 341755 - DNA, 117 bp, Zea mays
  unsure (1)..(117): unsure at all n locations
acccacgcgtccggttctatatcacaaccggccgcccttcncgtatattaattcctctaatatatgagaacttatttgtatctttttttatacccataataactctccttttctttt

SEQ ID NO: 341756 - DNA, 456 bp, Zea mays
attttgagcattcagaaacacaccaagcgaagcgcactagcaacaacctaacaacaatggctaccaagatattatccctccttgcgcttcttgcgctttttgcgagcgcaacaaatgcgtccattattccacaatgctcacttgctcctagttccattattccacagttcctcccaccagttacttcaatggccttcgaacacccagctgtgcaagcctataggctacaacaagcgattgcggcgagcgtcttacaacaaccaattgcccaattgcaacaacaatccttggcacatctaacaatacaaaccatcgcaacgcaacagcaacaacagttcctaccagcactgagccacctagccatggtgaaccctgtcgcctacttgcaacagcagctgcttgcatccaacccacttgctctaacaaacgtagttgcaaaccagcaacaacaacaac

SEQ ID NO: 341757 - DNA, 124 bp, Zea mays
ggtcttgagaccattagctttatctactccagagcgcagaagaaccccatcgacaccatgagggtggtgctcggtggcctcgctcttctggctctctctggaagcgccaccttcacacatacaa

SEQ ID NO: 341758 - DNA, 55 bp, Zea mays
tctagatcgcgagcggccgccctttttttctttttccttcttagaacctgggggg

SEQ ID NO: 341759 - DNA, 150 bp, Zea mays
caacaacacatcattggtggtgccctcttttagattgcttattagatgtaattcaataataaaggtttttggatgatgtatgtggccaaccagaaataaaaagttacatttccagattctgaaactagaaaacaaacaaaaataaagaac

SEQ ID NO: 341760 - DNA, 130 bp, Zea mays
  unsure (1)..(130): unsure at all n locations
gnnccggnccncaccccgcccgnccannnccgacngggccgnncctccnccacgccccggcgcgcgnnccggcagaacgggaggcgaggccanccgcgcgcgcgcganggcgccggacccgngcggcgac

SEQ ID NO: 341761 - DNA, 434 bp, Zea mays
gtggaatccagtagcaacaatagagcaacaatggagaccaagatattttccctccttatgctcggtgctctttctacatgtgttgctaacgcgacaattttccctcaatgctcacaagctcctatagcttccctttttcccccataccttccatcaattatagcttcagtatgtgaaaacccagctcttcaaccatataggctttaacaagcaatcgcagcaagcaacatacctttatcgccactgttgtgtcaacaatcgccagccctatctttggtgcagtcattggtacaaaccatcagggcacaacagctgcagcaactcgtgctacctgtgatcaaccaagtagctctggcaaacctttctccctactctccgcaacaactattaccatttagccagctagctacttgctactcttaacaacaacaact

SEQ ID NO: 341762 - DNA, 471 bp, Zea mays
aggtcgacggtatcgataagcttagaagtttgggcttggcgaaataaggttcgccaatagatttggtaagctgaagtatgccaataaggttggtgagttggagttcgccagaagacgtggtgagatggtgtttaccggaaggctgggtaagctggtatttgccagtggactaagcaaatgtaatcgccgaagggcttggcgagttgaatttcgtcagtgggcctagtgagttgtattgtaacacctcgcaagtgaagggttcgccagttttccaactaactggttgtttgccaaggtttaagcgagctgggggtttaccaaaagattatcaacaagggacttcactagtaaaagtgtatgccttaagatgtccgataccaagttgggtttgctagtttctctataaggtaggtttgctaatgtgatggtgagctagtgttcgccagtcttgctgtgaacaggggattgtca

SEQ ID NO: 341763 - DNA, 461 bp, Zea mays
tcgataagcttaagaaaatcggctatggtggttcgctagactaaagtatttttgatattattctttgagattcatgtatgttttaagttgtaagtgaaaatctacctagccatggttcaaattttgttaattgaaggagatgatattcggccatgaatgttacattcttggttggtattttgatgtctttggcgatgaggtatgaagatggttgattttgagtgttaaataaaaaggatgcatgaattattgttaaataatggtcgaatgtagcatgattaaagatgtgaataaattgaagttaacgaggttgtcaatgaaaaatatgagttggatgaggcttaaagaataaaaatctatgtgactagaggtcaaggacattcggtcatatgcttgtatgctagcaaaatcggccaagtgattatgtggtggaaattaagtgttaaatggaatgaaaatga

SEQ ID NO: 341764 - DNA, 396 bp, Zea mays
gacggtatcgataagcttaatttgaatatgtttagatcaagaaccaaagaaatcagatttggatcaagggaaaacgaaagttatcgactagctgccttgttccgttttgtatcgttcgaggtaagtttataaggaaatagacatgtttaattgtagtttaatattaaatatgtatgatggaacgaaatgtatgaagttatagatgctatggctgaatatgaataagcttactcgacttgtataaaacatttgttttactatttaaaattaataaaataataaatatatatttataattaaaattaaaattaattttacattatttaaattgaacttggataggatcaaaagctttgtgcttttaagatattggaatatttagctgaaatttccttg

SEQ ID NO: 341765 - DNA, 72 bp, Zea mays
aaaccaagcaagattcctaatgcttccttttttaattatcatgaattcctgccggccggggcatccattaat

SEQ ID NO: 341766 - DNA, 473 bp, Zea mays
tcgacggtatcgataagcttgttcaacatacaaacttacttcggttcctaaaatggcaaaaggacctattcgtcaattattttgtttttcactcgatctacacctgaactttgtttttcttgatctataatatcacatttaacttatttaatcatcacattattcaatatagtccaaaaatgcattatggaaaaaattacatttttgctcctaccttttcaacattttacaatttagtccctagacttgtaaaatgaatttttttcaatttcatcacaacccaagtctagcaaaatattatttgtgctcataaaaacccatatttttcatttattcacacttttgtacacattttatagacttttacaaataagtccctatttaacgtttttatcaaaaatcacttgacaaacgttgtttaactaacaatgaacatgcattttctaccatcaaacaccaaaatacaaacatat

SEQ ID NO: 341767 - DNA, 430 bp, Zea mays
atcgctgagcttgcggttaaattataaaacagaaaagatcgaaacaagggttaaattgcaacgagttggaaagggtgagggagtgcacacgcaactatgcccttcataggaaacacgcggatccttgccccgggtcggcacaacgtgcgggtcgagagggcctaaaaacggcgccgttgtatgacttgtattaatatataacaaatgcccaaaaaaatcacttttatctgttttctaaaaaaaaacatagagccttttgtctaaagccctacaaggacgcccaagattcggcggctttcgataatccgattattctccgaagaccatcgtgcacgggggtatgaagtacaaaatcagatcttttcggttcatgtctaatctgactgactctataccacagattcatggtgaaatgatgagaaagacgatt

SEQ ID NO: 341768 - DNA, 476 bp, Zea mays
gtcgacggtatcgataagcttgagcattgctctcaacttcctcggattcagctcagttgaatgacattactatatgaaaaacatgtttaaaatgatcaggagatatcacactatcacagattatataatggcatgtatagctagactcgtatacaccacgttagtccgataatcgactaaatcgtagctctgataccaataaaacatgcattagaaacaagtcaaaacattagaatctcaaagaagtattttgcaaaattttaaattttttcaaagtgcaggggacacacgcccgtgtggtcaggccgtgtggtatttgacgtagggcacacgaccatggccccaacgtgtgtaaccctttgacttgcaatacatttaagtgcaggggtcacatggccaagccacacgctcgtgtgccaagccgtgtgattaattctgagcattctgttttgaaattttaagatgtaggggacaca

SEQ ID NO: 341769 - DNA, 424 bp, Zea mays
agctgagaagctcataggcattaaacacaaatcatatcaaatattgacacaatcttatatctattaggttaactgatggatcctccaaatcacaatttcattaataactcattggaataatttccatatggctactcacaatttaactcccttaggcccatttctcatttacttcattgtcaatttaaggaacaataagggaattgagtgcttcattatcacattgccatagtaaactatggactttcacattgttacgcatcacacaccgaagccatagccttgccatggtcttacacggttcacatatcataccgaagccatatccagacatggtcttatacggaatcacattatcacattataccgatgccatagcccagctatggtcttatacggagtcacattatcacattgaaccgat

SEQ ID NO: 341770 - DNA, 398 bp, Zea mays
cgaggtatcgataagcttcagagttccagtgatatacaaccatccatacggcaacattcaaaataaaacacacttggagcgtgacaagtctcgaacgtcagaccccatggaacactgcacatgcctctatcccctagactagtaggcattttatgtcatgttttactcacatttatttaaaaatctaccaactaaaggcaagggtttatttcataaaaataaaactttcttgcaaaagcccaggtttgaacctaagacctctcagacactcccagaacatgtaaccactgaagcagacatgcatttgtgtgcaacacaatatacgtaaatagatatttaaattttggggcggtataactctaccccactaaaaaaaaattttggccttaaaaattaac

SEQ ID NO: 341771 - DNA, 407 bp, Zea mays
gttttcgaaaaaaaggcgcttttatcatgaatggtttaatttgtgagggagatcgcccctacacaataaaaacaagaagcaaatggcttctttccatctcagaagattagtaagcagcgttcttaactcgcgggtgcaaacaaatccccttttgaccttcaagtgcttctgttctcctcctgttacacctttcacttcccatgctagttacgaccctaactccatccacttgtccaaccaataaagcaaaagacgcttgttcaacatgctattatacaaaatcaagcagcgagggttcctcgaactcgatttggttcttcgaaaatgggtagaggacaatattcactccttggatgaatatcgcgtttgaactttcattcttcttctcgacttggagaatccaaatt

SEQ ID NO: 341772 - DNA, 477 bp, Zea mays
ggtcgacggtatcgataagcttgtgtacaagaaaactttgtgtattttgtgattttgtgaattagggattaaagtgtcgaaatgtgaaaatgtgagggctagtttgcaatatgccttaattgtgcgtatatggattggtttgaatattatagatcaagaaaagtggaattcgcttcaaggttacccaaaagcgacttacctcccaccttcaatatatcaatagaatctcacacctaaataagtctttgattgatgcccacgagtgcttgaaaatctctctcaagcatcgagaaggagaaaacagacatttcccaataagagaaaaggttcagcaatatagaaaaggttcagccaaaaagagcaatgtggggaaaacttgtctacaatgaaatacagtaaaagggatcaaacgaatattcagcaaagaaagaggaagaagagactaacgtgaaaactaaatggcaaaactgaaagaac

SEQ ID NO: 341773 - DNA, 352 bp, Zea mays
aggtcgacggtatcgataagctttgactgtgatgacacacttcatgtcatgatatatattatgaaatcgacgacgatcctacatagagtagtacgactgtactacacacacatttatatcatatatgaacacttaacgcatcaagcaatccttgaaccaaaaaaacacataacgctatactactaaatacacgtggaacaaatcttattgattcaacaaagaaatctatattgttgatcgagactatcaagtgtatactatgcatgatgaaggacacacacagtattagagcagtcgccaccgttatatatctacggatcttaatatgaatacagacggacacaatgatgct

SEQ ID NO: 341774 - DNA, 375 bp, Zea mays
tcgacggtatcgataagcttcaactgttgctccctcacacgcgcggttccagccctttccacgtcaccacacgaacgacctcttttgtacgatggtttcacctgcaacaaacatgcaacaaggaaagcaagcaaaggaaaaacaacaaaaattacagagattaaaaatgtttataatttttttttctgtgattttagctatataaagccgattgattcatttgtaaaaggattcacacatagtatcaataaaaaagaaagaattctaaaacaaaaatcagaaagttttgaaaaagtgggctgagtttttttttcttttcgattatattcttttacgatcgatttgatccttttatttgtttgattattcattgag

SEQ ID NO: 341775 - DNA, 417 bp, Zea mays
aaagcttgaaccatcaaaacatttgattcacctaacacatttcttacaatattttaaacatcacacaatgcaggggatggagggacactattataaccatcataatatgtcctatttatatgagtgtcgacttagccaaccccatgagctcctataattggccgcacttccaattacatatgtctatcccatctaaagattcctcataattatcacacgctaacatatttgtgttatgcgcccattaacagtacattactcatccatccattataattgacagaacctatcatttttaattttaaaataatgtatttataatgccaatagtcattcactaaagatatactttgtataactgaactaaagacataatgctataccaagtcttaactatatttttcatcaaaagtgact

SEQ ID NO: 341776 - DNA, 513 bp, Zea mays
  unsure (1)..(513): unsure at all n locations
gagggcgacgggatgcgataagcctaggagagtctgaattggctactcgatctcttggcacaaatggtgtgctcttggtgtaagccaaaaaatgaatcagcgcttcgatgcattgtacacagactgctacatgcatcttaccattacatgtgaactcttcatgcatcgaactcttgtgtaatgggttctaaacaaaatatttggcgtgtaccgtatttaacacacagaactcaaatgtaagattaaactaaattttctagttggaacataatttaaaacataaatgtaaacacattaagttaacagtttagacacaattaaataatgaacttagcaacgacaaaacttaaattcgtgctattaaccagacattaattaaatacatgtaatatatctaacgacaatatttacattgaactaagggcttaattatgttcagcttaagacaacggcataattaaacacattgtaatnaattaagaacaagttgtataagctattacgtaatatttg

SEQ ID NO: 341777 - DNA, 448 bp, Zea mays
gacggtatcgataagcttgtgaaattgaaaagaaaaaagaagaagagaaaactattgtaaaatcctatatgttagggaagttgctgtcactcattctatgtaccattataacaaatatgttttttttttacttgagccatcattttgggccttatataggtttcaattgggctaagtttggtctatttaattatgacatgtttgacaaaacagtagcatgggtcgactagattagtcacccaatcaacttcctttagatggtttgataatgtaacatcctatactcggtccagtcaccaaacctgagctataggatgttacaacagtaaaagtgatgtttggaatgttaggattatttggtatttatttcactaaagtttttaacttttaatgatgctttacttaagataactaaaagtgaaccacaattttaaactcgatattctat

SEQ ID NO: 341778 - DNA, 396 bp, Zea mays
aaaaaataagaatagaaatctattgtttaaaactatacaaaatggaaggggctgtgtctcattttatataccaccataacaaatatgttttttttttacttgacccattattttgggccttatgtaagtttcaattgggctaacctaggtctatttaattatcacattttagataaaacagtaacattcgccgactaaattagtcaccctatcaactcactttagatggattgataatgtaacatcctatacttggaacacacaccatacctgatctataagatggtacaacaataaaaataatgtttacaaagaaaggattatttggaatacattttactaaagtaattaacttttaatgatccttctcttattataactaaaaaagagccacaa

SEQ ID NO: 341779 - DNA, 487 bp, Zea mays
ctcgaggtcgacggtatcgataagcttccatattaagcaaatgaatcttgggaatgcatgtagcagctacattcagctgatgagcttaattgatcattcaataggcaactcttactgaaaagttatcaataataaagagggcacttgaacagccacattaggtgtgaatggacggttttgaagagccttaaaatgtgaacaccaagaaccgaatggccaaaatgtatccagcaatgtgaaggaaataatggcagcttgaaaaactatctctttagccgaatggtcacttagagaacttcaataatcagcacaccatttttaatgtagttcatgcatgtatcattaggtgcattgaatccaacatgcatgcatcttgcacaccacattcggccaacctttcccatgcatcttccacattcggctgaacctaaataaaacaaatgaacctcattaatttaactcaattcagctgaacataatatgaaca

SEQ ID NO: 341780 - DNA, 331 bp, Zea mays
tcatccttgcatctaacttacactttatttcatgctaaaatatttatatgccttgagaggctttataactcaaaccacctatcccaatgattaataaacaaaaaagttacaagcctaaggcacttacattaatgcataaaggttttttatatgaatgatagatcaaaattaatatttaatgatagcttaatatactatcaaaataaattataataaacacatttcaatcaatgaatttaatttcaaaatataaaaacttccataaaataaatctaaaataaaattaatatatgtctcgctacacaccaaacttatattaatctatcatctt

SEQ ID NO: 341781 - DNA, 393 bp, Zea mays
  unsure (1)..(393): unsure at all n locations
gggaaaaaagggtggaaccaagagaactaattattgaaagaggattgtacttttaattttatgtagtatcaaaatttgatggtggtggggtaaattattaccgaacagntatattgcgaataagaggatggtttaatataaatgtttgtgggaactggaatgctttattaggcttataatttgcaaaccaataaccgcattggacaaatgtatttagcaaagggaaagaaattatgggtagttgaaaaaatttttttttaaaaaaatggttttttaacactatttgattaaaatcatgtcattttttattgtgcaaaagcattgaataattggggcagttgatataagataattggtttttggaaaacatgtttgagataactttaccaagta

SEQ ID NO: 341782 - DNA, 475 bp, Zea mays
gaggtcgacggtatcgataagcttctcaattctcaacgcaaacactaaccgaaatcctagtagtttgcataaaatagttaggtattgacaggaggagcacccaagcaggattcacacaccctaccatggccggaagattagcttccaacctttccaccttttttaaacccttttaatggccaaaatggaaggttaatggccattggcggtgggaccatgggcttccttaattgggacctaaaataaccggcttaattaattccaggtccaccacaattttaagtaccacctttgggtcttgatttttaaaagaaaaccacatgggcttaataggatataacttaaggccctgaaccactccaaatggtgtttaaaccatcctggacaattttttctgggctacatatactttcgcaaacacgagattattcatcaacacagaatagatgcaaaatagtccggccattcctcccaa

SEQ ID NO: 341783 - DNA, 454 bp, Zea mays
aggtcgacggtatcgataagctttgtatatatagtatataacatgaataggctagtgtcattttggtatgttttgaaccttgaatttagccatgtgagttggcttgtaaatggtattgttgatgatgttgaattttattaatgttatgagttaatttgtgatatgtgatgtatttatgacgctttatgctttggtagacataatgtggttattttgatgagttgatgaataagtatttagaaaattgttaatgatatgttatggtttgagaaatggtaaattttggtataatttaatatgatacttggatgccattttggtttagttaatgcttgatgatttgggttatgtctaaatatggatattagttaaagtatcaatttgatttggcatgtttttggttgtggaattgagtagtgaaaaggatgatgtataaatggcatgaaatgcgtat

SEQ ID NO: 341784 - DNA, 501 bp, Zea mays
aggtgaggatcgacagctagtcaaatgtacatatgatatggactaaaagaaaaagagatatatgtcttctttaaattgggcaggactacagatgatgtgatggaaagagtccataaaataatttctcatggtaaacacattaatgtataattatacttccaaaaaagactggtgagacttaaaatggcagttttaaaacatttggaatgcaactttcatgaaattaggcaggactatggatgatgtggtggaaagagtccataaaataatttctcatagtaaacacattaatttataacttccaaaaaagactaatgagacttaaaatgggagttttaaaacatttggaatgttacttccattaaagtttttagttacaaatagtgtgtcactgataaaacttagatggtaaattttgcagtaaatgaaataaaggattttcattcaaattcaacacttggatttatccaagtgccaggtagcttgcctgtctcgataggc

SEQ ID NO: 341785 - DNA, 474 bp, Zea mays
tcgacggtatcgataagcttatattttataagtgatttatggatatgtgatttatgttgttggttgttttacagttttgcttaatagtcctaaagtttttgagaaaatatttggggatcaattaatcatggatattatcagttctcttgaatgtaagtcctatactgcttgttcgtggatttattattggtgactattgttgattgaattaaatgtctaatttgaaaatttacttatattattggcacgatacttctttatgcaaataactttgttatattttaggattttctgagagttcttatgtttccagtttgtttgctttctcttttcaagtgcatggttttttgtgttattttttaattcaatttctaaattatgacctactatatctgtaactagagttttttttgaagttaacctccatgtagcagcaaagatggccacgatggtcacatgcagaaaggcagcagc

SEQ ID NO: 341786 - DNA, 284 bp, Zea mays
  unsure (1)..(284): unsure at all n locations
gacggnannngaaagctcggaagatggtggagttggaatgagactctgaggttgaattggtcatgagtgcttcaaggaaaattgaggtgggtgttgagtgatttggggagaaaataaaggaatttgaaataggagagttgcatgggtggagtgttggtgccgaatttgaactccctttcttactcaaaatttctgcagggggttgaggtcacatttcagtttttctttgctcaatttttggtttttcgaggtgtttgacatactaaaattggatttctactcct

SEQ ID NO: 341787 - DNA, 461 bp, Zea mays
gacggtatcgataagcttactttgtttattttccattagaaacacaaaaatttatatactttttcatacccaattctacttaaattcatgcaaattcggttaaattcttgtcaaaaaaataattaaatattataaaataattaaattatgttaaaaatatgaacattatgaattttaattaattttatagttattttttattaaatttggttatttttgacagaattacacaatttgagaaaaaggacccgatgaacactgcgagaagaacaaaatcgagagtaatttgaagtatcgaggccaattaatttccagcccaagacggtccagaaatgtgtattaattcataattaaattaattttaatttatttcctatttaatttaggttaaatgaattaattttaattaattatgaagaaatggcctagtgaaccgcattggttgaaccgaatgaagtgag

SEQ ID NO: 341788 - DNA, 443 bp, Zea mays
  unsure (1)..(443): unsure at all n locations
aggtngacggaatcgacaagctttcaggatctttcaagttagggggaaacttgtttatcaagactgtactacagccttctgtgagtgcaatagtgtcaggatcagtgagttttttcttcttggacaagaggtctttcataaatttcctataattagaaatttgtaccagagcacccactaaaggaatgttgatctgcagttgttccagtgtatgcaaaaactactgatactatttataattttcattcctcttgaatctttgtggaaaaggtatagataaaagtacatttggttgaggcgatacttttggttgcatccacaatttcgagggtcgaatataaagcatgtgaacggcagttggcggtacttctttgtctggtacatctacaagctcttcagcattcgccttcccatcagggtttatgtcaccaatatctggggat

SEQ ID NO: 341789 - DNA, 377 bp, Zea mays
  unsure (1)..(377): unsure at all n locations
agacggtgcacggccgtgtggtgtcaagcacgttttgttacgtggaaagaaagccgngtggttgaaaagtatagggtataggaagggaaaatggggattaatgcaaggagagtggatttgagggtggtttgggggttggggaagtgagaatctggggaattgtggtcggaatagggattaggggttacgaaagggtagatttcagctggggttttgaaagggggaagaagatgaacagtggtttgtttatataggggagggtcaaacggcctatagccacgcctgtgtactttaagggtgagcccatgtttttcatatttggcaagtttggtcgtgcccgtctactatcacatgccagtgtgtcttgagcgtgtgtc

SEQ ID NO: 341790 - DNA, 238 bp, Zea mays
ttttaaacacaaaaatttatatactatttatacccaaaaatacttaaattcatgcgtgtaccttttaattcttgtcaaacaaataaataaatattatataattattaaattatgttaaatatattaacaatatgaatccttattaattttataattttttttaattaaatttggttaaatatgacacaattacacaatttgagaaaaatgaccactttaacactgctaaaagaacaaa

SEQ ID NO: 341791 - DNA, 424 bp, Zea mays
atcgataagctttgattagttaattgcatgtgaatctagttaataggacttatgtgtgacacttttgaaatgtgataggtgaatctataaggatctattagtgcatgtaatcaaaggggtggacttgcatgtcaatttcccccttttaattagtagaggccggccatgacattgaggatagacaaaatgtgatgggtaaaacacattaaaaacaatttgggataacatgttgtgggaaaaacaataaaattgaggggagtgggaggagaaaccaaagttgtttcatccttgctcccccattttgccgtacctagaagaagaaaaagaaaaaaaaaggcttcatcctctttgatcttcttgaccgacaaatcaaatgaagaagaaaggagttctcttgattcattttcggtttggatgacgatta

SEQ ID NO: 341792 - DNA, 385 bp, Zea mays
cagaaacacaccacgcgaagcgcactagccacattctaaatacaacggctaccaagatatgggcgcgtccttgctcttcttgcccttttagagaacgcaacacatgcgtacataattccacagcgctaacttgctcctagtgccattattccacagctcctcccaccagttacttgaatgggcttcgaacatccagccgtgcaagcctacaggctacaactagcgcttgcggtgagcgtcttacaacaaccaattgcccaattgcaacaacaatccttggcacatctaaacctacaaaccatcgcaacgcaacaagcaacaacagtttctgccatcactgagccacctagccgtggtgaaccctgtcgcctacttgcaacagcag

SEQ ID NO: 341793 - DNA, 393 bp, Zea mays
gccttcgaataaacacactaatcgatgcgcactatccacattctaacaacaatggctaccaagataggagccggccttgcgcttcttgcccttttagtgagcgcaacaaatgcgttcattattccacagtgctcacttgctcctagtgccattattccacagttcctcccaccagttacttcaatgggcttcgaacatccagccgtgcaagcctacaggctacaactagcgcttgcggcgagcgtcttacaacaaccaattgcccaattgcaacaacaatccttggcacatctaaacctacaaaccatcgcaacgcaacagcaacaacagtttctgccatcactgagccacctagccgtggtgaaccctgtcgcctacttgcaacagcagcta

SEQ ID NO: 341794 - DNA, 478 bp, Zea mays
cacaagcaacatagaaagtggaatccagtagcatcaatagagcaacaatggcgaccaagatattggccctccttatgctccttgctctttctgcatgtgttgctaacgcgacaattttccctcaatgctcacaagctcctatagcttcccttcttcccccataccttccatcaatgatagcttcagtatgtgaaaacccagctcttcaaccctataggctccaacaagcaatcgcagcaagcaacatacctttatcacccttgtttcaacaatcgccagccctatctttggtgcagtcattggtacaaaccatcaaggcacagcagctgcagcaactcgtgctacctgtgatcaaccaagtagctctggcaaacctttctccctactctcagcaacaacaatttcttacattcaaccaactgtctacattgaaccgtgctgcttatttgcagcaacaactattaccattcagccagct

SEQ ID NO: 341795 - DNA, 244 bp, Zea mays
gcaacatagaacgaacaaatctataccaacgctttcaacttgaatattaagggcgcttatgcttggggagggctatggaagtgttgttatcgcaaccatcttcctacaatgcttacacgctgctatcagttccattgttgggacatacttcttaccagcggggtctataatgtacgaaaacctaattagctaactctacaggatcgacaacgcaatctgcacaagcatattaccattatcaccc

SEQ ID NO: 341796 - DNA, 113 bp, Zea mays
atgcggcgtcggggctattctatagtgcgaactaatttcaactcattggccgtcgatgtacaacatcaagactggcaagaccatgccgttacccaacataatagactagcagc

SEQ ID NO: 341797 - DNA, 130 bp, Zea mays
  unsure (1)..(130): unsure at all n locations
gggacgaccacgcgtccggcaactgttcatanaaagtatccactctcacattataatgaaaagggtcatcctactgggggtgggcgatcctattgtagctgccaatgccaataccatgcagatggcatgc

SEQ ID NO: 341798 - DNA, 347 bp, Zea mays
cagaaacacaccaagcgaagcgcactagcaacaacctaacaacaatggctaccaagatattatccgtccttgcgcttcttgcgctttttgcgagcgcaacaaatgcgtccattattccacaatgctcacttgctcctagttccattattccacagttcctcccaccagttacttcaatggccttcgaacacccagctgtgcaagcctataggctacaacaagcgattgcggcgagcgtcttacaacaaccaattgcccaattgcaacaacaatccttggcacatctaacaatacaaaccatcgcaacgcaacagcaacaacagttcctaccagcactgagccaccta

SEQ ID NO: 341799 - DNA, 191 bp, Zea mays
atggagaccaacaagccgcatagagggtcgtattccataacaacattaaaacggcaatggcgaccgagatgtgcctggttctgatgcttgtcgctctctctgcatgtcatgttcactcgacaatcgcggctcaatgctgacaggctcgtatatgcttcccttcttaccacataccatgcatcaatgatggc

SEQ ID NO: 341800 - DNA, 241 bp, Zea mays
gaaaacccaattctacaaccctacaggatccaacaggcaatcgcagctggcatcttacctttatcacccttgttcctccaacaatcatcagtcctattacaacagttacctttggtgcatttattggcacaaaacatcagggcacaacaactacaacaacttgtgctagcaaaccttgctgcctactttcatcaacagcagttttcttccattcaaccaactaggttcattgaactcttct

SEQ ID NO: 341801 - DNA, 374 bp, Zea mays
ataatattttgagcattcagaaacacaccaagctaagcacattagcaacaacctaacaacaatggcgtccaagatattatccctccttgcgcttcttgcgctttttgcgagcgcaacaaatgcgttcattattccacaatgctcacttgctccaagttccattattacacagttcctcccaccagttacttcaatgggcttcgaacacccagctgtgcaagcctataggctacaacaagcaattgcggcgagcgtcttacaacaaccaatttcccagttgcaacaacaatccttggcacatctaacaatacaaaccatcgcaacgcaacagcaacaacaattcctaccagcactgagccacctagccatggtga

SEQ ID NO: 341802 - DNA, 192 bp, Zea mays
cccacacaatcaacaacacgtcttacttttgcttatactacacacccaaaaattgaccaagcggatgtctaaatttaatggcacttctttctatccccgaccttaatacatgcggcaattgcgcttcacaaacaccaacatgtaaacaaccgcctacacactatatgcctctcttcattctatctcatcacc

SEQ ID NO: 341803 - DNA, 331 bp, Zea mays
  unsure (1)..(331): unsure at all n locations
cgcgttcgatccggctactgaaaccacacactttccttttcacgatcgcatatcgatcaccgggccgtggatagttaactcccgtgcccttcacccgcaccttgagctcgcaacacaatgctcgctagaggcacacctctcacgggtcaaggcatcaactgtcgcaaccgtcgtctctgcagttaccaccctggttagcgaccagatgcttccatgggccaatgccaacatcaaccccgttggccaggccctcatacaatacacagntgctgacatggcagcactctatcttggcgcacataacgatactctccatggcgacgcaacactc

SEQ ID NO: 341804 - DNA, 339 bp, Zea mays
  unsure (1)..(339): unsure at all n locations
aaataaaaaaaaattaaaaaatttaaaaaaaaaaaaaaaaaagggaaatctgtaagattaaaaagggaaagggcaaaataaaanataaaaaaataaataataaaataaataaatataaaataaaaaaaattaaaaatataaaaaaaaaaaataaaaaaaaaatataaaaaaataaaaaaaaaaaaaaaaaaaaaaaaaaataataaataataaaaaaaaaataaaaaaaaaaaaattaaataaaataatatataaaaaaaatataattgaaataataaaataaaaatatttaataataaataataaaaaataaaaataaaataaaaagatagtaaaatt

SEQ ID NO: 341805 - DNA, 458 bp, Zea mays
  unsure (1)..(458): unsure at all n locations
cccagcggccganncacaaacacaccaagcgaagcacatgagcaatatcccaacaacaacggcnaccaagggancagggccnccnngcgcancgggcgccgncngcgagcgcaacaaangcgnncannannccacaaggcgcacncgcnccaaagggcaaaaaaacacgaggccacccaccaggnaccccaaggggcnncgaacacccaacngagcaagccganaggcgacaacaagcaaacgcggcgagcgnncgacaacaaccaagngcccagcggcaacaacaanccgaggcacaacaaacaanacaaaccancgcaacgcaacagcaacaacaangccgaccagcacggagccaccaagccagggngaacccagccgccaacnngcaacagcagnngcaggcancaaacccacnngccccggcaaaacgaggngcaaaccagccacaacaacag

SEQ ID NO: 341806 - DNA, 201 bp, Zea mays
attgagaccaacaagcaacatataaagtggaatccagtttcaacactcgagcatcaatggcgaccgagatggtatacctccatatgctcctagctctttctgcatgtgttgctaacgcgacaattttgcctcaatgctcacaagctcctatagcttcccttcttcccacatccctttcatcaatgatagctacagtatgtg

SEQ ID NO: 341807 - DNA, 312 bp, Zea mays
gcaacatagaaagcacaatattgtaccaacaatggcagttaaaatattttgcttccttatgctccgtggtggttctgcaagtgctgctaccgcaaccattttcccacaatgctcacaagctcctatagcttcctttcttcccccatacctctcaccagcggtgtcttcagtatgtgaaaacccaattcttcaaccctacaggatccaacaggcaatcgcagcaggcatcttacctttatcacccttgttcctccaacaaccgtcagccctattacagcagttacctttggtgcatttgttggcacaaaacat

SEQ ID NO: 341808 - DNA, 408 bp, Zea mays
  unsure (1)..(408): unsure at all n locations
gaccaacaagcaacatagaaagtggaatccagtttcaacaatagagcaacaatggcgaccaagatattttccctccttatgctccttgctctttctgcatgtgttgctaacgcgacaattttccctcaatgctcacaagctcctatagcttcccttcttcccccataccttccatcaatgatagccttcagtatgtgaaaacccagctcttcaaccctataggctccaacaagcaatcgcagcaagcaacatacctttatcacccttgtttcaacaatcgccagccctatctttggtgcagtcattggtacaaaccatcanggcacagcagctgcagcaactcgtgctacctgtgatcaaccaagtagctctggaaacctttcccctactctacaacaacaattttca

SEQ ID NO: 341809 - DNA, 352 bp, Zea mays
attatttagaccaactagcaacatatatagcacattagtgtaccaacaatggcagccaagatatggggcctccttatgctccttggtatttctgcaagtgctgctacggcgaccattttcccgcaatgctcacaagctcctatagcttcccttcttcccccgtacctctcaccagcggtgtcttcggtatgtgaaaacccaattcttcaaccctacaggatccaacaggcaatcgcagctggcatcttacctttatcacccttgtttctccaacaatcatcagccctattacagcagttacctttggtgcatttattggcacaaaacatcaaggcacaacaactacaacaac

SEQ ID NO: 341810 - DNA, 330 bp, Zea mays
  unsure (1)..(330): unsure at all n locations
cgggacgaccacgcgtccgatcaatcanaccaaacagattaagctattgattttatcaaaaccaccgatgccagtcatgaacgggtcctatcataggcttccaggtataactccaaacacagatactcagaccattcatatgtattgctcacaatgctcctaaacttctcattgctcacagctacgctaacaacatgggattctatgtagagcaaacctactctttcaacattacatgataaaacacccatttaaatgttacgtttgaaagtcatctcaaacttgtcatcaagcctattcattcaaaccatactattcatcgtgcctcta

SEQ ID NO: 341811 - DNA, 271 bp, Zea mays
  unsure (1)..(271): unsure at all n locations
cccacgcatacgattctatatcccaaaccccctccctttttttctttttttancacacaaccccctatcatgcaatggttatatttcacgcatcaccaacccctacaatatcaactttagcaatcactctaactaacaactgaaatcaaatgataaaaatatccctccaaaaaaaaaaatataaattttctatctctctaattaaaccccccatacctacacacacaaactaccacaacccatttctatcttgctacctaaatacaaaaca

SEQ ID NO: 341812 - DNA, 365 bp, Zea mays
attttgagcattcagaaacacaccaagcgaagctacctagcaacgacttaacaacaatggctaccaagatattagccctccttgcgcttcttgccctttttgtgagcgcaacaaatgcgttcattattccacaatgctcacttgctcctagtgccattataccacagttcctccgaccagttacttcaatgggcttcgaacacctagctgtgcaagcctacaggctacaacaagcgcttgcggcgagcgtcttacaacaaccaattaaccaattgcaacaacaatccttggcacatctaaccatacaaaccatcgcaacacaacagcaacaacagttcctaccagcacttgaccaactagatgtg

SEQ ID NO: 341813 - DNA, 384 bp, Zea mays
aagggtccccccgcgtgcggaacacaccaattaagcgcactttttcaactttcaacaatggctaccaagatatgtgcccttcttgcgcttcttgcccttttagtgagcgcaacaaatgcgttcattattccacagtgctcactagctcctagtgccattattccacagttcctaccaccagttacttcaatgggcttcgaacatccagccgtgcaagcctacatgctacaactaacgcttgcggcgagcgttttacaacaaccaattgcccaattgcaacaacaatccttggcacatttaaacctacaaaccattgcaacgcaacagcaacaacagtttctgccatcactgagccacctagccgaggtgaaccctgtcggctac

SEQ ID NO: 341814 - DNA, 260 bp, Zea mays
aaataacgctcgcatgcctgtgcacttctccattttcaccactgggtcttcagaccattagctttggctactccagagcgcagaagaacccgatcgacaccatgagggtgttgctcgttgccctcgctctcctggctctcgctgcgagcgccacctccacgcatacaagcggcggctgcggctgccagccaccgccgccggttcatctaccgccgccggtgcatctgccacctccggttcacctggccacctccggtgca

SEQ ID NO: 341815 - DNA, 340 bp, Zea mays
cagaaacacaccaagcgaagcacattatcaacatcctaataacaatggctaccaagatattatccgtgcttgcgcttcttgcgctttttgcgagcgcaacaaatgcgttcattattccacaatgctcacttgctccaagttccattattacacagttcctcccaccagttacttcaatgggcttcgaacacccagctgtgcaagcctataggctacaacaagcaattgcggcgagcgtcttacaacaaccaatttttcagatgcaacaacaatccttggcacatctaacaatacaaaccatcgtatcgcaacagcaacaacaatttctaccagcactgag

SEQ ID NO: 341816 - DNA, 388 bp, Zea mays
ctttaatcgccagttcgccaccaccgccgtgaaatccgcacgcgtgcttcctgtcgaattttgagctgtgactgtgagcgccatggccgtggaggctgtgtccggaaatggcaccgaggcagtggccgcgacgccggcgaaggaggtgagcaccaagcaggcgtctttccgggaggagagcaacttcctggacgatctcaaggagagcgagcgtaaggcgctcgccgagctccgcgacaaggtcgaggcagccatcgtggagggcaagctgttcgacgacggtaagccggaggtgaaggagaaggagaaggagaaggaggaagccaagaagaaagcagtggagaaaaaagatgagcagcccgaaaccctagagaagggagagaggatg

SEQ ID NO: 341817 - DNA, 343 bp, Zea mays
aaaacattctctactacctgccgcaaatcccattctcatccgtccccccaccaccgctgggctgcggcgctctctctctctcccctcgctcagtcgccgccaaccatgaacaacctcctgaccgatacctttgatctcccccagcgggactcctcaagagatgcacacattgaaatggcaatgcatcaagctgatgctacaaacaacttaaaagacatcttgaagacagtcgatgcaatcgagagatcaatcgcaaagctgacaaatctattgaataagctacagactgcaaatgacaaatccaaagcatatacaaacgcccgttccatgaaagcaattaaac

SEQ ID NO: 341818 - DNA, 114 bp, Zea mays
acgcgccaggcgtacggcactagaccgcgcgcagtcgctctattcgatttacgctggctaccacgatcatgcgcgggcatgggtttcttgtgctgtcagctagctccaattcag

SEQ ID NO: 341819 - DNA, 282 bp, Zea mays
cgtacctgcactgaaaacacttcccagcgccatttatcgcctaccaaacccttaggctgctatggctcaccatgacattcatggcgctggatccgaccgccaatttcatgcactgcaagaatgcttgcatcgttccacctgcatgacatgtctcttctaccagcgtagggtctggtgccagataccgccaacattaaaacttacgagaatcagctcacggtagtcgacgtgatattaactgacctactgtcgatgaaggaacattgatcagcgctagttcaa

SEQ ID NO: 341820 - DNA, 384 bp, Zea mays
  unsure (1)..(384): unsure at all n locations
ccacgcgtccgtagcaacatanaatgcacaatagtgtttcaacattttcagccaaaatattttgcctccgtatgctgggtggtctttctgcaagtgctgctacggcgaccattttcccgaaatgctcgcaagctcctatagcttcccttcttcccccgtacctctcaccagcggtgtcttcggtatgtgaaaacccaattcttcaaccctacaggatccaacaggcaatcacagctggcatcttacctttatcacccttgttcctccaacaatcatcagccctattacatcagttacctttggtgcatttattggcacaaaacatcagggcacaacaactacaacaacttgtgctagcaaaccttgctgcctactctcaacaac

SEQ ID NO: 341821 - DNA, 351 bp, Zea mays
attatgagcattcagaaacacaccaagcgaagcgcactaacaacaacctaacaacaatggctaccaagatattatccctccttgcgcttcttgcgctttttgcgagcgcaacaaatgcgtccattattccacaatgctcacttgctcctagttccattattccacagttcctcccaccagttacttcaatggccttcgaacacccagctgtgcaagcctataggctacaacaagcgattgcggcgagcgtcttacaacaaccaattgcccaattgcaacaacaatccttggcacatctaacaatacataccatcgcaacgcaacagcaacaacagttcctaccagcactga

SEQ ID NO: 341822 - DNA, 281 bp, Zea mays
ggctcacaccagctagcttcttgatacaaccacttttgttgccgttctaccagcacgctgcgcctgacgctggcaccctcttacaactgcaacaattgctgccattcaaccaacttgctttgacaaacccagcagcgttctaccaacaacccatcattggtggtgccctcttttagatttcttatgagttatagttcaataataaagttttttgtcaaaaaaaaaaaaaaaaaaaaaaaaaaaaaaaaaaataaaaaaaaaaaaagaaaaacaaataaaaa

SEQ ID NO: 341823 - DNA, 500 bp, Zea mays
ggggccacccacgcgtccgcaactagcaacatagaaagcacaatattgtaccttttatggcagccaaaatattttgcttccttatgctccttggtctttctgcaagtgttgctaccgcaaccattttcccacaatgctcacaagctcctatagcttcccttcttcccccatacctctcaccagcggtgtcttcaatgtgtgaaaacccaattgttcaaccctacaggatccaacaggcaatcgcaacaggcatcttaccattatcacccttgttcctccaacaaccgtcagccctattacagcagttacctttggtccatttggtggcacaaaacatcagggcacaacaactacaacaacttgtgctagcaaaccttgctgcatactctcagcaacatcagtttcttccattcaaccaactggctgcattgaactttgctgcttatttgcaacaacaattaccattcacccaacttgttgctgcctacccccaacaattt

SEQ ID NO: 341824 - DNA, 326 bp, Zea mays
cagtatgtgaaaacccaattcttcaaccctacattatccaacaggcaatcgcagcagggatcttggctttatcacccttgttcctgcaacaaccgccagccctattacagcagttacctttggtgcatttgttggcacaaaacatcaaggcacaacaactacaacaacttgtgctaggaaaccttgctgcctactctcagcaacagcagtttcttccattcaaccaactggctgcattgaactctgctgcttatttgcaacaacaactaccattcagtcagctagctgctgcctacccccagcaatttcttccattcaaacaactg

SEQ ID NO: 341825 - DNA, 476 bp, Zea mays
acgcgtgcgatgtagagcattcataaacacaccaagcgaagttctcttttaacaacctaacaacaatggctacggagatggtatccctccttgcgcttcttgcgctatttgcgagcgcaacaaatgcattcattattccacaatgctcacttgctcctagttacattattccacagatcctaccaccagatacttcaatggccttcgaacacccagctgtgcaagcctataggctacaacaagcgattgcggcgagcgtcttacaacaaccaattgcccaattgcaacaacaatccttggcacatctaacaatacaaaccatcgcaacgcaacagcaacaacagttcctaccagcactgagccacctagccatggtgaaccctgtcgcctacttgcaacagcagctgcttgcattcaacccacttgctctagcaaacgtagttgcaaaccagcaacaacaacaactgccacagttt

SEQ ID NO: 341826 - DNA, 357 bp, Zea mays
gaccaacaagcaacatagaaagtggaatccagtatcaattatagagcaacaatggcgaccaagaggttgtgcctccttatgctccttgctctttctgcatgtgttgctaacgcgacaattttccctcaatgctcacaagctcctatagcttcccttcttcccccataccttccatcaatgatagcttcagtatgtgaaaacccagctcttcaaccctataggctccaacaagcaatcgcagcaagcaacatacctttatcacccttgtttcaacaatcgccagccctatctttggtgcagtcattggtacaaaccatcaaggcacagcagctgcagcaactcgtgctacctgtgatc

SEQ ID NO: 341827 - DNA, 423 bp, Zea mays
  unsure (1)..(423): unsure at all n locations
tgggtcttcagaccattagctttatctactccagagcgcagaagaacccgatcgacaccatgagggtgttgctcgttgccctcgctctcctggctctcgctgcgagcgccacctccacgcatacaagcggcggctgcggctgccagccaccgccgccggttcatctaccgccgccggtgcatctgccacctccggttcacctgccacctccggtgcatctcccaccgccggtccacctgccgccgccggtccacctgccaccgccggtccatgtgccgccgccggttcatctgccgccgccaccatgccactaccctactcaaccgccccggcctcagcctcatccccagccacacccatgcccgtgccaacagccgcatccaagcccgtgccagctgcagggaacctgcnngcgttgcagca

SEQ ID NO: 341828 - DNA, 427 bp, Zea mays
  unsure (1)..(427): unsure at all n locations
ggtcttcagaccattagctttatctactccagttcgcagaagaacccgatcgacaccatgagggggttgctcgttgccctcgctctcctggctctcgctgcgagcgccacctccacgcatacaagcggcggctgctgctgccagccaccgccgccggttcatctaccgccgccggtgcatctgccacctccggttcacctgccacctccggtgcatctcccaccgccggtccacctgccgacgccggtccacctgccaccgccggtccatgtgccgccgccggttcatctgccgccgccaccatgccactaccctactcaaccgccccggcctcagcctcatccccagccacacccatgcccgtgccaacagccgcatncaagcccgtgccagctgcagggaacctgcggcgttggcagcaccccca

SEQ ID NO: 341829 - DNA, 368 bp, Zea mays
caacaagcaacatagaaagtggaatccagtagcaacaatagagcaacaatggagaccaagatattttccctccttatgctccttgctctttctacatgtgttgctaacgcgacaattttccctcaatgctcacaagctcctatagcttccctttttcccccataccttccatcaattatagcttcagtatgtgaaaacccagctcttcaaccatataggcttcaacaagcaatcgcagcaagcaacatacctttatcgcccttgttgtgtcaacaatcgccagccctatctttggtgcagtcattggtacaaaccatcagggcacaacagctgcagcaactcgtgctacctgtgatcaaccaagtagc

SEQ ID NO: 341830 - DNA, 431 bp, Zea mays
  unsure (1)..(431): unsure at all n locations
ggtcttcaaacaataaccttaatctactcaaaaccgcaaaaaaacccgatcggacaccaggagggtgttgctcgttgccctcgctctcctggctctcgctgcgagcgccacctncacgcatacaagcggcggctgcggctgccagccaccgccgccggttcatctaccgccgccggtgcatctgccacctccggttcacctgccacctccggtgcatctcccaccgccggtccacctgccgtcgccggtccacctgccaccgccggtccatgtgccgccgccggttcatctgccgccgccaccatgccactaccctactcaaccgccccggcctcagcctcatccccagccacacccatgcccgtgccaacagccgcatccaagcccgtgccagctgcagggaacctgcggcgttggcagcaccccgatcc

SEQ ID NO: 341831 - DNA, 437 bp, Zea mays
cagaaacacaccaagcgaagctacctagcatcgacttaacaacaatggctaccaagatattagccctccttgcgcttcttgccctttttgtgagcgcaacaaatgcgttcattattccacaatgctcacttgctcctagtgccattataccacagttcctccgaccagttacttcaatgggcttcgaacacctagctgtgcaagcctacaggctacaacaagcgcttgcggcgagcgtcttacaacaaccaattaaccaattgcaacaacaatccttggcacatctaaccatacaaaccatcgcaacacaacatcaacaacagttcctaccagcactgagccaactagatgtggtgaaccctgtcgcctacttgcaacagcaggtgcttgcatccaacccacttgctctggcaaacgtagctgcataccaacaacaa

SEQ ID NO: 341832 - DNA, 433 bp, Zea mays
gcaaagcggcagtgcgtaaagaggatcgtcgaacagaacagcatgaagatggtcatcgttctcgtcgtgtgcctggctctgtcagctgccagcgcctctgcaatgcagatgccctgcccctgcgcggggctgcagggcttgtacggcgctggcgccggcctgacgacgatgatgggcgccggcgggctgtacccctacgcggagtacctgaggcagccgcagtgcagcccgctggcggcggcgccctactacgccgggtgtgggcagacgagcgccatgtaccagccgctccggcaacagtgctgccagcagcagatgaggatgatggacgtgcagtccgtcgcgcagcagctgcagatgatgatgcagcttgagcgtgccgctgccgccagcagcagcctgtacgagccagctctgatgcagcagcagcagc

SEQ ID NO: 341833 - DNA, 426 bp, Zea mays
gttggcacaaatcatcaaggcacaacaactactacaacttgtgctaggaaaccttgctgcctactctcagcaacagcagtttcttccattcaaccaactggctgcattgaactctgctgcttatttgcaacaacaactaccattcagtcagctagctgctgcctacccccagcaatttcttccattcaaccaactggcagcattgaactctgctgcttatttacaacagcaacagctaccaccattcagccagctagctgatgtgagccctgttgccttcttgacacaacaacagttgttgccgttctacctgcacgctgcgcctaacgctggcaccctcttacaactgcaacaattgctgccattcaaccaacttgctttgacaaacccaacagcgttctaccaacaacccatcattggtggtgc

SEQ ID NO: 341834 - DNA, 419 bp, Zea mays
tgaaaacccaattcttcaaccctacaggatccaacaggcaatcacagctggcatcttacctttatcacccttgttcctccaacaatcatcagccctattacatcagttacctttggtgcatttattggcacaaaacatcagggcacaacaactacaacaacttgtgctagcaaaccttgctgcctactctcagcaacagcagtttcttccattcaaccaactagctgcattgaactctgcttcttatttgcaacaacaacaactaccattcagccagctacctgctgcctacccccagcaatttcttccattcaaccaactggcagcattgaactctcctgcttatttacagcagcaacaactactaccattcagccagctagctggtgtgagccctgctaccttcttgatacaaccac

SEQ ID NO: 341835 - DNA, 430 bp, Zea mays
attttgagcattcagaaacacaccaagcgtagcacattagcaacaacctaacaacaatggctaccaagatattatccctccttgcgcttcttgcgctttttgcgagcgcaacaaatgcgttcattattccacaatgctcacttgctccaagttccattattacacagttcctcccaccagttacttcaatgggcttcgaacacccagctgtgcaagcctataggctacaacaagcaattgcggcgagcgtcttacaacaaccaatttcccagttgcaacaacaatccttggcacatctaacaatacaaaccatcgcaacgcaacagcaacaacaattcctaccagcactgagccacctagccatggtgaaccctgccgcctacttgcaacagcagttgcttgcatcaaacccacttgctctggcaaacgt

SEQ ID NO: 341836 - DNA, 423 bp, Zea mays
gaccattagctttatctactccagagcgcagaagaacccgatcgacaccatgagggtgttgctcgttgccctcgctctcctggctctcgctgcgagcgccacctccacgcatacaagcggcggctgcggctgccagccaccgccgccggttcatctaccgccgccggtgcatctgccacctccggttcacctgccacctccggtgcatctcccaccgccggtccacctgccgccgccggtccacctgccaccgccggtccatgtgccgccgccggttcatctgccgccgccaccatgccactaccctactcaaccgccccggcctcagcctcatccccagccacacccatgcccgtgccaacagccgcatccaagcccgtgccagctgcagggaacctgcggcgttggcagcaccccgatcct

SEQ ID NO: 341837 - DNA, 204 bp, Zea mays
tctttgaccttgtttattgatcgccccaatgcttctgtcacgctgagagcctgatagagagggcatgaacacaccgtgaatgcggtcggtgccagcatgtctgtgcgaatcaaggcgtctgtagacctattcgcgaaagaactgcatgaggcgctggacgctgacattatagaccttgttatgtaagaactcgagatgcatatc

SEQ ID NO: 341838 - DNA, 389 bp, Zea mays
ggtcttaaaaccattagctttatctactccagagcgcaaaaaaacccgatcgacaccatgagggtgttgctcgttgccctcgctctcctggctctcgctgcgagcgccacctccacgcatacaagcggcggctgcggctgccagccaccgccgccggttcatctaccgccgccggtgcatctgccacctccggttcacctgccacctccggtgcatctcccaccgccggtccacctgccgccgccggtccacctgccaccgccggtccatgtgccgccgccggttcatctgccgccgccaccatgccactaccctactcaaccgccccggcctcagcctcatccccagccacacccatgcccgtgccaacagccgcatccaagcccgtg

SEQ ID NO: 341839 - DNA, 417 bp, Zea mays
caactagcaacatagaaagcacaatagtgtaccaacaatggcagccaaaatattttgcctgcttatgctccttggtctttctgcaagtgctgctacggcgaccattttcccacaatgctcacaagctcctatagcttcccttcttcccccgtacctctcaccagcggtgtcttcggtatgtgaaaacccaattcttcaaccctatatgatccaacaggcaatcgcagctggcatcttacctttatcacccttgttcctccaacaatcatcagccctattacagcagttacctttggtgcatttattggcacaaaacatcagggcacaacaactacaacaacttgtgctagcaaaccttgctgcctactctcagcaacaacagtttcttccattcaaccaactagctgcattgaactc

SEQ ID NO: 341840 - DNA, 422 bp, Zea mays
ccgaccacgcgtccgacaatgtcatccaattattttgccttttatgctccttggtctttctgcaagtgctacgacggttaccattttcccgcaatgctcgcaagctcctatagctttccttcttcccccgtacctctcaccagcggtgtcttcggtatgtgaaaacccaattcttcaaccctacaggatccaacatgcaatcgcagctggcatcttacctttatcacccttgttcctccaacaatcatcaaccctattacaacagttacctttggtgcatttattggcacaaaacatcatggcacaacaactacaacatcttgttctagcaaaccttgctgcctactctcatcaacagcattttcttccattcaaccaactatgttcattgaactctgcttcttatttgcaacaacaacaac

SEQ ID NO: 341841 - DNA, 462 bp, Zea mays
cgtccggattcccgttcgaccacgcgtccgatctagcatcatagatagccttagtgtaccacaatggcagccaaaatattttgcctgcttatgctccttggtatttctgcaagtgctgctacggcgaccattttcccgcaatgctcacaagctcctatagcttccctttcttccccgttacctctcaccagcggtgtcttcggtatgtgaaaacccaattcttcaaccctacaggatccaacaggcaatcgcagctggcatcttacctttatcacccttgttcctccaacaatcatcagccctattacagcagttacctttggtgcatttattggcacaaaacatcagggcacaacaactacaacaacttgtgctagcaaaccttgctgcctactctcagcaacagcagtttcttccattcaaccaactagctgcattgaactctgcttcttatttgcaaca

SEQ ID NO: 341842 - DNA, 351 bp, Zea mays
acccacgcgtccgctaaataaactatgatatctacaatagcttttttcatacctaccaatgacagaattcaaggcggtgattttcatcaataatccctcacacatgcacatgagtatctactgtctatatctcaaacacttcctactacaattccaaccataagttccaagaactgttcctattctaaaaatacgagtgacactcctaaccttttactcaacacactccacttgcttctccaccttttttaggccccaaaatcctaacaactgggagaactcccttgaaactatacctatcatactcaaccttgcaattccttattctcatatatacttacctaaattcaa

SEQ ID NO: 341843 - DNA, 126 bp, Zea mays
agatcaatatgatggatgggaagagcatgctcaggtgcttgacaatgacaaaaccgcttggggaggttgctgctctgaaaactcctcatggcccgcatctttatagtaataatcttgtgcgccata

SEQ ID NO: 341844 - DNA, 332 bp, Zea mays
ttcagcattcaaaaacacaccaagcgaagcgcactatcaacaacctaacaacaatggctaccaagatattagccctccttgcgcttcttgcccttttagtgagcgcaacaaatgcgttcattattccacagtgctcacttgctcctagtgccattattccacagttcctcccaccagttacttcaatgggcttcgaacatccagccgtgcaagcctacaggctacaactagcgcttgcggcgagcgtcttacaacaaccaattgcccaattgcaacaacaatccttggcacatctaaacctacaaaccatcgcaacgcaacagcaacaacag

SEQ ID NO: 341845 - DNA, 426 bp, Zea mays
caactagcaacatataaagcacaatagtgtaccaacaatggcagccaaaatattttgcctgcttatgctccttggtctttctgcaagtgctgctacggcgaccattttcccgcaatgctcgcaagctcctatagcttcccttcttcccccgtacctctcaccagcggtgtcttcggtatgtgaaaacccaattcttcaaccctacaggatccaacaggcaatcgcagctggcatcttacctttatcacccttgttcctccaacaatcatcagccctattacaacagttacctttggtgcatttattggcacaaaacatcagggcacaacaactacaacaacttgtgctagcaaaccttgctgcctactctcagcaacagcagtttcttccattcaaccaactaggttcattgaactctgcttctta

SEQ ID NO: 341846 - DNA, 418 bp, Zea mays
attagctttatctactccagagcgcagaagaacccgatcgacaccatgagggtgttgctcgttgccctcgctctcctggctctcgctgcgagcgccacctccacgcatacaagcggcggctgcggctgccagccaccgccgccggttcatctaccgccgccggtgcatctgccacctccggttcacctgccacctccggtgcatctcccaccgccggtccacctgccgccgccggtccacctgccaccgccggtccatgtgccgccgccggttcatctgccgccgccaccatgccactaccctactcaaccgccccggcctcagcctcatccccagccacacccatgcccgtgccaacagccgcatccaagcccgtgccagctgcagggaacctgcggcgttggcagcaccccgatcc

SEQ ID NO: 341847 - DNA, 416 bp, Zea mays
gccctgcccctgcgcggggctgcagggcttgtacggcgctggcgccggcctgacgacgatgatgggcgccggcgggctgtacccctacgcggagtacctgaggcagccgcagtgcagcccgctggcggcggcgccctactacgccgggtgtgggcagacgagcgccatgtaccagccgctccggcaacagtgctgccagcagcagatgaggatgatggacgtgcagtccgtcgcgcagcagctgcagatgatgatgcagcttgagcgtgccgctgccgccagcagcagcctgtacgagccagctctgatgcagcagcagcagcagctgctggcagcccaaggtctcaaccccatggccatgatgatggcgcagaacatgccggccatgggtggactctaccagtaccagtaccagc

SEQ ID NO: 341848 - DNA, 139 bp, Zea mays
accataccactaccctactcaacctcccacacctcatcctcatacctatccacacccatcccctatccaacatccactttcaaaccacttccatctacatataaccttcaacacaatcatcaccccaatcctttaccat

SEQ ID NO: 341849 - DNA, 157 bp, Zea mays
  unsure (1)..(157): unsure at all n locations
tccgatttgaccttgggttctccggttcattgtatctcggtgcagntaattcgctgatgggggtgtctgtttgatcatcgacagaacataacagaaatggccttgcgcattgtactcccaaagcttccatcttcaaatctgccttttagatatagat

SEQ ID NO: 341850 - DNA, 425 bp, Zea mays
accaactagcaacatataaagcacaatagtgtaccaacaatggcagccaaaatattttgcttccttatgctccttggtctttctgcaagtgttgctaccgcaaccattttcccacaatgctcacaagctcctatagcttcccttcttcccccatacctctcaccagcggtgtcttcaatgtgtgaaaacccaattgttcaaccctacaggatccaacaggcaatcgcaacaggcatcttaccattatcacccttgttcctccaacaaccgtcagccctattacagcagttacctttggtccatttggtggcacaaaacatcagggcacaacaactacaacaacttgtgctagcaaaccttgctgcatactctcagcaacatcagtttcttccattcaaccaactggctgcattgaactctgctgc

SEQ ID NO: 341851 - DNA, 86 bp, Zea mays
aaacagttgcgacagctcgacaaagatttgtgagagtgatccggcgctgagaagagatggctaagatcgccgcagccgccgcggcg

SEQ ID NO: 341852 - DNA, 429 bp, Zea mays
aaacacaccaagcgaagcgcactagcttcaacctaacaacaatggctaccaagataggagccctccttgcgcttcttgcccttttagtgagcgcaacaaatgcgttcattattccacagtgctcacttgctcctagtgccattattccacagttcctcccaccagttacttcaatgggcttcgaacatccagccgtgcaagcctacaggctacaactagcgcttgcggcgagcgtcttacaacaaccaattgcccaattgcaacaacaatccttggcacatctaaacctacaaaccatcgcaacgcaacagcaacaacagtttctgccatcactgagccacctagccgtggtgaaccctgtcgcctacttgcaacagcagctacttgcatccaacccacttgctctggcgaacgtagctgcataccagc

SEQ ID NO: 341853 - DNA, 347 bp, Zea mays
ttcagcattcaaaaccacaccaagcgaagcgcactagcaacaacctaacaacaatggctaccaagatattagccctccttgcgcttcttgcccttttagtgagcgcaacaaatgcgttcattattccacagtgctcacttgctcctagtgccattattccacagttcctcccaccagttacttcaatgggcttcgaacatccagccgtgcaagcctacaggctacaactagcgcttgcggcgagcgtcttacaacaaccaattgcccaattgcaacaacaatccttggcacatctaaacctacaaaccatcgcaacgcaacagcaacaacagtttctgccatcactg

SEQ ID NO: 341854 - DNA, 433 bp, Zea mays
gttcattattccacaatgctcacttgctccaagttccattattacacagttcctcccaccagtggacttaatgggcttcgaacacccagctgtgcaagcctataggctacaacaagcaattgcggcgagcgtcttacaacaaccaatttcccagttgcaacaacaatccttggcacatctaacaatacaaaccatcgcaacgcaacagcaacaacaattcctaccagcactgagccacctagccatggtgaaccctgccgcctacttgcaacagcagttgcttgcatcaaacccacttgctctggcaaacgtagttgcaaaccagccacaacaacagctgcaacagtttctgccagcgctcagtcaactagccatggtgaaccctgccgcctacctacaacagcaacaactgctttcatctagcccgctcgct

SEQ ID NO: 341855 - DNA, 434 bp, Zea mays
gaaagcacaatagtgtaccaacaatggcatccaaaatattttgcctccttatgctccttggtggttctgcaagtgctgctacggcgaccattttcccgcaatgctcacaagctcctatagcttcccttcttcccccgtacctctcaccagcggtgtcttcggtatgtgaaaacccaattcttcaaccctacaggatccaacaggcaatcgcagctggcatcttacctttatcacccttgttcctccaacaatcatcagccctattacagcagttacctttggtgcatttattggcacaaaacatcagggcacaacaactacaacaacttgtgctagcaaaccttgctgcctactctcagcaacagcagtttcttccattcaaccaactagctgcattgaactctgcttcttatttgcaacaacaacaactacca

SEQ ID NO: 341856 - DNA, 430 bp, Zea mays
tccgaccacgcgtccgattgagaccaacaagctacatagaaagtttaatccagtagcaacaatagagcaacaatggcgaccaagatattttccctccttatgctccttgctctttctgcatgtgttgctaacgcgacaattttccctcaatgctcacaagctcctatagcttcccttcttcccccataccttccatcaatgatagcttcagtatgtgaaaacccagctcttcaaccctataggctccaacaagcaatcgcagcaagcaacatacctttatcacccttgtttcaacaatcgccagccctatctttggtgcagtcattggtacaaaccatcagggcacaacagctgcagcaactcgtgctacctgtgatcaaccaagtagctctggcaaacctttctccctactctcagcaacaacaatttc

SEQ ID NO: 341857 - DNA, 374 bp, Zea mays
ctgggtcttcagaccattagctttatctactccagagcgcagaagaacccgatcgacaccatgagggtgttgctcgttgccctcgctctcctggctctcgctgcgagcgccacctccacgcatacaagcggcggctgcggctgccagccaccgccgccggttcatctaccgccgccggtgcatctgccacctccggttcacctgccacctccggtgcatctcccaccgccggtccacctgccgccgccggtccacctgccaccgccggtccatgtgccgccgccggttcatctgccgccgccaccatgccactaccctactcaaccgccccggcctcagcctcatccccagccacacccatgcccgtgccaaca

SEQ ID NO: 341858 - DNA, 272 bp, Zea mays
gacccacgcgttcgcgctgacttacttcctatctctctatatacttttttaccacacaataataacgtagtaggaggcattatcattgctggcattgccaacaatcaccacaattaaccattcaaatggaaagtaataatacataccccacaaatactatcataaaccgccacaaaataatataccacaataaatataacccttcacatataatccaatttcaacaactaaatacatctacaaaaaaaaaataaaaaatcacatcctccctc

SEQ ID NO: 341859 - DNA, 431 bp, Zea mays
gcttaatctactccagagcgcaaaaaaacccgatcgacaccatgagggtgttgctcgttgccctcgctctcctggctctcgctgcgagcgccacctccacgcatacaagcggcggctgcggctgccagccaccgccgccggttcatctaccgccgccggtgcatctgccacctccggttcacctgccacctccggtgcatctcccaccgccggtccacctgccgccgccggtccacctgccaccgccggtccatgtgccgccgccggttcatctgccgccgccaccatgccactaccctactcaaccgccccggcctcagcctcatccccagccacacccatgcccgtgccaacagccgcatccaagcccgtgccagctgcagggaacctgcggcgttggcagcaccccgatcctgggccagtgcgtcgag

SEQ ID NO: 341860 - DNA, 275 bp, Zea mays
gacccacgcgtacgaagcgacctaccatcatatacctcactttctcatcaccatcaccatcgcataaactaaagtagtttatacagatctccatacatcttaaacatgattctctatctgccccacccactccctccttccctccttcgtccatactccatctttcctcctcacacctaccatcaatatccaatctcgatatctaatactacatcccccaaccgtaccctcaccaactagctagttcctcatccaacttatcttcattacaccta

SEQ ID NO: 341861 - DNA, 432 bp, Zea mays
caacaagcaacatagaaagtggaatccagtagcaacaatagagcaacaatggcgaccaagatattttccctccttatgctccttgctctttctgcatgtgttgctaacgcgacaattttccctcaatgctcacaagctcctatagctgcccttcttcccccataccttccatcaatgaccgcttcagtatgtgaaaacccagcccttcaaccctacaggctccaacaagcaatcgcaacaagcaacttacctttatcacccctgttctttcaacaatcgccagccctatctttggtgcagtcattggtacaaaccatcatggcacaacagctgcagcaactcgtgctaccagtgatcagccaagtagctctggcaaacctttctccctactctcagcaacaacaatttcttccattcaaccaactgtctaca

SEQ ID NO: 341862 - DNA, 305 bp, Zea mays
attagctttatctactccagagcgcagaagaacccgatcgacaccatgagggtgttgctcgttgccctcgctctcctggctctcgctgcgagcgccaccttcacgcatacaagcggcggctgcggctgccagccaccgccggcggttcatataccgccgccggtgcatctgccacctccggttcacctgccaccttcggtgcatatcccaccgccggtgcacctggcgccgccggtgcacctgtcaccgccggtccatgtgccgccgccggttcatatgtcgccgccaccatgccactaccctac

SEQ ID NO: 341863 - DNA, 118 bp, Zea mays
aattgcccgaccgacgcgtgcgtgacgcatatcctttacctactccacagcgcttattaacccgctcgacaccatgaggggggggggggtttcccttactctactggcactcccttct

SEQ ID NO: 341864 - DNA, 431 bp, Zea mays
ctgggtcttcagaccattagctttatctactccagagcgcagaagaacccgatcgacaccatgagggtgttgctcgttgccctcgctctcctggctctcgctgcgagcgccacctccacgcatacaagcggcggctgcggctgacagccaccgccggcggttcatctaccgtcgccggtgcatctgccacctccggttcacctgccacctccggtgcatctcccaccgccggtccacctgccgccgccggtccacctgccaccgccggtccatgtgccgccgccggttcatctgccgccgccaccatgccactaccctactcaaccgccccggcctcagcctcatccccagccacacccatgcccgtgccaacagccgcatccaagcccgtgccagctgcaaataacctgctgcctttgcagcaccccgat

SEQ ID NO: 341865 - DNA, 151 bp, Zea mays
gcaggttgcacctaacattgctgctgctgttgttggcgagaccgggccattcttgcaggggtgttttacatggaaccagaccttctcgtttgctgatgtcgctcgctgctgttccgtgctattccgattgtggtcaacgcatcgtgctgag

SEQ ID NO: 341866 - DNA, 393 bp, Zea mays
gcaacaacctaacaacaatggctaccaagatattatccctccttgcgcttcttgcgctttttgcgagcgcaacaaatgcgtccattattccacaatgctcacttgctcctagttccattattccacagttcctcccaccagttacttcaatggccttcgaacacccagctgtgcaagcctataggctacaacaagcgattgcggcgagcgtcttacaacaaccaattgcccaattgcaacaacaatccttggcacatctaacaatacaaaccatcgcaacgcaacagcaacaacagttcctaccagcactgagccacctagccatggtgaaccctgtcgcctacttgcaacagcagctgcttgcatccaacccacttgctctagcaaacgtag

SEQ ID NO: 341867 - DNA, 233 bp, Zea mays
agacgattaactttatctacaccagagcgcttaagaaccagatcgacaccatgaggggggggctcgtggccctggttctgctggttcttgctagcagcgccacctgcacacatacaagctgcggctgcgacagacaaccaccgcatctacctcatctaccgtatatggcgcatctgccatatctggttcaccagccacatccggagcatttgccacagccgaatcaactaccg

SEQ ID NO: 341868 - DNA, 402 bp, Zea mays
cctaacaaccaatggctaccaagatatagtccctgcttgcgcttcttgcgctttttgcgagcgcaacaaatgcgttcattattccacaatgctcacttgctccaagttccattattacacagttcctcccaccagttacttcaatgggcttcgaacacccagctgtgcaagcctataggctacaacaagcaattgcggcgagcgtcttacaacaaccaatttcccagttgcaacaacaatccttggcacatctaacaatacaaaccatcgcaacgcaacagcaacaacaattcctaccagcactgagccacctagccatggtgaaccctgccgcctacttgcaacagcagttgcttgcatcaaacccacttgctctggcaaacgtagttgcaaaccagccac

SEQ ID NO: 341869 - DNA, 288 bp, Zea mays
ctccttgcgcttcttgcccttttagtgagcgcaacaaatgcgttcattattgcacagtgctcacttgctcctagtgccattattccacagttcctgccaccagttacttcaatgggcttcgaacatccagccgtgcaagcctacaggctacaactagcgcttgcggcgagcgtcttacaacaaccaattgcccaattgcaacaacaatccttggcacatttaaacctacaaaccatcagaacgcatcagcaacaacagtttctgtcatcactgagccacctatgcgtg

SEQ ID NO: 341870 - DNA, 326 bp, Zea mays
aacagtaccatcaatcatcatcaaacttagtaaaatacgcaccaaaccaaatatgaaccgtggattatataacttcaaaaaccattgagctggtgctggtggttgttgccgcaatagatgcagtaataagtgtacattgctcacttactggcagctgcagatgacgcaaacaacaaaaccatgagctgcaacgtgattcacaaaaccatcatgcacaagaacatcagcttcaaccagcactagaacatagcgtgttacagcaacaccaacaacaactagttcacatgcaaccgccacatcataacctacaacacgatgttcatgtt

SEQ ID NO: 341871 - DNA, 320 bp, Zea mays
ttagcaacaacctaacaacaatggctaccaagatattatccctccttgcgcttcttgcgctttttgcgagcgcaacaaatgcgttcattattccacaatgctcacttgctccaagttccattattacacagttcctcccaccagttacttcaatgggcttcgaacacccagctgtgcaagcctataggctacaacaagcaattgcggcgagcgtcttacaacaaccaatttcccagttgcaacaacaatctggccattaacaatcaaaccatgaacgcacacaacacattctaccacctgaccacagctgggaactgcgc

SEQ ID NO: 341872 - DNA, 241 bp, Zea mays
cggccgcccttttttttgtttttttttttttttttttttgtggtttgttttgttttctttggtctcttgcttttttttttatttaatcgttttctttctctgtggaagaagtacaagcgtttaactctattgaggaattgcttgtcgccggctcgacccggagcggaaaacagatgatgtttttcattacaaagcggaaaagacggtttgatcaaaaaccacaacgcccccccgggggggg

SEQ ID NO: 341873 - DNA, 108 bp, Zea mays
ccctgccttttttccattccatcttatcacaaaattctcacactattctcacttgctctctttccccatatttcacacattctccgtctcattcactaaaaacccaat

SEQ ID NO: 341874 - DNA, 377 bp, Zea mays
aatattttgagcattcagaaacacaccaagcgaagcacattagcaacaacctaacaacaatggctaccaagatattatccctccttgcgcttcttgcgctttttgcgagcgcaacaaatgcgttcattattccacaatgctcacttgctccaagttccattattacacagttcctcccaccagttacttcaatgggcttcgaacacccagctgtgcaagcctataggctacaacaagcaattgcggcgagcgtcttacaacaaccaatttcccagttgcaacaacaatccttggcacatctaacaatacaaaccatcgcaacgcaacagcaacaacaattcctaccagcactgagccacctagccatggtgaaccct

SEQ ID NO: 341875 - DNA, 392 bp, Zea mays
aacctaacaacaatggctaccaagatattggcccgtcttgcgcttcttgcgctttttgcgagcgcaacaaatgcgttcattattccacaatgctcacttgctccaagttccattattacacaggtcctcccaccagttacttcaatgggcttcgaacacccagctgtgcaagcctataagctacaacaagcaattgcggcgagcgtcttacaacaaccaatttaccagttgcaacaacaatccttggcacatttaacaatacaaaccatcgcaacgcaacagcaacaacaattcctaccagcactgagccacctagccatggtgaaccctgccgtctacttgcaacagcagttgcttgcatcatacccacttgctctggcaaacgtagttgc

SEQ ID NO: 341876 - DNA, 306 bp, Zea mays
acccacgcgtccggcaggttcatacctcgatcccccccactattatatcctatcccaccaacccgtccacgccgcgtcttttccattctaaaaggtccacaaacaaacaccaactctccgaccacaataaacaaattctaccgatccaacatatcctgaacctcaaactaattacctctcatcatatttttcttttgtaagataaaacccaattctataatcctacaccaaccaacaatcaaatacatctcgcatcctacctttataaaactttcttctccaacaatcatcaaccctatcacatca

SEQ ID NO: 341877 - DNA, 165 bp, Zea mays
cccattctatatcctcatcatccccacctatctaccctttacaaccaaccctaccaacccgcgcattttacattctaaaagctccacatattcacctaaattcaattcacactccacaaatctacacacgtacaacttttaaaaccctcaaattacccaacttaa

SEQ ID NO: 341878 - DNA, 392 bp, Zea mays
gcgaagcgcactagcaacgacctaacaacggtggctaccaagatattagccctccttgcgcttcttgccctttttgtgagcgcaacaaatgcgttcattattccacaatgctcacttgctcctagtgccattattccacagttcctcccaccagttacttcaatgggcttcgaacacctagctgtgcaagccaacatgcaacaacaagcgcttgcggcgagcgtcttacaacaaccaattgcccaattgcaacaacaatccttgccacatctaacaatacaagccatcacaacgcaacagcaacaacagttcctaccagcactgagccacctagccatggtgaaccctgccgcctacttgcaagagcagctgcttgcatccaacccacttgc

SEQ ID NO: 341879 - DNA, 340 bp, Zea mays
aacagcatgaagatggtcatcgttctcgtggtgtgcctggctctgtcagctgccagcgcctctgcaatgcagatgccctgcccctgcgcggggctgcagggcttgtacggcgctggcgccggcctgacgacgatgatgggcgccggcgggctgtacccctacgcggagtacctgaggcagccgcagtgcagcccgctggcggcggcgccctactacgccgggtgtgggcagacgagcgccatgtaccagccgctccggcaacagtgctgccagcagcagatgaggatgatggacgtgcagtccgtcgcgcagcagctgcagatgatgatgcagcttgagc

SEQ ID NO: 341880 - DNA, 398 bp, Zea mays
gcagaagaacccgatcgacaccgggagtgtgttgctcgttgccctcgctctcctggctctcgctgcgagcgccacctccacgcatacaagcggcggctgcggctgccagccaccgccgccggttcatctaccgccgccggtgcatctgccacctccggttcacctgccacctccggtgcatcttccaccgccggtccacctgccgccgccggtccacctgccaccgccggtccatgtgccgccgccggttcatctgccgccgccaccatgccactaccctactcaaccgccccggcctcagcctcatccccagccacacccatgcccgtgcctacagccgcattcaagcccgtgccagctgcagggaacctgcggcgttggcagcaccccgatcctgg

SEQ ID NO: 341881 - DNA, 249 bp, Zea mays
ctatgcgacgtcgtggcttttctataaggtccacaaaattcaactaacggtgcggtcacaatacacagcttataatgagacaaccgtggagaaaatcaactgaactatcgcggatgatatgcttcttgcgacagatcatgtaagcagcgaaaaggccatgacgccattgccctaccgaacaattgtcgcaacatgcatgtgcgaaagggacacaccctgttacctctcatcaagcgcagactgagaagg

SEQ ID NO: 341882 - DNA, 400 bp, Zea mays
gaactcgacaccatgaaggtgctgatcggtgcccttgctctcctggcgctcgctgcgagcgccgcctccagtacaagcggcggctgtggctgccagacaccaccgtttcatctaccgcctccgttctatatgccgcctccgttctatctgccgccgcagcagcagccgcagccatggcaataccccactcaaccaccgcagctaagcccgtgccagcagttcggatcctgcggcgtcggcagcgtcggcagcccgttcctgggccagtgcgtcgagttcctgaggcaccagtgcagcccggcggcgacgccctacggctcgccacagtgccaggcgctgcagcagcagtgctgccaccagatcatgcaggtggagccgctgcaccggtaccaggcgacat

SEQ ID NO: 341883 - DNA, 385 bp, Zea mays
acccgatcgacaccatgagggtggggctcgttgccctcgctctcctggctctcgctgcgagcgccacctccacgcatacaagcggcggctgcggctgccagccaccgccgccggttcatctaccgccgccggtgcatctgccacctccggttcacctgccacctccggtgcatctcccaccgccggtccacctgccgccgccggtccacctgccaccgccggtccatgtgccgccgccggttcatctgccgccgccaccatgccactaccctactcaaccgccccggcctcagcctcatccccagccacacccatgcccgtgccaacagccgcatccaagcccgtgccagctgcagggaacctgcggcgttggcagcaccccgat

SEQ ID NO: 341884 - DNA, 314 bp, Zea mays
ctctcctggcgctggctgcgagcgccacctccaatacaagcggcggctgtggctgccagacaccaccgtttcatctaccggctccgttctatatgccggctccgttctatctgccggcgcagcagcagccgcagccatggcaataccccactcaaccaccgcagctaatcccgtgccagcagttcggatcctgcggcgtcggcagcgtcggcagcccgttcctgggccagtgcgtcgagttcctgaggcaccagtgcagcccggcggcgacgccctactgctcgccacagtgccaggcgctgcagcagcagtgc

SEQ ID NO: 341885 - DNA, 393 bp, Zea mays
ccaacaatggcagccaaaatatgggggtggcttatgctccttggtctttctgcaagtgctgctaccgcaaccattttcccacaatgctcacaagctcctatagcttcctttcttcccccatacctctcaccagcggtgtcttcagtatgtgaaaacccaattcttcaaccctacaggatccaacaggcaatcgcagcaggcatcttacctttatcacccttgttcctccaacaaccgtcagccctattacagcagctacctttggtgcatttgttggcacaaaacatcaaggcacaacaactacaacaacttgtgctaggaaaccttgctgtctactctcagcaacagcagtttcttccattcaaccaactggctgcattgaactctgctgct

SEQ ID NO: 341886 - DNA, 324 bp, Zea mays
actggctgtcttgacttcttgcactccttggctccttgggctgtgcggatgcgctgataacgttaccactttgctaccatgctcacatggttgtattgcttcctctgttcctctaaacatctgagcattggggatgtgaatacgcgattacccaaccctttaagattacacgagccatcagggctgggatgttagcattttaactttattacccttgtcactcctacaacctattaccgtatttcagtatggagcttttgtgggttcgttggatcaagacacaacagctccaccacctcgtgctctcgtgcctggataccttgt

SEQ ID NO: 341887 - DNA, 444 bp, Zea mays
gggtcttcagaccattagctttatctactttagagcgcagaagaacccgatcgacaccatgagggtgttgctcgttgccctcgctctcctggctctcgctgcgagcgccacctccacgcatacaagcggcggctgcggctgccagccaccgccgccggttcatctaccgccgccggtgcatctgccacctccggttcacctgccacctccggtgcatctcccaccgccggtccacctgccgccgccggtccacctgccaccgccggtccatgtgccgccgccggttcatctgccgccgccaccatgccactaccctactcaaccgccccggcctcagcctcatccccagccacacccatgcccgtgccaacagccgcatccaagcccgtgccagctgcagggaacctgcggcgttggcagcaccccgatcctgggccagtgcgt

SEQ ID NO: 341888 - DNA, 389 bp, Zea mays
aacccgatcgacaccatggaggtggtgctcgttgccctcgctctcctggctctcgctgcgagcgccacctccacgcatacaagcggcggctgcggctgccagccaccgccgccggttcatctaccgccgccggtgcatctgccacctccggttcacctgccacctccggtgcatctcccaccgccggtccacctgccgccgccggtccacctgccaccgccggtccatgtgccgccgccggttcatctgccgccgccaccatgccactaccctactcaaccgccccggcctcagcctcatccccagccacacccatgcccgtgccaacagccgcatccaagcccgtgccagctgcagggaacctgcggcgttggcagcaccccgatcct

SEQ ID NO: 341889 - DNA, 136 bp, Zea mays
cgccttctggggggtattctccggcgccgccgggctttgactgctgcagacaaagaagggggaaagactggtggaacaaggaagccccagaatttgaaagataacaagtgatatctacagcaaagcccatagttgg

SEQ ID NO: 341890 - DNA, 376 bp, Zea mays
ccgcgccatcaacgccgagcggaacgtccctgctgtcccgcgccgagcacaaccgcctgccatcgcgcgctactctccctccccgcgcccgcagtccgcagtccgcgccatcaacgccgagcacagccgcctgcctgagcgcgctacgctccctccccgcgccccgccccgcagtcccgcgccgagcagagccgccccgcagtcccgcgccgagcagagccgccccgcagtcccgcaatccctccccaccggtggtctggcacgtcgcctcctcgcctagatccgtccgtggtgcacccctccagccttgcccagctccaaagttccctcctgctcgcgggcacgcggactcaccctaggggccaggccctgggcc

SEQ ID NO: 341891 - DNA, 386 bp, Zea mays
atagagcaacaatggcgacgaggaggttttccctccttatgctccttgctctttctgcatgtgttgctaacgcgacaattttccctcaatgctcacaagctcctatagcttcccttcttcccccataccttccatcaatgatagcttcagtatgtgaaaacccagctcttcaaccctataggctccaacaagcaatcgcagcatgcaacatacctttatcacccttgtttcaacaatcgccagccctatctttggtgcagtcattggttcaaaccatcagggcacagcatctgcagcaactcgtgctacctgtgatcaaccaagtagctctggcaaacctttctccctactctcagcaacaacattttcttccattcaaccaactg

SEQ ID NO: 341892 - DNA, 372 bp, Zea mays
caactagcaacatagaaagcacaatagcgctccaacattggcagccaaaatattttgccggcttatgcgtccttggtctttctgcaagtgctgctacggcgaccattttcccgcaatgctcgcaagctcctatagcttcccttcttcccccgtacctctcaccagcggtgtcttcggtatgtgaaaacccaattcttcaaccctacaggatccaacaagcaatcgcagctggcattttacctttatcacccttgttccttcaacaatcatcagccctattacaacagttacctttggtgcatttattggcacaaaacatcaaggcacaacaactacaacaacttgtgctagcaaaccttgctgtctaccctg

SEQ ID NO: 341893 - DNA, 449 bp, Zea mays
attgagaccaactagcaacatagaaagcactattagtgtaccaacaatggcagccaaaatgggtttgcttccttatgctccttggtctttctgcaagtgttgctaccgcaaccattttcccacaatgctcacaagctcctatagcttcccttcttcccccatacctctcaccagcggtgtcttcaatgtgtgaaaacccaattgttcaaccctacaggatccaacaggcaatcgcaacaggcatcttaccattatcacccttgttcctccaacaaccgtcagccctattacagcagttacctttgtgccatttggtggcacaaaacatcatggcacaacaactacaacaacttgtgctagcaaaccttgctgcatactctcagcaacatcagtttcttccattcaaccaactggctgcattgaactctgcttgttatttgcaacaacaa

SEQ ID NO: 341894 - DNA, 378 bp, Zea mays
ctagcaacgacttaacaacaatggcgaccaagatatatgccctccttgcgcttcttgccctttttgtgagcgcaacaaatgcgttcattattccacaatgctcacttgctcctagtgccattataccacagttcctccgaccagttacttcaatgggcttcgaacacctagctgtgcaagcctacaggctacaacaagcgcttgcggcgagcgtcttacaacaaccaattaaccaattgcaacaacaatccttggcacatctaaccatacaaaccatcgcaacacaacagcaacaacagttcctaccagcactgagccaactagatgtggtgaaccctgtcgcctacttgcaacagcaggtgcttgcatccaacccac

SEQ ID NO: 341895 - DNA, 197 bp, Zea mays
ctttttcactccatccagatctccacggggcgggggttatatcggcttctatgcggtcaacgctgtctcgtaagccatcgcgtacgacgagcaccccgagatgctgcattagtcctaggaacatgccccctttgttccaacctacaatataattaagaagaattttaacatctaagtgcccaatcatgaagggtaca

SEQ ID NO: 341896 - DNA, 387 bp, Zea mays
cccgatcgacaccatgagggtggtgctggttgccctcgctctcctggctctcgctgcgagcgccacctccacgcatacaagcggcggctgcggctgccagccaccgccgccggttcatctaccgccgccggtgcatctgccaccttcggttcacctgccacctccggtgcatcttccaccgccggtccacctgccgccgccggtccacctgccaccgccggtccatgtgccgccgccggttcatctgccgccgccaccatgccactaccctactgaaccgccccggcctcagcctcattcccagccacacccatgcccgtgccaacagccgcattcaagcccgtgccagctgcagggaacctgcggcgttggcagcaccccgatcct

SEQ ID NO: 341897 - DNA, 395 bp, Zea mays
ttaaccctacggatccaacaggaatcggacaggcatcttaccattatcacccttgttcctccaacaaccgtcagccctattacagcagttacctttggtccatttggtggcacaaaacatcagggcacaacaactacaacaacttgtgctagcaaaccttgctgcatactctcagcaacatcagtttcttccattcaaccaactggctgcattgaactctgctgcttatttgcaacaacaattaccattcagccagctagttgctgcctacccccagcaatttcttccattcaaccaactagcagcattgaactctgctgcttatttacagcagcaacaactactaccattcagccagctagctgatgtgagccctgctgccttcttgacacaac

SEQ ID NO: 341898 - DNA, 368 bp, Zea mays
ccacccgtccggaaggacaccaactcgtaaaaagcatagtttatcagtttagaaacaacatggcccccgtggcggccgtgaaccttgccctgccagcccccatcgccttttcaatacacactccctcgcccctccgcgatgccacaatgctcacaccagtactctctctctttctgacaaccatgatagtcgcatacccaactatacaaccctacatgctacctgaggcaatcgcaacacgcatctcacgctgcattagcactaacactccaacaaccatttgacctattccatgaaccattcttatcgcattaaaatcttccaacaacttatgcagatcatctacatcaactcttgctaccaacaat

SEQ ID NO: 341899 - DNA, 401 bp, Zea mays
cgcactagcaacaacctaacaacaatggctaccaagatattagccctccttgcgcttcttgcccttttagtgagcgcaacaaatgcgttcattattccacagtgctcacttgctcctagtgccattattccacagttcctcccaccagttacttcaatgggcttcgaacatccagccgtgcaagcctacaggctacaactagcgcttgcggcgagcgtcttacaacaaccaattgcccaattgcaacaacaatccttggcacatctaaacctacaaaccatcgcaacgcaacagcaacaacagtttctgccatcactgagccacctagccgtggtgaaccctgtcgcctacttgcaacagcagctacttgcatccaacccacttgctctggcgaacgtagc

SEQ ID NO: 341900 - DNA, 113 bp, Zea mays
tcgctcccctgggacgtgatgggtgtgctatactgtcatcgaacttcaattcactgcccgagacacgacaacgtcatgtctgggctaacccctacctgccccatctgaacttt

SEQ ID NO: 341901 - DNA, 398 bp, Zea mays
acccgatcgacaccatgagggtggggctcgttgccctcgctctcctggctctcgctgcgagcgccacctccacgcatacaagcggcggctgcggctgccagccaccgccgccggttcatctaccgccgccggtgcatctgccacctccggttcacctgccacctccggtgcatctcccaccgccggtccacctgccgccgccggtccacctgccaccgccggtccatgtgccgccgccggttcatctgccgccgccaccatgccactaccctactcaaccgccccggcctcagcctcatccccagccacacccatgcccgtgccaacagccgcatccaagcccgtgccagctgcagggaacctgcggcgttggcagcaccccgatcctgggccagtgc

SEQ ID NO: 341902 - DNA, 151 bp, Zea mays
ttgagtcatttagcggcgatgattgagtaaggatgtgtcacgcatcaccatgggtggcagtgtcagtgtgagcaatgacctgaatgaacaattgaaatgaaaagaaaaaagtattgttccaaaaaaaaaaaaaaaaaaaaaaaaaataaag

SEQ ID NO: 341903 - DNA, 296 bp, Zea mays
atggcagctaaaatattgggccgggtatgctccttggtctgtctgcaagtgctgctacagcgaccattttaccacaatgctcacaagctcctatagcttcccttcttcctccgttcctctcaccaacggtgtcttcggtatgtgaaaacccaattcttcaaccctacatgatccaacaggcaatctcgggtgggctttttacatcatcaaatttgttcctgtaacaatcatcagtcatattacatcagaatcctttggtgcatttattggcacaaaacatcatggcacaactacta

SEQ ID NO: 341904 - DNA, 389 bp, Zea mays
ggccgaccacgcgtccggggtgttcaaaccattatctttatctactctagagcgcaaaaaaacccgatcgacaccatgagggtgttgctcgttgccctcgctctcctggctctcgctgcgagcgccacctccacgcatacaagcggcggctgcggctgccagccaccgccgccggttcatctaccgccgccggtgcatctgccacctccggttcacctgccacctccggtgcatctcccaccgccggtccacctgccgccgccggtccacctgccaccgccggtccatgtgccgccgccggttcatctgccgccgccaccatgccactaccctactcaaccgccccggcctcagccttattcccagccacacccatgcccgtgccaaca

SEQ ID NO: 341905 - DNA, 280 bp, Zea mays
gctgtatctactccagagcgcagaagaaccttatcgacaccatgagggtgttgctcggtggcctcgctctcctggctctcgctgcgagcgccacctccacgcatacaagcggcggctgcggctgccagccaccgccgccggttcatctaccgccgccggtgcatctgccacctccggttcacctgccacctccggtgcatgtcccaccgccgggccacctgccgtcgccggtccacctgtcaccgccggtccatgtgccgacaccggttcatctgccgcc

SEQ ID NO: 341906 - DNA, 400 bp, Zea mays
aacctaacaacaatggctaccaagatatgtatccctccttgcgcttcttgcgctttttgcgagcgcaacaaatgcgttcattattccacaatgctcacttgctccaagttccattattacacagttcctcccaccagttacttcaatgggcttcgaacacccagctgtgcaagcctataggctacaacaagcaattgcggcgagcgtcttacaacaaccaatttcccagttgcaacaacaatccttggcacatctaacaatacaaaccatcgcaacgcaacagcaacaacaattcctaccagcactgagccacctagccatggtgaaccctgccgcctacttgcaacagcagttgcttgcatcaaacccacttgctctggcaaacgtagttgcaaaccag

SEQ ID NO: 341907 - DNA, 388 bp, Zea mays
ccaaaatattttgcctggggatagtccttggtctttctgcaagtgctgctaccgcgagcattttcccgcaatgctcacaagctcctatagcttcccttcttcccccatacctctcaccagcgatgtcttcagtatgtgaaaatccaattcttctaccctacaggatccaacaggcaatcgcaaaaagcatctcacctttatcacccttgttcctccaacaatcatcagccctattacagcagctacctttggtgcatctatcggcacaaaacatcatggcacaacaactacaacaactcgtgctagcaaaccttgctgtctactctcaacaacagcagttacctttggtgcatatgctggcacaaaacatcacggctcatcaactaca

SEQ ID NO: 341908 - DNA, 388 bp, Zea mays
cgatcgacaccatgagggtggggctcgttgccctcgctctcctggctctcgctgcgagcgccacctccacgcatacaagcggcggctgcggctgccagccaccgccgccggttcatctaccgccgccggtgcatctgccacctcctgttcacctgccaccttcggtgcatctcccaccgccggtgcacctgccgccggcggtccacctgccaccgccggtccatgtgccgccgccggttcatctgccgtcgccaccatgccactaccctactcaaccgccccggccttagcctcatccccagccacacccatgcccgtgccaacagccgcattcatgcccgtgccagctgcagggaacctgcggcgttggcagcaccccgatcctggg

SEQ ID NO: 341909 - DNA, 388 bp, Zea mays
cagaccattagctttatctactccagagcgcataagaacccgatcgacaccatgagggtgttgctcgttgccctcgctctcctggctctcgctgcgagcgccacctccacgcatacaagcggcggctgcggctgccagccaccgccgccggttcatctaccgccgccggtgcatctgccacctccggttcacctgccacctccggtgcatctcccaccgccggtccacctgccgccgccggtccacctgccaccgccggtccatgtgccgccgccggttcatctgccgccgccaccatgccactaccctactcaaccgccccggcctcagcctcatccccagccacacccatgcccgtgccaacagccgcattcaaacccgtgccagc

SEQ ID NO: 341910 - DNA, 388 bp, Zea mays
ggcagtgcgtagagaggatcgtcttacagaacagcatgaagatggtcatcgttctcgtcgtgtgcctggctctgtcagctgccagcgcctctgcaatgcagatgccctgcccctgcgcggggctgcagggcttgtacggcgctggcgccggcctgacgacgatgatgggcgccggcgggctgtacccctacgcggagtacctgaggcagccgcagtgcagcccgctggcggcggcgccctactacgccgggtgtgggcagacgagcgccatgtatcagccgctccggcaacagtgctgccagcagcagatgaggatgatggacgtgcagtccgtcgcgcagcagctgcagatgatgatgcagcttgagcgtgccgctgccgccagcag

SEQ ID NO: 341911 - DNA, 348 bp, Zea mays
tgctatccctccaccaaaaaaaattttactgttaaccagcgaggcagcctaggaaaaatgcgcgaaagcaaagaaaacaatctcccacgctcacaagcagatcggcgcgcattactgcagcccagtgcgctcgcagaccagcagatcgagaggcgaggatccggggggacgacctgggtcatggccgcggctgccgcggcggcgaggacgccggactggtactgatgttgctgctgctgctgctgcagcgcctgctgcatcaggagcgcctgctgctgctgctgctgccggagcctgtgctgctgctggtggtggctgcccccggtgccgttcatctcctccagctcc

SEQ ID NO: 341912 - DNA, 418 bp, Zea mays
caactagcaacatagaaagcacaatagtgtaccaacaatggcagccaaaatattttgcctccttatgctccttggtctttctgcaagtgctgctacggcgaccattttcccgaaatgctcgcaagctcctatagcttcccttcttcccccgtacctctcaccagcggtgtcttcggtatgtgaaaacccaattcttcaaccctacaggatccaacaggcaatcacagctggcatcttacctttatcacccttgttcctccaacaatcatcagccctattacatcagttacctttggtgcatttattggcacaaaacatcagggcacaacaactacaacaacttgtgctagcaaaccttgctgcctactctcagcaacagcagtttcttccattcaaccaactagctgcattgaactct

SEQ ID NO: 341913 - DNA, 431 bp, Zea mays
agaccaacaagcaacatagaaagtggaatcctttagcaacaatagagcaacaatggcgaccaagatattttccctccttatgctccttgctctttctgcatgtgttgctaacgcgacaattttccctcaatgctcacaagctcctatagcttcccttcttcccccataccttccatcaatgatagcttcagtatgtgaaaacccagctcttcaaccctataggctccaacaagcaatcgcagcaagcaacatacctttatcacccttgtttcaacaatcgccagccctatctttggtgcagtcattggtacaaaccatcagggcacagcagctgcagcaactcgtgctacctgtgatcaaccaagtagctctggcaaacctttctccctactctcagcaacaacaatttctttcattcaccaactgtctac

SEQ ID NO: 341914 - DNA, 407 bp, Zea mays
acattattactcaattatcgccgctagctactgcctacgctcaacaacaacaacttcttccatttaaccaattggccgcactgaaccccgctgcttatttgcagcagcaaatactactaccatttagccagctagctacagcaagccgtgcttccttcttgacacaacaacagttgctgccgttctaccagcagtttgcggctaaccccgcaaccctcttacaactacaacaattgttgccctttgtccaacttgctttgacaaacccagcagcctcctaccaacaacacatcattggtggtgccctcttttagattgcttattagatgtaattcaataataaagttttttggatgatgtatgtggccaaccagaaataaaaaagtacatttccagattctaatgtg

SEQ ID NO: 341915 - DNA, 373 bp, Zea mays
gcggcagtgcgtagagaggatcgtctaacataacagcatgaagatggtcatcgttctcgtcgtgtgcctggctctgtcagctgccagcgcctctgcaatgcagatgccctgcccctgcgcggggctgcagggcttgtacggcgctggcgccggcctgacgacgatgatgggcgccggcgggctgtacccctacgcggagtacctgaggcagccgcagtgcagcccgctggcggcggcgccctactacgccgggtgtgggcagacgagcgccatgtaccagccgctccggcaacagtgctgccagcagcagatgaggatgatggacgtgcagtccgtcgcgcagcagctgcagatgatgatgcaacttgagcgt

SEQ ID NO: 341916 - DNA, 439 bp, Zea mays
  unsure (1)..(439): unsure at all n locations
ccacgcgtccgnacaatgctacaagctcctatagcttcctttcttctttcatacctctcaccagcggtgtgttcaatgtgtgaaaacccaattgttcaaccctacaggatccaacaggcaatcgcaacaggcatcttaccattatcacccttgttcctccaacaaccgtcagccctattacagcagttacctttggtccatttggtggcacaaaacatcagggcacaacaactacaacaacttgtgctagcaaaccttgctgcatactctcagcaacatcagtttcttccattcaaccaactggctgcattgaactctgctgcttatttgcaacaacaattaccattcagccagctagttgctgcctacccccagcaatttcttccattcaaccaactagcagcattgaactctgctgttatttacagcagcaacaact

SEQ ID NO: 341917 - DNA, 252 bp, Zea mays
gggcgacccacgcgttcgattagttatttacccaacaccgttttaacattctaaacaacaccaaaaaggcgggggggcgggggcatttcatctttgacgtagcacctaaatccaatcttctagcccacaatgctcaaaacaatgactgggtaatccctcacgcttcccatctcaatagccaagtatacaatcccactttttccaacaggcgatataaccaagaatcctacaccgattatccttaacaacaca

SEQ ID NO: 341918 - DNA, 380 bp, Zea mays
gaccattagctttatctactccagagcgcagtagaacccgatcgacaccatgagggtgttgctcgttgccctcgctctcctggctctcgctgcgagcgccacctccacgcatacaagcggcggctgcggctgccagccaccgccgccggttcatctaccgccgccggtgcatctgccacctccggttcacctgccacctccggtgcatcttccaccgccggtccacctgccgccgccggtccacctgccaccgccggtccatgtgccgccgccggttcatctgccgtcgtcaccatgccactaccctactcaaccgccccggcctcagcctcattcccagccacacccatgcccgtgccaacagccgcattcaagcccgt

SEQ ID NO: 341919 - DNA, 312 bp, Zea mays
cagcgacaccaaaagggcggggcgaggggccctttctctcctggctctcgctgcgagcgccaccttcacgcatacaagcggtggctgcggttgccagccaccgccgccggttcatttaccgccgccggtgcatctgccacctccggttcacctgacacctccggtgcatctcccaccgtctgtccacctgccgccgccggtccacctgtcaccgccggtccatgtgccgccgacggttcatctgccgccgtcaccatgccactaccctactcaaccgccccgggcttatactcatccacaaccacacccatg

SEQ ID NO: 341920 - DNA, 289 bp, Zea mays
gagggatccacatataaagccattttaaggttcttcttttcagccaacttctcaagcaagaggtctatggtacatcagcggattgctatatctcctgcagtgagttcacactacagtggtgctgtgcctctgacatgctatatatgccgctctcaacgtcggcgtacgagccatcgtcaatataccgcttgcatgaagactcatgtattcaactctatcagcgccaaagaggtttcatcttgtacgtcatacttctacaacgcgcatctcagccagacccacatctatg

SEQ ID NO: 341921 - DNA, 350 bp, Zea mays
caactagcaacatagaaagcacaatagtgtaccaacaatggcagccaaaatattttgcttcctttatgctccttggtctttctgcaagtgttgctaccgcaaccattttcccacaatgctcacaagctcctatagcttcccttcttcccccatacctctcaccagcgggtgtcttcaatgtgtgaaaacccaattgttcaaccctacaggatccaacaggcaatcgcaacaggcatcttaccattatcacccttgttcctccaacaaccgtcagccctattacagcagttacctttggtccatttggtggcacaaaacatcaaggcacaacaactacaacaacttgtgct

SEQ ID NO: 341922 - DNA, 207 bp, Zea mays
gcgctcttgtctcaccttacacaaaatctctctgtctcacgtctctcccgcgcgcccttctcccgcgcacgggcggctccgccgccggtcgcgccgccccgaccgcgccccgccctcgaggagcccaccccggccgtcaccgcggccgcctctccagcccccaatagcgccgcgtccaagtggagaaaacccaattgttgaaccctc

SEQ ID NO: 341923 - DNA, 436 bp, Zea mays
gcgtgcgtacatcatattaagcacaatagttttccaataattgcagctaaaatattttggcggcttatgctccttggtctttctgcaagtgctgctacggcgaccattttcccacaatgctcacaagctcctatagctaacgttcttcccccgtacctctcaccaacggtgtcttcggtatgtgaaaacccaattcttcaaccctacaggatccaacaggcaatcgcagctggcatcttacctttatcacccttgttccttcaacaatcatcatccctattacagcagttacctttggtgcatttattggcacataacatcagggcacatcaactacaacaacttgtgctagcaaaccttgctgtctactctcagcaccagcattttcttcattcaaccaacttactgcattgaactctgcttcttaatttcaaca

SEQ ID NO: 341924 - DNA, 392 bp, Zea mays
ctggacgtcagcctagcaattagctcatcgactccagattggagaactcgacaccatgaaggtgctgatcgttgcccttgctctcctggcgctcgctgcgagcgccgcctccagtacaagcggcggctgtggctgccagacaccaccgtttcatctaccgcctccgttctatatgccgcctccgttctatctgccgccgcagcagcagccgcagccatggcaataccccactcaaccaccgcagctaagcccgtgccagcagttcggatcctgcggcgtcggcagcgtcggcagcccgttcctgggccagtgcgtcgagttcctgaggcaccagtgcagcccggcggcgacgccctacggctcgccacagtgccaggcgctgcagcagcagt

SEQ ID NO: 341925 - DNA, 410 bp, Zea mays
cgcgtccgcagaaacacaccaagcgaagcacattagcatctacctattaacaatggctaccaagatattatccctccttgcgcttcttgcgctttttgcgagcgcaacaaatgcgttcattattccacaatgctcacttgctccaagttccattattacacagttcctcccaccagttacttcaatgggcttcgaacacccagctgtgcaagcctataggctacaacaagcaattgcggcgagcgtcttacaacaaccaatttcccagttgcaacaacaatccttggcacatctaacaatacaaaccatcgcaacgcaacagcaacaacaattcctaccagcactgagccacctagccatggtgaaccctgccgcctacttgcaacagcagttgcttgcatcaaacccac

SEQ ID NO: 341926 - DNA, 154 bp, Zea mays
cctagccttaatgagcgacactgctttccgtgttgttgtggttgattatgccgatgatgacacagcatctgttgcagactacactgaggttgatcatacaatctactctgtgggacctgccgatgctctatcaggacatatagttgatcgcatc

SEQ ID NO: 341927 - DNA, 403 bp, Zea mays
atccagatcagcaaagcggcagtgcgtagagtggatcgtcgaacagaacagcatgaagatggtcatcgttctcgtcgtgtgcctggctctgtcagctgccagcgcctctgcaatgcagatgccctgcccctgcgcggggctgcagggcttgtacggcgctggcgccggcctgacgacgatgatgggcgccggcgggctgtacccctacgcggagtacctgaggcagccgcagtgcagcccgctggcggcggcgccctactacgccgggtgtgggcagacgagcgccatgtaccagccgctccggcaacagtgctgccagcagcagatgaggatgatggacgtgcagtccgtcgcgcagcagctgcagatgatgatgcagcttgagcgtgccgctgccgccagc

SEQ ID NO: 341928 - DNA, 424 bp, Zea mays
ggtcttcagaccattaactttatttactccttagcgcagaagaacccgatcgacaccatgagggtgttgctcgttgccctcgctctcctggctctcgctgcgagcgccacctccacgcatacaagcggcggctgcggctgccagccaccgccgccggttcatctaccgccgccggtgcatctgccacctccggttcacctgccacctccggtgcatctcccaccgccggtccacctgccgccgccggtccacctgccaccgccggtccatgtgccgccgccggttcatctgccgccgccaccatgccactaccctactcaaccgccccggcctcagcctcatccccagccacacccatgcccgtgccaacagccgcattcaagcccgtgccagctgcatggaacctgctgcgttggcagcaccc

SEQ ID NO: 341929 - DNA, 406 bp, Zea mays
caactagcaacatagaaagcacaatagtgtaccaacaatggcagccaaaatattttgcctccttatgctccttggtctttctgcaagtgctgctacggcgaccattttcccacaatgctcacaagctcctatagcttcccttcttcccccgtacctctcaccagcggtgtcttcggtatgtgaaaacccaattcttcaaccctataggatccaacaggcaatcgcagctggcatcttacctttatcacccttgttcctccaacaatcatcagccctattacagcagttacctttggtgcatttattggcacaaaacatcagggcacaacaactacaacaacttgtgctagcaaaccttgctgcctactctcagcaacaacaagtttctccattcaaccaactagct

SEQ ID NO: 341930 - DNA, 406 bp, Zea mays
gtcgccatctaccagtccaaggtctccctatttaggaagtctggacccgacgtgccgccggggtacgatccggcgcaagtggccgatgccaaacccaagacgaaggcggccaagcggaacgagcgacggaaagagaaacggcagcaggtagcggttctctgtctggtgcttgtgctcgtatcgccatggattgcgagggaaaccgtcagatttagttggattggattggtcatcataggagtttgtttactaagtgtccattggagaaccaacaatggagttgtgcttgtgatggaaggaggaattgtaccttttgtttctcgtgcattagtcagccatactcaatagtctgtataggaaaaagtcgacccttttacaatgcttccaccattaccatgataccttt

SEQ ID NO: 341931 - DNA, 383 bp, Zea mays
gcaacatagaaagtggaatacagtagcaacaatagagcaacaatggcggccaagatattttccatccttatgctccttgctctttctgcatgtgttgctaacgcgaccatttttcctcaatactcacaagctcctatagctgcccttcttcccccataccttccatcaatgaccgcttcagtatgtgaaaacccagcccttcaaccctacaggctccaacaagcaatcgcaacaagcaacttacctttatcacccctgttctttcaacaatcgccagccctatctttggtgcagtcattggtacaaaccatcagggcacaacagctgcagcaactcgtgctaccagtgatcagccaagtagctctggcaaaccttctccctac

SEQ ID NO: 341932 - DNA, 368 bp, Zea mays
ccgggccgacccacgcgtgcgaaaatcataatgcagaatacagttttaagtttcaaacaacaacggcggccacgagattctggatgcttatactacgagccctgtgcgcgtggatcgctgacgcaacgatttataatcaatacgtacaagctcacatacctgccgttgttgccgcatacattacatcaatgaccgggctaagactgtgaaaacccaatccttatacactacaacatccaacttgccatcgtaccaagcatctccagtttcttacacccgttcttctaccaattgccagccctactctttggcgcagtcatcggcacaaaccataagggcaacaacaactgcaacaactcgtgctacca

SEQ ID NO: 341933 - DNA, 219 bp, Zea mays
cgtcgctccataacgattgacggaccagggggctgcatgatcgtcgtgctacactgggatcaaactactaggtgtaggcagcctttgtccgtactttcagcaacaacgctttcttccattaaagcaactatctacattgggccgtgctgttcttttgcaacgacgactattacaattcacgcacttagctcctgcctaatgtgaacaccaacaacttct

SEQ ID NO: 341934 - DNA, 438 bp, Zea mays
ctttatcgcccttgttgtgtcaacaatcgccttccctatctttggtgcagtcattggtacaaaccatcagggcacaacagctgcagcaactcgtgctacctgtgatcaaccaagtagctctggcaaacctttctccctactctccgcaacaacaatttcttccattcaaccaactgtctacactgaaccctgctgcttatttgcagcaacaactattaccatttagccagctagctactgcctactctcaacaacaacaacttcttccatttaaccaattggccgcactgaaccccgctgcttatttgcagcagcaaatactactaccatttagccagctagctacagcaagccgtgcttccttcttgacacaacaacagttgctgccgttctaccagcagtttgcggctaaccccgcaaccctcttacaactacaac

SEQ ID NO: 341935 - DNA, 429 bp, Zea mays
agcgaagctacctagcaacgacttaacaacattggctaccaagatattagccctccttgcgcttcttgccctttttgtgagcgcaacaaatgcgttcattattccacaatgctcacttgctcctagtgccattataccacagttcctccgaccagttacttcaatgggcttcgaacacctagctgtgcaagcctacaggctacaacaagcgcttgcggcgagcgtcttacaacaaccaattaaccaattgcaacaacaatccttggcacatctaaccatacaaaccatcgcaacacaacagcaacaacagttcctaccagcactgagccaactagatgtggtgaaccctgtcgcctacttgcaacagcaggtgcttgcatccaacccacttgctctggcatacgtagctgcataccaacaacaacaaca

SEQ ID NO: 341936 - DNA, 377 bp, Zea mays
  unsure (1)..(377): unsure at all n locations
actgggtcttcagaccattagctttatctactccagagcgcagaagaacccgatcgacaccatgagggtgttgctcgttgccctcgctctcctggctctcgctgcgagcgccacctccacgcatacaagcggcggctgcggctgccagccaccgccgccggttcatctaccgccgccggtgcatctgccacctccggttcacctgccacctccggtgcatctcccaccgccggtccacctgccgccgccggtccacctgccaccgccggtccatgtgccgccgccggttcatctgccgccgccaccatgccactaccctactcaaccgccccggcctcagcctcatccncagccacacccatgcccgtgccaacaag

SEQ ID NO: 341937 - DNA, 383 bp, Zea mays
ctcatatgtatttgcactcatgcatcacaaatcatccttctatcagtaccatcaatcatcattcatcttagtagtataggcaccaaatcaaatctgcaacatcaattatctaactccaaaaaccatgaagctggtgcttgtggttcttgctttcattgctttagtatcaagtgtttcttgtacacagacaggcggctgcagctgtggtcaacaacaaagccatgagcagcaacatcatccacaacaacatcatccacaaaaacaacaacatcaaccaccaccacaacatcaccagcagcagcaacaccaacaacaacaagttcacatgcaaccacaaaaacatcagcaacaacaagaagttcatgttcaacaacaacaacaac

SEQ ID NO: 341938 - DNA, 439 bp, Zea mays
gcaacatagaaagcacaatagtgttccaactttggcagccaaaatattttgcctcgcttatgctccttggtctttctgcaagtgctgctacggcgaccattttcccgaaatgctcgcaagctcctatagcttcccttcttcccccgtacctctcaccagcggtgtcttcggtatgtgaaaacccaattcttcaaccctacaggatccaacaggcaatcacagctggcatcttacctttatcacccttgttcctccaacaatcatcagccctattacatcagttacctttggtgcatttattggcacaaaacatcagggcacaacaactacaacaacttgtgctagcaaaccttgctgcctactctcagcaccagcagtttcttccattcaaccaactagctgcattgaactctgcttttatttgcaacaacaacaacta

SEQ ID NO: 341939 - DNA, 167 bp, Zea mays
gttgctatctctgctggtctgaacggatgggccttataccctcactaactttcgaacagaggcttgcatgtaattttggagtctgggaaactaagacgatggagaggctctggagagagaacttttttgacactgcgacaaataactggaccaccaataacacaaga

SEQ ID NO: 341940 - DNA, 435 bp, Zea mays
  unsure (1)..(435): unsure at all n locations
gagaccaactagcaacatagaaagcacaatagtgtaccaacaatggcagccaaaatattttgcttccttatgctccttggtctttctgcaagtgctgctaccgcaaccattttcccacaatgctcacaagctcctatagcttcctttcttcccccatacctctcaccagngnnnnnnnnnnnntgtgnanacnnnntnntnnnnnnntacaggatccaacaggcaatcgcagcaggcatcttacctttatcacccttgttcctccaacaaccgtcagccctattacagcagttacctttggtgcatttgttggcacaaaacatcaaggcacaacaactacaacaacttgtgctaggaaaccttgctgcctactctcagcaacagcagtttcttccattcaaccaactggctgcattgaactctgctgcttatttg

SEQ ID NO: 341941 - DNA, 362 bp, Zea mays
  unsure (1)..(362): unsure at all n locations
ctgggtcttcagaccattagctttatctactccagagcgcaaaagaacccgatcgacaccatgagggtgttgctcgttgccctcgctctcctggctctcgctgcgagcgccacctccacgcatacaagcggcggctgcggctgccagccaccgccgccggttcatctaccgccgccggtgcatctgccacctccggttcacctgccacctccggtgcatctnccaccgccggtccacctgccgccgccggtccacctgccaccgccggtccatgtgccgccgccggttcatctgccgccgccaccatgccactaccctactcaaccgccccgggctcagcctcatccccagccacacccatg

SEQ ID NO: 341942 - DNA, 435 bp, Zea mays
  unsure (1)..(435): unsure at all n locations
ccataaccttaatctactccaaagcgcataagaaacccgatcgacaccatgagggtgttgctcgttgccctcgctctcctggctctcgctgngagcgccacctncacgcatacaagcggcggctgcggctgccagccaccgccgccggttcatctaccgccgccggtgnntntnnnttctnntnnttanntgncaccttcngtgcttttcccaccgccggtccacctgccgccgccggtccacctgccaccgtcggtccatgtgccgccgccggttcatctgccgncgccaccatgccactaccctactcaaccgccccggcctcagcctcatccccagccacacccatgcccgtgccaacagccgcatccaaacccgtgccagctgcagggaacctgcggcgttggcagcaccccgatcctgggccagtgcgtc

SEQ ID NO: 341943 - DNA, 78 bp, Zea mays
ggccacatacatcatccaaaaataagatgttacatttccagattctactgtgaaaaaaacaatgaggtagttgctcgt

SEQ ID NO: 341944 - DNA, 334 bp, Zea mays
ccagatcagcaaagcggcagtgcgtttataggatcgtcgaacagaacagcatgaagatggtcatcgttctcgtcgtgtgcctggctctgtcagctgccagcgcctctgcaatgcagatgccctgcccctgcgcggggctgcagggcttgtacggcgctggcgccggcctgacgacgatgatgggcgccggcgggctgtacccctacgcggagtacctgaggcagccgcagtgcagcccgctggcggcggcgccctactacgccgggtgtgggcagacgagcgccatgtaccaaccgctccggcaacagtgctgccagcagcagatgaggatgat

SEQ ID NO: 341945 - DNA, 439 bp, Zea mays
  unsure (1)..(439): unsure at all n locations
gagaccaacaagcaacatagaaagtggattccagtagcaacaatagagcaacaatggcgaccaagatattttccctccttatgctccttgctctttctgcatgtgttgctaacgcgacaattttccctcaatgctcacaagctcctatagcttcccttcttcccccatacctnnnatcaannnnnnnnnnnnnntttnnnnnnnnnnnnncttcaaccctatatgctccaacaagcaatcgcagcaagcaacatacctttatcacccttgtttcaacaatcgccagccctatctttggtgcagtcattggtacaaaccatcatggcacagcagctgcagcaactcgtgctacctgtgatcaaccaagtagctctggcaaacctttctccctactctcagcaacaacaatttcttccattcaaccaactgtctacattga

SEQ ID NO: 341946 - DNA, 425 bp, Zea mays
  unsure (1)..(425): unsure at all n locations
tctgtctcgcgctggcgcagcgcagggctctcgacacgcgcgcctcatccggtaccggcgtgacgagcgcctccgagctcttcaccgcgcgccgtgccgcccgtggggcccgactctccgacctggacctggatccgcacgccgacgcgctccgggaccagcacggacttggnnnnnnnnnncggttctgttgttgccttttcgttannnaagcttaacgccgtcggggacgtgcggcagcacctgcacaccggggncccgccaccgcgtcgccgcgggtcagtacaccgatcagatcttatcgtacatagacaacaacaaccttggggttggggattctgcagctcggaggaacagacttgataagctgatgttcaggacaaatgagctgcttgctggtgctgtactgcaagcacaagcgcgtg

SEQ ID NO: 341947 - DNA, 412 bp, Zea mays
cacaaaacatcaaggcacaacaactacaacaacttgtgctaggaaaccttgctgcctactctcagcaacagcagtttcttccattcaaccaactggctgcattgaactctgctgcttatttgcaacaacaactaccattcagtcagctagctgctgcctacccccagcaatttcttccattcaaccaactggcagcattgaactctgctgcttatttacaacagcaacagctaccaccattcagccagctagctgatgtgagccctgttgccttcttgacacaacaacagttgttgccgttctacctgcacgctgcgcctaacgctggcaccctgttacaactgcaacaattgctgccattcaaccaacttgctttgacaaacccaacagcgttctaccaacaacccatcat

SEQ ID NO: 341948 - DNA, 438 bp, Zea mays
  unsure (1)..(438): unsure at all n locations
attcagaaacacaccaagcgaagcacattagctacaacctaacaacaatggctaccaagatattatccctccttgcgcttcttgcgctttttgcgagcgcaacaaatgcgttcattattccacaatgctcacttgctccaagttccattattacacagttcctcccaccagttnntnnantgnncttnnnacacccanctnttcnancntttaggctacaacaagcaattgcggcgagcgtcttacaacaaccaatttcccagttgcaacaacaatccttggcacatntaacaatacaaaccatcgcaacgcaacagcaacaacaattcctaccagcactgagccacctagccatggtgaaccctgccgcctacttgcaacagcagttgcttgcatcaaacccacttgctctggcaaacgtagttgcaaaccagccac

SEQ ID NO: 341949 - DNA, 420 bp, Zea mays
  unsure (1)..(420): unsure at all n locations
caaagcggcagtgcgtagagaggatcgtcgaacagaacagcatgaagatggtcatcgttctcgtcgtgtgcctggctctgtcagctgccagcgcctctgcaatgcagatgccctgcccctgcgcggggctgcagggcttgtacggcgctggcgccggcctgacgacgatgatgggnnnnnnnngnnttttnnnnttcnnnnnntnnnttnggcagccgcagtgcagcccgctggcggcggcgccctactacgccgggtgtgggcagacgagcgccatgtaccagccgctccggcaacagtgctgccagcagcagatgaggatgatggacgtgcagtccgtcgcgcagcagctgcagatgatgatgcagcttgagcgtgccgctgccgncagcagcaagctgtacgagccagctttgatgc

SEQ ID NO: 341950 - DNA, 180 bp, Zea mays
  unsure (1)..(180): unsure at all n locations
gagttctatgatcnngcgagcggcnncgctctagtaggttatccaagnncttacgtaccgnnngtgcatgcgagcgtcgatagctttcttctatagtggtnncacctaaattcaaaattcatctggccgnntcgttttaccaacngnntcgtgactagggggaaaacccctgggggcgtt

SEQ ID NO: 341951 - DNA, 436 bp, Zea mays
  unsure (1)..(436): unsure at all n locations
cagaccattagctttatctactccagagcgcagaagaacccgatcgacaccatgagggtgttgctcgttgccctcgctctcctggctctcgctgcgagcgccacctccacgcatacaagcggcggctgcggctgccagccaccgccgccggttcatctaccgccgccggtgcatntgnnanntncggttaaactgnctcctncggtgnttctcccaccgccggtccacctgccgccgccggtccacctgccaccgccggtccatgtgccgccgccggttcatctgccgncgccaccatgccactaccctactcaaccgccccggcctcagcctcatccccagccacacccatgcccgtgccaacagccgcatccaagcccgtgccagctgcagggaacctgcggcgttggcagcaccccgatcctgggccagtgcg

SEQ ID NO: 341952 - DNA, 433 bp, Zea mays
  unsure (1)..(433): unsure at all n locations
tgggtcttcagaccattagctttatctactccagagcgcagaagaacccgatcgacaccatgagggtgttgctcgttgccctcgctctcctggctctngctgcgagcgccacctccacgcatacaagcggcggctgcggctgccagccaccgccgccggttcatctaccgccgnnngtgcatntgncacctnncggttacctgnnnnntnntgtgcatctcccaccgccggtccacctgccgccgccggtccacctgccaccgccggtccatgtgccgccgccggttcatctgccgccgccaccatgccactaccctactcaaccgccccggcctcagcctcatccccagccacacccatgcccgtgccaacagccgcatccaaacccgtgccagctgcaaggaacctgcggcgttggcagcaccccgatcct

SEQ ID NO: 341953 - DNA, 423 bp, Zea mays
gaccaactagcaacatagaaagcacaatagtgtaccaacaatggcagccaaaatattttgcctccttatgctccttggtctttctgcaagtgctgctacggcgaccattttcccacaatgctcacaagctcctatagcttcccttcttcccccgtacctctcaccagcggtgtcttcggtatgtgaaaacccaattcttcaaccctataggatccaacaggcaatcgcagctggcatcttacctttatcacccttgttcctccaacaatcatcagccctattacagcagttacctttggtgcatttattggcacaaaacatcagggcacaacaactacaacaacttgtgctagcaaaccttgctgcctactctcagcaacaacagtttcttccattcaaccaactagctgcattgaactctgc

SEQ ID NO: 341954 - DNA, 430 bp, Zea mays
  unsure (1)..(430): unsure at all n locations
tagcaacatataaagcacaatagtgtactaacaatggctgccaaaatannnngcctncttatgctccttggtctttctgcaagtgctgctacggcgaccattttcccacaatgctcacaagctcctatagcttcccttcttcccccgtacctctcaccagcggtgtcttcggtatgtgaaaacccaattcttcaaccctataggatccaacaggcaatcgcagctggcatcttacctttatcacccttgttcctccaacaatcatcagccctattacagcagntacctttggtgcatttattggcacaaaacatcagggcacaacaactacaacaacttgtgctagcaaaccttgctgcctactctcagcaacaacagtttcttgcattcaaccaactagctgcattgaactctgcttcttatttgcaac

SEQ ID NO: 341955 - DNA, 422 bp, Zea mays
  unsure (1)..(422): unsure at all n locations
attgagaccaacaagcaacatagaaagtggaatccagtagcaacaatagagcaacaatggcgaccaagatattttccctccttatgctccttgctctttctgcatgtgttgctaacgcgacaattttccctcaatgctcacaagctcctatagcttcccttcttcccccataccttncatnaatgatagcttcagtatgtgaaaacccagctcttcaaccctataggctccaacaagcaatcgcagcaagcaacatacctttatcacccttgtttcaacaatcgccagccctatctttggtgcagtcattggtacaaaccatcatggcacagcagctgcagcaactcgtgctacctgtgatcaaccaagtagctctggcaaacctttctccctactctcagcaacaacaatttcttccattc

SEQ ID NO: 341956 - DNA, 429 bp, Zea mays
  unsure (1)..(429): unsure at all n locations
caacaagcaacatagaaagtggaatccagtatcaacaatagagcaacaatggcgaccaagatattttccctccttatgctcctggctctttctgcatgtgttgctaacgcgacaattttccctcaatgctcacaagctcctatagcttcccttcttcccccataccttccatnaatgatagnttcagtatgtgaaaacccagctcttaaaccctataggctccaacaagcaatcgcagcaagcaacatacctttatcacccttgtttcaacaatcgccagccctatctttggtgcagtcattggtacaaaccatcagggcacagcagctgcagcaactcgtgctacctgtgatcaaccaagtagctctggcaaacctttctccctactctcagcaacaacaatttcttccattcaaccaactgtctaca

SEQ ID NO: 341957 - DNA, 435 bp, Zea mays
  unsure (1)..(435): unsure at all n locations
cgggtcccccaacccgtccgcagaccattagctttatctactccagagcgctgaagaacccgatcgacaccatgagggtggttgctcgttgccctcgctctcctggctctcgctgcgagcgccacctccacgcatacaagcggcggctgcggctgccagccaccgccgccggttcatctaccgccgccggtgcatntgccanntnnngttnanctgncanntnnnnnntcttttttaccgtcggtccacctgccgccgccggtccacctgccaccgncggtccatgtgccgccgccggttcatctgccgncgccaccatgccactaccctactcaaccgccccggcctcagcctcatccccagccacacccatgcccgtgccaacagccgcatccaaacccgtgccaacttgcaggaacctgcggcgttggcagc

SEQ ID NO: 341958 - DNA, 188 bp, Zea mays
  unsure (1)..(188): unsure at all n locations
ccacgcgtccgcagcaaagcggcagtgcgtttagaggatttttgaacagaacagcatgaagatggtcatcgggcgcgtcgtgtgcctggctctgtcagctgccancgcctttgcaatgcagatgccctgcccctgcgcggggctgcagggcttgtacggngctaactccagcctgacgactatgatgg

SEQ ID NO: 341959 - DNA, 417 bp, Zea mays
gaaaacccagctcttcaaccatataggcttcaacaagcaatcgcagcaagcaacatacctttatcgcccttgttgtgtcaacaatcgccagccctatctttggtgcagtcattggtacaaaccatcagggcacaacagctgcagcaactcgtgctacctgtgatcaaccaagtagctctggcaaacctttctccctactctccgcaacaacaatttcttccattcaaccaactgtctacactgaaccctgctgcttatttgcagcaacaactattaccatttagccagctagctactgcctactctcaacaacaacaacttcttccatttaaccaattggccgcactgaaccccgctgcttatttgcagcagcaaatactactaccatttagccagctagctacagcaagccgtgct

SEQ ID NO: 341960 - DNA, 387 bp, Zea mays
  unsure (1)..(387): unsure at all n locations
ttcagaaacacaccaagcgaagcgcactatcaacaacctaacaacaatggctaccaagatgttatccctccttgcgcttcttgcgctttttgcgagcgcaacaaatgcgtccattattccacaatgctcacttgctcctagttccattattccacagttcctcccaccagttacttcaatggncttngaacacccagctgtgcaagcctataggctacaacatgcgattgcggcgagcgtcttacaacaaccaantgcccaattgcaacaacaatccttggcacatctaacantncanancatcgcaacgcaacagcaacaacagttcctaccagcactgagccacctagccatggtgaaccctgtcggctacttgcaacaacagct

SEQ ID NO: 341961 - DNA, 419 bp, Zea mays
  unsure (1)..(419): unsure at all n locations
gctcgttgccctcgctctcctggctctcgctgcgagcgccacctncacgcatacaagcggcggctgcggctgccagccaccgccgncggttcatctaccgccgccggtgcatctgccacctccggttcacctgccacctccggtgcatctnccaccgccggtccacctgnnnnnnnnngtccacctgccaccgccggtccatgtgccgccgccggttcatctgccgccgccaccatgccactaccctactcaaccgccccggcctcagcctcatccccagccacacccatgcccgtgccaacagccgcatccaagcccgtgccagctgcagggaacctgcggcgttggcagcaccccgatcctgggccagtgcgtcgagttcctgaggcatcagtgcagcccgacggcgacgccctact

SEQ ID NO: 341962 - DNA, 438 bp, Zea mays
  unsure (1)..(438): unsure at all n locations
tactccagagcgcagaagaacccgatcgacaccatgagggtgttgctcgttgccctcgctctcctggctctcgctgcgagcgccacctccacgcatacaagcggcggctgcggctgccagccaccgccgccggttcatctaccgccgccggtgcatctgccacctccggttcacctgccacctncggtgcatctcccaccgccggtccacctgccgccgccggtccacctgccaccgccggtccatgtgccgncgncggttcatctgccgccgccaccatgccactaccctactcaaccgccccggcctcagcctcatccccagccacacccatgcccgtgccaacagccgcatccaagcccgtgccagctgcagggaacctgcggcgttggcagcaccccgatcctgggccagtgcgtcgagtttctgaggcatcag

SEQ ID NO: 341963 - DNA, 380 bp, Zea mays
  unsure (1)..(380): unsure at all n locations
ctgggtcttcagaccattagctttatctactccagagcgcagaagaacccgatcgacaccatgagggtgttgctcgttgccctcgctctcctggctctcgctgcgagcgccacctccacgcatacaagcggcggctgcggctgccagccaccgccgccggttcatctaccgccgncggtgcatntgnnnanntnnggtttatctgccacctntggtgcatctcccaccgtcggtccacctgccgccgccggtccacctgncaccgccggtccatgtgccgccgccggttcatctgccgncgncaccatgccactaccctactcaaccgccccggcctcagcctcatccccagccacacccatgcccgtgccaacagccgc

SEQ ID NO: 341964 - DNA, 440 bp, Zea mays
gggcaatcgcagctggcatcttacctttatcacccttgttcctccaacaatcatcagccctattacaacagttacctttggtgcatttattggcacaaaacatcagggcacaacaactacaacaacttgtgctagcaaaccttgctgcctactctcagcaacagcagtttcttccattcaaccaactaggttcattgaactctgcttcttatttgcaacaacaacaactaccattcagccagctacctgctgcctacccccagcaatttcttccattcaaccaactagcagcattgaactctcctgcttatttacagcagcaacaactactaccattcagccagctagctggtgtgagccctgctaccttcttgacacaaccacagttgttgccgttctaccaacacgttgcgcctaacgctggcaccctcttacaactg

SEQ ID NO: 341965 - DNA, 431 bp, Zea mays
  unsure (1)..(431): unsure at all n locations
gaaagcacaatagtgtaccaacaatggcagctaaaatattttgcctccttatgctccttggtctttctgcaagtgctgctacngcgaccattttcccacaatgctcacaagctcctatagcttcccttcttcccccgtacctctcaccaacggtgtcttcggtatgtgaaaacccaattcttcaaccctacaggatccaacaggnaatcgcagctggcatcttacctttatcacccttgttcctccaacaatcatcagccctattacagcagttacctttggtgcatttattggcacaaaacatcagggcacaacaactacaacaacttgtgctagcaaaccttgctgcctactctcagcaacagcagtttcttccattcaaccaactagctgcattgaactctgcttcttatttgcaacaacaacaacta

SEQ ID NO: 341966 - DNA, 432 bp, Zea mays
  unsure (1)..(432): unsure at all n locations
agaccattagctttatctactccagagcgcagaagaacccgatcgacaccatgagggtgttgctcgttgccctcgctctcctggctctcgctgcgagcgccacctncacgcatacaagcggcggctgcggctgccagccaccgccgncggttcatctaccgccgccggnnnntntgncacctncggttcacctgccacctccggtgcatctcccaccgccggtccacctgccgccgccggtccacctgccaccgccggtccatgtgccgccgccggttcatntgncgccgccaccatgccactaccctactcaaccgccccggcctcagcctcatccccagccacacccatgcccgtgccaacagccgcatccaagcccgtgccagctgcagggaacctgcggcgttggcagcaccccgatcctgggccagt

SEQ ID NO: 341967 - DNA, 426 bp, Zea mays
  unsure (1)..(426): unsure at all n locations
attgagaccaactagcaacatagaaagcacaatagtgtaccaacaatggcagccaaaatattttgcctccttatgctccttggtctttctgcaagtgctgctacggcgaccattttcccacaatgctcacaagctcctatagcttcccttcttcccccgtacctctnannannggngtcttnggtntgtgaaaacccaannnttnaaccctataggatccaacaggcaatcgcagctggcatcttacctttatcacccttgttcctccaacaatcatcagccctattacagcagttacctttggtgcatttattggcacaaaacatcagggcacaacaactacaacaacttgtgctagcaaaccttgctgcctactctcagcaacaacagtttcttccattcaaccaactagctgcattgaactct

SEQ ID NO: 341968 - DNA, 436 bp, Zea mays
attgagaccaactagcaacatagaaagctcaatagtgtaccaacaatggcagccaaaatattttgcctccttatgctccttggtctttctgcaagtgctgctacggcgaccattttcccgcaatgctcgcaagctcctatagcttcccttcttcccccgtacctctcaccagcggtgtcttcggtatgtgaaaacccaattcttcaaccctacaggatccaacaggcaatcgcagctggcatcttacctttatcacccttgttcctccaacaatcatcagccctattacaacagttacctttggtgcatttattggcacaaaacatcagggcacaacaactacaacaacttgtgctagcaaaccttgctgcctactctcagcaacagcagtttcttccattcaaccaactaggttcattgaactctgcttcttatt

SEQ ID NO: 341969 - DNA, 175 bp, Zea mays
  unsure (1)..(175): unsure at all n locations
accggccgacccacgcgtacgatttacaccaacttgtttcacagatttcttatataccgcaccaacaatggcagccaaaagacgttgtctccttatgctccctggcctnnntaatagngctgttaaggagaccattttaccataatgctttcaagttnttataggtttccttttt

SEQ ID NO: 341970 - DNA, 190 bp, Zea mays
  unsure (1)..(190): unsure at all n locations
cgcagaataacccgatcgacaccatgatggttgctcgttgccctcgctctcctggctcgggctgcgagcgccacctccacgcatacaagcggcggctgcggctgccagccaccgccgccggttcatctaccgccgccggtgcatctgccacctccggttcacctgccaccttcggtgcatntnccaccgt

SEQ ID NO: 341971 - DNA, 435 bp, Zea mays
  unsure (1)..(435): unsure at all n locations
cccaattcttcaaccctacatgatccaacttgcaatcgcagcaggcatcttacctttatcacccttgttcctccaacaaccgtcagccctattacagcagttacctttggtgcatttgttggcacaaaacatcaaggcacaacaactacaacaacttgtgctaggaaaccttgctgcctactctcagcaacagcagtttcttccattcaaccaactggctgcattgaactctgctgcttatttgcaacaacaactaccattcagtcagctagctgctgcctacccccagcaatttcttncattcaaccaactggcagcattgaactctgctgcttatttacaacagcaacagctaccaccattcagccagctagctgatgtgagccctgttgcctttttgacacaacaacagntgttgccgttctacctgcacgc

SEQ ID NO: 341972 - DNA, 434 bp, Zea mays
  unsure (1)..(434): unsure at all n locations
attagctttatctactccagagcgcagaataacccgatcgacaccatgagggtgttgctcgttgccctcgctctcctggctctcgctgcgagcgccacctccacgcatacaagcggcggctgcggctgccagccaccgccgccggttcatctaccgccgccggtgcatntnnnnanntncggttcacctgccacctncggtgcatntcccaccgccggtccacctgccgccgccggtccacctgccaccgncggtccatgtgccgccgccggttcatctgccgncgncaccatgccactaccctactcaaccgccccggcctcagcctcatccccagccacacccatgcccgtgccaacagccgcatccaagcccgtgccagctgcagggaacctgcggcgttggcagcaccccgatcctgggccagtgcgtcg

SEQ ID NO: 341973 - DNA, 114 bp, Zea mays
  unsure (1)..(114): unsure at all n locations
gttagtagaggctccgtttgatcaataagcaactacatacacccttccgtttggcgtcgcttcctccggccgtaccctccctggtcgtgtcgatcgnnnannannnactccggc

SEQ ID NO: 341974 - DNA, 436 bp, Zea mays
  unsure (1)..(436): unsure at all n locations
attttgagcattcagaaacacaccaagctaatcacattagcaacaacctaacaacaatggctaccaagatattatccctccttgcgcttcttgcgctttttgcgagcgcaacaaatgcgttcattttcccgcaatgctcgcaagctcctatagcttcccttcttcccccgtnnnnnnnaccagcggngtcnnnngtatgtgaaaacccaattcttcaaccctacaggatccaacaggcaatcgcagctggcatcttacctttatcacccttgttcctccaacaatcatnagccctattacaacagttacctttggtgcatttattggcacaaaacatcagggcacaacaactacaacaacttgtgctagcaaaccttgctgcctactctcagcaacagcagtttcttccattcaaccaactaggttcattgaactc

SEQ ID NO: 341975 - DNA, 188 bp, Zea mays
cagaccattagctttatctactccagagtcgcataataacccgatcgacaccatgagggggtggtcggtggccctggtctcctggcttttgcttggagcgccaacttcacgcatacaagcggcggctgcggctgccagccaccgccgtcggttcatctaccgccgccggtgcatctgtcatcctcggt

SEQ ID NO: 341976 - DNA, 247 bp, Zea mays
  unsure (1)..(247): unsure at all n locations
ctgctaccttcttgacacaaccacagttgttgccgttctaccagcacgctgcgcctaacgctggcaccctcttacaactgcaacaattgctgccattcaaccaacttgctttgacaaacccagcagcattctaccaacaacccatcattggtggtgccctcttttagatnnnnnangantnatagttcaataataaagntttttgtntgatgtttgtggcttcccagaaataagaaagtacatttct

SEQ ID NO: 341977 - DNA, 295 bp, Zea mays
ctcaaccgccccggcctcagcctcatctctcagccacacccatgcccgtgccaacagccggatccaagcccgtgccagctgcagggaacctgcggcgttggcagcaccccgatcctgggccagtgcgtcgagtttctgaggcatcagtgcagcccgacggcgacgccctactgctcgcctcagtgccagtcgttgcggcagcagtgttgccagcagctcatgcaggtggagccgcagcaccggtaccaggcgatcttcggcttggtcctccagtccatcctgcagcaacagccgc

SEQ ID NO: 341978 - DNA, 372 bp, Zea mays
  unsure (1)..(372): unsure at all n locations
cggacgcgtgggcggacgcgtgggttgagaccaactagcaacatagaaagcacaatagtgtgccaacaatggcagccaaaatattttgcttccttatgctactcggtctttctgcaagtgctgctaccgcaaccattttcccacaatgctcacaagctcctatagcttcctttgttccaccatacctttcaccatcggtgtcttgagtatgtgaaaacccaattcttcaaccctacaggatccaacaggcaatcgcagcaggcatcttacctttatgacccttgttcctacgacaacnnnnagccctattacagcagttacctttggtgcatttgccggcacaaaacatgaaagcacaacaactgcaacaac

SEQ ID NO: 341979 - DNA, 412 bp, Zea mays
aagcaacatacctttatcacccttgtttcaacaatcgccagccctatctttggtgcagtcattggtacaaaccatcagggcacagcagctgcagcaactcgtgctacctgtgatcaaccaagtagctctggcaaacctttctccctactctcagcaacaacaatttcttccattcaaccaactgtctacattgaaccgtgctgcttatttgcagcaacaactattaccattcagccagctagctactgcctactctcagcaacaacaacttcttccatttaaccaattggccgcactgaaccccgctgcttatttgcagcagcaaatactactaccatttagccagctagctgcagcaagccgtgcttccttcttgacacagcaacagttgctgcctttctaccagcagttt

SEQ ID NO: 341980 - DNA, 226 bp, Zea mays
acaacgcgtccgcctgtttcgtggtttttcttaaacgtgtgcaccggtgccgatcgcacgcagggaggatgcaccaccattacatgggctgctgtggcctgacggctgaggagctcgctcacgcccttgcgctagcggacgtcgtggggtgcgccggcaacatcttcggaggccacgtgaaccctgacgttaccttcggcgcgctgctcgacggtcagatctgcct

SEQ ID NO: 341981 - DNA, 349 bp, Zea mays
gcatccggcaacatagaaagtggaatccagtagcatcaatagagcaacaatggcgaccaagatattttccctccttatgctccttgctctttctgcatgtgttgctaacgcgacaattttccctcaatgttcacaagctcctatagcttcccttcttcccccataccttccatcaatgatagcttcagtatgtgaaaacccagctcttcaaccctataggctccaacaagcaatcgcagcaagcaacatacctttatcacccttgtttcaacaatcgccagccctatctttggtgcagtcattggtacaaaccatcatggcacagcagctgcaacaactcgtgctacct

SEQ ID NO: 341982 - DNA, 439 bp, Zea mays
  unsure (1)..(439): unsure at all n locations
gaccattagctttatctactccagagtcgctatgaagaacccgatcgacaccatgagggtgttgctcgttgccctcgctctcctggctctcgctgcgagcgccacctccacgcatacaagcggcggctgcggctgccagccaccgccgccggttcatctaccgccgccggtnnntntnnntttttctttttnanntgtcatcatcntnnnnccttccaccgccggtccacctgccgccgccggtccacctgccaccgacggtccatgtgccgccgtcggttaatntgnngnngtcaccatgccactaccctactcaaccgccccggcctcagcctcatccccagccacacccatgcccgtgccaacagccgcatccaagcccgtgccagctgcagggaacctgcggcgttggcagcaccccgatcctgggccagtgcgt

SEQ ID NO: 341983 - DNA, 444 bp, Zea mays
cccacgcgtccgtagcaacatagaaagcacaatagtgtaccaacaatggcagccaaaatatgttgcttccttatgctccttggtctttctgcaagtgttgctaccgcaaccattttcccacaatgctcacaagctcctatagcttcccttcttcccccatacctctcaccagcggtgtcttcaatgtgtgaaaacccaattgttcaaccctacaggatccaacaggcaatcgcaacaggcatcttaccattatcacccttgttcctccaacaaccgtcagccctattacagcagttacctttggtccatttggtggcacaaaacatcagggcacaacaactacaacaacttgtgctagcaaaccttgctgcatactctcagcaacatcagttcttccattcaccaacttgctgcattgactctgctgcttatttgcacaacatt

SEQ ID NO: 341984 - DNA, 342 bp, Zea mays
caccatgaaggtgctgatcgttgcccttgctctcctggcgctcgctgcgagcgccgcctccagtacaagcggcggctgtggctgccagacaccaccgtttcatctaccgcctccgttctatatgccgcctccgttctatctgccgccgcagcagcagccgcagccatggcaataccccactcaaccaccgcagctaagcccgtgccagcagttcggatcctgcggcgtcggcagcgtcggcagcccgttcctggccagtgcgtcgagttcctgaggcaccagtgcagcccgcggcgacgccctacagctcgcacagtgccagcgctgcacagcagtgctgca

SEQ ID NO: 341985 - DNA, 374 bp, Zea mays
attttgagcattcagaaacacaccaagcgaagcgcactagcaacgacctaacaacaatggctaccaagatattagccctccttgcgcttcttgccctttttgtgagcgcaacaaatgcgttcattattccacaatgctcacttgctcctagtgccattattccacagatcctcccaccagttacttcaatgggcttcgaacacctagctgtgcaagccaacatgcaacaacaagcgcttgctgcgagcgtcttacaacaaccaattgcccaattgcaacaacaatccttgccacatctaacaatacaagccatcacaacgcaacagcaacaacagttcctaccagcactgagccacctagccatggtgaaccct

SEQ ID NO: 341986 - DNA, 272 bp, Zea mays
ctggtctagatcgcgagcggccgcccttttttttttttttctactacgtttcttctttgggggcgatgatttttgctcttcgtgcgctttttggcgttgtgtgagcgccccttaagcgttttttttttctttttgctcacgcgctcctagtgccattattcctctgttgggggcagcagctactgtgttgggcttcgaacggggagctgtgggggattgcatgcaccagccgcggcccgcgggggggtggtacaacaactttttgcccaatt

SEQ ID NO: 341987 - DNA, 367 bp, Zea mays
caagcaacatagaaagtggaatacagtagcaacaatagagcaacaatggcggccaagatattttccatccttatgctccttgctctttctgcatgtgttgctaacgcgaccatttttcctcaatactcacaagctcctatagctgcccttcttcccccataccttccatcaatgaccgcttcagtatgtgaaaacccagcccttcaaccctacaggctccaacaagcaatcgcaacaagcaacttacctttatcacccctgttctttcaacaatcgccagccctatctttggtgcagtcattggtacaaaccatcagggcacaacagctgcagcaactcgtgctaccagtgatcagccaagtagctc

SEQ ID NO: 341988 - DNA, 388 bp, Zea mays
ctggtgcatatcgcgaaccatcgaaagcatttttttgttccaacaatggcagccaaaataggttgcttgcttatgctccttggtctttctgcaagtgttgctaccacaaccatttttccacaatgctcacaagctcctataacttcccttcttcccccatacctctcaccagcagagtcttcaatgtgtgaaaacccaattgttcaaccctacaggatccaacaggcaatcgcaacaggcatcttaccattatcacccttgttcctccaacaaccgtcagccctattacagcaggtaccttttgtccatttggtggcacaaaacatcatggcacaacaactacaacaacttgtgctaacaaaccttgctgcatactctcagcaacatc

SEQ ID NO: 341989 - DNA, 295 bp, Zea mays
ctcgtctacaactcgagccacccccctttttttacactttctacctcctatcaccaatgggagccatgattcttgaccttcttgccctccttgccctttgaagaacaccgctaacttgacttttatttcacaaagctcacaagaataccctctctaccgcgaccgccgtaggcacccaatccccaactatgcgaatctccattgttcaagaagccatgcacgcacacataatactggcattcacattaaccctataacaaccatatgctctattgccacaagccttattagagca

SEQ ID NO: 341990 - DNA, 256 bp, Zea mays
tctcttttttacttttcatactcttttttcattttcccaattccaactttttatgtgcatatgtgttattcacattattacctttatacatccacctattttcacttctttacactaatttcttttaccactcaaaacaacctttattcttacaacacatcctaaaaatccatcatctaaatcatattcttccaattcatccactcatggaaaaacaaatattacttttaacactcaccctacatttaaactaaac

SEQ ID NO: 341991 - DNA, 401 bp, Zea mays
cacgcgtccgattctgagcattcacaaacacaccaagcgaagctacctaacaacgacttaacaacaatggctaccaagatattagccctgcttgcgcttcttgccctttttgtgagcgcaacaaatgcgttcattattccacaatgctcacttgctcctagagccattataccacagtttctccgaccagttactgcaatgggcttcgaacacctagctgtgcaagcctacaggctacaacaagcgcttgcggcaagcgtcttacatcaaccaattaaccaattgcaacaacaatgcttggcacatgtaaccatacaaaccatcgcaacacaacagcaacaacagttgctaccagcactgagccaactagatgtggtgaaccctgtcggctacttgcaaca

SEQ ID NO: 341992 - DNA, 296 bp, Zea mays
cgcgaacgagaccagactagcaacatagaaagtacaatagcgtaccaacaatggcagccaaaagattttgcttccttatgctccttgctctttctgcaagtgttgctaccgcaaccattttcccacaatgctcacaagctcctatagcttcccttcttcccccatacctctcaccagcggtgtcttcaatgtgtgaaaacccaattgttcaaccctacaggatccaacaggcaatcgcaacaggcatcttaccattatcacccttgtttcttcacaaccgtgagccctattacagc

SEQ ID NO: 341993 - DNA, 441 bp, Zea mays
agaccattagctttatctactccagagcgcagaagaacccgatcgacaccatgagggtgttgctcgttgccctcgctctcctggctctcgctgcgagcgccacctccacgcatacaagcggcggctgcggctgccagccaccgccgccggttcatctaccgccgccggtgcatctgccacctccggttcacctgccacctccggtgcatctcccaccgccggtccacctgccgccgccggtccacctgccaccgccggtccatgtgccgccgccggttcatctgccgccgccaccatgccactaccctactcaaccgccccggcctcagcctcatccccagccacacccatgcccgtgccaacagccgcatccaagcccgtgccagctgcagggaacctgcggcgttggcagcaccccgatcctgggccagtgcgtcgagt

SEQ ID NO: 341994 - DNA, 250 bp, Zea mays
tcagaaacacaccaagcgaagcgcactagcaacgacctaacaacaatggctaccaagatattagccctacttgcgcttcttgccctttttgtgagcgcaacaaatgcgttcattattccacaatgctcacttgctcctagtgccattattccacagttcctcccaccagttacttcaatgggcttcgaacacctagctgtgcaagccaacatgcaacaacaagcgcttgcggcgagcgtcttacaacaac

SEQ ID NO: 341995 - DNA, 453 bp, Zea mays
caactagcaacatagaaagcacaatagtgtaccaacaatggcagccaaaatatgttgcctccttatgctccttggtctttctgcaagtgctgctacggcgaccattttcccgaaatgctcgcaagctcctatagcttcccttcttcccccgtacctctcaccagcggtgtcttcggtatgtgaaaacccaattcttcaaccctacaggatccaacaggcaatcacagctggcatcttacctttatcacccttgttcctccaacaatcatcagccctattacatcagttacctttggtgcatttattggcacaaaacatcagggcacaacaactacaacaacttgtgctagcaaaccttgctgcctactctcagcaacagcagtttcttccattcaaccaactagctgcattgaactctgcttcttatttgcaacaacaacaactaccattcag

SEQ ID NO: 341996 - DNA, 324 bp, Zea mays
gcagcattgaactctcctgcttatttacattagcaacaactactaccattcaggcagctggctggtgtgagccctgctaccttcttgacacaaccacagttgttgccgttctaccagcacgttgcgcctaacgctggcaccctcttacaactgcaacaattgctgccattcaaccaacttgctttgacaaacccagcagtgttctaccaacaacccatcattggtggtgccctcttttagatttcttatgagttatagttcaataataaagttttttatctgatgtttgtggcttcccagaaataagaaagtacatttctagat

SEQ ID NO: 341997 - DNA, 358 bp, Zea mays
agaccattagctttatctactccagagcgcataagaacccgatcgacaccatgagggtgttgctcgttgccctcgctctcctggctctcgctgcgagcgccacctccacgcatacaagcggcggatgcggctgccagccaccgccgtcggttcatctaccgacgccggtgcatctgccacctccggttcacctgccacctgcggtgcatgtcccaccgccggtccacctgccgtcgccggtccacctgccaccgccggtccatgtgccgtcaacggttcatgtggcggcggcaacatgccactaccctactcaaccggccaggcctcaacctcatgctcagtcacacccatgcccgtg

SEQ ID NO: 341998 - DNA, 85 bp, Zea mays
agctccaggcagtgtcgaatgcacattgcattaccgacctcacttgccttaccaaaccgaaactaagctgtcggtatcggatttt

SEQ ID NO: 341999 - DNA, 438 bp, Zea mays
gtaccatcaatcatcattcattttattagtttacgcaccaaatcaaatctggggcatcggtgtatctaactccaaaaaccatgaagctggtgcttgtggttcttgctttcattgctttagtatcaagtgtttcttgtacacagacaggcggctgcagctgtggtcaacaacaaagccatgagcagcaacattatccacaacaacatcattcacaaaaacaacaactttaaccaccaccacaacattaccagcagcagcaacaaccacaacagcctcagcaatatcagcagggccaggaaaaatcacaacagcaacaatgtcattgccaggagcagcaacagactacaaggtgcagctataactactatagcagtagctcaaatctaaaaaattgtcatgaattcctaatgcagcagtgcagccctttggtaatgcctt

SEQ ID NO: 342000 - DNA, 327 bp, Zea mays
cccacgcgtacggttctagatattgagcggtcgccctttttttttttttattagtaattggttttattatattatatttttttttttttattttttttttttttatattttatatttttttataattttacattgtttattatttacaatttctattattatatattttctattaaaaataacttcaatgggggaaaaacaacatttttttatgattataggctacaacatgcaacaaaaaagagttttttacaataactattatagcaacttctaaaaaagggcccccacaacaaaaattatcaaccattggaactcaccaacatc

SEQ ID NO: 342001 - DNA, 314 bp, Zea mays
cccataccatcatagatagcacaatatcgtatcaattatgccagccaaactataccgcctcattaagctacgtgctctgtcttcgagcgctgctatggtcagcatggtcgcgcagcgctctcaacctccaatagctaagcttcatcgcgcatacctttcaccagggatgccttcagtgtgtgaaaatcaactacttctaccgtcatggatccagaaggcactccaggaaggcatgttacctcattgacctttagacttgaaaaaatcattagtctaattgaagcagcttccttagaggcttttatttgcacaaa

SEQ ID NO: 342002 - DNA, 194 bp, Zea mays
aacgacggacgcgatccacgcgtccgatggttactagcaacctacattttaagtgttttccgccaacatcattagcgcaaggtaggggactagctatttctgcctccacatccacgttgagcattctacctgactggccaaaacctccaatgtccatacatgctcacgtgcacctatcgcttgcaatatcctca

SEQ ID NO: 342003 - DNA, 389 bp, Zea mays
ggtcttcataccattagctttatctactccagagcgcagaagaacccgatcgacaccatgagggtgttgctcgttgccctcgctctcctggctctcgctgcgtgcgccacctccacgcatacaagcggcggctgcggctgccagccaccgccgccggttcatctaccgccgccggtgcatctgccacctccggttcacctgccacctccggtgcatctcccaccgccggtccacctgccgccgccggtccacctgccaccgccggtccatgtgccgccgccggttcatctgccgccgccaccatgccactaccctactcaaccgccccggcctcagcctcatccccagccacacccatgcccgtgccaacagccgcatccaagcccgtg

SEQ ID NO: 342004 - DNA, 428 bp, Zea mays
gcatttattggcacaaaacatcagggcacatcaactacaacaacttgtgctagcaaaccttgctgcctactctcagcaacagcagtttcttccattcaaccaactaggttcattgaactctgcttcttatttgcaacaacaacaactaccattcagccagctacctgctgcctacccccagcaatttcttccattcaaccaactagcagcattgaactctcctgcttatttacagcagcaacaactactaccattcagccagctagctggtgtgagccctgctaccttcttgacacaaccacagttgttgccgttctaccagcacgttgcgcctaacgctggcaccctcttacaactgcaacaattgctgccattcaaccaacttgctttgacaaacccagcagtgttctaccaacaacccatcattg

SEQ ID NO: 342005 - DNA, 456 bp, Zea mays
attcagaaacacaccaagcgaagcacattatcaacaacctaacaacaatggctaccaagatattatccctccttgcgcttcttgcgctttttgcgagcgcaacaaatgcgttcattattccacaatgctcacttgctccaagttccattattacacagttcctcccaccagttacttcaatgggcttcgaacacccagctgtgcaagcctataggctacaacaagcaattgcggcgagcgtcttacaacaaccaatttcccagttgcaacaacaatccttggcacatctaacaatacaaaccatcgcaacgcaacagcaacaacaattcctaccagcactgagccacctagccatggtgaaccctgccgcctacttgcaacagcagttgcttgcatcaaacccacttgctctggcaaacgtagttgcaaaccagccacaacaacagctgcaacagt

SEQ ID NO: 342006 - DNA, 374 bp, Zea mays
ctagcaacatagaaagcacaatagtgtaccaacaatggcagccaaaatattttgcctccttatgctccttggtctttctgcaagtgctgctacggcgaccattttcccgaaatgctcgcaagctcctatagcttcccttcttcccccgtacctctcaccagcggtgtcttcggtatgtgaaaacccaattcttcaaccctacaggatccaacaggcaatcacagctggcatcttacctttatcacccttgttcctccaacaatcatcagccctattacatcagttacctttggtgcatttattggcacaaaacatcagggcacaacaactacaacaacttgtgctagcaaaccttgctgcctactctcagcaac

SEQ ID NO: 342007 - DNA, 74 bp, Zea mays
ggacttcatacaattatatctatttactgtttaacgcaaaacaaccccatcgagacgccgagggtgctgctcga

SEQ ID NO: 342008 - DNA, 226 bp, Zea mays
aactagcaacccaaaagcctttaacgtctaacacaggaaaccaaaagagcttacgggcttattctccttggccattcctcaaatggtgacaccgcaaccatattgctactatgctcacaaacctctaattcttcccttgttcctccaaaccacttaccatcggtgtcttcaaagcccgaaaatccaattgttcaagcccccacgagccaacaggcgaagcgcaaca

SEQ ID NO: 342009 - DNA, 165 bp, Zea mays
  unsure (1)..(165): unsure at all n locations
ggccgacccacgcgtccncttatatccatatacctacacattatacttttcacacccgcaacccccgccggggaactggtaacaattaaaaaacacctctcacccccccaaatcacatataccataccctcaaatttcctcacaattaacacattatcctaaatt

SEQ ID NO: 342010 - DNA, 267 bp, Zea mays
ctagtcgcaacatacatagtgaagtacactatcaacatttgaacaccaatgggagccaagggtgctgggctgcttgccctccttgctgtgtcatcaatcgctgctccctctacttttattccacaaggcgcagatgactacctctctccggtgacagaccggtgatttctatactgcactatacaatctatacatcgtacaagaagccatccaagccagcgtcttaccgtcattagcataaacagttcaacaaccagatgctctatt

SEQ ID NO: 342011 - DNA, 370 bp, Zea mays
cccacgcgtccgattttgagcattcagaaacacaccaagcgaagcgcactagcaacgacctaacaacaatggctaccaagatattagccctccttgcgcttcttgccctttttgtgagcgcaacaaatgcgttcattattccacaatgctcacttgctcctagtgccattattccacagtttctcccaccagttacttcaatgggcttcgaacacctagctgtgcaagccaacatgcaacaacaagcgcttgcggcgagcgtcttacaacaaccaattgcccaattgcaacaacaatccttgccacatctaacaatacaagccatcacaacgcaacagcaacaacagtttctaccatcactgaaccaact

SEQ ID NO: 342012 - DNA, 190 bp, Zea mays
ggaaggcgtagttggatgtcgttagaggctctgcaatcccaaatacgcagagaggggtggacgcatcttgatgacatcattgtctaaaggacgaagcgggccaatcttattgctgctcttcgagagagcttataccagcgaaggctagctgggctaatgtcgaatccagacaaatgtgtgttctgagtga

SEQ ID NO: 342013 - DNA, 394 bp, Zea mays
ctggacgtcagcctagcaattagctcatcgactccagattggagaactcgacaccatgaaggtgctgatcgttgcccttgctctcctggcgctcgctgcgagcgccgcctccagtacaagcggcggctgtggctgccagacaccaccgtttcatctaccgcctccgttctatatgccgcctccgttctatctgccgccgcagcagcagccgcagccatggcaataccccactcaaccaccgcagctaagcccgtgccagcagttcggatcctgcggcgtcggcagcgtcggcagcccgttcctgggccagtgcgtcgagttcctgaggcaccagtgcagcccggcggcgacgccctacggctcgccacagtgccaggcgctgcagcagcagtgc

SEQ ID NO: 342014 - DNA, 287 bp, Zea mays
ggaagaccgggccgacccacgcgtacggagaccgaagcgcctgtactataccacttcacagcgccaccggcatccgagaagggagacttcgcctagcccgtcaaggacgagcttgtagcattcaaggtgacgacagcttttgctgtgtatgcatagaaggtaaacttggcgctaacgttcctccatagcctacattattcataaccacagggtgagagagagaagcactgcaacagagtgagatgcgaccagcgaccggagtaggtatgatacgttttttatgctta

SEQ ID NO: 342015 - DNA, 343 bp, Zea mays
gggcacaacaactacaacaacttgtgctagcaaaccttgctgcctactctcagcaacagcagtttcttccattcaaccaactagctgcattgaactctgcttcttatttgcaacaacaacaactaccattcagccagctacctgttgcctacccccagcaatttcttccattcaaccaactggcagcattgaactctcctgcttatttacagcagcaacaactactaccattcagccagctagctggtgtgagccctgctaccttcttgacacaaccacagttgttgccgttctaccagcacgctgcgcctaacgctggcaccctcttacaactgcaacaatt

SEQ ID NO: 342016 - DNA, 453 bp, Zea mays
attaagaccaactagcaacatataaagcacaatagtgtaccaacaatggcaacgaaaatattttgcttccttatgctccttggtctttctgcaagtgctgctaccgcgaccattttcccgcaatgctcacaagctcctatagcttcccttcttcccccatacctctcaccagcggtgtcttcagtatgtgaaaacccaattcttcaaccctacaggatccaacaggcaatcgcagcaggcatcttacctttatcacccttgttcctccaacaaccgtcagccctattacagcagttacctttggtgcatttgttggcacaaaacatcagggcacaacaactacaacaacttgtgctagcaaaccttgctgcctactctcagcaacagcagtttcttccattcaaccaactggctgcattgaactctgctgcttatttgcaacaacaactacca

SEQ ID NO: 342017 - DNA, 270 bp, Zea mays
gacggccacttacaacgtacacaatgttttgtatttcttaccacccacgccccatgtgcggcctagtattttgcactgggatcccatactgctcattcaacaagagcctgctactcgactttggtttccacaatgctcacaacaaaccctctctttggctacagccacgaaattttaatatccaacatattcaaccctacacaccttaaagaggccattgcatggaccacttttaccagacacataaccattagcccttgacaaacatat

SEQ ID NO: 342018 - DNA, 362 bp, Zea mays
attgagaccaacaagcaacatagaaagtggtatccagtttcaacaatagagcaacaatggcgaccaagatattttccctccttatgctccttgctctttctgcatgtgttgctaacgcgacaattttccctcaatgctcacaagctcctatagcttcccttcttcccccataccttccatcaatgatagcttcagtatgtgaaaacccagctcttcaaccctatatgctccaacaagcaatcgcagcaagcaacatacctttatcacccttgtttcaacaatcgccagccctatctttggtgcagtcattggtacaaaccatcatggcacagcagctgcagcaactcgtgctacctgtgatc

SEQ ID NO: 342019 - DNA, 331 bp, Zea mays
ctagcaacatagaaagcacaatagtgtaccaacaatggcagccaaaatattttgcctccttatgctccttggtctttctgcaagtgctgctacggcgaccattttcccgcaatgctcgcaagctcctatagcttcccttcttcccccgtacctctcaccagcggtgtcttcggtatgtgaaaacccaattcttcaaccctacaggatccaacaggcaatcgcagctggcatcttacctttatcacccttgttcctccaacaatcatcagccctattacaacagttacctttggtgcatttattggcacaaaacatcaaggcacaacaacta

SEQ ID NO: 342020 - DNA, 271 bp, Zea mays
cgacccacgcgacccacgcgtcacatacaatgaacactagtgctcctttaccgttctacaaactattaggcacaggggggcttcttgttctatctactagtgctgctacaaccaccatattacttgcatgcatccaagctactattcattcagttatttgttgtcaactctcagcaactgcgtccatacaatcaaaagacccaattgtactatcctgcttgattcaagacgcaaccactactagcattcaacctttttgacggttggacct

SEQ ID NO: 342021 - DNA, 58 bp, Zea mays
gttctagatcgccgagcggcctcccttctttttttatgttcttatcctaacgggggac

SEQ ID NO: 342022 - DNA, 395 bp, Zea mays
atattcagcattcacaaacacaccaagcgaagcgcactagcaacaacctaacaacaatggctaccaagatattagccctccttgcgcttcttgcccttttagtgagcgcaacaaatgcgttcattattccacagtgctcacttgctcctagtgccattattccacagttcctcccaccagttacttcaatgggcttcgaacatccagccgtgcaagcctacaggctacaactagcgcttgcggcgagcgtcttacaacaaccaattgcccaattgcaacaacaatccttggcacatctaaacctacaaaccatcgcaacgcaacagcaacaacagtttctgccatcactgagccacctagccgtggtgaaccctgtcgcctacttgcaacagcag

SEQ ID NO: 342023 - DNA, 71 bp, Zea mays
ccgggccgacccacgcgtgcacatacctacaatataactacattttctttctattaaacaccaaacaactc

SEQ ID NO: 342024 - DNA, 254 bp, Zea mays
gcaattagctcatcgactccagattggagaactcgacaccatgaaggtgctgatcgttgcccttgctctcctggcgctcgctgcgagcgccgcctccagtacaagcggcggctgtggctgccagacaccaccgtttcatctaccgcctccgttctatatgccgcctccgttctatctgccgccgcagcagcagccgcagccatggcaataccccactcaaccaccgcagctaagcccgtgccagcagttcggat

SEQ ID NO: 342025 - DNA, 240 bp, Zea mays
accgcgcccacctaagcctgttgagagatgactgagggatgcccagaggcacacaaacaacgtcgacgacgtatgcctcgtgggcggcttcactatgatgctccgggtaccatttttgctcacatgactacattctcctataggagctgttcatgaacattacctctgaccaggcgcgtgtctatggtgttaatacccaagcctttatccttataggatacagcaagcaaaaggtgctgg

SEQ ID NO: 342026 - DNA, 415 bp, Zea mays
gttctagatcgcgagcggctgcccttttttttttttttttttttttttttttttttttttttttttttttttttttttttttttttttttttttttttttttttttttttttttttttttttttttttttttttttttttaaaaaaacaaaaaaagccttttttttttttggggaaacccaaaaccataaaaaaaaaattttttttttgaactattacccaaaaaaaaaaaaaaaaggggccgcccttttaaaaaaaacaatttttacttccgcgggttgcaaagtattttttttttttttggggcccctaaattaaatttcctggccggtgttttaaaaatccctaaatggaaaaaccctggtgttaacaaaattatttgtttttaaaaaaaatccctttttcccaagttggtt

SEQ ID NO: 342027 - DNA, 75 bp, Zea mays
  unsure (1)..(75): unsure at all n locations
cgggccgaccgnngcgtgagggggtagatcccgagcgtctgcccttctttttttcattttttctttaactcctta

SEQ ID NO: 342028 - DNA, 368 bp, Zea mays
attttgagcattcagaaacacaccaagctaagcgcactagcaacaacctaacaacaatggctaccaagatattatccctccttgcgcttcttgcgctttttgcgagcgcaacaaatgcgtccattattccacaatgctcacttgctcctagttccattattccacagttcctcccaccagttacttcaatggccttcgaacacccagctgtgcaagcctataggctacaacaagcgattgcggcgagcgtcttacaacaaccaattgcccaattgcaacaacaatccttggcacatctaacaatacaaaccatcgcaacgcaacagcaacaacagttcctaccagcactgagccacctaaccatggtg

SEQ ID NO: 342029 - DNA, 367 bp, Zea mays
caacacgcaacatagaaagtggaatacagtggcaacaatagagcaacaatggcggccgggatattttgcatccttatgctccttgctctttctgcatgtgttgctaacgcgaccatttttcctgaatactcacaagctcctatagctgcccttcttgccccataccttccatcaatgaccgcttcagtatgtgaaaacccagcccttcaaccctacaggctccaacaagcaatcgcaacaagcaacttacctttatcacccctgttctttcaacaatcgccagccctatctttggtgcagtcattggtacaaaccatcagggcacaacagctgcagcaactcgtgctaccagtgatcagccaagtag

SEQ ID NO: 342030 - DNA, 436 bp, Zea mays
accaactagcaacatagaaagcacaatagtgtaccaacaatggcagccaaaatatttgggctccttatgctccttggtctttctgcaagtgctgctacggcgaccattttcccacaatgctcacaagctcctatagcttcccttcttcccccgtacctctcaccagcggtgtcttcggtatgtgaaaacccaattcttcaaccctataggatccaacaggcaatcgcagctggcatcttacctttatcacccttgttcctccaacaatcatcagccctattacagcagttacctttggtgcatttattggcacaaaacatcagggcacaacaactacaacaacttgtgctagcaaaccttgctgcctactctcagcaacaacagtttcttccattcaaccaactagctgcattgaactctgcttcttatttgcaac

SEQ ID NO: 342031 - DNA, 178 bp, Zea mays
acaagatctggtcataaacagagcaccatggtccctatacaagcggccgcgagatgatggactgttatgctctcaaggcttatgttaaagagctggtgccacgatcatttttgcccaaaccaaacaatgacgtatatcttcctgttcttctaccgaagatgtgagaagacatgtgttg

SEQ ID NO: 342032 - DNA, 431 bp, Zea mays
ctgggtcttcagaccattagctttatctactccagagcgcagaagaacccgatcgacagcatgagggtgttgctcgttgccctcgctctcctggctctcgctgcgagcgccacctccacgcatacaagcggcggctgcggctgccagccaccgccgccggttcatctaccgccgccggtgcatctgccacctccggttcacctgccacctccggtgcatctcccaccgccggtccacctgccgccgccggtccacctgccaccgccggtccatgtgccgccgccggttcatctgccgccgccaccatgccactaccctactcaaccgccccggcctcagcctcatccccagccacacccatgcccgtgccaacagccgcatccaagcccgtgccagctgcagggaacctgcggcgttggcagcaccccgat

SEQ ID NO: 342033 - DNA, 437 bp, Zea mays
aagcaacataaaaagtggaatccagtattaacaatagagcaacaatggcgggcaagatggtttccctccttatgctccttgctctttctgcatgtgttgctaacgcgacaattttccctcaatgctcacaagctcctatagcttcccttcttcccccataccttccatcaatgatagcttcagtatgtgaaaacccagctcttcaaccctataggctccaacaagcaatcgcagcaagcaacatacctttatcacccttgtttcaacaatcgccagccctatctttggtgcagtcattggtacaaaccatcagggcacagcagctgcagcaactcgtgctacctgtgatcaaccaagtagctctggcaaacctttctccctactctcagcaacaacaatttcttccattcaaccaactgtctacattgaaccgtgct

SEQ ID NO: 342034 - DNA, 446 bp, Zea mays
caactagcaacatagaaagcacaatagtgtaccaacaatggcagccaaaatattttgcggccttatgctccttggtctttctgcaagtgctgctaccgcaaccattttcccacaatgctcacaagctcctatagcttcctttcttcccccatacctctcaccagcggtgtcttcagtatgtgaaaacccaattcttcaaccctacaggatccaacaggcaatcgcagcaggcatcttacctttatcacccttgttcctccaacaaccgtcagccctattacagcagttacctttggtgcatttgttggcacaaaacatcaaggcacaacaactacaacaacttgtgctaggaaaccttgctgcctactctcagcaacagcagtttcttccattcaaccaactggctgcattgaactctgctgcttatttgcaacaacaactaccat

SEQ ID NO: 342035 - DNA, 419 bp, Zea mays
ggggcttcagaccattagctttatctactccagagcgcagaagaacccgatcgacaccgggagggtgttgctcgttgccctcgctctcctggctctcgctgcgagcgccacctccacgcatacaagcggcggctgcggctgccagccaccgccgccggttcatctaccgccgccggtgcatctgccacctccggttcacctgccacctccggtgcatctcccaccgccggtccacctgccgccgccggtccacctgccaccgccggtccatgtgccgccgccggttcatctgccgccgccaccatgccactaccctactcaaccgccccggcctcagcctcatccccagccacacccatgcccgtgccaacagccgcatccaagcccgtgccagctgcagggaacctgcggcgttggca

SEQ ID NO: 342036 - DNA, 356 bp, Zea mays
cagaccattagctttatctactccagagcgcagaagaacccgatcgacaccatgagggtgttgctcgttgccctcgctctcctggctctcgctgcgagcgccacctccacgcatacaagcggcggctgcggctgccagccaccgccgccggttcatctaccgccgccggtgcatctgccacctccggttcacctgccacctccggtgcatctcccaccgccggtccacctgccgccgccggtccacctgccaccgccggtccatgtgccgccgccggttcatctgccgccgccaccatgccactaccctactcaaccgccccggcctcagcctcatccccagccacacccatgccc

SEQ ID NO: 342037 - DNA, 402 bp, Zea mays
tttgagcattcagaaacacaccaagcgaagcgcactatcaacaacctaacaacaatgggtgccaagagattagccctccttgcgcttcttgcccttttagtgagcgcaacaaatgcgttcattattccacagtgctcacttgctcctagtgccattattccacagttcctcccaccagttacttcaatgggcttcgaacatccagccgtgcaagcctacaggctacaactagcgcttgcggcgagcgtcttacaacaaccaattgcccaattgcaacaacaatccttggcacatctaaacctacaaaccatcgcaacgcaacagcaacaacagtttctgccatcactgagccacctagccgtggtgaaccctgtcgcctacttgcaacagcagctacttgca

SEQ ID NO: 342038 - DNA, 392 bp, Zea mays
ggacgtcagcctagcaattagctcatcgactccagattggagaactcgacaccatgaaggtgctgagcgttgcccttgctctcctggcgctcgctgcgagcgccgcctccagtacaagcggcggctgtggctgccagacaccaccgtttcatctaccgcctccgttctatatgccgcctccgttctatctgccgccgcagcagcagccgcagccatggcaataccccactcaaccaccgcagctaagcccgtgccagcagttcggatcctgcggcgtcggcagcgtcggcagcccgttcctgggccagtgcgtcgagttcctgaggcaccagtgcagcccggcggcgacgccctacggcttcgcacagtgccaggcgctgcagcagcagtgc

SEQ ID NO: 342039 - DNA, 302 bp, Zea mays
aataccgatacctacaactactatagaacgcacaataacccacccgcaacggtgggggggatattctgcttccttatgctcctggctctttctgcaagcgctgctaccacacatacaatccgacaatgctgacaacctccaatagcttcctttcatctaccatacctcttagcagtggcgccttcagtatacgaacaacctattgttcatctctacacgatcgaacaggtgatggcagcaggccacctaccatcatcagtctaggtgctgcaacaaccgtatgtgctattacagccattaca

SEQ ID NO: 342040 - DNA, 306 bp, Zea mays
aataccattaccaacttctactatagattgcacaataacccaccaacaacggcgacggggatattcttattccttattctccttgctcttactgcaagcgctacttccgcacatacaatcccacaatgctcacaggcatccaatcgcttcctttcatataccataccaccataccattgacacctccagtatacgaaaaccctactgttcatctctacacgaccgaacaggtgatcgcaccaggcaacctaccttaatcaccctatgtgctcccacaaccttatgtgctattacagccatatacat

SEQ ID NO: 342041 - DNA, 438 bp, Zea mays
  unsure (1)..(438): unsure at all n locations
gcaacatagaaagcacaatagtgtaccaacaatggcagccaaaatattttgcctccttgggctccttggtctttctgcaagtgctgctacggcgaccattttcccacaatgctcacaagctcctatagcttcccttcttcccccgtacctctcaccagcggtgtcttcggtatgtgaaaacccaattcttcaaccctataggatccaacaggcaatcgcagctggcatcttacctttatcacccttgttcctccaacaatcatcagccctattacagcagttacctttggtgcatttattggcacaaaacatcagggcacaacaactacaacaacttgtgctagcaaaccttgctgcctactctcagcaacaacagtttcttccattcaaccaactagctgcatngaactctgcttcttatttgcaacaacaacaact

SEQ ID NO: 342042 - DNA, 394 bp, Zea mays
caactagcaacatagaaagcacaatagtgtaccaacaatggcagccaaaatattttgcctccttatgctccttggtctttctgcaagtgctgctacggcgaccattttcccgcaatgctcgcaagctcctatagcttcccttcttcccccgtacctctcaccagcggtgtcttcggtatgtgaaaacccaattcttcaaccctacaggatccaacaggcaatcgcagctggcatcttacctttatcacccttgttcctccaacaatcatcagccctattacaacagttacctttggtgcatttattggcacaaaacatcagggcacaacaactacaacaacttgtgctagcaaaccttgctgcctactctcagcaacagcagtttcttccattc

SEQ ID NO: 342043 - DNA, 399 bp, Zea mays
gctgaatgctcacaagctccaatagctttcctccttttcccataccttccatcaatgatggctccagtatgtgaaaacccagctcttcaaccctatatgctccaacaagcaatcgcagcaagcaacatacctttatcacccttgtttcaacaatcgccagccctatctttggtgcagtcattggtacaaaccatcagggcacagcagctgcagcaactcgtgctacctgtgatcaaccaagtagctctggcaaacctttctccctactcttatcaacaacaatttcttccattcaaccaacttgctacatttaaccgtgctgcttatttgcagcaacaactattaccattcagccagatagctactgactactctcagcaacaacaacttcttccattt

SEQ ID NO: 342044 - DNA, 66 bp, Zea mays
aaagaaacaacaaacaataaaaaaaaaattaaaaaacataaataaaaaaaaaaataaaggaacaat

SEQ ID NO: 342045 - DNA, 390 bp, Zea mays
gggtcttcagaccattagctttatctactccagagcgcagaagaacccgatcgacaccgtgagggtgttgctcgttgccctcgctctcctggctctcgctgcgagcgccacctccacgcatacaagcggcggctgcggctgccagccaccgccgccggttcatctaccgccgccggtgcatctgccacctccggttcacctgccacctccggtgcatctcccaccgccggtccacctgccgccgccggtccacctgccaccgccggtccatgtgccgccgccggttcatctgccgccgccaccatgccactaccctactcaaccgccccggcctcagcctcatccccagccacacccatgcccgtgccaacagccgcatccaagcccgtg

SEQ ID NO: 342046 - DNA, 451 bp, Zea mays
attgagaccaactagcaacatagaaagctcaatagtgtaccaacaatggcagccaaaatattttgcctccttatgctccttggtctttctgcaagtgctgctacagcgaccattttcccgaaatgctcgcaagctcctatagcttcccttcttcccccgtacctctcaccagcggtgtcttcggtatgtgaaaacccaattcttcaaccctacaggatccaacaggcaatcacagctggcatcttacctttatcacccttgttcctccaacaatcatcagccctattacatcagttacctttggtgcatttattgtcacaaaacatcagggcacaacaactacaacaacttgtgctagcaaaccttgctgcctactctcagcaacagcagtttcttccattcaaccaactagctgcattgaactctgcttcttatttgcaacaacaacaac

SEQ ID NO: 342047 - DNA, 113 bp, Zea mays
  unsure (1)..(113): unsure at all n locations
ggcggaaccacgcggccggntgtaaatcncgagcgtcccctctagttgatccattcttacntacccntccatgcgaggtcatttggcttctatattggcacctaaattcaatt

SEQ ID NO: 342048 - DNA, 430 bp, Zea mays
  unsure (1)..(430): unsure at all n locations
caagaananaccaacaanggcagccaatttatnnngcctccttatgctccgtggtcttgctgcaattgctgctacggcgaccattttcccacaatgctcacaagctcctatagcttcccttcttcccccgtacctctcaccagcggtgtcttcggtatgtgaaaacccaattcttcaaccctataggatccaacaggcaatcgcagctggcatcttacctttatcacccttgttcctccaacaatcatcagccctattacagcagttacctttggtgcatttattggcacaaaacatcagggcacaacaactacaacaacttgtgctagcaaaccttgctgcctactctcagcaacaacagattcttccattcaaccaactagctgcattgaactctgcttcttatttgcaacaacaacaactaccattc

SEQ ID NO: 342049 - DNA, 389 bp, Zea mays
gaccaactagcaacatagaaagcacaatattgtaccaacaatggcagccaaaatatttggcctcctgatgctccttggtctttctgcaagtgctgctacggcgaccattttcccgaaatgctcgcaagctcctatagcttcccttcttcccccgtacctctcaccagcggtgtcttcggtatgtgaaaacccaattcttcaaccctacaggatccaacaggcaatcacagctggcatcttacctttatcacccttgttcctccaacaatcatcagccctattacatcagttacctttggtgcatttattggcacaaaacatcagggcacaacaactacaacaacttgtgctagcaaaccttgctgcctactctcagcaacagcagtttc

SEQ ID NO: 342050 - DNA, 248 bp, Zea mays
cgcgtgcgcaggaaataaagtcgtatacagcaccattaattgatttacaccgcagaccaaaacttggaccatcgaggcgctcatgggtctccttacatttctggctctcgctacaatctccccttacagttcaaaagctcgattagcttccctataccccccattcatttaaccgctgctggctatatgccggcaaaccccaatcttccacccaactaggctccaccagccattccataccccactca

SEQ ID NO: 342051 - DNA, 424 bp, Zea mays
  unsure (1)..(424): unsure at all n locations
tatcaacatanaattttcaatactttaccaacaatgccagctaaaagattttgtgtacttatgctccttggtctttctgcaagtgctgctacggcaaccattttcccacaatgctcacaagctcctatagcttcccttcttcccccgtacctctcaccaacggtgtcttcggtatgtgaaaacccaattcttcaaccctacaggatccaacaggcaatcgcagctggcatcttacctttatcacccttgttcctccaacaatcatcagccctattacagcagttacctttggtgcatttattggcacaaaacatcagggcacaacaactacaacaacttgtgctagcaaaccttgctgcctactctcagcaacagcagtttcttccattcaaccaactaactgcattgaactctgcttcttatt

SEQ ID NO: 342052 - DNA, 334 bp, Zea mays
gaccacgcgtccgggtctttctgcaagtgttgctaccgcaaccattttcccacaatgctcacaagctcctagggcttcccgtcttcccccatacctctcaccagcggtgtcttcaatgtgtgaaaacccaattgttcaaccctacaggatccaacaggcaatcgcaacaggcatcttaccattatcacccttgttcctccaacaaccgtcagccctattacagcagttacctttggtccatttggtggcacaaaacatcagggcacaacaactacaacaacttgtgctagcaaaccttgctgcatactctcagcaacatcagtttctttcattc

SEQ ID NO: 342053 - DNA, 288 bp, Zea mays
ctagttctagatcgcgagcggccgcccttttttttttttttttttttttttttttttttttttttttgtttttttttattttttttttttttttttttttttttttttttttaaaaaaaaaaaaattttatttttttttttaaaaaaaatttttaataaaaaaaaaaaaaaaaaaaaaattataaaaaaaaattttaaaatttaaatgaaataaaaataaaaaaaataatttatatgttattaaaaaagaaaaaaaacaatttattaatataaaaaaattatttttat

SEQ ID NO: 342054 - DNA, 252 bp, Zea mays
aaataatccatgcagcacatgacattattgggtttgaattgaagaattgtgtctacctagccgttatactcctataacggtgttaagcaataaagtaccatacattatgatgtttgtactatgatatttgaataagaatactaattgtaattataatgctacaaaaaaaaattctgaaaataaaaagccaaaaaaaaaaaaaaacaaaggtgtataataaaataaaaaagaaaaattcggcagcgtttgaat

SEQ ID NO: 342055 - DNA, 415 bp, Zea mays
gtgaaaacccaattcttcaaccctacattatccaacattcaatcgcagcaggcatcttacctttatcagccttgttcctccaacaaccgtcagccctattacagcagttacctttggtgcatttgttggcacaaaacatcaaggcacaacaactacaacaacttgtgctaggaaaccttgctgcctactctcagcaacagcagtttcttccattcaaccaactggctgcattgaactctgctgcttatttgcaacaacaactaccattcagtcagctagctgctgcctacccccagcaatttcttccattcaaccaactggcagcattgaactctgctgcttatttacaacagcaacagctaccaccattcagccagctagctgatgtgagccctgttgccttcttgacacaaca

SEQ ID NO: 342056 - DNA, 350 bp, Zea mays
  unsure (1)..(350): unsure at all n locations
tagaaagtggaatccagtagcaacaatatagcaacaatggcgaccaagatattttccctccttatgctccttgctctttctgcatgtgttgctaacgtgaccattttcccacaatgctcacaagctcctatagcttcccttcttcccccgtacctctcaccagcggtgtcttcggtatgtgaaaacccaattcttcaaccctataggatccaacaggcaatcgcagctggcatcttacctttatcacccttgttcctccaacaatcatcagccctattacagcagttacctttggtgcatttattggcacanaacatcagggcacaacaactacaacaactngtgctagc

SEQ ID NO: 342057 - DNA, 218 bp, Zea mays
  unsure (1)..(218): unsure at all n locations
gggcggancnacgcgtccggatgaatattnaccactcctgaaccctttttcacgatctccgccccaaacccatcgtctggcgattgtgccatcttccatatcaacaacctattacctctaacctccagcgacagctccctcgacgcgctgtccaactaggtttacagcggctagccgggactggggcttctacaggttatgaaccactgcatccccat

SEQ ID NO: 342058 - DNA, 404 bp, Zea mays
aatgtgaacattcaaaaacacaccaagctaagcgcactaacaacgacctaacaacaatgggtaccaagatattagccctccttgcgcttcttgccctttttgtgagcgcaacaaatgcgttcattattccacaatgctcacttgctcctagtgccattattccacagttcctcccaccagttacttcaatgggcttcgaacacctagctgtgcaagccaacatgcaacaacaagcgcttgcggcgagcgtcttacaacaaccaattgcccaattgcaacaacaatccttgccacatctaacaatacaagccatcacaacgcaacagcaacaacagttcctaccagcactgagccacctagccatggtgaaccctgccgcctacttgcaagagcagctgcttgca

SEQ ID NO: 342059 - DNA, 311 bp, Zea mays
gaccattagctttatctactccagagcgcagaagaacccgatcgacaccatgagggtggggctcgttgccctcgctctcctggctctcgctgcgagcgccacctccacgcatacaagcggcggctgcggctgccagccaccgccgccggttcatctaccgccgccggtgcatctgccacctccggttcacctgccacctccggtgcatctcccaccgccggtccacctgccgccgccggtccacctgccaccgccggtccatgtgccgccgccggttcatctgccgccgccaccatgccactaccctactc

SEQ ID NO: 342060 - DNA, 388 bp, Zea mays
attgtgagcattcagaacccaccaagctaagctacctaccaccacctaaacaccatgggctaccaagatattagccctccttgcgcttcttgccctttttgcgagcgcaacaaatgcgttcattattccacaatgctcacttgctcctagtgccattataccacagatcctccgaccagttacttcaatgggcttcgaacacctagctgtgcaagcctacaggctacaacaagcgcttgcggcgagcgtcttacaacaaccatataaccaattgcaacaacaatccttggcacatgtaaccatacaaaccatcgctacacatcagcaacaacagttcctaccagcacttgaccaactagatgtggtgaacccttgtcgctacttgcaa

SEQ ID NO: 342061 - DNA, 150 bp, Zea mays
atgcgggggtccatagcgtcttctataggggtcacctaaaattcaatcaatgggccgccgtttaccaccgccgggccgggaaaacccttgccgttccccacctaattggcctggcagaccatccccttttggccggttggggtattacca

SEQ ID NO: 342062 - DNA, 104 bp, Zea mays
  unsure (1)..(104): unsure at all n locations
ggcgggcggnaggagatcgcgagctaccactctattttatccaattttacgaacgnccaacatacgaggtcatttagattctatttagtcacctacattcaatt

SEQ ID NO: 342063 - DNA, 356 bp, Zea mays
caagaagcaacatataaagtggaatccattagcaacattagagcaacaatggcgaccaggatatttggcctccttatgctccttgctctttctgcatgtgttgctaacgcgacaattttccctcaatgctcacaagctcctatagctttccttctttcctcatacctttcatcaatgatagcttcagtatgtgaaaacccagctcttcaaccctataggctccaacaagcaatcgcagcaagcaacatacacttatcacccttgtttcaacaatcgccagccctatctttggtgcagtcattggtacaaaccatcagggcacagcagctgcagtaactcgagctacctgtgatcaa

SEQ ID NO: 342064 - DNA, 439 bp, Zea mays
gagaccaacaagcaacatattaagtggtttccagtagcaacaatagagcagcgatggcggccaatatattttccctccttatgctccttgctctttctgcatgtgttgctaacgcgacaattttccctcaatgctcacaagctcctatagcttcccttcttcccccataccttccatcaatgatagcttcagtatgtgaaaacccagctcttcaaccctataggctccaacaagcaatcgcagcaagcaacatacctttatcacccttgtttcaacaatcgccagccctatctttggtgcagtcattggtacaaaccatcagggcacagcagctgcagcaactcgtgctacctgtgatcaaccaagtagctctggcaaacctttctccctactctcagcaacaacaatttctttcattcaaccaactgtctacattgaa

SEQ ID NO: 342065 - DNA, 419 bp, Zea mays
caagcaacatagaaagtggtatccagtatcaacaatagagcaacaatggcggccaagggattatccctccttatgctcctagctctttctgcatgtgttgctaacgcgacaattttccctcaatgctcacaagctcctatagctttccttcttcccccataccttccatcaatgatagcttcagtatgtgaaaacccagctcttcaaccctataggctccaacaagcaatcgcagcaagcaacatacctttatcacccttgtttcaacaatcgccagccctatctttgttgcagtcattgatacataccatcagggcacagcagctgcagcaactcgtgctatctgtgatcaaccaagtagctctggcaaacctttcttcctactctcatcaacaacaatttcttacattcaaccaact

SEQ ID NO: 342066 - DNA, 470 bp, Zea mays
aatcccggtcgaccacgcgtccgattgagaccaactagcaacatagaaagcacaatagtgtaccaacaatggcagccaaaatgttttgcttccttatgctccttggtctttctgcaagtgctgctaccgcaaccattttcccacaatgctcacaagctcctatagcttcctttcttcccccatacctctcaccagcggtgtcttcagtatgtgaaaacccaattcttcaaccctacaggatccaacaggcaatcgcagcaggcatcttacctttatcacccttgttcctccaacaaccgtcagccctattacagcagttacctttggtgcatttgttggcacaaaacatcaaggcacaacaactacaacaacttgtgctaggaaaccttgctgcctactctcagcaacagcagtttcttccattcaaccaactggctgcattgaactctgctgcttatttgcaacaacaa

SEQ ID NO: 342067 - DNA, 145 bp, Zea mays
acgcgtccggagcaagaacaagcacaccaacccatatttctcaacttttacttaccaccacaggctaggaaaatatgagcctttcttgcgctccaagcccaatttacgagcgcaacaaatacaaccattatatccacataacact

SEQ ID NO: 342068 - DNA, 405 bp, Zea mays
aagaaaaaaataaaaaaaaaaaaaaaattaaaaaaataaaaaaaaaaaaaaaaacaaagagaaaaaggaaattaatcaaacctaccccttcttacacattaaatcaacacaaaaaaatgccaccattattcaataaacctcacttgcttctacatctttttttttaaaaaaactccaaccaatcccaacaaaattcttttatctcccatctttttaatcccagctgccataataaactattgccgccaactttacctttttttcaatttttccactttttcaactattcacgcaacaccactattccaaccattaaactcatcatttcgatatttcttcatctttatcgctctttttttttttactattcccatactttcacttttttctttctttctcccactt

SEQ ID NO: 342069 - DNA, 318 bp, Zea mays
cccgatccagcgatatggctggctccgtagctccccacgccgtggtcctcggtcttctcctgctcgcggggctcgcggcggcgcaaagggcgacgacgccggctgcggcggcccccgcgcccgaccccggctgcaacggcatccagctgacctacaacttcgtggaccgcaccaagatccggcccttcgtcagcgacaagaacaagcagccctacgccttccgcgccaatgtcaccgtgctcaactccggcacccgcccgctcaagtcctgggtggcactcgtcacattcggctacggcgagatcctcgtcggcgtcg

SEQ ID NO: 342070 - DNA, 342 bp, Zea mays
  unsure (1)..(342): unsure at all n locations
gacccacgcgtgncggggatcttacctttatcattcttgttttttcaacaatcatcanccctattgcatcagtgacctttgtttcatttattgtcacaaaacatcatgtcacaacaactacaacaacttgtgctagcaaaccttgctgcctactctcattaacttctcttttttacattcaaccaactaactgcattgaactctacttcttatttgctacaacaacaactaccattcagccagctacctgctgcctacctccatctttttctttcattcaaccatctgccaatattgaactctcctgtttattcacagcatcaacaactactaccattcatc

SEQ ID NO: 342071 - DNA, 340 bp, Zea mays
  unsure (1)..(340): unsure at all n locations
tgtacctnnncaccgcgtttccgcctagccccagtcaaccacatcacccgtgctcttgtggcgctatctaacagcgccgccttcaatacaagcngcggctgtggctgccaaacaccaccgtttcatctaccgcctccgttctatatgccgcctccgttctatctgccgccgcagcagcagccgcagccatggcaataccccactcaaccaccgcagctaagcccgtgccagcagttcggatcctgcggcgtcggcagcgtcggcagcccgttcctgggccagtgcgtcgagttcctgaggcaccagtgcagcccggcggcgacgccctacggctcgccac

SEQ ID NO: 342072 - DNA, 56 bp, Zea mays
cattgccccaccctgattgggaattggacccccccctgtaccggccctttaacccc

SEQ ID NO: 342073 - DNA, 289 bp, Zea mays
gccgccgccaccatgccactaccctactcaaccgccccggcctcagcctcatccccagccacgcccatgcccgtgccaacagccgcatccaagcccgtgccagctgcagggaacctgcggcgttggcagcaccccgatcctgggccagtgcgtcgagttcctgaggcatcagtgcatcccgacggcgacgccctactgctcgcctcagtgccagtcgttgcggcagcagtgttgccagcagctcatgcaggtggagccgcagcaccggtaccaggcgatcttcggcttg

SEQ ID NO: 342074 - DNA, 430 bp, Zea mays
gcggaaacacaccaagcgtagcgcactagcaacaacctatcatcaatggctaccaagaggtgagccctccttgcgcttcttgcccttttagtgagcgcaacaaatgcgttcattattccacagagctcacttgctcctagtgccattattccacagttcctcccaccagttacttcaatgggcttcgaacatccagccgtgcaagcctacaggctacaactagcgcttgcggcgagcgtcttacaacaaccaattgcccaattgcaacaacaattcttggcacatctaaacctacaaaccatcgcaacgcatcagcaacaacagtttctgccatcactgagccacctagccgtggtgaaccctgtcgcctacttgcaacaacagttacttgcattcaacccacttgctctggcgaacgtagctgcatacc

SEQ ID NO: 342075 - DNA, 230 bp, Zea mays
attgagaccaacaagcaacatagaaagtggaatccagtagcaacaatatagcaacaatggcgaccaagatattttccctccttatgctccttgctctttctgcatgtgttgctaacgcgacaattttccctcaatgctcacaagctcctatagcttcccttcttcccccataccttccatcaatgatagcttcagtatgtgaaaacccagttcttaaaccttataggctc

SEQ ID NO: 342076 - DNA, 175 bp, Zea mays
tcgacccacgcgtacggacaccatatttatcattctcattagatgttccaagcaaacttactcctactttccggggcgtggcttttttatactttctcctaaatctaattcacttaccgccgctttacaaattcgtgactaattaaacaatgactttacgaaccttattattact

SEQ ID NO: 342077 - DNA, 435 bp, Zea mays
gatcagcaaagcggcagtgcgtagagaggatcgtcgaacagaacagcatgaagatggtcatcgttctcgtcgtgtgcctggctctgtcagctgccagcgcctctgcaatgcagatgccctgcccctgcgcggggctgcagggcttgtacggcgctggcgccggcctgacgacgatgatgggcgccggcgggctgtacccctacgcggagtacctgaggcagccgcagtgcagcccgctggcggcggcgccctactacgccgggtgtgggcagacgagcgccatgtaccagccgctccggcaacagtgctgccagcagcagatgaggatgatggacgtgcagtccgtcgcgcagcagctgcagatgatgatgcagcttgagcgtgccgctgccgccagcagcagcctgtacgagccagctctgatgcagcagcagc

SEQ ID NO: 342078 - DNA, 388 bp, Zea mays
attcagccagctagctactgcctactctcagcaacaacaacttcttccatttaaccaattggccgcactgaaccccgctgcttatttgcagcagcaaatactactaccatttagccagctagctgcagcaagccgtgcttccttcttgacacagcaacagttgctgcctttctaccagcagtttgcggctaaccccgcaaccctcttacaactacaacaattgttgccctttgtccaacttgctttgacaaacccagcagccttctaccaacaacacatcattggtggtgccctcttttagattgcttattagtcgtaattcaataataaagttttttggatgatgtatgtggccaaccagaaataagaagttacatttccagattct

SEQ ID NO: 342079 - DNA, 359 bp, Zea mays
gccagcgcctctgcaatgcagatgccctgcccctgcgcggggctgcaaggcttgtacggcgctggcgccggcctgacgacgatgatgggcgccggctggctgtacccctacgcggagtacctgaggcagccgcagtgcagcccgctggcggcggcgccctactacgccgggtgtgggcagacgagcgccatgtaccagccgctccggcaacagtgctgccagcagcagatgaggatgatggacgtgcagtccgtcgcgcaacagctgcagatgatgatgcaccttgagcgtgccgctgccgccagcagcaacctgtacgagccagctctgatgcagcagcagcagcagctgctggcagc

SEQ ID NO: 342080 - DNA, 316 bp, Zea mays
atttccggagcgacccactcgttctgtctaacacctgaaaactgtgctaaaggctgagctactccttccggtgtattcagggatggtcataggcccagaatatctttcaaacaatgttaaaattccaggtggtgagtatcttctgaagcctctcggctttgattggatcaaaggaccagctaaaatctgtgagatcctcaaagacagttaccatcgacttagatatactataaaagacgactttttacgttttaaccagccttttgtctgggcattcaaccttgcactgcccaaggataactttagcgcaatattc

SEQ ID NO: 342081 - DNA, 430 bp, Zea mays
ttttcagcattcagaaacacaccaagcgaagcgcactagcaacaacctaacaacaatggctaccaagatattagccctccttgcgcttcttgcccttttagtgagcgcaacaaatgcgttcattattccacagtgctcacttgctcctagtgccattattccacagttcctcccaccagttacttcaatgggcttcgaacatccagccgtgcaagcctacaggctacaactagcgcttgcggcgagcgtcttacaacaaccaattgcccaattgcaacaacaatccttggcacatctaaacctacaaaccatcgcaacgcaacagcaacaacagtttctgccatcactgagccacctagccgtggtgaaccctgtcgcctacttgcaacagcagctacttgcatccaacccacttgctctggcgaacgta

SEQ ID NO: 342082 - DNA, 434 bp, Zea mays
gaaagcacaatagtgtaccaacaatggcagccaaaatattttgcttccttatgctccttggtctttctgcaagtgctgctaccgcaaccattttcccacaatgctcacaagctcctatagcttcctttcttcccccatacctctcaccagcggtgtcttcagtatgtgaaaacccaattcttcaaccctacaggatccaacaggcaatcgcagcaggcatcttacctttatcacccttgttcctccaacaaccgtcagccctattacagcagttacctttggtgcatttgttggcacaaaacatcaaggcacaacaactacaacaacttgtgctaggaaaccttgctgcctactctcagcaacagcagtttcttccattcaaccaactggctgcattgaactctgctgcttatttgcaacaacaactaccattc

SEQ ID NO: 342083 - DNA, 436 bp, Zea mays
agaccattagctttatctactccagagcgcagaagaacccgatcgacaccatgagggtgttgctcgttgccctcgctctcctggctctcgctgcgagcgccacctccacgcatacaagcggcggctgcggctgccagccaccgccgccggttcatctaccgccgccggtgcatctgccacctccggttcacctgccacctccggtgcatctcccaccgccggtccacctgccgccgccggtccacctgccaccgccggtccatgtgccgccgccggttcatctgccgccgccaccatgccactaccctactcaaccgccccggcctcagcctcatccccagccacacccatgcccgtgccaacagccgcatccaagcccgtgccagctgcagggaacctgcggcgttggcagcaccccgatcctgggccagtgcgt

SEQ ID NO: 342084 - DNA, 437 bp, Zea mays
agaccaacaagcaacatagaaagtggaatccagtagcaacaatagagcaacaatggagaccaagatattttccctccttatgctccttgctctttctacatgtgttgctaacgcgacaattttccctcaatgctcacaagctcctatagcttccctttttcccccataccttccatcaattatagcttcagtatgtgaaaacccagctcttcaaccatataggcttcaacaagcaatcgcagcaagcaacatacctttatcgcccttgttgtgtcaacaatcgccagccctatctttggtgcagtcattggtacaaaccatcagggcacaacagctgcagcaactcgtgctacctgtgatcaaccaagtagctctggcaaacctttctccctactctccgcaacaacaatttcttccattcaaccaactgtctacac

SEQ ID NO: 342085 - DNA, 99 bp, Zea mays
atcacgcgcactgatcttcacaccattcgctgcacattctccacatcgcatcatcaccgggtcgacacatttagggcgttgttgcgctccttgcgcttt

SEQ ID NO: 342086 - DNA, 162 bp, Zea mays
atactaagctgtttccttaacctctgcggagctttcgcaaaatcttactccgactccattttctaacagtgctacctaggttctatttcttcctatatcttcttcttccttttactcacgtttttcatagaaaaatatcacctattacgccaaccctacatc

SEQ ID NO: 342087 - DNA, 351 bp, Zea mays
tcgaaccattaaagtgatctactccagacctcataataaaccgatcgacaccatgagggtggtgctcgttgccctcgctctcctggctctcgctgtgagcgccaccttcacgcatacaagcggcggttgctgctgccatccaccgccgccggttcatctaccgtcgtcggtgcatctgccacctacggttaaactgccaccttcaatgcattttccaccgccggtccacctgccgtcgcctgtccacctgccaccgccggtccatgtgccgccgccggttcatctgccgtcgccaccatgccactaccctactcaaccgtcccgtccttagcctcatccccagccacaccc

SEQ ID NO: 342088 - DNA, 379 bp, Zea mays
agcaatcgcagcaagcaacatacctttatcacccttgtttcaacaatcgccagccctatgtttggtgcagtcattggtacaaaccatcagggcacagcagctgcagcaactcgtgctacctgtgatcaaccaagtagctctggcaaacctttctccctactctcagcaacaacaatttcttccattcaaccaactgtctacattgaaccgtgctgcttatttgcagcaacaactattaccattcagccagctagctactgcctactctcagcaacaacaacttcttccatttaaccaattggccgcactgaaccccgctgcttatttgcagcagcaaatactactaccatttagccagctagctgcagcaagccgtgct

SEQ ID NO: 342089 - DNA, 432 bp, Zea mays
gggtcttcagaccattagctttatctactccagagcgcagaagaacccgatcgacaccatgagggtgttgctcgttgccctcgctctcctggctctcgctgcgagcgccacctccacgcatacaagcggcggctgcggctgccagccaccgccgccggttcatctaccgccgccggtgcatctgccacctccggttcacctgccacctccggtgcatctcccaccgccggtccacctgccgccgccggtccacctgccaccgccggtccatgtgccgccgccggttcatctgccgccgccaccatgccactaccctactcaaccgccccggcctcagcctcatccccagccacacccatgcccgtgccaacagccgcatccaagcccgtgccagctgcagggaacctgcggcgttggcagcaccccgatcct

SEQ ID NO: 342090 - DNA, 407 bp, Zea mays
  unsure (1)..(407): unsure at all n locations
aagcaacatanaaagtggaatccagtagcaacaatagagcaacaatggcgaccaagatattggccctccttatgctccttgctctttctgcatgtgttgctaacgcgacaattttccctcaatgctcacaagctcctatagcttcccttcttcccccataccttccatcaatgatagcttcagtatgtgaaaacccagctcttcaaccctataggctccaacaagcaatcgcagcatgcaacatacctttattaacccttgtttcaacaatcgccagccctatttttggtgcatcctttgttccaaaccttaaggccccagaacttgcgcaacctctgcctaccgtgatcaaaccaattacctttgccaaacttttttccttattttaagaacaacaatttttttca

SEQ ID NO: 342091 - DNA, 400 bp, Zea mays
tcgaaagtggaatacattattcaacaatagtttcaactaatggcgcgccaagatatttctccatcctgtgatgctccttgctctttctgcatgtgttgctaacgcgaccatttttcctcaatactcacaagctcctatagctgcccttcttcccccataccttccatcaatgaccgcttcagtatgtgaaaacccatcccttcaaccctacatgctccaacaagctatcgcaacaagcatcttacctttatcacccttgttcctccaacaatcatcaaccctattacagcagttacctttggtgcatttattggcacaaaacatcatggcacaacaactacaacaacttgtgctagcaaaccttgctgcctactctcatcaacaacaatttttttcattc

SEQ ID NO: 342092 - DNA, 417 bp, Zea mays
tcgcagaaacacaccaagcgaagcacattatcttcaacctaacaacaatggctaccaagatattagtggcctccttgcgcttcttgcgctttttgcgagcgcaacaaatgcgttcattattccacaatgctcacttgctccaagttccattattacacagttcctcccaccagttacttcaatgggcttcgaacacccagctgtgcaagcctatatgctacaacaagcaattgcggcgagcgttttacaacaaccaatttcccagttgcaacaacaatccttggcacatctaacaatacaaaccatcgcatcgcaacagcaacaacaattcctaccagcactgatccacctagccatggtgaaacctgccgtctacttgcaacagcagttgcttgcattaaacccacttgctctggc

SEQ ID NO: 342093 - DNA, 353 bp, Zea mays
tcgtaggcttctccttacttccacaggaagtgtacaaacctggaggggaaccatcagggtgggggtcttagccgtccatctccttcctttcccctcgagtccgcacgtacacgcacacgtcggacgctatcgttgacagccacacgcagcaggtataggtaaaaggagcctcgcatgcgtcacccccttgctatctgtcaccttcggcgcatcagctacaatccctccagcttgtcgaacctaaccaaccgccagagaatgcacatttttgcacacatgattgttttagggcagcatggacccactacacatctcaacacccaaagcctgatgcacattcttaccaacactca

SEQ ID NO: 342094 - DNA, 306 bp, Zea mays
attagctttatctactccagagcgcagaagaacccgatcgacaccatgagggtgttgcgtggttgccctcgctctcctggctctcgctgcgagcgccacctccacgcatacaagcggcggctgcggctgccagccaccgccgccggttcatctaccgccgccggtgcatctgccacctccggttcacctgccacctccggtgcatctcccaccgccggtccacctgccgccgccggtccacctgccaccgtcggtccatgtgccgccgccggttcatctgccgtcgccaccatgccactaccctac

SEQ ID NO: 342095 - DNA, 413 bp, Zea mays
caactagcaacatagaaagcacaatagtgtaccaacaatggcagccaaaatattttgcctccttatgctccttggtctttctgcaagtgctgctacggcgaccattttcccacaatgctcacaagctcctatagcttcccttcttcccccgtacctctcaccagcggtgtcttcggtatgtgaaaacccaattcttcaaccctataggatccaacaggcaatcgcagctggcatcttacctttatcacccttgttcctccaacaatcatcagccctattacagcagttacctttggtgcatttattggcacaaaacatcagggcacaacaactacaacaacttgtgctagcaaaccttgctgcctactctcagcaacaacagtttcttccattcaaccaactagctgcattga

SEQ ID NO: 342096 - DNA, 383 bp, Zea mays
  unsure (1)..(383): unsure at all n locations
atcgacaccatgagggtggtgctcgttgccctcgctctcctggctctcgctgcgagcgcgacgttcacgcatacaagcggcggctgcggctgccagccaccgccgtcggctcatctaccgccggcggtgcatgtgccacctgcggttcacctgccacctacggtgcatgttccaccgccggtccacctgccgtcgccggtccacctgccaccgacggtccatgtgccgccgccggttcatctgccgacgccaccatgccactaccctactcaaccgacccgggctcatgctcattctcagccacacccatgcccgtgccaacagccgcatncaagcccgtgccagctgcagggaacctgcggcgttggcagcaccccgatcct

SEQ ID NO: 342097 - DNA, 443 bp, Zea mays
  unsure (1)..(443): unsure at all n locations
tagcacatnaaagcacaatatgtaccaacaatggcagccaaaatattttgcctgcgggtgctccttggtctttctgcaagtgctgctacggcgaccattttcccacaatgctcacaagctcctatatcttcccttcttcccccgtacctctcaccagcggtgtcttcggtatgtgaaaacccaattcttcaaccctatatgatccaacaggcaatcgcagctggcatcttacctttatcacccttgttcctccaacaatcatcagccctattacagcagttacctttggtgcatttattggcacaaaacatcagggcacaacaactacaacaacttgtgctagcaaaccttgctgcctactctcagcaacaacagtttcttccattcaaccaactagctgcattgaactctgcttcttatttgcaacaacaacaactaccatt

SEQ ID NO: 342098 - DNA, 439 bp, Zea mays
attttgagcattcagaaacacaccaagcgaagcgcactagcaacaacctaacaacaatggctaccaagatattatccctccttgcgcttcttgcgctttttgcgagcgcaacaaatgcgtccattattccacaatgctcacttgctcctagttccattattccacagttcctcccaccagttacttcaatggccttcgaacacccagctgtgcaagcctataggctacaacaagcgattgcggcgagcgtcttacaacaaccaattgcccaattgcaacaacaatccttggcacatctaacaatacaaaccatcgcaacgcaacagcaacaacagttcctaccagcactgagccacctagccatggtgaaccctgtcgcctacttgcaacagcagctgcttgcatccaacccacttgctctagcaaacgtagttgcaaa

SEQ ID NO: 342099 - DNA, 281 bp, Zea mays
ggacatatatagagcactccagttcccacaaagagcaacaatggcgaccaagagggtggcgctccttatgctccctgctctttctgcatgtgctgctaacgcgacaattttctctcaatgctcacaagctcctatagcttcccttcttcccccataccttccatcaatgatagcttaagaatgtgaaaacccagctcttcaaccctatcggctccaacaagcaatcgcagcaagcaacatacccttatcacccttgttttaacaatcgccagtcctatctt

SEQ ID NO: 342100 - DNA, 220 bp, Zea mays
gcaacatataaagtggaatccagtagctacaatagagcaacattggcgaccaagaggtgggcctccttatgctccttgctctttctgcatgtgttgctaacgctacaattttccctcaatgctcacaagctcctttagcttcccttcttcccccataccttccatcaatgatagcttcagtatgtgaaaacccagctcttcaaccctataggctccaaca

SEQ ID NO: 342101 - DNA, 400 bp, Zea mays
caacaatggctaccaagatattatccctccttgcgcttcttgcgctttttgcgagcgcaacaaatgcgttcattattccacaatgctcacttgctccaagttccattattacacagttcctcccaccagttacttcaatgggcttcgaacacccagctgtgcaagcctataggctacaacaagcaattgcggcgagcgtcttacaacaaccaatttcccagttgcaacaacaatccttggcacatctaacaatacaaaccatcgcaacgcaacagcaacaacaattcctaccagcactgagccacctagccatggtgaaccctgccgcctacttgcaacagcagttgcttgcatcaaacccacttgctctggcaaacgtagttgcaaaccagccacaaca

SEQ ID NO: 342102 - DNA, 444 bp, Zea mays
agaccattagctttatctactccagagcgcagaagaacccgatcgacaccatgagggtgttgctcgttgccctcgctctcctggctctcgctgcgagcgccacctccacgcatacaagcggcggctgcggctgccagccaccgccgccggttcatctaccgccgccggtgcatctgccacctccggttcacctgccacctccggtgcatctcccaccgccggtccacctgccgccgccggtccacctgccaccgccggtccatgtgccgccgccggttcatctgccgccgccaccatgccactaccctactcaaccgccccggcctcagcctcatccccagccacacccatgcccgtgccaacagccgcatccaagcccgtgccagctgcagggaacctgcggcgttggcagcaccccgatcctgggccagtgcgtcgagtttc

SEQ ID NO: 342103 - DNA, 224 bp, Zea mays
aaaacccgacgcccatgggggtgtcggcctcgtctcctggcttcgtggagcgcacctcccatacaacgggtgcgtgcaccaccgcgcggtattacgcgcgggcattgcactcggtactgcacctcgggcatctccacgcggtcactgcgcgcggtcactgcaccgcggccatgccgcgcggtattgcgcgcacatgccactaccctataacgcccgctagctat

SEQ ID NO: 342104 - DNA, 449 bp, Zea mays
  unsure (1)..(449): unsure at all n locations
tcttgcgcttcttgcgctttttgcgagcgcaacaaatgcgtccattattccacaatgctggggtgctcctagttccattattccacagttcctcccaccagttacttcaatggccttcgaacacccagctgtgcaagcctataggctacaacaagcgattgcggcgagcgtcttacaacaaccaattgcccaattgcaacaacaatccttggcacatctaacaatacaaaccatcgcaacgcaacagcaacaacagttgctaccagcactgagccacctagccatggtgaaccctgtcgcctacttgcaacagcagctgcttgcatccaacccacttgctctagcaaacgtagttgcaaaccagcaacaacaacaactgcaacagtttctgccagcgcttaatcaactagccatggtgaaccctgccgnctacctacaacagcaacaac

SEQ ID NO: 342105 - DNA, 438 bp, Zea mays
atcgacaccatgagggtgttgctcgttgccctcgctctcctggctctcgctgcgagcgccacctgcacgcatacaagcggcggctgcggctgccagccaccgccgccggttcatctaccgccgccggtgcatctgccacctccggttcacctgccacctccggtgcatctcccaccgccggtccacctgccgccgccggtccacctgccaccgccggtccatgtgccgccgccggttcatctgccgccgccaccatgccactaccctactcaaccgccccggcctcagcctcatccccagccacacccatgcccgtgccaacagccgcatccaagcccgtgccagctgcagggaacctgcggcgttggcagcaccccgatcctgggccagtgcgtcgagttcctgaagcatcagtgcagcccgacggcgacgccctac

SEQ ID NO: 342106 - DNA, 442 bp, Zea mays
tatatagagcgctagcgtaccaactatagagcatcaatggcggccaagatattttccatcctgatgctccttgctctttctgcatgtgttgctaacgcgaccatttttcctcaatactcacaagctcctatagctgcccttcttcccccataccttccatcaatgaccgcttcagtatgtgaaaacccagcccttcaaccctacaggctccaacaagcaatcgcaacaagcaacttacctttatcacccctgttctttcaacaatcgccagccctatctttggtgcagtcattggtacaaaccatcagggcacaacagctgcagcaactcgtgctaccagtgatcagccaagtagctctggcaaacctttctccctactctcagcaacaacaatttcttccattcaaccaactgtctacactgaaccctgctgcttatttgc

SEQ ID NO: 342107 - DNA, 390 bp, Zea mays
ttcagaccattagctttatctactccagagcgcagaagaacccgatcgacaccatgagggtgtggctcgttgccctcgctctcctggctctcgctgcgagcgccacctccacgcatacaagcggcggctgcggctgccagccaccgccgccggttcatctaccgccgccggtgcatctgccacctccggttcacctgccacctccggtgcatctcccaccgccggtccacctgccgccgccggtccacctgccaccgccggtccatgtgccgccgccggttcatctgccgccggcaccatgccactaccctactcaaccgccccggcctcagcctcatccccagccacacccatgcccgtgccaacagccgcatccaagcccgtgccagc

SEQ ID NO: 342108 - DNA, 328 bp, Zea mays
acccgctcgacaccatgagggtgttgcggggtgccctcgctctcctggctcttgctgtgagcgccacctccacgcatacaagcggcggttgcggctgccagccaccgtcgccggttcatctaccggcgccggtgcatctgccacctccggttcacctgccacctccggtgcatcttccaccgccggtccaactgccggcgccggtgcacctgccaccgcccgtgcatgtgccggcgccggttcatctgccggcgccaccatgccactaccctactcaaccgccccggcctcagcctcatccccagccacacccatggccgtgccaaca

SEQ ID NO: 342109 - DNA, 373 bp, Zea mays
attttgagcattcagaaacacaccaagcgaagcgcactagcaacaacctaacaacaatggctaccaagatattatccctccttgcgcttcttgcgctttttgcgagcgcaacaaatgcgtccattattccacaatgctcacttgctcctagttccattattccacagttcctcccaccagttacttcaatggccttcgaacacccagctgtgcaagcctataggctacaacaagcgattgcggcgagcgtcttacaacaaccaattgcccaattgcaacaacaatccttggcacatctaacaatacaaaccatcgcaacgcaacagcaacaacagttcctaccagcactgagccacctagccatggtgaaccc

SEQ ID NO: 342110 - DNA, 446 bp, Zea mays
agaccattagctttatctactccagagcgcagaagaacccgatcgacaccatgagggtggggctcgttgccctcgctctcctggctctcgctgcgagcgccacctccacgcatacaagcggcggctgcggctgccagccaccgccgccggttcatctaccgccgccggtgcatctgccacctccggttcacctgccacctccggtgcatctcccaccgccggtccacctgccgccgccggtccacctgccaccgccggtccatgtgccgccgccggttcatctgccgccgccaccatgccactaccctactcaaccgccccggcctcagcctcatccccagccacacccatgcccgtgccaacagccgcatccaagcccgtgccagctgcagggaacctgcggcgttggcagcaccccgatcctgggccagtgcgtcgagttcctg

SEQ ID NO: 342111 - DNA, 395 bp, Zea mays
gaacatagaaagtggaatccagtagcaacaatagagcaacaatggcgaccaagatattgtggcttcttatgctccttgcgtctttctgcatgtgttggttacaccaccatttttccttaatgcgtcacaagctcctatagcttcccttcttcccccataccttccatcaatgatagcttcagtatgtgaaaacccagctcttcaaccctataggctccaacaagcaatcgcagcaagcaacatacctttatcacccttgtttcaacaatcgccagccctatctttggtgcagtcattgttgcacaccaccatggcgcagcagctgcagcaactcgtgctacctgtgatcaaccaagtagctctggcaaacctttctccctactctcagcaacaac

SEQ ID NO: 342112 - DNA, 434 bp, Zea mays
caacaagcaacatagaaagtggaatccagtagcaacaatagagcaacaatggagaccaagatgtggtccctccttatgctccttgctctttctacatgtgttgctaacgcgacaattttccctcaatgctcacaagctcctatagcttccctttttcccccataccttccatcaattatagcttcagtatgtgaaaacccagctcttcaaccatataggcttcaacaagcaatcgcagcaagcaacatacctttatcgcccttggtgtgtcaacaatcgccagccctatctttggtgcagtcattggtacaaaccataagggcacaacagctgcagcaactcgtgctacctgtgatcaaccaagtagctctggcaaacctttcttcctactcttcgcaacaacaatttctttcattcaaccaactgtgtacact

SEQ ID NO: 342113 - DNA, 452 bp, Zea mays
ccacgcgtccgataaaaagcacaatagtgtcccaccaatggtttccaaaatatttggcctccttatgctcctgggtctttctgcaagtgctgctacggcgaccattttcccgcaatgctcgcaagctcctatagcttcccttcttcccccgtacctctcaccagcggtgtcttcggtatgtgaaaacccaattcttcaaccctacaggatccaacaggcaatcgcagctggcatcttacctttatcacccttgttcctccaacaatcatcagccctattacaacagttacctttggtgcatttattggcacaaaacatcagggcacaacaactacaacaacttgtgctagcaaaccttgctgcctactctcagcaacagcagtttcttccattcaaccaactaagttcattgaactctgcttcttatttgcaacaacaacaactaccattca

SEQ ID NO: 342114 - DNA, 461 bp, Zea mays
caccaagcgaagcgcactagcaacaacctaacaacaatggctaccaagatattatccctccttgcgcttcttgcgctttttgcgagcgcaacaaatgcgtccattattccacaatgctcacttgctcctagttccattattccacagttcctcccaccagttacttcaatggccttcgaacacccagctgtgcaagcctataggctacaacaagcgattgcggcgagcgtcttacaacaaccaattgcccaattgcaacaacaatccttggcacatctaacaatacaaaccatcgcaacgcaacagcaacaacagttcctaccagcactgagccacctagccatggtgaaccctgtcgcctacttgcaacagcagctgcttgcatccaacccacttgctctagcaaacgtagttgcaaaccagcaacaacaacaactgcaacagtttctgccagcgcttaa

SEQ ID NO: 342115 - DNA, 434 bp, Zea mays
cagcattcagaaacacaccaagcgaagcgcactagcaacaacctaacaacaatggctaccaaggtattagccctccttgcgcttcttgcccttttagtgagcgcaacaaatgcgttcattattccacagtgctcacttgctcctagtgccattattccacagttcctcccaccagttacttcaatgggcttcgaacatccagccgtgcaagcctacaggctacaactagcgcttgcggcgagcgtcttacaacaaccaattgcccaattgcaacaacaatccttggcacatctaaacctacaaaccatcgcaacgcaacagcaacaacagtttctgccatcactgagccacctagccgtggtgaaccctgtcgcctacttgcaacagcagctacttgcatccaacccacttgctctggcgaacgtagctgcata

SEQ ID NO: 342116 - DNA, 457 bp, Zea mays
cagaaacacaccaagcgaagcgcactagttataacctaacaacaatggctaccaagatatgagccctccttgcgcttcttggcccttttagtgagcgcaacaaatgcgttcattattccacagtgctcacttgctcctagtgccattattccacagttcctcccaccagttacttcaatgggcttcgaacatccagccgtgcaagcctacaggctacaactagcgcttgcggcgagcgtcttacaacaaccaattgcccaattgcaacaacaatccttggcacatctaaacctacaaaccatcgcaacgcaacagcaacaacagtttctgccatcactgagccacctagccgtggtgaaccctgtcgcctacttgcaacagcagctacttgcatccaacccacttgctctggcgaacgtagctgcataccagcaacaacaacgtctgcaacagttta

SEQ ID NO: 342117 - DNA, 355 bp, Zea mays
agaccattagctttatctactccagagcgcagaagaacccgatcgacaccatgagggtgtggcgcgttgccctcgctctgctggctctcgctgcgagcgccacctccacgcatacaagcggcggctgcggctgccagccaccgccgccggttcatctaccgccgccggtgcatctgccacctccggttcacctgccacctccggtgcatctcccaccgccggtccacctgccgccgccggtccacctgccaccgccggtccatgtgccgccgccggttcatctgccgccgccaccatgccactaccctacttaaccggccccggcctcagcctcatcctcagccacacccatgcc

SEQ ID NO: 342118 - DNA, 453 bp, Zea mays
ccggttggaataccggggcggcgacgcgtccgggtcttcagaccattagctttatctactccagagcgcagaagaacccgatcgacaccatgagggtgttgctcgtggccctcgctctcctggctctcgctgcgagcgccacctccacgcatacaagcggcggctgcggctgccagccaccgccgccggttcatctaccgccgccggtgcatctgccacctccggttcacctgccacctccggtgcatctcccaccgccggtccacctgccgccgccggtccacctgccaccgccggtccatgtgccgccgccggttcatctgccgccgccaccatgccactaccctactcaaaccgcccggcctcagcctcatccccagccacacccatgcccgtgccaacagccgcattcaagcccgtgccagctgcaaggaacctgctgcgtttgcagca

SEQ ID NO: 342119 - DNA, 372 bp, Zea mays
gggtctacagaccattagctttatctactccagagcgcagaagaacccgatcgacaccatgagggtgttgctcgttgccctcgctctcctggctctcgctgcgagcgccacctccacgcatacaagcggcggctgcggctgccagccaccgccgccggttcatctaccgccgccggtgcatctgccacctccggttcacctgccacctccggtgcatctcccaccgccggtccacctgccgccgccggtccacctgccaccgccggtccatgtgccgccgccggttcatctgccgccgccaccatgccactaccctactcaaccgccccggcctcagcctcatccccagccacacccatgcccgtgccaaca

SEQ ID NO: 342120 - DNA, 405 bp, Zea mays
  unsure (1)..(405): unsure at all n locations
tagcaacatagaaagcacaatagtgtaccaccaatggcagccaaaatattttgcctccttatgctccttggtctttctgcaagtgctgctacggcgaccattttcccgaaatgctcgcaagctcctatagcttcccttcttcccccgtacctctcaccagcggtgtcttcggtatgtgaaaacccaattcttcaaccctacaggatccaacaggcaatcacagctggcatcttacctttatcacccttgttcctccaacaatcatcagccctattacatcagttacctttggtgcatttattggcacaaaacatcagggcacaacaactacaacaactngtgctagcaaaccttgctgcctactctcagcaacagcagtttcttccattcaaccaactagctgca

SEQ ID NO: 342121 - DNA, 401 bp, Zea mays
  unsure (1)..(401): unsure at all n locations
gtccgaagcacatanaaagtggaatccagtagcaacaatagagcaacaatggcgaccaagatatttgcgctccttatgctcgttgctctttctgcatgtgttgctaacgcgacaattttccctcaatgctcacaagctcctatagcttcccttcttcccccataccttccatcaatgatagcttcagtatgtgaaaacccagctcttcaaccctataggctccaacaagcaatcgcagcaagcaacatacctttatcacccttgtttcaacaatcgccagccctatctttggtgcagtcattggtacaaaccatcaaggcacagcagctgcagcaactcgtgctacctgtgatcaaccaagtagctctggcaaacctttctccctactctcagcaacaaca

SEQ ID NO: 342122 - DNA, 449 bp, Zea mays
aaagcacaatactgtacctacaatggctgccaaaatattttgcctccttatgctccttggtctttctgcaagtgctgctacggcgaccattttcccgcaatgctcgcaagctcctatagcttcccttcttcccccgtacctctcaccagcggtgtcttcggtatgtgaaaacccaattcttcaaccctacaggatccaacaggcaatcgcagctggcatcttacctttatcacccttgttcctccaacaatcatcagccctattacaacagttacctttggtgcatttattggcacaaaacatcagggcacaacaactacaacaacttgtgctagcaaaccttgctgcctactctcagcaacagcagtttcttccattcaaccaactaagttcattgaactctgcttcttatttgcaacaacaacaactaccattcaaccagctacctg

SEQ ID NO: 342123 - DNA, 174 bp, Zea mays
tctaaatcgcgactgcccccttttttttcttttatctccattataaactggaattttttacagccagtaaattctataatttcaaatccctacaccaaatcaaacaccaaccgaatctcttaaaaaatatatcacaaccattttatttatttttttcaaaaatatccccaaata

SEQ ID NO: 342124 - DNA, 204 bp, Zea mays
gcaagtttaattcggtgtctcacgccatgtatttacaatggcttcttggtgtctccgcagcagggctattacaaggtcaacgacctcaacaagcgctacaagcgcgtggtctacctgctctgccgctgccgttccttcctagtggtctataaccacgctctgctttacgtcttttactaacttactctcaatgccaaagactaa

SEQ ID NO: 342125 - DNA, 422 bp, Zea mays
ccagagcgcataagaacccgatcgacaccatgagggtgttgctcgttgccctcgctctccgggctctcgctgcgagcgccacctccacgcatacaagcggcggctgcggctgccagccaccgccgccggttcatctaccgccgccggtgcatctgccacctccggttcacctgccacctccggtgcatctcccaccgccggtccacctgccgccgccggtccacctgccaccgccggtccatgtgccgccgccggttcatctgccgccgtcaccatgccactaccctactcaaccgccccggccttagcctcatcctcagccacacccatgcccgtgccaacagccgcatccaagcccgtgccagctgtatggaacctgcggcgttggcagcaaccccgatcctgggccagtgcgtcgagtt

SEQ ID NO: 342126 - DNA, 454 bp, Zea mays
agaccattagctttatctactccagagcgcataagaacccgatcgacaccatgagggtgttgcgcgttgccctcgctctcctggctctcgctgcgagcgccacctccacgcatacaagcggcggctgcggctgccagccaccgccgccggttcatctaccgccgccggtgcatctgccacctccggttcacctgccacctccggtgcatctcccaccgccggtccacctgccgccgccggtccacctgccaccgccggtccatgtgccgccgccggttcatctgccgccgccaccatgccactaccctactcaaccgccccggcctcagcctcatccccagccacacccatgcccgtgccaacagccgcatccaagcccgtgccagctgcagggaacctgcggcgttggcagcaccccgatcctgggccagtgcgtcgagtttctgaggcatca

SEQ ID NO: 342127 - DNA, 444 bp, Zea mays
gaccaacaagcaacatagaaggtggaatccagtagcaacaatagagcaacaatggcgaccaagagattttccctccttatgctccttgctctttctgcatgtgttgctaacgcgacaattttccctcaatgctcacaagctcctatagcttcccttcttcccccataccttccatcaatgatagcttcagtatgtgaaaacccagctcttcaaccctataggctccaacaagcaatcgcagcaagcaacatacctttatcacccttgtttcaacaatcgccagccctatctttggtgcagtcattggtacaaaccatcagggcacagcagctgcagcaactcgtgctacctgtgatcaaccaagtagctctggcaaacctttctccctactctcagcaacaacaatttcttccattcaaccaactgtctacattgaaccgtgct

SEQ ID NO: 342128 - DNA, 445 bp, Zea mays
catcaatcatcattcatcttagtagtataggcaccaaatcaaatctgcaacatcaattatctgagtccaaaaaccatgaagctggtgcttgtggttcttgctttcattgctttagtatcaagtgtttcttgtacacagacaggcggctgcagctgtggtcaacaacaaagccatgagcagcaacatcatccacaacaacatcatccacaaaaacaacaacatcaaccaccaccacaacatcaccagcagcagcaacaccaacaacaacaagttcacatgcaaccacaaaaacatcagcaacaacaagaagttcatgttcaacaacaacaacaacaaccgcagcaccaacaacaacaacaacaacagcaccaacaacaacatcaatgtgaaggccaacaacaacatcaccaacaatcacaaggccatgtgcaacaacacgaacaga

SEQ ID NO: 342129 - DNA, 450 bp, Zea mays
attttgagcattcagaaacacaccaagcgaagcacattagcaacaacctaacaacaatgggtgccaagatattatccctccttgcgcttcttgcgctttttgcgagcgcaacaaatgcgttcattattccacaatgctcacttgctccaagttccattattacacagttcctcccaccagttacttcaatgggcttcgaacacccagctgtgcaagcctataggctacaacaagcaattgcggcgagcgtcttacaacaaccaatttcccagttgcaacaacaatccttggcacatctaacaatacaaaccatcgcaacgcaacagcaacaacaattcctaccagcactgagccacctagccatggtgaaccctgccgcctacttgcaacagcagttgcttgcatcaaacccacttgctctggcaaacgtagttgcaaaccagccacaac

SEQ ID NO: 342130 - DNA, 407 bp, Zea mays
ccggttcacctgccacctccggtgcatctttcaccgccggtccacctgccgccgccggtccgcctgccaccgccgggccatgtgccgccgccggttcatctgccgccgccaccatgccactaccctactcaaccgccccggcctcagcctcatccccagccacacccatgcccgtgccaacagccgcatccaagcccgtgccagctgcagggaacctgcggcgttggcagcaccccgatcctgggccagtgcgtcgagttcctgaggcatcagtgcagcccgacggcgacgccctactgctcgcctcagtgccagtcgttgcggcagcagtgttgccagcagctcaagcaggtggagccgcagcaccggtaccaagcgatcttcggcttgggccttcagtccattct

SEQ ID NO: 342131 - DNA, 431 bp, Zea mays
cttcagaccattagctttatctactccagagcgcagaagaacccgatcgacaccatgagggggttgctcgttgccctcgctctcctggctctcgctgcgagcgccacctgcacgcatacaagcggcggctgcagctgccagccaccgccgccggttcatctaccgccgccggtgcatctgccacctccggttcacctgccacctccggtgcatataccaccgacggtccacctgccgccgccggtccacctgccaccgtcggtccatgtgccgacgacggttcatctgacgtcgacaccatgccactaccctactcaaccgccccggccttagtctcatccccagccacacccatgcccgtgccaacagccgcatacaagcccgtgccagctgcagggaacctgcggcgttggcagcaccccgatcctggg

SEQ ID NO: 342132 - DNA, 409 bp, Zea mays
gcgtacggtcaatcacaactggcatcttacctttattacccttgatcctccaacaatcatcatccctagtacatctattacctggggtgcatttattggcacaaaacatcatggcacaacaactacaacaacttgtgctagcaaaccttgcttcctactctcagcaacagcattttctttcattcaaccaactaggttcattgaactctgctccttatttgcaacaacaacaactaccattcagccagctacctgctttctacccacagcaaattcttccattcaaccaactagcagcattgaactctccttcttatttacagcagcaacaactactaccattcatccagctaaactgttgtgagccctgctaccttcttgacacaaccacaattgtagcccttttacc

SEQ ID NO: 342133 - DNA, 365 bp, Zea mays
attttgagcattcagaaacacaccaagcgaagcacattagcaacaacctaacaacaatggctggcaagatattatccctccttgcgcttcttgcgctttttgcgagcgcaacaaatgcgttcattattccacaatgctcacttgctccaagttccattattacacagttcctcccaccagttacttcaatgggcttcgaacacccagctgtgcaagcctataggctacaacaagcaattgcggcgagcgtcttacaacaaccaatttcccagttgcaacaacaatccttggcacatctaacaatacaaaaccatcgcaacgcaacagcaacaacaattcctaccagcactgagccacctagccat

SEQ ID NO: 342134 - DNA, 402 bp, Zea mays
atcaatcatcattcatcttagtagtataggcaccaaatcaaatctgcaacatcaattatctagctccaaaaaccatgaagctggtgcttgtggttcttgctttcattgctttagtatcaagtgtttcttgtacacagacaggcggctgcagctgtggtcaacaacaaagccatgagcagcaacatcatccacaacaacatcatccacaaaaacaacaacatcaaccaccaccacaacatcaccagcagcagcaacaccaacaacaacaagttcacatgcaaccacaaaaacatcagcaacaacaagaagttcatgttcaacaacaacaacaacaaccgcagcaccaacaacaacaacaacaacagcaccaacaacaacatcaatgtgaaggccaacaacaac

SEQ ID NO: 342135 - DNA, 441 bp, Zea mays
attttgagcattcagaaacacaccaagcgaagcgcactagcaacaacctaacaacaatggctgccaagatattatccctccttgcgcttcttgcgctttttgcgagcgcaacaaatgcgtccattattccacaatgctcacttgctcctagttccattattccacagttcctcccaccagttacttcaatggccttcgaacacccagctgtgcaagcctataggctacaacaagcgattgcggcgagcgtcttacaacaaccaattgcccaattgcaacaacaatccttggcacatctaacaatacaaaccatcgcaacgcaacagcaacaacagttcctaccagcactgagccacctagccatggtgaaccctgtcgcctacttgcaacagcagctgcttgcatccaacccacttgctctagcaaacgtagttgcaaacc

SEQ ID NO: 342136 - DNA, 380 bp, Zea mays
cattagctttatctactccagagcgcagaagaacccgatcgacaccatgagggtgttgctcgtggccctcgctctcctggctctcgctgcgagcgccacctccacgcatacaagcggcggctgcggctgccagccaccgccgccggttcatctaccgccgccggtgcatctgccacctccggttcacctgccacctccggtgcatctcccaccgccggtccacctgccgccgccggtccacctgccaccgccggtccatgtgccgccgccggttcatctgccgccgccaccatgccactaccctactcaaccgccccgggcttaggcttattcccagccacacccatgcccgtgccaacagccgcatccaagcccgtgcc

SEQ ID NO: 342137 - DNA, 449 bp, Zea mays
tccgtagcaccatataaagcacaatagtgtaccaacaatggcagccaaaatattttgcctccttatgggcgcttggtctttctgcaagtgctgctacggcgaccattttcccgaaatgctcgcaagctcctatagcttcccttcttcccccgtacctctcaccagcggtgtcttcggtatgtgaaaacccaattcttcaaccctacaggatccaacaggcaatcacagctggcatcttacctttatcacccttgttcctccaacaatcatcagccctattacatcagttacctttggtgcatttattggcacaaaacatcagggcacaacaactacaacaacttgtgctagcaaaccttgctgcctactctcagcaacagcagtttcttccattcaaccaactagctgcattgaactctgcttcttatttgcaacaacaacaactacca

SEQ ID NO: 342138 - DNA, 429 bp, Zea mays
  unsure (1)..(429): unsure at all n locations
caacaagcaacatagaaagtggaatccagtatcaacaatagagcaacaatggcgaccaagaggttttccctccttatgctccttgctctttctgcatgtgttgctaacgcgacaattttccctcaatgctcacaagctcctatagcttcccttcttcccccataccttccatcaatgatagcttcagtatgtgaaaacccagctcttcaaccctataggctccaacaagcaatcgcagcaagcaacatacctttatcacccttgtttcaacaatcgccagccctatctttggtgcagtcattggtacaaaccatcagggcacagcagctgcagcaactcgtgctacctgtgatcaaccaagtagctctggcaaacctttcttcctactctcagcaacaacaanttctttcattcaaccaactgtctaca

SEQ ID NO: 342139 - DNA, 301 bp, Zea mays
ccgagcacaccgcctcctcctcttatttgagcacattgttacctgctcttgctaggagtcactctagcacgccccctcctctagcctaaagtccctctatcacacccacgccttatctacccttaacacgccgacacctcatcaggtgagggattcttatctagacatagctgatgtctgcacccaactactggactttcaagacgaaaagctctttctgatcaaccacgaaaagatggatgcatataacaacctcatatcattgaaacacgttccatgaccgattactaaaagactaaac

SEQ ID NO: 342140 - DNA, 444 bp, Zea mays
gagcattcataaacacaccaagcgaagcgcactagcaacgacctaacaacaatggctaccgagggtattagccctccttgcgcttcttgccctttttgtgagcgcaacaaatgcgttcattattccacaatgctcacttgctcctagtgccattattccacagttcctcccaccagttacttcaatgggcttcgaacacctagctgtgcaagccaacatgcaacaacaagcgcttgcggcgagcgtcttacaacaaccaattgcccaattgcaacaacaatccttgccacatctaacaatacaagccatcacaacgcaacagcaacaacagtttctaccagcactgagccacctagccatggtgaaccctgccgcctacttgcaagagcagctgcttgcatccaacccacttgctctggcgaacgtagttgcaaaccagcaaca

SEQ ID NO: 342141 - DNA, 442 bp, Zea mays
cccacgcgtccgattttgagcattcagaaacacaccaagcgaagcacattagcaacaacctaacaacaatggctaccaagatattatccctccttgcgcttcttgcgctttttgcgagcgcaacaaatgcgttcattattccacaatgctcacttgctccaagttccattattacacagttcctcccaccagttacttcaatgggcttcgaacacccagctgtgcaagcctataggctacaacaagcaattgcggcgagcgtcttacaacaaccaatttcccagttgcaacaacaatccttggcacatctaacaatacaaaccatcgcaacgcaacagcaacaacaattcctaccagcactgagccacctagccatggtgaaccctgccgcctacttgcaacagcagttgcttgcatcaaacccacttgctctggcaaacgt

SEQ ID NO: 342142 - DNA, 446 bp, Zea mays
ctgggtcttcagaccattagctttatctactccagagcgcagaagaacccgatcgacaccaggggggtgttgctcggtgccctcgctctcctggctctcgctgcgagcgccacctccacgcatacaagcggcggctgcggctgccagccaccgccgccggttcatctaccgccgccggtgcatctgccacctccggttcacctgccacctccggtgcatctcccaccgccggtccacctgccgccgccggtccacctgccaccgccggtccatgtgccgccgccggttcatctgccgccgccaccatgccactaccctactcaaccgccccggtctcagcctcatccccagccacacccatgcccgtgccaacagccgcatccaagcccgtgccagctgcaaggaacctgcggcgttggcagcaccccgatcctgggccagtgcgt

SEQ ID NO: 342143 - DNA, 447 bp, Zea mays
atggagaccaactagcaccatataaagcacaattttgtaccaataatggcagccaaaatatgggggctcattatgctccttggtctttctgcaagtgctgctacggcgagcattttcccgcaatgctcacaagctcctatagcttcccttcttcccccatacctctcaccagcgatgtcttcagtatgtgaaaatccaattcttctaccctacaggatccaacaggcaatcgcagcaggcatcttacctttatcacccttgttcctccaacaatcatcagccctattacagcagttacctttggtgcatttattggcacaaaacatcagggcacaacaactacaacaactcgtgctagcaaaccttgctgcctactctcagcaacagcagttacctttggtgcatttgttggcacaaaacatcatggcacaacaactacaacaactc

SEQ ID NO: 342144 - DNA, 79 bp, Zea mays
ataccaacaacccatcattggtggtgccctcttttagatttcttatgagttatagttcaataagaaagttttttgtctg

SEQ ID NO: 342145 - DNA, 387 bp, Zea mays
acccgatcgacaccaggagggtgttgttgggtgacctcgctctactggctttggctgcgagcgccaccttcacgcatacaagcggccggttgcggatgccagccaccgcgcgccggttcatctaccgccgtcggtgcatctgccacctacggttcacctgccacctgcggtgcatctcccaccgccggtccacctgccgccgccggtccacctgccaccgtcggtccatgtgccgccgtcggttcatctgccgccgtcaccatgccactaccctactcaaccgccccggcctcagcctcatccccagccacacccatgcccgtgccaacagccgcatccaagcccgtgccagctgcagggaacctgcggcgttggcagcaccccgat

SEQ ID NO: 342146 - DNA, 411 bp, Zea mays
actgggtcttcagaccattagctttatctactccagagcgcagaagaacccgatcgacaccgtgagggtgttgctcgttgccctcgctctcctggctctcgctgcgagcgccacctccacgcatacaagcggcggctgcggctgccagccaccgccgccggttcatctaccgccgccggtgcatctgccacctccggttcacctgccacctccggtgcatctcccaccgccggtccacctgccgccgccggtccacctgccaccgccggtccatgtgccgccgccggttcatctgccgccgccaccatgccactaccctactcaaccgccccggcctcagcctcatccccagccacacccatgcccgtgccaacagccgcatccaagcccgtgccaactgcagggaacctg

SEQ ID NO: 342147 - DNA, 395 bp, Zea mays
ccaactagcaacatagaaggcacattagtgtaccaacaatggcagccaaaatattttgcctcgttatgctccttggtctttctgcaagtgctgctacggcgaccattttcccgaaatgctcgcaagctcctatagcttcccttcttcccccgtacctctcaccagcggtgtcttcggtatgtgaaaacccaattcttcaaccctacaggatccaacaggcaatcacagctggcatcttacctttatcacccttgttcctccaacaatcatcagccctattacatcagttacctttggtgcatttattggcacaaaacatcagggcacaacaactacaacaacttgtgctagcaaaccttgctgcctactctcagcaacagcagtttcttccattc

SEQ ID NO: 342148 - DNA, 305 bp, Zea mays
ttacctttatctactccagagcgcagaaaaacccgatcgacaccatgagggtgttgctggttgccctcgctctcctggctctcgctgcaagcgccaccttcacgcatacaagcggcggctgcggctgccagccaccgccgccggttcatctaccgccgccggtgcatctgccacctacggttcacctgccacctccggtgcatctcccaccggcggtccacctgccgccgccgagccacctgccaccgccggtccatgtgccgccgccgattcatctgccgccgtcaccatgccactaccctact

SEQ ID NO: 342149 - DNA, 221 bp, Zea mays
gtgagagaggggaaagttgattctctctctgacccgcccactccctccttccctgctcgccgcgcactccgtcgttcctgcgcgcacgtacgtacagtagccagacacgagatcgagtggtacaggtcccgccagaaacctcacgagctagctggttcctgatcggcggtctgtgccgcgcgccgatccacgcatggcgccgtcgctcctgcccgcgcgct

SEQ ID NO: 342150 - DNA, 437 bp, Zea mays
tcgccaacaagcaacatataaagtggaatacagtagcaacaatagatcaacaatggcggccaagagattttccatccttatgctccttgctctttctgcatgtgttgctaacgcgaccatttttcctcaatactcacaagctcctatagctgcccttcttcccccataccttgcatcaatgaccgcttcagtatgtgaaaacccagcccttcaaccctacaggctccaacaagcaatcgcaacaagcaacttacctttatcacccctgttctttcaacaatcgccagccctatctttggtgcagtcattggtacaaaccatcagggcacaacaactgcagcaactcgtgctaccagtgatcagccaaatagctcttgcaaacctttctccctactctcagcaacaacaatttcttgcattcaaccaactgtctacac

SEQ ID NO: 342151 - DNA, 442 bp, Zea mays
attttgagcattcagaaacacaccaagcgaagctacctagcaacgacttaacagcaatggcgaccaagatattagccctccttgcgcttcttgccctttttgtgagcgcaacaaatgcgttcattattccacaatgctcacttgctcctagtgccattataccacagttcctccgaccagttacttcaatgggcttcgaacacctagctgtgcaagcctacaggctacaacaagcgcttgcggcgagcgtcttacaacaaccaattaaccaattgcaacaacaatccttggcacatctaaccatacaaaccatcgcacaacaactacaacaacttgtgctagcaaaccttgctgcctactctcagcaacagcagtttcttccattcaaccaactagcttgattgaactctgcttcttatttgcaacaacaacaactaccatt

SEQ ID NO: 342152 - DNA, 427 bp, Zea mays
gcaattagctcatcgactccagattggagaactcgacaccatgaaggtgctgatcgttgcccttgctctcctggcgctcgctgcgagcgccgcctccagtacaagcggcggctgtggctgccagacaccaccgtttcatctaccgcctccgttctatatgccgcctccgttctatctgccgccgcagcagcagccgcagccatggcaataccccactcaaccaccgcagctaagcccgtgccagcagttcggatcctgcggcgtcggcagcgtcggcagcccgttcctgggccagtgcgtcgagttcctgaggcaccagtgcagcccggcggcgacgccctacggctcgccacagtgccaggcgctgcagcagcagtgctgccaccagatcaggcaggtggagccgctgcaccggtaccaggcgaca

SEQ ID NO: 342153 - DNA, 430 bp, Zea mays
ctgggtcttcagaccattagctttatctactccagagcgcagaagaacccgatcgacaccatgagggtgttgctcgttgccctcgctctcctggctctcgctgcgagcgccacctccacgcatacaagcggcggctgcggctgccagccaccgccgccggttcatctaccgccgccggtgcatctgccacctccggttcacctgccacctccggtgcatctcccaccgccggtccacctgccgccgccggtccacctgccaccgccggtccatgtgccgccgccggttcatctgccgccgccaccatgccactaccctactcaaccgccccggcctcagcctcatccccagccacacccatgcccgtgccaacagccgcatccaagcccgtgccagctgcagggaacctgcggcgttggcagcaccccga

SEQ ID NO: 342154 - DNA, 394 bp, Zea mays
acccacgccccacgcgtgcgcatatataaaggtagatcgcgcatttttttttaacacctccggccacaagaaaggggtgggtcattctcctcgttctttctgcaagtgttgttaccacaaccaaaatcccacaatgctcacacaatcctatatatttcttctttttccatacaccttacattaatatagcattgtgtgaaaaaaaaacaactcatccatacaatatgcatcaaacaatcaaaccaggcatcgaacaatcatcactctcgctccttcaacaaacggcaaacctattactggagttacatatgggccataaccttgcagaaaacaatatggaacaacacctactacaactggaaaaaacaaacattgctgcacacactcatcacca

SEQ ID NO: 342155 - DNA, 119 bp, Zea mays
gtcagatcaccagaaggcggatcacacgattcaagattaagctctcgcccgtgcgaaggggtacctatcttatagagtacattaacttaaacttactgtcctgccttttacaagccgac

SEQ ID NO: 342156 - DNA, 434 bp, Zea mays
caactagcaacatagaaagcacaatagtgttccaacaatggcagccaaaatattttgcctgcttatgctccttggtctttctgcaagtgctgctacggctaccattttcccgcaatgctcgcaagctcctatagcttcccttcttcccccgtacctctcaccagcggtgtcttcggtatgtgaaaacccaattcttcaaccctacaggatccaacaggcaatcgcagctggcatcttacctttatcacccttgttcctccaacaatcatcagccctattacaacagttacctttggtgcatttattggcacaaaacatcatggcacaacaactacaacaacttgtgctagcaaaccttgctgcctactctcagcaacagcaatttcttccattcaaccaactaggttcattgaactctgcttcttatttgcaac

SEQ ID NO: 342157 - DNA, 430 bp, Zea mays
ccaacaagcaacatataaagtggaatacagttgcaacaatagagcatcaatggcggccaagatattttccatccttatgctccttgctctttctgcatgtgttgctaacgcgaccatttttcctcaatactcacaagctcctatagctgcccttcttcccccataccttccatcaatgaccgcttcagtatgtgaaaacccagcccttcaaccctacaggctccaacaagcaatcgcaacaagcaacttacctttatcacccctgttctttcaacaatcgccagccctatctttggtgcagtcattggtacaaaccatcagggcacaacagctgcagcaactcgtgctaccagtgatcagccaagtagctctggcaaacctttctccctactatcagcaacaacaatttcttccattcaaccaactgtct

SEQ ID NO: 342158 - DNA, 425 bp, Zea mays
cagaccattagctttatctactccagagcgcagaagaacccgatcgacaccatgagggtgttgctcgttgccctcgctctcctggctctcgctgcgagcgccacctccacgcatacaagcggcggctgcggctgccagccaccgccgccggttcatctaccgccgccggtgcatctgccacctccggttcacctgccacctccggtgcatctcccaccgccggtccacctgccgccgccggtccacctgccaccgccggtccatgtgccgccgccggttcatctgccgccgccaccatgccactaccctactcaaccgccccggcctcagcctcatccccagccacacccatgcccgtgccaacagccgcatccaagcccgtgccagctgcagggaacctgcggcgttggcagcaccccgatcct

SEQ ID NO: 342159 - DNA, 417 bp, Zea mays
  unsure (1)..(417): unsure at all n locations
aaaaccgggccgaccgacgcgtccgcagagcattatctttatctactctatagcttcttaaaaacccgatcgacaccaggagggtaggtctcttttccctcnctctcctgtctctctcttcgagcgccacctccacgcatacaatcggcggctgctgctgccatccaccgccgccggttcatctaccgccgccggtgcatctgccacctccggttcacctgccacctccggtgcatctcccaccgccggtccacctgccgccgccggtccacctgccaccgccggtccatgtgccgccgccggttcatctgccgccgccaccatgccactaccctactcaaccgccccggcctcagcctcatccccagccacacccatgcccgtgccaacagcctcatccaagcccgtgccaacttc

SEQ ID NO: 342160 - DNA, 282 bp, Zea mays
gtcagcctagcaattagctcatcgactccagattggagaactcgacaccatgaaggtgctgatcgttgcccttgctctcctggcgctcgctgcgagcgccgcctccagtacaagcggcggctgtggctgccagacaccaccgtttcatctaccgcctccgttctatatgccgcctccgttctatctgccgccgcagcagcagccgcagccatggcaataccccactcaaccaccgcagctaagcccgtgccagcagttcggatcctgcggcgtcggcagcgt

SEQ ID NO: 342161 - DNA, 430 bp, Zea mays
ccaactatcaacatagaaagcactatagtgtaccaacaatggcagccaaaatatggtgcttccttatgctccttggtctttctgcaagtgttgctaccgcaaccattttcccacaatgctcacaagctcctatagcttcccttcttcccccatacctctcaccagcggtgtcttcaatgtgtgaaaacccaattgttcaaccctacatgatccaacaggcaatcgcaacaggcatcttaccattatcacccttgttcctccaacaaccgtcagccctattacagcagttacctttggtccatttggtggcacaaaacatcatgtcacaacaactacaacaacttgtgctagcaaaccttgctgcatactctcagcaacatcagtttcttccattcaaccaactggcttcattgaactctgctgcttattt

SEQ ID NO: 342162 - DNA, 361 bp, Zea mays
  unsure (1)..(361): unsure at all n locations
cttcagaccattagctttatctactccagatcgcagaagaacccgatcgacacgcatgagggtgttgctcgttgccctcgctctcctggctctcgctgcgagcgccacctccacgcatacaagcggcggctgcggctgccagccaccgccgccggttcatctaccgccgccggtgcatctgccacctccggttcacctgccacctccggtgcatctcccaccgccggtccacctgccgccgccggtccacctgccaccgccggtccatgtgccgccgccggttcatctgccgccgncaccatgccactaccctactcaaccgccccggcctcagcctcatncccagccacacccatgcccg

SEQ ID NO: 342163 - DNA, 436 bp, Zea mays
cttcagaccattagctttatctactccagagcgcagaagaacccgatcgacaccatgagggtgttgctcgttgccctcgctctcctggctctcgctgcgagcgccacctccacgcatacaagcggcggctgcggctgccagccaccgtcgccggttcatctaccgccgccggtgcatctgccacctgcggttcacctgccacctccggtgcatctcccaccgccggtccacctgccgccgccggtccacctgccaccgccggtccatgtgccgccgccggttcatctgccgccgccaccatgccactaccctactcaaccgccccggcctcagcctcatccccagccacacccatgcccgtgccaacagccgcatccaagcccgtgccagctgcaaggaacctgcggcgttggcagcaccccgatcctgggccagt

SEQ ID NO: 342164 - DNA, 401 bp, Zea mays
aatattttgagcattcagaaacacaccaagcgaagcacattagcaacaacctaacaacagtggctaccaagatattatccctccttgcgcttcttgcgctttttgcgagcgcaacaaatgcgttcattattccacaatgctcacttgctccaagttccattattacacagttcctcccaccagttacttcaatgggcttcgaacacccagctgtgcaagcctataggctacaacaagcaattgcggcgagcgtcttacaacaaccaatttcccagttgcaacaacaatccttggcacatctaacaatacaaaccatcgcaacgcaacagcaacaacaattcctaccagcactgatccacctagccatggtgaaccctgacgcctacttgcaacagcagttg

SEQ ID NO: 342165 - DNA, 420 bp, Zea mays
catgattcatcttagtagtataagcaccattttaaatttgcaacatcaattatctaactggggaaggcatgaatctggtgcttgtggttcttgctttcattgctttagtatcaagtgtttcttgtacacagacaggcggctgcatctgtggtcaacaacaaagccatgagcagcatcatcattcacaacaacatcatccacaataacaacatcatcaaccaccaccacaacatcaccagcagcagcaacaccaacaacaacaagttcacatgcatccacaaaaacattagcaacaacaagatgttcatgttcaacaacaacaacaacaaccgcagcaccaactacaacaacatcaactgcaccaacatcaacatcaatgtgaaggccaacaacaacattaccaacaatcacatagccatg

SEQ ID NO: 342166 - DNA, 299 bp, Zea mays
acgagttgctgcagctgctgtgctacctgtgatcaaccaaatagctctggcaaacctttgtgcctactctcagcaacaacaatttcttccattcaaccaactgtctacattgaaccgtgctgcttatttgcagcaacaactattaccattcagccagctagctactgcctactctcagcaacaacaacttctttcatttaaccaattggccgcactgaaccccgctgcttatttgcagcagcaaatactactaccatttagccagctagctgcagcaagccgtgctttcttcttgacac

SEQ ID NO: 342167 - DNA, 331 bp, Zea mays
attaagaccattaactgcatctactccagttctcaaaagaacccgatcgacagggggagctggttgctctttgccctcactctactgtctctacctgcaagctcctcctacactcatacaaacggcctatgaggctgccatccaccgactacctttcatcaaccgtcgcctgaacatgtgacaaacccaattgaccaaccacacacgatgcatcatccaaccccaacacacatgtcaccatcatcacacttgtcactgcaacaacatgtacccctattacagcatttaccttctgtacaattccactaacataatattacggcccaacatc

SEQ ID NO: 342168 - DNA, 321 bp, Zea mays
agaaacacaccaagcgaagcgcactagcatcaacctaacaacaatggctaccgagatattaggcctccttgcgcttcttgcgctttttgcgagcgcaacaaatgcgtccattattccacaatgctcacttgctcctagttccattattccacagttcctcccaccagttacttcaatggccttcgaacacccagctgtgcaagcctataagctacaacaagcgattgcggcgagcgtcttacaacaaccaattgcccaattgcaacaacaatccttggcacatctaacaatacaaaccatcgcaacgcaacagcaacaaca

SEQ ID NO: 342169 - DNA, 385 bp, Zea mays
gagaccaactagcaacatagaaagcacaatagtgtaccaacaatggcagccaaaatattttgcttccttatgctccttggtctttctgcaagtgttgctaccgcaaccattttcccacaatgctcacaagctcctatagcttcccttcttcccccatacctctcaccagcggtgtcttcaatgtgtgaaaacccaattgttcaaccctacaggatccaacaggcaatcgcaacaggcatcttaccattatcacccttgttcctccaacaaccgtcagccctattacagcagttacctttggtccatttggtggcacaaaacatcagggcacaacaactacaacaacttgtgctagcaaaccttgctgcatactctcagcaacatc

SEQ ID NO: 342170 - DNA, 436 bp, Zea mays
agaccaacaagcaacatagaaagtggaatccagtagcaacaatagagcaacaatggcgacggagatattttccctccttatgctccttgctctttctgcatgtgttgctaacgcgacaattttccctcaatgctcacaagctcctatagcttcccttcttcccccataccttccatcaatgatagcttcagtatgtgaaaacccagctcttcaaccctataggctccaacaagcaatcgcagcaagcaacatacctttatcacccttgtttcaacaatcgccagccctatctttggtgcagtcattggtacaaaccatcagggcacagcagctgcagcaactcgtgctacctgtgatcaaccaagtagctctggcaaacctttctccctactctcagcaacaacaatttcttccattcaaccaactgtctacattg

SEQ ID NO: 342171 - DNA, 434 bp, Zea mays
attgagaccaactagcaacatagaaagcacaatagtgtaccaacaatggcagccaaaatatgttgcgtccttatgctccttggtctttctgcaagtgctgctacggcgaccattttcccgcaatgctcgcaagctcctatagctttccttcttcccccgtacctatcaccagcggtgtcttcggtatgtgaaaacccaattcttcaaccctacatgatccaacaggcaatcgcagctggcatcttacctttatcacccttgttcctccaacaatcatcagccctattacaacagctacctttggtgcatttattggcacacaacatcatggcacaacaactacaacaacttgtgctagcaaaccttgctgcctactctcagcaacagcagtttcttccattcaacccaactaggtcatcgaactctgcttctta

SEQ ID NO: 342172 - DNA, 435 bp, Zea mays
cagaaacacaccaagcgaagcgcactagcatcaacctaacaacaatggctaccaagatatgagccctccttgcgcttcttgcccttttagtgagcgcaacaaatgcgttcattattccacagtgctcacttgctcctagtgccattattccacagttcctcccaccagttacttcaatgggcttcgaacatccagccgtgcaagcctacaggctacaactagcgcttgcggcgagcgtcttacaacaaccaattgcccaattgcaacaacaatccttggcacatctaaacctacaaaccatcgcaacgcaacagcaacaacagtttctgccatcactgagccacctagccgtggtgaaccctgtcgcctacttgcaacagcagctacttgcatccaacccacttgctctggcgaacgtagctgcataccagcaac

SEQ ID NO: 342173 - DNA, 173 bp, Zea mays
aagccgtcggagaaaacaaactatgcgaactccactacctccaacttaccaccatgggttccaaaaaatgaggccggctttgcgctctttgcccttttagggagcgcacaaaaggcgtcaatatttcaccagggttaactggttctaatggccatatttcacaagttctctcc

SEQ ID NO: 342174 - DNA, 401 bp, Zea mays
  unsure (1)..(401): unsure at all n locations
cagaccattagctttatctactccagagcgcagaagaacccgatcgacaccatgagggtgtggctcgttgccctcgctctcctggctctcgctgcgagcgccacctccacgcatacaagcggcggctgcggctgccagccaccgccgccggttcatctaccgccgccggtgcatctgccacctccggttcacctgccacctccggtgcatctcccaccgccggtccacctgccgccgccggtccacctgccaccgccggtccatgtgccgccgccggttcatctgccgtcgncaccatgccactaccctactcaaccgccccggcctcagcctcatccccagccacacccatgcccgtgccaacagccgcatncaagcccgtgccagctgcagggaacctg

SEQ ID NO: 342175 - DNA, 432 bp, Zea mays
agaccattagctttatctactccagagcgcagaagaacccgatcgacaccatgagggtgttgctcgttgccctcgctctcctggctctcgctgcgagcgccacctccacgcatacaagcggcggctgcggctgccagccaccgccgccggttcatctaccgccgccggtgcatctgccacctccggttcacctgccacctccggtgcatctcccaccgccggtccacctgccgtcgccggtccacctgccaccgccggtccatgtgccgccgccggttcatctgccgccgccaccatgccactaccctactcaaccgccccggcctcagcctcatccccagccacacccatgcccgtgccaacagccgcatccaagcccgtgccagctgcagggaacctgcggcgttggcagcaccccgatcctgggccagt

SEQ ID NO: 342176 - DNA, 429 bp, Zea mays
agacgattatctttatctactccagagcgcttaatatcccgatcgacaccatgagggtgaggctcggggccctcactctcctggctctcgctgcgagcgccacctccacgcatacaagcggcggctgcggctgccagccaccgccgccggttcatctaccgccgccggtgcatctgccacctccggttcacctgccacctgcggtgcatctcccaccgccggtccacctgccgtcgccggtccacctgccaccgccggtccatgtgccgacgccggttcatctgccgccgccaccatgccactaccctactcaaccgacccggactgagcctcatgcccagccacacccatgcccgtgccaacagccgcatccaagcccgtgccagctgcacggaacctgcggcgttagcagcaccccgatcctgggcc

SEQ ID NO: 342177 - DNA, 317 bp, Zea mays
ggccgaccacgcgtgcggacgttttcttccatccaaaccttttcccctcttacggagaccaaccttataaggagcttgttcgactaccaccacgcaccagatctctatgtatatgtcaatagggccccaaaatggtgctgcttatgtctccaatttatctcctcaaactcacgagaatatgctggattgtatattatcacaccataaagttgctaaagaaggacatataccatgggctctcaaaattttgcatccataccaacataaatcacaatgaaccaaacggtcatgcttcaattactttttatgatcaaaat

SEQ ID NO: 342178 - DNA, 417 bp, Zea mays
  unsure (1)..(417): unsure at all n locations
caactagcaacatagaaagcactttagtgttccaacaatggcagctaaaatatgtggcctggttatgctccttggtctttctgcaagtgctgctacggcgaccattttcccacaatgctcacaagctcctatagcttcccttcttcccccgtacctctcaccaacggtgtcttcggtatgtgaaaacccaattcttcaaccctacaggatccaacaggcaatcgcagctggcatcttacctttatcacccttgntcctccaacaatcatcagccctattacagcagttaccctttggtgcattattggcacataacatcagggcacaacaactacaacaacttgtgctagcaaaccttgctgcctactctcagcaacagcagttttttccattcaaccaactagctgcattgaactc

SEQ ID NO: 342179 - DNA, 434 bp, Zea mays
cccacgcgtccgctgggtcttcagaccattagctttatctactccagagcgcagaagaacccgatcgacaccatgagggtgttgctcgttgccctcgctctcctggctctcgctgcgagcgccacctccacgcatacaagcggcggctgcggctgccagccaccgccgccggttcatctaccgccgccggtgcatctgccacctccggttcacctgccacctccggtgcatctcccaccgccggtccacctgccgccgccggtccacctgccaccgccggtccatgtgccgccgccggttcatctgccgccgccaccatgccactaccctactcaaccgccccggcctcagcctcatccccagccacacccatgcccgtgccaacagccgcatccaagcccgtgccagctgcagggaacctgcggcgttggcag

SEQ ID NO: 342180 - DNA, 253 bp, Zea mays
cccacgcatccgttatgacttaagacaattttctatgtatactacaaaacgcacaacaacggcgacgtcaccatgaagacgatgatggtggcgctcgctgttctggctctcattgctagcgccacctgcgcgcattcaacacagacatgcggctgccagccacctccacaacttaatctaccgccgccggttcatctaccacatcctgttcaactgacacatcaagatcatccaccaccacaagatcacctgc

SEQ ID NO: 342181 - DNA, 434 bp, Zea mays
tagctttatctactccagagcgcagaagaacccgatcgacaccatgagggtgttgctcggtgccctcgctctcctggctctcgctgcgagcgccacctccacgcatacaagcggcggctgcggctgccagccaccgccgccggttcatctaccgccgccggtgcatctgccacctccggttcacctgccacctccggtgcatctcccaccgccggtccacctgccgccgccggtccacctgccaccgccggtccatgtgccgccgccggttcatctgccgccgccaccatgccactaccctactcaaccgccccggcctcagcctcatccccagccacacccatgcccgtgccaacagccgcatccaagcccgtgccagctgcagggaacctgcggcgttggcagcaccccgatcctgggccagtgcgtcgagt

SEQ ID NO: 342182 - DNA, 294 bp, Zea mays
aacgggccgacccacgcgtgcggactaaatgaaatccattcactttatacctctaaagacaccaggagtcaccatgagggggtttgttcttatcctcgcacagcccaatctcacttaaatccccgaacatcaacctaaaaatctgcttcagaagcaccatccaaaacctccacttcatctagctcatccactttaattacaccttcggcaccaactatctcttcactaacaaccaccaacaccctatacaataatctttacagcgacaaactacaaaatgcccacatataatat

SEQ ID NO: 342183 - DNA, 431 bp, Zea mays
attgagaccaacaagcaacatagaaagtggaatccagtagcaacaatagagcaacaatggagaccaagatattttccctccttatgctccttgctctttctacatgtgttgctaacgcgacaattttccctcaatgctcacaagctcctatagcttccctttttcccccataccttccatcaattatagcttcagtatgtgaaaacccagctcttcaaccatataggcttcaacaagcaatcgcagcaagcaacatacctttatcgcccttgttgtgtcaacaatcgccagccctatctttggtgcagtcattggtacaaaccatcagggcacaacagctgcagcaactcgtgctacctgtgatcaaccaagtagctctggcaaacctttctccctactctccgcaacaacaatttcttccattcaaccaa

SEQ ID NO: 342184 - DNA, 405 bp, Zea mays
cttgccagcagctctctctatcgctccctcacgctctctctcctcaccatttttgctcctgccgagagctcgccaagctccgaaaggcgcaagttttcttgccatggggaagaacacatgcaagctctgctcccgccgcttcgccagttcccgcgcccttgccgggcacatgcgctctcattacatggccgcaactaaggagacagcggcgactgcaaccgcagcggctgcggcagccgcagcaacggcgcaacatcacatctcttcggcatcatccgcgtcaacctccatcgccatcgccgacgaggaagtcggctcgatgatgaccgcttccaccaacgggctccgggagaatacgaagcgcacccttggcgtggcggatgtacgtttctcggatcgcgagag

SEQ ID NO: 342185 - DNA, 431 bp, Zea mays
attgagaccaactagcaacatagaaagcactatagtgtaccaacaatggcagccaaaatggtttgcctccttatgctccttggtctttctgcaagtgctgctacggcgaccattttcccgaaatgctcgcaagctcctatagcttcccttcttcccccgtacctctcaccagcggtgtcttcggtatgtgaaaacccaattcttcaaccctacaggatccaacaggcaatcacagctggcatcttacctttatcacccttgttcctccaacaatcatcagccctattacatcagttacctttggtgcatttattggcacaaaacatcagggcacaacaactacaacaacttgtgctagcaaaccttgctgcctactctcagcaacagcagtttcttccattcaaccaactagctgcattgaactctgcttc

SEQ ID NO: 342186 - DNA, 355 bp, Zea mays
atcgtacatccttagccaacattctacactttctaccaatcaaaccaacaaagggatccgtggtacatggacccagttcttcaccgcacttctacagttctgcgccctacggctacagggcctgccggtggaacaactactcgctcaagaactaatgccagatcacccacatcgtccatacccaacttaagctcgtataccttacgctgtgcccggtgctggcctcgatcactgtggccgcttacatgcacaatgtgtggaacattgtatgtacgcatacaatgctcgggtgcgggtggataatcgcatggctcttgttgctgccggtataccaagagaggaagatgtatttgct

SEQ ID NO: 342187 - DNA, 394 bp, Zea mays
tgagaccaactagcaacatagatagcacatttttgtaccaacaatggcagccgaaatattgtgcttccttatgctccttggtctttctgcaagtgctgctaccgcaaccattttcccacaatgctcacaagctcctatagcttcctttcttcccccatacctctcaccagcggtgtcttcagtatgtgaaaacccaattcttcaaccctacaggatccaacaggcaatcgcagcaggcatcttacctttatcacccttgttcctccaacaaccgtcagccctattacagcagttacctttggtgcatttgttggcacaaaacatcaaggcacaacaactacaacaacttgtgctaggaaaccttgctgcctactctcagcaacagaagtttttt

SEQ ID NO: 342188 - DNA, 294 bp, Zea mays
ggcaatcgcagctggcatcttacctttatctcccttgttcctccaacaatcatcagccctggtacaacggttacctttggtgcatttattggcacaaaacatcagggcacaacaactacaacaacttgtgctagcataccttgctgcctactctcagcaacagcagtttcttccattcaaccaactaggttcattgaactctgtttctaattggcaacaacaacatctaccattcacccagttacctgctgcctacccccagtaattatttccttccaaccacctagcagcttt

SEQ ID NO: 342189 - DNA, 427 bp, Zea mays
gtcagctgccagcgcctctgcaatgcagatgccctgcccctgcgcggggctgcagggcttgtacggcgctggcgccggcctgacgacgatgatgggcgccggcgggctgtacccctacgcggagtacctgaggcagccgcagtgcagcccgctggcggcggcgccctactacgccgggtgtgggcagacgagcgccatgtaccagccgctccggcaacagtgctgccagcagcagatgaggatgatggacgtgcagtccgtcgcgcagcagctgcagatgatgatgcagcttgagcgtgccgctgccgccagcagcagcctgtacgagccagctctgatgcagcagcagcagcagctgctggcagcccagggtctcaaccccatggccatgatgatggcgcagaacatgccggccatgggtggactc

SEQ ID NO: 342190 - DNA, 342 bp, Zea mays
acccacgcgtccgggacatacaaagcacattcatataccaactttggcattttaaacaaatagactccttatgcggacggggctttctttaagtgctgctactgcgaccattaccacgaaatgctcacacagctcatataactatactttttccaccgtacctatcaccaacatcttattagatatgtgaatacacaatcctactaccctacaccaaccataacgcattcacaattcaaactttacccatatcaccctcgatcctccaacaataattaaccctattacatcaacaacacttgattcatttactgtcacaaaccattaacacaaaacaactac

SEQ ID NO: 342191 - DNA, 442 bp, Zea mays
gcaacatataaagcacaatactgtaccaactatggcagtcaaaatatctcgcctccttatgctccttggtgtttctgcaagtgctgctacggcgaccattttcccgcaatgctcacaagctcctatagcttcccttcttcccccgtacctctcaccagcggtgtcttcggtatgtgaaaacccaattcttcaaccctacatgatccaacaggcaatcgcagctggcatcttacctttatcacccttgttcctccaacaatcatcatccctattacagcagttacctttggtgcatttattggcacaaaacatcaaggcacaacaactacaacaacttgtgctagcaaaccttgctgcctactctgagcaacagcagttttttccattcaaccaactagctgcattgaactctgcttcttatttgcaacaccaacaactacca

SEQ ID NO: 342192 - DNA, 290 bp, Zea mays
aacaaatccctagatgtaattaacaacgccgtacctctccgacacacaccttaaagagctggggagccggccatggtctcctgacctctagctctaagcacacccattcccctacgacccgaagagtgaagttgacatccacccgctgcccatatctactgctgcagagcacctagccctaaagtcactacatcaccagacaccgcctcaatgccccctggaacgtcagtcatctgcacgcacatctgaacacctctggacctctggctcttcactatgacctcactact

SEQ ID NO: 342193 - DNA, 344 bp, Zea mays
  unsure (1)..(344): unsure at all n locations
agcattcanaaacacaccaagcgaatcgcactatcaacaacctaacaacaatggctgccaagatattatccctccttgcgcttcttgcgctttttgcgagcgcaacaaatgcgtccattattccacaatgctcacttgctcctagttccattattccacagttcctcccaccagttacttcaatggccttcgaacacccagctgtgcaagcctatatgctacaacaagcgattgcggcgagcgtcttacaacaaccaattgcccaattgcaacaacaatccttggcacatctaacaatacaaaccatcgtaacgcaacagcaacaacagtttctaccagcactg

SEQ ID NO: 342194 - DNA, 127 bp, Zea mays
gaccacgcgtacgaaccattcactttctctactacactacaccttcgccctccatggacaccttaatcatctcggtccccggttcactctcaccctactcgtcacccaactcccatcctttcccctc

SEQ ID NO: 342195 - DNA, 376 bp, Zea mays
  unsure (1)..(376): unsure at all n locations
ttggatcgaccgacgcgtccacaactagcaacatataaagcgcagtcgccctttatcattttcatccaaaatatttngcctgggtatgcgcctaggtatttctgcaagtgctgctacggcgaccattttcccgcaatgctcacaagctcctatagcttcccttcttcccccgtacctttcaccagcagtgtcttcggtatgtgaaaacccaattcttcaaccctacatgatccaacaggcaatcgcagctggcatcttacctttatcacccttgttccttcaacaatcatcaaccctattacagcagttacctttggtgcatttattggcacataacaatatggcacaacaactacaacaacttgtgctaacaaac

SEQ ID NO: 342196 - DNA, 393 bp, Zea mays
  unsure (1)..(393): unsure at all n locations
ttaggtttatctactccatagcgcanaagatcccgatctacaccatgagggtgttgctcggtgccctgggtctcctggctctcgctgcgagcgccacctccacgcatacaagcggcggctgcggctgccagccaccgccgccggttcatctaccgccgccggtgcatctgccacctccggttcacctgccacctccggtgcatctcccaccgccggtccacctgccgccgccggtccacctgccaccgccggtccatgtgccgccgccggttcatctgccgccgccaccatgccactaccttactcaaccgccccggcctaagcctcatccccagccacacccatgcccgtgccaacagccgaatccaagcccgtgccagctgaagggaacct

SEQ ID NO: 342197 - DNA, 267 bp, Zea mays
tgatagctcacctcacctcctcgcccgttgtttcgtgctccgtccttcaccccccaccaagcttgccggtcaaaaactatccacccctccacggctccacccctacccgccgacgagcgccatcgattgattccgctcaagcctggccgtggacgacgatgcatctccccagcgctgtgtgagcccaccaaataccactaccgcaaaccctacaataaacaacctgctgtcgcaaaaccaattttagcactatgacgcttgtgcctc

SEQ ID NO: 342198 - DNA, 192 bp, Zea mays
ctcatacacaccaagcgaaccgcactagcatcagcctaacaacaatggtctaccagggagtgggggccttcttgcgcttgtcgcccttatagctagcgcatcaaatgcacttattatagcacagagctcactggctcctagggccaatattccacagtcccttccacacaattcttcgatgggcttagaaca

SEQ ID NO: 342199 - DNA, 156 bp, Zea mays
gtagcaactagctcgccatcgtgactttgatctgctgctttgtgtggttttatgtggagccgtctgttcaacaaaaagtgatgctttaatgtcacagtatgtgtgaaataaattaaaaaggattttctggtttactaaaacaaaacataacaaatg

SEQ ID NO: 342200 - DNA, 255 bp, Zea mays
cacgcccacgcgtaacattacataccttctaccaattaccttcatctttttcattccctgctctagcacgcgcgcgagtgaaatatccaaaagatatgcctcactattattaccactataaaaacacactcttgtatttttgcaaatttaccactcatactcgttccctcaatttaaaacatctcatatgcagatatcgaaaaataccaaaaatggatttaaaacgtgactattcatttattcaccttagttatt

SEQ ID NO: 342201 - DNA, 327 bp, Zea mays
gaaagcacaatagtgtaccaacaatggcagccaaaatattttgcttccttatgctccttggtctttgtgcaagtgctgctaccgcaaccattttcccacaatgctcacaagctcctatagcttcctttcttcccccatacctctcaccagcggtgtcttcagtatgtgaaaacccaattcttcaaccctacaggatccaacaggcaatcgcagcaggcatcttacctttatcacccttgttcctccaacaaccgtcagccctattacagcagttacctttggtgcatttgttggcacaaaacatcaaggcacaacaactacaacaac

SEQ ID NO: 342202 - DNA, 343 bp, Zea mays
ggggacgaccacgcgttcagaatatattacattacaccaactgtttacacttaaccctgctgattatttgccgcggcatggtttatgatttatccggataggctctgactactatcatcttcaacaactgcttccatgttaccatatggtcgctctgtaccccgctgcttatatgaagggggtaatactgtctgcgaaaaagccaaattgctaccgtacgcggtgcatccttcttgacacaacaacaggtgttgtcgatctaccaggagcttgcgactataatcacaacccttttaccagtaccactattggcaccctttgtgccacttgatttgggaaaaac

SEQ ID NO: 342203 - DNA, 270 bp, Zea mays
ccacgcatacgataccaacaagcatcctttaaagtgttatcttttacacaacactctaacaacaataggtggcgtgtattatatacattctctctctcacctctcaactcctctgcaatgcacaccccatcacccttcacaactcttcacaaactcaactaaatctccttcttcctcaataccattaatcaatcagccgtactgtacccctacacccaacacctcaaccataccaactgcatcacccattcggtacaagccctactacct

SEQ ID NO: 342204 - DNA, 348 bp, Zea mays
gacccacgcgtacgctccctcttcaatagggtatcatcatacacttcttaagagaccttattacatccagggcggggtcctatttgctatcaatggactgaaccaccgcggatactatagctagcacgactatgcatacctggagcaaggacagctcgcttccattgcacgtgccggcaggttcatgttcttggaagccacgagcctgctatacctgtgccctcctcctgcgctcgcgggacaccctggcccgcatgtggcgtaactacctcccttgactggcaaactatcctgaaaccactacagcccgtaccaaacaattgctggccatcagcaactagagaaaca

SEQ ID NO: 342205 - DNA, 344 bp, Zea mays
aagcaacatataaagtggaatccagtagcatcaatagagcaacaatggcgaccgggatatgttccctccttatgctccttgctctttctgcatgtgttgctaacgcgacaattttccctcaatgctcacaagctcctatagcttcccttcttcccccataccttccatcaatgatagcttcagtatgtgaaaacccagctcttcaaccctataggctccaacaagcaatcgcagcaagcaacatacctttatcacccttgtttcaacaatcgccagccctatctttggtgcagtcattggtacaaaccatcagggcacagcagctgcagcaactcgtgctacct

SEQ ID NO: 342206 - DNA, 236 bp, Zea mays
  unsure (1)..(236): unsure at all n locations
ttcatctactccatatctctgaaaaacccgatcgacaccataaaggcngcagctagtattccatcgctctcctgcctctcactncaagcaccaccttcacacatacaagctgaggctgcagatgacagccaccgacatcggttcatataccgaccccaacgcatctgacaacttctattcacatgccaactacgttgcatctcccaccctcgaccacctgacgactctcttccacc

SEQ ID NO: 342207 - DNA, 157 bp, Zea mays
gagggcacgcggacgggtgggattgggatacataccaccttacccttatttttatcaacctaacaacaacgactaagaacacgttcaatttcattgcgaccctcgcaccaatcgctaccaccactcatcctcccatcattggacgaacgctgccgac

SEQ ID NO: 342208 - DNA, 406 bp, Zea mays
agcaacatataaagtggaatccagttgcaactatagagcaacaatggagaccaagagattggccctccttatgctccttgctctttctacatgtgttgctaacgcgacaattttccctcaatgctcacaagctcctatagcttccctttttcccccataccttccatcaattatagcttcagtatgtgaaaacccagctcttcaaccatataggcttcaacaagcaatcgcagcaagcaacatacctttatcgcccttgttgtgtcaacaatcgccagccctatctttggtgcagtcattggtacaaaccatcagggcacaacagctgcagcaactcgtgctacctgtgatcaaccaagtagctctggcaaacctttctacctactcttcggaacaacaatttctt

SEQ ID NO: 342209 - DNA, 230 bp, Zea mays
  unsure (1)..(230): unsure at all n locations
gcccactcgtccgaaaccattttctttatcctctccagagcgcanaaaaaccggatcgacagcatgatgttgttgctcgttgccctctctctcctggctctcgctgcgagcgccacctccacgcatacaagcggcggctgctgctgccagccaccgccgccggttcatctaccgccgccggtgcatctgccacctccggttcacctgccacctccggtgcatctcccacc

SEQ ID NO: 342210 - DNA, 427 bp, Zea mays
catttattggcacaaaacataagggcacaactactacaacaacttgtgctagcaaaccttgcggtggactctcagcaacagcagtttcttccattcaaccaactagctgcattgaactctgcttcttatttgcaacaacaacaactaccattcagccagctacctgttgcctacccccagcaatttcttccattcaaccaactggcagcattgaactctcctgcttatttacagcagcaacaactactaccattcagccagctagctggtgtgagccctgctaccttcttgacacaaccacagttgttgccgttctaccagcacgctgcgcctaacgctggcaccctcttacaactgcaacaattgctgccattcaaccaacttgctttgacaaacctagcagtgttctaccaacaacccatcattg

SEQ ID NO: 342211 - DNA, 429 bp, Zea mays
ggtcttcagaccattagctttatctactccagagcgcagaagaacccgatcgacaccatgagggtggtgctcgttgccctcgctctcctggctctcgctgcgagcgccacctccacgcatacaagcggcggctgcggctgccagccaccgccgccggttcatctaccgccgccggtgcatctgccacctccggttcacctgccacctccggtgcatctcccaccgccggtccacctgccgccgccggtccacctgccaccgccggtccatgtgccgccgccggttcatctgccgccgccaccatgccactaccctactcaaccgccccggcctcagcctcatccccagccacacccatgcccgtgccaacagccgcatccaagcccgtgccagctgcagggaacctgcggcgttggcagcaccccgatc

SEQ ID NO: 342212 - DNA, 259 bp, Zea mays
cacgctcccgctcctagtctgataaccccttccccttcctttctaagtccctaccctacccccggcgaccgtcgtctttgaccgcaaacatagcagtcagctccaggacacatcatgtcgtaactctccttctacccttcctgccagagttccatagcccgctatataagacaccattcagagaaatagttatccacactatcattatcctcctcatccatctgcaatgccaccatctacaactacatgaacttgattc

SEQ ID NO: 342213 - DNA, 409 bp, Zea mays
  unsure (1)..(409): unsure at all n locations
ggccgacccacgcgtncgctatcaacatanaaagcacaatagtttaccttcaatggcagctaaaatattttggcgccttagtctccttggtctttctgcaagcgctgctacagcgaccattttcccacaatgctcacaagctcctatagcttcccttcttcccccgtacctctcaccaacggtgtcttcggtatgtgaaaacccaattcttcaaccctacaggatccaacaggcaatcgcagctggcatcttacctttatcacccttgttcctccaacaatcatcagccctattacagcagttacctttggtgcatttattggcacaaaacatcatggcacaacaactacaacaacttgtgctaacaaaccttgctgcctactctcaacaacagcagtttctttcattc

SEQ ID NO: 342214 - DNA, 450 bp, Zea mays
ggacgaccccgcgtgcgggtcgttaaaccattagctttatctactccttagcgcacaagaacccgatcgacaccatgagggtggtgctcgttgccctcgctctcctggctctcactgcgagcgccacctccacgcatacaagcggcggctgcggctgccagccaccgccgccggttcatctaccgccgccggtgcatctgccacctccggttcacctgccacctccggtgcatcttccaccgccggtccacctgccgccgccggtccacctgccaccgccggtccatgtgccgccgccggttcatctgccgccgccaccatgccactaccctactcaaccgccccggcctcagcctcatccccagccacacccatgcccgtgccaacagccgcatccaagcccgtgccagctgcaaggaacctgccgcgttggcagcaccccgatcctgg

SEQ ID NO: 342215 - DNA, 359 bp, Zea mays
cgggccgacccacgcgtgcggctgtatctactccagagcgcataagaactttatcgacaccatgagggtgtggctcgttaccctctctctcctggctctcgctgcgagcgccacctccacgcatacaagcggcggctgcggctgccagccaccgccgccggttcatctaccgccgccggtgcatctgccacctccggttcacctgccacctccggtgcatctcccaccgccggtccacctgccgccgccggtccacctgccaccgccggtccatgtgccgccggcggttcatctgccgccgccaccatgccactaccctactcaaccgccccggcctaagcctcatcccaagccacacc

SEQ ID NO: 342216 - DNA, 459 bp, Zea mays
  unsure (1)..(459): unsure at all n locations
ggtcttcagaccattagctctatctactccagagcgcagaagaacccgatcgacaccatgggggtgttgctcgttgccctcgctctcctggctctcgctgcgagcgccacctccacgcatacaagcggcggctgcggctgccagccaccgacgccggttcatctaccgccgacggtgcatctgccacctgcggttcacctgccacctccggtgcatctcccaccgccggtccacctgccgacgccggtccacctgccaccgccggtccatgtgccgncgccggttcatctgccgccggcaccatgccactaccctactgaaccgccccggactgagcctcatccccagccacacccatgcccgtgccaacagccgcatacaagcccgtgccagctgcagggaacctgcggcgttggcagcaccccgatcctgggccagtgcgtctagtttctgaggcat

SEQ ID NO: 342217 - DNA, 173 bp, Zea mays
  unsure (1)..(173): unsure at all n locations
gctttatctactccagagcgcatattaacccgatcgacaccatgagggtgttgctcgttgcggtcgctgtcctggctctcgctgcgagcgccacctacacgcatacaagcggcggctgctgctgccagccaccgccgccggttcatataccgncgcctgtgcatatgccacct

SEQ ID NO: 342218 - DNA, 372 bp, Zea mays
attttgaacattcagaaacacaccaagccattcacattaacaacaacctaacaacaatggcgaccaggatattatccctccttgcgcttcttgcgctttttgcagagcgcaacaaatgcgttcattattccacaacgctcacttgctccaagttccattattacacagttcctcccaccagttacttcaatgggcttcgaacacccagctgtgcaagcctataagctacaacaagcaattgcggcgagcgtcttacaacaaccaatttcccagttgcaacaacaatccttggcacatctaacaatacaaaccatcgcaacgcaacagcaacaacaattcctaccagcacttgaccacctagccatggtgaac

SEQ ID NO: 342219 - DNA, 244 bp, Zea mays
gcaacataaaaagcacaatattgcttcaactttggcagccaaaatattttgcttgcggatgcggcttggtctttctgcaagtgctgctaccacaaccattttcccacaatgctcacaagctcctatagcttcctttcttaccccatacctctcaccaacggtgtattcagtatgtgaaaacccaattcttcaaccctacaggatccaacaggcaatcgcagcatgcatcttacctttatcaccc

SEQ ID NO: 342220 - DNA, 175 bp, Zea mays
actagttataaatcgatatcgtcctttctatataatacaaccttacgtacccttgggtgcgatttatatctctcttatactcccacctaaattcaattcaccacctcttcccttacaacttcgagactgggaaatccctcaccctacccaaattaattatcttctaacacatatt

SEQ ID NO: 342221 - DNA, 415 bp, Zea mays
tacgacccacgcgtacgattgagaccaactcccaacataaatatcacatttgttttccaacaacggcaatcaaactacgggggcgacttatactccttggcctcttatcctcctttctttccctacccatgttgctaacgcgactacaatctctcaatgctcacactgcttctcatcatcctcttaccaccccataccttcacatcaatgataactcaattgtgcaaccatcccagatccaccaccctatacgatccaacatcttaccattatcagcctcattccttcatcacccttgattcatatatcaccagccacctcttttgcacttggattcacacaaaatatcagcgcaccaactacgacaactcttgctctccctcctatctacctactctcatcaacatacctttct

SEQ ID NO: 342222 - DNA, 86 bp, Zea mays
ataaaaaaaaaaaaaaataaaaaaaaaaataaaaaaaattaaaaaaaaaaatattaaaataaaaaaattataaaaatattaataat

SEQ ID NO: 342223 - DNA, 325 bp, Zea mays
attgagaccaactagcaacatagaaagcacaatagtgtaccaacaatggcagccaaaatatggtgctgccttatgctccttggtctttctgcaagtgttgctaccgcaaccattttcccacaatgctcacaagctcctatagcttcccttcttcccccatacctctcaccagcggtgtcttcaatgtgtgaaaacccaattgttcaaccctacaggatccaacaggcaatcgcaacaggcatcttaccattatcacccttgttcctccaacaaccgtcagccctattacagcagttacctttggtccatttggtggcacaaaaca

SEQ ID NO: 342224 - DNA, 330 bp, Zea mays
gctgcttgcccttttagtgagctcaacaatttcgttcattattccacagtgctcacttgcgcctagttccattattccacagttcctcccaccagttacttcaatgggcttcgaacatccagccgtgcaagcctacatgctacaactagcgcttgcggctagcgtcttacaacaaccaattgcccaattgcaacaacaatccttggcacatctaaacctacaaaccatcgcaacgcaacagcaacaacagtttctgccatcactgagccacctagccgtggagaaccctgtcgcctacttgcaacagcagctacttctatccaacccact

SEQ ID NO: 342225 - DNA, 133 bp, Zea mays
cgacccacgcgtgcgacccagtctccactcactctgcctttttttcttcaaggagacgtcggcagactcgcgggcggtcatattcagcgtggagcgctggcccctgcatctaccgtatgcattgcaccacctt

SEQ ID NO: 342226 - DNA, 444 bp, Zea mays
tagcaacatagaaagcacaatagtgtaccaacaatggcagccaaaatatggggcctccttatgctccttggtctttctgcaagtgctgctacggcgaccattttcccacaatgctcacaagctcctatagcttcccttcttcccccgtacctctcaccagcggtgtcttcggtatgtgaaaacccaattcttcaaccctataggatccaacaggcaatcgcagctggcatcttacctttatcacccttgttcctccaacaatcatcagccctattacagcagttacctttggtgcatttattggcacaaaacatcagggcacaacaactacaacaacttgtgctagcaaaccttgctgcctactctcagcaacaacagtttcttccattcaaccaactagctgcattgaactctgcttcttatttgcaacaacaacaactacca

SEQ ID NO: 342227 - DNA, 169 bp, Zea mays
acaatcgccagccctatctttggtgcagtcattggtacaaaccatcagggcacaacagctgcagcaactcgtgctacctgtgatcaaccaagtagctctggcaaacctttctccctactctccgcaacaacaatttcttccattcaaccaactgtctacactgaaccct

SEQ ID NO: 342228 - DNA, 85 bp, Zea mays
cctgcaacaatcactagccctattacagaatgttacctcttggtgcatgtattggcacaaaacatccgggcccatcaggctacaa

SEQ ID NO: 342229 - DNA, 113 bp, Zea mays
gggcagacagcgccatgtaccaggcgctccggaacagcgctgccagcagcagatgaggatgatggacgtgcagtccgtcgcgcaacacctgcagatgatgatgcaccttgagc

SEQ ID NO: 342230 - DNA, 189 bp, Zea mays
acatacctttatcacccttgttgtgcaacaatcgccagccctatctttggtgcagtcattggtacaaaccatgagggcacaacagctgcagcaactcgtgctacctgtgatcaaccaagtagctctggcaaacctttcttcctactctccgcaacaacaaattcttccattcaaccaactggctacact

SEQ ID NO: 342231 - DNA, 347 bp, Zea mays
actatatatagatagcgatcggtctatatgaacgaagcatacttacgcgggcatgcatgggaatagatattttatatatgcagctacataaaattaactgactgtccgtctacaaacaacggactgacagaaaaatgcctttacccacctaacttaacttgcttgaaatacatctttcttcagctggctagcttactaataaggacgtactgacacgatcttccttacataacagtcagcctgaatgaataacgaaacgcaccctgcctgtagccattaattaagcccggtgtgtgtggtacttacactatgaacgctccacttactagccatctagctctcgcaca

SEQ ID NO: 342232 - DNA, 118 bp, Zea mays
ctgccaccgcggtccatgtgccgccgccggttcatctgccgccgccaccatgccactaccctactcaaccgccccggcctcagcctcattcccagccacacccatgcccgtgccaaca

SEQ ID NO: 342233 - DNA, 127 bp, Zea mays
atgtgccgccgccggttcatctgccgccgccaccatgccactaccctacttcaaccgcccggctagcctatcccagcacaccatgccggcacagcgatcaccggcactgagactgggtgagaccact

SEQ ID NO: 342234 - DNA, 154 bp, Zea mays
cgccggtccacctgccaccgccggtccatgtgccgccgccggttcatctgccgccgccaccatgccactaccctactcaaccgccccggcctcagcctcatacccagccacacccatgcccgtgccaacagccgcattcaagcccgtgccagct

SEQ ID NO: 342235 - DNA, 154 bp, Zea mays
cattaaccctccaacaaccatatgctctattgcaacagccatccttagtgcatctgtatctccaaagaatcgcggcacaacaactacaacaacagttgctaccaacaatcaatcaagtagttgcagcgaaccttgctgcttacctccagcaaca

SEQ ID NO: 342236 - DNA, 211 bp, Zea mays
ccctgccgctacttgaacagcagttgcttgcataaacccacttgctctggcaaacgtagttgcaaaccagccacaacaacagctgcaacagtttctgccagcgctcagtcaactagccatggtgaaccctgccgcctacctacaacagcaacaactgctttcatctagcccgctcgctgtggccaatgcacctacatacctgcaacaacaa

SEQ ID NO: 342237 - DNA, 448 bp, Zea mays
tgagcattcagaaacacactcaagcgaatctacctagcaacgacttaacagcaatggctgccaagatattagccctccttgcgcttcttgccctttttgtgagcgcaacaaatgcgttcattattccacaatgctcacttgctcctagtgccattataccacagttcctccgaccagttacttcaatgggcttcgaacacctagctgtgcaagcctacaggctacaacaagcgcttgcggcgagcgtcttacaacaaccaattaaccaattgcaacaacaatccttggcacatctaaccatacaaaccatcgcaacacaacagcaacaacagttcctaccagcactgatccaactagatgtggtgaaccctgtcgcctacttgcaacagcatgtgcttgcatacaacccacttgctctggcaaacgtagctgcataccaacaacaaca

SEQ ID NO: 342238 - DNA, 203 bp, Zea mays
gcggcggcgccctactacgccgggtgtgggcagacgagcgccatgtaccagccgctccggcaacagtgctgccagcagcagatgaggatgatggacgtgcagtccgtcgcgcagcagctgcagatgatgatgcagcttgagcgtgccgctgccgccagcaagcagcctgtacgagccagctctgatgcaacagcagcagcagc

SEQ ID NO: 342239 - DNA, 111 bp, Zea mays
cagcccgctggctgcggcgccctactacgccgggtgtgggcagactaagcgccatgtaccagccgctccggcaacagtgctgccagcagcagatgaagatgatggacgtgc

SEQ ID NO: 342240 - DNA, 326 bp, Zea mays
  unsure (1)..(326): unsure at all n locations
caactagcaacatagaaagcacaatagtgtaccaacaatggcagctaaaatattttgcctccttatgctccttggtctttctgcaagtgctgctacggcgaccattttcccacaatgctcacaagctcctatagcttcccttcttcccccgtacctctcaccaacggtgtcttcggtatgtgaaaacccaattcttcaaccctacaggatccaacaggcaatcgcagctggcatcttacctttatcaccctngttcctccaacaatcatcagccctattacagcaagtacctttggtgcaattattggcacaaaacatcagggcac

SEQ ID NO: 342241 - DNA, 407 bp, Zea mays
aatattttcagcattcataaacacaccttgcgaagcgcactagcaacaaggtaacaacgatggctaccaagatattagccctccttgcgcttcttgcccttttagtgagcgcaacaaatgcgttcattattccacagtgctcacttgctcctagtgccattattccacagttcctcccaccagttacttcaatgggcttcgaacatccagccgtgcaagcctacaggctacaactagcgcttgcggcgagcgtcttacaacaaccaattgcccaattgcaacaacaatccttggcacatctaaacctacaaaccatcgcaacgcaacagcaacaacagtttctgccatcactgagccacctagccgtggtgaaccctgtcgcctacttgcaacagcagctacttgca

SEQ ID NO: 342242 - DNA, 126 bp, Zea mays
ggtccacctgccaccgccggtccatgtgccgccgccggttcatctgccgccgccaccatgccactaccctactcaaccgccccggcctcagcctcatccccagccacacccatgcccgtgccaaca

SEQ ID NO: 342243 - DNA, 60 bp, Zea mays
atgtaccacatcgctctagcaatcagtgatggcagcagcatatgacgatgatggacgtgc

SEQ ID NO: 342244 - DNA, 356 bp, Zea mays
tggacgtcagcctagcaattagctcatcgactccagattggagaactcgacaccatgaaggtgctgatcgttgcccttgctctcctggcgctcgctgcgagcgccgcctccagtacaagcggcggctgtggctgccagacaccaccgtttcatctaccgcctccgttctatatgccgcctccgttctatctgccgccgcagcagcagccgcagccatggcaataccccactcaaccaccgcagctaagcccgtgccagcagttcggatcctgcggcgtcggcagcgtcggcagcccgttcctgggccagtgcgtcgagttcctgaggcaccagtgcagcccggcggcgacgcccta

SEQ ID NO: 342245 - DNA, 371 bp, Zea mays
ggaaaacaggcggacccagcgtccactgtctcacacccctttcaccaaactttaagcatcgccacctccccagacctactagactattttcccgctctgccgacccccaccggcaacaacgacaaccccccttcactcgacgcatacttctacatggccgacctagcttccctagacgccacggccgttacatccgccaccaccggctgatctccttccacccgctcccgtcccaaagccaatgcaaatcccaacccgaatgctgatcctcccacacccgcaccagttgccgtacccatacctgaccctgaaccatatccataccttattccattgccggagcccgatgccaaccccttgccgccaccata

SEQ ID NO: 342246 - DNA, 120 bp, Zea mays
cggtccacctgccaccgccggtccatgtgccgccgccggttcatctgccgccgccaccatgccactaccctactcaaccgccccggcctcagcctcatccccagccacacccatgcccgt

SEQ ID NO: 342247 - DNA, 115 bp, Zea mays
tgtcctccacaatcatcagccctattacagcagttacctttggtgcatttattggcacaaaacatcagggcacaacaactacaacaacttgtgctaagcaaaccttgctggctac

SEQ ID NO: 342248 - DNA, 192 bp, Zea mays
ccaattgcccaattgcaacaacaatccttggcacatctagacctacaaaccatcgcaacgcaaacagcaacaacagtttctgccatcactgagccacctagccgtggtgaaccctgtacgctactagcaacagcaggtacttgcatacaacccacttgctctggcgaacgtagctgcataccaagaacaaca

SEQ ID NO: 342249 - DNA, 151 bp, Zea mays
gcgcatcttcgacaccacgctgcgcgacggggagcagtcgccgggcgccaccatgacgagcgcccaaagctcgtcgtcgcgcgccaagctggccgctcgggtgacatatcagccggttccggctctcccgacactgagcggcgctcatgca

SEQ ID NO: 342250 - DNA, 426 bp, Zea mays
attgagaccaactagcatcatagaaagctcaatagtgtaccaacaatggcagccaaaaggttttgcttccttatgctccttggtctttctgcaagtgctgctaccgcaaccattttcccacaatgctcacaagctcctatagcttcctttcttcccccatacctctcaccagcggtgtcttcagtatgtgaaaacccaattcttcaaccctacaggatccaacaggcaatcgcagcaggcatcttacctttatcacccttgttcctccaacaaccgtcagccctattacagcagttacctttggtgcatttgttggcacaaaacatcaaggcacaacaactacaacaacttgtgctaggaaaccttgctgcctactctcagcaacagcagtttcttccattcaaccaactggctgcattgaactct

SEQ ID NO: 342251 - DNA, 441 bp, Zea mays
gatcagcaaagcggcagtgcgtagagagtatcgtcgaacagaacagcatgaagatggggatcgttctcgtcgtgtgcctggctctgtcagctgccagcgcctctgcaatgcagatgccctgcccctgcgcggggctgcagggcttgtacggcgctggcgccggcctgacgacgatgatgggcgccggcgggctgtacccctacgcggagtacctgaggcagccgcagtgcagcccgctggcggcggcgccctactacgccgggtgtgggcagacgagcgccatgtaccagccgctccggcaacagtgctgccagcagcagatgaggatgatggacgtgcagtccgtcgcgcagcagctgcagatgatgatgcagcttgagcgtgccgctgccgccagcagcagcctgtacgagccagctctgatgcagcagcagcagcagc

SEQ ID NO: 342252 - DNA, 118 bp, Zea mays
  unsure (1)..(118): unsure at all n locations
gaaaacnggcgcgaccgacgcgtncggtgggtcttcagaccattagctttatttactccagagcgcagaagaaggcgatcgagaccatgagggtgttgctcgttgccctcgctctcct

SEQ ID NO: 342253 - DNA, 151 bp, Zea mays
ttatcacccctgttctttcaacaatcgccagccctatctttggtgcagtcattggtacaaaccatcagggcacaacagctgcagcaactcgtgctaccagtgatcagccaagtagctctggcaaacctttcttcctactctcagcaacaac

SEQ ID NO: 342254 - DNA, 186 bp, Zea mays
caacatacctttatcacccttgtttaacaatcgccagccctatctttggtgcagtcattggtacaaaccatcagggcacagcagctgcagcaactcgtgctacctgtgatcaaccaagtagctctggcaaacctttctccctactctcaacaacaacaatttcttccattcaaccaactgtctaca

SEQ ID NO: 342255 - DNA, 57 bp, Zea mays
tacgcccgtctttgttttcttcttttgcagtgcgttccgagttaatggtctagtcat

SEQ ID NO: 342256 - DNA, 91 bp, Zea mays
ttgttggacaaaaggagggacaacaactacacaacttgtgctggaaaccttgctgcctactgtcagaacaacagtttctttcattcaacca

SEQ ID NO: 342257 - DNA, 207 bp, Zea mays
attcggctctttacaccataaattttacaaactttagaacgcataaaaacccgggggtaactatgaggttgttgcacctaaccctacttcacctggctctcgttgacagcgccaccactacgcatacaatcggggtacgcaactgaaaaccaccgcagcacattcatctatcgccagctgtgcatataacaaatacggctgacactg

SEQ ID NO: 342258 - DNA, 448 bp, Zea mays
attagctttatctactccagagcgcagaagaacccgatcgacaccatgagggtgttgctcgttgccctcgctctcctggctctcgctgcgagcgccacctccacgcatacaagcggcggctgcggctgccagccaccgccgccggttcatctaccgccgccggtgcatctgccacctccggttcacctgccacctccggtgcatctcccaccgccggtccacctgccgccgccggtccacctgccaccgccggtccatgtgccgccgccggttcatctgccgccgccaccatgccactaccctactcaaccgccccggcctcagcctcatccccagccacacccatgcccgtgccaacagccgcatccaagcccgtgccagctgcagggaacctgcggcgttggcagcaccccgatcctgggccagtgcgtcgagttcctgaggcatc

SEQ ID NO: 342259 - DNA, 431 bp, Zea mays
gaaagcacaatagtgtaccaacaatggcagccaaaatattttgcttccttatgctccttggtctttctgcaagtgttgctaccgcaaccattttcccacaatgctcacaagctcctatagcttcccttcttcccccatacctctcaccagcggtgtcttcaatgtgtgaaaacccaattgttcaaccctacaggatccaacaagcaatcgcaacaggcatcttaccattatcacccttgttcctccaacaaccgtcagccctattacagcagttacctttggtccatttggtggcacaaaacatcagggcacaacaactacaacaacttgtgctagcaaaccttgctgcatactctcagcaacatcagtttcttccattcaaccaactggctgcattgaactctgctgctaatttgcaacaacaattacca

SEQ ID NO: 342260 - DNA, 200 bp, Zea mays
gtcgcattcagtcatattgcttctgcctacctctagcaatctctttcatttaacctactggcagcaccgaactgtgctgattatatacgacacctataggtacctgcaatgaggcacgtaaatgatgagagccctgatgcattcttggcagaacaacaagtgacggcggtgtagctgaacgctgagccttacgctgacag

SEQ ID NO: 342261 - DNA, 433 bp, Zea mays
  unsure (1)..(433): unsure at all n locations
attagctttatctactccagagcgcagaagaacccgatcgacaccatgagggtgttgctcgttgccctcgctctcctggctctcgctgcgagcgccacctccacgcatacaagcggcggctgcggctgccagccaccgccgccggttcatctaccgccgccggtgcatctgccacctccggttcacctgccacctccggtgcatctcccaccgccggtccacctgccgccgccggtccacctgccaccgccggtccatgtgccgccgccggttcatctgccgccgccaccatgccactaccctactcaaccgccccggcctcagcctcatccccagccacacccatgcccgtgccaacagccgcatncaaacccgtgccagctgcaaggaacctgcggcgttggcagcaccccgatcctgggccaatgcgtcg

SEQ ID NO: 342262 - DNA, 378 bp, Zea mays
cagaaacacaccaagcgaagctacctagcaacgacttaacaacaatggctaccaagatattagccctccttgcgcttcttgccctttttgtgagcgcaacaaatgcgttcattattccacaatgctcacttgctcctagtgccattataccacagttcctccgaccagttacttcaatgggcttcgaacacctagctgtgcaagcctacaggctacaacaagcgcttgcggcgagcgtcttacaacaaccaattaaccaattgcaacaacaatccttggcacatctaaccatacaaaccatcgcaacacaacagcaacaacagttcctaccagcactgagccaactagatgtggtgaaccctgtcgcctacttgcaac

SEQ ID NO: 342263 - DNA, 432 bp, Zea mays
agcggcagtgcgtagagaggatcgtcgaacagaacagcatgaagatggtcatcgttctcgtcgtgtgcctggctctgtcagctgccagcgcctctgcaatgcagatgccctgcccctgcgcggggctgcagggcttgtacggcgctggcgccggcctgacgacgatgatgggcgccggcgggctgtacccctacgcggagtacctgaggcagccgcagtgcagcccgctggcggcggcgccctactacgccgggtgtgggcagacgagcgccatgtaccagccgctccggcaacagtgctgccagcagcagatgaggatgatggacgtgcagtccgtcgcgcagcagctgcagatgatgatgcagcttgagcgtgccgctgccgccagcagcagactgtacgagccagctctgatgcagcagcagcagcagc

SEQ ID NO: 342264 - DNA, 361 bp, Zea mays
gcaacatagaaagcacaatagtgtaccaacaatggcagccaaaatattttgcttccttatgctccttggtctttctgcaagtgttgctaccgcaaccattttcccacaatgctcacaagctcctatagcttcccttcttcccccatacctctcaccagcggtgtcttcaatgtgtgaaaacccaattgttcaaccctacaggatccaacaggcaatcgcaacaggcatcttaccattatcacccttgttcctccaacaaccgtcagccctattacagcagttacctttggtccatttggtggcacaaaacatcagggcacaacaactacaacaacttgtgctagcaaaccttgctgcatac

SEQ ID NO: 342265 - DNA, 450 bp, Zea mays
attttgagcattcagaaacacaccaagcgaagcgcactagcaacaacctaacaacaatggctaccaagatattatccctccttgcgcttcttgcgctttttgcgagcgcaacaaatgcgtccattattccacaatgctcacttgctcctagttccattattccacagttcctcccaccagttacttcaatggccttcgaacacccagctgtgcaagcctataggctacaacaagcgattgcggcgagcgtcttacaacaaccaattgcccaattgcaacaacaatccttggcacatctaacaatacaaaccatcgcaacgcaacagcaacaacagttcctaccagcactgagccacctagccatggtgaaccctgtcgcctacttgcaacagcagctgcttgcatccaacccacttgctctagccaacgtagttgcaaaccagcaacaac

SEQ ID NO: 342266 - DNA, 449 bp, Zea mays
ccaactagcaacatagaaagcacaatagtgtaccaacaatggcagccaaaatattttgcctccttatgctccttggtctttctgcaagtgctgctacggcgaccattttcccgaaatgctcgcaagctcctatagcttcccttcttcccccgtacctctcaccagcggtgtcttcggtatgtgaaaacccaattcttcaaccctacaggatccaacaggcaatcacagctggcatcttacctttatcacccttgttcctccaacaatcatcagccctattacatcagttacctttggtgcatttattggcacaaaacatcagggcacaacaactacaacaacttgtgctagcaaaccttgctgcctactctcagcaacagcagtttcttccattcaaccaactagctgcattgaactctgcttcttatttgcaacaacaacaactacca

SEQ ID NO: 342267 - DNA, 386 bp, Zea mays
caactagcaacatagaaagcacaatagtgtaccaacaatggcagccaaaatattttgcttccttatgctccttggtctttctgcaagtgctgctaccgcaaccattttcccacaatgctcacaagctcctatagcttcctttcttcccccatacctctcaccagcggtgtcttcagtatgtgaaaacccaattcttcaaccctacaggatccaacaggcaatcgcagcaggcatcttacctttatcacccttgttcctccaacaaccgtcagccctattacagcagttacctttggtgcatttgttggcacaaaacatcaaggcacaacaactacaacaacttgtgctaagaaaccttgctgcctactctcaacaacaagcagttc

SEQ ID NO: 342268 - DNA, 454 bp, Zea mays
attttgagcattcagaaacacaccaagcgaagcgcactagcaacgacctaacaacaatggctaccaagatattagccctccttgcgcttcttgccctttttgtgagcgcaacaaatgcgttcattattccacaatgctcacttgctcctagtgccattattccacagttcctcccaccagttacttcaatgggcttcgaacacctagctgtgcaagccaacatgcaacaacaagcgcttgcggcgagcgtcttacaacaaccaattgcccaattgcaacaacaatccttgccacatctaacaatacaagccatcacaacgcaacagcaacaacagttcctaccagcactgagccacctagccatggtgaaccctgccgcctacttgcaagagcagctgcttgcatccaacccacttgctctggcgaacgtagttgcaaaccagcaacaacaacc

SEQ ID NO: 342269 - DNA, 387 bp, Zea mays
gatcagcaaagcggcagtgcgtagagaggatcgtcgaacagaacagcatgaagatggtcatcgttctcgtcgtgtgcctggctctgtcagctgccagcgcctctgcaatgcagatgccctgcccctgcgcggggctgcagggcttgtacggcgctggcgccggcctgacgacgatgatgggcgccggcgggctgtacccctacgcggagtacctgaggcagccgcagtgcagcccgctggcggcggcgccctactacgccgggtgtgggcagacgagcgccatgtaccagccgctccggcaacagtgctgccagcagcagatgaggatgatggacgtgcagtccgtcgcgcagcagctgcagatgatgatgcaacttgagcgtgccg

SEQ ID NO: 342270 - DNA, 421 bp, Zea mays
caaagcggcagtgcgtagagaggatcgtcgaacagaacagcatgaagatggtcatcgttctcgtcgtgtgcctggctctgtcagctgccagcgcctctgcaatgcagatgccctgcccctgcgcggggctgcagggcttgtacggcgctggcgccggcctgacgacgatgatgggcgccggcgggctgtacccctacgcggagtacctgaggcagccgcagtgcagcccgctggcggcggcgccctactacgccgggtgtgggcagacgagcgccatgtaccagccgctccggcaacagtgctgccagcagcagatgaggatgatggacgtgcagtccgtcgcgcagcagctgcagatgatgatgcagcttgagcgtgccgctgccgccagcagcagcctgtacgagccagctctgatgca

SEQ ID NO: 342271 - DNA, 395 bp, Zea mays
attgagaccaactagcaacatagaaagcacaatagtgtaccaacaatggcagctaaaatattttgcctccttatgctccttggtctttctgcaagtgctgctacggcgaccattttcccacaatgctcacaagctcctatagcttcccttcttcccccgtacctctcaccaacggtgtcttcggtatgtgaaaacccaattcttcaaccctacaggatccaacaggcaatcgcagctggcatcttacctttatcacccttgttcctccaacaatcatcagccctattacagcagttacctttggtgcatttattggcacaaaacatcagggcacaacaactacaacaacttgtgctagcaaaccttgctgcctactctcagcaaccagcagttct

SEQ ID NO: 342272 - DNA, 363 bp, Zea mays
caacaagcaacatagaaagtggaatccagtagcaacaatagagcaacaatggcgaccaagatattttccctccttatgctccttgctctttctgcatgtgttgctaacgcgacaattttccctcaatgctcacaagctcctatagcttcccttcttcccccataccttccatcaatgatagcttcagtatgtgaaaacccagctcttcaaccctataggctccaacaagcaatcgcagcaagcaacatacctttatcacccttgtttcaacaatcgccagccctatctttggtgcagtcattggtacaaaccatcagggcacagcagctgcagcaactcgtgctacctgtgataaaccaagta

SEQ ID NO: 342273 - DNA, 441 bp, Zea mays
atcaaccaccaccacaacatcaccagcagcttcaacaccaacaacaacaagttcacatgcaaccacaaaaacatcagcaacaacaagaagttcatgttcaacaacaacaacaacaaccgcagcaccaacaacaacaacaacaacagcaccaacaacaacatcaatgtgaaggccaacaacaacatcaccaacaatcacaaggccatgtgcaacaacacgaacagagccatgagcaacaccaaggacagagccatgagcaacaacatcaacaacaattccagggtcatgacaagcagcaacaaccacaacagcctcagcaatatcagcagggccaggaaaaatcacaacagcaacaatgtcattgccaggagcagcaacagactacaaggtgcagctataactactatagcagtagctcaaatctaaaaaattgtcatgaat

SEQ ID NO: 342274 - DNA, 423 bp, Zea mays
cttcagaccattagctttatctactccagagcgcagaagaacccgatcgacaccatgagggtgttgctcgttgccctcgctctcctggctctcgctgcgagcgccacctccacgcatacaagcggcggctgcggctgccagccaccgccgccggttcatctaccgccgccggtgcatctgccacctccggttcacctgccacctccggtgcatctcccaccgccggtccacctgccgccgccggtccacctgccaccgccggtccatgtgccgccgccggttcatctgccgccgccaccatgccactaccctactcaaccgccccggcctcagcctcatccccagccacacccatgcccgtgccaacagccgcatccaagcccgtgccagctgcagggaacctgcggcgttggcagcaccccg

SEQ ID NO: 342275 - DNA, 428 bp, Zea mays
tttgagcattcataaacacaccaagcgattcacattagcaacaacctaacaacggtggcgaccaagatattatccctccttgcgcttcttgcgctttttgcgagcgcaacaaatgcgttcattattccacaatgctcacttgctccaagttccattattacacagttcctcccaccagttacttcaatgggcttcgaacacccagctgtgcaagcctataggctacaacaagcaattgcggcgagcgtcttacaacaaccaatttcccagttgcaacaacaatccttggcacatctaacaatacaaaccatcgcaacgcaacagcaacaacaattcctaccagcactgagccacctagccatggtgaaccctgccgcctacttgcaacagcagttgcttgcatcaaacccacttgctcttgcaaacgt

SEQ ID NO: 342276 - DNA, 421 bp, Zea mays
  unsure (1)..(421): unsure at all n locations
gcaacatagaaagcacaatagtgtaccaacaatggcagctaaaatattttgcctccttatgctccttggtctttctgcaagtgctgctacggcgaccattttcccacaatgctcacaagctcctatagcttcccttcttcccccgtacctctcaccaacggtgtcttcggtatgtgaaaacccaattcttcaaccctacaggatccaacaggcaatcgcagctggcatcttacctttatcacccttgttcctccaacaatcatcagccctattacagcagttacctttggtgcatttattggcacaaaacatcagggcacaacaactacaacaacttgtgctagcaaaccttgctgtctactctcagcaacagcagnttgttgcattcaaccaactagctgcattgaactctgctgtttat

SEQ ID NO: 342277 - DNA, 365 bp, Zea mays
aaagcggcagtgcgtagagaggatcgtcgaacagaacagcatgaagatggtcatcgttctcgtcgtgtgcctggctctgtcagctgccagcgcctctgcaatgcagatgccctgcccctgcgcggggctgcagggcttgtacggcgctggcgccggcctgacgacgatgatgggcgccggcgggctgtacccctacgcggagtacctgaggcagccgcagtgcagcccgctggcggcggcgccctactacgccgggtgtgggcagacgagcgccatgtaccagccgctccggcaacagtgctgccagcagcagatgaggatgatggacgtgcagtccgtcgcgcagcagctgcagatgatgatgc

SEQ ID NO: 342278 - DNA, 426 bp, Zea mays
attgagaccaactagcaacatagaaagcacaatagtgtaccaacaatggcagccaaaatattttgcctccttatgctccttggtctttctgcaagtgctgctacggcgaccattttcccacaatgctcacaagctcctatagcttcccttcttcccccgtacctctcaccagcggtgtcttcggtatgtgaaaacccaattcttcaaccctataggatccaacaggcaatcgcagctggcatcttacctttatcacccttgttcctccaacaatcatcagccctattacagcagttacctttggtgcattcattggcacaaaacatcagggcacaacaactacaacaacttgtgctagcaaaccttgctgcctactctcagcaacaacagtttcttccattcaaccaactagctgcattgaactct

SEQ ID NO: 342279 - DNA, 446 bp, Zea mays
cttcagaccattagctttatctactccagagcgcagaagaacccgatcgacaccatgagggtgttgctcgttgccctcgctctcctggctctcgctgcgagcgccacctccacgcatacaagcggcggctgcggctgccagccaccgccgccggttcatctaccgccgccggtgcatctgccacctccggttcacctgccacctccggtgcatctcccaccgccggtccacctgccgccgccggtccacctgccaccgccggtccatgtgccgccgccggttcatctgccgccgccaccatgccactaccctactcaaccgccccggcctcagcctcatccccagccacacccatgcccgtgccaacagccgcattcaaacccgtgccagcttgaaggaacctgcggcgttggcagcaccccgatcctgggccaatgcgtcgagtt

SEQ ID NO: 342280 - DNA, 282 bp, Zea mays
caactagcaacatagaaggcccaattatgtaccaaccatgggcagccaaataatttggcctccttatgctcctgggtctttctgcaagtgctgctacggcgaccattttcccgaaatgctcgcaagctcctatagcttcccttcttccccgtaccttttaacaacggggtcttcggtatgggaaaacccaattcttcaacccttccggatccaacaggcaatcacagctggcatcttacctttatcacccttggtccttcaacaatcatcagacctattaca

SEQ ID NO: 342281 - DNA, 93 bp, Zea mays
gcaaggctcccaagggtggcaagacggactgggtcatgcaccaatacaggctcgaaggcagcggcaggctccccgccggcctcgcgttcgcaa

SEQ ID NO: 342282 - DNA, 404 bp, Zea mays
agacaccaccgtttcatctaccgcctccgttctatatgccgcctccgttctatctgccgccgcagcagcagccgcagccatggcaataccccactcaaccaccgcagctaagcccgtgccagcagttcggatcctgcggcgtcggcagcgtcggcagcccgttcctgggccagtgcgtcgagttcctgaggcaccagtgcagcccggcggcgacgccctacggctcgccacagtgccaggcgctgcagcagcagtgctgccaccagatcaggcaggtggagccgctgcaccggtaccaggcgacatacggtgtggtcctgcagtccttcctgcagcagcagccgcagggcgagctcgcggcgctgatggcggcccatgtagcgcagcagctgacggcgatgtgc

SEQ ID NO: 342283 - DNA, 441 bp, Zea mays
caacaagcaacatagaaagtggaatccagtagcaacaatagagcaacaatggcgaccaagatattttccctccttatgctccttgctctttctgcatgtgttgctaacgcgacaattttccctcaatgctcacaagctcctatagcttcccttcttcccccataccttccatcaatgatagcttcagtatgtgaaaacccagctcttcaaccctataggctccaacaagcaatcgcagcaagcaacatacctttatcacccttgtttcaacaatcgccagccctatctttggtgcagtcattggtacaaaccatcagggcacagcagctgcagcaactcgtgctacctgtgatcaaccaagtagctctggcaaacctttctccctactctcagcaacaacaatttcttccattcaaccaactgtctacattgaaccgtgct

SEQ ID NO: 342284 - DNA, 431 bp, Zea mays
  unsure (1)..(431): unsure at all n locations
gctgcattgaactctgcttcttatttgctacaacaacaactaccattcagccaggtacctgctgcctacccccagcaatttcttccattcaaccaactggcagcattgaactctcctgcttatttacagcagcaacaactactaccattcagccagctagctggtgtgagccctgctaccttcttgatacaaccacagttgttgccgttctaccagcacgctgcgcctaacgctggcaccctcttacaactgcaacaattgctgccattcaaccaacttgctttgacaaacccagcagcgttctaccaacaacccatcattggtggtgccctcttttagatttcttatgagttatagttcaataataaagttttttgtctgatgtttgtggcttcccagaaataagaaagtacatttctagattaannaaa

SEQ ID NO: 342285 - DNA, 354 bp, Zea mays
gggtcttcagaccattagctttatctactccagagcgcagaagaacccgatcgacaccatgagggtgttgctcgttgccctcgctctcctggctctcgctgcgagcgccacctccacgcatacaagcgggggctgcggctgccacccaccgccgccggttcatataccgacgacggtgcatctgccaccttcggttcacctgccacctccggtgcatctcccaccgccggtccacctgccgccgccggtccacctgccaccgccggtccatgtgccgccgccggatcatctgccgccgacaccatgccactaccctactcaacacgcccggcctcagcctcatccccagccaca

SEQ ID NO: 342286 - DNA, 429 bp, Zea mays
gcaacatagaaagtggaatccagtagcatcaatagagcaacaatggagaccaagatatgggccctccttatgctccttgctctttctacatgtgttgctaacgcgacaattttccctcaatgctcacaagctcctatagcttccctttttcccccataccttccatcaattatagcttcagtatgtgaaaacccagctcttcaaccatataggcttcaacaagcaatcgcagcaagcaacatacctttatcgcccttgttgtgtcaacaatcgccagccctatctttggtgcagtcattggtacaaaccatcagggcacaacagctgcagcaactcgtgctacctgtgatcaaccaagtagctctggcaaacctttctccctactctccgcaacaacaatttcttccattcaaccaactgtctacactg

SEQ ID NO: 342287 - DNA, 434 bp, Zea mays
gaaagcacaatagtgtaccaactatggcagttaaaatattttgcttccttatgctccttggtctttctgcaagtgttgctaccgcaaccattttcccacaatgctcacaagctcctatagcttcccttcttcccccatacctctcaccagcggtgtcttcaatgtgtgaaaacccaattgttcaaccctacaggatccaacaggcaatcgcaacaggcatcttaccattatcacccttgttcctccaacaaccgtcagccctattacagcagttacctttggtccatttggtggcacaaaacatcaggggacaacaactacaacaacttgtgctagcaaaccttgctgcatactctcaacaacatcagtttcttccattcaaccaactggctgcattgaactttgctgcttatttgcaacaacaattaccattc

SEQ ID NO: 342288 - DNA, 428 bp, Zea mays
  unsure (1)..(428): unsure at all n locations
attagctcatcgactccagattggagaacttgacaccatgaaggtgctgatcgttgcccttgctctcctggcgctcgctgcgagcgccgcctccagtacaagcggcggctgtggctgccagacaccaccgtttcatctaccgcctccgttctatatgccgcctccgttctatctgccgccgcagcagcagccgcagccatggcaataccccactcaaccaccgcagctaagcccgtgccagcagttcggatcctgcggcgtcggcagcgtcggcagcccgttcctgagccagtgcgtcgagttcctgaggcaccagtgcagcccggcggcgacgccctacggctcgccacagtgccaggcgctgcagcagcagtgctgccaccagatcangcaggtggagccgctgcaccggtaccaggcgacatacg

SEQ ID NO: 342289 - DNA, 421 bp, Zea mays
gcaaagcggcagtgcgtagagaggatcgtcgaacagaacagcatgaagatggtcatcgttctcgtcgtgtgcctggctctgtcagctgccagcgcctctgcaatgcagatgccctgcccctgcgcggggctgcagggcttgtacggcgctggcgccggcctgacgacgatgatgggcgccggcgggctgtacccctacgcggagtacctgaggcagccgcagtgcagcccgctggcggcggcgccctactacgccgggtgtgggcagacgagcgccatgtaccagccgctccggcaacagtgctgccagcagcagatgaggatgatggacgtgcagtccgtcgcgcagcagctgcagatgatgatgcagcttgagcgtgccgctgccgccagcagcagcctgtacgagccagctctgatgc

SEQ ID NO: 342290 - DNA, 171 bp, Zea mays
ctaggcaggtggagccgcagcaccggtaccaggcgatcttcggcttggtcctgcagtccatcctgcagcagcagccgcaaagcggccaagtcgcggggctggtggcggcgcaaatagcgcagcaactgacggcgatgggcggccttgaacaaccgactccatgcccctacg

SEQ ID NO: 342291 - DNA, 436 bp, Zea mays
aaagcacaatagtgtaccaacaatggcagctaaaatattttgcctccttatgctccttggtctttctgcaagtgctgctacggcgaccattttcccacaatgctcacaagctcctatagcttcccttcttcccccgtacctctcaccaacggtgtcttcggtatgtgaaaacccaattcttcaaccctacaggatccaacaggcaatcgcagctggcatcttacctttatcacccttgttcctccaacaatcatcagccctattacagcagttacctttggtgcatttattggcacaaaacatcagggcacaacaactacaacaacttgtgctagcaaaccttgctgcctactctcagcaacagcagtttcttccattcaaccaactagctgcattgaactctgcttcttatttgcaacaacaacaactaccattc

SEQ ID NO: 342292 - DNA, 262 bp, Zea mays
ctccttgcgcctcttgcccttttagtgagcgcaacaaatgcgttcattattccacagtgctcacttgctcctagtgccattattccacagttcctcccaccagttacttcaatgggctttgaacatccagccgtgcaagcctacaggctacaactagcgcttgcagtgagcgtcttacaacaaccaattgcccaattgcaacaacaatccttggcacatcttaacctacaaaccattgcaacgcaacagcaacaacagtttc

SEQ ID NO: 342293 - DNA, 225 bp, Zea mays
gcattcagaaacacaccaagcgaagcgcactatcaacaacctaacaacaatggctaccaagatattagccctccttgcgcttcttgccctttaagggagcgcaacaaatgcgttcattattccacagggctaacttgctcctagtgccattattccacagttcctcccaccagttacttcaatgggcttggaacatccagccgtgcaagcctacaggctacaact

SEQ ID NO: 342294 - DNA, 357 bp, Zea mays
tttgagcattcagaaacacaccaagcgaagcacattagcaacaacctaacaacaatggctaccaagatattatccctccttgcgcttcttgcgctttttgcgagcgcaacaaatgcgttcattattccacaatgctcacttgctccaagttccattattacacagttcctcccaccagttacttcaatgggcttcgaacacccagctgtgcaagcctataggctacaacaagcaattgcggcgagcgtcttacaacaaccaatttcccagttgcaacaacaatccttggcacatctaacaatacaaaccatcgcaacgcaacagcaacaacaattcctaccagcactgagccaccta

SEQ ID NO: 342295 - DNA, 371 bp, Zea mays
tgagcattcagaaacacaccaagcgaagcacattatcaacaacctaacaacaatggctaccaagatattatccctccttgcgcttcttgcgctttttgcgagcgcaacaaatgcgttcattattccacaatgctcacttgctccaagttccattattacacagttcctcccaccagatacttaaatgggcttcgaacacccacctgtgcaagcctataggctacaacaagcaattgcggcgagcgtcttacaacaaccaatttgccaggtgcaacaacaatacttggcacatctaacaatacaaaccatcgcaacgcaacagcaacaacaatttctaccagcactgagccacctagccatgggggaaccct

SEQ ID NO: 342296 - DNA, 385 bp, Zea mays
cccacgcgtccgcccacgcgttcggcaacatttaaagcacaatagtgtaccaacaatggcagccaaaatattttgcctccttatgctccttggtctttctgcaagtgctgctacggcgaccattttcccacaatgctcacaagctcctatagcttcccttcttcccccgtacctctcaccagcggtgtcttcggtatgtgaaaacccaattcttcaaccctataggatccaacaggcaatcgcagctggcatcttacctttatcacccttgttcctccaacaatcatcagccctattacagcagttacctttggtgcatttattggcacaaaacatcagggcacaacaactacaacaacttgtgctagcaaaccttgctgcctac

SEQ ID NO: 342297 - DNA, 445 bp, Zea mays
attgagaccaactagcaacatagaaagcacaatagtgtaccaacaatggcagccaaaatattttgcctccttatgctccttggtctttctgcaagtgctgctacggcgaccattttcccgaaatgctcgcaagctcctatagcttcccttcttcccccgtacctctcaccagcggtgtcttcggtatgtgaaaacccaattcttcaaccctacaggatccaacaggcaatcacagctggcatcttacctttatcacccttgttcctccaacaatcatcagccctattacatcagttacctttggtgcatttattggcacaaaacatcagggcacaacaactacaacaacttgtgctagcaaaccttgctgcctactctcagcaacagcagtttcttccattcaaccaactagctgcattgaactctgcttcttatttgcaacaac

SEQ ID NO: 342298 - DNA, 435 bp, Zea mays
gcaattagctcatcgactccagattggttaactcgacaccatgaaggtgctgatcgttgcccttgctctcctggcgctcgctgcgagcgccgcctccagtacaagcggcggctgtggctgccagacaccaccgtttcatctaccgcctccgttctatatgccgcctccgttctatctgccgccgcagcagcagccgcagccatggcaataccccactcaaccaccgcagctaagcccgtgccagcagttcggatcctgcggcgtcggcagcgtcggcagcccgttcctgggccagtgcgtcgagttcctgaggcaccagtgcagcccggcggcgacgccctacggctcgccacagtgccaggcgctgcagcagcagtgctgccaccagatcatgcaggtggagccgctgcaccggtaccaggcgacatacggtgt

SEQ ID NO: 342299 - DNA, 431 bp, Zea mays
caagcaacatagaaagtggaatacagtatcaacaatagagcaacaatggcggccaagatattttccatccttatgctccttgctctttctgcatgtgttgctaacgcgaccatttttcctcaatactcacaagctcctatagctgcccttcttcccccataccttccatcaatgaccgcttcagtatgtgaaaacccagcccttcaaccctacaggctccaacaagcaatcgcaacaagcaacttacctttatcacccctgttctttcaacaatcgccagccctatctttggtgcagtcattggtacaaaccatcagggcacaacagctgcagcaactcgtgctaccagtgatcagccaagtagctctggcaaacctttctccctactctcagcaacaacaatttcttccattcaaccaactgtctacact

SEQ ID NO: 342300 - DNA, 443 bp, Zea mays
gcaacatagaaagcacaatagtgtaccaacaatggcagccaaaatattttgcttccttatgctccttggtctttctgcaagtgttgctaccgcaaccattttcccacaatgctcacaagctcctatagcttcccttcttcccccatacctctcaccagcggtgtcttcaatgtgtgaaaacccaattgttcaaccctacaggatccaacaggcaatcgcaacaggcatcttaccattatcacccttgttcctccaacaaccgtcagccctattacagcagttacctttggtccatttggtggcacaaaacatcagggcacaacaactacaacaacttgtgctagcaaaccttgctgcatactctcagcaacatcagtttcttccattcaaccaactggctgcattgaactctgctgcttatttgcaacaacaattaccattca

SEQ ID NO: 342301 - DNA, 400 bp, Zea mays
aagcaacatagaaagtggaatccagtagcaacaatagagcaacaatggcgaccaagatattttccctccttatgctccttgctctttctgcatgtgttgctaacgcgacaattttccctcaatgctcacaagctcctatagcttcccttcttcccccataccttccatcaatgatagcttcagtatgtgaaaacccagctcttcaaccctataggctccaacaagcaatcgcagcaagcaacatacctttatcacccttgtttcaacaatcgccagccctatctttggtgcagtcattggtacaaaccatcagggcacagcagctgcagcaactcgtgctacctgtgatcaaccaagtagctctggcaaacctttcttcctactctcagcaacaacaatt

SEQ ID NO: 342302 - DNA, 384 bp, Zea mays
gcaacatagaaagtggaatccagtagcaacaatagagcaacaatggagaccaagatattttccctccttatgctccttgctctttctacatgtgttgctaacgcgacaattttccctcaatgctcacaagctcctatagcttccctttttcccccataccttccatcaattatagcttcagtatgtgaaaacccagctcttcaaccatataggcttcaacaagcaatcgcagcaagcaacatacctttatcgcccttgttgtgtcaacaatcgccagccctatctttggtgcagtcattggtacaaaccatcagggcacaacagctgcagcaactcgtgctacctgtgatcaaccaagtagctctggcaaacctttctccctac

SEQ ID NO: 342303 - DNA, 437 bp, Zea mays
gaaagcacaatagtgtaccaacaatggcagtcaaaatattttgcctccttatgctccttggtctttctgcaagtgctgctacggcgaccattttcccgaaatgctcgcaagctcctatagcttcccttcttcccccgtacctctcaccagcggtgtcttcggtatgtgaaaacccaattcttcaaccctacaggatccaacaggcaatcacagctggcatcttacctttatcacccttgtcctccaacaatcatcagccctattacatcagttacctttggtgcatttattggcacaaaacatcagggcacaacaactacaacaacttgtgctagcaaaccttgctgcctactctcagcaacagcagtttcttccattcaaccaactagctgcattgaactctgcttcttatttgcaacaacaacaactaccattca

SEQ ID NO: 342304 - DNA, 445 bp, Zea mays
  unsure (1)..(445): unsure at all n locations
caactagcaacatagaaagcacaatagtgtaccaacaatggcagccaaaatattttgcctccttatgctccttggtctttctgcaagtgctgctacggcgaccattttcccacaatgctcacaagctcctatagcttcccttcttcccccgtacctctcaccagcggtgtcttcggtatgtgaaaacccaattcttcaaccctataggatccaacaggcaatcgcagctggcatcttacctttatcacccttgttcctccaacaatcatcagccctattacagcagttacctttggtgcatttattggcacanaacatcagggcacaacaactacaacaacttgtgctagcanaccttgctgcctactctcagcaacaacagtttcttccattcaaccaactagctgcattgaactctgcttcttattgcaacaacaacaactac

SEQ ID NO: 342305 - DNA, 447 bp, Zea mays
caactagcaacatagaaagcacaatagtgtaccaacaatggcagccaaaatattttgcttccttatgctccttggtctttctgcaagtgttgctaccgcaaccattttcccacaatgctcacaagctcctatagcttcccttcttcccccatacctctcaccagcggtgtcttcaatgtgtgaaaacccaattgttcaaccctacaggatccaacaggcaatcgcaacaggcatcttaccattatcacccttgttcctccaacaaccgtcagccctattacagcagttacctttggtccatttggtggcacaaaacatcagggcacaacaactacaacaacttgtgctagcaaaccttgctgcatactctcagcaacatcagtttcttccattcaaccaactggctgcattgaactctgctgcttatttgcaacaacaattaccatt

SEQ ID NO: 342306 - DNA, 433 bp, Zea mays
ggagacatatatgaggaaccagtagcaccatactgtaacctcatcttctctgatgagaaagagatgatgagagagggtgatgcacgtgttacgcttctaagaagcaagctccatggcctggtcgaaaggaaccgagatctggaagaggaaaacaagcaattgagacaccaagtgagccaattaaaaggtcagatctcctctctcgaaggccaggaaactaataagaggatgctgtggaagaagctggagaattctgcaaccggcatcagctactccaaggaaaagcagtttgtccagagcaacgatggtgctaaggaagccgtagatctcaacagctcattgtctcacagcaggcagcaattctccagggtaaaccaagtgagatcaagggcgccaagggttccaaatcaacctcccaatccgacaagcaccc

SEQ ID NO: 342307 - DNA, 394 bp, Zea mays
  unsure (1)..(394): unsure at all n locations
ggtcttcaaaccattaactttatctactccagagcgcagaagaacccgatcgacaccatgagggtgttgctcgttgccctcgctctcctggctctcgctgcgagcgccacctccacacatacaagcggcggatgcggctgccagccaccgccgccggttcatctaccgacgtcggtgcatctgccacctgcggttcacctgccacctccggtgcatctcccaccgccggtccacctgccgccgccggtccacctgccaccgccggttcatgtgccgccgacggttcatctgccgccgncaccatgccactaccgtactcaaccgtcccgggctcagtctcatccgcagccacacccatgcccgtgccaacagccgcatccaaacccgggccaac

SEQ ID NO: 342308 - DNA, 447 bp, Zea mays
attttgagcattcagaaacacaccaagctaagcacattagcaacaacctaacaacaatggctaccaagatattatccctccttgcgcttcttgcgctttttgcgagcgcaacaaatgcgttcattattccacaatgctcacttgctccaagttccattattacacagttcctcccaccagttacttcaatgggcttcgaacacccagctgtgcaagcctataggctacaacaagcaattgcggcgagcgtcttacaacaaccaatttcccagttgcaacaacaatccttggcacatctaacaatacaaaccatcgcaacgcaacagcaacaacaattcctaccagcactgagccacctagccatggtgaaccctgccgcctacttgcaacagcagttgcttgcatcaaacccacttgctctggcaaacgtagttgcaaaccagccac

SEQ ID NO: 342309 - DNA, 240 bp, Zea mays
gtgtcttcggtatgtgaaaacccaattcttcaaccctacaggatccaacaggcaatcacagctggcatcttacctttatcacccttgttcctccaacaatcatcagccctattacatcagttacctttggtgcatttattggcacaaaacatcagggcacaacaactacaacaacttgtgctagcaaaccttgctgcctactctcagcaacagcagtttcttccattcaaccaactagct

SEQ ID NO: 342310 - DNA, 318 bp, Zea mays
gggtcttcagaccattagctttatctactccagagcgcagaagaacccgatcgacaccatgagggtgttgctcgttgccctcgctctcctggctctcgctgcgagcgccacctccacgcatacaagcggcggctgcggctgccagccaccgccgccggttcatctaccgccgccggtgcatctgccacctccggttcacctgccacctccggtgcatctcccaccgccggtccacctgccgccgccggtccacctgccaacggccggtcatgtgccgccgccggtcatctgccgccgcaccatgccactaccctactc

SEQ ID NO: 342311 - DNA, 355 bp, Zea mays
  unsure (1)..(355): unsure at all n locations
cagaccattagctttatctactccagagcgcagaagaacccgatcgacaccatgagggtgttgctcgttgccctcgctctcctggctctcgctgcgagcgccacctccacgcatacaagcggcggctgcggctgccagccaccgccgccggttcatctaccgccgccggtgcatctgccacctccggttcacctgccacctccggtgcatctcccaccgccggtccacctgccgccgccggtccacctgccaccgccggtccatgtgccgccgccggttcatctgccgccgccaccatgccactaccctactcaaccgccccggcctcagcctcatncccagccacacccatgcc

SEQ ID NO: 342312 - DNA, 440 bp, Zea mays
agcaacatagaaagcacaatagtgtaccaacaatggcagccaaaatattttgcctccttatgctccttggtctttctgcaagtgctgctacggcgaccattttcccgcaatgctcgcaagctcctatagcttcccttcttcccccgtacctctcaccagcggtgtcttcggtatgtgaaaacccaattcttcaaccctacaggatccaacaggcaatcgcagctggcatcttacctttatcacccttgttcctccaacaatcatcagccctattacaacagttacctttggtgcatttattggcacaaaacatcagggcacaacaactacaacaacttgtgctagcaaaccttgctgcctactctcagcaacagcagtttcttccattcaaccaactacgttcattgaactctgcttcttatttgcaacaacaacaacta

SEQ ID NO: 342313 - DNA, 448 bp, Zea mays
gaagaacccgatcgacaccatgagggtgttgctcgttgccctcgctctcctggctctcgctgcgagcgccacctccacgcatacaagcggcggctgcggctgccagccaccgccgccggttcatctaccgccgccggtgcatctgccacctccggttcacctgccacctccggtgcatctcccaccgccggtccacctgccgccgccggtccacctgccaccgccggtccatgtgccgccgccggttcatctgccgccgccaccatgccactaccctactcaaccgccccggcctcagcctcatccccagccacacccatgcccgtgccaacagccgcatccaagcccgtgccagctgcaaggaacctgcggcgttggcagcaccccgatcctgggccagtgcgtcgagtttctgaggcatcagtgcagcccgacggcgacgccctac

SEQ ID NO: 342314 - DNA, 446 bp, Zea mays
ccaactagcaacatagaaagcacaatagtgtaccaacaatggcagccaaaatattttgctggcttatgctccttggtctttctgcaagtgttgctaccgcaaccattttcccacaatgctcacaagctcctatagcttcccttcttcccccatacctctcaccagcggtgtcttcaatgtgtgaaaacccaattgttcaaccctacaggatccaacaggcaatcgcaacaggcatcttaccattatcacccttgttcctccaacaaccgtcagccctattacagcagttacctttggtccatttggtggcacaaaacatcagggcacaacaactacaacaacttgtgctagcaaaccttgctgcatactctcagcaacatcagtttcttccattcaaccaactggctgcattgaactctgctgcttatttgcaacaacaattacca

SEQ ID NO: 342315 - DNA, 365 bp, Zea mays
catttattggcacaaaacatcagggcacaacaactacaacaacttgtgctagcaaaccttgctgcctactctcagcaacagcagtttcttccattcaaccaactagctgcattgaactctgcttcttatttgcaacaacaacaactaccattcagccagctacctgctgcctacccccagcaatttcttccattcaaccaactggcagcattgaactctcctgcttatttacagcagcaacaactactaccattcagccagctagctggtgtgagccctgctaccttcttgatacaaccacagttgttgccgttctaccagcacgctgcgcctaacgctggcaccctcttacaactgcaacaatt

SEQ ID NO: 342316 - DNA, 433 bp, Zea mays
ccaacaagcaacatagaaagtggaatccagtagcaacaatagagcaacaatggcgaccaagatattttccctccttatgctccttgctctttctgcatgtgttgctaacgcgacaattttccctcaatgctcacaagctcctatagcttcccttcttcccccataccttccatcaatgatagcttcagtatgtgaaaacccagctcttcaaccctataggctccaacaagcaatcgcagcaagcaacatacctttatcacccttgtttcaacaatcgccagccctatctttggtgcagtcattggtacaaaccatcagggcacagcagctgcagcaactcgtgctacctgtgatcaaccaagtagctctggcaaacctttctccctactctcagcaacaacaatttcttccattcaaccaactgtctacattg

SEQ ID NO: 342317 - DNA, 354 bp, Zea mays
ggccgccctttttttttttttttttttttttttttttttggaaccccgcaaaaaagtctgctactttttgttcaaacaaagtcgccattagcttggttgcccaggggcatttctggcaaagacagggtccttcgctctggcaggggcaggacgccaggaccccgcgcaaagacagggtcctacggttcttttttttttacatgacatttgagtgacaactacatgacggagcaggcgttggggttctcgtcgctgaaaatctgcggcgccatgggctgctgctggtgcaagtggtggtgcggcggcccctaaaacggcggcgggtaggccggctggtaggcgtacgggtacccc

SEQ ID NO: 342318 - DNA, 423 bp, Zea mays
cggacgcgtgggcaatcatcattcatcttagtagtataggcaccaaatcaaatctgcaacgaggaattatctaactccaaaaaccatgaagctggtgcttgtggttcttgctttcattgctttagtatcaagtgtttcttgtacacagacaggcggctgcagctgtggtcaacaacaaagccatgagcagcaacatcatccacaacaacatcatccacaaaaacaacaacatcaaccaccaccacaacatcaccagcagcagcaacaccaacaacaacaagttcacatgcaaccacaaaaacatcagcaacaacaagaagttcatgttcaacaacaacaacaacaaccgcagcaccaacaacaacaacaacaacagcaccaacaacaacatcaatgtgaaggccaacaacaacatcaccaaca

SEQ ID NO: 342319 - DNA, 449 bp, Zea mays
acgattagctctatctactccagagcgcacaagaacccgatcgacaccatgagggtgttgctgggtgccctcgctctcctggctctcgctgcgagcgccacctccacgcatacaagcggcggctgcggctgccagccaccgccgccggttcatctaccgccgccggtgcatctgccacctccggttcacctgccacctccggtgcatctcccaccgccggtccacctgccgccgccggtccacctgccaccgccggtccatgtgccgccgccggttcatctgccgccgccaccatgccactaccctactcaaccgccccggcctcagcctcatcctcagccacacccatgcccgtgccaacagccgcatccaagcccgtgccagctgcagggaacctgcggcgttggcagcaccccgatcctgggccagtgcgtcgagtttctgaggca

SEQ ID NO: 342320 - DNA, 465 bp, Zea mays
gagaccaacaagcaacatagaaagtggaatccagtagcaacaatagagcaacaatggcgagcaggatattttccctccttatgctccttgctctttctgcatgtgttgctaacgcgacaattttccctcaatgctcacaagctcctatagcttcccttcttcccccataccttccatcaatgatagcttcagtatgtgaaaacccagctcttcaaccctataggctccaacaagcaatcgcagcaagcaacatacctttatcacccttgtttcaacaatcgccagccctatctttggtgcagtcattggtacaaaccatcagggcacagcagctgcagcaactcgtgctacctgtgatcaaccaagtagctctggcaaacctttctccctactctcagcaacaacaatttcttccattcaaccaactgtctacattgaaccgtgctgcttattgcagcaacaact

SEQ ID NO: 342321 - DNA, 367 bp, Zea mays
  unsure (1)..(367): unsure at all n locations
ccggggcggccggcgcgtacgttcagcattcanaaacacaccaagcgaagcgcactagcaacaacctaacaacaatggctaggaagatattaaccctcgttgcgctgcttgcccttttagtgagcgcaacaaatgcgttcattattccacagtgctcacttgctcctagtgccattattccacagttcctcccaccagttacttcaatgggcttcgaacatccagccgtgcaagcctacaggctacaactagcgcttgcggcgagcgtcttacaacaaccaattgcccaattgcaacaacaatccttggcacatctaaacctacaaaccatcgcaacgcaacagcaacaacagtttctgcatcactg

SEQ ID NO: 342322 - DNA, 326 bp, Zea mays
gtcctatatcattagctaccgttctacaagatccgatcttacgaccgcatccatgcgacagcagacgtcttttataccggggcctaaattcaataaactgaccaaccaccaacaacttcctgacactaataaccctgacgcatacccaactgaattgccttgagcacatccctctttccccaacttgcgacataacaagacatgcgccgaccaagcgccctatcgaaaaatagtccagcctcaatggagaatcgaacacgccctgtagctgcgcattatgctcgaccggtatggtgcgcacacccagactgacagctacacctgct

SEQ ID NO: 342323 - DNA, 357 bp, Zea mays
ttcagaccattagctttatctactccagagcgcagaagaacccgatcgacaccatgagggggttgctcgttgccctcgctctcctggctctcgctgcgagcgccacctccacgcatacaagcggcggctgcggctgccagccaccgccgccggttcatctaccgccgccggtgcatctgccacctccggttcacctgccacctccggtgcatctcccaccgccggtccacctgccgccgccggtccacctgccaccgccggtccatgtgccgtcgccggttcatctgccgccgccaccatgccactaccttactgaaccgtcccggccttagcctcatccgcagccacacccatgcc

SEQ ID NO: 342324 - DNA, 182 bp, Zea mays
ctcggtcttacatctataactccacatctacatctaccaattacacgtacgctctcatgcgacggcattgttcaagcgaagtggcacctaaactcaacttactgtcacccatgtacaccacccaatgactgacaaaacactacacttacttaactaaatagcattgcaagccatcccacttt

SEQ ID NO: 342325 - DNA, 421 bp, Zea mays
tcagaccattagctttatctactccagagcgcagaagaacccgatcgacaccatgagggtgtggctcgttgccctcgctctcctggctctcgctgcgagcgccacctccacgcatacaagcggcggctgcggctgccagccaccgccgccggttcatctaccgccgccggtgcatctgccacctccggttcacctgccacctccggtgcatctcccaccgccggtccacctgccgccgccggtccacctgccaccgccggtccatgtgccgccgacggttcatctgccgccgccaccatgccactaccctactcaaccgccccggcctcagcctcatccccagccacacccatgcccgtgccaacagccgcatccaagcccgtgccagctgcagggaacctgcggcgttggcagcaccccg

SEQ ID NO: 342326 - DNA, 409 bp, Zea mays
gaccgacgcgtccgaataagcacaccaagcaacacacactaccaacatcctaaccacaatcgctaccacaatgtgtagcattatatcactccttgcgctgcttgctaccccaacaaatacctccactaatccacaaatcttactacatcctacactcattattacacacatccttccaccagttacttcaatagccacttaacacccatctgaacaagcctatatgctacaacacacgataccactaagcctcttacaacacccaatacaccaattactacaacaattcttgccacatttaacaatacatatcatcctaccgcaacatcaacaacagcagctaccacaactgatccacttactcatcctgaaacctgtcgtctactttcaacactacttgcttcaatac

SEQ ID NO: 342327 - DNA, 375 bp, Zea mays
ctagcaacatagaaagcacaatagtgtaccaacaatggcagccaaaatattttgcttccttatgctccttggtctttctgcaagtgttgctaccgcaaccattttcccacaatgctcacaagctcctatagcttcccttcttcccccatacctctcaccagcggtgtcttcaatgtgtgaaaacccaattgttcaaccctacaggatccaacaggcaatcgcaacaggcatcttaccattatcacccttgttcctccaacaaccgtcagccctattacagcagttacctttggtccatttggtggcacaaaacatcagggcacaacaactacaacaacttgtgctagcaaaccttgctgcatactctcagcaaca

SEQ ID NO: 342328 - DNA, 461 bp, Zea mays
gcggcagtgcgtagagaggatcgtcgaacagaacagcatgaagatggtcatcgttctcggcgtgtgcctggctctgtcagctgccagcgcctctgcaatgcagatgccctgcccctgcgcggggctgcagggcttgtacggcgctggcgccggcctgacgacgatgatgggcgccggcgggctgtacccctacgcggagtacctgaggcagccgcagtgcagcccgctggcggcggcgccctactacgccgggtgtgggcagacgagcgccatgtaccagccgctccggcaacagtgctgccagcagcagatgaggatgatggacgtgcagtccgtcgcgcagcagctgcagatgatgatgcagcttgagcgtgccgctgccgccagcagcagcctgtacgagccagctctgatgcagcagcagcagcagctgctggcagcccagggtctcaaccccatgg

SEQ ID NO: 342329 - DNA, 422 bp, Zea mays
accattatctatatctactacacagcgcataataacccgatcgacaccatgagggggcggctcgttgccctcgctgggcgggctctcgctgcgagcaccacctccacgcatacaagcagcggctgcggctgccagccaccgccgccggttcatctaccgccgccggtgcatctgccacctccggatcacctgccacctccggtgcatctcccaccgacggtccacctgccgccgccggtccacctgccaccgccggtccatgtgccgccgccggttcatctgccgacgacaccatgccactaccctacatcaaccgcccggcctcagcctcatccccagccacacccatgcccgtgccaacagccgcatccaagcccgtgccagctgcagggaacctgcggcggtggcagcaccccgatcct

SEQ ID NO: 342330 - DNA, 134 bp, Zea mays
agctgtgcaagcctacaggctacaacaagcgcttgctgcgagcgtcttacaacaaccaattgaccaattgcaacaacaatccttggcacatctaaccatacaaaccatttcaacacaacaacctcaacattttt

SEQ ID NO: 342331 - DNA, 337 bp, Zea mays
gtggatatggacgtggaaggtacgaggaagaatacggctacaagaagaagccagccatcgggggctatagatgaggaaaatacaaggatgaagatgactacacgaggaaacctagcactgctagctatggtgggggatggcacgaggatgtagatgattacaagaagaaacccacaagatgaggctttggtggagggagggatgaacaagatgataatccctagaagcctacacgtggcggctcaggtgacagcaggcatgaacaggaccatgaatacaagaagcctctgaccgtatgtggcagtgcactaatggggacgcacgattgaggatcatc

SEQ ID NO: 342332 - DNA, 457 bp, Zea mays
gagcattcataaacacaccaagcgaagcgcactagcaacgacctaacaacaatggctaccaaggtattagccctccttgcgcttcttgccctttttgtgagcgcaacaaatgcgttcattattccacaatgctcacttgctcctagtgccattattccacagttcctcccaccagttacttcaatgggcttcgaacacctagctgtgcaagccaacatgcaacaacaagcgcttgcggcgagcgtcttacaacaaccaattgcccaattgcaacaacaatccttgccacatctaacaatacaagccatcacaacgcaacagcaacaacagttcctaccagcactgagccacctagccatggtgaaccctgccgcctacttgcaagagcagctgcttgcatccaacccacttgctctggcgaacgtagttgcaaaccagcaacaacaacagctacaac

SEQ ID NO: 342333 - DNA, 438 bp, Zea mays
caacaagcaacatagaaagtggaatccagtatcaacaattgagcaacaatggcgaccaagagatttttcctccttatgctccttgctctctctgcatgtgttgctaacgcgacaattttccctcaatgctcacaagctcctatagcttcccttcttcccccataccttccatcaatgatagcttcagtatgtgaaaacccagctcttcaaccctataggctccaacaagcaatcgcagcaagcaacatacctttatcacccttgtttcaacaatcgccagccctatctttggtgcagtcattggtacaaaccatcagggcacagcagctgcagcaactcgtgctacctgtgatcaaccaagtagctctggcaaacctttctccctactctcagcaacaacaatttcttacattcaaccaactgtctacattgaaccgt

SEQ ID NO: 342334 - DNA, 454 bp, Zea mays
caacaagcaacatagaaagtggaatccagtagcaacaatagagcaacaatggcgaccaagagattttccctccttatgctccttgctctttctgcatgtgttgctaacgcgacaattttccctcaatgctcacaagctcctatagcttcccttcttcccccataccttccatcaatgatagcttcagtatgtgaaaacccagctcttcaaccctataggctccaacaagcaatcgcagcaagcaacatacctttatcacccttgtttcaacaatcgccagccctatctttggtgcagtcattggtacaaaccatcagggcacagcagctgcagcaactcgtgctacctgtgatcaaccaagtagctctggcaaacctttctccctactctcagcaacaacaatttcttccattcaaccaactgtctacattgaaccgtgctgcttatttgcagc

SEQ ID NO: 342335 - DNA, 216 bp, Zea mays
aaaaccggccgacccagcatacgttctatatatctatctacactatacattatcaaactacatacccattcatacggcggcttatttttttatattctcacctaaatataatccactttctctcatactacaacttaatcacttttaaaacccttcctatacccaactaaatctccttacatcacattcaactttcaccatcatttttaatatctc

SEQ ID NO: 342336 - DNA, 183 bp, Zea mays
  unsure (1)..(183): unsure at all n locations
caactcacaccacccttctaggccacccgacaaccgacaaaccgcaggaataaaaaaaccgccagccatcaaaaagcaaaaaacacactacncccccaaccaatgctcccaccttcctgcaaacctactcatatctattaccatcatttcatataatctaacatccagctctaaccactactt

SEQ ID NO: 342337 - DNA, 449 bp, Zea mays
gcattcaaaaacacaccaagcgaagcgcactagcaacaacctaacaacaatggctaccaaggatttaacccttcttgggcctcttggccttttaatgagcgccacaaatgcgttcattattccacagtgctcacttgctcctagtgccattattccacagttcctcccaccagttacttcaatgggcttcgaacattcagccgtgcaagcctacaggctacaactagcgcttgcggcgagcgtcttacaacaaccaattggccaattgcgacaacaattcttggcacatataaacctacaaaccatcgcaacgcaacagcaacaacagtttctgtcatcactgagccacctagacgtggtgaaccctgtcgcctacttgcaacagcagctacttgcatccaacccacttgctctggcgaacgtagctgcataccaacaacaacaacgtc

SEQ ID NO: 342338 - DNA, 151 bp, Zea mays
acaaaaacaccaaccaactctcaagagtatccaaccaacaccactccctcacccgccggaataaaaaaaacgcagccccacccaaaacaaacacaacaccaactttaacaacccacagaccacaaaaacccctactacacccaacacaaac

SEQ ID NO: 342339 - DNA, 427 bp, Zea mays
ctctccttttgctcggaacgcacacaccgcccggtccccgatctccgatcccctcgtcgatccggagatgcagatcttcgtcaagaccctcactggaaagactatcaccctcgaggtggagtcttctgacaccattgacaacgtcaaggccaagatccaggacaaggagggcatccccccggaccagcagcggctcatctttgctggcaagcagctcgaggacgggcgcacacttgccgactacaacatccagaaggagagcaccctccaccttgttctccgcctcaggggaggcatgcagatcttcgtcaagaccctcactggaaagactatcaccctcgaggtggagtcttctgacaccatcgacaacgtcaaggccaagatccaagacaaggagggcatcccttcagaccagcagcggctcatt

SEQ ID NO: 342340 - DNA, 447 bp, Zea mays
gagaccaactagcaacatagaaagcacaatagtgtaccaacaatggcagccaaaatattgggcttccttatgctccttggtctttctgcaagtgttgctaccgcaaccattttcccacaatgctcacaagctcctatagcttcccttcttcccccatacctctcaccagcggtgtcttcaatgtgtgaaaacccaattgttcaaccctacaggatccaacaggcaatcgcaacaggcatcttaccattatcacccttgttcctccaacaaccgtcagccctattacagcagttacctttggtccatttggtggcacaaaacatcagggcacaacaactacaacaacttgtgctagcaaaccttgctgcatactctcagcaacatcagtttcttccattcaaccaactggctgcattgaactctgctgcttatttgcaacaacaatta

SEQ ID NO: 342341 - DNA, 468 bp, Zea mays
gcaacatagaaagcacaatagtgtaccaacaatggcagccaaaatattttgcctccttatgctccttggtctttctgcaagtgctgctacggcgaccattttcccgaaatgctcgcaagctcctatagcttcccttcttcccccgtacctctcaccagcggtgtcttcggtatgtgaaaacccaattcttcaaccctacaggatccaacaggcaatcacagctggcatcttacctttatcacccttgttcctccaacaatcatcagccctattacatcagttacctttggtgcatttattggcacaaaacatcagggcacaacaactacaacaacttgtgctagcaaaccttgctgcctactctcagcaacagcagtttcttccattcaaccaactagctgcattgaactctgcttcttatttgcaacaacaacaactaccattcagccagctacctgctgcctaccc

SEQ ID NO: 342342 - DNA, 461 bp, Zea mays
ctgggtcttcagaccattagctttatctactccagagcgcagaagaacccgatcgacaccgtgagggtgttgctcgttgccctcgctctcctggctctcgctgcgagcgccacctccacgcatacaagcggcggctgcggctgccagccaccgccgccggttcatctaccgccgccggtgcatctgccacctccggttcacctgccacctccggtgcatctcccaccgccggtccacctgccgccgccggtccacctgccaccgccggtccatgtgccgccgccggttcatctgccgccgccaccatgccactaccctactcaaccgccccggcctcagcctcatccccagccacacccatgcccgtgccaacagccgcatccaagcccgtgccagctgcagggaacctgcggcgttggcagcaccccgatcctgggccagtgcgtcgagtttctgaggca

SEQ ID NO: 342343 - DNA, 463 bp, Zea mays
attttgagcattcagaaacacaccaagcgaagcacattagcaacaacctaacaacaatggctaccaagatattatccctccttgcgcttcttgcgctttttgcgagcgcaacaaatgcgttcattattccacaatgctcacttgctccaagttccattattacacagttcctcccaccagttacttcaatgggcttcgaacacccagctgtgcaagcctataggctacaacaagcaattgcggcgagcgtcttacaacaaccaatttcccagttgcaacaacaatccttggcacatctaacaatacaaaccatcgcaacgcaacagcaacaacaattcctaccagcactgagccacctagccatggtgaaccctgccgcctacttgcaacagcagttgcttgcatcaaacccacttgctctggcaaacgtagttgcaaaccagccacaacaacagctgcaaca

SEQ ID NO: 342344 - DNA, 453 bp, Zea mays
attgagaccaactagcaacatagaaagcacaatagtgtaccaacaatggcagccaaaatatgttgcctccttatgctccttggtctttctgcaagtgctgctacggcgaccattttcccgaaatgctcgcaagctcctatagcttcccttcttcccccgtacctctcaccagcggtgtcttcggtatgtgaaaacccaattcttcaaccctacaggatccaacaggcaatcacagctggcatcttacctttatcacccttgttcctccaacaatcatcagccctattacatcagttacctttggtgcatttattggcacaaaacatcagggcacaacaactacaacaacttgtgctagcaaaccttgctgcctactctcagcaacagcagtttcttccattcaaccaactagctgcattgaactctgcttcttatttgcaacaacaacaacta

SEQ ID NO: 342345 - DNA, 417 bp, Zea mays
gaccgcacgcgtacgattgacaccaactatcatcatataacgcacactatatcaccaacattaccacccaaattacgatttttacatacactccttggtttctcttaatcttctacaactccaacaatttacccaatattctcaaatgctcctataacttaatttccatctttacacatatcaccacaccaatcttttttatttgaaaccaacattcttctaccctattctatccaacatacaaatacatctactattacatctttaacatcctatttatctccatcacactatacaatcttaaacatacctcacattttatcctatttacttccacacaacatctactctcatcaactttataaaactaatttaacttaagtgtaacctactccactcattaacaatcattttttt

SEQ ID NO: 342346 - DNA, 159 bp, Zea mays
aagacgactcacgcctccggtactctccaacaacagctacaataagccgccgattttttaaaagacgcggacgtcacacaaaatctgccaccacgaccacactcctgaaaatatcccaagcagttcttatttttcttcatgcaacatacctcctaccat

SEQ ID NO: 342347 - DNA, 449 bp, Zea mays
caactagcaacatagaaagcacaatagtgtaccaacaatggcagccaaaatattttgcctcctgatgctccttggtctttctgcaagtgctgctacggcgaccattttcccgaaatgctcgcaagctcctatagcttcccttcttcccccgtacctctcaccagcggtgtcttcggtatgtgaaaacccaattcttcaaccctacaggatccaacaggcaatcacagctggcatcttacctttatcacccttgttcctccaacaatcatcagccctattacatcagttacctttggtgcatttattggcacaaaacatcagggcacaacaactacaacaacttgtgctagcaaaccttgctgcctactctcagcaacagcagtttcttccattcaaccaactagctgcattgaactctgcttcttaattgcaacaacaacaactaccat

SEQ ID NO: 342348 - DNA, 440 bp, Zea mays
  unsure (1)..(440): unsure at all n locations
gagcaacataaaaagcacaatactgcacctacaatggcagccaaaatattttgcctcgttgtgttcataggacgggcgggggtactgctacagcgaccattttcccacaatgctcacaagctcctatagcttcccttcttcccccgtacctttcaccagcggtgtcttcggtatgtgaaaacccaattcttcaaccctataggatccaacaggcaatcgcagctggcatcttacctttatcacccttgttcctccaacaatcatcagccctattacagcagttacctttggtgcatttatcggcacanaacatcatggcacaacaactacaacaacttgtgctagcaaaccttgctgcctactctcagcaacaacagtttctttcattcaaccaactagctgcattgaactttgcttctaattgcaacaacaacaactac

SEQ ID NO: 342349 - DNA, 448 bp, Zea mays
attgagaccaactagcaacatagaaagcacaatagtgtaccaacaatggcagccaaaatatggtgcctccttatgctccttggtctttctgcaagtgctgctacggcgaccattttcccgaaatgctcgcaagctcctatagcttcccttcttcccccgtacctctcaccagcggtgtcttcggtatgtgaaaacccaattcttcaaccctacaggatccaacaggcaatcacagctggcatcttacctttatcacccttgttcctccaacaatcatcagccctattacatcagttacctttggtgcatttattggcacaaaacatcagggcacaacaactacaacaacttgtgctagcaaaccttgcttgcctactctcatcaacagcagtttctatcattcaaccaactagctgcattgaactttgcttcttatttgcaacaacaa

SEQ ID NO: 342350 - DNA, 466 bp, Zea mays
agaaagtggaatccagtagcaacaatagagcaacaatggcgaccaagatattttccctccgtatgctccttgctctttctgcatgtgttgctaacgcgacaattttccctcaatgctcacaagctcctatagcttcccttcttcccccataccttccatcaatgatagcttcagtatgtgaaaacccagctcttcaaccctataggctccaacaagcaatcgcagcaagcaacatacctttatcacccttgtttcaacaatcgccagccctatctttggtgcagtcattggtacaaaccatcagggcacagcagctgcagcaactcgtgctacctgtgatcaaccaagtagctctggcaaacctttctccctactctcagcaacaacaatttcttccattcaaccaactgtctacattgaaccgtgctgctttattgcagcaacaactattaccattcagccagct

SEQ ID NO: 342351 - DNA, 463 bp, Zea mays
aacacaccaagcgaagcgcactagcaacaacctaacaacaatggctaccaagatattagccctgcttgcgcttcttgcccttttagtgagcgcaacaaatgcgttcattattccacagtgctcacttgctcctagtgccattattccacagttcctcccaccagttacttcaatgggcttcgaacatccagccgtgcaagcctacaggctacaactagcgcttgcggcgagcgtcttacaacaaccaattgcccaattgcaacaacaatccttggcacatctaaacctacaaaccatcgcaacgcaacagcaacaacagtttctgccatcactgagccacctagccgtggtgaaccctgtcgcctacttgcaacagcagctacttgcatccaacccacttgctctggcgaacgtagctgcataccagcaacaacaacgtctgcaacagtttatgccagcgctc

SEQ ID NO: 342352 - DNA, 434 bp, Zea mays
ctgccacctccggtgcatctcccaccgccggtccacctgccgccgccggtccacctgccaccggcggtccatgtgccgccgccggttcatctgccgccgccaccatgccactaccctactcaaccgccccggcctcagcctcatccccagccacacccatgcccgtgccaacagccgcatccaagcccgtgccagctgcagggaacctgcggcgttggcagcaccccgatcctgggccagtgcgtcgagtttctgaggcatcagtgcagcccgacggcgacgccctactgctcgcctcagtgccagtcgttgcggcagcagtgttgccagcagctcaggcaggtggagccgcagcaccggtaccaggcgatcttcggcttggtcctccagtccatcctgcagcagcagccgcaaagcggccaggtcgcggggct

SEQ ID NO: 342353 - DNA, 446 bp, Zea mays
attgagaccaacaagcaacatagaaagtggaatccagtagcaacaatagagcaacaatggggaccaatatattttccctccttatgctccttgctctttctacatgtgttgctaacgcgacaattttccctcaatgctcacaagctcctatagcttccctttttcccccataccttccatcaattatagcttcagtatgtgaaaacccagctcttcaaccatataggcttcaacaagcaatcgcagcaagcaacatacctttatcgcccttgttgtgtcaacaatcgccagccctatctttggtgcagtcattggtacaaaccatcagggcacaacagctgcagcaactcgtgctacctgtgatcaaccaagtagctctggcaaacctttctccctactctccgcaacaacaatttcttccattcaaccaactgtctacactgaac

SEQ ID NO: 342354 - DNA, 426 bp, Zea mays
  unsure (1)..(426): unsure at all n locations
accggnccggaanacccggggcggccgacgcgnccganaaacccaagccccaccgccgccgccaaggcgggcccgaccggcgcaacacccaccgggggcggcgccggcgggggggggggccgcnaccacagcccgccccacgagcgccgccagcagcaggaggagcagcggcagcggcacaagggcccggcccaggggcagcgcccgacgaccccagcggcggggacgcccacgcccaggggggccaagcagaagacgccaccggccgagaagcccgacccggacaaggagcccgagaggcgggccgacgcgaccaccaagccgcccgcgacagcgccggcccacaccggcaaggcggccgcgacagcagacggggagacgaccccgccgccgacgcccgcgggacagggagaggcggggaaacac

SEQ ID NO: 342355 - DNA, 459 bp, Zea mays
catcaatcatcattcatcttattagtataggcattaaatcaaatctgcaacatcaattatgtaggtccaaaaaccatgaagctggtgcttgtggttcttgctttcattgctttagtatcaagtgtttcttgtacacagacaggcggctgcagctgtggtcaacaacaaagccatgagcagcaacatcatccacaacaacatcatccacaaaaacaacaacatcaaccaccaccacaacatcaccagcagcagcaacaccaacaacaacaagttcacatgcaaccacaaaaacatcagcaacaacaagaagttcatgttcaacaacaacaacaacaaccgcagcaccaacaacaacaacaacaacagcaccaacaacaacatcaatgtgaatgccaacaacaacatcaccaacaatcacaaggccatgttcaacaacacgaacagagccatgagcaacac

SEQ ID NO: 342356 - DNA, 329 bp, Zea mays
ggtcttcagaccattagctttatctactccagagcgcagaagaacccgatcgacaccatgggggtgttgctcgatgccctcgctctcctggctctcgctgcgagcgccacctccacgcatacaagcggcggctgcggctgccagccaccgccgccggttcatctaccgccgccggtgcatctgccacctccggttcacctgccacctccggtgcatctcccaccgccggtccacctgccgtcgccggtccacctgccaccgtcggtccatgtgccgccgccggttcatctgccgccgccaccatgccactaccctactcaaccgccccg

SEQ ID NO: 342357 - DNA, 465 bp, Zea mays
  unsure (1)..(465): unsure at all n locations
gcgcttcagaccattanctttatctactccagagcgcagaagaacccgatcgacaccatgagggtggtgctcgttgccctcgctctcctggctctcgctgcgagcgccacctccacgcatacaagcggcggctgcggctgccagccaccgccgccggttcatctaccgccgccggtgcatctgccacctccggttcacctgccacctccggtgcatctcccaccgccggtccacctgccgccgccggtccacctgccaccgccggtccatgtgccgccgccggttcatctgccgccgccaccatgccactaccctactcaaccgccccggcctcagcctcatccccagccacacccatgcccgtgccaacagccgcatccaagcccgtgccagctgcagggaacctgcggcgttggcagcaccccgatcctgggccagtgcgtcgagtttctgaggcatcagtgc

SEQ ID NO: 342358 - DNA, 423 bp, Zea mays
accattacctttatctactccagagcgcagaagaacccgatcgacaccatgagggtgggggtggttgccctcgctgtcgtggctctcgctgcgagcgccacctccacgcatacaagcggcggctgcggctgccagccaccgccgccggttcatctaccgccgccggtgcatctgccacctccggttcacctgccaccttcggtgcatctcccaccgccggtccacctgccgccgccggtccacctgccaccgccggtccatgtgccgccgccgggtcatctgccgccgccaccatgccactaccctactcaaccgccccggcctcagtctcatccccagccacacccatgcccgtgccaacagccgcattcaagcccgtgctagctgcagggaacctgcggcggtggcagcacctcgatcctg

SEQ ID NO: 342359 - DNA, 459 bp, Zea mays
acggaccaactagcaacatataaagcacaatagtgtaccaacaatggcagtcaaaatatttgcgttccttatgctccttgggctgtctgcaagtgttgctaccgcaaccattttcccacaatgctcacaagctcctatagcttcccttcttcccccatacctctcaccagcggtgtcttcaatgtgtgaaaacccaattgttcaaccctacaggatccaacaggcaatcgcaacaggcatcttaccattatcacccttgttccttcaacaaccgtcagccctattacagcatttacctttggtccatttgtgtggcacaaaacatcatgtcacaacaactacaacaacttgtgctagcaaaccttgctgcatactcttagcaacatcagtttcttccattcaaccaactggctgcattgaactctgttgcttatttgtaacaacaattaccattcatcc

SEQ ID NO: 342360 - DNA, 462 bp, Zea mays
attgagaccaacaagcaacatagaaagtggaatccagtagcaacaatagagcaacaatggcgaccaagatattttccctccttatgctccttgctctttctgcatgtgttgctaacgcgacaattttccctcaatgctcacaagctcctatagcttcccttcttcccccataccttccatcaatgatagcttcagtatgtgaaaacccagctcttcaaccctataggctccaacaagcaatcgcagcaagcaacatacctttatcacccttgtttcaacaatcgccagccctatctttggtgcagtcattggtacaaaccatcagggcacagcagctgcagcaactcgtgctacctgtgatcaaccaagtagctctggcaaacctttctccctactctcagcaacaacaatttcttccattcaaccaactgtctacattgaaccgtgctgcttatttgcagc

SEQ ID NO: 342361 - DNA, 58 bp, Zea mays
attcataatacctagagagcatcctacaatataacaccataaatacgctcataaacct

SEQ ID NO: 342362 - DNA, 216 bp, Zea mays
ggtcttcagaccattagctttatctactccagagcgcagaagaacccgatcgacaccatgagggtgttgctcgttgccctcgctctcctggctctcgctgggagcgccacctccacgcatacaagcggcggctgctgctgccagccaccgccgccgggtcatctaccgtcgtcggtgcatctgccaccttcggttcaactgccacctcgggtgcat

SEQ ID NO: 342363 - DNA, 120 bp, Zea mays
gttcattcaggtcatagcgacactgacactgccaaccatggagatgctgcacatgggactcttcatcctcggtcaattactaaactagctagctagccgcgcctttactacatcacatag

SEQ ID NO: 342364 - DNA, 388 bp, Zea mays
atccagatcagcaaagcggcagtgcgtagagaggatcgtcgaacagaacagcatgaagatggtcatcgttctcgtcgtgtgcctggctctgtcagctgccagcgcctctgcaatgcagatgccctgcccctgcgcggggctgcagggcttgtacggcgctggcgccggcctgacgacgatgatgggcgccggcgggctgtacccctacgcggagtacctgaggcagccgcagtgcagcccgctggcggcggcgccctactacgccgggtgtgggcagacgagcgccatgtaccagccgctccggcaacagtgctgccagcagcagatgaggatgatggacgtgcagtccgtcgcgcagcagctgcagatgatgatgcagcttgagcgt

SEQ ID NO: 342365 - DNA, 410 bp, Zea mays
ctgggtcttcagaccattagctttatctactccagagcgcagaagaacccgatcgacaccatgagggtgttgctcgttgccctcgctctcctggctctagctgcgagcgccacctctacgcatacaagcggcggctgcggctgccagccaccgacgccggttcatctaccgccgccggtgcatctgccacctccggttcacctgccaccttcggtgcatttcccaccgacggtccacctgccggcgccggtccacctgtcaccgccggtccatgtgccgacgccggttcatctgccggcggcactcatgccactaccctactgaaccgtcccggcctcagcctgatgcccagccacacacatgcccgtgccaacagccgaatccaagcccgtgccagctgcagggaacct

SEQ ID NO: 342366 - DNA, 406 bp, Zea mays
ccccgtcatcgatctcgtttcaaatccatccatcctcgtttcctccgtcccgcaccatctcaaccccatggccaagatcaagatcgggatcaatgggttcggcaggatcggaaggctggtggccagggtggccctgcagagtgacgatgtcgagctcgtcgccgtgaacgaccccttcatcagcaccgactacatgacctacatgttcaagtacgacactgtgcacggacagtggaagcaccatgaagtcaaggtgaaggactccaaaacccttctctttggtgagaaggaggttgctgtgtttggctgcaggaaccctgaggagatcccgtggggttcggttggtgctgaatatgttgttgagtctactggtgttttcactgaccaggagaaggctgcagctcac

SEQ ID NO: 342367 - DNA, 372 bp, Zea mays
ggtcttcagaccattagctttatctactccagagcgcagaagaacccgatcgacaccatgagggtgttgctcgttgccctcgctctcctggctctcgctgcgagcgccacctccacgcatacaagcggcggctgcggctgccagccaccgccgccggttcatctaccgccgccggtgcatctgccacctccggttcacctgccacctccggtgcatctcccaccgccggtccacctgccgccgccggtccacctgccaccgccggtccatgtgccgccgccggttcatctgccgccgccaccatgccactaccctactcaaccggcccggcctcagcctcatccccagccacacccatgcccgtgccaacag

SEQ ID NO: 342368 - DNA, 383 bp, Zea mays
cattagctttatctactccagagcgcagaagaacccgatcgacaccatgagggtgttgctcgttgccctcgctctcctggctctcgctgcgagcgccacctccacgcatacaagcggcggctgcggctgccagccaccgccgccggttcatctaccgccgccggtgcatctgccacctccggttcacctgccacctccggtgcatctcccaccgccggtccacctgccgccgccggtccacctgccaccgccggtccatgtgccgccgccggttcatctgccgccgccaccatgccactaccctactcaaccgccccggcctcagcctcatccccagccacacccatgcccgtgccaacagccgcatccaagcccgtgccagc

SEQ ID NO: 342369 - DNA, 424 bp, Zea mays
agaccattagctttatctactccagagcgcagaagaacccgatcgacaccatgagggtgttgctcgttgccctcgctctcctggctctcgctgcgagcgccacctccacgcatacaagcggcggctgcggctgccagccaccgccgccggttcatctaccgccgccggtgcatctgccacctccggttcacctgccacctccggtgcatctcccaccgccggtccacctgccgccgccggtccacctgccaccgccggtccatgtgccgccgccggttcatctgccgccgccaccatgccactaccctactcaaccgccccggcctcagcctcatccccagccacacccatgcccgtgccaacagccgcatccaagcccgtgccagctgcagggaacctgcggcgttggcagcaccccgatcct

SEQ ID NO: 342370 - DNA, 372 bp, Zea mays
gggtcttcagaccattagctttatctactccagagcgcagaagaacccgatcgacaccatgagggtgttgctcgttgccctcgctctcctggctctcgctgcgagcgccacctccacgcatacaagcggcggctgcggctgccagccaccgccgccggttcatctaccgccgccggtgcatctgccacctccggttcacctgccacctccggtgcatctcccaccgccggtccacctgccgccgccggtccacctgccaccgccggtccatgtgccgccgccggttcatctgccgccgccaccatgccactaccctactcaaccgccccggcctcagcctcatccccagccacacccatgcccgtgccaaca

SEQ ID NO: 342371 - DNA, 421 bp, Zea mays
cagaaacacaccaagcgaagcgcactagcaacaacctaacaacaatggctaccaagatattagccctccttgcgcttcttgcccttttagtgagcgcaacaaatgcgttcattattccacagtgctcacttgctcctagtgccattattccacagttcctcccaccagttacttcaatgggcttcgaacatccagccgtgcaagcctacaggctacaactagcgcttgcggcgagcgtcttacaacaaccaattgcccaattgcaacaacaatccttggcacatctaaacctacaaaccatcgcaacgcaacagcaacaacagtttctgccatcactgagccacctagccgtggtgaaccctgtcgcctacttgcaacagcagctacttgcatccaacccacttgctctggcgaacgtagc

SEQ ID NO: 342372 - DNA, 416 bp, Zea mays
atttagaccaactagcaacatagaaagcacaatagtgtaccaacaatggcagccaaaatattttgcctccttatgctccttggtatttctgcaagtgctgctacggcgaccattttcccgcaatgctcacaagctcctatagcttcccttcttcccccgtacctctcaccagcggtgtcttcggtatgtgaaaacccaattcttcaaccctacaggatccaacaggcaatcgcagctggcatcttacctttatcacccttgttcctccaacaatcatcagccctattacagcagttacctttggtgcatttattggcacaaaacattagggcacaacaactacaacaacttgtgctatcaaaccttgcttgctactcttaacaacagcagtttcttccattcaaccaactagctgc

SEQ ID NO: 342373 - DNA, 322 bp, Zea mays
cacacgcgtacgtagaccaactgctgaatgcacaacaaaccgcacaacaacccgagggagacgatgagggcgctggttgttgtggttgttgttgtgagtgtcacttcgagccctacatgcaggcattcgagctgccagtgacggtggcaggcacatctaccggctcatgtacatccgccagctcatgtgcaacttccagctcaggtgcctcttccagcgcatgtccaaccgccggcgcacgtgcagctgccagtgcacgtgcatgtgccggtgcatgtgcatctgccggctcatctatggcagtaaccatgtcaatagccta

SEQ ID NO: 342374 - DNA, 411 bp, Zea mays
attcagaaacacaccaagcgaagcgcactagcaacaacctaacaacaatggctaccaagatattatccctccttgcgcttcttgcgctttttgcgagcgcaacaaatgcgtccattattccacaatgctcacttgctcctagttccattattccacagttactcccaccagttacttcaatggccttcgaacacccagctgtgcaagcctatacgctacaacaagcgattgcggtgagcgtcttacaacaaccaattgcccaattgcaacaacaatccttgtcacatctaacaatacaaaccatcgcaacgcaacagcaacaacagttactaccagcactgagccacctagccatggtgaaccctgacgcctacttgcaacagcagctgcttgcattcaactcacttgctc

SEQ ID NO: 342375 - DNA, 403 bp, Zea mays
gaaagcacaatagtgtaccaacaatggcagccaaaatattttgcctccttatgctccttggtctttctgcaagtgctgctacggcgaccattttcccacaatgctcacaagctcctatagcttcccttcttcccccgtacctctcaccagcggtgtcttcggtatgtgaaaacccaattcttcaaccctataggatccaacaggcaatcgcagctggcatcttacctttatcacccttgttcctccaacaatcatcagccctattacagcagttacctttggtgcatttattggcacaaaacatcagggcacaacaactacaacaacttgtgctagcaaaccttgctgcctactctcagcaacaacagtttcttccattcaaccaactagctgcattgaactc

SEQ ID NO: 342376 - DNA, 424 bp, Zea mays
cccacgcgtccgcccacgcgtccgcccacgcgtccgaacaggcaatcgcagctggcatcttacctttatcacccttgttcctccaacaatcatcagccctattacagcagttacctttggtgcatttattggcacaaaacatcagggcacaacaactacaacaacttgtgctagcaaaccttgctgcctactctcagcaacaacagtttcttccattcaaccaactagctgcattgaactctgcttcttatttgcaacaacaacaactaccattcagccagctatctgctgcctacccccagcaatttcttccattcaaccaactgacagctttgaactctcctgcttatttacagcagcaacaactactaccattcagccagctagctggtgtgagccctgctaccttcttgacacaaccaca

SEQ ID NO: 342377 - DNA, 412 bp, Zea mays
caacaacaaagccatgagcagcaacatcatccacaacaacatcatccacaaaaacaacaacatcaaccaccaccacaacatcaccagcagcagcaacaccaacaacaacaagttcacatgcaaccacaaaaacatcagcaacaacaagaagttcatgttcaacaacaacaacaacaaccgcagcaccaacaacaacaacaacaacagcaccaacaacaacatcaatgtgaaggccaacaacaacatcaccaacaatcacaaggccatgtgcaacaacacgaacagagccatgagcaacaccaaggacagagccatgagcaacaacatcaacaacaattccagggtcatgacaagcagcaacaaccacaacagcctcagcaatatcagcaggggccagaaaaatcacaacagc

SEQ ID NO: 342378 - DNA, 393 bp, Zea mays
  unsure (1)..(393): unsure at all n locations
attttgagcattcagaaacacaccaagcgaagcgcactagcaacgacctaacaacaatggctaccaagatattagccctccttgcgcttcttgccctttttgtgagcgcaacaaatgcgttcattattccacaatgctcacttgctcctagtgccattattccacagttcctcccaccagttacttcaatgggcttcgaacacctagctgtgcaagccaacatgcaacaacaagcgcttgcggcgagcgtcttacaacaaccaattgcccaattgcaacaacaatccttgccacatctaacaatacaagccatcacaacgcaacagcaacaacagttcctaccagcactgagccacctagccatggtgaaccctgccgnctacttgcaagagc

SEQ ID NO: 342379 - DNA, 394 bp, Zea mays
gaccaactagcaacatagaaagcacaatagtgtaccaacaatggcagccaaaatattttgcctccttatgctccttggtctttctgcaagtgctgctacggcgaccattttcccacaatgctcacaagctcctatagcttcccttcttcccccgtacctctcaccagcggcgtcttcggtatgtgaaaacccaattcttcaaccctataggatccaacaggcaatcgcagctggcatcttacctttatcacccttgttcctccaacaatcatcagccctattacagcagttacctttggtgcatttattggcacaaaacatcagggcacaacaactacaacaacttgtgctagcaaaccttgctgcctactctcagcaacaacagttttcttca

SEQ ID NO: 342380 - DNA, 401 bp, Zea mays
agcggcagtgcgtagagaggatcgtcgaacagaacagcatgaagatggtcatcgttctcgtcgtgtgcctggctctgtcagctgccagcgcctctgcaatgcagatgccctgcccctgcgcggggctgcagggcttgtacggcgctggcgccggcctgacgacgatgatgggcgccggcgggctgtacccctacgcggagtacctgaggcagccgcagtgcagcccgctggcggcggcgccctactacgccgggtgtgggcagacgagcgccatgtaccagccgctccggcaacagtgctgccagcagcagatgaggatgatggacgtgcagtccgtcgcgcagcagctgcagatgatgatgcagcttgagcgtgccgctgccgccagcagcagcctgtac

SEQ ID NO: 342381 - DNA, 223 bp, Zea mays
atcgacgtcagcctaagaggttcgtcatacactacagattggagaacgcgacaccacgaaggtgctgatcggctctgttactttcctggccctctctaatagcgctgccttgagtatgagcggcggttgagggtttgtaccacgatcgcttcatctataccaccattattatctgccgcctgctgtatatctgcccggagatcatgaggcagacgcattgcat

SEQ ID NO: 342382 - DNA, 316 bp, Zea mays
ggtcttcagaccattagctatatctactccagagcgcagaagaacccgatcgacaccatgagggtgttgctcgttgccctcgctctcctggctctcgctgggagcgccacctacacgcatacaagcggcggctgcggctgccaaccaccgtcgccggttcatctaccgacgccggtgcatctgccaccttcggttcagctgccaacttcggtgcatctaccaccgccggtccacctgacgccgccggaccacctgtcaccgtcggtccatgtgccgccgtcggtcatctgccgccgcaccatgccactaccctact

SEQ ID NO: 342383 - DNA, 375 bp, Zea mays
agcggcagtgcgtagagaggatcgtcgaacagaacagcatgaagatggtcatcgttcgggtcgtgtgcctggctctgtcagctgccagcgcctctgcaatgcagatgccctgcccctgcgcggggctgcagggcttgtacggcgctggcgccggcctgacgacgatgatgggcgccggcgggctgtacccctacgcggagtacctgaggcagccgcagtgcagcccgctggcggcggcgccctactacgccgggtgtgggcagacgagcgccatgtaccagccgctccggcaacagtgctgccagcagcaaatgaggatgatggacgtgcagtccgtcgcgcagcagctgcagatgatgatgcagcttgagcgtg

SEQ ID NO: 342384 - DNA, 55 bp, Zea mays
gttcattcagattatctctcacacctacacagccaaccataaccatgcctgccac

SEQ ID NO: 342385 - DNA, 134 bp, Zea mays
ggtcaagaaaccaataactacatctacctcaaagcgcagaaaaaaccgatcgacaccaggggggtgttgctcgtaggcatcattctcctggttcttgttaggaacgcgatcataacgtattcaaacggccactg

SEQ ID NO: 342386 - DNA, 451 bp, Zea mays
atttagaccaactagcaacatagaaagcacaatagtgtaccaacaatggcagccaaaatattttgcctccttatgctccttggtatttctgcaagtgctgctacggcgaccattttcccgcaatgctcacaagctcctatagcttcccttcttcccccgtacctctcaccagcggtgtcttcggtatgtgaaaacccaattcttcaaccctacaggatccaacaggcaatcgcagctggcatcttacctttatcacccttgttcctccaacaatcatcagccctattacagcagttacctttggtgcatttattggcacaaaacatcagggcacaacaactacaacaacttgtgctagcaaaccttgctgcctactctcagcaacagcagtttcttccattcaaccaactagctgcattgaactctgcttcttatttgcaacaacaacaac

SEQ ID NO: 342387 - DNA, 366 bp, Zea mays
  unsure (1)..(366): unsure at all n locations
cagaccattagctttatctactccagagcgcagaagaacccgatcgacaccatgagggtgttgctcgttgccctcgctctcctggctctcgctgcgagcgccacctccacgcatacaagcggcggctgcggctgccagccaccgccgccggttcatctaccgccgccggtgcatctgccacctgcggttcacctgccacctccggtgcatctcccaccgccggtccacctgccgccgccggtccacctgccaccgccggtgcatgtgccgccgccggttcatctgccgccgccaccatgccactaccctactcaaccgccccggactcagcctcatcncccagcacactcatgcccgtgccaacag

SEQ ID NO: 342388 - DNA, 347 bp, Zea mays
attcatattagttgtataggcaccaaatcaaatctgcaacattaattatctaactgcatataccatgttagccgtcgctggtggttctcgctttcattgctttagtatcaagtgtttcttgtactcagacaggcgtttgctgctgtggttaacaactaagccatgagcagcagctttatccactgcaacatacattcacaattacaacatcattgaccaccacggcaacattacctgcagtagtaactctatcaacatcaggtttacatgcatcctcagaaacatcagcaacagcaacattttgatgttcaattgcaacaacacctacctacttgttttgtcaaacc

SEQ ID NO: 342389 - DNA, 358 bp, Zea mays
attttgagcattcagaaacacaccaagcgaagcgcactagcaacgacctaacaacaatggctaccaagatattagccctccttgcgcttcttgccctttttgtgagcgcaacaaatgcgttcattattccacaatgctcacttgctcctagagccattattccacagttcctcccaccagttacttcaatgggcttcgaacacctagctgtgcaagccaacatgcaacaacaagcgcttgcggcgagcgtcttacaacaaccaattgcccaattgcaacaacaatccttgccacatgtaacaatacaagccatgacaacgcaacatgaacaacaagtactaccagcactgagccacct

SEQ ID NO: 342390 - DNA, 387 bp, Zea mays
gaccattagctttatctactccagagcgcagaagaacccgatcgacaccatgagggtgttgctcgttgccctcgctctcctggctctcgctgcgagcgccacctccacgcatacaagcggcggctgccgctgccagccaccgacgccggttcatctaccgccgccggtgcatctgccacctgcggttcacctgccacctccggtgcatctcccaccgacggtccacctgacgtcgccggtccacctgccaccgccggtccatgtgccgacgacggttcatctgccgccgccaccatgccactaccctactcaaccgccccgggctcagcctaatccacagccacacccatgcccgtgccaacagacgcatccaagcccgtgccagct

SEQ ID NO: 342391 - DNA, 162 bp, Zea mays
  unsure (1)..(162): unsure at all n locations
ggaaggaangggcgcgccgacccacgcctccgggccataagaccataaccgaaaggcactccagagcgcgtcgaaaccaacacgacgccaagggggattggtctggtgccgtgcctctctctgtcagatgccagagcctccagcttgcaacataccctgccg

SEQ ID NO: 342392 - DNA, 449 bp, Zea mays
cagcattcagaaacacaccaagcgaagcgcactaacaacaacctaacaacaatgggtaccaagatatttacccttcttgcgcttcttggccttttagtgagcgcaacaaaagcgttcattattccacagagctcacttgctcctagtgccattattccacagtttctcccaccagttacttcaatgggcttcgaacatacagccgtgcaagcctacaggctacaactagcgcttgcggcgagcgtcttacaacaaccaattgcccaattgcaacaacaatccttggcacatctaaacctacaaaccatcgcaacgcaacagcaacaacagtttctgccatcactgagccacctagccgtggtgaaccctgtcgactacttgcaacagcagctacttgcatccaacccacttgctctggcgaacgtagctgcataccagcaacaacaacg

SEQ ID NO: 342393 - DNA, 383 bp, Zea mays
gcccatcatcgatctcgtttcaaatccatccatcctcgtttcctccgtcccgcaccagctcaaccccatggccaagatcaagatcgggatcaatgggttcggcaggatcggaaggctggtggccagggtggccctgcagagtgacgatgtcgagctcgtcgccgtgaacgaccccttcatcagcaccgactacatgacctacatgttcaagtacgacactgtgcacggacagtggaagcaccatgaagtcaaggtgaaggactccaaaacccttctctttggtgagaaggaggttgctgtgtttggctgcaggaaccctgaggagatcccgtggggttcggttgttctgaatatgttgttgagtctactggtgttttcactga

SEQ ID NO: 342394 - DNA, 352 bp, Zea mays
cctcaatcatcattcatcttagtagggtttgctccaaatgggatctgcatcatctattacctaactccaaaaaccatgaagctggttcttgtcgtgtccgctgacaccgctatggcttcaactgctactgggacacagaccaacggctgctactcttgactgcaccacctccttgtgcggttacatcggatcacaacgacgtgatcagaacggacatctacatttacctccaccacggcatttcgagcgtgagcaactccaactgcgacttgtcgacatgcacccacacaaacatcagcaacaccaagtagttcatcgttccacaacgacaacaacaaccgcagcaccaaca

SEQ ID NO: 342395 - DNA, 244 bp, Zea mays
  unsure (1)..(244): unsure at all n locations
gaaacacaccaagcgaagcgcactagcaacgacctaacaacaatggctaccaagatattagccctccttgcgcttcttgccctttttgtgagcgcaacaaatgcgttcattattccacaatgctcacttgctcctagtgccattattccacagttcctcccaccagttacttcaatgggcttcgaacacctagctgtgcaagccaacatgcaacaacaagcgctngcggcgagcgtcttacaac

SEQ ID NO: 342396 - DNA, 447 bp, Zea mays
tagcaacatagaaagcacaatagtgtaccaacaatggcagccaaaatatcctgccttcttatgctccttggtatttctgcaagtgctgctacggcgaccattgtcccgcaatgctcacaagctcctatagctcaccttattaccccgtacctgtgaccagcggtgtcttcggtatgtgaaaacccaattcttgaaccctacacgatccaacaggcaatcgcagctggcatcttacctttatcacccttgttcctccaacaataatcagccctattacagcagttacctttggtgcatttattgtcacaaaacatcagggcacaacaactacaacaacttgtgctagcaaagcttgctgcctactcttagcaacagcagtttcttccattcaaccaactagctgcattgaactctgcttcttattcgcaacaacaacaactaccattc

SEQ ID NO: 342397 - DNA, 81 bp, Zea mays
ggatcacatcacacgccactcactctcgtggccctagcatcgataccagtaaggaggaaggaactccttgccattcatgca

SEQ ID NO: 342398 - DNA, 435 bp, Zea mays
gaccattagctttatctactccagagcgcagaagaacccgatcgacaccatgagggggttgctcgttgccctcgctctcctggctctcgctgcgagcgccacctccacgcatacaagcggcggctgcggctgccagccaccgccgccggttcatctaccgccgccggtgcatctgccaccttcggttcacctgccacctccggtgcatctcccaccgccggtccacctgccgtcgccggtccacctgccaccgccgctccatgtgccgccggcggttcatctgtcgccgccaccatgccactaccctactcaaccggcccggcctgagcctgatccccagccacacccatgcccgtgccaacagtcgcatccaagcccgtgccagctgcagggaacctgctgcgttggcagcaccccgatcctgagccagcgcgt

SEQ ID NO: 342399 - DNA, 192 bp, Zea mays
ctgagactttataccattagctgtatctactccagagcgcaggagacccccatcggcaggatgagggtaatgctctatgcccccccacgcacggctctagctgcgagcgccacctacactcatacaaacatcggttgcggcttccattcaccgaatacctttcatatactgccccttaagcatctgccccct

SEQ ID NO: 342400 - DNA, 399 bp, Zea mays
gtgaaaacccaattcttcaaccctacaggatccaacaggcaatcgcagcaggcatcttacctttatcacccttgttcctccaacaaccgtcagccctattacagcagttacctttggtgcatttgttggcacaaaacatcaaggcacaacaactacaacaacttgtgctaggaaaccttgctgcctactctcagcaacagcagtttcttccattcaaccaactggctgcattgaactctgctgcttatttgcaacaacaactaccattcagtcagctagctgctgcctacccccagcaatttcttccattcaaccaactggcagcattgaactctgctgcttatttacaacagcaacagctaccaccatttcaccagctagctgatgtgagccctgttg

SEQ ID NO: 342401 - DNA, 155 bp, Zea mays
gacgtcaccctatcaattaactcatcgacttccgactggcaaactcgacacgcataatgcgctgatcgtctccttgctcacggcgtcgctctagcgccgacttcactcaagccgttggtgtggctgacacacaccagcgcatcatctaccgcctc

SEQ ID NO: 342402 - DNA, 334 bp, Zea mays
  unsure (1)..(334): unsure at all n locations
caacatagaaagcacaatagtgtaccaacaatggcagccaaaatattttgcctccttatgctccttggtatttctgcaagtgctgctacggcgaccattttcccgcaatgctcacaagctcctatagcttcccttcttcccccgtacctctcaccagcggtgtcttcggtatgtgaaaacccaattcttcaaccctacaggatccaacaggcaatcgcagctggcatcttacctttatcacccttgttcctccaacaatcatcagccctattacagcagttacctttggtgcatttattggcacaaaacatcanggcacaacaactacaacaac

SEQ ID NO: 342403 - DNA, 274 bp, Zea mays
cttgtgcagccgcccccccctctctctaggcttggaggacgcccctcgcactcctgcacccatatgcagccgccaccccacctcccccatcaaaccctagccggcccctgctcaagctctactatccgaggtgccattctgctaccgctctgatctacctcgcgtttgtgcatctctccaactgcatttaggaggagggaagaagaacggtggaaagggggcggatatctaagcggtggacttctggatcgcaccaagggccatgccctaactt

SEQ ID NO: 342404 - DNA, 76 bp, Zea mays
atagaatgaacgttatctactccacataggatgggaagacgctcgacacccttatggtggtggttgttgccgtcag

SEQ ID NO: 342405 - DNA, 391 bp, Zea mays
tttcagcattcagaaacacaccaagcgaagcgcactagcaacaacctaacaacaatggctaccaagatattagccctccttgcgcttcttgcccttttagtgagcgcaacaaatgcgttcattattccacagtgctcacttgctcctagtgccattattccacagttcctcccaccagttacttcaatgggcttcgaacatccagccgtgcaagcctacaggctacaactagcgcttgcggcgagcgtattacaacaaccaattgcccaattgcaacaacaatccttggcacatctaaacctacaaaccatcgcaacgcaacagcaacaacagtttctgccatcactgatccacctagccgtggtgaaccctgtcgcctacttgcaacagc

SEQ ID NO: 342406 - DNA, 297 bp, Zea mays
gcgcacaccctcaccatgagcatctccattgcataatccaaacaccagaagaccccaaggggagtggccgtgggtgctgctcttgcccttctagtgagcggatcaccactcctacacaaacatacactgattactggctgacaactgcgatgattgcacacatctaccgactaatttacatctgccagcttagaataaacagccgagtaagctgacacgttaaaagtatctcctactgccagcgcatgtaaacctgccagtgcacattcgtaacaacgatcctgtgcacatgtcaac

SEQ ID NO: 342407 - DNA, 404 bp, Zea mays
ctgggtcttcagaccattagctttatctactccagagcgcagaacaacccgatcgacaccatgagggtgttgctcgttgccctcgctctcctggctctcgctgcgagcgccacctccacgcatacaagcggcggctgcggctgccagccaccgccgccggttcatctaccgccgccggtgcatctgccacctgcggttcacctgccacctgcggtgcatctcccaccgccggtccacctgccgccgccggtccacctgccacacgcggtccatgtgccggcgccggttcatctgccgccgccaccatgccactaccctactcaaccgccccggcctgagcctcatccccagccacacccatgcccgtgccaacagccgcatccaagcccgtgccagctgcaagg

SEQ ID NO: 342408 - DNA, 195 bp, Zea mays
gtgtacgactagacagtggctgctatcttcacgcgcgagcatactgccgctataggggcggtatgaattgcctgcgaatcgcggtctaagcacactatggaaggatcttcctccatacttcctaatttcggacagaagagatgcacttccttgcatcaagttatgtacatacgcggttttgtgtatatctggttt

SEQ ID NO: 342409 - DNA, 348 bp, Zea mays
  unsure (1)..(348): unsure at all n locations
gggaaggaangggncgaccgacgcatgcgttcggtcttcagaccattagctttatctactccagagcgcagaacaacccgatcgacaccgggggggtgttgctcgttgccctcgctctcctggctctcgctgcgagcgccacctacacgcatacaagcggcggctgcggctgccagccaccgtcgccggttcatctaccgccgccggtgcatctgccacctgcggttcacctgccacctccggtgcatctcccaccgccggtccacctgccggcggcggtccacctgctacggtcggtccatgcgccagcatcggtccatctgtcgccggcaccatgccactacccta

SEQ ID NO: 342410 - DNA, 443 bp, Zea mays
ctgtaaataagcaggagagttcaatgctgccattcagccagctagctggtgtgagccctgctaccttcttgatacaaccacagttgttgccgttctaccagcacgctgcgcctaacgctggcaccctcttacaactgcaacaattgctgccattcaaccaacttgctttgacaaacccagcagcgttctaccaacaacccatcattggtggtgccctcttttagatttcttatgagttatagttcaataataaagttttttgtctgatgtttgtggcttcccagaaataagaaagtacatttctaaaaaaaaaaataaaaaaaaaaaaaatattataaaaaaaattttttttataaatttattttatttatattttttttattaatttttaattaatttatattttttttttttataaaatttttaattattttttttttttt

SEQ ID NO: 342411 - DNA, 372 bp, Zea mays
gggtcttgcaaccattacctgcatctactccagagcgcacaagaacccgatcgacaccatggaggtgctgctcgttgccctcgctctcctggctctcgctgcgagcgccacctccacgcatacaagcggcggctgcggctgccagccaccgccgccggttcatctaccgccgccggtgcatctgccacctccggttcacctgccacctccggtgcatctcccaccgccggtccacctgccgccgccggtccacctgccaccgccggtccatgtgccgccgccggttcatctgccgccgccaccatgccactaccctactcaaccgccccgggctcagcctcatccccagccacacccatgcccgtgccaaca

SEQ ID NO: 342412 - DNA, 234 bp, Zea mays
ccaactacagtattcactacaaaccgcataacaacccgagggggaccattatggtcttgctcgttgcccctcctcttctgagtgtcacctttaggcctacattcagccaatcaatctgcctgtgcccgtgtcaggctcatctaccggttcatctacatctgccaactcatgttcaacctccacttcacctgcaacttccagcgcatgtccaactgtcggtgcaagtgcacctgc

SEQ ID NO: 342413 - DNA, 307 bp, Zea mays
  unsure (1)..(307): unsure at all n locations
ttcagcattcagaaacacaccaagcgaagcgcactagcaacaacctaacaacaatggctaccaagatattagccctccttgcgcttcttgcccttttagtgagcgcaacanatgcgttcattattccacagtgctcacttgctcctagtgccattattccacagttcctcccaccagttacttcaatgggcttcgaccatcaagccgtgcaagcctacaggctacaactagcgcttgcggcgagcgtcttacaacaaccaattgcccaattgcaccaccattcctgggcacatttaaacctacaaac

SEQ ID NO: 342414 - DNA, 315 bp, Zea mays
gggaggaatggcgggacgaacgccgccgccgaccaatcgaccgcgcacgcgtgcgccgatacatacaaactgtcaactcgcgcgcgcgggatatcataattactcgcgcgtcttgcacaattttcattcgcagtacatgagttaactatggcgcatttattggcacacaagtatttacctaaattactttgactgctatgcatagctatattggctgtctactatcaaccacagcaggccctttcgttcaaccaaccaattgcattgaacgcctgtctttatctacttgcactacttctaccattaaaccaggca

SEQ ID NO: 342415 - DNA, 139 bp, Zea mays
ggctccaacagcaatcgcaacagcaacttacctttatcacccctgttctttcaacaatcgccagagctacttggtgtactggtgcacgagttgtgagctgtgtgcctgaggttgaccaatgctgcccaagatgggctgc

SEQ ID NO: 342416 - DNA, 74 bp, Zea mays
tgcttgatggatgatacgacccctcctgcagcgcatcattcaccgcggctgtggtggttactaccagcatgacc

SEQ ID NO: 342417 - DNA, 285 bp, Zea mays
  unsure (1)..(285): unsure at all n locations
gaaggaanaggccgggaccgacgcgtccgccgacgcctcctgcatcagcgcagccggacagtcacgccatagtgctagcctaagtgccaggggatgttgtaaccctgtgtgccagcaactcacacaagtggtgccacagcaccggccccaggcgcacttatggtcgcacctccagaccatactgcaacaacagccgcttagcctacacatccttgcgctgttggctgagcaaatagcgcatcttctgtcgagccaactacggactgtagaactctgcttcatacc

SEQ ID NO: 342418 - DNA, 246 bp, Zea mays
gttcactaagaacacaaagcgagccactgcacaacacacggggtgctattatcctcgcctctgcctatggagccacaatctgatattacatgctatactataggctattcaattctccacagtcttaatggctcaacacctacttgcagccacatccaacagccttgcgggcgttaacaccaatggcatgcacacaatctggcattacatacagcaccaccacacacacagtctacaccgaccact

SEQ ID NO: 342419 - DNA, 444 bp, Zea mays
gggtcttcagaccattagctttatctactccagagcgcagaagaacccgatcgacaccatgagggtgttgctcgttgccctcgctctcctggctctcgctgcgagcgccacctccacgcatacaagcggcggctgcggctgccagccaccgccgccggttcatctaccgccgccggtgcatctgccacctccggttcacctgccacctccggtgcatctcccaccgccggtccacctgccgccgccggtccacctgccaccgccggtccatgtgccgccgccggttcatctgccgccgccaccatgccactaccctactcaaccgccccggcctcagcctcatccccagccacacccatgcccgtgccaacagccgcatccaagcccgtgccagctgcagggaacctgcggcgttggcagcaccccgatcctgggccagtgcgt

SEQ ID NO: 342420 - DNA, 442 bp, Zea mays
gaaacacaccaagcgaagcgcactagcaacgacctaacaacaatggctaccaagatattagccctccttgcgcttcttgccctttttgtgagcgcaacaaatgcgttcattattccacaatgctcacttgctcctagtgccattattccacagttcctcccaccagttacttcaatgggcttcgaacacctagctgtgcaagccaacatgcaacaacaagcgcttgcggcgagcgtcttacaacaaccaattgcccaattgcaacaacaatccttgccacatctaacaatacaagccatcacaacgcaacagcaacaacagttcctaccagcactgagccacctagccatggtgaaccctgccgcctacttgcaagagcagctgcttgcatccaacccacttgctctggcgaacgtagttgcaaaccagctacaacaacagc

SEQ ID NO: 342421 - DNA, 308 bp, Zea mays
gggccacgccaccctaagcttgatagactccatatcacagaaaagcctcctcgacaacatgaggtgcatgctgcgagccctcgctctaaagcctctcggtggcagcgcaaccttcacacatacaaacgggggctgaggatgtcatacaccacaaccagatcaagaaccatcgcaggagcatatgaacacctaggtgcaattaccatcattgggtgcatcaacgaacgccgggacagctagagccgtctgtacacccgacatgaaatgtccatgtgtcacccacaggtcaatatacgccaccacaatgc

SEQ ID NO: 342422 - DNA, 346 bp, Zea mays
accaacaagcaacatagaaagtggaatacagtaccaacaatagagcaacaatggcggccaagatatttcccatccttatgctccttgctctttctgcatgtgttgctaacgcgaccatttttcctgaatactcacaagctcctatagctgcccttcttcccccataccttccatgaatgaccgattcagtatgtgaaaacccagtccttcaaccctacaggctccaacaagcaatcgcaacacgcaacttacctttatcacccctgttctttcaacaatcgacagtcctatctatggcgcagccattggtacaaaccatcatggcacaactgatgcagctactcgt

SEQ ID NO: 342423 - DNA, 76 bp, Zea mays
tccgtccacccgcctaaagctagagagacatatctcacattctctctcaccgcatcggtccaatctatagcaaggg

SEQ ID NO: 342424 - DNA, 375 bp, Zea mays
attttgagcattcataaacacaccaagcgaagcgcactagcaacgacctaacaacaatggctaccaagatattagccctccttgcgcttcttgccctttttgtgagcgcaacaaatgcgttcattattccacaatgctcacttgctcctagtgccattattccacagttcctcccaccagttacttcaatgggcttcgaacacctagctgtgcaagccaacatgcaacaacaagcgcttgcggcgagcgttttacaacaaccaattgcccaattgcaacaacaatccttgccacatctaacaatacaagccatcacaacgcaacagcaacaacagttcctaccatgcactgaaccacctagccatggtgaaccct

SEQ ID NO: 342425 - DNA, 374 bp, Zea mays
agcggcagtgcgtagagaggatcgtcgaacagaacagcatgaagatggtcatcgttctcgtcgtgtgcctggctctgtcagctgccagcgcctctgcaatgcagatgccctgcccctgcgcggggctgcagggcttgtacggcgctggcgccggcctgacgacgatgatgggcgccggcgggctgtacccctacgcggagtacctgaggcagccgcagtgcagcccgctggcggcggcgccctactacgccgggtgtgggcagacgagcgccatgtaccagccgctccggcaacagtgctgccagcagcagatgaggatgatggacgtgcagtccgtcgcgcagcagctgcagatgatgatgcagcttgagcgt

SEQ ID NO: 342426 - DNA, 360 bp, Zea mays
  unsure (1)..(360): unsure at all n locations
gggtcttcagaccattagctttatctactccagagcgcagaagaacccgatcgacaccatgagggtgttgctcgttgccctcgctctcctggctctcgctgcgagcgccacctccacgcatacaagcggcggctgcggctgccagccaccgccgccggttcatctaccgccgccggtgcatctgccacctccggttcacctgccacctccggtgcatctcccaccgccggtccacctgccgccgccggtccacctgccaccgccggtccatgtgccgccgccggttcatctgccgccgccaccatgccactaccctactcaaccgccccggcctcagcctcatccncagccacacccatg

SEQ ID NO: 342427 - DNA, 440 bp, Zea mays
  unsure (1)..(440): unsure at all n locations
caagcaacatagaaagtggaatacagtagcaacaatagagcaacaatggcggccaagatattttccatccttatgctccttgctctttctgcatgtgttgctaacgcgaccatttttcctcaatactcacaagctcctatagctgcccttcttcccccataccttccatcaatgaccgcttcagtatgtgaaaacccagcccttcaaccctacaggctccaacaagcaatcgcaacaagcaacttacctttatcacccctgttctttcaacaatcgccagccctatctttggtgcagtcattggtacaaaccatcagggcacaacagctgcagcaactcgtgctaccagtgatcagccaagtagctctggcaaacctttctccctactctcagcaacaacaatntcttccattcaaccaactgtctacactgaaccctgc

SEQ ID NO: 342428 - DNA, 218 bp, Zea mays
tccgaaaacaatcacgctttgaacaaactggtttactcgatcttcatgatgtcgcagcgggggcggggtgactgcttcttgagagacccacggcgcctacaaaatcatcagccataaaaataagcgacaggatacgtacatttccccagtgaattaagtttctagattctataactataatgcctgctatatatcttacacatggatacattctacgt

SEQ ID NO: 342429 - DNA, 438 bp, Zea mays
  unsure (1)..(438): unsure at all n locations
ctagcaacatanaaagcacaatagtgtaccaacaatggcagccaaaatattttgcttcgttatgctccttggtcttgctgcaagtgttgctaccgcaaccattttcccacaatgctcacaagctcctatagcttcccttcttcccccatacctctcaccagcggtgtcttcaatgtgtgaaaacccaattgttcaaccctacaggatccaacaggcaatcgcaacaggcatcttaccattatcacccttgttcctccaacaaccgtcagccctattacagcagttacctttggtccatttggtggcacaaaacatcagggcacaacaactacaacaacttgtgctagcaaaccttgctgcatactctcagcaacatcagtttcttccattcaacccaactgctgcattgaactctgctgcttatttgcaacaacaatt

SEQ ID NO: 342430 - DNA, 192 bp, Zea mays
taataaccccccgacccacccacacgtccaaccataacatacatctactccaaagcacacaataacccgaacaacaacattagaggggcggtctataaaatagctttccctactttcacttaaatcaccacctctacacatacaaacaactcataaaactcacatccatctcaacctaatcatctaccatca

SEQ ID NO: 342431 - DNA, 367 bp, Zea mays
agcaaagcggcagtgcgtagagaggatcgtcgaacagaacagcatgaagatggtcatcgggctcgtcgtgtgcctggctctgtcagctgccagcgcctctgcaatgcagatgccctgcccctgcgcggggctgcagggcttgtacggcgctggcgccggcctgacgacgatgatgggcgccggcgggctgtacccctacgcggagtacctgaggcagccgcagtgcagcccgctggcggcggcgccctactacgccgggtgtgggcagacgagcgccatgtaccagccgctccggcaacagtgctgccagcagcagatgaggatgatggacgtgcagtccgtcgcgcagcaactgcagatgatgatg

SEQ ID NO: 342432 - DNA, 148 bp, Zea mays
agcaaatccacagtacataaataggatcatcaaacataacaacatgaatatcctcatgcggctctttatttacctggctctggcagctaccaacacctttacaatgcaaatcccctacccctccacaactctccatctctcgtactac

SEQ ID NO: 342433 - DNA, 385 bp, Zea mays
  unsure (1)..(385): unsure at all n locations
cagaaacacaccaagcgaagcgcactagcaacaacctaacaacaatggctaccaanatgtatccctccttgcgctgcttgcgctttttgcgaacgcaacaaatgcatccattattccacaatgctcacttgctcctagatccattattccacagttcctcccaccagttacttcaatggccttcgaacacccagctgtgcaagcctataagctacaacaagcgattgcggcgagcgtcttacaacaaccaattgcccaattgcaacaacaatccttggcacatctaacaatacaaaccatcgcaacgcaacagcaacaacagttcctaccatcactgagccacctagccatggtgaaccctgtcacctacttgcaacagcagctg

SEQ ID NO: 342434 - DNA, 439 bp, Zea mays
ggcacaacagctgcagcaactcgtgctaccagtgatcagccaagtagctctggcaaacgtttctccctactctcaggagcagcaatttcttccattcaaccaactgtctacactgaaccctgctgcttatttgcagcaacaacaactactaccattcagccagctagctactgcctactctcagcagcaacaatttcttccatttaaccaattcgccgcactgaacccctctgcttatttccagcagcaaatactactaccatttggccagctagctacaacaagccccgcttccttcttgacacaacaacaattgcttccgttctaccagcagtttgtggctaaccccgcaacccttttacaactgcaacagttgctgccctatgtccaacttgctttgacaaacccagcagccttctaccaacaacacatcattggc

SEQ ID NO: 342435 - DNA, 284 bp, Zea mays
  unsure (1)..(284): unsure at all n locations
acccaaacaaaccgcnaacccaaaaaaccacaccaactcctttttttcctccccccacaacaaacccccgcgcaattatataaaaaccaccctccccccaactaacaaaccaaactatataaccacaaccaccacaacatcacctacctaccccccaacaacattaacaattacctcctttctctcaccaaccacaactacaacttccaacaaacccccttcatcttcatcactaactttcatatctcccacaactacaaattccccaatcctcattctccaca

SEQ ID NO: 342436 - DNA, 375 bp, Zea mays
aacacaccaagcaaatcgcactattttttacctaacaacaatggctaccaccgtggtattcctacatgcgcttgttgcccttttaatgatcacaacaaatgcgttcattattccacagtgctcacttgctcctagtgccattattccacagttcctcccaccagttacttcaatgggcttcgaacatccagccgtgcaagcctacatgctacaactatcgcttgcagcgagcgtcttacaacaaccaattgcccaatttcaacaacaatccttggcacatctaaacctacaaaccatcttaacgcaacaacaacaacattttctgccatcacttagccacctagccctggtaaaccctgtctcctacttgcaaca

SEQ ID NO: 342437 - DNA, 73 bp, Zea mays
aaaatcaattcaacctccttctacaaacataccactgacaaaacatactcttaccccacccaaatcactcatc

SEQ ID NO: 342438 - DNA, 287 bp, Zea mays
acagtgctctcatctccttacaccgactccctctttctgccactagtatattgacaatggggcggcttcttttacacagggctacaatcttaatcaatctcaacctatccatccgtcctcttctcaccatctatatcacgacaacactttccccccgctccttgccaacatcaccctcaacatcatgcccttccagctcccgcccttccatccttatcatgtcctcgtgctcattaatgcacttttgatttaccacactcatgtgcactacctactgcataatccca

SEQ ID NO: 342439 - DNA, 134 bp, Zea mays
ataaacacaaccatctttcttcaatacttacaaacttctataacttccattcttcccacctactttctatcaattattatcttttactttataaccacctacctaactaaccctataacctcacacaaacaacc

SEQ ID NO: 342440 - DNA, 97 bp, Zea mays
aaaaaaaaaaaaaaaaaaaaaaaaaaaaaataaaaaaaaaaaaaaaaaaaaaaaaaagggagagaaaaaaaaaaaaaaaaaaagaaaaaaaaaaaag

SEQ ID NO: 342441 - DNA, 327 bp, Zea mays
  unsure (1)..(327): unsure at all n locations
aaggaangccccggccgacccacacgaacaagtctaaatcactagcaactcattctacattatccaagctcacgaactcttccatgcgacggcttatttctcttatagcgtcacctaaaaacactacacattcccctcaattacaacaacctcacatagcaaaccctctccccacacaccttacatcaatgatagctcaaccaccttaaaacacatctcttcaaccctataagctccaacaagcaatctcttccaaccacatacccatatcaaacttgtaataacaatcgccatccctatcttcattacacgcattgatacaaacca

SEQ ID NO: 342442 - DNA, 321 bp, Zea mays
  unsure (1)..(321): unsure at all n locations
aacaccacgcatcccatccaatcacanatcatctttatcttcaatacatacacattatcgcggggcttttcatcataaagatggtcatcctactcatcaagtccctggctctctcaactaccagctcctcttctatacaaattcccttcccctgcacgaatctgcatatcttttacagctctcactccaaccttacaactatgataatccccatccctctttacccctactacaaatacctaatccattctcatttcatcccactttctgatgctccctactactccccttattttcacactaacgccatttaccactctc

SEQ ID NO: 342443 - DNA, 324 bp, Zea mays
  unsure (1)..(324): unsure at all n locations
attttgagcattcanaaacacaccaagcgaagctcactagcaacgacctaacaacagtgggtgccaagatattagccctccttgcgcttcttgccctttttgtgagcgcaacaaatgcgttcattattccacaatgctcacttgctcctagtgccattattccacagttcctcccaccagttacttcaatgggcttcgaacacctagctgtgcaagccaacatgcaacaacaagcgcttgcggcgagcgtcttacaacaaccaattgcccaattgcaacaacaatccttgccacatctaacaatacangccattacaacgcaac

SEQ ID NO: 342444 - DNA, 353 bp, Zea mays
  unsure (1)..(353): unsure at all n locations
caagcaacatagaaagtggaatccagtagcaacaatagagcaacaatggagaccaaggtagtttccctccttatgctccttgctctttctacatgtgttgctaacgcgacaattttccctcaatgctcacaagctcctatagcttccctttttcccccataccttccatcaattatagcttcagtatgtgaaaacccagctcttcaaccatataggcttcaacaagcaatcgcagcaagcaacatacctttatcgcccttgttgtgtcaacaatcgccagccctatcttttgtgcagtcatttggacaaaccatcanggcacaacagctgcaacaactcgtgctacctgtgat

SEQ ID NO: 342445 - DNA, 442 bp, Zea mays
cagaaacacaccaagcgaagcgcactagcattgacctaacaacaatggctaccaagatattagccgtccttgcgcttcttgccctttttgtgagcgcaacaaatgcgttcattattccacaatgctcacttgctcctagtgccattattccacagttcctcccaccagttacttcaatgggcttcgaacacctagctgtgcaagccaacatgcaacaacaagcgcttgcggcgagcgtcttacaacaaccaattgcccaattgcaacaacaatccttgccacatctaacaatacaagccatcacaacgcaacagcaacaacagttcctaccagcactgagccacctagccatggtgaaccctgccgcctacttgcaagagcagctgcttgcatccaacccacttgctctggcgaacgtagttgcaaaccagcaacaacaaca

SEQ ID NO: 342446 - DNA, 450 bp, Zea mays
gcaacatagaaagtggaatccagtatcaactatagagcaacaatggcgaccaagagatttgccctccttatgctccttgctctttctgcatgtgttgctaacgcgacaattttccctcaatgctcacaagctcctatagcttcccttcttcccccataccttccatcaatgatagcttcagtatgtgaaaacccagctcttcaaccctataggctccaacaagcaatcgcagcaagcaacatacctttatcacccttgtttcaacaatcgccagccctatctttggtgcagtcattggtacaaaccatcagggcacagcagctgcagcaactcgtgctacctgtgatcaaccaagtagctctggcaaacctttctccctactctcagcaacaacaatttcttccattcaaccaactgtctacattgaaccgtgctgcttatttgcagcaa

SEQ ID NO: 342447 - DNA, 436 bp, Zea mays
gcaaagcggcagtgcgtagagaggatcgtctaacagaacagcatgaagatggtcatcgttctcgtcgtgtgcctggctctgtcagctgccagcgcctctgcaatgcagatgccctgcccctgcgcggggctgcagggcttgtacggcgctggcgccggcctgacgacgatgatgggcgccggcgggctgtacccctacgcggagtacctgaggcagccgcagtgcagcccgctggcggcggcgccctactacgccgggtgtgggcagacgagcgccatgtaccagccgctccggcaacagtgctgccagcagcagatgaggatgatggacgtgcagtccgtcgcgcagcagctgcagatgatgatgcagcttgagcgtgccgctgccgccagcagcagcctgtacgagccaactctgatgcagcagcagcagcagc

SEQ ID NO: 342448 - DNA, 303 bp, Zea mays
cagaccattagctttatctactccagagcgtagaagaacccgatcgacaccatgagggtggggctcgttgccctcgctctcctggctctcgctgcgagcgccacctccacgcatacaagcggcggctgcggctgccagccaccgccgccggttcatctaccgccgccggtgcatctgccacctccggttcacctgccacctccggtgcatctcccaccgccggtccacctgccgccgccggtccacctgccaccgccggtccatgtgccgccgccggttcatctgccgccgccaccatgccac

SEQ ID NO: 342449 - DNA, 400 bp, Zea mays
  unsure (1)..(400): unsure at all n locations
aagcgaancacattancatcaacctaacatttatggtttccaagatattatccctccttgggcttgttgcgctttttgcgagcgcaacaaatgcgttcattattccacaatgctcacttgctccaagttccattattacacagttcctcccaccagttacttcaatgggcttcgaacacccagctgtgcaagcctataggctacaacaagcaattgcggcgagcgtcttacaacaaccaatttcccagttgcaacaacaatccttggcacatctaacaatacaaaccatcgcaacgcaacagcaacaacaattcctaccagcactgagccacctagccatggtgaaccctgccgcctacttgcaacagcagttgcttgcatcaaacccacttgctctgca

SEQ ID NO: 342450 - DNA, 454 bp, Zea mays
ccaacaagcaacatagaaagtggattccattatcaacaatagagcaacaatggaggccaagatattttccctccttatgctccttgctctttctacatgtgttgctaacgcgacaattttccctcaatgctcacaagctcctatagcttccctttttcccccataccttccatcaattatagcttcagtatgtgaaaacccagctcttcaaccatataggcttcaacaagcaatcgcagcaagcaacatacctttatcgcccttgttgtgtcaacaatcgccagccctatctttggtgcagtcattggtacaaaccatcagggcacaacagctgcagcaactcgtgctacctgtgatcaaccaagtagctctggcaaacctttctccctactctccgcaacaacaattttttccattcaaccaactgtctacactgaaccctgctgcttatttg

SEQ ID NO: 342451 - DNA, 451 bp, Zea mays
  unsure (1)..(451): unsure at all n locations
tttgagcattcataaacacaccaagcgaagttcattagcaacaacctaacaacaatggctgcgaagatattatccctccttgcgcttcttgcgctttttgcgagcgcaacaaatgcgttcattattccacaatgctcacttgctccaagttccattattacacagttcctcccaccagttacttcaatgggcttcgaacacccagctgtgcaagcctataggctacaacaagcaattgcggcgagcgtcttacaacaaccaatttcccagttgcaacaacaatccttggcacatctaacaatacaaaccatcgcaacgcaacagcaacaacaattcctaccagcactgagccacctagccatggtgaaccctgccgcctacttgcaacagcagttgcttgcatcaaacccacttgcttctgcanacgtagtttgcaaccagccacaacaac

SEQ ID NO: 342452 - DNA, 385 bp, Zea mays
caacaagcaacatagaaagtggaattcagtttcaacaatagagcaacaatggcgaggaagatattttccctccttatgctccttgctctttctgcatgtgttgctaacgcgacaattttccctcaatgctcacaagctcctatagcttcccttcttcccccataccttccatcaatgatagcttcagtatgtgaaaacccagctcttcaaccctataggctccaacaagcaatcgcagcaagcaacatacctttatcacccttgtttcaacaatcgccagccctatctttggtgcagtcattggtacaaaccatcagggcacagcagctgcagcaactcgtgctacctgtgatcaaccaagtagctttggcaaacctttcttcct

SEQ ID NO: 342453 - DNA, 444 bp, Zea mays
gctcatcgactccagattggagaactcgacaccatgaaggtgctgatcgttgcccttgctgtcctggcgctcgctgcgagcgccgcctccagtacaagcggcggctgtggctgccagacaccaccgtttcatctaccgcctccgttctatatgccgcctccgttctatctgccgccgcagcagcagccgcagccatggcaataccccactcaaccaccgcagctaagcccgtgccagcagttcggatcctgcggcgtcggcagcgtcggcagcccgttcctgggccagtgcgtcgagttcctgaggcaccagtgcagcccggcggcgacgccctacggctcgccacagtgccaggcgctgcagcagcagtgctgccaccagatcaggcaggtggagccgctgcaccggtaccaggcgacatacggtgtggtcctgcagtccttc

SEQ ID NO: 342454 - DNA, 455 bp, Zea mays
tcgttttgagcattcagaaacacaccatgtcgatttacattagcaacaacctaacaacggtggcgaccaagatattatccctccttgcgcttcttgcgctttttgcgagcgcaacaaatgcgttcattattccacaatgctcacttgctccaagttccattattacacagttcctcccaccagttacttcaatgggcttcgaacacccagctgtgcaagcctataggctacaacaagcaattgcggcgagcgtcttacaacaaccaatttcccagttgcaacaacaatccttggcacatctaacaatacaaaccatcgcaacgcaacagcaacaacaattcctaccagcactgagccacctagccatggtgaaccctgccgcctacttgcaacagcagttgcttgcatcaaacccacttgctctggcaaacgtagttgcaaaccagccacaacaa

SEQ ID NO: 342455 - DNA, 402 bp, Zea mays
tttcagcattcagaaacacaccaagcgaagttcactagcaacaacctaacaacaatggctgccaagatattagccctccttgcgcttcttgcccttttagtgagcgcaacaaatgcgttcattattccacagtgctcacttgctcctagtgccattattccacagttcctcccaccagttacttcaatgggcttcgaacatccagccgtgcaagcctacaggctacaactagcgcttgcggcgagcgtcttacaacaaccaattgcccaattgcaacaacaatccttggcacatctaaacctacaaaccatcgcaacgcaacagcaacaacagtttctgccatcactgagccacctagccgtggtgaaccctgtcgcctacttgcaacagcagctacttgca

SEQ ID NO: 342456 - DNA, 428 bp, Zea mays
caattagctcatcgactccagattggagaattcgattccatgaaggtgctgatcgttgcccttgctctcctggcgctcgctgcgagcgccgcctccagtacaagcggcggctgtggctgccagacaccaccgtttcatctaccgcctccgttctatatgccgcctccgttctatctgccgccgcagcagcagccgcagccatggcaataccccactcaaccaccgcagctaagcccgtgccagcagttcggatcctgcggcgtcggcagcgtcggcagcccgttcctgggccagtgcgtcgagttcctgaggcaccagtgcagcccggcggcgacgccctacggctcgccacagtgccaggcgctgcaacagcagtgctgccaccagatcaggcaggtggagccgctgcaccggtaccaggcgacata

SEQ ID NO: 342457 - DNA, 336 bp, Zea mays
attgagaccaacaagcaacatagaaagtggaatccagtagcaacaatagagcaacaatggcgaccaagatattttccctccttatgctccttgctctttctgcatgtgttgctaacgcgacaattttccctcaatgctcacaagctcctatagcttcccttcttcccccataccttccatcaatgatagcttcagtatgtgaaaacccagctcttcaaccctataggctccaacaagcaatcgcagcaagcaacatacctttatcacccttgtttcaacaatcgccagccctatctttggtgcagtcattggtacaaaccatcagggcacagcagc

SEQ ID NO: 342458 - DNA, 210 bp, Zea mays
  unsure (1)..(210): unsure at all n locations
tttttcatttttttttccccttttacatctccancaaccnaacaacagggggtgccaggatattataactcagggcacaactttcgcattttgcaagcgcaacaaatgccttcataatttacacaaagctcactagctccaacatccatcattacacataatcctttcaccaattacttcaatgtgcgaagtacacccaatttgagcaaa

SEQ ID NO: 342459 - DNA, 383 bp, Zea mays
ggaaacccgggccgacccacgcgttcggtccctctggtcccacataaacatttcttttttaccgaaccacctgacgagctagggccagagcttgggagctgggacctgacacagccaccccggaatagcacgcacgatcggcaccctgccatgattaaagctaccagcgtgcctgatgcattttttctctgatgaagaaccatcgatcgattataaagcatcatttgtccattttgaccaattagtttccaggtcaaaaccaggcgattactttccagagtccagacccattcaaagctctccgccgtcctccttgctcctactcgggctacgacgctgcgccggtaggcacgaagcgttcgacgagtctctgcgcttcgacc

SEQ ID NO: 342460 - DNA, 451 bp, Zea mays
caacaagcaacatagaaagtggaatccagtttcaacaatagagcaacaatggcgaccaagatattttccctccttatgctccttgctctttctgcatgtgttgctaacgcgacaattttccctcaatgctcacaagctcctatagcttcccttcttcccccataccttccatcaatgatagcttcagtatgtgaaaacccagctcttcaaccctataggctccaacaagcaatcgcagcaagcaacatacctttatcacccttgtttcaacaatcgccagccctatctttggtgcagtcattggtacaaaccatcagggcacagcagctgcagcaactcgtgctacctgtgatcaaccaagtagctctggcaaacctttctccctactctcagcaacaacaatttcttccattcaaccaactgtctacattgaaccgtgctgcttatttgc

SEQ ID NO: 342461 - DNA, 352 bp, Zea mays
accaactagcaacatagaaagcacaatagtgtaccaacaatggcagccaaaatattttgcctccttatgctccttggtctttctgcaagtgctgctacggcgaccattttcccgcaatgctcgcaagctcctatagcttcccttcttcccccgtacctctcaccagcggtgtcttcggtatgtgaaaacccaattcttcaaccctacaggatccaacaggcaatcgcagctggcatcttacctttatcacccttgttcctccaacaatcatcagccctattacaacagttacctttggtgcatttattggcacaaaacatcagggcacaacaactacaacaacttgtgctag

SEQ ID NO: 342462 - DNA, 437 bp, Zea mays
aactagcaacatagaaagcacaatagtgtatcaacaatggcagccaaaatattttgcctccttatgctccttggtctttctgcaagtgctgctacggcgaccattttcccgaaatgctcgcaagctcctatagcttcccttcttcccccgtacctctcaccagcggtgtcttcggtatgtgaaaacccaattcttcaaccctacaggatccaacaggcaatcacagctggcatcttacctttatcacccttgttcctccaacaatcatcagccctattacatcagttacctttggtgcatttattggcacaaaacatcaaggcacaacaactacaacaacttgtgctagcaaaccttgctgcctactctcagcaacagcagtttcttccattcaaccaactagctgcattgaactctgcttcttatttgcaacaaca

SEQ ID NO: 342463 - DNA, 436 bp, Zea mays
gcaaagcggcagtgcgtagagaggatcgtcgaacagaacagcatgaagatggtcatcgttctcgtcgtgtgcctggctctgtcagctgccagcgcctctgcaatgcagatgccctgcccctgcgcggggctgcagggtttgtacggcgctggcgccggcctgacgacgatgatgggcgccggcgggctgtacccctacgcggagtacctgaggcagccgcagtgcagcccgctggcggcggcgccctactacgccgggtgtgggcagacgagcgccatgtaccagccgctccggcaacagtgctgccagcagcagatgaggatgatggacgtgcagtccgtcgcgcagcagctgcagatgatgatgcagcttgagcgtgccgctgccgccagcagcagcctgtacgagccagctctgatgcagcagcagcagcagc

SEQ ID NO: 342464 - DNA, 430 bp, Zea mays
caactagcaacatagaaagcacaattttgtttcaacaatggcagccaaaatattgggcctgcttatgctccttggtctttctgcaagtgctgctacggcgaccattttcccacaatgctcacaagctcctatagcttcccttcttcccccgtacctctcaccagcggtgtcttcggtatgtgaaaacccaattcttcaaccctataggatccaacaggcaatcgcagctggcatcttacctttatcacccttgttcctccaacaatcatcagccctattacagcagttacctttggtgcatttattggcacaaaacatcagggcacaacaactacaacaacttgtgctagcaaaccttgctgtctactctcaacaacaacagtttcttccattcaaccaactagctgcattgaactctgcttcttatttg

SEQ ID NO: 342465 - DNA, 452 bp, Zea mays
gctggcttctcctccccctcttaccaagtcttcttcgggttagggttacttagggttttgtggaggggcgatggcggcggctgatgtggagtaccgttgcttcgtcggcgggcttgcctgggccaccagcaacgagtcgctggagaatgccttcgcctcctacggcgagatcctcgactccaaggtcatcaccgaccgggagacggggaggtctcgcggcttcggcttcgttaccttctcctccgagaactccatgctcgacgctatcgagaacatgaacggcaaggagctcgacggccgtaacatcaccgttaaccaggcccagtcccgtggcggtggcggtggcggcggtggctacggcggcggtcgcggcggcggcggctatggtggcgggcgccgtgacggcggttattgcggcggtggcggctaccgcggtcggcgcgagggtggtg

SEQ ID NO: 342466 - DNA, 438 bp, Zea mays
cgcacacacacacaaccagatcttccccaattccacccgtcggcacctccgcttcaagatgcagatctttgtgaaaaccctgaccggcaagactatcaccctcgaggtggagtcgtctgacaccattgacaacgttaaggccaagatccaggacaaggagggcatccccccagaccagcagcggctcatcttcgctggcaaacagcttgaggacgggcgcacgcttgctgactacaacatccagaaggagagcaccctccaccttgtgctccgcctcaggggaggcatgcagatctttgtgaaaaccctgaccggcaagactatcaccctcgaggtggagtcctctgacaccattgacaacgtcaaggccaagatccaggacaaggagggcatcccttcagaccagcagcggctcatctttgctgggaagcagcttga

SEQ ID NO: 342467 - DNA, 405 bp, Zea mays
gcaacatagaaagtggaatccagtagcaacaatagagcaacaatggcgaccaagatattttccctccttatgctccttgctctttctgcatgtgttgctaacgcgacaattttccctcaatgctcacaagctcctatagcttcccttcttcccccataccttccatcaatgatagcttcagtatgtgaaaacccagctcttcaaccctataggctccaacaagcaatcgcagcaagcaacatacctttatcacccttgtttcaacaatcgccagccctatctttggtgcagtcattggtacaaaccatcaaggcacagcagctgcagcaactcgtgctacctgtgatcaaccaagtagctctggcaaacctttcttcctactctcagcaacaacaatttctttca

SEQ ID NO: 342468 - DNA, 386 bp, Zea mays
ggtcttcagaccattagctttatttactcctgagcgcagaagaacccgatcgacggcatgagggtgttgctcgttgccctcgctctcctggctctcgctgcgagcgccacctccacgcatacaagcggcggctgcggctgccagccaccgccgccggttcatctaccgccgccggtgcatctgccacctccggttcacctgccacctccggtgcatctcccaccgccggtccacctgccgccgccggtccacctgccaccgccggtccatgtgccgccgccggttcatctggcggcgccaccatgccgctaccctactgaaacgcccctgcctaaagctcatccccagccacacccatgcccgtgccaacagccgcattcaagccc

SEQ ID NO: 342469 - DNA, 213 bp, Zea mays
cggaccgacccacgctttttttttttttcttctcgacttccgttttgagttttgaacaaacacactgccagtcagggaaggtgtataattttactgctccttccaccaccacccacacctatccaaatggctgatgactttgacaaccaccaacgtattaatatttatcgccgcctttgacatttccaacctcgtatcaactaccacctactt

SEQ ID NO: 342470 - DNA, 413 bp, Zea mays
attatctttatctactccagagcgcagaatttcccgttcgacaccatgagggtgttgctcggtgccctcgctctcctggctctcgctgcgagcgccacctccacgcatacaagcggcggctgcggctgccagccaccgccgccggttcatctaccgccgccggtgcatctgccacctccggttcacctgccacctccggtgcatctcccaccgccggtccacctgccgccgccggtccacctgccaccgccggtccatgtgccgccgccggttcatctgccgccgccaccatgccactaccctactcaaccgccccggcctcagcctcatccccagccacacccatgcccgtgccaacagccgcattcaagcccgtgccagcttgaaggaacctggggggttggcaacacccc

SEQ ID NO: 342471 - DNA, 444 bp, Zea mays
ccaactagcaacatagaaagcacaattgtgttccaacaatggcagccaaaatattttgctggcttatgctccttggtctttctgcaagtgctgctaccgcaaccattttcccacaatgctcacaagctcctatagcttcctttcttcccccatacctctcaccagcggtgtcttcagtatgtgaaaacccaattcttcaaccctacaggatccaacaggcaatcgcagcaggcatcttacctttatcacccttgttcttccaccaccgcgaagccttataccagaagtaacttttgtggcattggtggcgccaaacaataaaggccaaacacttccaacacttgtgctaagaaaccttgctgcctactcttagcaacagcagtttctttcattcaaccaactggctgcattgaactctgctgcttatttgcaacaacaactacc

SEQ ID NO: 342472 - DNA, 445 bp, Zea mays
attttgagcattcagaaacacacttagcgtttctacctagcaacgacttaacaacaatggctaccaagatattagccctccttgcgcttcttgccctttttgtgagcgcaacaaatgcgttcattattccacaatgctcacttgctcctagtgccattataccacagttcctccgaccagttacttcaatgggcttcgaacacctagctgtgcaagcctacaggctacaacaagcgcttgcggcgagcgtcttacaacaaccaattaaccaattgcaacaacaatccttggcacatctaaccatacaaaccatcgcaacacaacagcaacaacagttcctaccagcactgagccaactagatgtggtgaaccctgtcgcctacttgcaacagcaagtgcttgcatccaacccacttgctctggcaaacgtagctgcataccaaca

SEQ ID NO: 342473 - DNA, 449 bp, Zea mays
cagcattcagaaacacaccaagcgaagcgcactagcaacaacctaacaacaatggctaccaagatattagccctccttgcgcttcttgcccttttagtgagcgcaacaaatgcgttcattattccacagtgctcacttgctcctagtgccattattccacagttcctcccaccagttacttcaatgggcttcgaacatccagccgtgcaagcctacaggctacaactagcgcttgcggcgagcgtcttacaacaaccaattgcccaattgcaacaacaatccttggcacatctaaacctacaaaccatcgcaacgcaacagcaacaacagtttctgccatcactgagccacctagccgtggtgaaccctgtcgcctacttgcaacagcagctacttgcatccaacccacttgctctggcgaacgtagctgcataccagcaacaacaacg

SEQ ID NO: 342474 - DNA, 349 bp, Zea mays
accacgcgtccgattttcagcattcagaaacacaccaagcgattcgcactatcaacaacctaacaacaatggcgaccaagatattagccctccttgcgcttcttgcccttttagtgagcgcaacaaatgcgttcattattccacagtgctcacttgctcctagtgccattattccacagttcctcccaccagttacttcaatgggcttcgaacatccagccgtgcaagcctacaggctacaactagcgcttgcggcgagcgtcttacaacaaccaattgcccaattgcaacaacaatccttgcacatctaaacctacataccatcgcaacgcaacagcaacaacagttt

SEQ ID NO: 342475 - DNA, 313 bp, Zea mays
cagaccattagctttatctactccagagcgcagaagaacccgatcgacaccatgagggtgttgctcgttgccctcgctctcctggctctcgctgcgagcgccacctccacgcatacaagcggcggctgcggctgccagccaccgccgccggttcatctaccgccgccggtgcatctgccacctccggttcacctgccacctccggtgcatctcccaccgccggtccacctgccgccgccggtccacctgccaccgccggtccatgtgccgccgccggttcatctgccgccgccaccatgccactaccctactc

SEQ ID NO: 342476 - DNA, 380 bp, Zea mays
gcaacatagaaagcacaatagtgtaccaacaatggcagccaaaatattttgcttccttatgctccttggtctttctgcaagtgctgctaccgcaaccattttcccacaatgctcacaagctcctatagcttcctttcttcccccatacctctcaccagcggtgtcttcagtatgtgaaaacccaattcttcaaccctacaggatccaacaggcaatcgcagcaggcatcttacctttatcacccttgttcctccaacaaccgtcagccctattacagcagttacctttggtgcatttgttggcacaaaacatcaaggcacaacaactacaacaacttgtgctaggaaaccttgctgcctactctcagcaacagcagtttc

SEQ ID NO: 342477 - DNA, 311 bp, Zea mays
agaccattagctttatctactccagagcgcagaagaacccgatcgacaccatgagggtggggctcgttgccctcgctctcctggctctcgctgcgagcgccacctccacgcatacaagcgggggctgcggctgccagccaccgacgccggttcatctaccgtcgccggtgcatatgccacctacggttcacctgccacctccggtgcatttcccaccgacggtccacctgccggcgccggtccacctgccaccgccggtccatgtgccgccgtcggttcatgtgccgtcgtcaccatgccactaccctact

SEQ ID NO: 342478 - DNA, 89 bp, Zea mays
atcacccaaacctctatcagctctccccactacatacttcaaactcctccttccaggagtggcttcttatacattatgcctctctactc

SEQ ID NO: 342479 - DNA, 412 bp, Zea mays
ttttgctcggaacgcacacaccgcccggtccccgatctccgatcccctcgtcgatccaaagaggcagatcttcgtcaagaccctcactggaaagactatcaccctcgaggtggagtcttctgacaccattgacaacgtcaaggccaagatccaggacaaggagggcatccccccggaccagcagcggctcatctttgctggcaagcagctcgaggacgggcgcacacttgccgactacaacatccagaaggagagcaccctccaccttgttctccgcctcaggggaggcatgcagatcttcgtcaagaccctcactggaaagactatcaccctcgaggtggagtcttctgacaccatcgacaacgtcaaggccaagatccaggacaaggagggcatccctccagaccagcag

SEQ ID NO: 342480 - DNA, 338 bp, Zea mays
cagaaacacaccaagcgaagcacattagcaacaacctaacaacaatggctaccaagatatgatccctccttgcgcttcttgcgctttttgcgagcgcaacaaatgcgttcattattccacaatgctcacttgctccaagttccattattacacagttcctcccaccagttacttcaatgggcttcgaacacccagctgtgcaagcctataggctacaacaagcaattgcggcgagcgtcttacaacaaccaatttcccagttgcaacaacaatccttggcacatctaacaatacaaaccatcgcaacgcaacagcaacaacaatttctaccagcactg

SEQ ID NO: 342481 - DNA, 239 bp, Zea mays
ctgggtcttcagaccattagctttatctactccagagcgcagaagaacccgatcgacaccgtgagggtgttgctcgttgccctcgctctcctggctctcgctgcgagcgccacctccacgcatacaagcggcggctgcggctgccagccaccgccgccggttcatctaccgccgccggtgcatctgccacctccggttcacctgccacctccggtgcatctcccaccgccggtccacct

SEQ ID NO: 342482 - DNA, 283 bp, Zea mays
accaactagcaacatagaaagcacaatagtgtaccaacaatggcagccaaaatattttgctgccttatgctccttggtctttctgcaagtgttgctaccgcaaccattttcccacaatgctcacaagctcctatagcttcccttcttcccccatacctctcaccagcggtgtcttcaatgtgtgaaaacccaattgttcaaccctacaggatccaacaggcaatcgcaacaggcatcttaccattatcacccttgttcctccaacaaccgtcagccctattac

SEQ ID NO: 342483 - DNA, 138 bp, Zea mays
ttagccaactaaatttataaaatggagtcgcgatacaccctatctataatcaccactttggatccataccattgctatctcacttacatgtgggaccacatgagtcaaggacatgaggcgccatgatatatatgtaaa

SEQ ID NO: 342484 - DNA, 374 bp, Zea mays
gttctagatcgcgagcggccgacctagaggatcatattttactcactcttgctaacacagctagggttataaaatggattcgtgagacaccctatctataaccaccactttacatccataccattactatcacacttacatgtggcacacacattagtcaatcacatgatcgcccatgatatatatgtaaagatagcaaatattaaagcactaaacctaattgccaacatcacaacaagctgattggcccatggcactcgcaatggcccacgccattacgctctttcttcttctacattacgcgtctcttaaaagaaacactacagggcgcattacattcaccccctttgggttaaatcggacacttgcataaa

SEQ ID NO: 342485 - DNA, 390 bp, Zea mays
agaccattagctttatctactccagagcgcagaagaacccgatcgacaccatgagggtggggctcgttgccctcgctctcctggctctcgctgcgagcgccacctccacgcatacaagcggcggctgcggctgccagccaccgccgccggttcatctaccgccgccggtgcatctgccacctccggttcacctgccacctccggtgcatctcccaccgccggtccacctgccgccgccggtccacctgccaccgccggtccatgtgccgccgccggttcatctgccgccgccaccatgccactaccctactcaaccgccccggcctcagcctcatccccagccacacccatgcccgtgccaacagccgcatccaagcccgtgccagctgc

SEQ ID NO: 342486 - DNA, 324 bp, Zea mays
gttctagatcgcgagcggccgcccttttttttttttttttttttttcttaaggtgtcgcttggaatcgtcacaccatatgaatgacacaccgtcacacccccgcactgttggctcacatcaacatgaacgaaacaaaaaaaaagagcttactactaccctggcccgacttttttttaaaaagagagagagagagaaaaggaactcaagagataagcaatcagcagcgctgctcatattctaacctatacataccggccggaaaccggcgagcgagcctgcggccggcgcggcgggggatcagaatcggctcagtccttgaagcc

SEQ ID NO: 342487 - DNA, 447 bp, Zea mays
  unsure (1)..(447): unsure at all n locations
tagcaacatagaaagcacaatagtgtaccaacaatggcagccaaaatattttgcctgcgttgtgctccttggtctttctgcaagtgctgctacggcgaccattttcccgaaatgctcgcaagctcctatagcttcccttcttcccccgtacctctcaccagcggtgtcttcggtatgtgaaaacccaattcttcaaccctacaggatccaacaggcaatcacagctggcatcttacctttatcacccttgttcctccaacaatcatcagccctattacatcagttacctttggtgcatttattggcacaaaacatcagggcacaacaactacaacaacttgtgctagcaaacctngctgcctactctcagcaacagcagtttcttccattcaaccaactaactgcattgaactctggtttttatttgcacaacaacaacttcccatt

SEQ ID NO: 342488 - DNA, 320 bp, Zea mays
ctgcattgaactctgctgcttatttgcaacaacaattaccattcagccagctagttgctgcctaccctcagcaatttcttccattcaaccaactagcagcattgaactctgctgcttatttacagcagcaacaactactaccattcagccagctagctgatgtgagccctgctgccttcttgacacaacaacagttgttgccgttctacctgcacgctatgcctaacgctggcaccctcttacaactgcaacaattgctgccattcaaccaacttgctttgacaaactcaacagtgttctaccaacaacccatcattggt

SEQ ID NO: 342489 - DNA, 372 bp, Zea mays
attatgagcattcacaaacacaccaagcgaagcacattagcaacaacctaacaacaatggcgtacgcaagatattatccctccttgcgcttcttgcgctttttgcgagcgcaacaaatgcgttcattattccacaatgctcacttgctccaagttacattattacacagttcctcccaccagttacttcaatgggcttcgaacacccagctgtgcaagcctataggctacaacaagcaattgcggcgagcgtcttacaacaaccaatttcccagttgcaacaacaatccttggcacatctaacaatacaaaccatcgcaacgcaacagcaacaaacaattcctaccagcactgagccacctagccatggtga

SEQ ID NO: 342490 - DNA, 233 bp, Zea mays
attatgaacattcaaaaacacaccaaacgtaagcatattatcaacaagctagcaccatttgggggagccaaattaacgttcgcggccctgctacctcatatctctagtatagcgtaacctaaatttaattcactggcctcactttcacaacgttccgataggaaaaaccttctcctaccccaacttaatatgctctcagaacatcccgctttccacacctatagtcataaaca

SEQ ID NO: 342491 - DNA, 106 bp, Zea mays
tcgtccacgcgtgatatattatttctccaatcgagcaacaccggcaacgaacaaatcgagcccggggagaggcaatgacacactcgcacgcgttgcacaccctaca

SEQ ID NO: 342492 - DNA, 89 bp, Zea mays
tacacccatgaaagaaatgacaacaatcgaccttcctagccaaccagatcatctactaccatggcgacaaatgatccttcttcgtgcca

SEQ ID NO: 342493 - DNA, 311 bp, Zea mays
cagaccattatctttatctactccagagcgcagaagaacccgatcgacaccatgagggtggggctcagagccctcgcggtcctggctctcgctccgagcgccacctccacgcatacaagcggcggctgcggctgccagccaccgccgacggttcatctaccgccgccggtgcatctgccaccttcggttcacctgccacctccggagcatctcccaccgccggtccacctgccgccgccggtccacctgccaccgccggtccatgtgccgcctccggttcatctgccgccgccaccatgccactaccctac

SEQ ID NO: 342494 - DNA, 76 bp, Zea mays
gccgccgccacaatgcaattaccttattaaaccgcccgggcttaagcttattcccaggcagaaccattcccgtggc

SEQ ID NO: 342495 - DNA, 306 bp, Zea mays
aagtggaattcagtagcaacaatagagcaacaatggcgaccaagatattttccctccttatgctccttgctctttctgcatgtgttgctaacgcgacaattttccctcaatgctcacaagctcctatagcttcccttcttcccccataccttccatcaatgatagcttcagtatgtgaaaacccagctcttcaaccctataggctccaacaagcaatcgcagcaagcaacatacctttatcacccttgtttcaacaatcgccagccctatctttggtgcagtcattggtacaaaccatcagggcac

SEQ ID NO: 342496 - DNA, 356 bp, Zea mays
aagcggaatccagtatcaacaatagagcaacaatggcgaccaacatattttccctccttaggctccttgctctttctgcatgtgttgctaacgcgacaattttccctcaatgctcacaagctcctatagcttcccttcttcccccataccttccatcaatgatagcttcagtatgtgaaaacccagctcttcaaccctataggctccaacaagcaatcgcagcaagcaacatacctttatcacccttgtttcaacaatcgccagccctatctttggtgcagtcattggtacaaaccatcatggcacagcagctgcagcaactcgtgctacctgtgatcaaccaagtagctctggca

SEQ ID NO: 342497 - DNA, 155 bp, Zea mays
aacaaatcacattctcaccttctaaactatgcaatcttttctacacacgaataccacgtggtaggtcttctatattgtcatgtatgttcaattcactgcccattgctcaacaacatttcgactgtgataacgctagccattcccaacttaattta

SEQ ID NO: 342498 - DNA, 54 bp, Zea mays
actagttctagatcgcgagcggacgaccttaacaaccccttaacaccctttgat

SEQ ID NO: 342499 - DNA, 324 bp, Zea mays
cagaaacacaccaagcgaagcacattagcaacaacctaacaacaatggctaccaagatatgagccctccttgcgcttcttgcgctttttgcgagcgcaacaaatgcgttcattattccacaatgctcacttgctccaagttccattattacacagttcctcccaccagttacttcaatgggcttcgaacacccagctgtgcaagcctataggctacaacaagcaattgcggcgagcgtcttacaacaaccaatttcccagttgcaacaacaatccttggcacatctaacaatacaaaccatcgcaacgcaacagcaacaacaat

SEQ ID NO: 342500 - DNA, 357 bp, Zea mays
attgagaccaactagcaacatagaaagcacaatagtgtaccaacaatggcagccaaaatatgttgcctccttatgctccttggtctttctgcaagtgctgctacggcgaccattttcccgaaatgctcgcaagctcctatagcttcccttcttcccccgtacctctcaccagcggtgtcttcggtatgtgaaaacccaattcttcaaccctacaggatccaacaggcaatcacagctggcatcttacctttatcacccttgttcctccaacaatcatcagccctattacatcagttacctttggtgcatttattggcacaaaacatcaaggcacaacaactacaacaacttgtgcta

SEQ ID NO: 342501 - DNA, 369 bp, Zea mays
agaccaactagcaacatagaaagcacaatagtgtaccaacaatggcagccaaaatagttgggctccttatgctccttggtctgtctgcaagtgctgctacggcgaccattttcccgaaatgctcgcaagctcctatagcttcccttcttcccccgtacctctcaccagcggtgtctttggtatgtgaaaacccaattcttcaaccctacaggatccaacaggcaatcacagctggcatcttacctttatcacccttgttcctgcaacaatcatcagccctattacatcagttacctttggtgcatatattggcacaaaacatcatggcacaacaactacaacaacttgtgcttgcaaactctgctgcct

SEQ ID NO: 342502 - DNA, 180 bp, Zea mays
ctacaagcagcatggaaagtgcaatccagtggcagcaatgaagcaacaatggagaccacgagatgctctctgcttaagctccacgctcgctatacatgtgctgatgacccgacaattattactgaatgctcacaagctcatatagctatggttgctgcaccagacctaccatcaatgata

SEQ ID NO: 342503 - DNA, 75 bp, Zea mays
atctaataaccaaagaaacctaaatcgcatcactccattccattacatatcaaatgatcgagtaggggtctgtgt

SEQ ID NO: 342504 - DNA, 324 bp, Zea mays
tttcttaacaatatcagccaaaatattctgcttccttatgctccttggtctttctgcaagtgttgggtaccgaaccaatttcgcacagtgctcacaagctcctatagcttcccttattcccccatacctctcaacagcggtgtcttcaatgtgtgaaaacccaattgttcaaccctacaggatccaacaggcaatcgcaacacgcattttaccattatcacccttgttcctccaacaaccgacagccctattacagcagttacctttggtccatttggtggcacaaaacaatatggcacaacaactacaacaacttgtgctagc

SEQ ID NO: 342505 - DNA, 346 bp, Zea mays
caacaatggcagccaaaatattttgcttccttatgctccttggtctttctgcaagtgttgctaccgcaaccattttcccacaatgctcacaagctcctatagcttcccttcttcccccatacctctcaccagcggtgtcttcaatgtgtgaaaacccaattgttcaaccctacaggatccaacaggcaatcgcaacaggcatcttaccattatcacccttgttcctccaacaaccgtcagccctattacagcagatacctttggtccatttggtggcacaaaacatcagggcacaacaactacaacaacttgtgctagcaaaccttgctgcatactctcagcaaca

SEQ ID NO: 342506 - DNA, 367 bp, Zea mays
caactagcaacatataaagcacaatagtgtaccaacaatggcagccaaaatatttcgcctcgttatgctccttggtctttctgcaagtgctgctacagcgaccattttcccacaatgctcacaagctcctatagcttcccttcttcccccgtacctctcaccagcggtgtcttcggtatgtgaaaacccaattcttcaaccctataggatccaacaggcaatcgcagctggcatcttacctctatcacccttgttcctccaacaatcatcagccctattacagcagttacctttggtgcatttattggcacaaaacatcatggcacaacaactacaacaacttgtgctagcaaaccttgctgcctac

SEQ ID NO: 342507 - DNA, 225 bp, Zea mays
tacgtaccactataaacagaacaagcacaatcctgcaccagcaaccgaagcataaagactgcgggtgcttatgctccttggtgtatgtgcaggtgctgctaccgctaccattcaacgactatgctcacacgatcctatagcttccttccttaacctgtcactatcaccaactgtgtcttcggaatgagacaaccctataccctaccctaccaatccaacatgcaa

SEQ ID NO: 342508 - DNA, 58 bp, Zea mays
gtattggtgaactacaaagaacagattctaatccaactccggcgtgcccaaacatttt

SEQ ID NO: 342509 - DNA, 341 bp, Zea mays
aaagcggcagtgcgtagagaggatcgtcgaacagaacagcatgaagatggtcatcgttctggtcgtgtgcctggctctgtcagctgccagcgcctctgcaatgcagatgccctgcccctgcgcggggctgcagggcttgtacggcgctggcgccggcctgacgacgatgatgggcgccggcgggctgtacccctacgcggagtacctgaggcagccgcagtgcagcccgctggcggcggcgccctactacgccgggtgtgggcagacgagcgccatgtaccagccgctccggcaacagtgctgccagcagcagatgaggatgatggacgtgcagtccgtcg

SEQ ID NO: 342510 - DNA, 265 bp, Zea mays
cttccacccactagcaaccatagaaggcacattagtgtaccaccaatggcagctaaaaaatttggcgtcctaagcctcctgggccttctggcagggcctgctacggcgaccattttcccacaatgctcacaagctcctatagcttcctttcttccccggtacctctcaccaacggtgtcttcggtatgtgaaaacccaattctataaccctacaggatccaacaggcaatcgcagctggcatcttacctatatcacccttgttcc

SEQ ID NO: 342511 - DNA, 323 bp, Zea mays
ctagcaacatagaaagcacaatagtgtaccaacaatggcagccaaaatattttgcttcctgatgctccttggtctttctgcaagtgttgctaccgcaaccattttcccacaatgctcacaagctcctatagcttcccttcttcccccatacctctcaccagcggtgtcttcaatgtgtgaaaacccaattgttcaaccctacaggatccaacaggcaatcgcaacaggcatcttaccattatcacccttgttcctccaacaaccgtcagccctattacagcagttacctttggtccatttggtggcacagaacatcagggcac

SEQ ID NO: 342512 - DNA, 61 bp, Zea mays
gtcatctacttacaacattagaagcaccattgcgtgacaacaatgggagcccaaacatttc

SEQ ID NO: 342513 - DNA, 416 bp, Zea mays
ggacgtcagcctagcaattagctcatcgactccagattggagaactcgacaccatgaaggtgctgatcgttgcccttgctctcctggcgctcgctgcgagcgccgcctccagtacaagcggcggctgtggctgccagacaccaccgtttcatctaccgcctccgttctatatgccgcctccgttctatctgccgccgcagcagcagccgcagccatggcaataccccactcaaccaccgcagctaagcccgtgccagcagttcggatcctgcggcgtcggcagcgtcggcagcccgttcctgggccagtgcgtcgagttcctgaggcaccagtgcagcccggcggcgacgccctacggctcgccacagtgccaggcgctgcagcagcagtgctgccaccagatcaggcaggtggag

SEQ ID NO: 342514 - DNA, 297 bp, Zea mays
agacggaagacatacatgcttatgtgcgtgcgctggcatattacccttaccgacaccctggggtaatggcaaggaatgctcgcattcctgtctcatgttaccaacaccttactcacagactacagctggcatgtgaggaatccagacaacgacgccgaaccatctatatgcctcctagcttctatctaccgcatgacatatgccatcaccggggcatgtctacacgacgtgtcaccagcttatggctgtccagataacatcgtcacatcatgtgcggacgccggtttataagctctt

SEQ ID NO: 342515 - DNA, 280 bp, Zea mays
atcccgtcgcatcccatcccactaccacccatctcgtcgtccgccgattcgatccggttctgccaacccaggggcagtgatggcgacgaagaggagcgtgggcaccctcggcgaggcggatctgaaggggaagaaggtgttcgtgcgcgccgacctcaacgtcccgctcgacgatgcccagaagatcaccgacgacacccgcatccgcgcctccgtccccaccatcaagttcctcctcgagaagggcgccaaggtcatcctcgccagccacctgggtcgt

SEQ ID NO: 342516 - DNA, 314 bp, Zea mays
ccgcactgaaccccgctgcttatttgcagcagcaaatactactaccatttagccagctagctgcagcaagccgtgcttccttcttgacacagcaacagttgctgcctttctaccagcagtttgcggctaaccccgcaaccctcttacaactacaacaattgttgccctttgtccaacttgctttgacaaacccagcagcctcctaccaacaacacatcattggtggtgccctcttttagattgcttattagttgtaattcaataataaagttttttggatgatgtatgtggccaaccagaaataagaagttaca

SEQ ID NO: 342517 - DNA, 329 bp, Zea mays
agcaacatagaaagcacaatagtgtaccaacaatggcagctaaaatattttgcctccttatgctccttggtctttctgcaagtgctgctacggcgaccattttcccacaatgctcacaagctcctatagcttcccttcttcccccgtacctctcaccaacggtgtcttcggtatgtgaaaacccaattcttcaaccctacaggatccaacaggcaatcgcagctggcatcttacctttatcacccttgttcctccaacaatcatcagccctattacagcagttacctttggtgcatttattggcacaaaacatcagggcacaacaacta

SEQ ID NO: 342518 - DNA, 235 bp, Zea mays
  unsure (1)..(235): unsure at all n locations
gtccatctcatcccgagcgccgaaatccaaacgcacaatgactttgccgtccccgcccccggcccccaccgtgtgcggtgtcctccccttctctgcctcgtgcgccggccggccttaccactcgtgccaccccgcgcgccgncgnctgtgcgtgcgcagctcaagggccagcccaccgggcatgcccaacaccagcaccaggccgacttcgctgccgccgcgccgactgcacgga

SEQ ID NO: 342519 - DNA, 111 bp, Zea mays
ccgacaagagactcactgccttccatcctgaaatcgaggagctcatctacagcgacgtcgaggactccgagcacaagttcgtgctgaaagacaagaagaagccgatcattt

SEQ ID NO: 342520 - DNA, 302 bp, Zea mays
  unsure (1)..(302): unsure at all n locations
ctagcaacatagaaagcacaatagtgtaccaacaatggcagctaaaatattttgcctccttatgctccttggtctttctgcaagtgctgctacngcgaccattttcccacaatgctcacaagctcctatagcttcccttcttcccccgtacctctcaccaacggtgtcttcggtatgtgaaaacccaattcttcaaccctacaggatccaacaggcaatcgcagctggcatcttacctttatcacccttgttcctccaacaatcatcagccctattacagcagttacctttggtgcatttat

SEQ ID NO: 342521 - DNA, 333 bp, Zea mays
tttcagcattcagaaacacaccaagcgaagcgcactagcaacaacctaacaacaatggctacgcaagatattagccctccttgcgcttcttgcccttttagtgagcgcaacaaatgcgttcattattccacagtgctcacttgctcctagtgccattattccacagttcctcccaccagttacttcaatgggcttcgaacattcagccgtgcaagcctacaggctacaactagcgcttgcggcgagcgtcttacaacaaccaattgcccaattgcaacaacaattcttggcacatctaaacctacaaaccattgcaacgcaacagcaacaaca

SEQ ID NO: 342522 - DNA, 247 bp, Zea mays
cagaaacacaccaagcgaagcgcactagcaacaacctaacaacaatggctaccaagatattagccctccttgcgcttcttgcgcttttttcgaaccccaccaaagccgtcattatttcacaatggtcacttgctcctagttccattattccacagttcctcccaccagttacttcaatggccttcgaacacccagctgtgcaagcctataggctacaacaagcgattgcggcgagcgtcttacaaca

SEQ ID NO: 342523 - DNA, 289 bp, Zea mays
attgagaccaactagcaacatagaaagcacaatagtgtaccaacaatggcagccaaaatatggggcctccttatgctccttggtctttctggaagtgctgctacggggaccattttcccgaaatgctcgcaagctcctatagcttccttttttcccccgtacctctcaccagcggtgtcttcggtatgtgaaaacccaattcttcaaccctacaggatccaacaggcaatcacagctggcatcttacctttatcacccttgttcctccaacaatcatcaggccctatta

SEQ ID NO: 342524 - DNA, 427 bp, Zea mays
gcaacatagaaagtggaatccagtagcaacaatagagcaacaatggcgaccaagatattttgcctccttatgctccttgctctttctgcatgtgttgctaacgcgacaattttccctcaatgctcacaagctcctatagcttcccttcttcccccataccttccatcaatgatagcttcagtatgtgaaaacccagctcttcaaccctataggctccaacaagcaatcgcagcaagcaacatacctttatcacccttgtttcaacaatcgccagccctatctttggtgcagtcattggtacaaaccatcagggcacagcagctgcagcaactcgtgctacctgtgatcaaccaagtagctctggcaaacctttctccctactctcagcaacaacaatttcttccattcaaccaactgtctacattga

SEQ ID NO: 342525 - DNA, 400 bp, Zea mays
  unsure (1)..(400): unsure at all n locations
aaaaaaaaaaaaaaaaaaaaaaaaaaaaaaaaaaaaaaaaaaaaaaaaaaaaaaaaaaaaaaagggaaaaaaaaaaaaaaaggaaaaaataaaaaaaaaaaaaaaaaaaaaaaaaaaaaaaaaaaaaaaaataattttttaaaaaaaaaaaaaaaaattaaatttaaaaaaaaataaatgggggggggttttaaaaaaaaaaaaattttatatggtttttttgatgagataattttttatttagggttgtgtaaattaaatttatttagggggtttttaaaaaatattaaaatttaaaaaaatgtgtgtatagaaaattaaaagttttaaaataaattatattttttaaaaattgtgttatattaaaaaatgagannaaaaatattttttaaaaaattta

SEQ ID NO: 342526 - DNA, 391 bp, Zea mays
gcggtgtcttcggtatgtgaaaacccaattcttcaaccctataggatccaacaggcaatcgcgagctggcatcttacctttatcacccttgttcctccaacaatcatcagccctattacagcagttacctttggtgcatttattggcacaaaacatcagggcacaacaactacaacaacttgtgctagcaaaccttgctgcctactctcagcaacaacagtttcttccattcaaccaactagctgcattgaactctgcttcttatttgcaacaacaacaactaccattcagccagctatctgctgcctacccccagcaatttcttccattcaaccaactgacagctttgaactctcctgcttatttacagcagcaacaactactaccattc

SEQ ID NO: 342527 - DNA, 239 bp, Zea mays
  unsure (1)..(239): unsure at all n locations
tctcatctcaacaagctctccgtaccatcgccatggaccccnccaccggcaactgttccttctctccgctgggcatcctaatcttcccattgctcgcgttcttccacatgctcccatgcctggaactctcggagcgtctggcttcgcggagccaccgcatgtccttcgtttncaccccattcaaacttgctccccttccgtcctagatccacgacctgcaccttttgccccttcccctt

SEQ ID NO: 342528 - DNA, 387 bp, Zea mays
ccaactagcaacatagaaagcacaatagtgtaccaacaatggcagccaaaatattttgcttgcttatgctccttggtctttctgcaagtgttgctaccgcaaccattttcccacaatgctcacaagctcctatagcttcccttcttcccccatacctctcaccagcggtgtcttcaatgtgtgaaaacccaattgttcaaccctacaggatccaacaggcaatcgcaacaggcatcttaccattatcacccttgttcctccaacaaccgtcagccctattacagcagttacctttggtccatttggtggcacaaaacatcagggcacaacaactacaacaacttgtgctagcaaaccttgctgcatactctcagcaacatcagtttc

SEQ ID NO: 342529 - DNA, 428 bp, Zea mays
  unsure (1)..(428): unsure at all n locations
aagcaacatagaaagtggaatccagtagcaacaatagagcaacaatggcgaccaagatattgtccctccttatgctccttgctctttctgcatgtgttgctaacgcgacaattttccctcaatgctcacaagctcctatagcttcccttcttcccccataccttccatcaatgatagcttcagtatgtgaaaacccagctcttcaaccctataggctccaacaagcaatcgcagcaagcaacatacctttatcacccttgtttcaacaatcgccagccctatctttggtgcagtcattggtacaaaccatcanggcacagcagctgcagcaactcgtgctacctgtgatcaaccaagtagctctggcaaacctttctccctactctcagcaacaacaatttcttccattcaaccaactgtctacattg

SEQ ID NO: 342530 - DNA, 402 bp, Zea mays
attttcagcattcagaaacacaccaagcgaagcgcactagcaacaacctaacaacaatggctgccaagatattagccctccttgcgcttcttgcccttttagtgagcgcaacaaatgcgttcattattccacagtgctcacttgctcctagtgccattattccacagttcctcccaccagttacttcaatgggcttcgaacatccagccgtgcaagcctacaggctacaactagcgcttgcggcgagcgtcttacaacaaccaattgcccaattgcaacaacaatccttggcacatctaaacctacaaaccatcgcaacgcaacagcaacaacagtttctgccatcactgagccacctagccgtggtgaaccctgtcgcctacttgcaacagcagctacttg

SEQ ID NO: 342531 - DNA, 414 bp, Zea mays
tagcaacatagaaagcacaatagtgtaccaacaatggcagccaaaatattttgcctccttgtgctccttggtctttctgcaagtgctgctacggcgaccattttcccacaatgctcacaagctcctatagcttcccttcttcccccgtacctctcaccagcggtgtcttcggtatgtgaaaacccaattcttcaaccctataggatccaacaggcaatcgcagctggcatcttacctttatcacccttgttcctccaacaatcatcagcgctattacagcagttacctttggtgcatttattggcacaaaacatcagggcacaacaactacaacaacttgtgctagcaaaccttgctgcctactctcagcaacaacagtttcttccattcaaccaactagctgcattgaactct

SEQ ID NO: 342532 - DNA, 426 bp, Zea mays
attgagaccaactagcaacatagaaagcacaatagtgtaccaacaatggcagccaaaatatggtgcctccttatgctccttggtctttctgcaagtgctgctacggcgaccattttcccacaatgctcacaagctcctatagcttcccttcttcccccgtacctctcaccagcggtgtcttcggtatgtgaaaacccaattcttcaaccctataggatccaacaggcaatcgcagctggcatcttacctttatcacccttgttcctccaacaatcatcagccctattacagcagttacctttggtgcatttattggcacaaaacatcatggcacaacaactacaacaacttgtgctagcaaaccttgctgcctactctcagcaacaacagtttcttccattcaaccaactagctgcattgaactct

SEQ ID NO: 342533 - DNA, 400 bp, Zea mays
tttcagcattcagaaacacaccaagcgaagcgcactagcaacaacctaacaacaatggctagcaagatattagccctccttgcgcttcttgcccttttagtgagcgcaacaaatgcgttcattattccacagtgctcacttgctcctagtgccattattccacagttcctcccaccagttacttcaatgggcttcgaacatccagccgtgcaagcctacaggctacaactagcgcttgcggcgagcgtcttacaacaaccaattgcccaattgcaacaacaatccttggcacatctaaacctacaaaccatcgcaacgcaacagcaacaacagtttctgccatcactgagccacctagccgtggtgaaccctgtcgcctacttgcaacaagagctacttg

SEQ ID NO: 342534 - DNA, 357 bp, Zea mays
gaccaacaagcaacatagaaagtggaatccagtagcaacaatagagcaacaatggcgaccaggatattttccctccttatgctccttgctctttctgcatgtgttgctaacgcgacaattttccctcaatgctcacaagctcctatagcttcccttctttccccataccttccatcaatgatagcttcagtatgtgaaaacccagctcttcaaccctataggctccaacaagcaatcgcagcaagcaacatacctttatcacccttgtttcaacaatcgccagccctatcttttgtgcagtcattggtacaaaccatcaaggcacagcaactgcagcaactcgtgctacctgtgatc

SEQ ID NO: 342535 - DNA, 448 bp, Zea mays
ccaactagcaacatagaaagcacaatagtgtaccaacaatggcagccaaaatattttgcctggttatgctccttggtctgtctgcaagtgctgctacggcgaccattttcccgaaatgctcgcaagctcctatagcttcccttcttcccccgtacctctcaccagcggtgtcttcggtatgtgaaaacccaattcttcaaccctacaggatccaacaggcaatcacagctggcatcttacctttatcacccttgttcctccaacaatcatcagccctattacatcagttacctttggtgcatttattggcacaaaacatcagggcacaacaactacaacaacttgtgctagcaaaccttgctgcctactctcagcaacagcagtttcttccattcaaccaactagctgcattgaactctgcttcttatttgcaacaacaacaactacc

SEQ ID NO: 342536 - DNA, 349 bp, Zea mays
  unsure (1)..(349): unsure at all n locations
attgagaccaactagcaacatagaaagcacaatagtgtaccaacaatggcagccaaaatatgttgcttccttatgctccttggtctttctgcaagtgttgctaccgcaaccattttcccacaatgctcacaagctcctatagcttcccttcttcccccatacctctcaccagcggtgtcttcaatgtgtgaaaacccaattgttcaaccctacaggatccaacaggcaatcgcaacaggcatcttaccattatcacccttgttcctccaacaaccgtcagccctattacagcagntacctttggtccattttgtggcacaaaacattaaggcacaacaactacaacaac

SEQ ID NO: 342537 - DNA, 295 bp, Zea mays
caactagcaacatagaaagcacactagtgtaccaacaatggcagccaaaatattttgcctgcttatgctccttggtctttctgcaagtgctgctacggcgaccattttcccacaatgctcgcaagctcctatagcttcccttcatcccccgtacctcttaccagcggtgtcttaagaatgtgaaaacccaattcttcaaccctacaggatccaacaggcaatcgcagctcgcatattacctttatcaccctagttcctgcaacaatcatcagacctattacaacaggtacctttg

SEQ ID NO: 342538 - DNA, 412 bp, Zea mays
attgagaccaactagcaacatataaagcacaatagtgtaccaacaatggcagccaaaatatgttgcttccttatgctccttggtctttctgcaagtgttgctaccgcaaccattttcccacaatgctcacaagctcctatagcttcccttcttcccccatacctctcaccagcggtgtcttcaatgtgtgaaaacccaattgttcaaccctacaggatccaacaggcaatcgcagcaggcatcttaccattatcacccttgttgctccaacaaccgtcagccctattacagcagttaccttaggtccatttggtggcacaaaacatcagggcacaacaactacaacaacttgtgctagcaaaccttgctgcatactctcagcaacatcaagttttttccattcaaccaactg

SEQ ID NO: 342539 - DNA, 448 bp, Zea mays
ctcacctgccacctccggtgcatctcccaccgccggtccacctgccgccgccggtccacctgccaccgccggtccatgtgccgccgccggttcatctgccgccgccaccatgccactaccctactcaaccgccccggcctcagcctcatccccagccacacccatgcccgtgccaacagccgcatccaagcccgtgccagctgcagggaacctgcggcgttggcagcaccccgatcctgggccagtgcgtcgagtttctgaggcatcagtgcagcccgacggcgacgccctactgctcgcctcagtgccagtcgttgcggcagcagtgttgccagccgcttaagccgggggagcccgaacaccggtaccaggcgatcttcggcttggtccttcagtccattctgcaacagcagccgcaaagcggtcaggtcgcggggctgttggcggc

SEQ ID NO: 342540 - DNA, 456 bp, Zea mays
atcagtaccatcaatcatcattcatcttagtagtataggcaccaaatcaaatctggaacatcaattatctaactccaaaaaccatgaagctggtgcttgtggttcttgctttcattgctttagtatcaagtgtttcttgtacacagacaggcggctgcagctgtggtcaacaacaaagccatgagcagcaacatcatccacaacaacatcatccacaaaaacaacaacatcaaccaccaccacaacatcaccagcagcagcaacaccaacaacaacatgttcacatgcaaccacataaacatcagcaacatcatgatgttcatgttcaacaacaacaacaacaaccgcagctccaacaacaacaacaacaacagcaccaacaacaacatcaatgtgaaggccaacaccaacttcaccaacaataacaaggccttgtgcaccaccacgaacagagcc

SEQ ID NO: 342541 - DNA, 350 bp, Zea mays
agaccattagctttatctactccagagcgcagaagaacccgatcgacaccatgagggtgttgctcgttgccctcgctctcctggctctcgctgcgagcgccacctccacgcatacaagcggcggctgcggctgccagccaccgccgccggttcatctaccgccgccggtgcatctgccacctccggttcacctgccacctccggtgcatctcccaccgccggtccacctgccgccgccggtccacctgccaccgccggtccatgtgccgccgccggttcatctgccgccgccaccatgccactaccctactcaaccgccccggcctcagcctcatccccagccacaccca

SEQ ID NO: 342542 - DNA, 197 bp, Zea mays
ctcaagcataccaagccacgtgcgctacgaccgacacagcaatgctggcaactgagctcttagaactccgcaaactaattgtcatatcactgagcgcaactgatccgtctatgatctaacaaagctcagatgctcctactgatatcattgaacctgtagggcgaactgttactttaatggtgattaggagatgcaca

SEQ ID NO: 342543 - DNA, 453 bp, Zea mays
gggtcttcagaccattagctttatctactccagagcgcagaagaacccgatcgacaccatgagggtgttgctcgttgccctcgctctcctggctctcgctgcgagcgccacctccacgcatacaagcggcggctgcggctgccagccaccgccgccggttcatctaccgccgccggtgcatctgccacctccggttcacctgccacctccggtgcatctcccaccgccggtccacctgccgccgccggtccacctgccaccgccggtccatgtgccgccgccggttcatctgccgccgccaccatgccactaccctactcaaccgccccggcctcagcctcatccccagccacacccatgcccgtgccaacagccgcatccaagcccgtgccagctgcagggaacctgcggcgtggcagcaccccgatcctgggccagtgcgtcgagtttctg

SEQ ID NO: 342544 - DNA, 382 bp, Zea mays
cagcaacatagaaagcacaatagtgtaccaacaatggcagccaaaatattttgcctccttatgctccttggtctttctgcaagtgctgctacggcgaccattttcccgcaatgctcgcaagctcctatagcttcccttcttcccccgtacctctcaccagcggtgtcttcggtatgtgaaaacccaattcttcaaccctacaggatccaacaggcaatcgcagctggcatcttacctttatcacccttgttcctccaacaatcatcagccctattacaacagttacctttggtgcatttattggcacaaaacattagggcacaacaactacaacaacttgtgctagcaaaccttgctgcctactctcagcaacagcagtttc

SEQ ID NO: 342545 - DNA, 231 bp, Zea mays
tttatattacaaggtgagcgtctgctgtatccgagccaaccttagcctccctggcatgccatggcttttctatagtgtcgtgtaacttcaattcaatgcactggccgctacatcacaacgtctggactgactctgccctggcgtaactcaactgcatcgtcttgcagctcattttcgtcacctgaggtgtcatcaaagagaacaggtccgttcgcacttcccatcagtaca

SEQ ID NO: 342546 - DNA, 445 bp, Zea mays
gaccattagctttatctactccagagcgcagaagaacccgatcgacaccatgagggtgttgctcgttgccctcgctctcctggctctcgctgcgagcgccacctccacgcatacaagcggcggctgcggctgccagccaccgccgccggttcatctaccgccgccggtgcatctgccacctccggttcacctgccacctccggtgcatctcccaccgccggtccacctgccgccgccggtccacctgccaccgccggtccatgtgccgccgccggttcatctgccgccgccaccatgccactaccctactcaaccgccccggcctcagcctcatccccagccacacccatgcccgtgccaacagccgcatccaagcccgtgccagctgcagggaacctgcggcgttggcagcaccccgatcctgggccagtgcgtcgagtttctg

SEQ ID NO: 342547 - DNA, 399 bp, Zea mays
ccaacaagcaacatagaaagtggaatccagtagcaacaatagagcaacaatggcgaccaagatattttccctccttatgctccttgctctttctgcatgtgttgctaacgcgacaattttccctcaatgctcacaagctcctatagcttcccttcttcccccataccttccatcaatgatagcttcagtatgtgaaaacccagctcttcaaccctataggctccaacaagcaatcgcagcaagcaacatacctttatcacccttgtttcaacaatcgccagccctatctttggtgcagtcattggtacaaaccatcagggcacagcagctgaagcaactcgtgctacctgtgatcaaccaagtagctctggcaaaccttttctcctactctcagcaaca

SEQ ID NO: 342548 - DNA, 353 bp, Zea mays
  unsure (1)..(353): unsure at all n locations
ccgccctttattttttttttttctttttatagtatacannattaattgactcttgtggttataggtgatcggtgcaatggggaccgacctaaattggatttaacccccaaaaaaaatcggtttcttttttataaaaaaaaagcccctttatttttgttgcccaggggcattttttgaaaaaaaagggttttttttttttgggggggggggacccccggaccccccccaaaaaaaggggcctacgggttttttttttttacaagacatttgggggaccacttcattacggagccggcgttggggttctcagaaataaaaatatgcggccccatggacttttttttgttcaagtg

SEQ ID NO: 342549 - DNA, 340 bp, Zea mays
attgagaccaactagcaacatagaaagcacaatattctaccaataatggcagccaggatattttgcctcattatgctccttggtctttctgcaagtgctgctacggcgagcattttcccgcaatgctcacaagctcctatagcttcccttcttcccccatacctctcaccagcgatgtcttcagtatgtgaaaatccaattcttctaccctacaggatccaacaggcaatcgcagcaggcatcttacctttatcacccttgttcctccaacaatcatcagccctattacagcagttacctttggtgcatttattggcacaaaacatcagggcacaacaac

SEQ ID NO: 342550 - DNA, 380 bp, Zea mays
ctgggtcttcagaccattagctttatctactccagagcgcagaagaacccgatcgacaccatgagggtgttgctcgttgccctcgctctcctggctctcgctgcgagcgccacctccacgcatacaagcggcggctgcggctgccagccaccgccgccggttcatctaccgccgccggtgcatctgccacctccggttcacctgccacctccggtgcatctcccaccgccggtccacctgccgccgccggtccacctgccaccgccggtccatgtgccgccgccggttcatctgccgccgccaccatgccactaccctactcaaccgccccggcctcagcctcatccccagccacacccatgcccgtgccaacagccgca

SEQ ID NO: 342551 - DNA, 449 bp, Zea mays
agcaacatagaaagcacaatagtgtaccaacaatggcagccaaaatattttgcctccttatgctccttggtctttctgcaagtgctgctacggcgaccattttcccgaaatgctcgcaagctcctatagcttcccttcttcccccgtacctctcaccagcggtgtcttcggtatgtgaaaacccaattcttcaaccctacaggatccaacaggcaatcacagctggcatcttacctttatcacccttgttcctccaacaatcatcagccctattacatcagttacctttggtgcatttattggcacaaaacatcagggcacaacaactacaacaacttgtgctagcaaaccttgctgcctactctcagcaacagcagtttcttccattcaaccaactagctgcattgaactctgcttcttatttgcaacaacaacaactaccattcagc

SEQ ID NO: 342552 - DNA, 424 bp, Zea mays
ctgggtcttcagaccattagctttatctactccagagcgcagaagaacccgatcgacaccatgagggtgttgctcgttgccctcgctctcctggctctcgctgcgagcgccacctccacgcatacaagcggcggctgcggctgccagccaccgccgccggttcatctaccgccgccggtgcatctgccacctccggttcacctgccacctccggtgcatctcccaccgccggtccacctgccgccgccggtccacctgccaccgccggtccatgtgccgccgccggttcatctgccgccgccaccatgccactaccctactcaaccgccccggcctcagcctcatcctcagccacacccatgcccgtgccaacagccgcattcaagcccgtgccagctgcagggaacctgctgcgttggcagca

SEQ ID NO: 342553 - DNA, 304 bp, Zea mays
gcgccaccttcacacatacaagcggcggctgcggcttgcagccaccgactgcggttcatctaccgccggcggtgcatctgccacctacggttcacctgccacctccggtgcatcttccaccgccggtccacctgccgccgccggtccacctgccaccgccggtccatgtgccgccgccggttcatatggcgccgccaccatgccactaccctactcaaccgccccggcctcagcctcattcccagccacacccatgcccgtgccaacagccgcatccaaacccgtgccagctgcagggaacctg

SEQ ID NO: 342554 - DNA, 437 bp, Zea mays
cttcctttcttcccccatacctctcaccagcggtgtcttcagtatgtgaaaacccgattcttgaaccctacaggatccaacaggcaatcgcagcaagcatcttacctttatcacccttgttcctccaacaaccgtcagccctattacagcagttacctttggtgcatttgttggcacaaaacatcaaggcacaacaactacaacaacttgtgctaggaaaccttgctgtctactctcagaacagcagtttcttcattcaccaactggctgcattgactctgctgctattttgcacaacaactaccattcagtcagctagctgctgcctacccccagcaatttcttccattcaaccaactggcagcattgaactctgctgcttatttacaacagcaacagctaccaccattcagccagctagctgatgtgaagccctg

SEQ ID NO: 342555 - DNA, 351 bp, Zea mays
  unsure (1)..(351): unsure at all n locations
tagcaacatagaaagcacaatagtgtaccaacaatggcagccaaaatattttgcgtgcttatgctccttggtctttgtgcaagtgttgctaccgcaaccattttcccacaatggctacaagctcctatagcttcccttctttccccatacctntaaccaacggtgttttcaatgggtgaaaacccaattgttcaaccctacaggatccaacaggcaatcgcaacaggcattttaccattatcacccttgttcctccaacaaccgacagccctattacagcagttacctttggtccatttggtggcacaaaacattagggcacaacaactgcaacaacttgtgctagcaaac

SEQ ID NO: 342556 - DNA, 142 bp, Zea mays
agctcagctactccagattggacaacttgacaccatgaacgttcgactccatgcccttgctgtactggctctagctggtagcgccgattgcattacaagaggatggcttggataacaaaaagcatggactaatctaccgact

SEQ ID NO: 342557 - DNA, 327 bp, Zea mays
gcgacataaaaagcacactaagctaccaacactggcagctaaaatatatcgcctgcttatgcgacgtgggctttctgcgagcgctgttaccttcaacatatcgccacaatggccacaatcttttatcactgctcatttgctcccagacctatcaccaaccaggtcttcccgctgggaaaacccaagtcttcaacacataccagatccaccaggcaacaggctactgcatgttacctttatgagccttgtacatccaccaatcatcaaacctattacaccagccacctctgatgtatatattggcaccatacatccgggcacaacacc

SEQ ID NO: 342558 - DNA, 281 bp, Zea mays
agctcatttactccagatcgcacaactctacaccatgaacgttcgactccattccgttgctgttctggctctagctggtggcgccgattgcattacaagaggctgctgtggttaacagacagcatggattaatctaccgactctattagataagacggctgcgctctgtctgctctcgcaccagcaatccaatgcgtggcaataacctactggatcctagtatctaacgcggtgccgctggttcagatcactgctgagccggctgaggcgagagtccttgt

SEQ ID NO: 342559 - DNA, 444 bp, Zea mays
agaccattagctttatctactccagagcgcagaagaacccgatcgacaccatgagggtgttgctcgttgccctcgctctcctggctctcgctgcgagcgccacctccacgcatacaagcggcggctgcggctgccagccaccgccgccggttcatctaccgccgccggtgcatctgccacctccggttcacctgccacctccggtgcatctcccaccgccggtccacctgccgccgccggtccacctgccaccgccggtccatgtgccgccgccggttcatctgccgccgacaccatgccactaccctactcaaccgccccggcctgagcctcatccccagccacacccatgcccgtgccaacagccgcatacaaacccgtgccagctgcagggaacctgcggcgttggcagcaccccgatcctgggccagtgcgtcgagtttc

SEQ ID NO: 342560 - DNA, 444 bp, Zea mays
tgggtcttcagaccattagctttatctactccagagcgcagaagaacccgatcgacaccatgagggtgttgctcgttgccctcgctctcctggctctcgctgcgagcgccacctccacgcatacaagcggcggctgcggctgccagccaccgccgccggttcatctaccgccgccggtgcatctgccacctccggttcacctgccacctccggtgcatctcccaccgccggtccacctgccgccgccggtccacctgccaccgccggtccatgtgccgccgccggttcatctgccgccgccaccatgccactaccctactcaaccgccccggcctcagcctcatccccagccacacccatgcccgtgccaacagccgcatccaagcccgtgccagctgcagggaacctgcggcgttggcagcaccccgatcctgggccagtgcg

SEQ ID NO: 342561 - DNA, 379 bp, Zea mays
acgggcgcacacttgccgactacaacatccagaaggagagcaccctccaccttgtggtccgcctcagggaggcatgcagatcttcgtcaagaccctcactggaaagactatcaccctcgaggtggagtcttctgacaccatcgacaacgtcaaggccaagatccaggacaaggagggcatccctccagaccagcagcggctcatttttgccggcaagcagctcgaggacgggcgcacgctggccgactacaacattcagaaggagagcaccctccacttggtgctgcgtctcaggggcggcatgcagatctttgtgaagactctgaccggcaagactatcacccttgaggtcgagtcttctgataccattgataatgtc

SEQ ID NO: 342562 - DNA, 454 bp, Zea mays
cccacgcgtccgtccagatcagcaaagcggcagtgcgtagagaggatcgtcgaacagaacagcatgaagatggtcatcgttctcgtcgtgtgcctggctctgtcagctgccagcgcctctgcaatgcagatgccctgcccctgcgcggggctgcagggcttgtacggcgctggcgccggcctgacgacgatgatgggcgccggcgggctgtacccctacgcggagtacctgaggcagccgcagtgcagcccgctggcggcggcgccctactacgccgggtgtgggcagacgagcgccatgtaccagccgctccggcaacagtgctgccagcagcagatgaggatgatggacgtgcagtccgtcgcgcagcagctgcagatgatgatgcagcttgagcgtgccgctgccgccagcagcagcctgtacgagccagctctgatgcagcagcagcagc

SEQ ID NO: 342563 - DNA, 314 bp, Zea mays
cttcagaccattagctttatctactccagagcgcagaagaacccgatcgacaccatgagggtgttgctcgttgccctcgctctcctggctcttgctgcgagcgccacctccacgcatacaagcagcggctgcggcttgccagccacctgcgtcagttcatctaccgccgccggtgcatgtcccacctgcgggtcacctgccacctgcggtgcatctcccaccgccggaccacctgccgacgccggtccacctgccaccgccggttcatgtgccggtcgcgagtcaatctagcgacggcaccatgccactaccct

SEQ ID NO: 342564 - DNA, 366 bp, Zea mays
gaccattagctttatatacttcagagcgcataccaaccggagaaacaccatccgggagtgggttgatggccgcgctctcctggctgtcgctggcagcgcgagcttcacccatacaaacaggtggtggaggtggcacaccaacgccgaaggtttatataacgtagccagtgtatgtgtcatctttggtataaatggcacctgcagtgcatttatcaccggcaattcatctgtcgacgacggtacacctgccatcgtctgtcacatgtgacttcgaggttcatgcagagatcgcagtatgctcactacgccactcaacctggtcggcgtcacactcatgcaaacctacaccgatgcccttgacaacag

SEQ ID NO: 342565 - DNA, 447 bp, Zea mays
tgggtcttcagaccattagctttatctactccagagcgcagaagaacccgatcgacaccatgagggtgatgctcgttgccctcgctctcctggctctcgctgcgagcgccacctccacgcatacaagcggcggctgcggctgccagccaccgccgtcggttcatctaccgccgccggtgcatctgccacctccggttcacctgccacctccggtgcatctaccaccgccggtccacctgccgccgccggtccacctgccaccgacagtccatgtgccgacgtcggatcatctgtcgccgaccccatgccactaccctacttaagcggcccggcctgagtcttatcctcagccacacccatgtccgtgccaacagccgcatccaagcccgtgccagctgtagggaacctgcggcgttggcagcacccagatcctgggccagtgcgtcg

SEQ ID NO: 342566 - DNA, 170 bp, Zea mays
ctgggtcttcagaccattagctttatctactccagagcgcagaagaacccgatcgagaccatgagggtgttgctcgttgccctcgctctcctggctctcgctgcgagcgccacctccacgcatacaagcggcggctgcggctgccagccaccgccgccggttcatctacc

SEQ ID NO: 342567 - DNA, 454 bp, Zea mays
caacaagcaacatagaaagtggaatccagtagcaacaatagagcaacaatggcgaccaagatatttggcctccttatgctccttgctctttctgcatgtgttgctaacgcgacaattttccctcaatgctcacaagctcctatagcttcccttcttcccccataccttccatcaatgatagcttcagtatgtgaaaacccagctcttcaaccctataggctccaacaagcaatcgcagcaagcaacatacctttatcacccttgtttcaacaatcgccagccctatctttggtgcagtcattggtacaaaccatcagggcacagcagctgcagcaactcgtgctacctgtgatcaaccaagtagctctggcaaacctttctccctactctcagcaacaacaatttcttccattcaaccaactgtctacattgaaccgtgctgcttatttgcagc

SEQ ID NO: 342568 - DNA, 341 bp, Zea mays
gccggcgggctgtacccctacgcggagtacctgaggcagccgcagtgcagcccgctggcggcggcgccctactacgccgggtgtgggcagacgagcgccatgtaccagccgctccggcaacagtgctgccagcagcagatgaggatgatggacgtgcagtccgtcgcgcagcagctgcagatgatgatgcagcttgagcgtgccgctgccgccagcagcagcctgtacgagccagctctgatgcagcagcagcagcagctgctggcagcccagggtctcaaccccatggccatgatgatggcgcacaacatgccggccatgggtggactctaccagtacca

SEQ ID NO: 342569 - DNA, 447 bp, Zea mays
gcaacatagaaagcacaatagtgtaccaacaatggcagccaaaatattttgcctccttatgctccttggtctttctgcaagtgctgctacggcgaccattttcccgcaatgctcgcaagctcctatagcttaccttcttcccccgtacctctcaccagcggtgtcttttgtatgtgaaaacccaattcttcaaccctacaggatccaacaggcaatcgcagctggcatcttacctttatcacccttgttcctccaacaatcatcagccctattacaacagttacctttggtgcatttattggcacaaaacatcagggcacaacaactacaacaacttgtgctagcaaaccttgctgcctactctcagcaacagcagtttcttccattcaaccaactaagttcattgaactctgcttcttatttgcaacaacaacaactaccattcag

SEQ ID NO: 342570 - DNA, 298 bp, Zea mays
ttagctttatctactccagagcgcagaagaacccgatcgacaccatgagggtgttgctcggtgccctcgctctcctggctctcgctgcgagcgccacctccacgcatacaagcggcggctgcggctgccagccaccgccgccggttcatctaccgccgccggtgcatctgccacctccggttcacctgccacctccggtgcatctcccaccgccggtccacctgccggcgccggtccacctgccaccgccggtccatgtgccgccgccggttcatctgccgtcgccaccatgccacta

SEQ ID NO: 342571 - DNA, 445 bp, Zea mays
cagcaaagcggcagtgcgtagagaggatcgtcgaacagaacagcatgaagatggtcatcgatctcgtcgggtgcctggctctgtcagctgccagcgcctctgcaatgcagatgccctgcccctgcgcggggctgcagggcttgtacggcgctggcgccggcctgacgacgatgatgggcgccggcgggctgtacccctacgcggagtacctgaggcagccgcagtgcagcccgctggcggcggcgccctactacgccgggtgtgggcagacgagcgccatgtaccagccggtgcggcaacagtgctgccagcagcagatgaggatgatggacgtgcagtccgtcgcgcagcatctgcagatgatgatgcagcttgagcgtgccgctgccgtcagcagcagtctgtacgagccagctctgatgcagcagcagcagcagctgctggc

SEQ ID NO: 342572 - DNA, 335 bp, Zea mays
gagaccaacaagcaacatagaaagtggaatacagtagcaacaatagagcaacaatggcggccaagatattttccatccttatgctccttgctctttctgcatgtgttgctaacgcgaccatttttcctcaatactcacaagctcctatagctgcccttcttcccccataccttccatcaatgaccgcttcagtatgtgaaaacccagcccttcaaccctacaggctccaacaagcaatcgcaacacgcaacttacctttatcacccctgttctttcaacaatcgccagccctatctttggcgcagtcattggtacaaaccatgagggcacaacag

SEQ ID NO: 342573 - DNA, 446 bp, Zea mays
tagcaacatagaaagcacaatagtgtaccaacaatggcagccaaaatattttgcttccttatgctccttggtctttctgcaagtgctgctaccgcaaccattttcccacaatgctcacaagctcctatagcttcctttcttcccccatacctctcaccagcggtgtcttcagtatgtgaaaacccaattcttcaaccctacaggatccaacaggcaatcgcagcaggcatcttacctttatcacccttgttcctccaacaaccgtcagccctattacagcagttacctttggtgcatttgttggcacaaaacatcaaggcacaacaactacaacaacttgtgctaagaaaccttgcttgctactctcaacaacaagcagttcttgcattcaaccaactggcttgattgaactcttgtgcttatttgcaacaacaactaccattcag

SEQ ID NO: 342574 - DNA, 334 bp, Zea mays
cgtacctctcaccagcggtgtcttgggtatgtgaaaacccaattcttcaaccctatatgatccaacaggcaatcgcagctggcatcttacctttatcacccttgttgctccaacaatcatcagccctattacagcagttacctttggtgcatttattggcacaaaacatcagggcacaacaactacaacaacttgtgctagcaaaccttgctgcctactctcagcaacaacagtttcttgcattcaaccaactagctgcattgaactctgcttgttatttgcaacaacaacaactaccattcagccagctatctgctgcctacccgcagcaatt

SEQ ID NO: 342575 - DNA, 101 bp, Zea mays
cagaccgttacctttatcgactccagagcgcacaacaacccgatcgacaccatgagggtggcgctcgctgcccgtcctctcctgggtgtcgctgcgagcgc

SEQ ID NO: 342576 - DNA, 369 bp, Zea mays
gttcggagcgcacacacacacaaccagatctcccccaaatccacccgtcggcaccgccgcttgaagatgcagatctttgtgaaaaccctgaccggcaagactatcaccctcgaggtggagtcgtctgacaccattgacaacgttaaggccaagatccaggacaaggagggcatcccgccagaccagcagcggctcatcttcgctggcaaacagcttgaggacgggcgcacgcttgctgactacaacatccagaaggagagcaccctccaccttgtgctccgcctcatgggaggcatgcagatctttgtgaaaaccctgaccggcaagactatcaccctcgaggtggagtgctctgacaccattgacaac

SEQ ID NO: 342577 - DNA, 214 bp, Zea mays
cacactcactcatacaacgtgcgattcacactctccaatacctcaacactatggagccccagtttttacccccttatggccctttatcccttttaattgagttcacaaaacgccattttattacaatgtattcattctctcttagctcccttttttcccccatacttccactcattattaaattagcttgaaaaaacccacctttccaacctta

SEQ ID NO: 342578 - DNA, 438 bp, Zea mays
agaaagcacaatagtgtaccaacaatggcagccaaaatattttgcctccttatgctccttggtctttctgcaagtgctgctacggcgaccattttcccgcaatgctcgcaagctcctatagcttcccttcttcccccgtacctctcaccagcggtgtcttcggtatgtgaaaacccaattcttcaaccctacaggatccaacaggcaatcgcagctggcatcttacctttatcacccttgttcctccaacaatcatcagccctattacaacagttacctttggtgcatttattggcacaaaacatcagggcacaacaactacaacaacttgtgctagcaaaccttgctgcctactctcagcaacagcagtttcttccattcaaccaactaggttcattgaactctgcttcttatttgcaacaacaaccactaccattc

SEQ ID NO: 342579 - DNA, 384 bp, Zea mays
agcaatcgcagcaagcaacatacctttatcacccttgtttcaacaatcgccagccctatctttggtgcagtcattggtacaaaccatcagggcacagcagctgcagcaactcgtgctacctgtgatcaaccaagtagctctggcaaacctttctccctactcttagcaacaacaaatattcttccattcaaccaactgtctacattgaaccgtgctgcttatttgcagcaacaactattaccattcagtcagctagctactgcctactcttagcaacaacaacttcttccatttaaccaattggccgcactgaaccccgctgcttatttgtagcagcaaatactactaccatttagccagctagctgcagcaagccgtgctttc

SEQ ID NO: 342580 - DNA, 443 bp, Zea mays
ggacgtcagcctagcaattagctcatcgactccagattggagaactcgacaccatgaaggtgctgatcgttgcccttgctctcctggcgctcgctgcgagcgccgcctccagtacaagcggcggctgtggctgccagacaccaccgtttcatctaccgcctccgttctatatgccgcctccgttctatctgccgccgcagcagcagccgcagccatggcaataccccactcaaccaccgcagctaagcccgtgccagcagttcggatcctgcggcgtcggcagcgtcggcagcccgttcctgggccagtgcgtcgagttcctgaggcaccagtgcagcccggcggcgacgccctacggctcgccacagtgccaggcgctgcagcagcagtgctgccaccagatcaagcaggtggagccgctgcaccggtaccaggcgacatac

SEQ ID NO: 342581 - DNA, 373 bp, Zea mays
ctagcaacatagaaagcacaatagtgtaccaacaatggcagccaaaatattttgcttccttatgctccttggtctttctgcaagtgttgctaccgcaaccattttcccacaatgctcacaagctcctatagcttcccttcttcccccatacctctcaccagcggtgtcttcaatgtgtgaaaacccaattgttcaaccctacaggatccaacaggcaatcgcaacaggcatcttaccattatcacccttgttcctccaacaaccgtcagccctattacagcagttacctttggtccatttggtggcacaaaacaataaggcacaaccactaccacaacctgggctagccaaccttggtgtgtacttttaacaa

SEQ ID NO: 342582 - DNA, 359 bp, Zea mays
cagacaaccctatactgttacaacctacacacacacacatgcataatggttggggcacggtgaaactataccaggctaaggtcgatcgctcgtctatagctagaccactatcaccagtaccacctgcatggttacttgactgatagatagaccgacgagaatgaataagctagctagctactatatatatcatcagtagagcgttcagttgttgatgatggccatttcctagcccctggtcaccactgggctgcgccattctccgtaggagcagtcaccgagggtggtcctgtagagcgaggactcgaccgagtggtgagcgtgcacgcaccacgggcaccgactgtcgatggccatgc

SEQ ID NO: 342583 - DNA, 336 bp, Zea mays
aatattttgagcattcacaaacacaccaagcgaagcacattagcaacaacctaacaacaatggctaccaagatattatccctccttgcgcttcttgcgctttttgcgagcgcaacaaatgcgttcattattccacaatgctcacttgctccaagttccattattacacagttcctcccaccagttacttcaatgggcttcgaacacccagctgtgcaagcctataggctacaacaagcaattgcggcgagcgtcttacaacaaccaatttcccagttgcaacaacaatccttggcacatctaacaatacaaaccatcgcaacgcatcagctacaac

SEQ ID NO: 342584 - DNA, 273 bp, Zea mays
cccacgcgtccggcggcagtgcgtagagaggatcgtcgaacagaacagcatgaagatggtcatcgttctcgtcgtgtgcctggctctgtcagctgccagcgcctctgcaatgcagatgccctgcccctgcgcggggctgcagggcttgtacggcgctggcgccggcctgacgacgatgatgggcgccggcgggctgtacccctacgcggagtacctgaggcagccgcagtgcagcccgctggcggcggcgccctactacgccgggtgtgggca

SEQ ID NO: 342585 - DNA, 299 bp, Zea mays
gagaccaacaagcaacatagaaagtggaatccagtagcaacaatagagcaacaatggagaccaagatattttccctccttatgctccttgctctttctacatgtgttgctaacgcgacaattttccctcaatgctcacaagctcctatagcttccctttttcccccataccttccatcaattatagcttcagtatgtgaaaacccagctcttcaaccatataggcttcaacaagcaatcgcagcaagcaacatacctttatcgcccttgttgtgtcaacaatcgccagccctatctttg

SEQ ID NO: 342586 - DNA, 365 bp, Zea mays
tcgcaaaacatccttctattagtaccattaatcattattcatcttagtagtataggcgcgaaatgaaatctgcaacatcaattatctaactccaaaaaccatgaagctggtgcttgtggttcttgctttcattgctttagaatcaagtgtttcttgtacacagacaggcgggtgcagctgtggtcaacaacaaagccatgagcagcaacataatccactacaacatcgtccacaaaaacaactgcataaaccgccatcacaacattaccagcagtagcaacaccaacatacaacaagttcacatgcgaccacaaaaacatcatgaacaacaagaatgttaatggtcaataacaacaactacttcc

SEQ ID NO: 342587 - DNA, 236 bp, Zea mays
ccaacaagcaacatagaaagtggaatccagtagcaacaatagagcaacaatggagaccaagatattttccctccttatgctccttgctctttctacatgtgttgctaacgcgacaattttccctcaatgctcacaagctcctatagcttccctttttcccccatcccttccatcaattatagcttcagtatgtgaaaacccagctcttcaaccatataggcttcaacaggcaatcg

SEQ ID NO: 342588 - DNA, 332 bp, Zea mays
ccaacaagcaacatagaaagtggaattcagtagcaacaatagagcaacaatggagaccaagatattttccctccttatgctccttgctctttctacatgtgttgctaacgcgacaattttccctcaatgctcacaagctcctatagcttccctttttcccccataccttccatcaattatagcttcagtatgtgaaaacccagctcttcaaccatataggcttcaacaagcaatcgcagcaagcaacatacctttatcgcccttggtgtgtcaacaatcgccagccctatctttggtgcagtcattggtacaaaccatcacggcacaacagc

SEQ ID NO: 342589 - DNA, 435 bp, Zea mays
gcacaatagtgtaccaacaatggcagccaaaatattttgcctccttatgctccttggtctgtctgcaagtgctgctacggcgaccattttcccacaatgctcacaagctcctatagcttcccttcttcccccgtacctctcaccagcggtgtcttcggtatgtgaaaacccaattcttcaaccctataggatccaacaggcaatcgcagctggcatcttacctttatcacccttgttcctccaacaatcatcagccctattacagcagttacctttggtgcatttattggcacaaaacatcagggcacaacaactacaacaacttgtgctagcaaaccttgctgcctactctcagcaacaacagtttcttccattcaaccaactagctgcattgaactctgcttcttatttgcaacaacaacaactaccattcag

SEQ ID NO: 342590 - DNA, 375 bp, Zea mays
  unsure (1)..(375): unsure at all n locations
cgtagttgcaaaccagcaacaacaacaactgcaacagtttctgccagcgcttagtcaactagccatggtgaaccctgccgcctacctacaacagcaacaactgctttcatctagcccgctcgctgtggccaatgcacctacatacctgcaacaagaattgttgcaacagattgtaccagctctaactcagctagctgtggcaaaccctgttgcctacttgcaacagctgcttccattcaaccaactaactatgtcgaactctgttgcgtacctacaacagcgacaacagttacttaatccattggcagtggctaacccattggtcgctgccttcctacagcagcaacaattgctgccatacaaccggntctcttt

SEQ ID NO: 342591 - DNA, 211 bp, Zea mays
gcggccgctttagaagcaccacactcacttccgagtgcataccacgtcacaacaatggtatcgaagattgtacttgcacttcagtggctggccttttacaacgcctagactacgaaaaccctgtggggcagcaacacaataccgttgcatctaatgcctctgttgtctgtgcacgctatactgtataggccggcgcagatcgagctgcaca

SEQ ID NO: 342592 - DNA, 411 bp, Zea mays
ctcaatttttcccagccgccacagccattcttcctccctgtcttcttatctccacggcagggagcctctcccatggcgcagcagcaaatcccatgcagcgagctcctcccccatgcggtgtccggccaccacttcttcacatgtgctgcgtaggatcccctagcccaaccccttgcggcgggagcacaaccgtcgtttctcttggtgctcagctcctaggcgcagatccctccatggccgtcagctgcgctcgagctccactcctcccatggcgccacaaccccagccagcccccttcttccccatggccgagcatctccatggctggcgctcccctttccttggtgccccatggctgctcgttcaggtgccctgctccacctcgcacagcgcctgctcttcccctactcg

SEQ ID NO: 342593 - DNA, 459 bp, Zea mays
agaaagcacaatattgtaccaataatggcagccaaaatattttgcctcattatgctccttggtctttctgcaagtgctgctacggcgagcattttcccgcaatgctcacaagctcctatagcttcccttcttcccccatacctctcaccagcgatgtcttcagtatgtgaaaatccaattcttctaccctacaggatccaacaggcaatcgcagcaggcatcttacctttatcacccttgttcctccaacaatcatcagccctattacagcagttacctttggtgcatttattggcacaaaacatcagggcacaacaactacaacaactcgtgctagcaaaccttgctgcctactctcagcaacagcagttacctttggtgcatttgttggcacaaaacatcatggcacaacaactacaacaactcgtgctagcaaaccttgctgcctactctcagcaa

SEQ ID NO: 342594 - DNA, 72 bp, Zea mays
ccatcccacgcgggagatgttatatagcgtcacttaaattaaataaactgaaccgagtggtacaacgtttac

SEQ ID NO: 342595 - DNA, 53 bp, Zea mays
gaccccccttgaaccgggccttaaaggccggggggtggggggggttcccccca

SEQ ID NO: 342596 - DNA, 353 bp, Zea mays
gagcattcagaaacacaccaagcgaagcgcactagcaacaacctaacaacaatggctaccaagatattatccctccttgcgcttcttgcgctttttgcgagcgcaacaaatgcgtccattattccacaatgctcacttgctcctagttccattattccacagttcctcccaccagttacttcaatggccttcgaacacccagctgtgcaagcctataggctacaacaagcgattgcggcgagcgtcttacaacaaccaattgcccaattgcaacaacaatccttggcacatctaacaatacaaaccatcgcaacgcaacagcaacaacagttcctaccagcactgagccacct

SEQ ID NO: 342597 - DNA, 368 bp, Zea mays
cagcaaagcggcagtgcgtagagaggatcgtcgaacagaacagcatgaagatggtcatcgttctcgtcgtgtgcctggctctgtcagctgccagcgcctctgcaatgcagatgccctgcccctgcgcggggctgcagggcttgtacggcgctggcgccggcctgacgacgatgatgggcgccggcgggctgtacccctacgcggagtacctgaggcagccgcagtgcagcccgctggcggcggcgccctactacgccgggtgtgggcagacgagcgccatgtaccagccgctccggcaacagtgctgccagcagcagatgaggatgatggacgtgcagtccgtcgcgcagcagctgcaaatgatgatg

SEQ ID NO: 342598 - DNA, 454 bp, Zea mays
gggtcttcagaccattagctttatctactccagagcgcagaagaacccgatcgacaccatgagggtgttgctcgttgccctcgctctcctggctctcgctgcgagcgccacctccacgcatacaagcggcggctgcggctgccagccaccgccgccggttcatctaccgccgccggtgcatctgccacctccggttcacctgccacctccggtgcatctcccaccgccggtccacctgccgccgccggtccacctgccaccgccggtccatgtgccgccgccggttcatctgccgccgccaccatgccactaccctactcaaccgccccggcctcagcctcatccgcagccacacccatgcccgtgccaacagccgcatccaagcccgtgccagcttgcaggaacctgcgggcgtggcaacaccccgatcctgggccagtgcgtcgagtttctg

SEQ ID NO: 342599 - DNA, 247 bp, Zea mays
gcctaaaccccattccttgctgcaatactgtttacattacctaatgcgggtggctccacaggaccggttccaatcgatcttgggcttggtcctccactccatactgcaacaatagctccctaatcggtcacatcccggtactgctggcggttcagatagctcattatctgactgtaattatcgatctgcataaaactaattcattccactacactggtgccaacagtgttccccactaaacaaacta

SEQ ID NO: 342600 - DNA, 252 bp, Zea mays
ctggacgtcagcctagcaattagctcatcgactccagattggagaactcgacaccatgaaggtgctgatcgttgcccttgctctcctggcgctcgctgcgagcgccgcctccagtacaagcggcggctgtggctgccaaacaccaccgtttcatctaccgcctccgttctatatgccgcctccgttctatctgccgccgcagcagcagccgcagccatggcaataccccactcaaccaccgcagctaagccc

SEQ ID NO: 342601 - DNA, 370 bp, Zea mays
catcgatgatcatagagtcgatgaccagcagaaaacgcaggtatgttaacatattctttgacgtcattcttgttcagatatgatttgatcattgttgctatgtgcaaaaatatttaatatttattgttcataagaagcaggcaccgcacacagcatcactggctatatgtgagaatgctcaaaacgatggcaatagaatccttgaatcaatggtgtatcaggtaacatgattatacataatatttaaaaaattactttgtgttgtgtaatatgattttgttaacaacccatttaacattaggaggttattaaccttacccaacttttattggttcttgaagtggaatggcttttgaattccgagaaaatg

SEQ ID NO: 342602 - DNA, 380 bp, Zea mays
attgagaccaacaagcaacatagaaagtggaatccagtagcaacaatagagcaacagtggcgaccaagatattttccctccttatgctccttgctctttctgcatgtgttgctaacgcgacaattttccctcaatgctcacaagctcctatagcttcccttcttcccccataccttccatcaatgatagcttcagtatgtgaaaacccagctcttcaaccctataggctccaacaagcaatcgcagcaagcaacatacctttattaccctgggtgtcaacaatcgccagccctatctttggtgcagtcattggtacaaaccatcagggcacagcagctgcagcaactcgtgctacctgtgatcaaccaagtagctctggc

SEQ ID NO: 342603 - DNA, 364 bp, Zea mays
gggtcttcagaccattagctttatctactccagagcgcagaagaacccgatcgacaccatgagggtgttgctcgttgccctcgctctcctggctctcgctgcgagcgccacctccacgcatacaagcggcggctgcggctgccagccaccgccgccggttcatctaccgccgccggtgcatctgccacctccggttcacctgccacctccggtgcatctcccaccgccggtccacctgccgccgccggtccacctgccaccgccggtccatgtgccgccgccggttcatctgccgccgccaccatgccactaccctactcaaccgccccggcctcagcctcattcccagccacacccatgcccg

SEQ ID NO: 342604 - DNA, 329 bp, Zea mays
cagaaacacaccaagcgaagcacattagcaacaacctaacaacaatggctaccaagatattatccctccttgcgcttcttgcgctttttgcgagcgcaacaaatgcgttcattattccacaatgctcacttgctccaagttccattattacacagttcctcccaccagttacttcaatgggcttcgaacacccagctgtgcaagcctataggctacaacaagcaattgcggcgagcgtcttacaacaaccaatttcccagttgcaacaacaatccttggcacatctaacaatacaaaccatcgcaccgcaccagcaacaccaattctta

SEQ ID NO: 342605 - DNA, 123 bp, Zea mays
atgagttatagttcaataataaatctaaaagagggcaccaccaataatcggctcccccttgaacggtggttgttttgtcaaagcaagttgttcttaatcgcatcaacccatcattggtgcata

SEQ ID NO: 342606 - DNA, 268 bp, Zea mays
caacaagcaacatagaacgtggaatccagtagcaacaatagagcaacaatggagaccaagatattttccctccttatgctccttgctctttctacatgtgttgctaacgcgacaattttacctcaatgctcacaagctcctatagcttccctttttcccccataccttccatcaattatagcttcagtatgtgaaaacccagctcttcaaccatataggcttcaacaagcaatcgcagcaagcaacataccgttatcgccttgttgtg

SEQ ID NO: 342607 - DNA, 360 bp, Zea mays
gcgcgaacgcgaggacggacaccagggctgacgcgtacgtttcgagcattcagaagacgggatgtcttactgctagccagtacatgacgacaattgttctgatgctattaccagtgcgcgaccttgttgcctactttgagaaacaaccaaatgttttatttattcaactgtgttcatttgattttagtgccattattccacagctcctcccacctgttagttgaatgggtcgcgtacacgttccgccgcggcgccacgcacggcctgagggggccccggccttcgctggcggcgacacccttaagattgcgaacaaggggggccgcggggccaaggaacaacaacaaggccccccgcggg

SEQ ID NO: 342608 - DNA, 144 bp, Zea mays
taacatgctcatctaaagaggcatacagtactcaacactacaccatcaagggcggggtcgatgttctccatccttctgctccttgcttctatctgcaatcttcactcatcacaaccatttgtcctcaatgccaacaaactccta

SEQ ID NO: 342609 - DNA, 206 bp, Zea mays
ctgcactgtcttgttctaggcctagctagctagccctccagctcgcacacatgccatggcgctgtcgtggtcgcccgccgtcgtcgtcttcctcctcctcctgttgctcctccctgccccatggccccgcgcggccgcccaggccggccggtaccacgccgtgtcggtgtccagggcaggaggccagctgtccgcgcggttggagc

SEQ ID NO: 342610 - DNA, 302 bp, Zea mays
ggcatcttacctttatcacccttgttcctccaacaaccgtcagccctattacagcagttacctttggtgcatttgttggcacaaaacatcaaggcacaacaactacaacaacttgtgctaggaaaccttgctgcctactctcagcaacagcagtttcttccattcaaccaactggctgcattgaactctgctgcttatttgcaacaacaactaccattcagtcagctagctgctgcctacccccagcaatttcttccattcaaccaactggcagcattgaactctgctgcttatttacaaca

SEQ ID NO: 342611 - DNA, 376 bp, Zea mays
  unsure (1)..(376): unsure at all n locations
gaccattagctttatctactccagagcgcagaagaacccgatcgacaccatgagggtgttgctcgttgccctcgctctcctggctctcgctgcgagcgccacctccacgcatacaagcggcggctgcggctgccagccaccgccgccggttcatctaccgccgccggtgcatctgccacctccggttcacctgccacctccggtgcatctcccaccgccggtccacctgccgccgccggtccacctgccaccgncggtccatgtgccgccgccgggtcatctgccgccgccaccatgcaactaccttactaaaccgcccgggcttaagcttaatcccaagcaaaaccaaggccggggccaccagcggattcaaacc

SEQ ID NO: 342612 - DNA, 295 bp, Zea mays
attttgagcattcagaaacacaccaagcgaagcgcactagcaacaacctaacaacaatggctgccaagatattatccctccttgcgcttcttgcgctttttgcgagcgcaacaaatgcgtccattattccacaatgctcacttgctcctagttccattattccacagttcctcccaccagttacttcaatggccttcgaacacccagctgtgcaagcctataggctacaacaagcgattgcggcgagcgtcttacaacaaccaattgcccaattgcaacaacaatccttggcaca

SEQ ID NO: 342613 - DNA, 286 bp, Zea mays
ccaactagcaacatataaagcacaatagtgtaccaacaatggcagccaaaatattgggcctgcttatgctccttggtctttctgcaagcgctgctacagcgaccattttcccgaaatgctcgcaagctcctatagcttcccttcttcccccgtacctctcaccagcggtgtcttcggtatgtgaaaacccaattgttcaaccctacaggatccaacaggcaatcacagctggcatcttacctttatcacccttgttcctccaacaatcatcagccctattacatca

SEQ ID NO: 342614 - DNA, 153 bp, Zea mays
agcgttctaccaacaacccatcattggtggtgccctcttttagattgcttatgagttatagttcaataatgaagttgtttggatgatgtttgtggcttcccagaaatcagaaagtacatttctagattcttacaacaaaaataaaaaaaataa

SEQ ID NO: 342615 - DNA, 447 bp, Zea mays
caactagcaacatagaaagcacaatagtgtaccaacaatggcagccaaaatattttgcttggcgttatgctccttggtctttctgcaagtgctgctaccgcaaccattttcccacaatgctcacaagctcctatagcttcctttcttcccccatacctctcaccagcggtgtcttcagtatgtgaaaacccaattcttcaaccctacaggatccaacaggcaatcgcagcaggcatcttacctttatcacccttgttcctccaacaaccgtcagccctattacagcagttacctttggtgcatttgttggcacaaaacatcaaggcacaacaactacaacaacttgtgctaggaaaccttgctgcctactcttagcaacagcagtttcttccattcaaccaactggctgcattgaactctgctgcttatttgcacaacaactaccat

SEQ ID NO: 342616 - DNA, 301 bp, Zea mays
tttatctactccagagcgcagaagaacccgatcgacaccatgagggtgttgctcgttgccctcgctctcctggctctcgctgcgagcgccacctccacgcatacaagcggcggctgcggctgccagccaccgccgccggttcatctaccgccgccggtgcatctgccacctccggttcacctgccacctccggtgcatctcccaccgccggtccacctgccgccgccggtccacctgccaccgccggtccatgtgccgccgccggttcatctgccgccgccaccatgccactaccctactc

SEQ ID NO: 342617 - DNA, 122 bp, Zea mays
agatcctcgaaggccatttcagtactcgaacagctctggctctccctgcgtttcagaatcagggtctgacatttatagcaaaagagaggtcatacagaagctaagacagcacctcaagaaac

SEQ ID NO: 342618 - DNA, 183 bp, Zea mays
gttctaaatcgcgaccggccacccttttttttttttataattttacaacaatatctctcccgttatattttcttccttttctttcttaacatttttttttcctcttttctattttccccaatacaaccataaacaccaccccccaattcctttttccccaaaaacccccaccaaaaacactaa

SEQ ID NO: 342619 - DNA, 161 bp, Zea mays
agcgttctaccaacaacccatcattggtggtgccctcttttagattgcttatgagttataggtcaatcatgaagttttttagaaatgtactttcttattcctgggaagccacaaacatgatccaaaaatatgaaagtacatttctcaaaaaaaaaaaaaca

SEQ ID NO: 342620 - DNA, 335 bp, Zea mays
  unsure (1)..(335): unsure at all n locations
gcaacatagaaagcacaatagtgtaccaacaatggcagccaaaatattttgcctccttatgctccttggtatttctgcaagtgctgctacggcgaccattttcccgcaatgctcacaagctcctatagcttcccttcttcccccgtacctctcaccagcggtgtcttcggtatgtgaaaacccaattcttcaaccctacaggatccaacaggcaatcgcagctggcatcttacctttatcacccttgttcctccaacaatcatcagccctattacagcagttacctttggtgcatttattggcacanaacatcagggcacaacaactacaacaac

SEQ ID NO: 342621 - DNA, 105 bp, Zea mays
gtcatacttagtcattgaactacaggaaaatgtgcacgtgggtgcagagcacacattcggggcagagctcatcatcgggcgatctcgcggagggacgtgaagcca

SEQ ID NO: 342622 - DNA, 445 bp, Zea mays
  unsure (1)..(445): unsure at all n locations
gcaacatagaaagcacaatagtgtaccaacaatggcagccaaaatattttgcctccttatgctccttggtctttctgcaagtgctgctacggcgaccattttcccgcaatgctcgcaagctcctatagcttcccttcttcccccgtacctctcaccagcggtgtcttcggtatgtgaaaacccaattcttcaaccctacaggatccaacaggcaatcgcagctggcatcttacctttatcacccttgttcctccaacaatcatcagccctattacaacagttacctttggtgcatttattggcacanaacatcagggcacaacaactacaacaacttgtgctagcaaaccttgctgcctactctcaacaacagcaggttctttcattcaaccaactaagttcattgaactctgcttcttatttgcaacaacaacaactaccattc

SEQ ID NO: 342623 - DNA, 184 bp, Zea mays
ccgggacgacgccacgccgtccgcttactcctctgagcgcgtatgacactaccgcaccgcaccgaccggacgaatagacgccgactgcggggcgtgataacccccacccaccaaccaacgcgactaacgtctctctctctctcaatctccaagcgagcgcgggcggcgcgcggttgcagcatgg

SEQ ID NO: 342624 - DNA, 453 bp, Zea mays
caaaacatcagggcacaacaactacaacaacttgtgctagcaaaccttgctgcctactctgagcaacagcagtttcttccattcaaccaactagctgcattgaactctgcttcttatttgcaacaacaacaactaccattcagccagctacctgctgcctacccccagcaatttcttccattcaaccaactggcagcattgaactctcctgcttatttacagcagcaacaactactaccattcagccagctagctggtgtgagccctgctaccttcttgatacaaccacagttgttgccgttctaccagcacgctgcgcctaacgctggcaccctcttacaactgcaacaattgctgccattcaaccaacttgctttgacaaacccagcagcgttctaccaacaacccatcattgggggtgccctcttttagatttcttatgagttatagttc

SEQ ID NO: 342625 - DNA, 319 bp, Zea mays
gagcattcagaaacacaccaagcgaagcgcactagcaacaacctaacaacaatggctaccaagatattatccctccttgcgcttcttgcgctttttgcgagcgcaacaaatgcgtccattattccacaatgctcacttgctcctagttccattattccacagttcctcccaccagttacttcaatggccttcgaacacccagctgtgcaagcctataggctacaacaagcgattgcggcgagcgtcttacaacaaccaattgcccaattgcaacaacaatccttggcacatctaacaatacaaaccatcgcaacgcaac

SEQ ID NO: 342626 - DNA, 447 bp, Zea mays
agcaacatagaaagcacaatagtgtaccaacaatggcagccaaaatattttgcctccttatgctccttggtctttctgcaagtgctgctacggcgaccattttcccacaatgctcacaagctcctatagcttcccttcttcccccgtacctctcaccagcggtgtcttcggtatgtgaaaacccaattcttcaaccctataggatccaacaggcaatcgcagctggcatcttacctttatcacccttgttcctccaacaatcatcagccctattacagcagttacctttggtgcatttattggcacaaaacatcagggcacaacaactacaacaacttgtgctagcaaaccttgctgcctactctcagcaacaacagtttcttccattcaaccaactagctgcattgaactctgcttcttatttgcaacaacaacaactaccattca

SEQ ID NO: 342627 - DNA, 478 bp, Zea mays
attgagaccaacaagcaacatagaaagtggaatacagtagcaacaatagagcaacaatggcggccaagatattttccatccttatgctccttgctctttctgcatgtgttgctaacgcgaccatttttcctcaatactcacaagctcctatagctgcccttcttcccccataccttccatcaatgaccgcttcagtatgtgaaaacccagcccttcaaccctacaggctccaacaagcaatcgcaacaagcaacttacctttatcacccctgttctttcaacaatcgccagccctatctttggtgcagtcattggtacaaaccatcagggcacaacagctgcagcaactcgtgctaccagtgatcagccaagtagctctggcaaacctttctccctactctcagcaacaacaatttcttccattcaaccaactgtctacactgaaccctgctgcttatttgcagcaacaacaactact

SEQ ID NO: 342628 - DNA, 285 bp, Zea mays
cgtcagcctagcaattagctcatcgactccagattggagaactcgacaccatgaaggtgctgatcgttgcccttgctctcctggcgctcgctgcgagcgccgcctccagtacaagcggcggctgtggctgccagacaccaccgtttcatctaccgcctccgttctatatgccgcctccgttctatctgccgccgcagcagcagccgcagccatggcaataccccactcaaccaccgcagctaagcccgtgccagcagtttcggatcctgcggcgtctgcagcgtc

SEQ ID NO: 342629 - DNA, 420 bp, Zea mays
cacagttcctcccaccagttacttcaatgggcttcgaacatccagccgtgcaagcctacaggctacaactagcgcttgcggcgagcgtcttacaacaaccaattgcccaattgcaacaacaatccttggcacatctaaacctacaaaccatcgcaacgcaacagcaacaacagtttctgccatcactgagccacctagccgtggtgaaccctgtcgcctacttgcaacagcagctacttgcatccaacccacttgctctggcgaacgtagctgcataccagcaacaacaacgtctgcaacagtttatgccagcgctcaatcaactagccatggtgaacccttgtcgctacctacaacaacaacaattgctttcatctaacccggtcgcttggggcaatgcacctacgtacctacaacaac

SEQ ID NO: 342630 - DNA, 347 bp, Zea mays
gatcagcaaagcggcagtgcgtagagaggatcgtcgaacagaacagcatgaagatggtcatggttctcgtcgtgtgcctggctctgtcagctgccagcgcctctgcaatgcagatgccctgcccctgcgcggggctgcagggcttgtacggcgctggcgccggcctgacgacgatgatgggcgccggcgggctgtacccctacgcggagtacctgaggcagccgcagtgcagcccgctggcggcggcgccctactacgccgggtgtgggcagacgagcgccatgtaccagccgctccggcaacagtgctgccagcagcagatgaagatgatggacgtgcagtccgtc

SEQ ID NO: 342631 - DNA, 467 bp, Zea mays
cataaacacaccaagcgaagcgcactagcatcgacctaacaacaatggctaccaagatatgagccctccttgcgcttcttgccctttttgtgagcgcaacaaatgcgttcattattccacaatgctcacttgctcctagtgccattattccacagttcctcccaccagttacttcaatgggcttcgaacacctagctgtgcaagccaacatgcatcaacaagcgcttgcggcgagcgtcttacaacaaccaattgcccaattgcaacaacaatccttgccacatctaacaatacatgccatcacaacgcaacagcaacaacagttcctaccagcactgagccacctatccatggtgaaccctgccgcctacttgcaagagcagctgcttgcatccaacccacttgctctggcgaacgtagttgcaaaccagcaacaacaacagctacaacagtttctgccaacgctc

SEQ ID NO: 342632 - DNA, 451 bp, Zea mays
gagaccatctagcaacatagaaagcacattagtgtaccaacaatggcagccaaaatattgagcctccttatgctccttggtctttctgcaagtgctgctactgcgaccattttcccgaaatgctcgcaagctcctatagcttcccttcttaccccgtacctctcaccagcagtgtcttcggtatgtgaaaacccaattcttcaaccctacaagatccaacaggcaatcacagctggcatcttacctttatcacccttgttcctccaacaatcatcagccctattacatcagttacctttggtgcattcattggcacaaatcatcttggcacaacaactacaacaacttgtgctagcaaaccttgctgcctactctcagcaacagcagtttcttccattcaaccaactagctgcattgaactctgcttcttatttgcaacagcaacaactac

SEQ ID NO: 342633 - DNA, 388 bp, Zea mays
gcaacatacaaagcacattagtgtaccaacaatggcacccaaaatattttgcctccttagaggcctttgtatttctgcaagtgctgctacagcgaccattttcccgcaatgctcacaagctcctatagcttcccttcttcccccgtacctctcaccagcggtgtcttcggtatgtgaaaacccaattcttcaaccctacaagatccaacaagcaatcacatctgacatcttacctttatcacccttgttcctccaacaatcatcagccctattacagcagttacctttgatgcatctattggcacataacatcagggcacaacaactacaacaacttgtgctagcaaaccttgctgcctactctcagcaacagcagtttctttcattc

SEQ ID NO: 342634 - DNA, 456 bp, Zea mays
ctgggtcttcagaccattagctttatctactccagagcgcagaagaacccgatcgacagcgggagggtgttgctcggtgccctcgctctcctggctctcgctgcgagcgccacctccacgcatacaagcggcggctgcggctgccagccaccgccgccggttcatctaccgccgccggtgcatctgccacctccggttcacctgccacctccggtgcatctcccaccgccggtccacctgccgccgccggtccacctgccaccgccggtccatgtgccgccgccggttcatctgccgccgccaccatgccactaccctactcaaccgccccggcctcagcctcatccccagccacacccatgcccgtgccaacagccgcatccaagcccgtgccagcttgcaggaacctgcggcgttggcagcaccccgatcctgagccaatgcgtcgagttcctg

SEQ ID NO: 342635 - DNA, 233 bp, Zea mays
  unsure (1)..(233): unsure at all n locations
cgtcagcctagcaattagctcatcgactccagattggagaactcgacaccatgaaagtgctgatcgttgcccttgctctcctggcgctcgctgcgagcgccgncttcagtacaagcggcggctgtggctgccaaacaccaccgtttaatctaccgcctccgttctatatgccgcctccgttctatctgccgccgaagcagcagccgcagccatggaattccccaattaaacac

SEQ ID NO: 342636 - DNA, 462 bp, Zea mays
tgagcattcagaaacacaccaagcgaagcacattagcaacaacctaacaacaatggctacgaagatattatccctccttgcgcttcttgcgctttttgcgagcgcaacaaatgcgttcattattccacaatgctcacttgctccaagttccattattacacagttcctcccaccagttacttcaatgggcttcgaacacccagctgtgcaagcctataggctacaacaagcaattgcggcgagcgtcttacaacaaccaatttcccagttgcaacaacaatccttggcacatctaacaatacaaaccatcgcaacgcaacagcaacaacaattcctaccagcactgagccacctagccatggtgaaccctgccgcctacttgcaacagcagttgcttgcatcaaacccacttgctctggcaaacgtagttgcaaaccagccacaacaacagctgcaacagtt

SEQ ID NO: 342637 - DNA, 287 bp, Zea mays
atttttccaactatcatcatataaagcacattagtgtaccaacaatggcagccaaaatagtttgcctccttatgctcgtaggtatttctgcaagtgctgctacagcgaccattttcccgcaatgctcacaagctcctatagcttcccttcttcccccgtacctctcaccagcggtgtcttcggtatgtgaaaacccaattcttcaaccctacaagatccaacatgcaatcgcagctgacattcttacctttatcaccctttttccttcaacaatcattagccctatt

SEQ ID NO: 342638 - DNA, 366 bp, Zea mays
gaaacacaccaagcgaagcgcactagcaacaacctaacaacaatggctaccaagatattagccctccttgcgcttcttgcgctttttgcgagcgcaacaaatgcgtccattattccacaatgctcacttgctcctagttccattattccacagttcctcccaccagttacttcaatggccttcgaacacccagctgtgcaagcctataggctacaacaagcgattgcggcgagcgtcttacaacaaccaattgcccaattgcaacaacaatccttggcacatctaacaatacaaaccatcgcaacgcaacagcaacaacagttcctaccagcactgaaccaccttaccatggtgaaccctgtcgcc

SEQ ID NO: 342639 - DNA, 367 bp, Zea mays
  unsure (1)..(367): unsure at all n locations
gtcttcgtactcgcctacctccgcggctcaaacctttcccccttctcccaattcccgccggcggtccatcccgtaacgcgacaccatgagggagtgcatttcgatccacatcggccaggccggtatccaggtcggaaacgcgtgctgggagctgtactgccttgagcatggcattcaggctgacggtcagatgcccggtgacaagaccattgggggaggtgatgatgctttcaacaccttcttcagtgagactggtgctgggaagcacgtgccccgtgctgtttttgttgaccttgaacccactgtcatcgatgaggtgagaactggcacctaccgccagctcttncaccctgagcagctcatcagt

SEQ ID NO: 342640 - DNA, 447 bp, Zea mays
tagcaacatataaagcacaatattgtaccaacaatggcagccaaaatattttgcctccttaggctccttggtatttctgcaagtgctgctacggcgaccattttcccgcaatgctcacaagctcctatagcttcccttcttcccccgtacctctcaccagcggagtcttcggtatgtgaaaacccaattcttcaaccctacaggatccaacaggcaatcgcagctggcatcttacctttatcacccttgttcctccaacaatcatcagccctattacagcagttacctttggtgcatttattggcacaaaacatcagggcacaacaactacaacaacttgtgctagcaaaccttgctgcctactctcagcaacagcagtttctttcattcaaccaactagctgcattgaactctgcttcttatttgcaacaacaacaactaccattc

SEQ ID NO: 342641 - DNA, 394 bp, Zea mays
tcataacttcccccccactaggctatataacctattttctttgattcctaacctttctacttcagaagaactttttaataaaacagcaaaccttcacttctccatctactttcccaattccactccctattcttcaaccccctctcaattatctcataaaaacaacttattcttaccttatacatatcaccttattataccaattatttgcttcctcaatttacattccaacctctaatccactttcaacttttttaccttgaatcattatcaattttaaccaatccattacatttttactttacactaacatcaagatcaaaactctaatatccctatattcattttctactattttcttatcatcctaacatttataaaatttcacttcctt

SEQ ID NO: 342642 - DNA, 466 bp, Zea mays
cggacgcgtgggtttgagcattcagaaacacaccaagcgaagcgcactagcaacaacctaacaacaatggctaccaagatattatccctccttgcgcttcttgcgctttttgcgagcgcaacaaatgcgtccattattccacaatgctcacttgctcctagttccattattccacagttcctcccaccagttacttcaatggccttcgaacacccagctgtgcaagcctataagctacaacaagcgattgcggcgagcgtcttacaacaaccaattgcccaattgcaacaacaatccttggcacatctaacaatacaaaccatcgcaacgcaacagcaacaacagttcctaccagcactgagccacctagccatggtgaaccctgtcgcctacttgcaacagcagctgcttgcatccaacccacttgctctagcaaacgtagttgcaaaccagcaacaacaacaac

SEQ ID NO: 342643 - DNA, 316 bp, Zea mays
gtgtcttcagaccattagctttatctactccagagcgcagaagaacccgatcgacaccgagagggtgttgctcgttgccctcgctctcctggctctcgctgcgagcgccacctccacgcatacaagcggcggctgcggctgccagccaccgccgccggttcatctaccgccgccggtgcatctgccacctccggttcacctgccacctccggtgcatctcccaccgccggtccacctgccgccgccggtccacctgccaccgtcggtccatgtgccgccgccggttcatctgtcatcgtcaccatgccactaccct

SEQ ID NO: 342644 - DNA, 402 bp, Zea mays
attgagaccaactagcaacatagaaagcacaatagtgtaccaacaatggcagccaaaatatggtgcttccttatgctccttggtctttctgcaagtgttgctaccgcaaccattttcccacaatgctcacaagctcctatagcttcccttcttcccccatacctctcaccagcggtgtcttcaatgtgtgaaaacccaattgttcaaccctacaggatccaacaggcaatcgcaacaggcatcttaccattatcacccttgttcctccaacaaccgtcagccctattacagcagttacctttggtccatttggtggcacaaaacatcaaggcacaacaactacaacaacttgtgctagcaaaccttgctgcatactctcagcaacatcagtttcttccattc

SEQ ID NO: 342645 - DNA, 183 bp, Zea mays
  unsure (1)..(183): unsure at all n locations
ccccttctccntcccccactcccccacattccccaccatctccttttacctcccttccccccccttaccccctatcacctttctctcactgcctttatcccccaatttttatatccatctccatcccacactctaccgcttctttttccttaccacccataacctctttcctcctaccatttt

SEQ ID NO: 342646 - DNA, 201 bp, Zea mays
ttttcttccccatccctttttccaccattctctccatcccctatttctttccttttttccccattcctttcaccattcgtgtcttcaattttttaaaaccccattttttaacccttccatattcctccatcaatctctacacacctttttccatttttacccttttttcctccacaacccctattcctatttcaccctttt

SEQ ID NO: 342647 - DNA, 457 bp, Zea mays
attttcagcattcagaaacacaccaagcgaagcgcactagcaacaacctaacaacaatggctgaccaagatattagccctccttgcgcttcttgcccttttagtgagcgcaacaaatgcgttcattattccacagtgctcacttgctcctagtgccattattccacagttcctcccaccagttacttcaatgggcttcgaacatccagccgtgcaagcctacaggctacaactagcgcttgcggcgagcgtcttacaacaaccaattgcccaattgcaacaacaatccttggcacatctaaacctacaaaccatcgcaacgcaacagcaacaacagtttctgccatcactgagccacctagccgtggtgaaccctgtcgcctacttgcaacagcagctacttgcatccaacccacttgctctggcgaacgtagctgcataccagcaacaacaacgtc

SEQ ID NO: 342648 - DNA, 417 bp, Zea mays
gaccattagctttatctactccagagcgcagaagaacccgatcgacaccatgagggtgggggtcgttgccctcgctctcctggctctcgctgcgagcgccacctccacgcatacaagcggcggctgcggctgccagccaccgccgccggttcatctaccgccgccggtgcatctgccacctccggttcacctgccacctccggtgcatctcccaccgccggtccacctgccgccgccggtccacctgccaccgccggtccatgtgccgccgccggttcatctgccgccgccaccatgccactaccctactcaaccgccccggcctcagcctcatccccagccacacccatgcccgtgccaacaagccgattcaagcccgtgccagctgcagggaacctgcggcggtggcagcacccc

SEQ ID NO: 342649 - DNA, 313 bp, Zea mays
gcgaagcgcactatcaacgacctaacaacattggctaccaagatattagccctccttgcagtgctttccctttttgtgagcgcaacaaatgcgttcattattccacaatgctcacttgctcctagtgccattattccacagttcctcccaccagttacttcaatgggcttcgaacacctagctgtgcaagccaacatgcaacaacaagcgcttgcggcgagcgtcttacaacatccaattgcccaattgcaacaacattccttgccacatctaacaatacaagccatcacaactcaacagcaacaacagtttc

SEQ ID NO: 342650 - DNA, 290 bp, Zea mays
acgattttaaatcctaacaaacacaccaatctcttttctctaccaacaatctcacatccaatagtgagattttttatactcggggaacacccatcccattttcctaatcactacaatctccaccatcatcaccaaaaaccattaatatccctttccccaaaaacacatttccctcaagattttccacgactcaaaaccctattatctcaaccccacactattccattttacacaaaaaactcccatttaccattataaacccttcttctctcaattctgaatcctttttc

SEQ ID NO: 342651 - DNA, 278 bp, Zea mays
gcaacatataaagcacaatagtgtaccaacaatggcagccaaaatattttgcctccttatagcgtccttggtctttctgcaagtgctgctacggcgaccattttcccacaatgctcacaagctcctatagcttcccttcttcccccgtacctctcaccagcggtgtcttcggtatgtgaaaacccaattcttcaaccctataggatccaacaggcaatcgcagctggcatcttacctttatcacccttgttcctccaacaatcatcagccctattaca

SEQ ID NO: 342652 - DNA, 305 bp, Zea mays
attagctttatctactccagagcgcagaagaacccgatcgacaccatgagggtgttgctcgttgccctcgctctcctggctctcgctgcgagcgccacctccacgcatacaagcggcggctgcggctgccagccaccgccgccggttcatctaccgccgccggtgcatctgccacctccggttcacctgccacctccggtgcatctcccaccgccggtccacctgccgccgccggtccacctgccaccgccggtccatgtgccgccgccggttcatctgccgccgccaccatgccactaccctac

SEQ ID NO: 342653 - DNA, 415 bp, Zea mays
gttggcttctcctccccctccggttcgggttcgggttcgtgaggttctccggggttcggggtcgtgggtgagcggatcgagatggcggcgtcggatgttgagtaccgctgcttcgtcggcggcctcgcctgggccacggacgaccactccctccacaacgccttcagcacctacggcgaggtcctcgagtccaagatcatcctcgatcgggagacgcagaggtcccgcggcttcggcttcgtcaccttctccacggaggaggcgatgcggaacgccatcgagggcatgaacggcaaggagctggacggccgcaacatcaccgtcaacgaggcccagtcccgcggcggccgtggaggcggcggcggcggcgggtacagtggtggccgtggaggcggcggctactgcggtggcgggc

SEQ ID NO: 342654 - DNA, 464 bp, Zea mays
attttcagcattcagaaacacaccaagcgaagcgcactagcaacaacctaacaacaatggggaccaagatattagccctgcttgcgcttcttgcccttttagtgagcgcaacaaatgcgttcattattccacagtgctcacttgctcctagtgccattattccacagttcctcccaccagttacttcaatgggcttcgaacatccagccgtgcaagcctacaggctacaactagcgcttgcggcgagcgtcttacaacaaccaattgcccaattgcaacaacaatccttggcacatctaaacctacaaaccatcgcaacgcaacagcaacaacagtttctgccatcactgagccacctagccgtggtgaaccctgtcgcctacttgcaacagcagctacttgcatccaacccacttgctctagcgaacgtagctgcataccagcaacaacaacgtctgcaacaa

SEQ ID NO: 342655 - DNA, 274 bp, Zea mays
gccagctagctgcagcaagccgtgcttccttcttgacacagcaacagttgctgcctttgtggcagcagtttgcggctaaccccgcaaccctcttacaactacaacaattgttgccctttgtccaacttgctttgacaaacccagcagcctcctaccaacaacacatcattggtggtgccctcttttagattgcttattagttgtaattcaataataaagttttttggatgatgtatgtggccaaccagaaataagaagttacatttccagattc

SEQ ID NO: 342656 - DNA, 418 bp, Zea mays
attgagaccaactagcaacatagaaagcacaatagtgtaccaacaatggcagccaaaataagttgcttccttatgctccttggtctttctgcaagtgttgctaccgcaaccattttcccacaatgctcacaagctcctatagcttcccttcttcccccatacctctcaccagcggtgtcttcaatgtgtgaaaacccaattgttcaaccctacaggatccaacaggcaatcgcaacaggcatcttaccattatcacccttgttcctccaacaaccgtcagccctattacagcagttacctttggtccatttggtggcacaaaacatcaaggcacaacaactacaacaacttgtgctatcaaacctagctgcatactctcagcaacatcaatttcttccattcaaccaactggctgcat

SEQ ID NO: 342657 - DNA, 449 bp, Zea mays
caactagcaacatagaaagcacaatagtgtaccaacaatggcagccaaaatattttgcttagcttatgctccttggtctttctgcaagtgttgctaccgcaaccattttcccacaatgctcacaagctcctatagcttcccttcttcccccatacctctcaccagcggtgtcttcaatgtgtgaaaacccaattgttcaaccctacaggatccaacaggcaatcgcaacaggcatcttaccattatcacccttgttcctccaacaaccgtcagccctattacagcagttacctttggtccatttggtggcacaaaacatcagggcacaacaactacaacaacttgtgctagcaaaccttgctgcatactctcaacaacatcagtttcttccattcaaccaactggctgcattgaactctgctgcttatttgcaacaacaattaccattc

SEQ ID NO: 342658 - DNA, 480 bp, Zea mays
  unsure (1)..(480): unsure at all n locations
acgattgagaccaacaagctacatanaaagtggaatccagtagcaacactagagcaacaatggggagcgtatattttccgtgcgttatgctccttgctctttctgcatgtgttgctaacgcgacaattttccctcaaagctcacaagctcctatagcttcccttcttcccccataccttccatcaatgatagcttcagtatgtgaaaacccagctcttcaaccctataggctccaacaagcaatcgcagcaagcaacatacctttatcacccttgtttcaacaatcgccagccctatctttggtgcaggcattggtacaaaccatcttggcacagcagctgcagcaactcgtgctacctgtgatcaaccaagtagctctggcaaacctttctctctactctcagcaacaacaatttctttcattcaaccaactggctacatttgaaccgtgctgcttatttgcaacaacaactattacca

SEQ ID NO: 342659 - DNA, 336 bp, Zea mays
ggaatccagtagcaacaatagagcaacaatggagaccaagatattttccctccttatgctccttgctctttctacatgtgttgctaacgcgacaattttccctcaatgctcacaagctcctatagcttccctttttcccccataccttccatcaattatagcttcagtatgtgaaaacccagctcttcaaccatataggcttcaacaagcaatcgcagcaagcaacatacctttatcgcccttgttgtgtcaacaatcgccagccctatctttggtgcagtcattggtacaaaccatcagggcacaacagctgcagcaactcgtgctacctgtgat

SEQ ID NO: 342660 - DNA, 405 bp, Zea mays
ccccccgcgagctctatctttcgtggcgcagctcggcagctgggcggccgccccccgccggcgccacgccctaagctacgccaggttcccagttcttcgtccgtccttttgctaggtcttcgttggacacttaaacggcgacgagcaccgccagacgcgctggtgcctggatccggcgggagtgcttcaagttttgacggttcgtctctctcgttgtttccggcggggttatgaaggcggtgggatacagcccctacgacagcagcgcacaaaatagaggactaagagggcgatctttcagtgggaatgtcgtagcatctgctggggcatttccttacatgagggcaaataatgatctggagagtgaaatacatcgggttgagcaagatgcatatactggtattc

SEQ ID NO: 342661 - DNA, 317 bp, Zea mays
cctcctttaccctatctttctcgccgcctgttatcttgctgcagctacgctcgctaggagagctcctacccaacgtgggctccctcccattccattcccctcccgtttcaccagtttctggcccccaccttatcacgcacaaaccactccaatttcccacctgactcatctccggttttatccactcccgcttacctcttcctcacgtacgggatttgattggtggttaatcttctccttagatgaagcacattatccgttcatcatcctaatagactaaacttagccgctcccgttcccacgctaatgctacaccc

SEQ ID NO: 342662 - DNA, 380 bp, Zea mays
caactagcaacatagaaagcacaatagtgtaccaacaatggcagccaaaatattttgcttccttatgctccttggtctttctgcaagtgttgctaccgcaaccattttcccacaatgctcacaagctcctatagcttcccttcttcccccatacctctcaccagcggtgtcttcaatgtgtgaaaacccaattgttcaaccctacaggatccaacaggcaatcgcaacaggcatcttaccattatcacccttgttcctccaacaaccgtcagccctattacagcagttacctttggtccatttggtggcacaaaacatcagggcacaacaactacaacaacttgtgctagcaaaccttgctgcatactctcagcaacatc

SEQ ID NO: 342663 - DNA, 375 bp, Zea mays
tcccgttcgacccacgcatccctcctcctcctccacccataccttattttccccctactcttcccgctaccagagtctcttataaaaaagacgatacccctccctttcctgattaaccacctactcttcatctcccttcttctctatacctccgcaattcccccttccatatcaaaatccaactccactaccaaaatccccttcactaacaatctctcgcatcaaaattcctttcttatcctttatcattcaattatcacccatcctttctttgtctccagccttatctcaaccctctatttcctacaaactcctgtcaactcttctaccttttattcattcactacctgtagacaaccttttttctttttttcc

SEQ ID NO: 342664 - DNA, 286 bp, Zea mays
atacgcttcctgtcagttgtatattgtgagtcatgcttccagtgggagacacggggaaatgggaagaggttctctaaggagcgaggcgggcccaactgtctgcgatgtgtttgataacatgtcgtcgtgactgtttaccaagaacaccctctagatcatgcccttcaagctcccacccgtctgcccttattatttccgtgtgcgcatgatagcagtgtggatttgctgcagcgatgtgcactacctatatgaaatgctcatctctcactctttcttttttgatccc

SEQ ID NO: 342665 - DNA, 175 bp, Zea mays
tcccctcgtcacttcccatgacgacgcccttctccacgccttccccacctaaccctaaaggagttttcttaaatgcgacggctcttctgctacagcccctatttaactccaacataccacctccaatatcatatactgctcctacactcctgactacctatatctaccccaccct

SEQ ID NO: 342666 - DNA, 468 bp, Zea mays
caagcaacatagaaagtggaatccagtagcaacaatagagcaacaatggcgaccaagatatggtccctccttatgctccttgctctttctgcatgtgttgctaacgcgacaattttccctcaatgctcacaagctcctatagcttcccttcttcccccataccttccatcaatgatagcttcagtatgtgaaaacccagctcttcaaccctataggctccaacaagcaatcgcagcaagcaacatacctttatcacccttgtttcaacaatcgccagccctatctttggtgcagtcattggtacaaaccatcagggcacagcagctgcagcaactcgtgctacctgtgatcaaccaagtagctctggcaaacctttctccctactctcagcaacaacaatttcttccattcaaccaactgtctacattgaaccgtgctgcttatttgcagcaacaactattaccattc

SEQ ID NO: 342667 - DNA, 333 bp, Zea mays
gaattaccgggccgagcgcgcacgcgtccgattgagaccaactagcatcatagaaagcactatagtgtaccaacaatggcagccaaaatgtgttgtttccttatgctccttggtctttctgcaagtgctgctacagcgaccattttcccgcaatgctcgcaagctcctatagcttcccttcttcccccgtacctttcaccagcggtgtcttcggtatgtgaaaacccaattcttcaaccctacatgatccaacaggcaatctcatctggcatcttacctttatcacccttgttcctccaacaatcatcagccctattacatcagttacctttg

SEQ ID NO: 342668 - DNA, 224 bp, Zea mays
cggctccagctgagttcgcttccccatcctcatccccatcccgctcccgctagctccgaggcgtggtctccgagatcggggggcctttccttgccgatttgatccgcccagctggaaaacgaaaatcgctgatgggttttggaaggaaagttgtcatttcttggtgaggtttccgtttctggatcgactagctgatcgatcgtagtatcgtactatccaccatg

SEQ ID NO: 342669 - DNA, 298 bp, Zea mays
gcagcttctgcttgctctggggggaaggatagagagagagagcgagagagagatctaagagagatgtctataggtggtcctcgatcaaatatgttggcgagtttcaccagtcaggcagtggaggtgccggtagagctagtagcagcaggcagtcggacgccatctcccaagacgaatgcatcgcacctggtatggcgcttactgaccacttccaacctcgacgcatccgtgcagatcgagcgaccacagtcaccttgtctactcacacaccaaccaggctctactacgacccaggtct

SEQ ID NO: 342670 - DNA, 369 bp, Zea mays
gagcattcagaaacacaccaagcgaagcgcactagcaacgacctaacaacaatggctaccaagatattagccctccttgcgcttcttgccctttttgtgagcgcaacaaatgcgttcattattccacaatgctcacttgctcctagtgccattattccacagttcctcccaccagttacttcaatgggcttcgaacacctagctgtgcaagccaacatgcaacaacaagcgcttgcggcgagcgtcttacaacaaccaattgcccaattgcaacaacaatccttgccacatctaacaatacaagccatcacaacgcaacaaccacaacaattcctaccaacactgaaccacctaaccatggtgaaccct

SEQ ID NO: 342671 - DNA, 448 bp, Zea mays
ctagcaacatagaaagcacaatagtgtaccaacaatggcagccaaaatattttgcctccttatgctccttggtctttctgcaagtgctgctacggcgaccattttcccgaaatgctcgcaagctcctatagcttcccttcttcccccgtacctctcaccagcggtgtcttcggtatgtgaaaacccaattcttcaaccctacaggatccaacaggcaatcacagctggcatcttacctttatcacccttgttcctccaacaatcatcagccctattacatcagttacctttggtgcatttattggcacaaaacatcagggcacaacaactacaacaacttgtgctagcaaaccttgctgcctactctcagcaacagcagtttcttccattcaaccaactagctgcattgaactctgcttcttatttgcaacaacaacaactaccattc

SEQ ID NO: 342672 - DNA, 448 bp, Zea mays
acgctgggtcttcagaccattagctttatctactccagagcgcagaagaacccgatcgacaccgggagggtgttgctcgttgccctcgctctcctggctctcgctgcgagcgccacctccacgcatacaagcggcggctgcggctgccagccaccgccgccggttcatctaccgccgccggtgcatctgccacctccggttcacctgccacctccggtgcatctcccaccgccggtccacctgccgccgccggtccacctgccaccgccggtccatgtgccgtcgccggttcatctgccgccgccaccatgccactaccctactcaaccagcccggcctcagcctcattcccagccacacccatgcccgtgccaacagccgcattcaagcccgtgccagctgcaaggaacctgcggcgttggcagcaccccgatcctgggccaatgcg

SEQ ID NO: 342673 - DNA, 424 bp, Zea mays
cagcaaagcggcagtgcgtagagaggatcgtcgaacagaacagcatgaagatggtcatcggtctcgtcgtgtgcctggctctgtcagctgccagcgcctctgcaatgcagatgccctgcccctgcgcggggctgcagggcttgtacggcgctggcgccggcctgacgacgatgatgggcgccggcgggctgtacccctacgcggagtacctgaggcagccgcagtgcatcccgctggcggcggcgccctactacgccgggtgtgggcagacgagcgccatgtaccagccgctccggcaacagtgctgccagcagcagatgaggatgatggacgtgcagtccgtcgcgcagcagctgcagatgatgatgcagcttgagcgtgccgctgccgccagcagcagcctgtacgaaccatctctgatgca

SEQ ID NO: 342674 - DNA, 338 bp, Zea mays
gaattcccaagtcagacccacacatactgatcattcatacactctcctttctatcctctctatccactccctaccctcatcctcaagaaaaattttaaacataaaagcactacttcccccttttcctatctcatccaataccctcactttcacacaattctcattttctcctaccacccttaatccatttttttcccccacctattacttcctcaaactcctaacactcctctaccccatccaactttctacaacccactctcccttcttactcttttaccacatcccatttcccaatcttttcaccactccttccctcttctccacacttcaattca

SEQ ID NO: 342675 - DNA, 351 bp, Zea mays
accaagcgaagcacattagcaacaacctaacaacaatggctaccaagatattatccctccttgcgcttcttgcgctttttgcgagcgcaacaaatgcgttcattattccacaatgctcacttgctccaagttccattattacacagttcctcccaccagttacttcaatgggcttcgaacacccagctgtgcaagcctataggctacaacaagcaattgcggcgagcgtcttacaacaaccaatttcccagttgcaacaacaatccttggcacatctaacaatacaaaccatcgcaacgcaacagcaacaacaattcctaccagcactgagccacctagccatggtgaacc

SEQ ID NO: 342676 - DNA, 245 bp, Zea mays
ccgacgcgtggcatacaccgtgaactctatctacatcaaagcgcaaacaaacgccatcgagactatgagggtgttgctcgccgcctcgctctcaggctctgctgcgagcgcacctcactcatacatacggggctgtagtgccaccactgcccccgccatctatcgcgatggtgcattgcagatacgctcactgcaccttatggcatcaccaacagttgtacacatgaacacgcctgtacaactgt

SEQ ID NO: 342677 - DNA, 307 bp, Zea mays
caacaagcaacatagaaagtggaatccagtagcaacaatagagcaacaatggagaccaagatattttccctccttatgctccttgctctttctacatgtgttgctaacgcgacaattttccctcaatgctcacaagctcctatagcttccctttttcccccataccttccatcaattatagcttcagtatgtgaaaacccagctcttcaaccatataggcttcaacaagcaatcgcagcaagcaacatacctttatcgcccttgttgtgtcaacaatcgccagccctatctttggtgcagtcattgg

SEQ ID NO: 342678 - DNA, 139 bp, Zea mays
tcgctaccccccgcattaactaacaaaaaaaaacccgggcccttgggggccttttgaaagaagaggacccatttctttcccaagtttggccttcgcaaaggaaacccggggccctttcatttcgggcgcggggggggtt

SEQ ID NO: 342679 - DNA, 56 bp, Zea mays
tcgagaccattagctttatctactacagagcgccaaagaacccgatcgacaccatg

SEQ ID NO: 342680 - DNA, 115 bp, Zea mays
aaccaagtagctctggcaaacctttctccctactctcagcaacaacaatttcttccattcaaccaactgtctacattggaccgggctgcttatttgcagcaaccactattaccat

SEQ ID NO: 342681 - DNA, 87 bp, Zea mays
caactagcaacatagaaagcacaatagtgtaccaacaatggcagccaaaatattttgcttccttatgctcccttggtctttctgcaa

SEQ ID NO: 342682 - DNA, 285 bp, Zea mays
acgcactgggtcttcagaccattagctttatctactccagagcgcagaagaacccgatcgacaccatgagggtgttgctcgttgcccttgctctcctggctctcgctgcgagccgccaccttcacgcataacaacggggggtgcggcttgcaaccaccggcgccggttcatctaccgccgccggtgcatctgccacctacggttcacctgccacctccggtgcatctcccaccgccggtccacctgccgccgccggtccacctgccaccggcggtccatgtgccg

SEQ ID NO: 342683 - DNA, 192 bp, Zea mays
tcggctacatattgaacccgagctgactctctttagggtgccaaaccacgttcgctagtttgcgaaggtgtttctattttatcaagtcaccatgattaaatctgctgggcgcctacatacaacacaacaactgcttaaacccttggcggaggctaatccattggctggtggcacattaccgcatttacaact

SEQ ID NO: 342684 - DNA, 437 bp, Zea mays
cagaccattagctttatctactccagagcgcagaagaacccgatcgacaccatgagggtgttgctcgttgccctcgctctcctggctctcgctgcgagcgccacctccacgcatacaagcggcggctgcggctgccagccaccgccgccggttcatctaccgccgccggtgcatctgccacctccggttcacctgccacctccggtgcatctcccaccgccggtccacctgccgccgccggtccacctgccaccgccggtccatgtgccgccgccggttcatctgccgccgccaccatgccactaccctactcaaccgccccggcctcagcctcatccccagccacacccatgcccgtgccaacagccgcatccaagcccgtgccagctgcaaggaacctgcggcgttggcagcaccccgatcctgggccagtgcgt

SEQ ID NO: 342685 - DNA, 163 bp, Zea mays
ggacataaaaaggggaatccaatagcaacaatagagccacaatggagacccaaatattttgccttcctatgcctcctggtctttttacaaggggtggtaaacccaccatttttccttaaaggctaccaagctctattggtttccttttttccccaaaactttc

SEQ ID NO: 342686 - DNA, 129 bp, Zea mays
gccacgcgttcggagaccattagctttatctactccagagcgcagaagaacccgatcgacaccatgagggtgttgctcgttggccttgctctcctggctctcgctgcgagcgccacctccacgcataca

SEQ ID NO: 342687 - DNA, 106 bp, Zea mays
cgaacgatgaccatgacgtactcgatgatctactgcaccgctaaacacaccaccggcgccaccatcaatacgatccctgtcccaagatccgtccggtgcgtccatg

SEQ ID NO: 342688 - DNA, 348 bp, Zea mays
caactagcaacatagaaagcacaatagtgtaccaacaatggcagccaaaatattttgcttccttatgctccttggtctttctgcaagtgctgctaccgcaaccattttcccacaatgctcacaagctcctatagcttcctttcttcccccatacctctcaccagcggtgtcttcagtatgtgaaaacccaattcttcaaccctacaggatccaacaggcaatcgcagcaggcatcttacctttatcacccttgttcctccaacaaccgtcagccctattacagcagttacctttggtgcatttgttggcacaaaacatcaaggcacaacaactacaacaacttgtgct

SEQ ID NO: 342689 - DNA, 63 bp, Zea mays
gacgatgatgacatggatcccactcaatactatgagaataggctcaaggctcttgattcactg

SEQ ID NO: 342690 - DNA, 389 bp, Zea mays
cagaccattagctttatctactccagagcgcagaagaacccgatcgacaccatgagggtgttgctcgttgccctcgctctcctggctctcgctgcgagcgccacctccacgcatacaagcggcggctgcggctgccagccaccgccgccggttcatctaccgccgccggtgcatctgccacctccggttcacctgccacctccggtgcatctcccaccgccggtccacctgccgccgccggtccacctgccaccgccggtccatgtgccgccagcggttcatctgccgccgccaccatgccactaccctactcaaccgccccggcctcagcctcatccccagccacacccatgcccgtgccaacagccgcatacaagcccgtgccagct

SEQ ID NO: 342691 - DNA, 316 bp, Zea mays
ctggacgtcagcctagcaattagctcatcgactccagattggagaactcgacaccatgaaggtgctgatcgttgcccttgctctcctggcgctcgctgcgagcgccgcctccagtacaagcggcggctgtggctgccagacaccaccgtttcatctaccgcctccgttctatatgccgcctccgttctatctgccgccgcagcagcagccgcagccatggcaataccccactcaaccaccgcagctaagcccgtgccagcagttcggatcctgcggcgtcagcagcgtcagcagcccgttcctgggccaatgcgtc

SEQ ID NO: 342692 - DNA, 377 bp, Zea mays
agaccattagctttatctactccagagcgcaaaaaaccccgaccgaaccataagggggtggtcggtgccctcgcttttctggctttcgttgcaacccccacctccacccaaccaaacgggggttgcggttgccacccaccgccgccggttcattaaccgccgccgggcattctgccacttccggtaacctgccacctccggtgcatctcccaccggcggtccacctgccgccgccggtccacctgccaccgccgttccatgtgccgccaccggttcatctgccgtcgccaccatgccactaccctactcaaccgccccggcctcagcctcattcccagccacacccatgcccgtgccaacagccgcatccaaacccg

SEQ ID NO: 342693 - DNA, 315 bp, Zea mays
  unsure (1)..(315): unsure at all n locations
gaccattagctttatctactccagagcgcagaagaacccgatcgacaccatgagggtgttgctcgttgccctcgctctcctggctctcgctgcgagcgccacctccacgcatacaagcggcggctgcggctgccagccaccgccgccggttcatctaccgccgccggtgcatctgccacctacggttcacctgccacctacggtgcatctaccaccgccggtccacctgctcgcgccggtccacctgccaccgncggtccatgtgccgccgccggttcatctgccgccgccaccatgccactaccctactcaacc

SEQ ID NO: 342694 - DNA, 438 bp, Zea mays
ctgggtcttcagaccattagctttatctactccagagcgcagaagaacccgatcgacaccatgagggtgttgctcgttgccctcgctctcctggctctcgctgcgagcgccacctccacgcatacaagcggcggctgcggctgccagccaccgacgacggttcatctaccgccgccggtgcatctgccacctgcggttcacctgccacctccggtgcatctcccaccgccggtccacctgccgccgccggtccacctgccaccgccggtccatgtgccgtcgacggttcatctgccgcctgcaccatgccactaccctactcaaccggcccggcctcaggctcatccccagccacacccatgcccgtgccaacagccgattccaaccccgtgccagctgcagggaaacctgcggcgttggcagaaccccgatcctggg

SEQ ID NO: 342695 - DNA, 263 bp, Zea mays
attgagaccaacaagcaacatagaaagtggaatccagtagcaacaatagagcaacaatggcgaccaagatattttccctccttatgctccttgctctttctgcatgtgttgctaacgcgacaattttccctcaatgctcacaagctcctatagcttgccttcttcccccataccttccatcaatgatagcttcagtatgtgaaaacccagctcttcaaccctataggctccaacaagcaatcgcagcaagcaacataccttta

SEQ ID NO: 342696 - DNA, 366 bp, Zea mays
cattagctttatctactccagagcgcagaagaacccgatcgacaccatgagggtgttgctcgttgccctcgctctcctggctctcgctgcgagcgccacctccacgcatacaagcggcggctgcggctgccagccaccgccggcggttcatctaccgccgccggtgcatctgccacctccggttcacctgccacctccggtgcatctcccaccgccggtccacctgccgccgccggtccacctgccaccgccggtccatgtgccgccgccggttcatctgccgccgccaccatgccactaccctactcaaccgacccggcctcagcctcatccccagccacacccatgcccgtgccaacagccgca

SEQ ID NO: 342697 - DNA, 442 bp, Zea mays
caactagcaacatagaaagcacaatagtgtaccaacaatggcagccaaaatattttgcttacttatgctccttgggctttctgcaagtgctgctaccgcaaccattttcccacaatgctcacaagctcctatagcttcctttgttcccccatacctctcaccagcggtgtcttcagtatgtgaaaacccaattcttcaaccctacaggatccaacaggcaatcgcagcaggcatcttacctttatcacccttgttactccaacaaccgtcagccctattacagcagttacctttggtgcatttgttggcacaaaacatcaaggcacatcagctacaacaacttgtgctacgaaaccttgctgactactctgagcaacagcagtttcttccattcaaccaactggctgcattgaactctgctgattatttgcaacaacaacta

SEQ ID NO: 342698 - DNA, 322 bp, Zea mays
  unsure (1)..(322): unsure at all n locations
tgagaccaactagcaacatagaaagcacaatagtgtaccaacaatggcagccaaaatattgtgcctacctatgctccttggtctttctgcaagtgctgctacagcgaccattttcccgcaatgctcgcaagctcctatagcttcccttcttcccccgtacctctcaccagcggtgtcttcggtatgtgaaaacccaattcttcaaccctacaagatccaacaggcaatcgcagctggcatcttacctttatcacccttgtttctccaacaatcattaaccctattacaacagntacctttggtgcatttattggcacaaaac

SEQ ID NO: 342699 - DNA, 295 bp, Zea mays
ctagttctagatcgcgagcggccgcccttttttttttttttttatataacatttttttatgctttgcatcttattaatcctggcaaccatacataacatagtaccctgtcagtctggctcaatgcatacggacataccattcataccatctcatatgcttgtaccaaatcaactttgtctggcttcacagtgcctgaaatctaaggcgtccaggcatcactagccgtttatgtcgaagctttatgacaaccattactccaacagccgtcacgaatatttcaacccttaccttttg

SEQ ID NO: 342700 - DNA, 376 bp, Zea mays
  unsure (1)..(376): unsure at all n locations
cagaaacacaccaagcgaagcgcactagcgacaacctaacaacaatggctaccaagatattatccctccttgcgcttcttgcgctttttgcgagcgcaacaaatgcgtccattattccacaatgctcacttgctcctagttccattattccacagttcctcccaccagttacttcaatggccttcgaacacccagctgtgcaagcctataggctacaacaagcgattgcggcgagcgtcttacaacaaccaattgcccaattgcaacaacaatgcttggcacatctaacaatacaaaccatcgcaacgcaacagcaacaacagttcctaccagcactgagccacctagccatggtgaaccctgtcgnctacttgca

SEQ ID NO: 342701 - DNA, 334 bp, Zea mays
ccagagcgcagaagaacccgatcgacaccatgagggtgttgctcgttgccctcgctctcctggctctcgctgcgagcgccacctccacgcatacaagcggcggctgcggctgccagccaccgccgccggttcatctaccgccgccggtgcatctgccacctccggttcacctgccacctccggtgcatctcccaccgccggtccacctgccgccgccggtccacctgccaccgccggtccatgtgccgccgccggttcatctgccgccgccaccatgccactaccctactgaaccgccccggcctcagcctcatccccagccacacccatgccc

SEQ ID NO: 342702 - DNA, 392 bp, Zea mays
attttgagcattcagaaacacaccaagcgaagcgcactagcaacaacctaacaacaatggctaccaagatattatccctccttgcgcttcttgcgctttttgcgagcgcaacaaatgcgtccattattccacaatgctcacttgctcctagttccattattccacagttcctcccaccagttacttcaatggccttcgaacacccagctgtgcaagcctataggctacaacaagcgattgcggcgagcgtcttacaacaaccaattgcccaattgcaacaacaatccttggcacatctaacaatacaaaccatcgcaacgcaacagcaacaacagttcctaccagcactgagccacctagccatggtgaaccctgtcgcctacttgcaacag

SEQ ID NO: 342703 - DNA, 432 bp, Zea mays
atagaaagcacaatagtgtaccaacaatggcagccaaaatattttgcttccttatgctccttggtctttctgcaagtgttgctaccgcaaccattttcccacaatgctcacaagctcctatagcttcccttcttcccccatacctctcaccagcggtgtcttcaatgtgtgaaaacccaattgttcaaccctacaggatccaacaggcaatcgcaacaggcatcttaccattatcacccttgttcctccaacaaccgtcagccctattacagcagttacctttggtccatttggtggcacaaaacatcaaggcacaacaactacaacaacttgtgctagcaaaccttgctgcatactctcagcaacatcagtttcttttcattcaaccaactggctgcattgaactctgctgcttatttgcaacaacaatta

SEQ ID NO: 342704 - DNA, 101 bp, Zea mays
cataccattcgcttgatctactccagagcgcagaataacccgatcgacaccatgagggggttgttcgatgccctcactttaccggctctggctgaaaacgc

SEQ ID NO: 342705 - DNA, 400 bp, Zea mays
cagaccattagctttatctactccagagcgcagaagaacccgatcgacaccatgagggtgttgctcgttgccctcgctctcctggctctcgctgcgagcgccacctccacgcatacaagcggcggctgcggctgccagccaccgccgccggttcatctaccgccgccggtgcatctgccacctccggttcacctgccacctccggtgcatctcccaccggcggtccacctgccgccgccggtccacctgccaccgccggtccatgtgccgccgacggttcatctgccgccgccaccatgccactaccctactcacaccgcccgggctcagcctcatccccagccacacccatgcccgtgccaacagccgcatccaagcccgtgccagctgcagggaacct

SEQ ID NO: 342706 - DNA, 272 bp, Zea mays
attttgagcattcataaacacaccaagcgaagctacctagcgacgacttaacaacaatggctaccaagatattagccctccttgcgcttcttgtcctttttgtgagcgcaacaaatgcgttgattattccacaatgctcacttgctcctagagccattataccacaggtgcttccaccagctacttcaatgggcttcgaacaactagctgtgcaagcctacaagctacaacaagcggttggggtgagcgtgttacaacaacccatttaccca

SEQ ID NO: 342707 - DNA, 361 bp, Zea mays
gaccaactagcaacatagaaagcacaatagtgtaccaacaatggcagccaaaatattttgcctccttatgctccttggtctttctgcatgtgctgctacggtgaccattttcccaaaatgctcgcaagctgctatagcttcccttcttcccccgtacctctcaccagaggagtcttgggtatgtgaaaacccaattcttcaaccctacaggatccaacaggcaatcacagctggcatctgacgtttatcacccttgctcctccaacaatcatgagccctattacatcagtgacctttggtgcatgcattggcacaaaacatcagggcacaacaactacaacaacttgtgctaacaaatctt

SEQ ID NO: 342708 - DNA, 264 bp, Zea mays
atcgactccagattggagaactcgacaccatgaaggtgctgatcgttgcccttgctctcctggcgctcgctgcgagcgcccgctccagtacaagcggcggctgtggctgccagacaccaccgtttcatctaccgcctccgttctatatgccggctccgttctatctgccgccgcagcagcagccgcagccatggcaataccccactcaaccaccgcagctaagcccgtgccagcagttcggatcctgcggcgtcggcagcgtcg

SEQ ID NO: 342709 - DNA, 315 bp, Zea mays
caccaagcgaagcgcactaacaacaacctaacaacaatggctaccaagatattatccctgcttgcgcttcttgcgctttttgcgagcgcaacaaatgcgtccattattccacaatgctcacttgctcctagttccattattccacagttcctcccaccagttacttcactggccttcgaacacccagctgtgcaagcctatatgctacaacaagcgattgcggcgagcgtcttacaacaaccaattgcccaattgcaacaacaattcttggcacatctaacaatacaaaccatcgcaacgcaacagcaacaacag

SEQ ID NO: 342710 - DNA, 341 bp, Zea mays
acacaccaagcgaagcgcactagcaacgacctaacaacaatggctaccaagatattagccctccttgcgcttcttgccctttttgggagcgcaacaaatgcgttcattattccacaatgctcacttgctcctagtgccattattccacagttcctcccaccagttacttcaatgggcttcgaacacctagctgtgcaagccaacatgcaacaacaagcgcttgcggcgagcgtcttacaacaaccaattgcccaattgcaacaacaatccttgccacatctaacaatacaagccatcacaacgcaacagcaacaacagttcctaccagcactgagccacct

SEQ ID NO: 342711 - DNA, 129 bp, Zea mays
ctgggtcttcagaccattagctttatctactgcagagcgcagaagaacccgatcgacaccatgagggtgttgctcgttgccctcgctctcctggctctcgctgcgagcgccacctccacgcatacaagc

SEQ ID NO: 342712 - DNA, 436 bp, Zea mays
  unsure (1)..(436): unsure at all n locations
attttgagcattcagaaacacaccaagcgaagcacattagcaacaacctaacaacaatggctaccaagatattatccctccttgcgcttcttgcgctttttgcgagcgcaacaaatgcgttcattattccacaatgctcacttgctccaagttccattattacacagttcctcccaccagttacttcaatgggcttcgaacacccagctgtgcaagcctataggctacaacaagcaattgcggcgagcgtcttacaacaaccaatttcccagttgcaacaacaatccttggcacatctaacaatacaaaccatcgcaacgcaacagcaacaacaattcctaccagcactgagccacctagccatggtgaaccctgccgnctacttgcaacagcagttgcttgcatcaaacccacttgctctggcaaacgtagttgc

SEQ ID NO: 342713 - DNA, 161 bp, Zea mays
ctctatctcctgcttccgaaccctcgcccttccagcccccaaaggcccaaaccccaatctgtctcttccgctagggttagcgtaattccatggccggcgccggtatccacccgttccagcagtggccacccgcggggggcgcgccgcccccgccgggggcc

SEQ ID NO: 342714 - DNA, 235 bp, Zea mays
caacaagcaacatagaaagtggaatccagtagcaacaatagagcaacaatggcgaccaagatattttccctccttatgctccttgctctttctgcatgtgttgctaacgcgacaattttccctcaatgctcacaagctgctatagcttcccttcttcccccataccttccatcaatgataggcttagtatgtgaaaacccagctcttcaaccctatatgctccaacaagcaattg

SEQ ID NO: 342715 - DNA, 193 bp, Zea mays
aattggccgggtccgacccacgccgtccggttctatgatcgcgagccgggcgcctctttttttttttttcttctaacaaacgccactttcttatttgatgggaacgccaccaaacactcgagataacaaaacgcctatttattgacactatacactcataagtaaacctaaaaggaggcgcaccaccaatgat

SEQ ID NO: 342716 - DNA, 345 bp, Zea mays
  unsure (1)..(345): unsure at all n locations
gggtcttcagaccattagctttatctactccagagcgcagaagaacccgatcgacaccatgagggtgttgctcgttgccctcgctctcctggctctcgctgcgagcgccacctccacgcatacaagcggcggctgcggctgccagccaccgccgccggttcatctaccgccgccggtgcatctgccacctgcggttcacctgccacctccggtgcatctcccaccgccggtccacctgccgncgccggtacacctgacaccgccggtcatgtgccgccgccggttaatctgccgccgccacaatgccattaccttactaaacggcccgggcctaagcctaatccc

SEQ ID NO: 342717 - DNA, 353 bp, Zea mays
  unsure (1)..(353): unsure at all n locations
attagctttatctactccagagcgcagaagaacccgatcgacaccatgagggtgttgctcgttgccctcgctctcctggctctcgctgcgagcgccacctccacgcatacaagcggcggctgcggctgccagccaccgccgccggttcatctaccgccgccggagcatctgccacctccggttcacctgccacctacggggcatctcccaccgccggtccacctgccggcgccggttcacctgccaacgncagtccatgtgccgccgcccgttcatctgccgccgccaccatgccactaccctactgaaccgccccggcctcagcctcatacccagccacacccatgcccgtg

SEQ ID NO: 342718 - DNA, 366 bp, Zea mays
cagaccattagctttatctactccagagcgcagaagaacccgatcgacaccatgagggtggtgctcgttgccctcgctctcctggctctcgctgcgagcgccacctccacgcatacaagcggcggctgcggctgccagccaccgccgccggttcatctaccgccgccggtgcatctgccacctccggttcacctgccacctccggtgcatctcccaccgccggtccacctgccgccgccggtccacctgccaccgtcggtacatgtgccggcgacggttcatctgccgtcgtcaccatgccactaccctactcaaccgccccggcctaagcctaatccccagccacacccatgcccgtgccaacag

SEQ ID NO: 342719 - DNA, 417 bp, Zea mays
  unsure (1)..(417): unsure at all n locations
ctgggtcttcagaccattagctttatctactccagagcgcagaagaacccgatcgacaccatgagggtgttgctcgttgccctcgctctcctggctctcgctgcgagcgccacctccacgcatacaagcggcggctgcggctggcagccaccgccgccggttcatctaccgccgccggtgcatctgccacctccggatcacctgccacctncggtgcatctaccaccgccggtccacctgccgccgccggtacacctgccaccgncggtccatgtgccgccgccggttcatctgccgtcgccaccatgccactaccctactcaaccgccccggcctcagcctcatccccagccacacccatgcccgtgccaacagccgcatncaagcccgtgccagctgcagggaacctggcgcgtt

SEQ ID NO: 342720 - DNA, 303 bp, Zea mays
aatcatcattcatcttagtagtataggctccaaatcatatctgccacatcaattgtctaactcggaaaaccatgaagctggtgcttgtgggtcttgctttgattgctctagactcacgtgttccttgtacacagacaagcggctgcagctgatgtcaacaacacatccgtgagcaggatcatgatgcacatgaacttgatgcacaattacagcaacttttaccaccagcacaacatgatcagctgcatcaacaccaacaacagcaggttcacatgcaaccacaaaaacatcagttgcaaccag

SEQ ID NO: 342721 - DNA, 341 bp, Zea mays
cccacgcgtccggcggcagtgcgtagagaggatcgtcgaacagaacagcatgaagatggtcatcgttctcgtcgtgtgcctggctctgtcagctgccagcgcctctgcaatgcagatgccctgcccctgcgcggggctgcagggcttgtacggcgctggcgccggcctgacgacgatgatgggcgccggcgggctgtacccctacgcggagtacctgaggcagccgcagtgcagcccgctggcggcggcgccctactacgccgggtgtgggcagacgagcgccatgtaccagccgctcccgcaacagtgctgccagcagcagatgatgatgatggacgtgc

SEQ ID NO: 342722 - DNA, 320 bp, Zea mays
  unsure (1)..(320): unsure at all n locations
attagctttatctactccagagcgcagaagaacccgatcgacaccatgagggtgttgctcgttgccctcgctctcctggctctcgctgcgagcgccacctccacgcatacaagcggcggctgcggctggcagccaccgccgccggttcatctaccgccgccggtgcatctgccacctccggttcacctgccacctccggtgcatctcccaccgccggtccacctgccgccgccggtccacctgccaccgccggtccatgtgccgccgccggttcatctgccngcgtcaccatgccactaccctactcaaccgccccggcc

SEQ ID NO: 342723 - DNA, 320 bp, Zea mays
ccgtccgataagaaagcacatatacgtgtacacaaccaatgagcacgcccaaaatatctttcgcttcctgtatgcgtgctgtggtactttctcgcaagctgtgtgctacgcgcaacacattcttacccaccaatgcatcaacaagctgcctatagcgttccgcttcttcaccccataccttttcaccagaccgtgtgcttcaaatgtgtgaacaacccacattgttcacaccctacagtgatccaacagtgcaatcgcaacatggacatcttaccaattatcaccacttgtttcctccaacagaccgtcatgccctatta

SEQ ID NO: 342724 - DNA, 283 bp, Zea mays
gaccaacaagcaacatagaaagtggaatccagtagcaacaatagagcaacaatggcgaccaagatattttccctccttatgctccttgctctttctgcatgtgttgctaacgcgacaattttccctcaatgctcacaagctcctatagcttcccttcttcccccataccttccatcaatgatagcttcagtatgtgaaaacccagctcttcaaccctataggctccaacaagcaatcgcagcaagcaacatacctttatcacccttgtttcaacaatcgccag

SEQ ID NO: 342725 - DNA, 51 bp, Zea mays
gatcaagaaaacggcagtgcgtaaaaaggatccgtcaacaaaacaacatga

SEQ ID NO: 342726 - DNA, 252 bp, Zea mays
attcagaaacacaccaagcgaagcgcactagcaacaacctaacaacaatggctaccaagatattagccctccttgcgcttcttgcccttttagtgagcgcaacaaatgcggtcattattccacagtgctcacttgctcctagtgccattattccacagttcctcccaccagttacttcaatgggcttcgaacatccagccgtgcaagcctacaggctacaactagcgcttgcggcgagcgtcttacaacaac

SEQ ID NO: 342727 - DNA, 272 bp, Zea mays
gctccttggtctttctgcaagtgctgctacggcgaccattttcccgaaatgctcgcaagctcctatagcttcccttcttcccccgtacctctcaccagcggtgtcttcggtatgtgaaaacccaattcttcaaccctacaggatccaacaggcaatcacagctggcatcttacctttatcacccttgttgcttcaacaatcatcagccctattacatcagttacctttggtgcatttattggcacaaaacatcagggcacaacaactacaac

SEQ ID NO: 342728 - DNA, 99 bp, Zea mays
ccacaaccgaaaaactcccaaaaaaattggaattccccaattcgggagatcttttaatattcggccgattaaccgacccaattgttagggttaagtttc

SEQ ID NO: 342729 - DNA, 269 bp, Zea mays
gaccatctaccgtcgtttctccctgaggcatatcaacccgaccgacaacctctaggtggtagattatggcatccccatatattggcatatctatagaatgccgagcgttataacacaaacattgctattgtctacttcaaagacagaatctttatcatctacctccactacaatttctgggacatgaccatcagctgccaccatcagaggcttttgaatatgagagccgccaggaagaatcagaacaggtgccatcgcattgtcatgag

SEQ ID NO: 342730 - DNA, 79 bp, Zea mays
atcagcaaagcggcagtgcgtaaagaggatcgtccaacagaacaacatgaagatggtgatcgttctcgtctggtgcctg

SEQ ID NO: 342731 - DNA, 301 bp, Zea mays
ccaactagcaacatagttagcacaatagtgtaccaacaatggcagccaaaatattttgcttccttatgctccttggtctttctgcaagtgctgctaccgcaaccattttcccacaatgctcacaagctcctatagcttcctttcttcccccatacctctcaccagcggtgtcttcagtatgtgaaaacccaattcttcaaccctacaggatccaacaggcaatcgcagcaggcatcttacctgtatcaccctagttcctccaacaaccgtcagccctattacagcagttacctttggtgca

SEQ ID NO: 342732 - DNA, 342 bp, Zea mays
  unsure (1)..(342): unsure at all n locations
attgagaccaactagcaacatagaaagcacaatagtgtaccaacaatggcagccaaaatattttgcctccttatgctccttggtctttctgcaagtgctgctacggcgaccattttcccgcaatgctcgcaagctcctatagcttcccttcttcccccgtacctctcaccagcggtgtcttcggtatgtgaaaacccaattcttcaaccctacaggatccaacaggcaatcgcagctggcatcttacctttatcacccttgttcctccaacaatcatcagccctattacaacagttacctttggtgcatttattggcacaaaacatcanggcacaacaacta

SEQ ID NO: 342733 - DNA, 357 bp, Zea mays
  unsure (1)..(357): unsure at all n locations
tcatcattcatcttagtagtataggcaccaaatcaaatctgcaacatcaattatctaactccaaaaaccatgaagctggtgcttgtggttcttgctttcattgctttagtatcaagtgtttcttgtacacagacaggcggctgcagctgtggtcaacaacaaagccatgagcagcaacatcatccacaacaacatcatccacaaaaacaacaacatcaaccaccaccacaacatcaccagcagcagcaacaccaacaacaacaagttcacatgcaaccacaaaaacatcagcaacaacaagaagttcatgttcaacaancaacaacacaaccgcagcaccaacaacaacaacaacaa

SEQ ID NO: 342734 - DNA, 356 bp, Zea mays
attcagaaacacaccaagcgaagcgcactagcaacaacctaacaacaatggctaccaagatattatccctccttgcgcttcttgcgctttttgcgagcgcaacaaatgcgtccattattccacaatgctcacttgctcctagttccattattccacagttcctcccaccagttacttcaatggccttcgaacacccagctgtgcaagcctataggctacaacaagcgattgcggcgagcgtcttacaacaaccaattgcccaattgcaacaacaatccttggcacatctaacaatacaaaccatcgcaacgcaacagcaacaacagttcctaccagcactgagccacctagccatg

SEQ ID NO: 342735 - DNA, 278 bp, Zea mays
  unsure (1)..(278): unsure at all n locations
ctgggtcttcagaccattagctttatctactccagagcgcagaagaacccgatcgacaccatgagggtgttgctcgttgccctcgctctcctggctctcgctgcgagcgccacctccacgcatacaagcggcggctgcggctgccagccaccgccgccggttcatctaccgccgccggtgcatctgccacctncggttcacctgccacctccggtgcatctnccaccgccggtccacctgccgncgccggtccacctgccaccgccggtccatgtgcc

SEQ ID NO: 342736 - DNA, 255 bp, Zea mays
caacaagcaacatagaaagtggaatccagtagcaacaatagagcaacaatggagaccaagatattttccctccttatgctccttgctctttctacatgtgttgctaacgcgacaattttccctcaatgctcacaagctcctatagcttccctttttcccccataccttccatcaattatagcttcagtatgtgaaaacccagctcttcaaccatataggcttcaacaagcaatcgcagcaagcaacataccttta

SEQ ID NO: 342737 - DNA, 338 bp, Zea mays
aagcaacatagaaagtggaatccagtagcaacaatagagcaacaatggagaccaagatattttccctccttatgctccttgctctttctacatgtgttgctaacgcgacaattttccctcaatgctcacaagctcctatagcttccctttttcccccataccttccatcaattatagcttcagtatgtgaaaacccagctcttcaaccatataggcttcaacaagcaatcgcagcaagcaacatacctttatcgcccttgttgtgtcaacaatcgccagccctatctttggtgcagtcattggtacaaaccatcaaggcacaacagctgcagcaactc

SEQ ID NO: 342738 - DNA, 443 bp, Zea mays
agcaacatagaaagcacaatagtgtaccaacaatggcagctaaaatattttgcctccttatgctccttggtctttctgcaagtgctgctacggcgaccattttcccacaatgctcacaagctcctatagcttcccttcttcccccgtacctctcaccaacggtgtcttcggtatgtgaaaacccaattcttcaaccctacaggatccaacaggcaatcgcagctggcatcttacctttatcacccttgttcctccaacaatcatcagccctattacagcagttacctttggtgcatttattggcacaaaacatcagggcacaacaactacaacaacttgtgctagcaaaccttgctgcctactctcagcaacagcagtttcttccattcaaccaactagctgcattgaactctgcttcttattttgcacaacaacaactacca

SEQ ID NO: 342739 - DNA, 76 bp, Zea mays
cccacgcgtccgaaaaaaaaaaaaaaaaaaaaaaaaaaaaaaaaaaaaaaaaaaaaaaaaaaagggcgggcgatat

SEQ ID NO: 342740 - DNA, 78 bp, Zea mays
ttccgggttttcaaaaccattgcttttatttattccaaaccccaaaaaaacccgttcgaccccttgggggggtggttc

SEQ ID NO: 342741 - DNA, 384 bp, Zea mays
  unsure (1)..(384): unsure at all n locations
atcaatcatcattcatcttagtagtataggcaccaaatcaaatctgcaacatcaattatctaactgcaaaaaccatgaagctggtgcttggggttcttgctttcattgctttagtatcaagtgtttcttgtacacagacaggcggctgcagctgtggtcaacaacaaagccatgagcagcaacatcatccacaacaacatcatccacaaaaacaacaacatcaaccaccaccacaacatcaccagcagcagcaacaccaacaacaacaagttcacatgcaaccacaaaaacatcagcaacaacaagaagttcatgttcaacaacaacaacaacaaccgcagcacccacaacaacaaccacaacagcnccaacaacaacattaat

SEQ ID NO: 342742 - DNA, 394 bp, Zea mays
caactagcaacatagaaagcacaatagtgtaccaacaatggcagccaaaatattttgcttccttatgctccttggtctttctgcaagtgttgctaccgcaaccattttcccacaatgctcacaagctcctatagcttcccttcttcccccatacctctcaccagcggtgtcttcaatgtgtgaaaacccaattgttcaaccctacaggatccaacaggcaatcgcaacaggcatcttaccattatcacccttgttcctccaacaaccgtcagccctattacagcagttacctttggtccatttggtggcacaaaacatcagggcacaacaactacaacaacttgtgctagcaaaccttgctgcatactctcagcaacatcagtttcttccattc

SEQ ID NO: 342743 - DNA, 396 bp, Zea mays
  unsure (1)..(396): unsure at all n locations
gacgggctgaaaaccgaagcaccgaacacacgcgcaccgcagcttgtccgtatcgcccatcgccatgctcgcctacctcctcaacggcccagccgccgccatcgccgcggcgcccagcgccttcctcctccgctccctcccgccggcgaagaccccgttcctatcctctctcccgcgcccggtctcgccgaggcgcgctgccgcagccgcgttcgccttcaaccccgctgccgcagcggcccccatcgtggcgtcgctgctcgagggccccgtgctggtctgggccggccggctctgcctctactacgcgcttctccacgtcgggctcgccggctccccgcgcaaccccttnctctctcacgagatcggcggcgaggacggcgccggggataagcg

SEQ ID NO: 342744 - DNA, 422 bp, Zea mays
cggacgcgtgggtgagaccaacaagcaacatagaaagtggaatacagtagcaacaatagagcaacaatggcggccaagatattttccatccttatgctccttgctctttctgcatgtgttgctaacgcgaccatttttcctcaatactcacaagctcctatagctgcccttcttcccccataccttccatcaatgaccgcttcagtatgtgaaaacccagcccttcaaccctacaggctccaacaagcaatcgcaacaagcaacttacctttatcacccctgttctttcaacaatcgccagccctatctttggtgcagtcattggtacaaaccatcagggcacaacagctgcagcaactcgtgctaccagtgatcagccaagtagctcttgcaaacctttctccctactctcagcaacaaca

SEQ ID NO: 342745 - DNA, 319 bp, Zea mays
tgggtcttcagaccattagctttatctactccagagcgcagaagaacccgatcgacaccatgagggtgttgctcgttgccctcgctctcctggctctcgctgcgagcgccacctccacgcatacaagcggcggctgcggctgccagccaccgccgccggttcatctaccgccgccggtgcatctgccacctccggttcacctgccacctccggtgcatctcccaccgccggtccacctgccgccgccggtccacctgccaccgccggtccatgtgccgccgccggttcatctgccgccgccaccatgccactaccctac

SEQ ID NO: 342746 - DNA, 91 bp, Zea mays
cttcggacaaaaaaaccaaccgggccttctttcaaccggttttccaccccggacacccggaaattggtcctatttgccccttttgcccttt

SEQ ID NO: 342747 - DNA, 242 bp, Zea mays
attcagaaacacaccaagcgaagcgcactagcaacaacctaacaacaatggctaccaagatattatgcctccttgcgcttcttgcgctttttgcgagcgcaacaaatgcgtccattattccacaatgctcacttgctcctagttccattattccacagttcctcccaccagttacttcaatggccttcgaacacccagctgtgcaagcctataggctacaacaaagcgattgcgggagagcg

SEQ ID NO: 342748 - DNA, 440 bp, Zea mays
aacaagcaacatagaaagtggaatacagtagcaacaatagagcaacaatggcggccaagatattttccatccttatgctccttgctctttctgcatgtgttgctaacgcgaccatttttcctcaatactcacaagctcctatagctgcccttcttcccccataccttccatcaatgaccgcttcagtatgtgaaaacccagcccttcaaccctacaggctccaacaagcaatcgcaacaagcaacttacctttatcacccctgttctttcaacaatcgccagccctatctttggtgcagtcattggtacaaaccatcagggcacaacagctgcagcaactcgtgctaccagtgatcagccaagtagctctggcaaacctttctccctactctcagcaacaacaatttcttccattcaaccaactgtctacactgaaccct

SEQ ID NO: 342749 - DNA, 362 bp, Zea mays
ctgggtcttcagaccattagctttatctactccagagcgcagaagaacccgatcgagaccatgagggtgttgctcgttgccctcgctctcctggctctcgctgcgagcgccacctccacgcatacaagcggcggctgcggctgccagccaccgccgccggttcatctaccgccgccggtgcatctgccacctccggttcacctgccacctccggtgcatctcccaccgccggtccacctgccgccgccggtccacctgccaccgccggtccatgtgccgccgccggttcatctgccgccgccaccatgccactaccctactcaaccgccccggcctcagcctcatccccagccacacccatg

SEQ ID NO: 342750 - DNA, 327 bp, Zea mays
cccacgcgtccgattcagaaacacaccaagcgaagctacctagcaacgacttaacaacaatggctaccaagatattagccctccttgcgcttcttgccctttttgtgagcgcaacaaatgcgttcattattccacaatgctcacttgctcctagtgccattataccacagttcctccgaccagttacttcaatgggcttcgaacacctagctgtgcaagcctacaggctacaacaagcgcttgcggcgagcgtcttacaacaaccaattaaccaattgcaacaacaattcttggcacatctaaccatacaaaccatcgcaacacaac

SEQ ID NO: 342751 - DNA, 180 bp, Zea mays
caaaaggacaggcagccaaatgccccaccacagcggagcccctcctcactgactcacctgcaaaaaccacttgcaaaccacacaaaccgaaaacgccagcttccctgccttcatttttagcaactttttcctttaatctcccgtggcagtcacccttctttgccccccgcgcagatttcg

SEQ ID NO: 342752 - DNA, 378 bp, Zea mays
cagcaaagcggcagtgcgtagagaggatcgtcgaacagaacagcatgaagatggtcatcgttctcgtcgtgtgcctggctctgtcagctgccagcgcctctgcaatgcagatgccctgcccctgcgcggggctgcagggcttgtacggcgctggcgccggcctgacgacgatgatgggcgccggcgggctgtacccctacgcggagtacctgaggcagccgcagtgcagcccgctggcggcggcgccctactacgccgggtgtgggcagacgagcgccatgtaccagccgctccggcaacagtgctgccagcagcagatgaagatgatggacgtgcagtccgtcgcgcagcagctgcagatgatgatgcaacttgagc

SEQ ID NO: 342753 - DNA, 253 bp, Zea mays
ggagctataaatctcggcgcccccccgctaccggaccccgcattcccgtgcgcgagctccggtgatcgccgggagcggtcggcggccatggggcagtgctacgcgaggaacgtgcgcggcgtcgacgccgactgcggcggcgtgggggcgaccaccatcacggtctcagcggcaggagggccggaggatgcggcgtctgtagggggagggggaggacgacgaggagggaggcggagcgcgcggccgtctacta

SEQ ID NO: 342754 - DNA, 381 bp, Zea mays
gatcagcaaagcggcagtgcgtagagaggatcgtcgaacagaacagcatgaagatggtcatcgttctcgtcgtgtgcctggctctgtcagctgccagcgcctctgcaatgcagatgccctgcccctgcgcggggctgcagggcttgtacggcgctggcgccggcctgacgacgatgatgggcgccggcgggctgtacccctacgcggagtacctgaggcagccgcagtgcagcccgctggcggcggcgccctactacgccgggtgtgggcagacgagcgccatgtaccagccgctccggcaacagtgctgccagcagcagatgaggatgatggacgtgcaatccgtcgcgcagcagctgcagatgatgatgcagcttgagc

SEQ ID NO: 342755 - DNA, 431 bp, Zea mays
  unsure (1)..(431): unsure at all n locations
tacaaaccatcgcaacgcaacagcaacaacagtttctgccatcactgagccacctagccgtggtgaaccctgtcgcctacttgcaacagcagctacttgcatccaacccacttgctctggcgaacgtagctgcataccagcaacaacaacgtctgcaacagtttatgccagcgctcagtcaactagccatggtgaaccctgtcgcctacctacaacagcaacaattgctttcatctagcccgctcgctgtgggcaatgcacctacgtacctacaacaacagttgctgcaacagattgtaccagctctgactcagctagctgtggcaaaccctactgnctacttgcaacagttgctttcattcaaccaactggctgtgtcgaactctgctgtgtacctacaacagcgacaacagttacttaatccactagca

SEQ ID NO: 342756 - DNA, 364 bp, Zea mays
  unsure (1)..(364): unsure at all n locations
ggtcttcagaccattagctttatctactccagagcgcagaagaacccgatcgacaccatgagggtgttgctcgttgccctcgctctcctggctctcgctgcgagcgccacctccacgcatacaagcggcggctgcggctgccagccaccgccgccggttcatctaccgccgccggtgcatctgccacctccggttcacctgccacctccggtgcatctcccaccgccggtccacctgccgccgccggtccacctgccaccgccggtccatgtgccgccgccggttcatctgccgccgccaccatgccactaccctactcaaccgccccggcctcagcctcatncccagccacacccatgcccgt

SEQ ID NO: 342757 - DNA, 334 bp, Zea mays
gttctagatcgcgagggccgcccttttttttttttttttttttttctttttttttttttgtggcaagcaatcactattctaggattctttattcaaaattcaatccttgtatattactcacctaatctatattttctttttactgaaagggaggatcgattcccccaacgaatattacatgatcagttgcagggggcccaagattttcagtcttatgtccacccgcgcatttcttcctgtgctcggccttcggcttcttcttttcacatcttttcctgccacaacacgggccagttggcccgggcctcttcgatgccgaacagcgaccctttct

SEQ ID NO: 342758 - DNA, 373 bp, Zea mays
attttgagcattcagaaacacaccaagcgaagcgcactagcaacgacctaacaacaatggctaccaagatattagccctccttgcgcttcttgccctttttgtgagcgcaacaaatgcgttcattattccacaatgctcacttgctcctagtgccattattccacagttcctcccaccagttacttcaatgggcttcgaacacctagctgtgcaagccaacatgcaacaacaagcgcttgcggcgagcgtcttacaacaaccaattgcccaattgcaacaacaatccttgccacatctaacaatacaagccatcacaacgcaacagcaacaacagttcctaccagcactgagccacctagccatggtgaaccc

SEQ ID NO: 342759 - DNA, 350 bp, Zea mays
  unsure (1)..(350): unsure at all n locations
gaccattagctttatctactccagagcgcagaagaacccgatcgacaccatgagggtgttgctcgttgccctcgctctcctggctctcgctgcgagcgccacctccacgcatacaagcggcggctgcggctgccagccaccgccgccggttcatctaccgccgccggtgcatctgccacctccggttcacctgccacctccggtgcatctcccaccgccggtccacctgccgccgccggtccacctgccaccgccggtccatgtgccgccgccggttcatctgccgccgccaccatgccactaccctactcaaccgccccggcctcagcctcatncccagccacacccat

SEQ ID NO: 342760 - DNA, 443 bp, Zea mays
  unsure (1)..(443): unsure at all n locations
tagcaacatagaaagcacaatagtgtaccaacaatggcagccaaaatattttgcctccttatgctccttggtctttctgcaagtgctgctacggcgaccattttcccgcaatgctcgcaagctcctatagcttcccttcttcccccgtacctctcaccagcggtgtcttcggtatgtgaaaacccaattcttcaaccctacaggatccaacaggcaatcgcagctggcatcttacctttatcacccttgttcctccaacaatcatcagccctattacaacagttacctttggtgcatttattggcacanaacatcagggcacaacaactacaacaacttgtgctagcaaaccttgctgcctactctcagcaacagcagtttcttccattaaccaactaggttcattgaactctgcttcttatttgcaacaacaacaactacca

SEQ ID NO: 342761 - DNA, 318 bp, Zea mays
  unsure (1)..(318): unsure at all n locations
gggtcttcagaccattagctttatctactccagagcgcagaagaacccgatcgacaccatgagggtgttgctcgttgccctcgctctcctggctctcgctgcgagcgccacctccacgcatacaagcggcggctgcggctgccagccaccgccgccggttcatctaccgccgccggtgcatctgccacctccggttcacctgccacctccggtgcatctcccaccgccggtccacctgccgccgccggtccacctgccaccgncggtccatgtgccgccgccggttcatctgccgncgncaccatgccactaccctac

SEQ ID NO: 342762 - DNA, 368 bp, Zea mays
aatattttgagcattcagaaacacaccaagcgaagcacattagcaacaacctaacaacaatggctaccaagatattatccctccttgcgcttcttgcgctttttgcgagcgcaacaaatgcgttcattattccacaatgctcacttgctccaagttccattattacacagttcctcccaccagttacttcaatgggcttcgaacacccagctgtgcaagcctataggctacaacaagcaattgcggcgagcgtcttacaacaaccaatttcccagttgcaacaacaatccttggcacatctaacaatacaaaccatcgcaacgcaacagcaacaacaattcctaccagcactgagccacctagccatg

SEQ ID NO: 342763 - DNA, 176 bp, Zea mays
cagaccattagctttatctactccagagcgcagaagaacccgatcgacaccatgagggtgttgctcgttgccctcgctctcctggctctcgctgcgagcgccacctccacgcatacaagcggcggctgcggctgccagccaccgccgccggttcatctaccgccgccggtgcatct

SEQ ID NO: 342764 - DNA, 382 bp, Zea mays
cagaaacacaccaagcgaagctacctagcaacgacttaacaacaatggctaccaagatattagccctccttgcgcttcttgccctttttgtgagcgcaacaaatgcgttcattattccacaatgctcacttgctcctagtgccattataccacagttcctccgaccagttacttcaatgggcttcgaacacctagctgtgcaagcctacaggctacaacaagcgcttgcggcgagcgtcttacaacaaccaattaaccaattgcaacaacaatccttggcacatctaaccatacaaaccatcgcaacacaacagcaacaacagttcctaccagcactgagccaactagatgtggtgaaccctgtcgcctacttgcaacagca

SEQ ID NO: 342765 - DNA, 358 bp, Zea mays
cagaccattagctttatctactccagagcgcagaagaacccgatcgacaccatgagggtgttgctcgttgccctcgctctcctggctctcgctgcgagcgccacctccacgcatacaagcggcggctgcggctgccagccaccgccgccggttcatctaccgccgccggtgcatctgccacctccggttcacctgccacctccggtgcatctcccaccgccggtccacctgccgccgccggtccacctgccaccgccggtccatgtgccgccgccggttcatctgccgccgccaccatgccactaccctactcaaccgccccggcctcagcctcatccccagccacacccatgcccgt

SEQ ID NO: 342766 - DNA, 351 bp, Zea mays
attagctttatctactccagagcgcagaagaacccgatcgacaccatgagggtgttgctcgttgccctcgctctcctggctctcgctgcgagcgccacctccacgcatacaagcggcggctgcggctgccagccaccgccgccggttcatctaccgccgccggtgcatctgccacctccggttcacctgccacctccggtgcatctcccaccgccggtccacctgccgccgccggtccacctgccaccgccggtccatgtgccgccgccggttcatctgccgccgccaccatgccactaccctactcaaccgccccggcctcagcctcatccccagccacacccatgcccg

SEQ ID NO: 342767 - DNA, 362 bp, Zea mays
  unsure (1)..(362): unsure at all n locations
attgagaccaacaagcaacatagaaagtggaatccagtagcaacaatagagcaacaatggcgaccaagatattttccctccttatgctccttgctctttctgcatgtgttgctaacgcgacaattttccctcaatgctcacaagctcctatagcttcccttcttcccccataccttccatcaatgatagcttcagtatgtgaaaacccagctcttcaaccctataggctccaacaagcaatcgcagcaagcaacatacctttatcacccttgtttcaacaatcgccagccctatctttggtgcagtcattggtacaaaccatcanggcacagcagctgcagcaactcgtgctacctgtgatc

SEQ ID NO: 342768 - DNA, 339 bp, Zea mays
gcaacatagaaagtggaatccagtagcaacaatagagcaacaatggcgaccaagatattttccctccttatgctccttgctctttctgcatgtgttgctaacgcgacaattttccctcaatgctcacaagctcctatagcttcccttcttcccccataccttccatcaatgatagcttcagtatgtgaaaacccagctcttcaaccctataggctccaacaagcaatcgcagcaagcaacatacctttatcacccttgtttcaacaatcgccagccctatctttggtgcagtcattggtacaaaccatcagggcacagcagctgcagcaactcgtgcta

SEQ ID NO: 342769 - DNA, 395 bp, Zea mays
  unsure (1)..(395): unsure at all n locations
attttgagcattcagaaacacaccaagcgaagcgcactagcaacaacctaacaacaatggctaccaagatattatccctccttgcgcttcttgcgctttttgcgagcgcaacaaatgcgtccattattccacaatgctcacttgctcctagttccattattccacagttcctcccaccagttacttcaatggccttcgaacacccagctgtgcaagcctataggctacaacaagcgattgcggcgagcgtcttacaacaaccaattgcccaattgcaacaacaatccttggcacatctaacaatacanaccatcgcaacgcaacagcaacaacagttcctaccagcactgagccacctagccatggtgaaccctgtcgcctacttgcaacagcag

SEQ ID NO: 342770 - DNA, 164 bp, Zea mays
gcgccatcggcacgaccaggcctgtccagggatggggcggagaggggagccctactacgtcgaagcggcgccgccggtggacgtgaacaagaacacagagtggttcatgtacccgggcgtctggaccacctaatcctcctgtcttttccttggctctgtcttcg

SEQ ID NO: 342771 - DNA, 381 bp, Zea mays
caactagcaacatagaaagcacaatagtgtaccaacaatggcagccaaaatattttgcctccttatgctccttggtatttctgcaagtgctgctacggcgaccattttcccgcaatgctcacaagctcctatagcttcccttcttcccccgtacctctcaccagcggtgtcttcggtatgtgaaaacccaattcttcaaccctacaggatccaacaggcaatcgcagctggcatcttacctttatcacccttgttcctccaacaatcatcagccctattacagcagttacctttggtgcatttattggcacaaaacatcagggcacaacaactacaacaacttgtgctagcaaaccttgctgcctactctcagcaacagca

SEQ ID NO: 342772 - DNA, 165 bp, Zea mays
ccaacaagcaacatagaaagtggaatccagtagcaacaatagagcaacaatggagaccaagatattttccctccttatgctccttgctctttctacatgtgttgctaacgcgacaattttccctcaatgctcacaagctcctatagcttccctttttcccccata

SEQ ID NO: 342773 - DNA, 381 bp, Zea mays
ccaactagcaacatagaaagcacaatagtgtaccaacaatggcagccaaaatattttgcttccttatgctccttggtctttctgcaagtgctgctaccgcaaccattttcccacaatgctcacaagctcctatagcttcctttcttcccccatacctctcaccagcggtgtcttcagtatgtgaaaacccaattcttcaaccctacaggatccaacaggcaatcgcagcaggcatcttacctttatcacccttgttcctccaacaaccgtcagccctattacagcagttacctttggtgcatttgttggcacaaaacatcaaggcacaacaactacaacaacttgtgctaagaaaccttgctgcctactctcagcaacagc

SEQ ID NO: 342774 - DNA, 138 bp, Zea mays
  unsure (1)..(138): unsure at all n locations
ccgtccgagaaaccattnnngctttatctaaactccagagnncgcagaagaaacnccgcattccgacaccanntgagggtggttgcgtnncgttgcccnttcgctctccctgnngctctcgctttgcgagcccgccac

SEQ ID NO: 342775 - DNA, 123 bp, Zea mays
gacatgaacgacgttatgccacatgcctaccaagagctagtcgacaactgcaggatactggcgagccactctaaagaaatgcatgacatccaatctacagatcacgagagcaggttgcggatg

SEQ ID NO: 342776 - DNA, 209 bp, Zea mays
  unsure (1)..(209): unsure at all n locations
cagaccattagctttatctactccagagcgcagaagaacccgatcgacaccatgagggtgttgctcgttgccctcgctctcctggctctcgctgcgagcgccaccttcacgcatacaagcggcggctgcggctgccagccaccgccgccggttcatctaccgccgccggtgcatctgccacctncggttcacctgccacctccggtgca

SEQ ID NO: 342777 - DNA, 389 bp, Zea mays
gacgtcagcctagcaattagctcatcgactccagattggagaactcgacaccatgaaggtgctgatcgttgcccttgctctcctggcgctcgctgcgagcgccgcctccagtacaagcggcggctgtggctgccagacaccaccgtttcatctaccgcctccgttctatatgccgcctccgttctatctgccgccgcagcagcagccgcagccatggcaataccccactcaaccaccgcagctaagcccgtgccagcagttcggatcctgcggcgtcggcagcgtcggcagcccgttcctgggccagtgcgtcgagttcctgaggcaccagtgcagcccggcggcgacgccctacggctcgccacagtgccaggcgctgcagcagcagt

SEQ ID NO: 342778 - DNA, 445 bp, Zea mays
attcagaaacacaccaagcgaagcgcactaacaacaaccttaccaccatggctaccaagatattagcccttcttgcgcttcttgcccttttagtgagcgcaacaaatgcgttcattattccacagtgctcacttgctcctagtgccattattccacagttcctcccaccagttacttcaatgggcttcgaacatccagccgtgcaagcctacaggctacaactagcgcttgcggcgagcgtcttacaacaaccaattgcccaattgcaacaacaatccttggcacatctaaacctacaaaccatcgcaacgcaacagcaacaacagtttctgccatcactgagccacctagccgtggtgaaccctgtcgcctacttgcaacagcagctacttgcatccaacccacttgctctggcgaacgtagctgcataccagcaacaacaacg

SEQ ID NO: 342779 - DNA, 148 bp, Zea mays
  unsure (1)..(148): unsure at all n locations
gtcgatttctaattctcctcgcgagcccaaaccctaaacctaaaccttttacccgccgncgccgccaccaccagcactgtcacttcgtcaccaccgtgccgaagccccctcccagcgccatcgactttatctcggattgaagcaatgt

SEQ ID NO: 342780 - DNA, 148 bp, Zea mays
gactgactactgtagtaccatagatcgaacaacttggagctgcaactcaaaaagagagatttgtgctttttatggcccgtggtctgatagatagagagagaaccatgacggtggaccatcagtgctcacatgcatgatagagatgaac

SEQ ID NO: 342781 - DNA, 355 bp, Zea mays
agaccattagctttatctactccagagcgcagaagaacccgatcgacaccatgagggtgttgctcgttgccctcgctctcctggctctcgctgcgagcgccacctccacgcatacaagcggcggctgcggctgccagccaccgccgccggttcatctaccgccgccggtgcatctgccacctccggttcacctgccacctccggtgcatctcccaccgccggtccacctgccgccgccggtccacctgccaccgccggtccatgtgccgccgccggttcatctgccgccgccaccatgccactaccctactcaaccgccccggcctcagcctcatccccagccacacccatgccc

SEQ ID NO: 342782 - DNA, 104 bp, Zea mays
gtccgttcaattcttggggccgttgccgaatctcctctacaggtaaggaggagagaaagagggcgaaatggggaacacaacaacgtcatccccaaagggcactt

SEQ ID NO: 342783 - DNA, 422 bp, Zea mays
  unsure (1)..(422): unsure at all n locations
ctatcagtaccatcaatcatcattcatcttattagtataggcaccaaatcaaatctgcgggggcaattatctaactccaaaaaccatgaagctggtgcttgtggttcttgctttcattgctttagtatcaagtgtttcttgtacacagacaggcggctgcagctgtggtcaacaacaaagccatgagcagcaacatcatccacaacaacatcatccacaaaaacaacaacatcaaccaccaccacaacatcaccagcagcagcaacaccaacaacaacaagttcacatgcaaccncnanancatttgcaccaacaagaagttcatgttcaacaacaacaacaacaaccgtagtaccatcatacacatcaacaacagccccaacaacaacatcaatgtgaaggccaacaacaacattcccaac

SEQ ID NO: 342784 - DNA, 222 bp, Zea mays
cgtccgattccgtcgcccaccgtcgattagattcaaacacaccagcgaatcgcactacaacacctacacatggcgccagaattaccctcttgcgcttttgcctttatgagcgcacaagcgtcattattccacaggctacttgtcctatgccattattcacagtcgtccaccagtctaaatgggcttctaacatccaaccgtgcagcctacaagctcaactag

SEQ ID NO: 342785 - DNA, 380 bp, Zea mays
gaccaactagcaacatagaaagcacaatagtgtaccaacaatggcagccaaaatattttgcttccttatgctccttggtctttctgcaagtgctgctaccgcaaccattttcccacaatgctcacaagctcctatagcttcctttcttcccccatacctctcaccagcggtgtcttcagtatgtgaaaacccaattcttcaaccctacaggatccaacaggcaatcgcagcaggcatcttacctttatcacccttgttcctccaacaaccgtcagccctattacagcagttacctttggtgcatttgttggcacaaaacatcaaagcacaacaactacaacaacttgtgctaagaaaccttgctgcctactctcaacaac

SEQ ID NO: 342786 - DNA, 354 bp, Zea mays
caccaagcgaagcgcactagcaacaacctaacaacaatggctaccaagatattagccctccttgcgcttcttgcccttttagtgagcgcaacaaatgcgttcattattccacagtgctcacttgctcctagtgccattattccacagttcctcccaccagttacttcaatgggcttcgaacatccagccgtgcaagcctacaggctacaactagcgcttgcggcgagcgtcttacaacaaccaattgcccaattgcaacaacaatccttggcacatctaaacctacaaaccatcgcaacgcaacagcaacaacagtttctgccatcactgagccacctagccgtggtgaaccct

SEQ ID NO: 342787 - DNA, 372 bp, Zea mays
gttggcttctcctccccctccggttcgggttcgggttcgtgaggttctccggggttcggtttcgtgggtgagcggatcgagatggcggcgtcggatgttgagtaccgctgcttcgtcggcggcctcgcctgggccacggacgaccactcccttcacaacgccttcagcacctacggcgaggtcctcgagtccaagatcatcctcgatcgggagacgcagaggtcccgcggcttcggcttcgtcaccttctccacggaggaggcgatgcggaacgccatcgagggcatgaacggcaaggagctggacggccgcaacatcaccgtcaacgaggcccattcccgcggcggccgtggaggcggcggcggcggcggg

SEQ ID NO: 342788 - DNA, 412 bp, Zea mays
gagaggatcgtcgaacagaacagcatgaagatggtcatcgttctcgtcgtgtgcctggctctgtcagctgccagcgcctctgcaatgcagatgccctgcccctgcgcggggctgcagggcttgtacggcgctggcgccggcctgacgacgatgatgggcgccggcgggctgtacccctacgcggagtacctgaggcagccgcagtgcagcccgctggcggcggcgccctactacgccgggtgtgggcagacgagcgccatgtaccagccgctccggcaacagtgctgccagcagcagatgaggatgatggacgtgcagtccgtcgcgcagcagctgcagatgatgatgcagcttgagcgtgccgctgccgccagcagcagcctgtacgagccagctctgatgcaacaacagc

SEQ ID NO: 342789 - DNA, 404 bp, Zea mays
ggacgtcagcctagcaattagctcatcgactccagattggagaactcgacaccatgaaggtgctgatcgttgcccttgctctcctggcgctcgctgcgagcgccgcctccagtacaagcggcggctgtggctgccagacaccaccgtttcatctaccgcctccgttctatatgccgcctccgttctatctgccgccgcagcagcagccgcagccatggcaataccccactcaaccaccgcagctaagcccgtgccagcagttcggatcctgcggcgtcggcagcgtcggcagcccgttcctgggccagtgcgtcgagttcctgaggcaccagtgcagcccggcggcgacgccctacggctcgccacagtgccaggcgctgcagcagcagtgctgccaccagatc

SEQ ID NO: 342790 - DNA, 437 bp, Zea mays
agaaagcacaatagtgtaccaacaatggcagccaaaatattttgcttccttatgctccttggtctttctgcaagtgttgctaccgcaaccattttcccacaatgctcacaagctcctatagcttcccttcttcccccatacctctcaccagcggtgtcttcaatgtgtgaaaacccaattgttcaaccctacaggatccaacaggcaatcgcaacaggcatcttaccattatcacccttgttcctccaacaaccgtcagccctattacagcagttacctttggtccatttggtggcacaaaacatcagggcacaacaactacaacaacttgtgctagcaaaccttgctgcatactctcagcaacatcagtttcttccattcaaccaactggctgcattgaactctgctgcttatttgcaacaacaattaccattcaa

SEQ ID NO: 342791 - DNA, 437 bp, Zea mays
ggacgtcagcctagcaattagctcatcgactccagattggagaactcgacaccatgaaggtgctgatcgttgcccttgctctcctggcgctcgctgcgagcgccgcctccagtacaagcggcggctgtggctgccagacaccaccgtttcatctaccgcctccgttctatatgccgcctccgttctatctgccgccgcagcagcagccgcagccatggcaataccccactcaaccaccgcagctaagcccgtgccagcagttcggatcctgcggcgtcggcagcgtcggcagcccgttcctgggccagtgcgtcgagttcctgaggcaccagtgcagcccggcggcgacgccctacggctcgccacagtgccaggcgctgcagcagcagtgctgccaccagatcaggcaggtggagccgctgcaccggtaccaggcg

SEQ ID NO: 342792 - DNA, 437 bp, Zea mays
gctttatctactccagagcgcagaagaacccgatcgacaccatgagggtgttgctcgttgccctcgctctcctggctctcgctgcgagcgccacctccacgcatacaagcggcggctgcggctgccagccaccgccgccggttcatctaccgccgccggtgcatctgccacctccggttcacctgccacctccggtgcatctcccaccgccggtccacctgccgccgccggtccacctgccaccgccggtccatgtgccgccgccggttcatctgccgccgccaccatgccactaccctactcaaccgccccggcctcagcctcatccccagccacacccatgcccgtgccaacagccgcatccaagcccgtgccagctgcagggaacctgcggcgttggcagcaccccgatcctgggccagtgcgtcgagttcctg

SEQ ID NO: 342793 - DNA, 439 bp, Zea mays
ccaatccagatcagcaaagcggcagtgcgtagagaggatcgtcgaacagaacagcatgaagatggtcatcgttctcgtcgtgtgcctggctctgtcagctgccagcgcctctgcaatgcagatgccctgcccctgcgcggggctgcagggcttgtacggcgctggcgccggcctgacgacgatgatgggcgccggcgggctgtacccctacgcggagtacctgaggcagccgcagtgcagcccgctggcggcggcgccctactacgccgggtgtgggcagacgagcgccatgtaccagccgctccggcaacagtgctgccagcagcagatgaggatgatggacgtgcagtccgtcgcgcagcagctgcagatgatgatgcagcttgagcgtgccgctgccgccagcagcagcctgtacgagccagctctgatgcagcag

SEQ ID NO: 342794 - DNA, 364 bp, Zea mays
ccaacaagcaacatagaaagtggaatccagtagcaacaatagagcaacaatggcgaccaagatattttccctccttatgctccttgctctttctgcatgtgttgctaacgcgacaattttccctcaatgctcacaagctcctatagcttcccttcttcccccataccttccatcaatgatagcttcagtatgtgaaaacccagctcttcaaccctataggctccaacaagcaatcgcagcaagcaacatacctttatcacccttgtttcaacaatcgccagccctatctttggtgcagtcattggtacaaaccatcagggcacagcagctgcagcaactcgtgctacctgtgatcaaccaagta

SEQ ID NO: 342795 - DNA, 410 bp, Zea mays
agaccaactagcaacatagaaagcacaatagtgtaccaacaatggcagccaaaatattttgcttccttatgctccttggtctttctgcaagtgttgctaccgcaaccattttcccacaatgctcacaagctcctatagctttccttcttcccccatacctctcaccagcggtgtcttcaatgtgtgaaaacccaattgttcaaccctacaggatccaacaggcaatcgcaacaggcatcttaccattatcacccttgttccttcaacaaccgtcagccctattacagcagttacctttggtccatttggtggcacaaaacatcatggcacaacatctacaacaacttgtgctagcaaaccttgctgcatactctcagcaacatcagtttcttccattcaaccaactggct

SEQ ID NO: 342796 - DNA, 351 bp, Zea mays
ccagtagcaacaatagagcaacaatggagaccaagatattttccctccttatgctccttgctctttctacatgtgttgctaacgcgacaattttccctcaatgctcacaagctcctatagcttccctttttcccccataccttccatcaattatagcttcagtatgtgaaaacccagctcttcaaccatataggcttcaacaagcaatcgcagcaagcaacatacctttatcgcccttgttgtgtcaacaatcgccagccctatctttggtgcagtcattggtacaaaccatcagggcacaacagctgcagcaactcgtgctacctgtgatcaaccaagtagctctggcaa

SEQ ID NO: 342797 - DNA, 398 bp, Zea mays
caactagcaacatagaaagcacaatagtgtaccaacaatggcagccaaaatattttgcctccttatgctccttggtctttctgcaagtgctgctacggcgaccattttcccgcaatgctcgcaagctcctatagcttcccttcttcccccgtacctctcaccagcggtgtcttcggtatgtgaaaacccaattcttcaaccctacaggatccaacacgcaatcgcagctggcatcttacctttatcacccttgttcctccaacaatcatcagccctattacaacagttacctttggtgcatttattggcacagaacatcagggcacaacaactacaacaacttgtgctagccaaccttgctgtctactctcagcaacaagaagttttttcctttcaac

SEQ ID NO: 342798 - DNA, 439 bp, Zea mays
atttagaccaactagcaacatagaaagcacaatagtgtaccaacaatggcagccaaaatattttgcctccttatgctccttggtatttctgcaagtgctgctacggcgaccattttcccgcaatgctcacaagctcctatagcttcccttcttcccccgtacctctcaccagcggtgtcttcggtatgtgaaaacccaattcttcaaccctacaggatccaacaggcaatcgcagctggcatcttacctttatcacccttgttcctccaacaatcatcagccctattacagcagttacctttggtgcatttattggcacaaaacatcagggcacaacaactacaacaacttgtgctagcaaaccttgctgcctactctcagcaacagcagtttcttccattcaaccaactagctgcattgaactctgcttcttatttgc

SEQ ID NO: 342799 - DNA, 433 bp, Zea mays
agcggccgccctttttttttttttttttttttttttttttttttttttttttttttttttgttttttttttttttttttttttttttttttttttttttttttttttttttttttttttttttttttttaaagggggccaaatttttttttaaaaaaaaaaaaaaaaaaaaggaaaaaaacctggaaaaaaaaaaattttttttttttaaaaaaacggggggaaaaaaacactttgaaaaaaaggggggggaaaatttttattacggggggggaaaaaaccacaaaaaggggggggaaaaaaaaaaaaaagggggccgggaaaatttttaaaaataaaaagggccaaaaaagggggccacattcccgagggggaattagaaaaaaaaattttttttttgggggaaacaaaaaggttttttttttaattggggg

SEQ ID NO: 342800 - DNA, 415 bp, Zea mays
gttcgcacgcgactaacagccagcccccgacacgtgaacaagcacaagggcgtcgcctcgcctcgcgcgcgctggcgccgcgcacagacacgcaagcgtggatcgcgccgccgctcatcggggcatcgtccgtcgcgacagggatccgtcgccgccgccgccggccgagccacaggcggcgggagacgtcggaggcggcggtgtctcttggggcggcccccggttgcgcgccgaggacgagcacgccgtcatcgtcgcggccctggctcacgtcgtcggcgccgggacgcggagctcgccaccggccgggctcggccagcaaggccgacacgctcccctcttctgcgtggattcagtgacgctgacgcaccgcaggggcagggccgtccacgcgccggcgacggagacacagcgg

SEQ ID NO: 342801 - DNA, 409 bp, Zea mays
gagaccaacaagcaacatagaaagtggaatccagtagcaacaatagagcaacaatggagaccaagatattttccctccttatgctccttgctctttctacatgtgttgctaacgcgacaattttccctcaatgctcacaagctcctatagcttccctttttcccccataccttccatcaattatagcttcagtatgtgaaaacccagctcttcaaccatataggcttcaacaagcaatcgcagcaagcaacatacctttatcgcccttgttgtgtcaacaatcgccagccctatctttggtgcagtcattggtacaaaccatcagggcacaacagctgcagcaactcgtgctacctgtgatcaaccaagtagctctggcaaacctttttgcctactctccggaacaaca

SEQ ID NO: 342802 - DNA, 423 bp, Zea mays
agctcatcgactccagattggagaactcgacaccatgaaggtgctgatcgttgcccttgctctcctggcgctcgctgcgagcgccgcctccagtacaagcggcggctgtggctgccagacaccaccgtttcatctaccgcctccgttctatatgccgcctccgttctatctgccgccgcagcagcagccgcagccatggcaataccccactcaaccaccgcagctaagcccgtgccagcagttcggatcctgcggcgtcggcagcgtcggcagcccgttcctgggccagtgcgtcgagttcctgaggcaccagtgcagcccggcggcgacgccctacggctcgccacagtgccaggcgctgcagcagcagtgctgccaccagatcaggcaggtggagccgcttgcaccgtaccaggcgacata

SEQ ID NO: 342803 - DNA, 434 bp, Zea mays
ccaacaagcaacatagaaagtggaatccagtagcaacaatagagcaacaatggcgaccaagatattttccctccttatgctccttgctctttctgcatgtgttgctaacgcgacaattttccctcaatgctcacaagctcctatagcttcccttcttcccccataccttccatcaatgatagcttcagtatgtgaaaacccagctcttcaaccctataggctccaacaagcaatcgcagcaagcaacatacctttatcacccttgtttcaacaatcgccagccctatctttggtgcagtcattggtacaaaccatcagggcacagcagctgcagcaactcgtgctacctgtgatcaaccaagtagctctggcaaacctttctccctactctcagcaacaacaatttcttccattcaaccaactgtctacattga

SEQ ID NO: 342804 - DNA, 380 bp, Zea mays
gcaacatagaaagcacaatagtgtaccaacaatggcagccaaaatattttgcctccttatgctccttggtctttctgcaagtgctgctacggcgaccattttcccgaaatgctcgcaagctcctatagcttcccttcttcccccgtacctctcaccagcggtgtcttcggtatgtgaaaacccaattcttcaaccctacaggatccaacaggcaatcacagctggcatcttacctttatcacccttgttcctccaacaatcatcagccctattacatcagttacctttggtgcatttattggcacaaaacatcagggcacaacaactacaacaacttgtgctagcaaaccttgctgcctactctcagcaacagcaggttc

SEQ ID NO: 342805 - DNA, 328 bp, Zea mays
gcaacatagaaagcacaatagtgtaccaacaatggcagccaaaatattttgcctccttatgctccttggtatttctgcaagtgctgctacggcgaccattttcccgcaatgctcacaagctcctatagcttcccttcttcccccgtacctctcaccagcggtgtcttcggtatgtgaaaacccaattcttcaaccctacaggatccaacaggcaatcgcagctggcatcttacctttatcacccttgttcctccaacaatcatcagccctattacagcagttacctttggtgcatttattggcacaaaacatcagggcacaacaacta

SEQ ID NO: 342806 - DNA, 328 bp, Zea mays
cacacaaagctctgcacaagaaatgggtatgtaggtctagccggagccaatctgccgacacctaactaatcgatagctcgcctgcatgcgaccacacgctcttgctgccgggccatggcgactgcgttccaccacacagtcctggtgccgaacatggcgaccagcgttattgacagtgaagccctcgcctgactacgcgcggttgcttgccctcctgcctgctgactttcggatgataggcgcaacaacctgcgcagccgaaacgtggacggtctgagccataaccggtgtttctgcagagaaggagcctggacattaaacgcatggg

SEQ ID NO: 342807 - DNA, 417 bp, Zea mays
gtggaatccagtagcaacaatagagcaacaatggagaccaagatattttccctccttatgctccttgctctttctacatgtgttgctaacgcgacaattttccctcaatgctcacaagctcctatagcttccctttttcccccataccttccatcaattatagcttcagtatgtgaaaacccagctcttcaaccatataggcttcaacaagcaatcgcagcaagcaacatacctttatcgcccttgttgtgtcaacaatcgccagccctatctttggtgcagtcattggtacaaaccatcagggcacaacagctgcagcaactcgtgctacctgtgatcaaccaagtagctctggcaaacctttctccctactctccgcaacaacaatttcttccattcaaccaactgtctacactg

SEQ ID NO: 342808 - DNA, 394 bp, Zea mays
atttagaccaactagcaacatagaaagcacaatagtgtaccaacaatggcagccaaaatattttgcctccttatgctccttggtatttctgcaagtgctgctacggcgaccattttcccgcaatgctcacaagctcctatagcttcccttcttcccccgtacctctcaccagcggtgtcttcggtatgtgaaaacccaattcttcaaccctacaggatccaacaggcaatcgcagctggcatcttacctttatcacccttgttcctccaacaatcatcagccctattacagcagttacctttggtgcatttattggcacaaaacatcagggcacaacaactacaacaacttgtgctagcaaaccttgcttgctactctcagcaacagcagtttc

SEQ ID NO: 342809 - DNA, 387 bp, Zea mays
ttcagcattcagaaacacaccaagcgaagcgcactagcaacaacctaacaacaatggctaccaagatattagccctccttgcgcttcttgcccttttagtgagcgcaacaaatgcgttcattattccacagtgctcacttgctcctagtgccattattccacagttcctcccaccagttacttcaatgggcttcgaacatccagccgtgcaagcctacaggctacaactagcgcttgcggcgagcgtcttacaacaaccaattgcccaattgcaacaacaatccttggcacatctaaacctacaaaccatcgcaacgcaacagcaacaacagtttctgccatcactgagccacctagccgtggtgaaccctgtcgcctacttgcaac

SEQ ID NO: 342810 - DNA, 378 bp, Zea mays
gtgaaattgactgtaacgaggtggaatgaaagcgacgatggaagccctggcttggttgaagagtggcttttagtgtctggggtcccaagaatgtatagaaactggaaggagctatatgaggttgcttctgcacttggtgtgctgatcgacgtcgatgaggaaagtttgcaagtcggagataaggagcctattaggctgaagctgaagacagcattcaggagttttgatgctgctcccttttcttactactttgcatttggatgttggtcgtcaagactagtaatggtcacagcagtacaagacaaaacacaaggtatggaacataaaattaaggaggtagactgcaaggagcataaaaaggaactgaatgggggaaaa

SEQ ID NO: 342811 - DNA, 371 bp, Zea mays
ataggcttcaacaagcaatcgcagcaagcaacatacctttatcgcccttgttgtgtcaacaatcgccagccctatctttggtgcagtcattggtacaaaccatcagggcacaacagctgcagcaactcgtgctacctgtgatcaaccaagtagctctggcaaacctttctccctactctccgcaacaacaatttcttccattcaaccaactgtctacactgaaccctgctgcttatttgcagcaacaactattaccatttagccagctagctactgcctactctcaacaacaacaacttcttccatttaaccaattggccgcactgaaccccgctgcttatttgcagcagcaaatactactaccatttagc

SEQ ID NO: 342812 - DNA, 357 bp, Zea mays
gatcagcagaacggacatgcgcatagaggaccgtatgacagaacagcatgaacatggacatcgttgtgcaaccgtgactggctctgccaattgccaacggctctggaatgcacatccgatgccattgggcagcactaaacgattggtacagcactggatcaagcctcacgacgatgacaggctgctagcgtgtgcaaccctactgctagaacctcgtggcagccttaccgcatcacgctggccagatgccaatgatgatgccagggatgacagaacagatgacagtgacacccattccgaatacaatgccatcaataatagaggaggatgatagacgagcaataacgatagctagaa

SEQ ID NO: 342813 - DNA, 382 bp, Zea mays
gaccaacaagcaacatagaaagtggaatccagtagcaacaatagagcaacaatggagaccaagatattttccctccttatgctccttgctctttctacatgtgttgctaacgcgacaattttccctcaatgctcacaagctcctatagcttccctttttcccccataccttccatcaattatagcttcagtatgtgaaaacccagctcttcaaccatataggcttcaacaagcaatcgcagcaagcaacatacctttatcgcccttgttgtgtcaacaatcgccagccctatctttggtgcagtcattggtacaaaccatcatggcacaacagctgcagcaactcgtgctacctgtgatcaaccaagttgcttttgcaaacc

SEQ ID NO: 342814 - DNA, 356 bp, Zea mays
atttagaccaactagcaacatagaaagcacaatagtgtaccaacaatggcagccaaaatattttgcctccttatgctccttggtatttctgcaagtgctgctacggcgaccattttcccgcaatgctcacaagctcctatagcttcccttcttcccccgtacctctcaccagcggtgtcttcggtatgtgaaaacccaattcttcaaccctacaggatccaacaggcaatcgcagctggcatcttacctttatcacccttgttcctccaacaatcatcagccctattacagcagttacctttggtgcatttattggcacaaaacatcagggcacaacaactacaacaacttgtgct

SEQ ID NO: 342815 - DNA, 256 bp, Zea mays
ttgccacgttggactttctgcatgtgctgatactagagaccattttctgacagtgcgtcacacgctgctatagctggcattactccgccgtacctcaaccaacggggcttgcagaaagtgaaaacccaacagttgaccctataggatacaacaggcaatcgatagtggtatcataccttgatcacccttgatgctccaacgatcatcacccttattacaggcattacgcgcggtgcatgtagtggctacaaacatc

SEQ ID NO: 342816 - DNA, 436 bp, Zea mays
tgctctttctgcatgtgttgctaacgcgaccatttttcctcaatactcacaagctcctatagctgcccttcttcccccataccttccatcaatgaccgcttcagtatgtgaaaacccagcccttcaaccctacaggctccaacaagcaatcgcaacaagcaacttacctttatcacccctgttctttcaacaatcgccagccctatctttggtgcagtcattggtacaaaccatcagggcacaacagctgcagcagctcgtgctaccagtgatcagccaagtagctctggcaaacctttctccctactctcagcaacaacaatttcttccattcaaccaactgtctacactgaaccctgctgcttatttgcagcaacaacaactactaccattcagccagctagctactgcctactctcagcagcaacaatttctt

SEQ ID NO: 342817 - DNA, 333 bp, Zea mays
tttcagcattcataaacacaccaagcgaagcgcactagcaacaacctaacaacaatggctaccaagatattagccctccttgcgcttcttgcccttttagtgagcgcaacaaatgcgttcattattccacagtgctcacttgctcctagtgccattattacacagttcctcccaccagttacttcaatgggcttcgaacatccagccgtgcaagcctacaggctacaactagcgcttgcggcgagcgtcttacaacatccaactgcccaattgcaacaacaatccttggcacatgtaaacctacaaaccatcgcaacgcaacagcaacaacag

SEQ ID NO: 342818 - DNA, 393 bp, Zea mays
aatattttgagcattcagaaacacaccaagcgaagcacattagcaacaacctaacaacaatggctaccaagatattatccctccttgcgcttcttgcgctttttgcgagcgcaacaaatgcgttcattattccacaatgctcacttgctccaagttccattattacacagttcctcccaccagttacttcaatgggcttcgaacacccagctgtgcaagcctataggctacaacaagcaattgcggcgagcgtcttacaacaaccaatttcccagttgcaacaacaatccttggcacatctaacaatacaaaccatcgcaacgcaacagcaacaacaattcctaccagcactgagccacctagccatggtgaaccctgccgcctacttgcaac

SEQ ID NO: 342819 - DNA, 335 bp, Zea mays
  unsure (1)..(335): unsure at all n locations
ggtgccggaattcgccgggtacgacaccacgtcgtggcgtctagcgaaccatatgaaaggcaccaanntagtgtacccaacccaataggcagcccannaaatattttagcattcgctctatgacctccttaggtcatcttctaggcaagtgggttgcntacccccgcaacnccatnctttgcccaccaatagggctcacaaagcntnncctatangnncttccctttcnnttcccccaatacncnntctcaccnnngcggtgtnncttcaatgggtgtgaaannnacccaatnttgttcaaaaccctaccaggaatcctatacaggnncaatcgc

SEQ ID NO: 342820 - DNA, 429 bp, Zea mays
atagaaagcacaatagtgtaccaacaatggcagccaaaatattttgcctccttatgctccttggtctttctgcaagtgctgctacggcgaccattttcccgaaatgctcgcaagctcctatagcttcccttcttcccccgtacctctcaccagcggtgtcttcggtatgtgaaaacccaattcttcaaccctacaggatccaacaagcaatcacagctggcatcttacctttatcacccttgttccttcaacaatcatcagccctattacatcagttacctttggtgcatttattggcacaaaacatcagggcacaacaactacaacaacttgtgctagcaaaccttgctgcctactctcagcaacagcagattctttcattcaaccaactaactgcattgaactctgcttcttatttgcaacaacaac

SEQ ID NO: 342821 - DNA, 104 bp, Zea mays
attttgagcaccaacaatggcacccaacatatctcgcctgcttatgcctctcggcaatggcgaccaagatgttaccgctacctttgcttcttgatgcttttgag

SEQ ID NO: 342822 - DNA, 405 bp, Zea mays
caactagcaacatagaaagcacaatagtgtaccaacaatggcagccaaaatattttgcttccttatgctccttggtctttctgcaagtgctgctaccgcaaccattttcccacaatgctcacaagctcctatagcttcctttcttcccccatacctctcaccagcggtgtcttcagtatgtgaaaacccaattcttcaaccctacaggatccaacaggcaatcgcagcaggcatcttacctttatcacccttgttcctccaacaaccgtcagccctattacagcagttacctttggtgcatttgttggcacaaaacatcaaggcacaacaactacaacaacttgtgctaagaaaccttgctgcctactctcagcaacagcagtttcttccattcaaccaactggc

SEQ ID NO: 342823 - DNA, 400 bp, Zea mays
ccgatcgacaccatgagggtgttgctcgttgccctcgctctcctggctctcgctgcgagcgccacctccacgcatacaagcggcggctgcggctgccagccaccgccgccggttcatctaccgccgccggtgcatctgccacctccggttcacctgccacctccggtgcatctcccaccgccggtccacctgccgccgccggtccacctgccaccgccggtccatgtgccgccgccggttcatctgccgccgccaccatgccactaccctactcaaccgccccggcctcagcctcatccccagccacacccatgcccgtgccaacagccgcatccaagcccgtgccagctgcagggaacctgcggcgttggcagcaccccgatcctgggccagtgcgtcg

SEQ ID NO: 342824 - DNA, 221 bp, Zea mays
  unsure (1)..(221): unsure at all n locations
tgcagcgttagccagtggctttcgtagaggttagctcaaagtattcagaaaagtttcataatgcgaacgagagncctttcagaactccaataaggggatctggtacgaagggtggatcggcacgaacagatgtatttggtatcaatctgcatgcattatccatatgggcagctnaatgcaggatgacntttctgaagtctattgggaaattgcnttgggaa

SEQ ID NO: 342825 - DNA, 368 bp, Zea mays
gaccaacaagcaacatagaaagtggaatccagtagcaacaatagagcaacaatggcgaccaagatattttccctccttatgctccttgctctttctgcatgtgttgctaacgcgacaattttccctcaatgctcacaagctcctatagcttcccttcttcccccataccttccatcaatgatagcttcagtatgtgaaaacccagctcttcaaccctataggctccaacaagcaatcgcagcaagcaacatacctttatcacccttgtttcaacaatcgccagccctatctttggtgcagtcattggtacaaaccatcaaggcacagcagctgcagcaactcgtgctacctgtgatcaaccaagtagc

SEQ ID NO: 342826 - DNA, 368 bp, Zea mays
aacctcgccgcccgccgccctaatttacgtgcccaggtcttcgtccgtcccctctctaggacttcgccgatcctttctcaggcgacgggagccaaccagctgccccaatggaagttgagctgccaaacatccataaagctacttcgagtgaccattggagtttaaccagcagccaatacccgtctggtaaatttcctaaggtctcagtgggtatcatgattccgaaagcaggtagtataccgagaggtggagaagctaccccaactcctacatttgacaggaacttgtctcaaggaactgatggtttatctagaccaaaaggtgataatacttcacttcgtgtttcacaagaagcttttgaacatgat

SEQ ID NO: 342827 - DNA, 352 bp, Zea mays
  unsure (1)..(352): unsure at all n locations
gaccattagctttatctactccagagcgcagaagaacccgatcgacaccatgagggtgttgctcgttgccctcgctctcctggctctcgctgcgagcgccacctccacgcatacaagcggcggctgcggctgccagccaccgccgccggttcatctaccgccgccggtgcatctgccacctccggttcacctgccacctccggtgcatctcccaccgccggtccacctgccgccgccggtccacctgccaccgccggtccatgtgccgccgccggttcatctgccgccgccaccatgccactaccctactcaaccgccccggcctcagcctcatncccagccacacccatgc

SEQ ID NO: 342828 - DNA, 441 bp, Zea mays
tagcaacatagaaagcacaatagtgtaccaacaatggcagctaaaatattttgcctcgttatgctccttggtctttctgcaagtgctgctacggcgaccattttcccacaatgctcacaagctcctatagcttcccttcttcccccgtacctctcaccaacggtgtcttcggtatgtgaaaacccaattcttcaaccctacaggatccaacaggcaatcgcagctggcatcttacctttatcacccttgttcctccaacaatcatcagccctattacagcagttacctttggtgcatttattggcacaaaacatcagggcacaacaactacaacaacttgtgctagcaaaccttgctgcctactctcagcaacagcagtttcttccattcaaccaactagcttgattgaactctgctttttatttgccacaacaacaacta

SEQ ID NO: 342829 - DNA, 372 bp, Zea mays
  unsure (1)..(372): unsure at all n locations
cgcgtccggttctagatcgcgagcggncgccctttttttttttttttttttataattanatttattttgtgntttgtttttttttatatttaattattctttcccggggggttatttttaaatataaaaaatgtggatgttgaagtttttataaaaacaatgaatatttatttgcgtaggagcaacagtaatttgtttttatttgcccgcnccggtttaaaaaaaaagggaaaaaaaaatatttttttttttagaaaaaaaaaaagggggttgggggggcccatttttaataaaacttttttatggaaaacaaaaaaaaggtggcctcccaaaaggggtgttgtgtgtttaaaaaaaaaaaagagaggtttt

SEQ ID NO: 342830 - DNA, 111 bp, Zea mays
ctagggttttgctgctctccaaccccaacttccaaaggccgaacaataaggcccggcccccttggggtgtgaccgaaatggcgctgccgaatcaggggaccgttgataacc

SEQ ID NO: 342831 - DNA, 425 bp, Zea mays
tttgagcattcagaaacacaccaagcgaagcgcactagcaacaacctaacaacaatggctggcaagatattatccctccttgcgcttcttgcgctttttgcgagcgcaacaaatgcgtccattattccacaatgctcacttgctcctagttccattattccacagttcctcccaccagttacttcaatggccttcgaacacccagctgtgcaagcctataggctacaactagcgattgcggcgagcgtcttacaacaaccaattgcccaattgcaacaacaatccttggcacatctaacaatacaaaccatcgcaacgcaacagcaacaacagttcctaccagcactgagccacctagccatggtgaaccctgtcgcctacttgcaacagcagctgcttgcatacaacccacttgctctagcaaa

SEQ ID NO: 342832 - DNA, 381 bp, Zea mays
caactagcaacatagaaagcacaatagtgtaccaacaatggcagctaaaatattttgcctcgttatgctccttggtctttctgcaagtgctgctacggcgaccattttcccacaatgctcacaagctcctatagcttcccttcttcccccgtacctctcaccaacggtgtcttcggtatgtgaaaacccaattcttcaaccctacaggatccaacaggcaatcgcagctggcatcttacctttatcacccttgttcctccaacaatcatcagccctattacagcagttacctttggtgcatttattggcacaaaacatcagggcacaacaactacaacaacttgtgctagcaaaccttgctgcctactctcagcaacagca

SEQ ID NO: 342833 - DNA, 110 bp, Zea mays
  unsure (1)..(110): unsure at all n locations
gttctaaatcggcccgccttattttttttggggccaaccctggcagttccggccggggcggttggcctacttggccatggccgngggggcccccgttggttaacaaggtt

SEQ ID NO: 342834 - DNA, 78 bp, Zea mays
gggtcttcagaccattagctttatctactccaaagcgcaaaaaaacccgatcgacaccatgagggtgttgttggttgc

SEQ ID NO: 342835 - DNA, 359 bp, Zea mays
cttctatcagtaccatcaatcatcattcatcttagtagtataggcaccaaatcaagaggtgcgacatcaattatctaactccaaaaaccatgaagctggtgcttgtggttcttgctttcattgctttagtatcaagtgtttcttgtccacaaacaggcggttgcagctgtggtcacaccaaagccttgacaagaacattttccacccacctatatccacaaaacacaacataaccaccccaacttcccagtgatgaaccaaaaaaaaggttaatcacccaaaactacacacagagtatgtaaacacacacacgagacacaacacacacagacacacactatggagcacacactacacat

SEQ ID NO: 342836 - DNA, 431 bp, Zea mays
gaccaacaagcaacatagaaagtggaatccagtagcaacaatagagcaacaatggcgaccaagatattttccctccttatgctccttgctctttctgcatgtgttgctaacgcgacaattttccctcaatgctcacaagctcctatagcttcccttcttcccccataccttccatcaatgatagcttcagtatgtgaaaacccagctcttcaaccctataggctccaacaagcaatcgcagcaagcaacatacctttatcacccttgtttcaacaatcgccagccctatctttggtgcagtcattggtacaaaccatcagggcacagcagctgcagcaactcgtgctacctgtgatcaaccaagtagctctggcaaacctttcttcctactctcagcaacaacaatttcttccattcaaccaactgtctac

SEQ ID NO: 342837 - DNA, 245 bp, Zea mays
  unsure (1)..(245): unsure at all n locations
ctcgataatggtgccctcattcccgcatgtgtttcctagaaataatcaatatattgattgagatttatctcannnnanannannnnnnccnnccccccnnnnnnnnnnnnnccaaaannnnccgggaaaaaaaaaaaaaaaaattttaaaaaaaaaaaaaannnaaaaaaaaaaaaaaaaaaggggccgccccttttaaagatccaaacttaccttccccttctttccaagttataagttttttt

SEQ ID NO: 342838 - DNA, 320 bp, Zea mays
  unsure (1)..(320): unsure at all n locations
gggtcttcagaccattagctttatctactccagagcgcagaagaacccgatcgacaccatgagggtgttgctcgttgccctcgctctcctggctctcgctgcgagcgccacctccacgcatacaagcggcggctgcggctgccagccaccgccgccggttcatctaccgccgccggtgcatctgccacctccggttcacctgccacctccggtgcatctcccaccgccggtccacctgccgccgccggtccacctgccaccgccggtccatgtgccgccgccggttcatctgccgncgncaccatgccactaccctactc

SEQ ID NO: 342839 - DNA, 315 bp, Zea mays
  unsure (1)..(315): unsure at all n locations
tgcgcttctttgcgctntttgcgagcgcaacanatgcgttcattattccacaatgctcacttgctcccaagttccattattacacagttcctcccaccagttacttcaatgggcttcgaacacccagctgtgcaagcctataggctacaacaagcaattgcggcgagcgtcttacaacaaccaatttcccagttgcaacaacaatccttggcacatctaacaatacaaaccatcgcaacgcaacagcaacaacaattcctaccagcactgagccacctagccatggtgaaccctgccgcctacttgcaacagcag

SEQ ID NO: 342840 - DNA, 400 bp, Zea mays
  unsure (1)..(400): unsure at all n locations
agaaagtggaatacagtagcaacaatagagcaccattggcggccaagatattttccatccttatgctccttgctctttctgcatgtgttgctaacgcgaccatttttcctcaatactcacaagctcctatagctgcccttcttcccccataccttccatcaatgaccgcttcagtatgtgaaaacccagcccttcaaccctacaggctccaacaagcaatcgcaacaagcaacttacctttatcacccctgttctttcaacaatcgccagccctatctttggtgcagtcattggtacanaccatcagggcacaacagctgcagcaactcgtgctaccagtgatcagcccaagtagctctggcaaaacctttctccctactctcagcaaacaacaattttc

SEQ ID NO: 342841 - DNA, 130 bp, Zea mays
  unsure (1)..(130): unsure at all n locations
tcgcagctggcatcttacctttatcacccttgtttctccaacaatcatcagccctattacaacagttaccttttgtgcatttattggcacaaaacatcanggcacaacaactacaacaactngtgctagc

SEQ ID NO: 342842 - DNA, 441 bp, Zea mays
  unsure (1)..(441): unsure at all n locations
caacatagaaagcacaatagtgtaccaacaatggcagccaaaatattttgcctccggatgctccttggtctttctgcaagtgctgctacggcgaccattttcccgaaatgctcgcaagctcctatagcttcccttcttcccccgtacctctcaccagcggtgtcttcggtatgtgaaaacccaattcttcaaccctacaggatccaacaggcaatcacagctggcatcttacctttatcacccttgttcctccaacaatcatcagccctattacatcagttacctttggtgcatttattggcacanaacatcagggcacaacaactacaacaacttgtgctagcaaaccttgctgcctactctcagcaacagcagtttcttccatcaaccaactagctgcattgaactctgcttcttatttgcaacaacaacaactaccat

SEQ ID NO: 342843 - DNA, 131 bp, Zea mays
  unsure (1)..(131): unsure at all n locations
gacccacgccgtcncnngcattagctttaaatctactccagaaagcgctagaatgtaacccgatcggacnnaccatgagggtggtgggctgcgttggctcctcgcnttctcctgggggctctccgctggcg

SEQ ID NO: 342844 - DNA, 441 bp, Zea mays
  unsure (1)..(441): unsure at all n locations
caactagcaacatagaaagcacaatattgtaccaataatggcagccaaaatattttgcctgattatgctccttggtctttctgcaagtgctgctacggcgagcattttcccgcaatgctcacaagctcctatagcttcccttcttcccccatacctctcaccagcgatgtcttcagtatgtgaaaatccaattcttctaccctacaggatccaacaggcaatcgcagcaggcatcttacctttatcacccttgttcctccaacaatcatcagccctattacagcagttacctttggtgcatttattggcacaaaacatcagggcacaacaactacaacaactcgtgctagcaaaccttgctgcctactctcagcaacagcagttacctttggtgcatttgttggcacanaacattanggcacaacaactacaacaactcgt

SEQ ID NO: 342845 - DNA, 303 bp, Zea mays
tttccttcctatggctcctgctctttctacatggggtgctaacgcgacaattttccctcaatgctcacaagctcctatagctttcctttttcccccataccttccatcaattatagctttagtatgtgaaaacccagctctttaaccatataagcttcaacaagcaatcgcagcaagcaacatacctttatcgcccttgttgtgtcaacaatcgccagccctatctttggtgcagtcattggtacaaaccatcagggcacaacagctgcagcaactcgtgctacctgtgatcaaccaagtagc

SEQ ID NO: 342846 - DNA, 400 bp, Zea mays
  unsure (1)..(400): unsure at all n locations
cccagctcttcaaccatataggctttatcaagcaatcgcagcaagcaacataccttgantcggtcttgttgtgtcaacaatcgccacccctatctttggtgcagtcattggtacaaaccatcagggcacaacagctgcagcaactcgtgctacctgtgatcaaccaagtagctctggcaaacctttctccctactctccgcaacaacaatttcttccattcaaccaactgtctacactgaaccctgctgcttatttgcagcaacaactattaccatttagccagctagctactgcctactctcaacaacaacaacttcttccatttaaccaattggccgcactgaaccccgctgcttatttgcagcagcaaatactactaccatttagccagctagctac

SEQ ID NO: 342847 - DNA, 396 bp, Zea mays
ttttcagcattcagaaacacaccaagtcgaatcgcactagcaacaacctaacaacagtggctactaagatattagccctccttgcgcttcttgcccttttagtgagcgcaacaaatgcgttcattattccacagtgctcacttgctcctagtgccattattccacagttcctcccaccagttacttcaatgggcttcgaacatccagccgtgcaagcctacaggctacaactagcgcttgcggcgagcgtcttacaacaaccaattgcccaattgcaacaacaatccttggcacatctaaacctacaaaccatcgcaacgcaacagcaacaacagtttctgccatcactgagccacctagccgtggtgaaccctgtcgcctacttgcaacagcagc

SEQ ID NO: 342848 - DNA, 361 bp, Zea mays
tgagcattcagaaacacaccaagcgattcacattagcaacaacctaacaacaatggcgtccaatatattatccctccttgcgcttcttgcgctttttgcgagcgcaacaaatgcgttcattattccacaatgctcacttgctccaagttccattattacacagttcctcccaccagttacttcaatgggcttcgaacacccagctgtgcaagcctataagctacaacaagcaattgcggcgagcgtcttacaacaaccaatttcccagttgcaacaacaatccttggcacatctaacaatacaaaccatcgcaacgcaacagcaacaacaattcctaccagcactgagccacctaaccatg

SEQ ID NO: 342849 - DNA, 126 bp, Zea mays
accacgcgtccggtgaaaacccaattcttcaaccttacaggttccaccaggcattcgcagttggcatctaacgttaataaccttggttcctccaacaatcatcacccttattacagcagttacctt

SEQ ID NO: 342850 - DNA, 364 bp, Zea mays
gtcccctgctccattctcagccgccgccaatcccttcccgtgctccgcaaccgctgagtgagaagaatagatggccggcaagggcgatcgcccggctatcggcatcgatctcggcacgacgtactcttgcgtcggcgtgtggcagcacgaccgcgtcgagatcattgccaacgaccagggtaaccgcaccacgccctcgtacgtcgccttcaccgactccgagcgcctcatcggagatgcggccaagaaccaggtcgccatgaaccccatcaacaccgtctttgatgccaagcgtctcatcggcaggaggttcagtgatgcgtctgtccagagtgatatcaagctgtggccctttcaggtcatt

SEQ ID NO: 342851 - DNA, 91 bp, Zea mays
aaaaccgttaaattgggacaaggcttttttttttttatattaaatggtccatcaaggcaatggttaaaactgcacctgcacccaatgggga

SEQ ID NO: 342852 - DNA, 384 bp, Zea mays
gaggattctttcaagatgtcggacattatcttgaagttgaaaactagcactagatccgtaagcctgtcactagtttcatctactgatagcgagagaaggaaactatctcatgtgtattggtctcatagcaccggagacgatttacaactatcacatgctgaggttcaagtggatatggtttggcagcagaatgtgccattgtcccccaacggatcaacatttactccatctccttcaaacaattcagataactatcatgtttcttgggtttggttctctcctacatcgcatggaactggcacatacattcccaacatgagttatcatacatacagggaacgtatgatgcttgaaagagaaaccatacgagcaagaaaacaacga

SEQ ID NO: 342853 - DNA, 353 bp, Zea mays
tattattgagaccaactagcaacatagaaagcacaatagtgtaccaacaatggcagctaaaatattttgcctccttatgctccttggtctttctgcaagtgctgctacggcgaccattttcccacaatgctcacaagctcctatagcttcccttcttcccccgtacctctcaccaacggtgtcttcggtatgtgaaaacccaattcttcaaccctacaggatccaacaggcaatcgcagctggcatcttacctttatcacccttgttcctccaacaatcatcagccctattacagcagttacctttggtgcatttattggcacaaaacatcagggcacaacaactacaacaac

SEQ ID NO: 342854 - DNA, 173 bp, Zea mays
  unsure (1)..(173): unsure at all n locations
gttctagtccgaccggccgccctttttttttttttttttttttttnnnccaataaaaagagccaggtattatttcatttggctttttccagccaaaattttattttacctccaaattcaaaaccggggcttcccttttttgacctaggcaaaaaaggagcctacccagttttt

SEQ ID NO: 342855 - DNA, 391 bp, Zea mays
tgagcattcagaaccacaccaagcgaagcacattagcaacaacctaacaacaatggctaccaagatattatccctccttgcgcttcttgcgctttttgcgagcgcaacaaatgcgttcattattccacaatgctcacttgctccaagttccattattacacagttcctcccaccagttacttcaatgggcttcgaacacccagctgtgcaagcctataggctacaacaagcaattgcggcgagcgtcttacaacaaccaatttcccagttgcaacaacaatccttggcacatctaacaatacaaaccatcgcaacgcaacagcaacaacaattcctaccagcactgagccacctagccatggtgaaccctgccgcctacttgcaacagcag

SEQ ID NO: 342856 - DNA, 411 bp, Zea mays
  unsure (1)..(411): unsure at all n locations
gtggaatccagtaccaccaatagagcaacattggcgaccaaaatattttccctccttatgctccttgctctttctgcatgtgttgctaacgcgacaattttccctcaatgctcacaagctcctatagcttcccttcttcccccataccttccatcaatgatagcttcagtatgtgaaaacccagctcttcaaccctataggctccaacaagcaatcgcagcaagcaacatacctttatcacccttgtttcaacaatcgccagccctatctttggtgcagtcattggtacaaaccatcagggcacagcagctgcagcaactcgtgctacctgtgatcaaccaagtagctctggcaaacctttctccctactctaagcacaacaatttcttncattcaaccactgtctacatt

SEQ ID NO: 342857 - DNA, 389 bp, Zea mays
  unsure (1)..(389): unsure at all n locations
ccaatccagatcagcaaagcggcagtgcgtagagaggatcgtcgaacagaacagcatgaagatggtcatcgttctcgtcgtgtgcctggctctgtcagctgccagcgcctctgcaatgcagatgccctgcccctgcgcggngctgcagggcttgtacggcgctggcgccggcctgacgacgatgatgggcgccggcgggctgtacccctacgcggagtacctgaggcagccgcagtgcagcccgctggcggcggcgccctactacgccgggtgtgggcagacgagcgccatgtaccagccgctccggcaacagtgctgccagcagcagatgaggatgatggacgtgcagtccgtcgcgcaacagctgcagatgatgatgcaacttgagc

SEQ ID NO: 342858 - DNA, 388 bp, Zea mays
gcaacatagaaagcacaatagtgtaccaacaatggcagccaaaatattttgcctccttatgctccttggtctttctgcaagtgctgctacggcgaccattttcccgcaatgctcgcaagctcctatagcttcccttcttcccccgtacctctcaccagcggtgtcttcggtatgtgaaaacccaattcttcaaccctacaggatccaacaggcaatcgcagctggcatcttacctttatcacccttgttcctccaacaatcatcagccctattacaacagttacctttggtgcatttattggcacaaaacatcagggcacaacaactacaacaacttgtgctagcaaaccttgctgcctactctcagcaacagcagtttcttccattc

SEQ ID NO: 342859 - DNA, 59 bp, Zea mays
cgcgtccgcgcattgaaaccagggcctgagcggtgggttgggcggacagcaccagacag

SEQ ID NO: 342860 - DNA, 385 bp, Zea mays
  unsure (1)..(385): unsure at all n locations
ataaacgtgtgcaccggtgccgcccgcacccagggaggatgcaccaccatgacaaggccgggggcggcctgccggcggtggccctcgcgcaaccccttgggcctcgcggccgccgtgggggccgccgccacaatctccggcgccacgtcaacccggccgtccccttcgggccgctgctcgccggccgatctgcctcgtccctccctcgtctactggccgcgcagctgctcngcgccgtcgccgcgcgctcgtgctcaggctcgccaccgagggatgcatctngccgagtacccccctgcgggggcgtgagcggattgaacgcgcngtgctngangcngnncatgcgttcgggctcatgtacgcctactttgcgacngtgatggac

SEQ ID NO: 342861 - DNA, 407 bp, Zea mays
gaccaacaagcaacatagaaagtggaatccagtagcaacaatagagcaacaatggcgaccaagatattttccctccttatgctccttgctctttctgcatgtgttgctaacgcgacaattttccctcaatgctcacaagctcctatagcttcccttcttcccccataccttccatcaatgatagcttcagtatgtgaaaacccagctcttcaaccctataggctccaacaagcaatcgcagcaagcaacatacctttatcacccttgtttcaacaatcgccagccctatctttggtgcagtcattggtacaaaccatcagggcacagcagctgcagcaactcgtgctacctgtgatcaaccaagtagctctggcaaacctttctccctactctcagcaacaacaatt

SEQ ID NO: 342862 - DNA, 353 bp, Zea mays
  unsure (1)..(353): unsure at all n locations
caacaagcaacatagaaagtggaatccagtaccaacaatagagcaccaatggcgaccaagagattgtccctccttatgctccttgctctttctgcatgtgttgctaacgcgacaattttccctcaatgctcacaagctcctatagcttcccttcttcccccataccttccatcaatgatagcttcagtatgtgaaaacccagctcttcaaccctataggctccaacaagcaatcgcagcaagcaacatacctttatcacccttgtttcaacaatcgccagccctatctttggtgcagtcattggtacaaaccatcanggcacagcagctgcagcaactcgtgctacctgtgat

SEQ ID NO: 342863 - DNA, 71 bp, Zea mays
gtgcgactgcatagctatagtattgcgacacctacatctaattcactggcacgtggccgtacaacgacaac

SEQ ID NO: 342864 - DNA, 354 bp, Zea mays
  unsure (1)..(354): unsure at all n locations
cagaccattagctttatctactccatgtatcgcagaagaacccgatcgacaccatgagggtggggctcgttgccctcgctctcctggctctcgctgcgagcgccacctncacgcatacaagcggcggctgcggctgccagccaccgccgccggttcatctaccgccgccggtgcatctgccacctccggttcacctgccacctccggtgcatctcccaccgccggtccacctgccgccgccggtccacctgccaccgccggtccatgtgccgccgccggttcatctgccgccgccaccatgccactaccctactcaaccgccccggnctcagcctcatccccagccacacccat

SEQ ID NO: 342865 - DNA, 61 bp, Zea mays
tcggtccaagcttcctggaagccgccgccaaaatttttttaccccgtcctccgccatggcc

SEQ ID NO: 342866 - DNA, 80 bp, Zea mays
atctgcgtacacggtctccctcttcctgtcattagtagagtgagagtgaggcaacgagtgggagacaatgggaaatgggg

SEQ ID NO: 342867 - DNA, 112 bp, Zea mays
ccaaaaggccgttgggtgctctgaacacacactttgttttaaacacatacctttgtgggcatgctggtggttttacttacattggattggccttccacctttaccattggat

SEQ ID NO: 342868 - DNA, 52 bp, Zea mays
taaaaggcacaatagtgtaccaacattggcagccaaaatattttgcctcctt

SEQ ID NO: 342869 - DNA, 336 bp, Zea mays
aaaatatttggcctcctaatgctggtgggtttttttgcaagtgctgctacggcgaccattttcccgcaatgctcacaagctcctatagcttcccttcttcccccgtacctctcaccagcggtgtcttcggtatgtgaaaacccaattcttcaaccctacaggatccaacaggcaatcgcagctggcatcttacctttatcacccttgttcctccaacaatcatcagccctattacagcagttacctttggtgcatttattggcacaaaacatcagggcacaacaactacaacaacttgtgctagcaaaccttgctgcctactctcagcaacagcag

SEQ ID NO: 342870 - DNA, 386 bp, Zea mays
  unsure (1)..(386): unsure at all n locations
attgagaccaactagcaacatagaatgcacattagtgtaccaacaatggcagccaaaatatggtgctttcttatgctccttggtctttctgcaagtgttgctaccgcaaccattttcccacaatgctcacaagctcctatagcttcccttcttcccccatacctctcaccagcggtgtcttcaatgtgtgaaaacccaattgttcaaccctacaagatccaacaagcaatcgcaacaggcatcttaccattatcacccttgttcctccaacaaccgtcagccctattacagcagttacctttggtccatttggtggcacaaaacatcagggcacaacaactacaacaactngtgctagcaaaccttgctgcatactctcagcaaca

SEQ ID NO: 342871 - DNA, 117 bp, Zea mays
ttcagaccattagctttatctactccagagtgcagaagaacccgatcgacaccatgagggtgttgctcgttgccctcgctctcctggctctcgctgcgagcgccacctccacgcata

SEQ ID NO: 342872 - DNA, 96 bp, Zea mays
gacccacgcgtcgaccattagctttatctactccagagcgcataaaacccgatcgacaccatgagggtgtgctcgtgcctgctctctggcttgctg

SEQ ID NO: 342873 - DNA, 132 bp, Zea mays
  unsure (1)..(132): unsure at all n locations
agaccattagctntatctactccagagcgcagaaaaacccgatcgacaccatgagggggttgggcggtgccctcgctcttctgggtctcgctttgagagccacacttacacatacaaacggggggttggggt

SEQ ID NO: 342874 - DNA, 258 bp, Zea mays
tcgcaacaagcaacataaaaagggggatcccgtagccacaatagagccacaatggggacccagatattttccctccttatgctccttgctctttctacatgtgttgctaacgcgacaatttttcctcaatgctcacaagctcctatagctttccttttttccccatacctttcatcaattatagcttcagtatgtgaaaacccagctctttaaccatataggctttaacaagcgatcgcagcaagcaacataccttta

SEQ ID NO: 342875 - DNA, 343 bp, Zea mays
caacaagcaacatagaatgtggaatccagtagcaacaatagagcaacaatggcgaccaagatattttccctccttatgctccttgctctttctgcatgtgttgctaacgcgacaattttccctcaatgctcacaagctcctatagcttcccttcttcccccataccttccatcaatgatagcttcagtatgtgaaaacccagctcttcaaccctataggctccaacaagcaatcgcagcaagcaacatacctttatcacccttggttcaacaatcgccagccctatctttggtgcagtcattggtacaaaccatcatggcacagcagctgcagcaactcgtgc

SEQ ID NO: 342876 - DNA, 223 bp, Zea mays
caaatgcgttcattattccacagtgctcacttgctcctagtgccattattccacagttcctgccaccagttacttcaatgggcttcgaacatccagccgtgcaagcctacaggctacaactagcgcttgcggcgagcgtcttacaacaaccaattgcccaattgcaacaacaatccttggcacatctaaacctacaaaccatcgcaacgcaacagcaacaaca

SEQ ID NO: 342877 - DNA, 157 bp, Zea mays
attagctttatctactccagagcgcagaagaacccgatcgacaccatgagggtgttgctcgttgccctcgcttcctggcttcgctggagcgccactcacgcatacaacggggtgggtgccaccaccgcgcggtattaccgcgcgggcattgcacctc

SEQ ID NO: 342878 - DNA, 151 bp, Zea mays
aatgcaacctacttgatataacaacatgccaagtcaagccccaccatgggcttcagagccaaatgcatcaaaagcatcttcgatgctacagctcaatcctctaatgtgcacattccacgcttgtgccatcctgagcaaactgcctctattg

SEQ ID NO: 342879 - DNA, 374 bp, Zea mays
cggacgcgtggggcggcagtgcgtaaagaggatcgtcgaacagaacagcatgaagatggtcatcgttctcgtcgtgtgcctggctctgtcagctgccagcgcctctgcaatgcagatgccctgcccctgcgcggggctgcaaggcttgtacggcgctggcgccggcctgacgacgatgatgggcgccggcgggctgtacccctacgcggagtacctgaggcagccgcagtgcagcccgctggcggcggcgccctactacgccgggtgtgggcagacgagcgccatgtaccagccgctccggcaacagtgctgccagcagcaaatgaggatgatggacgtgcagtccgtcgcgcaacagctgcagatgatgatgc

SEQ ID NO: 342880 - DNA, 278 bp, Zea mays
cttccccttctgcagatgtgctcccctggcccgcggcgccgccgctagcctctcgtgcgccatgccaccgcgaaagcgcccggcgctgccgccggatgagcccttccctttctcgaagcattaacctgaagcacaggcgtgcgaacccttcaaacccttccccgatttcgagcagccgatcatatcgggggcgatcctcgcccaacttgccccccaggagcgcctggcttacaagctcatcttcgaggcgggcaacaagggtatgtggatgctggata

SEQ ID NO: 342881 - DNA, 352 bp, Zea mays
gtcagcctagcaattagctcatcgactccagattggagaactcgacaccatgaaggtgctgatcgttgcccttgctctcctggcgctcgctgcgagcgccgcctccagtacaagcggcggctgtggctgccagacaccaccgtttcatctaccgcctccgttctatatgccgcctccgttctatctgccgccgcagcagcagccgcagccatggcaataccccactcaaccaccgcagctaagcccgtgccagcagttcggatcctgcggcgtcggcagcgtcggcagcccgttcctgggccagtgcgtcgagttcctgaggcaccagtgcagcccggcggcgacgccctac

SEQ ID NO: 342882 - DNA, 295 bp, Zea mays
gtcttcataccataagctggggctactactgtccgcataagaaccccagcgacacccaggagcagtttctacgagccgtggctatcctgtttctggttgccagcaccaactccacccattcatgccgcgggggaggatgccacccaccgccggctgctaatatacgcgccaccagtgaatatgccacaccgcgcgtcaactgccatctgggggcaattccaccacgccgttcagctgtcggcgcctgatgacgtaccacctgctggccatgtgcgcgcaactgttattattactg

SEQ ID NO: 342883 - DNA, 312 bp, Zea mays
agaaagcacaatagtgtaccaacaatggcagccaaaatattttgcttccttatgctccttgggctttctgcaagtgctgctaccgcaaccattttcccacaatgctcacaagctcctatagctgcctttcttcccccatacctctcaccagcggcgtctacaggatgtgaaaacccaattcttcaaccctacaggatccaaacaggcaatcgcagcatgcatcttacctttatcaccctggttcctccaacaaccgtcagccgtattacagcagttacctttggtgcattggttgcacaaaacatcaaggac

SEQ ID NO: 342884 - DNA, 376 bp, Zea mays
gtcttcagaccattagctgtatctactccagagcgcagaagaacccgatcgacaccatgagggtgttgctcgttgccctcgctctcctggctctcgctgcgagcgccacctccacgcatacaagcggcggctgcggctgccagccaccgccgccggttcatctaccgccgccggtgcatctgccacctccggatcacctgccacctccggtgcatatcccaccgacggtccacctgccgccgccggtccacctgacaccgccggtccatgtgccgccgccggttcatctgccggcggcaccatgccactaccctactcaaccgacccgggctcagactcatgctcagccacacccatgcccgtgccaacagccgca

SEQ ID NO: 342885 - DNA, 176 bp, Zea mays
agggtcgtcgaacaaaacaacatgaaaatgggcattggtctcgtcgggtggctggctctgtcaacttgcaacgccttttgaatgcaaattcccttgcccttcgccgggctgtaaggctttgaccgggcttgcgcccggcttaccaccattattggcgcccgcgggctttaccccta

SEQ ID NO: 342886 - DNA, 376 bp, Zea mays
gcaaagcggcagtgcgtagagaggatcgtcgaacagaacagcatgaagatggtcatcgttctcgtcgtgtgcctggctctgtcagctgccagcgcctctgcaatgcagatgccctgcccctgcgcggggctgcagggcttgtacggcgctggcgccggcctgacgacgatgatgggcgccggcgggctgtacccctacgcggagtacctgaggcagccgcagtgcagcccgctggcggcggcgccctactacgccgggtgtgggcagacgagcgccatgtaccagccgctccggcaacagtgctgccagcagcagatgaggatgatggacgtgcaatccgtcgcgcatcaactgcagatgatgatgcaacttgagc

SEQ ID NO: 342887 - DNA, 287 bp, Zea mays
cgccgccggtgcatctgccacctccggttcacctgccacctccggtgcatctcccaccgccggtccacctgccgccgccggtccacctgccaccgccggtccatgtgccgccgccggttcatctgccgccgccaccatgccactaccctactcaaccgccccggcctcagcctcatccccagccacacccatgcccgtgccaacagccgcatccaagcccgtgccagctgcaaggaacctgcggcgttggcagcaccccgatcctgggccagtgcgtcgagttcctg

SEQ ID NO: 342888 - DNA, 215 bp, Zea mays
cagaccattagctttatctactccagagcgcagaagaacccgatcgacaccatgagggtgttgctcgttgccctcgctctcctggctctcgctgcgagcgccacctccacgcatacaagcggcggctgcggctgccagccaccgccgccggttcatctaccgccgccggtgcatctgccacctccggttcacctgccacctccggggcatcttcc

SEQ ID NO: 342889 - DNA, 442 bp, Zea mays
agcaacatagaaagcacaatagtgtaccaacaatggcagccaaaatattttgcctccttatgctccttggtctttctgcaagtgctgctacggcgaccattttcccacaatgctcacaagctcctatagcttcccttcttcccccgtacctctcaccagcggtgtcttcggtatgtgaaaacccaattcttcaaccctataggatccaacaggcaatcgcagctggcatcttacctttatcacccttgttcctccaacaatcatcagccctattacagcagttacctttggtgcatttattggcacaaaacatcagggcacaacaactacaacaacttgtgctagcaaaccttgctgcctactctcagcaacaacagtttcttccattcaaccaactagctgcattgaactctgcttcttatttgaacaacacaactaccat

SEQ ID NO: 342890 - DNA, 351 bp, Zea mays
gcaacatagaaagcacaatagtgtaccaacaatggcagctaaaatattttgcctccttatgctccttggtctttctgcaagtgctgctacggcgaccattttcccacaatgctcacaagctcctatagcttcccttcttcccccgtacctctcaccaacggtgtcttcggtatgtgaaaacccaattcttcaaccctacaggatccaacaggcaatcgcagctggcatcttacctttatcacccttgttcctccaacaatcatcagccctattacagcagttacctttggtgcatttattggcacaaaacatcaaggcacaacaactacaacaacttgtgctagcaaacct

SEQ ID NO: 342891 - DNA, 411 bp, Zea mays
aaagcacaatagtgtaccaacaatggcagccaaaatattttgcctccttatgctccttggtatttgtgcaagtgctgctacggcgaccattttcccgcaatgctcacaagctcctatagcttcccttcttcccccgtacctctcaccagcggtgtcttcggtatgtgaaaacccaattcttcaaccctacaggatccaacaggcaatcgcagctggcatcttacctttatcacccttgttgctccaacaatcatcagccctattacagcagttacctttggtgcatttattggcacaaaacatgacggcacaacaactacaacaacttgtgctagcaaaccttgctggctactctcagcaacagcagattcttacattcaaccaactagctgcattgaactctgcttctta

SEQ ID NO: 342892 - DNA, 144 bp, Zea mays
gcaacaacttccttcattcgctttgaggcgtgcccaaccatggctgtcctcggcaccgcggcggttgaggtgctcatcccggagcggattggtgcatcgtttccgtgtgagggatgggggcaagtccggcttcacccgagacgg

SEQ ID NO: 342893 - DNA, 222 bp, Zea mays
cttccatttggacccacttgccacatttaaagggccatagggggcccacaatgggcgcccaaatattttggtttcctatgccccctgggctttctgccaaggttgtgacccgaacccattttccacaaaggttacaaacttctataggtttccttttttccccataccctttaacaaaggggggtttaaaggggggaaaacccatttgttaaaccttcccgg

SEQ ID NO: 342894 - DNA, 447 bp, Zea mays
tcgacccacttgcaacataaaaaggaccattagggtcccaccatgggcagccaaatattttggcttcttatgctccttggtctttctgcaagtgttgctaccgcaaccattttcccacaatgctcacaagctcctatagcttcccttcttcccccatacctctcaccagcggtgtcttcaatgtgtgaaaacccaattgttcaaccctacaggatccaacaggcaatcgcaacaggcatcttaccattatcacccttgttcctccaacaaccgtcagccctattacagcagttacctttggtccatttggtggcacaaaacatcagggcacaacaactacaacaacttgtgctagcaaaccttgctgcatactctcagcaacatcagtttcttccattcaaccaactggctgcattgaactctgctgcttatttgcaacaacaatta

SEQ ID NO: 342895 - DNA, 451 bp, Zea mays
caactagcaacatagaaagcacaatagtgtaccaacaatggcagccaaaatattttgcctccttatgctccttggtctttctgcaagtgctgctacggcgaccattttcccgaaatgctcgcaagctcctatagcttcccttcttcccccgtacctctcaccagcggtgtcttcggtatgtgaaaacccaattcttcaaccctacaggatccaacaggcaatcacagctggcatcttacctttatcacccttgttcctccaacaatcatcagccctattacatcagttacctttggtgcatttattggcacaaaacatcagggcacaacaactacaacaacttgtgctagcaaaccttgctgcctactctcagcaacagcagtttcttccattcaaccaactagctgcattgaactctgcttcttatttgcaacaacaacaactaccattc

SEQ ID NO: 342896 - DNA, 357 bp, Zea mays
caactagcaacatagaaagcacaatagtgtaccaacaatggcagccaaaatattttgcttccttatgctccttggtctttctgcaagtgctgctaccgcaaccattttcccacaatgctcacaagctcctatagcttcctttcttcccccatacctctcaccagcggtgtcttcagtatgtgaaaacccaattcttcaaccctacaggatccaacaggcaatcgcagcaggcatcttacctttatcacccttgttcctccaacaaccgtcagccctattacagcagttacctttggtgcatttgttggcacaaaacatcaaggcacaacaactacaacaacttgtgctaggaaacct

SEQ ID NO: 342897 - DNA, 468 bp, Zea mays
aaaccaccttaaaaggtggaatacagtagcaacaatagagcaacaatggcggccaagatattttccatccttatgctccttgctctttctgcatgtgttgctaacgcgaccatttttcctcaatactcacaagctcctatagctgcccttcttcccccataccttccatcaatgaccgcttcagtatgtgaaaacccagcccttcaaccctacaggctccaacaagcaatcgcaacaagcaacttacctttatcacccctgttctttcaacaatcgccagccctatctttggtgcagtcattggtacaaaccatcagggcacaacagctgcagcaactcgtgctaccagtgatcagccaagtagctctggcaaacctttctccctactctcagcaacaacaatttcttgcattcaaccaactgtctacactgaaccctgctgcttatttgcagcaacaacaactacta

SEQ ID NO: 342898 - DNA, 409 bp, Zea mays
  unsure (1)..(409): unsure at all n locations
tcggcaaaacgcaaaaaaacccggacggaaacattaagggggtggctcgttgccttcgctcttcctggctctcgctgcgagcgccacctccacgcatacaagcggcggctgcggctgccaaccaccgccgccggttcatctaccgccgccggtgcatctgccacctncggttcacctgccacctccggtgcatctnccaccgccggtccacctgccgccgccggtccacctgccaccgccggtccatgtgccgccgccggttcatctgccgccgccaccatgccactaccctactcaaccgccccggcctcagcctcatccccagccacacccatgcccgtgccaacagccgcatncaagcccgtgccagctgcagggaacctgcggcgttggcagcaccccgatcctg

SEQ ID NO: 342899 - DNA, 355 bp, Zea mays
agaccattagctttatctactccagagcgcagaagaacccgatcgacaccatgagggtgttgctcgttgccctcgctctcctggctctcgctgcgagcgccacctccacgcatacaagcggcggctgcggctgccagccaccgccgccggttcatctaccgccgccggtgcatctgccacctccggttcacctgccacctccggtgcatcttccaccgccggtccacctgccgccgccggtccacctgccaccgccggtccatgtgccgccgccggttcatctgccgccgccaccatgccactaccctactcaaccgccccggcctcagcctcattcccagccacacccatgccc

SEQ ID NO: 342900 - DNA, 314 bp, Zea mays
ccaacaagcaacatagaaagtggaatccagtagcaacaatagagcaacaatggcgaccaagatattttccctccttatgctccttgctctttctgcatgtgttgctaacgcgacaattttccctcaatgctcacaagctcctatagcttcccttcttcccccataccttccatcaatgatagcttcagtatgtgaaaacccaactcttcaaccctataggctccaacaagcaatcgcagcaagcaacatacctttatcacccttggttcaacaatcgccagccctatctttggtgcaagcattggtaccaacca

SEQ ID NO: 342901 - DNA, 131 bp, Zea mays
  unsure (1)..(131): unsure at all n locations
cccacgcgtncggaccaactagcaacatagaaagcacaatagtgtaccaacaatggcagctaaaatattgtgcctacttatgctccttggtctttctgcaagtgctgctaccgcgaccattttcccacaat

SEQ ID NO: 342902 - DNA, 405 bp, Zea mays
  unsure (1)..(405): unsure at all n locations
gacacaatcaactctatgtaatctgcagggaacatgaaccggatggacaacatgaaggcggggctagtgggcctagtttttctggctttagctgagagcgacagctacacgcttatgatcggctgatggccatgccatgcaccagcagcggtgcatgtacctcaggcagggcatgtggcacctccggtacaactggaacttccggtggatcttccaccgcatgctgaactagcagccgcagagcagctagcaccggcggttcatgtgccggcanatagtgatataactgacggagatgcgccgactgtactaaaccactccatgctcatactctattgccggcagagtcatgcactggagaaaatatgtattgaagcataggccatgtgtaggtaactatgtgag

SEQ ID NO: 342903 - DNA, 436 bp, Zea mays
ttgagaccaacaagcaacatagaaagtggaatccagtagcaacaatagagcaacaatggcgaccaagatattttccctccttatgctccttgctctttctgcatgtgttgctaacgcgacaattttccctcaatgctcacaagctcctatagcttcccttcttcccccataccttccatcaatgatagcttgagtatgtgaaaacccagctcttcaaccctataggctccaacaagcaatcgcagcaagcaacatacctttatcacccttggttcaacaatcgccagccctatctttggtgcaggcattggtacaaaccatgaaggcacatcagctgcagcaactcgtgctacctgtgatcaaccaagtagctgtggcaaacctttctccctactctcagcaacaacaatttcttccattcaaccaactgtctaca

SEQ ID NO: 342904 - DNA, 242 bp, Zea mays
gcctagcaattagctcatcgactccagattggagaactcgacaccatgaaggtgctgatcgttgcccttgctctcctggcgctcgctgcgagcgccgcctccagtacaagcggcggctgtggctgccagacaccaccgtttcatctaccgcctccgttctatatgccgcctccgttctatctgccgccgcagcagcagccgcaaccatggcaataccccactcaaccaccgcaactaaaccc

SEQ ID NO: 342905 - DNA, 458 bp, Zea mays
attttgagcatttaaaaacacacccagcgaaacggacttaccaccaccttaccaaaaatggctaccaagatattatccctccttgcgcttcttgcgctttttgcgagcgcaacaaatgcgtgcattattccacaatgctcacttgctcctagttccattattccacagttcctcccaccagttacttcaatggccttcgaacacccagctgtgcaagcctataagctacaacaagcgattgcggcgagcgtcttacaacaaccaattgcccaattgcaacaacaatccttggcacatctaacaatacaaaccatcgcaacgcaacagcaacaacagttcctaccagcactgagccacctagccatggtgaaccctgtcgcctacttgcaacagcagctgcttgcatccaacccacttgctctagcaaacgtagttgcaaaccagcaacaacaacaact

SEQ ID NO: 342906 - DNA, 465 bp, Zea mays
  unsure (1)..(465): unsure at all n locations
gtgcgtagagaggatcgtcgaacagaacagcatgaagatggtcatcgttctcgtcgtgtgcctggctctgtcagctgccagcgcctctgcaatgcagatgccctgcccctgcgcggggctgcagggcttgtacggcgctggcgccggcctgacgacgatgatgggcgccggcgggctgtacccctacgcggagtacctgaggcagccgcagtgcagcccgctggcggcggcgccctactacgccgggtgtgggcagacgagcgccatgtaccagccgctccggcaacagtgctgccagcagcagatgaggatgatggacgtgcagtccgtcgcgcagcagctgcagatgatgatgcagcttgagcgtgccgctgccgccagcagcaacctgtacgagccagctctgatgcaacagcagcagcagctgctggcagcccanggtctcaaccccatggccatgatgat

SEQ ID NO: 342907 - DNA, 293 bp, Zea mays
aatattttgcctccttatgctccttggtctttctgcaagtgctgctacggcgaccattttcccgcaatgctcgcaagctcctatagacttccttctttccccgtacctctcaccagcggtgtcttcggtatgtgaaaacccaattcttcaaccctacaggatccaacaggcaatcgcagctggcatcttacctttatcacccttggtcctccaacaatcatcagccctattacaacaggtacctttggtgcatttattggcacaaaacattagggcacaacaactacaacaac

SEQ ID NO: 342908 - DNA, 368 bp, Zea mays
tcgactaggtctagatcgcgagccggccgcctttttttttttttttaaaaaattaaaaaaggaccttcttaatttttgggaagccccaaaacattagggcacaacaactacaacaacttgtgctagcaaaccttgctgcctactctcagaaacagcagtttcttccattcaaccaactagctgcattgaactctgcttcttatttgcaacaacaacaactaccattcagccagctatctgctggctacccccaacaatttctttcattcaaccaactgacagcattgaactctcctgcttatttacagcagcaacaactactaccattcagccagctagctggtgtgagccctgctaccttcttgaca

SEQ ID NO: 342909 - DNA, 440 bp, Zea mays
agaaagcacaatagtgtaccaacaatggcagccaaaatattttgcctccttatgctccttggtctttctgcaagtgctgctacggcgaccattttcccgaaatgctcgcaagctcctatagcttcccttcttcccccgtacctctcaccagcggtgtcttcggtatgtgaaaacccaattcttcaaccctacaggatccaacaggcaatcacagctggcatcttacctttatcacccttgttcctccaacaatcatcagccctattacatcagttacctttggtgcatttattggcacaaaacatcagggcacaacaactacaacaacttgtgctagcaaaccttgctgcctactctcagcaacagcagtttcttccattcaaccaactagctgcattgaactctgcttcttatttgcaacaacaacaactaccattcag

SEQ ID NO: 342910 - DNA, 351 bp, Zea mays
  unsure (1)..(351): unsure at all n locations
agaccattagctttatctactccagagcgcagaagaacccgatcgacaccatgagggtgttgctcgttgccctcgctctcctggctctcgctgcgagcgccacctccacgcatacaagcggcggctgcggctgccagccaccgccgccggttcatctaccgccgccggtgcatctgccacctccggttcacctgccacctacggtgcatctcccaccgccggtccacctgccgccgccggtccacctgccaccgacggtccatgtgccgncgacggttcatctgccgacgtcaccatgccactaccctactcaaccgccccggcctcaacctgatgcccagccacacccat

SEQ ID NO: 342911 - DNA, 342 bp, Zea mays
caacaagcaacatagaaagtggaatccagtagcaacaatagagcaacaatggagaccaagatattttccctccttatgctccttgctctttctacatgtgttgctaacgcgacaattttccctcaatgctcacaagctcctatagcttccctttttcccccataccttccatcaattatagcttcagtatgtgaaaacccagctcttcaaccatataggcttcaacaagcaatcgcagcaagcaacatacctttatcgcccttgttgtgtcaacaatcgccagccctatctttggtgcagtcattggtacaaaccatcaaggcacaacagctgcagcaactc

SEQ ID NO: 342912 - DNA, 441 bp, Zea mays
caacaagcaacatagaaagtggaatacagtagcaacaatagagcaacaatggcggccaagatattttccatccttatgctccttgctctttctgcatgtgttgctaacgcgaccatttttcctcaatactcacaagctcctatagctgcccttcttcccccataccttccatcaatgaccgcttcagtatgtgaaaacccagcccttcaaccctacaggctccaacaagcaatcgcaacaagcaacttacctttatcacccctgttctttcaacaatcgccagccctatctttggtgcagtcattggtacaaaccatcagggcacaacagctgcagcaactcgtgctaccagtgatcagccaagtagctctggcaaacctttctccctactctcagcaacaacaatttcttccattcaaccaactgtctacactgaaccct

SEQ ID NO: 342913 - DNA, 427 bp, Zea mays
cccacgcgtccgcactcatgcatcacaaaacatccttctatcagtaccatcaatcatcattcatcttagtagtataggcaccaaatcaaatctgcaacatcaattatctaactccaaaaaccatgaagctggtgcttgtggttcttgctttcattgctttagtatcaagtgtttcttgtacacagacaggcggctgcagctgtggtcaacaacaaagccatgagcagcaacatcatccacaacaacatcatccacaaaaacaacaacatcaaccaccaccacaacatcaccagcagcagcaacaccaacaacaacaagttcacatgcaaccacaaaaacatcagcaacaacaagaagttcatgttcaacaacaacaacaacaaccgcagcaccaacaacaacaacaacaacagcaccaacaacaaca

SEQ ID NO: 342914 - DNA, 135 bp, Zea mays
  unsure (1)..(135): unsure at all n locations
tttaaattatcaactccataccttatttttaattctatcaacaccaaaaaattntttctgttttttttaaaactcctggctccctctaaaaacaccatctacacacatacaatctattattttctaatttcaacc

SEQ ID NO: 342915 - DNA, 53 bp, Zea mays
cttcgaaaacattaactttatttaattcaaaagggcaaaaaaacccgaccgac

SEQ ID NO: 342916 - DNA, 70 bp, Zea mays
attttaatattataaacttgcaccgagtcgaacaaagtttatttttttttgcccaaactaagataaactt

SEQ ID NO: 342917 - DNA, 250 bp, Zea mays
tttcagcattcagaaacacaccaagcgaagcgcactagcaacaacctaacaacaatggctaccaagatattagccctccttgcgcttcttgcccttttagtgagcgcaacaaatgcgttcattattccacagtgctcacttgctcctagtgccattattccacagttcctcccaccagttacttcaatgggcttcgaacatccagccgtgcaagcctacagggctacaactaagccgcttgcggcgaagc

SEQ ID NO: 342918 - DNA, 173 bp, Zea mays
atcgacaccatgagggtgttgctcgttgccctcgctctcctggctctcgctgcgagcgccacgtccacgcatacaagcggcggctgcggctgccagccaccgccgccggttcatctaccgccgccggtgcatctgccacctccggttcacctgccacctccggtgcatcttcc

SEQ ID NO: 342919 - DNA, 456 bp, Zea mays
ctgggtcttcagaccattagctttatctactccagagcgcagaagaacccgatcgacaccatgagggtgttgctcgttgccctcgctctcctggctctcgctgcgagcgccacctccacgcatacaagcggcggctgcggctgccagccaccgccgccggttcatctaccgccgccggtgcatctgccacctccggttcacctgccacctccggtgcatctcccaccgccggtccacctgccgccgccggtccacctgccaccgccggtccatgtgccgccgccggttcatctgccgccgccaccatgccactaccctactcaaccgccccggcctcagcctcatccccagccacacccatgcccgtgccaacagccgcatccaagcccgtgccagctgcaaggaacctgccggcgtggcagcaccccgatcctgggccaatgcgtcgagttcctg

SEQ ID NO: 342920 - DNA, 152 bp, Zea mays
ttaccgcggccgtggatttggcaacttcgggtgaacctgccacctccggggattttccaacgggggggcaactggcggcggcggggcacctggcaccggcggggcatttgcccccccccggttatatgtcgccgccaccattgcactatcct

SEQ ID NO: 342921 - DNA, 103 bp, Zea mays
ggccggaaccggggccggggccaacgggcccaattaccaaccggttctttcttttaaatgggccaattggcccgaatgttttttggcccaatttttttttttt

SEQ ID NO: 342922 - DNA, 203 bp, Zea mays
gatagaaagtggaatccagtagcaacaatagagcaacaatggggaccaagatattttccctccttatgctccttgctctttctgcatgtgttgctaacgcgacaatttttcctcaatgctcacaaactgctatagcttcccttcttcccccataccttccatcaatgatagcttgagtatgtggaaacccacctcttttaccc

SEQ ID NO: 342923 - DNA, 436 bp, Zea mays
agaccaacatgcaacatagaaagtggaatgcagaagcaacaatagatcaacaatggcgaccaagacattttccctgcttatgctccttgctctatctgcatgtgctgctaacgcgacaattttgcctcaatgctcacaagcttctatagcttcccttcttgccccataccttccatcaatgatagcttcagaatgtgaaaacccaactcttcaaccctataggctgcaacaagcaatcggagcaagcaacatacctttatcacccttgtttcaacaatcgacagccctatctttggtgcagtcattgatacaaaccatgagggcacagtagctgcagcaactcgtgctacctgtgatcaaccaagtagctctggcgaacctttgtacctactctcagcaacaacaatttcttccattcaaccaactgtctacattg

SEQ ID NO: 342924 - DNA, 176 bp, Zea mays
ctgcaaatgcatacattattctacattgattactagctgctaaatacattattccacaccatgtgggagcatgctacttgaatgtcctttaacactctctgtgcagcctatatctaaaaaccgatgcggtgggtttaacaaccatggaatgaacacatgtggaattaaataaacca

SEQ ID NO: 342925 - DNA, 155 bp, Zea mays
caactagcaacatagaaagcacaatagtgtaccaacaatggcagccaaaatattttgcttccttatgctccttggtctttctggaagtgttgctaccgcaaccattttcccacaatgctcacaagctcctatagcttgccttttttccccatacc

SEQ ID NO: 342926 - DNA, 193 bp, Zea mays
cagaaacacaccaagcgaagcacattagcaacaacctaacaacaatgggtaccaagatattatcccttcttgcgcttcttgcgctttttgcgagcgcaacaaatgcgttcattattccacaatgctcacttgctccaaggtccattattacacaagtcctcccaccaagtactttaatgggctttgaacaccc

SEQ ID NO: 342927 - DNA, 361 bp, Zea mays
aatattttgagcattcagaaacacaccaagcgaagcgcactaacaacgacctaacaacaatggctaccaagatattaaccctccttgcgcttcttgccctttttgtgagcgcaacaaatgcgttcattattccacaatgctcacttgctcctagtgccattattccacagttcctcccaccagttacttcaatgggcttcgaacacctagctgtgcaagccaacatgcaacaacaagcgcttgcggcgagcgtcttacaacaaccaattgcccaattgcaacaacaatccttgccacatctaacaatacaagccatcacaacgcaacagcaacaacagttcctaccagcactgagccacct

SEQ ID NO: 342928 - DNA, 462 bp, Zea mays
attttgagcattcagaaacacaccaagcgaagcgcactagcaacgacctaacaacaatggctaccaagatattagccctccttgcgcttcttgccctttttgtgagcgcaacaaatgcgttcattattccacaatgctcacttgctcctagtgccattattccacagttcctcccaccagttacttcaatgggcttcgaacacctagctgtgcaagccaacatgcaacaacaagcgcttgcggcgagcgtcttacaacaaccaattgcccaattgcaacaacaatccttgccacatctaacaatacaagccatcacaacgcaacagcaacaacagttcctaccagcactgagccacctagccatggtgaaccctgccgcctacttgcaagagcagctgcttgcatccaacccacttgctctggcgaacgtagttgcaaaccagcaacaacaacagctacaac

SEQ ID NO: 342929 - DNA, 300 bp, Zea mays
tagaaagtggaatccagtagcaacaatagagcaacaatggcgaccaagatattttcccctcgtatgcctcctgctctttctgcatgtgttgctaacgcgacaattttccctcaatgctcacaagctcctatagcttcccttctttccccatacctttcatcaatgatagcttcagtatgtgaaaacccagctcttcaaccctataggctccaacaagcaatcgcagcaagcgacatacctttatcacccttgtgttaacaatcgccagccctatctttggtgcaggcattgggacaaacc

SEQ ID NO: 342930 - DNA, 383 bp, Zea mays
gaccaactagcaacatagaaagcacaatagtgtaccaacaatggcagccaaaatattttgcttccttatgctccttggtctttctgcaagtgctgctaccgcaaccattttcccacaatgctcacaagctcctatagcttcctttcttcccccatacctctcaccagcggtgtcttcagtatgtgaaaacccaattcttcaaccctacaggatccaacaggcaatcgcagcaggcatcttacctttatcacccttgttcctccaacaaccgtcagccctattacagcagttacctttggtgcatttgttggcacaaaacatcaaggcacaacaactacaacaacttgtgctaagaaaccttgctgcctactctcagcaacagc

SEQ ID NO: 342931 - DNA, 476 bp, Zea mays
ctgggtcttcagaccattagctttatctactccagagcgcagaagaacccgatcgacaccatgagggtgttgctcgttgccctcgctctcctggctctcgctgcgagcgccacctccacgcatacaagcggcggctgcggctgccagccaccgccgccggttcatctaccgccgccggtgcatctgccacctccggttcacctgccacctccggtgcatctcccaccgccggtccacctgccgccgccggtccacctgccaccgccggtccatgtgccgccgccggttcatctgccgccgccaccatgccactaccctactcaaccgccccggcctcagcctcatccccagccacacccatgcccgtgccaacagccgcatccaagcccgtgccagctgcagggaacctgcggcgttggcagcaccccgatcctgggccagtgcgtcgagtttctgaggcatcagtgcagcccgac

SEQ ID NO: 342932 - DNA, 93 bp, Zea mays
cagtagggtgggaattgtacctcgaccaaatcacttgtcgggtgggggaccaccaccccttggggaaggtaatgggggtgcatcatggtgggc

SEQ ID NO: 342933 - DNA, 456 bp, Zea mays
agaccaactagcaacatagaaagcacaatagtgtaccaacaatggcagctaaaatattttgcctccttatgctccttggtctttctgcaagtgctgctacggcgaccattttcccacaatgctcacaagctcctatagcttcccttcttcccccgtacctctcaccaacggtgtcttcggtatgtgaaaacccaattcttcaaccctacaggatccaacaggcaatcgcagctggcatcttacctttatcacccttgttcctccaacaatcatcagccctattacagcagttacctttggtgcatttattggcacaaaacatcagggcacaacaactacaacaacttgtgctagcaaaccttgctgcctactctcagcaacagcagtttcttccattcaaccaactagctgcattgaactctgcttcttatttgcaacaacaacaactaccattca

SEQ ID NO: 342934 - DNA, 336 bp, Zea mays
aatgccaccaacttgatctactgcaagccgcataataacccgaccgacaccatcaaggtgttgcgccttcgtatgcttctcgtggcttttgctgcgagcgctaccgcgaccaatacaaccggatgctggcagggtcatacacctgcgcttgttcatctacacctgtcagcacatgtgtcatctgcatgtgaactgccaactcttgaacattacacgatgccagaggaaatggcagctggggtccaacttttatcaccggtgcatgtgccaccatcatttgatctattaccaccaccatgtctgtagcctactttggcgcacaagattaaggctcat

SEQ ID NO: 342935 - DNA, 122 bp, Zea mays
gcgtcttcagaccattatctttatctactccagagcgcagaaaaacaccatcgacaccatgaggggggtgctcgttgccctcgctcttctggctcttgctgcgagcgccaccttcacgcata

SEQ ID NO: 342936 - DNA, 353 bp, Zea mays
gaaagcacaatagtgtaccaacaatggcagccaaaatattttgcttccttatgctccttggtctttctgcaagtgttgctaccgcaaccattttcccacaatgctcacaagctcctatagcttcccttcttcccccatacctctcaccagcggtgtcttcaatgtgtgaaaacccaattgttcaaccctacaggatccaacaggcaatcgcaacaggcatcttaccattatcacccttgtttcttcaacaaccgtcagccctattacagcagttacctttggtccatttgggggcacaaaacattagggcacaacaactacaacaacttgtgctagcaaaccttgctggatac

SEQ ID NO: 342937 - DNA, 295 bp, Zea mays
attttgagcattcacaaacacaccaagcgaagcacattagcaacaacctaacaacaatggctaccaagatattatcccttcttgcgcttcttgcgctttttgcgagcgcaacaaatgcgttcattatttcacaatgctcacttgctccaagtttcattattacacagatcctcccaccagttactttaatgggctttgaacacccagctgtgcaagcctatatgctacaacaagcaattgcggcgagcgtcttacaacaaccaaatttccagtttgaacaacaatgcttgggaca

SEQ ID NO: 342938 - DNA, 98 bp, Zea mays
ctaagttctaaatcgggagccggcggtttaaaaggttccaagctaccttccgcggccttgcaacgtcttagctcttgtatagtggcacctaaatcaat

SEQ ID NO: 342939 - DNA, 61 bp, Zea mays
atacatgcgagcgcgggtctatactatggtggcgcctaaattcaatccactggccgaaaaa

SEQ ID NO: 342940 - DNA, 431 bp, Zea mays
gggtcttcagaccattagctttatctactccagagcgcagaagaacccgatcgacaccatgagggtgttgctcgttgccctcgctctcctggctctcgctgcgagcgccacctccacgcatacaagcggcggctgcggctgccagccaccgccgccggttcatctaccgccgccggtgcatctgccacctccggttcacctgccacctccggtgcatctcccaccgccggtccacctgccgccgccggtccacctgccaccgccggtccatgtgccgccgccggttcatctgccgccgccaccatgccactaccctactcaaccgccccggcctcagcctcatccccagccacacccatgcccgtgccaacagccgcatccaagcccgtgccagctgcagggaacctgcggcgttggcagcaccccgatcc

SEQ ID NO: 342941 - DNA, 445 bp, Zea mays
gcaacatagaaagcacaatagtgtaccaacaatggcagccaaaatattttgcctccttatgctccttggtctttctgcaagtgctgctacggcgaccattttcccacaatgctcacaagctcctatagcttcccttcttcccccgtacctctcaccagcggtgtcttcggtatgtgaaaacccaattcttcaaccctataggatccaacaggcaatcgcagctggcatcttacctttatcacccttgttcctccaacaatcatcagccctattacagcagttacctttggtgcatttattggcacaaaacatcagggcacaacaactacaacaacttgtgctagcaaaccttgctgcctactctcagcaacaacagtttcttccattcaaccaactagctgcattgaactctgcttcttatttgcaacaacaacaactaccattc

SEQ ID NO: 342942 - DNA, 119 bp, Zea mays
tttatctactccagagcgcagaagaacccgatcgacaccatgagggtggtgctcgatggcctcgctcttctgggtctcgctgtgagagccaacttcacgcatacaaacggggggtgggg

SEQ ID NO: 342943 - DNA, 476 bp, Zea mays
ctgggtcttcagaccattagctttatctactccagagcgcagaagaacccgatcgacaccatgagggtgttgctcgttgccctcgctctcctggctctcgctgcgagcgccacctccacgcatacaagcggcggctgcggctgccagccaccgccgccggttcatctaccgccgccggtgcatctgccacctccggttcacctgccacctccggtgcatctcccaccgccggtccacctgccgccgccggtccacctgccaccgccggtccatgtgccgccgccggttcatctgccgccgccaccatgccactaccctactcaaccgccccggcctcagcctcatccccagccacacccatgcccgtgccaacagccgcatccaagcccgtgccagctgcagggaacctgcggcgttggcagcaccccgatcctgggccagtgcgtcgagttcctgaggcatcagtgcagcccgac

SEQ ID NO: 342944 - DNA, 471 bp, Zea mays
  unsure (1)..(471): unsure at all n locations
gctgcagcaactcgtgctacctgtgatcaaccaagtagctctggcaaacctttctccctactctccgcaacaacaatttcttccattcaaccaactgtctacactgaaccctgctgcttatttgcagcaacaactattaccatttagccagctagctactgcctactctcaacaacaacaacttcttccatttaaccaattggccgcactgaaccccgctgcttatttgcagcagcaaatactactaccatttagccagctagctacagcaagccgtgcttccttcttgacacaacaacagttgctgccgttctaccagcagtttgcggctaaccccgcaaccctcttacaactacaacaattgttgccctttgtccaacttgctttgacaaacccagcaagcttctaccaacaacacatnattggtggtgccctcttttagatggcttattagatgtaattcaataataa

SEQ ID NO: 342945 - DNA, 442 bp, Zea mays
gcaacatagaaagcacaatagtgtaccaacaatggcagctaaaatattttgcctccttatgctccttggtctttctgcaagtgctgctacggcgaccattttcccacaatgctcacaagctcctatagcttcccttcttcccccgtacctctcaccaacggtgtcttcggtatgtgaaaacccaattcttcaaccctacaggatccaacaggcaatcgcagctggcatcttacctttatcacccttggtcctccaacaatcatcagccctattacagcagttacctttggtgcatttattggcacaaaacatcagggcacaacaactacaacaacttgtgctagcaaaccttgctgcctactctgagcaacagcagtttcttgcattcaaccaactagctgcattgaactctgcttcttatttgcaacaacaacaactacca

SEQ ID NO: 342946 - DNA, 95 bp, Zea mays
gttctagatcgcgagccggcggtttaaaagattccaacttacctacccctgccttccaactcataacttttttataagggcacctaaattcaatt

SEQ ID NO: 342947 - DNA, 464 bp, Zea mays
caactagcaacatagaaagcacaatagtgtaccaacaatggcagccaaaatattttgcctccttatgctccttggtctttctgcaagtgctgctacggcgaccattttcccacaatgctcacaagctcctatagcttcccttcttcccccgtacctctcaccagcggtgtcttcggtatgtgaaaacccaattcttcgaacacccagctgtgcaagcctataggctacaacaagcgattgcggcgagcgtcttacaacaaccaattgcccaattgcaacaacaatccttggcacatctaacaatacaaaccatcgcaacgcaacagcaacaacagttcctaccagcactgagccacctagccatggtgaaccctgtcgcctacttgcaacagcagctgcttgcatccaacccacttgctctagcaaacgtagttgcaaaccagcaacaacaacaactgcaacag

SEQ ID NO: 342948 - DNA, 384 bp, Zea mays
aaaaaaaaaaaaaaaaaaaaaaaaaaaaaatttaaaaaaaaaaaaaaaaaaaaaaaaaaaaagggaaaaataaaaaaaaaaaaaaaaaaaaaaaaaaaaaaaaaaaaaaaaaaaaaaaaagaaaaaaaaaaaaaagggggggcctttttaaaaaaaaaaaaaataaaaaaaggggggggcctttttaaggattcaattttttttccccgtgctttgaaataatttttttttttttttgggccccttaatttgattaattgggggggtttttaaaaaggggggtttgggaaaaccttgggttttcccaattttattttttttgaaaaaattccctttttagcgggttgggtaaaaagaaaaaagcccacccccaatgccctttcc

SEQ ID NO: 342949 - DNA, 443 bp, Zea mays
agaccaactagcaacatacaaagcacaatagtgtaccaacaatggcagccaaaatattttgcctccttatgctccttggtctttctgcaagtgctgctacggcgaccattttcccacaatgctcacaagctcctatagcttcccttcttcccccgtacctctcaccagcggtgtcttcggtatgtgaaaacccaattcttcaaccctataggatccaacaggcaatcgcagctggcatcttacctttatcacccttgttcctccaacaatcatcagccctattacagcagttacctttggtgcatttattggcacaaaacatcagggcacaacaactacaacaacttgtgctagcaaaccttgctgcctactctcagcaacaacagtttcttccattcaaccaacttgctttgacaacccaacagcattctaccaacaaccca

SEQ ID NO: 342950 - DNA, 64 bp, Zea mays
gcagtgtcagtgtgagcaatgacctgaatgaacaattgaaatgaaaagaaaaaagtattggtcc

SEQ ID NO: 342951 - DNA, 461 bp, Zea mays
caacaagcaacatagaaagtggaatccagtagcaacaatagagcaacaatggcgaccaagatattttccctccttatgctccttgctctttctgcatgtgttgctaacgcgacaattttccctcaatgctcacaagctcctatagcttcccttcttcccccataccttccatcaatgatagcttcagtatgtgaaaacccagctcttcaaccctataggctccaacaagcaatcgcagcaagcaacatacctttatcacccttgtttcaacaatcgccagccctatctttggtgcagtcattggtacaaaccatcagggcacagcagctgcagcaactcgtgctacctgtgatcaaccaagtagctctggcaaacctttctccctactctcagcaacaacaatttcttccattcaaccaactgtctacattgaaccgtgctgcttatttgcagcaacaact

SEQ ID NO: 342952 - DNA, 479 bp, Zea mays
gagaccaactagcaacatagaaagcacaatagtgtaccaacaatggcagccaaaatattttgcttccttatgctccttggtctttctgcaagtgctgctaccgcaaccattttcccacaatgctcacaagctcctatagcttcctttcttcccccatacctctcaccagcggtgtcttcagtatgtgaaaacccaattcttcaaccctacaggatccaacaggcaatcgcagcaggcatcttacctttatcacccttgttcctccaacaaccgtcagccctattacagcagttacctttggtgcatttgttggcacaaaacatcaaggcacaacaactacaacaacttgtgctaggaaaccttgctgcctactctcagcaacagcagtttcttccattcaaccaactggctgcattgaactctgctgcttatttgcaacaacaactaccattcagtcagctagctgctgcctaccccca

SEQ ID NO: 342953 - DNA, 94 bp, Zea mays
ctcgcttttgatcgattggattcggtaccggctatggactgaaggtctttgagcggattgatctgggatttttttccaaaaattgcggtagggg

SEQ ID NO: 342954 - DNA, 198 bp, Zea mays
tcggccccaactggcggaaaattgagaaaggggattggctttattccaatgggtttcgacctggccatgatgtaaccttggttaatgggcccattgataaaaaccttattaaggtagcttcttaaaaaatgcatttcgctttcattggggtccatttgggcgcttaacttaactttcatttttatttgggggaaggga

SEQ ID NO: 342955 - DNA, 460 bp, Zea mays
attattgagaccaactagcaacatagaaagcacaatagtgtaccaacaatggcagccaaaatattttgcctccttatgctccttggtctttctgcaagtgctgctacggcgaccattttcccgcaatgctcgcaagctcctatagcttcccttcttcccccgtacctctcaccagcggtgtcttcggtatgtgaaaacccaattcttcaaccctacaggatccaacaggcaatcgcagctggcatcttacctttatcacccttgttcctccaacaatcatcagccctattacaacagttacctttggtgcatttattggcacaaaacatcagggcacaacaactacaacaacttgtgctagcaaaccttgctgcctactctcagcaacagcagtttcttccattcaaccaactaggttcattgaactctgcttcttatttgcaacaacaacaactaccat

SEQ ID NO: 342956 - DNA, 464 bp, Zea mays
gagaccaactagcaacatagaaagcacaatagtgtaccaacaatggcagccaaaatattttgcttccttatgctccttggtctttctgcaagtgctgctaccgcaaccattttcccacaatgctcacaagctcctatagcttcctttcttcccccatacctctcaccagcggtgtcttcagtatgtgaaaacccaattcttcaaccctacaggatccaacaggcaatcgcagcaggcatcttacctttatcacccttgttcctccaacaaccgtcagccctattacagcagttacctttggtgcatttgttggcacaaaacatcaaggcacaacaactacaacaacttgtgctaggaaaccttgctgcctactctcagcaacagcagtttcttccattcaaccaactggctgcattgaactctgctgcttatttgcaacaacaactaccattcagtcagctagc

SEQ ID NO: 342957 - DNA, 456 bp, Zea mays
cttcagaccattagctttatctactccagagcgcagaagaacccgatcgacaccatgagggtgttgctcgttgccctcgctctcctggctctcgctgcgagcgccacctccacgcatacaagcggcggctgcggctgccagccaccgccgccggttcatctaccgccgccggtgcatctgccacctccggttcacctgccacctccggtgcatctcccaccgccggtccacctgccgccgccggtccacctgccaccgccggtccatgtgccgccgccggttcatctgccgccgccaccatgccactaccctactcaaccgccccggcctcagcctcatccccagccacacccatgcccgtgccaacagccgcatccaagcccgtgccagctgcagggaacctgcggcgttggcagcaccccgatcctgggccagtgcgtcgagtttctgaggcat

SEQ ID NO: 342958 - DNA, 444 bp, Zea mays
ctccaacaatcatcagccctattacaacagttacctttggtgcatttattggcacaaaacatgagggcacaacaactacaacaacttgtgctagcaaaccttgctgcctactctcagcaacagcagtttcttccattcaaccaactaggttcattgaactctgcttcttatttgcaacaacaacaactaccattcagccagctacctgctgcctacccccagcaatttcttccattcaaccaactagcagcattgaactctcctgcttatttacagcagcaacaactactaccattcagccagctagctggtgtgagccctgctaccttcttgacacaaccacagttgttgccgttctaccagcacgttgcgcctaacgctggcaccctcttacaactgcaacaattgctgccattcaaccaacttgctttgacaaacccagca

SEQ ID NO: 342959 - DNA, 448 bp, Zea mays
caactagcaacatagaaagcacaatagtgtaccaacaatggcagccaaaatattttgcctccttatgctccttggtctttctgcaagtgctgctacggcgaccattttcccacaatgctcacaagctcctatagcttcccttctttccccgtacctctcaccagcggtgtcttcggtatgtgaaaacccaattcttcaaccctataggatccaacaggcaatcgcagctggcatcttacctttatcacccttgttcctccaacaatcatcagccctattacagcagttacctttggtgcatttattggcacaaaacatcatggcacaacaactacaacaacttgtgctagcaaaccttgctgcctactctcagcaacaacagtttctttcattcaaccaactagctgcattgaactctgcttcttatttgcaacaacaacaactacca

SEQ ID NO: 342960 - DNA, 81 bp, Zea mays
tggctgttctgttgtgacgcactccctcacgggtcgtgcaccgcgcgtattacgcgcggcttgcactccgtcactgcactc

SEQ ID NO: 342961 - DNA, 375 bp, Zea mays
ctagttctagatcgcgagcggccgcccttttttttttttttttttttttttttttttttttgtttttttttttttgggagcacgcatgcaagctgtttttttttattcaaaaaattccgaggagcggggacgacaacaacgtcctgctggtcctgcatgcatgtagtcctttacccacgacgggggtcgccgaaacttggggcgggcttcttcttcttcttgggggccgtgccggcaacaaggtgcttgtaaaccaccccggaaaggccggggccgaccatgggccccacccaatacacccattggtgttttcagggacgggagcccacaaaggggggcccgaacgcgcgcgccggatttattaaggggcccttc

SEQ ID NO: 342962 - DNA, 452 bp, Zea mays
caactagcaacatagaaagcacaatagtgtaccaacaatggcagccaaaatattttgcctccttatgctccttggtctttctgcaagtgctgctacggcgaccattttcccgcaatgctcgcaagctcctatagcttcccttcttcccccgtacctctcaccagcggtgtcttcggtatgtgaaaacccaattcttcaaccctacaggatccaacaggcaatcgcagctggcatcttacctttatcacccttgttcctccaacaatcatcagccctattacaacagttacctttggtgcatttattggcacaaaacatcagggcacaacaactacaacaacttgtgctagcaaaccttgctgcctactctcagcaacagcagtttcttccattcaaccaactaggttcattgaactctgcttcttatttgcaacaacaacaactaccattca

SEQ ID NO: 342963 - DNA, 377 bp, Zea mays
  unsure (1)..(377): unsure at all n locations
atccagatcagcaaagcggcagtgcgtagagaggatcgtcgaacagaacagcatgaagatggtcatcgttctcgtcgtgtgcctggctctgtcagctgccagcgcctctgcaatgcagatgccctgcccctgcgcggngctgcagggcttgtacggcgctggcgccggcctgacgacgatgatgggcgccggcgggctgtacccctacgcggagtacctgaggcagccgcagtgcagcccgctggcggcggcgccctactacgccgggtgtgggcagacgagcgccatgtaccagccgctccggcaacagtgctgccagcagcagatgaggatgatggacgtgcagtccgtcgcgcagcagctgcagatgatgatgc

SEQ ID NO: 342964 - DNA, 374 bp, Zea mays
ctgggtcttcagaccattagctgtatctactccagagcgcagaagaacccgatcgacaccatgagggtgttgctcgttgccctcgctctcctggctctcgctgcgagcgccacctgcacgcatacaagcggcggctgcggctgccagccaccgccgccggttcatataccgacggcggtgcatctgccacctccggttcacctgccacctacggtgcatctcccaccgccggtccacctgccgccgccggtccacctgccaccgccggtccatgtgccgccgccggttcatctgccgccgccaccatgccactaccctactgaaccgccccggcctcagcctcatgcacagccacacccatgcccgtgccaaca

SEQ ID NO: 342965 - DNA, 256 bp, Zea mays
gagaccaactagcaacataaaaagcacaatagtgtacccaccatggccggccaaatattttgctttcctatgctccttgggctttctgcaagtgctgctaccgcaaccattttcccacaatgctcacaagctcctatagcttcctttctttccccatacctctcaccagcggtgtcttcagtatgtgaaaacccaattcttcaaccctacaggatccaacaggcaatcgcagcaagcatcttacctttatcaccct

SEQ ID NO: 342966 - DNA, 126 bp, Zea mays
gccacgcatccggtgcggctagattacaagctgccagtttacatgctccaagctgacacacgcgtgcatgcgaatagagagatcttatatcaagtcaccgaacgtcaatttactgggcggcgactg

SEQ ID NO: 342967 - DNA, 151 bp, Zea mays
ctgggtcttcagaccattaactttatctactccaaaacgcaaaaaaacccgatcgacaccatgaggggggtgctcggtggccttgctttcctgggttttgctgggagcgccaccttcacgcatacaaacggggggttggggttgcaaccac

SEQ ID NO: 342968 - DNA, 328 bp, Zea mays
cgatcctctgcgggtcattcttactggggaccggattcgttgctttcttgcttccatctcatgttggaggactgagagagggagttgtaatttcaaataccagctagaggactgtcactcagctgttaagctggtatataatgggtggctgctgccgctgttggtgcataacatctgaagcagttagagcacgagcacgagcagatatatatgatcaacaatatgttgacgagcaggaatcatgggcttcaatttttgatggatcatattcagcctctgcaattgttgcattatacacaaatatggatactttcacacctgacacata

SEQ ID NO: 342969 - DNA, 54 bp, Zea mays
agtcttaaacggcaaccggcggttttaaaggttccaacttacctaccccggcct

SEQ ID NO: 342970 - DNA, 111 bp, Zea mays
gcgtattacggcggattgcactcgtactgcactcggattcacgcgtacgcgcgcgtacgcacgcgtctgtcgcgcggtattgcgcgcaatgcatactataacgccgctagc

SEQ ID NO: 342971 - DNA, 439 bp, Zea mays
tagcaacatagaaagcacaatagtgtaccaacaatggcagccaaaatattttgcctccttatgctccttggtctttctgcaagtgctgctacggcgaccattttcccgcaatgctcgcaagctcctatagcttcccttcttcccccgtacctctcaccagcggtgtcttcggtatgtgaaaacccaattcttcaaccctacaggatccaacaggcaatcgcagctggcatcttacctttatcacccttgttcctccaacaatcatcagccctattacaacaggtacctttggtgcatttattggcacaaaacatcaaggcacaacaactacaacaacttgtgctagcaaaccttgctggctactctcagcaacagcagtttcttccattcaaccaactagggtcattgaactctgcttcttatttggaacaacaacaac

SEQ ID NO: 342972 - DNA, 448 bp, Zea mays
ggcaaacctttctccctactctcagcaacaacaatttcttccattcaaccaactgtctacattgaaccgtgctgcttatttgcagcaacaactattaccattcagccagctagctactgcctactctcagcaacaacaacttcttccatttaaccaattggccgcactgaaccccgctgcttatttgcagcagcaaatactactaccatttagccagctagctgcagcaagccgtgcttccttcttgacacagcaacagttgctgcctttctaccagcagtttgcggctaaccccgcaaccctcttacaactacaacaattgttgccctttgtccaacttgctttgacaaacccagcagcctcctaccaacaacacataattgggggtgccctcttttagattgcttattagatgtaattcaataataaaagtttttggatgatgtat

SEQ ID NO: 342973 - DNA, 365 bp, Zea mays
atccaggacaaggagggcatccccccagaccagcagcggctcatcttcgctggcaaacagcttgaggacgggcgcacgcttgctgactacaacatccagaaggagagcaccctccaccttgtgctccgcctcaggggaggcatgcagatctttgtgaaaaccctgaccggcaagactatcaccctcgaggtggagtcctctgacaccattgacaacgtcaaggccaagatccaggacaaggagggcatccctccagaccagcagcggctcatctttgctgggaagcagcttgaggacgggcgcacgcttgccgactacaacatccagaaggagagcaccctccactttggtgctgcgcctcaggg

SEQ ID NO: 342974 - DNA, 363 bp, Zea mays
gcatttattggcacaaaacatcagggcacaacaactacaacaacttgtgctagcaaaccttgctgcctactctcagcaacagcagtttcttccattcaaccaactagctgcattgaactctgcttcttatttgcaacaacaacaactaccattcagccagctacctgctgcctacccccagcaatttcttccattcaaccaactggcagcattgaactctcctgcttatttacagcagcaacaactactaccattcagccagctagctggtgtgagccctgctaccttcttgatacaaccacagttgttgccgttctaccagcacgctgcgcctaacgctggcaccctcttacaactgcaaca

SEQ ID NO: 342975 - DNA, 338 bp, Zea mays
cccacgcgtccgaagcacaatagtgtaccaacaatggcagccaaaatattttgcttccttaggctccttggtctttctgcaagtgctgctaccgcaaccattttcccacaatgctcacaagctcctatagcttcctttcttcccccatacctctcaccagcggtgtcttcagtatgtgaaaacccaattcttcaaccctacaggatccaacaggcaatcgtagcaggcatcttacctttatcacccttgttcctgcaacaaccgtcagccctattacagcagttacctttggtgcatttgttggcacaaaacatcaaggcacaacaactacaacaact

SEQ ID NO: 342976 - DNA, 305 bp, Zea mays
  unsure (1)..(305): unsure at all n locations
attagctttatttactccagagcgcaaaaaaacccgatggacaccatgagggtgttgctcgtgggcttcgctctcctggctctcgctgcgagcgcaacctgcaggcatacaagccggggctgcggctgccagccaccgccgncggttcatctaccgccgccggtgcatctgccacctccggttcacctgccacctccggtgcatctnccaccgccggtccacctgccgccgccggtccacctgccaccgccggtccatgtgccgccgccggttcatctgccgccgccaccatgccactaccctac

SEQ ID NO: 342977 - DNA, 333 bp, Zea mays
agcgaagcgcactagcaacgacctatcaacaatggctaccaagatattagccctccttgcgcttcttgccctttttgtgagcgcaacaaatgcgttcattattccacaatgctcacttgctcctagtgccattattccacagttcctcccaccagttacttcaatgggcttcgaacacctagctgtgcaagccaacatgcaacaacaagcgcttgcggcgagcgtcttacaacaaccaattgcccaattgcaacaacaatccttgccacatctaacaatacaagccatcacaacgcaacagcaacaacagttcctaccagcactgagccacct

SEQ ID NO: 342978 - DNA, 343 bp, Zea mays
gcaattagctcatcgactccagattggagaactcgacaccatgaaggtgctgatcggtgcccttgctctcctggcgctcgctgcgagcgccgcctccagtacaagcggcggctgtggctgccagacaccaccgtttcatctaccgcctccgttctatatgccgcctccgttctatctgccgccgcagcagcagccgcagccatggcaataccccactcaaccaccgcagctaagcccgtgccagcagttcggatcctgcggcgtcggcagcgtcggcagcccgttcctgggccagtgcgtcgagttcctgaggcaccagtgcagcccggcggcgacgccctac

SEQ ID NO: 342979 - DNA, 297 bp, Zea mays
gaccacctagcaccttaaaaggcccattgttgtcccaccattggcagccaaaaaatttggcttccttatgctccttggtctttctgcaagggctgctaccgcaaccattttccaacaatgctcacaagctcctatagctttctttttttcccccatacctctcaccagcggtgtcttcagtatgtgaaaacccaatttttcaaccctacaggatccaacaggcaatcgcagcaggcatcttacctgtatcacccttggtcctccaacaaccgtcagccctattacagcaggtacctt

SEQ ID NO: 342980 - DNA, 433 bp, Zea mays
caactagcaacatagaaagcacaatagtgtaccaacaatggcagctaaaatattttgcctccttatgctccttggtctttctgcaagtgctgctacggcgaccattttcccacaatgctcacaagctcctatagcttcccttcttcccccgtacctctcaccaacggtgtcttcggtatgtgaaaacccaattcttcaaccctacaggatccaacaggcaatcgcagctggcatcttacctttatcacccttgttcctgcaacaatcatcagccctattacagcagttacctttggtgcatttattggcacaaaacatcagggcacaacaactacaacaacttgtgctagcaaaccttgctgcctactctcagcaacagcagtttcttccattcaaccaactagctgcattgaactctgcttcttattgcaac

SEQ ID NO: 342981 - DNA, 210 bp, Zea mays
cgtcatcagcagcttctgcttgctctggggggaaggagagagagagagagcgagagagagatctaatatagaggcttgtaaggggtcctcgaaccaaaattttggcggtgttcaaccggcaagtggtggaagtgcccgccgaacttgtggcggcgggcaacccgaccccgtcgcccaaaacgaaagcgtcgcaactggtggggcgctttc

SEQ ID NO: 342982 - DNA, 383 bp, Zea mays
agcctagcaattagctcatcgactccagattggagaactcgacaccatgaaggtgctgatcgttgcccttgctctcctggcgctcgctgcgagcgccgcctccagtacaagcggcggctgtggctgccagacaccaccgtttcatctaccgcctccgttctatatgccgcctccgttctatctgccgccgcagcagcagccgcagccatggcaataccccactcaaccaccgcagctaagcccgtgccagcagttcggatcctgcggcgtcggcagcgtcggcagcccgttcctgggccagtgcgtcgagttcctgaggcaccagtgcagcccggcggcgacgccctacggctcgccacagtgccaggcgctgcagcagcagt

SEQ ID NO: 342983 - DNA, 366 bp, Zea mays
gcaacatagaaagtggaatccagtagcaacaatagagcaacaatggagaccaagatattttccctccttatgctccttgctctttctacatgtgttgctaacgcgacaattttccctcaatgctcacaagctcctatagcttccctttttcccccataccttccatcaattatagcttcagtatgtgaaaacccagctcttcaaccatataggcttcaacaagcaatcgcagcaagcaacatacctttatcgcccttgttgtgtcaacaatcgccagccctatctttggtgcagtcattggtacaaaccatcagggcacaacagctgcagcaactcgtgctacctgtgatcaaccaagtagctctg

SEQ ID NO: 342984 - DNA, 433 bp, Zea mays
caacaagcaacatagaaagtggaatccagtagcaacaatagagcaacaatggagaccaagatattttccctccttatgctccttgctctttctacatgtgttgctaacgcgacaattttccctcaatgctcacaagctcctatagcttccctttttcccccataccttccatcaattatagcttcagtatgtgaaaacccagctcttcaaccatataggcttcaacaagcaatcgcagcaagcaacatacctttatcgcccttgttgtgtcaacaatcgccagccctatctttggtgcagtcattggtacaaaccatcagggcacaacagctgcagcaactcgtgctacctgtgatcaaccaagtagctctggcaaacctttctccctactctccgcaacaacaatttcttccattcaaccaactgtctacac

SEQ ID NO: 342985 - DNA, 365 bp, Zea mays
ctgggtcttcagaccattagctttatctactccagagcgcagaagaacccgatcgacaccatgagggtgttgctcgttgccctcgctctcctggctctcgctgcgagcgccacctccacgcatacaagcggcggctgcggctgccagccaccgccgccggttcatctaccgccgccggtgcatctgccacctccggttcacctgccacctccggtgcatctcccaccgccggtccacctgccgccgccggtccacctgccaccgccggtccatgtgccgccgccggttcatctgccgccgccaccatgccactaccctactcaaccgccccggcctcagcctcatccccagccacacccatgccc

SEQ ID NO: 342986 - DNA, 372 bp, Zea mays
cgcactagcaacaacctaacaacaatggctaccaagatattagccctccttgcgcttcttgcccttttagtgagcgcaacaaatgcgttcattattccacagtgctcacttgctcctagtgccattattccacagttcctcccaccagttacttcaatgggcttcgaacatccagccgtgcaagcctacaggctacaactagcgcttgcggcgagcgtcttacaacaaccaattgcccaattgcaacaacaatccttggcacatctaaacctacaaaccatcgcaacgcaacagcaacaacagtttctgccatcactgagccacctagccgtggtgaaccctgtcgcctacttgcaacagcagctacttgca

SEQ ID NO: 342987 - DNA, 410 bp, Zea mays
gcagtttcttccattcaaccaactggctgcattgaactctgctgcttatttgcaacaacaactaccattcagtcagctagctgctgcctacccccagcaatttcttccattcaaccaactggcagcattgaactctgctgcttatttacaacagcaacagctaccaccattcagccagctagctgatgtgagccctgttgccttcttgacacaacaacagttgttgccgttctacctgcacgctgcgcctaacgctggcaccctcttacaactgcaacaattgctgccattcaaccaacttgctttgacaaacccaacagcgttctaccaacaacccatcattggtggtgccctcttttagattgcttatgagttatagttcaataatgaaagtttttggatgatggttg

SEQ ID NO: 342988 - DNA, 82 bp, Zea mays
ggtcttaaaacaataactttatttaattcataacggcaaaaaacccgacgaaacctgggggggggtggtgccttgttttcct

SEQ ID NO: 342989 - DNA, 432 bp, Zea mays
caacaagcaacatagaaagtggaatccagttgcaacaatagagcaacaatggcgaccaagatattgtccctccttatgctccttgctctttctgcatgtgttgctaacgcgacaattttccctcaatgctcacaagctcctatagcttcccttcttcccccataccttccatcaatgatagcttcagtatgtgaaaacccagctcttcaaccctataggctccaacaagcaatcgcagcaagcaacatacctttatcacccttgtttcaacaatcgccagccctatctttggtgcagtcattggtacaaaccatcagggcacagcagctgcagcaactcgtgctacctgtgatcaaccaagtagctctggcaaacctttctccctactctcagcaacaacaatttcttccattcaaccaactgtctacattg

SEQ ID NO: 342990 - DNA, 391 bp, Zea mays
agaccaactagcaacatagaaagcacaatagtgtaccaacaatggcagccaaaatattttgcttccttatgctccttggtctttctgcaagtgctgctaccgcaaccattttcccacaatgctcacaagctcctatagcttcctttcttcccccatacctctcaccagcggtgtcttcagtatgtgaaaacccaattcttcaaccctacaggatccaacaggcaatcgcagcaggcatcttacctttatcacccttgttcctccaacaaccgtcagccctattacagcagttacctttggtgcatttgttggcacaaaacatcaaggcacaacaactacaacaacttgtgctaggaaaccttgctgcctactctcagcaacagcagtttct

SEQ ID NO: 342991 - DNA, 390 bp, Zea mays
gaaacacaccaagcgaagcgcactagcaacaacctaacaacaatggctaccaagatattatccctccttgcgcttcttgcgctttttgcgagcgcaacaaatgcgtccattattccacaatgctcacttgctcctagttccattattccacagttcctcccaccagttacttcaatggccttcgaacacccagctgtgcaagcctataggctacaacaagcgattgcggcgagcgtcttacaacaaccaattgcccaattgcaacaacaatccttggcacatctaacaatacaaaccatcgcaacgcaacagcaacaacagttcctaccagcactgagccacctagccatggtgaaccctgtcgcctacttgcaacagcagctgcttgca

SEQ ID NO: 342992 - DNA, 59 bp, Zea mays
ttggaaccaccaggcaccttggaagggggattccattgccaccattggagcaccattgg

SEQ ID NO: 342993 - DNA, 363 bp, Zea mays
gggtcttcagaccattagctttatctactccagagcgcagaagaacccgatcgacaccatgagggtgttgctcgttgccctcgctctcctggctctcgctgcgagcgccacctccacgcatacaagcggcggctgcggctgccagccaccgccgccggttcatctaccgccgccggtgcatctgccacctccggttcacctgccacctccggtgcatctcccaccgccggtccacctgccgccgccggtccacctgccaccgccggtccatgtgccgccgccggttcatctgccgccgccaccatgccactaccctactcaaccgccccggcctcagcctcatccccagccacacccatgccc

SEQ ID NO: 342994 - DNA, 295 bp, Zea mays
gttgcaaccaacgcgcaacatggaacgaccattggtggccaaacaatggggcttactaaagctggtcggcttttgcgcacgggtcgttatcgaaaccatgctcccacaacgatcacacgacactgttgataagcttctatcgccatacttcttaccacgtgcgtctcaactgcgggaaaacccgattgtgcaaacctacaggatccaacatgcaagagccaccaggctattaccattatcaccctagcttcttcaacactcgtcagccctattacatcagccaccttacggccat

SEQ ID NO: 342995 - DNA, 432 bp, Zea mays
attttgagcattcagaaacacaccaagcgaagcacattagcaacaacctaacaacaatggctaccaagatattatccctccttgcgcttcttgcgctttttgcgagcgcaacaaatgcgttcattattccacaatgctcacttgctccaagttccattattacacagttcctcccaccagttacttcaatgggcttcgaacacccagctgtgcaagcctataggctacaacaagcaattgcggcgagcgtcttacaacaaccaatttcccagttgcaacaacaatccttggcacatctaacaatacaaaccatcgcaacgcaacagcaacaacaattcctaccagcactgagccacctagccatggtgaaccctgccgcctacttgcaacagcagttgcttgcatcaaacccacttgctctggcaaacgtag

SEQ ID NO: 342996 - DNA, 318 bp, Zea mays
gaccaactagcaacatagaaagcacaatagtgtaccaacaatggcagccaaaatattttgcctccttatgctccttggtctttctgcaagtgctgctacggcgaccattttcccacaatgctcacaagctcctatagcttcccttcttcccccgtacctctcaccagcggtgtcttcggtatgtgaaaacccaattcttcaaccctataggatccaacaggcaatcgcagctggcatcttacctttatcacccttgttgctccaacaatcatcaagcctattacagcaagtacctttggtgcatttattggcacaaaa

SEQ ID NO: 342997 - DNA, 442 bp, Zea mays
tagcaacatagaaagcacaatagtgtaccaacaatggcagccaaaatattttgcttccttatgctccttggtctttctgcaagtgctgctaccgcaaccattttcccacaatgctcacaagctcctatagcttcctttcttcccccatacctctcaccagcggtgtcttcagtatgtgaaaacccaattcttcaaccctacaggatccaacaggcaatcgcagcaggcatcttacctttatcacccttgttcctccaacaaccgtcagccctattacagcagttacctttggtgcatttgttggcacaaaacatcaaggcacaacaactacaacaacttgtgctaggaaaccttgctgcctactctcagcaacagcagtttcttccattcaaccaactggctgcattgaactctgctgcttatttgcaacaacaactaccat

SEQ ID NO: 342998 - DNA, 365 bp, Zea mays
ctgggtcttcaaaccattagctttatctactccagagcgcagaagaacccgatcgacaccatgagggtgttgctcgttgccctcgctctcctggctctcgctgcgagcgccacctccacgcatacaagcggcggctgcggctgccagccaccgccgccggttcatataccgccgacggtgcatctgccacctccggatcacctgccacctccggtgcatctcccaccgccggtccacctgccgtcgccggtccacctgccaccgacggtccatgtgccgacgccggttcatctgccgacgacaccatgccactaccctactcaaccggcccgggctcagactcatacgcagccacacccatgccc

SEQ ID NO: 342999 - DNA, 438 bp, Zea mays
ggcaatcacagctggcatcttacctttatcacccttgttcctccaacaatcatcagccctattacatcagttacctttggtgcatttattggcacaaaacatcagggcacaacaactacaacaacttgtgctagcaaaccttgctgcctactctcagcaacagcagtttcttccattcaaccaactagctgcattgaactctgcttcttatttgcaacaacaacaactaccattcagccagctacctgctgcctacccccagcaatttcttccattcaaccaactggcagcattgaactctcctgcttatttacagcagcaacaactactaccattcagccagctagctggtgtgagccctgctaccttcttgatacaaccacagttgttgccgttctaccagcacgctgcgcctaacgctggcaccctcttacaact

SEQ ID NO: 343000 - DNA, 368 bp, Zea mays
  unsure (1)..(368): unsure at all n locations
agcaaagcggcagtgcgtagagaggatcgtcgaacagaacagcatgaagatggtcatcgttctcggcgtgtgcctggctctgtcagctgccagcgcctctgcaatgcagatgccctgcccctgcgcggggctgcagggcttgtacggcgctggcgccggcctgacgacgatgatgggcgccggcgggctgtacccctacgcggagtacctgaggcagccgcagtgcagcccgctggcggcggcgccctactacgccgggtgtgggcagacgagcgccatgtaccagccgctccggcaacagtgctgccagcagcaaatgaggatgatggacgtgcagtccgtcgcgcancagctgcagatgatgatgc

SEQ ID NO: 343001 - DNA, 404 bp, Zea mays
attttcagcattcagaaacacaccaagcgaagcgcactagcaacaacctaacaacaatgggtaccaagatattagccctccttgcgcttcttgcccttttagtgagcgcaacaaatgcgttcattattccacagtgctcacttgctcctagtgccattattccacagttcctcccaccagttacttcaatgggcttcgaacatccagccgtgcaagcctacaggctacaactagcgcttgcggcgagcgtcttacaacaaccaattgcccaattgcaacaacaatccttggcacatctaaacctacaaaccatcgcaacgcaacagcaacaacagtttctgccatcactgagccacctagccgtggtgaaccctgtcgcctacttgcaacagcagctacttgca

SEQ ID NO: 343002 - DNA, 424 bp, Zea mays
gcacaatagtgtaccaacaatggcagccaaaatattttgcttccttatgctccttggtctttctgcaagtgttgctaccgcaaccattttcccacaatgctcacaagctcctatagcttcccttcttcccccatacctctcaccagcggtgtcttcaatgtgtgaaaacccaattgttcaaccctacaggatccaacaggcaatcgcaacaggcatcttaccattatcacccttgttcctccaacaaccgtcagccctattacagcagttacctttggtccatttggtggcacaaaacatcagggcacaacaactacaacaacttgtgctagcaaaccttgctgcatactctcagcaacatcagtttcttgcattcaaccaactggctgcattgaactctgctgcttatttgcaacaacaatta

SEQ ID NO: 343003 - DNA, 441 bp, Zea mays
caactagcaacatagaaagcacaatagtgtaccaacaatggcagccaaaatattttgcctccttatgctccttggtctttctgcaagtgctgctacggcgaccattttcccgaaatgctcgcaagctcctatagcttcccttcttcccccgtacctctcaccagcggtgtcttcggtatgtgaaaacccaattcttcaaccctacaggatccaacaggcaatcacagctggcatcttacctttatcacccttgttcctccaacaatcatcagccctattacatcagttacctttggtgcatttattggcacaaaacatcaaggcacaacaactacaacaacttgtgctagcaaaccttgctgcctactctcagcaacagcaagttcttccattcaaccaactagctgcattgaactctgcttcttatttgcaacaacaaca

SEQ ID NO: 343004 - DNA, 72 bp, Zea mays
tcgccaacaagcaacatagaaagtggaatccagttgcaacaatggagcaccattggcaaccaagaatttttc

SEQ ID NO: 343005 - DNA, 384 bp, Zea mays
gaccaactagcaacatagaaagcacaatagtgtaccaacaatggcagccaaaatattttgcttccttatgctccttgggctttctgcaagtgctgctaccgcaaccattttcccacaatgctcacaagctcctatagcttcctttcttcccccatacctctcaccagcggtgtcttcagtatgtgaaaacccaattcttcaaccctacaggatccaacaggcaatcgcagcaggcatcttacctttatcacccttgttcctccaacaaccgtcagccctattacagcagttacctttggtgcatttgttggcacaaaacatcaaggcacaacaactacaacaacttgtgctaggaaaccttgctgcctactctcagcaacagca

SEQ ID NO: 343006 - DNA, 349 bp, Zea mays
tttcagcattcagaaacacaccaagcgaagtgcactagcaacaacctaacaacaatggctaccaagatattagccctccttgcgcttcttgcccttttagtgagcgcaacaaatgcgttcattattccacagtgctcacttgctcctagtgccattattccacagttcctcccaccagttacttcaatgggcttcgaacatccagccgtgcaagcctacaggctacaactagcgcttgcggcgagcgtcttacaacaaccaattgcccaattgcaacaacaatccttggcacatctaaacctacaaaccatcgcaacgcaacagcaacaacagtttctgccatcactga

SEQ ID NO: 343007 - DNA, 386 bp, Zea mays
caactagcaacatagaaagcacattagtgtgccaacaatggcagccaaaatattttgcctccttatgctccttggactttctgcaagtgctgctacggcgaccattttgccgcaatgctcgcaagctgctatagcttcccttcttcccccgtacctctcaccaacggtgtcttcggtatgtgaaaacccaattcttcaaccctacaggatccaacaggcaatcgcagctggcatcttacctttatcacccttgttcctccaacaatcatcagccctattacaacagttacctttggtgcatttattggcacaaaacatgagggcacaacaactacaacaacttgtgctagcaaacctttgctgctactctcagcaacaagcagttc

SEQ ID NO: 343008 - DNA, 389 bp, Zea mays
attgagaccaactagcaacatagaaagcacaatagtgtaccaacaatggcagccaaaatattttgcttccttatgctccttggtctttctgcaagtgttgctaccgcaaccattttcccacaatgctcacaagctcctatagcttcccttcttcccccatacctctcaccagcggtgtcttcaatgtgtgaaaacccaattgttcaaccctacaggatccaacaggcaatcgcaacaggcatcttaccattatcacccttgttcctccaacaaccgtcagccctattacagcagttacctttggtccatttggtggcacaaaacatcagggcacaacaactacaacaacttgtgctagcaaaccttgctgcatactctcagcaacatca

SEQ ID NO: 343009 - DNA, 411 bp, Zea mays
aatcatcattcatcttagtagtataggcactaaatcaaatctgcaacatcaattatgtaacgtccaaaaaccatgaagctggtgcttgtggttcttgctttcattgctttagtatcaagtgtttcttgtacacagacaggcggctgcagctgtggtcaacaacaaagccatgagcagcaacatcatgcacaacaacatcatccacaaaaacaacaacatcaaccaccaccacaacatcaccagcagcagcaacaccaacaacaacaagttcacatgcaaccacaaaaacatcagcaacaacaagaagttgatgttcaacaacaacaacaacaaccgcagcaccaacaacaacaacaacaacagcaccaacaacaacatcaatgtgaaggccaacaacaacatcaccaacaa

SEQ ID NO: 343010 - DNA, 350 bp, Zea mays
attttgagcattcagaaacacaccaagcgatgcgcactagcaacaacctaacaacaatggctaccaagatattatccctccttgcgcttcttgcgctttttgcgagcgcaacaaatgcgtccattattccacaatgctcacttgctcctagttccattattccacagttcctcccaccagttacttcaatggccttcgaacacccagctgtgcaagcctataggctacaacaagcgattgcggcgagcgtcttacaacaaccaattgcccaattgcaacaacaatccttggcacatctaacaatacaaaccatcgcaacgcaacagcaacaacagttcctaccagcactg

SEQ ID NO: 343011 - DNA, 352 bp, Zea mays
  unsure (1)..(352): unsure at all n locations
gaccattagctttatctactccagagcgcagaagaacccgatcgacaccatgagggtgttgctcgttgccctcgctctcctggctctcgctgcgagcgccacctccacgcatacaagcggcggctgcggctgccagccaccgccgccggttcatctaccgccgccggtgcatctgccacctccggttcacctgccacctccggtgcatctcccaccgccggtccacctgccgccgccggtccacctgccaccgccggtccatgtgccgncgccggttcatctgccgcgcaccatgcactacctactcaaccgccgggctagctatcccagcaaccatgccggcacagcgatc

SEQ ID NO: 343012 - DNA, 374 bp, Zea mays
  unsure (1)..(374): unsure at all n locations
aacacaccaagcgaagcacattagcaacaacctaacaacaatggctaccaagatattatccctccttgcgcttcttgcgctttttgcgagcgcaacaaatgcgttcattattccacaatgctcacttgctccaagttccattattacacagttcctcccaccagttacttcaatgggcttcgaacacccagctgtgcaagcctataggctacaacaagcaattgcggcgagcgtcttacaacaaccaatttcccagttgcaacaacaatccttggcacatctaacaatacaaaccatcgcaacgcaacagcaacaacaattnctaccagcactgagccacctagccatggtgaaccctgccgcctacttgcaac

SEQ ID NO: 343013 - DNA, 349 bp, Zea mays
  unsure (1)..(349): unsure at all n locations
tagcaacatagaaggcacaatagtgtcccaccattggcagctaaaatttttggcctccttatgctccttggtctttctgcaagggctgctacggcgacctttttccaacaatgctcacaagctcctatagcttccttttttcccccgtccctctcaccaacggtgtcttcggtatgtgaaaacccaattcttcaaccctacaggatccaacaggcaatcgcagctggcatcttacctttatcacccttgttcctccaacaatcatcagccctattacagcagttacctttggtgcatttattggcacaaaacatcanggcacaacaactacaacaactngtgctagcaa

SEQ ID NO: 343014 - DNA, 162 bp, Zea mays
aatagcttatttaattcaaaacggaaaaaaaaccggaccgaaacaataagggggtggttggtggccttggttttcctggttttggttggaagcgcaacctcaacccatacaaccgggggttgcggttgccacccaccgccgccggttaatctaccgccgccg

SEQ ID NO: 343015 - DNA, 71 bp, Zea mays
caactagcaacatagaaggcacaatagggtaccaacaatggcagccaaaatattttgcctccttatgctcc

SEQ ID NO: 343016 - DNA, 352 bp, Zea mays
  unsure (1)..(352): unsure at all n locations
agaccattagctttatctactccagagcgcaaaaaaacccgatcgacaccatgagggtgttgctcgttgccctcgctctcctggctctcgctgcgagcgccacctccacgcatacaagcggcggctgcggctgccagccaccgccgccggttcatctaccgccgccggtgcatctgccacctncggttcacctgccacctccggtgcatctcccaccgccggtccacctgccgccgccggtccacctgccaccgccggtccatgtgccgccgccggttcaatctgccgcgccaccatgccactaccctactcaaccgccccggcctcagcctcatncccagccacacccatg

SEQ ID NO: 343017 - DNA, 371 bp, Zea mays
tgcgctttttgcgagcgcaacaaatgcgttcattattccacaatgctcacttgctccaagttccattattacacagttcctcccaccagttacttcaatgggcttcgaacacccagctgtgcaagcctataggctacaacaagcaattgcggcgagcgtcttacaacaaccaatttcccagttgcaacaacaatccttggcacatctaacaatacaaaccatcgcaacgcaacagcaacaacaattcctaccagcactgagccacctagccatggtgaaccctgccgcctacttgcaacagcagttgcttgcatcaaacccacttgctctggcaaacgtagttgcaaaccagccacaacaacagctgcaac

SEQ ID NO: 343018 - DNA, 98 bp, Zea mays
aaattacgttcatggagggaaatatattttaaacctgaggtggggggttattaaaaggaggggcgagaaaattcaaatattgatgatgaaatggagtt

SEQ ID NO: 343019 - DNA, 144 bp, Zea mays
cggacgcgtgggtgactctgacactgttgtcattgacaatagttatggtattactgcccctgtaggggcttggagtctaataccaaccattgtgggggctgatacaaatgtttatggtgctaaaatatactgtgatcctacaga

SEQ ID NO: 343020 - DNA, 295 bp, Zea mays
  unsure (1)..(295): unsure at all n locations
cggacgcatgggtgactctaacaattattttattgacaatagatagggtattaaagggcgggtaggtttttaaagagtaataacaaccattgtagaggctgatacaaatgtttatggtgctaaaatatactgcgagcctacagctgatcatagtagcaagctctatgatcttgttacatcactcgggagctggaatataatgcagatgttgcttctgcaagngaaaagctactaaacaaatggattataatgctgttcgattatgatggtcatactactgagtggaataaatatg

SEQ ID NO: 343021 - DNA, 371 bp, Zea mays
  unsure (1)..(371): unsure at all n locations
ccaactagcaacatagaaggcacaatagtgtcccaacaatggcagccaaaatattttgcctccttatcctccttggactttctgcaagtgctgctacngcgaccattttcccgcaatgctcgcaagctcctatagcttcccttcttcccccgtacctctcaccagcggtgtcttcggtatgtgaaaacccaattcttcaaccctacaggatccaacaggcaatcgcagctggcatcttacctttatcacccttgttcctccaacaatcatcagccctattacaacagttacctttggtgcatttattggcacaaaacatcaaggcacaacaactacaacaacttgtgctagcaaaccttgctgcctactct

SEQ ID NO: 343022 - DNA, 388 bp, Zea mays
caagctcctatagcttcccttcttcccccataccttccatcaatgatagcttcagtatgtgaaaacccagctcttcaaccctataggctccaacaagcaatcgcagcaagcaacatacctttatcacccttgtttcaacaatcgccagccctatctttggtgcagtcattggtacaaaccatcagggcacagcagctgcagcaactcgtgctacctgtgatcaaccaagtagctctggcaaacctttctccctactctcagcaacaacaatttcttccattcaaccaactgtctacattgaaccgtgctgcttatttgcagcaacaactattaccattcagccagctagctactgcctactctcagcaacaacaacttcttccattta

SEQ ID NO: 343023 - DNA, 350 bp, Zea mays
attagctttatctactccagagcgcagaagaacccgatcgacaccatgagggtgttgctcgttgccctcgctctcctggctctcgctgcgagcgccacctccacgcatacaagcggcggctgcggctgccagccaccgccgccggttcatctaccgccgccggtgcatctgccacctccggttcacctgccacctccggtgcatctcccaccgccggtccacctgccgccgccggtccacctgccaccgccggtccatgtgccgccgccggttcatctgccgccgccaccatgccactaccctactcaaccgccccggcctcagcctcatccccagccacacccatgccc

SEQ ID NO: 343024 - DNA, 267 bp, Zea mays
caaaccataaccttaatctactccaaagcgcaaaaaaacccgaccgacaccatgagggtgtggctcgttgccctcgctctcctggctctcgctgcgagcgccacctccacgcatacaagcggcggctgcggctgccagccaccgccgccggttcatctaccgccgccggtgcatctgccacctccggttcacctgccacctccggtgcatctcccaccgccggtccacctgccgccgccggtccacctgccaccgccggtccatgtg

SEQ ID NO: 343025 - DNA, 383 bp, Zea mays
cagaaacacaccaagcgaagcacattagcaacaacctaacaacaatggctaccaagatattatccctccttgcgcttcttgcgctttttgcgagcgcaacaaatgcgttcattattccacaatgctcacttgctccaagttccattattacacagttcctcccaccagttacttcaatgggcttcgaacacccagctgtgcaagcctataggctacaacaagcaattgcggcgagcgtcttacaacaaccaatttcccagttgcaacaacaatccttggcacatctaacaatacaaaccatcgcaacgcaacagcaacaacaattcctaccagcactgagccacctagccatggtgaaccctgccgcctacttgcaacagcag

SEQ ID NO: 343026 - DNA, 282 bp, Zea mays
gaccataaaaggtggaatccagtaccaccaatagagcaccattggcgaccaaaatatttgccctccttatgctcctggctctttctgcatgtgttgctaacgcgacaattttccctcaatgctcacaagctcctatagcttcccttcttcccccataccttccatcaatgatagcttcagtatgtgaaaacccagctcttcaaccctataggctccaacaagcaatcgcagcaagcaacatacctttatcacccttgtttcaacaatcgccagccctatctt

SEQ ID NO: 343027 - DNA, 263 bp, Zea mays
attgagaccaacaagcaacatagaaagtggaatccagtagcaacaatagagcaacaatggagaccaagatattttccctccttatgctccttgctctttctacatgtgttgctaacgcgacaattttccctcaatgctcacaagctcctatagcttccctttttcccccataccttccatcaattatagcttcagtatgtgaaaacccagctcttcaaccatatacgcttcaacaagcaatcgcagcaagcaacataccttta

SEQ ID NO: 343028 - DNA, 192 bp, Zea mays
accattagctttatctactccagagcgcagaagaacccgatcgacaccatgagggtgtggctcgatgccctcgctctcctggctctcgctgcgagcgccacctacacgcatacaagcggcggatgcggatgacagccaccgtcgccggatcatctaccggcgccggtgcatctgcacacctccggttcacct

SEQ ID NO: 343029 - DNA, 410 bp, Zea mays
cctgccgaccggccgaatcccggtcgaccacgcgtccggggtcttcaaaccattagctttatctactccagagcgcagaagaacccgatcgacaccatgagggtgttgctcgttgccctcgctctcctggctctcgctgcgagcgccacctccacgcatacaagcggcggctgcggctgccagccaccgccgccggttcatctaccgccgccggtgcatctgccacctccggttcacctgccacctccggtgcatctcccaccgccggtccacctgccgccgccggtccacctgccaccgccggtccatgtgccgccgccggttcatctgccgccgccaccatgccactaccctactcaaccgccccggcctcagcctcatccccagccacacccatgcccgtgccaaca

SEQ ID NO: 343030 - DNA, 124 bp, Zea mays
ctagttctagatagcgagcggtcgaccttttttatattttttattaacccgatcgacaccaggagggagacgctcgtagcgctctatatcctggatcaaactgaaagcacgacctccacgcata

SEQ ID NO: 343031 - DNA, 412 bp, Zea mays
tgggtcttcagaccattagctttatctactccagagcgcagaagaacccgatcgacaccatgagggtgttgctcgttgccctcgctctcctggctctcgctgcgagcgccacctccacgcatacaagcggcggctgcggctgccagccaccgccgccggttcatctaccgccgccggtgcatctgccacctccggttcacctgccacctccggtgcatctcccaccgccggtccacctgccgccgccggtccacctgccaccgccggtccatgtgccgccgccggttcatctgccgccgccaccatgccactaccctactcaaaccgcccggcctcagcctcattccagcccacccatgtcgtgccacagccgcatcaagcccgtccagctgaggaacctgggcgttgcaga

SEQ ID NO: 343032 - DNA, 397 bp, Zea mays
ccggccgaattccggtcgaccacgcctcgcattcatctagtatataggcaccaaatcaaatctgcaacatcaattatctaactccaaaaaccatgaagctggtgcttgtggttcttgctttcattgctttagtatcaagtgtttcttgtacacagacaggcggctgcagctgtggtcaacaacaaagccatgagcagcaacatcatccacaacaacatcatccacaaaaacaacaacatcaaccaccaccacaacatcaccagcagcagcaacaccaacaacaacaagttcacatgcaaccacaaaaacatcagcaacaacaagaagttcatgttcaacaacaacaacaacaaccgcaggcccgacaacaacaacaacaacagcaccgacaacaaca

SEQ ID NO: 343033 - DNA, 121 bp, Zea mays
attaagtgcagcaccagaggatgatgtgtctctgcatttactaactatgatcgtatacaaataaacacaccgcgtatgcgggttcgatctcatagcacaacatgtaaagggtgaacactat

SEQ ID NO: 343034 - DNA, 417 bp, Zea mays
gttcctcccaccagttacttcaatggccttcgaacaacccagctgtgcaagcctataggctacaacaagcgattgcggcgagcgtcttacaacaaccaattgcccaattgcaacaacaatccttggcacatctaacaatacaaaccatcgcaacgcaacagcaacaacagttcctaccagcactgagccacctagccatggtgaaccctgtcgcctacttgcaacagcagctgcttgcatccaacccacttgctctagcaaacgtagttgcaaaccagcaacaacaacaactgcaacagtttctgccagcgcttagtcaactagccatggtgaaccctgccgcctacctacaacagcaacaactgctttcatctagcccgctcgcttgggccaatgcacctacatacctgcaacaag

SEQ ID NO: 343035 - DNA, 358 bp, Zea mays
  unsure (1)..(358): unsure at all n locations
ctagttctagatagcgagcggtcgcctttttcaaaacccgtataaaactgtgcgaaacctgtacactctacatagtgtcctggttcatactgggggagtcaatgaaggacactattatgcctttattcgtccgaagctgcttgatcaatgtgacaagttcnaggatgacctagtgacaaaagaagacatgaaacgagcattggaggaacaatatggtggtgaaaaatagctcccgcataccaactctgggttgatactgcaccgcttagatttaccaaccattcanatgcttacatgcttgctaacattcaagaaagtgacacagataacattatctgtgattcggatgatgaagata

SEQ ID NO: 343036 - DNA, 367 bp, Zea mays
aacaagcaacatagaaagtggaatacagtagcaacaatagagcaacaatggcggccaagatattttccatccttatgctccttgctctttctgcatgtgttgctaacgcgaccatttttcctcaatactcacaagctcctatagctgcccttcttcccccataccttccatcaatgaccgcttcagtatgtgaaaacccagcccttcaaccctacaggctccaacaagcaatcgcaacaagcaacttacctttatcacccctgttctttcaacaatcgccagccctatctttggtgcagtcattggtacaaaccatcagggcacaacagctgcagcaactcgtgctaccagtgatcaaccaagtagc

SEQ ID NO: 343037 - DNA, 353 bp, Zea mays
cccacgcgtccgccaacaagcaacatagaaagtggaatccagtagcaacaatagagcaacaatggagaccaagatattttccctccttatgctccttgctctttctacatgtgttgctaacgcgacaattttccctcaatgctcacaagctcctatagcttccctttttcccccataccttccatcaattatagcttcagtatgtgaaaacccagctcttcaaccatataggcttcaacaagcaatcgcagcaagcaacatacctttatcgcccttgttgtgtcaacaatcgccagccctatctttggtgcagtcattggtacaaaccatcagggcacaacagctgcagcaac

SEQ ID NO: 343038 - DNA, 344 bp, Zea mays
gaccaactagcaacatagaaagcacaatagtgtaccaacaatggcagccaaaatattttgcttccttatgctccttggtctttctgcaagtgctgctaccgcaaccattttcccacaatgctcacaagctcctatagcttcctttcttcccccatacctctcaccagcggtgtcttcagtatgtgaaaacccaattcttcaaccctacaggatccaacaggcaatcgcagcaggcatcttacctttatcacccttgttcctccaacaaccgtcagccctattacagcagttacctttggtgcatttgttggcacaaaacatcaaagcacaacaactacaacaac

SEQ ID NO: 343039 - DNA, 323 bp, Zea mays
  unsure (1)..(323): unsure at all n locations
cagaccattagctttatctactccagagcgcagaagaacccgatcgacaccatgagggtgttgctcgttgccctcgctctcctggctctcgctgcgagcgccacctccacgcatacaagcggcggctgcggctgccagccaccgccgccggttcatctaccgccgccggtgcatctgccacctccggttcacctgccacctccggtgcatctcccaccgccggtccacctgccgccgccggtccacctgccaccgccggtccatgtgccgccgccggttcatctgccgncgncaccatgccactaccctactcaaaccgcccg

SEQ ID NO: 343040 - DNA, 401 bp, Zea mays
ttgagaccaactagcaacatagaaagcacaatagtgtaccaacaatggcagccaaaatattttgcttccttatgctccttggtctttctgcaagtgttgctaccgcaaccattttcccacaatgctcacaagctcctatagcttcccttcttcccccatacctctcaccagcggtgtcttcaatgtgtgaaaacccaattgttcaaccctacaggatccaacaggcaatcgcaacaggcatcttaccattatcacccttgttcctccaacaaccgtcagccctattacagcagttacctttggtccatttggtggcacaaaacatcaaggcacaacaactacaacaacttgtgctagcaaaccttgctgcatactctcagcaacatcagtttcttccattc

SEQ ID NO: 343041 - DNA, 365 bp, Zea mays
ctgggtcttcagaccattagctttatctcctccagagcgcagaagaacccgatcgacaccatgagggtgttgctcgttgccctcgctctcctggctctcgctgcgagcgccacctccacgcatacaagcggcggctgcggctgccagccaccgccgccggttcatctaccgccgccggtgcatctgccacctccggttcacctgccacctccggtgcatctcccaccgccggtccacctgccgccgccggtccacctgccaccgccggtccatgtgccgccgccggttcatctgccgccgccaccatgccactaccctactcaaccgccccggcctcagcctcatccccagccacacccatgccc

SEQ ID NO: 343042 - DNA, 248 bp, Zea mays
ctagcaacatagaaagcacaatagtgtaccaacaatggcagccaaaatattttgcctccttatggctccttggtctttctgcaagtgctgctacggcgaccattttcccgcaatgctcgcaagctcctatagcttcccttcttcccccgtacctctcaccagcggtgtcttcggtatgtgaaaacccaattcttcaaccctacaggatccaacaggcaatcgcagctggcatcttacctttatcaccc

SEQ ID NO: 343043 - DNA, 167 bp, Zea mays
ctccctcgctctcgtcgcctcgttcgcttcgcctcctccccgccccgccccgagccgagcagagcgcagccctatccggagctgggatggcggacgcgaagcagcagcagcagcagccacagcaggcggcagcggcagccaccggcgtgtggaagacggtcaagccc

SEQ ID NO: 343044 - DNA, 327 bp, Zea mays
attttcagcattcagaaccacaccaagcgaagcgcactaccaacaacctaacaacaatggctaccaagatattagccctccttgcgcttcttgcccttttagtgagcgcaacaaatgcgttcattattccacagtgctcacttgctcctagtgccattattccacagttcctcccaccagttacttcaatgggcttcgaacatccagccgtgcaagcctacaggctacaactagcgcttgcggcgagcgtcttacaacaaccaattgcccaattgcaacaacaatccttggcacatctaaacctacaaaccatcgcaacgcaacagc

SEQ ID NO: 343045 - DNA, 184 bp, Zea mays
aaccaatttgcttcgaggaactgtctattgttctagaggcatcacaacattgatggtgtgggctatgagaatgttaataagttatacactaagcgtggggagtattggctgatgccagtacttaccataaattggaaggttgtttgctaaatctaccaaataaatataaagggcagccgttata

SEQ ID NO: 343046 - DNA, 357 bp, Zea mays
agaccattagctttatctactccagagcgcagaagaacccgatcgacaccatgagggtgttgctcgttgccctcgctctcctggctctcgctgcgagcgccacctccacgcatacaagcggcggctgcggctgccagccaccgccgccggttcatctaccgccgccggtgcatctgccacctccggttcacctgccacctccggtgcatctcccaccgccggtccacctgccgccgccggtccacctgccaccgccggtccatgtgccgccgccggttcatctgccgccgccaccatgccactaccctactcaaccgccccggcctcagccctatccccaggcacacccatgcccgt

SEQ ID NO: 343047 - DNA, 80 bp, Zea mays
aacttagcaacttaaaaggcccattagtgtaccaccaatggcttccataatatttagcctccttatgctcctagatcttt

SEQ ID NO: 343048 - DNA, 359 bp, Zea mays
ccaccataaaaggtggattccagtaccaccattgaaccaccattggcgaccaaaatattttccctccttatgctcctggctctttctgcatgtgttgctaacgcgacaattttccctcaatgctcacaagctcctatagcttcccttcttcccccataccttccatcaatgatagcttcagtatgtgaaaacccagctcttcaaccctataggctccaacaagcaatcgcagcaagcaacatacctttatcacccttgtttcaacaatcgccagccctatctttggtgcagtcattggtacaaaccatcagggcacagcagctgcagcaactcgtgctacctgtgatcaaccaagtagc

SEQ ID NO: 343049 - DNA, 440 bp, Zea mays
ccgcagaccggccggaattccggtcgaccacgcctccgtttggggccagccatgggtccaaaccatcaaagcacagcagctgcagcaactcgtgctacctggtgatcaaccaagtagctctggcaaacctttctccctactctcagcaacaacaatttcttccattcaaccaactgtctacattgaaccgtgctgcttatttgcagcaacaactattaccattcagccagctagctactgcctactctcagcaacaacaacttcttccatttaaccaattggccgcactgaaccccgctgcttatttgcagcagcaaatactactaccatttagccagctagctgcagcaagccgtgcttccttcttgacacagcaacagttgctgcctttctaccagcagtttgcggctaaccccgcaaccctcttacaactacaacaa

SEQ ID NO: 343050 - DNA, 232 bp, Zea mays
  unsure (1)..(232): unsure at all n locations
agaccattagctttatctactccagagcgcagaagaacccgatcgacaccatgagggtgttgctcgttgccctcgctctcctggctctcgctgcgagcgccacctccacgcatacaagcggcggctgcggctgccagccaccgccgccggttcatctaccgccgccggtgcatctgccaccttcggttcacctgccacctncggtgcatatcccaccgccggtccacctgcc

SEQ ID NO: 343051 - DNA, 286 bp, Zea mays
caactagcaacatagaaagcacaatagtgtaccaacaatggcagccaaaatattttgcttccttatgctccttggtctttctgcaagtgttgctaccgcaaccattttcccacaatgctcacaagctcctatagcttcccttcttcccccatacctctcaccagcggtgtcttcaatgtgtgaaaacccaattgttcaaccctacaggatccaacaggcaatcgcaacaggcatcttaccattatcacccttgttcctccaacaaccgtcaggcctattacagcag

SEQ ID NO: 343052 - DNA, 443 bp, Zea mays
tggacgtcagcctagcaattagctcatcgactccagattggagaactcgacaccatgaaggtgctgatcgttgcccttgctctcctggcgctcgctgcgagcgccgcctccagtacaagcggcggctgtggctgccagacaccaccgtttcatctaccgcctccgttctatatgccgcctccgttctatctgccgccgcagcagcagccgcagccatggcaataccccactcaaccaccgcagctaagcccgtgccagcagttcggatcctgcggcgtcggcagcgtcggcagcccgttcctgggccagtgcgtcgagttcctgaggcaccagtgcagcccggcggcgacgccctacggctcgccacagtgccaggcgctgcagcagcagtgctgccaccagatcaggcaagtggagccgctgcaccggtaccaggcgacata

SEQ ID NO: 343053 - DNA, 375 bp, Zea mays
aattagctcatcgactccagattggagaactcgacaccatgaaggtgctgatcgttgcccttgctctcctggcgctcgctgcgagcgccgcctccagtacaagcggcggctgtggctgccagacaccaccgtttcatctaccgcctccgttctatatgccgcctccgttctatctgccgccgcagcagcagccgcagccatggcaataccccactcaaccaccgcagctaagcccgtgccagcagttcggatcctgcggcgtcggcagcgtcggcagcccgttcctgggccagtgcgtcgagttcctgaggcaccagtgcagcccggcggcgacgccctacggctcgccacagtgccaggcgcttgaacagcagt

SEQ ID NO: 343054 - DNA, 270 bp, Zea mays
gcaattgcggcgagcgtcttacaacaaccaatttcccagttgcaacaacaatccttggcacatctaacaatacaaaccatcgcaacgcaacagcaacaacaattcctaccagcactgagccacctagccatggtgaaccctgccgcctacttgcaacagcagttgcttgcatcaaacccacttgctctggcaaacgtagttgcaaaccagccacaacaacagctgcaacagtttctgccagcgctcagtcaactagccatggtgaaccct

SEQ ID NO: 343055 - DNA, 263 bp, Zea mays
acaaggtctacggggacgtcttcgacagggtcttcgcgcaggagcttgcctatgctcgccggatggtcgttcccgagcccgctgcgccgccggtcattgggaaccttgattccccctatgcgcaggtcactgctttctacagttattggcttgggtttggctcgggcatggatttcggatgggcggctgcgtgggacgctgcgcgtggggaaagtcgccgtgttcggaggcttatggaggaggactaacagaaggcgatgcgt

SEQ ID NO: 343056 - DNA, 292 bp, Zea mays
ccgggccggaaaatcccgggcgagccacacgcgcgcgactagaacgagagcgaaccacaccaagcgaagcacattagcaacaacctaacaacaatggctaccaagatattatccctccttgcgcttcttgcgctttttgcgagcgcaacaaatgcgttcattattccacaatgctcacttgctccaagttccattattacacagttcctaccaccagttactttaatgggcttcgaacacccagctgtgcaagcctataggctacaacaagcaatttgcgcgagcgtcttac

SEQ ID NO: 343057 - DNA, 253 bp, Zea mays
ctcttttagattgcttatgagttatagttcaataatgaagttttttagaaatgtactttcttatttctgggacgccacaaacatcatccaaaaataagaaagtacatttctaaaaaaaaaaaaataaaataaatacaacataccatatacaaaaaagaaaaataaatgagtgaaaaccaaataagtaaaaccctacaggatccaacaaagaaatcgaaacaaagcatgggggcggcctctttataggaccaaa

SEQ ID NO: 343058 - DNA, 437 bp, Zea mays
tttaagcattcaaaaccacaccaggcgaagcgcactaccaccaacctaacaccaatggctaccaagatattagccctccttgcgcttctggccctttaagggagcgcaacaaatgcgttcattattccacagtgctcacttgctcctagtgccattattccacagttcctcccaccagttacttcaatgggcttcgaacatccagccgtgcaagcctacaggctacaactagcgcttgcggcgagcgtcttacaacaaccaattgcccaattgcaacaacaatccttggcacatctaaacctacaaaccatcgcaacgcaacagcaacaacagtttctgccatcactgagccacctagccgtggtgaaccctgtcgcctacttgcaacagcagctacttgcatccaacccacttgctctggcgaacgtagctgcata

SEQ ID NO: 343059 - DNA, 259 bp, Zea mays
cccgtcctctaaatccgcaagcggccgccttttttttttttttttaattttttttttttttttttttttgtgtttttaattggcttttttctttttttttttcggttacttttttttttttttgttctttaaaaccaaaatctttttttgtggcctctttttttggccatcccacacttaagaatgtggagaccctattctgcatctttacatgtttcaacaggcaggtgttgctggcattttaccttcataattcttg

SEQ ID NO: 343060 - DNA, 322 bp, Zea mays
caaatgcgttcattattccacagtgctcacttgctcctagtgccattattccacagttcctgccaccagttacttcaatgggcttcgaacatccagccgtgcaagcctacaggctacaactagcgcttgcggcgagcgtcttacaacaaccaattgcccaattgcaacaacaatccttggcacatctaaacctacaaaccatcgcaacgcaacagcaacaacagtttctgccatcactgagccacctagccgtggtgaaccctgtcgcctacttgcaacagcagctacttgcatccaacccacttgctctggcgaacgtagc

SEQ ID NO: 343061 - DNA, 422 bp, Zea mays
tagaaagtggaatacagtagcaacaatagagcaacaatggcggccaagatattttccatccttatgctccttgctctttctgcatgtgttgctaacgcgaccatttttcctcaatactcacaagctcctatagctgcccttcttcccccataccttccatcaatgaccgcttcagtatgtgaaaacccagcccttcaaccctacaggctccaacaagcaatcgcaacaagcaacttacctttatcacccctgttctttcaacaatcgccagccctatctttggtgcagtcattggtacaaaccatcaaggcacaacagctgcagcaactcgtgctaccagtgatcagccaagtagctctggcaaacctttctccctactctcagcaacaacaatttctttcattcaaccaactgtctacact

SEQ ID NO: 343062 - DNA, 323 bp, Zea mays
ctcgatcgggagacgcagaggtcccgcggcttcggcttcgtcaccttctccacggaggaggcgatgcggaacgccatcgagggcatgaacggcaaggagctggacggccgcaacatcaccgtcaacgaggcccagtcccgcggcggccgtggaggcggcggcggcggcgggtacggtggtggccgtggaggcggcggctacggcggtggcgggcgccgtgatggcggcggcggctactgcggtggcggctgctacagtggtggcggcggctgctacagtggtggtggctgcggctactgcggaggcaaccgtggcggcggcta

SEQ ID NO: 343063 - DNA, 453 bp, Zea mays
caactagcaacatagaaagcacaatagtgtaccaacaatggcagccaaaatattttgcttccttatgctccttggtctttctgcaagtgctgctaccgcaaccattttcccacaatgctcacaagctcctatagcttcctttcttcccccatacctctcaccagcggtgtcttcagtatgtgaaaacccaattcttcaaccctacaggatccaacaggcaatcgcagcaggcatcttacctttatcacccttgttcctccaacaaccgtcagccctattacagcagttacctttggtgcatttgttggcacaaaacatcaaggcacaacaactacaacaacttgtgctaggaaaccttgctgcctactctcagcaacagcagtttcttccattcaaccaactggctgcattgaactctgctgcttatttgcaacaacaactaccattcaatca

SEQ ID NO: 343064 - DNA, 441 bp, Zea mays
cccttccgacccacctaccaccataaaaggcacaatagtgtaccaacaatggcagccaaaatattttgcttccttatgctccttggtctttctgcaagtgctgctaccgcaaccattttcccacaatgctcacaagctcctatagcttcctttcttcccccatacctctcaccagcggtgtcttcagtatgtgaaaacccaattcttcaaccctacaggatccaacaggcaatcgcagcaggcatcttacctttatcacccttgttcctccaacaaccgtcagccctattacagcagttacctttggtgcatttgttggcacaaaacatcaaggcacaacaactacaacaacttgtgctaggaaaccttgctgcctactctcagcaacagcagtttcttcatttcaccaactggctgcattgaactctgttgtttatttgc

SEQ ID NO: 343065 - DNA, 440 bp, Zea mays
gcaacatagaaagcacaatagtgtaccaacaatggcagccaaaatattttgcttccttatgctccttggtctttctgcaagtgctgctaccgcaaccattttcccacaatgctcacaagctcctatagcttcctttcttcccccatacctctcaccagcggtgtcttcagtatgtgaaaacccaattcttcaaccctacaggatccaacaggcaatcgcagcaggcatcttacctttatcacccttgttcctccaacaaccgtcagccctattacagcagttacctttggtgcatttgttggcacaaaacatcaaggcacaacaactacaacaacttgtgctaggaaaccttgctgcctactctcaacaacagcagtttcttccattcaaccaactggctgcattgaactctgctgcttatttgcaacaacaactaccat

SEQ ID NO: 343066 - DNA, 316 bp, Zea mays
gtcttcagaccattagctttatctactccagagcgcagaagaacccgatcgacaccatgagggtgttgctcgttgccctcgctctcctggctctcgctgcgagcgccacctgcacgcatacaagcggcggctgcggctgccagccaccgccgccggttcatctaccgccgccggtgcatctgccacctccggttcacctgccacctgcggtgcatctcccaccgccggtccacctgccgccgccggtccacctgccaccgccggtccatgtgccgccgccggttcatctgccgacgccaccatgccactaccctac

SEQ ID NO: 343067 - DNA, 410 bp, Zea mays
caccaatggcagccaaaatatttggcttccttatgctccttggtctttctgcaagtgctgctaccgcaaccattttcccacaatgctcacaagctcctatagcttcctttcttcccccatacctctcaccagcggtgtcttcagtatgtgaaaacccaattcttcaaccctacaggatccaacaggcaatcgcagcaggcatcttacctttatcacccttgttcctccaacaaccgtcagccctattacagcagttacctttggtgcatttgttggcacaaaacatcaaggcacaacaactacaacaacttgtgctaggaaaccttgctgcctactctcagcaacagcagtttcttccattcaaccaactggctgcattgaactctgctgcttatttgcaacaacaacta

SEQ ID NO: 343068 - DNA, 364 bp, Zea mays
atttagaccaactagcaacatagaaagcacaatagtgtaccaacaatggcagccaaaatattttgcctccttatgctccttggtatttctgcaagtgctgctacggcgaccattttcccgcaatgctcacaagctcctatagcttcccttcttcccccgtacctctcaccagcggtgtcttcggtatgtgaaaacccaattcttcaaccctacaggatccaacaggcaatcgcagctggcatcttacctttatcacccttgttcctccaacaatcatcagccctattacagcagttacctttggtgcatttattggcacaaaacatcagggcacaacaactacaacaacttgtgctagcaaacc

SEQ ID NO: 343069 - DNA, 432 bp, Zea mays
attttgagcattcagaaacacaccaagcgaagcgcactagcaacaacctaacaacaatggctaccaagatattatccctccttgcgcttcttgcgctttttgcgagcgcaacaaatgcgtccattattccacaatgctcacttgctcctagttccattattccacagttcctcccaccagttacttcaatggccttcgaacacccagctgtgcaagcctataggctacaacaagcgattgcggcgagcgtcttacaacaaccaattgcccaattgcaacaacaatccttggcacatctaacaatacaaaccatcgcaacgcaacagcaacaacagttcctaccagcactgagccacctagccatggtgaaccctgtcgcctacttgcaacagcagctgcttgcatccaacccacttgctctagcaaacgtag

SEQ ID NO: 343070 - DNA, 244 bp, Zea mays
cacacacacgcgcgtgcgaggcgatatctcttttatagagtgacctataaacacaacactgtgcgcggctttacaccgcggcgactgtgaaaaccctgtggcgacccaacttaaactccttgtgcaacataccccttttgcccgctggggtaatatcgagaagaggcccaccccgagcgcttttcaacagatgtgcacactctatatggaaagtgacacgcgctgtatcggcgcatttaacgcg

SEQ ID NO: 343071 - DNA, 387 bp, Zea mays
gggtcttcagaccattagctttatctactccagagcgcagaagaacccgatcgacaccatgagggtgttgctcgttgccctcgctctcctggctctcgctgcgagcgccacctccacgcatacaagcggcggctgcggctgccagccaccgccgccggttcatctaccgccgccggtgcatctgccacctccggttcacctgccacctccggtgcatctcccaccgccggtccacctgccgccgccggtccacctgccaccgccggtccatgtgccgccgccggttcatctgccgtcgccaccatgccactaccctactcaaccgccccggcctcagcctcatgcccagccacacccatgcccgtgccaacagccgcattcaaaccc

SEQ ID NO: 343072 - DNA, 152 bp, Zea mays
ctgggtcttcagaccattagctttatctactccagagcgcagaagaacccgatcgacaccatgagggtgttgctcgttgccctcgctctcctggctctcgctgcgagcgccacctccacgcatacaagcggcggctgcggctgccagccacc

SEQ ID NO: 343073 - DNA, 216 bp, Zea mays
gggtcttcagaccattagctttatctactccagagcgcagaagaacccgatcgacaccatgagggtgttgctcgttgccctcgctctcctggctctcgctgcgagcgccaccttcacgcatacaagcggcggctgcggctgccagccaccgccgtcggttcatctaccgccgccggtgcatctgccaccttcggttcacctgccaccttcggtgca

SEQ ID NO: 343074 - DNA, 68 bp, Zea mays
gtgcgacaatggagaccttgtattgtgtcatccatatgcaacttgctgtccgtggatgtgcagctaac

SEQ ID NO: 343075 - DNA, 212 bp, Zea mays
gcaacatagaaagtggaatacagtagcaacaatagagcaacaatggcggccaagatattttccatccttatgctccttgctctttctgcatgtgttgctaacgcgaccatttttcctcaatactcacaagctcctatagctgcccttcttcccccataccttccatcaatgaccgcttcagtatgtgaaaacccagcccttcaaccctacag

SEQ ID NO: 343076 - DNA, 227 bp, Zea mays
  unsure (1)..(227): unsure at all n locations
cttcagaccattagctttatctactccagagcgcagaagaacccgatcgacaccatgagggtgttgctcgttgccctcgctctcctggctctcgctgcgagcgccacctccacgcatacaagcggcggctgcggctgccagccaccgccgncggttcatctaccgccgccggtgcatctgccaccttcggttcacctgccacctccggtgcatctcccaccgccggt

SEQ ID NO: 343077 - DNA, 108 bp, Zea mays
tggcagctggcgcgaacggtgcaccagatacggggggcaaatgtgccaccacacatgcatgtcatgacggtagattgccactactacagtgacccagagggagctaag

SEQ ID NO: 343078 - DNA, 235 bp, Zea mays
gaccaactagcaacatagaaagcacaatagtgtaccaacaatggcagccaaaatattttgcttccttatgctccttggtctttctgcaagtgttgctaccgcaaccattttcccacaatgctcacaagctcctatagcttcccttcttcccccatacctctcaccagcggtgtcttcaatgtgtgaaaacccaattgttcaaccctacaggatccaacaggcattcgcaacaggc

SEQ ID NO: 343079 - DNA, 177 bp, Zea mays
gtgacacaacacgcaacactgcatgtggcatccagtcacatcaatcgagcttctatgactgccaacttgtctcccctcggtatgctcagagctctttctttaacagttgctaacgctacaatttttgctgaccgatcacacgcttctatagcaaaccttgttgccgcatacctttca

SEQ ID NO: 343080 - DNA, 59 bp, Zea mays
gtgggtcttcagaccattagctttatctacttcagagcgcaaaagaacccgatcgacac

SEQ ID NO: 343081 - DNA, 56 bp, Zea mays
ttctcatgctgatatgtgcgacctctcagtaataaagcattagagatctatatttt

SEQ ID NO: 343082 - DNA, 61 bp, Zea mays
tcgatctggtcttggtggcccgattcggcacgaagccgcactttgagagaggggcgcgggc

SEQ ID NO: 343083 - DNA, 220 bp, Zea mays
caacaagcaacatagaaagtggaatccagtagcaacaatagagcaacaatggagaccaagatattttccctccttatgctccttgctctttctacatgtgttgctaacgcgacaattttccctcaatgctcacaagctcctatagcttccctttttcccccataccttccatcaattatagcttcagtatgtgaaaacccagctcttcaaccatataggc

SEQ ID NO: 343084 - DNA, 354 bp, Zea mays
tagcaacatagaaagcacaatagtgtaccaacaatggcagccaaaatattttgcctccttatgctccttggtctttctgcaagtgctgctacggcgaccattttcccgcaatgctcgcaagctcctatagcttcccttcttcccccgtacctctcaccagcggtgtcttcggtatgtgaaaacccaattcttcaaccctacaggatccaacaggcaatcgcagctggcatcttacctttatcacccttgttcctccaacaatcatcagccctattacaacagttacctttggtgcatttattggcacaaaacatgagggcacaacaactacaacaacttgtgctagcaaacctt

SEQ ID NO: 343085 - DNA, 62 bp, Zea mays
gatcagcaaagcggcagtgcgtagagaggatcgtcgaacagaacaacatgaaaatggtcatc

SEQ ID NO: 343086 - DNA, 310 bp, Zea mays
  unsure (1)..(310): unsure at all n locations
agaccattagctttatctactccagagcgcagaagaacccgatcgacaccatgagggtgttgctcgttgccctcgctctcctggctctcgctgcgagcgccacctccacgcatacaagcggcggctgcggctgccagccaccgccgccggttcatctaccgccgccggtgcatctgccacctgcggttcacctgccacctgcggtgcatctcccaccgccggtccacctgccggcgtcggtccacctgccaccgtcggtccatgtgccgccgccggtttatctgccgncgncaccatgccactaccctac

SEQ ID NO: 343087 - DNA, 73 bp, Zea mays
  unsure (1)..(73): unsure at all n locations
agatcaacaagcaacattgaaagtagaatacagtagcaacaaaagagcaacaatggcggncaagatattttcc

SEQ ID NO: 343088 - DNA, 120 bp, Zea mays
tgggaccaacccttccgagaccattagctttatttactccagagcgcagaagaacccgttcgacaccatgggggtgttgttggttgccctggttttcctggctttggttgggggggcaac

SEQ ID NO: 343089 - DNA, 360 bp, Zea mays
cagaaacacaccaagcgaagcgcactagcaacgacctaacaacaatggctaccaagatattagccctccttgcgcttcttgccctttttgtgagcgcaacaaatgcgttcattattccacaatgctcacttgctcctagtgccattattccacagttcctcccaccagttacttcaatgggcttcgaacacctagctgtgcaagccaacatgcaacaacaagcgcttgcggcgagcgtcttacaacaaccaattgcccaattgcaacaacaatccttgccacatctaacaatacaagccatcacaacgcaacagcaacaacatgtcctaccagcactgagccacctagccatggtgaacc

SEQ ID NO: 343090 - DNA, 454 bp, Zea mays
  unsure (1)..(454): unsure at all n locations
attttgagcattcagaaacacaccaagcgaagctacctagcaacgacttaacaacaatggctaccaagatattagccctccttgcgcttcttgccctttttgtgagcgcaacaaatgcgttcattattccacaatgctcacttgctcctagtgccattataccacagttcctccgaccagttacttcaatgggcttcgaacacctagctgtgcaagcctacaggctacaacaagcgcttgcggcgagcgtcttacaacaaccaattaaccaattgcaacaacaatccttggcacatctaaccatacaaaccatcgcaacacaacagcaacaacagttcctaccagcactgagccaactagatgtggtgaaccctgtcgcctacttgcaacagcaggtgcttgcatccaacccactngctctggcatacgtagctgcataccaacaacaacaaca

SEQ ID NO: 343091 - DNA, 326 bp, Zea mays
ctggcatcttacctttatcacccttgttcctccaacaatcatcagccctattacatcagttacctttggtgcatttattggcacaaaacatcagggcacaacaactacaacaacttgtgctagcaaaccttgctgcctactctcagcaacagcagtttcttccattcaaccaactagctgcattgaactctgcttcttatttgcaacaacaacaactaccattcagccagctacctgctgcctacccccagcaatttcttccattcaaccaactggcagcattgaactctcctgcttatttacagcagcaacaactactaccattc

SEQ ID NO: 343092 - DNA, 263 bp, Zea mays
  unsure (1)..(263): unsure at all n locations
ctagttctagatcgcgagcggccgccccttttttttttttttttttttgttgttttttttttttttgggtggggttttttaaatatatatttttttgtttatttttttttttatgttgtttttggaaggggggggggaaaaggggggnttnntttgggggagggggaaagggaacttttttttgggggggggccccataccttttacaaaaaccttttttggggggccccccccaagggggcccccaagggggggcccccccc

SEQ ID NO: 343093 - DNA, 292 bp, Zea mays
aaaatccggaatcgtgcagacgggcaccgcttatcctccgcgcaggcaagagcagccagccgattcgggatcggtacgcggagaggggaaaggcgagtcgtcgactcgtcgtccgggcagcttacctccctctcctgtccgtccccgcttacctaggccggccccgtctacgcacgcctaccgtcgtcgcacgatgagcacttctcccgacgccgacgacgtttcgcctttgccgcctactgctgccgccgacgaggccgcgcgggcgacagaaacgggggtggtcgatgag

SEQ ID NO: 343094 - DNA, 165 bp, Zea mays
  unsure (1)..(165): unsure at all n locations
gctttatctactccagagcgcagaaaaaaccccgatcgacaccatgagggtgttgctcgttgccctcgctctcctggctctcgctgcgagcgccacctncacgcatacaagcggcggctgcggctgccagccaccgccgccggttcatctaccgccgccggtgca

SEQ ID NO: 343095 - DNA, 124 bp, Zea mays
cgcccgctgggcatatgcaacattattctccgaggcgacgcgacatgcgtcgggctgaatgaataaactcactgtcatccagtgaagggggagttgcgtactgatccttatatcaatgcgtgca

SEQ ID NO: 343096 - DNA, 413 bp, Zea mays
ggacgtcagcctagcaattagctcatcgactccagattggagaactcgacaccatgaaggtgctgatcgttgcccttgctctcctggcgctcgctgcgagcgccgcctccagtacaagcggcggctgtggctgccagacaccaccgtttcatctaccgcctccgttctatatgccgcctccgttctatctgccgccgcagcagcagccgcagccatggcaataccccactcaaccaccgcagctaagcccgtgccagcagttcggatcctgcggcgtcggcagcgtcggcagcccgttcctgggccagtgcgtcgagttcctgaggcaccagtgcagcccggcggcgacgccctacggctcgccacagtgccaggcgctgcagcagcagtgctgccaccagatcaggcaggtg

SEQ ID NO: 343097 - DNA, 344 bp, Zea mays
gagaccaactagcagcatagaaagcacaattgtgtaccaacaatggcagccaaaatattttgcctccttatgctccttggtctttctgcaagtgctgctacggcgaccattttcccacaatgctcacaagctcctatagcttcccttcttcccccgtacctctcaccagcggtgtcttcggtatgtgaaaacccaattcttcaaccctataggatccaacaggcaatcgcagctggcatcttacctttatcacccttgttcctccaacaatcatcagccctattacagcagttacctttggtgcatttatgggcacaaaacatgggggcacaacatctacaaca

SEQ ID NO: 343098 - DNA, 450 bp, Zea mays
  unsure (1)..(450): unsure at all n locations
agctttatctactccagagcgcagaagaacccgatcgacaccatgagggtgttgctcgttgccctcgctctcctggctctcgctgcgagcgccacctccacgcatacaagcggcggctgcggctgccagccaccgccgccggttcatctaccgccgccggtgcatctgccacctccggttcacctgccacctccggtgcatctcccaccgccggtccacctgccgtcgccggtccacctgccaccgccggtccatgtgccgccgccggttcatctgccgccgtcaccatgccactaccctactcaaccgtcccggcctcagcctcatccncagccacacccatgcccgtgccaacagccgcatccaagcccgtgccagctgcagggaacctgcggcgttggcagcaccccgatcctgggccagtgcgtcgagttcctgaggcatcagtgc

SEQ ID NO: 343099 - DNA, 439 bp, Zea mays
agctttatctactccagagcgcagaataacccgatcgacaccatgagggtgttgctcgttgccctcgctctcctggctctcgctgcgagcgccacctccacgcatacaagcggcggctgcggctgccagccaccgccgccggttcatctaccgccgccggtgcatctgccacctccggttcacctgccacctccggtgcatctcccaccgccggtccacctgccgtcgccggtccacctgccaccgtcggtccatgtgccgccgccggttcatctgccgccgtcaccatgccactaccctactcaaccgtcccggcctcagcctcatgcccagccacacccatgcccgtgccaacagccgcattcaagcccgtgccagctgcagggaacctgcggcgttggcagcaccacgatcctgagccagtgcgtcgagttcctga

SEQ ID NO: 343100 - DNA, 120 bp, Zea mays
agaccattagctttatctactccagagcgcagaagaacccgatcgacaccatgagggtgttgctcgttgccctcgctctcctggctctcgctgcgagcgccaccttcacgcatacaagcg

SEQ ID NO: 343101 - DNA, 236 bp, Zea mays
gggtcttcagaccattagctttatctactccagagcgcagaagaacccgatcgacaccatgagggtgttgctcgttgccctcgctctcctggctctcgctgcgagcgccaccttcacgcatacaagcggtgggtgcggctgccagccaccgtcgccggttcatctaccgccgccggtgcatctgccacctccggttcacctgccacctgcggtgcatctcccaccgccggtccacc

SEQ ID NO: 343102 - DNA, 130 bp, Zea mays
gaggatgattgcactctgttttttatttggcacatcaacaactaccattgagccagctacgtgctgactacccaccagaattaccttcacttaaccgaacggccgcattgaactctccagcttatttaca

SEQ ID NO: 343103 - DNA, 314 bp, Zea mays
caagcgaagcgcactagcaacaacctaacaacaatggctaccaagatattagccctccttgcgcttcttgcccttttagtgagcgcaacaaatgcgttcattattccacagtgctcacttgctcctagtgccattattccacagttcctcccaccagttacttcaatgggcttcgaacatccagccgtgcaagcctacaggctacaactagcgcttgcggcgagcgtcttacaacaaccaattgcccaattgcaacaacaatccttggcacatctaaacctacaaaccatctgaacgcaacagcaacaacagtt

SEQ ID NO: 343104 - DNA, 462 bp, Zea mays
  unsure (1)..(462): unsure at all n locations
caacaagcaacatagaaagtggaatacagtagcaacaatagagcaacaatggcggccaagatattttccatccttatgctccttgctctttctgcatgtgttgctaacgcgaccatttttcctcaatactcacaagctcctatagctgcccttcttcccccataccttccatcaatgaccgcttcagtatgtgaaaacccagcccttcaaccctacaggctccaacaagcaatcgcaacaagcaacttacctttatcacccctgttctttcaacaatcgccagccctatctttggtgcagtcattggtacaaaccatcagggcacaacagctgcagcaactcgtgctaccagtgatcagccaagtagctctggcaaacctttctccctactctcagcaacaacaatttcttncattcaaccaactgtctacactgaaccctgctgcttatttgcagcaacac

SEQ ID NO: 343105 - DNA, 178 bp, Zea mays
caacaacccatcattggtggtgccctcttttagattgcttatgagttatagttcaataatgaagttttttttaagaatctagaaatgtactttcttatttctgggaagccacaaacatcatccaaaaaataagaaagtacatttctagattcttaaaaaaaaaacaacaaataaaaat

SEQ ID NO: 343106 - DNA, 318 bp, Zea mays
  unsure (1)..(318): unsure at all n locations
gggtcttcagaccattagctttatctactccagagcgcagaagaacccgatcgacaccatgagggtgttgctcgttgccctcgctctcctggctctcgctgcgagcgccaccttcacgcatacaagcggcggctgcggctgccagccaccgccgccggttcatctaccgccgccggtgcatctgccaccttcggttcacctgccacctccggtgcatctcccaccgccggtccacctgccgtcgccggtccacctgccaccgtcggtccatgtgccgccgccggttcatctggcgncgtcaccatgccactaccctac

SEQ ID NO: 343107 - DNA, 363 bp, Zea mays
tagcaacatagaaagcacaatagtgtaccaacaatggcagccaaaatattttgcttccttatgctccttggtctttctgcaagtgctgctaccgcaaccattttcccacaatgctcacaagctcctatagcttcctttctttccccatacctctcaccagcggtgtcttcagtatgtgaaaacccaattcttcaaccctacaggatccaacaggcaatcgcagcaggcatcttacctttatcacccttgttcctccaacaaccgtcagccctattacagcagttacctttggtgcatttgttggcacaaaacatcaaggcacaacaactacaacaacttgtgctaggaaaccttgctgcctac

SEQ ID NO: 343108 - DNA, 130 bp, Zea mays
ctgggtcttcagaccattagctttatctactccagagcgcagaagaacccgatcgacaccatgagggtgttgctcgttgccctcgctctcctggctctcgctgcgagcgccaccttcacgcatacaagcg

SEQ ID NO: 343109 - DNA, 404 bp, Zea mays
cccacacgtccgtatctagcaacatagaaagcacaatagtgtaccaacaatggcagccaaaatattttgcttccttatgctccttggtctttctgcaagtgttgctaccgcaaccattttcccacaatgctcacaagctcctatagctttcctttttcccccatacctatcaccagcggggtcgttaatgtgtgaaaacccaattgttcaaccctacaggatccaacaagcaatcgcaacaggcatcttaccattatcacccttgttcctccaacaaccgtcagccctattacagcagttacctttggtccatttggtggcacaaaacatcagggcacaacaactacaacaacttgtgctagcaaaccttgctgcatactctcagcaacatcagtttctttcat

SEQ ID NO: 343110 - DNA, 383 bp, Zea mays
atccaatccagatcagcaaagcggcagtgcgtagagaggatcgtcgaacagaacagcatgaagatggtcatcgttctcgtcgtgtgcctggctctgtcagctgccagcgcctctgcaatgcagatgccctgcccctgcgcggtgctgcagggcttgtacggcgctggcgccggcctgacgacgatgatgggcgccggcgggctgtacccctacgcggagtacctgaggcagccgcagtgcagcccgctggcggcggcgccctactacgccgggtgtgggcagacgagcgccatgtaccagccgctccggcaacagtgctgccagcagcagatgaggatgatggacgtgcagtccgtcgcgcagcagctgcagatgatgatgca

SEQ ID NO: 343111 - DNA, 466 bp, Zea mays
cttcggtatgtgaaaacccaattcttcaaccctacaggatccaacaggcaatcacagctggcatcttacctttatcacccttgttcctccaacaatcatcagccctattacatcagttacctttggtgcatttattggcacaaaacatcagggcacaacaactacaacaacttgtgctagcaaaccttgctgcctactctcagcaacagcagtttcttccattcaaccaactagctgcattgaactctgcttcttatttgcaacaacaacaactaccattcagccagctacctgctgcctacccccagcaatttcttccattcaaccaactggcagcattgaactctcctgcttatttacagcagcaacatctactaccattcagccagctagctggtgtgagccctgctaccttcttgatacaaccacagtttgttgccgtctaccagcacgctgcgcctaacgc

SEQ ID NO: 343112 - DNA, 422 bp, Zea mays
cagaccattagctttatctactccagagcgcagaagaacccgatcgacaccatgagggtgttgctcgttgccctcgctctcctggctctcgctgcgagcgccaccttcacgcatacaagcggcggctgcggctgccagccaccgccgccggttcatctaccgccgccggtgcatctgccacctccggttcacctgccacctccggtgcatctcccaccgccggtccacctgccgtcgccggtccacctgccaccgccggtccatgtgccgccgccggttcatctgccgccgtcaccatgccactaccctactcaaccgccccggcctcagcctcatccccagccacacccatgcccgtgccaacagccgcattcaagcccgtgccagctgcagggaacctgccgcgttggcagcaccccgat

SEQ ID NO: 343113 - DNA, 449 bp, Zea mays
ctagcaacatagaaagcacaatagtgtaccaacaatggcagccaaaatattttgcctccttatgctccttggtctttctgcaagtgctgctacggcgaccattttcccacaatgctcacaagctcctatagcttgccttcttcccccgtacctctcaccagcggtgtcttcggtatgtgaaaacccaattcttcaaccctataggatccaacaggcaatcgcagctggcatcttacctttatcacccttgttcctccaacaatcatcagccctattacagcagttacctttggtgcatttattggcacaaaacatcagggcacaacaactacaacaacttgtgctagcaaaccttgctgcctactctcagcaacaacagtttcttccattcaaccaactagctgcattgaactctgcttcttatttgcaacaacaacaactaccattca

SEQ ID NO: 343114 - DNA, 449 bp, Zea mays
attgagaccaacaagcaacatagaaagtggaatccagtagcaacaatagagcaacaatggagaccaagatattttccctccttatgctccttgctctttctacatgtgttgctaacgcgacaattttccctcaatgctcacaagctcctatagcttccctttttcccccataccttccatcaattatagcttcagtatgtgaaaacccagctcttcaaccatataggcttcaacaagcaatcgcagcaagcaacatacctttatcgcccttgttgtgtcaacaatcgccagccctatctttggtgcagtcattggtacaaaccatcatggcacaacagctgcagcaactcgtgctacctgtgatcaaccaagtagctctggcaaacctttctccctactctccgcaacaacaatttcttccattcaaccaactgtctacactgaaccct

SEQ ID NO: 343115 - DNA, 176 bp, Zea mays
  unsure (1)..(176): unsure at all n locations
ttctagatcgcgagcggccgcccttttttttttttttttttttttttttttttgttgtttntttggtcaaattatcgtattctctttattgccaacacacacaaaaaaagggttaacatttttttattggtttacaacacccttcaaggggaaaaaagaatgggcagagcatgaat

SEQ ID NO: 343116 - DNA, 92 bp, Zea mays
ctatcctcttctctgttctaccccctttgaagcaacaatcgttcaccgatcgatccagtgcgttctgcatggaaactgccgccgtcgccgcc

SEQ ID NO: 343117 - DNA, 387 bp, Zea mays
ttctagatcgcgagcggtcgccctttttttttttttttattttcctttttgggtgttttttttgggcaaaggaggggattctttttattgccaacacacacaaaaaaagggttaacatttttttattggtttacatcaccattcaaggggaaaaatgaatgggcagagcaagaatgtaattgctttgtttttatttccatgctcctgccttgtgccattagataacctccaaactcattggctcttttctatcttcatcccaatgcatagccgtaagtgcattcactgtatttccaacatatggaagccctaaaaatttcccaataaagatgttttgacaagggtaaaaagtaaaggtaaaattgtagctcacttaaaatctttatc

SEQ ID NO: 343118 - DNA, 406 bp, Zea mays
aaatattttgcctccttatgctccttggtctttctgcaagtgctgctacggcgaccattttcccacaatgctcacaagctcctatagcttcccttcttcccccgtacctctcaccagcggtgtcttcggtatgtgaaaacccaattcttcaaccctataggatccaacaggcaatcgcagctggcatcttacctttatcacccttgttcctccaacaatcatcagccctattacagcagttacctttggtgcatttattggcacaaaacatcagggcacaacaactacaacaacttgtgctagcaaaccttgctgcctactctcagcaacaacagtttcttccattcaaccaactagctgcattgaactctgcttcttatttgcaacaacaacaactaccattcag

SEQ ID NO: 343119 - DNA, 74 bp, Zea mays
tcggaccattagctttatctactccagagcgcagaagaacccgatcgacaccatgagggtgttgctcgttgccc

SEQ ID NO: 343120 - DNA, 354 bp, Zea mays
gaccattagctttatctactccagagcgcagaagaacccgatcgacaccatgagggtgttgctcgttgccctcgctctcctggctctcgctgcgagcgccacctccacgcatacaagcggcggctgcggctgccagccaccgccgccggttcatctaccgccgccggtgcatctgccacctccggttcacctgccacctccggtgcatcttccaccgccggtccacctgccgccgccggtccacctgccaccgtcggtccatgtgccgccgccggttcatctgccgtcgtcaccatgccactaccctactcaaccgccccggtctcagcctcatccccagccacacccatgccc

SEQ ID NO: 343121 - DNA, 58 bp, Zea mays
ccggtcgccacgcgtcgcttcctatttatgctaaacaatttcggcagattccggcgct

SEQ ID NO: 343122 - DNA, 236 bp, Zea mays
attgagaccaactagcaacatagaaagcacaatagtgtaccaacaatggcagccaaaatattttgcttccttatgctccttggtctttctgcaagtgttgctaccgcaaccattttcccacaatgctcacaagctcctatagctttccttctttccccatacctctcaccagcggtgtcttcaatgtgtgaaaacccaattgttcaaccctacaagatccaacaagcaatcgcaac

SEQ ID NO: 343123 - DNA, 399 bp, Zea mays
cagaccattagctttatctactccagagcgcagaagaacccgatcgacaccatgagggtgttgctcgttgccctcgctctcctggctctcgctgcgagcgccacctccacgcatacaagcggtggctgcggctgccagccaccgccgtcggttcatctaccgccgccggtgcatctgccacctccggttcacctgccacctccggtgcatctcccaccgccggtccacctgccgccggcggtccacctgccaccggcggtccatgtgccgccggcggttcatctgccggcgccaccatgccactaccctactcaaccgccccggcctcagcctcattcccagccacacccatgcccgtgccaacagccgtatccaagcccgtgccagctgcagggaacc

SEQ ID NO: 343124 - DNA, 401 bp, Zea mays
attgagaccaactagcaacatagaaagcacaatagtgtaccaacaatggcagctaaaatattttgcctgcttatgctccttggtctttctgcaagtgctgctacggcgaccattttcccacaatgctcacaagctcctatagcttcccttcttcccccgtacctctcaccaacggtgtcttcggtatgtagaaaacccaattcttcaaccctacaggatccaacaggcaatcgcagctggcatcttacctttatcacccttgttcctccaacaatcatcagccctattacagcagttacctttggtgcatttattggcacaaaacatcagggcacaacaactacaacaacttgtgctagcaaaccttgctgcctactctcagcaacagcagtttcttccat

SEQ ID NO: 343125 - DNA, 392 bp, Zea mays
caacaagcaacatagaaagtggaatccagtagcaacaatagagcaacaatggagaccaagatattttccctccttatgctccttgctctttctacatgtgttgctaacgcgacaattttccctcaatgctcacaagctcctatagcttccctttttcccccataccttccatcaattatagcttcagtatgtgaaaacccagctcttcaaccatataggcttcaacaagcaatcgcagcaagcaacatacctttatcgcccttgttgtgtcaacaatcgccagccctatctttggtgcagtcattggtacaaaccatcagggcacaacagctgcagcaactcgtgctacctgtgatcaaccaagtagctctggcaaacctttctccctactc

SEQ ID NO: 343126 - DNA, 386 bp, Zea mays
tcgtgccttcagtcctactcctacacccatctcattgctttcggaatccggagagctcgagtcgtgcgtgcgcgagtctttgttgcatgctgcggcgaatcaccagcaccaccctttcgcgtcgtgcgcgcgtttcgatggccgacagcgagcctttcatcacgcgctggacctttgaggatttcgtggtccactacgaaacgcgcttcggtctccggctcgaggccgaccgttacggttactgtgatggcgacgattgcacccccgtcgtgcgtattcgatcatggggccagtcgtcccgtcactgtccgtgccaacggtggtcgcataccatgtccgtcttagatcagatctagcggatggagaggaaggtggagattatccat

SEQ ID NO: 343127 - DNA, 395 bp, Zea mays
gcaacatagaaagcacaatagtgtaccaacaatggcagctaaaatattttgcctccttatgctccttggtctttctgcaagtgctgctacggcgaccattttcccacaatgctcacaagctcctatagcttcccttcttcccccgtacctctcaccaacggtgtcttcggtatgtgaaaacccaattcttcaaccctacaggatccaacaggcaatcgcagctggcatcttacctttatcacccttgttcctccaacaatcatcagccctattacagcagttacctttggtgcatttattggcacaaaacatcagggcacaacaactacaacaacttgtgctagcaaaccttgctgcctactctcagcaacagcagtttcttccattcaaccaac

SEQ ID NO: 343128 - DNA, 255 bp, Zea mays
gtcgtatacaactagatattcacctagttcaccgcaacggaaataagctgaggtcaatatatacctaggcatgcgccaacactggcattcaaggccgttgctgctacagcgctcatgcggtgttggtagtacactgatcctggggtagtcctgtctgatcctgaggtatctgtggagcaggacggtgattgcactactgcatcgttcagtgtcagagcgtgttggagcagcgacgccagtgaatcaggcgggtgg

SEQ ID NO: 343129 - DNA, 125 bp, Zea mays
gcctcttggaaaaagaagaatccaatttattgttgagtgctgatgctatctctccaggaaagcacatgcttgctactattcctggactgccaacactttcatgtagctacagtaagggtatcata

SEQ ID NO: 343130 - DNA, 397 bp, Zea mays
gagaccaactagcaacatagaaagcacaatagtgtaccaacaatggcagccaaaatattttgcctccttatgctccttggtctttctgcaagtgctgctacggcgaccattttcccgcaatgctcgcaagctcctatagcttcccttcttcccccgtacctctcaccagcggtgtcttcggtatgtgaaaacccaattcttcaaccctacaggatccaacaggcaatcgcagctggcatcttacctttatcacccttgttcctccaacaatcatcagccctattacaacagttacctttggtgcatttattggcacaaaacatcagggcacaacaactacaacaacttgtgctagcaaaccttgctgcctactctcagcaacagcagtttctttcat

SEQ ID NO: 343131 - DNA, 395 bp, Zea mays
attttcagcattcagaaacacaccaagcgaagcgcactagcaacaacctaacaacaatggctaccaagatattagccctccttgcgcttcttgcccttttagtgagcgcaacaaatgcgttcattattccacagtgctcacttgctcctagtgccattattccacagttcctcccaccagttacttcaatgggcttcgaacatccagccgtgcaagcctacaggctacaactagcgcttgcggcgagcgtcttacaacaaccaattgcccaattgcaacaacaatccttggcacatctaaacctacaaaccatcgcaacgcaacagcaacaacagtttctgccatcactgagccacctagccgtggtgaaccctgtcgcctacttgcaacagcag

SEQ ID NO: 343132 - DNA, 396 bp, Zea mays
caactagcaacatagaaagcacaatagtgtaccaacaatggcagccaaaatattctgcctccttatgctccttggtctttctgcaagtgctggtacggcgaccattttcccacaatgctcacaagctcctatagctttccttctttccccgtacctctcaccagcggtgtcttcggtatgtgaaaacccaattcttcaaccctataggatccaacaggcaatcgcagctggcatcttacctttatcacccttgttcctccaacaatcatcagccctattacagcagttacctttggtgcatttattggcacataacatcagggcacaacaactacaacaacttgtgctagcaaaccttgctggctactttcagcaacaacagtttgttccattcaa

SEQ ID NO: 343133 - DNA, 399 bp, Zea mays
gcaacatagaaagcacaatagtgtaccaacaatggcagccaaaatattttgcttccttatgctccttggtctttctgcaagtgttgctaccgtaaccattttcccacaacgctcacaagctcctatagcttcccttcttcccccatacctttcaccagcggagtcttcaatgtgtgaaaacccaattgttcaaccctacaggatccaacaggcaatcgcaacaagcatcttaccattatcacccttgttccttcaacaaccgtcagccctattacagcagttacctttggtccatttggtggcacataacataagggcacaacaactacaacaacttgtgctagcaaaccttgctgcatactctgagcaacatcagtgtcttccattcaaccaactggc

SEQ ID NO: 343134 - DNA, 354 bp, Zea mays
gctttatctactccagagcgcagaagaacccgatcgacaccatgagggtgttgctcgttgccctcgctctcctggctctcgctgcgagcgccacctccacgcatacaagcggcggctgcggctgccagccaccgtcgccggttcatctaccgccgccggtgcatctgccacctccggttcacctgccacctccggtgcatctcccaccgccggtccacctgccgccgccggtccacctgccaccgtcggtccatgtgccgccgtcggttcatttgccgacgccaccatgccactaccctacttaaccgccccgggcttagtcttattcccagccacacccatgcccgtgccaac

SEQ ID NO: 343135 - DNA, 402 bp, Zea mays
ccaactagcaacatagaaagcacaatagtgtaccaacaatggcagccaaaatattttggcctcctaatgctcctgggctttcttgaaggggtgctacggcgaccattttcccgcaatgctcgcaagctcctatagcttcccttctttccccgtacctctcaccagcggtgtcttcggtatgtgaaaacccaattcttcaaccctacaggatccaacaggcaatcgcagctggcatcttacctttatcacccttgttcctccaacaatcatcagccctattacaacagttacctttggtgcatttattggcacaaaacatcagggcacaacaactacaacaacttgtgctagcaaaccttgctgcctactctcagcaacagcagtttttttcattcaaccaac

SEQ ID NO: 343136 - DNA, 381 bp, Zea mays
  unsure (1)..(381): unsure at all n locations
ggtaaaaacaacacaggatgaactgcttggagaactcgggttctgtcctctcgcgacttcttcgtcacaggccccacgtagccgcgccggcgacggcgccgcagtcaccagctttacggtactactactacgccttccgcgttaagccagtcgtcttccgaccgccggcgccgtcccagttgccgagatctagggactactacacatncccgcagcggcagcaggtcgttcactttaaccgccgtcgcggcgggttccggtggtaccacgaccagcggaagctcacggcggcggtgttaatcagcggcggcggagcggtcgcgttctactttggccatttggagaaccgttcctacaccaaccggttccaacctgtcgttc

SEQ ID NO: 343137 - DNA, 218 bp, Zea mays
cagaccattagctttatctactccagagcgcagaagaacccgatcgacaccatgagggtgttgctcgttgccctcgctctcctggctctcgctgcgagcgccacctccacgcatacaagcgggggctgcggctgccagccaccgccgccggttcatctaccgccggcggtgcatctgccaccttcggttcacctgccacctccggtgcattttccacc

SEQ ID NO: 343138 - DNA, 67 bp, Zea mays
gtggaattaagcgtaaaaatcagcttatagacttcagatcgaataacttcagagcaggatggcgctg

SEQ ID NO: 343139 - DNA, 323 bp, Zea mays
ctcccggcttcgcctcgtggtactcgccgtagtgggcgcatacctacgggatggcgacgcgcggccgtgccacaccttcttctttgccttacgcgccgtccccaaccccaccagatgcgatgattttgtaccccagcaccttggcgcccgtcatgattgttacaacatgaccgtcttccgttgtccgacgtctcgttccgtacttccttcacggacaccgaaaccatcaccaccgccactgcatcctgggcaacgcacggacccaccgtcccattcttacaaactccgtcggggtaccctaggtgagcgtcagtgacatctct

SEQ ID NO: 343140 - DNA, 400 bp, Zea mays
cacagttcctcccaccagttacttcaatgggcttcgaacatccagccgtgcaagcctacaggctacaactagcgcttgcggcgagcgttttacaacaaccaattgcccaattgcaacaacaatccttggcacatctaaacctacaaaccatcgcaacgcaacagcaacaacagtttctgccatcactgagccacctagccgtggtgaaccctgtcgcctacttgcaacagcagctacttgcatccaacccacttgctctggcgaacgtagctgcataccagcaacaacaacgtctgcaacagtttatgccagcgctcagtcaactagccatggtgaaccctgtcgtctacctacaacagcaacaattgctttcatctagcccgctcgctgtgggcaatgg

SEQ ID NO: 343141 - DNA, 156 bp, Zea mays
actcaacagagttctaccaacaacccatgattggtggtgccctcttttagattgcttatgagttatagttcaataatgaagttttttggatgatgcttgcggcgtcccagaaataagaaagtacatttctagattctaaaaaaaaaaaaaataaaa

SEQ ID NO: 343142 - DNA, 398 bp, Zea mays
gaccattagctttatctactccagagcgcagaagaacccgatcgacaccatgagggtgttgctcgttgccctcgctctcctggctctcgctgcgagcgccacctccacgcatacaagcggcggctgcggctgccagccaccgccgccggttcatctaccgccggcggtgcatctgccacctccggttcacctgccacctccggtgcatctcccaccgccggtccacctgccgccgccggtccacctgccaccgtcggtccatgtgccgccgccggttcatctgtcgtcgccaccatgccactaccctacttaaccgtcccggccttagccttattcccagacacacccatgcccgtgccaacagccgtattcaagcccgtgccagctgcagggaacct

SEQ ID NO: 343143 - DNA, 126 bp, Zea mays
tgtccattagttatatttacttcagattgcattttaacccgtatcgttaccatgggggggctgttagttgccctggttattctggatctcgctttgtgcgccatcttcattcatacaatcgatgtc

SEQ ID NO: 343144 - DNA, 57 bp, Zea mays
gatgcgaggccttagttttcttattgtggctcctagagccaactcaacggacgcaag

SEQ ID NO: 343145 - DNA, 295 bp, Zea mays
ctcctcgcctcgccttggagttcacgccgtagctagcgcctgccgaggagaaggttcttccctccccggcgccaggctatagtcgtagccagacacacatctgctaccccagatcaccaacacaccagctcggcagtaccacgcgatgcgaaacgtaaactcgtgaagaaaaaagccgccactgacaaaacacttgcgacggaagtgggctacacgtgacatctttcccatcagtcgctccatccatgtcgcaaatatgccaggctgcaggaagacagaccatattcagagacaa

SEQ ID NO: 343146 - DNA, 99 bp, Zea mays
gttgtatcaagagagaaacataaattgtgtttaagagtacaaacacccagaggggagaggagttctttgtttttgtgctacttgtatttattacactat

SEQ ID NO: 343147 - DNA, 387 bp, Zea mays
gtcagcctagcaattagctcatcgactccagattggagaactcgacaccatgaaggtgctgatcgttgcccttgctctcctggcgctcgctgcgagcgccgcctccagtacaagcggcggctgtggctgccagacaccaccgtttcatctaccgcctccgttctatatgccgcctccgttctatctgccgccgcagcagcagccgcagccatggcaataccccactcaaccaccgcagctaagcccgtgccagcagttcggatcctgcggcgtcggcagcgtcggcagcccgttcctgggccagtgcgtcgagttcctgaggcaccagtgcagcccggcggcgacgccctacggctcgccacagtgccaggcgctgcagcagcagtg

SEQ ID NO: 343148 - DNA, 393 bp, Zea mays
cggacgcgtgggcagaaacacaccaagcgaagcacattagcaacaacctaacaacaatggctaccaagatattatccctccttgcgcttcttgcgctttttgcgagcgcaacaaatgcgttcattattccacaatgctcacttgctccaagttccattattacacaattgctcccaccagctacttcaatgggcttcgaacacccagctgcgcaagcctataggctacaacaagcaattgcggcgagcgtcttacaacaaccaattttccagttgcaacaacaatccttggcacatctaacaatacaaaccatcgcaacgcaacagcaacaacaattgctaccagcactgagccacctagccatggtgaaccctgccgtctacttgcaacagc

SEQ ID NO: 343149 - DNA, 398 bp, Zea mays
ctccttttgctcggaacgcacacaccgtccggtccccgatctccgatcccctcgtcgatccaaagatgcagatcttcgtcaagaccctcactggaaagactatcaccctcgaggtggagtcttttgacaccattgacaacgtcaaggccaagatccaggacaaggagggcatccccccggaccagcagcggctcatctttgctggcaagcagctcgaggacgggcgcacacttgccgactacaacattcagaaggagagcaccctccaccttgttctccgtctcaggggaggcatgcagatcttcgtcaagaccctcactggaaagactatcacccttgaggtggagtcttctgacaccatcgacaacgtcaaggccaagatccaggacaaggagggc

SEQ ID NO: 343150 - DNA, 402 bp, Zea mays
tgagcattcagaaacacaccaagcgaagcacattagcaacaacctaacaacaatggctaccaagatattatccctccttgcgcttcttgcgctttttgcgagcgcaacaaatgcgttcattattccacaatgctcacttgctccaagttccattattacacagttcctcccaccagttacttcaatgggcttcgaacacccagctgtgcaagcctataggctacaacaagcaattgcggcgagcgtcttacaacaaccaatttcccagttgcaacaacaatccttggcacatctaacaatacaaaccatcgcaacgcaacagcaacaacaattcctaccagcactgagccacctagccatggtgaaccctgccgactacttgcaacagcagttgcttgcatc

SEQ ID NO: 343151 - DNA, 188 bp, Zea mays
gttctagatcgcgagctgccgccctttttttttttttttttaatattgttagtgtttttttttttttttttttttttttttatttttttttattatattttaactgccaaatatacactatgatcttatcagaataataattttgccttatattactaaattcaattataaaacatacccttaacgtg

SEQ ID NO: 343152 - DNA, 396 bp, Zea mays
agaccaacaagcaacatagaaagtggaatacagtagcaacaatagagcaacaatggcggccaagatattttccatccttatgctccttgctctttctgcatgtgttgctaacgcgaccatttttcctcaatactcacaagctcctatagctgcccttcttcccccataccttccatcaatgaccgcttcagtatgtgaaaacccagcccttcaaccctacaggctccaacaagcaatcgcaacaagcaacttacctttatcacccctgttctttcaacaatcgccagccctatctttggtgcagtcattggtacaaaccatcagggcacaacagctgcagcaactcgtgctaccagtgatcagccaagtagctctggcaaacctttctccctactc

SEQ ID NO: 343153 - DNA, 397 bp, Zea mays
attttgagcattcagaaacacaccaagcgaagcacattagcaacaacctaacaacaatggctaccaagatattatccctccttgcgcttcttgcgctttttgcgagcgcaacaaatgcgttcattattccacaatgctcacttgctccaagttccattattacacagttcctcccaccagttacttcaatgggcttcgaacacccagctgtgcaagcctataggctacaacaagcaattgcggcgagcgtcttacaacaaccaatttcccagttgcaacaacaatccttggcacatctaacaatacaaaccatcgcaacgcaacagcaacaacaattcctaccagcactgagccacctagccatggtgaaccctgccgcctacttgcaacagcagtt

SEQ ID NO: 343154 - DNA, 58 bp, Zea mays
  unsure (1)..(58): unsure at all n locations
ggggngggaagcgaaaaggggaaagaggggaggaggggggggaaagcacgaggggggg

SEQ ID NO: 343155 - DNA, 72 bp, Zea mays
gttgcataaaacgaaaagccttaattattcagtagcgcacaaaaaccataacggcagtgtgggtctttgtct

SEQ ID NO: 343156 - DNA, 382 bp, Zea mays
gttgcattaaacgaacatcattcatagtgcagtagcgcacaaaaaatctcaggggagtgtgcttcttggtctttgtgctcctggtgctcacgacactatcatcctccaatgatacaaaggtcctattgggagaacttcttacaacattacctttgatgggccagtgtaccggaagctgacaaccaagggtgttaagctacaggaccacaacacgcaatcgcatccaccaccttaccttaatcagcctagtggcttcaacaaccatgaggcctattacaacaatcacctgtctgggatttattgtctcaaaaaaatagggaccaaaaactacaacaacttggtgtagtcaaccttgctgccaactcttagcaacagcagtttt

SEQ ID NO: 343157 - DNA, 123 bp, Zea mays
gttccattaaactaaaatcacacatagcgcagaagagcacaaacaaccccaggggagggatcctctttgtcttttcgctccttgtgctcactacaatatccgcccgccagcatacaaacggcc

SEQ ID NO: 343158 - DNA, 110 bp, Zea mays
gttctatatagcgagcagccctactagttgtatagagttcaagcacccttacgtgagagggtataatgttgttataggtccatctcatttcaatgcactggtcggcgctc

SEQ ID NO: 343159 - DNA, 61 bp, Zea mays
gttgaataaatctagaatcacacctagtgaattacagctgaaacaacctcacagcagtggt

SEQ ID NO: 343160 - DNA, 393 bp, Zea mays
gaccaacaagcaacatagaaagtggaatccagtagcaacaatagagcaacaatggagaccaagatattttccctccttatgctccttgctctttctacatgtgttgctaacgcgacaattttccctcaatgctcacaagctcctatagcttccctttttcccccataccttccatcaattatagcttcagtatgtgaaaacccagctcttcaaccatataggcttcaacaagcaatcgcagcaagcaacatacctttatcgcccttgttgtgtcaacaatcgccagccctatctttggtgcagtcattggtacaaaccatcagggcacaacagctgcagcaactcgtgctacctgtgatcaaccaagtagctctggcaaacctttctccctac

SEQ ID NO: 343161 - DNA, 148 bp, Zea mays
cttgctttgacaaacccagcagtgttctaccaacaacccatcattggtggtgccctcttttagatttcttatgagttatagttcaataataaagttttttatctgatgtttgtggcttcccagaaataagaaagtacatttctagatt

SEQ ID NO: 343162 - DNA, 200 bp, Zea mays
gttgaattaaacgaaaatcatacattgtgcagtacagtcggatcaataccaggggagagatggtcttggtattttagctccttgtgctaactacaatctcatggtccacggatacaaacgtcctatgcgcacagatgcttgatagctcacagttttcatcgaagagcaccagattttgaaattccagattgaaaaacaca

SEQ ID NO: 343163 - DNA, 82 bp, Zea mays
aagagcattcgacgtcatagcattattatagtgtgacctaaatataattaaatgacacgcgttttacaacgctacgactggg

SEQ ID NO: 343164 - DNA, 395 bp, Zea mays
gtccaactagcaacatagaaagcacaatagtgtaccaacaatggcagccaaaatgtttcgcctccttatgctccttgatctttctgcaagtgctgctacggtgaccattttcccacaatgctcacaagctcctatagcttgccttcttcccccgtacctctcaccagcggagtcttcggtttgtgaaaacccaattcttcaaccctataggatccaacaggccatcgcagctggcatcttacctttatgacccttgtttctccaacaatcatgagtcctattacagcagttacctttggtgcatttattggcacaaaacatcagggcacaacaactacaacaacttgtgctagcaaaccttgctgtctactctcagcaacaacagcttctttcat

SEQ ID NO: 343165 - DNA, 73 bp, Zea mays
gttgagtgaagcgaggaggataaaaaggggaggagagtagaaacaatcccaggggagtggtggtgttgggttt

SEQ ID NO: 343166 - DNA, 392 bp, Zea mays
tttccctcaatgctcacaagctcctattgctttccttctttccccataccttccatcaatgatagcttcagtgtgtgaaaacccagctcttgaaccctataggctccaacaagcaatcgcagcaagcaacatacctttatcacccttgtttcaacaatcgccagccctatctttggtgcagtcattggtacaaaccatcagggcacagcagctgcagcaacttgtgctacctgtgatcaaccaagtagctctggcaaacctttctccctactctcagcaacaacaattttttccattcaaccaactgtctacattgaaccgtgctgcttatttgcagcaacaactattaccattcagccagctagctactgcctactctcagcaacaacaac

SEQ ID NO: 343167 - DNA, 133 bp, Zea mays
gttgaattaaacgaacatcatacattgtgcagaagagtacaaacaatatgaggggaatggtggtctttggtttttagctccctgtgctagctacaatctcagggtcccaggataaatacgtcctaatgggcag

SEQ ID NO: 343168 - DNA, 401 bp, Zea mays
ggtcttcagaccattagctttatctactccagagcgcagaagaacccgatcgacaccatgagggtgttgctcgttgccctcgctctcctggctctcgctgcgagcgccacctccacgcatacaagcggcggctgcggctgtcagccaccgtcgtcggttcatctaccgccgccggtgcatctgccaccttcggttcacctgccacctccggtgcatctcccaccgccggtccacctgccgtcgccggttcacctgccaccgtcggtccatgtgccgccgacggttcatctgtcgtcgtcaccatgccactaccctactcaaccgacccggcctcagtctcattcccagccacacccatgcccgtgccaacagccgcattcaagcccgtgccagctgcaggg

SEQ ID NO: 343169 - DNA, 84 bp, Zea mays
gttgtataaaacataaatcatatatagtgcagaacggtgaaaaaaactatagggacaaggtgggctttgctttttgtcttcatg

SEQ ID NO: 343170 - DNA, 375 bp, Zea mays
ctagcaacatagaaagcacaatagtgttccaacaatggcagccaaaatattttgcttccttatgctccttggtctttctgcaagtgttgctaccgcaaccattttcccacaatgctcacaagctcctatagctttccttcttcccccatacctctcaccagcggtgtcttcaatgtgtgaaaacccaattgttcaaccctacaggatccaacaggcaatcgcaacaggcatcttaccattatcacccttgtttcttcaacaaccgtcagccctattacagcagttacctttggtccatttggtggcacaaaacattatggcacaacaactacaacaacttgtgctagcaaactttgctgcatactctcagcaaca

SEQ ID NO: 343171 - DNA, 91 bp, Zea mays
gttgcatcaaacgagcatcacaaatagcgcagaagagtacaaacaatctcaggggaaagagattctagttcttttcgctccttgatctctc

SEQ ID NO: 343172 - DNA, 333 bp, Zea mays
gttgaattaaactagaaacataaatagtgcattacagcacaaacaatccaaggggaaagattgtcttggcttatttgctccttgtgctacttaggatattcttggtgccaagattcttacgtccttgtatcacattgcttaatacttcaactcttttctcatagtgtaacgatttttgttgttccacgatttaacaacacatatgcatgcactcaggtttcttcactaacgtaaatcaatcagtaaggttgcttgaaccacccttgtggcaaatttaacaaccatttatttggggatatttgtctccaaatgatcgttacagaaaagaacaac

SEQ ID NO: 343173 - DNA, 133 bp, Zea mays
gttgcatcaaactagaatcataaatagtgcagtaccgtccaaacaattccacgggaaagtttttctttgcttattagctcctggatcttcttacgagatcatggtgccacgcattcttccggcatactatcag

SEQ ID NO: 343174 - DNA, 239 bp, Zea mays
gttccagtaaactaggagcacacatagtgcagtagagtgcaaacaacctcacgggaatggttttctttgtttttttgctccctgtgcttgctacgctctgagcgggcgaaactatcgccgtcatcgtatcagattccttagttgcccatactttcctactcacagcacagatccttgttgttacctgattgaacaacacttaggcatgcacccaggtgcctccacaacaacacgacagt

SEQ ID NO: 343175 - DNA, 396 bp, Zea mays
aagcaacatagaaagtggaatccagtctcaacaatagagcaacaatggcgaccaagatattttccctccttatgctccttgctctttctgcatgtgttgctaacgcgacaattttccctcaatgctcacaagcttctatagcttcccttcttcccccataccttccatcaatgatagcttcagtatgtgaaaacccagctcttcaaccctataggctccaacaagcaatcgcagcaagcaacatacctttatcacccttgtttcaacaatcgccagccctatctttggtgcagtcattggtacaaaccatcagggcacagcagctgcagcaactcgtgctacctgtgatcaaccaagtagctctggcaaacctttctccctactctcagcaacaac

SEQ ID NO: 343176 - DNA, 417 bp, Zea mays
attgagaccaactagcaacatagaaagcacaatagtgtaccaacaatggcagccaaaatattttgcctccttatgctccttggtctttctgcaagtgctgctacggcgaccattttcccgcaatgctcgcaagctcctatagcttcccttcttcccccgtacctctcaccagcggtgtcttcggtatgtgaaaacccaattcttcaaccctacaggatccaacaggcaatcgcagctggcatcttacctttatcacccttgttcctccaacaatcatcagccctattacaacagttacctttggtgcatttattggcacaaaacatcagggcacaacaactacaacaacttgtgctagcaaaccttgctgcctactctcagcaacagcagtttcttccattcaaccaactaggttca

SEQ ID NO: 343177 - DNA, 417 bp, Zea mays
aagcgaagcgcactagcaacaacctaacaacaatggctaccaagatattagccctccttgcgcttcttgcccttttagtgagcgcaacaaatgcgttcattattccacagtgctcacttgctcctagtgccattattccacagttcctcccaccagttacttcaatgggcttcgaacatccagccgtgcaagcctacaggctacaactagcgcttgcggcgagcgtcttacaacaaccaattgcccaattgcaacaacaatccttggcacatctaaacctacaaaccatcgcaacgcaacagcaacaacagtttctgccatcactgagccacctagccgtggtgaaccctgtcgcctacttgcaacagcagctacttgcatccaacccacttgctctggcgaacgtagctgcatacc

SEQ ID NO: 343178 - DNA, 156 bp, Zea mays
tcgatcttaatagatctagatccaaagcggccgctttagccaccaaaatttgaagtctccgggtcttgcacgcttagacagctagcccagtattggcgttcatctatggatactatttacctgcatctagagcaagtttctaatagttctctttat

SEQ ID NO: 343179 - DNA, 415 bp, Zea mays
attgagaccaacaagcaacatagaaagtggaatccagtagcaacaatagagcaacaatggagaccaagatattttccctccttatgctccttgctctttctacatgtgttgctaacgcgacaattttccctcaatgctcacaagctcctatagcttccctttttcccccataccttccatcaattatagcttcagtatgtgaaaacccagctcttcaaccatataggcttcaacaagcaatcgcagcaagcaacatacctttatcgcccttgttgtgtcaacaatcgccagccctatctttggtgcagtcattggtacaaaccatcagggcacaacagctgcagcaactcgtgctacctgtgatcaaccaagtagctctggcaaacctttctccctactctccgcaacaacaatt

SEQ ID NO: 343180 - DNA, 335 bp, Zea mays
  unsure (1)..(335): unsure at all n locations
attttgagcattcagaaacacaccaagcgaagcacattagcaacaacctaacaacaatggctaccaagatattatccctccttgcgcttcttgcgctttttgcgagcgcaacaaatgcgttcattattccacaatgctcacttgctccaagttccattattacacagttcctcccaccagttacttcaatgggcttcgaacacccagctgtgcaagcctataggctacaacaagcaattgcggcgagcgtcttacaacaaccaatttccaagtgcaacaaacaatcttggcacatctaacaatacanaccatcgcaacgcaacagcaacaacaat

SEQ ID NO: 343181 - DNA, 411 bp, Zea mays
ggacgtcagcctagcaattagctcatcgactccagattggagaactcgacaccatgaaggtgctgatcgttgcccttgctctcctggcgctcgctgcgagcgccgcctccagtacaagcggcggctgtggctgccagacaccaccgtttcatctaccgcctccgttctatatgccgcctccgttctatctgccgccgcagcagcagccgcagccatggcaataccccactcaaccaccgcagctaagcccgtgccagcagttcggatcctgcggcgtcggcagcgtcggcagcccgttcctgggccagtgcgtcgagttcctgaggcaccagtgcagcccggcggcgacgccctacggctcgccacagtgccaggcgctgcagcagcagtgctgccaccagatcaggcagg

SEQ ID NO: 343182 - DNA, 390 bp, Zea mays
cccacgcgtccgcaacaacctaacaacaatggctaccaagatattatccctccttgcgcttcttgcgctttttgcgagcgcaacaaatgcgttcattattccacaatgctcacttgctccaagttccattattacacagttccttccaccagttacttcaatgggcttcgaacacccagctgtgcaagcctataggctacaacaagcaattgcggcgagcgtcttacaacaaccaatttcccagttgcaacaacaatccttggcacatctaacaatacaaaccatcgcaacgcaacagcaacaacaattcctaccagctctgagccacctagccatggtgaactctgccggctacttgcaacagcagatgcttgcatcaaacccacttgc

SEQ ID NO: 343183 - DNA, 199 bp, Zea mays
agaccattagctttatctactccagagcgcagaagaacccgatcgacaccatgagggtgttgctcgttgccctcgctctcctggctctcgctgcgagcgccaccttcacgcatacaagcggcggctgcggctgccagccaccgacgccggttcatctaccgccgccggtgcatctgccaccttcgggtcacctgccacc

SEQ ID NO: 343184 - DNA, 415 bp, Zea mays
cgtcagcctagcaattagctcatcgactccagattggagaactcgacaccatgaaggtgctgatcgttgcccttgctctcctggcgctcgctgcgagcgccgcctccagtacaagcggcggctgtggctgccagacaccaccgtttcatctaccgcctccgttctatatgccgcctccgttctatctgccgccgcagcagcagccgcagccatggcaataccccactcaaccaccgcagctaagcccgtgccagcagttcggatcctgcggcgtcggcagcgtcggcagcccgttcctgggccagtgcgtcgagttcctgaggcaccagtgcagcccggcggcgacgccctacggctcgccacagtgccaggcgctgcagcagcagtgctgccaccagatcaggcaggtggagcc

SEQ ID NO: 343185 - DNA, 363 bp, Zea mays
  unsure (1)..(363): unsure at all n locations
cccacgcgtccgatgagggtgttgctcgttgccctcgctctcctggctctcgctgcgagcgccacctccacgcatacaagcggcggctgcggctgccagccaccgccgccggttcatctaccgccgccggtgcatctgccacctccggttcacctgccacctccggtgcatctcccaccgccggtccacctgccgccgccggtccacctgccaccgtcggtccatgtgccgccgccggttcatctgccgncgtcaccatgccactaccctactcaaccgccccggcctcagcctcatccccagccacacccatgcccgggccaacagccgcattcaagcccgtgccagcttgagggaacctgc

SEQ ID NO: 343186 - DNA, 411 bp, Zea mays
gagaccaactagcaacatagaaagcacaatagtgtaccaacaatggcagccaaaatattttgcctccttatgctccttggtctttctgcaagtgctgctacggcgaccattttcccgaaatgctcgcaagctcctatagcttcccttcttcccccgtacctctcaccagcggtgtcttcggtatgtgaaaacccaattcttcaaccctacaggatccaacaggcaatcacagctggcatcttacctttatcacccttgttcctccaacaatcatcagccctattacatcagttacctttggtgcatttattggcacaaaacatcagggcacaacaactacaacaacttgtgctagcaaaccttgctgcctactctcagcaacagcagtttcttccattcaaccaactagct

SEQ ID NO: 343187 - DNA, 322 bp, Zea mays
gctacatagacagaacaaccgagtaacagcattggcagccaaaatatttcgcgggcagattattgtgggtctttatgctacttgtgctacctgaacgatttgataacgctgcttatatgctaatatggttgtaaggtcttattcgataccttttatcagcggtgtgtttaatgcgcgaagacgcgcgtggttaaaaccacaagttagaacatgcaatgagcgcatgagtactaccaagatgacagttgctcctacaacacttggcacatctaacactacaaacccttgtagcgcattagcctcaacaaaacataatggcaca

SEQ ID NO: 343188 - DNA, 409 bp, Zea mays
  unsure (1)..(409): unsure at all n locations
cagaccattagctttatctactccagagcgcagaagaacccgatcgacaccatgagggtgttgctcgttgccctcgctctcctggctctcgctgcgagcgccacctccacgcatacaagcggcggctgcggctgccagccaccgccgccggttcatctaccgccgccggtgcatctgccacctccggttcacctgccacctccggtgcatctcccaccgccggtccacctgccgccgccggtccacctgccaccgccggtccatgtgccgccgccggttcatctgccgccgccaccatgccactaccctactcaaccgccccggcctcagcctcatccccagccacacccatgcccgtgccaacagccgcatncaagcccgtgccagctgcagggaacctgcggcgttg

SEQ ID NO: 343189 - DNA, 401 bp, Zea mays
gcaacatagaaagtggaatccagtagcaacaatagagcaacaatggagaccaagatattttccctccttatgctccttgctctttctacatgtgttgctaacgcgacaattttccctcaatgctcacaagctcctatagcttccctttttcccccataccttccatcaattatagcttcagtatgtgaaaacccagctcttcaaccatataggcttcaacaagcaatcgcagcaagcaacatacctttatcgcccttgttgtgtcaacaatcgccagccctatctttggtgcagtcattggtacaaaccatcagggcacaacagctgcagcaactcgtgctacctgtgatcaaccaagtagctctggcaaacctttctccctactctccgcaacaacaatt

SEQ ID NO: 343190 - DNA, 364 bp, Zea mays
  unsure (1)..(364): unsure at all n locations
gccttacttcatcaccagccgagggacacccgcggaaccgtcgctcgagctcgcgcctgaacccctcaaactctgccaaatttcggcaaacccagccggtcggacctcggaacacattgccaaaccaaccgggccggtcgacacaagccgcatcccgtggcgatggacctggcgttgagcgaccttgcggcgctggacgcggcggagctggtccgtgtatcggcgtagataccgcgcgcagatacgtgcacattctggctggtcaccggctgtctnagattcctgctgtgctagggcgtgctggcgcattggctctagagccagcccatactgatccgcatacaggtcgccacctactccgagc

SEQ ID NO: 343191 - DNA, 412 bp, Zea mays
caattagctcatcgactccagattggagaactcgacaccatgaaggtgctgatcgttgcccttgctctcctggcgctcgctgcgagcgccgcctccagtacaagcggcggctgtggctgccagacaccaccgtttcatctaccgcctccgttctatatgccgcctccgttctatctgccgccgcagcagcagccgcagccatggcaataccccactcaaccaccgcagctaagcccgtgccagcagttcggatcctgcggcgtcggcagcgtcggcagcccgttcctgggccagtgcgtcgagttcctgaggcaccagtgcagcccggcggcgacgccctacggctcgccacagtgccaggcgctgcagcagcagtgctgccaccagatcaggcaggtggagcccgtgcacc

SEQ ID NO: 343192 - DNA, 260 bp, Zea mays
catctagagaacattatctatatctacttaatagcgacgacgaacccgatcggcacggtgattgcgctgctggcgcggcttgctatcctgccatatcggtgcaagcgccacctgctcgtatacaactacccgctgacattgacagccaccgttctacgttcattttccgacgtcattgtatatgtagtttcccaagaagagcgctccatcaggttgtaagggagcacagttacctaagcacatagattccactctcagca

SEQ ID NO: 343193 - DNA, 97 bp, Zea mays
acttagtatgttttttgtcatgatacatgtttatacactgttgccccctcctttatgctattttgcaaaggagatgttgtcgaaattttatatatgg

SEQ ID NO: 343194 - DNA, 412 bp, Zea mays
agaaacacaccaagcgaagcgcactatcaacaacctaacaacaatggctaccaagatattagccctccttgcgcttcttgcccttttagtgagcgcaacaaatgcgttcattattccacagtgctcacttgctcctagtgccattattccacagttcctcccaccagttacttcaatgggcttcgaacatccagccgtgcaagcctacaggctacaactagcgcttgcggcgagcgtcttacaacaaccaattgcccaattgcaacaacaatccttggcacatctaaacctacaaaccatcgcaacgcaacagcaacaacagtttctgccatcactgagccacctagccgtggtgaaccctgtcgtctacttgcaacagcagctacttgcattcaacccacttgctctggcg

SEQ ID NO: 343195 - DNA, 74 bp, Zea mays
aatagatttggcagtgactgagcgaccgatccgtggggtaccttgtcttctactttcaacaggagcgacgtgta

SEQ ID NO: 343196 - DNA, 243 bp, Zea mays
agctcattaaatcaatatactagagatagcaactaaaccggttctaaaccatgcgcgtgttgttctgagacttggttatactggcatcttactgaacaagccgaatctaggcatacaagacgaaacagatccagccagccaccacaagactatataccgactccaagcaatgtgcctccaaagaactagtcacagtcgacgcaaggctccactcaaacacccgagctaaatcagcaccagcag

SEQ ID NO: 343197 - DNA, 417 bp, Zea mays
  unsure (1)..(417): unsure at all n locations
gtcttcagaccattagctttatctactccagagcgcagaagaacccgatcgacaccatgagggtgttgctcgttgccctcgctctcctggctctcgctgcgagcgccacctncacgcatacaagcggcggctgcggctgccagccaccgccgccggttcatctaccgccgccggtgcatctgccacctncggttcacctgccacctccggtgcatctcccaccgccggtccacctgccgccgccggtccacctgccaccgtcggtccatgtgccgccgccggttcatctgccgccgccaccatgccactaccctactcaaccgccccggcctcagcctcatccccagccacacccatgcccgtgccaacagccgcatccaagcccgtgccagctgcagggaacctgcggcgttggca

SEQ ID NO: 343198 - DNA, 416 bp, Zea mays
  unsure (1)..(416): unsure at all n locations
agaccattagctttatctactccagagcgcagaagaacccgatcgacaccatgagggtgttgctcgttgccctcgctctcctggctctcgctgcgagcgccacctccacgcatacaagcggcggctgcggctgccagccaccgccgccggttcatctaccgccgccggtgcatctgccacctccggttcacctgccacctccggtgcatcttccaccgccggtccacctgccgccgccggtccacctgccaccgccggtccatgtgccgccgccggttcatctgccgccgccaccatgccactaccctactcaaccgccccggcctcagcctcatccccagccacacccatgcccgtgccaacagccgcatncaagcccgtgccagctgcagggaacctgcggcgttggcagcacc

SEQ ID NO: 343199 - DNA, 415 bp, Zea mays
ctagcaacatagaaagcacaatagtgtaccaacaatggcagccaaaatattttgcctccttatgctccttggtctttctgcaagtgctgctacggcgaccattttcccgcaatgctcgcaagctcctatagcttcccttcttcccccgtacctctcaccagcggtgtcttcggtatgtgaaaacccaattcttcaaccctacaggatccaacaggcaatcgcagctggcatcttacctttatcacccttgttcctccaacaatcatcagccctattacaacagttacctttggtgcatttattggcacaaaacatcagggcacaacaactacaacaacttgtgctagcaaaccttgctgcctactctcagcaacagcagtttcttccattcaaccaactaggttcattgaactct

SEQ ID NO: 343200 - DNA, 388 bp, Zea mays
  unsure (1)..(388): unsure at all n locations
cagaccattagctttatctactccagagcgcagaagaacccgatcgacaccatgagggtgttgctcgttgccctcgctctcctggctctcgctgcgagcgccacctccacgcatacaagcggcggctgcggctgccagccaccgccgtcggttcatctaccgccgccggtgcatctgccacctccggttcacctgccacctccggtgcatctaccaccgccggtccacctgccgacgccggtccacctgccaccgccggtccatgtgccgccgacggatcatctgccgtcgtcaccatgccactaccctactcaaccgccccgagctcagacttatnctcaggcacacccatgcccgtgccaacagtcagatacaagcccgtgccaga

SEQ ID NO: 343201 - DNA, 216 bp, Zea mays
ccaagctcaaaaaagcgccgccaggcgccaatgtagcagccacgacagcaagaggttgtcgccggctgccttcgcttttatggcgcgtatagccagaccgcgcatcagcagtaccggccgcgcaggcccggggaggggtgctggcgcgggggcagtggaccgccatgctgacagttggaagtcgcggggggcgtgagggagggctctcgtggggaa

SEQ ID NO: 343202 - DNA, 189 bp, Zea mays
ctagttctagatcgcgagcggacgactttttttttattattttctatagagggacattttaatcaatatagtgattattttctaataatcacatgtcttattgagtgcaccattatcgagtacatcttatattaagtctaaaagttggcatctataatcttgtgttgctagattgacaattcaggtttg

SEQ ID NO: 343203 - DNA, 410 bp, Zea mays
ggtcttgagaccatgcgctctatctacttcagagcgcagaagaacccgatcgacaccatgagggtgttgctcgttgccctcgctctcctggctctcgctgcgagcgccacctccacgcatacaagcggcggctgcggctgccagccaccgccgccggttcatctaccgccgccggtgcatctgccacctccggttcacctgccacctccggtgcatcttccaccgccggtccacctgccgtcgccggtccacctgccaccgtcggttcatgtgccgccggcggttcatctgccgacgccaccatgccactaccctactcaaccgccccggactgagccttatccccagtcacacccatgcccgtgccaacaggcgcattcaagcccgtgccagctggagggaacctgcgg

SEQ ID NO: 343204 - DNA, 400 bp, Zea mays
  unsure (1)..(400): unsure at all n locations
cagaccattagctttatctactccagagcgcagaagaacccgatcgacaccatgagggtgttgctcgttgccctcgctctcctggctctcgctgcgagcgccacctccacgcatacaagcggcggctgcggctgccagccaccgccgccggttcatctaccgccgccggtgcatctgccacctccggttcacctgccacctccggtgcatctcccaccgccggtccacctgccgtcgccggtccacctgccaccgccggtccatgtgccgccgccggttcatctgccgncgccaccatgccactaccctactcaaccgccccggcctcagcctcatccccagccacacccatgcccgtgccaacagccgcatncaagcccgtgccagctgcagggaacct

SEQ ID NO: 343205 - DNA, 419 bp, Zea mays
caaatgcgttcattattccacaatgctcacttgctcctagtgccattattccacagttcctcccaccagttacttcaatgggcttcgaacacctagctgtgcaagccaacatgcaacaacaagcgcttgcggcgagcgtcttacaacaaccaattgcccaattgcaacaacaatccttgccacatctaacaatacaagccatcacaacgcaacagcaacaacagttcctaccagcactgagccacctagccatggtgaaccctgccgcctacttgcaagagcagctgcttgcatccaacccacttgctctggcgaacgtagttgcaaaccagcaacaacaacagctacaacagtttctgccaacgctcagtcaactagccatggtgaaccctgccgcctacgtacaacaacaacaactg

SEQ ID NO: 343206 - DNA, 412 bp, Zea mays
ttgagaccaactagcaacatagaaagcacaatagtgtaccaacaatggcagccaaaatattttgcttccttatgctccttggtctttctgcaagtgttgctaccgcaaccattttcccacaatgctcacaagctcctatagcttcccttcttcccccatacctctcaccagcggtgtcttcaatgtgtgaaaacccaattgttcaaccctacaggatccaacaggcaatcgcaacaggcatcttaccattatcacccttgttcctccaacaaccgtcagccctattacagcagttacctttggtccatttggtggcacaaaacatcagggcacaacaactacaacaacttgtgctagcaaaccttgctgcatactctcagcaacatcagtttcttccattcaaccaactggc

SEQ ID NO: 343207 - DNA, 266 bp, Zea mays
agaccattagctttatctactccagagcgcagaagaacccgatcgacaccatgagggtgttgctcgttgccctcgctctcctggctctcgctgcgagcgccacctccacgcatacaagcggcggctgcggctgccagccaccgccgccggttcatctaccgccgccggtgcatctgccacctccggttcacctgccaccttcggtgcatctcccaccgccggtccacctgtcgccggcggtccacctgccatcgtcgttccatgtg

SEQ ID NO: 343208 - DNA, 403 bp, Zea mays
caagcaacatagaaagtggaatccagtagcaacaatagagcaacaatggcgaccaagatattttccctccttatgctccttgctctttctgcatgtgttgctaacgcgacaattttccctcaatgctcacaagctcctatagcttcccttcttcccccataccttccatcaatgatagcttcagtatgtgaaaacccagctcttcaaccctataggctccaacaagcaatcgcagcaagcaacatacctttatcacccttgtttcaacaatcgccagccctatctttggtgcagtcattggtacaaaccatcagggcacagcagctgcagcaactcgtgctacctgtgatcaaccaagtagctctggcaaacctttttccctactctcagcaacaacaatttc

SEQ ID NO: 343209 - DNA, 413 bp, Zea mays
  unsure (1)..(413): unsure at all n locations
attttgagcattcagaaacacaccaagcgaagcacattagcaacaacctaacaacaatggctaccaagatattatccctccttgcgcttcttgcgctttttgcgagcgcaacaaatgcgttcattattccacaatgctcacttgctccaagttccattattacacagttcctcccaccagttacttcaatgggcttcgaacacccagctgtgcaagcctataggctacaacaagcaattgcggcgagcgtcttacaacaaccaatttcccagttgcaacaacaatccttggcacatctaacaatacaaaccatcgcaacgcaacagcaacaacaattcctaccagcactgagccacctagccatggtgaaccctgccgnctacttgcaacagcagttgcttgcatcaaaccca

SEQ ID NO: 343210 - DNA, 417 bp, Zea mays
gcaacatagaaagtggaatccagtagcaacaatagagcaacaatggcgaccaagatattttccctccttatgctccttgctctttctgcatgtgttgctaacgcgacaattttccctcaatgctcacaagctcctatagcttcccttcttcccccataccttccatcaatgatagcttcagtatgtgaaaacccagctcttcaaccctataggctccaacaagcaatcgcagcaagcaacatacctttatcacccttgtttcaacaatcgccagccctatctttggtgcagtcattggtacaaaccatcagggcacagcagctgcagcaactcgtgctacctgtgatcaaccaagtagctctggcaaacctttctccctactctcagcaacaacaatttcttccattcaaccaactg

SEQ ID NO: 343211 - DNA, 382 bp, Zea mays
attttgagcattgagaaacacaccaagcgaagcgcactagcaacaacctaacaacaatggctaccaagatattatccctccttgcgcttcttgcgctttttgcgagcgcaacaaatgcgttcattattccacaatgctcacttgctcctagttccattattccacagatccttcgaccaggtacttgaatggccttcgaacacccagctgtgcaagcctataggctacaacaagcgattgcggcgagcgtcttacaacaaccaattgtccaatggcaacaacaatgcttggcacatgtaacaatacataccatcgcaacgcatcagcaacaacagtttctaccagcactgagccacctagccatggtgaaccctgtcgtcta

SEQ ID NO: 343212 - DNA, 355 bp, Zea mays
  unsure (1)..(355): unsure at all n locations
agaccattagctttatctactccagagcgcagaagaacccgatcgacaccatgagggtgttgctcgttgccctcgctctcctggctctcgctgcgagcgccacctccacgcatacaagcggcggctgcggctgccagccaccgccgccggttcatctaccgccgccggtgcatctgccaccttcggttcacctgccacctccggtgcatctcccaccgccggtccacctgccgncgccggtccacctgccaccgccggtccatgtgccgccgccggttcatctgccgccgncaccatgccactaccctactcaaccgccccggccttaacctcatcctcagccacacccatgccc

SEQ ID NO: 343213 - DNA, 337 bp, Zea mays
gcaccttctgcttgctctgcggggaaggagagagagagagagccagcgagagatctagtaaagtggctagtacgtatgctcttgaacgaagatgttggcggtgtttaccggcctactggtggatgatactgatgagctgctatagctgcgcttcatttcgcctaccttcaatatatgaccgtttcagtttgtgagaacctatctgttcatctctacacgctccaacacgtgatagcatcaagccactgaccacgatcactactgttatatcaacaatggactgctctatcttaggtgcatacattgctacaaaccatgatggtacatcagctggagc

SEQ ID NO: 343214 - DNA, 404 bp, Zea mays
agaaagcacaatagtgtaccaacaatggcagccaaaatattttgcttccttatgctccttggtctttctgcaagtgttgctaccgcaaccattttcccacaatgctcacaagctcctatagcttcccttcttcccccatacctctcaccagcggtgtcttcaatgtgtgaaaacccaattgttcaaccctacaggatccaacaggcaatcgcaacaggcatcttaccattatcacccttgttcctccaacaaccgtcagccctattacagcagttacctttggtccatttggtggcacaaaacatcagggcacaacaactacaacaacttgtgctagcaaaccttgctgcatactctcagcaacatcagtttcttccattcaaccaactggctgcattgaactc

SEQ ID NO: 343215 - DNA, 370 bp, Zea mays
  unsure (1)..(370): unsure at all n locations
gatcagcaaagcggcagtgcgtagagaggatcgtcgaacagaacagcatgaagatggtcatcgttctcgtcgtgtgcctggctctgtcagctgccagcgcctctgcaatgcagatgccctgcccctgcgcggggctgcagggcttgtacggcgctggcgccggcctgacgacgatgatgggcgccggcgggctgtacccctacgcggagtacctgaggcagccgcagtgcagcccgctggcggcggcgccctactacgccgggtgtgggcagacgagcgccatgtaccagccgttccggcaacagtgctgncagcagcagatgaagatgatggacgtgcagtccgtcgcgcagcagctgcagatgatgat

SEQ ID NO: 343216 - DNA, 386 bp, Zea mays
gagaccaactagcaacatagaaagcacaatagtgtaccaacaatggcagccaaaatattttgcttccttatgctccttggtctttctgcaagtgctgctaccgcaaccattttcccacaatgctcacaagctcctatagcttcctttcttgccccatacctctcaccagcggtgtcttcagtatgtgaaaacccaattcttcaaccctacaggatccaacaggcaatcgcagcaggcatcttacctttatcacccttgttcctccaacaaccgtcagccctattacagcagttacctttggtgcatttgttggcacaaaacatcaaggcacaacaactacaacaacttgtgctaggaaaccttgctgcctactctcagcaacagca

SEQ ID NO: 343217 - DNA, 261 bp, Zea mays
ctgggtcttcagaccattagctttatctactccagagcgcagaagaacccgatcgacaccatgagggtgttgctcgttgccctcgctctcctggctctcgctgcgagcgccaccttcacgcatacaagcggcggctgcggctgccagccaccgccgccggttcatttaccgccgccggtgcatctgccacctccggttcacctgccaccttcggtgcatctgccaccgtttgtacgaattgatgtcttcggaccactttgt

SEQ ID NO: 343218 - DNA, 354 bp, Zea mays
caacaagcaacatagaaagtggaatccagtagcaacaatagagcaacaatggcgaccaagatattttccctccttatgctccttgctctttctgcatgtgttgctaacgcgacaattttccctcaatgctcacaagctcctatagcttcccttcttcccccataccttccatcaatgatagcttcagtatgtgaaaacccagctcttcaaccctataggctccaacaagcaatcgcagcaagcaacatacctttatcacccttgtttcaacaatcgccagccctatctttggtgcagtcattggtacaaaccatcagggcacagcagctgcagcaactcgtgctacctgtgatc

SEQ ID NO: 343219 - DNA, 97 bp, Zea mays
  unsure (1)..(97): unsure at all n locations
ccggncggaatccgggtcgacccagcgnccgctgggaggnnagaccaagagcgngagcgacgcgagagcgcaaaagaacccgagcgacaccangagg

SEQ ID NO: 343220 - DNA, 395 bp, Zea mays
  unsure (1)..(395): unsure at all n locations
attattgagaccaactagcaacatagaaagcacagtagtgtaccaacaatggcagccaaaatattttgcttccttatgctccttggtctttctgcaagtgttgctaccgcaaccattttcccacaatgctcacaagctcctatagcttcccttcttcccccatacctctcaccagcggtgtcttcaatgtgtgaaaacccaattgttcaaccctacaggatccaacaggcaatcgcaacaggcatcttaccattatcacccttgttcctccaacaaccgtcagccctattacagcagttacctttggtccatttggtggcacaaaacatcagggcacaacaactacaacaactngtgctagcaaaccttgctgcatactctcagcaacatcagtt

SEQ ID NO: 343221 - DNA, 177 bp, Zea mays
tgccacctccggtgcatctcccaccactgggtcttcagaccattagctttatctactccagagcgcagaagaacccgatcgacaccatgagggtgttgctcgttgccctcgctctcctggctctcgctgcgagcgccacctccacgcatacaagcggcggctgcggctgccagccac

SEQ ID NO: 343222 - DNA, 323 bp, Zea mays
gcattcataaacacaccaagcgaagcgcactagcaacgacctaacaacaagggctaccaagatattagccctccttgcgcttcttgccctttttgtgagcgcaacaaatgcgttcattattccacaatgctcacttgctcctagtgccattattccacagttcctcccaccagttacttcaatgggcttcgaacacctagctgtgcaagccaacatgcaacaacaagcgcttgcggcgagcgttttacaacaaccaattgcccaattggaacaacaattcttgccacatttaacaaatcaagccattacaacgcaacagcaac

SEQ ID NO: 343223 - DNA, 346 bp, Zea mays
attgagaccaactagcaacatagaaagcacaatagtgtaccaacaatggcagccaaaatattttgcctccttatgctccttggtctttctgcaagtgctgctacggcgaccattttcccgaaatgctcgcaagctcctatagcttcctttcttcccccgtacctctcaccagcggtgtcttcggtatgtgaaaacccaattcttcaaccctacaggatccaacaggcaatcacagctggcatcttacctttatcacccttgttcctccaacaatcatcagccctattacatcagttacctttggtgcatttattggcacaaaacattagggcacaacaactacaac

SEQ ID NO: 343224 - DNA, 170 bp, Zea mays
aaaacattaactctatatgattcatttttcagaagcaccaggcagatgacaggaggtacttgtgggacgccaacaactcttcatggctcattactgcgagcgatcattttgagcatatacaaggctgtaggatgttaaatgtaataacacccgacgatgtatttattgta

SEQ ID NO: 343225 - DNA, 270 bp, Zea mays
gcgcttgcggcgagcgtcttacaacaaccaattaaccaattgcaacaacaatccttggcacatctaaccatacaaaccatcgcaacacaacagcaacaacagttcctaccagcactgagccaactagatgtggtgaaccctgtcgcctacttgcaacagcaggtgcttgcattcaacccacttgctctggcaaacgtagctgcataccaacaacaacaacaattgcaacagtttctgccagcgctcaatcaactagccatggtgaaccct

SEQ ID NO: 343226 - DNA, 418 bp, Zea mays
  unsure (1)..(418): unsure at all n locations
caactagcaacatagaaagcacaatagtgtaccaacaatggcagccaaaatattttgcctccttatgctccttggtatttctgcaagtgctgctacggcgaccattttcccgcaatgctcacaagctcctatagcttcccttcttcccccgtacctctcaccagcggtgtcttcggtatgtgaaaacccaattcttcaaccctacaggatccaacaggcaatcgcagctggcatcttacctttatcacccttgttcctccaacaatcatcagccctattacagcagttacctttggtgcatttattggcacanaacatcagggcacaacaactacaacaacttgtgctagcaaaccttgctgnctactctcagcaacagcagtttctttcattcaaccaactagctgcattgaactct

SEQ ID NO: 343227 - DNA, 414 bp, Zea mays
  unsure (1)..(414): unsure at all n locations
tagcaacatagaaagcacaatagtgtaccaacaatggcagccaaaatattttgcctccttatgctccttggtctttctgcaagtgctgctacggcgaccattttcccgcaatgctcgcaagctcctatagcttcccttcttcccccgtacctctcaccagcggtgtcttcggtatgtgaaaacccaattcttcaaccctacaggatccaacaggcaatcgcagctggcatcttacctttatcacccttgttcctccaacaatcatcagccctattacaacagttacctttggtgcatttattggcacanaacatcagggcacaacaactacaacaacttgtgctagcaaaccttgctgtctactctcagcaacagcaggttcttccattcaaccaactagggtcattgaactct

SEQ ID NO: 343228 - DNA, 204 bp, Zea mays
ctcatcccggcgccaggagagccgcctcggtcggttcgtttacgatcccagatctgctctcgtacgagcgttctcggcgggtgttcgctcgcgaggcgcagcgtgccacgttcactgagagcttcgagaagctgaaatggctgctaaagctgctcccgccaagaagcgtgatgccaccacccatgccttgaaggttgccaatgc

SEQ ID NO: 343229 - DNA, 361 bp, Zea mays
gaccaactagcaacatagaaagcacaatagtgtaccaacaatggcagccaaaatattttgcttccttatgctccttgggctttctgcaagtgctgctaccgcaaccattttcccacaatgctcacaagctgctatagcttcctttcttgccccatacctctcaccagcggtgtcttcagtatgtgaaaacccaattcttcaaccctacaggatccaacaggcaatcgcagcaggcatcttacctttatcacccttgttactccaacaaccgtcagccctattacagcagttacctttggtgcatttgttggcacagaacattaaggcacaacatctacaacaacttgtgctaggaaacctt

SEQ ID NO: 343230 - DNA, 366 bp, Zea mays
atcgagaccaactagcaacatagaaagcacaatagtgtaccaacaatggcagccaaaatattttgcctccttatgctccttggtctttctgcaagtgctgttacggcgaccatttttccgaaatgctcgcaagctcctatagcttcccttcttgccccgtacctgtgaccagcggtgtgttcggtatgtgaaaacccaattctttaaccctacaggatccaacaggcaatcacagatggcatcttacctttatcacccttgttcctacaacaatcatcagccctattacatcagttacctttggtgcatttattggcacaaaacatcagggcacaacaactacaacaacttgtgctagcaaacctt

SEQ ID NO: 343231 - DNA, 138 bp, Zea mays
cgctcgtctgcccacacccggcgtagtagggcgccatgtaccagccgctccggcaacagtgctgccagcagcagatgaggatgatggacgtgcagtccgtcgcgcagcaactggagatgatgatgcagcttgagcgtg

SEQ ID NO: 343232 - DNA, 68 bp, Zea mays
atgacatactctgttgcagatgtgtaatgcgagaggacgaccgtcgccatacgacagtggcagctgat

SEQ ID NO: 343233 - DNA, 316 bp, Zea mays
gtgctaggaaaccttgctgcctactctcagcaacagcagtttcttccattcaaccaactggctgcattgaactctgctgcttatttgcaacaacaactaccattcagtcagctagctgctgcctacccccagcaatttcttccattcaaccaactggcagcattgaactctgctgcttatttacaacagcaacagctaccaccattcagccagctagctgatgtgagccctgttgccttcttgacacaacaacagttgttgccgttctacctgcacgctgcgcctaacgctggcaccctcttacaactgcaacaat

SEQ ID NO: 343234 - DNA, 335 bp, Zea mays
aaagcacaatagtgtaccaacaatggcagccaaaatattttgcctccttatgctccttggtatttctgcaagtgctgctacggcgaccattttcccgcaatgctcacaagctcctatagcttcccttcttcccccgtacctctcaccagcggtgtcttcggtatgtgaaaacccaattcttcaaccctacaggatccaacaggcaatcgcagctggcatcttacctttatcacccttgttcctccaacaatcatcagccctattacagcagttacctttggtgcatttattggcacaaaacatcaaggcacaacaactacaacaacttgtgctag

SEQ ID NO: 343235 - DNA, 392 bp, Zea mays
  unsure (1)..(392): unsure at all n locations
actgggtcttcagaccattagctttatctactccagagcgcagaagaacccgatcgacaccatgagggtgttgctcgttgccctcgctctcctggctctcgctgcgagcgccacctccacgcatacaagcggcggctgcggctgccagccaccgccgccggttcatctaccgccgccggtgcatctgccacctccggttcacctgccacctccggtgcatctcccaccgccggtccacctgccgtcgtcggtccacctgccaccgtcggtccatgtgccgccgccggttcatctgccgncgccaccatgccactaccctactcaaccgncccggncttagcctcattctcagccacacccatgcccgtgccaacagtcgcatncaagcccgt

SEQ ID NO: 343236 - DNA, 384 bp, Zea mays
attcagaaacacaccaagcgaagcgcactagtaacaacctaacaacaatggctaccaagatattagccctccttgcgcttcttgcccttttagtgagcgcaacaaatgcgttcattattacacagtgctcacttgctcctagtgccattattccacagttgcttccaccagttacttcaatgggcttcgaacatccagccgagcaagcctacaggctacaactagcgcttgcggcgagcgtcttacaacaaccaattgcccaattgcaacaacaatgcttggcacatctaaacctacaaaccatcgcaacgcaacagcaacaacagtttctgccatcactgagccacctagccgtggtgaaccctgtcgcctacttgcaacagc

SEQ ID NO: 343237 - DNA, 173 bp, Zea mays
atcacacacgaacaaccccactaccggcagggaggccctcttgtctatcgggccatggttcgctcagccgagaagaggctagccgcgggagctcttaacagtggcaaggagacggcgtggttcgaccccacctaggtctacctgatctcgacggccaactcgagtcagaacat

SEQ ID NO: 343238 - DNA, 337 bp, Zea mays
ggcaatcacagctggcatcttacctttatcacccttgttcctccaacaatcatcaggcctattacatcagttacctttggtgcatttattggcacaaaacatcagggcacaacaactacaacaacttgtgctagcaaaccttgctgcctactctcagcaacagcagtttcttccattcaaccaactagctgcattgaactctgcttcttatttgcaacaacaacaactaccattcaggcagctacctgctgcctacccccagcaatttctttcattcaaccaactggcagcattgaactctcctgcttatttacagcagcaacaactactaccattc

SEQ ID NO: 343239 - DNA, 351 bp, Zea mays
  unsure (1)..(351): unsure at all n locations
gcaacatagaaagcacaatagtgtaccaacaatggcagccaaaatattttgcctccttatgctccttggtatttctgcaagtgctgctacggcgaccattttcccgcaatgctcacaagctcctatagcttcccttcttcccccgtacctctcaccagcggtgtcttcggtatgtgaaaacccaatttttcaaccctacaggatccaacaggcaatcgcagctggcatcttacctttatcacccttgttcctccaacaatcatcagccctattacagcaggtacctttggtgcatttattggcacanaacatcatggcacaacaactacaacaacttgtgctagcaaacct

SEQ ID NO: 343240 - DNA, 253 bp, Zea mays
attagaaacacaccaagcgaagcgcactagcaacaacctaacaacaatggctaccaagatattagccctccttgcgcttcttgcccttttagtgagcgcaacaaatgcgttcattattccacagtgctcacttgctcctagtgccattattccacagttcctcccaccagttacttcaatgggcttcgaacatccagccgtgcaagcctacaggctacaactagcgcttgcggcgagcgtcttacaacaacca

SEQ ID NO: 343241 - DNA, 304 bp, Zea mays
tttcagtattgagaaacacaccaagcgaagcgcactagcaacaacctaacaacagtggctaccaagatattagccctccttgcgctttttgcccttttagtgagcgcaacaaatgcgttcattattgcacagtgctcacttgctcctagtgccattatttcacagttcctcccaccagatacttcaatgggcttcgaacattcagccgcgcaagcctacaggctacaactagcgcttgcggcgagcgtcttacaacaaccaattgcccaattgcaacaacaatccttggcacatttaaacctac

SEQ ID NO: 343242 - DNA, 388 bp, Zea mays
agcaacatacctttatcgcccttgttgtgtcaacaatcgccagccctatctttggtgcagtcattggtacaaaccatcagggcacaacagctgcagcaactcgtgctacctgtgatcaaccaagtagctctggcaaacctttctccctactctccgcaacaacaatttcttccattcaaccaactgtctacactgaaccctgctgcttatttgcagcaacaactattaccatttagccagctagctactgcctactctcaacaacaacaacttcttccatttaaccaattggccgcactgaaccccgctgcttatttgcagcagcaaatactactaccatttagccagctagctacagcaagccgtgcttccttcttgacacaacaac

SEQ ID NO: 343243 - DNA, 103 bp, Zea mays
agcaagctcactagagcgcccacagtgggtgaccaaatatcaggcctacttatgctgcatggactgtgtgcaagcgctgatgcgcagaccattttgccacaat

SEQ ID NO: 343244 - DNA, 197 bp, Zea mays
gcagcatagaaagcacaatagtgtaccaacactggcagccaaaatattctgcttccttatgctccttggtctttctgcaagtgctgctaccgcaaccattttcccacaatgctcacaagctcctatagcttgccttctttccccatacctctcaccagcggtgtctttaatgtgtgaaaacccaattgttcaaccct

SEQ ID NO: 343245 - DNA, 413 bp, Zea mays
gcaacatataaagcacaatagtgtaccaacattggcagccaaaatattttgcttccttatgctccttgggctttctgcaagtgctgctaccgcaaccattttcccacaatgctcacaagctcctatagcttcccttcttcccccatacctctcaccagtggtgtctttaatgtgtgaaaacccaattgttcaaccctacaggatccaacaggcaatcgcaacatgcatcttaccattatcacccttgttccttcaacaaccgtcagtcctattacagcagttacctttggttcatttggtggcacaaaacatcatggcacaacaactacaacaacttgtgctagcaaaccctgctgcttacttttagcaacatgtagtttttttcattcaaccaactggctgcattgaactct

SEQ ID NO: 343246 - DNA, 398 bp, Zea mays
cagcctagcaattagctcatcgactccagattggagaactcgacaccatgaaggtgctgatcgttgcccttgctctcctggcgctcgctgcgagcgccgcctccagtacaagcggcggctgtggctgccagacaccaccgtttcatctaccgcctccgttctatatgccgcctccgttctatctgccgccgcagcagcagccgcagccatggcaataccccactcaaccaccgcagctaagcccgtgccagcagatcggatcctgcggcgtcggcagcgtcggcagcccgttcctgggccagtgcgtcgagttcctgaggcaccagtgcagcccggcggcgacgccctacggctcgccacagtgccaggcgctgcagcagcagtgctgccaccagatc

SEQ ID NO: 343247 - DNA, 62 bp, Zea mays
tcggtacacaccacgcaccatacatttgctccatggttttatcacaggttactaagagacta

SEQ ID NO: 343248 - DNA, 390 bp, Zea mays
cccacgcgtccgtagcaacatagaaagcacaatagtgtaccaacaatggcagccaaaatattttgcctccttatgctccttggtctttctgcaagtgctgctacggcgaccattttcccacaatgctcacaagctcctatagctttccttcttcccccgtacctctcaccagcggtgtcttcggtatgtgaaaacccaattcttcaaccctataggatccaacaggcaatcgcagctggcatcttacctttatcacccttgttcctccaacaatcatcagccctattacagcagttacctttggtgcatttattggcacaaaacatcagggcacaacaactacaacaacttgtgctagcaaaccttgctgtctactctcaacaacaacag

SEQ ID NO: 343249 - DNA, 320 bp, Zea mays
  unsure (1)..(320): unsure at all n locations
ggtcttcagaccattagctttatctactccagagcgcagaagaacccgatcgacaccatgagggtgttgctcgttgccctcgctctcctggctctcgctgcgagcgccacctccacgcatacaagcggcggctgcggctgccagccaccgccgccggttcatctaccgccgccggtgcatctgccaccttcggttcacctgccacctgcggtgcatattccaccgtcggaccacctgccggcgccggttcacctgccacacgcggttcatgtgccgccagcggttcatttgtcgtcgncaccatgccactaccctactta

SEQ ID NO: 343250 - DNA, 364 bp, Zea mays
attttgagcattcagaaacacaccaagcgaagcgcactagcaacaacctaacaacaatggctaccaagatattatccctccttgcgcttcttgcgctttttgcgagcgcaacaaatgcgtccattattccacaatgctcacttgctcctagttccattattccacagttcctcccaccagttacttcaatggccttcgaacacccagctgtgcaagcctataggctacaacaagcgattgcggcgagcgtcttacaacaaccaattgcccaattgcaacaacaattcttggcacatctaacaatacaaaccatcggaacgcaacagcaacaacagtttctaccagcactgagccacctagccat

SEQ ID NO: 343251 - DNA, 412 bp, Zea mays
attgagaccaacaagcaacatagaaagtggaatccagtagcaacaatagagcaacaatggcgaccaagatattttccctccttatgctccttgctctttctgcatgtgttgctaacgcgacaattttccctcaatgctcacaagctcctatagcttcccttcttcccccataccttccatcaatgatagcttcagtatgtgaaaacccagctcttcaaccctataggctccaacaagcaatcgcagcaagcaacatacctttatcacccttgtttcaacaatcgccagccctatctttggtgcagtcattggtacaaaccatcagggcacagcagctgcagcaactcgtgctacctgtgatcaaccaagtagctctggcaaacctttctccctactctcagcaacaacaatt

SEQ ID NO: 343252 - DNA, 322 bp, Zea mays
cggacgcgtgggcggacgcgtgggttagctttatctactccagagcgcagaagaacccgatcgacaccatgagggtgttgctcgttgccctcgctctcctggctctcgctgcgagcgccaccttcacgcatacaagcggcgggtgcggctgtcagccaccgccgccggttcatctaccgccgacggtgcatctgccacctccggttcacctgccacctccggtgcatcttccaccgccggtccacctgccgccgccggttcacctgccaccgtcggtccatgtgccgtcgccggatatctgtcgccgcaccatggcactacc

SEQ ID NO: 343253 - DNA, 201 bp, Zea mays
gtgatgctagggcggcagccggcgaggtagtggataccatgtcaccgtcgctggcttccaagaacacacttatgatcatgcgcttcaagattccgaccgactggccttatgatgaccacgtgcgcactaaggaaacgctgatttgtcccagacttatgcactagctaaggatgatgctcttggcagctttcgagattacgg

SEQ ID NO: 343254 - DNA, 417 bp, Zea mays
caactagcaacatagaaagcacaatagtgtaccaacaatggcagccaaaatattttgcctccttatgctccttggtatttctgcaagtgctgctacggcgaccattttcccgcaatgctcacaagctcctatagcttcccttcttcccccgtacctctcaccagcggtgtcttcggtatgtgaaaacccaattcttcaaccctacaggatccaacaggcaatcgcagctggcatcttacctttatcacccttgttcctccaacaatcatcagccctattacagcagttacctttggtgcatttattggcacaaaacatcagggcacaacaactacaacaacttgtgctagcaaaccttgctgcctactctcagcaacagcagtttcttccattcaaccaactagctgcattgaactc

SEQ ID NO: 343255 - DNA, 393 bp, Zea mays
attgagaccaactagcaacatagaaagcacaatagtgtaccaacaatggcagccaaaatattttgcttccttatgctccttggtctttctgcaagtgttgctaccgcaaccattttcccacaatgctcacaagctcctatagcttcccttcttcccccatacctctcaccagcggtgtcttcaatgtgtgaaaacccaattgttcaaccctacaggatccaacaggcaatcgcaacaggcattttaccattatcacccttgttccttcaacaaccgtcagccctattacagcagttacctttggtccatttggtggcacaaaacatcagggcacaacaactacaacaacttgtgctagcaaaccttgctgcatactctcagcaacatcagttt

SEQ ID NO: 343256 - DNA, 359 bp, Zea mays
attttcagcattcagaaacacaccaagcgaagcgcactagcaacaacctaacaacaatggctaccaagatattagccctccttgcgcttcttgcccttttagtgagcgcaacaaatgcgttcattattacacagtgctcacttgctcctagtgccattattccacagatcctcccaccagttacttcaatgggcttcgaacattcagccgtgcaagcctacaggctacaactagcgcttgcggcgagcgttttacaacaaccaattgcccaattgcaacaacaattcttggcacatctaaacctacaaaccatcgcaacgcaacagcaacaacagtttctgccatcactgagccaccta

SEQ ID NO: 343257 - DNA, 406 bp, Zea mays
catctagcaacatagaaagcacaatagtgtaccaacaatggcagccaaaatatttcgcctcgcttatgctccttggtatttctgcaagtgctgctacagcgaccattttcccgcaatgctcacaagctcctatagcttcccttcttcccccgtacctctcaccagcggtgtcttcggtatgtgaaaacccaattcttcaaccctacaggatccaacaggcaatcgcagctggcatcttacctttatcacccttgttcctccaacaatcatcagccctattacagcagttacctttggtgcatttattggcacaaaacatcaaggcacaacaactacaacaacttgtgctagcaaaccttgctgcctactctcagcaacagcagtttcttccattcaaccaactagc

SEQ ID NO: 343258 - DNA, 365 bp, Zea mays
  unsure (1)..(365): unsure at all n locations
caacaagcaacatagaaagtggaatccagtagcaacaatagagcaacaatggcgaccaagatattttccctccttatgctccttgctctttctgcatgtgttgctaacgcgacaattttccctcaatgctcacaagctcctatagcttcccttcttcccccataccttncatcaatgatagcttcagtatgtgaaaacccagctcttcaaccctataggctccaacaagcaatcgcagcaagcaacatacctttatcacccttgtttcaacaatcgccagccctatctttggtgcagtcattggtacaaaccatcagggcacagcagctgcagcaactcgtgctacctgtgatcaaccaagtagc

SEQ ID NO: 343259 - DNA, 353 bp, Zea mays
attgagaccaactagcaacatagaaagcacaatagtgtaccaacaatggcagccaaaatattttgcttccttatgctccttggtctttctgcaagtgttgctaccgcaaccatttttccacaatgctcacaagctcctatagcttcccttcttcccccatacctctcaccagcggtgtcttcaatgtgtgaaaacccaattgttcaaccctacaggatccaacaggcaatcgcaacaggcatcttaccattatcacccttgttgcttcaacaaccgtcagccctattacagcagttacctttggtccatttggtggcacaaaacattagggcacaacaactacaacaacttgt

SEQ ID NO: 343260 - DNA, 405 bp, Zea mays
gggcacaacaactacaacaacttgtgctagcaaaccttgctgcctactctcagcaacagcagtttcttccattcaaccaactagctgcattgaactctgcttcttatttgcaacaacaacaactaccattcagccagctacctgctgcctacccccagcaatttcttccattcaaccaactggcagcattgaactctcctgcttatttacagcagcaacaactactaccattcagccagctagctggtgtgagccctgctaccttcttgatacaaccacagttgttgccgttctaccagcacgctgcgcctaacgctggcacccttttacaactgcaacaattgctgccattcaaccaacttgctttgacaaacccagcagcgttctaccaacaacccatcattg

SEQ ID NO: 343261 - DNA, 178 bp, Zea mays
atccaatttaaacgcgcgcgtctgctttagtgtatctatgtttaccgacccaagcttgcgacgccaatctaattgtctcgtggccgcgaagggccatacgctgttcgtcggtggacaccggaaatgctgtggaaccacagatcatgccgagatgaatgtcaaaaccctgcatgaagga

SEQ ID NO: 343262 - DNA, 288 bp, Zea mays
gtcttgcccggtgtgcaccgtcgaaaccagtgtcagcagcacagagaccaacggcgtggtatcctactgcattagatgcttcctagctaggggcgctctgtaccgcttcgagtacgcaggcaaccccaggctattccttgccaaagcgcgaggagggacgagcacgctcgatgcctatgaccctgactacacagaggctcgacaggccagatacctgctgacgaacggattcaggcgctacaacctgatcaagagcaactgcgaggacttcgcgatatactgcacgac

SEQ ID NO: 343263 - DNA, 397 bp, Zea mays
  unsure (1)..(397): unsure at all n locations
ctgagacaattttatgaacattcctaggcactggtaacttcgattgtacgagcattcagaaacacaccaagcgaagcacattagcaacaacctaacaacaatggctaccaagatattatccatccttgcgcttcttgcgctttttgcgagcgcaacaaatgcgttcattattgcacaatgctcacttgcttcaagtttcattattacacaggtcctcccaccagttactataatgggcttcgaacacccagctgtgcaagcctataggctacaacaagcaattgcggcgagcgtnttacaacaaccaatttaccagttgcaacaacaatccttggcacatctaacaatacaaaccatcgcaacgcaacagcaacaacaatttctaccagcactgagc

SEQ ID NO: 343264 - DNA, 354 bp, Zea mays
gcccttgcaacatataaagtggtattcagttggaacaatagagcaacaatggcgaccaagatattttccctccttatgcttcttgctctttctgcatgtgttgctaacgcgacaattttacctcaatgctcacaagctcctatagatttccttcctcccccatacctttcatcaatgatagcttcagtatgtgaaaacccagctcttcaaccctataggctccaacaagcaatcgcagcaagcaacatacctttatcacccttgtttcaacaatcgccagccctatctttggtgcagtcattggtacaaaccatcaaggcacagcagctgcagcaactcgtgctacctgtgatc

SEQ ID NO: 343265 - DNA, 264 bp, Zea mays
agcatacacagagaaccaaccatgcattatttatggagctgatatgtaccagattgagggcattgctacattcatggactatgggctgccagagatattaagcacaaaactttgggacccacacaccacagttaactatggcttggaggcaaagttggcagggaaccacatatgacattgtccgactatgggctcaggtcaattgggccctgagttccacaggatgcattggctgtggaggtcttgtggcttagtggcaccttg

SEQ ID NO: 343266 - DNA, 388 bp, Zea mays
gtggaatccagtagcaacaatagagcaacaatggcgaccaagatattttccctccttatgctccttgctctttctgcatgtgttgctaacgcgacaattttccctcaatgctcacaagctgctatagcttcccttcttcccccataccttccatcaatgatagcttcagtatgtgaaaacccagctcttcaaccctataggctccaacaagcaatcgcagcaagcaacatacctttatcacccttgtttcaacaatcgccagccctatctttggtgcagtcattggtacaaaccatcagggcacagcagctgcagcaactcgtgctacctgtgatcaaccaagtagctctggcaaacctttctccctactctcagcaacaacaatttt

SEQ ID NO: 343267 - DNA, 354 bp, Zea mays
  unsure (1)..(354): unsure at all n locations
gaccattagctttatctactccagagcgcagaagaacccgatcgacaccatgagggtgttgctcgttgccctcgctctcctggctctcgctgcgagcgccacctccacgcatacaagcggcggctgcggctgccagccaccgccgccggttcatctaccgccgccggtgcatctgccacctccggttcacctgccacctccggtgcatctcccaccgccggtccacctgtcgncgncggtccacctgccaccgncggtccatgtgccgccgccggttcatctgtcgncgncaccatgccactaccctactcaaaccgcccggnctcagcctcatncccagccacacccatgccc

SEQ ID NO: 343268 - DNA, 368 bp, Zea mays
  unsure (1)..(368): unsure at all n locations
gctttatctactccagagcgcagaagaacccgatcgacaccatgagggtgttgctcgttgccctcgctctcctggctctcgctgcgagcgccacctccacgcatacaagcggcggctgcggctgccagccaccgccgccggttcatctaccgccgccggtgcatctgccacctccggttcacctgccacctccggtgcatctcccaccgccggtccacctgccgccgccggtccacctgccaccgtcggtccatgtgccgncgccggttcatctgccgtcgtcaccatgccactaccctactcaaccggcccggcctcagccttatccccagacacacccatgcccgtgccaacaggcgcattcaagc

SEQ ID NO: 343269 - DNA, 372 bp, Zea mays
  unsure (1)..(372): unsure at all n locations
attttgagcattcagaaacacaccaagcgaagcacattagcaacaacctaacaacaatggctaccaagatattatccctccttgcgcttcttgcgctntntgcgagcgcaacanatgcgttcattattccacaatgctcacttgctccaagttccattattacacagttcctcccaccagttacttcaatgggcttcgaacacccagctgtgcaagcctataggctacaacaagcaattgcggcgagcgtcttacaacaaccaatttcccagttgcaacaacaatccttggcacatctaacaatacanaccatcgcaacgcaacagcaacaacaattcctaccagcactgagccacctagccatggtgaacc

SEQ ID NO: 343270 - DNA, 326 bp, Zea mays
gcattcagaaacacaccaagcgaagcgcactagcaacaacctaacaacaatggctaccaagatattagccctccttgcgcttcttgcccttttagtgagcgcaacaaatgcgttcattattccacagtgctcacttgctcctagtgccattattccacagttcctcccaccagttacttcaatgggcttcgaacatccagccgtgcaagcctacaggctacaactagcgcttgcggcgagcgtcttacaacaaccaattgcccaattgcaacaacaatccttggcacatctaaacctacaaaccatcgcaacgcaacagcaacaac

SEQ ID NO: 343271 - DNA, 175 bp, Zea mays
taatttagtaaattccatacagattggaacatgaaaggtttacacaatttatgtattcataggtttaccgtcaccatcagggagaacacaacctgctgtttccccacgtggccaaagctttggacaaagaattatgggcaatatgatggataatcttttggttagaagtcttaca

SEQ ID NO: 343272 - DNA, 313 bp, Zea mays
aatcatgattcatcgtagtcgtataggcaccaaaacaaatttgcaacactaattatgtaactgcaaaaaccatgaagctggtgcttgtggttattgctttcactggtttagtaataagaggttcttggacacagacaggcggctgcagctgtggtcaacaacaaagccttgtgcagtaacattattcacaacaacattattcacaaaaacaacaacattattcaccaccacaacattacctgtaggaggaacaccaacaacaacatgtttacatgctaccacaaaaacatctgtatcaacaagaagttcatgt

SEQ ID NO: 343273 - DNA, 160 bp, Zea mays
agaccattagctgtatctactccagagcgcagaagaacccgatcgacaccatgagggtgttgctcgttgccctcgctctcctggctctcgctgcgagcgccacctcgaggcatacaagcggcggctgcggctgccagccaccgccgacggttcatctacc

SEQ ID NO: 343274 - DNA, 77 bp, Zea mays
ggctctcagacatatcttatcactccaatccaaagaacccacgacaccattttttgtgccgtcccctctctccgctc

SEQ ID NO: 343275 - DNA, 220 bp, Zea mays
ccattagcttatctactccaagcgcagaagacccgatcgacaccatgaggggtgctcgtgccctcgctctctgctctcgctgcgagcgccactcacgcagtacactgggctgcgtgcaccacgcgcggtattacgcgcggcattgcactcgtactgcctcggattcacgcgcatgcgcgcgcactgacgcgcatgcgcggtattgggcaacatcatacgc

SEQ ID NO: 343276 - DNA, 100 bp, Zea mays
aacttgcttgacataccctcagcgttctaccaacaacccatcattgtggtgccctctttatatttcttagagtatagttcaataataaagtttttgctga

SEQ ID NO: 343277 - DNA, 256 bp, Zea mays
cccaattctgcaagcctacaggatccaacaggcaatcacagctggcatcttactcttatcacccttgttcctccaacaatcatcagccctattacatgagttacctgtggtgcatttattggcacaaaacatcatggcacaacaactacaacaacttgtgctagcaaaccttgctgcctactctcagcaacagcagtttcttccattcaaccaaccagctgcatcgaactccgcttcctatttcatcaacaacaac

SEQ ID NO: 343278 - DNA, 197 bp, Zea mays
  unsure (1)..(197): unsure at all n locations
cggacgcgtgggcggacgcgtgggtggacgtgagcctancaattagctcatctactccagattgtataactcgacaccatgaaggtgctgatcgttgcccttgctctgctggcgctcgctgcgagcgccgcctccagtacaagcggcggctgtggctgccagacaccaccgtttcatctaccgcctccgttctatat

SEQ ID NO: 343279 - DNA, 91 bp, Zea mays
  unsure (1)..(91): unsure at all n locations
atcatcatgccgcgttacacgcggctggtacctgcgtccactatcgctgaccatcccttncagtgctatacaaagcccccatcgctcacag

SEQ ID NO: 343280 - DNA, 180 bp, Zea mays
gtcccacttattccatgtacacatcctttcgccagcggattaatcacttcatctctgcagagctcacactttacgctatacctcacaaccttctatgacagctctggcttgttcaagatggaacactcacacagtgtacacatataagagtgaggaactgttgtactcagacacagtttt

SEQ ID NO: 343281 - DNA, 226 bp, Zea mays
aggtcttagaccatagcttatctactccagagccagaagacccgatcgacaccatgagggtgttgctcgtgccctcgctctctgctctcgtgaagcgccactcaccatacaagcgcggtgcagtgcaccccgcgcggtattccgcgcggcattgcactcggtactgcactcggcattcaccggtcacgcgcgcgcactgacgcgcatggcgccgtattgcgcgaca

SEQ ID NO: 343282 - DNA, 230 bp, Zea mays
acgtcagcctagcaattagctcatcgactccagataggagaactcgacaccatgaaggtgctgatcgttgcccttgctctcctggcgctcgctgcgagcgccgcctccagtacaagcggcggctgtggctgccagacaccaccgtttcatctaccgcctccgttctatatgccgcctccgttctatctgccgccgcagcagcagccgcagccatggcaataccccacaac

SEQ ID NO: 343283 - DNA, 316 bp, Zea mays
  unsure (1)..(316): unsure at all n locations
gccgccaccaggtgcagagtctttcgtcatctcttctccggcgaagaacccncagtcgcccaccagatcactagttaaactttgttgaggggtgatggcggtttcttcgcgacctcacaccgggcagggctaaaagctgatagtcctctactccagtcatactgctccaacttcaagtactgctgctcctcgttctgtcctgcaagttacgacaggggaaaatgtcctggagtacgatctgaggcagggagtatctaagtctagccatcaatgtgtaccagcacttggaggcatatatgtacttgagacaataaag

SEQ ID NO: 343284 - DNA, 90 bp, Zea mays
acgtactgtctgtgtcatcaaaggcaacgccaaacctcttcacgtgcaaccgtactacgcacaactcatagcaggggggtgtcgaactaa

SEQ ID NO: 343285 - DNA, 262 bp, Zea mays
  unsure (1)..(262): unsure at all n locations
atcgcgagcgctcgagagcgcagaagaacccgatcgacaccatgagggtgttgctcgttgccctcgctctcctggctctcgctgcgagcgccacctccacgcatacaagcggcggctgcggctgccagccaccgncgccggttcatctaccgccgcggagcattgcacctcggttcactgcacctcgggcattccccgcggtcacnccgcggcactgacgcgtctggccgcgtattgcccacacatctatacgcagtactat

SEQ ID NO: 343286 - DNA, 349 bp, Zea mays
tcgaccacgcgtccgccacgcgtccgccacgcgtccgccccgcgtccgccacgcgtccgtgagcattagaacacatatgcgaagcgcactacacgacctacacaatgctacgagatataccctctgcctcttgcttttggaccacaatcttatattacatgctactgctaggctatcatgtctcacattcatggttaaacagtggagcacatgaacaggtgcgaggtaacacatgcatgacacatctgcattacatcagataacgacagacacagtctaagctgcactactgtacctggctctgagaagtgtgatcacactgttgcacgatgaaagacacacagtcaag

SEQ ID NO: 343287 - DNA, 161 bp, Zea mays
  unsure (1)..(161): unsure at all n locations
cagaccattagctntatctactccagagcgcagaagaacccgatcgacaccatgagggtgttgctcgttgccctcgctctcctggctctcgctgcgagcgccacctggacgcatacaagcggcggctgcggctgccagccaccgccgccggttcatctacc

SEQ ID NO: 343288 - DNA, 265 bp, Zea mays
acgcgcgagcaaggcggcccgccgcgcgtcgcgaccggcctgctctccatcttcatactttgtctggaaatggcggtgactacctacgctggggtcaaagtcatgcagccggctgtgacaaatctttcattcgcatgacaaccgataacatgctatctgtacatggcccaagcaatatggagatcactgtgactctattgcatgacattctgcttgtttgccaaaagaaggctttgatatacactatatggggagttgtgtgctc

SEQ ID NO: 343289 - DNA, 166 bp, Zea mays
gctctgcctctgtttaagggtctattattaaagtacaactttcgcagcgatatcactcacctgcaagctcagacttcgataatacccacactttatgacactctatgttgttcagatggaacacaccacatgtcacatataaagtgaggactgtgtactcacacac

SEQ ID NO: 343290 - DNA, 200 bp, Zea mays
  unsure (1)..(200): unsure at all n locations
cagaccattagctntatctactccagagcgcagaagaacccgatcgacaccatgagggtgttgctcgttgccctcgctctcctggctctcgctgcgagcgccacctcgacgcatacaagcggcggctgcggctgccagccaccagcgccggttcatctaccgccgccggtgcatctgccacctccggttcacctgccacc

SEQ ID NO: 343291 - DNA, 147 bp, Zea mays
  unsure (1)..(147): unsure at all n locations
cttcagacaccatcgacaacgtcaaggccaagatccaggacaaggagggcattcccccagaccagcagcgtctcatctntgctggaaagcagctngaggacgggcgcacgctggccgactacaacatccagaaggtagcaccctcac

SEQ ID NO: 343292 - DNA, 74 bp, Zea mays
gtctctcctctacagcggtagtgagacatctacctagacacagatgacagcttactatacctgtctcacaccga

SEQ ID NO: 343293 - DNA, 148 bp, Zea mays
cgctcgcacagcaacatacagtttctgccatcactgaccacctagccgggtgaaccctgtcgcctacttgcacagcagctacttgatccaaccacttgcttggcgaacgtactgcataccacacacaactctgcaacagtatgcacct

SEQ ID NO: 343294 - DNA, 250 bp, Zea mays
ccacgcgtcggcgcttacctatgacacggcacatgttctaccccatggcacggccgccatgatcccgatcccactcgtggtgccgagcttaccgatgcgctatctgtgcacctactatggagctgatcagaccggtcacatgagacgcgttacacacgtgccaccgtcggagatctaccacagggccgcggactgccgggctgcatcacctgtcggtgtgcgacgcgctgactttagctacaacgctgac

SEQ ID NO: 343295 - DNA, 158 bp, Zea mays
ttacatatactgtctcacacgcagctataagagtaccttgtcattgtgacaacatatgccacactcacactgtgtgcaactgtgatcttagacatagttttcatcacactgtgatgacttgtgtattgacacatacatagcagtgtgtgctcccacat

SEQ ID NO: 343296 - DNA, 361 bp, Zea mays
  unsure (1)..(361): unsure at all n locations
gtcgaccacgcgtccgcacaagcacatagaaagtggaaacagtaccacaatagagcacaatggcggccaagatatttccatcctatgctcctgctcttctgctgtgtgctacgcgaccattttctaaactacaagctcatactgcctcttccatactcatatgccgttagatgtgaaccaccctacctcggtcacngcgacagactactatacctgcttacaatgagctattggccatgtcacatagccacagtgaactgctcaggaagcagagttgcaactttctattagacacattctcatcaccctgctcatgaacctgtgtattgagacacactctcatcagcagtagtctgctatt

SEQ ID NO: 343297 - DNA, 57 bp, Zea mays
atgcgactattctctttataggcacctaatcaatcactgccgcgggacacgtctgct

SEQ ID NO: 343298 - DNA, 369 bp, Zea mays
atcccggtcgccacgcgtcgtctcacagcgggtctcggtatggaaaccaatctcaacctacagatcaacaggcaatccagtgcatttacttataccctgtcctcagcgatatagctatacacataccttgggcttatgcacaaacatagcacacacacacactgtgtgcaacctgtgctacttacaacagagttctcatcaacactagtcatgacttgctttattgaacacacactacatcagcagtactgtgctacccagcattctcatcaacactcacatgacttctgtattacagacacaactcacattagcagtagtgggtagcctgtacctttgcacacacagtgtgcgtcacagacgtggcta

SEQ ID NO: 343299 - DNA, 102 bp, Zea mays
  unsure (1)..(102): unsure at all n locations
gcgaagcgcactagcaacaacctaacaacaatggctaccaagatattagccctccttgcgcttcttgcccttntagtgagcgcaacanatgcgttcattatt

SEQ ID NO: 343300 - DNA, 381 bp, Zea mays
atttagaccaactagcaacatagatgcacattattgtaccaacaatggcagccaaaagattttgcctccttatgctccttggtatttctgcaagtgctgctacggcgaccattttcccgcaatgctcacaagctcctatagcttcccttcttcccccgtacctctcaccagcggtgtcttcggtatgtgaaaacccaattcttcaaccctacaggatccaacaggcaatcgcagctggcatcttacctttatcacccttgttcctccaacaatcatcagccctattacagcagttacctttggtgcatttattggcacaaaacatcagggcacaacaactacaacaacttgtgctagcaaaccttgctgcctactctcagc

SEQ ID NO: 343301 - DNA, 89 bp, Zea mays
tttcgggtcgtcctgctcgcgaggcggctgtcttctttcatgcccttcctgtgcgggggtcccatgagtacttgtgctgttattgccgt

SEQ ID NO: 343302 - DNA, 277 bp, Zea mays
tgggtcttcagaccattagctttatcttctccagagcgcagtatatcccgatcgacaccatgagggtgttgctcgttgccctcgctctcctggctctcgctgcgagcgccaccttcacgcatacaagcggcggctgcggctgccagccaccgccgtcggttcatctaccgccgccggtgcatctgccacctccggttcacctgccacctccggtgcatcttccaccgccggtccacctgccgtcgccggtccacctgccaccgtcggtccatgtgcc

SEQ ID NO: 343303 - DNA, 370 bp, Zea mays
tgagcattcagaaacacaccttgcgttgcacattagcaacaacctaacaacaatggctaccatgatattatccctccttgcgcttcttgcgctttttgcgagcgcaacaaatgcgttcattattccacaatgctcacttgctccaagttccattattacacagttcctcccaccagttacttcaatgggcttcgaacacccagctgtgcaagcctattagcttcaacaagcaattgcggcgagcgtcttacaacaaccaatttcccagttgcaacaacaatccttggcacatctaacaatacaaaccatcgcaacgcatcagctacaacaattcctaccagcactgatccacctagccatggtgaaccct

SEQ ID NO: 343304 - DNA, 376 bp, Zea mays
ccaccactgggtcttcagaccattttctttatctactccagagcgctgaagaacccgatcgacaccatgagggtgttgctcgttgccctcgctctcctggctctcgctgcgtgcgccacctccacgcatacatgcggcggctgcggctgccagccaccgccgccggttcatctaccgccgccggtgcatctgccacctccggttcacctgccacctccggtgcatctcccaccgccggtccacctgccgtcgccggtccacctgccaccgccggtccatgtgccgccgtctgttcatctgccgtcgtcaccatgccactaccctactcaaccgccccggcctctgcctcatccccagccacacccatgcccgtgcc

SEQ ID NO: 343305 - DNA, 363 bp, Zea mays
agaccattagctttatctactccatttctctgaagaacccgatcgacaccatgagggtgttgctcgttgccctcgctctcctggctctcgctgcgagcgccacctccacgcatacatgcggcggctgcagctgccagccaccggcgccggttcatctaccgccgtcggtgcatctgccacctgcagttcacctgccacctgcagtgcatcttccaccggcggtccacctgccgtcgccggtccacctgccaccgccggtccatgtgccgtcgtcggttcatctgccgtcgtcaccatgccactaccctatctaaccgccccggcctcagtctcatccccagccacacccatgcccgtgccaac

SEQ ID NO: 343306 - DNA, 380 bp, Zea mays
attcaaccaactagctgcattgttctctgcttcttatttgcaacaacaacaactaccattcagccagctatctgctgcctacccccagcaatttcttccattcaaccaactgacagctttgaactctcctgcttatttacagctgcaacaactactaccattcagccagctagctggtgtgagccctgctaccttcttgacacatccacaattgttgccgttctaccagctcgctgcgcctaacgctggcaccctcttacaactgcaacaattgctgccattcaaccaacttgctttgacaaacccaacagcattctaccaacaacccatcattggtggtgccctcctttagatttcctatgagttatagctcaataata

SEQ ID NO: 343307 - DNA, 380 bp, Zea mays
gttagcacaatattgttccaacaatgtgtgttcttaatattttgcctccttatgcgccttggtatttctgcaagtgctgcttcagcgaccattttcccgcaatgctcacaagctcctattgcttcccttcttcccccgtacctctcaccagcggtgtcttcggtatgtgaaaacccaattcttcaaccctacaggatccaacaggcaatcgcagctggcatcttacctttatcacccttgttcctccaacaatcatctgccctattacaacagttacctttggtgcatttattggcacaaaacatctgggcacatcaacttcaacaacttgtgcttgcaaaccttgctgcctactctcagcaacagcagtttcttccatt

SEQ ID NO: 343308 - DNA, 248 bp, Zea mays
tccctccttggatagggtttgagactgagctcccccgctcgcgcgcgagccatggtctccttcacctgttcccatgtcggcgcgacggctgcgggcggagcctcgcccttcctcggcttccggtggcggagcggccccgggggagccaccccgtcgagctccctcttcgttggccggcggctggcatcggtgcatatgcgcgcgccatctcgcggggcccgcgggggctccgcgctgcgggtcacgtg

SEQ ID NO: 343309 - DNA, 304 bp, Zea mays
gcgacatataaagggcaattgtggtccttctatgggggcccaaatattttgcccccttttgccccccgggatttccgcgagagctgctacagggaccattttcccgcaaaggtcacaaaatgctattaatttcccttttcccccggtcccctcaccaacggggggtttggggtgggaaaaacccattctttaacccctctagatcccacaagggatcgcaaatgggatttttcccttttcacccccgtttctcccacaatttttaaacccttttccacaatttcccttgggggctttgttggga

SEQ ID NO: 343310 - DNA, 161 bp, Zea mays
agggtcttcagaccattagcttttttttctccagtgcgctgaataacccgatggacaccttgagggaggtgcgggctgccctcgctctgctggctctcgctgcgagcgccacctccacgcatacaagcgggaggtgctgctggcagccaccaccgacgggt

SEQ ID NO: 343311 - DNA, 353 bp, Zea mays
gctagccacttcttaaacttttctttttctatcctgattctgctctctcggatggctcttttgatcgatcgaggctctttcccttcttcctctctctcgctctctctctctctatccgtgactgccatgtttccgcctgcgagctttctgcacgaccaaagcggcggaagaagagcacaggagctaagcggctcccatctggagcacgtggaggatgtcccctgcactctggacatgttctcgcacgaagcacggggctccctctagaccatccgcttctactgtgacctccattacttttactcgagactggcgcttacgtcagcacccgactcctgctcctgcgcgcgcct

SEQ ID NO: 343312 - DNA, 350 bp, Zea mays
  unsure (1)..(350): unsure at all n locations
actagttctagatcgncgagcgtttctccctttttttttttttttttcttagaaaggttttttttaatttttaaggttcttttttttttttttttttttttttttttttttttttttttttttttttttttttttttttttttttttttttttttaaaaaaaaaaaaaaaaaccccccttttttggggggacccccaaaaccaaaaaaaaaaaccttttttttgaccccttcccccaaaaaaaattaaaaaagggccccccccttttagaacccatttttccccgccggggggtggaaaaccttcttcttttttttttcccctcccaattcactttcccccccccctttt

SEQ ID NO: 343313 - DNA, 121 bp, Zea mays
ggtcttaacaccattagcctcacctattcttgagcgcagtagaaccccttcgagaccaggatggtgtttctcgttgccctctctctcctggctcccgctgtgagcgccaccttcacgcata

SEQ ID NO: 343314 - DNA, 373 bp, Zea mays
gaccaacttgcaacatagattgctcttttgtgtaccaacaatggctgccgaaatattttgcctccttatgctccttggtatttctgcaagtgctgctacggcgaccattttcccgcaatgctcacatgctcctattgcttcccttcttcccccgtacctctcaccagcggtgtcttcggtatgtgaaaacccaattcttcaaccctactggatccatcaggcaatcgcagctggcatcttacctttatcacccttgttcctccaacaatcatcagccctattacagcagttacctttggtgcatttattggcacataacatctaggcacaacaactacaacaacttgtgcttgcaaaccttgctgcctactct

SEQ ID NO: 343315 - DNA, 353 bp, Zea mays
agtcctactagcaccctagcctcctctttctggcaccaactaattcagagagaaagattttgtttacttatgctggctattctttgtacggttctctcttccgcttccattttccctctatgctctcatgcttctatatcttgccttcttggccccattcccttctccatcctcatgatcttacgcttgtataccccatccttcatcccttctgattcccacatgcactcgaaagcagcatgtttccactaccaccattgtcactacatcaaccagatgcccttctaccactttttcctttaggacacttgggggctcatatcctaatggctcatcatcttcataatcttgtg

SEQ ID NO: 343316 - DNA, 374 bp, Zea mays
gttagctctttattgttccaacattttctgccaaattttttagcctccttatgctccttggtctttctgcaagtgctgctacagcgaccattttcccgaaatgctcgcaagctcctatagcttcccttcttcccccgtacctctcaccagcggtgtcttcggtatgtgaaaacccaattcttctacccttcaggatccaacaggcaatcacagctggcatcttacctttatcacccttgttcctccaacaatcatctgccctattacatcagttacctttggtgcatttattggcacaaaacatctgggcacatcttcttcatcttcttgtgcttgcaaaccttgctgcctactctcagcaacagcagtttctt

SEQ ID NO: 343317 - DNA, 147 bp, Zea mays
gcgttcgagaccattagctttatctactccagttcgctgtagaacccgatcgacaccatgaggggggtgctcgttgaccccggtctcccgggtctcgctgggagcgccaccttctcgcattcaaacggggggtgggggtggcaacca

SEQ ID NO: 343318 - DNA, 292 bp, Zea mays
ggtcttgattgctagcggtcatgttttattatcctaggttaagtacgcttaagggcccactttcattgtccctgccacacaaaatgtgtggatggacgtatatagccttcctgtacctggatcacgggggaaaaacctgcgcccagactattttatgaggctggttgtaatacaccatcttgtccttattgcagtacttgttagggcggccccggatatacctttgcacagttgaacgaacctaatggctaatggttcaccacctactggaactctccaagcacgacggggc

SEQ ID NO: 343319 - DNA, 230 bp, Zea mays
tcccgggtcgtccctctcgtccggcggtccgttgtccccggattgttctttttccttccatcgctgctaatctgatgcgtctttttcaccatgggcgggcatcgttctcttggttatcctctaccccaaagtcttgaaatgtgagtatgctctccgtggcgtgaccgtgatccatgctcagcgcttgctgcctcttcttccatcacaaactgggtctcttccttttgatg

SEQ ID NO: 343320 - DNA, 171 bp, Zea mays
tcccggggcgggccagccgtccggcaccttaaaaggcccattagggttcttctatgggagcccaaatattttggcccgcggatgccccctgaggcttctggaaaagccgcttccgggaccattttcccgaaatgcccgcaagctcccataggtttccttttttccccggtc

SEQ ID NO: 343321 - DNA, 378 bp, Zea mays
gtgaaaacccaattcttcaacccttctggatccaactggcaatcgctgctagcatcttacctttatcacccttgttcctccaacatccgtctgccctattacagctgttacctttggtgcatttgttggcacaaaacatcatggcacatcatcttcatcatcttgtgcttagaaaccttgctgcctactctcagcaacagcagtttcttccattcaaccaactggctgcattgaactctgctgcttatttgcaacaacaactaccattcagtcagcttgctgctgcctacccccagcaatttcttccattcaaccaactggcagcattgaactctgctgcttatttacaacagcaacagcttccaccattcagccagc

SEQ ID NO: 343322 - DNA, 130 bp, Zea mays
ttgatcgcgagcggtcgccctttttttttctttttttaatctagaaatgtactttgttatttctgggatgccacaaacatctgacaataaactttatttttgaactattactcattagaaatctttaaaa

SEQ ID NO: 343323 - DNA, 260 bp, Zea mays
  unsure (1)..(260): unsure at all n locations
tgctggatcttctccggcggcgtccagcacttgctaccaggggttaaaaataaagtgagagacggcgcgacgtgcattgcgcatcatgtgttctgggcgcgtgcacatccagtttgtcgtttctctgtcgtgggctcgctttattctggcgtgttcgtcacaattttgatgttaactgtgaggaatatagttgggtatgccgccagtgccagttagttctggcgccggctctccgtnacggatggtgtgttcattgccct

SEQ ID NO: 343324 - DNA, 369 bp, Zea mays
gggtcttcagaccattagctttttcttctccagagcgcagaataacccgagcgagaccatgagggtgttgctcggtgccctcgctctcctggctctcgctgcgagcgccacctccacgcatacaagcggcggctgcggctgccagccaccgccgccggttcatctaccgccgccggtgcatctgccacctccggttcacctgccacctccggtgcatctcccaccgccggtccacctgccgtcgccggtccacctgccaccgccggtccatgtgccgccgccggttcatctgccgtcgtcaccatgccactaccctactcaaccgtcccggcctcagcctcatccccagccacacccatgcccgtgcca

SEQ ID NO: 343325 - DNA, 378 bp, Zea mays
cttctatcagtaccatcaatcttctttcatcttagtagtataggcaccaaatgggatctgctacatcaattatgtaactccaaaaaccatgatgctggtgcttgtggttcttgctttcattgctttaatatcaagagtttcttgtacacagacaggcggctgctgctgtggtcaacatcattgccatgtgctgcttcatcatccacatcatcatcatcctctttatcatcttcatcttccacctccacttcatctcctgctgctgcttcaccaacaacaacatgttctcatgcttccactaaatacatctgcaacatcatgatgttcatgttcaacaacaacatcaactaccgctgctccttcttcttcttcttcttc

SEQ ID NO: 343326 - DNA, 373 bp, Zea mays
gcggcagagcgtagagaggatcgtcttacagaacagcatgaagatggtcatcgttctcgtcgtgtgcctggctctgtcagctgccagcgcctctgcaatgcagatgccctgcccctgcgcggggctgcaaggcttgtacagcgctggcgccggcctgacgacgatgatgggcgccggcgggctgttcccctacgcggagttcctgaagctgccgcagtgcatcccgctggcggcggcgccctactacgccgggtgtgggctgacgtgcgccatgttccagccgctccggcaacagtgctgccagcagcagatgaagatgatggacgtgcagtccgtcgcgcagcatctgcagatgatgatgcatcttgagcgt

SEQ ID NO: 343327 - DNA, 241 bp, Zea mays
cccacgcgtccgcctacctacaacagcaacaattgctttcatctagcccgctcgctgtgggcaatgcacctacgtacctacaacaacagttgctgcaacagattgtaccagctctgactcagctagctgtggcaaaccctactgcctacttgcaacagttgcttccattcaaccaactggctgtgtcgaactctgctgtgtacctacaacagcgacaacagttacttaatccactagcagt

SEQ ID NO: 343328 - DNA, 152 bp, Zea mays
  unsure (1)..(152): unsure at all n locations
ctccaacaactcgtcagctcctattacagcagttactcttggtccaattggtggcacanaacatcatggcacaacaactacaacaacttgtgctagcaaaccttgctgcatactctcagcaacatcagtttcttccattcaaccaactggct

SEQ ID NO: 343329 - DNA, 183 bp, Zea mays
  unsure (1)..(183): unsure at all n locations
caactagcagcatagaaagcacaatagtgtaccaacaatggcagctaaaatantttgcctccttatgctccttggtctttctgcaagtgctgctaccgcgaccagtgggccacaatgctcacaagctcctatagcttcccttcttcccccgaacctctcaccaacggtgtcttcggtatgtga

SEQ ID NO: 343330 - DNA, 289 bp, Zea mays
  unsure (1)..(289): unsure at all n locations
tcagtatgtgaaacccagctcttaaccctataggctcaacaagcaatcgcagcagcaacatactctttatcaccctgttaacaatcgcttccctatctgtgggcagtcattgtacaaaccatagggcacagcactgagcaactcgtgctacctggncaaccaagtagctctggcaaccttctcctactctagcaacacaattcttcatcaaccactgctacattgaccggctgttattgcagcacactataccattcagcagtagctactgctactctagaacaacaac

SEQ ID NO: 343331 - DNA, 131 bp, Zea mays
  unsure (1)..(131): unsure at all n locations
tagcaacatagagagcacaatagtgtaccaacaatggcagccaaaatattgtgcctccttatgctctctggtctntctgcaagtgctgctacggcgaccattttcccgcaatgctcgcaagctcctatagc

SEQ ID NO: 343332 - DNA, 176 bp, Zea mays
  unsure (1)..(176): unsure at all n locations
atacagcagttactcttggtgccattgttggcacataacatcaaggcacaacaactacaacaactngtgctaggaaaccttgctgcctactctcagcaacagcagtttcttccattcaaccaactggctgcatngaactctgctgctttattgcaacaacaactaccattcagtca

SEQ ID NO: 343333 - DNA, 179 bp, Zea mays
tcgatccagaccaggagaatgcctcgtatgaggagggtctttaatacacgctgtatgttgaagattgtctccccacccgtctcgtgacctaaatacctttagaaatatggaaaattcagagtggagttgagcgtgactatgcatcatgaattagcgcccccggatgctatgatcacagt

SEQ ID NO: 343334 - DNA, 51 bp, Zea mays
caaccccccccccattcccccctatctcttcccaccaaccagaaatccacc

SEQ ID NO: 343335 - DNA, 305 bp, Zea mays
  unsure (1)..(305): unsure at all n locations
gcattcagaaacacaccaagcgaagcgcactagcaacaacctaacaacaatggctaccaagatattagccctccttgcgccttcttgccctttagtgagcgcaacanatgcgttcattattccacagtgctcacttgctcctagtgccattattccacagttcctcccaccagttacttcaatgggcttcgaacatccagccgtgcaagcctacaggctacaactagcgcttgcggcgagcgtcttacaacaaccaattgcccaattgcaacaacaatccttggcacatctaaacctacaaacca

SEQ ID NO: 343336 - DNA, 225 bp, Zea mays
ctactccagagcgcagatgattccgatcgacaccatgagggtgttgctcgttgccctcgctctcctggctctcgctgcgagcgccacctccacgcatacaagcggcggcggctgctgttagccaccgccgccggttcatctaccgccgccggtgcatctgccaccttcggttcatctgccaccttcggtgcatgctccaccgacggttcacctgcctgcgccggt

SEQ ID NO: 343337 - DNA, 191 bp, Zea mays
gattgagaccaacaagcaacatagaaagtggaatccagtagcaacaatagagcaacaatggcgaccaagatattttccctccttatgctccttgctctttctgcatgtgttgctaacgcgacaattttccctaatgctccaagctcctatagcttcccttttaccccaaccttcataatgatgcttagttg

SEQ ID NO: 343338 - DNA, 78 bp, Zea mays
cgacgcacgcgtccagaacaagcaacatagaaagtggaatccagtagcaacaatagagcaacaatggcgaccaagata

SEQ ID NO: 343339 - DNA, 166 bp, Zea mays
tgtgctgttctgttgtgacgcactagctcagcggtggtgcacacgcgcgtcatacgcccgtgattgcactcgatactgcactcggtcttacactcgtcactgcgcgcgtcactgcacgcggcattccgcgcgtattgcgcgacatcatactatacgccgctactat

SEQ ID NO: 343340 - DNA, 170 bp, Zea mays
  unsure (1)..(170): unsure at all n locations
cgtaccaacaatggcagatacatatatttgcctncttatgctcctnggtctttctgcatgttctgctacggcgaccatnttcccacaatgctcacaagctgctatagcttcccttcttaccccgtaactctcaccaacggtgtcttcggtatgtgaaaacccaattcttc

SEQ ID NO: 343341 - DNA, 168 bp, Zea mays
  unsure (1)..(168): unsure at all n locations
tcgatttgagcattcagaaacacaccaagcgaagcgcactagcaacgacctaacaacaatggctaccaagatattagccctccttgcgccttcttgcccttttgtgagcgcaacanatgcgttcattattccacaatgctcacttgctcctagtgccattattccaca

SEQ ID NO: 343342 - DNA, 322 bp, Zea mays
aattcccgttcgacccatcgtcgttaaaaccaccaagcaacttatatttcaaccacaacattctcgggaggatcttcttggcgctgccttttctatccacattatcttattttctaatttacatcttcttattgtctattttaccttttactacaaatttctataacttttattatatattattatacaatattttatataacctaattattatattttttaaaaaaataaaattattctacctttttatagatccaacttactacctttcattcacgtatatttttttatattttacctatttaatttatgccttattttt

SEQ ID NO: 343343 - DNA, 123 bp, Zea mays
ggccgccccacctcgctgttacgtgtatgtgcttccctaacctcgaagcttctacgcgagaggcggtgaatccaatggcgggcgaggaatatctcactgtatgctgctgctttcccattctgc

SEQ ID NO: 343344 - DNA, 135 bp, Zea mays
gccaaaatccaagcgcgtcgccacgcatttctcccattgcctcaaatccggaaattgcgcgtttggccggctctgaaggccttctttgtagacgcgcgcgggctgctatgcgttcgcgctgcagggaatttttcc

SEQ ID NO: 343345 - DNA, 137 bp, Zea mays
tacatttccagattctaaaaaactttattattgatacaacaataagcaatctaaaagagggcccaccagatggttgtggtggggctgctgggtttgtcaaacagtggacaaggcaactttgttgagttgttgagggt

SEQ ID NO: 343346 - DNA, 441 bp, Zea mays
ggccgaccgacgcgtacggtttgtgaattctttactttattctcaagcttatggtgcgttgaaaacaacagcggatctagaagactttgatttggcagatgaaactcattcttatgaataaaaagttgaaattgcacaaaaggatgtcccgtctgctgtgtttggaggtattcggaagagggaagatggcgatgacattcatgatggagatgatgcctctgctgccaaagaaaaatgcagtataagcctactgggtgcacttgaacgaattaaaaggcacaaacaagcttataaatattacacatccaactcgtactactgagatatatctttgacaattctatgaactaactgtgtaatgtctacactataagcgaaatttgagtgccatctattggatcattttgtatatttggaacaaaattatatacatttcaagtt

SEQ ID NO: 343347 - DNA, 376 bp, Zea mays
aatattttgagcattcagaaacacaccaagcgaagcgcactagcaacgacctaacaacaatggctaccaagatattagccctccttgcgcttcttgccctttttgtgagcgcaacaaatgcgttcattattccacaatgctcacttgctcctagtgccattattccacagttcctcccaccagttacttcaatgggcttcgaacacctagctgtgcaagccaacatgcaacaacaagcgcttgcggcgagcgtcttacaacaaccaattgcccaattgcaacaacaatccttgccacatctaacaatacaagccatcacaacgcaacagcaacaacagttcctaccagcactgaaccacctagccatggtgaaccc

SEQ ID NO: 343348 - DNA, 166 bp, Zea mays
ttacatcccccaccatcccttttattattcccattaataactacaaaattttctttctaattactaacttttccaaaactaatataccatatcatatcacttctcccttatatcctatcatatacaataatcaaacattcaaatcctatttaatccaccttttaac

SEQ ID NO: 343349 - DNA, 417 bp, Zea mays
gcaacatagaaagtggaatccagtagcaacaatagagcaacaatggcgaccaagatattttcgctccttatgctccttgctctttctgcatgtgttgctaacgcgacaattttccatcaatgatagcttcagtatgtgaaaacccagctcttcaaccctatatgctccaacaagcaatcgcagcaagcaacatacctttatcacccttgtttcaacaatcgccagccctatctttggtgcagtcattggtacaaaccatcatggcacagcagctgcagcaactcgtgctacctgtgatcaaccaagtagctctggcaaacctttctccctactctcagcaacaacaatttcttccattcaaccaactgtctacattgaaccgtgctgcttatttgcagcaacaactattaccattca

SEQ ID NO: 343350 - DNA, 260 bp, Zea mays
gagaccaacaagcaacatagaaagtggaatccagtagcaacaatagagcaacaatggcgaccaagatattttccctccttatgctccttgctctttctgcatgtgttgctaacgcgacaattttccctcaatgctcacaagctcctatagcttcccttcttcccccataccttccatcaatgatagcttcagtatgtgaaaacccagctcttcaaccctataggctccaacaagcaatcgcagcaagcaacataccttta

SEQ ID NO: 343351 - DNA, 341 bp, Zea mays
  unsure (1)..(341): unsure at all n locations
acttataaacacaccaatcatatctctttatatttatacataacaacaatagctaccaaggtataagttatattttaacttggggatcatcatactatttcttcaatttttcataacaaaacaaaattcaattatttatcaaaatccaatataaattatcaacttataatatatttcaaattaataaattcataattatttacaaaacaaaacaaatatatctatatatataaattaaataattaatcataaattatttcattaaaattatnattattattaataaaaccattttatacttttttttaaatttttcattaaaaatataattcttattattt

SEQ ID NO: 343352 - DNA, 177 bp, Zea mays
tctctcataccattttccttaatcatcaccctcttccttcaaaacctcttccagtataatttcaaactaaacttgcacttaattccattcctactatagacacattatcatctcaaactacaatccataaaaacaaacctacaaacctattatactatatataaatccaacaaaaca

SEQ ID NO: 343353 - DNA, 394 bp, Zea mays
  unsure (1)..(394): unsure at all n locations
ctggctttcactggtttctgttcatatttattgaaggntactttccntatcggtctacgtttaatctcaacttaatctcaatcaaactaaactcttatttatcattataaactatcttccaactgtcttttaaattgtaacttgaaggaaccccatataatacaatcccacattacaaaatttaatccaatcacgaaacatctccaatatatcaatctatttacatccaaaaaacaatcctaaattagttgatcaaaattattatgaggatgaataataacatgtccacacctttttcccgatttttggtggaagatataattctcattagttttggatcacttgtgacaactttgaaccgtcttaccatttaatagttcgttaatattacacc

SEQ ID NO: 343354 - DNA, 399 bp, Zea mays
gagcattcaaaaacacaccaagccgagctacctagcaacgactaaacaacaatggctaccaagatattagccctccttgcgcttcttgccctttttgtgagcgcaacatatgcgttcattattccacaatgctcacttgctcctagtgccattataccacagttcctccgaccagttacttcaatgggcttcgaacacctagctgtgcaagcctacaggctacaacaagcgcttgcggcgagcgtcttacaacaaccaattaaccaattgcaacaacaatccttggcacatctaaccatacaaaccatcgcaacacaacagcaacaacagttcctaccagcactgagccaactagatgtggtgaaccctgtcgcctacttgcaacagcatgtgcttgca

SEQ ID NO: 343355 - DNA, 258 bp, Zea mays
tctatttttaaaaaatatacccttaaaacccccacattccccacatactttctttcccaaatcctctttttgcaattttcttatataggataaatccctccaatctcccttctcaaaatttttactcttatttctaatttacactccctttttttccatttttgttttgtttttttactctctcactttacccctcactttcaaatcccttattccccctcctttttatttttttccttcctttttttccacaaattt

SEQ ID NO: 343356 - DNA, 315 bp, Zea mays
  unsure (1)..(315): unsure at all n locations
cccacgcgtccgattagctttatctactccagagcgcagaagaacccgatcgacaccatgagggtgttgctcgttgccctcgctctcctggctctcgctgcgagcgccacctccacgcatacaagcggcggctgcggctgccagccaccgccgccggttcatctaccgccgccggtgcatctgccaccttcggttcacctgccacctccggtgcatcttccaccgccggtccacctgccgccgccggtccacctgccaccgncggtccatgtgccgccgccggttcatctgccgccgccaccatgccactaccct

SEQ ID NO: 343357 - DNA, 358 bp, Zea mays
caactagcaacatagaaagcacaatattgtaccaacaatggcagctaaaatatgggggctccttatgctccttggtctttctgcaagtgctgctacggcgaccattttcccacaatgctcacaagctcctatagcttcccttcttcccccgtacctctcaccaacggtgtcttcggtatgtgaaaacccaattcttcaaccctacaggatccaacaggcaatcgcagctggcatcttacctttatcacccttgttcctccaacaatcatcagccctattacagcagttacctttggtgcatttattggcacaaaacatcaaggcacaacaactacaacaacttgggctagcaaacctt

SEQ ID NO: 343358 - DNA, 236 bp, Zea mays
  unsure (1)..(236): unsure at all n locations
cggaanccggggcggccacgcgtccgctccagagcgcagaagaacccgatcgtctccatgagggtgttgctcgttgcccgcgctctcctggctctcgctgcgagcgccacctccacgcatacaagcggcggctgcggctgccagccaccgccgccggttcatctaccgccgccggtgcatctgccacctccggttcacctgccacctccggtgcatctcccaccgccggtccacct

SEQ ID NO: 343359 - DNA, 377 bp, Zea mays
aatattttgagcattcagaaacacattaagcgaagcacattagcaacaacctagcaacaatggctaccaagatattatccctccttgcgcttcttgcgctttttgcgagcgcaacaaatgcgttcattattccacaatgctcacttgctccaagttccattattacacagttgctgccaccagttacttcaatgggccttgaacacccagctgtgcaagcctataggctacaacaagcaattgcggcgagcgtcttacaacaaccaatttcccagttgcaacaacaatccttggcacatctaacaatacaaaccatcgcaacgcaacagcaacaacaattgctaccagcactgagccacctagccatggtgaaccct

SEQ ID NO: 343360 - DNA, 386 bp, Zea mays
gtctacattgaaccgtgctgcttatttgcagcaacaactattaccattcagggggctagctactgcctactgtgagcaacaacaacttcttccatttaaccaattggccgcactgaaccccgctgcttatttgcagcagcaaatactactaccatttacccagctagctgcagcaagccgtgctttcttcttgacacagcaacagttgctgcctttctaccagcagtttgcggctaaccccgcaaccctcttacaactacaacaattgttgccctttgtccaacttgctttgacaaacccagcaggcttctaccaacaacacatcattggtggtgccctcttttagattgcttattaggtcgaattcaataataaagatttttgga

SEQ ID NO: 343361 - DNA, 374 bp, Zea mays
aaagcggcagtgcgtagagaggattgtcgaacagaacagcatgaagatggtcatcgttctcgtcgtgtgcctggctctgtcagctgccagcgcctctgcaatgcagatgccctgcccctgcgcggggctgcagggcttgtacggcgctggcgccggcctgacgacgatgatgggcgccggcgggctgtacccctacgcggagtacctgaggcagccgcagtgcagcccgctggcggcggcgccctactacgccgggtgtgggcagacgagcgccatgtaccagccgctccggcaacagtgctgccagcagcagatgaggatgatggacgtgcagtccgtcgcgcagcagctgcagatgatgatgcagcttgagc

SEQ ID NO: 343362 - DNA, 340 bp, Zea mays
caacaactacaacaacttgtgcttttaaaccttgctgcctactctcagcaacaggagtttcttccattcaaccgactaggttcattgaactctgcttcttatttgcaacaacaacaactaccattcagccagctacctgctgcctacccccagcaatttcttccattcaaccaactagcagcattgaactctcctgcttatttacagcagcaacaactactaccattcagccagctagctggtgtgagccctgctaccttcttgacacaaccacagttgttgccgttctaccagcacgttgcgcctaacgctggcaccctcttacaactgcaacaattgc

SEQ ID NO: 343363 - DNA, 322 bp, Zea mays
  unsure (1)..(322): unsure at all n locations
agaccattagctttatctactccagagcgcagaagaacccgatcgacaccatgagggtgttgctcgttgccctcgctctcctggctctcgctgcgagcgccacctccacgcatacaagcggcggctgcggctgccagccaccgccgccggttcatctaccgccgccggtgcatctgccaccttcggttcacctgccaccttcggtgcatctcccaccgccggtccacctgccgncgccggtccacctgccaccgccggtccatgtgccgccgccggttcatctgccgccgccaccatgccactaccctactcaaccgccccg

SEQ ID NO: 343364 - DNA, 380 bp, Zea mays
caacaagcaacatagaaagtggaattttttagcaacaatagagcaacaatggcgaccaagatattttccctccttatgctccttgctctttctgcatgtgttgctaacgcgacaattttccctcaatgctcacaagctcctatagcttcccttcttcccccataccttccatcaatgatagcttcagtatgtgaaaacccagctcttcaaccctataggctccaacaagcaatcgcagcaagcaacatacctttatcacccttgtttcaacaatcgccagccctatctttggtgcagtcattggtacaaaccatcagggcacagcagctgcagcaactagtgctacctgtgatcaaccaagtagctctggcaaacctttc

SEQ ID NO: 343365 - DNA, 334 bp, Zea mays
cccacgcgtccgcagaaacacaccattttaagcgcactagcaacgacctaacaacgggggctaccaagatattagccctccttgcgcttcttgccctttttgtgagcgcaacaaatgcgttcattattccacaatgctcacttgctcctagtgccattattccacagttcctcccaccagttacttcaatgggcttcgaacacctagctgtgcaagccaacatgcaacaacaagcgcttgcggcgagcgtcttacaacaaccaattgcccaattgcaacaacaatccttgccacatctaacaatacaagccatcacaacgcaacagcaacaaca

SEQ ID NO: 343366 - DNA, 338 bp, Zea mays
  unsure (1)..(338): unsure at all n locations
cggaccaagccttccgttgggttttaaaaccattacctttttttattccaaagcgcaaaaaaacccgagggggaccatgagggtgttgctggttgccctcgctctcctggctttcgctgcgagcgccacctncacccatccaaccgggggctgcggctgccagccaccgccgccggttatctaccgccgccggtgcatctgccacctccggttcacctgccacctccggtgcatctcccaccgccggtccacctgccgccgccggtccacctgccaaccgncggtccatgtgccgccgccggttcatctgccgncgccaccatgccactaccctactc

SEQ ID NO: 343367 - DNA, 116 bp, Zea mays
acaccataaactgtgtctactttttttctcaaaagaaccccatcgacaccgtgggggttttgcttcgttgcgctcgctcttctggctatagctgcgagcgccacctccacgcatac

SEQ ID NO: 343368 - DNA, 384 bp, Zea mays
cggacgcgtgggtagctttatctacttcagagcgcagaagaacccgatcggcgccatgagggtgttgctcggtgccctcgctctcctggctctcgctgcgagcgccacctccacgcatacaagcggcggctgcggctgccagccaccgccgccggttcatctaccgccgccggtgcatctgccacctccggttcacctgccacctccggtgcatctcccaccgccggtccacctgccgccgccggtccacctgccaccgccggtccatgtgccgccgccggttcatctgccgccgccaccatgccactaccctactcaaccgccccggcctcagcctcatccccagccacacccatgcccgtgccaacagccgcatccaagccc

SEQ ID NO: 343369 - DNA, 376 bp, Zea mays
  unsure (1)..(376): unsure at all n locations
aacatattatttnggaatcctgnatctacaatagagcaacaanggcgccgcggattttaaactccggaggctcctaaatctttctgcatgtgttgctaacgcgacaattttccctcaatgctcacaagctcctatagcttcccttcttcccccataccttccatcaatgatagcttcagtatgtgaaaacccagctcttcaaccctataggctccaacaagcaatcgcagcaagcaacatacctttatcacccttgtttcaacaatcgccagccctatctttggtgcagtcattggtacaaaccatcaaggcacagcagctgcagcaactagtgctacctgtgatcaaccaagtaactcttgcaaacctttctccc

SEQ ID NO: 343370 - DNA, 353 bp, Zea mays
gaccaactagcaacatagaaagctttatagtgtaccaacaatggcagccaaaaggttttgcctccttatgctccgtggtctttctgcaagtgctgctacggcgaccattttcccgaaatgctcgcaagctcctatagcttcccttcttcccccgtacctctcaccagcggtgtcttcggtatgtgaaaacccaattcttcaaccctacaggatccaacaggcaatcacagctggcatcttacctttatcacccttgttcctccaacaatcatcagccctattacatcagttacctttggtgcatttattggcacaaaacatcagggcacaacaactacaacaacttgtgctag

SEQ ID NO: 343371 - DNA, 55 bp, Zea mays
gcgggggcttgcatgcaacggcatagctcttctataatgacacctaaattcaatt

SEQ ID NO: 343372 - DNA, 365 bp, Zea mays
cgcacacacacacaaccagatctcttttaaatccacccgtcggcacctccgctggaagatgcagatctttgtgaaaaccctgaccggcaagactatcaccctcgaggtggagtcgtctgacaccattgacaacgttaaggccaagatccaggacaaggagggcatccccccagaccagcagcggctcatcttcgctggcaaacagcttgaggacgggcgcacgcttgctgactacaacatccagaaggagagcaccctccaccttgtgctccgcctcaggggaggcatgcagatctttgtgaaaaccctgaccggcaagactatcaccctcgaggtggagtcctctgacaccattgacaacgtca

SEQ ID NO: 343373 - DNA, 74 bp, Zea mays
ttttatagaatccaaccttacgtccccgggcgggctacttcatagcttttttatactgccacctaaattcaatt

SEQ ID NO: 343374 - DNA, 379 bp, Zea mays
agaccattagctttatctacttttgtgcgcagaagaacccgatcgacaccgggggggtgttgctcgttgccctcgctctcctggctctcgctgcgagcgccacctccacgcatacaagcggcggctgcggctgccagccaccgccgccggttcatctaccgccgccggtgcatctgccacctccggttcacctgccacctccggtgcatctgccaccgccggtccacctgccgccgccggtccacctgccaccgccggtccatgtgccgccgccggttcatctgccgccgccaccatgccactaccctactcaaccgccccggccttagcctcatacccagccacacccatgcccgtgccaacagccgcattcaagccc

SEQ ID NO: 343375 - DNA, 350 bp, Zea mays
attgagaccaactagcaacatagattgttcaatagtgtaccaacaatggcagccaagatattttgcttccttatgctccttggtctttctgcaagtgttgctaccgcaaccattttcccacaatgctcacaagctcctatagcttcccttcttcccccatacctctcaccagcggtgtcttcaatgtgtgaaaacccaattgttcaaccctacaggatccaacaggcaatcgcaacaggcatcttaaccattatcacccttgttcctccaacaaccgtcagccctattacagcagttacctttggtccatttggtggcacaaaacatcagggcacaacaactacaacaac

SEQ ID NO: 343376 - DNA, 391 bp, Zea mays
  unsure (1)..(391): unsure at all n locations
ggggcgcacgccgtccgggtcttcaaaccattagctttatcttctccagagcgcagaagaacccnatcgggggcatgagggtgttgctcggtgccctcgctctcctggctctcgctgcgagcgccacctccacgcatacaagcggcggctgcggctgccagccaccgccgccggttcatctaccgccgccggtgcatctgccacctccggttcacctgccaccttcggtgcatctcccaccgccggtccacctgccgccgccggtccacctgccaccgccggtccatgtgccgccgccggttcatctgccgccgccaccatgccactaccctactcaaccgccccggcctcagcctcatccccagccacacccatgcccgtgccaacagcc

SEQ ID NO: 343377 - DNA, 301 bp, Zea mays
  unsure (1)..(301): unsure at all n locations
caccacttgcccgagagtcgtattgtccaagccaacgcaggtgcagatgggggccgatcaccacctccgggcggancacgaccaccacaaaagggggaggaaggggggtcacccccaccaactgaaaccgcgctggtggcgccgcaacccccggtacagatactactacagcgggggcaagggcgggggcgcggatcccgccctctgcttcgacgaactcgtcctgctcctggccgcggggatcaccctgctggtgctctacgtaatgtaccgaccgttccaccccaccttacccgtcacc

SEQ ID NO: 343378 - DNA, 376 bp, Zea mays
ccaacccttccgcaaatgaaaaaattgtgtcaaccaatccgtaaaactccaataacggtgttaagcagtaaattaccatacattgaggaaaaaaaaaaaaaaaaaaaaaaaaaaaaaaaaaaaaaaaaaaaaaaaaaaaaaaaaaaaaaaaaaaaaaaaaaaggggccaacgaaaaaaaaaaaaaaaaaaaaaaaaaaaaaaaaaaaaaaaaaaaaaaaaaaaaaaaaaaaaaaaaaaaaaaaaaaaaaaaaaaaaaaggggggggagaatttaaaaaaaaaaaaaaataatggccgtgcccaagaaaaaaaaaatttattaaaaggcgcataaaaaaaaaaaaaaaatgaccgaataaaaaaaacacgaagcggg

SEQ ID NO: 343379 - DNA, 295 bp, Zea mays
aacattagggaccacaaaaaacaaaaaaaaaacaaaaacaaaaacaaacaacacaaacaaccaaaaaccaaacaaaaaaaaaccacaacccccacatacaaaaaccacaacaacaaaaacaaaaaacaaaaaacccaaaccacaccaccctacaaaaaccaaacaaaaaatcaaaaccacccatcccacccaccattaaccctcctaaatccaacaacaccccacccccacaacaacacttacccaaaacccattccacccacacaaaacatcacaacacaacacctacaccaac

SEQ ID NO: 343380 - DNA, 365 bp, Zea mays
cttacctttatcacccttgttctttttcaatcatcagccctattacaacagggacctttggtgcatttattggcacaaaacatcagggcacaacaactacaacaacttgtgctagcaaaccttgctgcctactctcagcaacagcagtttcttccattcaaccaactaggttcattgaactctgcttcttatttgcaacaacaacaactaccattcagccagctacctgctgcctacccccagcaatttcttccattcaaccaactagcagcattgaactctcctgcttatttacagcagcaacaactactaccattcagccagctagctggtgtgagccctgctaccttcttgacacaaccaca

SEQ ID NO: 343381 - DNA, 383 bp, Zea mays
caacaagcaacatagaaagtggtttttagtagcaacaatagagcaacaatggagaccaagatattttccctccttatgctccttgctctttctacatgtgttgctaacgcgacaattttccctcaatgctcacaagctcctatagcttccctttttcccccataccttccatcaattatagcttcagtatgtgaaaacccagctcttcaaccatataggcttcaacaagcaatcgcagcaagcaacatacctttatcgcccttgttgtgtcaacaatcgccagccctatctttggtgcagtcattggtacaaaccataagggcacaacagctgcagcaactcgtgctaactgtgatcaaaccaattacttttggcaaaccttt

SEQ ID NO: 343382 - DNA, 347 bp, Zea mays
ccttccgaacttggcaccttaaaaggcccatttttgacccaccaagggaggccaaaggggggggcctcctaagcctcgtgggccttttggaaaggcctgttccgggaaccattttccaacaaggctaacaacctccaatagccttcccttcttcccccgaacctttaaccaccggggtcttcggtatgtgaaaaaccccaattcttcaaccctataggacccaaacaggcaatcgcagctggcatcttacctttatcaccccttgttcctccaacaatcatcagccctattacagcagttacctttgggtgcatttattggcacaaaacatcagggcacaacaacta

SEQ ID NO: 343383 - DNA, 386 bp, Zea mays
gacaaagcccaatacaaccaattctcatatcctgacaatggcacacatacttgggggcattgtcatcctcggcggcacctatgcaactgctcttaccgcgtccatttccgcaccatggtgacagactgccttcgcttcgtaccaccacacgatccacgctctaccgggggatacagtctgtccaaacgccattgttcaccagtatcggaaccaacacgtactggcagttctgatcactacttttatgacccttgccactgaaccaaatatcacacctataactgcttactcccttacagtacatatattggcacagaacatcaagccacaacaatatacaacatctagcgctagcaaacttcactgcctactctgagaaacaacaa

SEQ ID NO: 343384 - DNA, 83 bp, Zea mays
cccacgccttccggttgggaaaaacctccccggttcgggttggatcgggacattgaaaggacgatgggggggcgcgcgctcct

SEQ ID NO: 343385 - DNA, 381 bp, Zea mays
tccggccggtttttcccaacttaaacggttttggcagttagttgttacaagcttagcttgccgggccccccttaaggcggcggtcgacgttaccgtccttggaatccaactggtcttaagttcttttactcgaacgccggacacccttgaacccggccgccccccgtggccatggtcgccggcgccgccgccatccttctggtcctgcccgtcgtcgccgtcctcgcgtcgtcgtccgcggcggcggacgggtcgttcataacgtgggacgacctcagcaccccgtccgccgccgccgtgcagggcggcgtgaaggcggccagcgggggaggcgcccgcgagctggacacgatcgtggtggcgcaagacgggacggggcac

SEQ ID NO: 343386 - DNA, 419 bp, Zea mays
  unsure (1)..(419): unsure at all n locations
ccggtccggaaattccccggggggcgccacgcgtncgattgagaccaacaagcaacatagattgtggaatccagtagcaacaatagagcagcagtggagaccaagatattttccctccttatgctccttgctctttctacatgtgttgctaacgcgacaattttccctcaatgctcacaagctcctatagcttccctttttcccccataccttccatcaattatagcttcagtatgtgaaaacccagctcttcaaccatataggcttcaacaagcaatcgcagcaagcaacatacctttatcgcccttgttgtgtcaacaatcgccagccctatctttggtgcagtcattggtacaaaccatcagggcacaacagctgcagcaactcgtgctacctgtgatcaaccaagtagctctggc

SEQ ID NO: 343387 - DNA, 371 bp, Zea mays
  unsure (1)..(371): unsure at all n locations
ggtcttcagaccattagctttattttttccagagcgcagaagaacccgatcgaggccatgagggtgttgctcgttgccctcgctctcctggctctcgctgcgagcgccacctccacgcatacaagcggcggctgcggctgccagccaccgccgccggttcatctaccgccgccggtgcatctgccacctncggttcacctgccacctccggtgcatctnccaccgccggtccacctgccgccgccggtccacctgccaccgccggtccatgtgccgccgccggttcatctgccgccgccaccatgccactaccctactcaaccgccccggcctcagcctcatccccagccacacccatgcccgtgccaaca

SEQ ID NO: 343388 - DNA, 407 bp, Zea mays
  unsure (1)..(407): unsure at all n locations
ccggtccggaaannccggggggcccacgccgtccggggtcttaaaaccattagctttatctatttcagagcgcagaagaacccgatcgacagcatgagggtgttgctcggtgccctcactctcctggctctcgctgcgagcgccacctccacgcatacaagcggcggctgcggctgccagccaccgccgccggttcatctaccgccgccggtgcatctgccacctccggttcacctgccacctccggtgcatctcccaccgccggtccacctgccgccgccggtccacctgccaccgccggtccatgtgccgccgccggttcatctgccgccgccaccatgccactaccctactcaaccgccccggcctcagcctcatccccagccacacccatgcccgtgccaaca

SEQ ID NO: 343389 - DNA, 145 bp, Zea mays
accctacaggatccaacaggcaatcgcagcaggcatcttacctttatcacccttgttcctccaacaaccgtcagccctattacagcagttacctttggtgcatttgttggcacaaaacatcaaggcacaacaactacaacaactt

SEQ ID NO: 343390 - DNA, 383 bp, Zea mays
gaccaacaagcaacatagaaagtggtttccagtagcaacaatagagcaacaggggcgaccaagatattttccctccttatgctccttgctctttctgcatgtgttgctaacgcgacaattttccctcaatgctcacaagctcctatagcttcccttcttcccccataccttccatcaatgatagcttcagtatgtgaaaacccagctcttcaaccctataggctccaacaagcaatcgcagcaagcaacatacctttatcacccttgtttcaacaatcgccagccctatctttggtgcagtcattggtacaaaccatcagggcacagcagctgcagcaactcgtgctacctgtgatcaaccaagtagctctggcaaacctttc

SEQ ID NO: 343391 - DNA, 378 bp, Zea mays
attattgagaccaacaagcaacatattttttggaatccagtagcaacaatagaggagcaattgcgaccaagatatgggccctccttatgctccttgctctttctgcatgtgttgctaacgcgacaattttccctcaatgctcacaagctcctatagcttcccttcttcccccataccttccatcaatgatagcttcagtatgtgaaaacccagctcttcaaccctataggctccaacaagcaatcgcagcaagcaacatacctttatcacccttgtttcaacaatcgccagccctatctttggtgcagtcattggtacaaaccatcagggcacagcagctgcagcaactcgtgctacctgtgatcaaccaagtagctc

SEQ ID NO: 343392 - DNA, 354 bp, Zea mays
attcaaaaacacaccaagcgaatttttctagcaacgacttaacaacaatggcgggcaagatattagccctcctggcgcttcttgccctttttgtgagcgcaacaaatgcgttcattattccacaatgctcacttgctcctagtgccattataccacagttcctccgaccagttacttcaatgggcttcgaacacctagctgtgcaagcctacaggctacaacaagcgcttgcggcgagccgtttacaacagccaattaaccaattgcaacaacaatccttggcacatctaaccatacaaaccatcgcaacacaacagcaacaacagttcctaccagcactgagccaactagatg

SEQ ID NO: 343393 - DNA, 386 bp, Zea mays
aaacaagcaacatagaaagtggaatttattatcaacaatagagcaacaatggcggcgaagatattttccctccttatgctccttgctctttctgcatgtgttgctaacgcgacaattttccctcaatgctcacaagctcctatagcttcccttcttcccccataccttccatcaatgatagcttcagtatgtgaaaacccagctcttcaaccctataggctccaacaagcaatcgcagcaagcaacatacctttatcacccttgtttcaacaatcgccagccctatctttggtgcagtcattggtacaaaccatcagggcacagcagctgcagcaactcgtgctacctgtgatcaaccaagtagctctggcaaacctttctcccta

SEQ ID NO: 343394 - DNA, 380 bp, Zea mays
ctgggtcttcagaccattagctttatttactccagagcgcagaagaacccgggggacaccatgagggtgttgctcgttgccctcgctctcctggctctcgctgcgagcgccacctccacgcatacaagcggcggctgcggctgccagccaccgccgccggttcatctaccgccgccggtgcatctgccacctccggttcacctgccacctccggtgcatctcccaccgccggtccacctgccgccgccggtccacctgccaccgccggtccatgtgccgccgccggttcatctgccgccgccaccatgccactaccctactcaaccgccccggcctcagcctcatccccagccacacccatgcccgtgccaacagccgca

SEQ ID NO: 343395 - DNA, 347 bp, Zea mays
ggtcttcagaccattagctttatctactccagagcgcagaagaacccgatcgacaccatgagggtgttgctcgttgccctcgctctcctggctctcgctgcgagcgccacctccacgcatacaagcggcggctgcggctgccagccaccgccgccggttcatctaccgccgccggtgcatctgccacctccggttcacctgccacctccggtgcatctcccaccgccggtccacctgccgccgccggtccacctgccaccgccggtccatgtgccgccgccggttcatctgccgccgccaccatgccactaccctactcaaccgccccggcctcagcctcatcccca

SEQ ID NO: 343396 - DNA, 344 bp, Zea mays
aagcaacatagaaagtggaatccagtttcaacaatagagcaacaatggcgaccaagatattttccctccttatgctccttgctctttctgcatgtgttgctaacgcgacaattttccctcaatgctcacaagctcctatagcttcccttcttcccccataccttccatcaatgatagcttcagtatgtgaaaacccagctcttcaaccctataggctccaacaagcaatcgcagcaagcaacatacctttatcacccttgtttcaacaatcgccagccctatctttggtgcagtcattggtacaaaccatcagggcacagcaggtgcagcaactcgtgctacct

SEQ ID NO: 343397 - DNA, 359 bp, Zea mays
  unsure (1)..(359): unsure at all n locations
gcgtncgctgggtcttcagaccattatctttatttacttcagagcgcagaagaacccgatcgacagcatgagggtgttgctcgttgccctcgctctcctggctctcgctgcgagcgccacctccacgcatacaagcggcggctgcggctgccagccaccgccgccggttcatctaccgccgccggtgcatctgccacctccggttcacctgccacctccggtgcatcttccaccgccggtccacctgccgccgccggtccacctgccaccgccggtccatgtgccgccgccggttcatctgccgccgccaccatgccactaccctactcaaccgccccggcctcagcctcatccccagc

SEQ ID NO: 343398 - DNA, 351 bp, Zea mays
ccaactagcaacatagaaagcacaattttgttccaacaatggcagccaaaatatggtggctccttatgctccttggtctttctgcaagtgctgctacggcgaccattttcccgaaatgctcgcaagctcctatagcttcccttcttcccccgtacctctcaccagcggtgtcttcggtatgtgaaaacccaattcttcaaccctacaggatccaacaggcaatcacagctggcatcttacctttatcacccttgttcctccaacaatcatcagccctattacatcagttacctttggtgcatttattggcacaaaacatcagggcacaacaactacaacaacttgtgctag

SEQ ID NO: 343399 - DNA, 351 bp, Zea mays
caacaagcaacatataaagtggaatttagtttctacaatagagcaacaatggcggccgagatattttccctccttatgctccttgctctttctgcatgtgttgctaacgcgacaattttccctcaatgctcacaagctcctatagcttcccttcttcccccataccttccatcaatgatagcttcagtatgtgaaaacccagctcttcaaccctataggctccaacaagcaatcgcagcaagcaacatacctttatcacccttgtttcaacaatcgccagccctatctttggtgcagtcattggtacaaaccatcagggcacagcagctgcagcaactcgtgctacctgtg

SEQ ID NO: 343400 - DNA, 311 bp, Zea mays
gcaacatagaaagcacaatagtgttttaacaatggcagccaaaatatttgggctgcttatgctccttgggctttctgcaagtgctgctaccgcgaccattttcccgaaatgctcgcaagctcctatagcttcccttcttcccccgtacctctcaccagcggtgtcttcggtatgtgaaaacccaattgttcaaccctacaggatccaacaggccatcacagctggcattttacctttatcacccttgctccttcaacaatcatcatgcctattacatcaattacctttggtgcatttattgggacaaaaca

SEQ ID NO: 343401 - DNA, 343 bp, Zea mays
attattgagaccaactagcaacatattaagcacaatagtgtaccaacaatggcagccaaaatattttgcttgcttatgctccttggtctttctgcaagtgttgctaccgcaaccattttcccacaatgctcacaagctcctatagcttcccttcttcccccatacctctcaccagcggtgtcttcaatgtgtgaaaacccaattgttcaaccctacaggatccaacaggcaatcgcaacaggcatcttaccattatcacccttgttcctccaacaaccgtcagccctattacagcaattacctttggtccatttggtggcacaaaacatcagggcacaacaac

SEQ ID NO: 343402 - DNA, 355 bp, Zea mays
gcgcagaagaacccgatcgacaccatgagggtgttgctcgttgccctcgctctgctggctctcgctgcgagcgccacctccacgcatacaagcggcggctgcggctgccagccaccgccgccggttcatctaaccgccgcggtgcatttgccccctccggttaacttgcaacctccggggcttttccaacggcggttcaacctgccgccgccggtcaacttgcaaccgccggtccatgtgccgccgccggttaatttgccgccgccacaatgccattaccttattaaaccgccccggcctaagccttatccccagccacacccatgcccgtgccaacagccgtatccaagcccgg

SEQ ID NO: 343403 - DNA, 302 bp, Zea mays
attgagaccaactagcaacatttaatgcacaatagtgtaccaacaatggcggccaaaatattttgcctccttatgctccttggtctttctgcaagtgctgctacggcgaccattttcccgaaatgctcgcaagctcctatagcttcccttcttcccccgtacctctcaccagcggtgtcttcggtatgtgaaaacccaattcttcaaccctacaggatccaacaggcaatcacagctggcatcttacctttatcacccttgttcctccaacaatcatcagccctattacatcagttaccttt

SEQ ID NO: 343404 - DNA, 156 bp, Zea mays
  unsure (1)..(156): unsure at all n locations
atnttgagcattcagaaacacaccaagcgaagctacctagcaacgacttaacaacaatggctaccaagatattagccctccttgcgcttcttgccctttttgtgagcgcaacaaatgcgttcattattccacaatgctcacttgctcctagtgcca

SEQ ID NO: 343405 - DNA, 143 bp, Zea mays
catcaatcatcattcatcctagcatttttttctccaaatcaaacctccaacagcgaagggtctaacttcaaaaacgatgatgctgcagctcttggcttttgctcttaccacattaatatcaagtttgtttagctcacatccaa

SEQ ID NO: 343406 - DNA, 352 bp, Zea mays
attttgagcattcagaaacacacctttcgtttcacattagcaacaacctaacaacaatggctaccaagatattatccctccttgcgcttcttgcgctttttgcgagcgcaacaaatgcgttcattattccacaatgctcacttgctccaagttccattattacacagttcctcccaccagttacttcaatgggcttcgaacacccagctgtgcaagcctataggctacaacaagcaattgcggcgagcgtcttacaacaaccaatttcccagttgcaacaacaatccttggcacatctaacaatacaaaccatcgcaacgcaacagcaacaacaatttctaccagcactgag

SEQ ID NO: 343407 - DNA, 345 bp, Zea mays
  unsure (1)..(345): unsure at all n locations
caaagcggcagtgcgtatagaggattttcttacagaacagcatgaanatggtcagcgggctcgtcttgtgcctggctctgtcagctgccatcgcctctgcaatgcagatgccctgcccctgcgcggggctgcagggcttgtacggcgctggcgccggcctgacgactatgatgggcgccggcgggctgtacccctacgcggagtacctgaggcagccgcagtgcatcccgctggcggcggcgccctactacgccgggtgtgggcagactagcgccatgtaccagccgctccggcaacagtgctgccagcagcagatgaggatgatggacgtgcattccgtcgcgc

SEQ ID NO: 343408 - DNA, 204 bp, Zea mays
gatcgtgctaattctacttctttttggtatcgccgccgctcccggcgcggggggttgtctactaccgcaggaggtctccgctgcaggatcggtggtccagcgtgcgatggctgcggctcctaccgtgcggggctacgggccagcgacgccgtcgtcgtcgtcggtggcgctgcctcggtcgcgatcgtgggtgcccgccccttt

SEQ ID NO: 343409 - DNA, 345 bp, Zea mays
tcgacaccatgagggtgttgttcgtttccctcgctctcctggctctcgctgggggcgccatctccacgcatacgagcggccactgctgctgccatccaccgccgccggttcatctaccgccggcggagcatctgccacctccggttcacctgccacctccggtgcatctcccaccgccggtccacctgacgacgccggtccacctgccaccgccggtccatgtgccgccgccggttcatctgccgccgtcaccatgccactaccctactcaaccgccccggcctcagcctcatccccagccacacccatgcccgtgccaacagccgcattcaagcccgtgccaac

SEQ ID NO: 343410 - DNA, 97 bp, Zea mays
gacgcgccctctagcggtgcatttatcgccgccggtgtatctgtcactcgcagcatgaccgttacactttccaacgccccagcgcccgcttctttcg

SEQ ID NO: 343411 - DNA, 347 bp, Zea mays
ttttagcattcataacacaccattcgatttgcactagcaacaacctaacaacaggggctaccaagatattagccctccttgcgcttcttgcccttttagtgagcgcaacaaatgcgttcattattccacagtgctcacttgctcctagtgccattattccacagttcctcccaccagttacttcaatgggcttcgaacatccagccgtgcaagcctacaggctacaactagcgcttgcggcgagcgtcttacaacaaccaattgcccaattgcaacaacaatccttggcacatctaaacctacaaaccattacaacgcaacagctacaacagtttctgccatcactg

SEQ ID NO: 343412 - DNA, 309 bp, Zea mays
attgtgtctgtgtgtgtattctacgtagttcggaaggagaatatgcgatgtttgcatcttgtcattgtgacacagaacatcaggtgccctcaccagataaagaatcttgtgaagggtgatttgggattgacacaggttggaaaaaattatagtatttgggggccagaaaagcagtgagaaaagcctttgaagaaatagagtgcctttggtgtgtaagagtttgctgcaacatacaccaatgtgattcttacactcagattgcttgtgcctgaaaccttcttcattctcaaacacaagtcctctaggaaa

SEQ ID NO: 343413 - DNA, 341 bp, Zea mays
cccacgcgtccgccaaatacaaatttttttttgggaaagccgctcgaatccgggccgggaccccacacccactgatgggaccctccaccttctctcctccctcccttccatccaatcctcggaacgagcgcgcgggcgaggaggacccccgacggaggatggcggcggcggctagggttttccgcgggtccctcttcctgatgtccccggcggcgggcgccaaggcgtctgcagccaataaggcgggcacagcggctgcggctgcagccgtggccaataagaccgaggcggccactaccaagccgagactgccgaccgggatcacgaagccggtgccggtc

SEQ ID NO: 343414 - DNA, 348 bp, Zea mays
gagaccaacaagcaacatagaaagtgttttctagtagcaacaatagagcaacaatggcgaccaatatattttccctccttatgctccttgctctttctgcatgtgttgctaacgcgacaattttccctcaatgctcacaagctcctatagcttcccttcttcccccataccttccatcaatgatagcttcagtatgtgaaaacccagctcttcaaccctataggctccaacaagcaatcgcagcaagcaacatacctttatcacccttgtttcaacaatcgccagccctatctttggtgcagtcattggtacaaaccatcagggcacagcagctgcagcaactcgtgc

SEQ ID NO: 343415 - DNA, 323 bp, Zea mays
ctcgcatgcctgtgcacttctccatttcctccactgggtcttcagaccattagctttatctactccagagcgcagaagaacccgatcgacaccatgagggtgttgctcgttgccctcgctctcctggctctcgctgcgagcgccacctccacgcatacaagcggcggctgcggctgccagccaccgccgccggttcatctaccgccgccggtgcatctgccacctccggttcacctgccacctccggtgcatctcccaccgccggtccacctgccgccgccggtccacctgccaccgccggtccatgtgccgccgccggttca

SEQ ID NO: 343416 - DNA, 295 bp, Zea mays
gcaacatagaaagcacaatagtgttccaacaatggcagccaaaatattttgcctgcttatgctccttggtctttctgcaagtgctgctacggcgaccattttcccgcaatgctcgcaagctcctatagcttcccttcttcccccgtacctctcaccagcggtgtcttcggtatgtgaaaacccaattcttcaaccctacaggatccaacaggcaatcgcagctggcatcttacctttatcacccttgttcctccaacaatcatcagccctattacaacagttacctttggtgcat

SEQ ID NO: 343417 - DNA, 345 bp, Zea mays
cagaaacacaccaagcgaagctcattttctacaacctaacaacaatggctgccgagatattatccctccttgcgcttcttgcgctttttgcgagcgcaacaaatgcgttcattattccacaatgctcacttgctccaagttccattattacacagttcctcccaccagttacttcaatgggcttcgaacacccagctgtgcaagcctataggctacaacaagcaattgcggcgagcgtcttacaacaaccaatttcccagttgcaacaacaatccttggcacatctaacaatacaaaccatcgcaacgcaacagcaacaacaattcctaccagcactgagccacc

SEQ ID NO: 343418 - DNA, 252 bp, Zea mays
  unsure (1)..(252): unsure at all n locations
tcggtaaaagataccgaaacgacaactgtttgtttctatctggccaggtgtanggcggaagggtcactggtggatagatggcagattgtgacggtacctgactcggactgcaccattcaggatatggacatttttcatgataatttagttctctttcttcgaaagaatggtactcctcttttttgttccatcagtatgccaattgatgttcaggagccaaaggaacttgatgatctcaacccaatgtttttt

SEQ ID NO: 343419 - DNA, 342 bp, Zea mays
ccaactagcaacatataaagcacattttttttccaacaatggcagccaaaatagggtggcttcttatgctccttggtctttctgcaagtgctgctacggcgaccattttcccgaaatgctcgcaagctcctatagcttcccttcttcccccgtacctctcaccagcggtgtcttctgtatgtgaaaacccaattcttcaaccctacaggatccaacaggcaatcacagctggcatcttacctttatcacccttgttcctccaacaatcatcagccctattacatcagttacctttggtgcatttattggcacaaaacatcagggcacaacaactacaacaac

SEQ ID NO: 343420 - DNA, 347 bp, Zea mays
caacaagcaacatagaaagtggaatccagtttcaacaatagagcaacaatggagaccaggatattttccctccttatgctccttgctctttctacatgtgttgctaacgcgacaattttccctcaatgctcacaagctcctatagcttccctttttcccccataccttccatcaattatagcttcagtatgtgaaaacccagctcttcaaccatataggcttcaacaagcaatcgcagcaagcaacatacctttatcgcccttgttgtgtcaacaatcgccagccctatctttggtgcagtcattggtacaaaccatcagggcacaacagctgcagcaactcgtgct

SEQ ID NO: 343421 - DNA, 341 bp, Zea mays
ctgggtcttcagaccattagctttttctactccagagcgcagaagaacccgagcgacaccatgagggtgttgctcgttgccctcgctctcctggctctcgctgcgagcgccacctccacgcatacaagcggcggctgcggctgccagccaccgccgccggttcatctaccgccgccggtgcatctgccacctccggttcacctgccacctccggtgcatctcccaccgccggtccacctgccgccgccggtccacctgccaccgccggtccatgtgccgccgccggttcatctgccgtcgccaccatgccactaccctactcaaccgccccggcctcagcc

SEQ ID NO: 343422 - DNA, 345 bp, Zea mays
gagcattcagaaacacaccattcgtttctcactagcaacaacctaacaacaatggctaccaagatattatgcctccttgcgcttcttgcgctttttgcgagcgcaacaaatgcgtccattattccacaatgctcacttgctcctagttccattattccacagttcctcccaccagttacttcaatggccttcgaacacccagctgtgcaagcctataggctacaacaagcgattgcggcgagcgtcttacaacaaccaattgcccaattgcaacaacaatccttggcacatctaacaatacaaaccatcggaacgcaacagcaacaacagttcctaccagcactg

SEQ ID NO: 343423 - DNA, 346 bp, Zea mays
  unsure (1)..(346): unsure at all n locations
gcaaagcggcagtgcgtagagaggatcgtttaacagaacagcatgaanatgggggtgggtctcgtcgtgtgcctggctctgtcagctgccagcgcctctgcaatgcagatgccctgcccctgcgcggggctgcagggcttgtacggcgctggcgccggcctgacgacgatgatgggcgccggcgggctgtacccctacgcggagtacctgaggcagccgcagtgcatcccgctggcggcggcgccctactacgccgggtgtgggcagacgagcgccatgtaccagccgctccggcaacagtgctgccagcagcagatgaggatgatggacgtgcagtccgtcgcgc

SEQ ID NO: 343424 - DNA, 200 bp, Zea mays
attgagaccaactagcaacatagtttttcttttttttgtaccaacaatctcatcggaaaggttatgcctccttatgctggccacgtctctctgcacgtgctgctacggctaccatttccccctaatgcaggcaagctcgtatacgttccgtttttaccgcatccacacgatcaccatgtggatcggcgtcataaaacccg

SEQ ID NO: 343425 - DNA, 352 bp, Zea mays
tcattattccacagtgctcacttgttcttattgccattattccacagttcctcggaccagttacttcaatgggcttcgaacatccagccgtgcaagcctacaggctacaactagcgcttgcggcgagcgtcttacaacaaccaattgcccaattgcaacaacaatccttggcacatctaaacctacaaaccatcgcaacgcaacagcaacaacagtttctgccatcactgagccacctagccgtggtgaaccctgtcgcctacttgcaacagcagctacttgcatccaacccacttgctctggcgaacgtagctgcataccagcaacaacaacgtctgcaacagtttatgcc

SEQ ID NO: 343426 - DNA, 349 bp, Zea mays
ctgggtcttcagaccattagctttatcttctccagagcgcagaagaacccgagggacaccatgagggtgttgcgtcgttgccctcgctctcctggctctcgctgcgagcgccacctccacgcatacaagcggcggctgcggctgccagccaccgccgccggttcatctaccgccgccggtgcatctgccacctccggttcacctgccacctccggtgcatctcccaccgccggtccacctgccgccgccggtccacctgccaccgccggtccatgtgccgccgccggttcatctgccgccgccaccatgccactaccctactcaaccgccccggcctcagcctcatccc

SEQ ID NO: 343427 - DNA, 347 bp, Zea mays
gcaattagctcatcgactccagattttagaactcgacaccatgaaggtgctgggcgttgcccttgctctcctggcgctcgctgcgagcgccgcctccagtacaagcggcggctgtggctgccagacaccaccgtttcatctaccgcctccgttctatatgccgcctccgttctatctgccgccgcagcagcagccgcagccatggcaataccccactcaaccaccgcagctaagcccgtgccagcagttcggatcctgcggcgtctgcagcgtcggcagcccgttcctgggccagtgcgtcgagttcctgaggcaccagtgcagcccggcggcgacgccctacggct

SEQ ID NO: 343428 - DNA, 348 bp, Zea mays
ggagagaggatagtctcatttcattttctatcgcgagcggcacctttaagagggtgatcattgaaaaccaatgacaccctccccttctgcctcaatgccggcgtaaaggccaacctcgcgcctccgcacccgttcaagtccagcatccaatcggaggccaagttctgggcggacaaaaaaaattttgggacagaggccatttacggatccgccttgaacatccgaaaggttctctatgccaaaatccttttaaggttccaaaggccccttgaggcttggcaattatttttgttggatatgaggcactgacaggttccctaaatgattgtggttttgaagattatctta

SEQ ID NO: 343429 - DNA, 309 bp, Zea mays
caagcacacacttttttttttagccagcgccagtatgaagagggggattttcgagagcggctagagccccctctcatctctcaatgtggggcttgaggtctgacctcaacaagcaaaaaagctaatgtcaagcatccaatctgaagataccaccctgaagggcccgaataaggttaagaagatcttcatttaactagaccctcggtatgatcgcaggaagcatgttgaagatgcaccactggaacgagcaaaggaagactaggcccttctatgacatgcttgacgatgtcaagaacagacatgttccct

SEQ ID NO: 343430 - DNA, 291 bp, Zea mays
gtagagaggagaggcgcaaatcattttacgatggccagcggcatcatgaagagggggatcagcgagacccacgagaccctccccttctgcctcaatgccggcataaaagccgacctcctgccgacataccagctccagtccagcatccaatcggaggccaagttctagtcggacatgaagacgtaagggacagaggccatttacagatccgccttcgaacatccgcagagatctcgataccacactcctctcaaggacccaaaaggctcctgctgcttctccataatctct

SEQ ID NO: 343431 - DNA, 348 bp, Zea mays
agcaaagcggcagtgcgtagagaggtatcgtcgaacagaacagcatgaagatgggcatcgttctcgtcgtgtgcctggctctgtcagctgccagcgcctctgcaatgcagatgccctgcccctgcgcggggctgcagggcttgtacggcgctggcgccggcctgacgacgatgatgggcgccggcgggctgtacccctacgcggagtacctgaggcagccgcagtgcatcccgctggcggcggcgccctactacgccgggtgtgggcagacgagcgccatgtaccagccgctccggcaacagtgctgccagcagcagatgaggatgatggacgtgcagtccgtcgcgc

SEQ ID NO: 343432 - DNA, 347 bp, Zea mays
gcaacatagaaagtggaatcctgttttaacaatagagcaacaatggagaccaagatattttccctccttatgctccttgctctttctacatgtgttgctaacgcgacaattttccctcaatgctcacaagctcctatagcttcccttttttccccataccttccatcaattatagcttcagtatgtgaaaacccagctcttcaaccatataggcgttaacaagcaatcgcagcatgcaacatacctttatcgcccttgttgtgtcaacaatcagcagccctatctttggtgcagtcattggtacaaaccatcagggcacaacagctgcagcaactcgtgctacctgt

SEQ ID NO: 343433 - DNA, 364 bp, Zea mays
gcgttcgcccacgcgtccgccctgctccattctttttttgtcgccaatcccttccccttctcgggggccgctgagtgagaagaagagatggccggcaagggcgatggcccggctatcggcatcgatctcggcacgacgtactcttgcgtcggcgtgtggcagcacgaccgcgtcgagatcattgccaacgaccagggtaaccgcaccacgccctcgtacgtcgccttcaccgactccgagcgcctcatcggagatgcggccaagaaccaggtcgccatgaaccccatcaacaccgtctttgatgccaagcgtctcatcggcaggaggttcagtgatgcgtctgtccagagtgatatcaagctgg

SEQ ID NO: 343434 - DNA, 357 bp, Zea mays
ctcgctctcctggctctcgctgcgagctcctcctccacgcatacaagcggcgggtgcggctgccagccaccgccgccggttcatctaccgccgccggtgcatctgccacctccggttcacctgccacctccggtgcatctcccaccgccggtccacctgccgccgccggtccacctgccaccgccggtccatgtgccgccgccggttcatctgccgccgccaccatgccactaccctactcaaccgccccggcctcagcctcatccccagccacacccatgcccgtgccaacagccgcatccaagcccgtgccagctgcagggaacctgcggcgttggcagcaccccgatcctgggg

SEQ ID NO: 343435 - DNA, 352 bp, Zea mays
  unsure (1)..(352): unsure at all n locations
ttatcattcanaaacacaccaagcgttatctctctatcaacgacctaacaacagggggtgccaagatattatccgtgcttgcacttcttgccctttttgtgagcgcaacaaatgcgttcattattccacaatgctcacttgctcctagtgccattattccacagttcctcccaccagttacttcaatgggcttcgaacacctagctgtgcaagccaacatgcaacaacaagcgcttgcggagagcgttttacaacaaccaattgcccaattgcaacaacaatccttgccacatctaacaatacaagccatcacaacgcatcagcaacaacagttcctaccagcactgagcca

SEQ ID NO: 343436 - DNA, 353 bp, Zea mays
  unsure (1)..(353): unsure at all n locations
attagctttatctactccagagcgcttattaacccgatcgacaccatnaaggggggggtcgttgacctcactctgctggctctcactgcgagcgccacctccacgcatacaagcggcggctgcggctgccagccaccgccgccggttcatctaccgccggcggtgcatctgccacctcctgttcacctgccacctccggtgcatctcccaccgccggtccacctgccggcgccggtccacctgccaccgccggtccatgtgccgccgcctgttcatctgccgccggcaccatgccactaccctactcaaccgccccggcctcatcctcatccccagccacacccatgcccgtg

SEQ ID NO: 343437 - DNA, 342 bp, Zea mays
tattgagaccaacaagcaactttttttttggaatccagtagcaacaatagggcggcaatggagaccaagatattgtccctccttatgctccttgctctttctacatgtgttgctaacgcgacaattttccctcaatgctcacaagctcctatagcttccctttttcccccataccttccatcaattatagcttcagtatgtgaaaacccagctcttcaaccatatatgcttcaacaagcaatcgcagcaagcaacatacctttatcgaccttgttgtgtcaacaatcgacagccctatctttggtgcagtcattggtacaaaccatcatggcacaacagctg

SEQ ID NO: 343438 - DNA, 388 bp, Zea mays
  unsure (1)..(388): unsure at all n locations
ngggtcttcaaacattagctttatttactttagagcgcagaagaacccgatcgacaccatgagggtgttgctcgttgccctcgctctcctggctctcgctgcgagcgccacctccacgcatacaagcggcggctgcggctgccagccaccgccgccggttcatctaccgccgccggtgcatctgccacctccggttcacctgccacctccggtgcatctcccaccgccggtccacctgccgccgccggtccacctgccaccgccggtccatgtgccgccgccggttcatctgccgccgccaccatgccactaccctactcaaccgccccggcctcagccttatccccagccacacncatgcccgtgccaacagccgcatccaagcccg

SEQ ID NO: 343439 - DNA, 382 bp, Zea mays
  unsure (1)..(382): unsure at all n locations
attagctntatctctccagagcgtttaagattccgatcgacaccatgagggtgttgctcgtggccctcgctctcctggctctcgctgcgagcgccacctccacgcatacaagcggcggctgcggctgccagccaccgccgccggttcatctaccgccgccggtgcatctgccacctccggttcacctgccacctccggtgcatctcccaccgccggtccacctgccgccgccggtccacctgccaccgccggtccatgtgccgccgccggttcatctgccgccgccaccatgccactaccctactcaaccgccccggcctcagcctcattcccagccacacccatgcccgtgccaacagccgcatccaagccccgtgccagc

SEQ ID NO: 343440 - DNA, 344 bp, Zea mays
ctagcaacatagaagcacaatagtttaccaacaatggcagccaaaatattttgcctccttatgctccttggtctttctgcaagtgctgctacggcgaccattttcccgcaatgctcgcaagctcctatagcttcccttcttcccccgtacctctcaccagcggtgtcttcggtatgtgaaaacccaattcttcaaccctacaggatccaacaggcaatcgcagctggcatctaacctttatcacccttgttcctccaacaatcatcaacccttattacaacaagtaccttttggtgcattttattggcacaaaaacatcaagggcacaacaactaccaacaact

SEQ ID NO: 343441 - DNA, 254 bp, Zea mays
cccacgcgtacgtagcttttctactccagagcgcagattaacccgatcgacaccatgagggtgttgctcgttgccctcgctctcctggctctcgctgcgagcgccacctccacgcatacaagcggcggctgcggctgccagccaccgccgccggttcatctaccgccgccggtgcatctgccacctccggttcacctgccacctccggtgcatcttccaccgccggtccacctggccgcgccggtcacctggca

SEQ ID NO: 343442 - DNA, 233 bp, Zea mays
cgctgttctcagcgatgccctgcccagcgtttgtgggacaacgcgacagcggcggaaggggcggcgcatgcgtttctgctggccgaacccccccggggacaacgaacccccgtgcgggggccggttccctttcgggcttggccccgggggcaaactggtgaccagcggggtgggcgcccggattatttttaatccggcgggcattcccctgcttggcgtggtgcccggtgggg

SEQ ID NO: 343443 - DNA, 366 bp, Zea mays
  unsure (1)..(366): unsure at all n locations
tgggtcttcagacattagctttatctactttagagcgcagaagaacccgatcgacaccatgagggtgttgctcgttgccctcgctctcctggctctcgctgcgagcgccacctccacgcatacaagcggcggctgcggctgccagccaccgccgccggttcatctaccgccgccggtgcatctgccacctccggttcacctgccacctccggtgcatcttccaccgccggtccacctgccgccgccggtccacctgccaccgccggtccatgtgccgccgccggttcatctngccgcgcaccatgtactaccctactaaccgcccgcctcagctatcccagcacancatgtcgtgcaacagtgatc

SEQ ID NO: 343444 - DNA, 193 bp, Zea mays
acctgcgacaccagataggtgagacagcgatttcatttttcgttcctctccccggcggtgctaggggggcacacccggagggggatcagctatccagtggaacttcaaattaccggcggcagctcctagccaattgctcctttccggtaaccacccctttggacctctgttctcatttggacgcatgcaacaa

SEQ ID NO: 343445 - DNA, 333 bp, Zea mays
  unsure (1)..(333): unsure at all n locations
cagcattcanaaacacaccagcgaagcgcactatcattttcctaacaacaatggctaccaagatattagccctccttgcgcttcttgcccttttagtgagcgcaacaaatgcgttcattattccacagtgctcacttgctcctagtgccattattccacagttcctcccaccagttacttcaatgggcttcgaacatccagccgtgcaagcctacaggctacaactagcgcttgcggcgagcgtcttacaacaaccaattgcccaattgcaacaacaattcttgggacatctaaacctacaaaccatcgcaacgcaacagcaacaacaggttt

SEQ ID NO: 343446 - DNA, 124 bp, Zea mays
tcaaatcgtacatcatattcaaaacacgacttcatgtttgtgcttatcgcacccccccctgttctgggggtcgtttatagcgcaagctgcggtacaagctgccacttactctcccatactctac

SEQ ID NO: 343447 - DNA, 349 bp, Zea mays
ccaatccagatcacaaagcggctgttcgtttataggatcgtcgaacagaacagcatgaagatggtcatcgttctcgtggcgtgcctggctctgtcagctgccagcgcctctgcaatgcagatgccctgcccctgcgcggggctgcagggcttgtacggcgctggcgccggcctgacgacgatgatgggcgccggcgggctgtacccctacgcggagtacctgaggcagccgcagtgcagcccgctggcggcggcgccctactacgccgggtgtgggcagacgagcgccatgtaccaaccgctccggcaacagtgctgccagcagcagatgatgatgatggacgtgcagt

SEQ ID NO: 343448 - DNA, 55 bp, Zea mays
caactacgtcgcgtgctgcggggtggtactctctatagtgcacctaaattcaatt

SEQ ID NO: 343449 - DNA, 294 bp, Zea mays
aatcatcattcacttagtagtatattgcactttatcaaatctgcaacatcaattatctaactgcaaaaaccatgaagctggtgcttgtggttcttgctttcattgctttagtatcaagagtttcttgtacacagacaggcggttgcagctgttgtcaacatcatatccatgatcagtaacatcattcataataacatcattcactaaaacaactccattaaccaccaccacaacattaccagcatttttaatcccatctacatcaatgtttacatgtaaccacaaaatcattta

SEQ ID NO: 343450 - DNA, 388 bp, Zea mays
ttgagaccaacaagcaacaagaaagtggaattcagtttcaacaatagagcaacaatggagaccaagatattttccctccttatgctccttgctctttctacatgtgttgctaacgcgacaattttccctcaatgctcacaagctcctatagcttccctttttcccccataccttccatcaattatagcttcagtatgtgaaaacccagctcttcaaccatataggcttcaacaagcaatcgcagcaagcaacatacctttatcgcccttgttgtgtcaacaatcgccagccctatctttggtgcagtcattggtacaaaccatcagggcacaacagctgcagcaactcgtgctacctgtgatcaacccagtagctctggcaaaccttt

SEQ ID NO: 343451 - DNA, 265 bp, Zea mays
attttgagcattagaaacacaccattcgtaattttactagcaacaacctaacaacaatggctaccaagatattatccctgcttgcgcttcttgcgctttttgcgagcgcaacaaatgcgttcattattccacaatgctcacttgctcctagttccattattccacagtttctcccaccagttactttaatggcctttcaacacccagctgtgcaagcctataggctacaacaagcgattgcggcgagcgttttacaacaacctat

SEQ ID NO: 343452 - DNA, 335 bp, Zea mays
cctcaatgctcacagctcctatagcttccctttttcccccataccttccatcaattatagcttcagtatgtgaaaacccagctcttcaaccatataggcttcaacaagcaatcgcagcaagcaacatacctttatcgcccttgttgtgtcaacaatcgccagccctatctttggtgcagtcattggtacaaaccatcagggcacaacagttgcagcaactcgtgctacctgtgatcaaccaagtagctctggcaaacctttctccctactctccgcaacaacaatttcttccattcaaccaactgtctaacactgaaccctgctgcttatttgca

SEQ ID NO: 343453 - DNA, 368 bp, Zea mays
attgagaccaactagcacatagaaagcactttattgttccaacaatggcagccaaaatattgggccttcttatgctccttggtctttctgcaagtgctgctacggcgaccattttcccgcaatgctcgcaagctcctatagcttcccttcttcccccgtacctctcaccagcggtgtcttcggtatgtgaaaacccaattcttcaaccctacaggatccaacaggcaatcgcagctggcatcttacctttatcacccttgttcctccaacaatcatcagccctattacaacagttacctttggtgcatttattggcacataacatcagggcacaacaactacaacaacttgtgctagcaaaccttgct

SEQ ID NO: 343454 - DNA, 407 bp, Zea mays
  unsure (1)..(407): unsure at all n locations
cgacccacgcgnccggnncnagaccgcgagcggacaaccacaattcaaangccgggaacacaaagcaaaggaaaaaggagccagcaaagccaaggcggggagcagaggagagaggggaacaggcaaaacgacacacgcgaagaggcaacccacaggagaggaagagaaaaaaaaggaaccaaccaggggagcgggaaggaaaccagcggaagcaccacaaaaggggggaagagcagggccaaccgacgggaagccgaaggcaaaaaaagacagggggaccgaaggaagggaaccacaaaacagcggaacacgggaaaacaaaaacgcacgaaaggaacaaccaaagcggcaaaagacaaaaaaacgagccgcacgggggcaaacggaaaaagaaaaaaagcaagggg

SEQ ID NO: 343455 - DNA, 176 bp, Zea mays
gaaagtggaatcagtagcaacaatagagcatttatggcgaccaagatattttccctccttatgctccttgctctttctgcatgtgttgctaacgcgacaatttttcctcaatgctcacaagctcctatagctttccttcttcccccataccttccatcaatgatagccttcagtat

SEQ ID NO: 343456 - DNA, 390 bp, Zea mays
caacaatggcgaccaagaattttccctccttatgctttttgctctttctgcatgtgttgctaacgcgacaattttccctcaatgctcacaagctcctatagcttcccttcttcccccataccttccatcaatgatagcttcagtatgtgaaaacccagctcttcaaccctataggctccaacaagcaatcgcagcaagcaacatacctttatcacccttgtttcaacaatcgccagccctatctttggtgcagtcattggtacaaaccatcagggcacagcagctgcagcaactcgtgctacctgtgatcaaccaagtagctctggcaaacctttcttcctactttcagcaacaacaatttcttccattcaaccaactgtctacattgaa

SEQ ID NO: 343457 - DNA, 166 bp, Zea mays
gagaccaactagcacatagaaagttcaatattgtaccaacaatggcagccaaaatattttgcttccttatgctccttggtctttctgcaagtgttgctacctcaaccatcttcccacattgctcacaagctcctatagctttccttcttgtcccatacttatcacc

SEQ ID NO: 343458 - DNA, 322 bp, Zea mays
caacaacggcgaccaagatattgttcctccttatgctccttgctctttctgcatgtgttgctaacgcgacaattttccctcaatgctcacaagctcctatagcttcccttcttcccccataccttccatcaatgatagcttcagtatgtgaaaacccagctctttaaccctatatgctccaacaagcaatcgcagcaagcaacatacctttattacccttgtttcaacaatcgccagccctatctttggtgcagtcattggtacaaaccatcatggcacagcagctgtagcaactcgggctacttgagatcaaccaagtagc

SEQ ID NO: 343459 - DNA, 384 bp, Zea mays
  unsure (1)..(384): unsure at all n locations
caacaagcaacatagaaaggaatacagtttttcattagagcaacaatggcggccaagatattttccatccttatgctccttgctctttctgcatgtgttgctaacgcgaccatttttcctcaatactcacaagctcctatagctgcccttcttcccccataccttccatcaatgaccgcttcagtatgtgaaaacccagcccttcaaccctacaggctccaacaagcaatcgcaacaagcaacttacctttatcacccctgttctttaacaatcgccagccctatctttggtgcagtcattggtacaaaccatcanggcacaacagctgcagcaactcgtgctaccaagtgatcagcctagtagcttttggcaaaccttttttc

SEQ ID NO: 343460 - DNA, 368 bp, Zea mays
ggttgctacatggaaacatatcggcctggtttacgtaatgaggccgtagcatttgcggcgaagaacacaaagaggaaacggagaagttctccgaacgagtcgaaggatttgctgttggtaagtgaggaagctgcttcgggcagtggaggaagtgctggcacaagcctcgagaccaacggcgaggatgttgctactgacgatgagatttcaggtgctccgaggagtgctgttcttcaggcttgcactctcacgtcaggcttgctgcttgccggagggcttctgcttcgcgaggcatcgcacctagcatcaataaatggatggcccattgctgaccctacagatgtgtcattcagttttgaaacctggca

SEQ ID NO: 343461 - DNA, 72 bp, Zea mays
atctcctccgggcgcccagtcagcgcccgctttttatcgctcgaccgaaatctatgccccctccttcaccac

SEQ ID NO: 343462 - DNA, 205 bp, Zea mays
aagcaacatagaaagggaatacagttgcttttttagagcaacaatggcggccaagagattggccatccttatgcgcggggctgttacggcaggggtggctaacccacccatttttcttaatacccacaagcttctattgctggccttttttctccatacacttcccattaattgcccggtttagttatggaaaaaacctatcctt

SEQ ID NO: 343463 - DNA, 383 bp, Zea mays
  unsure (1)..(383): unsure at all n locations
gcaacatanaaagtgaatacagtttcaacttttgagcaacaatggcggccaagatattttccatccttatgctccttgctctttctgcatgtgttgctaacgcgaccatttttcctcaatactcacaagctcctatagctgcccttcttcccccataccttccatcaatgaccgcttcagtatgtgaaaacccagcccttcaaccctacaggctccaacaagcaatcgcaacaagcaacttacctttatcacccctgttctttcaacaatcgccagccctatctttggtgcagtcattggtacaaaccatcagggcacaacagctgcagcaactcgtgctaccagtgatcagccaagtagctctggcaaacctttcttcctac

SEQ ID NO: 343464 - DNA, 236 bp, Zea mays
  unsure (1)..(236): unsure at all n locations
agttctagatcgcgagcggcgcccttttttttttttttttctaccnaaatacccctatcacgggtctgtcttaatcttaatgggctcatccctcctctatcctttattaccattaatctttttttttctcagactctttttttttcttttttattttctctttttttttttaaaaaaacaaaaaaagacctttttttttttgggggccccccaaaaaattataaaaaaaatttttt

SEQ ID NO: 343465 - DNA, 240 bp, Zea mays
  unsure (1)..(240): unsure at all n locations
ccggaannncgggcgacccacgcgngcgcaacaaagaaagcacaacaggcaccaacaatggcagccaaaanacancgccgacaaaagcacggagggcggaccgcaagagcggcgacggcgaccaaaaacccgcaacgcgcgcaagccccaagagcgacccgacaacccccggaccgcgcaccagcggagggcacggcaagagaaaacccaacacaacaacccgacaggaaccaacaggca

SEQ ID NO: 343466 - DNA, 367 bp, Zea mays
atccacaaaaacaacaacatcaccaccactttatcattaccagcagcagcaacaccaacaacaacaagttcacatgcaaccacaaaaacatcagcaacaacaagaagttcatgttcaacaacaacaacaacaaccgcagcaccaacaacaacaacaacaacagcaccaacaacaacatcaatgtgaaggccaacaacaacatcaccaacaatcacaaggccatgtgcaacaacacgaacagagccatgagcaacaccaaggacagagccatgagcaacaacatcaacaacaattccagggtcatgacaagcagcaacaaccacaacagccttagcaatattagcagggccagggaaaattacaacag

SEQ ID NO: 343467 - DNA, 310 bp, Zea mays
cagaccattagctttatctactcagagcgcttaagaatttgatcgacaccatgagggtgttgctcgttgccctcgctctcctggctctcgctgggagcgccacctccacgcatacaagcgggggctgcggctgccagccaccgccgccggttcatctaccgccgccggtgcatctgccaccttcgggtcacctgccaccttcggtgcatcttccaccggcggtccacctggcggcgccggttcacctgccaccgccggtccatgtgccggcggcggttcatctgccgccggcaccatgccactaccctac

SEQ ID NO: 343468 - DNA, 352 bp, Zea mays
gcaacatagaaagcaaatagtgtttcaacattggcagccaaaatattttgcctccttatgctccttggtctttctgcaagtgctgctacggcgaccattttcccgaaatgctcgcaagctcctatagcttcccttcttcccccgtacctctcaccagcggtgtcttcggtatgtgaaaacccaattcttcaaccctacaggatccaacaggcaatcacagctggcatcttacctttatcacccttgttcctccaacaatcatcagccctattacatcagttacctttggtgcatttattggcacaaaacatcaaggcacaacaactacaacaacttgtgctagcaaaccttg

SEQ ID NO: 343469 - DNA, 191 bp, Zea mays
caatccagatcagcaaagcggcgtgcgtagtgaggatcgtcgaacagaacagcatgaagatggtcatcgttctcgtcgtgtgcctggctctgtcagctgccagcgcctctgcaatgcagatgccctgcccctgcgcggggctgcagggcttgtacggcgcttgcgccggcctgactacgattattggctcc

SEQ ID NO: 343470 - DNA, 364 bp, Zea mays
attgagaccaacaagcaacataaaagtggaatccagtttcaacaatagagcaacaatggagaccaagatattttccctccttatgctccttgctctttctacatgtgttgctaacgcgacaattttccctcaatgctcacaagctcctatagcttccctttttcccccataccttccatcaattatagcttcagtatgtgaaaacccagctcttcaaccatataggcttcaacaagcaatcgcagcaagcaacatacctttatcgcccttgttgtgtcaacaatcgccagccctatctttggtgcagtcattggtacaaaccatcagggcacaacagctgcagcaactcgtgctacctgtgatc

SEQ ID NO: 343471 - DNA, 107 bp, Zea mays
tggtgccctctaaacaacttggcgtgaccaaagccataggcgcctactaagctacatgctcttgcggtaaccgttgctaacacgacaattatccctcaatgctcaca

SEQ ID NO: 343472 - DNA, 415 bp, Zea mays
  unsure (1)..(415): unsure at all n locations
cnnnaattagctttatctactccagagcgcagaagaacccgatcgacaccatgaggggggggctcgttgccctcgctctcctggctctcgctgcgagcgccacctccacgcatacaagcgggggctgcggctgccagccaccgccgccggttcatctaccgccgccggtgcatctgccacctccggttcacctgccacctccggtgcatctcccaccgccgggccacctgccggcgccgggccacctgccaccgccgggccatgtgccgccgccgggtcatttggcggcgtcaccatgccactaccctactcaaccgccccgggctcaggctcatcccccggcacacccatggcccgggcaacagccgcatccaagcccgtgccagctgaggggacctgggtgttggaggacccc

SEQ ID NO: 343473 - DNA, 416 bp, Zea mays
  unsure (1)..(416): unsure at all n locations
nnccgcagaagaacccgatcgacaccattagggtgttgctcgttgccctcgctctcctggctctcgctgcgagcgccacctccacgcatacaagcggcggctgcggctgccagccaccgccgccggttcatctaccgccgccggtgcatctgccacctccggttcacctgccacctccggtgcatctcccaccgccggtccacctgccgccgccggtccacctgccaccgccggtccatgtgccgccgccggttcatctgccgccgccaccatgccactaccctactcaaccgccccggcctcagcctcatccccagccacacccatgcccgtgccaacagccgcatccaagcccgtgccagctgcagggaacctgcggcgttggcagcaccccgaacctgggccagtgcgtcgag

SEQ ID NO: 343474 - DNA, 128 bp, Zea mays
aagcgaagcgcactagcaacaacctaacaacaagggcgaccaagatattagccctccttgcgctggttgccctttaagtgagcgcaacaaatgcgttcattatgccacagtgctcacttgctccaagg

SEQ ID NO: 343475 - DNA, 375 bp, Zea mays
  unsure (1)..(375): unsure at all n locations
gtcnnnnnagctactatactatactctaggaagtaaggacaccaccgccatggcagccaagatgcttgcattgttcgctctcctagctctttgtgcaagcgccactagtgcgacccatattccagggcacttgccaccagtcatgccagtgggtaccatgaacccatgcatgcagtactgcatgatgcaacaggggcttgccagcttgatggcgtggccggccctgatgctgcagcaactgttggccttaccgcttcagacgatgccagtgaagacgcgccagatgatgacgcccaacatgaggtcaccattgatgatgccgagcatgaaggcaccaaaggtcttgccgagcatgaggtcgcaaatgatgatgcc

SEQ ID NO: 343476 - DNA, 227 bp, Zea mays
gcaacatagaatgtgtaattcagtagcaacaatagagcaacaatggcgaccaagatattttccctccttatgctccttgctctttctgcatgtgttgctaacgcgacaattttccctcaatgctcacaagctcctatagcttgcctttttcttccatacctttcattaatgatagctttagtatgtgaaaactcacctctttaaccctatttgctccaacaagcttt

SEQ ID NO: 343477 - DNA, 386 bp, Zea mays
  unsure (1)..(386): unsure at all n locations
nncctaccattagctttatctactcttatatcgcagaagaacccgatcgacaccatgagggtgttgctcgttgccctcgctctcctggctctcgctgcgagcgccacctccacgcatacaagcggcggctgcggctgccagccaccgccgccggttcatctaccgccgccggtgcatctgccacctccggttcacctgccacctccggtgcatctcccaccgccggtccacctgccgccgccggtccacctgccaccgccggtccatgtgccgccgccggttcatctgccgccgccaccatgccactaccctactcaaccgccccggcctcagcctcatccccagccacacccatgcccgtgccaacagccgcatccaagcccgtg

SEQ ID NO: 343478 - DNA, 430 bp, Zea mays
  unsure (1)..(430): unsure at all n locations
atncnnnaccaccaagcgaagcacatttttattaacctaacaacaatggctaccaagatattatccctccttgcgcttcttgcgctttttgcgagcgcaacaaatgcgttcattattccacaatgctcacttgctccaagttccattattacacagttcctcccaccagttacttcaatgggcttcgaacacccagctgtgcaagcctataggctacaacaagcaattgcggcgagcgtcttacaacaaccaatttcccagttgcaacaacaatccttggcacatctaacaatacaaaccatcgcaacgcaacagcaacaacaattcctaccagcactgagccacctagccatggtgaaccctgccgcctacttgcaacagcagttgcttgcatcaaacccacttgctctggcaaacgtagttgcaaacc

SEQ ID NO: 343479 - DNA, 414 bp, Zea mays
ctatcagtaccatcaattattattcatcttagtagtataggcaccaaatcaaatctgcaacatcaattatctaactccaaaaaccatgaagctggtgcttgtggttcttgctttcattgctttagtatcaagtgtttcttgtacacagacaggcggctgcagctgtggtcaacaacaaagccatgagcagcaacatcatccacaacaacatcatccacaaaaacaacaacatcaaccaccaccacaacatcaccagcagcagcaacaccaacaacaacaagttcacatgcaaccacaaaaacatcagcaacaacaagaagttcatgttcaacaacaacaacaacaaccgcagcaccaacaacaacaacaacaacagcaccaacaacaacatcaatgtgaaagccaacaacaaca

SEQ ID NO: 343480 - DNA, 326 bp, Zea mays
caagcgaagctacctagcttcgacttaacaacaatggctaccaagatattagccctccttgcgcttcttgccctttttgtgagcgcaacaaatgcgttcattattccacaatgctcacttgctcctagtgccattataccacagttcctccgaccagttacttcaatgggcttcgaacacctagctgtgcaagcctacaggctacaacaagcgcttgcggcgagcgtcttacaacaaccaattaaccaattgcaacaacaatccttggcacatctaaccatacaaaccatcgcaacacaacagcaacaacagtttctaccagcact

SEQ ID NO: 343481 - DNA, 422 bp, Zea mays
tcttcagaccgtttgctttatctactccagagcgcagaagaacccgatcgacaccatgagggtgttgctcgttgccctcgctctcctggctctcgctgcgagcgccacctccacgcatacaagcggcggctgcggctgccagccaccgccgccggttcatctaccgccgccggtgcatctgccacctccggttcacctgccacctccggtgcatctcccaccgccggtccacctgccgccgccggtccacctgccaccgccggtccatgtgccgccgccggttcatctgccgccgccaccatgccactaccctactcaaccgccccggcctcagccttattcccagccacacccatgcccgtgccaacagccgcattcaagcccgtgccagctgcagggaacctgcggcgtttgcagcaccc

SEQ ID NO: 343482 - DNA, 427 bp, Zea mays
ataacagcattcataaacacaccaagtgtttcgcactagcaacaacctaacaacaatgggtaccaagatattagccctccttgcgcttcttgcccttttagtgagcgcaacaaatgcgttcattattccacagtgctcacttgctcctagtgccattattccacagttcctcccaccagttacttcaatgggcttcgaacatccagccgtgcaagcctacaggctacaactagcgcttgcggcgagcgtcttacaacaaccaattgcccaattgcaacaacaatccttggcacatctaaacctacaaaccatcgcaacgcaacagcaacaacagtttttgccatcactgagccacctagccgtggtgaaccctgtcgcctacttgcaacagcagctacttgcatccaacccacttgctctggcgaac

SEQ ID NO: 343483 - DNA, 377 bp, Zea mays
gagggtgtggctcgttgttttcgctctcctggctctcgctgcgagcgccacctccacgcatacaagcggcggctgcggctgccagccaccgccgccggttcatctaccgccgccggtgcatctgccacctccggttcacctgccacctccggtgcatctcccaccgccggtccacctgccgccgccggtccacctgccaccgccggtccatgtgccgccgccggttcatctgccgccgacaccatgccactaccctactcaaccgccccgggctaagcctcatactcagccacacccatgcccgtgccaacagccgaatccaaaccccgtgccagctgcagggaacctgcggcgtttgcagcacccccaaccctggc

SEQ ID NO: 343484 - DNA, 404 bp, Zea mays
  unsure (1)..(404): unsure at all n locations
canannccccaagcgaagcgcactagcttcattctaacaacaatggctaccaagatattatccctccttgcgcttcttgcgctttttgcgagcgcaacaaatgcgtccattattccacaatgctcacttgctcctagttccattattccacagttcctcccaccagttacttcaatggccttcgaacacccagctgtgcaagcctataggctacaacaagcgattgcggcgagcgtcttacaacaaccaattgcccaattgcaacaacaatgcttggcacatctaacaatacaaaccatcgcaacgcaacagcaacaacagttcctaccagcactgagccacctagccatggtgaaccctgtcgcctacttgcaacagcaagtgcttgcattcaacccacttgc

SEQ ID NO: 343485 - DNA, 411 bp, Zea mays
agtggaatccagttgttacaatagagcaacaatggcgaccaagatatgttccctccttatgctccttgctctttctgcatgtgttgctaacgcgacaattttccctcaatgctcacaagctcctatagcttcccttctttccccataccttccatcaatgatagcttcagtatgtgaaaacccagctcttcaaccctataggctccaacaagcaatcgcagcaagcaacatacctttatcacccttgtttcaacaatcgccagccctatctttggtgcagtcattggtacaaaccatcatggcacagcagctgctgcaactcgtgctacctgtgatcaaccaattttctctggcatacctttcttccacttttagcaacaacaatttctttcattcaaccaactgtttaca

SEQ ID NO: 343486 - DNA, 341 bp, Zea mays
cttatctactcgagcgttaagaacccgatcgacaccatgagggtgttgctcgttgccctcgctctcctggctctcgctgcgagcgccacctccacgcatacaagcggcggctgcggctgccagccaccgccgccggttcatctaccgccgccggtgcatctgccacctccggttcacctgccacctccggtgcatctcccaccgccggtccacctgccgccgccggtccacctgccaccgccggtccatgtgccgccgccggttcatctgccgccgccaccatgccactaccctactcaaccgccccggcctcagcctcatccccagccacacccatgccc

SEQ ID NO: 343487 - DNA, 283 bp, Zea mays
gttacttagggttttgtggaggggcgatggcggcggctgatgtggagtaccgttgcttcgtcggcgggcttgcctgggccaccagcaacgagtcgctggagaatgccttcgcctcctacggcgagatcctcgactccaaggtcatcaccgaccgggagacggggaggtctcgcggcttcggcttcgttaccttctcctccgagaactccatgctcgacgctatcgagaacatgaacggcaaggagctcgacggccgtaacatcaccgttaaccaggcccagtc

SEQ ID NO: 343488 - DNA, 210 bp, Zea mays
  unsure (1)..(210): unsure at all n locations
ngccttgagctttatctactccagagtgcataagaacccgatcgacaccatgaggggggtgctcgttgccctcgctctcctggctctcgctgcgagcgccaccttcacgcatacaagcggcggttgcggctgccagccaccgtcgccggttcatctaccgccgtcggtgcatctgccaccttcggttcacctgccaccaccggtgcattt

SEQ ID NO: 343489 - DNA, 80 bp, Zea mays
  unsure (1)..(80): unsure at all n locations
cgaaacccgggcgacccacgcgnnnggttctagcatatcactccattttttttaagaacccgaccgacaccatgaggggg

SEQ ID NO: 343490 - DNA, 433 bp, Zea mays
  unsure (1)..(433): unsure at all n locations
gggnctnccaccattagctttatctactctagatcgcagaagaacccgatcgacaccatgagggtgttgctcgttgccctcgctctcctggctctcgctgcgagcgccacctccacgcatacaagcggcggctgcggctgccagccaccgccgccggttcatctaccgccgccggtgcatctgccacctccggttcacctgccacctccggtgcatctcccaccgccggtccacctgccgccgccggtccacctgccaccgccggtccatgtgccgccgccggttcatctgccgccgccaccatgccactaccctactcaaccgccccggcctcagcctcatccccagccacacccatgcccgtgccaacagccgcattcaagcccgtgccagctgcagggaacctgcggcgttggcagcaccccgatcctgg

SEQ ID NO: 343491 - DNA, 357 bp, Zea mays
ccctcgctctcctggctctcgctgcgagcgccacctccacgcatacaagcggcggctgcggctgccagccaccgccgccggttcatctaccgccgccggtgcatctgccacctccggttcacctgccacctccggtgcatctcccaccgccggtccacctgccgccgccggtccacctgccaccgccggtccatgtgccgccgccggttcatctgccgccgccaccatgccactaccctactcaaccgccccggcctcagcctcatccccagccacacccatgcccgtgccaacagccgcatccaagcccgtgccagctgcagggaacctgcggcgttggcagcaccccgatcctgg

SEQ ID NO: 343492 - DNA, 420 bp, Zea mays
acaccaagcgaagcgtactttcaacaacctaacaacaatggctaccaagatattagccctccttgcgcttcttgcccttttagtgagcgcaacaaatgcgttcattattccacagtgctcacttgctcctagtgccattattccacagttcctcccaccagttacttcaatgggcttcgaacatccagccgtgcaagcctacaggctacaactagcgcttgcggcgagcgtcttacaacaaccaattgcccaattgcaacaacaatccttggcacatctaaacctacaaaccatcgcaacgcaacagcaacaacagtttctgccatcactgagccacctagccgtggtgaaccctgtcgcctacttgcaacagcagctacttgcatccaacccacttgctctggcgaacgtagctgcata

SEQ ID NO: 343493 - DNA, 381 bp, Zea mays
gcatcggaaacacaccaagcgaagctcattttcaacaacctaacaacaatggctaccaagatattatccctccttgcgcttcttgcgctttttgcgagcgcaacaaatgcgttcattattccacaatgctcacttgctccaagttccattattacacagttcctcccaccagttacttcaatgggcttcgaacacccagctgtgcaagcctataggctacaacaagcaattgcggcgagcgtctacaacaaccaatttccagttgcacaacaatcttggcacatttaacaatcaaaccatcgcaacgcaacagcaacaacaatttctaccaacactgagccacctagccatggtgaaccctgccgcctacttgcaacagca

SEQ ID NO: 343494 - DNA, 424 bp, Zea mays
gcaactagaaagcacaatagtgtaccatctttggcagccaaaatattttgcctccttatgctccttggtctttctgcaagtgctgctacggcgaccattttcccgaaatgctcgcaagctcctatagcttcccttcttcccccgtacctctcaccagcggtgtcttcggtatgtgaaaacccaattcttcaaccctacaggatccaacaggcaatcacagctggcatcttacctttatcacccttgttcctccaacaatcatcagccctattacatcagttacctttggtgcatttattggcacaaaacatcagggcacaacaactacaacaacttgtgctagcaaaccttgctgcctactctcagcaacagcagtttcttccattcaaccaactagctgcattgaactctgcttcttatttgc

SEQ ID NO: 343495 - DNA, 324 bp, Zea mays
agaccattattttatctactccagagcgctgatgaacccgatcgacaccatgagggtgttgctcgttgccctcgctctcctggctctcgctgcgagcgccaccttcacgcatacaagcggcggctgcggttgtcagccatcgtcgtcgtgttttttacttgttgctgtgtatttgtttctttattgttcttttctatctttaatttttattttattttgattccgtctttttttttttttttttatttatttttgttatttacaaatttaacttgtatttttttttattatataatatttagtctattatttttttttttcttt

SEQ ID NO: 343496 - DNA, 187 bp, Zea mays
  unsure (1)..(187): unsure at all n locations
cannacctaatcatcattcatcttagttttttaggcaccaaatcaaatctgcaacatcaattatctaactccaaaaaccatgaagctggtgcttgtggttcttgctttcattgctttagtatcaagtgtttcttgtacacagacaggcggctgcagctgtggtcaacaacaaagccatgagcagcaa

SEQ ID NO: 343497 - DNA, 420 bp, Zea mays
agaccattcgtttatctactccagagcgcagattaacccgatcgacaccatgagggtgttgctcgttgccctcgctctcctggctctcgctgcgagcgccacctccacgcatacaagcggcggctgcggctgccagccaccgccgccggttcatctaccgccgccggtgcatctgccaccttcggttcacctgccacctccggtgcatctcccaccgccggtccacctgccgccgccggtccacctgccaccgccggtccatgtgccgccgccggttcatctgccgccgccaccatgccactaccctactcaaccgccccggcctcagcctcatccccagccacacccatgcccgtgccaacagccgcatccaagcccgtgccagctgcaaggaacctgcggcgttggcagcaccccgat

SEQ ID NO: 343498 - DNA, 369 bp, Zea mays
ggcagtgcgtagagaggatcgtcgaacagaacagcatgaagatggtcatcgttctcgtcgtgtgcctggctctgtcagctgccagcgcctctgcaatgcagatgccctgcccctgcgcggggctgcagggcttgtacggcgctggcgccggcctgacgacgatgatgggcgccggcgggctgtacccctacgcggagtacctgaggcagccgcagtgcagcccgctggcggcggcgccctactacgccgggtgtgggcagacgagcgccatgtaccaaccgctccggcaacagtgctgccagcagcagatgaggatgatggacgtgcaatccgtcgcgcagcagctgcaaatgatgatgcagcttgagc

SEQ ID NO: 343499 - DNA, 397 bp, Zea mays
aagtggaatacagtatcaactttatagcaacaatggcggccaagatattttgcatccttatgctccttgctctttctgcatgtgttgctaacgcgaccatttttcctcaatactcacaagctcctatagctgcccttctttccccataccttccatcaatgaccgcttcagtatgtgaaaacccagccctttaaccctacaggcttcaacaagcaatcgcaacaagcaacttacctttatcacccctggtctttcaacaatcgccagccctatctttggtgcagtcattgggtcaaaccatcagggcacaacagctgcagcaactcgtgctaccagtgatcaggccaagtagcttttggaaaaccttttcttcctacttttaacaacaacaattttt

SEQ ID NO: 343500 - DNA, 376 bp, Zea mays
tatttcatagaaagtggaatccttattttcaattgagcaacaatggcgaccaagagatttttcctgcgtatgcgccgtgctctttctgcatgtgttgctaacgcgacaattttccctcaatgctcacaagctcctatagcttcccttcttcccccatacctttcatcaatgatagctttagtatgtgaaaacccagctcttcaaccctataggctccaacaagcaatctcagcaagcaacatacctttatcacccttgtttcaacaatcggcagccctatctttggtgcagtcattgggacaaaccatcagggcacaacagctgcagcaacttttgctacctgtgatcaaaccaagagctgtgggaaacctttctt

SEQ ID NO: 343501 - DNA, 427 bp, Zea mays
gcatttgaaacacaccaagcgaagtgcactagcaacaacctaacaacaatggctaccaagatattagccctccttgcgcttcttgcccttttagtgagcgcaacaaatgcgttcattattccacagtgctcacttgctcctagtgccattattccacagttcctcccaccagttacttcaatgggcttcgaacatccagccgtgcaagcctacaggctacaactagcgcttgcggcgagcgtcttacaacaaccaattgcccaattgcaacaacaatccttggcacatctaaacctacaaaccatcgcaacgcaacagcaacaacagtttctgccatcactgagccacctagccgtggtgaaccctgtcgcctacttgcaacagcagctacttgcatccaacccacttgctcttgcgaacgtagctg

SEQ ID NO: 343502 - DNA, 220 bp, Zea mays
cagaagcacacgccgtgcctatctatctatagctagcaccagcaggggggcacaccgaaaaggacagcgccagcagcctcgaggacgaacaccagcagcggctgcggcggcggcgcgtccacggacaagcaaagggcagtgggcgtctaccccgacgccacggggacgccgccggagcgcaagggcaacagcgccaacgcggacccggacaccgcccaac

SEQ ID NO: 343503 - DNA, 432 bp, Zea mays
  unsure (1)..(432): unsure at all n locations
attttcancttcagaaacacaccaagcgattcgcactagcaacaacctaacaacaatggctaccaagatattagccctccttgcgcttcttgcccttttagtgagcgcaacaaatgcgttcattattccacagtgctcacttgctcctagtgccattattccacagttcctcccaccagttacttcaatgggcttcgaacatccagccgtgcaagcctacaggctacaactagcgcttgcggcgagcgtcttacaacaaccaattgcccaattgcaacaacaatccttggcacatctaaacctacaaaccatcgcaacgcaacagcaacaacagtttctgccatcactgagccacctagccgtggtgaaccctgtcgcctacttgcaacagcagctacttgcatccaacccacttgctctggcgaacgtagc

SEQ ID NO: 343504 - DNA, 426 bp, Zea mays
cagaaacacacaagcgaagcgcactagcttcaacctaacaacaatggctaccaagatattagccctccttgcgcttcttgcccttttagtgagcgcaacaaatgcgttcattattccacagtgctcacttgctcctagtgccattattccacagttcctcccaccagttacttcaatgggcttcgaacatccagccgtgcaagcctacaggctacaactagcgcttgcggcgagcgtcttacaacaaccaattgcccaattgcaacaacaatccttggcacatctaaacctacaaaccatcgcaacgcaacagcaacaacagtttctgccatcactgagccacctagccgtggtgaaccctgtcgcctacttgcaacagcagctacttgcatccaacccacttgctctggcgaacgtagctgcata

SEQ ID NO: 343505 - DNA, 342 bp, Zea mays
agccgccactctcttcttccttctctcccacacgcacagccctctcctctcctgttcatggcgcagagaagctctccgccgagctgctcccatggcgccaaccttccctgcggcgagctccttcctccaggcacccatgccgccgagctctccttcacggcgcgggcgagctccctcctcggctgcttccagcccaactcggtgcccttgctgcaggcgagcagcaggctccctgctccacgcgcctccccagccatggcgtcctgcttcctcccatggcgcaggagatgccccagcgagctcccttcccttccccatggctcgagctcgagtttcctcatg

SEQ ID NO: 343506 - DNA, 348 bp, Zea mays
  unsure (1)..(348): unsure at all n locations
annnaaccaactagcaacatagaaagcattatagtgtaccaacaatggcagccaaaatattttgcctccttatgctccttggtctttctgcaagtgctgctacggcgaccattttcccgcaatgctcgcaagctcctatagcttcccttcttcccccgtacctctcaccagcggtgtcttcggtatgtgaaaacccaattcttcaaccctacaggatccaacaggcaatcgcagctggcatcttacctttatcacccttgttcctccaacaatcatcagccctattacaacagttacctttggtgcatttattggcacaaaacattagggcacaacaactacaacaac

SEQ ID NO: 343507 - DNA, 406 bp, Zea mays
  unsure (1)..(406): unsure at all n locations
naacactaacatagaaagtggaattcagtttcaacaatagagcaacaatggcgaccaagatattttccctccttatgctccttgctctttctgcatgtgttgctaacgcgacaattttccctcaatgctcacaagctcctatagcttcccttcttcccccataccttccatcaatgatagcttcagtatgtgaaaacccagctcttcaaccctataggctccaacaagcaatcgcagcaagcaacatacctttatcacccttgtttcaacaatcgccagccctatctttggtgcagtcattggtacaaaccattagggcacagcagctgcagcaactcgtgctacctgtgatcaaccaagtagctcttgcaaacctttcttcctactctcagcaacaacaatttct

SEQ ID NO: 343508 - DNA, 432 bp, Zea mays
gggtcttcaacccttagctttatctacttcagagcgcagaagaacccgatcgacaccatgagggtgttgctcgttgccctcgctctcctggctctcgctgcgagcgccacctccacgcatacaagcggcggctgcggctgccagccaccgccgccggttcatctaccgccgccggtgcatctgccacctccggttcacctgccacctccggtgcatctcccaccgccggtccacctgccgccgccggtccacctgccaccgccggtccatgtgccgccgccggttcatctgccgccgccaccatgccactaccctactcaaccgccccggcctcagcctcatccccagccacacccatgcccgtgccaacagccgcatccaagcccgtgccagctgcagggaacctgcggcgttggcagcaccccgatcctg

SEQ ID NO: 343509 - DNA, 402 bp, Zea mays
  unsure (1)..(402): unsure at all n locations
gggcttanactttagctttatctactctttagtgcagaagaacccgatcgacaccatgagggtgttgctcgttgccctcgctctcctggctctcgctgcgagcgccacctccacgcatacaagcggcggctgcggctgccagccaccgccgccggttcatctaccgccgccggtgcatctgccacctccggttcacctgccacctccggtgcatctcccaccgccggtccacctgccgccgccggtccacctgccaccgccggtccatgtgccgccgccggttcatctgccgccgccaccatgccactaccctactcaaccgccccggcctcagcctcatacccagccacacccatgcccgtgccaacagacgcattcaagcccgtgccagctgcagggaac

SEQ ID NO: 343510 - DNA, 213 bp, Zea mays
  unsure (1)..(213): unsure at all n locations
nnnnaagatcgcgagcggccgcccttttttttttcccgttcgacaccttttttttgttgttgggaacaatacttttttcttttcatttcaatagggccatcagacccatccgcaccagcagtcccaatgccggccacccgcggcggtttatgtagcgccgatagcgcatcaaccagactgcggtttacctgcctgcttcagtgcatttcatac

SEQ ID NO: 343511 - DNA, 321 bp, Zea mays
  unsure (1)..(321): unsure at all n locations
gngnttcagaaacacaccaagcgaatcattttatcaacaacctaacaacaatggctaccaagatattatccctccttgcgcttcttgcgctttttgcgagcgcaacaaatgcgttcattattccacaatgctcacttgctccaagttccattattacacagttccttccaccagttacttcaatgggctttgaacacccagctgtgcaagcctataggctacaacaagcaattgcggcgagcgtcttacaacaaccaatttcccagttgcaacaacaatccttggcacatctaacaatacaaaccattgcaacgcaacagc

SEQ ID NO: 343512 - DNA, 389 bp, Zea mays
gggtctcagaccattagctttatctacttcagagcgcagaagaacccgatcgacaccatgagggtgttgctcgttgccctcgctctcctggctctcgctgcgagcgccacctccacgcatacaagcggcggctgcggctgccagccaccgccgccggttcatctaccgccgccggtgcatctgccacctccggttcacctgccacctccggtgcatctcccaccgccggtccacctgccgccgccggtccacctgccaccgccggtccatgtgccgccgccggttcatctgccgccgccaccatgccactaccctactcaaccgccccggcctcagcctcattcccagccacacccatgcccgtgccaacagccgcattcaagcccgtg

SEQ ID NO: 343513 - DNA, 336 bp, Zea mays
  unsure (1)..(336): unsure at all n locations
gccagggggggngcggcaggagcgggatctactccagagcgcagaagaacccgatcgacaccatgagggggttgctcgatgccctcgcgctcctggctctcgctgcgagcgccacctccacgcatacaagcggcggctgcggctgccagccaccgccgccggggcatctaccgccgccggcgcaactgccacctccggggcaccagccacctccggggcatctcccaccgccggtccacctgccggcgccgggccacctgccaccggcggtccatgtgccgccgccggggcatctgccggcggcaccatgccactaccctacgaaaccgggccggg

SEQ ID NO: 343514 - DNA, 54 bp, Zea mays
attatcatgtcggtatgaccaataatatatgcatcataataaagttttggtttt

SEQ ID NO: 343515 - DNA, 426 bp, Zea mays
  unsure (1)..(426): unsure at all n locations
gcaacatanacgcacaatagtgtaccaacattgttagccaaaatattttgcttccttatgctccttggtctttctgcaagtgctgctaccgcaaccattttcccacaatgctcacaagctcctatagcttcctttcttcccccatacctctcaccagcggtgtcttcagtatgtgaaaacccaattcttcaaccctacaggatccaacaggcaatcgcagcaggcatcttacctttatcacccttgttcctccaacaaccgtcagccctattacagcagttacctctggtgcatttgttggcacaaaacatcaaggcacaacaactacaacaacttgtgctaggaaaccttgctgcctactcttagcaacagcagtttcttccattcaaccaactggctgctttgactctgctgcttatttgcaac

SEQ ID NO: 343516 - DNA, 147 bp, Zea mays
cagaccaatacttgatgtacttcagagcgcagaatatcccgatcgacaccatgagggcgttgctggttgcccttgctgtcctggctatcgctgcgagcgccacctccacgcaaacaagcggagggtgaagatgccagccacccccca

SEQ ID NO: 343517 - DNA, 365 bp, Zea mays
gtcttcagaccattagctttatctacttcattagcgcagaagaacccgatcgacaccatgagggtgttgctcgttgccctcgctctcctggctctcgctgcgagcgccacctccacgcatacaagcggcggctgcggctgccagccaccgccgccggttcatctaccgccgccggtgcatctgccacctccggttcacctgccacctccggtgcatctcccaccgccggtccacctgccgccgccggtccacctgccaccgccggtccatgtgccgccgccggttcatctgccgccgccaccatgccactaccctactcaaccgccccggcctcagcctcattcccagccacacccatgcccgtg

SEQ ID NO: 343518 - DNA, 333 bp, Zea mays
attgagaccaacaagcaacatagaaagtggtttacagtagcaacaatagagcaacaatggcggccaagatattttccatccttatgctccttgctctttctgcatgtgttgctaacgcgaccatttttcctcaatactcacaagctcctatagctgcccttcttcccccataccttccatcaatgaccgcttcagtatgtgaaaacccagcccttcaaccctacaggctccaacaagcaatcgcaacaagcaacttacctttatcacccctgttctttcaacaatcgccagccctatctttggtgcagtcattggtacaaaccatcaaggcac

SEQ ID NO: 343519 - DNA, 418 bp, Zea mays
gtaccatcaatcatcattcatcttagtagtatatgtaccaaatcaaatctgcaacatcaattatctaactccaaaaaccatgaagctggtgcttgtggttcttgctttcattgctttagtatcaagtgtttcttgtacacagacaggcggctgcagctgtggtcaacaacaaagccatgagcagcaacatcatccacaacaacatcatccacaaaaacaacaacatcaaccaccaccacaacatcaccagcagcagcaacaccaacaacaacaagttcacatgcaaccacaaaaacatcagcaacaacaagaagttcatgttcaacaacaacaacaacaaccgcagcaccaacaacaacaacaacaacagcaccaacaacaacatcaatgtgaaggccaacaacaacatcaccaacaa

SEQ ID NO: 343520 - DNA, 351 bp, Zea mays
caactagcaacatagaaagcacaatagtgtatcaacaatggcagccaaaatattttgcctccttatgctccttggtctttctgcaagtgctgctacggcgaccattttcccacaatgctcacaagctcctatagcttcccttcttcccccgtacctctcaccagcggtgtcttcggtatgtgaaaacccaattcttcaaccctataggatccaacaggcaatcgcagctggcatcttacctttatcacccttgttcctccaacaatcatcagccctattacagcagctacctttggtgcatttattggcacaaaacatcagggcacaacaactacaacaacttgtgctagc

SEQ ID NO: 343521 - DNA, 245 bp, Zea mays
cataccattagctgtattgattacggacgcttctttaacctcatgcataccattaggacggagcgagtcgcctgcattatgggggcacttgcaacaagcgccacctgtacacatacgaggaggggctgccgctggcatccagacccgaaggttgatctaccgaagcgcttgcatcagccagcgacatttgacatatcaaatgcggagaatgtgacaactatggtcaacctgactactaccatgca

SEQ ID NO: 343522 - DNA, 406 bp, Zea mays
tgcatttattggcacaaaacatcagggcacatcaactacaacaacttgtgctagcaaaccttgctgcctactctcagcaacagcagtttcttccattcaaccaactagctgcattgaactctgcttcttatttgcaacaacaacaactaccattcagccagctatctgctgcctacccccagcaatttcttccattcaaccaactgacagcattgaactctcctgcttatttacagcagcaacaactactaccattcagccagctagctggtgtgagccctgctaccttcttgacacaaccacagttgttgccgttctaccagcacgctgcgcctaacgctggcaccctcttacaactgcaacaattgctgccattcaacccacttggcttgacaaaccagcagca

SEQ ID NO: 343523 - DNA, 208 bp, Zea mays
gggtcttcagaccattagctttatctactcttgagcgcagaagaacccgatcgacaccatgagggtgttgctcgtagccctcgctctcctggctctcgctgcgagcgccaccttcacgcatacaagcggcggctgcggctgccagccaccgccgccggttcatttaccgccgccggtgcatctgctacctttcgttcacctgccacct

SEQ ID NO: 343524 - DNA, 311 bp, Zea mays
gttctagatcgcgagcggccgcccttttttttttttttttttttttctctttttggggggttttttttttttttttttttttttaggccacccacaaacgggatccaatacgagtttgggttttgggttgcaaaatacaaaaacatgttttgtttaagggacggggacagttgcgatgcgacaaaaaaacaaaaccacgggaatctgactccacagaacagggtctcaacaaagccctgatatcactgttcattggcagatttgtttgacggggggcaaaaactgggcgggctggaccacgggggggttct

SEQ ID NO: 343525 - DNA, 316 bp, Zea mays
cgatcgacaccatgagggtgttgctcgttgtcctcgctctcctggctctcgctgcgagcgccacctccacgcatacaagcggcggctgcggctgccagccaccgccgccggttcatctaccgccgccggtgcatctgccacctccggttcacctgccacctccggtgcatctcccaccgccggtccacctgccgccgccggtccacctgccaccgccggtccatgtgccgccgccggttcatctgccgccgccaccatgccactaccctactcaaccgccccggcctcagcctcatccccagccacacccatgccc

SEQ ID NO: 343526 - DNA, 400 bp, Zea mays
gcacaatagtgtaccaacaatggcagccaatatattttgcctccttatgctccttggtatttctgcaagtgctgctacggcgaccattttcccgcaatgctcacaagctcctatagcttcccttcttcccccgtacctctcaccagcggtgtcttcggtatgtgaaaacccaattcttcaaccctacaggatccaacaggcaatcgcagctggcatcttacctttatcacccttgttcctccaacaatcatcagccctattacagcagttacctttggtgcatttattggcacaaaacatcagggcacaacaactacaacaacttgtgctagcaaaccttgctgcctactcttagcaacagcagtttcttccattcaaccaactagctgcattgaactct

SEQ ID NO: 343527 - DNA, 420 bp, Zea mays
agaaagtggaatccagtagcaacaatagagcttctatggcgaccaagatattttccctccttatgctccttgctctttctgcatgtgttgctaacgcgacaattttccctcaatgctcacaagctcctatagcttcccttcttcccccataccttccatcaatgatagcttcagtatgtgaaaacccagctcttcaaccctataggctccaacaagcaatcgcagcaagcaacatacctttatcacccttgtttcaacaatcgccagccctatctttggtgcagtcattggtacaaaccatcagggcacagcagctgcagcaactcgtgctacctgtgatcaaccaagtagctctggcaaacctttctccctactctcagcaacaacaatttcttccattcaaccaactgtctacattga

SEQ ID NO: 343528 - DNA, 419 bp, Zea mays
cattattccacaatgctcacttgctccaagtttcattattacacagttcctcccaccagttacttcaatgggcttcgaacacccagctgtgcaagcctataggctacaacaagcaattgcggcgagcgtcttacaacaaccaatttcccagttgcaacaacaatccttggcacatctaacaatacaaaccatcgcaacgcaacagcaacaacaattcctaccagcactgagccacctagccatggtgaaccctgccgcctacttgcaacagcagttgcttgcatcaaacccacttgctctggcaaacgtagttgcaaaccagccacaacaacagctgcaacagtttctgccagcgctcagtcaactagccatggtgaaccctgccgcctacctacaacagcaacaactgctttcatcta

SEQ ID NO: 343529 - DNA, 413 bp, Zea mays
ccaagcgaagcacattagcaacaacctaacatcattggctaccaagatattatccctccttgcgcttcttgcgctttttgcgagcgcaacaaatgcgttcattattccacaatgctcacttgctccaagttccattattacacagttcctcccaccagttacttcaatgggcttcgaacacccagctgtgcaagcctataggctacaacaagcaattgcggcgagcgtcttacaacaaccaatttcccagttgcaacaacaatccttggcacatctaacaatacaaaccatcgcaacgcaacagcaacaacaattcctaccagcactgagccacctagccatggtgaaccctgccgcctacttgcaacagcagttgcttgcatcaaacccacttgctcttggcaacgtagttg

SEQ ID NO: 343530 - DNA, 416 bp, Zea mays
agaccattagctttatctactccagagcgcttaagaacccgatcgacaccatgagggtgttgctcgttgccctcgctctcctggctctcgctgcgagcgccacctccacgcatacaagcggcggctgcggctgccagccaccgccgccggttcatctaccgccgccggtgcatctgccacctccggttcacctgccacctccggtgcatctcccaccgccggtccacctgccgccgccggtccacctgccaccgccggtccatgtgccgccgccggttcatctgccgccgccaccatgccactaccctactcaaccgccccggcctcagcctcatccccagccacacccatgcccgtgccaacagccgcatccaagcccgtgccagctgcagggaacctgcggcgttggcagcacc

SEQ ID NO: 343531 - DNA, 341 bp, Zea mays
  unsure (1)..(341): unsure at all n locations
catcattggnggtgccctcttttagattttttatgagttatagttcaataataaaggtgtgtgtctgatgtttgtggcttcccagaaataagaaagtacatttctagattaaaaaaaacaaaaaaaaataaaaaaaaaaaaaaaaaaaaaaaaaaaaaaaaaaaaaaaaaaaaaaaaaaaaaaaaaaaaaaacncttataaaaaaaaaaaaaagggggcggccgttttagaggaacaaattttatacccgggcccatgtaccattatagtttttatttgggtgcacaaaaaaaaaatacaggggcgggtttttaaccacggggaactgggaaaacccgggg

SEQ ID NO: 343532 - DNA, 419 bp, Zea mays
gcaacatagaaagcacaatagtgtaccaactatggtagccaaaatatttcgcttccttatgctccttggtctttctgcaagtgctgctaccgcaaccattttcccacaatgctcacaagctgctatatgcttcctttcttcccccatacctgttaccagcaggtgtcttcagtatgtgaaaacccaattcttcaaccctacatgatccaacaggcaatcgcagcaggcatcttacctttatcacccttgttcctccaacaaccgataggcctattacagcagatacctttggtgcatttggtggctcaaaacatcaaggcacaacaactacaacaacttgtgctaggaaaccttgctcgctactctaagcaacagcagtttcttgcattctaccaactggctgcattgaactctgctgc

SEQ ID NO: 343533 - DNA, 346 bp, Zea mays
cagaaacacaccaagcgaagcacattatcattaacctaacaacaatggctaccaagatattatccctccttgcgcttcttgcgctttttgcgagcgcaacaaatgcgttcattattccacaatgctcacttgctccaagttccattattacacagttcctcccaccagttacttcaatgggcttcgaacacccagctgtgcaagcctataggctacaacaagcaattgcggcgagcgtcttacaacaaccaatttcccagttgcaacaacaatccttggcacatctaacaatacaaaccatcgcaacgcaacagcaacaacaattcctaccagcactgagccacct

SEQ ID NO: 343534 - DNA, 69 bp, Zea mays
gtcctgaccagtcgtatgtcttggctggcttggtagttattaaaacgtgttgcaatagctgtggtcggc

SEQ ID NO: 343535 - DNA, 375 bp, Zea mays
ctgggtcttcagaccattagctttatctactccatagcgcagaagaacccgatcgacaccatgagggtgttgctcgttgccctcgctctcctggctctcgctgcgagcgccacctccacgcatacaagcggcggctgcggctgccagccaccgccgccggttcatctaccgccgccggtgcatctgccacctccggttcacctgccacctccggtgcatctcccaccgccggtccacctgccgccgccggtccacctgccaccgccggtccatgtgccgccgccggttcatctgccgccgccaccatgccactaccctactcaaccgccccggcctcagcctcatccccagccacacccatgcccgtgccaacag

SEQ ID NO: 343536 - DNA, 409 bp, Zea mays
caactagcaacatagaaagcacaatagtgttctctcaatggcagccaaaatattttgcctccttatgctccttggtctttctgcaagtgctgctacggcgaccattttcccgcaatgctcgcaagctcctatagcttcccttcttcccccgtacctctcaccagcggtgtcttcggtatgtgaaaacccaattcttcaaccctacaggatccaacaggcaatcgcagctggcatcttacctttatcacccttgttcctccaacaatcatcagccctattacaacagttacctttggtgcatttattggcacaaaacatcatggcacaacaactacaacaacttgtgctagcaaaccttgctgcctactctaagcaacagcagtttcttccattcaaccaactaggttca

SEQ ID NO: 343537 - DNA, 388 bp, Zea mays
cagaccattagctttatctactccagagcgttgaataacccgatcgacaccatgagggtgttgctcgttgccctcgctctcctggctctcgctgcgagcgccacctccacgcatacaagcggcggctgcggctgccagccaccgccgccggttcatctaccgccgccggtgcatctgccacctccggttcacctgccacctccggtgcatctcccaccgccggtccacctgccgccgccggtccacctgccaccgccggtccatgtgccgccgccggttcatctgccgccgccaccatgccactaccctactcaaccgccccggcctcagcctcatccccagccacacccatgcccgtgccaacagccgcatccaagcccgtgccagc

SEQ ID NO: 343538 - DNA, 384 bp, Zea mays
cagaccattagctttatctactccagagcgtagaagaacccgatcgacaccatgagggtgttgctcgttgccctcgctctcctggctctcgctgcgagcgccacctccacgcatacaagcggcggctgcggctgccagccaccgccgccggttcatctaccgccgccggtgcatctgccacctccggttcacctgccacctccggtgcatctcccaccgccggtccacctgccgccgccggtccacctgccaccgccggtccatgtgccgccgccggttcatctgccgccgccaccatgccactaccctactcaaccgccccggccttagcctcattcccagccacacccatgcccgtgccaacagccgcattcaagcccgtgc

SEQ ID NO: 343539 - DNA, 365 bp, Zea mays
tgagaccaacatgcaacatagaaagtggttttcagtagcaacaatagagcaacaatggcgaccaagatattttccctccttatgctccttgctctttctgcatgtgttgctaacgcgacaattttccctcaatgctcacaagctcctatagcttcccttcttcccccataccttccatcaatgatagcttcagtatgtgaaaacccagctcttcaaccctataggctccaacaagcaatcgcagcaagcaacatacctttattacccttgtttcaacaattgccagccctatctttggtgcagtcattggtacaaaccatcagggcacaacagctgcagcaactcgtgctacctgtgatcaacca

SEQ ID NO: 343540 - DNA, 415 bp, Zea mays
cagaccattagctttatctactccagagcgcatattaacccgatcgacaccatgagggtgttgctcgttgccctcgctctcctggctctcgctgcgagcgccacctccacgcatacaagcggcggctgcggctgccagccaccgccgccggttcatctaccgccgccggtgcatctgccacctccggttcacctgccacctccggtgcatctcccaccgccggtccacctgccgccgccggtccacctgccaccgccggtccatgtgccgccgccggttcatctgccgccgccaccatgccactaccctactcaaccgccccggcctcagcctcatccccagccacacccatgcccgtgccaacagccgcatccaagcccgtgccagctgcagggaacctgcggcgttggcagca

SEQ ID NO: 343541 - DNA, 373 bp, Zea mays
gaccgactacatgaatcgaacgtacagttgtctcctgtcaatgaccgactatctatgccaacgctttctgcttactgtaagatgcggcaatgcttaccatgcaaccatttgtctgcattgctccgtggttcttattggttgcatcagctattagcacgtatcaagatagatgctgtctgccagcaaaaaccccatcgttttacattaaacgatgtcaaccggcctgcaccgctgtgctcatacgtagatcacccttctacttccatcaatccagatcgctattacatagccgtgccttcgttgcagtcaaaagaacaggggctgcctgtctaaacaactacagcaactagcgctagcaaaccttgacaactac

SEQ ID NO: 343542 - DNA, 359 bp, Zea mays
gaccaacaagcaacatagaaagtggaattttttagcaacaatagagcaacaatggcgaccaagatattttccctccttatgctccttgctctttctgcatgtgttgctaacgcgacaattttccctcaatgctcacaagctcctatagcttcccttcttcccccataccttccatcaatgatagcttcagtatgtgaaaacccatctcttcaaccctataggctccaacaagcaatcgcagcaagcaacatacctttattacccttgtttcaacaatcgccagccctatctttggtgcagtcattggtacaaaccatcaaggcacagcagctgcagcaacttgtgctacctgtgatcaa

SEQ ID NO: 343543 - DNA, 361 bp, Zea mays
attttgagcattcagaaacacaccaagcgatttttattagcaacaacctaacaacaatggctaccaagatattatccctccttgcgcttcttgcgctttttgcgagcgcaacaaatgcgttcattattccacaatgctcacttgctccaagttccattattacacagttcctcccaccagatacttcaatgggcttcgaacacccagctgtgcaagcctataggctacaacaagcaattgcggcgagcgtcttacaacaaccaattttccagttgcaacaacaattcttggcacatctaacaatacaaaccatcgcaacgcaacagcaacaacaatttctaccaacactgagccacctagc

SEQ ID NO: 343544 - DNA, 233 bp, Zea mays
  unsure (1)..(233): unsure at all n locations
cttcagaccattagctttatctactccagagtgtttaagaacccgatcgacaccatgagggtggtgctcgttgccctcgctctcctggctctcgctgcgagcgccacctccacgcatacaagcggcggctgcggctgccagccaccgccgccggttcatctaccgccgccggtgcatctgccacctccggttcacctgccacctccggtgcatctnccaccgccggtccacct

SEQ ID NO: 343545 - DNA, 191 bp, Zea mays
gcaacatttgttgccgttctacctgcacactgtttctaacgttggcaccctcttacaactgcaacaattgctgccattcgaccaacttgctttgacaaacccagcagtgttctaccaacaacccatcattggtggtgccctcttttagattgcttatgagttatagttcaataataaagttttttttgctg

SEQ ID NO: 343546 - DNA, 397 bp, Zea mays
ggtcttcagaccattagctttatctactccttagtgcagaagaacccgatcgacaccatgagggtgttgctcgttgccctcgctctcctggctctcgctgcgagcgccacctccacgcatacaagcggcggctgcggctgccagccaccgccgccggttcatctaccgccgccggtgcatctgccacctccggttcacctgccacctccggtgcatctcccaccgccggtccacctgccgccgccggtccacctgccaccgccggtccatgtgccgccgccggttcatctgccgccgccaccatgccactaccctactcaaccgccccggcctcagcctcatccccagccacacccatgcccgtgccaacagccgcatccaagcccgtgccagctgc

SEQ ID NO: 343547 - DNA, 408 bp, Zea mays
cttgttgtgtcaacaatcgccagccctatcttttgtgcagtcattggtacaaaccatcagggcacaacagctgcagcaactcgtgctacctgtgatcaaccaagtagctctggcaaacctttctccctactctccgcaacaacaatttcttccattcaaccaactgtctacactgaaccctgctgcttatttgcagcaacaactattaccatttagccagctagctactgcctactctcaacaacaacaacttcttccatttaaccaattggccgcactgaaccccgctgcttatttgcagcagcaaatactactaccatttagccagctagctacagcaagccgtgcttccttcttgacacaacaacagttgctgccgttctaccagcagtttgcggctaaccccgc

SEQ ID NO: 343548 - DNA, 412 bp, Zea mays
gcattcagaaacacaccaagcgaagcgcattttcaacaacctaacaacaatggctaccaagatattagccctccttgcgcttcttgcccttttagtgagcgcaacaaatgcgttcattattccacagtgctcacttgctcctagtgccattattccacagttcctcccaccagttacttcaatgggcttcgaacatccagccgtgcaagcctacaggctacaactagcgcttgcggcgagcgtcttacaacaaccaattgcccaattgcaacaacaatccttggcacatctaaacctacaaaccatcgcaacgcaacagcaacaacagttttctgccatcacttgaccacctaaccgtggtgaaccctgtcgcctacttgcaacagcagctacttgcatccaacccacttgc

SEQ ID NO: 343549 - DNA, 393 bp, Zea mays
ccgcaatgctcacaagctcctatagctttttttcttcccccatacctctcaccagcgatgtcttcagtatgtgaaaatccaattcttctaccctacaggatccaacaggcaatcgcagcaggcatcttacctttatcacccttgttcctccaacaatcatcagccctattacagcagttacctttggtgcatttattggcacaaaacatcagggcacaacaactacaacaactcgtgctagcaaaccttgctgcctactctcagcaacagcagttacctttggtgcatttgttggcacaaaacatcagggcacaacaactacaacaactcgtgctagcaaaccttgctgcctactctcagcaacaacagtttctgccattcaaccaactagct

SEQ ID NO: 343550 - DNA, 340 bp, Zea mays
tcccattccgtgccaccgccgccgcgctgtttctgcgtctgcgtgcgtcgcccgcccgcccgcccgcagtgtccgcagccagagccagagccagcgcacgcgctgctccgccgacgccgaagcctcgtccgcgagcgcgtggctaagcaagcactcgagtcgagctccctccagcggcgggcgcagtgcagccaggccgcgcgcgccgcagcatgaacggcgtcggcgacgcgcacgcggccgtggccgcggccgccatggtgcagcagacgctggggatgtcgctgccgatggcggcgttcgtgcccgagcagggcagcgccaataagctgaccaggcc

SEQ ID NO: 343551 - DNA, 409 bp, Zea mays
caactagcaacatagaaagcacaatagtgtaccttcaatggcagccaaaatattttgcctccttatgctccttggtctttctgcaagtgctgctacggcgaccattttcccacaatgctcacaagctcctatagcttcccttcttcccccgtacctctcaccagcggtgtcttcggtatgtgaaaacccaattcttcaaccctataggatccaacaggcaatcgcagctggcatcttacctttatcacccttgttcctacaacaatcatcagccctattacagcagttacctttggtgcatttattggcacaaaacatcagggcacaacaactacaacaacttgtgctagcaaaccttgctgcctactctcagcaacaacagtttcttccattcaaccaactagcctga

SEQ ID NO: 343552 - DNA, 380 bp, Zea mays
caagctcctatagcttccctttttcccccatatctttcatcaattatagcttcagtatgtgaaaacccagctcttcaaccatataggcttcaacaagcaatcgcagcaagcaacatacctttatcgcccttgttgtgtcaacaatcgccagccctatctttggtgcagtcattggtacaaaccatcagggcacaacagctgcagcaactcgtgctacctgtgatcaaccaagtagctctggcaaacctttctccctactctccgcaacaacaatttcttccattcaaccaactgtctacactgaaccctgctgcttatttgcagcaacaactattaccatttagccagctagctactgcctactcttaacaacaacaact

SEQ ID NO: 343553 - DNA, 404 bp, Zea mays
gcaacatagaaagtggaatccagtagcaactttttagcaacaatggagaccaagatattttccctccttatgctccttgctctttctacatgtgttgctaacgcgacaattttccctcaatgctcacaagctcctatagcttccctttttcccccataccttccatcaattatagcttcagtatgtgaaaacccagctcttcaaccatataggcttcaacaagcaatcgcagcaagcaacatacctttatcgcccttgttgtgtcaacaatcgccagccctatctttggtgcagtcattggtacaaaccatcagggcacaacagctgcagcaactcgtgctacctgtgatcaaccaagtagctctggcaaacctttctccctactctccgcaacaacaatttct

SEQ ID NO: 343554 - DNA, 411 bp, Zea mays
gcaacatagaaagcacaatagtgtaccaactttgtcagccaaaatattttgcctccttatgctccttggtatttctgcaagtgctgctacggcgaccattttcccgcaatgctcacaagctcctatagcttcccttcttcccccgtacctctcaccagcggtgtcttcggtatgtgaaaacccaattcttcaaccctacaggatccaacaggcaatcgcagctggcatcttacctttatcacccttgttcctacaacaatcatcagccctattacagcagctacctttggtgcatttattggcacaaaacatgagggcacaacaactacaacaacttgtgctagcaaaccttgctgcctactctcagcaacagcagtttcttccattcaaccaactagctgcattgaactc

SEQ ID NO: 343555 - DNA, 330 bp, Zea mays
attttgagcattcagaaacacaccaagcgattcacattagcaacaacctaacaacaatggctaccaagatattatccctccttgcgcttcttgcgctttttgcgagcgcaacaaatgcgttcattattccacaatgctcacttgctccaagttccattattacacagttcctcccaccagttacttcaatgggcttcgaacacccagctgtgcaagcctataggctacaacaagcaattgcggcgagcgtcttacaacaaccaatttcccagttgcaacaacaatccttggcacatctaacaatacaaaccatcgcaacgcaacagcaac

SEQ ID NO: 343556 - DNA, 329 bp, Zea mays
aggaagcgccgtgcatccatcgacatctttttattagcctcaacaactcatctgcgtcatcagtctatacgtaggcacgagactttgggtccactcaccatcaacacgcaactcctatcaccttgggctcaacgtgaagacccactctggccatgccaacatcccggggtgcacgggctatatggtgttacacatatgagaacggacttgtggacatactgaaagagcatgctgatatcccaatgtacaaagcacacaacggttggacaacagagggctgggtcagtattaccaacccgttcaacgacacgtttgcttgggctcatttt

SEQ ID NO: 343557 - DNA, 397 bp, Zea mays
  unsure (1)..(397): unsure at all n locations
tcagcattcagaaacacaccaagcgaagcgtactaacaacaacctaacaacaatggctaccaagatattagccctccttgcgcttcttgcccttttagtgagcgcaacaaatgcgttcattattccacagtgctcacttgctcctagtgccattattccacagttcctcccaccagttacttcaatgggcttcgaacatccagccgtgcaagcctacaggctacaactagcgcttgcggcgagcgtcttacaacaaccaattgcccaattgcaacaacaatccttggcacatctaaacctacaaaccatcgcaacgcaacagcaacaacagtttctgccatcactgagccacctagccgtggtgaaccctgtcgnctacttgcaacagcagctactt

SEQ ID NO: 343558 - DNA, 381 bp, Zea mays
cttcagaccattagctttatctactccttatcgcagaagaacccgatcgacaccatgagggtgttgctcgttgccctcgctctcctggctctcgctgcgagcgccacctccacgcatacaagcggcggctgcggctgccagccaccgccgccggttcatctaccgccgccggtgcatctgccacctccggttcacctgccacctccggtgcatctcccaccgccggtccacctgccgccgccggtccacctgccaccgccggtccatgtgccgccgccggttcatctgccgccgccaccatgccactaccctactcaaccgccccggcctcagcctcatccccaaccacacccatgcccgtgccaacagccgcatccaagc

SEQ ID NO: 343559 - DNA, 338 bp, Zea mays
ggcaatcacagctggcatcttacctttattttccttgttcctccaacaatcatcagccctattacatcagttacctttggtgcatttattggcacaaaacatcagggcacaacaactacaacaacttgtgctagcaaaccttgctgcctactctcagcaacagcagtttcttccattcaaccaactagctgcattgaactctgcttcttatttgcaacaacaacaactaccattcagccagctacctgctgcctacccccagcaatttcttccattcaaccaactggcagcattgaactctcctgcttatttacagcagcaacaactactaccattca

SEQ ID NO: 343560 - DNA, 337 bp, Zea mays
aaggatataaagctcacgaggcgatccatcattagtattttcaacatacaacgacactgtacacttcaagagctttgtgaaggcgaagctccgtgtaccattggtcggatatgctctggcgcgatctataacaggctttctatggggatcgtgagagaaggatctttttaaagttagtgaaaaccatattatttgaccctactagatacagcaggcagtcagagacggactcttagcttcatgcacgctagaagctataacacttaacattcatgattgattattggacgtgagtggattaatctggcctatacattttatcgcagcagatgcgaca

SEQ ID NO: 343561 - DNA, 411 bp, Zea mays
attttgagcattcagaaacacaccaagcgaatttctctagcaacgacctaacaacaatggctaccaagatattagccctccttgcgcttcttgccctttttgtgagcgcaacaaatgcgttcattattccacaatgctcacttgctcctagtgccattattccacagttcctcccaccagttacttcaatgggcttcgaacacctagctgtgcaagccaacatgcaacaacaagcgcttgcggcgagcgtcttacaacaaccaattgcccaattgcaacaacaatccttgccacatctaacaatacaagccatcacaacgcaacagcaacaacagttcctaccagcactgagccacctagccatggtgaaccctgccgcctacttgcaagagcagctgcttgcatccaacc

SEQ ID NO: 343562 - DNA, 401 bp, Zea mays
ttctatcagtaccatcaatcatcattcatcttagtagtataggcaccaaatcaaatctgcaacatcaattatctaactccaaaaaccatgaagctggtgcttgtggttcttgctttcattgctttagtatcaagtgtttcttgtacacagacaggcggctgcagctgtggtcaacaacaaagccatgagcagcaacatcatccacaacaacatcatccacaaaaacaacaacatcaaccaccaccacaacatcaccagcagcagcaacaccaacaacaacaagttcacatgcaaccacaaaaacatcagcaacaacaagaagttcatgttcaacaacaacaacaacaaccgcggcaccaacaacaacaacaacaacagcaccaacaacaacattaatgtga

SEQ ID NO: 343563 - DNA, 360 bp, Zea mays
gaccaacaagcaacatagaaagtggaatactttagcaacaatagagcaacaatggcggccaagatattttccatccttatgctccttgctctttctgcatgtgttgctaacgcgaccatttttcctcaatactcacaagctcctatagctgcccttcttcccccataccttccatcaatgaccgcttcagtatgtgaaaacccagcccttcaaccctacaggctccaacaagcaatcgcaacaagcaacttacctttatcacccctgttctttcaacaatcgccagccctatctttggtgcagtcattggtacaaaccatcagggcacaacagctgcagcaactcgtgctaccagtgatc

SEQ ID NO: 343564 - DNA, 306 bp, Zea mays
ccgctgcttatttgcagcagcaaatattattaccatttagccagctagctgcagcaagccgtgcttccttcttgacacagcaacagttgctgcctttctaccagcagtttgcggctaaccccgcaaccctcttacaactacaacaattgttgccctttgtccaacttgctttgacaaacccagcagcctcctaccaacaacacataattggtggtgccctcttttagattgcttattagttgtaattcaataatcaagttttttagaatctggacatgaactacttatttctggatggcccataca

SEQ ID NO: 343565 - DNA, 240 bp, Zea mays
ataattttggtctgcttccgtcactgattcttcctgttctgttgccggcaacagaggcccagagaggcgccaatccgccggctggatctgaaccatgaacaagcaatctgatgggcagggggtggagagggttgctgaggaaaaccaacttgatgagaaagagttagaaaggaagctgaaaaaagatcaaatggcaaaagagaaagatgagaagaaacttaaggcaaaacaaaaggaggc

SEQ ID NO: 343566 - DNA, 350 bp, Zea mays
gtggaatccagtagcaacaatagagcaacattggttaccaagatattttccctccttatgctccttgctctttctacatgtgttgctaacgcgacaattttccctcaatgctcacaagctcctatagcttccctttttcccccataccttccatcaattatagcttcagtatgtgaaaacccagctcttcaaccatataggcttcaacaagcaatcgcagcaagcaacatacctttatcgcccttgttgtgtcaacaatcgccagccctatctttggtgcagtcattggtacaaaccatcagggcacaacagctgcagcaactcgtgctacctgtgatcaaccaagtagc

SEQ ID NO: 343567 - DNA, 288 bp, Zea mays
gaccccataacatcattctacgcacaagcgtttaccaacactggcgactccatgatggtgccgctttatgctctttggtctctgtgtattgctgctagcggccactatactcatacaatggtgagatgctgctgtcagtcaccttcttcggttgatcctactgacgacggtgcatttgccaccgtgagaacacctgtcatctacggtgcatgatccaacgggggatcacatgtcgcctccggcctatatgacactggcggttcatgtgctgatgacggttaatacagc

SEQ ID NO: 343568 - DNA, 82 bp, Zea mays
agaccgtgaacttcatctactccagagcgcttactaacgcgaccgacaccatgagggtgctgatgcgtcccgctcgctctac

SEQ ID NO: 343569 - DNA, 397 bp, Zea mays
cccgatcgacaccatgagggtgtggctcgttgctttcgctctcctggctctcgctgcgagcgccacctccacgcatacaagcggcggctgcggctgccagccaccgccgccggttcatctaccgccgccggtgcatctgccacctccggttcacctgccacctccggtgcatctcccaccgccggtccacctgccgccgccggtccacctgccaccgccggtccatgtgccgccgccggttcatctgccgccgccaccatgccactaccctactcaaccgccccggcctcagcctcatccccagccacacccatgcccgtgccaacagccgcatccaagcccgtgccagctgcagggaacctgcggcgttggcagcaccccgatcctgggccagtgc

SEQ ID NO: 343570 - DNA, 130 bp, Zea mays
acggggtcttcagaccattagctttatctactcttagcgcagaagaacccgatcgacaccatgagggtgttgctcgttgccctcgctctcctggctctcgctgcgagcgccaccttcacgcatacaagcg

SEQ ID NO: 343571 - DNA, 350 bp, Zea mays
gagaccaacaagcaacatagaaagtggaatccagtatcaacaatagagcaacaatggcgaccaagatattttccctccttatgctccttgctctttctgcatgtgttgctaacgcgacaattttccctcaatgctcacaagctcctatagcttcccttcttcccccataccttccatcaatgatagcttcagtatgtgaaaacccagctcttcaaccctataggctccaacaagcaatcgcagcaagcaacatacctttatcacccttgtttcaacaatcgccagccctatctttggtgcagtcattggtacaaaccatcagggcacagcagctgcagcaactcgtgcta

SEQ ID NO: 343572 - DNA, 390 bp, Zea mays
gaccattagctttatctactccagagcgcataataacccgatcgacaccatgagggtgttgctcgttgccctcgctctcctggctctcgctgcgagcgccacctccacgcatacaagcggcggctgcggctgccagccaccgccgccggttcatctaccgccgccggtgcatctgccacctccggttcacctgccacctccggtgcatctcccaccgccggtccacctgccgccgccggtccacctgccaccgccggtccatgtgccgccgccggttcatctgccgccgccaccatgccactaccctactcaaccgccccggcctcaggctcatgcccagccacacccatgcccgtgccaacagccgcatccaagcccgtgccagctgca

SEQ ID NO: 343573 - DNA, 390 bp, Zea mays
caacaagcaacatagaaagtggaatacagtatcatcaatagagcaacaatggcggccaagatattttccatccttatgctccttgctctttctgcatgtgttgctaacgcgaccatttttcctcaatactcacaagctcctatagctgcccttcttcccccataccttccatcaatgaccgcttcagtatgtgaaaacccagcccttcaaccctacaggctccaacaagcaatcgcaacaagcaacttacctttatcacccctgttctttcaacaatcgccagccctatctttggtgcagtcattggtacaaaccatcagggcacaacagctgcagcaactcgtgctaccagtgatcagccaagtagctttggcaaacctttcttcctac

SEQ ID NO: 343574 - DNA, 158 bp, Zea mays
cccgaccgggaatggaccgggtcggcccacgccacgcgattcagctctatctacatccacgagcgcaggaagatccttgtatctgacaccactgaggggtgggttgctcagttgcgcgctcagctctcactggggctctcggctggcgagcccgccac

SEQ ID NO: 343575 - DNA, 356 bp, Zea mays
ggtcttcagaccattagctttatctactccatagcgcagaagaacccgatcgacaccatgagggtgttgctcgttgccctcgctctcctggctctcgctgcgagcgccacctccacgcatacaagcggcggctgcggctgccagccaccgccgccggttcatctaccgccgccggtgcatctgccacctccggttcacctgccacctccggtgcatctcccaccgccggtccacctgccgccgccggtccacctgccaccgccggtccatgtgccgccgccggttcatctgccgccgccaccatgccactaccctacttaacccgcccggccctaagcttattcccaggcacaacc

SEQ ID NO: 343576 - DNA, 395 bp, Zea mays
attttcagcattcagaaacacaccaatttttttgcactagcaacaacctaacaacaatgggtaccaatatattagccctccttgcgcttcttgcccttttagtgagcgcaacaaatgcgttcattattccacagtgctcacttgctcctagtgccattattccacagttcctcccaccagttacttcaatgggcttcgaacatccagccgtgcaagcctacaggctacaactagcgcttgcggcgagcgtcttacaacaaccaattgcccaattgcaacaacaatccttggcacatctaaacctacaaacaatttgaacgcaccagcaacaacagtttttgtcatcactgagacacctagccgtggtgaacccttttgctactttgaacagcaaa

SEQ ID NO: 343577 - DNA, 216 bp, Zea mays
cagaaacacaccaagcgaagcgcactagcaacaacctaacaacaatggctaccaagatattagccctccttgcgcttcttgcccttttagtgagcgcaacaaatgcgttcattattccacagtgctcacttgctcctagtgccattattccacagttcctcccaccagttacttcaatgggcttcgaacatccagccgtgcaagcctacaggctac

SEQ ID NO: 343578 - DNA, 406 bp, Zea mays
gcaattagctcatcgactccagattggagaactcgacaccatgaaggtgctgatcgttgcccttgctctgctggcgctcgctgcgagcgccgcctccagtacaagcggcggctgtggctgccagacaccaccgtttcatctaccgcctccgttctatatgccgcctccgttctatctgccgccgcagcagcagccgcagccatggcaataccccactcaaccaccgcagctaagcccgtgccagcagttcggatcctgcggcgtcggcagcgtcggcagcccgttcctgggccagtgcgtcgagttcctgaggcaccagtgcagcccggcggcgacgccctacggctcgccacagtgccaggcgctgcagcagcagtgctgccaccagatcaggcaggtggagccg

SEQ ID NO: 343579 - DNA, 303 bp, Zea mays
agcacaatagtgtaccaacaatggcagccaaaatattttgcctccttatgctccttggtatgtctgcaagtgctgctacggcgaccattttcccgcaatgctcacaagctcctatagcttcccttcttcccccgtacctctcaccagcggtgtcttcggtatgtgaaaacccaattcttcaaccctacaggatccaacaggcaatcgcagctggcatcttacctttatcacccttgttcctccaacaatcatcagccctattacagcagttacctttggtgcatttattggcacaaaacatca

SEQ ID NO: 343580 - DNA, 290 bp, Zea mays
agcaatcgcaacaagcaacttacctttatcacccctgttctttcaacaatcgccagccctatctttggtgcagtcattggtacaaaccatcagggcacaacagctgcagcaactcgtgctaccagtgatcagccaagtagctctggcaaacctttctccctactctcagcaacaacaatttcttccattcaaccaactgtctacactgaaccctgctgcttatttgcagcaacaacaactactaccattcagccagctagctactgcctactctcagcagcaacaatttc

SEQ ID NO: 343581 - DNA, 256 bp, Zea mays
caattagctcatcgactccagattggagaactcgacaccatgaaggtgctgatcgttgccgttgctctcctggcgctcgctgcgagcgccgcctccagtacaagcggcggctgtggctgccagacaccaccgtttcatctaccgcctccgttctatatgccgcctccgttctatctgccgccgcagcagcagccgcagccatggcaataccccactcaaccaccgcagctaagcccgtgccagcagttcggatcct

SEQ ID NO: 343582 - DNA, 453 bp, Zea mays
ctacaggatccaacaggcaatcgcagctggcatcttacctttatcacccttgttcctccaacaatcatcagccctattacagcagttacctttggtgcatttattggcacaaaacatcagggcacaacaactacaacaacttgtgctagcaaaccttgctgcctactctcagcaacagcagtttcttccattcaaccaactagctgcattgaactctgcttcttatttgcaacaacaacaactaccattcagccagctacctgttgcctacccccagcaatttcttccattcaaccaactggcagcattgaactctcctgcttatttacagcagcaacaactactaccattcaaccagctagctggtgtgagccctgctaccttcttgacacaaccacagttgttgccgttctaccagcacgctgcgcctaacgctggcaccctcttacaact

SEQ ID NO: 343583 - DNA, 223 bp, Zea mays
gagcattcagaaacacaccaagcgaagcgcactagcaacaacctaacaacaatggctaccaagatattatccctccttgcgcttcttgcgctttttgcgagcgcaacaaatgcgtccattattccacaatgctcacttgctcctagttccattattccacagttcctcccaccagttacttcaatggccttcgaacacccagctgtgcaagcctataagctac

SEQ ID NO: 343584 - DNA, 140 bp, Zea mays
tacctataaccagcggggtattcggtatgtgaaaacccaattcttcaaccctataggatccaacaggcaatcgcagctggcgtgttacctttataacacttgttcctacaacactgataatccctattacagcagttaca

SEQ ID NO: 343585 - DNA, 251 bp, Zea mays
cggacgcgtgggtttgtgttgtacccaataatgaagtcggcatgccatcgcatgcgactcagtgtttaggaataaaacaagctaataatgacttttctctcattataatgtaaaaaaaaaaaaaaaaataaaaaaaaaaaaaaaaaaaaaaaataaaaaaacaaaataaacaaaaaaataaaaaaaaaaaatacaaaaaaaatggaaacaaaacaccattgaaggggcgggccttttaaaaaaaacaaaat

SEQ ID NO: 343586 - DNA, 344 bp, Zea mays
cgacccacacgtccgcgtacacatttttttttttattacacaacaattcaattctcatcccatcccacacaactcagtgaatatgtataaaacctttttcatactcacacatttctccttatttatcccaaaatataatcaaaacatttttcctttttacaacaacaacatttttttccatttaaccaacattcttttacaaatcctaccactcttattcaaccccccacacatttttctcccatcttttaaattttttatatattaatactttaataaaaaattcctaatccttattttttcataccttttaattataatatttttaaaacatctatattttt

SEQ ID NO: 343587 - DNA, 322 bp, Zea mays
cagaaacacaccaagcgaagcgcactagcaacaacctaacaacaatggctaccaagatattagccctccttgcgcttcttgcccttttagtgagcgcaacaaatgcgttcattattccacagtgctcacttgctcctagtgccattattccacagttcctcccaccagttacttcaatgggcttcgaacatccagccgtgcaagcctacaggctacaactagcgcttgcggcgagcgtcttacaacaaccaattgcccaattgcaacaacaatccttggcacatctaaacctacaaaccatcgcaacgcaacagcaacaaca

SEQ ID NO: 343588 - DNA, 277 bp, Zea mays
acaatgggcttagaacacccagctgtgcactcctatcagctacaacaagcaattgcggcgagcgtgttacaacaaccaatttcccagttgccacaacaatccttggcacatctaacaatacaaaccatcgcaacgcaacagcaacaacaattcctaccagcactgagccacctagccatggtgaaccctgccccctacttgcaacagcagttgcttgcatcaaacccacttgctcttgcaaacgtaattgcaaaccagccacaacaacagctgcaac

SEQ ID NO: 343589 - DNA, 421 bp, Zea mays
aaagcacaatagtgtaccaacaatggcagccaaaacattttgcctccttatgctccttgggctttctgcaagtgctgctactgcgaccattttcccacaatgctcacaagctcctatggctatcccttctttccccgcacctttcaccagcggcgtctaccgtatgcgaaaacccaattcttcaaccctataggatccaacaggcaatcgcagctggcatcttacctttatcacccttgttcctccaacaatcataagccctattacagcatttacctttgttgcatttattggcacaaaacatcacggcacaacaactacaacaacttgtgctagcaaaccttgctgtctactctcagcaacaacagtttcttccattcaaccaactagctgcattgaacttctgttgttatttgctaca

SEQ ID NO: 343590 - DNA, 343 bp, Zea mays
cagaaacacaccaagcgaagcgcactagcaacaacctaacaacaatggcttaccaagatattatccctccttgcgcttcttgcgctttttgcgagcgcaacaaatgcgtccattattccacaatgctcacttgctcctagttccattattccacagttcctcccaccagttacttcaatggccttcgaacacccagctgtgcaagcctataggctacaacaagcgattgcggcgagcgtcttacaacaaccaattgcccaattgcaacaacaatccttggcacatctaacaatacaaaccatcgcaacgcaacagcaacaacagttcctaccagcactgagcc

SEQ ID NO: 343591 - DNA, 278 bp, Zea mays
caatgggcttcgaacacccagctgtgcaagcctatatgctacaacaagcaattgcggcgagcgtcttacaacaaccaattttccagttgcaacaacaattcttggcacatctaacaatacaaaccattgcaacgcaacagcaacaacaatttctaccagcactgagccacctagccatggtgaaccctgccgcctacttgcaacagcagttgcttgcatcaaacccacttgctctggcaaacgtagttgcaaaccagccacaacaacagctgcaacag

SEQ ID NO: 343592 - DNA, 333 bp, Zea mays
cacaccaagcgaagcgcactagcaacaacctaacaacaatggctaccaagatattagccctgcttgcgcgtcttgcccttttagtgagcgcaacaaatgcgttcattattccacagtgctcacttgctcctagtgccattattccacagttcctcccaccagttacttcaatgggcttcgaacatccagccgtgcaagcctacaggctacaactagcgcttgcggcgagcgtcttacaacaaccaattgcccaattgcaacaacaatccttggcacatctaaacctacaaaccatcgcaacgcaacagcaacaacagtttctgccatcactga

SEQ ID NO: 343593 - DNA, 451 bp, Zea mays
  unsure (1)..(451): unsure at all n locations
ccaactagcaacatagaaagcacaatagtgtaccaacaatggcagccaaaatattttgcttggttatgcggcttggtctttctgcaagtgttgctaccgcaaccattttcccacaatgctcacaagctcctatagcttcccttcttcccccatacctctcaccagcggtgtcttcaatgtgtgaaaacccaattgttcaaccctacaggatccaacaggcaatcgcaacaggcatcttaccattatcacccttgttcctccaacaaccgtcagccctattacagcagttacctttggtccatttggtggcacanaacatcagggcacaacaactacaacaacttgtgctagcaaaccttgctgcatactctcagcaacatcagtttcttccattcaaccaactggctgcattgaactctgctgcttatttgcaacaacaattaccattcag

SEQ ID NO: 343594 - DNA, 293 bp, Zea mays
cggacgcgtgggcaagcaacatagaaagtggaatccagtagcaacaatagagcaacaatggagaccaagagattttccctccttatgctccttgctctttctacatgtgttgctaacgcgacaattttccctcaatgctcacaagctcctatagcttccctttttcccccataccttccatcaattatagcttcagtatgtgaaaacccagctcttcaaccatatatgcttcaacaagcaatcgcagcaagcaacatacctttatcgcccttgttgtgtcaacaatcgccagc

SEQ ID NO: 343595 - DNA, 293 bp, Zea mays
aatgttaccagctttcaacatcacacgcacagtagcgcaccaacaacggcctacgaactggggcgctcactaatgcttcctggcctgtgctcatggcgctctacgcgagcgcttctaatgcattgattattcgatactgttgacttgcttcatgctccattcttacaaacatccttgtatcaaatgcttgaaagccctattgacacacacttctgcatgcatctaggcttcaacacgcgcttgttaccatcgtcttacttcatcctacaacaaacgtgcgacatctatcattg

SEQ ID NO: 343596 - DNA, 267 bp, Zea mays
agaaagcacaatattgtaccaacaatggcagccaaaatattttgcttccttatgctcctgggtctttctgcaagtgttgctaccgtaaccattttcccacaatgctcacaagctcctatagcttcctttcttcccccatacctctcaccagcggcgtcttcaatgtgtgaaaactcaattgtttaaccctacaggatccaacatgcaatctccacaagcctcttaccattatcacccttgttctttcaacaaccttcctccctatta

SEQ ID NO: 343597 - DNA, 457 bp, Zea mays
  unsure (1)..(457): unsure at all n locations
gtggaatccagtagcaacaatagagcaacaatggcgaccaagatattttccctccttatgctccttgctctttctgcatgtgttgctaacgcgacaattttccctcaatgctcacaagctcctatagcttcccttcttcccccataccttccatcaatgatagcttcagtatgtgaaaacccagctcttcaaccctataggctccaacaagcaatcgcagcaagcaacatacctttatcacccttgtttcaacaatcgccagccctatctttggtgcagtcattggtacanaccatcagggcacagcaagccgtgctttcttcttgacacagcaacagttgctgcctttttaccaacagtttgcggctaaccccgcaacccttttacaactacaacaattgttgccctttgtccaacttgctttgacaaacccagcagcctcctaccaacaacacat

SEQ ID NO: 343598 - DNA, 303 bp, Zea mays
cggacgcgtgggtgagcattcagaaacacaccaagcgaagcgcactagcaacaacctaacaacaatggctaccaagatattatccctccttgcgcttcttgcgctttttgcgagcgcaacaaatgcgttcattattccacaatgctcacttgctcctagttccattattccacagttactcccaccagttacttcaatggccttcgaacacccagctgtgcaagcctataggctacaacaagcgattgcggagagcgtcttacaacaaccaatttgccaattgcaacaacaatccttggcaca

SEQ ID NO: 343599 - DNA, 298 bp, Zea mays
cctctcgttgtgggtaatgcacctacatacctgcaacaacaattgctgcaacagattgtaccagctctgactcagctagctgtggcaaaccctgctgcctacttgcaacagctgcttccattcaaccaactgactgtgtcgaactctgctgcgtacctacaacagcgacaacagttacttaatccactagcagtgcctaacccattggtcactgccttcctacagcagcaacaattgctaccatacagccagttctctttgatgaaccctgccttgtcgtggcaagcaacccatcgtt

SEQ ID NO: 343600 - DNA, 450 bp, Zea mays
gagaccaactagcaacatagaaagcacaatagtgtaccaacaatggcagccaaaatattttgcttccttatgctccttggtctttctgcaagtgctgctaccgcaaccatttttccacaatgctcacaagctcctatagcttcctttctttccccatacctctcaccagcggtgtcttcagtatgtgaaaacccaattcttcaaccctacaggatccaacaggcaatcgcagcaggcatcttacctttatcacccttgttcctccaacaaccgtcagtcctattacagcagttacctttggtgcatttgttggcacaaaacatcaaggcgcaacaactacaacaacttgtgctaggaaaccttgctgcctactctcagcaacagcagtttcttccattcaaccaactggctgcattgaactctgctgcttatttgcaacaacaactacca

SEQ ID NO: 343601 - DNA, 197 bp, Zea mays
caacaagcaacatagaaagtggaatccagtagcaacaatagagcaacaatggcgaccaagagattttgcctccttatgctccttgctctttctgcatgtgttgctaacgccacaattttccctcaatgctcacaagctcctataggcttccttttttccccaatactttcataatgatagcttcagatgtggaaaac

SEQ ID NO: 343602 - DNA, 316 bp, Zea mays
gaccaactagcaacatagaaagcacaatagtgtaccaacaatggcagctaaaatattttgcctccttatgctccttggtctttctgcaagtgctgctacggcgaccattttcccacaatgctcacaagctcctatagcttcccttcttcccccgtacctctcaccaacggtgtcttcggtatgtgaaaacccaattcttcaaccctacaggatccaacaggcaatcgcagctggcatcttacctttatcacccttgttcctccaacaatcatcagccctattacagcagttacctttggtgcatttattggcacaa

SEQ ID NO: 343603 - DNA, 410 bp, Zea mays
gaccaactagcaacatagaaagcacaatagtgtaccaacaatggcagctaaaatattttgcgctccttatgctccttggtctttctgcacgtgctgctacggcgaccattttcccacaatgctcacaagctcctatagctttccttcttcctccgtacctctcaccaacggtgtcttcggtatgtgaaaacccaattcttcatccctacaggatccaacaggcaatcgcagctggcatcttacctttatcacccttgttcctccaacaatcatcatccctattacagcagttacctttggggcatttattggcacaaaacatgagggcacaacaactacaacaacttgtgctaacaaaccttgctgcctactctcagcaacagcagtttctttcattcaaccaactagct

SEQ ID NO: 343604 - DNA, 258 bp, Zea mays
gagcattcagaaacacaccaagcgaagcgcactagcaacgacctaacaacaatggctaccaagatattagccctccttgcgcttcttgccctttttgtgagcgcaacaaatgcgttcattattccacaatgctcacttgctcctagtgccattattccacagttcctcccaccagttacttcaatgggcttcgaacacctagctgtgcaagccaacatgcaacaacaagcgcttgcggcgagcgtcttacaacaacca

SEQ ID NO: 343605 - DNA, 239 bp, Zea mays
gtcagcctagcaattagctcatcgactccagattggagaactcgacaccatgaaggtgctgatcgttgcccttgctctcctggcgctcgctgcgagcgccgcctccagtacaagcggcggctgtggctgccagacaccaccgtttcatctaccgcctccgttctatatgccgcctccgttctatctgccgccgcagcagcagccgcagccatggcaataccccactcaaccaccgcagc

SEQ ID NO: 343606 - DNA, 384 bp, Zea mays
ggaatccagtagcaacaatagagcaacaatttctaccaagatattttccctccttatgctggttgctctgtctgcatgtgttgctaacgcgacaattttccctcaatgctcacaagctcctatagcttcccttcttcccccataccttccatcaatgatagcttcagtatgtgaaaacccagctcttcaaccctataggctccaacaagcaatcgcagcaagcaacatacctttatcactcttgtttcaacaatcgccagccctatctttggtgcagtcattggtacaaaccatcatggcacagcagctgcagcaactcgtgctacctgtgatcaaccaagtatctctggcaaacctttcttcctactctcagcatcaacaatt

SEQ ID NO: 343607 - DNA, 297 bp, Zea mays
gttcattattccacagtgctcacttgctcctagtgccattattccacagttcctcccaccagttacttcaatgggcttcgaacatccagccgtgcaagcctacaggctacaactagcgcttgcggcgagcgtcttacaacaaccaattgcccaattgcaacaacaatccttggcacatctaaacctacaaaccatcgcaacgcaacagcaacaacagtttctgccatcactgagccacctagccgtggtgaaccctgtcgcctacttgcaacagcagctacttgcatccaacccact

SEQ ID NO: 343608 - DNA, 433 bp, Zea mays
  unsure (1)..(433): unsure at all n locations
gagcaacaatggagaccaagatattttccctccttatgctccttgctctttctacatgtgttgctaacgcgacaattttccctcaatgctcacaagctcctatagcttccctttttcccccataccttccatcaattatagcttcagtatgtgaaaacccagctcttcaaccatataggcttcaacaagcaatcgcagcaagcaacatacctttatcgcccttgttgtgtcaacaatcgccagccctatctttggtgcagtcattggtacaaaccatcagggcacaacagctgcagcaactcgtgctacctgtgatcaaccaagtagctctggcaaacctttctccctactctccgcaacaacaatttcttncattcaaccaactgtctacactgaaccctgctgcttatttgcagcaacaactattaccatt

SEQ ID NO: 343609 - DNA, 213 bp, Zea mays
gccagcctagcaattaaacccaccgcactcttataggagcaccagccaccctacattcgctgcgcaggcgttatcgccaccctggtgctcgtcgtgcccgaaaccaaacaccaaaacccgctcatgatattgggagaacaaagcctagcatcaaccgaaaaagatagcaaatccctccataacctatgtcctgccggaaccgcaacattggac

SEQ ID NO: 343610 - DNA, 336 bp, Zea mays
gagcattcagaaacacaccaagcgaagctacctagcaacgacttaacaacaatggctaccaagatattagccctccttgcgcttcttgccctttttgtgagcgcaacaaatgcgttcattattccacaatgctcacttgctcctagtgccattataccacagttcctccgaccagttacttcaatgggcttcgaacacctagctgtgcaagcctacaggctacaacaagcgcttgcggcgagcgtcttacaacaaccaattaaccaattgcaacaacaatccttggcacatctaaccatacaaaccatcgcaacacaacagcaacaccagttccta

SEQ ID NO: 343611 - DNA, 350 bp, Zea mays
  unsure (1)..(350): unsure at all n locations
caactagcaacatagaaagcacaatagtgtaccaacaatggcaaccaaaatattttgcttccttatgctccttggtctttctgcaagtgctgctaccgcgaccattttcccgcaatgctcacaagctcctatagcttcccttcttcccccatacctctcaccagcggtgtcttcagtatgtgaaaacccaattcttcaaccctacaggatccaacaggcaatcgcagcaggcatcttacctttatcacccttgttcctccaacaaccgtcagccctattacagcagttacctttggtgcatttgntggcacaaaacatcagggcacaacaactacaacaactngtgctag

SEQ ID NO: 343612 - DNA, 303 bp, Zea mays
tttcagcattcagaaacacaccaagcgaagcgcactagcaacaacctaacaacaatggctaccaagatattagccctccttgcgcttcttgcccttttagtgagcgcaacaaatgcgttcattattccacagtgctcacttgctcctagtgccattattccacagttcctcccaccagttacttcaatgggcttcgaacatccagccgtgcaagcctacaggctacaactagcgcttgcggcgagcgtcttacaacaaccaattgcccaattgcaacaacaatcctttgcacatctaaaccta

SEQ ID NO: 343613 - DNA, 456 bp, Zea mays
gcaacatagaaagcacaatagtgtaccaacaatggcagccaaaatattttgcctccttatgctccttggtctttctgcaagtgctgctacggcgaccattttcccgaaatgctcgcaagctcctatagcttcccttcttcccccgtacctctcaccagcggtgtcttcggtatgtgaaaacccaattcttcaaccctacaggatccaacaggcaatcacagctggcatcttacctttatcacccttgttcctccaacaatcatcaaccctattacattaattaccttttgtgcatttattagcacaaaacatcagggcacaacaactacaacaacttgtgctagcaaaccttgctgcctactctcagcaacagcagtttcttccattcaaccaactagctgcattgaactctgcttcttatttgcaacaacaacaactaccattcagccagctacc

SEQ ID NO: 343614 - DNA, 366 bp, Zea mays
attgagaccaacaagcaacatagaaagtggaatacagtagcaacaatagagcaacaatggcggccaagatattttccatccttatgctccttgctctttctgcatgtgttgctaacgcgaccatatttcctcaatactcacaagctactatagatgcccttcttcccccataccttccatcaatgaccgcttcagtatgtgaaaacacaacccttcaaccctacaggctccaacaagctatcgcaacaagcaacttacctttatcacccctgttctttcaacaatcgtcagccctatctttggggcagtcattgttacacaccatcatggcacaacagctgcagcaactcgtgctaccagtgatca

SEQ ID NO: 343615 - DNA, 358 bp, Zea mays
attttgagcattcagaaacacaccaagcgaagcgcactagcaacgacctaacaacaatggctaccaagatattagccctccttgcgcttcttgccctttttgtgagcgcaacaaatgcgttcattattccacaatgctcacttgctcctagtgccattattccacagttcctcccaccagttacttcaatgggcttcgaacacctagctgtgcaagccaacatgcaacaacaagcgcttgcggcgagcgtcttacaacaaccaattgcccaattgcaacaacaatccttgccacatctaacaatacaagccatcacaacgcaacagcaacaacagttcctaccagcactgagccacct

SEQ ID NO: 343616 - DNA, 342 bp, Zea mays
gcgcagaagaacccgatcgacaccatgagggtgttgctcgttgccctcgctctcctggctctcgctgcgagcgccacctccacgcatacaagcggcggctgcggctgccagccaccgccgccggttcatctaccgccgccggtgcatctgccacctccggttcacctgccacctccggtgcatctcccaccgccggtccacctgccgccgccggtccacctgccaccgccggtccatgtgccgccgccggttcatctgccgccgccaccatgccactaccctactcaaccgtcccggcctcggcctcatccccagcaacaccaatgcccgggccaacagccg

SEQ ID NO: 343617 - DNA, 274 bp, Zea mays
  unsure (1)..(274): unsure at all n locations
agcttaatccatctgcccataataatttgagcgattgcaaaatacacacacaagggaagatgtcactagcagactgggctaaccaacaatggcgtaccatagactattagccgctcccttggcgctcactttctcctttcaagtgaggcgcaacaacgtgcanttcatttatttcacacatgcgtcacgttgtctcctaatggccattatgttcacacgtgtcctgccatcaagttacaatcgaatggtgcatcgaaacaccactattggtgca

SEQ ID NO: 343618 - DNA, 345 bp, Zea mays
agcattcagaaacacaccaagcgaagcgcactagcaacaacctaacaacaatggctaccaagatattatgcctccttgcgcttcttgcgctttttgcgagcgcaacaaatgcgtccattattccacaatgctcacttgctcctagttccattattccacagttcctcccaccagttacttcaatggccttcgaacacccagctgtgcaagcctataggctacaacaagcgattgcggcgagcgtcttacaacaaccaattgcccaattgcaacaacaatccttggcacatctaacaatacaaaccatcgcaacgcaacagcaacaacagttcctaccagcactga

SEQ ID NO: 343619 - DNA, 283 bp, Zea mays
gtggaatccagtagcaacaatagagcaacaatggcgaccaagatattttccctccttatgctccttgctctttctgcatgtgttgctaacgcgacaatttttcctcaatgctcacaagctcctatagcttcccttcttcccccataccttccatcaatgatagcttcagtatgtgaaaacccagctcttcaaccctataggctccaacaagcaatcgcagcaagcaacatacctttatcacccttgtttcaacaatcgccagccctatctttggtgcagtcat

SEQ ID NO: 343620 - DNA, 456 bp, Zea mays
ctgggtcttcagaccattagctttatctactccagagcgcagaagaacccgatcgacaccatgagggtgttgctcgttgccctcgctctcctggctctcgctgcgagcgccacctccacgcatacaagcggcggctgcggctgccagccaccgccgccggttcatctaccgccgccggtgcatctgccacctccggttcacctgccacctccggtgcatctcccaccgccggtccacctgccgccgccggtccacctgccaccgccggtccatgtgccgccgccggttcatctgccgccgccaccatgccactaccctactcaaccgccccggcctcagcctcatccccagccacacccatgcccgtgccaacagccgcatccaagcccgtgccagctgcagggaacctgcggcgttggcagcaccccgatcctgggccagtgcgtcgagttcctg

SEQ ID NO: 343621 - DNA, 309 bp, Zea mays
tgagcattcagaaacacaccaagcgaagcgcactagcaacgacctaacaacaatggctacgaagatattagccctccttgcgcttcttgccctttttgtgagcgcaacaaatgcgttcattattccacaatgctcacttgctcctagtgccattattccacagttcctcccaccagttacttcaatgggcttcgaacacctagctgtgcaagccaacatgcaacaacaagcgcttgcggcgagcgtcttacaacaaccaattgcccaattgcaacaacaatccttgccacattttaaaaattacaagcc

SEQ ID NO: 343622 - DNA, 309 bp, Zea mays
cagcattcagaaacacaccaagcgaagcgcactagcaacaacctaacaacaatggctaccgagatattagccctccttgcgcttcttgcccttttagtgagcgcaacaaatgcgttcattattccacagtgctcacttgctcctagtgccattattccacagtttcttccaccagttacttcaatgggcttcgaacatccagccgtgcaagcctacaggctacaactagcgcttgcggcgagcgtcttacaacaaccaattgcccaatttgcacaacaatccttggcacatctaaacctaccaaccatc

SEQ ID NO: 343623 - DNA, 363 bp, Zea mays
attttgagcattcagaaacacaccaagcgaagctacctagcaacgacttaacaacaatggctaccaagatattagccctccttgcgcttcttgccctttttgtgagcgcaacaaatgcgttcattattccacaatgctcacttgctcctagtgccattataccacagttcctccgaccagttacttcaatgggcttcgaacacctagctgtgcaagcctacaggctacaacaagcgcttgcggcgagcgtcttacaacaaccaattaaccaattgcaacaacaatccttggcacatctaaccatacaaaccatcgcaacacaacagcaacaacagttcctaccagcactgagccaactagatg

SEQ ID NO: 343624 - DNA, 375 bp, Zea mays
attttgagcattcagaaacacaccaagcgaagctacctagcaacgacttaacaacaatggctaccaagagattagccctccttgcgcttcttgccctttttgtgagcgcaacaaatgcgttcattattccacaatgctcacttgctcctagtgccattataccacagttcctccgaccagttacttcaatgggcttcgaacacctagctgtgcaagcctacaggctacaacaagcgcttgcggcgagcgtcttacaacaaccaattaaccaattgcaacaacaatccttggcacatctaaccatacaaaccatcgcaacacaacagcaacaacagttcctaccagcactgagccaactagatgtggtgaaccctg

SEQ ID NO: 343625 - DNA, 453 bp, Zea mays
gcgaagcgcactagcaacaacctaacaacaatggctaccaagatattagccctccttgcgcgtcttgccgttttagtgagcgcaacaaatgcgttcattattccacagtgctcacttgctcctagtgccattattccacagttcctcccaccagttacttcaatgggcttcgaacatccagccgtgcaagcctacaggctacaactagcgcttgcggcgagcgtcttacaacaaccaattgcccaattgcaacaacaatccttggcacatctaaacctacaaaccatcgcaacgcaacagcaacaacagtttctgccatcactgagccacctagccgtggtgaaccctgtcgcctacttgcaacagcagctacttgcatccaacccacttgctctggcgaacgtagctgcataccagcaacaacaacgtctgcaacagtttatgccagcgctc

SEQ ID NO: 343626 - DNA, 139 bp, Zea mays
gaatcctaccaccttattgcaaccgcccaccattggtggtgccatcttctagattttttatgatatagactgtaataataaagttatcatgctgatatgtgcgacctctcagtaataaagtattagagatctatatttt

SEQ ID NO: 343627 - DNA, 328 bp, Zea mays
  unsure (1)..(328): unsure at all n locations
taatattttgagcattcagaaacacaccaagcgaagcgcactagcaacgacctaacaacaatggctagcaagatattagccctccttgcgcttcttgccctttttgtgagcgcaacacatgcgttcattattccacaatgctcacttgctcctagtgccattattccacagttcctcccaccagttacttcaatgggcttcgaacacctagctgtgcaagccaacatgcaacaacaagcgcttgcggcgagcgtctacaacaaccaattgcccaattgcaacaacaatncttgccacatctaacaatacaagccatcacaacgcaaca

SEQ ID NO: 343628 - DNA, 295 bp, Zea mays
  unsure (1)..(295): unsure at all n locations
ctagatcgcgagcgtccgccctttttttttttttttttttttcatttttttttttttatgggatttttgcagtcaacatttcttttttttcctttttttttttactctctccttncaaaaagttaaacaatcattccctcaaaccataaaaaacccacccccgttttatcggaccctccctttcaaaaaccaacaaactaggtaatcctttctccctcctttaacatacaaccatttctttccccctaacaaaaaaaaaaacttcttccttatgcttacttacaacaaaacctat

SEQ ID NO: 343629 - DNA, 454 bp, Zea mays
aagcaacatagaaagtggaatccagtagcaacaatagagcaacaatggcgaccaagatatgttccctccttatgctccttgctctttctgcatgtgttgctaacgcgacaattttccctcaatgctcacaagctcctatagcttcccttcttcccccataccttccatcaatgatagcttcagtatgtgaaaacccagctcttcaaccctataggctccaacaagcaatcgcagcaagcaacatacctttatcacccttgtttcaacaatcgccagccctatctttggtgcagtcattgggaccaaacaattaggcgccagaacttgaacaacttgtgcttcccgtgatcaacccagtagctctggcaaacctttcttcctactcttagcaacaacaatttctttcattcaaccaactgtctacattgaaccgtgctgcttatttgcagcaaca

SEQ ID NO: 343630 - DNA, 327 bp, Zea mays
attttgagcattcagaaacacaccaagcgaagcgcactagcaacaacctaacaacaatggctaccaagatattatccctccttgcgcttcttgcgctttttgcgagcgcaacaaatgcgtccattattccacaatgctcacttgctcctagttccattattccacagttcctcccaccagttacttcaatggccttcgaacacccagctgtgcaagcctataggctacaacaagcgattgcggcgagcgtcttacaacaaccaattgcccaattgcaacaacaatccttggcacatctaacaatacaaaccatcgcaacgcaacagc

SEQ ID NO: 343631 - DNA, 413 bp, Zea mays
gcaacatagaaagcacaatagtgtaccaacaatggcagccaaaatattttgcctccttatgctccttgggctttctgcaagtgctgctacggcgaccattttcccgaaatgctcgcaagctcctatagcttcccttcttcccccgtacctctcaccagcggtgtcttcggtatgtgaaaacccaattcttcaaccctacaggatccaacaggcaatcacagctggcatcttacctttatcacccttgttcctccaacaatcatcagccctattacatcagttacctttggtgcatttattggcacaaaacatcagggcacaacaactacaacaacttgtgctagcaaaccttgctgcctactctcagcaacagcagtttcttccattcaaccaactagctgcattgaactttg

SEQ ID NO: 343632 - DNA, 351 bp, Zea mays
attttcagcattcagaaacacaccaagcgaagcgcactagcaacaacctaacagcaatgggtaccaagatattagccctccttgcgcttcttgcccttttagtgagcgcaacaaatgcgttcattattccacagtgctcacttgctcctagtgccattattccacagttcctcccaccagttacttcaatgggcttcgaacatccagccgtgcaagcctacaggctacaactagcgcttgcggcgagcgtcttacaacaaccaattgcccaattgcaacaacaatccttggcacatctaaacctacaaaccatcgcaacgcaacagcaacaacagtttctgccatcactga

SEQ ID NO: 343633 - DNA, 286 bp, Zea mays
  unsure (1)..(286): unsure at all n locations
cccacgcgtccgggtcttcagaccattagctttatctactccagagcgcagaagaacccgatcgacaccatgagggtgttgctcgttgccctcgctctcctggctctcgctgcgagcgccacctccacgcatacaagcggcggctgcggctgccagccaccgccgccggttcatctaccgccgccggtgcatctgccacctccggttcacctgccacctccggtgcatctcccaccgccggtccacctgccgccgccggtccacctgccaccgncggtccatgtgc

SEQ ID NO: 343634 - DNA, 82 bp, Zea mays
cagctagaccctacgcctacactcttccaacaatcctcctaaccctactcctgctggacgcttttctctgcgccgggctcat

SEQ ID NO: 343635 - DNA, 429 bp, Zea mays
cttcagaccattagctttatctactccagagcgcagaagaacccgatcgacaccatgagggtgttgctcgttgccctcgctctcctggctctcgctgcgagcgccacctccacgcatacaagcggcggctgcggctgccagccaccgccgccggttcatctaccgccgccggtgcatctgccacctccggttcacctgccacctccggtgcatctcccaccgccggtccacctgccgccgccggtccacctgccaccgccggtccatgtgccgccgccggttcatctgccgccgccaccatgccactaccctactcaaccgccccggcctcagcctcatccccagccacacccatgcccgtgccaacagccgcatccaagcccgtgccagctgcagggaacctgcggcgttggcagcaccccgatcctg

SEQ ID NO: 343636 - DNA, 53 bp, Zea mays
caaattgtagccggttaatattcttttatagttgtagtgtttatggatgcttt

SEQ ID NO: 343637 - DNA, 431 bp, Zea mays
attttgagcattcagaaacacaccaagcgaagcacattagcaacaacctaacagcaatgggtaccaagatattatccctccttgcgcttcttgcgctttttgcgagcgcaacaaatgcgttcattattccacaatgctcacttgctccaagttccattattacacagttcctcccaccagttacttcaatgggcttcgaacacccagctgtgcaagcctataggctacaacaagcaattgcggcgagcgtcttacaacaaccaatttcccagttgcaacaacaatccttggcacatgtaacaatacaaaccatcgcaacgcaacagcaacaacaattcctaccagcactgagccacctagccatggtgaaccctgccgcctacttgcaacagcagttgcttgcatcaaacccacttgctctggcaaacgta

SEQ ID NO: 343638 - DNA, 284 bp, Zea mays
attttgagcattcagaaacacaccaagcgaagcgcactagcaacgacctaacaacaatggctaccaagatattagccctccttgcgcttcttgccctttttgtgagcgcaacaaatgcgttcattattccacaatgctcacttgctcctagtgccattattccacagttcctcccaccagttacttcaatgggcttcgaacacctagctgtgcaagccaacatgcaacaacaagcgcttgcggcgagcgtcttacaacaaccaattgcccaattgcaacaacaa

SEQ ID NO: 343639 - DNA, 313 bp, Zea mays
caacaaatgcgttcattattccacagtgctcacttgctcctagtgccattattcgcacagggcctcccaccagttacttcaatgggcttcgaacatccagccgtgcaagcctacaggctacaactagcgcttgcggcgagcgtcttacaacaaccaattgcccaattgcaacaacaatccttggcacatctaaacctacaaaccatcgcaacgcaacagcaacaacagtttctgccatcactgagccacctagccgtggtgaaccctgtcgcctacttgcaacagcagctacttgcatccaacccacttgctc

SEQ ID NO: 343640 - DNA, 437 bp, Zea mays
aagtggaatccagtagcaacaatagagcaacaatggcgaccaagatattttccctccttatgctccttgctctttctgcatgtgttgctaacgcgacaattttccctcaatgctcacaagctcctatagcttcccttcttcccccataccttccatcaatgatagcttcagtatgtgaaaacccagctcttcaaccctataggctccaacaagcaatcgcagcaagcaacatacctttatcacccttgtttcaacaatcgccagccctatctttggtgcagtcattggtacaaaccatcagggcacagcagctgcagcaactcgtgctacctgtgatcaaccaagtagctctggcaaacctttctccctactctcagcaacaacaatttcttccattcaaccaactgtctacattgaaccgtgctgcttatttgcag

SEQ ID NO: 343641 - DNA, 440 bp, Zea mays
  unsure (1)..(440): unsure at all n locations
tagcaacatagaaagcacaatagtgtaccaacaatggcagccaaaatattttgctgccttatgctccttggtctttctgcaagtgttgctaccgcaaccattttcccacaatgctcacaagctcctatagcttcccttcttcccccatacctctcaccagcggtgtcttcaatgtgtgaaaacccaattgttcaaccctacaggatccaacaggcaatcgcaacaggcatcttaccattatcacccttgttcctccaacaaccgtcagccctattacagcagttacctttggtccatttggtggcacaaaacatcagggcacaacaactacaacaacttgtgctagcaaaccttgctgcatactctcagcaacatcagtttcttccattcaaccaactagcagcattgaactctgctgcttatttacagcagncacaact

SEQ ID NO: 343642 - DNA, 435 bp, Zea mays
attttcagcattcagaaacacaccaagcgaagcgcactagcaacaacctaacaacaatggctaccaagatattagccctccttgcgcttcttgcccttttagtgagcgcaacaaatgcgttcattattccacagtgctcacttgctcctagtgccattattccacagttcctcccaccagttacttcaatgggcttcgaacatccagccgtgcaagcctacaggctacaactagcgcttgcggcgagcgtcttacaacaaccaattgcccaattgcaacaacaatccttggcacatctaaacctacaaaccatcgcaacgcaacagcaacaacagtttctgccatcactgagccacctagccgtggtgaaccctgtcgcctacttgcaacagcagctacttgcatccaacccacttgctctggcgaacgtagctg

SEQ ID NO: 343643 - DNA, 444 bp, Zea mays
agaaagtggaatccagtagcaacaatagagcaacaatggcgaccaagatattttcggtccttatgctccttgctctttctgcatgtgttgctaacgcgacaattttccctcaatgctcacaagctcctatagcttcccttcttcccccataccttccatcaatgatagcttcagtatgtgaaaacccagctcttcaaccctataggctccaacaagcaatcgcagcaagcaacatacctttatcacccttgtttcaacaatcgccagccctatctttggtgcagtcattggtacaaaccatcagggcacagcagctgcagcaactcgtgctacctgtgatcaaccaagtagctctggcaaacctttctccctactctcagcaacaacaatttcttccattcaaccaactgtctacattgaaccgtgctgcttatttgcagcaac

SEQ ID NO: 343644 - DNA, 386 bp, Zea mays
gaaacacaccaagcgaagcgcactatcaacaacctaacaacaatggctaccaagatattagccctccttgcgcttcttgcccttttagtgagcgcaacaaatgcgttcattattccacagtgctcacttgctcctagtgccattattccacagttcctcccaccagttacttcaatgggcttcgaacatccagccgtgcaagcctacaggctacaactagcgcttgcggcgagcgtcttacaacaaccaattgcccaattgcaacaacaatccttggcacatctaaacctacaaaccatcgcaacgcaacagcaacaacagtttctggcatcactgagccacctagccgtggtgaacccttgtctctacttgcaacagcagctact

SEQ ID NO: 343645 - DNA, 420 bp, Zea mays
  unsure (1)..(420): unsure at all n locations
caaagcggcagtgcgtagagaggatcgtcgaacagaacagcatgaagatggtcatcgttgtcgtcgtgtgcctggctctgtcagctgccagcgcctctgcaatgcagatgccctgcccctgcgcggggctgcagggcttgtacggcgctggcgccggcctgacgacgatgatgggcgccggcgggctgtacccctacgcggagtacctgaggcagccgcagtgcagcccgctggcggcggcgccctactacgccgggtgtgggcagacgagcgccatgtaccagccgctccggcaacagtgctgccagcagcagatgaggatgatggacgtgcagtccgtcgcgcagcagctgcagatgatgatgcagcttgagcgtgccgctgncgccagcaacagcctgtacgagccagctctgatgc

SEQ ID NO: 343646 - DNA, 352 bp, Zea mays
caccaagcgaagcgcactaacaacaacctaacaacaatggctaccaagatattatccctcgttgcgcttcttgcgctttttgcgagcgcaacaaatgcgtccattattccacaatgctcacttgctcctagttccattattccacagttcctcccaccagttacttcaatggccttcgaacacccagctgtgcaagcctataagctacaacaagcgattgctgcgagcgtcttacaacaaccaattgctcaattgcaacaacaatccttggcacatctaacaatacaaaccattgcaacgcaacagcaccaacagttcttaccaacactgagccacctagccatggtgaacc

SEQ ID NO: 343647 - DNA, 317 bp, Zea mays
attgaactctcctgcttatttacagcagcaacaactactaccattcagccagctagctggtgtgagccctgctaccttcttgacacaaccacagttgttgccgttctaccagcacgttgcgcctaacgctggcaccctcttacaactgcaacaattgctgccattcaaccaacttgctttgacaaacccagcagtgttctaccaacaacccatcattggtggtgccctcttttagatttcttatgagttatagttcaataataaagttttttatctgatgtttgtggcttcccagaaataagaaagtacatttcttg

SEQ ID NO: 343648 - DNA, 439 bp, Zea mays
caacaagcaacatagaaagtggaatacagtagcaacaatagagcaacaatggcggccgagatattttccatccttatgctccttgctctttctgcatgtgttgctaacgcgaccatttttcctcaatactcacaagctcctatagctgcccttcttcccccataccttccatcaatgaccgcttcagtatgtgaaaacccagcccttcaaccctacaggctccaacaagcaatcgcaacaagcaacttacctttatcacccctgttctttcaacaatcgccagccctatctttggtgcagtcattggtacaaaccatcagggcacaacagctgcagcaactcgtgctaccagtgatcagccaagtagctctggcaaacctttctccctactctcagcaacaacaatttcttccattcaaccaactgtctacactgaacc

SEQ ID NO: 343649 - DNA, 436 bp, Zea mays
gggtcttcagaccattagctttatctactccagagcgcagaagaacccgatcgacaccatgagggtgttgctcgttgccctcgctctcctggctctcgctgcgagcgccacctccacgcatacaagcggcggctgcggctgccagccaccgccgccggttcatctaccgccgccggtgcatctgccacctccggttcacctgccacctccggtgcatctcccaccgccggtccacctgccgccgccggtccacctgccaccgccggtccatgtgccgccgccggttcatctgccgccgccaccatgccactaccctactcaaccgccccggcctcagcctcatccccagccacacccatgcccgtgccaacagccgcatccaagctcgtgccagctgcagggaaccttgcggcgttgcagcaccccgatcctgggc

SEQ ID NO: 343650 - DNA, 446 bp, Zea mays
cagaaacacaccaagcgaagcgcactagcaacaacctaacaacaatggctaccaagatattatccctccttgcgcttcttgcgctttttgcgagcgcaacaaatgcgtccattattccacaatgctcacttgctcctagttccattattccacagttcctcccaccagttacttcaatggccttcgaacacccagctgtgcaagcctataggctacaacaagcgattgcggcgagcgtcttacaacaaccaattgcccaattgcaacaacaatccttggcacatctaacaatacaaaccatcgcaacgcaacagcaacaacagttcctaccagcactgagccacctagccatggtgaaccctgtcgcctacttgcaacagcagctgcttgcatccaacccacttgctctagcaaacgtagttgcaaaccagcaacaacaacaactg

SEQ ID NO: 343651 - DNA, 389 bp, Zea mays
acttgctcctagtgccattattccacagttcctcccaccagttacttcaatgggcttcggacatccagccgtgcaagcctacaggctacaactagcgcttgcggcgagcgtcttacaacaaccaattgcccaattgcaacaacaatccttggcacatctaaacctacaaaccatcgcaacgcaacagcaacaacagtttctgccatcactgagccacctagccgtggtgaaccctgtcgcctacttgcaacagcagctacttgcatccaacccacttgctctggcgaacgtagctgcataccagcaacaacaacgtctgcaacagtttatgccagcgctcagtcaactagccatggtgaaccctgtcgcctacctacaacagcaacaat

SEQ ID NO: 343652 - DNA, 341 bp, Zea mays
caactagcaacatagaaagcacaatagtgtaccaacaatggcagccaaaatattttgctggcttatgctccttggtctttctgcaagtgctgctaccgcaaccattttcccacaatgctcacaagctcctatagcttcctttcttcccccatacctctcaccagcggtgtcttcagtatgtgaaaacccaattcttcaaccctacaggatccaacaggcaatcgcagcaggcatcttacctttatcacccttgttcctccaacaaccgtcagccctattacaagagttacctttggtgcatttgttggcacaaaacatcaaggcacaacaactacaacaac

SEQ ID NO: 343653 - DNA, 394 bp, Zea mays
atccaatccagatcagcaaagcggcagtgcgtagagaggatcgtcgaacagaacagcatgaagatggtcatcgttctcgtcgtgtgcctggctctgtcagctgccagcgcctctgcaatgcagatgccctgcccctgcgcggggctgcagggcttgtacggcgctggcgccggcctgacgacgatgatgggcgccggcgggctgtacccctacgcggagtacctgaggcagccgcagtgcagcccgctggcggcggcgccctactacgccgggtgtgggcagacgagcgccatgtaccagccgctccggcaacagtgctgccagcagcagatgaggatgatggacgtgcagtccgtcgcgcagcagctgcagatgatgatgcagcttgagcgtg

SEQ ID NO: 343654 - DNA, 436 bp, Zea mays
aagcacaatagtgtaccaacaatggcagccaaaatattttgcctccttatgctccttggtctttctgcaagtgctgctacggcgaccattttcccgaaatgctcgcaagctcctatagcttcccttcttcccccgtacctctcaccagcggtgtcttcggtatgtgaaaacccaattcttcaaccctacaggatccaacaggcaatcacagctggcatcttacctttatcacccttgttcctccaacaatcatcagccctattacatcagttacctttggtgcatttattggcacaaaacatcagggcacaacaactacaacaacttgtgctagcaaaccttgctgcctactctcagcaacagcagtttcttccattcaaccaactagctgcattgaactctgcttcttatttgcaacaacaacaactaccattca

SEQ ID NO: 343655 - DNA, 399 bp, Zea mays
cccacgcgtccgcagaaacacaccaagcgaagcacattagcaacaacctaacaacaatggctaccaagatattatccctccttgcgcttcttgcgctttttgcgagcgcgacacaaagcggcattatttcacaaaggtgacttgctgccagatgcattattacacagctcctcccaccagatacttcaatgggcttcgaacacccagctgtgcaagcctatatgctacaacaagcaattgcggcgagcgtcttacaacaaccaatttcccagttgcaacaacaatccttggcacatctaacaatacaaaccatcgcaacgcaacagcaacaacaattcctaccagcactgagccacctagccatggtgaaccctgccgcctacttgcaacagcagttgc

SEQ ID NO: 343656 - DNA, 435 bp, Zea mays
aacacaccaagcgaagcgcactagcatcaacctaacaacaatggctaccaagatattatccctccttgcgcttcttgcgctttttgcgagcgcaacaaatgcgtccattattccacaatgctcacttgctcctagttccattattccacagttcctcccaccagttacttcaatggccttcgaacacccagctgtgcaagcctataggctacaacaagcgattgcggcgagcgtcttacaacaaccaattgcccaattgcaacaacaatccttggcacatctaacaatacaaaccatcgcaacgcaacagcaacaacagttcctaccagcactgagccacctagccatggtgaaccctgtcgcctacttgcaacagcagctgcttgcatccaacccacttgctctagcaaacgtagttgcaaaccagcaacaaca

SEQ ID NO: 343657 - DNA, 442 bp, Zea mays
cccaattgttcaaccctacaggatccaacaggcaatcgcaacaggcatcttaccattatcacccttgttcctccaacaaccgtcagccctattacagcagttacctttggtccatttggtggcacaaaacatcagggcacaacaactacaacaacttgtgctagcaaaccttgctgcatactctcagcaacatcagtttcttccattcaaccaactggctgcattgaactctgctgcttatttgcaacaacaattaccattcagccagctagttgctgcctacccccagcaatttcttccattcaaccaactagcagcattgaactctgctgcttatttacagcagcaacaactactaccattcagccagctagctgatgtgagccctgctgccttcttgacacaacaacagttgttgccgttctacctgcacgctatgcct

SEQ ID NO: 343658 - DNA, 438 bp, Zea mays
agaccaacaagcaacatagaaagtggaatccagtagcaacaatagagcaacaatggagaccaagatattttccctccttatgctccttgctctttctacatgtgttgctaacgcgacaattttccctcaatgctcacaagctcctatagcttccctttttcccccataccttccatcaattatagcttcagtatgtgaaaacccagctcttcaaccatataggcttcaacaagcaatcgcagcaagcaacatacctttatcgcccttgttgtgtcaacaatcgccagccctatctttggtgcagtcattggtacaaaccatcagggcacaacagctgcagcaactcgtgctacctgtgatcaaccaagtagctctggcaaacctttctccctactcttcgcaacaacaatttctttcattcaaccaactgtctacact

SEQ ID NO: 343659 - DNA, 344 bp, Zea mays
gagcattcagaaacacaccaagcgaagcacattagcaacaacctaacaacaatggctacgaagatattatccctccttgcgcttcttgcgctttttgcgagcgcaacaaatgcgttcattattccacaatgctcacttgctccaagttccattattacacagttcctcccaccagttacttcaatgggcttcgaacacccagctgtgcaagcctataggctacaacaagcaattgcggcgagcgtcttacaacaaccaatttcccagttgcaacaacaatccttggcacatctaacaatacaaaccatcgcaacgcaacagcaacaacaatttctaccagcact

SEQ ID NO: 343660 - DNA, 435 bp, Zea mays
agcaatcgcagcaagcaacatacctttatcacccttgtttcaacaatcgccagccctatctttggtgcagtcattggtacaaaccatcagggcacagcagctgcagcaactcgtgctacctgtgatcaaccaagtagctctggcaaacctttctccctactctcagcaacaacaatttcttccattcaaccaactgtctacattgaaccgtgctgcttatttgcagcaacaactattaccattcagccagctagctactgcctactctcagcaacaacaacttcttccatttaaccaattggccgcactgaaccccgctgcttatttgcagcagcaaatactactaccatttagccagctagctgcagcaagccgtgcttccttcttgacacagcaacagttgctgcctttctaccagcagtttgcggctaaccc

SEQ ID NO: 343661 - DNA, 352 bp, Zea mays
caacaagcaacatagaaagtggaatccagtagcaacaatagagcaacaatggagaccaagatattttccctccttatgctccttgctctttctacatgtgttgctaacgcgacaattttccctcaatgctcacaagctcctatagcttccctttttcccccataccttccatcaattatagcttcagtatgtgaaaacccagctcttcaaccatataggcttcaacaagcaatcgcagcaagcaacatacctttatcgcccttgttgtgtcaacaatcgccagccctatctttggtgcagtcattggtacaaaccatcagggcacaacagctgcagcaactcgtgctacctg

SEQ ID NO: 343662 - DNA, 380 bp, Zea mays
gcattcagaaacacaccaagcgaagcgcactagcaacaacctaacaacaatggctaccaagatattatccctccttgcgcttcttgcgctttttgcgagcgcaacaaatgcgtccattattccacaatgctcacttgctcctagttccattattccacagttcctcccaccagttacttcaatggcctttgaacacccagctgtgcaagcctataggctacaacaagcgattgcggcgagcgtcttacaacaaccaattgcccaattgcaacaacaatccttggcacatttaacaatacaaaccatcgcatcgcatcagcaacaacagttcctaccagcactgatccacctagccatggggaaccttgtcgcctacttgc

SEQ ID NO: 343663 - DNA, 406 bp, Zea mays
ttttgagcattcagaaacacaccaagcgaagcacattagcaacaacctaacagcgatggcgtaccaagatattatccctccttgcgcttcttgcgctttttgcgagcgcaacaaatgcgttcattattccacaatgctcacttgctccaagttccattattacacagttcctcccaccagttacttcaatgggcttcgaacacccagctgtgcaagcctataggctacaacaagcaattgcggcgagcgtcttacaacaaccaatttcccagttgcaacaacaatccttggcacatctaacaatacaaaccatcgcaacgcaacagcaacaacaattcctaccagcactgaaccacctagccatggtgaacccctgccggctacttgcaacagcagttgcttgcat

SEQ ID NO: 343664 - DNA, 439 bp, Zea mays
gcaacatagaaagcacaatagtgtaccaacaatggcagccaaaatattttgcctccttatgctccttggtctttctgcaagtgctgctacggcgaccattttcccgaaatgctcgcaagctcctatagcttcccttcttcccccgtacctctcaccagcggtgtcttcggtatgtgaaaacccaattcttcaaccctacaggatccaacaggcaatcacagctggcatcttacctttatcacccttgttcctccaacaatcatcagccctattacatcagttacctttggtgcatttattggcacaaaacatcagggcacaacaactacaacaacttgtgctagcaaaccttgctgcctactctcagcaacagcagtttcttccattcaaccaactagctgcattgaactctgcttcttatttgcaacaacaacaacta

SEQ ID NO: 343665 - DNA, 427 bp, Zea mays
atagaaagcacaatagtgtaccaacaatggcagccaaaatattttgcctccttatgctccttggtctttctgcaagtgctgctacggcgaccattttcccacaatgctcacaagctcctatagcttcccttcttcccccgtacctctcaccagcggtgtcttcggtatgtgaaaacccaattcttcaaccctataggatccaacaggcaatcgcagctggcatcttacctttatcacccttgttcctccaacaatcatcagccctattacagcagttacctttggtgcatttattggcacaaaacatcagggcacaacaactacaacaacttgtgctagcaaaccttgctgcctactctcagaacaacagtttcttccattcaaccaactagctgcattgaactctgcttcttatttgcacaacaac

SEQ ID NO: 343666 - DNA, 435 bp, Zea mays
ccaacaagcaacatagaaagtggaatccagtagcaacaatagagcaacaatggcgaccaagatattttccctccttatgctccttgctctttctgcatgtgttgctaacgcgacaattttccctcaatgctcacaagctcctatagcttcccttcttcccccataccttccatcaatgatagcttcagtatgtgaaaacccagctcttcaaccctataggctccaacaagcaatcgcagcaagcaacatacctttatcacccttgtttcaacaatcgccagccctatctttggtgcagtcattggtacaaaccatcagggcacagcagctgcagcaactcgtgctacctgtgatcaaccaagtagctctggcaaacctttctccctactctcagcaacaacaatttcttccattcaaccaactgtctacattgaa

SEQ ID NO: 343667 - DNA, 74 bp, Zea mays
gtaattcaataataaagttttttggatgatgtatgtggccaaccagaaataaaaagttagagtttccagattct

SEQ ID NO: 343668 - DNA, 386 bp, Zea mays
gaccattagctttatctactccagagcgcagaagaacccgatcgacaccatgagggtgttgctcgttgccctcgctctcctggctctcgctgcgagcgccacctccacgcatacaagcggcggctgcggctgccagccaccgccgccggttcatctaccgccgccggtgcatctgccacctccggttcacctgccacctccggtgcatctcccaccgccggtccacctgccgccgccggtccacctgccaccgccggtccatgtgccgccgccggttcatctgccgccgccaccatgccactaccctactcaaccgccccggcctcagcctcatccccagccacacccatgcccgtgccaacagccgcatccaagcccgtgccagc

SEQ ID NO: 343669 - DNA, 437 bp, Zea mays
aagcaacatagaaagtggaatccagtagcaacaatagagcaacaatggcgaccaagatattttccctccttatgctccttgctctttctgcatgtgttgctaacgcgacaattttccctcaatgctcacaagctcctatagcttcccttcttcccccataccttccatcaatgatagcttcagtatgtgaaaacccagctcttcaaccctataggctccaacaagcaatcgcagcaagcaacatacctttatcacccttgtttcaacaatcgccagccctatctttggtgcagtcattggtacaaaccatcagggcacagcagctgcagcaactcgtgctacctgtgatcaaccaagtagctctggcaaacctttctccctactctcagcaacaacaatttcttccattcaaccaactgtctacattgaaccgtgct

SEQ ID NO: 343670 - DNA, 447 bp, Zea mays
ccaacaagcaacatagaaagtggaatccagtagcaacaatagagcaacaatggcgaccaagatattttccctccttatgctccttgctctttctgcatgtgttgctaacgcgacaattttccctcaatgctcacaagctcctatagcttcccttcttcccccataccttccatcaatgatagcttcagtatgtgaaaacccagctcttcaaccctataggctccaacaagcaatcgcagcaagcaacatacctttatcacccttgtttcaacaatcgccagccctatctttggtgcagtcattggtacaaaccatcagggcacagcagctgcagcaactcgtgctacctgtgatcaaccaagtagctctggcaaacctttctccctactctcagcaacaacaatttcttccattcaaccaactgtctacattgaaccgtgctgctta

SEQ ID NO: 343671 - DNA, 439 bp, Zea mays
cacagctggcatcttacctttatcacccttgttcctccaacaatcatcagccctattacaacagttacctttggtgcatttattggcacaaaacatcagggcacaacaactacaacaacttgtgctagcaaaccttgctgcctactctcagcaacagcagtttcttccattcaaccaactaggttcattgaactctgcttcttatttgcaacaacaacaactaccattcagccagctacctgctgcctacccccagcaatttcttccattcaaccaactagcagcattgaactctcctgcttatttacagcagcaacaactactaccattcagccagctagctggtgtgagccctgctaccttcttgacacaaccacagttgttgccgttctaccagcacgttgcgcctaacgctggcaccctcttacaactgcaacaa

SEQ ID NO: 343672 - DNA, 399 bp, Zea mays
cagcattcagaaacacaccaagcgaagcgcactagcaacaacctaacaacaatggctacgaagatattagccctccttgcgcttcttgcccttttagtgagcgcaacaaatgcgttcattattccacagtgctcacttgctcctagtgccattattccacagttcctcccaccagttacttcaatgggcttcgaacatccagccgtgcaagcctacaggctacaactagcgcttgcggcgagcgtcttacaacaaccaattgcccaattgcaacaacaatccttggcacatctaaacctacaaaccatcgcaacgcaacagcaacaacagtttctgccatcactgagccacctagccgtggtgaaccctgtcgcctacttgcaacagcagctacttgca

SEQ ID NO: 343673 - DNA, 429 bp, Zea mays
aggcagtacaccaaatggggcgaccgccctgccgccggggagcattcaatcgtcggcggcacaccgtccccattcttcccgttccccaacgtgaagtggcaccatggtcgccacgcgctcgccgcaggagcaggagcaggagcagcgactgcgggccagccagcctccggttgggtagctgttctgcgcaacagtccgaggggcgcggatggaggagggaccaaacaggagcggaggggaaggcgggcggtacaactgatgagccggtacctgttctacgatagcggtcgcttcagacacgaaagatgttcttgcgagggacatgctgatcatcgccttcgagtaagatgctccaaccatgaggagcataggcacaactagcagggagagcaggccgacctcccaacagcacgcgaaggcaacaatgat

SEQ ID NO: 343674 - DNA, 439 bp, Zea mays
gaccattagctttatctactccagagcgcagaagaacccgatcgacaccatgagggtgttgctcgttgccctcgctctcctggctctcgctgcgagcgccacctccacgcatacaagcggcggctgcggctgccagccaccgccgccggttcatctaccgccgccggtgcatctgccacctccggttcacctgccacctccggtgcatctcccaccgccggtccacctgccgccgccggtccacctgccaccgccggtccatgtgccgccgccggttcatctgccgccgccaccatgccactaccctactcaaccgccccggcctcagcctcatccccagccacacccatgcccgtgccaacagccgcatccaagcccgtgccagctgcagggaacctgcggcgttggcagcaccccgatcctgggccagtgcgtcgag

SEQ ID NO: 343675 - DNA, 421 bp, Zea mays
gtgaaaacccaattcttcaaccctacaggatccaacaggcaatcgcagctggcatcttacctttatcacccttgttcctccaacaatcatcagccctattacagcagttacctttggtgcatttattggcacaaaacatcagggcacaacaactacaacaacttgtgctagcaaaccttgctgcctactctcagcaacagcagtttcttccattcaaccaactagctgcattgaactctgcttcttatttgcaacaacaacaactaccattcagccagctatctgctgcctacccccagcaatttcttccattcaaccaactgacagcattgaactctcctgcttatttacagcagcaacaactactaccattcagccagctagctggtgtgagccctgctaccttcttgacacaaccaca

SEQ ID NO: 343676 - DNA, 433 bp, Zea mays
aacaagcaacatagaaagtggaatccagtagcaacaatagagcaacaatggagaccagagatattttccctccttatgctccttgctctttctacatgtgttgctaacgcgacaattttccctcaatgctcacaagctcctatagcttccctttttcccccataccttccatcaattatagcttcagtatgtgaaaacccagctcttcaaccatataggcttcaacaagcaatcgcagcaagcaacatacctttatcgcccttgttgtgtcaacaatcgccagccctatctttggtgcagtcattggtacaaaccatcagggcacaacagctgcagcaactcgtgctacctgtgatcaaccaagtagctctggcaaacctttctccctactctccgcaacaacaatttcttccattcaaccaactgtctacac

SEQ ID NO: 343677 - DNA, 446 bp, Zea mays
attttgagcattcagaaacacaccaagcgaagctacctagcaacgacttaacaacgggtggctaccaagatattagccctccttgcgcttcttgccctttttgtgagcgcaacaaatgcgttcattattccacaatgctcacttgctcctagtgccattataccacagttcctccgaccagttacttcaatgggcttcgaacacctagctgtgcaagcctacaggctacaacaagcgcttgcggcgagcgtcttacaacaaccaattaaccaattgcaacaacaatccttggcacatctaaccatacaaaccatcgcaacacaacagcaacaacagttcctaccagcactgagccaactagatgtggtgaaccctgtcgcctacttgcaacagcaagtgcttgcattcaacccacttgctctggcaaacgtagctgcataccaaca

SEQ ID NO: 343678 - DNA, 184 bp, Zea mays
catgagcgagaacaagcatgagcatgtcgcggctaccatctaccacactgtgtggcgacgccaacgagaacaatctgaagtgcactgatacttgcaaactatcaattcgcatgaacaattatgacccacactacgacaagcctatcagtggctctggtcagatgcttcatatcactcgtaccaa

SEQ ID NO: 343679 - DNA, 421 bp, Zea mays
gcaacatagaaagcacaatagtgtaccaacaatggcagccaaaatattttgcctccttatgctccttggtctttctgcaagtgctgctacggcgaccattttcccacaatgctcacaagctcctatagcttcccttcttcccccgtacctctcaccagcggtgtcttcggtatgtgaaaacccaattcttcaaccctataggatccaacaggcaatcgcagctggcatcttacctttatcacccttgttcctccaacaatcatcagccctattacagcagttacctttggtgcatttattggcacataacatcagggcacaacaactacaacaacttgtgctagcaaaccttgctgcctactcttagcaacaacaagttcttccattcaaccaactagctgcattgaaccctgccgcctac

SEQ ID NO: 343680 - DNA, 385 bp, Zea mays
attcagaaacacaccaagcgaagcacattagcaacaacctaacaacaatggctaccaagatattatccctccttgcgcttcttgcgctttttgcgagcgcaacaaatgcgttcattattccacaatgctcacttgctccaagttccattattacacagttcctcccaccagttacttcaatgggcttcgaacacccagctgtgcaagcctataggctacaacaagcaattgcggcgagcgtcttacaacaaccaatttcccagttgcaacaacaatccttggcacatctaacaatacaaaccatcgcaacgcaacagcaacaacaattcctaccagcactgagccacctagccatggtgaaccctgccgcctacttgcaacagca

SEQ ID NO: 343681 - DNA, 359 bp, Zea mays
atttagaccaactagcaacatagaaagcacaatagtgtaccaacaatggcagccgaaatattttgcctccttatgctccttggtatttctgcaagtgctgctacggcgaccattttcccgcaatgctcacaagctcctatagcttcccttcttcccccgtacctctcaccagcggtgtcttcggtatgtgaaaacccaattcttcaaccctacaggatccaacaggcaatcgcagctggcatcttacctttatcacccttgttcctccaacaatcatcagccctattacagcagttacctttggtgcatttattggcacagaacatcagggcacaacaactacaacaacttgtgctagc

SEQ ID NO: 343682 - DNA, 359 bp, Zea mays
gcgaccaactagcaacatataaagcacaatagtgtaccaacaatggcagccaaaatagtgggcttgcttatgctccttggtctttctgcaagtgttgctaccgcaaccattttcccacaatgctcacaagctcctatagcttcccttcttcccccatacctctcaccagcggtgtcttcaatgtgtgaaaacccaattgttcaaccctacaggatccaacaggcaatcgcaacaggcatcttaccattatcacccttgttccttcaacaaccgtctgccctattacagcagttacctttggtccatttggtggcacaaaacattaaggcacaacaactacaacaacttgtgctagcaaa

SEQ ID NO: 343683 - DNA, 280 bp, Zea mays
  unsure (1)..(280): unsure at all n locations
cagcctagcaattagctcatcgactccagattggagaactcgacaccatgaaggtgctgagcgttgcccttgctctcctggcgctcgctgcgagcgccgcctccagtacaagcggcggctgtggctgccagacaccaccgtttcatctaccgcctccgttctatatgccgcctccgttctatctgccgccgcagcagcagccgcagccatggcaataccccactcaaccaccgcagctaagcccgtgccagcagttcggatcctgcggcgtcngcagcgt

SEQ ID NO: 343684 - DNA, 245 bp, Zea mays
gtcaacacgttattcttgtctatacaagatacctttgtctagaaatcttgtctcaccatgttgtattcgactcaaacaatgttgcataccatggacattgtccgtttcaaaatttcttccttgcacatttacacaaaccttttcaatttttatttcttgctaaacattaaatgcttttggtttaatttcagtttgtgtaaatctagtttttttattttattttctttaacttactattaaatggg

SEQ ID NO: 343685 - DNA, 121 bp, Zea mays
tcggtagatattgcggccgacattattgattaccgtgcaccatgagtaggggcattctgggcttggggatcccatctcccagattgttggggatgccaaggagatgaataggatgtccact

SEQ ID NO: 343686 - DNA, 435 bp, Zea mays
agaccaacaagcaacatagaaagtggaatccagtagcaacaatagagcaacaatggcgaccaagatattttccctccttatgctccttgctctttctgcatgtgttgctaacgcgacaattttccctcaatgctcacaagctcctatagcttcccttcttcccccataccttccatcaatgatagcttcagtatgtgaaaacccagctcttcaaccctataggctccaacaagcaatcgcagcaagcaacatacctttatcacccttgtttcaacaatcgccagccctatctttggtgcagtcattggtacaaaccatcagggcacagcagctgcagcaactcgtgctacctgtgatcaaccaagtagctctggcaaacctgtctccctactctcagcaacaacaatttcttacattcaaccaactgtctacatt

SEQ ID NO: 343687 - DNA, 423 bp, Zea mays
caacaagcaacatagaaagtggagtacagtagcaacaatagagcgacaatggcggccaagagattttccatccttatgctccttgctctttctgcatgtgttgctaacgcgaccatttttcctcaatactcacaagctcctatagctgcccttcttgccccataccttccatcaatgaccgcttcagtatgtgaaaacccagccctttaaccctacaggctccaacaagcaatcgcaacaagcaacttacctttatcacccctgtgctttcaacaatcgccagccctatctttggtgcagtcattggtacaaaccatcagggcacaacagcttgcagcaactcgtgctaccagtgatcagccaagtagctctggcaaacctttctccttacttttagcaacaacaatttcttccattcaacca

SEQ ID NO: 343688 - DNA, 393 bp, Zea mays
  unsure (1)..(393): unsure at all n locations
ggggggggcacgcgtccggtgcgtagagaggatcgncgattattacagcatgaagatggtcatcgttctncgtcnggtgcctggctctgtcagctgccagcgcctctgcaatgcagatgccctgcccctgcgcggggctgcagggcttgtacggcgctggcgccggcctgacgacgatgatgggcgccggcgggctgtacccctacgcggagtacctgaggcagccgcagtgcagcccgctggcggcggcgccctactacgccgggtgtgggcagacgagcgccatgtaccagccgctccggcaacagtgctgccagcagcagatgaggatgatggacgtgcagtccgtcgcgcagcagctgcagatgatgatgcattttgagcgtgccgttg

SEQ ID NO: 343689 - DNA, 436 bp, Zea mays
  unsure (1)..(436): unsure at all n locations
gaatgggccgggccgacgccacgcgtcacggcacaactaatggaccaacaattgattaccaagatattttgccctccttatgcgcncgggctctttctacatgtgttgctaacgcgacaattttccctcaatgctcacaagctcctatagcttccctttttcccccataccttccatcaattatagcttcagtatgtgaaaacccagctcttcaaccatataggcttcaacaagcaatcgcagcaagcaacatacctttatcgcccttgttgtgtcaacaatcgccagccctatctttggtgcagtcattggtacaaaccatcagggcacaacagctgcagcaactcgtgctacctgtgatcaaccaagtagctctggcaaacctttctccctactctccgcaacaacaatttcttccattcaaccaactgtctac

SEQ ID NO: 343690 - DNA, 403 bp, Zea mays
cagaccattagctttatctactccatagcgcagaagaacccgatcgacaccatgggggtgttgctcgttgccctcgctctcctggctctcgctgcgagcgccacctccacgcatacaagcggcggctgcggctgccagccaccgccgccggttcatctaccgccgccggtgcatctgccacctccggttcacctgccacctccggtgcatctcccaccgccggtccacctgccgccgccggtccacctgccaccgccggtccatgtgccgccgccggttcatctgccgccgccaccatgccactaccctactcaaccgccccggcctcagcctcatccccagccacacccatgcccgtgccaacagccgcatccaagcccgtgccagctgcagggaacctgcg

SEQ ID NO: 343691 - DNA, 404 bp, Zea mays
gcaacatagaaagcacaatagtgtaccaacaatggcagccaaaatattttgcttgctgatgctccttggtctttctgcaagtgttgctaccgcaaccattttcccacaatgctcacaagctcctatagcttcccttcttcccccatacctctcaccagcggtgtcttcaatgtgtgaaaacccaattgttcaaccctacaggatccaacaggcaatcgcaacaggcatcttaccattatcacccttgttcctccaacaaccgtcagccctattacagcagttacctttggtccatttggtggcacaaaacatcagggcacaacaactacaacaacttgtgctagcaaaccttgctgcatactctcagcaacatcagtttcttccattcaaccaactggctgcat

SEQ ID NO: 343692 - DNA, 437 bp, Zea mays
  unsure (1)..(437): unsure at all n locations
aatgggnngggtcgacgccacgcgtcacggcacaactagtgtaccaacaatgtctttccaaaatattttgcctccttatgcgcctgggtctttctgcaagtgctgctacggcgaccattttcccgaaatgctcgcaagctcctatagcttcccttcttcccccgtacctctcaccagcggtgtcttcggtatgtgaaaacccaattcttcaaccctacaggatccaacaggcaatcacagctggcatcttacctttatcacccttgttcctccaacaatcatcagccctattacatcagttacctttggtgcatttattggcacaaaacatcagggcacaacaactacaacaacttgtgctagcaaaccttgctgcctactctcagcaacagcagtttcttccattcaaccaactagctgcattgaactctgcttct

SEQ ID NO: 343693 - DNA, 390 bp, Zea mays
ttttcagcattcagaaacacttcattcgaagcgcactagcaacaacctaagaacgatggctaccaagatattagccctccttgcgcttcttgcccttttagtgagcgcaacaaatgcgttcattattccacagtgctcacttgctcctagtgccattattccacagttcctcccaccagttacttcaatgggcttcgaacatccagccgtgcaagcctacaggctacaactagcgcttgcggcgagcgtcttacaacaaccaattgcccaattgcaacaacaatccttggcacatctaaacctacaaaccatcgcaacgcatcagcaacaacagtttttgccatcactgagccacctagccgtggtgaaccctgtcgcctacttgcaaca

SEQ ID NO: 343694 - DNA, 379 bp, Zea mays
caagcaacatagaaagtggaattcattagcaacaatagagcaacaatggagaccaagatattttccctccttatgctccttgctctttctacatgtgttgctaacgcgacaattttccctcaatgctcacaagctcctatagcttccctttttcccccataccttccatcaattatagcttcagtatgtgaaaacccagctcttcaaccatataggcttcaacaagcaatcgcagcaagcaacatacctttatcgcccttgttgtgtcaacaatcgccagccctatctttggtgcagtcattggtacaaaccatcagggcacaacagctgcagcaactcgtgctacctgtgatcaaccaagtagctctggcaaaccttt

SEQ ID NO: 343695 - DNA, 409 bp, Zea mays
tttccctcaatgctcacaagctcctatagcttcccttcttcccccataccttcgagtcgatgatagcttcagtatgtgaaaacccagctcttcaaccctataggctccaacaagcaatcgcagcaagcaacatacctttatcacccttgtttcaacaatcgccagccctatctttggtgcagtcattggtacaaaccatcagggcacagcagctgcagcaactcgtgctacctgtgatcaaccaagtagctctggcaaacctttctccctactctcagcaacaacaatttcttccattcaaccaactgtctacattgaaccgtgctgcttatttgcagcaacaactattaccattcagccagctagctactgcctactctcagcaacaacaacttcttccatttaacca

SEQ ID NO: 343696 - DNA, 408 bp, Zea mays
cccacgcgtccgagaccaactagcatcatataaagcacaatagtgtaccaacaatggcagccaaaatattttgcctccttatgctccttggtctttctgcaagtgctgctacggcgaccattttcccgcaatgctcgcaagctcctatagcttcccttcttcccccgtacctctcaccagcggtgtcttcggtatgtgaaaacccaattcttcaaccctacaggatccaacaggcaatcgcagctggcatcttacctttatcacccttgttcctccaacaatcatcagccctattacaacagttacctttggtgcatttattggcacaaaacatcagggcacaacaactacaacaacttgtgctagcaaaccttgctgcctactctcagcaacagcagtttcttccat

SEQ ID NO: 343697 - DNA, 412 bp, Zea mays
ggcggcccaacccgtccgcacctagcaccatagaaagcacatttttttcccaacaatggcagccaaaatatttggcctccttatgctccttggtctttctgcaagtgctgctacggcgaccattttcccgaaatgctcgcaagctcctatagcttcccttcttcccccgtacctctcaccagcggtgtcttcggtatgtgaaaacccaattcttcaaccctacaggatccaacaggcaatcacagctggcatcttacctttatcacccttgttcctccaacaatcatcagccctattacatcagttacctttggtgcatttattggcacaaaacatcagggcacaacaactacaacaacttgtgctagcaaaccttgctgcctactctcagcaacagcagtttcttccattc

SEQ ID NO: 343698 - DNA, 339 bp, Zea mays
cagaaacacaccaagcgaagcgcttttcttcaacctaacaacaatggctaccaagatattagccctccttgcgcttcttgcccttttagtgagcgcaacaaatgcgttcattattccacagtgctcacttgctcctagtgccattattccacagttcctcccaccagttacttcaatgggcttcgaacatccagccgtgcaagcctacaggctacaactagcgcttgcggcgagcgtcttacaacaaccaattgcccaattgcaacaacaatccttggcacatctaaacctacaaaccatcgcaacgcaacagcaacaacagtttctgccatcactgag

SEQ ID NO: 343699 - DNA, 404 bp, Zea mays
tagcaacatagaaagcacaattgtgtaccaacaatggcagccaaaatattgggggtccttatgctccttggtctttctgcaagtgctgctacggcgaccattttcccgaaatgctcgcaagctcctatagcttcccttcttcccccgtacctctcaccagcggtgtcttcggtatgtgaaaacccaattcttcaaccctacaggatccaacaggcaatcacagctggcatcttacctttatcacccttgttcctccaacaatcatcagccctattacatcagttacctttggtgcatttattggcacaaaacatcagggcacaacaactacaacaacttgtgctagcaaaccttgctgcctactctcagcaacagcagtttcttccattcaaccaactagctgc

SEQ ID NO: 343700 - DNA, 406 bp, Zea mays
caccaagcgaagcgcactagcaacaacctaacaacaatggctaccaagatattagtccctccttgcgcttcttgcgctttttgcgagcgcaacaaatgcgtccattattccacaatgctcacttgctcctagttccattattccacagttcctcccaccagttacttcaatggccttcgaacacccagctgtgcaagcctataggctacaacaagcgattgcggcgagcgtcttacaacaaccaattgcccaattgcaacaacaatccttggcacatctaacaatacaaaccatcgcaacgcaacagcaacaacagttcctaccagcactgagccacctagccatggtgaaccctgtcgcctacttgcaacagcagctgcttgcatccaacccacttgctctagca

SEQ ID NO: 343701 - DNA, 408 bp, Zea mays
agcattcagaaacacaccaagcgaatcgtactagcaacaacctaacaacaatggctaccaagatattagccctccttgcgcttcttgcccttttagtgagcgcaacaaatgcgttcattattccacagtgctcacttgctcctagtgccattattccacagttcctcccaccagttacttcaatgggcttcgaacatccagccgtgcaagcctacaggctacaactagcgcttgcggcgagcgtcttacaacaaccaattgcccaattgcaacaacaatccttggcacatctaaacctacaaaccatcgcaacgcaacagcaacaacagtttctgccatcactgagccacctagccgtggtgaaccctgtcgcctacttgcaacagcagctacttgcatccaacccac

SEQ ID NO: 343702 - DNA, 376 bp, Zea mays
gcagtttcttccattcaaccaactttctgcattgaactctgcttcttatttgcaacaacaacaactaccattcagccagctacctgttgcctacccccagcaatttcttccattcaaccaactggcagcattgaactctcctgcttatttacagcagcaacaactactaccattcagccagctagctggtgtgagccctgctaccttcttgacacaaccacagttgttgccgttctaccagcacgctgcgcctaacgctggcaccctcttacaactgcaacaattgctgccattcaaccaacttgctttgacaaacccaacagcattctaccaacaacccatcattggtggtgccctcttttagatttttttatga

SEQ ID NO: 343703 - DNA, 165 bp, Zea mays
tgacaattcttcccttaatgctttcttttctcctatatgctctcctatcttccggggggacttttctattattttctggcgtttactattgcgataaaaccctactctacaaccatattttgcttcaacaagcaacatgttgtatgcaacacacctttatcgccc

SEQ ID NO: 343704 - DNA, 403 bp, Zea mays
cagcaaagcggcagtgcgtagagaggatcgtcgaacagaacagcatgaagatggtcatcgttctcgtcgtgtgcctggctctgtcagctgccagcgcctctgcaatgcagatgccctgcccctgcgcggggctgcagggcttgtacggcgctggcgccggcctgacgacgatgatgggcgccggcgggctgtacccctacgcggagtacctgaggcagccgcagtgcagcccgctggcggcggcgccctactacgccgggtgtgggcagacgagcgccatgtaccagccgctccggcaacagtgctgccagcagcagatgaggatgatggacgtgcagtccgtcgcgcagcagctgcagatgatgatgcagcttgagcgtgccgctgccgccagcagcagcct

SEQ ID NO: 343705 - DNA, 397 bp, Zea mays
  unsure (1)..(397): unsure at all n locations
gtttaaacccacttggcaccataaaaggttcattgtggtcccaccaatggcagccaaaatatttggcctccttatgctcctgggaatttttgcaagtgctgctacggcgaccattttcccgcaatgctaacaagctcctatagcttcccttcttcccccgtacctctaaccagcggtgtcttcggtatgtgaaaacccaattcttcaaccctacaggatccaacaggcaatcgcagctggcatcttacctttatcacccttgttcctccaacaatcatcagccctattacagcagttacctttggtgcatttattggcacaaaacatcagggcacaacaactacaacaacttgtgctagcaaaccttgctgnctactctcagcaacagcagtttctt

SEQ ID NO: 343706 - DNA, 402 bp, Zea mays
caacaagcaacatagaaagtggaatactttagcaacaatagagcaacaatggcggccaagatattttccatccttatgctccttgctctttctgcatgtgttgctaacgcgaccatttttcctcaatactcacaagctcctatagctgcccttcttcccccataccttccatcaatgaccgcttcagtatgtgaaaacccagcccttcaaccctacaggctccaacaagcaatcgcaacaagcaacttacctttatcacccctgttctttcaacaattgccagccctatctttggtgcagtcattggtacaaaccatcagggcacaacagctgcagcaactcgtgctaccagtgatcagccaagtagctctggcaaacctttctccctactctcagcaacaa

SEQ ID NO: 343707 - DNA, 401 bp, Zea mays
aagcaacatagaaagtggaatccattagcaacaatagagcaacaatggcgaccaagatattttccctccttatgctccttgctctttctgcatgtgttgctaacgcgacaattttccctcaatgctcacaagctcctatagcttcccttcttcccccataccttccatcaatgatagcttcagtatgtgaaaacccagctcttcaaccctataggctccaacaagcaatcgcagcaagcaacatacctttatcacccttgtttcaacaatcgccagccctatctttggtgcagtcattggtacaaaccatcagggcacagcagctgcagcaactcgtgctacctgtgatcaaccaagtagctctggcaaacctttctccctactctcagcaacaacaattt

SEQ ID NO: 343708 - DNA, 401 bp, Zea mays
cagcattcagaaacacaccatttgtttcgcactagcaacaacctaacaacaatggctaccaagatattagccctccttgcgcttcttgcccttttagtgagcgcaacaaatgcgttcattattccacagtgctcacttgctcctagtgccattattccacagttcctcccaccagttacttcaatgggcttcgaacatccagccgtgcaagcctacaggctacaactagcgcttgcggcgagcgtcttacaacaaccaattgcccaattgcaacaacaatccttggcacatttaaacctacaaaccatcgcaacgcaacagcaacaacagttttctgccatcactgagccacctagccgtggtgaaccctgtcgcctacttgcaacagcagctacttgcat

SEQ ID NO: 343709 - DNA, 221 bp, Zea mays
gccgttctacctgcacgctgcgcctaacgctggcaccctcttacaactgcaacaattgctgccattcaaccaacttgctttgacaaacccaacagcgttctaccaacaacccatcattggtggtgccctcttttagattgcttatgagttatagttcaataatgaagttttttggatgatgtttgtggcttcccagaaataagaaagtacatttctaagat

SEQ ID NO: 343710 - DNA, 407 bp, Zea mays
caactagcaacatagaaagcacaatagtgtaccaacaatggcagccaaaatattttgcctccttatgctccttggtctttctgcaagtgctgctacggcgaccattttcccgcaatgctcgcaagctcctatagcttcccttcttcccccgtacctctcaccagcggtgtcttcggtatgtgaaaacccaattcttcaaccctacaggatccaacaggcaatcgcagctggcatcttacctttatcacccttgttcctccaacaatcatcagccctattacaacagttacctttggtgcatttattggcacaaaacatcagggcacaacaactacaacaacttgtgctagcaaaccttgctgcctactctcagcaacagcagtttcttccattcaaccaactaggtt

SEQ ID NO: 343711 - DNA, 404 bp, Zea mays
cagatctcccccaaatccacccgtttttacctccgcttcaagatgcagatctttgtgaaaaccctgaccggcaagactatcaccctcgaggtggagtcgtctgacaccattgacaacgttaaggccaagatccaggacaaggagggcatccccccagaccagcagcggctcatcttcgctggcaaacagcttgaggacgggcgcacgcttgctgactacaacatccagaaggagagcaccctccaccttgtgctccgcctcaggggaggcatgcagatctttgtgaaaaccctgaccggcaagactatcaccctcgaggtggagtcctttgacaccattgacaacgtcaaggccaagatccaggacaaggagggcatccctccagaccagcagcggctcatctt

SEQ ID NO: 343712 - DNA, 405 bp, Zea mays
aaagcacaatagtgtaccaacaatgtcagccaaaatattttgcctccttatgctccttggtctttctgcaagtgctgctacggcgaccattttcccacaatgctcacaagctcctatagcttcccttcttcccccgtacctctcaccagcggtgtcttcggtatgtgaaaacccaattcttcaaccctataggatccaacaggcaatcgcagctggcatcttacctttatcacccttgttcctccaacaatcatcagccctattacagcagttacctttggtgcatttattggcacaaaacatcagggcacaacaactacaacaacttgtgctagcaaaccttgctgcctactctcagcaacaacagtttcttccattcaaccaactagctgcattgaactctgc

SEQ ID NO: 343713 - DNA, 397 bp, Zea mays
gcaacatagaaagcacaatagtgtttcatctaatggcagccaaaatattttgcttccttatgctccttggtctttctgcaagtgttgctaccgcaaccattttcccacaatgctcacaagctcctatagcttcccttcttcccccatacctctcaccagcggtgtcttcaatgtgtgaaaacccaattgttcaaccctacaggatccaacaggcaatcgcaacaggcatcttaccattatcacccttgttccttcaacaaccgtcagccctattacagcagttacctttggtccatttggtggcacaaaacatcagggcacaacaactacaacaacttgtgctagcaaaccttgctgcatactctcagcaacattagttttttccattcaaccaact

SEQ ID NO: 343714 - DNA, 74 bp, Zea mays
gaaccattgaaatggaaaggaataatatataaggaaaaaagatgattggaaactgatagttggttcatttagcg

SEQ ID NO: 343715 - DNA, 406 bp, Zea mays
cccacgcgtccggcggccaagatattttccatccttatgctcctggctctttctgcatgtgttgctaacgcgaccatttttcctcaatactcacaagctcctatagctgcccttcttcccccataccttccatcaatgaccgcttcagtatgtgaaaacccagcccttcaaccctacaggctccaacaagcaatcgcaacaagcaacttacctttatcacccctgttctttcaacaatcgccagccctatctttggtgcagtcattggtacaaaccatcagggcacaacagctgcagcaactcgtgctaccagtgatcagccaagtagctctggcaaacctttctccctactctcagcaacaacaatttcttccattcaaccaactgtctacactgaaccctgctg

SEQ ID NO: 343716 - DNA, 402 bp, Zea mays
cagaaacacaccaagcgaagcgcactagttacaacctaacaacaatggctaccaagaggttatccctccttgcgcttcttgcgctttttgcgagcgcaacaaatgcgtccattattccacaatgctcacttgctcctagttccattattccacagttcctcccaccagttacttcaatggccttcgaacacccagctgtgcaagcctataggctacaacaagcgattgcggcgagcgtcttacaacaaccaattgcccaattgcaacaacaatccttggcacatctaacaatacaaaccatcgcaacgcaacagcaacaacagttcctaccagcactgagccacctagccatggtgaaccctgtcgcctacttgcaacagcagctgcttgcatccaacccac

SEQ ID NO: 343717 - DNA, 269 bp, Zea mays
cagcaaactaacaaggcaacatcgttcgatcgaggagaggagctgcgttcttggcgtggtggcggaatcggcgatctaccggctgccggaggagtgcgtggcatacgccatctcgctgacgacgcccggcgacgcgtgccactcgtctgcggtgtcgccggccttcagggccgccgcggactccgacgccgtctgggcgcggttactgctgccggtccacgccgacatcctggcgcgcgcctactacccgggtgctgtttccgtcggtt

SEQ ID NO: 343718 - DNA, 396 bp, Zea mays
ttcagcattcagaaacacacctatgttgaagcgcactagcaacaacctaacaacagtggttaccaagatattagccctccttgcgcttcttgcccttttagtgagcgcaacaaatgcgttcattattccacagtgctcacttgctcctagtgccattattccacagtttctcccaccagttacttcaatgggcttcgaacatccagccgtgcaagcctacaggctacaactagcgcttgcggcgagcgtcttacaacaaccaattgcccaattgcaacaacaattcttggcacatctaaacctacaaaccattgcaacgcaacagcaacaacagtttttgccatcactgagccacctagccgtggtgaaccctgttgcctacttgcaacagcagct

SEQ ID NO: 343719 - DNA, 406 bp, Zea mays
cgtcagcctagcaattagctcatctactccagattggagaactcgacaccatgaaggtgctgatcgttgcccttgctctcctggcgctcgctgcgagcgccgcctccagtacaagcggcggctgtggctgccagacaccaccgtttcatctaccgcctccgttctatatgccgcctccgttctatctgccgccgcagcagcagccgcagccatggcaataccccactcaaccaccgcagctaagcccgtgccagcagttcggatcctgcggcgtcggcagcgtcggcagcccgttcctgggccagtgcgtcgagttcctgaggcaccagtgcagcccggcggcgacgccctacggctcgccacagtgccaggcgctgcagcagcagtgctgccaccagatcaggca

SEQ ID NO: 343720 - DNA, 405 bp, Zea mays
cagaaacacaccaagcgaagcgcactatcaacgacctaacaacaatggctaccaagatattagccctccttgcgcttcttgccctttttgtgagcgcaacaaatgcgttcattattccacaatgctcacttgctcctagtgccattattccacagttcctcccaccagttacttcaatgggcttcgaacacctagctgtgcaagccaacatgcaacaacaagcgcttgcggcgagcgtcttacaacaaccaattgcccaattgcaacaacaatccttgccacatctaacaatacaagccatcacaacgcaacagcaacaacagttcctaccagcactgagccacctagccatggtgaaccctgccgcctacttgcaagagcagctgcttgcatccaacccacttg

SEQ ID NO: 343721 - DNA, 397 bp, Zea mays
gcattcagaaacacaccaagcgaagttctctagcaacaacctaacaacaatggctaccaagatattatccctccttgcgcttcttgcgctttttgcgagcgcaacaaatgcgtccattattccacaatgctcacttgctcctagttccattattccacagttcctcccaccagttacttcaatggccttcgaacacccagctgtgcaagcctataggctacaacaagcgattgcggcgagcgtcttacaacaaccaattgcccaattgcaacaacaatccttggcacatctaacaatacaaaccatcgcaacgcaacagcaacaacagttcctaccagcactgagccacctagccatggtgaaccctgtcgcctacttgcaacagcagctgcttgca

SEQ ID NO: 343722 - DNA, 403 bp, Zea mays
caacaagcaacatagaaagtggtattcagtagcaacaatagagcaacaatggcgaccaagatattttccctccttatgctccttgctctttctgcatgtgttgctaacgcgacaattttccctcaatgctcacaagctcctatagcttcccttcttcccccataccttccatcaatgatagcttcagtatgtgaaaacccagctcttcaaccctataggctccaacaagcaatcgcagcaagcaacatacctttatcacccttgtttcaacaatcgccagccctatctttggtgcagtcattggtacaaaccatcagggcacagcagctgcagcaactcgtgctacctgtgatcaaccaagtagctctggcaaacctttctccctactctcagcaacaacaat

SEQ ID NO: 343723 - DNA, 405 bp, Zea mays
gaaacacaccaagcgaagcgcactagcaacaacctaacaacaatggctaccaagatattatccctccttgcgcttcttgcgctttttgcgagcgcaacaaatgcgtccattattccacaatgctcacttgctcctagttccattattccacagttcctcccaccagttacttcaatggccttcgaacacccagctgtgcaagcctataggctacaacaagcgattgcggcgagcgtcttacaacaaccaattgcccaattgcaacaacaatccttggcacatctaacaatacaaaccatcgcaacgcaacagcaacaacagttcctaccagcactgagccacctagccatggtgaaccctgtcgcctacttgcaacagcagctgcttgcatccaacccacttgct

SEQ ID NO: 343724 - DNA, 196 bp, Zea mays
cattagaaactcaccaattgttctcattaccaacaacctaacaacactgtctgctttatattatccctccttcccctactcactctttatgctagcgcaacaaatgctttcattattccacaatgctcactttctccaacttccattattacacagttcctcccaccagtcacttcaatggccttataaacaccca

SEQ ID NO: 343725 - DNA, 405 bp, Zea mays
  unsure (1)..(405): unsure at all n locations
gcaataggctcatcgcctccagattggagaactcgacaccatgaaggtgctgatcgttgcccttgctctcctggcgctcgctgcgagcgccgnctccagtacaagcggcggctgtggctgccagacaccaccgtttcatctaccgcctccgttctatatgccgcctccgttctatctgccgccgcagcagcagccgcagccatggcaataccccactcaaccaccgcagctaagcccgtgccagcagttcggatcctgcggcgtcggcagcgtcggcagcccgttcctgggccagtgcgtcgagttcctgaggcaccagtgcagcccggcggcgacgccctacggctcgccacagtgccaggcgctgcagcagcagtgctgccaccagatcaagcaggtggagcc

SEQ ID NO: 343726 - DNA, 406 bp, Zea mays
agcgaagcgcactagcaacaaccttacatcaatggctaccaagatattatccctccttgcgcttcttgcgctttttgcgagcgcaacaaatgcgtccattattccacaatgctcacttgctcctagttccattattccacagttcctcccaccagttacttcaatggccttcgaacacccagctgtgcaagcctataggctacaacaagcgattgcggcgagcgtcttacaacaaccaattgcccaattgcaacaacaatccttggcacatctaacaatacaaaccatcgcaacgcaacagcaacaacagttcctaccagcactgagccacctagccatggtgaaccctgtcgcctacttgcaacagcagctgcttgcatccaacccacttgctctagcaaacgta

SEQ ID NO: 343727 - DNA, 404 bp, Zea mays
cggacgcgtgggtttgagcattcataaacacaccaagcgaagcacattagcaacaacctaacaacaatggctaccaagatattatccctccttgcgcttcttgcgctttttgcgagcgcaacaaatgcgttcattattccacaatgctcacttgctccaagttccattattacacagttcctcccaccagttacttcaatgggcttcgaacacccagctgtgcaagcctataggctacaacaagcaattgcggcgagcgtcttacaacaaccaatttcccagttgcaacaacaatccttggcacatctaacaatacaaaccatcgcaacgcaacagcaacaacaattcctaccagcactgagccacctagccatggtgaaccctgccgcctacttgcaacagca

SEQ ID NO: 343728 - DNA, 406 bp, Zea mays
caacaagcaacatagaaagtggaatctcagtagcaacaatagagcaacaatggagaccaagatattttccctccttatgctccttgctctttctacatgtgttgctaacgcgacaattttccctcaatgctcacaagctcctatagcttccctttttcccccataccttccatcaattatagcttcagtatgtgaaaacccagctcttcaaccatataggcttcaacaagcaatcgcagcaagcaacatacctttatcgcccttgttgtgtcaacaatcgccagccctatctttggtgcagtcattggtacaaaccatcagggcacaacagctgcagcaactcgtgctacctgtgatcaaccaagtagctctggcaaacctttcttcctactctccgcaacaacaa

SEQ ID NO: 343729 - DNA, 406 bp, Zea mays
aagcgaagcacattagcaacaacctaacatcaatggctaccaagatattatccctccttgcgcttcttgcgctttttgcgagcgcaacaaatgcgttcattattccacaatgctcacttgctccaagttccattattacacagttcctcccaccagttacttcaatgggcttcgaacacccagctgtgcaagcctataggctacaacaagcaattgcggcgagcgtcttacaacaaccaatttcccagttgcaacaacaatccttggcacatctaacaatacaaaccatcgcaacgcaacagcaacaacaattcctaccagcactgagccacctagccatggtgaaccctggcgcctacttgcaacagcagttgcttgcatcaaacccacttgctctggcaaacgt

SEQ ID NO: 343730 - DNA, 394 bp, Zea mays
aacaaatgcgttcattattccacattgctcacttgctcctagtgccattatacgacagttcctccgaccagttacttcaatgggcttcgaacacctagctgtgcaagcctacaggctacaacaagcgcttgcggcgagcgtcttacaacaaccaattaaccaattgcaacaacaatccttggcacatctaaccatacaaaccatcgcaacacaacagcaacaacagttcctaccagcactgagccaactagatgtggtgaaccctgtcgcctacttgcaacagcaggtgcttgcatccaacccacttgctctggcaaacgtagctgcataccaacaacaacaacaattgcaaccagttctgccagcgctcagtcaactagccatggtgaaccct

SEQ ID NO: 343731 - DNA, 405 bp, Zea mays
attcagaaacacaccaagcgaagcgcactagcaacaacctaacaacaatggctaccaagatattagccctccttgcgcttcttgcccttttagtgagcgcaacaaatgcgttcattattccacagtgctcacttgctcctagtgccattattccacagttcctcccaccagttacttcaatgggcttcgaacatccagccgtgcaagcctacaggctacaactagcgcttgcggcgagcgtcttacaacaaccaattgcccaattgcaacaacaatccttggcacatctaaacctacaaaccatcgcaacgcaacagcaacaacagtttctgccatcactgagccacctagccgtggtgaaccctgtcgcctacttgcaacagcagctacttgcattcaacccac

SEQ ID NO: 343732 - DNA, 174 bp, Zea mays
tcgtctggcagcatagaatgctctttattttaccaacaatggcagccaaaattgtgagtctcctaatgctccttgagctcctccgcacgatgctgctacaggtgacacattttcccgcatttgcatcgcaagcttcccatatgctattctatcttccttccgacctttttactc

SEQ ID NO: 343733 - DNA, 400 bp, Zea mays
aaagcacaatagtgtaccaacaatgtgcagccaaaatattttgcctccttatgctccttggtctttctgcaagtgctgctacggcgaccattttcccgaaatgctcgcaagctcctatagcttcccttcttcccccgtacctctcaccagcggtgtcttcggtatgtgaaaacccaattcttcaaccctacaggatccaacaggcaatcacagctggcatcttacctttatcacccttgttcctccaacaatcatcagccctattacatcagttacctttggtgcatttattggcacaaaacatcagggcacaacaactacaacaacttgtgctagcaaaccttgctgcctactctcagcaacagcagtttcttccattcaaccaactagctgcattgaa

SEQ ID NO: 343734 - DNA, 407 bp, Zea mays
ttcagaaacacaccaagcgaagcgcactagcaacaacctaacaacaatggctaccaagatattagccctccttgcgcttcttgcccttttagtgagcgcaacaaatgcgttcattattccacagtgctcacttgctcctagtgccattattccacagttcctcccaccagttacttcaatgggcttcgaacatccagccgtgcaagcctacaggctacaactagcgcttgcggcgagcgtcttacaacaaccaattgcccaattgcaacaacaatccttggcacatctaaacctacaaaccatcgcaacgcaacagcaacaacagtttctgccatcactgagccacctagccgtggtgaaccctgtcgcctacttgcaacagcagctacttgcattcaacccacttg

SEQ ID NO: 343735 - DNA, 370 bp, Zea mays
caaaatttttggcccaataagcgtccttggtttttctgcaagggctgctaccgcaagcattttcccgcaatgctcacaagctcctatagcttcccttcttcccccatacctttcaccagcgatgtcttcagtatgtgaaaatccaattcttctaccctacaggatccaacaggcaatcgcagcaggcatcttacctttatcacccttgttcctccaacaatcatcagccctattacagcagttacctttggtgcatttattggcacaaaacatcagggcacaacaactacaacaactcgtgctagcaaaccttgctgcctactctcagcaacagcagttacctttggtgcatttgttggcacaaaacatc

SEQ ID NO: 343736 - DNA, 403 bp, Zea mays
gcacaatagtgtaccaacaatggcatccaaaatattttgcctccttatgctccttggtctttctgcaagtgctgctacggcgaccattttcccacaatgctcacaagctcctatagcttcccttcttcccccgtacctctcaccagcggtgtcttcggtatgtgaaaacccaattcttcaaccctataggatccaacaggcaatcgcagctggcatcttacctttatcacccttgttcctccaacaatcatcagccctattacagcagttacctttggtgcatttattggcacaaaacatcagggcacaacaactacaacaacttgtgctagcaaaccttgctgcctactctcagcaacaacagtttcttccattcaaccaactagctgcattgaactctgct

SEQ ID NO: 343737 - DNA, 400 bp, Zea mays
caacaagcaacatagaaagtggaattcagtagcaacaatagagcaacaatggcgaccaagatattttccctccttatgctccttgctctttctgcatgtgttgctaacgcgacaattttccctcaatgctcacaagctcctatagcttcccttcttcccccataccttccatcaatgatagcttcagtatgtgaaaacccagctcttcaaccctataggctccaacaagcaatcgcagcaagcaacatacctttatcacccttgtttcaacaatcgccagccctatctttggtgcagtcattggtacaaaccatcagggcacagcagctgcagcaactcgtgctacctgtgatcaaccaagtagctctggcaaacctttctccctactctcagcaacaac

SEQ ID NO: 343738 - DNA, 386 bp, Zea mays
aatattttgcctccttatgctcctttttatttctgcaagtgctgctacggcgaccattttcccgcaatgctcacaagctcctatagcttcccttcttcccccgtacctctcaccagcggtgtcttcggtatgtgaaaacccaattcttcaaccctacaggatccaacaggcaatcgcagctggcatcttacctttatcacccttgttcctccaacaatcatcagccctattacagcagttacctttggtgcatttattggcacaaaacatcagggcacaacaactacaacaacttgtgctagcaaaccttgctgcctactctcagcaacagcagtttcttccattcaaccaactagctgcattgaactctgcttcttatttgcaac

SEQ ID NO: 343739 - DNA, 371 bp, Zea mays
attgaactctgcttcttatttgcatcaactacaactaccattcagccagctacctgctgcctacccccagcaatttcttccattcaaccaactggcagcattgaactctcctgcttatttacagcagcaacaactactaccattcagccagctagctggtgtgagccctgctaccttcttgatacaaccacagttgttgccgttctaccagcacgctgcgcctaacgctggcaccctcttacaactgcaacaattgctgccattcaaccaacttgctttgacaaacccagcagcgttctaccaacaacccatcattggtggtgccctcttttagatttcttatgagttatagttcaataataaagtttttt

SEQ ID NO: 343740 - DNA, 392 bp, Zea mays
atttagaccaactagcaacatagattgctctatagtgtaccaacaatggcagccaaaatattttgcctccttatgctccttggtatttctgcaagtgctgctacggcgaccattttcccgcaatgctcacaagctcctatagcttcccttcttcccccgtacctctcaccagcggtgtcttcggtatgtgaaaacccaattcttcaaccctacaggatccaacaggcaatcgcagctggcatcttacctttatcacccttgttcctccaacaatcatcagccctattacagcagttacctttggtgcatttattggcacataacatcagggcacaacaactacaacaacttgtgctagcaaaccttgctgcctacttttagcaacagcaatt

SEQ ID NO: 343741 - DNA, 384 bp, Zea mays
cagaaacacaccaagcgaatcgcactagcaacaacctaacaacaatggctaccaagatattatccctccttgcgcttcttgcgctttttgcgagcgcaacaaatgcgtccattattccacaatgctcacttgctcctagttccattattccacagttcctcccaccagttacttcaatggccttcgaacacccagctgtgcaagcctataggctacaacaagcgattgcggcgagcgtcttacaacaaccaattgcccaattgcaacaacaatccttggcacatctaacaatacaaaccatcgcaacgcaacagcaacaacagttcctaccagcactgagccacctagccatggtgaaccctgtcgcctacttgcaacagcagc

SEQ ID NO: 343742 - DNA, 384 bp, Zea mays
gcaacatagaaagtggaattcagtttcaacaatagagcaacaatggagaccaagatattttccctccttatgctccttgctctttctacatgtgttgctaacgcgacaattttccctcaatgctcacaagctcctatagcttccctttttcccccataccttccatcaattatagcttcagtatgtgaaaacccagctcttcaaccatataggcttcaacaagcaatcgcagcaagcaacatacctttatcgcccttgttgtgtcaacaatcgccagccctatctttggtgcagtcattggtacaaaccatcagggcacaacagctgcagcaactcgtgctacctgtgatcaaccaagtagctttggcaaacctttcttcctac

SEQ ID NO: 343743 - DNA, 389 bp, Zea mays
ggcgcatagaaagcacaaggatgttccaacattggcagccaaaaaatgtcgcttccttatgctccttggtctttctgcaagtgtggctaccgcaaccattgtaccacaatgctcacaagctgctatatgcttgccttgttccgccatacctctcaccagcggtgccttcaatgtgtgaaaacccaattgttcaaccctacaggatccaacaggcaatcgcaacaggcatcttaccattatcacccttgttcctccaacaaccgtcagccctattacagcagttacctttggtccatttggtggcacaaaacatcagggcacaacaactacaacaacttgtgctagcaaaccttgctgcatactctcagcaacatcagtttctttcattc

SEQ ID NO: 343744 - DNA, 271 bp, Zea mays
ctctcctgcttatttacagcagcatcaactactaccattcagccagctagctggtgtgagccctgctaccttcttgacacaaccacagttgttgccgttctaccagcacgttgcgcctaacgctggcaccctcttacaactgcaacaattgctgccattcaaccaacttgctttgacaaacccagcagtgttctaccaacaacccatcattggtggtgccctcttttagatttcttatgagttatagttcaataataaagttttttatctg

SEQ ID NO: 343745 - DNA, 391 bp, Zea mays
tagcaacatagaaagcacaatagtgtaccaacaatggcagccaaaatattttgcttccttatgctccttggtctttctgcaagtgttgctaccgcaaccattttcccacaatgctcacaagctcctatagcttcccttcttcccccatacctctcaccagcggtgtcttcaatgtgtgaaaacccaattgttcaaccctacaggatccaacaggcaatcgcaacaggcatcttaccattatcacccttgttcctccaacaaccgtcagccctattacagcagttacctttggtccatttggtggcacaaaacatcagggcacaacaactacaacaacttgtgctagcaaaccttgctgcatactctcagcaacatcagtttcttccattca

SEQ ID NO: 343746 - DNA, 394 bp, Zea mays
aagcaacatagaaagtggaatccagtagctacaatagagcaacaatggcgaccaagatattttccctccttatgctccttgctctttctgcatgtgttgctaacgcgacaattttccctcaatgctcacaagctcctatagcttcccttcttcccccataccttccatcaatgatagcttcagtatgtgaaaacccagctcttcaaccctataggctccaacaagcaatcgcagcaagcaacatacctttatcacccttgtttcaacaatcgccagccctatctttggtgcagtcattggtacaaaccatcagggcacagcagctgcagcaacaacaatttcttccattcaaccaactgtctacattgaaccgtgctgcttatttgcagcaaca

SEQ ID NO: 343747 - DNA, 386 bp, Zea mays
cggacgcgtgggtagcaacatagaatgcacaatagtgtaccaacaatggcagccaaaatattttgcttccttatgctccttggtctttctgcaagtgttgctaccgcaaccattttcccacaatgctcacaagctcctatagcttcccttcttcccccatacctctcaccagcggtgtcttcaatgtgtgaaaacccaattgttcaaccctacaggatccaacaggcaatcgcaacaggcatcttaccattatcacccttgttccttcaacaaccgtcagccctattacagcagttacctttggtccatttggtggcacaaaacattagggcacaacaactacaacaacttgtgctagcaaaccttgctgcatactctcagcaaca

SEQ ID NO: 343748 - DNA, 390 bp, Zea mays
aaagtggaatacagtagcaacaatagagcaacaatggcggccaagatattttccatccttatgctccttgctctttctgcatgtgttgctaacgcgaccatttttcctcaatactcacaagctcctatagctgcccttcttcccccataccttccatcaatgaccgcttcagtatgtgaaaacccagcccttcaaccctacaggctccaacaagcaatcgcaacaagcaacttacctttatcacccctgttctttcaacaatcgccagccctatctttggtgcagtcattggtacaaaccatcagggcacaacagctgcagcaactcgtgctaccagtgatcagccaagtagctctggcaaacctttctgcctacttacaacagcttctt

SEQ ID NO: 343749 - DNA, 390 bp, Zea mays
cccacgcgtccggctgcttatttgttgcaacaactattaccattcagccagctagctactgcctactctcagcaacaacaacttcttccatttaaccaattggccgcactgaaccccgctgcttatttgcagcagcaaatactactaccatttagccagctagctgcagcaagccgtgcttccttcttgacacagcaacagttgctgcctttctaccagcagtttgcggctaaccccgcaaccctcttacaactacaacaattgttgccctttgtccaacttgctttgacaaacccagcagcctcctaccaacaacacatcattggtggtgccctcttttagattgcttattagttgtaattcaataataaagttttttggatgatgtat

SEQ ID NO: 343750 - DNA, 391 bp, Zea mays
tagcgcttgcggcgagcgtcttacaacaaccaattgcccaattgcaacaacaatccttggcacatctaaacctacaaaccatcgcaacgcaacagcaacaacagtttctgccatcactgagccacctagccgtggtgaaccctgtcgcctacttgcaacagcagctacttgcatccaacccacttgctctggcgaacgtagctgcataccagcaacaacaacgtctgcaacagtttatgccagcgctcagtcaactagccatggtgaaccctgtcgcctacctacaacagcaacaattgctttcatctagcccgctcgctgtgggcaatgcacctacgtacctacaacaacagttgctgcaacagattgtaccagctctgactcagctagc

SEQ ID NO: 343751 - DNA, 391 bp, Zea mays
caacaagcaacatagaaagtttaattcagtagcaacaatagagcaacaatggcggccaagatattttccatccttatgctccttgctctttctgcatgtgttgctaacgcgaccatttttcctcaatactcacaagctcctatagctgcccttcttcccccataccttccatcaatgaccgcttcagtatgtgaaaacccagcccttcaaccctacaggctccaacaagcaatcgcaacaagcaacttacctttatcacccctgttctttcaacaatcgccagccctatctttggtgcagtcattggtacaaaccatcagggcacaacagctgcagcaactcgtgctaccagtgatcagccaagtagctctggcaaacctttcttcctact

SEQ ID NO: 343752 - DNA, 390 bp, Zea mays
cggacgcgtgggggtcttcagaccattagctttatctactccagagcgcagaagaacccgatcgacaccatgagggtgttgctcgttgccctcgctctcctggctctcgctgcgagcgccacctccacgcatacaagcggcggctgcggctgccagccaccgccgccggttcatctaccgccgccggtgcatctgccacctccggttcacctgccacctccggtgcatctcccaccgccggtccacctgccgccgccggtccacctgccaccgccggtccatgtgccgccgccggttcatctgccgccgccaccatgccactaccctactcaaccgccccggcctcagcctcatccccagccacacccatgcccgtgccaacagccgcat

SEQ ID NO: 343753 - DNA, 331 bp, Zea mays
atgctacatatacagaggcacacagttttttagcactggaaccatcgtaaccacgatgttttccatgattatgctccttgttgtgcttgtaggcgttgctgagagcgcaacatatgctcaaagtttacaagagcgcatagttgctcttagtgccatattcctacaattaatgatagctgttgcttgaaggggctcagctcatccagcctatcgggtctaccaggtacaactagcgcgtgacatacgtgtattacaacagccaaaacaataatcggcactacatttggtggcacatttgaacctacacatcatggcaccgcaactgcaacaa

SEQ ID NO: 343754 - DNA, 390 bp, Zea mays
cccacgcgtccgtagcaacatagaatgcacaatagtgtaccaacaatggcagccaaaatattttgcctccttatgctccttggtatttctgcaagtgctgctacggcgaccattttcccgcaatgctcacaagctcctatagcttcccttcttcccccgtacctctcaccagcggtgtcttcggtatgtgaaaacccaattcttcaaccctacaggatccaacaggcaatcgcagctggcatcttacctttatcacccttgttcctccaacaatcatcagccctattacagcagttacctttggtgcatttattggcacaaaacatcagggcacaacaactacaacaacttgtgctagcaaaccttgctgtctactctcagcaacagcag

SEQ ID NO: 343755 - DNA, 393 bp, Zea mays
ggccgaccaacgcgtccggcaacataaaaggcacaatagtgttccatcaatggcagccaaaatatttggctggcttatgctccttggtctttctgcaagtgttgctaccgcaaccattttcccacaatgctcacaagctcctatagcttcccttcttcccccatacctctcaccagcggtgtcttcaatgtgtgaaaacccaattgttcaaccctacaggatccaacaggcaatcgcaacaggcatcttaccattatcacccttgttcctccaacaaccgtcagccctattacagcagttacctttggtccatttggtggcacaaaacatcagggcacaacaactacaacaacttgtgctagcaaaccttgctgcatactctcagcaacatca

SEQ ID NO: 343756 - DNA, 408 bp, Zea mays
  unsure (1)..(408): unsure at all n locations
aaggaangggccgaccaacgcgtgcgtacgaggaaacatagaaggtggaattcttttgcaccaatagagcaccaatggagaccaagattttttccctccttatgctccttgctctttctacatgtgttgctaacgcgacaatttttcctcaatgctcacaagctcctatagcttccctttttcccccataccttccatcaattatagcttcagtatgtgaaaacccagctcttcaaccatataggcttcaacaagcaatcgcagcaagcaacatacctttatcgcccttgttgtgtcaacaatcgccagccctatctttggtgcagtcattggtacaaaccatcagggcacaacagctgcagcaactcgtgctacctgtgatcaaccaagtagctctggcaaaccttg

SEQ ID NO: 343757 - DNA, 192 bp, Zea mays
gaattccgtgcccacctcgtgtgctaccactttttcataaccaactgcaatgcttcgttatacagacacactctaccatagcgtgtggggccctgtcctttgccaaccacagggcgtacccctgcctactgccttacaacgacatgtgcttaacatgttgcaaacacagttaccaacccatattgggggcct

SEQ ID NO: 343758 - DNA, 388 bp, Zea mays
atccaatccagatcagcaaatcggtagtgcgtagagaggatcgtcgaacagaacagcatgaagatggtcatcgttctcgtcgtgtgcctggctctgtcagctgccagcgcctctgcaatgcagatgccctgcccctgcgcggggctgcagggcttgtacggcgctggcgccggcctgacgacgatgatgggcgccggcgggctgtacccctacgcggagtacctgaggcagccgcagtgcagcccgctggcggcggcgccctactacgccgggtgtgggcagacgagcgccatgtaccagccgctccggcaacagtgctgccagcagcagatgaggatgatggacgtgcagtccgtcgcgcagcagctgcagatgatgatgcagcttg

SEQ ID NO: 343759 - DNA, 392 bp, Zea mays
acaaaccaactagcaacatagaatgcactatagcgtaccaacaatggcagccaaaatattttgcttccttatgctccttggtctttctgcaagtgttgctaccgcaaccattttcccacaatgctcacaagctcctatagcttcccttcttcccccatacctctcaccagcggtgtcttcaatgtgtgaaaacccaattgttcaaccctacaggatccaacaggcaatcgcaacaggcatcttaccattatcacccttgttcctccaacaaccgtcagccctattacagcagttacctttggtccatttggtggcacaaaacatcagggcacaacaactacaacaacttgtgctagcaaaccttgctgcatactctcagcaacatcagtttc

SEQ ID NO: 343760 - DNA, 391 bp, Zea mays
caacaagcaacatagaaagtggaatacagtatcaacaatagagcaacaatggcggccaagatattttccatccttatgctccttgctctttctgcatgtgttgctaacgcgaccatttttcctcaatactcacaagctcctatagctgcccttcttcccccataccttccatcaatgaccgcttcagtatgtgaaaacccagcccttcaaccctacaggctccaacaagcaatcgcaacaagcaacttacctttatcacccctgttctttcaacaatcgccagccctatctttggtgcagtcattggtacaaaccatcagggcacaacagctgcagcaactcgtgctaccagtgatcagccaagtagctctggcaaacctttctccctact

SEQ ID NO: 343761 - DNA, 392 bp, Zea mays
cagaaacacaccaagcgaagcgcactagcaacgacctaacaacaatggctaccaagatattagccctccttgcgcttcttgccctttttgtgagcgcaacaaatgcgttcattattccacaatgctcacttgctcctagtgccattattccacagttcctcccaccagttacttcaatgggcttcgaacacctagctgtgcaagccaacatgcaacaacaagcgcttgcggcgagcgtcttacaacaaccaattgcccaattgcaacaacaatccttgccacatctaacaatacaagccatcacaacgcaacagcaacaacagttcctaccagcactgagccacctagccatggtgaaccctgccgcctacttgcaagagcagctgcttgca

SEQ ID NO: 343762 - DNA, 393 bp, Zea mays
cccgtccgttgatcttaggcagattgagccacattacattcaccaagcaatctacaacatggttcaatccataatccaggaggagcaacaacaacaaccatgtgagttatgtggatctcaacaagctactcaaagtgcggtggcaatcttgacagcagcacaatacctaccatcaatgtgcggcttgtaccactcatactaccaaaataatccatgcagcagcaatgacattagtggtgtttgcaattgaagaattgtgtctacctagccgttatactcctataacggtgttaagcaataaagtaccatacatttaaaaaaaaaaaaaattaatttttataattatatatattttatattttttttatatttattttttatattattttttaa

SEQ ID NO: 343763 - DNA, 390 bp, Zea mays
attgagaccaactagcaacatagaaagcacaatagtgtaccaacaatggcagccaaaatattttgcctccttatgctccttggtctttctgcaagtgctgctacggcgaccattttcccgaaatgctcgcaagctcctatagcttcccttcttcccccgtacctctcaccagcggtgtcttcggtatgtgaaaacccaattcttcaaccctacaggatccaacaggcaatcacagctggcatcttacctttatcacccttgttcctccaacaatcatcagccctattacatcagttacctttggtgcatttattggcacaaaacatcagggcacaacaactacaacaacttgtgctagcaaaccttgctgcctactctcagcaacagcag

SEQ ID NO: 343764 - DNA, 412 bp, Zea mays
gaaaggccggggcggaccaacccttccgtggaaaccaactaggcgaagcgaattttcaacaccctaccaccaatggctaccaagatattagccctcctgggccttctggcccttttggggggcgcaacaaatgccgtcattattccacaatgctcacttgctcctagtgccataattccacaggttcctccaccagttacttcaatgggcttcgaacacctagctgtgcaagccaacatgcaacaacaagcgcttgcggcgagcgtcttacaacaaccaattgcccaattgcaacaacaatccttgccacatctaacaatacaagccatcacaacgcaacagcaacaacagttcctaccagcactgagccacctagccatggtgaaccctgccgcctacttgcaagagcagc

SEQ ID NO: 343765 - DNA, 409 bp, Zea mays
acccacccgtccgagcattcaaaaacacaccaagcgaagcactttagcaccaacctaacaccaatggctaccaagatattatccctccttgcgcttcttgcgctttttgcgagcgcaacaaatgcgttcattattccacaatgctcacttgctccaagttccattattacacagttcctcccaccagttacttcaatgggcttcgaacacccagctgtgcaagcctataggctacaacaagcaattgcggcgagcgtcttacaacaaccaatttcccagttgcaacaacaatccttggcacatctaacaatacaaaccatcgcaacgcaacagcaacaacaattcctaccagcactgagccacctagccatggtgaacccttgccgctacttgcaacagcagttgcttg

SEQ ID NO: 343766 - DNA, 245 bp, Zea mays
cggacgcgtgggcggcaacaacagttgttgccgttctacctgcacgctgcgcctaacgctggcaccctcttacaactgcaacaattgctgccattcaaccaacttgctttgacaaacccaacagcgttctaccaacaacccatcattggtggtgccctcttttagattgcttatgagttatagttcaataatgaagttttttggatgatgtttgtggcttcccagaaataagaaagtacatttct

SEQ ID NO: 343767 - DNA, 374 bp, Zea mays
attttgagcattcagaaacacacctagcgaagcacattagcaacaacctaacaacaatggctaccaagatattatccctccttgcgcttcttgcgctttttgcgagcgcaacaaatgcgttcattattccacaatgctcacttgctccaagttccattattacacagttcctcccaccagttacttcaatgggcttcgaacacccagctgtgcaagcctataggctacaacaagcaattgcggcgagcgtcttacaacaaccaatttcccagttgcaacaacaatccttggcacatctaacaatacaaaccatcgcaacgcaacagcaacaacaattcctaccagcactgagccacctagccatggtgaaccct

SEQ ID NO: 343768 - DNA, 392 bp, Zea mays
atttgcactcatgcatcacaaaacatccttctatcagtaccatcaatcatcattcatcttagtagtataggcaccaaatcaaatctgcaacatcaattatctaactccaaaaaccatgaagctggtgcttgtggttcttgctttcattgctttagtatcaagtgtttcttgtacacagacaggcggctgcagctgtggtcaacaacaaagccatgagcagcaacatcatccacatcaacatcatccacaaaaacaacaacatcaaccaccaccacaacatcaccagcagcagcaacaccaacaacaacaagttcacatgcaaccacaaaaacatcagcaacaacaagaagtcatgttcaacaacaacaacaacaaccgcagcaccaacaaca

SEQ ID NO: 343769 - DNA, 391 bp, Zea mays
ggcagtgcgtagagaggatcgtcgaacagaacagcatgaagatggtcatcgttctcgtcgtgtgcctggctctgtcagctgccagcgcctctgcaatgcagatgccctgcccctgcgcggggctgcagggcttgtacggcgctggcgccggcctgacgacgatgatgggcgccggcgggctgtacccctacgcggagtacctgaggcagccgcagtgcagcccgctggcggcggcgccctactacgccgggtgtgggcagacgagcgccatgtaccagccgctccggcaacagtgctgccagcagcagatgaggatgatggacgtgcagtccgtcgcgcagcagctgcagatgatgatgcagcttgagcgtgccgctgccgccagcagcag

SEQ ID NO: 343770 - DNA, 395 bp, Zea mays
gggcggacccacccgtccgaagcggaagtccgtagagaggatcgtcgttcagaacagcatgaagatggtcatcgttctcgtcgtgtgcctggctctgtcagctgccagcgcctctgcaatgcagatgccctgcccctgcgcggggctgcagggcttgtacggggctggcgccggcctgacgacgatgatgggcgccggcgggctgtacccctacgcggagtacctgaggcagccgcagtgcagcccgctggcggcggcgccctactacgccgggtgtgggcagacgagcgccatgtaccagccgctccggcaacagtgctgccagcagcagatgaggatgatggacgtgcagtccgtcgcgcactagctgtagatgatgatgcagcttgagcgtg

SEQ ID NO: 343771 - DNA, 389 bp, Zea mays
gtcagcctagcaattagctcatcgactccagattggagaactcgacaccatgaaggtgctgatcgttgcccttgctctcctggcgctcgctgcgagcgccgcctccagtacaagcggcggctgtggctgccagacaccaccgtttcatctaccgcctccgttctatatgccgcctccgttctatctgccgccgcagcagcagccgcagccatggcaataccccactcaaccaccgcagctaagcccgtgccagcagttcggatcctgcggcgtcggcagcgtcggcagcccgttcctgggccagtgcgtcgagttcctgaggcaccagtgcagcccggcggcgacgccctacggctcgccacagtgccaggcgctgcagcagcagtgct

SEQ ID NO: 343772 - DNA, 398 bp, Zea mays
acgcgttagcaacatagaaagcacaatattttcttacaatggcagctaaaatattttgcctccttatgctccttggtctttctgcaagtgctgctacggcgaccattttcccacaatgctcacatgctcctatagctttccttctttccccgtacctttcaccaacggtgtcttcggtattgtgaaaacccaattcttcaaccctacaggatccaacaggcaatcgcagctggcatcttacctttatcacccttgttcctccaacaattaattagtcctattacagcagttacctttaggtgcattaatttggcacaaatcatttaggcacaacaacttcaaccaacttgtgctagcaataccttgctgcctacttttcatgtaacatcaatgttttt

SEQ ID NO: 343773 - DNA, 384 bp, Zea mays
tgagaccaacaagcaacatagaaagtggaatccagtagcaacaatagagcaacaatggcgaccaagatattttccctccttatgctccttgctctttctgcatgtgttgctaacgcgacaattttccctcaatgctcacaagctcctatagcttcccttcttcccccataccttccatcaatgatagcttcagtatgtgaaaacccagctcttcaaccctataggctccaacaagcaatcgcagcaagcaacatacctttatcacccttgtttcaacaatcgccagccctatctttggtgcagtcattggtacaaaccatcagggcacagcagctgcagcaactcgtgctacctgtgatcaaccaagtagctctggcaaacctt

SEQ ID NO: 343774 - DNA, 387 bp, Zea mays
gctccaacaagcaatcgcagcaagcaacatacctttatcacccttgtttcaacaatcgccagccctatctttggtgcagtcattggtacaaaccatcagggcacagcagctgcagcaactcgtgctacctgtgatcaaccaagtagctctggcaaacctttctccctactctcagcaacaacaatttcttccattcaaccaactgtctacattgaaccgtgctgcttatttgcagcaacaactattaccattcagccagctagctactgcctactctcagcaacaacaacttcttccatttaaccaattggccgcactgaaccccgctgcttatttgcagcagcaaatactactaccatttagccagctagctgcagcaagccgtgc

SEQ ID NO: 343775 - DNA, 396 bp, Zea mays
caatagtgtaccaacaatggtagctaaaatattttgcctccttatgctccttggtatttctgcaagtgctgctacggcgaccattttcccgcaatgctcacaagctcctatagcttcccttcttcccccgtacctctcaccagcggtgtcttcggtatgtgaaaacccaattcttcaaccctacaggatccaacaggcaatcgcagctggcatcttacctttatcacccttgttcctccaacaatcatcagccctattacagcagttacctttggtgcatttattggcacaaaacatcagggcacaacaactacaacaacttgtgctagcaaaccttgctgcctactctcagcaacagcagtttcttccattcaaccaactagctgcattgaactc

SEQ ID NO: 343776 - DNA, 387 bp, Zea mays
cagaaacacaccaagcgaagctacctagcttcgacttaacaacaatggctaccaagatattagccctccttgcgcttcttgccctttttgtgagcgcaacaaatgcgttcattattccacaatgctcacttgctcctagtgccattataccacagttcctccgaccagttacttcaatgggcttcgaacacctagctgtgcaagcctacaggctacaacaagcgcttgcggcgagcgtcttacaacaaccaattaaccaattgcaacaacaatccttggcacatctaaccatacaaaccatcgcaacacaacagcaacaacagttcctaccagcactgagccaactagatgtggtgaaccctgtcgcctacttgcaacagcaggtgc

SEQ ID NO: 343777 - DNA, 400 bp, Zea mays
cggacgcgtgggattgagaccaactagcatcatagaaagcacaatagtgtaccaacaatggcagccaaaatattttgcttccttatgctccttggtctttctgcaagtgttgctaccgcaaccattttcccacaatgctcacaagctcctatagcttcccttcttcccccatacctctcaccagcggtgtcttcaatgtgtgaaaacccaattgttcaaccctacaggatccaacaggcaatcgcaacaggcatcttaccattatcacccttgttcctccaacaaccgtcagccctattacagcagttacctttggtccatttggtggcacaaaacattagggcacaacaactacaacaacttgtgctagcaaaccttgctgcatactcttagcaacatt

SEQ ID NO: 343778 - DNA, 354 bp, Zea mays
gcttcaccggatttcgagattttttcgactggacattatctccgagggaagcgcgcgctccaggttcattaacaaaatggactgcatggaggggaactgtaaaatgtgttctgtgctgaagcttgccttgatcgacaattactccaccccagatgaccagatccatctgatgacggttgggcaggtcctactgaatcatcggatcagatggacaccatccaaacaatctgctttgaaatgctctgcttatatcctacaccagacacaacggcgactcaatgcactagctgtggttatacccattggacgaagcctgtctacagcagccacaattggttgtcatacaaccagatg

SEQ ID NO: 343779 - DNA, 381 bp, Zea mays
cggacgcgtgggggaatccagttgctacaatagagcaacaatggcgaccaagatattttccctccttatgctccttgctctttctgcatgtgttgctaacgcgacaattttccctcaatgctcacaagctcctatagcttcccttcttcccccataccttccatcaatgatagcttcagtatgtgaaaacccagctcttcaaccctataggctccaacaagcaatcgcagcaagcaacatacctttatcacccttgtttcaacaatcgccagccctatctttggtgcagtcattggtacaaaccatcagggcacagcagctgcagcaactcgtgctacctgtgatcaaccaagtagctctggcaaacctttctccctactc

SEQ ID NO: 343780 - DNA, 381 bp, Zea mays
caactagcaacatagaaagcacaatagtgtaccaacaatggcagccaaaatattttgcttccttatgctccttggtctttctgcaagtgctgctaccgcaaccattttcccacaatgctcacaagctcctatagcttcctttcttcccccatacctctcaccagcggtgtcttcagtatgtgaaaacccaattcttcaaccctacaggatccaacaggcaatcgcagcaggcatcttacctttatcacccttgttcctccaacaaccgtcagccctattacagcagttacctttggtgcatttgttggcacaaaacatcaaggcacaacaactacaacaacttgtgctaggaaaccttgctgcctactctcagcaacagca

SEQ ID NO: 343781 - DNA, 394 bp, Zea mays
caccaagcgaagctacctagcaacgacttaacaacaatggctaccaagatattagccctccttgcgcttcttgccctttttgtgagcgcaacaaatgcgttcattattccacaatgctcacttgctcctagtgccattataccacagttcctccgaccagttacttcaatgggcttcgaacacctagctgtgcaagcctacaggctacaacaagcgcttgcggcgagcgtcttacaacaaccaattaaccaattgcaacaacaatccttggcacatctaaccatacaaaccatcgcaacacaacagcaacaacagttcctaccagcactgagccaactagatgtggtgaaccctgtcgcctacttgcaacagcaggtgcttgcatccaacccac

SEQ ID NO: 343782 - DNA, 394 bp, Zea mays
attagctcatcgactccagattggtgaactcgacaccatgaaggtgctgatcgttgcccttgctctcctggcgctcgctgcgagcgccgcctccagtacaagcggcggctgtggctgccagacaccaccgtttcatctaccgcctccgttctatatgccgcctccgttctatctgccgccgcagcagcagccgcagccatggcaataccccactcaaccaccgcagctaagcccgtgccagcagttcggatcctgcggcgtcggcagcgtcggcagcccgttcctgggccagtgcgtcgagttcctgaggcaccagtgcagcccggcggcgacgccctacggctcgccacagtgccaggcgctgcagcagcagtgctgccaccagatcaggcag

SEQ ID NO: 343783 - DNA, 353 bp, Zea mays
tagcaacaaccctaacaacaatgggctaccaagatattattccctccttgcgcttcttgcgctttttgcgagcgcaacaaatgcgttcattattccacaatgctcacttgctccaagttccattattacacagttcctcccaccagttacttcaatgggcttcgaacacccagctgtgcaagcctataggctacaacaagcaattgcggcgagcgtcttacaacaaccaatttcccagttgcaacaacaatccttggcacatctaacaatacaaaccatcgcaacgcaacagcaacaacaattcctaccagcactgagccacctagccatggtgaaccctgccgcctacttgc

SEQ ID NO: 343784 - DNA, 372 bp, Zea mays
cagccagctagttgctgcctacccccagcaatttcttccattcaaccaactagcagcattgaactctgctgcttatttacagcagcaacaactactaccattcagccagctagctgatgtgagccctgctgccttcttgacacaacaacagttgttgccgttctacctgcacgctatgcctaacgctggcaccctcttacaactgcaacaattgctgccattcaaccaacttgctttgacaaactcaacagtgttctaccaacaacccatcattggtggtgccctcttttagattgcttatgagttatagttcaataatgaagttttttggatgatgtttgtggcgtcccagaaataagaaagtacatttct

SEQ ID NO: 343785 - DNA, 382 bp, Zea mays
cagaaacacaccaagcgaagcacattagcaacaacctaacaacaatggctaccaagatattatccctccttgcgcttcttgcgctttttgcgagcgcaacaaatgcgttcattattccacaatgctcacttgctccaagttccattattacacagttcctcccaccagttacttcaatgggcttcgaacacccagctgtgcaagcctataggctacaacaagcaattgcggcgagcgtcttacaacaaccaatttcccagttgcaacaacaatccttggcacatctaacaatacaaaccatcgcaacgcaacagcaacaacaattcctaccagcactgagccacctagccatggtgaaccctgccgtctacttgcaacagca

SEQ ID NO: 343786 - DNA, 376 bp, Zea mays
ctaccattcagccagctagctggtgtgagccctgctaccttcttgatacaaccacagttgttgccgttctaccagcacgctgcgcctaacgctggcaccctcttacaactgcaacaattgctgccattcaaccaacttgctttgacaaacccagcagcgttctaccaacaacccatcattggtggtgccctcttttagatttcttatgagttatagttcaataataaagtttttttgtctgatgtttgtggcttcccagaaataagaaagtacatttctagattcttaaaaaaaaaaaaaaaaaaaaaaaaaaaaaaaaaaaaaaaaaaaaaaaaaaaaaaaaaaaaaaaataaaaaaaaaaaaaaattaaattaa

SEQ ID NO: 343787 - DNA, 78 bp, Zea mays
  unsure (1)..(78): unsure at all n locations
tagcagatcaaacaagtagttttcttattgtcaaaganntgtgagagcgaggccggggctttatatgagatggcttaa

SEQ ID NO: 343788 - DNA, 387 bp, Zea mays
caggctacaacaagcgcttgcggcgagcgtcttacaacaaccaattaaccaattgcaacaacaatccttggcacatctaaccatacaaaccatcgcaacacaacagcaacaacagttcctaccagcactgagccaactagatgtggtgaaccctgtcgcctacttgcaacagcaggtgcttgcatccaacccacttgctctggcaaacgtagctgcataccaacaacaacaacaattgcaacagtttctgccagcgctcagtcaactagccatggtgaaccctgccgcctacctacaacagcaacaactgctttcatctagccctctcgttgtgggtaatgcacctacatacctgcaacaacaattgctgcaacagatggtaccagc

SEQ ID NO: 343789 - DNA, 371 bp, Zea mays
gttcctccaacaaccgtcagccctattattgcagttacctttggtccatttggtggcgcaaaacatcagggcacaacaactacaacaacttgtgctagcaaaccttgctgcatactctcagcaacatcagtttcttccattcaaccaactggctgcattgaactctgctgcttatttgcaacaacaattaccattcagccagctagttgctgcctacccccagcaatttctttcattcaaccaactagcagcattgaactctgctgcttatttacagcagcaacaactactaccattcagccagctagctgatgtgagccctgctgccttcttgacacaacaacagttggtgccgttctaccctgacgcta

SEQ ID NO: 343790 - DNA, 385 bp, Zea mays
attgagaccaactagcaacatagattgctcaatagtgtaccaacaatggcagccaaaatattttgcctccttatgctccttggtctttctgcaagtgctgctacggcgaccattttcccacaatgctcacaagctcctatagcttcccttcttcccccgtacctctcaccagcggtgtcttcggtatgtgaaaacccaattcttcaaccctataggatccaacaggcaatcgcagctggcatcttacctttatcacccttgttcctccaacaatcatcagccctattacagcagttacctttggtgcatttattggcacaaaacatcagggcacaacaactacaacaacttgtgctagcaaaccttgctgcctactctcagcaac

SEQ ID NO: 343791 - DNA, 315 bp, Zea mays
aagcaacatagaaagtggaatccattttttacaatagagcaacaatggagaccgagagattttcccttcttatgctccttgctctttctacatgtgttgctaacgcgacaattttccctcaatgctcacaagctcctatagcttccctttttcccccataccttccatcaattatagcttcagtatgtgaaaacccagctcttcaaccatataggcttcaacaagcaatcgcagcaagcaacatacctttatcgcccttgttgtgtcaacaatcgccagccctattttttgtgcagtcattggtacaaaccatta

SEQ ID NO: 343792 - DNA, 157 bp, Zea mays
taatattgtaccaacaatgtttttctataatattaccgcccttcttatgctcgcggcgcgctttcatgtcaagtgctgtctacctccacctatttttccacaatgcatcacaatgtctctctattgcatttcctttttatctctcgtaccttctcac

SEQ ID NO: 343793 - DNA, 263 bp, Zea mays
  unsure (1)..(263): unsure at all n locations
ggcgacccacgcgttcttccaactagcaacatagatttattattgtgnaccaacatggcagcgggagatttttcttctatgctcctgttctaatcagtgctgctacttataccatttatctcattgcatgaagctcctatagcttactatcatcctctacttttactacttttttttttttttatatcccattactttaaccttcatattatcatttattttattttattttactttatcatcttattttctctatatttttc

SEQ ID NO: 343794 - DNA, 386 bp, Zea mays
attgagaccaactagcaacatagaaagctcaatagtgtaccaacaatggcagccaaaatattttgcttccttatgctccttggtctttctgcaagtgttgctaccgcaaccattttcccacaatgctcacaagctcctatagcttcccttcttcccccatacctctcaccagcggtgtcttcaatgtgtgaaaacccaattgttcaaccctacaggatccaacaggcaatcgcaacaggcatcttaccattatcacccttgttcctccaacaaccgtcagccctattacagcagttacctttggtccatttggtggcacaaaacatcatggcacaacaactacaacaaactgtgctagcaaaccttgctgcatactctcagcaaca

SEQ ID NO: 343795 - DNA, 379 bp, Zea mays
attttgagcattcagaaacacactttgcgaagctacctagcaacgacttaacaacaatggctaccaagatattagccctccttgcgcttcttgccctttttgtgagcgcaacaaatgcgttcattattccacaatgctcacttgcattcaacccacttgctctggcaaacgtagctgcataccaacaacaacaacaattgcaacagtttctgccagcgctcagtcaactagccatggtgaaccctgccgcctacctacaacagcaacaactgctttcatctagccctctcgttgtgggtaatgcacctacatacctgcaacaacaattgctgcaacagattgtaccagctctgactcagctagctgtggcaaaccctgc

SEQ ID NO: 343796 - DNA, 386 bp, Zea mays
caaatgcgttcattattccacaatgctcacttgctccaagttccattattacacagttcctcccaccagttacttcaatgggcttcgaacacccagctgtgcaagcctataggctacaacaagcaattgcggcgagcgtcttacaacaaccaatttcccagttgcaacaacaatccttggcacatctaacaatacaaaccatcgcaacgcaacagcaacaacaattcctaccagcactgagccacctagccatggtgaaccctgccgcctacttgcaacagcagttgcttgcatcaaacccacttgctctggcaaacgtagttgcaaaccagccacaacaacagctgcaacagtttctgccagcgctcagtcaactagccatggtg

SEQ ID NO: 343797 - DNA, 112 bp, Zea mays
  unsure (1)..(112): unsure at all n locations
gaaagatgctgctgcagcttttgatgntgaaggggccgatctaggtagggttgctgatgatacacattgtatccacctacttaccttaaagccctgtacctggtgtatagac

SEQ ID NO: 343798 - DNA, 385 bp, Zea mays
acagcagtttcttccattcaaccaactagctgcattgaactctgcttcttatttgcaacaacaacaactaccattcagccagctatctgctgcctacccccagcaatttcttccattcaaccaactgacagcattgaactctcctgcttatttacagcagcaacaactactaccattcagccagctagctggtgtgagccctgctaccttcttgacacaaccacagttgttgccgttctaccagcacgctgcgcctaacgctggcaccctcttacaactgcaacaattgctgccattcaaccaacttgctttgacaaacccagcagcattctaccaacaacccatcattggtggtgccctcttttagatttcttatgagttatag

SEQ ID NO: 343799 - DNA, 292 bp, Zea mays
tcaatatctttcattatttcaaccttttttcttgatccaactctcattattacgggcgggatcaacaaataccattcaaccagctacctgcacccaaccccgaacaattataggcatcaaaccgacagacaggattgcactttactgcatctatacagcaagaacaactaactaccattttgtacatttactagtgagagccccgttacctaacagacacaaccacattttactatcattctaccactaagctatgcttaacgctggctcctacttacaactgcaattgttg

SEQ ID NO: 343800 - DNA, 293 bp, Zea mays
aacagcaacagctaccaccattcagccagctagctgatgtgagccctgttgccttcttgacacaacaacagttgttgccgttctacctgcacgctgcgcctaacgctggcaccctcttacaactgcaacaattgctgccattcaaccaacttgctttgacaaacccaacagcgttctaccaacaacccatcattggtggtgccctcttttagattgcttatgagttatagttcaataatgaagttttttggatgatgtttgtggcttcccagaaataagaaagtacatttctt

SEQ ID NO: 343801 - DNA, 390 bp, Zea mays
  unsure (1)..(390): unsure at all n locations
attgagaccaactagcaacatagaaagcacaatagtgtaccaacaatggcagccaaaatattttgcctccttatgctccttggtctttctgcaagtgctgctacggcgaccattttcccgcaatgctcgcaagctcctatagcttcccttcttcccccgtacctctcaccagcggtgtcttcggtatgtgaaaacccaattcttcaaccctacaggatccaacaggcaatcgcagctggcatcttacctttatcacccttgttcctccaacaatcatcagccctattacaacagttacctntggtgcatntattggcacaaaacatcaaggcacaacaactacaacaacttgtgctagcaaaccttgctgcctactctcagcaacagcag

SEQ ID NO: 343802 - DNA, 392 bp, Zea mays
tgagaccaactagcaacaataaaaggtcctttagggtaccaccaatggcagccaaaatattttgcctccttatgctccttggtctttctgcaagtgctgctacggcgaccattttcccgcaatgctcgcaagctcctatagcttcccttcttcccccgtacctctcaccagcggtgtcttcggtatgtgaaaacccaattcttcaaccctacaggatccaacaggcaatcgcagctggcatcttacctttatcacccttgttcctccaacaatcatcagccctattacaacagttacctttggtgcatttattggcacaaaacatcagggcacaacaactacaacaacttgtgctagcaaaccttgctgtctactctcagcaacagcagttt

SEQ ID NO: 343803 - DNA, 300 bp, Zea mays
atcagctagctggctgatgtgagctctgctgccttcttgacacaacaacaggtgttgccgttctacctgcacgctatgcctaacgctggcaccctcttacaactgcaacaattgctgccattcaaccaacttgctttgacaaactcaacagtgttctaccaacaacccatcattggtggtgccctcttttagattgcttatgagttatagttcaataatgaagttttttggatgatgtttgtggcgtcccagaaataagaaagtacatttctagaaaaataaattataaaattaaaataa

SEQ ID NO: 343804 - DNA, 176 bp, Zea mays
caacaacaacaactaccattcagccagctatctgctgcctacccccagcaatttcttccattcaaccaactgacagctttgaactctcctgcttatttacagcagcaacaactactaccaatcagccagctagctggtgtgagccctgctaccttcttgacacaaccacaattgtt

SEQ ID NO: 343805 - DNA, 387 bp, Zea mays
cttcgaacacctagctgtgcaagccaacatgcaacaacaagcgcttgcggcgagcgtcttacaacaaccaattgcccaattgcaacaacaatccttgccacatctaacaatacaagccatcacaacgcaacagcaacaacagttcctaccagcactgagccacctagccatggtgaaccctgccgcctacttgcaagagcagctgcttgcatccaacccacttgctctggcgaacgtagttgcaaaccagcaacaacaacagctacaacagtttctgccaacgctcagtcaactagccatggtgaaccctgccgcctacgtacaacaacaacaactgctttcatctagcccgctcgctgtgggcaatgcacctacatacctgcaaca

SEQ ID NO: 343806 - DNA, 364 bp, Zea mays
cccacgcgtccgattttgagcatttagattcacaccaagcgaagcacattagcaacaacctaacaacaatggctaccaagatattatccctccttgcgcttcttgcgctttttgcgagcgcaacaaatgcgttcattattccacaatgctcacttgctccaagttccattattacacagttcctcccaccagttacttcaatgggcttcgaacacccagctgtgcaagcctataggctacaacaagcaattgcggcgagcgtcttacaacaaccaatttcccaagtgcaacaacaatccttggcacatctaacaatacaaaccatcgcaacgcaacagcaacaacaatttctaccagcactgag

SEQ ID NO: 343807 - DNA, 366 bp, Zea mays
cagaccattagctttatctactccttagcgcagaagaacccgatcgacaccatgagggtgttgctcgttgccctcgctctcctggctctcgctgcgagcgccacctccacgcatacaagcggcggctgcggctgccagccaccgccgccggttcatctaccgccgccggtgcatctgccacctccggttcacctgccacctccggtgcatctcccaccgccggtccacctgccgccgccggtccacctgccaccgccggtccatgtgccgccgtcggttcatctgccgccgccaccatgccactaccctactcaaccgccccggttctagtcttatccccagccacacccatgcccgtgccaacag

SEQ ID NO: 343808 - DNA, 385 bp, Zea mays
gcaacatagaaagtggaatccagtttcatcaatagagcaacaatggcgaccaagatgttttccctccttatgctccttgctctttctgcatgtgttgctaacgcgacaattttccctcaatgctcacaagctcctatagcttcccttcttcccccataccttccatcaatgatagcttcagtatgtgaaaacccagctcttcaaccctataggctccaacaagcaatcgcagcaagcaacatacctttatcacccttgtttcaacaatcgccagccctatctttggtgcagtcattggtacaaaccatcagggcacagcagctgcagcaactcgtgctacctgtgatcaaccaagtagctctggcaaacctttctccctactctc

SEQ ID NO: 343809 - DNA, 331 bp, Zea mays
atcagcaaagcggcagtgcgtagttaggatcgtcgaacagaacagcatgaagatggtcatcgttctcgtcgtgtgcctggctctgtcagctgccagcgcctctgcaatgcagatgccctgcccctgcgcggggctgcagggcttgtacggcgctggcgccggcctgacgacgatgatgggcgccggcgggctgtacccctacgcggagtacctgaggcagccgcagtgcagcccgctggcggcggcgccctactacgccgggtgtgggcagacgagcgccatgtaccagccgctccggcaacagtgctgccagcagcagatgaggatgatt

SEQ ID NO: 343810 - DNA, 222 bp, Zea mays
  unsure (1)..(222): unsure at all n locations
attgagaccaactagcaacatatttttcacaatagtgnaccaacaatggcgggggaaatattttgcctccttatgctccttggtctttctgcaagtgctgctacggcgaccattttcccgaaatgctcgcaagctcctatagcttccctttttcccccgtacctctcaccagcggtgtttttgtgttgtgaaaacccaattcttcaaccttactggatccaa

SEQ ID NO: 343811 - DNA, 322 bp, Zea mays
cttctgtatgtgaaaacccatttctttaaccctacaggatccaacaggcagtcgcagctggcatcttacctttatcacccttgttcctccaacaatcatcagccctattacatcagttacctttggtgcatttattggcacaaaacatcatggcacaacaactacaacaacttgtgctagcaaaccttgctgcctactctcatcaacagcagtttcttccattcaacctacttagctgcattgaactctgcttcttatttgcaacaacaacaactaccattcattcagtttcctgttgtctacccccagcaatttctttcat

SEQ ID NO: 343812 - DNA, 381 bp, Zea mays
caacaagcaacatagaaagtggaattcattagcaacaatagagcaacaatggagaccaagatattttccctccttatgctccttgctctttctacatgtgttgctaacgcgacaattttccctcaatgctcacaagctcctatagcttccctttttcccccataccttccatcaattatagcttcagtatgtgaaaacccagctcttcaaccatataggcttcaacaagcaatcgcagcaagcaacatacctttatcgcccttgttgtgtcaacaatcgccagccctatctttggtgcagtcattggtacaaaccatcagggcacaacagctgcagcaactcgtgctacctgtgatcaaccaagtagctctggcaaacctt

SEQ ID NO: 343813 - DNA, 324 bp, Zea mays
cagaaacacaccaagcgaagttctttatcaacaacctaacaacaatggctacgaagatattatccctccttgcgcttcttgcgctttttgcgagcgcaacaaatgcgttcattattccacaatgctcacttgctcctagttccattattccacagttcctcccaccagttacttcaatggccttcgaacacccagctgtgcaagcctataggctacaacaagcgattgcggcgagcgttttacaacaaccaattgcccaattgcaacaacaattcttggcacatctaacaatacaaaccattgtaacgcaacagcaacaacagt

SEQ ID NO: 343814 - DNA, 353 bp, Zea mays
cagcattcagaaacacaccaagcgatttttactagcaacaacctaacaacaatggctgccaagatattagccctccttgcgcttcttgcccttttagtgagcgcaacaaatgcgttcattattccacagtgctcacttgctcctagtgccattattccacagttcctcccaccagttacttcaatgggcttcgaacattcagccgtgcaagcctacaggctacaactagcgcttgcggcgagcgtcttacaacaaccaattgcccaattgcaacaacaattcttggcacatctaaacctacaaaccatcgcaacgcaacagcaacaacagtttttgccatcactgagccacct

SEQ ID NO: 343815 - DNA, 375 bp, Zea mays
gcaacatagaaagcacaatagtgtaccaacaatggcagccaaaatattttgcttccttatgctccttggtctttctgcaagtgttgctaccgcaaccattttcccacaatgctcacaagctcctatagcttcccttcttcccccatacctctcaccagcggtgtcttcaatgtgtgaaaacccaattgttcaaccctacaggatccaacaggcaatcgcaacaggcatcttaccattatcacccttgttcctccaacaaccgtcagccctattacagcagttacctttggtccatttggtggcacaaaacatcagggcacaacaactacaacaacttgtgctagcaaacccttgctgcatactcttagcaacatc

SEQ ID NO: 343816 - DNA, 359 bp, Zea mays
tcgcagaaacacaccaagcgaagctacttattatcgacttaacaacaatggctaccaagagattagccctccttgcgcttcttgccctttttgtgagcgcaacaaatgcgttcattattccacaatgctcacttgctcctagtgccattataccacagttcctccgaccagttacttcaatgggcttcgaacacctagctgtgcaagcctacaggctacaacaagcgcttgcggcgagcgtcttacaacaaccaattaaccaattgcaacaacaattcttggcacatctaaccatacaaaccattgcaacacaacagcaacaacagttcctaccagcactgagcccactagatgtggtg

SEQ ID NO: 343817 - DNA, 382 bp, Zea mays
caacatagaaagtggaatacattatcaacaatagagcaacaatggcggccaagatattttccatccttatgctccttgctctttctgcatgtgttgctaacgcgaccatttttcctcaatactcacaagctcctatagctgcccttcttcccccataccttccatcaatgaccgcttcagtatgtgaaaacccagcccttcaaccctacaggctccaacaagcaatcgcaacaagcaacttacctttatcacccctgttctttcaacaatcgccagccctatctttggtgcagtcattggtacaaaccatcagggcacaacagctgcagcaactcgtgctaccagtgatcagccaagtagctctggcaaacctttcttccta

SEQ ID NO: 343818 - DNA, 381 bp, Zea mays
gaccaacaagcaacatagaaagtggtattcagtagcaacaatagagcaacaatggagaccaagatattttccctccttatgctccttgctctttctacatgtgttgctaacgcgacaattttccctcaatgctcacaagctcctatagcttccctttttcccccataccttccatcaattatagcttcagtatgtgaaaacccagctcttcaaccatataggcttcaacaagcaatcgcagcaagcaacatacctttatcgcccttgttgtgtcaacaatcgccagccctatctttggtgcagtcattggtacaaaccatcagggcacaacagctgcagcaactcgtgctacctgtgatcaaccaagtagctctggcaaac

SEQ ID NO: 343819 - DNA, 297 bp, Zea mays
gcgcgcgaacagctccaacttttgtaaccagagggacctcatggagcaggacgtgaagattctggatctggatgagtctatcgctcgtatgaaagtgatttactgttcttggaccaatgggaaggtgtccacatgctcatttaccgagttaatcttgcaatctgttggttttcatactggtctgtttactttaccacatttgattgttgttagagagctattccatcttatttgacttaattttttttatttgtttttttttgaagtactctatctcttgtgttggatcttattctt

SEQ ID NO: 343820 - DNA, 383 bp, Zea mays
aactagcaacatagaaagcacaatattgtaccaacaatggcagccaaaatattttgcttccttatgctccttggtctttctgcaagtgttgctaccgcaaccattttcccacaatgctcacaagctcctatagcttcccttcttcccccatacctctcaccagcggtgtcttcaatgtgtgaaaacccaattgttcaaccctacaggatccaacaggcaatcgcaacaggcatcttaccattatcacccttgttccttcaacaaccgtcagccctattacagcagttacctttggtccatttggtggcacaaaacatcagggcacaacaactacaacaacttgtgctagcaaaccttgctgcatactctcagcaacatcagtt

SEQ ID NO: 343821 - DNA, 356 bp, Zea mays
gagaccaactagcaacatagaaagtacattagtgtaccaacaatggcagctaaaatatgttgcctccttatgctccttggtctttctgcaagtgctgctacggcgaccattttcccacaatgctcacaagctcctatagcttcccttcttcccccgtacctctcaccaacggtgtcttcggtatgtgaaaacccaattcttcaaccctacaggatccaacaggcaatcgcagctggcatcttaccttgatcacccttgttcctccaacaatcatcagccctattacagcagttacctttggtgcatttattggcacaaaacatcagggcacaacaactacaacaacttgtgctagc

SEQ ID NO: 343822 - DNA, 337 bp, Zea mays
agcacaatagtgtaccaacaatggcagctaaaatattttgcctccttatgctccttggtctttctgcaagtgctgctacggcgaccattttcccacaatgctcacaagctcctatagcttcccttcttcccccgtacctctcaccaacggtgtcttcggtatgtgaaaacccaattcttcaaccctacaggctccaacaggcaatcgtagctggcatctgacctatctcaccctagcatctacaacagatattagccctattacagcagctacctttggagcatttattgggacaaaacattagggcacaacaactacaacaacttgtgctagcaaa

SEQ ID NO: 343823 - DNA, 471 bp, Zea mays
  unsure (1)..(471): unsure at all n locations
cggcnaattagctcatcnnngactccagattgtgatgtaactcgnnacaccatgaagnngtgctgagtcggtggcccttggcttctcctgggcgcnntcgctgcgaggcnngccgcctctcagtacaagggcggcggctgggtggctgcctagactaccnnaccgtttcaatctaccccgcctccnnngttctatannngccgcctnnccgttctaattctgcnncgccgcangnncagcagcccccgcagcccatgggctaatactctccacttctaacccactcgcagctttaagcctcgttgcccagcangnnttcggatctcctgcgnnngcgttcggcagctngtcgtgcagctcccgttcccttgggccaagtgggcgtcgaggttccctgagggcaccaagtgcaagccccggcgggcgacgctcctacggcttcgccacaagtgcccaggcgctgcagcagca

SEQ ID NO: 343824 - DNA, 272 bp, Zea mays
attgagaccaactagcaacattattgttcactagcgttccaacaatggcgggcggtgatatttagtcttcttaggctccttggcaattgcgcaagtgctgacactgttaccatattgctgcaatgctcgtatgcttccattgcttccctcctacctctgtacctcttaccattcgtgttttcatgtcgtgatatcttaattcttataaccttttatatatccaacactctattcatccttccttataatttttattatccttgtttctcata

SEQ ID NO: 343825 - DNA, 369 bp, Zea mays
ctccagagcgcagaagaacccgatcgacaccatgagggtgttgctcgttgccctcgctctcctggctctcgctgcgagcgccacctccacgcatacaagcggcggctgcggctgccagccaccgccgccggttcatctaccgccgccggtgcatctgccacctccggttcacctgccacctccggtgcatctcccaccgccggtccacctgccgccgccggtccacctgccaccgccggtccatgtgccgccgccggttcatctgccgccgccaccatgccactaccctactcaaccgccccggcctcagcctcatccccagccacacccatgcccgtgccaacagccgcattcaagcccgtgccagct

SEQ ID NO: 343826 - DNA, 384 bp, Zea mays
cagaaacacaccaagcgaagcgcactagcaacaacctaacaacaatggctaccaagatattatccctccttgcgcttcttgcgctttttgcgagcgcaacaaatgcgtccattattccacaatgctcacttgctcctagttccattattccacagttcctcccaccagttacttcaatggccttcgaacacccagctgtgcaagcctataggctacaacaagcgattgcggcgagcgtcttacaacaaccaattgcccaattgcaacaacaatccttggcacatctaacaatacaaaccatcgcaacgcaacagcaacaacagttcctaccagcactgagccacctagccatggtgaaccctgtcgcctacttgcaacagcagc

SEQ ID NO: 343827 - DNA, 381 bp, Zea mays
aaagcggcagtgcgtagagaggatcgtcgaacagaacagcatgaagatggtcatcgttctcgtcgtgtgcctggctctgtcagctgccagcgcctctgcaatgcagatgccctgcccctgcgcggggctgcagggcttgtacggcgctggcgccggcctgacgacgatgatgggcgccggcgggctgtacccctacgcggagtacctgaggcagccgcagtgcagcccgctggcggcggcgccctactacgccgggtgtgggcagacgagcgccatgtaccagccgctccggcaacagtgctgccagcagcagatgaggatgatggacgtgcagtccgtcgcgcagcagctgcagatgatgatgcagcttgagcgtgccgc

SEQ ID NO: 343828 - DNA, 389 bp, Zea mays
agaccaactagcaacatagaaagcacatttgtgtaccaacaatggcagccaaaatattttgcttccttatgctccttggtctttctgcaagtgttgctaccgcaaccattttcccacaatgctcacaagctcctatagcttcccttcttcccccatacctctcaccagcggtgtcttcaatgtgtgaaaacccaattgttcaaccctacaggatccaacaggcaatcgcaacaggcatcttaccattatcacccttgttcctccaacaaccgtcagccctattacagcagttacctttggtccatttggtggcacaaaacatcagggcacaacaactacaacaacttgtgctagcaaaccttgctgcatactctcagcaacatcagttt

SEQ ID NO: 343829 - DNA, 283 bp, Zea mays
  unsure (1)..(283): unsure at all n locations
tcgctggacgttncagcctagcaattagtctcatcttgactccacgatnntggagaaccctcgaccagccatgannaggtgctganntcgttgcccttgctttctcctggcnngctcgctgcgaggcnngccgcctcctagtacaagggcggcggcttgtgggctgcctagacactcnnaccgtttcaatctacccgccnnntccgttctatttatgccgccnnntccgttctaatttctgccgccnnngcagcagcaagccccgcagccccatgttgcaata

SEQ ID NO: 343830 - DNA, 372 bp, Zea mays
  unsure (1)..(372): unsure at all n locations
tcgaagtggnaatactagtagcaacaatattatcaacaatnggcggccaagatattttccaggcttatgctccttgctctttctgcatgtgttgctaacgcgaccatttttcctcaatactcacaagctcctatagctgcccttcttcccccataccttccatcaatgaccgcttcagtatgtgaaaacccagcccttcaaccctacaggctccaacaagcaatcgcaacaagcaacttacctttatcacccctgttctttcaacaatcgccagccctatctttggtgcagtcattggtacaaaccatcagggcacaacagctgcagcaactcgtgctaccagtgatcagccaagtagcttctggaaacctt

SEQ ID NO: 343831 - DNA, 345 bp, Zea mays
catcaaggcacaacaactacaacaacttgtgctaggaaaccttgctgcctactctcagcaacagcagtttcttccattcaaccaactggctgcattgaactctgctgcttatttgcaacaacaactaccattcagtcagctagctgctgcctacccccagcaatttcttccattcaaccaactggcagcattgaactctgctgcttatttacaacagcaacagctaccaccattcagccagctagctgatgtgagccctgttgccttcttgacacaacaacagttgttgccgttctacctgcacgctgcgcctaacgctggcaccctcttacaactgcaacaatt

SEQ ID NO: 343832 - DNA, 384 bp, Zea mays
ttcagaaacacaccaagcgaatctttctagcaacgacttaacaacaatggctaccaagatattagccctccttgcgcttcttgccctttttgtgagcgcaacaaatgcgttcattattccacaatgctcacttgctcctagtgccattataccacagttcctccgaccagttacttcaatgggcttcgaacacctagctgtgcaagcctacaggctacaacaagcgcttgcggcgagcgtcttacaacaaccaattaaccaattgcaacaacaatccttggcacatctaaccatacaaaccatcgtaacacaacagcaacaacagttcctaccagcactgagccaactagatgtggtgaaccctgtcgcctacttgcaacagca

SEQ ID NO: 343833 - DNA, 377 bp, Zea mays
cctcccaccagttacttcaatggccttcgaacacccagctgtgcaagcctataggctacaacaagcgattgcggcgagcgtcttacaacaaccaattgcccaattgcaacaacaatccttggcacatctaacaatacaaaccatcgcaacgcaacagcaacaacagttcctaccagcactgagccacctagccatggtgaaccctgtcgcctacttgcaacagcagctgcttgcatccaacccacttgctctagcaaacgtagttgcaaaccagcaacaacaacaactgcaacagtttctgccagcgcttagtcaactagccatggtgaaccctgccgcctacctacaacagcaacaactgctttcatctagcccgc

SEQ ID NO: 343834 - DNA, 390 bp, Zea mays
agaaagtggaatccagtagcaacaatagagcaacaatggagaccaagatattttccctgcttatgctccttgctctttctacatgtgttgctaacgcgacaattttccctcaatgctcacaagctcctatagcttccctttttcccccataccttccatcaattatagcttcagtatgtgaaaacccagctcttcaaccatataggcttcaacaagcaatcgcagcaagcaacatacctttatcgcccttgttgtgtcaacaatcgccagccctatctttggtgcagtcattggtacaaaccatcagggcacaacagctgcagcaactcgtgctacctgtgatcaaccaagtagctctggcaaacctttctccctactctccgcaacaac

SEQ ID NO: 343835 - DNA, 389 bp, Zea mays
catagaaagcacaatagtgtaccaacaatggcagccaaaatattttgcctccttatgctccttggtctttctgcaagtgctgctacggcgaccattttcccgaaatgctcgcaagctcctatagcttcccttcttcccccgtacctctcaccagcggtgtcttcggtatgtgaaaacccaattcttcaaccctacaggatccaacaggcaatcacagctggcatcttacctttatcacccttgttcctccaacaatcatcagccctattacatcagttacctttggtgcatttattggcacaaaacatcagggcacaacaactacaacaacttgtgctagcaaaccttgctgcctactctcagcaacagcagtttcttccattcaacca

SEQ ID NO: 343836 - DNA, 369 bp, Zea mays
aatggcagctaaaatattttgccttcttatgctccttggtctttctgcaagtgctgctacggcgaccattttcccacaatgctcacaagctcctatagcttcccttcttcccccgtacctctcaccaacggtgtcttcggtatgtgaaaacccaattcttcaaccctacaggatccaacaggcaatcgcagctggcatcttacctttatcacccttgttcctccaacaatcatcagccctattacagcagttacctttggtgcatttattggcacaaaacatcagggcacaacaactacaacaacttgtgctagcaaaccttgctgcctactctcagcaacagcagtttctttcattcaaccaactagc

SEQ ID NO: 343837 - DNA, 248 bp, Zea mays
gttagacattaaacctctgagagcgccctaccgacacacagggtgcagatgactcttgcctttgctgagggcctcaactcaatgagtgaggtgctcaccaggcctattaccacgcttgcatctgcactctaaggtatctgaacacttaggtgcgtatgccaacatgcaacaacatgccctcgccgggagagctttaaaacaaccaatatgtgaattgcaacaacaatctttggcacatatcataatac

SEQ ID NO: 343838 - DNA, 388 bp, Zea mays
caactagcaacatagaaagcacaatagtgtaccaacaatggcagccaaaatattttgcctccttatgctccttggtatttctgcaagtgctgctacggcgaccattttcccgcaatgctcacaagctcctatagcttcccttcttcccccgtacctctcaccagcggtgtcttcggtatgtgaaaacccaattcttcaaccctacaggatccaacaggcaatcgcagctggcatcttacctttatcacccttgttcctccaacaatcatcagccctattacagcagttacctttggtgcatttattggcacaaaacatcagggcacaacaactacaacaacttgtgctagcaaaccttgctgcctactctcagcaacagcagtttctt

SEQ ID NO: 343839 - DNA, 389 bp, Zea mays
caacaagcaacatagaaagtggaatccagtagcaacaatagagcaacaatggcgaccaagatattttccctccttatgctccttgctctttctgcatgtgttgctaacgcgacaattttccctcaatgctcacaagctcctatagcttcccttcttcccccataccttccatcaatgatagcttcagtatgtgaaaacccagctcttcaaccctataggctccaacaagcaatcgcagcaagcaacatacctttatcacccttgtttcaacaatcgccagccctatctttggtgcagtcattggtacaaaccatcagggcacagcagctgcagcaactcgtgctacctgtgatcaaccaagtagctctggcaaacctttctccctactc

SEQ ID NO: 343840 - DNA, 381 bp, Zea mays
cagaaacacaccaagcgaagcgcactagcaacaacctaacaacaatggctaccaagatattatccctccttgcgcttcttgcgctttttgcgagcgcaacaaatgcgtccattattccacaatgctcacttgctcctagttccattattccacagttcctcccaccagttacttcaatggccttcgaacacccagctgtgcaagcctataggctacaacaagcgattgcggcgagcgtcttacaacaaccaattgcccaattgcaacaacaatccttggcacatctaacaatacaaaccatcgcaacgcaacagcaacaacagtttctaccagcactgagccacctagccatggtgaaccctgtcggctacttgcaacagc

SEQ ID NO: 343841 - DNA, 386 bp, Zea mays
ccaactagcaacatagaaagcacaatagtgtaccaacaatggcagctaaaatattttgcctccttatgctccttggtctttctgcaagtgctgctacggcgaccattttcccacaatgctcacaagctcctatagcttcccttcttcccccgtacctctcaccaacggtgtcttcggtatgtgaaaacccaattcttcaaccctacaggatccaacaggcaatcgcagctggcatcttacctttatcacccttgttcctccaacaatcatcagccctattacagcagttacctttggtgcatttattggcacaaaacatcagggcacaacaactacaacaacttgtgctagcaaaccttgctgcctactcttaagaacagcagttt

SEQ ID NO: 343842 - DNA, 388 bp, Zea mays
gcaacatagaaagcacaatagtgtaccaacaatggcagctaaaatattttgcctccttatgctccttggtctttctgcaagtgctgctacggcgaccattttcccacaatgctcacaagctcctatagcttcccttcttcccccgtacctctcaccaacggtgtcttcggtatgtgaaaacccaattcttcaaccctacaggatccaacaggcaatcgcagctggcatcttacctttatcacccttgttcctccaacaatcatcagccctattacagcagttacctttggtgcatttattggcacaaaacatcagggcacaacaactacaacaacttgtgctagcaaaccttgctgcctactctcagcaacagcagtttcttccattc

SEQ ID NO: 343843 - DNA, 288 bp, Zea mays
caacaagcaacatagaaagtgtatttcagtagcaacaatagagcaacaatggagaccaagatattttccctccttatgctccttgctctttctacatgtgttgctaacgcgacaattttccctcaatgctcacaagctcctatagctttcctttttcccccataccttccatcaattatagcttcagtatgtgaaaacccagctctttaaccatataggcttcaacaagcaatctctgcaagcaacatacctttatcgcctcttgtgtgtcaacaatcgccagcccta

SEQ ID NO: 343844 - DNA, 368 bp, Zea mays
tcgcccacgcgtccgtccacgcgttcttttggcttataatatagtcgaccattcggacccaagtggagtgggacacttggcttaatttttcagcatgctggtgctcgtgatgataaagggattccggtcatcagggatttctataacagccaattgactgccagttgacatgattatgattatacactgttagctaagtttgaaagtattcacacagtttctggagaccatagctttacaatgattgtttttaactattagctaggtctttctgttcttctggagtggctaatgtttaacctgacttacagtactcttgtggtattgtcttttatatttgttctgctttgcttctattatgagccttt

SEQ ID NO: 343845 - DNA, 83 bp, Zea mays
aaaaaaaaaaaaaaaaaaaaaaaatttttttaaaaaaaaaaaaaaaaaaaaaaaaaaaaaaaaaaaaaaaaaaaaaaaaaaag

SEQ ID NO: 343846 - DNA, 382 bp, Zea mays
tccagatcagcaaagcggcagtgcgtagagaggatcgtcgaacagaacagcatgaagatggtcatcgttctcgtcgtgtgcctggctctgtcagctgccagcgcctctgcaatgcagatgccctgcccctgcgcggggctgcagggcttgtacggcgctggcgccggcctgacgacgatgatgggcgccggcgggctgtacccctacgcggagtacctgaggcagccgcagtgcagcccgctggcggcggcgccctactacgccgggtgtgggcagacgagcgccatgtaccagccgctccggcaacagtgctgtcagcagcagatgaggatgatggacgtgcagtccgtctcgcatcagctgcagatgatgatgcatcttg

SEQ ID NO: 343847 - DNA, 110 bp, Zea mays
tagacttcataaacacaccatttttttttctgaggaccgactaccttaccacagtggttaccatgatattatatccgccttgggcttcgatgtgctagttgtgagcgcac

SEQ ID NO: 343848 - DNA, 389 bp, Zea mays
cagccctattacagcagttacctttggtgcatttattggcacaaaacatcagggcacaacaactacaacaacttgtgctagcaaaccttgctgcctactctcagcaacaacagtttcttccattcaaccaactagctgcattgaactctgcttcttatttgcaacaacaacaactaccattcagccagctatctgctgcctacccccagcaatttcttccattcaaccaactgacagctttgaactctcctgcttatttacagcagcaacaactactaccattcagccagctagctggtgtgagccctgctaccttcttgacacaaccacaattgttgccgttctaccagcacgctgcgcctaacgctggcaccctcttacaactgcaa

SEQ ID NO: 343849 - DNA, 239 bp, Zea mays
cgctgatgtgagccctgttgccttcttgacacaacaacagttgttgccgttctacctgcacgctgcgcctaacgctggcaccctcttacaactgcaacaattgctgccattcaaccaacttgctttgacaaacccaacagcgttctaccaacaacccatcattggtggtgcccttttttagattgcttatgagcaatagaccaattttgaggactattgcttgtaaacaatataaaaga

SEQ ID NO: 343850 - DNA, 388 bp, Zea mays
agaaagtggaatccagtagcaacaatagttcaacaatggagaccaagatattttccctccttatgctccttgctctttctacatgtgttgctaacgcgacaattttccctcaatgctcacaagctcctatagcttccctttttcccccataccttccatcaattatagcttcagtatgtgaaaacccagctcttcaaccatataggcttcaacaagcaatcgcagcaagcaacatacctttatcgcccttgttgtgtcaacaatcgccagccctatctttggtgcagtcattggtacaaaccatcagggcacaacagctgcagcaactcgtgctacctgtgatcaaccaagtagctctggcaaacctttctccctactctccgcaaca

SEQ ID NO: 343851 - DNA, 381 bp, Zea mays
agcctagcaattagctcatcgactctagattggagaactcgacaccatgaaggtgctgatcgttgcccttgctctcctggcgctcgctgcgagcgccgcctccagtacaagcggcggctgtggctgccagacaccaccgtttcatctaccgcctccgttctatatgccgcctccgttctatctgccgccgcagcagcagccgcagccatggcaataccccactcaaccaccgcagctaagcccgtgccagcagttcggatcctgcggcgtcggcagcgtcggcagcccgttcctgggccagtgcgtcgagttcctgaggcaccagtgcagcccggcggcgacgccctacggctcgccacagtgccaggcgctgcagcagca

SEQ ID NO: 343852 - DNA, 94 bp, Zea mays
agcagagaaatttcaacattattgttatatttgtgaacttggcaccatggaggagatgatagaggacatagctcgactgtcacacgataaaagc

SEQ ID NO: 343853 - DNA, 388 bp, Zea mays
agcattcagaaacacaccaagcgttgttcactagcaacaacctaacaacaatggctaccaagatattagccctccttgcgcttcttgcccttttagtgagcgcaacaaatgcgttcattattccacagtgctcacttgctcctagtgccattattccacagttcctcccaccagttacttcaatgggcttcgaacatccagccgtgcaagcctacaggctacaactagcgcttgcggcgagcgtcttacaacaaccaattgcccaattgcaacaacaatccttggcacatctaaacctacaaaccatcgcaacgcaacagcaacaacagtttctgccatcactgagccacctagccgtggtgaaccctgtcgcctacttgcaacagca

SEQ ID NO: 343854 - DNA, 389 bp, Zea mays
tagcaacatagaaagcacaatagtgttccaacaatggcagccaaaatattttggtgtccttatgctccttggtctttctgcaagtgctgctaccgcaaccattttcccacaatgctcacaagctcctatagcttcctttcttcccccatacctctcaccagcggtgtcttcagtatgtgaaaacccaattcttcaaccctacaggatccaacaggcaatcgcagcaggcatcttacctttatcacccttgttcctccaacaaccgtcagccctattacagcagttacctttggtgcatttgttggcacaaaacatcaaggcacaacaactacaacaacttgtgctaggaaaccttgctgcctactctcagcaacagcagttttcttcca

SEQ ID NO: 343855 - DNA, 359 bp, Zea mays
attttgagcattcagaaacacaccttgcgaagcgcactagcaacgacctaacaacaatggctaccaagatattagccctccttgcgcttcttgccctttttgtgagcgcaacaaatgcgttcattattccacaatgctcacttgctcctagtgccattattccacagttcctcccaccagttacttcaatgggcttcgaacacctagctgtgcaagccaacatgcaacaacaagcgcttgcggcgagcgtcttacaacaaccaattgcccaattgcaacaacaatcctttgccacatttaacaatacaagccattacatcgcaacagcaacaacagttcctaccagcacttgatccacc

SEQ ID NO: 343856 - DNA, 390 bp, Zea mays
caacaagcaacatagaaagtggaattcagtagcaacaatagagcaacaatggagaccaagatattttccctccttatgctccttgctctttctacatgtgttgctaacgcgacaattttccctcaatgctcacaagctcctatagcttccctttttcccccataccttccatcaattatagcttcagtatgtgaaaacccagctcttcaaccatataggcttcaacaagcaatcgcagcaagcaacatacctttatcgcccttgttgtgtcaacaatcgccagccctatctttggtgcagtcattggtacaaaccatcagggcacaacagctgcagcaactcgtgctacctgtgatcaaccaagtagctctggcaaacctttctccctac

SEQ ID NO: 343857 - DNA, 385 bp, Zea mays
agaccaacaagcaacatagaaagtggaattcagtagcaacaatagagcaacaatggcgaccaagatattttccctccttatgctccttgctctttctgcatgtgttgctaacgcgacaattttccctcaatgctcacaagctcctatagcttcccttcttcccccataccttccatcaatgatagcttcagtatgtgaaaacccagctcttcaaccctataggctccaacaagcaatcgcagcaagcaacatacctttatcacccttgtttcaacaatcgccagccctatctttggtgcagtcattggtacaaaccatcagggcacagcagctgcagcaactcgtgctacctgtgatcaaccaagtagctctggcaaacctttct

SEQ ID NO: 343858 - DNA, 393 bp, Zea mays
cagaaacacaccaagcgaagcgcactatcaacaacctaacaacaatggctaccaagatattagccctccttgcgcttcttgcccttttagtgagcgcaacaaatgcgttcattattccacagtgctcacttgctcctagtgccattattccacagttcctcccaccagttacttcaatgggcttcgaacatccagccgtgcaagcctacaggctacaactagcgcttgcggcgagcgtcttacaacaaccaattgcccaattgcaacaacaatccttggcacatctaaacctacaaaccatcgcaacgcaacagcaacaacagtttctgccatcactgagccacctagccgtggtgaaccctgtcgcctacttgcaacagcagctacttgcat

SEQ ID NO: 343859 - DNA, 385 bp, Zea mays
tcagaaacacaccaagcgaagcgcactatcaacgacctaacaacaatggctaccaagatattagccctccttgcgcttcttgccctttttgtgagcgcaacaaatgcgttcattattccacaatgctcacttgctcctagtgccattattccacagttcctcccaccagttacttcaatgggcttcgaacacctagctgtgcaagccaacatgcaacaacaagcgcttgcggcgagcgtcttacaacaaccaattgcccaattgcaacaacaatccttgccacatctaacaatacaagccatcacaacgcaacagcaacaacagttcctaccagcactgagccacctagccatggtgaaccctgccgcctacttgcaagagcagc

SEQ ID NO: 343860 - DNA, 387 bp, Zea mays
agaccaactagcaacatagaaagcacaatagtgtaccaacaatggcagccaaaatattttgcctccttatgctccttggtctttctgcaagtgctgctacggcgaccattttcccgcaatgctcgcaagctcctatagcttcccttcttcccccgtacctctcaccagcggtgtcttcggtatgtgaaaacccaattcttcaaccctacaggatccaacaggcaatcgcagctggcatcttacctttatcacccttgttcctccaacaatcatcagccctattacaacagttacctttggtgcatttattggcacaaaacatcagggcacaacaactacaacaacttgtgctagcaaaccttgctgcctactctcagcaacagcagt

SEQ ID NO: 343861 - DNA, 386 bp, Zea mays
tccagatcagcaaagcggcagtgcgtagagaggatcgtcgaacagaacagcatgaagatggtcatcgttctcgtcgtgtgcctggctctgtcagctgccagcgcctctgcaatgcagatgccctgcccctgcgcggggctgcagggcttgtacggcgctggcgccggcctgacgacgatgatgggcgccggcgggctgtacccctacgcggagtacctgaggcagccgcagtgcagcccgctggcggcggcgccctactacgccgggtgtgggcagacgagcgccatgtaccagccgctccggcaacagtgctgccagcagcagatgaggatgatggacgtgcagtccgtcgcgcagcagctgcagatgatgatgcagcttgagcg

SEQ ID NO: 343862 - DNA, 362 bp, Zea mays
attttcagcattcagaaacacaccaagcgaagcgcactagcaacaacctaacaacaatggctaccaagatattagccctccttgcgcttcttgcccttttagtgagcgcaacaaatgcgttcattattccacagtgctcacttgctcctagtgccattattccacagttcctcccaccagttacttcaatgggcttcgaacatccagccgtgcaagcctacaggctacaactagcgcttgcggcgagcgtcttacaacaaccaattgcccaattgcaacaacaatccttggcacatctaaacctacaaaccatcgcaacgcaacagcaacaacagtttctgccatcactgagccacctagcc

SEQ ID NO: 343863 - DNA, 403 bp, Zea mays
  unsure (1)..(403): unsure at all n locations
cggcatttatntggcanncaaaaggtaacttgctgtaanntagggctganntgattgttggagggaacgagagggtgtataaaggtatagatgctcagctagttactctcttggtgcatttttattggcaccaaaacatctagggctacatacaaccttacacacaacttgttgctatgcaaaccgttgcttgcctacatctcatgcaacacgcacgtgttctttcctattcagaccaactatgctgcatatgaagctctgctttcttatgttgcaacaaacaactaattacctattgcagtctagctaccatgttgctctactccccagcnaattttcttccatttcaactcaacttggcagtcatttgtaacctctctctgctttaatttacccagcagca

SEQ ID NO: 343864 - DNA, 387 bp, Zea mays
ccaacaagcaacatagaaagtggaatccagtagcaacaatagagcaacaatggcgaccaagatattttccctccttatgctccttgctctttctgcatgtgttgctaacgcgacaattttccctcaatgctcacaagctcctatagcttcccttcttcccccataccttccatcaatgatagcttcagtatgtgaaaacccagctcttcaaccctataggctccaacaagcaatcgcagcaagcaacatacctttatcacccttgtttcaacaatcgccagccctatctttggtgcaggcattggtacaaaccaatagggcacagcagctgcagcaactcgtgctacctgtgatcaaccaagtagctctggcaaacctttcttccta

SEQ ID NO: 343865 - DNA, 266 bp, Zea mays
gctttcttgagacaacaacatttgttgccattttacccacaggttgtgggaaacattaatgccttcttgcaacagcaacaattgctaccattctacccacagaatgtggcaaacattgttgccttcttacaacaacaacaattgttgccatttagccaacatgctttgacgaatcctaccaccttattgcaaccgcccaccattggtggtgccatcttctagattttttatgatttatactgtaataataaagttctcatactgat

SEQ ID NO: 343866 - DNA, 384 bp, Zea mays
cggacgcgtgggtttgagcattcagaaacacaccaagcgaagcgcactagcaacgacctaacaacaatggctaccaagatattagccctccttgcgcttcttgccctttttgtgagcgcaacaaatgcgttcattattccacaatgctcacttgctcctagtgccattattccacagttcctcccaccagttacttcaatgggcttcgaacacctagctgtgcaagccaacatgcaacaacaagcgcttgcggcgagcgtcttacaacaaccaattgcccaattgcaacaacaatccttgccacatctaacaatacaagccatcacaacgcaacagcaacaacagttcctaccagcactgagccacctagccatggtgaaccct

SEQ ID NO: 343867 - DNA, 395 bp, Zea mays
attttgagcattcagaaacacaccatgcgaagcacattagcaacaacctaacagcaatggctaccaagatattatccctccttgcgcttcttgcgctttttgcgagcgcaacaaatgcgttcattattccacaatgctcacttgctccaagttccattattacacagttcctcccaccagttacttcaatgggcttcgaacacccagctgtgcaagcctataggctacaacaagcaattgcggcgagcgtcttacaacaaccaatttcccagttgcaacaacaatccttggcacatctaacaatacaaaccatcgcaacgcaacagcaacaacaattcctaccagcactgagccacctagccatggtgaaccctgccgcctacttgcaacagcag

SEQ ID NO: 343868 - DNA, 315 bp, Zea mays
aaaaaaaaaaaaaaaaaaaaaaattttattttaaaaaaaaaaaaaaataaaaatagaaggaataaataaaaataataaaaaaataaaaaaaaaaaaaaaaaaaaaaaaaaaaaaaaaaaaggggggggccgttttaagggttccatgttttcttccccgtgcttgcaacgaaaaagtttttttttggggtcccctaaattaaattcactggccgggtttttaaaacgtggggatgggaaaaaccttggcgttccccaatttaatcgcttggaagaaaattcccttttggccggtgggcgtaatatcaaaagggcc

SEQ ID NO: 343869 - DNA, 381 bp, Zea mays
agcattcagaaacacaccaagctattcgcactagcaacaacctaacaacaatggctaccaagatattagccctccttgcgcttcttgcccttttagtgagcgcaacaaatgcgttcattattccacagtgctcacttgctcctagtgccattattccacagttcctcccaccagttacttcaatgggctttgaacatccagccgtgcaagcctacaggctacaactagcgcttgcggcgagcgtcttacaacaaccaattgcccaattgcaacaacaatccttggcacatctaaacctacaaaccatcgcaacgcaacagcaacaacagtttctgccatcactgagccacctagccgtggtgaaccctgtctcctacttgc

SEQ ID NO: 343870 - DNA, 308 bp, Zea mays
gcaacatagaaagtggaatccatttttatacaatagagcaacaatggcgaccaaggtattttccctccttatgctccttgctctttctgcatgtgttgctaacgcgacaattttccctcaatgcttacaagctcctatagcttcccttcttcccccataccttccatcaatgatagcttcagtatgtgaaaacccagctctttaaccctataggctccaacaagcaatcgcagcaagcaacatacctttatcacccttgtttcaacaatcgccagccctatctttggtgcagttattggtacaaacca

SEQ ID NO: 343871 - DNA, 357 bp, Zea mays
cattggtacaaaccatcagggttcatcagctgcagcaactcgtgctaccagtgatcagccaagtagctctggcaaacctttctccctactctcagcaacaacaatttcttccattcaaccaactgtctacactgaaccctgctgcttatttgcagcaacaacaactactaccattcagccagctagctactgcctactctcagcagcaacaatttcttccatttaaccaattcgccgcactgaacccctctgcttatttccagcagcaaatactactaccatttggccagctagctacaacaagccccgttttctttttgtcacaacaacaattgctttcgttcttccagcagtttg

SEQ ID NO: 343872 - DNA, 371 bp, Zea mays
tattattgagaccaactagcaacatataaagcacaatagtgtaccaacaatggcagccaaaatattttgcctccttatgctccttggtctttctgcaagtgctgctacggcgaccattttcccgcaatgctcgcaagctcctatagcttcccttcttcccccgtacctctcaccagcggtgtcttcggtatgtgaaaacccaattcttcaaccctacaggatccaacaggcaatcgcagctggcatcttacctttatcacccttgttcctccaacaatcatcagccctattacaacagttacctttggtgcatttattggcacaaaacatcagggcacaacaactacaacaacttgtgctagcaaaccttg

SEQ ID NO: 343873 - DNA, 109 bp, Zea mays
tattttagcgaccaaaaacattatctttgctagccccacaatcaacaaccaatgggcgccggctattttggtcttagtcttctttgcgctttttgtcctagtactgagc

SEQ ID NO: 343874 - DNA, 390 bp, Zea mays
caacaagcaacatagaaagtggaatccagtagcaacaatagagcaacaatggagaccaagatattttccctccttatgctccttgctctttctacatgtgttgctaacgcgacaattttccctcaatgctcacaagctcctatagcttccctttttcccccataccttccatcaattatagcttcagtatgtgaaaacccagctcttcaaccatataggcttcaacaagcaatcgcagcaagcaacatacctttatcgcccttgttgtgtcaacaatcgccagccctatctttggtgcagtcattggtacaaaccatcagggcacaacagctgcagcaactcgtgctacctgtgatcaaccaaagagctctggcaaacctttcttcctac

SEQ ID NO: 343875 - DNA, 391 bp, Zea mays
ccaacaagcaacatagaaagtggaatccattagcaacaatagagcaacaatggagaccaagatattttccctccttatgctccttgctctttctacatgtgttgctaacgcgacaattttccctcaatgctcacaagctcctatagcttccctttttcccccataccttccatcaattatagcttcagtatgtgaaaacccagctcttcaaccatataggcttcaacaagcaatcgcagcaagcaacatacctttatcgcccttgttgtgtcaacaatcgccagccctatctttggtgcagtcattggtacaaaccatcagggcacaacagctgcagcaactcgtgctacctgtgatcaaccaagtagctctggcaaacctttcttcctac

SEQ ID NO: 343876 - DNA, 366 bp, Zea mays
attgagaccaactagcaacatagaatgcacaatagtgtaccaacaatggcagctaaaatattttgcctccttatgctccttggtctttctgcaagtgctgctacggcgaccattttcccacaatgctcacaagctcctatagcttcccttcttcccccgtacctctcaccaacggtgtcttcggtatgtgaaaacccaattcttcaaccctacaggatccaacaggcaatcgcagctggcatcttacctttatcacccttgttcctccaacaatcatcagccctattacagcagttacctttggtgcatttattggcacaaaacatcagggcacaacaactacaacaacttgtgctagcaaacctt

SEQ ID NO: 343877 - DNA, 388 bp, Zea mays
tagaaagcacaatagtgtaccaacattggcagccaaaatattttgcttccttatgctccttggtctttctgcaagtgttgctaccgcaaccattttcccacaatgctcacaagctcctatagcttcccttcttcccccatacctctcaccagcggtgtcttcaatgtgtgaaaacccaattgttcaaccctacaggatccaacaggcaatcgcaacaggcatcttaccattatcacccttgttcctccaacaaccgtcagccctattacagcagttacctttggtccatttggtggcacaaaacatcagggcacaacaactacaacaacttgtgctagcaaaccttgctgcatactctcagcaacatcagtttctttcattcaaccaa

SEQ ID NO: 343878 - DNA, 379 bp, Zea mays
gcaattagctcatcgactccagattggagaactcgacaccatgaaggtgctgatcgttgcccttgctctcctggcgctcgctgcgagcgccgcctccagtacaagcggcggctgtggctgccagacaccaccgtttcatctaccgcctccgttctatatgccgcctccgttctatctgccgccgcagcagcagccgcagccatggcaataccccactcaaccaccgcagctaagcccgtgccagcagttcggatcctgcggcgtcggcagcgtcggcagcccgttcctgggccagtgcgtcgagttcctgaggcaccagtgcagcccggcggcgacgccctacggctcgccacagtgccaggcgctgcagcaacagtgc

SEQ ID NO: 343879 - DNA, 388 bp, Zea mays
gaaagcacaatagtgtaccaacaatggcagccaaaatattttgcttccttatgctccttggtctttctgcaagtgttgctaccgcaaccattttcccacaatgctcacaagctcctatagcttcccttcttcccccatacctctcaccagcggtgtcttcaatgtgtgaaaacccaattgttcaaccctacaggatccaacaggcaatcgcaacaggcatcttaccattatcacccttgttcctccaacaaccgtcagccctattacagcagttacctttggtccatttggtggcacaaaacatcagggcacaacaactacaacaacttgtgctagcaaaccttgctgcatactctcagcaacatcagtttctttcattcaaccaact

SEQ ID NO: 343880 - DNA, 273 bp, Zea mays
caacaagcaacatagaaagtggaatccagtagcaacaatagagcaacaatggcgaccaagatattttccctccttatgctccttgctctttctgcatgtgttgctaacgcgacaattttccctcaatgctcacaagctcctatagcttcccttcttcccccataccttccatcaatgatagcttcagtatgtgaaaacccagctcttcaaccctataggctccaacaaagcaatcgcagcaaagccaacataccttttatcaccccttggttt

SEQ ID NO: 343881 - DNA, 355 bp, Zea mays
caacaagcaacatagaaagtggaattcattagcaacaatagagcaacaatggcgaccgagatattttccctccttatgctccttgctctttctgcatgtgttgctaacgcgacaattttccctcaatgctcacaagctcctatagcttcccttcttcccccataccttccatcaatgatagcttcagtatgtgaaaacccagctcttcaaccctataggctccaacaagcaatcgcagcaagcaacatacctttatcacccttgtttcaacaatcgccagccctatctttggtgcagtcattggtacaaaccatcagggcacagcaactgcagcaactcgtgctacctgtgatca

SEQ ID NO: 343882 - DNA, 379 bp, Zea mays
gccaacatgcaacaacaagcgcttgcggctagcgtcttacaacaaccaattgcccaattgcaacaacaatccttgccacatctaacaatacaagccatcacaacgcaacagcaacaacagttcctaccagcactgagccacctagccatggtgaaccctgccgcctacttgcaagagcagctgcttgcatccaacccacttgctctggcgaacgtagttgcaaaccagcaacaacaacagctacaacagtttctgccaacgctcagtcaactagccatggtgaaccctgccgcctacgtacaacaacaacaactgctttcatctagcccgctcgctgtgggcaatgcacctacatacctgcaacaacaattgttgcaac

SEQ ID NO: 343883 - DNA, 353 bp, Zea mays
  unsure (1)..(353): unsure at all n locations
cggacgcgtgggcgagcagtccnatttaaattttttaacagatgattgaangcttgccaggaataattaagtacatttctaaaaaaaaaaataaaaaataatttcttaatatattaatattttatttattattataattataatataattattaataatatttaaaaatttgttgctatatttaaattttacaattttaattatttcttttttctaatttattttttttttatatttatcactaaattaaacattttttcataatttttaaaaaaaatattctttttaaaatcttttttttttacttaatataatttacaattaatataaatttatttttttttcaatttttt

SEQ ID NO: 343884 - DNA, 90 bp, Zea mays
tttctagattcttatgtaaaaatgtactttcttatttctgggaagccacaaacatcagacaaaagaaagtacatttctagattcttatgt

SEQ ID NO: 343885 - DNA, 374 bp, Zea mays
attttgagcattcagaaacacaccatgcgaagcgcactagcaacgacctaacaacaatggctaccaagatattagccctccttgcgcttcttgccctttttgtgagcgcaacaaatgcgttcattattccacaatgctcacttgctcctagtgccattattccacagttcctcccaccagttacttcaatgggcttcgaacacctagctgtgcaagccaacatgcaacaacaagcgcttgcggcgagcgtcttacaacaaccaattgcccaattgcaacaacaattcttggcacattttacaatacaagccatcacaacgcaacagcaacaacagttcctaccagcactgagccacctagccatggtgaaccct

SEQ ID NO: 343886 - DNA, 146 bp, Zea mays
caacttgctttgacaaacccaacagcgttctaccaacaacccatcattggtggtgccctcttttagattgcttatgagttatagttcaataatgaagttttttggatgatgtttgtggcttcccagaaataagaaagtacatttct

SEQ ID NO: 343887 - DNA, 370 bp, Zea mays
ggtccacctgccaccgccggtccatgtgccgccgccggttcatctgccgccggcgccatgccactaccctactcaaccgccccggcctcagcctcatccccagccacacccatgcccgtgccaacagccgcatccaagcccgtgccagctgcagggaacctgcggcgttggcagcaccccgatcctgggccagtgcgtcgagttcctgaggcatcagtgcagcccgacggcgacgccctactgctcgcctcagtgccagtcgttgcggcagcagtgttgccagcagctcaggcaggtggagccgcagcaccggtaccaggcgatcttcggcttggtcctccagtccatcctgcagcagcagccgcaaagc

SEQ ID NO: 343888 - DNA, 380 bp, Zea mays
cagaaacacaccaagcgaagttttttatcaacaacctaacaacaatggctaccaagatattagccctccttgcgcttcttgcccttttagtgagcgcaacaaatgcgttcattattccacagtgctcacttgctcctagtgccattattccacagttcctcccaccagttacttcaatgggcttcgaacatccagccgtgcaagcctacaggctacaactagcgcttgcggcgagcgtcttacaacaaccaattgcccaattgcaacaacaatccttggcacatctaaacctacaaaccatcgcaacgcaacagcaacaacagtttctgccatcactgagccacctagccgtggtgaaccctgtcgcctacttgcaacag

SEQ ID NO: 343889 - DNA, 406 bp, Zea mays
  unsure (1)..(406): unsure at all n locations
cgggnccgacccacgcgtnnccgagctcctatagncttcccttcttccttcgttcctctcaccagcggtgtcttcggtatgtgaaaacccaattcttcaaccctataggatccaacaggcaatcgcagctggcatcttacctttatcacccttgttcctccaacaatcatcagccctattacagcagttacctttggtgcatttattggcacaaaacatcagggcacaacaactacaacaacttgtgctagcaaaccttgctgcctactctcagcaacaacagtttcttccattcaaccaactagctgcattgaactctgcttcttatttgcaacaacaacaactaccattcagccagctatctgctgcctacccccagcaatttcttccattcaaccaactgaca

SEQ ID NO: 343890 - DNA, 381 bp, Zea mays
gatcagcaaagcggcagtgcgtatagaggatcgtcgaacagaacagcatgaagatggtcatcgttctcgtcgtgtgcctggctctgtcagctgccagcgcctctgcaatgcagatgccctgcccctgcgcggggctgcagggcttgtacggcgctggcgccggcctgacgacgatgatgggcgccggcgggctgtacccctacgcggagtacctgaggcagccgcagtgcagcccgctggcggcggcgccctactacgccgggtgtgggcagacgagcgccatgtaccagccgctccggcaacagtgctgccagcagcagatgaggatgatggacgtgcagtccgtcgcgcagcagctgcagatgatgatgcagcttgagc

SEQ ID NO: 343891 - DNA, 354 bp, Zea mays
caacaagcaacatagaaagtggaattcagtagcaacaatagagcaacaatggcgaccaagatattttccctccttatgctccttgctctttctgcatgtgttgctaacgcgacaattttccctcaatgctcacaagctcctatagcttcccttcttcccccataccttccatcaatgatagcttcagtatgtgaaaacccagctcttcaaccctataggctccaacaagcaatcgcagcaagcaacatacctttatcacccttgtttcaacaatcgccagccctatctttggtgcagtcattggtacaaaccatcagggcacagcagctgcagcaactcgtgctacctgtgatc

SEQ ID NO: 343892 - DNA, 379 bp, Zea mays
aaagcacaatagtgtaccaacaatggcagccaaaatattttgcctccttatgctccttggtctttctgcaagtgctgctacggcgaccattttcccgaaatgctcgcaagctcctatagcttcccttcttcccccgtacctctcaccagcggtgtcttcggtatgtgaaaacccaattcttcaaccctacaggatccaacaggcaatcacagctggcatcttacctttatcacccttgttcctccaacaatcatcagccctattacatcagttacctttggtgcatttattggcacaaaacatcagggcacaacaactacaacaacttgtgctagcaaaccttgctgcctactctcagcaacagcagtttcttccattc

SEQ ID NO: 343893 - DNA, 377 bp, Zea mays
gcacaatagtgtaccaacaatggcttccaaaatattttgcctccttatgctccttggtatttctgcaagtgctgctacggcgaccattttcccgcaatgctcacaagctcctatagcttcccttcttcccccgtacctctcaccagcggtgtcttcggtatgtgaaaacccaattcttcaaccctacaggatccaacaggcaatcgcagctggcatcttacctttatcacccttgttcctccaacaatcatcagccctattacagcagttacctttggtgcatttattggcacaaaacatcagggcacaacaactacaacaacttgtgctagcaaaccttgctgcctactctcagcaacagcagtttcttccattca

SEQ ID NO: 343894 - DNA, 380 bp, Zea mays
tttcagcattcagaaacacattattcgaagcgcactagcaacaacctaacaacagtggctaccaagatattagccctccttgcgcttcttgcccttttagtgagcgcaacaaatgcgttcattattccacagtgctcacttgctcctagtgccattattccacagttcctcccaccagttacttcaatgggcttcgaacatccagccgtgcaagcctacaggctacaactagcgcttgcggcgagcgtcttacaacaaccaattgcccaattgcaacaacaatccttggcacatctaaacctacaaaccatcgcaacgcaacagcaacaacagtttctgccatcactgagccacctagccgtggtgaaccctgtcgccta

SEQ ID NO: 343895 - DNA, 378 bp, Zea mays
gcaacatagaaagtggaatccagtttcaacaatagagcaacaatggcgaccaagatattttccctccttatgctccttgctctttctgcatgtgttgctaacgcgacaattttccctcaatgctcacaagctcctatagcttcccttcttcccccataccttccatcaatgatagcttcagtatgtgaaaacccagctcttcaaccctataggctccaacaagcaatcgcagcaagcaacatacctttatcacccttgtttcaacaatcgccagccctatctttggtgcagtcattggtacaaaccatcagggcacagcaagccgtgcttccttcttgacacagcaacagttgctgcctttctaccagcagtttgcgg

SEQ ID NO: 343896 - DNA, 379 bp, Zea mays
aaacacaccaagcgaagctacctatcaacgacttaacaacaatggctaccaagatattagccctccttgcgcttcttgccctttttgtgagcgcaacaaatgcgttcattattccacaatgctcacttgctcctagtgccattataccacagttcctccgaccagttacttcaatgggcttcgaacacctagctgtgcaagcctacaggctacaacaagcgcttgcggcgagcgtcttacaacaaccaattaaccaattgcaacaacaatccttggcacatctaaccatacaaaccatcgcaacacaacagcaacaacagttcctaccagcactgagccaactagatgtggtgaaccctgtcgcctacttgcaacagca

SEQ ID NO: 343897 - DNA, 387 bp, Zea mays
accaaatcaaatctgcaacatcaattatctaactccaaaaaccatgaagctggtgcttgtggttcttgctttcattgctttagtatcaagtgtttcttgtacacagacaggcggctgcagctgtggtcaacaacaaagccatgagcagcaacatcatccacaacaacatcatccacaaaaacaacaacatcaaccaccaccacaacatcaccagcagcagcaacaccaacaacaacaagttcacatgcaaccacaaaaacatcagcaacaacaagaagttcatgttcaacaacaacaacaacaaccgcagcaccaacaacaacaacaacaacagcaccaacaacaacatcaatgtgaaggccaacaacaacatcaccaacaatcaca

SEQ ID NO: 343898 - DNA, 382 bp, Zea mays
cggacgcgtgggttagctttatctactccagagcgcagaagaacccgatcgacaccatgagggtgttgctcgttgccctcgctctcctggctctcgctgcgagcgccacctccacgcatacaagcggcggctgcggctgccagccaccgccgccggttcatctaccgccgccggtgcatctgccacctccggttcacctgccacctccggtgcatctcccaccgccggtccacctgccgccgccggtccacctgccaccgtcggtccatgtgccgccgccggttcatctgccgccgccaccatgccactaccctactcaaccgccccggcctcagcctcatccccagccacacccatgcccgtgccaacagccgcattcaag

SEQ ID NO: 343899 - DNA, 274 bp, Zea mays
tctcgtttcaaatccatccatcctcgtttcctccgtcccgcagcatctcaaccccatggccaagatcaagatcgggatcaatgggttcggcaggatcggaaggctggtggccagggtggccctgcagagtgacgatgtcgagctcgtcgccgtgaacgaccccttcatcagcaccgactacatgacctacatgttcaagtacgacactgtgcacggacagtggaagcaccatgaagtcaaggtgaaggacttcaaaacccttctttttggtgag

SEQ ID NO: 343900 - DNA, 382 bp, Zea mays
cagaaacacaccaagcgaagcgcactagcaacaacctaacaacaatggctaccaagatattatccctccttgcgcttcttgcgctttttgcgagcgcaacaaatgcgtccattattccacaatgctcacttgctcctagttccattattccacagttcctcccaccagttacttcaatggccttcgaacacccagctgtgcaagcctataggctacaacaagcgattgcggcgagcgtcttacaacaaccaattgcccaattgcaacaacaatccttggcacatctaacaatacaaaccatcgcaacgcaacagcaacaacagttcctaccagcactgagccacctagccatggtgaaccctgtcgcctacttgcaacagca

SEQ ID NO: 343901 - DNA, 380 bp, Zea mays
gaccaactagcaacatagaatgcattatagtgtaccaacaatggcagccaaaagattttgcttccttatgctccttggtctttctgcaagtgctgctaccgcaaccattttcccacaatgctcacaagctcctatagcttcctttcttcccccatacctctcaccagcggtgtcttcagtatgtgaaaacccaattcttcaaccctacaggatccaacaggcaatcgcagcaggcatcttacctttatcacccttgttcctccaacaaccgtcagccctattacagcagttacctttggtgcatttgttggcacaaaacatcaaggcacaacaactacaacaacttgtgctaggaaaccttgctgcctactctcagcaac

SEQ ID NO: 343902 - DNA, 159 bp, Zea mays
  unsure (1)..(159): unsure at all n locations
cncagatcctcaaccagcgtttgatcgtctaccgagaagcccgagcaggcgagcagcggtttcgatcaggtgagcagcgtctcggctgctgcctgcccacgcctgcctccgcggcttcgtcggccgtcgaccgagcagccgagcagcggcgcggcggct

SEQ ID NO: 343903 - DNA, 362 bp, Zea mays
  unsure (1)..(362): unsure at all n locations
gactgcgtgggcggacgcgtgggtgggtncttcagacccattnagctttatctanctccagagcgcagnaagaaccccgatcgacacctatgagggtgtntgctcgttgccctcgctctcctggctctcgctgcgagcgccacctccacgcatacaagcggcggctgcggctgccagccaccgccgccggttcatctaccgccgccggtgcatctgccacctccggttcacctgccacctccggtgcatctcccaccgccggtccacctgccgccgccggtccacctgccaccgccggtccatgtgccgccgccggttcatctgccgccgccaccatgccactaccctactcaaccgccccg

SEQ ID NO: 343904 - DNA, 381 bp, Zea mays
gcaacatagaaagcacaatagtgttccatcaatggcagccaaaatattttgcctccttatgctccttggtctttctgcaagtgctgctacggcgaccattttcccacaatgctcacaagctcctatagcttcccttcttcccccgtacctctcaccagcggtgtcttcggtatgtgaaaacccaattcttcaaccctataggatccaacaggcaatcgcagctggcatcttacctttatcacccttgttcctccaacaatcatcagccctattacagcagttacctttggtgcatttattggcacaaaacatcagggcacaacaactacaacaacttgtgctagcaaaccttgctgcctactctcagcaacaacagtttct

SEQ ID NO: 343905 - DNA, 393 bp, Zea mays
  unsure (1)..(393): unsure at all n locations
aaaaaananccgggcgacccacgcgtccgtaactagcaacatttaaagctcaattgtgnaccaacaatggcagccaaaatagggggctttcttatgctccttggtctttctgcaagtgttgctaccgcaaccattttcccacaatgctcacaagctcctatagcttcccttcttcccccatacctctcaccagcggtgtcttcaatgtgtgaaaacccaattgttcaaccctacaggatccaacaggcaatcgcaacaggcatcttaccattatcacccttgttcctacaacaaccgtcagccctattacagcagttacctttggtccatttggtggcacaaaacatcacggcacaacaactacaacaacttgtgctagcaaaccttgctgca

SEQ ID NO: 343906 - DNA, 376 bp, Zea mays
accaacaagcaacatagaaagtggtttttagtagcaacaatagagcaacaatggagaccaagatattttccctccttatgctccttgctctttctacatgtgttgctaacgcgacaattttccctcaatgctcacaagctcctatagcttccctttttcccccataccttccatcaattatagcttcagtatgtgaaaacccagctcttcaaccatataggcttcaacaagcaatcgcagcaagcaacatacctttatcgcccttgttgtgtcaacaatcgccagccctatctttggtgcagtcattggtacaaaccatcagggcacaacagctgcagcaactcgtgctacctgtgatcaaccaagtagctctggc

SEQ ID NO: 343907 - DNA, 174 bp, Zea mays
agagccatcgcagctttacggtatacataacctcaacccatatgcttagaacagcatctggcattgattcaagaatggccacaactacaacacgtgtccaactaataagtgtgcgaaccttgtgttacctcgaacaacagttttcattcaataactagatgggggaccctgttt

SEQ ID NO: 343908 - DNA, 374 bp, Zea mays
cggacgcgtgggcagaaacatacttagcgaagcgcactagcaacaacctaacaacaatggctaccaagatattatccctccttgcgcttcttgcgctttttgcgagcgcaacaaatgcgtccattattccacaatgctcacttgctcctagttccattattccacagttcctcccaccagttacttcaatggccttcgaacacccagctgtgcaagcctataggctacaacaagcgattgcggcgagcgtcttacaacaaccaattgcccaattgcaacaacaatccttggcacatctaacaatacaaaccatcgcaacgcaacagcaacaacagttcctaccagcactgagccacctagccatggtgaaccct

SEQ ID NO: 343909 - DNA, 375 bp, Zea mays
  unsure (1)..(375): unsure at all n locations
gagaccaactagctacatagaatgtacaatagcgnaccaacaatggcagccaaaatattttgcctccttatgctccttggtctttctgcaagtgctgctacggcgaccattttcccgcaatgctcgcaagctcctatagcttcccttcttcccccgtacctctcaccagcggtgtcttcggtatgtgaaaacccaattcttcaaccctacaggatccaacaggcaatcgcagctggcatcttacctttatcacccttgttcctccaacaatcatcagccctattacaacagttacctttggtgcatttattggcacaaaacattagggcacaacaactacaacaacttgtgctagcaaaccttgctgcctactct

SEQ ID NO: 343910 - DNA, 373 bp, Zea mays
  unsure (1)..(373): unsure at all n locations
tggcaccnnnctcttacccaactgnncaacaatgtgcgttgcctattcaaaaccaacttnngctttgacaannnacccagcanngcgttctatccaaccnnatcccatcattngnngtggtgccncnntcttttnnagatttnncttatcgacgttatangnnttcaataannntaaacgttttttcggtctcggatcgttnnaaaanannaaaaaaaannnaaaaaaaaaaaaggggccggcccgcttctttagaggatctcannagcttatcgtacccgcgntgtcatgcganncgtctatagcttctttcttatttagtgtnncacctaaatnnntcaattcactcggcccccgtcgttttacaaaacgt

SEQ ID NO: 343911 - DNA, 371 bp, Zea mays
cagcattcagaaacacaccaagcgaagcgcactagcaacaacctaacaacaatggctaccaagatattagccctccttgcgcttcttgcccttttagtgagcgcaacaaatgcgttcattattccacagtgctcacttgctcctagtgccattattccacagttcctcccaccagttacttcaatgggcttcgaacatccagccgtgcaagcctacaggctacaactagcgcttgcggcgagcgtcttacaacaaccaattgcccaattgcaacaacaatccttggcacatctaaacctacaaaccatcgcaacgcaacagcaacaacagtttctgccatcactgagccacctagccgtggtgaaccctgt

SEQ ID NO: 343912 - DNA, 376 bp, Zea mays
gtgaaaacccaattgttcaaccctacaggatccaacaggcaatcgcaacaggcatcttaccattatcacccttgttcctccaacaaccgtcagccctattacagcagttacctttggtccatttggtggcacaaaacatcagggcacaacaactacaacaacttgtgctagcaaaccttgctgcatactctcagcaacatcagtttcttccattcaaccaactggctgcattgaactctgctgcttatttgcaacaacaattaccattcagccagctagttgctgcctacccccagcaatttcttccattcaaccaactagcagcattgaactctgctgcttatttacagcagcaacaactactaccattcagcca

SEQ ID NO: 343913 - DNA, 376 bp, Zea mays
gcaaagcggcagtgcgtagagaggatcgttgaacagaacagcatgaagatggtcatcgttctcgtcgtgtgcctggctctgtcagctgccagcgcctctgcaatgcagatgccctgcccctgcgcggggctgcagggcttgtacggcgctggcgccggcctgacgacgatgatgggcgccggcgggctgtacccctacgcggagtacctgaggcagccgcagtgcagcccgctggcggcggcgccctactacgccgggtgtgggcagacgagcgccatgtaccagccgctccggcaacagtgctgccagcagcagatgaggatgatggacgtgcagtccgtcgcgcagcagctgcagatgatgatgcagcttgagc

SEQ ID NO: 343914 - DNA, 385 bp, Zea mays
gagcattcagaaacacaccaagctttcgcactagcaacgacctaacaacaatggctaccaagatattagccctccttgcgcttcttgccctttttgtgagcgcaacaaatgcgttcattattccacaatgctcacttgctcctagtgccattattccacagttcctcccaccagttacttcaatgggcttcgaacacctagctgtgcaagccaacatgcaacaacaagcgcttgcggcgagcgtcttacaacaaccaattgcccaattgcaacaacaatccttgccacatctaacaatacaagccatcacaacgcaacagcaacaacagttcctaccagcactgagccacctagccatggtgaaccctgccgcctacttgcaaga

SEQ ID NO: 343915 - DNA, 368 bp, Zea mays
gcaacatagaaagtggaatctagtttcaacaatagagcaacaatggagaccaagatattttccctccttatgctccttgctctttctacatgtgttgctaacgcgacaattttccctcaatgctcacaagctcctatagcttccctttttcccccataccttccatcaattatagcttcagtatgtgaaaacccagctcttcaaccatataggcttcaacaagcaatcgcagcaagcaacatacctttatcgcccttgttgtgtcaacaatcgccagccctatctttggtgcagtcattggtacaaaccatcagggcacaacagctgcagcaactcgggctacctgtgatcaaccaagtagctttggc

SEQ ID NO: 343916 - DNA, 90 bp, Zea mays
gggtctacagaccattagctttatttactccagagcgcagaagaacccgagcgacactatgagggtgttgtttgtcacccttcttcttct

SEQ ID NO: 343917 - DNA, 369 bp, Zea mays
agcattcagaaacacaccaagcgaatctacctagcaacgacttaacaacaatggctaccaagatattagccctccttgcgcttcttgccctttttgtgagcgcaacaaatgcgttcattattccacaatgctcacttgctcctagtgccattataccacagttcctccgaccagttacttcaatgggcttcgaacacctagctgtgcaagcctacaggctacaacaagcgcttgcggcgagcgtcttacaacaaccaattaaccaattgcaacaacaatccttggcacatctaaccatacaaaccatcgcaacacaacagcaacaacagttcctaccagcactgagccaactagatgtggtgaaccctg

SEQ ID NO: 343918 - DNA, 375 bp, Zea mays
attgagaccaactagcaacatttttagcacaatagtgtaccaacaatggcagccaaaatattttgcctccttatgctccttggtctttctgcaagtgctgctacggcgaccattttcccgcaatgctcgcaagctcctatagcttcccttcttcccccgtacctctcaccagcggtgtcttcggtatgtgaaaacccaattcttcaaccctacaggatccaacaggcaatcgcagctggcatcttacctttatcacccttgttcctccaacaatcatcagccctattacaacagttacctttggtgcatttattggcacaaaacattaaggcacaacaactacaacaacttgtgctagcaaaccttgctgcctac

SEQ ID NO: 343919 - DNA, 374 bp, Zea mays
caacaatggcagccaaaatattttgcctccttatgctccttggtctttctgcaagtgctgctacggcgaccattttcccacaatgctcacaagctcctatagcttcccttcttcccccgtacctctcaccagcggtgtcttcggtatgtgaaaacccaattcttcaaccctataggatccaacaggcaatcgcagctggcatcttacctttatcacccttgttcctccaacaatcatcagccctattacagcagttacctttggtgcatttattggcacaaaacatcagggcacaacaactacaacaacttgtgctagcaaaccttgctgcctactctcagcaacaaccagttcttccattcaaccaactagct

SEQ ID NO: 343920 - DNA, 374 bp, Zea mays
gtggaatccagtagcaacaatagatcaacaatggcgaccaagatattttccctccttatgctccttgctctttctgcatgtgttgctaacgcgacaattttccctcaatgctcacaagctcctatagcttcccttcttcccccataccttccatcaatgatagcttcagtatgtgaaaacccagctcttcaaccctataggctccaacaagcaatcgcagcaagcaacatacctttatcacccttgtttcaacaatcgccagccctatctttggtgcagtcattggtacaaaccatcagggcacagcagctgcagcaactcgtgctacctgtgatcaaccaagtagctctggcaaacctttctccctactctca

SEQ ID NO: 343921 - DNA, 386 bp, Zea mays
caccaagcgaagcgcactagcaacaacctaacaacaatggctaccaagatattatccctccttgcgcttcttgcgctttttgcgagcgcaacaaatgcgtccattattccacaatgctcacttgctcctagttccattattccacagttcctcccaccagttacttcaatggccttcgaacacccagctgtgcaagcctataggctacaacaagcgattgcggcgagcgtcttacaacaaccaattgcccaattgcaacaacaatccttggcacatctaacaatacaaaccatcgcaacgcaacagcaacaacagttcctaccagcactgagccacctagccatggtgaaccctgtcgcctacttgcaacagcagctgcttgcatt

SEQ ID NO: 343922 - DNA, 378 bp, Zea mays
gctcctatagctgcccttcttcctttatttcttccatcaatgaccgcttcagtatgtgaaaacccagcccttcaaccctacaggctccaacaagcaatcgcaacaagcaacttacctttatcacccctgttctttcaacaatcgccagccctatctttggtgcagtcattggtacaaaccatcagggcacaacagctgcagcaactcgtgctaccagtgatcagccaagtagctctggcaaacctttctccctactctcagcaacaacaatttcttccattcaaccaactgtctacactgaaccctgctgcttatttgcagcaacaacaactactaccattcagccagctagctactgcctactctcagcagcaacaa

SEQ ID NO: 343923 - DNA, 304 bp, Zea mays
  unsure (1)..(304): unsure at all n locations
anncagaaacacaccaagcgttttctctctagcaacaacctaacaacaatggctgccaagatattagccctccttgcgctttttgcccttttagtgagcgcaacaaatgcgttcattattccacagtgctcacttgctcctagtgccattattccacagttcctcccaccagttacttcaatgggcttcgaacattcagccgtgcaagcctacatgctacaactagcgcttgcggtgagcgtcttacaacaaccaattgcccaattgcaacaacaattcttggcacatctaaacctacaaacca

SEQ ID NO: 343924 - DNA, 395 bp, Zea mays
  unsure (1)..(395): unsure at all n locations
ggaaggaanggcccgacccacgcgtgcggaccaacaaggaacataaaaagggggattcaatagcaacaatagagcaacaatggcgaccaagatattttccctccttatgctccttgctctttctgcatggggttgctaacgcgacaattttccctcaatgctcacaagctcctatagcttcccttcttcccccataccttccatcaatgatagcttcagtttgtgaaaacccagctcttcaaccctataggctccaacaagcaatcgcagcaggcaacatacctttatcacccttgtttcaacaatcgccagccatatcttgggtgcagtcattggcacaaaccatcagggcacagcagttgcagcaactcgtgctacctgtgaacaaccaagta

SEQ ID NO: 343925 - DNA, 373 bp, Zea mays
accaccaccactggacgtcagcctatcatttagctcatcgactccagattggagaactcgacaccatgaaggtgctgatcgttgcccttgctctcctggcgctcgctgcgagcgccgcctccagtacaagcggcggctgtggctgccagacaccaccgtttcatctaccgcctccgttctatatgccgcctccgttctatctgccgccgcagcagcagccgcagccatggcaataccccactcaaccaccgcagctaagcccgtgccagcagttcggatcctgcggcgtcggcagcgtcggcagcccgttcctgggccagtgcgtcgagttcctgaggcaccagtgcagcccggcggcgacgccctacggctc

SEQ ID NO: 343926 - DNA, 384 bp, Zea mays
gaaagtggaatacagtagcaacaattgagtaacaatggcggccaagatattttccatccttatgctccttgctctttctgcatgtgttgctaacgcgaccatttttcctcaatactcacaagctcctatagctgcccttcttcccccataccttccatcaatgaccgcttcagtatgtgaaaacccagcccttcaaccctacaggctccaacaagcaatcgcaacaagcaacttacctttatcacccctgttctttcaacaatcgccagccctatctttggtgcagtcattggtacaaaccatcagggcacaacagctgcagcaactcgtgctaccagtgatcagccaagtagctctggcaaacctttctccctactctcagca

SEQ ID NO: 343927 - DNA, 374 bp, Zea mays
caacaagcaacatagaaagtggaatccagtagcaacaatagagcaacaatggcgaccaagatattttccctccttatgctccttgctctttctgcatgtgttgctaacgcgacaattttccctcaatgctcacaagctcctatagcttcccttcttcccccataccttccatcaatgatagcttcagtatgtgaaaacccagctcttcaaccctataggctccaacaagcaatcgcagcaagcaacatacctttatcacccttgtttcaacaatcgccagccctatctttggtgcagtcattggtacaaaccatcagggcacagcagctgcagcaactcgtgctacctgtgatcaaccaagtagctctggcaaa

SEQ ID NO: 343928 - DNA, 375 bp, Zea mays
gaccaacaagcaacatagaaagtggtaatacagtagcaacaatagagcaacaatggcggccaagatattttccatccttatgctccttgctctttctgcatgtgttgctaacgcgaccatttttcctcaatactcacaagctcctatagctgcccttcttcccccataccttccatcaatgaccgcttcagtatgtgaaaacccagcccttcaaccctacaggctccaacaagcaatcgcaacaagcaacttacctttatcacccctgttctttcaacaatcgccagccctatctttggtgcagtcattggtacaaaccatcagggcacaacagctgcagcaactcgtgctaccagtgatcagccaagtagctct

SEQ ID NO: 343929 - DNA, 379 bp, Zea mays
catccacaacaacatcatccacatttacaacaacatcaaccaccaccacaacatgaccagcagcagcaacaccaacaacaacaagttcacatgcaaccacaaaaacatcagcaacaacaagaagttcatgttcaacaacaacaacaacaaccgcagcaccaacaacaacaacaacaacagcaccaacaacaacatcaatgtgaaggccaacaacaacatcaccaacaatcacaaggccatgtgcaacaacacgaacagagccatgagcaacaccaaggacagagccatgagcaacaacatcaacaacaatttcagggtcatgacaagcagcaacaaccacaacagcctcagcaatatcagcagggccaggaaaaatcac

SEQ ID NO: 343930 - DNA, 340 bp, Zea mays
gagcaacaaaggagaccaagagggggggggtccttatgctccttgctctttctacatgtgttgttaacgcgacaattttccctcaatgctcacaagctcctatagcttccctttttcccccataccttccatcaattatagcttcagtatgtgaaaacccagctcttcaaccatataggcttcaacaagcaatcgcagcaagcaacatacctttatcgcccttgttgtgtcaacaatcgccagccctatctttggtgcagtcattggtacaaaccatcagggcacaacagctgcagcaactcgtgctacctgtgatcaaccaagtagcttctggctaacc

SEQ ID NO: 343931 - DNA, 331 bp, Zea mays
ggaatccagtagcaacaatagatttacaatggcgaccaagatattttccctccttatgctccttgctctttctgcatgtgttgctaacgcgacaattttccctcaatgctcacaagctcctatagcttcccttcttcccccataccttccatcaatgatagcttcagtatgtgaaaacccagctcttcaaccctataggctccaacaagcaatcgcagcaagcaacatacctttatcacccttgtttcaacaatcgccagccctatctttggtgcagtcattggtacaaaccatcagggcacagcagctgcagcaactcgtgctacctgtg

SEQ ID NO: 343932 - DNA, 293 bp, Zea mays
aaatactactaccatttagccagctagctacagcaagccgtgcttccttcttgacacaacaacagttgctgccgttctaccagcagtttgcggctaaccccgcaaccctcttacaactacaacaattgttgccctttgtccaacttgctttgacaaacccagcagcctcctaccaacaacacatcattggtggtgccctcttttagattgcttattagatgtaattcaataataaagttttttggatgatgtatgtggccaaccagaaataaaaagttacatttccagattct

SEQ ID NO: 343933 - DNA, 378 bp, Zea mays
cccacgcgtccgattttgagcattcagaaacacaccaagcgaagcgcactagcaacaacctaacaacaatggctaccaagatattatccctccttgcgcttcttgcgctttttgcgagcgcaacaaatgcgtccattattccacaatgctcacttgctcctagttccattattccacagttcctcccaccagttacttcaatggccttcgaacacccagctgtgcaagcctataggctacaacaagcgattgcggcgagcgtcttacaacaaccaattgcccaattgcaacaacaatccttggcacatctaacaatacaaaccatcgcaacgcaacagcaacaacagttcctaccagcactgagccacctagccatgg

SEQ ID NO: 343934 - DNA, 371 bp, Zea mays
cagaaacacaccaagcgaagcacattagctacaacctaacaacaatggctaccaagatattatccctccttgcgcttcttgcgctttttgcgagcgcaacaaatgcgttcattattccacaatgctcacttgctccaagttccattattacacagttcctcccaccagttacttcaatgggcttcgaacacccagctgtgcaagcctataggctacaacaagcaattgcggcgagcgtcttacaacaaccaatttcccagttgcaacaacaatccttggcacatctaacaatacaaaccatcgcaacgcaacagcaacaacaattcctaccagcactgagccacctagccatggtgaaccctgccgcctac

SEQ ID NO: 343935 - DNA, 376 bp, Zea mays
gcgaagcgcactagcaacaacctaacaacaatggctaccaagatattagccctccttgcgcttcttgcccttttagtgagcgcaacaaatgcgttcattattccacagtgctcacttgctcctagtgccattattccacagttcctcccaccagttacttcaatgggcttcgaacatccagccgtgcaagcctacaggctacaactagcgcttgcggcgagcgtcttacaacaaccaattgcccaattgcaacaacaatccttggcacatctaaacctacaaaccatcgcaacgcaacagcaacaacagtttctgccatcactgagccacctagccgtggtgaaccctgtcgcctacttgcaacagcagctacttg

SEQ ID NO: 343936 - DNA, 361 bp, Zea mays
gtgcatctcccaccgccggtccacctgccgccgccggtccacctgccaccgccggtccatgtgccgccgccggttcatctgccgccgccaccatgccactaccctactcaaccgccccggcctcagcctcatccccagccacacccatgcccgtgccaacagccgcatccaagcccgtgccagctgcagggaacctgcggcgttggcagcaccccgatcctgggccagtgcgtcgagttcctgaggcatcagtgcagcccgacggcgacgccctactgctcgcctcagtgccagtcgttgcggcagcagtgttgccagcagctcaagcaggtggagccgcaacaccggtaccaggcgatct

SEQ ID NO: 343937 - DNA, 372 bp, Zea mays
ctcatcgactccagattggagaactcgacaccatgaaggtgctgatcgttgcccttgctctcctggcgctcgctgcgagcgccgcctccagtacaagcggcggctgtggctgccagacaccaccgtttcatctaccgcctccgttctatatgccgcctccgttctatctgccgccgcagcagcagccgcagccatggcaataccccactcaaccaccgcagctaagcccgtgccagcagttcggatcctgcggcgtcggcagcgtcggcagcccgttcctgggccagtgcgtcgagttcctgaggcaccagtgcagcccggcggcgacgccctacggctcgccacagtgccaggcgctgcagcagcagtgct

SEQ ID NO: 343938 - DNA, 109 bp, Zea mays
attttcagcattcagaaacacaccaagcgaagcgaattacaacaaccttacaacaatgggtaccaagatattagcccttcttgcgcttttggccttttagagagcgcaa

SEQ ID NO: 343939 - DNA, 377 bp, Zea mays
aagcacaatagtgtaccaacaatggcagccaaaatattttgcctccttatgctccttggtatttctgcaagtgctgctacggcgaccattttcccgcaatgctcacaagctcctatagcttcccttcttcccccgtacctctcaccagcggtgtcttcggtatgtgaaaacccaattcttcaaccctacaggatccaacaggcaatcgcagctggcatcttacctttatcacccttgttcctccaacaatcatcagccctattacagcagttacctttggtgcatttattggcacaaaacatcagggcacaacaactacaacaacttgtgctagcaaaccttgctgcctactctcagcaacagcagtttcttccatt

SEQ ID NO: 343940 - DNA, 368 bp, Zea mays
tggacgtcagcctagcaattagctcatcgactccagattggagaactcgacaccatgaaggtgctgatcgttgcccttgctctcctggcgctcgctgcgagcgccgcctccagtacaagcggcggctgtggctgccagacaccaccgtttcatctaccgcctccgttctatatgccgcctccgttctatctgccgccgcagcagcagccgcagccatggcaataccccactcaaccaccgcagctaagcccgtgccagcagttcggatcctgcggcgtcggcagcgtcggcagcccgttcctgggccagtgcgtcgagttcctgaggcaccagtgcagcccggcggcgacgccctacggctcgccaca

SEQ ID NO: 343941 - DNA, 158 bp, Zea mays
  unsure (1)..(158): unsure at all n locations
gttctagatcgcgagggcggccgcctttttttttttttttttnttattttttttggggggtttttttcttaaacaactggaacagttgctgcccttagtccaacttgttttgacaaacccagtagttttttaccaacaacacatcattgggggcatct

SEQ ID NO: 343942 - DNA, 338 bp, Zea mays
attgagaccaacaggcaacatagaaagtggaatccagtagcaacaatagagcaacaatggagaccaagatattttccctccttatgctccttgctctttctacatgtgttgctaacgcgacaattttccctcaatgctcacaagctcctatagccttcctttttcccccataccttccataaattatagcttcagtattgtgaaaaccagctcttcaaccatataggcttcaacaagcaaatgcagcaagcaccatacctttatcgcccttgttgtgtcaacaatcgccagccctatctttggtgcagtcattggtacaaaccatcagggcacaacag

SEQ ID NO: 343943 - DNA, 362 bp, Zea mays
caatccagatcagcaaagcgtgtctagttcgtagagaggatcgtcgaacagaacagcatgaagatggtcatcgttctcgtcgtgtgcctggctctgtcagctgccagcgcctctgcaatgcagatgccctgcccctgcgcggggctgcagggcttgtacggcgctggcgccggcctgacgacgatgatgggcgccggcgggctgtacccctacgcggagtacctgaggcagccgcagtgcagcccgctggcggcggagccctactacgccgggtgtgggcagacgagcgccatgtaccagccgttccggcaacagtgctgccagcagctgatgaggatgatggacgtgcagtcctacgcgca

SEQ ID NO: 343944 - DNA, 371 bp, Zea mays
caacaagcaacatagaaagtggaatccagtagcaacaatagagcaacaatggcgaccaagatattttccctccttatgctccttgctctttctgcatgtgttgctaacgcgacaattttccctcaatgctcacaagctcctatagcttcccttcttcccccataccttccatcaatgatagcttcagtatgtgaaaacccagctcttcaaccctataggctccaacaagcaatcgcagcaagcaacatacctttatcacccttgtttcaacaatcgccagccctatctttggtgcagtcattggtacaaaccatcagggcacagcagctgcagcaactcgtgctacctgtgatcaaccaagtagctctggc

SEQ ID NO: 343945 - DNA, 159 bp, Zea mays
ataaatacatgccactcacatggttctcctccatcttccaagtcaccaacgcggattgcaccaagaaatccatcgagaggccgtcgacaggggaattaatggcgtcgtcgtctagcagcagccaccgccgccttatcctcgcagccgccgccctgtttt

SEQ ID NO: 343946 - DNA, 375 bp, Zea mays
ctccagattggagaactcgacaccatgaaggtgctgatcgttgcccttgctctcctggcgctcgctgcgagcgccgcctccagtacaagcggcggctgtggctgccagacaccaccgtttcatctaccgcctccgttctatatgccgcctccgttctatctgccgccgcagcagcagccgcagccatggcaataccccactcaaccaccgcagctaagcccgtgccagcagttcggatcctgcggcgtcggcagcgtcggcagcccgttcctgggccagtgcgtcgagttcctgaggcaccagtgcagcccggcggcgacgccctacggctcgccacagtgccaggcgctgcagcagcagtgctgccaccagatc

SEQ ID NO: 343947 - DNA, 114 bp, Zea mays
acaccaagcgaagcgcactagcaacaacctaacaacaatggctaccaagatattagccctccttgcgcttcttgcccttttagtgagcgcaacaaatgcgttcattatttccac

SEQ ID NO: 343948 - DNA, 134 bp, Zea mays
gcacaatagtgtaccaacaatggcttccataaaattttgcctccttatgctcctgggtctttctgcaagtgctgctacggcgaccattttcccgaaatgctcgcaagctcctataagcttccccttttcccccc

SEQ ID NO: 343949 - DNA, 126 bp, Zea mays
cagcgttctaccaacaacccatcattggtggtgccctcttttagatttcttatgagttatagttcaataataaagttttttgtctgatgtttgtggcttcccagaaataagaaagtacatttctag

SEQ ID NO: 343950 - DNA, 376 bp, Zea mays
caactagcaacatataaagcacaattttgtaccaacaatggcagccaaaatattttgcttccttatgctccttggtctttctgcaagtgttgctaccgcaaccattttcccacaatgctcacaagctcctatagcttcccttcttcccccatacctctcaccagcggtgtcttcaatgtgtgaaaacccaattgttcaaccctacaggatccaacaggcaatcgcaacaggcatcttaccattatcacccttgttcctccaacaaccgtcagccctattacagcagttacctttggtccatttggtggcacaaaacatcagggcacaacaactacaacaacttgtgctagcaaaccttgctgcatactctcagcaa

SEQ ID NO: 343951 - DNA, 373 bp, Zea mays
caacaacttgtgctagcaaaccttgctgcatactctcagcaacatcagtttcttccattcaaccaactggctgcattgaactctgctgcttatttgcaacaacaattaccattcagccagctagttgctgcctacccccagcaatttcttccattcaaccaactagcagcattgaactctgctgcttatttacagcagcaacaactactaccattcagccagctagctgatgtgagccctgctgccttcttgacacaacaacagttgttgccgttctacctgcacgctatgcctaacgctggcaccctcttacaactgcaacaattgctgccattcaaccaacttgctttgacaaactcaacagtgttctacc

SEQ ID NO: 343952 - DNA, 170 bp, Zea mays
gcaattagctcatcgactccagattggagaactcgacaccatgaaggtgctgatcgttgcccttgctctcctggcgctcgctgcgagcgccgcctccagtacaagcggcggctgtggctgccagacaccaccgtttcatctaccgcctccgttctatatgccggcttcgg

SEQ ID NO: 343953 - DNA, 352 bp, Zea mays
gcacaatagtgtaccaacaatggcagcctaaatattttgcctccttatgctccttggtctttctgcaagtgctgctacggcgaccattttcccacaatgctcacaagctcctatagcttcccttcttcccccgtacctctcaccagcggtgtcttcggtatgtaaaaacccaattcttcaaccctataggatccaacaggcaatcgcagctggcattttacctttatcacccttgttcctccaacaatcatcagccctattacagcagttacctttggtgcattaattggcacaaaacattagggcccaacaactacaacaacttgggctagcaaaccttgttgcctacttt

SEQ ID NO: 343954 - DNA, 371 bp, Zea mays
attcagaaacacaccaagcgaagctcactatcaacaacctaacaacaatggctgcgcaagatattagccctccttgcgcttcttgcccttttagtgagcgcaacaaatgcgttcattattccacagtgctcacttgctcctagtgccattattccacagttcctcccaccagttacttcaatgggctttgaacattcaagccgggcaggcttccaggttccaactagcgctggcggagagcgtcttacaacaaccaattgcccaattgcaacaacaatccttggcacatctaaacctacaaaccatcgcaacgcaacagcaacaacagtttctgccatcactgagccacctagccgtggtgaaccctgtcg

SEQ ID NO: 343955 - DNA, 371 bp, Zea mays
agaccattagctttatctactccagtagcgcagaagaacccgatcgacaccatgggggtgttgctcgttgccctcgctctcctggctctcgctgcgagcgccacctccacgcatacaagcggcggctgcggctgccagccaccgccgccggttcatctaccgccgccggtgcatctgccacctccggttcacctgccacctccggtgcatctcccaccgccggtccacctgccgccgccggtccacctgccaccgccggtccatgtgccgccgccggttcatctgccgccgccaccatgccactaccctactcaaccgccccggcctcagcctcatccccagccacacccatgcccgtgccaacagccgca

SEQ ID NO: 343956 - DNA, 356 bp, Zea mays
gaccaactagcaacataaaattactatagtgtaccaacaatggcagccaggagaggtttgtctccttatgctccttggtctttctgcaagtgctgctacggcgaccattttcccgcaatgctcgcaagctcctatagcttcccttcttcccccgtacctctcaccagcggtgtcttcggtatgtgaaaacccaattcttcaaccctacaggatccaacaggcaatcgcagctggcatcttacctttatcacccttgttcctccaacaatcatcagccctattacaacagttacctttggtgcatttattggcacaaaacatcatggcacaacaactacaacaacttgtgctagcaa

SEQ ID NO: 343957 - DNA, 365 bp, Zea mays
attttgagcattcagaaacacaccaagcgaagcgcactagcaacaacctaacaacaatggctaccaagatattatccctccttgcgcttcttgcgctttttgcgagcgcaacaaatgcgtccattattccacaatgctcacttgctcctagttccattattccacagttcctcccaccagttacttcaatggccttcgaacacccagctgtgcaagcctataggctacaacaagcgattgcggcgagcgtcttacaacaaccaattgcccaattgcaacaacaatccttggcacatctaacaatacaaaccatcgcaacgcaacagcaacaacagttcctaccagcactgagccacctagccatg

SEQ ID NO: 343958 - DNA, 369 bp, Zea mays
aacacaccgagcgaagcgctctatctactacctaacaccaagggctaccaagatattagccctccttgcgcttctggcccttttagagagcgcaacaaatgcgcacattattccacagggctcacttgctcctagtgccattattccacagttcctcccaccagttacgttaatgggctttgaacatacagccgtgcaagcctacaggctacaactagcgcttgcggcgagcgtcttactacaaccaattgcccaattgcaacaacaatccttggcacatctaaacctacaaaccatcccaacgcatcagcaacaacagtttgtgccatcactgagccacctagccgtggtgaaccctgtcggctactt

SEQ ID NO: 343959 - DNA, 369 bp, Zea mays
gcaacatagaaagtggaatccagtatcaactatagagcaacaatggagaccaagatattgtccctccttatgctccttgctctttctacatgtgttgctaacgcgacaattttccctcaatgctcacaagctcctatagcttcccttttttcccccataccttccatcaattatagcttcagtatgtgaaaacccagctcttcaaccatataggcttcaacaagcaatcgcagcaagcaacatacctttatcgcccttgttgtgtcaacaatcgccagccctatctttggtgcagtcattggtacaaaccatcagggcacaacagctgcagcaactcgtgctacctgtgatcaaccaagtagctctggc

SEQ ID NO: 343960 - DNA, 389 bp, Zea mays
  unsure (1)..(389): unsure at all n locations
acccacgcgtnccgagcgaagcacattagccaacaaccctaacaacaatggnctaccaagatattattccctccttgcgcttcttgcgctttttgcgagcgcaacaaatgcgttcattattccacaatgctcacttgctccaagttccattattacacagttcctcccaccagttacttcaatgggcttcgaacacccagctgtgcaagcctataggctacaacaagcaattgcggcgagcgtcttacaacaaccaatttcccagttgcaacaacaatccttggcacatctaacaatacaaaccatcgcaacgcaacagcaacaacaattcctaccagcactgagccacctagccatggtgaaccctgccgcctacttgcaacagcagt

SEQ ID NO: 343961 - DNA, 298 bp, Zea mays
  unsure (1)..(298): unsure at all n locations
tccttatgctcacttggtcctttctgcaagtggctgcttaccgcaacccattttcccacaatggctcacaagnctcctatnagcttcctttcttcccccatacctctcaccagcggtgtcttcagtatgtgaaaacccaattcttcaaccctacaggatccaacaggcaatcgcagcaggcatcttacctttatcacccttgttcctacaacaaccgtgagccctattacagcagttacctttggtgcatttgttggcacaaaacatcaaggcacaacaactacaacaacttgtgcta

SEQ ID NO: 343962 - DNA, 371 bp, Zea mays
tcggtggcacaaaacatcagggctcaactctacaacaacttgtgctagcaaaccttgctgcatactctcagcaacatcagtttcttccattcaaccaactggctgcattgaactctgctgcttatttgcaacaacaattaccattcagccagctagttgctgcctacccccagcaatttcttccattcaaccaactagcagcattgaactctgctgcttatttacagcagcaacaactactaccattcagccagctagctgatgtgagccctgctgccttcttgacacaacaacagttgttgccgttctacctgcacgctatgcctaacgctggcaccctcttacaactgcaacaattgctgccattcaac

SEQ ID NO: 343963 - DNA, 369 bp, Zea mays
tagcaattagctcatcgacttcagattggagaactcgacaccatgaaggtgctgatcgttgcccttgctctcctggcgctcgctgcgagcgccgcctccagtacaagcggcggctgtggctgccagacaccaccgtttcatctaccgcctccgttctatatgccgcctccgttctatctgccgccgcagcagcagccgcagccatggcaataccccactcaaccaccgcagctaagcccgtgccagcagttcggatcctgcggcgtcggcagcgtcggcagcccgttcctgggccagtgcgtcgagttcctgaggcaccagtgcagcccggcggcgacgccctacggctcgccacagtgccaggcgctg

SEQ ID NO: 343964 - DNA, 239 bp, Zea mays
aacagttgctgcctttctaccagcagtttgcggctaaccccgcaaccctcttacaactacaacaattgttgccctttgtccaacttgctttgacaaacccagcagcctcctaccaacaacacatcattggtggtgccctcttttagattgcttattagttgtaattcaataataaagttttttggatgatgtatgtggccaaccagaaataagaagttacatttccagattctaatgtg

SEQ ID NO: 343965 - DNA, 368 bp, Zea mays
aaagcggcagtgcgtagagaggatcgtcgaacagaacagcatgaagatggtcatcgttctcgtcgtgtgcctggctctgtcagctgccagcgcctctgcaatgcagatgccctgcccctgcgcggggctgcagggcttgtacggcgctggcgccggcctgacgacgatgatgggcgccggcgggctgtacccctacgcggagtacctgaggcagccgcagtgcagcccgctggcggcggcgccctactacgccgggtgtgggcagacgagcgccatgtaccagccgctccggcaacagtgctgccagcagcagatgaggatgatggacgtgcagtccgtcgcgcagcagctgcagatgatgatgcagc

SEQ ID NO: 343966 - DNA, 371 bp, Zea mays
attttcagcattcataaacacaccattcgaagcgcactagcaacaacctaacagcggtggctaccaagatattagccctccttgcgcttcttgcccttttagtgagcgcaacaaatgcgttcattattccacagtgctcacttgctcctagtgccattattccacagttcctcccaccagttacttcaatgggcttcgaacatccagccgtgcaagcctacaggctacaactagcgcttgcggcgagcgtcttacaacaaccaattgcccaattgcaacaacaatccttggcacatctaaacctacaaaccatcgcaacgcaacagcaacaacagtttctgccatcactgagccacctagccgtggtgaac

SEQ ID NO: 343967 - DNA, 371 bp, Zea mays
cagaccattagctttatctactccagagcgcagaagaacccgatcgacaccatgagggtgttgctcgttgccctcgctctcctggctctcgctgcgagcgccacctccacgcatacaagcggcggctgcggctgccagccaccgccgccggttcatctaccgccgccggtgcatctgccacctccggttcacctgccacctccggtgcatctcccaccgccggtccacctgccgccgccggtccacctgccaccgccggtccatgtgccgccgccggttcatctgccgccgccaccatgccactaccctactcaaccgccccggcctcagcctcatccccagccacacccatgcccgtgccaacagccgca

SEQ ID NO: 343968 - DNA, 372 bp, Zea mays
gttgctgagagtaggcagcaacagcagtttcttccattcaaccaactagctgcattgaactctgcttcttatttgcaacaacaacaactaccattcagccagctacctgttgcctacccccagcaatttcttccattcaaccaactggcagcattgaactctcctgcttatttacagcagcaacaactactaccattcagccagctagctggtgtgagccctgctaccttcttgacacaaccacagttgttgccgttctaccagcacgctgcgcctaacgctggcaccctcttacaactgcaacaattgctgccattcaaccaacttgctttgacaaacctagcagtgttctaccaacaacccatcattggt

SEQ ID NO: 343969 - DNA, 165 bp, Zea mays
cgagctgcctcccttttttttttttgaaggcggggggggggccaaatactttattatgatgcatatattattggtcataccacacatgataatgtgtgtcgttttactgctatattacatatatagatagagagggttggttatgtgtttttttttaaatattat

SEQ ID NO: 343970 - DNA, 362 bp, Zea mays
ccaactagcaacatagaaagtacattattgtaccaacaatggcagccaagagaggttgcctccttatgctccttggtctttctgcaagtgctgctacggcgaccattttcccgcaatgctcgcaagctcctatagcttcccttcttcccccgtacctctcaccagcggtgtcttcggtatgtgaaaacccaattcttcaaccctacaggatccaacaggcaatcgcagctggcatcttacctttatcacccttgttcctccaacaatcatcagccctattacaacagttacctttggtgcatttattggcacaaaacatcagggcacaacaactacaacaacttgtgctagcaaaccttgct

SEQ ID NO: 343971 - DNA, 372 bp, Zea mays
cgcacacacacacaaccagttctttcccaaatccacccgtcggcacctgggcttcaagatgcagatctttgtgaaaaccctgaccggcaagactatcaccctcgaggtggagtcgtctgacaccattgacaacgttaaggccaagatccaggacaaggagggcatccccccagaccagcagcggctcatcttcgctggcaaacagcttgaggacgggcgcacgcttgctgactacaacatccagaaggagagcaccctccaccttgtgctccgcctcaggggaggcatgcagatctttgtgaaaaccctgaccggcaagactatcaccctcgaggtggagtcctctgacaccattgacaacgtcaaggccaa

SEQ ID NO: 343972 - DNA, 132 bp, Zea mays
caacaacccatcattcctttttccttttcaaacaacgcttataaattatggctcgataattaatttctttggatgacctttcaccctccccataaataacaaagtacatctctagattctacaaaaaataac

SEQ ID NO: 343973 - DNA, 349 bp, Zea mays
attcagaaacacaccaagcgaagcgtactagcaacgacctaacaacaatggctgccaagatattagccctccttgcgcttcttgccctttttgtgagcgcaacaaatgcgttcattattccacaatgctcacttgctcctagtgccattattccacagttccttccaccagttacttcaatgggcttcgaacacctagctgtgcaagccaacatgcaacaacaagcgcttgcggcgagcgttttacaacaaccaattgcccaattgcaacaacaatccttgccacatctaacaatacaagccattacaacgcaacagcaacaacaggttctaccagcactgagccacct

SEQ ID NO: 343974 - DNA, 374 bp, Zea mays
aattagctcatcgactccagattggtagaactcgacaccatgaaggtgctgatcggtgcccttgctctcctggcgctcgctgcgagcgccgcctccagtacaagcggcggctgtggctgccagacaccaccgtttcatctaccgcctccgttctatatgccgcctccgttctatctgccgccgcagcagcagccgcagccatggcaataccccactcaaccaccgcagctaagcccgtgccagcagttcggatcctgcggcgtcggcagcgtcggcagcccgttcctgggccagtgcgtcgagttcctgaggcaccagtgcagcccggcggcgacgccctacggctcgccacagtgccaggcgctgcagcagca

SEQ ID NO: 343975 - DNA, 362 bp, Zea mays
agcgttgatactcctgatgaatttggctccgttgctgctcgatttcttgatacttatcgtgggtcacttagatcatagatccaatggccatggtgtgtactcggttctgattataacaactatgatttaattctgggctacaagatttagattctactgatgatgcgttaagataccctttggccgcgactaaaatataaaagaacccatgtgcttttcttaaattaacccgccgttcacacttgaggtaaagttattaaatctaggttaaaatatttgtaaattaaacccttaactttctgaaattgaaacacgcggtctgatggttattaaaaagatgtatattaaatatttaatgattt

SEQ ID NO: 343976 - DNA, 372 bp, Zea mays
caacatagaaagcacaatagtgtaccaacaatggcagccaaaatattttgcctccttatgctccttggtatttctgcaagtgctgctacggcgaccattttcccgcaatgctcacaagctcctatagcttcccttcttcccccgtacctctcaccagcggtgtcttcggtatgtgaaaacccaattcttcaaccctacaggatccaacaggcaatcgcagctggcatcttacccttatcacccttgttcctccaacaatcatcagccctattacagcagttacctttggtgcatttattggcacaaaacatcagggcacaacaactacaacaacttgtgctagcaaaccttgctgcctactctcagcaacag

SEQ ID NO: 343977 - DNA, 220 bp, Zea mays
acaatggcagctagggaaggttgccttcttatgctccttgggctttctgcaagtgctgctacggcgaccattttaccacaatgctcacaagctcctaaagcttcccttctttccccgtccctctcaccaacggtgtcttcgggatgtgaaaacccaatatttcaaccctacaggatccaacaggcaatcgcagctggcattttacctttattacccttgt

SEQ ID NO: 343978 - DNA, 367 bp, Zea mays
caactagcaacatagaaagcacaatagtgtaccaacaatggcagctaaaatattttgcctccttatgctccttggtctttctgcaagtgctgctacggcgaccattttcccacaatgctcacaagctcctatagcttcccttcttcccccgtacctctcaccaacggtgtcttcggtatgtgaaaacccaattcttcaaccctacaggatccaacaggcaatcgcagctggcatcttacctttatcacccttgttcctccaacaatcatcagccctattacagcagttacctttggtgcatttattggcacaaaacatcagggcacaacaactacaacaacttgtgctagcaaaccttgctgcctac

SEQ ID NO: 343979 - DNA, 372 bp, Zea mays
tagaaagtggaatccagtagcaacattagagcaacaatggagaccaagatattttccctccttatgctccttgctctttctacatgtgttgctaacgcgacaattttccctcaatgctcacaagctcctatagcttccctttttcccccataccttccatcaattatagcttcagtatgtgaaaacccagctcttcaaccatataggcttcaacaagcaatcgcagcaagcaacatacctttatcgcccttgttgtgtcaacaatcgccagccctatctttggtgcagtcattggtacaaaccatcagggcacaacagctgcagcaactcgtgctacctgtgatcaaccaagtagctctggcaaacctttct

SEQ ID NO: 343980 - DNA, 374 bp, Zea mays
gctagcaaaccttgctgcctactcttagcatcagcagtttcttccattcaaccagctaggttcattgaactctgcttcttatttgcaacaacaacaactaccattcagccagctacctgctgcctacccccagcaatttcttccattcaaccaactagcagcattgaactctcctgcttatttacagcagcaacaactactaccattcagccagctagctggtgtgagccctgctaccttcttgacacaaccacagttgttgccgttctaccagcacgttgcgcctaacgctggcaccctcttacaactgcaacaattgctgccattcaaccaacttgctttgacaaacccagcagtgttctaccaacaaccca

SEQ ID NO: 343981 - DNA, 338 bp, Zea mays
caacaacctaacaacaatggctaccaggatattagccctccttgcgcttcttgcccttttagtgagcgcaacaaatgcgttcattattccacagtgctcacttgctcctagtgccattattccacagttcctcccaccagttacttcaatgggcttcgaacatccagccgtgcaagcctacaggctacaactagcgcttgcggcgagcgtcttacaacaaccaattgcccaattgcaacaacaatccttggcacatctaaacctacaaaccatcgcaacgcaacagcaacaacagtttctgccatcactgagccacctagccgtggtgaaccctgtcg

SEQ ID NO: 343982 - DNA, 328 bp, Zea mays
cagaaacacaccaagcgaatttttttttcatcaacctaacaacaatggctaccaagatattatccctccttgcgcttcttgcgctttttgcgagcgcaacaaatgcgttcattattccacaatgctcacttgctccaagctccattattacacagttcctcccaccagttacttcaatgggcttcgaacacccagctgtgcaagcctataggctacaacaagcaattgctgcgagcgtcttacaacaaccaattttcgagtttcaacaacaatccttggcacatctaacaatacaaaccatcggaacccaacaactacaacaaattcc

SEQ ID NO: 343983 - DNA, 373 bp, Zea mays
atcgacaccatgagggtgttgctcgttgccctcgctctcctggctctcgctgcgagcgccacctccacgcatacaagcggcggctgcggctgccagccaccgccgccggttcatctaccgccgccggtgcatctgccacctccggttcacctgccacctccggtgcatctcccaccgccggtccacctgccgccgccggtccacctgccaccgccggtccatgtgccgccgccggttcatctgccgccgccaccatgccactaccctactcaaccgccccggcctcagcctcatccccagccacacccatgcccgtgccaacagccgcatccaagcccgtgccagctgcagggaacctgcggcgttggcagca

SEQ ID NO: 343984 - DNA, 303 bp, Zea mays
attcagaaacacaccaagtcgtggtttttttgcaacaacctaacaacaatggctaccaagatattatatcctccttgcgcttcttgcgctttttgcgagcgcaacaaatgcgtccattatttcacaatgctcacttgctcctagttccattattccacagttccttccaccagttacttcaatggcctttgaacacccagctgatcaagcctataggctacaacatgtgattgcggcgagcgtcttacaacaaccaatcgcccaattgcaacaacaatccttggcatatgtaacaatgcaaat

SEQ ID NO: 343985 - DNA, 372 bp, Zea mays
gagaccaactagcaacatagaaagctcaatagtgtaccaacaatggcagccaaaatattttgcttccttatgctccttggtctttctgcaagtgctgctaccgcaaccattttcccacaatgctcacaagctcctatagcttcctttcttcccccatacctctcaccagcggtgtcttcagtatgtgaaaacccaattcttcaaccctacaggatccaacaggcaatcgcagcaggcatcttacctttatcacccttgttcctccaacaaccgtcagccctattacagcagttacctttggttcatttgttggcacaaaacatcaaggcacaacaactacaacaacttgtgctaggaaaccttgcttgctac

SEQ ID NO: 343986 - DNA, 378 bp, Zea mays
aaacacaccaagcgaagcgcactagcaacaacctaacaacaatggctaccaagatattagccctccttgcgcttcttgcccttttagtgagcgcaacaaatgcgttcattattccacagtgctcacttgctcctagtgccattattccacagttcctcccaccagttacttcaatgggcttcgaacatccagccgtgcaagcctacaggctacaactagcgcttgcggcgagcgtcttacaacaaccaattgcccaattgcaacaacaatccttggcacatctaaacctacaaaccatcgcaacgcaacagcaacaacagtttctgccatcactgagccacctagccgtggtgaaccctgtcgcctacttgcaacagc

SEQ ID NO: 343987 - DNA, 320 bp, Zea mays
agaccaacaagcaacatattttgttttatacagtagcaacaatagagcaacaatggcggccaagatattttccatccttatgctccttgctctttctgcatgtgttgctaacgcgaccatttttcctcaatactcacaagctcctatagctgcccttcttcccccataccttccatcaatgaccgcttcagtatgtgaaaacccagcccttcaaccctacaggctccaacaagcaatcgcaacaagcaacttacctttatcacccctgttctttcaacaatcgccagccctatctttggtgcaagcattggtacaaacca

SEQ ID NO: 343988 - DNA, 167 bp, Zea mays
tcgatgcgagcgtataatacgttttgttttttatgaacgagctacaccaatgggacggcttgtttttgtgaaggcggattcgaggatgaggaaagcgcaaagctacttaatgtgactgagagagacttataatcagaaggattacaacatgtgctcataaagccata

SEQ ID NO: 343989 - DNA, 376 bp, Zea mays
gcaacatagaaagcacaatagtgtaccaactatggcagccaaaatattttgcttccttatgctccttggtctttctgcaagtgttgctaccgcaaccattttcccacaatgctcacaagctcctatagcttcccttcttcccccatacctctcaccagcggtgtcttcaatgtgtgaaaacccaattgttcaaccctacaggatccaacaggcaatcgcaacaggcatcttaccattatcacccttgttcctccaacaaccgtcagccctattacagcagttacctttggtccatttggtggcacaaaacatcagggcacaacaactacaacaacttgtgctagcaaaccttgctgcatactctcagcaacatcag

SEQ ID NO: 343990 - DNA, 368 bp, Zea mays
agaaagcacaatagtgtaccttcattggcagccaaaatattttgcctccttatgctccttggtctttctgcaagtgctgctacggcgaccattttcccgcaatgctcgcaagctcctatagcttcccttcttcccccgtacctctcaccagcggtgtcttcggtatgtgaaaacccaattcttcaaccctacaggatccaacaggcaatcgcagctggcatcttacctttatcacccttgttcctccaacaatcatcagccctattacaacagttacctttggtgcatttattggcacaaaacatcagggcacaacaactacaacaacttgtgctagcaaaccttgctgcctactctcagcaacagca

SEQ ID NO: 343991 - DNA, 373 bp, Zea mays
agaaagcacaatagtgtaccaacaatggcagccaaaatattttgcctccttatgctccttggtatttctgcaagtgctgctacggcgaccattttcccgcaatgctcacaagctcctatagcttcccttcttcccccgtacctctcaccagcggtgtcttcggtatgtgaaaacccaattcttcaaccctacaggatccaacaggcaatcgcagctggcatcttacctttatcacccttgttcctccaacaatcatcagccctattacagcagttacctttggtgcatttattggcacaaaacatcagggcacaacaactacaacaacttgtgctagcaaaccttgctgcctactctcagcaacagcagtttc

SEQ ID NO: 343992 - DNA, 379 bp, Zea mays
gcaacatagaaagcacaatagtgttttaacaatggcagctaaaatattttgcctccttatgctccttggtctttctgcaagtgctgctacggcgaccattttcccacaatgctcacaagctcctatagcttcccttcttcccccgtacctctcaccaacggtgtcttcggtatgtgaaaacccaattcttcaaccctacaggatccaacaggcaatcgcagctggcatcttacctttatcacccttgttcctccaacaatcatcagccctattacagcagttacctttggtgcatttattggcacaaaacatcagggcacaacaactacaacaacttgtgctagcaaaccttgctgcctactctcagcaacagcagttt

SEQ ID NO: 343993 - DNA, 379 bp, Zea mays
caacaagcaacatagaaagtggaattcagttgcaacaatagagcaacaatggagaccaagatattttccctccttatgctccttgctctttctacatgtgttgctaacgcgacaattttccctcaatgctcacaagctcctatagcttccctttttcccccataccttccatcaattatagcttcagtatgtgaaaacccagctcttcaaccatataggcttcaacaagcaatcgcagcaagcaacatacctttatcgcccttgttgtgtcaacaatcgccagccctatctttggtgcagtcattggtacaaaccatcagggcacaacagctgcagcaactcgtgctacctgtgatcaaccaagtagctctggcaaacc

SEQ ID NO: 343994 - DNA, 185 bp, Zea mays
attctgagcatccacaaacttatcttctgttgcttccgagcaccgacttagcagctttgtcttccaagataacaggacctccttgcgtcccttgtcctatttgcgagcgcaataattgcgtcgcattagttcacaaagtttacatgcttctagcgcctttttactacagctctctcgaccagtta

SEQ ID NO: 343995 - DNA, 374 bp, Zea mays
ctttctgcatgtgttgctaacgcgacaattttccctcaatgctcacaagctcctatagcttcccttcttcccccataccttccatcaatgatagcttcagtatgtgaaaacccagctcttcaaccctataggctccaacaagcaatcgcagcaagcaacatacctttatcacccttgtttcaacaatcgccagccctatctttggtgcagtcattggtacaaaccatcagggcacagcagctgcagcaactcgtgctacctgtgatcaaccaagtagctctggcaaacctttctccctactctcagcaacaacaatttcttccattcaaccaactgtctacattgaaccgtgctgcttatttgcagcaacaact

SEQ ID NO: 343996 - DNA, 372 bp, Zea mays
attttcagcattcagaaactttttttgtcgaagcgcactagcaacaacctaacaacaatggctaccaagatattagccctccttgcgcttcttgcccttttagtgagcgcaacaaatgcgttcattattccacagtgctcacttgctcctagtgccatttttccacagttcctcccatcagttacttcaatgggcttagaacatccagccgtgcaagcctacaggctacatctagtgcttgcggcgagcgttttacaacaaccaattgcccaatggcaacaacaattcttgggtcatctaaacctacaattcattgcaacgcattatcaactacagttttttgtcatcactgagccacctaatcgtggtgaa

SEQ ID NO: 343997 - DNA, 378 bp, Zea mays
gcaaagcggcagtgcgtaaagaggttcgtttaacagaacagcatgaagatggtcatcgttctcgtcgtgtgcctggctctgtcagctgccagcgcctctgcaatgcagatgccctgcccctgcgcggggctgcagggcttgtacggcgctggcgccggcctgacgacgatgatgggcgccggcgggctgtacccctacgcggagtacctgaggcagccgcagtgcagcccgctggcggcggcgccctactacgccgggtgtgggcagacgagcgccatgtaccagccgctccggcaacagtgctgccagcagcagatgaggatgatggacgtgcagtccgtcgcgcagcagctgcagatgatgatgcagcttgagcgg

SEQ ID NO: 343998 - DNA, 374 bp, Zea mays
caacaggcaacatagaaggtggaattcagtagcaacaatagagcaacaatggagaccaagatattttccctccttatgctccttgctctttctacatgtgttgctaacgcgacaattttccctcaatgctcacaagctcctatagcttccctttttcccccataccttccatcaattatagcttcagtatgtgaaaacccagctcttcaaccatataggcttcaacaagcaatcgcagcaagcaacatacctttatcgcccttgttgtgtcaacaatcgccagccctatctttggtgcagtcattggtacaaaccatcagggcacaacagctgcagcaactcgtgctacctgtgatcaaccaagtagctctggc

SEQ ID NO: 343999 - DNA, 379 bp, Zea mays
cagaaccacaccaagcgaagcacattagtttcaacctaacaacaatggctaccaagatattatccctccttgcgcttcttgcgctttttgcgagcgcaacaaatgcgttcattattccacaatgctcacttgctccaagttccattattacacagttcctcccaccagttacttcaatgggcttcgaacacccagctgtgcaagcctataggctacaacaagcaattgcggcgagcgtcttacaacaaccaatttcccagttgcaacaacaatccttggcacatctaacaatacaaaccatcgcaacgcaacagcaacaacaattcctaccagcactgagccacctagccatggtgaaccctgccgcctacttgcaaca

SEQ ID NO: 344000 - DNA, 364 bp, Zea mays
agaccattagctttatctactccagagcgcagaagaacccgatcgacaccatgagggtgttgctcgttgccctcgctctcctggctctcgctgcgagcgccacctccacgcatacaagcggcggctgcggctgccagccaccgccgccggttcatctaccgccgccggtgcatctgccacctccggttcacctgccacctccggtgcatctcccaccgccggtccacctgccgccgccggtccacctgccaccgccggtccatgtgccgccgccggttcatctgccgccgccaccatgccactaccctactcaaccgccccggcctcagcctcatccccagccacacccatgcccgtgccaaca

SEQ ID NO: 344001 - DNA, 373 bp, Zea mays
caaagccactatctattgggtatctttattcagttgctgagttgaagagtggcgcctattctaaagatacaactaacatatctctgcatgccacgtcaacatctgcaacctccaaaatatctgttatccatgataatgctttgccaaatgcattacttggtacagttgaatatgagttgccccatgtgcctccatggtttttttcatgctggtagccagaagctttatggggttcttgctggaataattagacttgttggcctatcaacagtgtcaggatagcatactcatacagtaatattgttgcatgtcgctcttaacaaatttcattcaggaaccgggccatgttgatgttcaaaagagttgccagaag

SEQ ID NO: 344002 - DNA, 372 bp, Zea mays
gggtcttcagaccattagctttatctacttcagagcgcagaagaacccgatcgacaccatgagggtgttgctcgttgccctcgctctcctggctctcgctgcgagcgccacctccacgcatacaagcggcggctgcggctgccagccaccgccgccggttcatctaccgccgccggtgcatctgccacctccggttcacctgccacctccggtgcatctcccaccgccggtccacctgccgccgccggtccacctgccaccgccggtccatgtgccgccgccggttcatctgccggcgccaccatgccactaccctactcaaccgccccggcctcagcctcatccccagccacacccatgcccgtgccaaca

SEQ ID NO: 344003 - DNA, 373 bp, Zea mays
caatagtgtaccaacaatggcagccaaaatattttgcctccttatgctccttggtctttctgcaagtgctgctacggcgaccattttcccgaaatgctcgcaagctcctatagcttcccttcttcccccgtacctctcaccagcggtgtcttcggtatgtgaaaacccaattcttcaaccctacaggatccaacaggcaatcacagctggcatcttacctttatcacccttgttcctccaacaatcatcagccctattacatcagttacctttggtgcatttattggcacaaaacatcagggcacaacaactacaacaacttgtgctagcaaaccttgctgcctactctcagcaacagcagtttcttccattc

SEQ ID NO: 344004 - DNA, 376 bp, Zea mays
cccacgcgtccgcaaagcggcagtgcgtatagaggatcgtcgaacagaacagcatgaagatggtcatcgttctcgtcgtgtgcctggctctgtcagctgccagcgcctctgcaatgcagatgccctgcccctgcgcggggctgcagggcttgtacggcgctggcgccggcctgacgacgatgatgggcgccggcgggctgtacccctacgcggagtacctgaggcagccgcagtgcagcccgctggcggcggcgccctactacgccgggtgtgggcagacgagcgccatgtaccagccgctccggcaacagtgctgccagcagcagatgaggatgatggacgtgcagtccgtcgcgcagcagctgcagatgatgat

SEQ ID NO: 344005 - DNA, 369 bp, Zea mays
ctagcaacatagaaagcacattagtttaccaacaatggcagccaaaatattttgcctccttatgctccttggtctttctgcaagtgctgctacggcgaccattttcccgcaatgctcgcaagctcctatagcttcccttcttcccccgtacctctcaccagcggtgtcttcggtatgtgaaaacccaattcttcaaccctacaggatccaacaggcaatcgcagctggcatcttacctttatcacccttgttcctccaacaatcatcagccctattacaacagttacctttggtgcatttattggcacaaaacatcagggcacaacaactacaacaacttgtgctagcaaaccttgctgcctactctca

SEQ ID NO: 344006 - DNA, 374 bp, Zea mays
ggaggaacacccagctgtgcttgcttataggctacaacaagcaattgcggcgagcgtcttacaacaaccaatttcccagttgcaacaacaatccttggcacatctaacaatacaaaccatcgcaacgcaacagcaacaacaattcctaccagcactgagccacctagccatggtgaaccctgccgcctacttgcaacagcagttgcttgcatcaaacccacttgctctggcaaacgtagttgcaaaccagccacaacaacagctgcaacagtttctgccagcgctcagtcaactagccatggtgaaccctgccgcctacctacaacagcaacaactgctttcatctagcccgctcgctgtggccaatgcaccta

SEQ ID NO: 344007 - DNA, 365 bp, Zea mays
  unsure (1)..(365): unsure at all n locations
gcaacatagaaagtggaatccagtagcaacaatagagcaacaatggcgaccaagatattttccctccttatgctccttgctctttctgcatgtgttgctaacgcgacaattttctctcaatgctcacaagctcctatagcttcccttcttcccccataccttccatcaatgatagcttcagtatgtgaaaacccagctcttcaaccctataggctccaacaagcaatcgcagcaagcaacatacctttatcacccttgtttcaacaatcgccagccctatctttggtgcagtcattggtacaaaccatcagggcacagcaagccgtgcttncttcttgacacagcaacagttgctgcctttctac

SEQ ID NO: 344008 - DNA, 376 bp, Zea mays
caacatagaaagtggaatccagtatcaacaatagagcaacaatggcgaccaagatattttccctccttatgctccttgctctttctgcatgtgttgctaacgcgacaattttccctcaatgctcacaagctcctatagcttcccttcttcccccataccttccatcaatgatagcttcagtatgtgaaaacccagctcttcaaccctataggctccaacaagcaatcgcagcaagcaacatacctttatcacccttgtttcaacaatcgccagccctatctttggtgcagtcattggtacaaaccatcagggcacagcagctgcagcaactcgtgctacctgtgatcaaccaagtagctctggcaaacctttctca

SEQ ID NO: 344009 - DNA, 373 bp, Zea mays
gcgattgcggcgagcgtcttacatcttctttttgcccaattgcaacaacaatccttggcacatctaacaatacaaaccatcgcaacgcaacagcaacaacagttcctaccagcactgagccacctagccatggtgaaccctgtcgcctacttgcaacagcagctgcttgcatccaacccacttgctctagcaaacgtagttgcaaaccagcaacaacaacaactgcaacagtttctgccagcgcttagtcaactagccatggtgaaccctggcggctacctacaacagcaacaactgctttcatttagcccgctcgctggggccaatgcacctacatacctgcaacaagaattgttgcaacagattgtaccag

SEQ ID NO: 344010 - DNA, 373 bp, Zea mays
aatattttgagcattcagaaacacaccaagcgaagcacattagcaacaacctaacaacaatggctaccaagatattatccctccttgcgctgcgctttttgcgagcgcaacaaatgcgttcattattccacaatgctcacttgctccaagttccattattacacagttcctcccaccagttacttcaatgggcttcgaacacccagctgtgcaagcctataggctacaacaagcaattgcggcgagcgtcttacaacaaccaatttcccagttgcaacaacaatccttggcacatctaacaatacaaaccatcgcaacgcaacagcaacaacaattcctaccagcactgagccacctagccatggtgaaccct

SEQ ID NO: 344011 - DNA, 373 bp, Zea mays
agaaagcacaatagtgtaccaacaatggctgtcaaaatattttgcctccttatgctccttggtctttctgcaagtgctgctacggcgaccattttcccgcaatgctcgcaagctcctatagcttcccttcttcccccgtacctctcaccagcggtgtcttcggtatgtgaaaacccaattcttcaaccctacaggatccaacaggcaatcgcagctggcatcttacctttatcacccttgttcctccaacaatcatcagccctattacaacagttacctttggtgcatttattggcacaaaacatcagggcacaacaactacaacaacttgtgctagcaaaccttgctgcctactctcagcaacagcagtttc

SEQ ID NO: 344012 - DNA, 369 bp, Zea mays
agaaagtggaatccagtagcaacaatagagcaacaatggcgaccaagatattttccctccttatgctccttgctctttctgcatgtgttgctaacgcgacaattttccctcaatgctcacaagctcctatagcttcccttcttcccccataccttccatcaatgatagcttcagtatgtgaaaacccagctcttcaaccctataggctccaacaagcaatcgcagcaagcaacatacctttatcacccttgtttcaacaatcgccagccctatctttggtgcagtcattggtacaaaccatcagggcacagcagctgcagcaactcgtgctacctgtgatcaaccaagtagctctggcaaacctttctc

SEQ ID NO: 344013 - DNA, 349 bp, Zea mays
  unsure (1)..(349): unsure at all n locations
taacatanaaagtggaatcttttggtgattcttagagcaacaatggcgaccaagatatttttcctacttatgctccttgctctatctgcatgtgttgctaacgcgacaattttccctcaatgctcacaagctcctatagctttccttcttcccccataccttccattaatgatagcttcagtatgtgaaaacccagctcttcaaccctataggctccaacaagcaatcgcagcaagcaacatacctttatcacccttgtttcaacaattgccagacctatctttggtgcagccattggttcaaaccatcagggcacagcacctgtagtaactcgtgctacctgtgatca

SEQ ID NO: 344014 - DNA, 376 bp, Zea mays
  unsure (1)..(376): unsure at all n locations
ntgccacctccggttcacctgcctttttttgtgcatctcccaccgccggtccaggtgccgtcgccggtccacctgccaccgccggtccatgtgccgccgccggttcatctgccgccgccaccatgccactaccctactcaaccgccccggcctcagcctcatccccagccacacccatgcccgtgccaacagccgcattcaagcccgtgccagctgcagggaacctgcggcgttggcagcaccccgatcctgggccagtgcgtcgagtttctgaggcatcagtgcagcccgacggcgacgccctactgctcgcctcagtgccagtcgttgcggcagcagtgttgccagcagctcatgcaggtggagccgcagcacc

SEQ ID NO: 344015 - DNA, 240 bp, Zea mays
tcttgacacagcaacagttgctgcctttctaccagcagtttgcggctaaccccgcaaccctcttacaactacaacaattgttgccctttgtccaacttgctttgacaaacccagcagcctcctaccaacaacacatcattggtggtgccctcttttagattgcttattagttgtaattcaataataaagttttttggatgatgtatgtggccaaccagaaataagaagttacatttccag

SEQ ID NO: 344016 - DNA, 368 bp, Zea mays
  unsure (1)..(368): unsure at all n locations
nagcaattagctcatcgactccagattggtgaactcgacaccatgaaggtgctgatcgttgcccttgctctcctggcgctcgctgcgagcgccgcctccagtacaagcggcggctgtggctgccagacaccaccgtttcatctaccgcctccgttctatatgccgcctccgttctatctgccgccgcagcagcagccgcagccatggcaataccccactcaaccaccgcagctaagcccgtgccagcagttcggatcctgcggcgtcggcagcgtcggcagcccgttcctgggccagtgcgtcgagttcctgaggcaccagtgcagcccggcggcgacgccctacggctcgccacagtgccaggcgct

SEQ ID NO: 344017 - DNA, 347 bp, Zea mays
agcgaacgggcggttgcggttgccagccacctttgtctgtttatctaccgccgccggtgcatctgccacctccggttcacctgccacctccggtgcatctaccaccgccggaccacctgccgccgccggtccacctgccaccgccggtccatgtgccgccgtcggttcatctgccgccgccaccatgccactaccctactcaaccgccccggccttagccttatccccagccacacccatgcccgtgccaacagccgcatccaagcccgtgccagctgcagggaacctgcggcgttggcagcacccctatcctgggccagtgcgtttagttcctgaggcatcattgc

SEQ ID NO: 344018 - DNA, 372 bp, Zea mays
cccacgcgtccggaaacacaccatgcgaagtacattagcaacaacctaacaacaatggctaccaagatattatccctccttgcgcttcttgcgctttttgcgagcgcaacaaatgcgttcattattccacaatgctcacttgctccaagttccattattacacagttcctcccaccagttacttcaatgggcttcgaacacccagctgtgcaagcctataggctacaacaagcaattgcggcgagcgtcttacaacaaccaatttcccagttgcaacaacaatccttggcacatctaacaatacaaaccatcgcaacgcaacagcaacaacaattcctaccagcactgagccacctagccatggtgaaccct

SEQ ID NO: 344019 - DNA, 371 bp, Zea mays
accaactagcaacatagaatgcacattagtgtaccaacaatggcagccaaaatattttgcttccttatgctccttggtctttctgcaagtgctgctaccgcaaccattttcccacaatgctcacaagctcctatagcttcctttcttcccccatacctctcaccagcggtgtcttcagtatgtgaaaacccaattcttcaaccctacaggatccaacaggcaatcgcagcaggcatcttacctttatcacccttgttcctccaacaaccgtcagccctattacagcagttacctttggtgcatttgttggcacaaaacatcaaggcacaacaactacaacaacttgtgctaggaaaccttgctgcctactc

SEQ ID NO: 344020 - DNA, 374 bp, Zea mays
cagaaacacaccaagcgaatttcactagcaacaacctaacaacaatggctaccaagatattatccctccttgcgcttcttgcgctttttgcgagcgcaacaaatgcgtccattattccacaatgctcacttgctcctagttccattattccacagttcctcccaccagttacttcaatggccttcgaacacccagctgtgcaagcctataggctacaacaagcgattgcggcgagcgtcttacaacaaccaattgcccaattgcaacaacaatccttggcacatctaacaatacaaaccatcgcaacgcaacagcaacaacagttcctaccagcactgagccacctagccatggtgaaccctgtcgcctacttg

SEQ ID NO: 344021 - DNA, 377 bp, Zea mays
gcaacatagaaagcacaatagtgtaccaactatggcagccaaaatattttgcttccttatgctccttggtctttctgcaagtgctgctaccgcaaccattttcccacaatgctcacaagctcctatagcttcctttcttcccccatacctctcaccagcggtgtcttcagtatgtgaaaacccaattcttcaaccctacaggatccaacaggcaatcgcagcaggcatcttacctttatcacccttgttcctccaacaaccgtcagccctattacagcagttacctttggtgcatttgttggcacaaaacatcaaggcacaacaactacaacaacttgtgctaggaaaccttgctgcctactctcagcaacagcagt

SEQ ID NO: 344022 - DNA, 242 bp, Zea mays
  unsure (1)..(242): unsure at all n locations
tctagatcgcgagcgccgcccttntttttttttttttttttttttttttgggggggttttttttttttttttggggnngggggggggttgcgggggtgtcatccatttacaaacccaaccctggggcaaaaccacaaaaaaaaggggcaaaaggggagggggggaaaaccggccccaaggggggggcaacaaaaaaaaggaccccaccccccccggggggggaaggggggggaaagccccgc

SEQ ID NO: 344023 - DNA, 378 bp, Zea mays
caacaagcaacatagaaagtggaattcagttgcaacaatagagcaacaatggagaccaagatattttccctccttatgctccttgctctttctacatgtgttgctaacgcgacaattttccctcaatgctcacaagctcctatagcttccctttttcccccataccttccatcaattatagcttcagtatgtgaaaacccagctcttcaaccatataggcttcaacaagcaatcgcagcaagcaacatacctttatcgcccttgttgtgtcaacaatcgccagccctatctttggtgcagtcattggtacaaaccatcagggcacaacagctgcagcaactcgtgctacctgtgatcaaccaagtagctctggcaaac

SEQ ID NO: 344024 - DNA, 373 bp, Zea mays
gcatttattggcacaaaacatcagggcacatcaactacaacaacttgtgctagcaaaccttgctgcctactctcagcaacagcagtttcttccattcaaccaactagctgcattgaactctgcttcttatttgcaacaacaactactaccattcagccagctagctggtgtgagccctgctaccttcttgacacaaccacagttgttgccgttctaccagcacgctgcgcctaacgctggcaccctcttacaactgcaacaattgctgccattcaaccaacttgctttgacaaacctagcagtgttctaccaacaacccatcattggtggtgccctcttttagatttcttatgagttatagttcaataataaa

SEQ ID NO: 344025 - DNA, 373 bp, Zea mays
ctcccaccgccggtccacctgccgtcgccggtccacctgccaccgccggtccatgtgccgccgccggttcatctgccgccgccaccatgccactaccctactcaaccgccccggcctcagcctcatccccagccacacccatgcccgtgccaacagccgcatccaagcccgtgccagctgcagggaacctgcggcgttggcagcaccccgatcctgggccagtgcgtcgagttcctgaggcatcagtgcagcccgacggcgacgccctactgctcgcctcagtgccagtcgttgcggcagcagtgttgccagcagctcatgcaggtggagccgcagcaccggtaccaggcgatcttcggcttggtcctccagt

SEQ ID NO: 344026 - DNA, 375 bp, Zea mays
caactagcaacatagaaagcacaattgtgtaccaacaatggcagccaaaatattttgcttccttatgctccttggtctttctgcaagtgttgctaccgcaaccattttcccacaatgctcacaagctcctatagcttcccttcttcccccatacctctcaccagcggtgtcttcaatgtgtgaaaacccaattgttcaaccctacaggatccaacaggcaatcgcaacaggcatcttaccattatcacccttgttcctccaacaaccgtcagccctattacagcagttacctttggtccatttggtggcacaaaacatcagggcacaacaactacaacaacttgtgctagcaaaccttgctgcatactctcagca

SEQ ID NO: 344027 - DNA, 329 bp, Zea mays
  unsure (1)..(329): unsure at all n locations
gaacgcgagcgccgccctntntntttaacaccccaaaaccacaaaaaagggaaaaataaaaaaaaaaaaccccttcactaaacaaaaaccaaaaaaaccaacccccaaacaaacacaggggaaaagccggggaagaaaaccccacaaaaatgccccaaagcaaaccagccccaatggcgcggcaccaaacaacaggccccccaccaaccccgggggagtatgtggggacaccccccgcccaatctaattttttactatcttgccccccgcgggggatagagccccgcaaaaaaatgcccgtacccagggggcgggcggacccccccccc

SEQ ID NO: 344028 - DNA, 367 bp, Zea mays
caactagcaacatagaaagctcttttttgtaccaacaatggcagccaaaatattttgccttcttatgctccttggtctttctgcaagtgctgctacggcgaccattttcccacaatgctcacaagctcctatagcttcccttcttcccccgtacctctcaccagcggtgtcttcggtatgtgaaaacccaattcttcaaccctataggatccaacaggcaatcgcagctggcatcttacctttatcacccttgttcctccaacaatcatcagccctattacagcagttacctttggtgcatttattggcacaaaacatcaaggcacaacaactacaacaacttgtgctagcaaaccttgctgcctac

SEQ ID NO: 344029 - DNA, 363 bp, Zea mays
gcaacatagaaagcacaattttgtttcaacaatggcagccaaaatatttggcctccttatgctccttggtatttctgcaagtgctgctacggcgaccattttcccgcaatgctcacaagctcctatagcttcccttcttcccccgtacctctcaccagcggtgtcttcggtatgtgaaaacccaattcttcaaccctacaggatccaacaggcaatcgcagctggcatcttacctttatcacccttgttcctccaacaatcatcagccctattacagcagttacccttggtgcatttattggcacaaaacatcagggcacaacaactacaacaacttgtgctagcaaaccttgcttgctactc

SEQ ID NO: 344030 - DNA, 314 bp, Zea mays
ctagttctagatcgcgagcggccgccctttttttttttttttctagaaatgtactttcttatttattggcacaaaacatcagggcacaacaactacaacaacttgtgctagcaaaccttgctgcctactctcagcaacaacagtttcttccattcaaccaactagctgcattgaactctgcttcttatttgcaacaacaacaactaccattcagccagctatctgctgcctacccccagcaatttcttccattcaaccaactgacagctttgaactctcctgcttatttacagcagcaacaactactaccattc

SEQ ID NO: 344031 - DNA, 372 bp, Zea mays
attattgagaccaactagcaacatttaaagcacaatagtgtaccaacaatggcagccaaaatattttgcctccttatgctccttggtctttctgcaagtgctgctacggcgaccattttcccgcaatgctcgcaagctcctatagcttcccttcttcccccgtacctctcaccagcggtgtcttcggtatgtgaaaacccaattcttcaaccctacaggatccaacaggcaatcgcagctggcatcttacctttatcacccttgttcctccaacaatcatcagccctattacaacagttacctttggtgcatttattggcacaaaacatcagggcacaacaactacaacaacttgtgctagcaaaccttgct

SEQ ID NO: 344032 - DNA, 370 bp, Zea mays
cggcagtgcgtagagaggatcgtctaacagaacagcatgaagatggtcatcgttctcgtcgtgtgcctggctctgtcagctgccagcgcctctgcaatgcagatgccctgcccctgcgcggggctgcagggcttgtacggcgctggcgccggcctgacgacgatgatgggcgccggcgggctgtacccctacgcggagtacctgaggcagccgcagtgcagcccgctggcggcggcgccctactacgccgggtgtgggcagacgagcgccatgtaccagccgctccggcaacagtgctgccagcagcagatgaggatgatggacgtgcagtccgtcgcgcagcagctgcagatgatgatgcagcttgagc

SEQ ID NO: 344033 - DNA, 303 bp, Zea mays
caggcatcttacctttatcacccttgttccttcaacaaccgtcagccctattacagcagttacctttggtgcatttgttggcacaaaacatcaaggcacaacaactacaacaacttgtgctaggaaaccttgctgcctactctcagcaacagcagtttcttccattcaaccaactggctgcattgaactctgctgcttatttgcaacaacaactaccattcagtcagctagctgctgcctacccccagcaatttcttccattcaaccaactggcagcattgaactctgctgcttatttacaac

SEQ ID NO: 344034 - DNA, 252 bp, Zea mays
ttcagcattcagaaacacaccaagcgaagcgcactagcaacaacctaacaacaatggctaccaagatattagccctccttgcgcttcttgcccttttagtgagcgcaacaaatgcgttcattattccacagtgctcacttgctcctagtgccattattccacagttcctcccaccagttacttcaatgggcttcgaacatccagccgtgcaagcctacaggctacaactagcgcttgcggcgagcgtcttac

SEQ ID NO: 344035 - DNA, 373 bp, Zea mays
agcaaaccttgctgcctactctcatcaacagcagtttcttccattcaaccaactagctgcattgaactctgcttcttatttgcaacaacaacaactaccattcagccagctacctgttgcctacccccagcaatttcttccattcaaccaactggcagcattgaactctcctgcttatttacagcagcaacaactactaccattcagccagctagctggtgtgagccctgctaccttcttgacacaaccacagttgttgccgttctaccagcacgctgcgcctaacgctggcaccctcttacaactgcaacaattgctgccattcaaccaacttgctttgacaaacctagcagtgttctaccaacaacccatc

SEQ ID NO: 344036 - DNA, 377 bp, Zea mays
attgagaccaactagcaacatagatagcacaatagtgtaccaacaatggcagccaaaatattttgcttccttatgctccttggtctttctgcaagtgttgctaccgcaaccattttcccacaatgctcacaagctcctatagcttcccttcttcccccatacctctcaccagcggtgtcttcaatgtgtgaaaacccaattgttcaaccctacaggatccaacaggcaatcgcaacaggcatcttaccattatcacccttgttcctccaacaaccgtcagccctattacagcagttacctttggtccatttggtggcacaaaacatcagggcacaacaactacaacaacttgtgctagcaaaccttgctgcatactc

SEQ ID NO: 344037 - DNA, 339 bp, Zea mays
caacaagcaacatagaaagtggaatccagtagcaacaatagagcaacaatggagaccaagatattttccctccttatgctccttgctctttctacatgtgttgctaacgcgacaattttccctcaatgctcacaagctcctatagcttccctttttcccccataccttccatcaattatagcttcagtatgtgaaaacccagctcttcaaccatataggcttcaacaagcaatcgcagcaagcaacatacctttatcgcccttgttgtgtaacaatcgccagccctatctttggtgcagtcattggtacaaaccatcaaggcacaacaagctgagcaac

SEQ ID NO: 344038 - DNA, 332 bp, Zea mays
cggacgcgtgggtgagcattcagaaacacaccaagcgaagctacctagcaacgacttaacaacaatggctaccaagatattagccctccttgcgcttcttgccctttttgtgagcgcaacaaatgcgttcattattccacaatgctcacttgctcctagtgccattataccacagttcctccgaccagttacttcaatgggcttcgaacacctagctgtgcaagcctacaggctacaacaagcgcttgcggcgagcgtcttacaacaaccaattaaccaattgcaacaacaatccttggcacatctaaccatacaaaccatcgcaacacaac

SEQ ID NO: 344039 - DNA, 379 bp, Zea mays
aactagcaacatagaaagcacaatagtgtaccaacaatggcagccaaaatattttgcctccttatgctccttggtctttctgcaagtgctgctacggcgaccattttcccgaaatgctcgcaagctcctatagcttcccttcttcccccgtacctctcaccagcggtgtcttcggtatgtgaaaacccaattcttcaaccctacaggatccaacaggcaatcacagctggcatcttacctttatcacccttgttcctccaacaatcatcagccctattacatcagttacctttggtgcatttattggcacaaaacatcagggcacaacaactacaacaacttgtgctagcaaaccttgctgcctactcttagcaacagc

SEQ ID NO: 344040 - DNA, 376 bp, Zea mays
ctgggtcttcagaccattagctttatctactccagagcgcagaagaacccgatcgacaccatgagggtgttgctcgttgccctcgctctcctggctctcgctgcgagcgccacctccacgcatacaagcggcggctgcggctgccagccaccgccgccggttcatctaccgccgccggtgcatctgccacctccggttcacctgccaccttcggtgcatctcccaccgccggtccacctgccgccgccggtccacctgccaccgccggtccatgtgccgccgccggttcatctgccgccgccaccatgccactaccctactcaaccgccccggcctcagcctcattctcaagcccacccatgcccgtgccaacagc

SEQ ID NO: 344041 - DNA, 328 bp, Zea mays
catcaatcatcattcatcttagtattataggcaccaaatcaaatctgcaacatcaattatctaactccaaaaaccatgaagctggtgcttgtggttcttgctttcattgctttagtatcaagtgtttcttgtacacagacaggcggctgcagctgtggtcaacaacaaagccatgagcagcaacatcatccacaacaacatcatccacaaaaacaacaacatcaaccaccaccacaacatcaccagcatcagcaacaccaacaacaacaagttcacatgcaaccacaaaaacatcagcaacaacaagaagtcattgttcaacaacaac

SEQ ID NO: 344042 - DNA, 269 bp, Zea mays
gcaacatagaaagtggaatacagttgcaacattagagcaacaatggcggccaagatattttccatccttatgctccttgctctttctgcatgtgttgctaacgcgaccatttttcctcaatactcacaagctcctatagctgcccttcttcccccataccttccatcaatgaccgcttcagtatgtgaaaacccagcccttcaaccctacaggctccaacaagcaatcgcaacaagcaacttacctttatcaccccctgttttttcaac

SEQ ID NO: 344043 - DNA, 135 bp, Zea mays
caccagcaaccctaccacctacacaggtccgatatactcttgctctgcctttaggagcgccaacgcatttacaggtatgtctaggctattacagtctcacgtcttaatgggctgacatcgcggcagcctcagtca

SEQ ID NO: 344044 - DNA, 356 bp, Zea mays
ggacgtcagcctagcaattagctcatcgactccagattggagaactcgacaccatgaaggtgctgatcgttgcccttgctctcctggcgctcgctgcgagcgccgcctccagtacaagcggcggctgtggctgccagacaccaccgtttcatctaccgcctccgttctatatgccgcctccgttctatctgccgccgcagcagcagccgcagccatggcaataccccactcaaccaccgcagctaagcccgtgccagcagttcggatcctgcggcgtcggcagcgtcggcagcccgttcctgggccagtgcgtcgagttcctgaggcaccagtgcagcccggcggcgacgccctac

SEQ ID NO: 344045 - DNA, 88 bp, Zea mays
  unsure (1)..(88): unsure at all n locations
gcgaggggcggggcgggcagggagaagaaggctaagaaaangcggatggaggacgacgggagggggagggacactgggaaggngaggg

SEQ ID NO: 344046 - DNA, 140 bp, Zea mays
cccacgcgtccgcccacgcgtccttttttagattgcttatgagtttgtcaaagcaagttggttgaatggcagtaattgttgcagttgtaagagggtgccagcgttaggcgcagcgtgcaggttgaacggtaacaactgtt

SEQ ID NO: 344047 - DNA, 321 bp, Zea mays
caacaagcaacatagaaagtggaatccagtagcaacaatagagcaacaatggcgaccaagatattttccctccttatgctccttgctctttctgcatgtgttgctaacgcgacaattttccctcaatgctcacaagctcctatagcttcccttcttcccccataccttccatcaatgatagcttcagtatgtgaaaacccagctcttcaaccctataggctccaacatgcaatcgcaacatgcaacatacctttatcaccccttgttcaacaatcgccagccctatctttggtgcagtcattggtacaaaccaataaggca

SEQ ID NO: 344048 - DNA, 278 bp, Zea mays
agaaagtggaatccagtagcaacaatagagcaacaatggcgaccaagatattttccctccttatgctccttgctctttctgcatgtgttgctaacgcgacaattttccctcaatgctcacaagctcctatagcttcccttcttcccccataccttccatcaatgatagcttcagtatgtgaaaacccagctcttcaaccctataggctccaacaagcaatcgcagcaagcaacatacctttatcacccttgtttcaacaatcgccagccctatctttg

SEQ ID NO: 344049 - DNA, 320 bp, Zea mays
agaaacacaccaagcgaatcacattttcaacaacctaacaacaatggctaccaagatattatccctccttgcgcttcttgcgctttttgcgagcgcaacaaatgcgttcattattccacaatgctcacttgctccaagttccattattacacagttcctcccaccagttacttcaatgggcttcgaacacccagctgtgcaagcctataggctacaacaagcaattgcggcgagcgtcttacaacaaccaattttccagttgcaacaacaatccttggcacatttaacaattcaaaccatcgtaacgcatcagcaacaac

SEQ ID NO: 344050 - DNA, 355 bp, Zea mays
caagcaacatagaaagtggaatccattagcaacaatagagcaacaatggagaccaagatattttccctccttatgctccttgctctttctacatgtgttgctaacgcgacaattttccctcaatgctcacaagctcctatagcttccctttttcccccataccttccatcaattatagcttcagtatgtgaaaacccagctcttcaaccatataggcttcaacaagcaatcgcagcaagcaacatacctttatcgcccttgttgtgtcaacaatcgccagccctatctttggtgcagtcattggtacaaaccatcagggcacaacagctgcagcaactcgtgctacctgtgatca

SEQ ID NO: 344051 - DNA, 249 bp, Zea mays
atcgactccagattggagaactcgacaccatgaaggtgctgatcgttgcccttgctctcctggcgctcgctgcgagcgccgcctccagtacaagcggcggctgtggctgccagacaccaccgtttcatctaccgcctccgttctatatgccgcctccgttctatctgccgccgcagcagcagccgcagccatggcaataccccactcaaccaccgcagctaagcccgtgccagcagttcggatcctgcg

SEQ ID NO: 344052 - DNA, 54 bp, Zea mays
cggggtggcccaagccgtccgaataaaacaagaaattaacataaaaaggggtgt

SEQ ID NO: 344053 - DNA, 334 bp, Zea mays
attttaagcattcagaaacacaccaagcgatgcgcactagcaacaacctaacaacaatggctaccaagatattagccctccttgcgcttcttgcccttttagtgagcgcaacaaatgcgttcattattccacagtgctcacttgctcctagtgccattattccacagttcctcccaccagttacttcaatgggcttcgaacatccagccgtgcaagcctacaggctacaactagcgcttgcggcgagcgtcttacaacaaccaattgcccaattgcaacaacaatccttggcacatttaaacctacaaaccatcgcaacgcaacagcaacaaca

SEQ ID NO: 344054 - DNA, 377 bp, Zea mays
attgagaccaactagcaacatagaaagcacaatagtgtaccaacaatggcagccaaaatattttgcttccttatgctccttggtctttctgcaagtgttgctaccgcaaccattttcccacaatgctcacaagctcctatagcttcccttcttcccccatacctctcaccagcggtgtcttcaatgtgtgaaaacccaattgttcaaccctacaggatccaacaggcaatcgcaacaggcatcttaccattatcacccttgttcctccaacaaccgtcagccctattacagcagttaccttttggccatttggtggcacaaaacatcagggcacaacaactacaacaacttgtgctagcaaaccttgctgcatactt

SEQ ID NO: 344055 - DNA, 347 bp, Zea mays
aaaatattttgcttccttatgctccttggtctttctgcaagtgctgctaccgcaaccattttcccacaatgctcacaagctcctatagcttcctttcttcccccatacctctcaccagcggtgtcttcagtatgtgaaaacccaattcttcaaccctacaggatccaacaggcaatcgcagcaggcatcttacctttatcacccttgtttctccaacaaccgccagccctattacagcagatacctttggtgcatttggtggcacaaaacatcaaggcacaacaactacaacaacttgtgctaggaaaccttgctgcctactctcagtaacagcagtttttttcatc

SEQ ID NO: 344056 - DNA, 289 bp, Zea mays
  unsure (1)..(289): unsure at all n locations
nttcgatcagaccctattacagctgttacttttggtgcatttattggcacaaaacatcggggcacaacaactacaacaactcgtgctagcaaaccttgctgtctactctcagcaacagcagttacctttggtgcatttgttggcacaaaacattagggcacaacaactacaacaactcgtgctagcaaaccttgctgcctactcttagcaacaacagtttttgccattcaaccaactagctgcattgaacttttgttgttatttgcagcatcaacatcttctaccattt

SEQ ID NO: 344057 - DNA, 310 bp, Zea mays
cagaaacacaccaagcgaagctacctagcaacgacttaacaacaatggctaccaagatattagccctccttgcgcttcttgccctttttgtgagcgcaacaaatgcgttcattattccacaatgctcacttgctcctagtgccattataccacagttcctccgaccagttacttcaatgggcttcgaacacctagctgtgcaagcctacaggctacaacaagcgcttgcggcgagcgtcttacaacaaccaattaaccaattgcaacaacaatccttggcacatctaaccatacaaaccattgcaacaca

SEQ ID NO: 344058 - DNA, 286 bp, Zea mays
agaccaactagcaacatagaaagcacaatagtgtaccaacaatggcagccaaaatattttgcctccttatgctccttggtctttctgcaagtgctgctacggcgaccattttcccgaaatgctcgcaagctcctatagcttcccttcttcccccgtacctctcaccagcggtgtcttcggtatgtgaaaacccaattcttcaaccctacaggatccaacaggcaatcacagctggcatcttacctttatcacccttgttcctccaacaatcatcaagcctattaca

SEQ ID NO: 344059 - DNA, 286 bp, Zea mays
cggacgcgtgggcggacgcgtggggccttctgcgcctccatttcggcctctgtcccttgcaagttcagtctcgcctccaaccatgggtaaagagaagtcccacatcaacattgtggttattggccatgtcgactctggcaagtcgaccaccacaggacaccttatctacaagcttggaggcattgacaagcgtgtgatcgagaggtttgagaaggaagctgctgaaatgaacaagcggtccttcaagtacgcctgggtgctcgacaagctcaaggctgagcgtgag

SEQ ID NO: 344060 - DNA, 209 bp, Zea mays
atgaagatggtcatcgttctcgtcttgtgcctggctctgtcagctgccagcgcctctgcaatgcagatgccctgcccctgcgcggggctgcagggcttgtacggcgctggcgccggcctgacgacgatgatgggcgccggcgggctgtacccctacgcggagtacctgaggcagccgtagtgcagtccgctggtggtggtgccctacta

SEQ ID NO: 344061 - DNA, 275 bp, Zea mays
ttttgagcattcagaaacacaccatgcgaagctacctagcaacgacttaacaacaatggctaccaagatattagccctccttgcgcttcttgccctttttgtgagcgcaacaaatgcgttcattattccacaatgctcacttgctcctagtgccattataccacagttcctccgaccagttacttcaatgggctttgaacacctagctgtgcaagcctacaggctacaacaagcgcttgcggcgagcgttttacaacaaccaattaaccaattgc

SEQ ID NO: 344062 - DNA, 293 bp, Zea mays
agaaagtggaatccagtagcaacaatagagcaacaatggcgaccaagatattttccctccttatgctccttgctctttctgcatgtgttgctaacgcgacaattttccctcaatgctcacaagctcctatagcttcccttcttcccccataccttccatcaatgatagcttcagtatgtgaaaacccagctcttcaaccctataggctccaacaagcaatcgcagcaagcaacatacctttatcacccttgtttcaacaatcgccagccctatctttggtgcaagcattggta

SEQ ID NO: 344063 - DNA, 238 bp, Zea mays
  unsure (1)..(238): unsure at all n locations
gttctagatcgcgagcggccgccctttttttttttttttttttttttttttttttttttttttttttttttttttttttttttttttttttttttttttttttatttttttttattttttttatttataatttttttttttttattaaaanattaataaaaatataaaaaaataatttttttttttatatgttaaaaattatattataaatataattaatttaatatttaatatttta

SEQ ID NO: 344064 - DNA, 279 bp, Zea mays
gcaattagctcatcgactccagattggagaactcgacaccatgaaggtgctgatcgttgcccttgctctcctggcgctcgctgcgagcgccgcctccagtacaagcggcggctgtggctgccagacaccaccgtttcatctaccgcctccgttctatatgccgcctccgttctatctgccgccgcagcagcagccgcagccatggcaataccccactcaaccaccgcagctaagcccgtgccagcagttcggatcctgcggcgtcggcagcgtcggcag

SEQ ID NO: 344065 - DNA, 286 bp, Zea mays
aacaactactaccattcagccagctagctggtgtgagccctgctaccttcttgacacaaccacagttgttgccgttctaccagcacgttgcgcctaacgctggcaccctcttacaactgcaacaattgctgccattcaaccaacttgctttgacaaacccagcagtgttctaccaacaacccatcattggtggtgccctcttttagatttcttatgagttatagttcaataataaagttttttatctgatgtttgtggcttcccagaaataagaaagtacatttct

SEQ ID NO: 344066 - DNA, 132 bp, Zea mays
cttcagaccattagctttatctatttcagagcgcagaagaacccgatcgacaccatgagggtgttgctcgttgccctcgctctcctggctctcgctgcgagcgccaccttcacgcatacaagcggtggttgt

SEQ ID NO: 344067 - DNA, 380 bp, Zea mays
atttagccagctagctgcagcaagtcgtgcttccttcttgacacagcaacagtggctgcctttctaccagcagtttgcggctaaccccgcaaccctcttacaactacaacaattgtagccctttgtccaacttgctttgacaaacccagcagcctcctaccaacaacacatcattggtggtgccctcttttagattgcttattagttgtaattcaaatataaaggtttttggatgatgtttgtggccaaccagaaataagaagttacattttcgtttatttttatattgatttttcttttttttttttcattatttttatatctttttatattatatatttttatcttatataatatattttttttttatatttttattt

SEQ ID NO: 344068 - DNA, 296 bp, Zea mays
ccaatccagatcagcaaagcggcagtgcgtagagaggatcgtcgaacagaacagcatgaagatggtcatcgttctcgtcgtgtgcctggctctgtcagctgccagcgcctctgcaatgcagatgccctgcccctgcgcggggctgcagggcttgtacggcgctggcgccggcctgacgacgatgatgggcgccggcgggctgtacccctacgcggagtacctgaggcagccgcagtgcagcccgctggcggcggcgccctactacgccgggtgtgggcagaccagcgccatgtacc

SEQ ID NO: 344069 - DNA, 335 bp, Zea mays
tcgattgataccaactagtattatatttagcacaatagtgtaccaacaggggcaggcaaaatattttgcctccttatgctccttggtctttctgcaagtgctgctacggcgaccattttcccacaatgctcacaagctcctatagcttcccttcttcccccgtacctctcaccagcggtgttttcggtatgtgaaaacccaattcttcaaccctataggatccaacaggcaatcgtagctggcattttactcttatcacccttgttcctccaacaatcattagtccttatttcatgtatttaccctttggtgcaatttattggtaccaaaacata

SEQ ID NO: 344070 - DNA, 62 bp, Zea mays
ctacactggtccagaatatctcttgctcttgcgctttgcagcgccaagctctattcacatgc

SEQ ID NO: 344071 - DNA, 284 bp, Zea mays
acgcgattcggtcaccacctcgcacataagccatatgaccaacatggcgccaaaatttgctcttatgcttggattttgaagtgctgtcgcaccatttccgatgctacagcttatgcttcttttcccgccttaccacggtttcgtggaaaaccattttacctacagaccacagcacgagtgcatttaccttataccctgtctcacatatagctatcagagtccttgggcttatggcaaacatagccacactcacactggctgcaactgtgctcttagaacgagtt

SEQ ID NO: 344072 - DNA, 195 bp, Zea mays
atcatcctcgtcctcatccgcccttgggagctaacaagcaagcaagcaaacgggcgaggagctggatagaggccggcgactcgaagcaaccgccgatcggagccgcggctgaggaggaggagcaagctcgagatggcgggtctcgtcggaggcagcacggtgcgggcggagcacgtcttggccaacgtcggtgga

SEQ ID NO: 344073 - DNA, 379 bp, Zea mays
cggacgcgtgggttcagaaacacatttagcttagcgcactagcaacaacctaacaacaatggctaccaagatattatccctccttgcgcttcttgcgctttttgcgagcgcaacaaatgcgtccattattccacaatgctcacttgctcctagttccattattccacagttcctcccaccagttacttcaatggccttcgaacacccagctgtgcaagcctataggctacaacaagcgattgcggcgagcgtcttacaacaaccaattgcccaattgcaacaacaattcttggcacatttaacaatacaaaccatcgcaacgcaacagcaacaacagtttctaccagcactgagccacctagccatggtgaaccctgtt

SEQ ID NO: 344074 - DNA, 302 bp, Zea mays
agcaacatagaaagcacattagttgttccaacaatggcagccaaaatatgttgcctccttatgctccttggtctttctgcaagtgctgctacggcgaccattttcccgcaatgctcgcaagctcctatagcttcccttcttcccccgtacctctcaccagcggtgtcttcggtatgtgaaaaacccaattcttcaaccctacaggatccaacaggcaatcgcagctggcatttaacctttatcacccttgtttcttcaaccatcattagtccctattacaaccatttaacctttgggtgcat

SEQ ID NO: 344075 - DNA, 370 bp, Zea mays
caacaagcaacatagaatgtggaattcagtagcaacaatagagcaacgatggagaccaagatattttccctccttatgctccttgctctttctacatgtgttgctaacgcgacaattttccctcaatgctcacaagctcctatagcttccctttttcccccataccttccatcaattatagcttcagtatgtgaaaacccagctcttcaaccatataggcttcaacaagcaatcgcagcaagcaacatacctttatcgcccttgttgtgtcaacaatcgccagccctatctttggtgcagtcattggtacaaaccatcagggcacaacagctgcagcaactcgtgctacctgtgatcaaccaagtagctc

SEQ ID NO: 344076 - DNA, 100 bp, Zea mays
gaggctgtcgcaccatttccaaagtccagtctatgcttcttttcccgaccttacacggtttgtggaaacccattaaccctacgccaacgcatacgtggca

SEQ ID NO: 344077 - DNA, 376 bp, Zea mays
ttttgagcattcaaaaacacaccatgcgaattgcactagcaacaacctaacaacaatggctaccaagatattatccctccttgcgcttcttgcgctttttgcgagcgcaacaaatgcgtccattattccacaatgctcacttgctcctagttccattattccacagttcctcccaccagttacttcaatggccttcgaacacccagctgtgcaagcctataggctacaacaagcgattgcggcgagcgtcttacaacaaccaattgcccaattgcaacaacaatccttggcacatctaacaatacaaaccatcgcaacgcaacagcaacaacagttcctaccagcactgagccacctagccatggtgaaccctgtc

SEQ ID NO: 344078 - DNA, 379 bp, Zea mays
gcacaatagtgtaccaacaatggcttccaaaatattttgcttccttatgctccgtggtctttctgcaagtgttgctaccgcaaccattttcccacaatgctcacaagctcctatagcttcccttcttcccccatacctctcaccagcggtgtcttcaatgtgtgaaaacccaattgttcaaccctacaggatccaacaggcaatcgcaacaggcatcttaccattatcacccttgttcctccaacaaccgtcagccctattacagcagttacctttggtccatttggtggcacaaaacatcagggcacaacaactacaacaacttgtgctagcaaaccttgctgcatactcttagcaacatcagtttcttccattcaac

SEQ ID NO: 344079 - DNA, 368 bp, Zea mays
gccaaatcgtgtgttcaccgtggctgacgaacctgccggatcacctaaccgatgcggcggctcccgatgggcctgtaccgactccagagacatgcaacccgtatgccgttcgagcttggccctcgtgcggccacagccggaggtaccccccgcgcgcgcgggcgcggacacagtcactgagtgctacgcgcgggacaccacgactagccgagtctgcttatggtgcgcggcttcggtgcggcgattgcgcgcagacacattacacggaggacgtacgaccgatccggtggagccgaacatggacgggccagagctacaagaacttgaggtagcagacgtcggtgtatactctcaagagcttgaggttc

SEQ ID NO: 344080 - DNA, 376 bp, Zea mays
gcaacatagaaagtggaatccagttgcaacaatagagcaacaatggagaccaagatattttccctccttatgctccttgctctttctacatgtgttgctaacgcgacaattttccctcaatgctcacaagctcctatagcttccctttttcccccataccttccatcaattatagcttcagtatgtgaaaacccagctcttcaaccatataggcttcaacaagcaatcgcagcaagcaacatacctttatcgcccttgttgtgtcaacaatcgccagccctatctttggtgcagtcattggtacaaaccatcagggcacaacagctgcagcaactcgtgctacctgtgatcaaccaagtagctctggcaaaccttt

SEQ ID NO: 344081 - DNA, 349 bp, Zea mays
cggacgcgtgggttttgtgcatttttaaacacaccaagcgaagcgcactagcagcgacctaacaacaatggctaccaagatattagccctccttgcgcttcttgccctttttgtgagcgcaacaaatgcgttcattattccacaatgctcacttgctcctagtgccattattccacagttcctcccaccagttacttcaatgggcttcgaacacctagctgtgcaagccaacatgcaacaacaagcgctttgcggtgagcgtcttacaacaaccaattgctcaattgctacaacaattcttgccacatttaacaatacaagccattacaacgcaacagcaacaacagtt

SEQ ID NO: 344082 - DNA, 321 bp, Zea mays
gctgcctacccccagcaatttctttcattcaaccaactggcagcattgaactcgcctgcttatttacagcagcaacaactactaccattcagccagctagctggtgtgagccctgctaccttcttgatacaaccacagttgttgccgttctaccagcacgctgcgcctaacgctggcaccctcttacaactgcaacaattgctgccattcaaccaacttgctttgacaaacccagcagcgttctaccaacaacccatcattggtggtgccctcttttagatttcttatgagttatagttcaataataaagttttttgtctg

SEQ ID NO: 344083 - DNA, 375 bp, Zea mays
gctgcattgaactctgcttcttatttgcaacaacaacaactaccattcagccagctacctgttgcctacccccagcaatttcttccattcaaccaactggcagcattgaactctcctgcttatttacagcagcaacaactactaccattcagccagctagctggtgtgagccctgctaccttcttgacacaaccacagttgttgccgttctaccagcacgctgcgcctaacgctggcaccctcttacaactgcaacaattgctgccattcaaccaacttgctttgacaaacctagcagtgttctaccaacaacccatcattggtggtgccctcttttagatttcttatgagttatagttcaataataaagttttt

SEQ ID NO: 344084 - DNA, 373 bp, Zea mays
catcagggcacaacagctgcagcatctcgtgctacctgtgatcaaccaagtagctctggcaaacctttctccctactctccgcaacaacaatttcttccattcaaccaactgtctacactgaaccctgctgcttatttgcagcaacaactattaccatttagccagctagctactgcctactctcaacaacaacaacttcttccatttaaccaattggccgcactgaaccccgctgcttatttgcagcagcaaatactactaccatttagccagctagctacagcaagccgtgcttccttcttgacacaacaacagttgctgccgttctaccagcagtttgcggctaaccccgcaaccctcttacaactacaa

SEQ ID NO: 344085 - DNA, 330 bp, Zea mays
tgcaccaataatggcagccagaatatggtgccttattatgctccttggtctttccgcaagtgctgctacggcgagcattttcccgcaatgctcacaagctcctatagcttcccttcttcccccatacctctcaccagcgatgtcttcagtatgttgaaaattcaattcttctaccctacaggatccaacaggcaatcgcagcaggcatcttacctttatcacccttgttcctccaacaatcatcagtcctattacagcagttacctttggtgcatttattggcacaaaacattagggcacaacaacctacacatcttttgcttgcaaacc

SEQ ID NO: 344086 - DNA, 385 bp, Zea mays
attagctcatcgactccagattggagaactcgacaccatgaaggtgctgatcgttgcccttgctctcctggcgctcgctgcgagcgccgcctccagtacaagcggcggctgtggctgccagacaccaccgtttcatctaccgcctccgttctatatgccgcctccgttctatctgccgccgcagcagcagccgcagccatggcaataccccactcaaccaccgcagctaagcccgtgccagcagttcggatcctgcggcgtcggcagcgtcggcagcccgttcctgggccagtgcgtcgagttcctgaggcaccagtgcagcccggcggcgacgccctacggctcgccacagtgccaggcgctgcagcagcagtgctgccaccag

SEQ ID NO: 344087 - DNA, 248 bp, Zea mays
gcggcagtgcgtaaagaggatcgttgaacataacagcatgaagatggtcatcgttctcgtcgtgtgcctggctctgtcagctgccagcgcctctgcaatgcagatgccctgcccctgcgcggggctgcagggcttgtacggcgctggcgccggcctgacgacgatgatgggcgccggcgggctgtacccctacgcggagtacctgaggcagtcccagtgccatccgctggcggcggtgccctactacg

SEQ ID NO: 344088 - DNA, 379 bp, Zea mays
gaaacacaccaagcgaagcgcactatcaacatcctaacaacaatggctaccaagatattagccctccttgcgcttcttgcccttttagtgagcgcaacaaatgcgttcattattccacagtgctcacttgctcctagtgccattattccacagttcctcccaccagttacttcaatgggcttcgaacatccagccgtgcaagcctacaggctacaactagcgcttgcggcgagcgtcttacaacaaccaattgcccaattgcaacaacaatccttggcacatctaaacctacaaaccatcgcaacgcaacagcaacaacagtttctgccatcactgagccacctagccgtggtgaaccctgtcgcctacttgcaacagc

SEQ ID NO: 344089 - DNA, 173 bp, Zea mays
gcggcagtgcgtagagaggatcgtttaacataacagcatgaagatggtcatcggtctcgtcgtgtgcctggctctgtcagctgccagcgcctctgcaatgcagatgccctgcccctgcgcggggctgcagggcttgtacggcgctggcgccggcctgacgactatgatgggcg

SEQ ID NO: 344090 - DNA, 270 bp, Zea mays
ccgttctaccagcagtttgtggcttaccccgcaacccttttacaactgcaacagttgctgtcctttgtccaacttgctttgacaaacccagcagccttctaccaacaacacatcattggcggtgccctcttttagattgcttattagttgtcattcaataatgaagttttttggctgatgtatgtggcctcctagaaataagaagttatatttccaattataatattatatatataataaataataattatcttttttttatatatttaa

SEQ ID NO: 344091 - DNA, 307 bp, Zea mays
ctcctgcttatttacagcagcaacaactactaccattcagccagctagctggtgtgagccctgctaccttcttgatacaaccacagttgttgccgttctaccagcacgctgcgcctaacgctggcaccctcttacaactgcaacaattgctgccattcaaccaacttgctttgacaaacccagcagcgttctaccaacaacccatcattggtggtgccctcttttagatttcttatgagttatagttcaataataaagttttttgtctgatgtttgtggcttcccagaaataagaaagtacatttct

SEQ ID NO: 344092 - DNA, 383 bp, Zea mays
cagaaacacaccaagcgaagcacattagctacaacctaacaacaatggctaccaagatattatccctccttgcgcttcttgcgctttttgcgagcgcaacaaatgcgttcattattccacaatgctcacttgctccaagttccattattacacagttcctcccaccagttacttcaatgggcttcgaacacccagctgtgcaagcctataggctacaacaagcaattgcggcgagcgtcttacaacaaccaatttcccagttgcaacaacaatccttggcacatctaacaatacaaaccatcgcaacgcaacagcaacaacaattcctaccagcactgagccacctagccatggtgaaccctgccgcctacttgcaacagcag

SEQ ID NO: 344093 - DNA, 296 bp, Zea mays
tttcagcattcagaaacacaccaagttattcgcactagcaacaacctaacaacaatggctaccaagatattagccctccttgcgcttcttgcccttttagtgagcgcaacaaatgcgttcattattccacagtgctcacttgctcctagtgccattattccacagttcctcccaccagttacttcaatgggcttcgaacatccagccgtgcaagcctacaggctacaactagcgcttgcggcgagcgttttacaacaaccaattgcccaattgcaacaacaatccttgggacattt

SEQ ID NO: 344094 - DNA, 351 bp, Zea mays
cggacgcgtgggagaaagcacaattttgtaccaacaatggcagccaaaatattttgcctccttatgctccttggtctttctgcaagtgctgctacggcgaccattttcccgcaatgctcgcaagctcctatagcttcccttcttcccccgtacctctcaccagcggtgtcttcggtatgtgaaaacccaattcttcaaccctacaggatccaacaggcaatcgcagctggcatcttacctttatcacccttgttccttcaacaatcatcagccctattacaacagttaccttttggtgcatttattggcacaaaacatcagggcacaacaactacaacaacttgtgctagc

SEQ ID NO: 344095 - DNA, 351 bp, Zea mays
gatcagcaaagcggcagtgcgtagagaggatcgtcgaacagaacagcatgaagatggtcatcgttctcgtcgtgtgcctggctctgtcagctgccagcgcctctgcaatgcagatgccctgcccctgcgcggggctgcagggcttgtacggcgctggcgccggcctgacgacgatgatgggcgccggcgggctgtacccctacgcggagtacctgaggcagccgcagtgcagcccgctggcggcggcgccctactacgccgggtgtgggcagacgagcgccatgtaccagccgctccggcaacagtgctgccagcagcagatgaggatgatggacgtgcagtccgtcgcgc

SEQ ID NO: 344096 - DNA, 354 bp, Zea mays
caagcaattgcggcgagcgttttatttcaaccaatttcccagatgcaacaacaatgcttggcacatctaacaatacaaaccatcgcaacgcaacagcaacaacaattcctaccaggactgtgccacctagccatggtggaccctggcggcttcttggaaacagaagttgcttgcataaaacccacttgctctggcaaacgtagttgcaaaccagccacaacaacagtgtgaacagtttctgccagcgctcagtcaactagccatggtgaaccctgccgtctacctacaacagcaacaactgtttttatctagcccgctcggtgtggacaatgcacctacatacctgcaacaaca

SEQ ID NO: 344097 - DNA, 363 bp, Zea mays
attgagaccaactagcaacattgaaagcacaatagtgtaccaacaatggcagcgaaaatattttgcctccttatgctccttggtctttctgcaagtgctgctacggcgaccattttcccacaatgctcacaagctcctatagcttcccttcttcccccgtacctctcaccagcggtgtcttcggtatgtgaaaacccaattcttcaaccctataggatccaacaggcaatcgcagctggcatcttacctttatcacccttgttcctccaacaatcatcagccctattacagcagttacctttggtgcatttattggcacaaaacatcatggcacaacaactacaacaacttgtgctagcaaac

SEQ ID NO: 344098 - DNA, 387 bp, Zea mays
  unsure (1)..(387): unsure at all n locations
cgcagaaacacanccaagcgaagcgcactagcaacgacctaacaacaatggctaccaagatattagccctccttgcgcttcttgccctttttgtgagcgcaacaaatgcgttcattattccacaatgctcacttgctcctagtgccattattccacagttcctcccaccagttacttcaatgggcttcgaacacctagctgtgcaagccaacatgcaacaacaagcgcttgcggcgagcgtcttacaacaaccaattgcccaattgcaacaacaatccttgccacatctaacaatacaagccatcacaacgcaacagcaacaacagttcctaccagcactgagccacctagccatggtgaaccctgccgcctacttgcaagagcagc

SEQ ID NO: 344099 - DNA, 381 bp, Zea mays
gcaacatagaaagtggaatacagtatcaacaatagagcaacaatggcggccaagatattttccatccttatgctccttgctctttctgcatgtgttgctaacgcgaccatttttcctcaatactcacaagctcctatagctgcccttcttcccccataccttccatcaatgaccgcttcagtatgtgaaaacccagcccttcaaccctacaggctccaacaagcaatcgcaacaagcaacttacctttatcacccctgttctttcaacaatcgccagccctatctttggtgcagtcattggtacaaaccatcagggcacaacagctgcagcaactcgtgctaccagtgatcagccaagtagctctggcaaacctttctccc

SEQ ID NO: 344100 - DNA, 382 bp, Zea mays
cgcactagcaacaacctaacaacaatggctaccaagatattagccctccttgcgcttcttgcccttttagtgagcgcaacaaatgcgttcattattccacagtgctcacttgctcctagtgccattattccacagttcctcccaccagttacttcaatgggcttcgaacatccagccgtgcaagcctacaggctacaactagcgcttgcggcgagcgtcttacaacaaccaattgcccaattgcaacaacaatccttggcacatctaaacctacaaaccatcgcaacgcaacagcaacaacagtttctgccatcactgagccacctagccgtggtgaaccctgtcgcctacttgcaacagcagctacttgcatccaacccac

SEQ ID NO: 344101 - DNA, 386 bp, Zea mays
attgagaccaactagcaacatagaaagcacaatagtgtaccaacaatggcagctaaaatattttgcctccttatgctccttggtctttctgcaagtgctgctacggcgaccattttcccacaatgctcacaagctcctatagcttcccttcttcccccgtacctctcaccaacggtgtcttcggtatgtgaaaacccaattcttcaaccctacaggatccaacaggcaatcgcagctggcatcttacctttatcacccttgttcctccaacaatcatcagccctattacagcagttacctttggtgcatttattggcacaaaacatcagggcacaacaactacaacaacttgtgctagcaaaccttgctgcctactctcagcaaca

SEQ ID NO: 344102 - DNA, 386 bp, Zea mays
gaaacacaccaagcgaagctacctatcaacgacttaacaacaatggctaccaagatattagccctccttgcgcttcttgccctttttgtgagcgcaacaaatgcgttcattattccacaatgctcacttgctcctagtgccattataccacagttcctccgaccagttacttcaatgggcttcgaacacctagctgtgcaagcctacaggctacaacaagcgcttgcggcgagcgtcttacaacaaccaattaaccaattgcaacaacaatccttggcacatctaaccatacaaaccatcgcaacacaacagcaacaacagttcctaccagcactgagccaactagatgtggtgaaccctgtcgcctacttgcaacagcaggtgct

SEQ ID NO: 344103 - DNA, 385 bp, Zea mays
aattagctcatcgactccagattggagaactcgacaccatgaaggtgctgatcgttgcccttgctctcctggcgctcgctgcgagcgccgcctccagtacaagcggcggctgtggctgccagacaccaccgtttcatctaccgcctccgttctatatgccgcctccgttctatctgccgccgcagcagcagccgcagccatggcaataccccactcaaccaccgcagctaagcccgtgccagcagttcggatcctgcggcgtcggcagcgtcggcagcccgttcctgggccagtgcgtcgagttcctgaggcaccagtgcagcccggcggcgacgccctacggctcgccacagtgccaggcgctgcagcagcagtgctgccacca

SEQ ID NO: 344104 - DNA, 383 bp, Zea mays
aaacacaccaagcgaagcacattagcaacaacctaacaacaatggctaccaagatattatccctccttgcgcttcttgcgctttttgcgagcgcaacaaatgcgttcattattccacaatgctcacttgctccaagttccattattacacagttcctcccaccagttacttcaatgggcttcgaacacccagctgtgcaagcctataggctacaacaagcaattgcggcgagcgtcttacaacaaccaatttcccagttgcaacaacaatccttggcacatctaacaatacaaaccatcgcaacgcaacagcaacaacaattcctaccagcactgagccacctagccatggtgaaccctgccgcctacttgcaacagcagttg

SEQ ID NO: 344105 - DNA, 72 bp, Zea mays
taacaaatcaagtattcaccatttttattaggctcccaaccaaagctgcaacggggactttctaacttctac

SEQ ID NO: 344106 - DNA, 385 bp, Zea mays
ttttgagcattcagaaacacaccaagcgaagctacctagcaacgacttaacaacaatggctaccaagatattagccctccttgcgcttcttgccctttttgtgagcgcaacaaatgcgttcattattccacaatgctcacttgctcctagtgccattataccacagttcctccgaccagttacttcaatgggcttcgaacacctagctgtgcaagcctacaggctacaacaagcgcttgcggcgagcgtcttacaacaaccaattaaccaattgcaacaacaatccttggcacatctaaccatacaaaccatcgcaacacaacagcaacaacagttcctaccagcactgagccaactagatgtggtgaaccctgtcgcctacttg

SEQ ID NO: 344107 - DNA, 378 bp, Zea mays
caacatagaaagcacaatagtgtaccaacaatggcagctaaaatattttgcctccttatgctccttggtctttctgcaagtgctgctacggcgaccattttcccacaatgctcacaagctcctatagcttcccttcttcccccgtacctctcaccaacggtgtcttcggtatgtgaaaacccaattcttcaaccctacaggatccaacaggcaatcgcagctggcatcttacctttatcacccttgttcctccaacaatcatcagccctattacagcagttacctttggtgcatttattggcacaaaacatcagggcacaacaactacaacaacttgtgctagcaaaccttgctgcctactctcagcaacagcagttt

SEQ ID NO: 344108 - DNA, 331 bp, Zea mays
tctaagcttgcctgttcatttattactgagagcaagtgtaatagtgatatagttaatgctaaggtagaggtgagaagagagttatgctgttgtagtggttagaagagaagagtgcaatcaacgagctcagcatttttgtgtgtgtgtagctttctgaactagataacaaagactatgtatgtttttttgtttagctttctgaactaggttcgctctaaaaatctacaatctgaaccaagtacaatggcaggatagattgtatagaaaatctatagatttttatagttcaattcagaatcactttctactaaaaaaaaaaaaaattttaaaa

SEQ ID NO: 344109 - DNA, 378 bp, Zea mays
gcgaagcgcactagcaacaacctaacaacaatggctaccaagatattatccctccttgcgcttcttgcgctttttgcgagcgcaacaaatgcgtccattattccacaatgctcacttgctcctagttccattattccacagttcctcccaccagttacttcaatggccttcgaacacccagctgtgcaagcctataggctacaacaagcgattgcggcgagcgtcttacaacaaccaattgcccaattgcaacaacaatccttggcacatctaacaatacaaaccatcgcaacgcaacagcaacaacagttcctaccagcactgagccacctagccatggtgaaccctgtcgcctacttgcaacagcagctgcttgca

SEQ ID NO: 344110 - DNA, 374 bp, Zea mays
attttgagcattcagaaacacaccaagcgaagcacattagcaacaacctaacaacaatggctaccaagatattatccctccttgcgcttcttgcgctttttgcgagcgcaacaaatgcgttcattattccacaatgctcacttgctccaagttccattattacacagttcctcccaccagttacttcaatgggcttcgaacacccagctgtgcaagcctataggctacaacaagcaattgcggcgagcgtcttacaacaaccaatttcccagttgcaacaacaatccttggcacatctaacaatacaaaccatcgcaacgcaacagcaacaacaatttctaccagcactgagccacctagccatggtgaaccct

SEQ ID NO: 344111 - DNA, 378 bp, Zea mays
agcaacatagaaagcacaatagtgtaccaacaatggcagctaaaatattttgcctccttatgctccttggtctttctgcaagtgctgctacggcgaccattttcccacaatgctcacaagctcctatagcttcccttcttcccccgtacctctcaccaacggtgtcttcggtatgtgaaaacccaattcttcaaccctacaggatccaacaggcaatcgcagctggcatcttacctttatcacccttgttcctccaacaatcatcagccctattacagcagttacctttggtgcatttattggcacaaaacatcagggcacaacaactacaacaacttgtgctagcaaaccttgctgcctactctcagcaacagcagt

SEQ ID NO: 344112 - DNA, 383 bp, Zea mays
caactagcaacatagaaagcacaattttgtaccaacaatggcagccaaaatattttgcttccttatgctccttggtctttctgcaagtgttgctaccgcaaccattttcccacaatgctcacaagctcctatagcttcccttcttcccccatacctctcaccagcggtgtcttcaatgtgtgaaaacccaattgttcaaccctacaggatccaacaggcaatcgcaacaggcatcttaccattatcacccttgttcctccaacaaccgtcagccctattacagcagttacctttggtccatttggtggcacaaaacatcagggcacaacaactacaacaacttgtgctagcaaaccttgctgcatactctcagcaacatcagt

SEQ ID NO: 344113 - DNA, 379 bp, Zea mays
caacaagcaacatataaagtgttttcattagcaacaatagagcaacaatggcgaccaagatattttccctccttatgctccttgctctttctgcatgtgttgctaacgcgacaattttccctcaatgctcacaagctcctatagcttcccttcttcccccataccttccatcaatgatagcttcagtatgtgaaaacccagctcttcaaccctataggctccaacaagcaatcgcagcaagcaacatacctttatcacccttgtttcaacaatcgccagccctatctttggtgcagtcattggtacaaaccatcagggcacagcagctgcagcaactcgtgctaccttgtatcaaccaagtagctctggcaaacctttc

SEQ ID NO: 344114 - DNA, 384 bp, Zea mays
attgagaccaacaagcaacatagaaagtggaatccagtagcaacaatagagcaacaatggcgaccaagatattttccctccttatgctccttgctctttctgcatgtgttgctaacgcgacaattttccctcaatgctcacaagctcctatagcttcccttcttcccccataccttccatcaatgatagcttcagtatgtgaaaacccagctcttcaaccctataggctccaacaagcaatcgcagcaagcaacatacctttatcacccttgtttcaacaatcgccagccctatctttggtgcagtcattggtacaaaccatcagggcacagcagctgcagcaactcgtgctacctgtgatcaaccaagtagctctggcaaacc

SEQ ID NO: 344115 - DNA, 393 bp, Zea mays
  unsure (1)..(393): unsure at all n locations
gacccaggggnncggggaagcgcactagcaacaacctaactttaatggctaccaagacattatccctccttgcgcttcttgcgctttttgcgagcgcaacaaatgcgttcattattccacaatgctcacttgctcctagttccattattgcacagttcctcccaccagttacttcaatggcctttgaacacccagctgggcaagcctataggctacaacaagcgattgcggagagcgtcttacaacaaccaattgcccaattgcaacaacaatccttggcacatttaacaatacaaaccatcgcaacgcaacagcaacaacagttcctaccagcactgagccacctagccatggtgaaccctgtcgcctacttgcaacaacagctgcttgcat

SEQ ID NO: 344116 - DNA, 182 bp, Zea mays
  unsure (1)..(182): unsure at all n locations
cccgggcggacccacgcgtccggaccattagctttatctactccagatcgtataagaacccgatcgacaccatgagggtgttgctcgtngccctcgctctcctggctctcgctgcgagcgccacctccacgcatacaagcggcggctgcgaaagccatcctcctaccccagttaatctacct

SEQ ID NO: 344117 - DNA, 302 bp, Zea mays
gcagatgaagcggcagccaccacactctcgcagcggcgacgactcgccggccggcgagagaggaagcgacggagggttgaagaaggggaaggggagagggaggtggggcggcgggagtcggaggcggaacgatcagcggctgggcggcggctggttttttttttttctcaattttttttttttttatcttttttttttttcccatttatattcttttttttccacattcttttttttttttctcctcactttttttttttttgcttcaaatatttttttttttttttctgttcaactttttt

SEQ ID NO: 344118 - DNA, 381 bp, Zea mays
tgagcattcagaaacacaccatgctaagcgcactagcaacgacctaacaacaatggctaccaagatattagccctccttgcgcttcttgccctttttgtgagcgcaacaaatgcgttcattattccacaatgctcacttgctcctagtgccattattccacagttcctcccaccagttacttcaatgggcttcgaacacctagctgtgcaagccaacatgcaacaacaagcgcttgcggcgagcgtcttacaacaaccaattgcccaattgcaacaacaatccttgccacatctaacaatacaagccatcacaacgcaacagcaacaacagttcctaccagcactgagccacctagccatggtgaaccctgccgcctactt

SEQ ID NO: 344119 - DNA, 378 bp, Zea mays
gctttatctactccagagcgcttattaacccgatcgacaccatgagggtgttgctcgttgccctcgctctcctggctctcgctgcgagcgccacctccacgcatacaagcggcggctgcggctgccagccaccgccgccggttcatctaccgccgccggtgcatctgccacctccggttcacctgccacctccggtgcatctcccaccgccggtccacctgccgccgccggtccacctgccaccgccggtccatgtgccgccgccggttcatttgccgccgccaccatgccactaccctacttaaccgccccgggctcagtcttatccccagccacacccattcccgtgccaacagtcgaattcaagctccgtccatc

SEQ ID NO: 344120 - DNA, 381 bp, Zea mays
agaaagcacaatagtgtaccatcaatggcagccaaaatattttgcctccttatgctccttggtatttctgcaagtgctgctacggcgaccattttcccgcaatgctcacaagctcctatagcttcccttcttcccccgtacctctcaccagcggtgtcttcggtatgtgaaaacccaattcttcaaccctacaggatccaacaggcaatcgcagctggcatcttacctttatcacccttgttcctccaacaatcatcagccctattacagcagttacctttggtgcatttattggcacaaaacatcagggcacaacaactacaacaacttgtgctagcaaaccttgctgcctactctcagcaacagcagtttctttcattc

SEQ ID NO: 344121 - DNA, 385 bp, Zea mays
gagcattcagaaacacaccaagcgaagctcactagcaacgacctaacaacaatggctaccaagatattagccctccttgcgcttcttgccctttttgtgagcgcaacaaatgcgttcattattccacaatgctcacttgctcctagtgccattattccacaattcctcccaccagttacttcaatgggcttcgaacacctagctgtgcaagcctacatgctacaacaagcgcttgcggcgagcgtcttacaacaaccaattgaccaattgcaacaacaatccttggcacatctaaccatacaaaccatcgcaacgcaacagcaacaacagttcctaccagcactgagccaactagctgtggtgaaccctatcgcctacttgcaat

SEQ ID NO: 344122 - DNA, 385 bp, Zea mays
cggacgcgtgggaaagcacaatagtgtaccaacaatggcagccaaaatattttgcctccttatgctccttggtatttctgcaagtgctgctacggcgaccattttcccgcaatgctcacaagctcctatagcttcccttcttcccccgtacctctcaccagcggtgtcttcggtatgtgaaaacccaattcttcaaccctacaggatccaacaggcaatcgcagctggcatcttacctttatcacccttgttcctccaacaatcatcagccctattacagcagttacctttggtgcatttattggcacaaaacatcagggcacaacaactacaacaacttgtgctagcaaaccttgctgcctactctcagcaacagcagtttctt

SEQ ID NO: 344123 - DNA, 385 bp, Zea mays
attgagaccaactagcaacatagaaagctcaatattgtaccaataatggcagccaaaatattttgcctcattatgctccttggtctttctgcaagtgctgctacggcgagcattttcccgcaatgctcacaagctcctatagcttcccttcttcccccatacctctcaccagcgatgtcttcagtatgtgaaaatccaattcttctaccctacaggatccaacaggcaatcgcagcaggcatcttacctttatcacccttgttcctccaacaatcatcagccctattacagcagttacctttggtgcatttattggcacaaaacatcagggcacaacaactacaacaactcgtgctagcaaaccttgctgcctactctcagcaac

SEQ ID NO: 344124 - DNA, 381 bp, Zea mays
  unsure (1)..(381): unsure at all n locations
agaaagcacaatagtgtaccaacaatggcagccaaaatattttgcctccttatgctccttggtctttctgcaagtgctgctacggcgaccattttcccgcaatgctcgcaagctcctatagcttcccttcttcccccgtacctctcaccagcggtgtcttcggtatgtgaaaacccaattcttcaaccctacaggatccaacaggcaatcgcagctggcatcttacctttatcacccttgttcctccaacaatcatcagccctattacaacagttacctttggtgcatttattggcacaaaacatcaaggcacaacaactacaacaacttgtgctagcaaaccttgctgnctactctcagcaacagcagtttcttccattc

SEQ ID NO: 344125 - DNA, 385 bp, Zea mays
tgcgttcattattccacagtgctcacttgctcctagtgccattattccacagttcctcccaccagttacttcaatgggcttcgaacatccagccgtgcaagcctacaggctacaactagcgcttgcggcgagcgtcttacaacaaccaattgcccaattgcaacaacaatccttggcacatctaaacctacaaaccatcgcaacgcaacagcaacaacagtttctgccatcactgagccacctagccgtggtgaaccctgtcgcctacttgcaacagcagctacttgcatccaacccacttgctctggcgaacgtagctgcataccagcaacaacaacgtctgcaacagtttatgccagcgctcagtcaactagccatggtgaac

SEQ ID NO: 344126 - DNA, 307 bp, Zea mays
ccaactagcaacatagaaagttcatttgtgtaccaacaatggcagccaaaatattttgcttccttatgctccttggtctttctgcaagtgctgctaccgcaaccattttcccacaatgctcacaagctcctatagcttcctttcttcccccataccttttaccagcggtgtctacagtttgtgaaaacccaatttttcaaccctacaggatccaacaggcaatcgcagcaggcatcttacctttatcacccttgtttctccaacaaccgttagtcctatttacagcagtttaccttggtgcatttgt

SEQ ID NO: 344127 - DNA, 386 bp, Zea mays
attttgagcattcagaaacacaccatgcgaagcgcactagcaacgacctaacaacaatggctaccaagatattagccctccttgcgcttcttgccctttttgtgagcgcaacaaatgcgttcattattccacaatgctcacttgctcctagtgccattattccacagttcctcccaccagttacttcaatgggcttcgaacacctagctgtgcaagccaacatgcaacaacaagcgcttgcggcgagcgtcttacaacaaccaattgcccaattgcaacaacaatccttgccacatctaacaatacaagccatcacaacgcaacagcaacaacagttcctaccagcactgagccacctagccatggtgaaccctgccgcctacttg

SEQ ID NO: 344128 - DNA, 346 bp, Zea mays
cagaaacacaccaagcgaagctcattagcaacaacctaacaacaatggctaccaagatattatccctccttgcgcttcttgcgctttttgcgagcgcaacaaatgcgttcattattccacaatgctcacttgctccaagttccattattacacagttcctcccaccagttacttcaatgggcttcgaacacccagctgtgcaagcctataggctacaacaagcaattgcggcgagcgtcttacaacaaccaatttcccagttgcaacaacaatccttggcacatctaacaatacaaaccatcgcaacgcaacagcaacaacaatttctaccagcactgagccacct

SEQ ID NO: 344129 - DNA, 384 bp, Zea mays
  unsure (1)..(384): unsure at all n locations
cccacgcgtncgattttgagcattcagaaacacaccaagcgaagcacattagcaacaacctaacaacaatggctaccaagatattatccctccttgcgcttcttgcgcttgttgcgagcgcaacaaatgcgttcattattccacaatgctcacttgctccaagttccattattacacagttcctcccaccagttacttcaatgggcttcgaacacccagctgtgcaagcctataggctacaacaagcaattgcggcgagcgtcttacaacaaccaatttcccagttgcaacaacaatccttggcacatctaacaatacaaaccatcgcaacgcaacagcaacaacaattcctaccagcactgagccacctagccatggtgaacc

SEQ ID NO: 344130 - DNA, 385 bp, Zea mays
caacaagcaacatagaaagtggaatccagtagcaacaatagagcaacaatggcgaccaagatattttccctccttatgctccttgctctttctgcatgtgttgctaacgcgacaattttccctcaatgctcacaagctcctatagcttcccttcttcccccataccttccatcaatgatagcttcagtatgtgaaaacccagctcttcaaccctataggctccaacaagcaatcgcagcaagcaacatacctttatcacccttgtttcaacaatcgccagccctatctttggtgcagtcattggtacaaaccatcagggcacagcagctgcagcaactcgtgctacctgtgatcaaccaagtagctctggcaaacctttctccct

SEQ ID NO: 344131 - DNA, 387 bp, Zea mays
gcgcaacaaatgcgttcattattccacagtgctcacttgctcctagtgccattattccacagttcctcccaccagttacttcaatgggcttcgaacatccagccgtgcaagcctacaggctacaactagcgcttgcggcgagcgtcttacaacaaccaattgcccaattgcaacaacaatccttggcacatctaaacctacaaaccatcgcaacgcaacagcaacaacagtttctgccatcactgagccacctagccgtggtgaaccctgtcgcctacttgcaacagcagctacttgcatccaacccacttgctctggcgaacgtagctgcataccagcaacaacaacgtctgcaacagtttatgccagcgctcagtcaactagcca

SEQ ID NO: 344132 - DNA, 373 bp, Zea mays
cccacgcgtccgcccacgcgttcgtccacgcgtccgcccacgcgtccgcccacgcgtgcgcccacgcgttcgcccacgcgttcgcggacgcgtgggctgagaaaacacttaccatggaggtagctggagatcctggcaaaattgctgtagtgcagaggaatctatggaaatttggaatcaaagaaatttgcaggacaggaaaaattgctttgagacgtgaaaggattggtgcaacagcccggttctggcgattttctgttgctttttacccagacctgattgaggcgttgtcgaaaaattcacttacattttgtaataggacagttattggtatgtttggttaaccatccaatgctgggggtgattgttatcc

SEQ ID NO: 344133 - DNA, 366 bp, Zea mays
ttcttcccccataccttccattaatgtccgcttcagtatgtgaaaacccagcccttcaaccctacaggctccaacaagcaatcgcaacaagcaacttacctttatcacccctgttctttcaacaatcgccagccctatctttggtgcagtcattggtacaaaccatcagggcacaacagctgcagcaactcgtgctaccagtgatcagccaagtagctttggcaaacctttctccctactctcagtaacaacaatttttttcattcaaccaactgtctacactgaaccctgctgcttatttgcagcaacaacaactactaccattcagccaggtagcttctggcttcttttaagaaaaacaatttt

SEQ ID NO: 344134 - DNA, 373 bp, Zea mays
gcacaatagtgtaccaacaatggcagccataatattttgcttccttatgctccttggtctttctgcaagtgctgctaccgcaaccattttcccacaatgctcacaagctcctatagcttcctttcttcccccatacctctcaccagcggtgtcttcagtatgtgaaaacccaattcttcaaccctacaggatccaacaggcaatcgcagcaggcatcttacctttatcacccttgttcctccaacaaccgtcagccctattacagcagttacctttggtgcatttgttggcacaaaacatcaaggcacaacaactacaacaacttgtgctaggaaaccttgctgtctactctcagcaacagcagtttctttca

SEQ ID NO: 344135 - DNA, 384 bp, Zea mays
agcattcagaaacacaccaagcgatgcacattagcaacaacctaacaacaatggctaccaagatattatccctccttgcgcttcttgcgctttttgcgagcgcaacaaatgcgttcattattccacaatgctcacttgctccaagttccattattacacagttcctcccaccagttacttcaatgggcttcgaacacccagctgtgcaagcctataggctacaacaagcaattgcggcgagcgtcttacaacaaccaatttcccagttgcaacaacaatccttggcacatctaacaatacaaaccatcgcaacgcaacagcaacaacaattcctaccagcactgagccacctagccatggtgaaccctgccgcctacttgcaac

SEQ ID NO: 344136 - DNA, 384 bp, Zea mays
attttgagcattcagaaacacaccaagctaagcacattagcaacaacctaacaacaatggctaccaagatattatccctccttgcgcttcttgcgctttttgcgagcgcaacaaatgcgttcattattccacaatgctcacttgctccaagttccattattacacagttcctcccaccagttacttcaatgggcttcgaacacccagctgtgcaagcctataggctacaacaagcaattgcggcgagcgtcttacaacaaccaatttcccagttgcaacaacaatccttggcacatctaacaatacaaaccatcgcaacgcaacagcaacaacaattcctaccagcactgagccacctagccatggtgaacccttgcgcctact

SEQ ID NO: 344137 - DNA, 388 bp, Zea mays
ggcaatcgcagcaggcatcttacctttatcacccttgttcctccaacaatcatcagccctattacagcagttacctttggtgcatttattggcacaaaacatcagggcacaacaactacaacaactcgtgctagcaaaccttgctgcctactctcagcaacagcagttacctttggtgcatttgttggcacaaaacatcagggcacaacaactacaacaactcgtgctagcaaaccttgctgcctactctcagcaacaacagtttctgccattcaaccaactagctgcattgaactctgctgcttatttgcagcaacaacaactactaccattcagccagctagctgctgcctacccccggcaatttcttccattcaaccaactggca

SEQ ID NO: 344138 - DNA, 175 bp, Zea mays
aaaaaaaaaataagtttaataaaagagaaaaaaaaaaaaaaaggggtgggagaaaaaaaaaaggaggaggaaaaaaaaagtggtaaaaaaaaaaaaaataagaaagaaaaaaaaataaggagaaaaaaaaagagaagaagaaaaaaaagaaatagaaaaaaagaatagatggagg

SEQ ID NO: 344139 - DNA, 356 bp, Zea mays
ttttgagcattcagaaacacaccaatcgaagcacattagcaacaacctaacaacaatggctaccaagatattatccctccttgcgcttcttgcgctttttgcgagcgcaacaaatgcgttcattattccacaatgctcacttgctccaagttccattattacacagttcctcccaccagttacttcaatgggcttcgaacacccagctgtgcaagcctataggctacaacaagcaattgcggcgagcgtcttacaacaaccaatttcccagttgcaacaacaatccttggcacatctaacaatacaaaccatcgcaacgcaacagcaacaacaatttctaccagcactgagccacc

SEQ ID NO: 344140 - DNA, 378 bp, Zea mays
cagaaacacaccaagcgaagcacatttgcaacaacctaacaacaatggctaccaagatattatccctccttgcgcttcttgcgctttttgcgagcgcaacaaatgcgttcattattccacaatgctcacttgctccaagttccattattacacagttcctcccaccagttacttcaatgggcttcgaacacccagctgtgcaagcctataggctacaacaagcaattgcggcgagcgtcttacaacaaccaatttcccagttgcaacaacaatccttggcacatctaacaatacaaaccatcgcaacgcaacagcaacaacaattcctaccagcactgagccacctagccatggtgaaccctgccgcctacttgcaac

SEQ ID NO: 344141 - DNA, 402 bp, Zea mays
  unsure (1)..(402): unsure at all n locations
gaaacacanccnnnagcgaagctacctatcatctgacttaacaacccaatggctaccaagatatgtagccctccttggcgcttcttggccctttttgtgaagcgcnnaacaaatgcgttcattattnnncacaatgctcactttgctcctagtgccattataccacagnnttcctccgaccagttacttcaatgggcttcgaacacctagctgtgcaagcctacaggctacaacaagcgcttgcggcgagcgtcttacaacaaccaattaaccaattgcaacaacaatccttggcacatctaaccatacaaaccatcgcaacacaacagcaacaacagttcctaccagcactgagccaactagatgtggtgaaccctgtcgcctacttgcaacagcaggtgc

SEQ ID NO: 344142 - DNA, 404 bp, Zea mays
cggggcggaccaacccgtccgttttttcccccgtacctttaaccagtggtgtcttcggtatgtgaaaacccaattcttcaaccctataggatccaacaggcaatcgcagctggcatcttacctttatcacccttgttcctccaacaatcatcagccctattacagcagttacctttggtgcatttattggcacaaaacatcagggcacaacaactacaacaacttgtgctagcaaaccttgctgcctactctcagcaacaacagtttcttccattcaaccaactagctgcattgaactctgcttcttatttgcaacaacaacaactaccattcagccagctatctgctgcctacccccagcaatttcttccattcaaccaactgacagctttgaactctcctgc

SEQ ID NO: 344143 - DNA, 386 bp, Zea mays
cggacgcgtgggttcagtcagctagctgctgcctacccccagcaatttcttccattcaaccaactggcagcattgaactctgctgcttatttacaacagcaacagctaccaccattcagccagctagctgatgtgagccctgttgccttcttgacacaacaacagttgttgccgttctacctgcacgctgcgcctaacgctggcaccctcttacaactgcaacaattgctgccattcaaccaacttgctttgacaaacccaacagcgttctaccaacaacccatcattggtggtgccctcttttagattgcttatgagttatagttcaataatgaagttttttggatgatgtttggggcttcccagaaataagaaagtacatttct

SEQ ID NO: 344144 - DNA, 394 bp, Zea mays
gcaacatagaaagcacaatattgttccaattatggcagccaaaatattttgcctcattatgctccttggtctttctgcaagtgctgctacggcgagcattttcccgcaatgctcacaagctcctatagcttcccttcttcccccatacctctcaccagcgatgtcttcagtatgtgaaaatccaattcttctaccctacaggatccaacaggcaatcgcagcaggcatcttacctttatcacccttgttcctccaacaatcatcagccctattacagcagttacctttggtgcatttattggcacaaaacatcagggcacaacaactacaacaactcgtgctagcaaaccttgctgcctactctcagcaacagcagttacctttggtgcatttg

SEQ ID NO: 344145 - DNA, 367 bp, Zea mays
  unsure (1)..(367): unsure at all n locations
gttctagatcgcgagcggccgccctttttttttttttttatcagnggtcagcatttgggcgagctcaaataagttacatggttaagttacatggttacggtagcaatcacacttaagttacatggtgatctattcataatgttatatgctagtatgttcttctttgcatttcccattaccgggaaattgagaaggaaaagtttgatgttaatagcccttcatgatacctctttgcaaataacatggaatcacaactgcttcttagccaactttctgttatgctccagagcagggtaaactctttgatactgcaagatagcccaaacaaggtgcctaaaagagaactcgggccacaaaggatctggat

SEQ ID NO: 344146 - DNA, 379 bp, Zea mays
attgagaccaactagcaacatataatgcacaatagtgtaccaacaatggcagccaaaatattttgcctccttatgctccttggtctttctgcaagtgctgctacggcgaccattttcccgaaatgctcgcaagctcctatagcttcccttcttcccccgtacctctcaccagcggtgtcttcggtatgtgaaaacccaattcttcaaccctacaggatccaacaggcaatcacagctggcatcttacctttatcacccttgttcctccaacaatcatcagccctattacatcagttacctttggtgcatttattggcacaaaacatcagggcacaacaactacaacaacttgtgctagcaaaccttgctgcctaccccc

SEQ ID NO: 344147 - DNA, 362 bp, Zea mays
gggtcttcagaccattagctttatctactccagagcgcagaagaacccgatcgacaccatgagggtgttgctcgttgccctcgctctcctggctctcgctgcgagcgccaccttcacgcatacaagcggcggctgcggctgccagccaccgccgccggttcatctaccgccgccggggcatctgccacctccggttcacctgccacctccggtgcatctcccaccgccggtccacctggcgtcgtcggttcacctgccaccgtcggtccatgtgccgccgccggttcatctgccgtcgccaccatgccactaccctacttaaccggcccgggcttagccttattcccagccacacccatgcc

SEQ ID NO: 344148 - DNA, 374 bp, Zea mays
cccacgcgtccgcaacaagcaacatttaaagtggaatccagtagcaacaatagagcaacaatggagaccaagatattttccctccttatgctccttgctctttctacatgtgttgctaacgcgacaattttccctcaatgctcacaagctcctatagcttccctttttcccccataccttccatcaattatagcttcagtatgtgaaaacccagctcttcaaccatataggcttcaacaagcaatcgcagcaagcaacatacctttatcgcccttgttgtgtcaacaatcgccagccctatctttggtgcagtcattggtacaaaccatcagggcacaacagctgcagcaactcgtgctacctgtgatcaacca

SEQ ID NO: 344149 - DNA, 384 bp, Zea mays
cagaaacacaccaagcgaagcgcactagcaacaacctaacaacaatggctaccaagatattagccctccttgcgcttcttgcccttttagtgagcgcaacaaatgcgttcattattccacagtgctcacttgctcctagtgccattattccacagttcctcccaccagttacttcaatgggcttcgaacatccagccgtgcaagcctacaggctacaactagcgcttgcggcgagcgtcttacaacaaccaattgcccaattgcaacaacaatccttggcacatctaaacctacaaaccatcgcaacgcaacagcaacaacagtttctgccatcactgagccacctagccgtggtgaaccctgtcgcctacttgcaacagcagc

SEQ ID NO: 344150 - DNA, 338 bp, Zea mays
cgggaaagaccggggcgggcccaacccgtccggcaacaactactaccattcagccagttagctggtgtgagccctgctaccttcttgatacaaccacagttgttgccgttctacctgcacgctgcgcctaacgctggcaccctcttacaactgcaacaattgctgccattcaaccaacttgctttgacaaacccaacagcgttctaccaacaacccatcattggtggtgccctcttttagattgcttatgagttatagttcaataatgaagttttttggatgatgtttgtggcttcccagaaataagaaagtacatttcttgaaaaaaaaacattttt

SEQ ID NO: 344151 - DNA, 415 bp, Zea mays
ggaaaaaccggggcggcccaagccgtccgcccacgcgtccgattttgagcatttttttacacaccaagcgaagcacattagcaacaacctaacaacaatggctaccaagatattatccctccttgcgcttcttgcgctttttgcgagcgcaacaaatgcgttcattattccacaatgctcacttgctccaagttccattattacacagttcctcccaccagttacttcaatgggcttcgaacacccagctgtgcaagcctataggctacaacaagcaattgcggcgagcgtcttacaacaaccaatttcccagttgcaacaacaatccttggcacatctaacaatacaaaccatcgcaacgcaacagcaacaacaattcctaccagcactgagccacctagccatggtgaaccct

SEQ ID NO: 344152 - DNA, 216 bp, Zea mays
  unsure (1)..(216): unsure at all n locations
cgacccacgcgttcggccatgcgccgncgacgtcgtttattttgaggtgtgggcaggactgatgggctggccggtgggggacgggaaagagctgtttgcacgcgggctgctgggtgtcgagctcggccccgatgacgttccgccgtttgcagcaaagctatactcgtgccttgagtcaattcgggcatcactgtgacattttgaggttctggagga

SEQ ID NO: 344153 - DNA, 381 bp, Zea mays
cagaaacacaccaagcgaagctacctagcaacgacttaacaacaatggctaccaagatattagccctccttgcgcttcttgccctttttgtgagcgcaacaaatgcgttcattattccacaatgctcacttgctcctagtgccattataccacagttcctccgaccagttacttcaatgggcttcgaacacctagctgtgcaagcctacaggctacaacaagcgcttgcggcgagcgtcttacaacaaccaattaaccaattgcaacaacaatccttggcacatctaaccatacaaaccatcgcaacacaacagcaacaacagttcctaccagcactgagccaactagatgtggtgaaccctgtcgcctacttgcaacagc

SEQ ID NO: 344154 - DNA, 379 bp, Zea mays
gtggagtcttcagacaccatcgactacgtcaaggccaagatccaggacaaggagggcattcccccagaccagcagcggctcatctttgctggaaagcagcttgaggacgggcgcacgctggccgactacaacatccagaaggagagcaccctccacttggtgctgcgcctcaggggaggcatgcagatcttcgtgaagaccctgactggcaagactatcaccctcgaggtggagtcttcagacaccatcgacaacgtcaaggccaagatccaggacaaggagggcatcccaccggaccagcagcgtttgatcttcgctggcaagcagctggaggatggccgcacccttgcggattacaacatccagaaagagagcaccc

SEQ ID NO: 344155 - DNA, 381 bp, Zea mays
ttgagaccaactagcaacatagaaagcacaatagtgtaccaacaatggcagctaaaatattttgcctccttatgctccttggtctttctgcaagtgctgctacggcgaccattttcccacaatgctcacaagctcctatagcttcccttcttcccccgtacctctcaccaacggtgtcttcggtatgtgaaaacccaattcttcaaccctacaggatccaacaggcaatcgcagctggcatcttacctttatcacccttgttcctccaacaatcatcagccctattacagcagttacctttggtgcatttattggcacaaaacatcagggcacaacaactacaacaacttgtgctagcaaaccttgctgcctactctcagc

SEQ ID NO: 344156 - DNA, 376 bp, Zea mays
tgacagatcagcaaagcggcagtgcgtagagaggatcgtcgaacagaacagcatgaagatggtcatcgttctcgtcgtgtgcctggctctgtcagctgccagcgcctctgcaatgcagatgccctgcccctgcgcggggctgcagggcttgtacggcgctggcgccggcctgacgacgatgatgggcgccggcgggctgtacccctacgcggagtacctgaggcagccgcagtgcagcccgctggcggcggcgccctactacgccgggtgtgggcagacgagcgccatgtaccagccgctccggcaacagtgctgccagcagcagatgaggatgatggacgtgcagtccgtcgcgcagcagctgcagatgatgatg

SEQ ID NO: 344157 - DNA, 380 bp, Zea mays
caacaagcaacatagaaagtggaatccagtagcaacaatagagcaacaatggcgaccaagatattttccctccttatgctccttgctctttctgcatgtgttgctaacgcgacaattttccctcaatgctcacaagctcctatagcttcccttcttcccccataccttccatcaatgatagcttcagtatgtgaaaacccagctcttcaaccctataggctccaacaagcaatcgcagcaagcaacatacctttatcacccttgtttcaacaatcgccagccctatctttggtgcagtcattggtacaaaccatcagggcacagcagctgcagcaactcgtgctacctgtgatcaaccaagtagctctggcaaacctttc

SEQ ID NO: 344158 - DNA, 385 bp, Zea mays
gcacaatagtgtaccaacaatggcagccaaaatattttgcttccttatgctccttggtctttctgcaagtgttgctaccgcaaccattttcccacaatgctcacaagctcctatagcttcccttcttcccccatacctctcaccagcggtgtcttcaatgtgtgaaaacccaattgttcaaccctacaggatccaacaggcaatcgcaacaggcatcttaccattatcacccttgttcctccaacaaccgtcagccctattacagcagttacctttggtccatttggtggcacaaaacatcagggcacaacaactacaacaacttgtgctagcaaaccttgctgcatactctcagcaacatcagtttcttccattcaaccaactg

SEQ ID NO: 344159 - DNA, 384 bp, Zea mays
ttagcaacatagaaagcacaatagtgtaccaacaatggcagctaaaatattttgcctccttatgctccttggtctttctgcaagtgctgctacggcgaccattttcccacaatgctcacaagctcctatagcttcccttcttcccccgtacctctcaccaacggtgtcttcggtatgtgaaaacccaattcttcaaccctacaggatccaacaggcaatcgcagctggcatcttacctttatcacccttgttcctccaacaatcatcagccctattacagcagttacctttggtgcatttattggcacaaaacatcagggcacaacaactacaacaacttgtgctagcaaaccttgctgcctactctcagcaacaagcagttct

SEQ ID NO: 344160 - DNA, 383 bp, Zea mays
ctagcaacatagaaagcacaatagtgtaccaacaatggcagctaaaatattttgcctccttatgctccttggtctttctgcaagtgctgctacggcgaccattttcccacaatgctcacaagctcctatagcttcccttcttcccccgtacctctcaccaacggtgtcttcggtatgtgaaaacccaattcttcaaccctacaggatccaacaggcaatcgcagctggcatcttacctttatcacccttgttcctccaacaatcatcagccctattacagcagttacctttggtgcatttattggcacaaaacatcagggcacaacaactacaacaacttgtgctagcaaaccttgctgcctactctcagcaacagcaagttc

SEQ ID NO: 344161 - DNA, 374 bp, Zea mays
ctctgctgcttatttgcaacaacaattaccattcagccagctagttgctgcctacccccagcaatttcttccattcaaccaactagcagcattgaactctgctgcttatttacagcagcaacaactactaccattcagccagctagctgatgtgagccctgctgccttcttgacacaacaacagttgttgccgttctacctgcacgctatgcctaacgctggcaccctcttacaactgcaacaattgctgccattcaaccaacttgctttgacaaactcaacagtgttctaccaacaacccatcattggtggtgccctcttttagattgcttatgagttatagttcaataatgaaagttttttggatgatgttt

SEQ ID NO: 344162 - DNA, 338 bp, Zea mays
attttcagcattcagaaacacaccaagcgaagcgcactagcaacaacctaacaacaatggctaccaagatattagccctccttgcgcttcttgcccttttagtgagcgcaacaaatgcgttcattattccacagtgctcacttgctcctagtgccattattccacagttcctcccaccagttacttcaatgggcttcgaacatccagccgtgcaagcctacaggctacaactagcgcttgcggcgagcgtcttacaacaaccaattgcccaattgcaacaacaatccttggcacatctaaacctacaaaccatcgcaacgcaacagcaacaacagttt

SEQ ID NO: 344163 - DNA, 381 bp, Zea mays
aacacaccaagcgaagcgcactagcaacaacctaacaacaatggctaccaagatattagccctccttgcgcttcttgcccttttagtgagcgcaacaaatgcgttcattattccacagtgctcacttgctcctagtgccattattccacagttcctcccaccagttacttcaatgggcttcgaacatccagccgtgcaagcctacaggctacaactagcgcttgcggcgagcgtcttacaacaaccaattgcccaattgcaacaacaatccttggcacatctaaacctacaaaccatcgcaacgcaacagcaacaacagtttctgccatcactgagccacctagccgtggtgaaccctgtcgcctacttgcaacagcagct

SEQ ID NO: 344164 - DNA, 358 bp, Zea mays
tgcctgtgcacttctccatcaccattactgggtcttcagaccattagctggatggtactccagagcgcagaagaacccgatcgacaccatgagggtgttgctcgttgccctcgctctcctggctctcgctgcgagcgccacctccacgcatacaagcggcggctgcggctgccagccaccgccgccggttcatctaccgccgccggtgcatctgccacctccggttcacctgccacctccggtgcatctcccaccgccggtccacctgccgccgccggtccacctgccaccgccggtccatgtgccgccgccggttcatctgccgtcgccaccatgccactaccctacttaaccgccc

SEQ ID NO: 344165 - DNA, 380 bp, Zea mays
caaagcggcagtgcgtagagtggtttttcgaacagaacagcatgaagatgggcggggttctcgtcgtgtgcctggctctgtcagctgccagcgcctctgcaatgcagatgccctgcccctgcgcggggctgcagggcttgtacggcgctggcgccggcctgacgacgatgatgggcgccggcgggctgtacccctacgcggagtacctgaggcagccgcagtgcagcccgctggcggcggcgccctactacgccgggtgtgggcagacgagcgccatgtaccagccgctccggcaacagtgctgccagcagcagatgaggatgatggacgtgcagtccgtcgcgcagcaactgcagatgatgatgcaacttgagcgtgcc

SEQ ID NO: 344166 - DNA, 386 bp, Zea mays
gaccaacaagcaacatagaaagtggaatccagtagcaacaatagagcaacaatggagaccaagatattttccctccttatgctccttgctctttctacatgtgttgctaacgcgacaattttccctcaatgctcacaagctcctatagcttccctttttcccccataccttccatcaattatagcttcagtatgtgaaaacccagctcttcaaccatataggcttcaacaagcaatcgcagcaagcaacatacctttatcgcccttgttgtgtcaacaatcgccagccctatctttggtgcagtcattggtacaaaccatcagggcacaacagctgcagcaactcgtgctacctgtgatcaaccaagtagctctggcaaacctttc

SEQ ID NO: 344167 - DNA, 383 bp, Zea mays
aacacaccaagcgaagcacattagcaacaacctaacaacaatggctaccaagatattatccctccttgcgcttcttgcgctttttgcgagcgcaacaaatgcgttcattattccacaatgctcacttgctccaagttccattattacacagttcctcccaccagttacttcaatgggcttcgaacacccagctgtgcaagcctataggctacaacaagcaattgcggcgagcgtcttacaacaaccaatttcccagttgcaacaacaatccttggcacatctaacaatacaaaccatcgcaacgcaacagcaacaacaattcctaccagcactgagccacctagccatggtgaaccctgccgcctacttgcaacagcagttgc

SEQ ID NO: 344168 - DNA, 386 bp, Zea mays
gcaacatagaaagcacaatagtgtaccaacaatggcagctaaaatattttgcctccttatgctccttggtctttctgcaagtgctgctacggcgaccattttcccacaatgctcacaagctcctatagcttcccttcttcccccgtacctctcaccaacggtgtcttcggtatgtgaaaacccaattcttcaaccctacaggatccaacaggcaatcgcagctggcatcttacctttatcacccttgttcctccaacaatcatcagccctattacagcagttacctttggtgcatttattggcacaaaacatcagggcacaacaactacaacaacttgtgctagcaaaccttgctgcctactctcagcaacagcagtttcttccat

SEQ ID NO: 344169 - DNA, 388 bp, Zea mays
atattttcagcattcagaaacacaccaagcgaagcgcactagcaacaacctaacaacaatggctaccaagatattagccctccttgcgcttcttgcccttttagtgagcgcaacaaatgcgttcattattccacagtgctcacttgctcctagtgccattattccacagttcctcccaccagttacttcaatgggcttcgaacatccagccgtgcaagcctacaggctacaactagcgcttgcggcgagcgtcttacaacaaccaattgcccaattgcaacaacaatccttggcacatctaaacctacaaaccatcgcaacgcaacagcaacaacagtttctgccatcactgagccacctagccgtggtgaaccctgtcgcctacttg

SEQ ID NO: 344170 - DNA, 377 bp, Zea mays
gcccgttccaagttggttgtggctggtggggctcgggcgaaggcctgggcctctttagacctgaagcggcaggcatggcgtgaggctggcttcacagagcagcgatcactgcccgccggtccacctgccgccgccggtccacctgccaccgccggtccatgtgccgccgccggttcatctgccgccgccaccatgccactaccctactcaaccgccccggcctcagcctcatccccagccacacccatgcccgtgccaacagccgcatccaagcccgtgccagctgcagggaacctgcggcgttggcagcaccccgatcctgggccagtgcgtcgagttcctgaggcatcagtgcagcccgacggcgacgccctact

SEQ ID NO: 344171 - DNA, 383 bp, Zea mays
aatattttcagcattcagaaacacaccaagcgaagcgcactagcaacaacctaacaacaatggctaccaagatattagccctccttgcgcttcttgcccttttagtgagcgcaacaaatgcgttcattattccacagtgctcacttgctcctagtgccattattccacagttcctcccaccagttacttcaatgggcttcgaacatccagccgtgcaagcctacaggctacaactagcgcttgcggcgagcgtcttacaacaaccaattgcccaattgcaacaacaatccttggcacatctaaacctacaaaccatcgcaacgcaacagcaacaacagtttctgccatcactgagccacctagccgtggtgaaccctgtcgcc

SEQ ID NO: 344172 - DNA, 382 bp, Zea mays
acgccggcctcagcctcatccccagccacacccatgcccgtgccaacagccgcatccaagcccgtgccagctgcagggaacctgcggcgttggcagcaccccgatcctgggccagtgcgtcgagttcctgaggcatcagtgcagcccgacggcgacgccctactgctcgcctcagtgccagtcgttgcggcagcagtgttgccagcagctcaggcaggtggagccgcagcaccggtaccaggcgatcttcggcttggtcctccagtccatcctgcagcagcagccgcaaagcggccaggtcgcggggctgttggcggcgcagatagcgcagcaactgacggcgatgtgcggcctgcagcagccgactccatgcccctacgct

SEQ ID NO: 344173 - DNA, 381 bp, Zea mays
gtcagcctagcaattagctcatcgactccagattggagaactcgacaccatgaaggtgctgatcgttgcccttgctctcctggcgctcgctgcgagcgccgcctccagtacaagcggcggctgtggctgccagacaccaccgtttcatctaccgcctccgttctatatgccgcctccgttctatctgccgccgcagcagcagccgcagccatggcaataccccactcaaccaccgcagctaagcccgtgccagcagttcggatcctgcggcgtcggcagcgtcggcagcccgttcctgggccagtgcgtcgagttcctgaggcaccagtgcagcccggcggcgacgccctacggctcgccacagtgccaggcgctgcagca

SEQ ID NO: 344174 - DNA, 52 bp, Zea mays
  unsure (1)..(52): unsure at all n locations
cggaannncccgggnncgacccacgccgtccgcannacatcatccaacaaca

SEQ ID NO: 344175 - DNA, 384 bp, Zea mays
aacacaccaagcgaagcacattagcaacaacctaacaacaatggctaccaagatattatccctccttgcgcttcttgcgctttttgcgagcgcaacaaatgcgttcattattccacaatgctcacttgctccaagttccattattacacagttcctcccaccagttacttcaatgggcttcgaacacccagctgtgcaagcctataggctacaacaagcaattgcggcgagcgtcttacaacaaccaatttcccagttgcaacaacaatccttggcacatctaacaatacaaaccatcgcaacgcaacagcaacaacaattcctaccagcactgagccacctagccatggtgaaccctgccgcctacttgcaacagcagttgct

SEQ ID NO: 344176 - DNA, 383 bp, Zea mays
gcaccataaaaggtggaatacagtagcaacaatagagcaacaatggcggccaagatattttccatccttatgctccttgctctttctgcatgtgttgctaacgcgaccatttttcctcaatactcacaagctcctatagctgcccttcttcccccataccttccatcaatgaccgcttcagtatgtgaaaacccagcccttcaaccctacaggctccaacaagcaatcgcaacaagcaacttacctttatcacccctgttctttcaacaatcgccagccctatctttggtgcagtcattggtacaaaccatcagggcacaacagctgcagcaactcgtgctaccagtgatcagccaagtagctctggcaaacctttctcccta

SEQ ID NO: 344177 - DNA, 380 bp, Zea mays
gcaattagctcatcgactccagattggagaactcgacaccatgaaggtgctgatcgttgcccttgctctcctggcgctcgctgcgagcgccgcctccagtacaagcggcggctgtggctgccagacaccaccgtttcatctaccgcctccgttctatatgccgcctccgttctatctgccgccgcagcagcagccgcagccatggcaataccccactcaaccaccgcagctaagcccgtgccagcagttcggatcctgcggcgtcggcagcgtcggcagcccgttcctgggccagtgcgtcgagttcctgaggcaccagtgcagcccggcggcgacgccctacggctcgccacagtgccaggcgctgcagcagcagtgct

SEQ ID NO: 344178 - DNA, 374 bp, Zea mays
  unsure (1)..(374): unsure at all n locations
cggtcgcccagcgtccggagcattcagaaacacaccaagcgatgcacattagcaacaacctaacaacaatggctaccaagatattatccctccttgcgcttcttgcgctttttgcgagcgcaacaaatgcgttcattattccacaatgctacttgcttaagttccattanacacagttcctcccaccagttacttcaatgggcttcgaacacccagctgtgcaagcctataggctacaacaagcaattgcggcgagcgtcttacaacaaccaatttcccagttgcaacaacaatccttggcacatctaacaatacaaaccatcgcaacgcaacagcaacaacaattcctaccagcactgagccacctagccatg

SEQ ID NO: 344179 - DNA, 384 bp, Zea mays
caactagcaacatagaaagcacaatagtgtaccaacaatggcagccaaaatattttgcttccttatgctccttggtctttctgcaagtgctgctaccgcaaccattttcccacaatgctcacaagctcctatagcttcctttcttcccccatacctctcaccagcggtgtcttcagtatgtgaaaacccaattcttcaaccctacaggatccaacaggcaatcgcagcaggcatcttacctttatcacccttgttcctccaacaaccgtcagccctattacagcagttacctttggtgcatttgttggcacaaaacatcaaggcacaacaactacaacaacttgtgctaggaaaccttgctgcctactctcagcaacagcagtt

SEQ ID NO: 344180 - DNA, 382 bp, Zea mays
gcaacatagaaagcacaatagtgtaccaacaatggcagccaaaatattttgcttccttatgctccttggtctttctgcaagtgctgctaccgcaaccattttcccacaatgctcacaagctcctatagcttcctttcttcccccatacctctcaccagcggtgtcttcagtatgtgaaaacccaattcttcaaccctacaggatccaacaggcaatcgcagcaggcatcttacctttatcacccttgttcctccaacaaccgtcagccctattacagcagttacctttggtgcatttgttggcacaaaacatcaaggcacaacaactacaacaacttgtgctaggaaaccttgctgcctactctcagcaacagcagtttctt

SEQ ID NO: 344181 - DNA, 412 bp, Zea mays
gggggaaaaatcgggggggacacaccgcctggcggaaatgcactaccaccaacctatcatcaatggctaccaagatattagccctccttgcgcttcttgcccttttagtgagcgcaacaaatgcgttcattattccacagtgctcacttgctcctagtgccattattccacagttcctcccaccagttacttcaatgggcttcgaacatccagccgtgcaagcctacaggctacaactagcgcttgcggcgagcgtcttacaacaaccaattgcccaattgcaacaacaattcttggcacatctaaacctacaaaccatcgcaacgcaacagcaacaacagtttctgccatcactgagccacctagccgtggtgaaccctgtcgcctactttcaacagcagctacttgcatc

SEQ ID NO: 344182 - DNA, 381 bp, Zea mays
tgagaccaacaagcaacatagaaagtggaatccagtagcaacaatagagcaacaatggcgaccaagatattttccctccttatgctccttgctctttctgcatgtgttgctaacgcgacaattttccctcaatgctcacaagctcctatagcttcccttcttcccccataccttccatcaatgatagcttcagtatgtgaaaacccagctcttcaaccctataggctccaacaagcaatcgcagcaagcaacatacctttatcacccttgtttcaacaatcgccagccctatctttggtgcagtcattggtacaaaccatcagggcacagcagctgcagcaactcgtgctacctgtgatcaaccaagtagctctggcaaac

SEQ ID NO: 344183 - DNA, 373 bp, Zea mays
gcaacatagaaagtggaatccagtttcaacaatagagcaacaatggagaccaagatattttccctccttatgctccttgctctttctacatgtgttgctaacgcgacaattttccctcaatgctcacaagctcctatagcttccctttttcccccataccttgcatcaattatagcttcagtatgtgaaaacccagctcttcaaccatataggcttcaacaagcaatcgcagcaagcaacatacctttatcgcccttgttgtgtcaacaatcgccagccctatctttggtgcagtcattggtacaaaccatcatggcacaacagctgcagcaactcgtgctacctgtgatcaaccaagtagctctggcaaacc

SEQ ID NO: 344184 - DNA, 383 bp, Zea mays
attatttagaccaactagcaacatagaaagcacaatagtgtaccaacaatggcagccaaaatattttgcctccttatgctccttggtatttctgcaagtgctgctacggcgaccattttcccgcaatgctcacaagctcctatagcttcccttcttcccccgtacctctcaccagcggtgtcttcggtatgtgaaaacccaattcttcaaccctacaggatccaacaggcaatcgcagctggcatcttacctttatcacccttgttcctccaacaatcatcagccctattacagcagttacctttggtgcatttattggcacaaaacatcagggcacaacaactacaacaacttgtgctagcaaaccttgctgcctactctca

SEQ ID NO: 344185 - DNA, 381 bp, Zea mays
aagaaaaccggaagtgcgtaaaggggatcgtcgaacaaaacaacatgaaaatggtcatcgttctcgtcgtgtgcctggctctgtcagctgccagcgcctctgcaatgcagatgccctgcccctgcgcggggctgcagggcttgtacggcgctggcgccggcctgacgacgatgatgggcgccggcgggctgtacccctacgcggagtacctgaggcagccgcagtgcagcccgctggcggcggcgccctactacgccgggtgtgggcagacgagcgccatgtaccagccgctccggcaacagtgctgccagcagcagatgaggatgatggacgtgcagtccgtcgcgcagcagctgcagatgatgatgcagcttgagcgtg

SEQ ID NO: 344186 - DNA, 385 bp, Zea mays
cggacgcgtgggtgggtcttcagaccattagctttatctactccagagcgcagaagaacccgatcgacaccatgagggtgttgctcgttgccctcgctctcctggctctcgctgcgagcgccacctccacgcatacaagcggcggctgcggctgccagccaccgccgccggttcatctaccgccgccggtgcatctgccacctccggttcacctgccacctccggtgcatctcccaccgccggtccacctgccgccgccggtccacctgccaccgccggtccatgtgccgccgccggttcatctgccgccgccaccatgccactaccctactcaaccgccccggcctcagcctcatccccagccacacccatgcccgtgccaaca

SEQ ID NO: 344187 - DNA, 380 bp, Zea mays
ggaatccagtagcaacaatagagcaacaatggcgaccaagatattttccctccttatgctccttgctctttctgcatgtgttgctaacgcgacaattttccctcaatgctcacaagctcctatagcttcccttcttcccccataccttccatcaatgatagcttcagtatgtgaaaacccagctcttcaaccctataggctccaacaagcaatcgcagcaagcaacatacctttatcacccttgtttcaacaatcgccagccctatctttggtgcagtcattggtacaaaccatcagggcacagcagctgcagcaactcgtgctacctgtgatcaaccaagtagctctggcaaacctttctccctactctcagcaacaac

SEQ ID NO: 344188 - DNA, 382 bp, Zea mays
cagaaacacaccaagcgaagcgcactagcaacaacctaacaacaatggctaccaagatattatccctccttgcgcttcttgcgctttttgcgagcgcaacaaatgcgtccattattccacaatgctcacttgctcctagttccattattccacagttcctcccaccagttacttcaatggccttcgaacacccagctgtgcaagcctataggctacaacaagcgattgcggcgagcgtcttacaacaaccaattgcccaattgcaacaacaatccttggcacatctaacaatacaaaccatcgcaacgcaacagcaacaacagtttctaccagcactgagccacctagccatggtgaaccctgtcgcctacttgcaacagca

SEQ ID NO: 344189 - DNA, 178 bp, Zea mays
  unsure (1)..(178): unsure at all n locations
cgcaaattgcaccaagaaatccatcgagaggccgncgacaggggaattaatggcgtcgtcgtctagcagcagccaccgccgcctcatcctcgcagccgccgtcctgctctccgtgctcgcggctgccagcgccagcgccgggacctcctgcgtgccggggtgggccatcccgcacaac

SEQ ID NO: 344190 - DNA, 380 bp, Zea mays
gcattcagaaacacaccaagcgaagcgcactagcaacaacctaacaacaatgggtaccaagatattatccctccttgcgcttcttgcgctttttgcgagcgcaacaaatgcgtccattattccacaatgctcacttgctcctagttccattattccacagttcctcccaccagttacttcaatggccttcgaacacccagctgtgcaagcctataggctacaacaagcgattgcggcgagcgtcttacaacaaccaattgcccaattgcaacaacaatccttggcacatctaacaatacaaaccatcgcaacgcaacagcaacaacagttcctaccagcactgagccacctagccatggtgaaccctgtcgcctacttgc

SEQ ID NO: 344191 - DNA, 263 bp, Zea mays
accgccaatccgggcgacccacgcgtcagaaagggaatccatacaacaatgacactggaccaaatatttcctcttactccttgctcttctgatggtgtaacgcgacaatttcctaatgctacgcttatcttccttttcccataccttcaaagatgtcagatgtgaaaacccactttaaccctatagctcaacagcatgagagacatcctataccctgtcaacaatcgcgcctatttgggcagcatgtcaaaccatagccacac

SEQ ID NO: 344192 - DNA, 386 bp, Zea mays
gagaccaacaagcaacatagaaagtggaatccagtagcaacaatagagcaacaatggagaccaagatattttccctccttatgctccttgctctttctacatgtgttgctaacgcgacaattttccctcaatgctcacaagctcctatagcttccctttttcccccataccttccatcaattatagcttcagtatgtgaaaacccagctcttcaaccatataggcttcaacaagcaatcgcagcaagcaacatacctttatcgcccttgttgtgtcaacaatcgccagccctatctttggtgcagtcattggtacaaaccatcagggcacaacagctgcagcaactcgtgctacctgtgatcaaccaagtagctctggcaaacctt

SEQ ID NO: 344193 - DNA, 384 bp, Zea mays
cttgtttcaacaatcgccagccctatctttggtgcagtcattggtacaaaccatcagggcacagcagctgcagcaactcgtgctacctgtgatcaaccaagtagctctggcaaacctttctccctactctcagcaacaacaatttcttccattcaaccaactgtctacattgaaccgtgctgcttatttgcagcaacaactattaccattcagccagctagctactgcctactctcagcaacaacaacttcttccatttaaccaattggccgcactgaaccccgctgcttatttgcagcagcaaatactactaccatttagccagctagctgcagcaagccgtgctttcttcttgacacagcaacagttgctgcctttctacca

SEQ ID NO: 344194 - DNA, 386 bp, Zea mays
gcaacatagaaagtggaatccagtagcaacaatagagcaacaatggagaccaagatattttccctccttatgctccttgctctttctacatgtgttgctaacgcgacaattttccctcaatgctcacaagctcctatagcttccctttttcccccataccttccatcaattatagcttcagtatgtgaaaacccagctcttcaaccatataggcttcaacaagcaatcgcagcaagcaacatacctttatcgcccttgttgtgtcaacaatcgccagccctatctttggtgcagtcattggtacaaaccatcagggcacaacagctgcagcaactcgtgctacctgtgatcaaccaagtagctctggcaaacctttctccctactc

SEQ ID NO: 344195 - DNA, 388 bp, Zea mays
gccacctccggttcacctgccacctccggtgcatctcccaccgccggtccacctgccgccgccggtccacctgccaccgccggtccatgtgccgccgccggttcatctgccgccgccaccatgccactaccctactcaaccgccccggcctcagcctcatccccagccacacccatgcccgtgccaacagccgcatccaagcccgtgccagctgcagggaacctgcggcgttggcagcaccccgatcctgggccagtgcgtcgagtttctgaggcatcagtgcagcccgacggcgacgccctactgctcgcctcagtgccagtcgttgcggcagcagtgttgccagcagctcaggcaggtggagccgcagcaccggtaccaggcgatc

SEQ ID NO: 344196 - DNA, 385 bp, Zea mays
gagccacctagccgtggtgaaccctgttgcctacttgcaacagcagctacttgcgtccaacccacttgctctggcgaacgtagctgcataccagcaacaacaacgtctgcaacagtttatgccagcgctcagtcaactagccatggtgaaccctgtcgcctacctacaacagcaacaattgctttcatctagcccgctcgctgtgggcaatgcacctacgtacctacaacaacagttgctgcaacagattgtaccagctctgactcagctagctgtggcaaaccctactgcctacttgcaacagttgcttccattcaaccaactggctgtgtcgaactctgctgtgtacctacaacagcgacaacagttacttaatccactagca

SEQ ID NO: 344197 - DNA, 378 bp, Zea mays
gcaacatagaaagtggaatccagtttcaacaatagagcaacaatggagaccaagatattttccctccttatgctccttgctctttctacatgtgttgctaacgcgacaattttccctcaatgctcacaagctcctatagcttccctttttcccccataccttccatcaattatagcttcagtatgtgaaaacccagctcttcaaccatataggcttcaacaagcaatcgcagcaagcaacatacctttatcgcccttgttgtgtcaacaatcgccagccctatctttggtgcagtcattggtacaaaccatcagggcacaacagctgcagcaactcgtgctacctgtgatcaaccaagtagctctggcaaacctttct

SEQ ID NO: 344198 - DNA, 334 bp, Zea mays
ctccaacaatcatcagccctattattgcagttacctttggtgcatttattggcgcaaaacatcagggcacaacaactacaacaactcgtgctagcaaaccttgctgcctactctcagcaacagcagttacctttggtgcatttgttggcacaaaacatcagggcacaacaactacaacaactcgtgctagcaaaccttgctgcctactctcagcaacaacagtttctgccattcaaccaactagctgcattgaactctgctgcttatttgcagcaacaacaactactaccattcagccagctagctgctgcctaccctcggcaatttcttccat

SEQ ID NO: 344199 - DNA, 407 bp, Zea mays
aaaaaccggggcggacccacgcgtccgcaacaagcaacatagaaagtggaatccagtagcaacaatagagcaacaatggcgaccaagatattttccctccttatgctccttgctctttctgcatgtgttgctaacgcgacaattttccctcaatgctcacaagctcctatagcttcccttcttcccccataccttccatcaatgatagcttcagtatgtgaaaacccagctcttcaaccctataggctccaacaagcaatcgcagcaagcaacatacctttatcacccttgtttcaacaatcgccagccctatctttggtgcagtcattggtacaaaccatcatggcacagcagctgcagcaactcgtgctacctgtgatcaaccaagtagctctggcaaacctttc

SEQ ID NO: 344200 - DNA, 56 bp, Zea mays
cccgcttccttcttgacacaacaacaattgaaatgaaaagaaaaaagtattgttcc

SEQ ID NO: 344201 - DNA, 385 bp, Zea mays
gcaacatagaaagcacaatagtgttccaacaatggcagccaaaatatttggccgccttatgctcctcggtatttctgcaagtgctgctacggcgaccattttcccgcaatgctcacaagctcctatagcttcccttcttcccccgtacctctcaccagcggtgtcttcggtatgtgaaaacccaattcttcaaccctacaggatccaacaggcaatcgcagctggcatcttacctttatcacccttgttcctccaacaatcatcagccctattacagcagttacctttggtgcatttattggcacaaaacatcagggcacaacaactacaacaacttgtgctagcaaaccttgctggctactctcagcaacagcagtttcttcca

SEQ ID NO: 344202 - DNA, 91 bp, Zea mays
acaacatctacggtcaaacatagctagaacagatcccgcccaaaactcttgtggacctatacctccacccatggctgcctccaccttcaac

SEQ ID NO: 344203 - DNA, 384 bp, Zea mays
agctttcaaaaacacaccaagcgaagcacattagcaacaacctaacaacaatggctaccaagatattatccctccttgcgcttcttgcgctttttgcgagcgcaacaaatgcgttcattattccacaatgctcacttgctccaagttccattattacacagttcctcccaccagttacttcaatgggcttcgaacacccagctgtgcaagcctataggctacaacaagcaattgcggcgagcgtcttacaacaaccaatttcccagttgcaacaacaatccttggcacatctaacaatacaaaccatcgcaacgcaacagcaacaacaattcctaccagcactgagccacctagccatggtgaaccctgccgcctacttgcaac

SEQ ID NO: 344204 - DNA, 386 bp, Zea mays
gcaacatagaaagcacaatagtgtaccaacaatggcagccaaaatattttgcctccttatgctccttggtctttctgcaagtgctgctacggcgaccattttcccgcaatgctcgcaagctcctatagcttcccttcttcccccgtacctctcaccagcggtgtcttcggtatgtgaaaacccaattcttcaaccctacaggatccaacaggcaatcgcagctggcatcttacctttatcacccttgttcctccaacaatcatcagccctattacaacagttacctttggtgcatttattggcacaaaacatcagggcacaacaactacaacaacttgtgctagcaaaccttgctgcctactctcagcaacagcagtttcttccat

SEQ ID NO: 344205 - DNA, 386 bp, Zea mays
attgagaccaactagcaacatagaaagcacaatagtgtaccaacaatggcagccaaaatattttgcctccttatgctccttggtctttctgcaagtgctgctacggcgaccattttcccgaaatgctcgcaagctcctatagcttcccttcttcccccgtacctctcaccagcggtgtcttcggtatgtgaaaacccaattcttcaaccctacaggatccaacaggcaatcacagctggcatcttacctttatcacccttgttcctccaacaatcatcagccctattacatcagttacctttggtgcatttattggcacaaaacatcagggcacaacaactacaacaacttgtgctagcaaaccttgctgcctactctcagcaaca

SEQ ID NO: 344206 - DNA, 381 bp, Zea mays
caacaagcaacatagaaagtggaatccagtagcaacaatagagcaacaatggcgaccaagatattttccctccttatgctccttgctctttctgcatgtgttgctaacgcgacaattttccctcaatgctcacaagctcctatagcttcccttcttcccccataccttccatcaatgatagcttcagtatgtgaaaacccagctcttcaaccctataggctccaacaagcaatcgcagcaagcaacatacctttatcacccttgtttcaacaatcgccagccctatctttggtgcagtcattggtacaaaccatcagggcacagcagctgcagcaactcgtgctacctgtgatcaaccaagtagctctggcaaacctttct

SEQ ID NO: 344207 - DNA, 375 bp, Zea mays
cggacgcgtgggtttgagcattcataaacacaccaagcgaagcgcactagcaacaacctaacaacaatggctaccaagatattatccctccttgcgcttcttgcgctttttgcgagcgcaacaaatgcgtccattattccacaatgctcacttgctcctagttccattattccacagttcctcccaccagttacttcaatggccttcgaacacccagctgtgcaagcctataggctacaacaagcgattgcggcgagcgtcttacaacaaccaattgcccaattgcaacaacaatccttggcacatctaacaatacaaaccatcgcaacgcaacagcaacaacagttcctaccagcactgagccacctagccatg

SEQ ID NO: 344208 - DNA, 379 bp, Zea mays
agcgaagcgcactagcaacgacctaacaacaatggctaccaagatattagccctccttgcgcttcttgccctttttgtgagcgcaacaaatgcgttcattattccacaatgctcacttgctcctagtgccattattccacagttcctcccaccagttacttcaatgggcttcgaacacctagctgtgcaagccaacatgcaacaacaagcgcttgcggcgagcgtcttacaacaaccaattgcccaattgcaacaacaatccttgccacatctaacaatacaagccatcacaacgcaacagcaacaacagttcctaccagcactgagccacctagccatggtgaaccctgccgcctacttgcaagagcagctgcttgca

SEQ ID NO: 344209 - DNA, 107 bp, Zea mays
gggaaagccaagatagtattatcaatagaaacctagcttcaagaatgtcgtgactatatatatgtatgatattaagacgagatttgataagggtggcatagcaagtc

SEQ ID NO: 344210 - DNA, 387 bp, Zea mays
agcaacatagaatgcacaatagtgtaccaacaatggcagccaaaatattttgcctccttatgctccttggtctttctgcaagtgctgctacggcgaccattttcccgaaatgctcgcaagctcctatagcttcccttcttcccccgtacctctcaccagcggtgtcttcggtatgtgaaaacccaattcttcaaccctacaggatccaacaggcaatcacagctggcatcttacctttatcacccttgttcctccaacaatcatcagccctattacatcagttacctttggtgcatttattggcacaaaacatcagggcacaacaactacaacaacttgtgctagcaaaccttgctgcctactctcagcaacagcagtttcttccat

SEQ ID NO: 344211 - DNA, 387 bp, Zea mays
gcaccataaaaggcacattagtgttccatcaatggcagccaaaaaatttggcctcctgatgctcctgggtatttctgcaagtgctgctacggcgaccattttcccgcaatgctcacaagctcctatagcttcccttcttcccccgtacctctcaccagcggtgtcttcggtatgtgaaaacccaattcttcaaccctacaggatccaacaggcaatcgcagctggcatcttacctttatcacccttgttcctccaacaatcatcagccctattacagcagttacctttggtgcatttattggcacaaaacatcagggcacaacaactacaacaacttgtgctagcaaaccttgctgcctactctcagcaacagcagtttctttcatt

SEQ ID NO: 344212 - DNA, 67 bp, Zea mays
  unsure (1)..(67): unsure at all n locations
aaaaacgggcgacccacgcgnccggcaacatataaagtacaataaagttttttttatacaaacaaaa

SEQ ID NO: 344213 - DNA, 381 bp, Zea mays
ttgagaccaactagcaacatagaaagcacaatagtgtaccaacaatggcagccaaaatattttgcctccttatgctccttggtctttctgcaagtgctgctacggcgaccattttcccgcaatgctcgcaagctcctatagcttcccttcttcccccgtacctctcaccagcggtgtcttcggtatgtgaaaacccaattcttcaaccctacaggatccaacaggcaatcgcagctggcatcttacctttatcacccttgttcctccaacaatcatcagccctattacaacagttacctttggtgcatttattggcacaaaacatcagggcacaacaactacaacaacttgtgctagcaaaccttgctgcctactctcagc

SEQ ID NO: 344214 - DNA, 384 bp, Zea mays
  unsure (1)..(384): unsure at all n locations
caacaagcaacatagaaagtggaattcagtagcaacaatagagcaacaatggcgaccaagatattttccctccttatgctccttgctctttctgcatgtgttgctaacgcgacaattttccctcaatgctcacaagctcctatagcttcccttcttcccccataccttccatcaatgatagcttcagnatgtgaaaacccagctcttcaaccctataggctccaacaagcaatcgcagcaagcaacatacctttatcacccttgtttcaacaatcgccagccctatctttggtgcagtcattggtacaaaccatcagggcacagcagctgcagcaactcgtgctacctgtgatcaaccaagtagctcttgcaaacctttcttcc

SEQ ID NO: 344215 - DNA, 386 bp, Zea mays
cttctatcagtaccatcaatcatcattcatcttagtagtataggcaccaaatcaaatctgcaacatcaattatctaactccaaaaaccatgaagctggtgcttgtggttcttgctttcattgctttagtatcaagtgtttcttgtacacagacaggcggctgcagctgtggtcaacaacaaagccatgagcagcaacatcatccacaacaacatcatccacaaaaacaacaacatcaaccaccaccacaacatcaccagcagcagcaacaccaacaacaacaagttcacatgcaaccacaaaaacatcagcaacaacaagaagttcatgttcaacaacaacaacaacaaccgcagcaccaacaacaacaacaacaacagcaccaac

SEQ ID NO: 344216 - DNA, 378 bp, Zea mays
  unsure (1)..(378): unsure at all n locations
cagaaacacaccaagcgaatcgcactagcaacaacctaacaacaatggctgccaggatattagccctccttgcgcttcttgcccttttagtgagcgcaacaaatgcgttcattattccacagngctcacttgctcctagtgccattattccacagttcctcccaccagttacttcaatgggcttcgaacatccagccgtgcaagcctacaggctacaactagcgcttgcggcgagcgttttacaacaaccaattgcccaattgcaacaacaatccttggcacatctaaacctacaaaccatcgcaacgcaacagcaacaacagtttctgccatcactgagccacctagccgtggtgaaccctgtctgctacttgcaac

SEQ ID NO: 344217 - DNA, 379 bp, Zea mays
agaaagtggaatccagtagcaacaatagagcaacaatggagaccaagatattttccctccttatgctccttgctctttctacatgtgttgctaacgcgacaattttccctcaatgctcacaagctcctatagcttccctttttcccccataccttccatcaattatagcttcagtatgtgaaaacccagctcttcaaccatataggcttcaacaagcaatcgcagcaagcaacatacctttatcgcccttgttgtgtcaacaatcgccagccctatctttggtgcagtcattggtacaaaccatcagggcacaacagctgcagcaactcgtgctacctgtgatcaaccaagtagctctggcaaacctttctccctactc

SEQ ID NO: 344218 - DNA, 386 bp, Zea mays
attgagaccaactagcaacatagaatgcacaatagtgtacctctcaccagcggggtcttcggtatgtgaaaacccaattcttcaaccctacaggatccaacaggcaatcgcagctggcatcttacctttatcacccttgttcctccaacaatcatcagccctattacaacagttacctttggtgcatttattggcacaaaacatcagggcacaacaactacaacaacttgtgctagcaaaccttgctgcctactcttagcaacagcagtttctttcattcaaccaactaggttcattgaactctgctttttatttgcaacaacaacaactaccattcatccagctacctgctgcctacccccagctatttttttcattcaaccaac

SEQ ID NO: 344219 - DNA, 363 bp, Zea mays
acatataaagcacaattttgttttaacaatggcagccaaaatatggggcgggcttatgctccttggtctttctgcaagtgttgctaccgtaaccattttcccacaatgctcacaagctcctatagctttcctttttcccccatacctttcaccagcggagtcttcaatgtgtgaaaactcaattgttctaccctacaggatccaacaggctatctcaacaggcatctaaccattatcacccttgttccttcaacaaccgtctgccctattacagcagttacctttggtccatttgtttgcacaaaacatcagtgtacaacatcttcaacaacttgtgcttgcaaaccttgctgtatacttctt

SEQ ID NO: 344220 - DNA, 388 bp, Zea mays
ccgatcgacaccatgagggtgttgctcgttgccctcgctctcctggctctcgctgcgagcgccacctccacgcatacaagcggcggctgcggctgccagccaccgccgccggttcatctaccgccgccggtgcatctgccacctccggttcacctgccacctccggtgcatctcccaccgccggtccacctgccgccgccggtccacctgccaccgccggtccatgtgccgccgccggttcatctgccgccgccaccatgccactaccctactcaaccgccccggcctcagcctcatccccagccacacccatgcccgtgccaacagccgcatccaagcccgtgccagctgcagggaacctgcggcgttggcagcaccccgatcctgg

SEQ ID NO: 344221 - DNA, 381 bp, Zea mays
ccaactagcaacatagaaagcacattagtgtaccaacaatggcagccaagataggttgcctccttatgctccttggtctttctgcaagtgctgctacggcgaccattttcccgaaatgctcgcaagctcctatagcttcccttcttcccccgtacctctcaccagcggtgtcttcggtatgtgaaaacccaattcttcaaccctacaggatccaacaggcaatcacagctggcatcttacctttatcacccttgttcctccaacaatcattagccctattacatcagttacctttggtgcatttattggcacaaaacattagggcacaacaactacaacaacttgtgctagcaaaccttgctgcctactctcagcaacagc

SEQ ID NO: 344222 - DNA, 367 bp, Zea mays
gagaccaacaagcaacatataaagtttaatccagtagcaacaatagagcagcaggggagaccaagatattttccctccttatgctccttgctctttctacatgtgttgctaacgcgacaattttccctcaatgctcacaagctcctatagcttccctttttcccccataccttccatcaattatagcttcagtatgtgaaaacccatctcttcaaccatataggcttcaacatgcaatcgcattatgcaacatacctttatcgcccttgttgtgtcaacaatcgccagccctatctttggtgcagtcattggtacaaaccattatggcacaacagctgcagcaactcttgctacctgttatcaacca

SEQ ID NO: 344223 - DNA, 387 bp, Zea mays
cgcggtccggagatccgcgagcggccgcccttttttttttttttttttttttttttttttttggggttgggtgtttttttttttttatttttttttttttttttttttttttttttttttttttattatattttttaaaaaaaaaaaaaaaaaaataaaaatgattaaaaaaaaaaaaaaaaaaaattaaaaaaaaaccctttttttattggggacacccaacaaacccaataaaaaaaagaagggcgcctcaataaaaaaaacaaaagataaaaaacaaatatacacacaaaataataaatttaaatagagacaaaaaaaaaaaaaaaaaaacggacgcgcaaaaataaaaaaaaaacacatataaaaaaaaaaaaccgtgtggcc

SEQ ID NO: 344224 - DNA, 382 bp, Zea mays
attttgagcattcagaaacacaccaagcgaagctacctagcaacgacttaacaacaatggctaccaagatattagccctccttgcgcttcttgccctttttgtgagcgcaacaaatgcgttcattattccacaatgctcacttgctcctagtgccattataccacagttcctccgaccagttacttcaatgggcttcgaacacctagctgtgcaagcctacaggctacaacaagcgcttgcggcgagcgtcttacaacaaccaattaaccaattgcaacaacaatccttggcacatctaaccatacaaaccatcgcaacacaacagcaacaacagttcctaccagcactgagccaactagatgtggtgaaccctgtcgccta

SEQ ID NO: 344225 - DNA, 242 bp, Zea mays
  unsure (1)..(242): unsure at all n locations
ccgattagctcaatcgacctccagaattgggtagaacttcgacaccccatgaagggtgccctgatcgtgtgccgggttgctcttcctgggcgccctcgctgcgagcccgcacgcctctcagtacaaagcggctggcttggtgtgactgccagacccaccaccgttttcaatctaccccgcctnnccgttctaaatatgcnncgcctnnccgttctaattctgcccgcccgcaaaagcagcag

SEQ ID NO: 344226 - DNA, 385 bp, Zea mays
gaccaactagcaacatagaaagcacaatagtgtaccaacaatggcagccaaaatattttgcttccttatgctccttggtctttctgcaagtgctgctaccgcaaccattttcccacaatgctcacaagctcctatagcttcctttcttcccccatacctctcaccagcggtgtcttcagtatgtgaaaacccaattcttcaaccctacaggatccaacaggcaatcgcagcaggcatcttacctttatcacccttgttcctccaacaaccgtcagccctattacagcagttacctttggtgcatttgttggcacaaaacatcaaggcacaacaactacaacaacttgtgctaggaaaccttgctgcctactctcagcaacagcag

SEQ ID NO: 344227 - DNA, 386 bp, Zea mays
caactagcaacatagaaagcacaattttgtaccaacaatggcagccaaaatatggtgcctccttatgctccttggtctttctgcaagtgctgctacggcgaccattttcccgaaatgctcgcaagctcctatagcttcccttcttcccccgtacctctcaccagcggtgtcttcggtatgtgaaaacccaattcttcaaccctacaggatccaacaggcaatcacagctggcatcttacctttatcacccttgttcctccaacaatcatcagccctattacatcagttacctttggtgcatttattggcacaaaacatcagggcacaacaactacaacaacttgtgctagcaaaccttgctgcctactctcagcaacagcagtttc

SEQ ID NO: 344228 - DNA, 463 bp, Zea mays
ctattatttaatttaaattttattttttataaaaaaaatattttaaatgtaaagggtttaatattaaaaataaatttataataaattaaaattaaataaaaaaaaatttaaataaatataaaaaataaatatattataatataatataataataaaaaaaaaaaattaatataaaaatattatataaaaaatattataaaaaaaaaattatatatttaaattatataaaaaaaataataaaattaatataaattataaaaaaaaatatataaaatttaatataatataataaattataattaatataatattaatataattaataaatataaataaaataaaaatatatatataaaatataacaaatatataatataataaatacaatataatatatttaataataatatataaaatatatataaaatataatatataataaatttaataattttattattaa

SEQ ID NO: 344229 - DNA, 393 bp, Zea mays
caccaagcgaagcgcactagcaacgacctaacaacaatggctaccaagatattagccctccttgcgcttcttgccctttttgtgagcgcaacaaatgcgttcattattccacaatgctcacttgctcctagtgccattattccacagttcctcccaccagttacttcaatgggcttcgaacacctagctgtgcaagccaacatgcaacaacaagcgcttgcggcgagcgtcttacaacaaccaattgcccaattgcaacaacaatccttgccacatctaacaatacaagccatcacaacgcaacagcaacaacagttcctaccagcactgagccacctagccatggtgaaccctgccgcctacttgcaagagcagctgcttgcatccaaccca

SEQ ID NO: 344230 - DNA, 385 bp, Zea mays
agctcatcgactccagattggagaactcgacaccatgaaggtgctgatcgttgcccttgctctcctggcgctcgctgcgagcgccgcctccagtacaagcggcggctgtggctgccagacaccaccgtttcatctaccgcctccgttctatatgccgcctccgttctatctgccgccgcagcagcagccgcagccatggcaataccccactcaaccaccgcagctaagcccgtgccagcagttcggatcctgcggcgtcggcagcgtcggcagcccgttcctgggccagtgcgtcgagttcctgaggcaccagtgcagcccggcggcgacgccctacggctcgccacagtgccaggcgctgcagcagcagtgctgccaccagatc

SEQ ID NO: 344231 - DNA, 361 bp, Zea mays
  unsure (1)..(361): unsure at all n locations
cttccgaaccaggcacaataaaagggggaatccagtaccaccaataaaccaccaatggcgaccaaaatattttccttcctatgctcctgctcttctgcattggtgctacgcgacaattttcctcatgctcacaagctcttagcttccttcttccccatccttncataatgatagctcagtatgtgaaaacccactcttaaccctatggctccacagcaatcgcagaagaacatacctttatcacccttgttaacaatcgcagccctatctttgggcagtcattggacaaaccatcaggcacgcagctgcagcaactcgtgctcctgtgataaccaagtagctctggcaacctttctcctac

SEQ ID NO: 344232 - DNA, 67 bp, Zea mays
gccaagtgcactgacactgttcatgctggacaaacaaacagtacccctccgttttaggggccttttt

SEQ ID NO: 344233 - DNA, 377 bp, Zea mays
  unsure (1)..(377): unsure at all n locations
agcaacatagaaggcacaatagtgtaccaacaatggcagctaaaatattttgcctccttatgctccttggtctttctgcaagtgctgctacggcgaccattttcccacaatgctcacaagctcctatagcttcccttcttcccccgtacctctcaccaacggtgtcnttcgtatgtgaaaacccaattcttcaaccctacaggatccaacaggcaatcgcagctggcatcttacctttatcacccttgttcctccaacaatcatcagccctattacagcagttacctttggtgcatttattggcacaaaacatcagggcacaacaactacaacaacttgtgctagcaaaccttgctgnctactctcagcaacagcag

SEQ ID NO: 344234 - DNA, 388 bp, Zea mays
gcacaatagtgtaccaacaatggcagctaaaatattttgcctccttatgctccttggtctttctgcaagtgctgctacggcgaccattttcccacaatgctcacaagctcctatagcttcccttcttcccccgtacctctcaccaacggtgtcttcggtatgtgaaaacccaattcttcaaccctacaggatccaacaggcaatcgcagctggcatcttacctttatcacccttgttcctccaacaatcatcagccctattacagcagttacctttggtgcatttattggcacaaaacatcagggcacaacaactacaacaacttgtgctagcaaaccttgctgcctactctcagcaacagcagtttcttccattcaaccaactagct

SEQ ID NO: 344235 - DNA, 388 bp, Zea mays
gagaccaacaagcaacatagaaagtggaatacagtagcaacaatagagcaacaatggcggccaagatattttccatccttatgctccttgctctttctgcatgtgttgctaacgcgaccatttttcctcaatactcacaagctcctatagctgcccttcttcccccataccttccatcaatgaccgcttcagtatgtgaaaacccagcccttcaaccctacaggctccaacaagcaatcgcaacaagcaacttacctttatcacccctgttctttcaacaatcgccagccctatctttggtgcagtcattggtacaaaccatcagggcacaacagctgcagcaactcgtgctaccagtgatcagccaagtagctctggcaaacctttc

SEQ ID NO: 344236 - DNA, 383 bp, Zea mays
ttcagaaacacaccaagcgaagcacattagcaacaacctaacaacaatggctaccaagatattatccctccttgcgcttcttgcgctttttgcgagcgcaacaaatgcgttcattattccacaatgctcacttgctccaagttccattattacacagttcctcccaccagttacttcaatgggcttcgaacacccagctgtgcaagcctataggctacaacaagcaattgcggcgagcgtcttacaacaaccaatttcccagttgcaacaacaatccttggcacatctaacaatacaaaccatcgcaacgcaacagcaacaacaattcctaccagcactgagccacctagccatggtgaaccctgccgcctacttgcaacagc

SEQ ID NO: 344237 - DNA, 391 bp, Zea mays
agcctagcaattagctcatcgactccagattggagaactcgacaccatgaaggtgctgatcgttgcccttgctctcctggcgctcgctgcgagcgccgcctccagtacaagcggcggctgtggctgccagacaccaccgtttcatctaccgcctccgttctatatgccgcctccgttctatctgccgccgcagcagcagccgcagccatggcaataccccactcaaccaccgcagctaagcccgtgccagcagttcggatcctgcggcgtcggcagcgtcggcagcccgttcctgggccagtgcgtcgagttcctgaggcaccagtgcagcccggcggcgacgccctacggctcgccacagtgccaggcgctgcagcagcagtgctgccac

SEQ ID NO: 344238 - DNA, 385 bp, Zea mays
tttcagcattcagaaacacaccaagcgaagcgcactagcaacaacctaacaacaatggctaccaagatattagccctccttgcgcttcttgcccttttagtgagcgcaacaaatgcgttcattattccacagtgctcacttgctcctagtgccattattccacagttcctcccaccagttacttcaatgggcttcgaacatccagccgtgcaagcctacaggctacaactagcgcttgcggcgagcgtcttacaacaaccaattgcccaattgcaacaacaatccttggcacatctaaacctacaaaccatcgcaacgcaacagcaacaacagtttctgccatcactgagccacctagccgtggtgaaccctgtcgcctacttgc

SEQ ID NO: 344239 - DNA, 383 bp, Zea mays
gatcagcaaagcggcagtgcgtagagaggatcgtcgaacagaacagcatgaagatggtcatcgttctcgtcgtgtgcctggctctgtcagctgccagcgcctctgcaatgcagatgccctgcccctgcgcggggctgcagggcttgtacggcgctggcgccggcctgacgacgatgatgggcgccggcgggctgtacccctacgcggagtacctgaggcagccgcagtgcagcccgctggcggcggcgccctactacgccgggtgtgggcagacgagcgccatgtaccagccgctccggcaacagtgctgccagcagcagatgaggatgatggacgtgcagtccgtcgcgcagcagctgcagatgatgatgcagcttgagcgt

SEQ ID NO: 344240 - DNA, 388 bp, Zea mays
aactagcaacatagaaagcacaattttgtaccaacaatggcagccaaaggattgggcttccttatgctccttggtctttctgcaagtgctgctaccgcaaccattttcccacaatgctcacaagctcctatagcttcctttcttcccccatacctctcaccagcggtgtcttcagtatgtgaaaacccaattcttcaaccctacaggatccaacaggcaatcgcagcaggcatcttacctttatcacccttgttcctccaacaaccgtcagccctattacagcagttacctttggtgcatttgttggcacaaaacatcaaggcacatcaactacaacaacttgtgctaggaaaccttgctgcctactctcagcaacagcagtttcttt

SEQ ID NO: 344241 - DNA, 380 bp, Zea mays
attgagaccaacaagcaacatatatagtggaatccagtagcaacaatagagcggcaatggcgaccaagatattttccctccttatgctccttgctctttctgcatgtgttgctaacgcgacaattttccctcaatgctcacaagctcctatagcttcccttcttcccccataccttccatcaatgatagcttcagtatgtgaaaacccagcttttcaaccctataggctccaacaagcaatcgcagcaagcaacatacctttatcacccttgtttcaacaatcgccagccctatctttggtgcagtcattggttcaaaccatcagggcacagcaagccgtgctttcttcttgacacagcaacagttgctgcctttctacc

SEQ ID NO: 344242 - DNA, 316 bp, Zea mays
cccacgcgtacgggggtattaacatgacttagaacatggtgcaattaaggatgatagttgaggaggcagctcaggatacacctcgatattactgactatcatggatactaaccaatcgccaccttgcaaggaaccgaaccgagatcaagaccgctaaaaggcacccttctcaaacataattcaagacatgtgacaagagatatgtagagatctccctgaagatgttatagaaactgtcatagcaagggtaactgttgctgcacttactggattccgcactgtgtgtcgcatgtggtgctcacacatgggctcagac

SEQ ID NO: 344243 - DNA, 382 bp, Zea mays
caatcacagctggcatcttacctttatcacccttgttcctccaacaatcatcaggcctattacatcagttacctttggtgcatttattggcacaaaacatcagggcacaacaactacaacaacttgtgctagcaaaccttgctgcctactctcagcaacagcagtttcttccattcaaccaactagctgcattgaactctgcttcttatttgcaacaacaacaactaccattcagccagctacctgctgcctacccccagcaatttctttcattcaaccaactggcagcattgaactttcctgcttatttacagcagcaacaactactaccattcagccagctagctggtgtgagccctgctaccttcttgatacaaccaca

SEQ ID NO: 344244 - DNA, 387 bp, Zea mays
attttgagcattcagaaacacaccaagcgaagcacattagcaacaacctaacaacaatggctaccaagatattatccctccttgcgcttcttgcgctttttgcgagcgcaacaaatgcgttcattattccacaatgctcacttgctccaagttccattattacacagttcctcccaccagttacttcaatgggcttcgaacacccagctgtgcaagcctataggctacaacaagcaattgcggcgagcgtcttacaacaaccaatttcccagttgcaacaacaatccttggcacatctaacaatacaaaccatcgcaacgcaacagcaacaacaattcctaccagcactgagccacctagccatggtgaaccctgccgcctacttgc

SEQ ID NO: 344245 - DNA, 357 bp, Zea mays
ccaagatccaggacaaggagggcattcctccggaccagcagcggctcatttttgccggcaagcagctcgaggacgggcgcacgctggccgactacaacattcagaaagagagcaccctccacttggtgctgcgtctcaggggtggcatgcagatcttcgtgaagacacttactggcaagacgatcacccttgaggtggagtcctcagacaccattgacaacgtcaaggccaagatccaggacaaggagggcattccaccggaccagcagcggctgatcttcgccggcaagcagctggaggatggtcgcaccttggctgactacaacatccagaaggagagcaccctccacctggtgc

SEQ ID NO: 344246 - DNA, 373 bp, Zea mays
  unsure (1)..(373): unsure at all n locations
tagaccaactagcaacatataatgtttaatagngnaccaacaatggcgggcaggatattttgcttccttatgctccttggtctttctgcaagtgctgctaccgcaaccattttcccacaatgctcacaagctcctatagcttcctttcttcccccatacctctcaccagcggtgtcttcagtatgtgaaaacccaattcttcaaccctacaggatccaacaggcaatcgcagcaggcatcttacctttatcaccctttgttctccaacaaccgtcatccctattacagtagttacctttggtgcatttgttggcacaataacattaatgcacaacaactacaacaacttgtgctaggaaaccttgctgcctac

SEQ ID NO: 344247 - DNA, 392 bp, Zea mays
attttgagcattcagaaacacaccaagcgaagcgcactagcaacgacctaacaacaatggctaccaagatattagccctccttgcgcttcttgccctttttgtgagcgcaacaaatgcgttcattattccacaatgctcacttgctcctagtgccattattccacagttcctcccaccagttacttcaatgggcttcgaacacctagctgtgcaagccaacatgcaacaacaagcgcttgcggcgagcgtcttacaacaaccaattgcccaattgcaacaacaatccttgccacatctaacaatacaagccatcacaacgcaacagcaacaacagttcctaccagcactgagccacctagccatggtgaaccctgccgcctacttgcaagag

SEQ ID NO: 344248 - DNA, 383 bp, Zea mays
cggcaatcgcaccaggcaacttacctttatcacccctgttctttcaacaatcgccagcccggtctttggtgcagtcattggtacaaaccatcagggcacaacagctgcagcaactcgtgctaccagtgatcagccaagtagctctggcaaacctttctccctactctcagcaacaacaatttcttccattcaaccaactgtctacactgaaccctgctgcttatttgcagcaacaacaactactaccattcagccagctagctactgcctactctcagcagcaacaatttcttccatttaaccaattcgccgcactgaacccctctgcttatttccagcagcaaatactactaccatttggccagctagctacaacaagcccc

SEQ ID NO: 344249 - DNA, 388 bp, Zea mays
agatattagccctccttgcgcttcttgcccttttagtgagcgcaacaaatgcgttcattattccacagtgctcacttgctcctagtgccattattccacagttcctcccaccagttacttcaatgggcttcgaacatccagccgtgcaagcctacaggctacaactagcgcttgcggcgagcgtcttacaacaaccaattgcccaattgcaacaacaatccttggcacatctaaacctacaaaccatcgcaacgcaacagcaacaacagtttctgccatcactgagccacctagccgtggtgaaccctgtcgcctacttgcaacagcagctacttgcatccaacccacttgctctggcgaacgtagctgcataccagcaacaacaacg

SEQ ID NO: 344250 - DNA, 384 bp, Zea mays
caatagtgtaccaacaatggcagccaaaatattttgcctccttatgctccttgggattgctgcaagtgctgctacggcgaccattttcccgcaatgctcacaagctcctatagcttcccttcttcccccgtacctctcaccagcggtgtcttcggtatgtgaaaacccaattcttcaaccctacaggatccaacaggcaatcgcagctggcatcttacctttatcacccttgttcctccaacaatcatcagccctattacagcagttacctttggtgcatttattggcacaaaacatcagggcacaacaactacaacaacttgtgctagcaaaccttgctgcctactctcagcaacagcagtttcttccattcaaccaactagc

SEQ ID NO: 344251 - DNA, 383 bp, Zea mays
aaaaaggcacaatagtgtaccaacaattggctttcaaaatattttgcctcctaaggctcgggggtatttctgcaagtgctgctacggcgaccattttcccgcaatgctcacaagctcctatagcttcccttcttcccccgtacctctcaccagcggtgtcttcggtatgtgaaaacccaattcttcaaccctacaggatccaacaggcaatcgcagctggcatcttacctttatcacccttgttcctccaacaatcatcagccctattacagcagttacctttggtgcatttattggcacaaaacatcagggcacaacaactacaacaacttgtgctagcaaaccttgctgcctactctcagcaacagcagtttctttcattc

SEQ ID NO: 344252 - DNA, 385 bp, Zea mays
gaaacacaccaagcgaagcgcactagcaacaacctaacaacaatggctaccaagatattatccctccttgcgcttcttgcgctttttgcgagcgcaacaaatgcgtccattattccacaatgctcacttgctcctagttccattattccacagttcctcccaccagttacttcaatggccttcgaacacccagctgtgcaagcctataggctacaacaagcgattgcggcgagcgtcttacaacaaccaattgcccaattgcaacaacaatccttggcacatctaacaatacaaaccatcgcaacgcaacagcaacaacagttcctaccagcactgagccacctagccatggtgaaccctgtcgcctacttgcaacagcagctgc

SEQ ID NO: 344253 - DNA, 388 bp, Zea mays
cgagaaagcacaatagtggtaccaacatatggcagcctaaaatattttgcgctccttatgcgtccttggtctttctgcaagtgctgctacggcgaccattttcccacaatgctcacaagctcctatagcttcccttcttcccccgtacctctcaccaacggtgtcttcggtatgtgaaaacccaattcttcaaccctacaggatccaacaggcaatcgcagctggcatcttacctttatcacccttgttcctccaacaatcatcagccctattacagcagttacctttggtgcatttattggcacaaaacatcagggcacaacaactacaacaacttgtgctagcaaaccttgctgcctactctcagcaacagcagtttcttccattc

SEQ ID NO: 344254 - DNA, 386 bp, Zea mays
caccaagcgaagcacattagcaacatcctaacaacaatggctaccaagatattatccctccttgcgcttcttgcgctttttgcgagcgcaacaaatgcgttcattattccacaatgctcacttgctccaagttccattattacacagttcctcccaccagttacttcaatgggcttcgaacacccagctgtgcaagcctataggctacaacaagcaattgcggcgagcgtcttacaacaaccaatttcccagttgcaacaacaatccttggcacatctaacaatacaaaccatcgcaacgcaacagcaacaacaattcctaccagcactgagccacctagccatggtgaaccctgccgcctacttgcaacagcagttgcttgcatc

SEQ ID NO: 344255 - DNA, 387 bp, Zea mays
attcagaaacacaccaagcgaagcacattagcaacaacctaacaacaatggctaccaagatattatccctccttgcgcttcttgcgctttttgcgagcgcaacaaatgcgttcattattccacaatgctcacttgctccaagttccattattacacagttcctcccaccagttacttcaatgggcttcgaacacccagctgtgcaagcctataggctacaacaagcaattgcggcgagcgtcttacaacaaccaatttcccagttgcaacaacaatccttggcacatctaacaatacaaaccatcgcaacgcaacagcaacaacaattcctaccagcactgagccacctagccatggtgaaccctgccgcctacttgcaacagcagt

SEQ ID NO: 344256 - DNA, 378 bp, Zea mays
gggcggacgcttgggttagcattcagaaacacaccaagcgaggcggactagcaacaacctaacaacaatggctaccaagatattatccctccttgcgcttcttgcgctttttgcgagcgcaacaaatgcgtccattattccacaatgctcacttgctcctagttccattattccacagttcctcccaccagttacttcaatggccttcgaacacccagctgtgcaagcctataggctacaacaagcgattgcggcgagcgtcttacaacaaccaattgcccaattgcaacaacaatccttggcacatctaacaatacaaaccatcgcaacgcatcagcaacaacagttcctaccagcactgagccacctagccatggt

SEQ ID NO: 344257 - DNA, 391 bp, Zea mays
caccaagcgaagcacattagcaacaacctaacaacaatggctaccaagatattatccctgcttgcgcttcttgcgctttttgcgagcgcaacaaatgcgttcattattccacaatgctcacttgctccaagttccattattacacagttcctcccaccagttacttcaatgggcttcgaacacccagctgtgcaagcctataggctacaacaagcaattgcggcgagcgtcttacaacaaccaatttcccagttgcaacaacaatccttggcacatctaacaatacaaaccatcgcaacgcaacagcaacaacaattcctaccagcactgagccacctagccatggtgaaccctgccgcctacttgcaacagcagttgcttgcatcaaacc

SEQ ID NO: 344258 - DNA, 384 bp, Zea mays
gatcagcaaagcggcagtgcgtagagaggatcgtcgaacagaacagcatgaagatggtcatcgttctcgtcgtgtgcctggctctgtcagctgccagcgcctctgcaatgcagatgccctgcccctgcgcggggctgcagggcttgtacggcgctggcgccggcctgacgacgatgatgggcgccggcgggctgtacccctacgcggagtacctgaggcagccgcagtgcagcccgctggcggcggcgccctactacgccgggtgtgggcagacgagcgccatgtaccagccgctccggcaacagtgctgccagcagcagatgaggatgatggacgtgcagtccgtcgcgcagcaactgcagatgatgatgcaacttgagcgtg

SEQ ID NO: 344259 - DNA, 395 bp, Zea mays
cccacgcgtccgacaccaagcgaggccccttaccactttcctttcaccaagggctcccaagaaagggtccgtgcctgcgcttcttgcgcttttggcgagcgcaacaaatgcgtccattattccacaatgctcacttgctcctagttccattattccacagttcctcccaccagttacttcaatggccttcgaacacccagctgtgcaagcctataggctacaacaagcgattgcggcgagcgtcttacaacaaccaattgcccaattgcaacaacaatccttggcacatctaacaatacaaaccatcgcaacgcaacagcaacaacagttcctaccagcactgagccacctagccatggtgaaccctgtcgcctacttgcaacagcagctgcttg

SEQ ID NO: 344260 - DNA, 309 bp, Zea mays
  unsure (1)..(309): unsure at all n locations
gacgacccacgcgtacgcggacgcgtggcctccctttttatttttctcccaggaaanaanccctggtgggggttcttgcgctttttgcgagcgcaacaaatgcgttcattattccacactgctcacttgctccaagttccattattacacagttcctcccaccagttacttcaatgggcttcgaacacccagctgtgcaagcctataggctacaacaagcaattgcggcgagcgtcttacaacaaccaatttcccagttgcaacaacaatccttggcacatctaacaatacaaaccatcgcaacgcaac

SEQ ID NO: 344261 - DNA, 387 bp, Zea mays
attcagaaacacaccaagcgaagcgtactagcaacgacctaacaacaatggctgcgcaagatattagccctccttgcgcttcttgccctttttgtgagcgcaacaaatgcgttcattattccacaatgctcacttgctcctagtgccattattccacagttcctcccaccagttacttcaatgggcttcgaacacctagctgtgcaagccaacatgcaacaacaagcgcttgcggcgagcgtcttacaacaaccaattgcccaattgcaacaacaatccttgccacatctaacaatacaagccatcacaacgcaacagcaacaacagttcctaccagcactgagccacctagccatggtgaaccctgccgcctacttgcaagagcag

SEQ ID NO: 344262 - DNA, 261 bp, Zea mays
  unsure (1)..(261): unsure at all n locations
aacacaccaagcttttttttctaacaacaaccnaacaacaagggctggcaaaatattaaaactacttgccctactacacatatatgagagctcaacaaacacattaattaaatccacatcactcactatcaactaaatccattattccacaccaccatcaaccagatattataaaaagcaactaacacctatctttacaagccaaaatgcaacaacataaacacaattacaagcatctaacaacaaccaatttcctcaatt

SEQ ID NO: 344263 - DNA, 246 bp, Zea mays
cagaaacacaccaagcgaagcacattatcaacaacctaacaacaatggctaccaagatattatccctccttgcgcttcttgcgctttttgcgagcgcaacaaatgcgttcattattccacaatgctcacttgctccaagttccattattacacagttcctcccaccagttacttcaatgggcttcgaacacccagctgtgcaagcctatatgctacatcaagcaattgcgtctgagcgtcttacaa

SEQ ID NO: 344264 - DNA, 145 bp, Zea mays
tgcaacactactaatttcacatatctattcaaccaacagaactaccataaagaagttttcattttaacttcacaatcacctcatctattttctctttaaaaaacataatattatatacacaaatattatttaacaacaaattttt

SEQ ID NO: 344265 - DNA, 120 bp, Zea mays
ccagcgtccgagtatgagcaggcagaaacacacttttcgaagcaacccagcaacgaccggacagcagttttctaccaatatattagccctccttgcgcttattgcccttatgtgagcgca

SEQ ID NO: 344266 - DNA, 222 bp, Zea mays
  unsure (1)..(222): unsure at all n locations
gnaatccatcacctaaatattttttcattcaaaacacaccaagcggacgcattttttcatcctacaacaagcctaccaagaattattcttttttgcgctactgctctttttgctagtctatcattttctctcaatatatcttctttctcaacattttttatatatcaaatatatttctttttacaatttaactttgttacaaatatttttttttttttcata

SEQ ID NO: 344267 - DNA, 311 bp, Zea mays
aaaaaaaaaaaaaaaaaaaaaacatattttttcaaaataacaacaaaaaaaatcgggcgggcgccctaaaaattatctcttctcacccaccctttacatccacaacaaatatcttttttataatcacatcttatttaaaattctcattccctttttttatacaaacttttttttttctaaaactcttcttctttccccaaatcttttattctctcttccaaatattatctcctcatatctaaattttccctctaatatttaatttttcccccactcttttttttttttcccctccataaatattttttttc

SEQ ID NO: 344268 - DNA, 428 bp, Zea mays
  unsure (1)..(428): unsure at all n locations
cggacacatgggtgatcattcagattcattcaagcgaagcacattatcaacaggcgaggatacatattcttccaacatattatccctccttgcgcaacattctctttttgcgagcgcatcaaattcttacataattttacatttcttatttgttccaaaatccatatatttcacaattactctcttttttttatctaaaattttttttttttaacacatattttttttaaacctaaatttttattaatatttctattttttcttaaaaatatttttatttttctttaaaaatctatttgtttttataaaatatatttttttttttccatattttttttttattttcatnatattttttttttttttctttataattattaattttttattaaataaaaatttttttttttctttaatccatattattt

SEQ ID NO: 344269 - DNA, 137 bp, Zea mays
  unsure (1)..(137): unsure at all n locations
gacagcaaagcggcagtgcgtatatattatcgtcgaacagaacagcatgaagaatgtcatctttctcttcttgtgcctctctctntcagctgccagcgccttttcaatgcatattcctttctcttgcacaatactta

SEQ ID NO: 344270 - DNA, 259 bp, Zea mays
  unsure (1)..(259): unsure at all n locations
gcttcccttcttcccccatacctttcattatctgtgtcttcggtatgtaaaaacgcggttctttatccctacagtatccaacangcaatctcatctggcatcttacctttatcacccttgttctttcaacaatttatatccttattacttcattatcctttttttcattttttttcacaaattattatttcacatcaacttcatctactattttctctaaacctttcttaccaatttatttttctcctatttttttttt

SEQ ID NO: 344271 - DNA, 367 bp, Zea mays
caactagcaacatataaagctcaatattgtaccaacaatggcagccaaaatagggggccttcttatgctccttggtctttctgcaagtgctgttacggcgaccattttcccacaatgctcacaagctcctatagcttcccttcttcccccgtacctctcaccagcggtgtcttcggtatgtgaaaacccaattcttcaaccctataggatccaacaggcaatcgcagctggcatcttacctttatcacccttgttcctccaacaatcatcagccctattacagcagttacctttggtgcatttattggcacagaacattatggctcatcaactacaacaacttgtgctagcaaaccttgctgtctac

SEQ ID NO: 344272 - DNA, 383 bp, Zea mays
atagaaagtggaatccagtagcaacaatagagcaacaatggagaccaagatattttcgctccttatgctccttgctctttctacatgtgttgctaacgcgacaattttccctcaatgctcacaagctcctatagcttccctttttcccccataccttccatcaattatagcttcagtatgtgaaaacccagctcttcaaccatataggcttcaacaagcaatcgcagcaagcaacatacctttatcgcccttgttgtgtcaacaatcgccagccctatctttggtgcagtcattggtacaaaccatcagggcacaacagctgcagcaactcgtgctacctgtgatcaaccaagtagctctggcaaaccttttctcctactctt

SEQ ID NO: 344273 - DNA, 379 bp, Zea mays
cccacgcgtccgatttgcagcaacaactattaccatttagccagctagctactgcctactctcaacaacaacaacttcttccatttaaccaattggccgcactgaaccccgctgcttatttgcagcagcaaatactactaccatttagccagctagctacagcaagccgtgcttccttcttgacacaacaacagttgctgccgttctaccagcagtttgcggctaaccccgcaaccctcttacaactacaacaattgttgccctttgtccaacttgctttgacaaacccagcagcctcctaccaacaacacatcattggtggtgccctcttttagattgcttattagatgtaattcaataataaagttttttggatgat

SEQ ID NO: 344274 - DNA, 384 bp, Zea mays
aagcaacatagaaagtggaatacagtagcaacaatagagcaacaatggcggccgagatattttccatccttatgctccttgctctttctgcatgtgttgctaacgcgaccatttttcctcaatactcacaagctcctatagctgcccttcttcccccataccttccatcaatgaccgcttcagtatgtgaaaacccagcccttcaaccctacaggctccaacaagcaatcgcaacaagcaacttacctttatcacccctgttctttcaacaatcgccagccctatctttggtgcagtcattggtacaaaccatcagggcacaacagctgcagcaactcgtgctaccagtgatcagccaagtagctctggcaaacctttctccct

SEQ ID NO: 344275 - DNA, 381 bp, Zea mays
gcacaatagtgtaccaacaatggcagctaaaatattttgcctccttatgctccttggtctttctgcaagtgctgctacggcgaccattttcccacaatgctcacaagctcctatagcttcccttcttcccccgtacctctcaccaacggtgtcttcggtatgtgaaaacccaattcttcaaccctacaggatccaacaggcaatcgcagctggcatcttacctttatcacccttgttcctccaacaatcatcagccctattacagcagttacctttggtgcatttattggcacaaaacatcagggcacaacaactacaacaacttgtgctagcaaaccttgctgcctactctcagcaacagcagtttcttccattcaacca

SEQ ID NO: 344276 - DNA, 376 bp, Zea mays
acgtcagcctagcaattagctcatcgactccagattggagaactcgacaccatgaaggtgctgatcgttgcccttgctctcctggcgctcgctgcgagcgccgcctccagtacaagcggcggctgtggctgccagacaccaccgtttcatctaccgcctccgttctatatgccgcctccgttctatctgccgccgcagcagcagccgcagccatggcaataccccactcaaccaccgcagctaagcccgtgccagcagttcggatcctgcggcgtcggcagcgtcggcagcccgttcctgggccagtgcgtcgagttcctgaggcaccagtgcagcccggcggcgacgccctacggctcgccacagtgccaggcgc

SEQ ID NO: 344277 - DNA, 377 bp, Zea mays
aacaagcaacatagaaagtggaattcagtagcaacaatagagcaacaatggcgaccaagatattttccctccttatgctccttgctctttctgcatgtgttgctaacgcgacaattttccctcaatgctcacaagctcctatagcttcccttcttcccccataccttccatcaatgatagcttcagtatgtgaaaacccagctcttcaaccctataggctccaacaagcaatcgcagcaagcaacatacctttatcactcttgtttcaacaatcgccagccctatctttggtgcagtcattggtacaaaccatcatggcacagcagctgcagcaactcgtgctacctgtgatcaaccaagtagctctggcaaacctt

SEQ ID NO: 344278 - DNA, 384 bp, Zea mays
cggacgcgtgggcagtaccatcaatcattattcatcttagtagtataggcaccaaagtgaaatctgcaacatcaattatctaactccaaaaaccatgaagctggtgcttgtggttcttgctttcattgctttagtatcaagtgtttcttgtacacagacaggcggctgcagctgtggtcaacaacaaagccatgagcagcaacatcatccacaacaacatcatccacaaaaacaacaacatcaaccaccaccacaacatcaccagcagcagcaacaccaacaacaacaagttcacatgcaaccacaaaaacattagcaacaacaagaagttcatgttcaacaacaacaacaacaaccgcagcaccaacaacaacaacaacaaca

SEQ ID NO: 344279 - DNA, 378 bp, Zea mays
gcggcagtgcgtagagaggatcgtcgaacagaacagcatgaagatggtcatcgttctcgtcgtgtgcctggctctgtcagctgccagcgcctctgcaatgcagatgccctgcccctgcgcggggctgcagggcttgtacggcgctggcgccggcctgacgacgatgatgggcgccggcgggctgtacccctacgcggagtacctgaggcagccgcagtgcagcccgctggcggcggcgccctactacgccgggtgtgggcagacgagcgccatgtaccagccgctccggcaacagtgctgccagcagcagatgaggatgatggacgtgcagtccgtcgcgcagcagctgcagatgatgatgcagcttgagcgtgccgc

SEQ ID NO: 344280 - DNA, 382 bp, Zea mays
agcggtgtcttcggtatgtgaaaacccaattcttcaaccctacaggatccaacaggcaatcgcagctggcatcttacctttatcacccttgttcctccaacaatcatcagccctattacaacagttacctttggtgcatttattggcacaaaacatcagggcacaacaactacaacaacttgtgctagcaaaccttgctgcctactctcagcaacagcagtttcttccattcaaccaactaggttcattgaactctgcttcttatttgcaacaacaacaactaccattcagccagctacctgctgcctacccccagcaatttcttccattcaaccaactagcagcattgaactctcctgcttatttacagcagcaacaacta

SEQ ID NO: 344281 - DNA, 382 bp, Zea mays
agaccattagctttatctactccagagcgcagaagaacccgatcgacaccatgagggtgttgctcgttgccctcgctctcctggctctcgctgcgagcgccacctccacgcatacaagcggcggctgcggctgccagccaccgccgccggttcatctaccgccgccggtgcatctgccacctccggttcacctgccacctccggtgcatctcccaccgccggtccacctgccgccgccggtccacctgccaccgccggtccatgtgccgccgccggttcatctgccgccgccaccatgccactaccctactcaaccgccccggcctcagactcatccccagccacacccatgcccgtgccaacagccgcatccaagcccgtg

SEQ ID NO: 344282 - DNA, 369 bp, Zea mays
cccacgcgtccgcaactagcaacatttaaagcacaatagtgtaccaacaatggcagccaaaatattttgcctccttatgctccttggtctttctgcaagtgctgctacggcgaccattttcccgaaatgctcgcaagctcctatagcttcccttcttcccccgtacctctcaccagcggtgtcttcggtatgtgaaaacccaattcttcaaccctacaggatccaacaggcaatcacagctggcatcttacctttatcacccttgttcctccaacaatcatcagccctattacatcagttaccttttgtgcatttattggcacaaaacattatggcacaacaacttcaacaacttgtgctagcaaacct

SEQ ID NO: 344283 - DNA, 373 bp, Zea mays
  unsure (1)..(373): unsure at all n locations
agctcatcgactccagattggagatctcgacaccatgaaggtgctgatcgggggccttgctctcctggcgctcgctgcgagcgccgcctccagtacaagcggcggctgtggctgccagacaccaccgtttcatctaccgcctccgttctatatgccgcctccgttctatctgccgccgcagcagcagccgcagccatggcaataccccactcaaccaccgcagctaagcccgtgccagcagttcggatcctgcggcgtcggcagcgtcggcagcccgttcctgggccagtgcgtcnagttcctgaggcactagtgcatcccggcggcgacgccctacggctcgccacagtgccaggcgctgcagcagcagtgc

SEQ ID NO: 344284 - DNA, 380 bp, Zea mays
cggacgcgtgggcaacaagcaacatagaaagtggaatccagtagcaacaatagagcaacaatggcgaccaagatattttccctccttatgctccttgctctttctgcatgtgttgctaacgcgacaattttccctcaatgctcacaagctcctatagcttcccttcttcccccataccttccatcaatgatagcttcagtatgtgaaaacccagctcttcaaccctataggctccaacaagcaatcgcagcaagcaacatacctttatcacccttgtttcaacaatcgccagccctatctttggtgcagtcattggtacaaaccatcagggcacagcagctgcagcaactcgtgctacctgtgatcaaccaagtagctct

SEQ ID NO: 344285 - DNA, 105 bp, Zea mays
tctttactctttgtcaacaaacttttttttagtgaaatccagaaacattagtgcgtcaacattttctatcaccacatccccccttcttataccccaaaatctttt

SEQ ID NO: 344286 - DNA, 379 bp, Zea mays
ttttgagcattcagaaacacaccaagcgaagcacattagcaacaacctaacaacaatggctaccaagatattatccctccttgcgcttcttgcgctttttgcgagcgcaacaaatgcgttcattattccacaatgctcacttgctccaagttccattattacacagttcctcccaccagttacttcaatgggcttcgaacacccagctgtgcaagcctataggctacaacaagcaattgcggcgagcgtcttacaacaaccaatttcccagttgcaacaacaatccttggcacatctaacaatacaaaccatcgcaacgcaacagcaacaacaattcctaccagcactgagccacctagccatggtgaaccctgccgcc

SEQ ID NO: 344287 - DNA, 370 bp, Zea mays
gcccgttcctgggccagtgcgtcgagttcctgaggcaccagtgcagcccggcggcgacgccctacggctcgccacagtgccaggcgctgcagcagcagtgctgccaccagatcaggcaggtggagccgctgcaccggtaccaggcgacatacggtgtggtcctgcagtccttcctgcagcagcagccgcagggcgagctcgcggcgctgatggcggcccaggtagcgcagcagctgacggcgatgtgcggcctgcagctgcagcagccaggtccctgcccttgcaacgcagctgccggcggtgtctactactgaggaaactatgtactgtagtaataatgtaatggagccgctgactagctacctagctc

SEQ ID NO: 344288 - DNA, 381 bp, Zea mays
caactagctgcattgaactctgcttcttatttgcaacaacaacaactaccattcagccagctatctgctgcctacccccagcaatttcttccattcaaccaactgacagctttgaactctcctgcttatttacagcagcaacaactactaccattcagccagctagctggtgtgagccctgctaccttcttgacacaaccacaattgttgccgttctaccagcacgctgcgcctaacgctggcaccctcttacaactgcaacaattgctgccattcaaccaacttgctttgacaaacccaacagcattctaccaacaacccatcattggtggtgccctcttttagatttcttatgagttatagttcaataataaagttttt

SEQ ID NO: 344289 - DNA, 383 bp, Zea mays
caactagcaacatagaaagcacaatagtgtaccaacaatggcagccaaaatattttgcgctccttatgctccttggtatttctgcaagtgctgctacggcgaccattttcccgcaatgctcacaagctcctatagcttcccttcttcccccgtacctctcaccagcggtgtcttcggtatgtgaaaacccaattcttcaaccctacaggatccaacaggcaatcgcagctggcatcttacctttatcacccttgttcctccaacaatcatcagccctattacagcagttacctttggtgcatttattggcacaaaacatcagggcacaacaactacaacaacttgtgctagcaaaccttgctgcctactctcagcaacagcag

SEQ ID NO: 344290 - DNA, 385 bp, Zea mays
gaccaactagcaacatagaaagcacaatattgtaccaataatggcagccaaaatattttgcctcattatgctccttggtctttctgcaagtgctgctacggcgagcattttcccgcaatgctcacaagctcctatagcttcccttcttcccccatacctctcaccagcgatgtcttcagtatgtgaaaatccaattcttctaccctacaggatccaacaggcaatcgcagcaggcatcttacctttatcacccttgttcctccaacaatcatcagccctattacagcagttacctttggtgcatttattggcacaaaacatcagggcacaacaactacaacaactcgtgctagcaaaccttgctgcctactctcagcaacagcag

SEQ ID NO: 344291 - DNA, 378 bp, Zea mays
attagctttatctactccagagcgcagaagaacccgatcgacaccatgagggtgttgctcgttgccctcgctctcctggctctcgctgcgagcgccacctccacgcatacaagcggcggctgcggctgccagccaccgccgccggttcatctaccgccgccggtgcatctgccacctccggttcacctgccacctccggtgcatctcccaccgccggtccacctgccgccgccggtccacctgccaccgccggtccatgtgccgccgccggttcatctgccgccgccaccatgccactaccctacttaaccgccccggcctcaaccttatccccagccacacccatgcccgtgccaacagccgcattcaagcccgtgc

SEQ ID NO: 344292 - DNA, 247 bp, Zea mays
attagctttatctactccagatcgcataagaacccgatcgacaccatgaggggggtgctcgttgccctcgctctcctggctctcgctgcgagcgccacctccacgcatacaagcggcggctgcggatgccagccaccgccgccggttcatctaccgccgccggtgcatctgccaccttctgttcacctgccaccttccgtgcatctcccaccgtcgttccaccttgccgtcttctgtccacctgcca

SEQ ID NO: 344293 - DNA, 369 bp, Zea mays
  unsure (1)..(369): unsure at all n locations
ccaactagcaacatagaaagcacaatagtgtaccaacaatggcagccaaaatattttgcctccttatgctccttggtctttctgcaagtgctgctacggcgaccattttcccgcaatgctcgcaagctcctatagcttcccttcttcccccgtacctctcaccagcggtgtcttcggtatgtgaaaacccaattcttcaaccctacaggatccaacaggcaatcgcagctggcatcttacctttatcacccttgttcctccaacaatcatcagccctattacaacagtgacctttggtgcatttattgtcacaaaacatnagggcactacaactacaacatctttgtgctagcaaaccttgctgcctat

SEQ ID NO: 344294 - DNA, 383 bp, Zea mays
attttgagcattcagaaacacaccaagcgaagcacattagcaacaacctaacagcaatggctaccaagatattatccctccttgcgcttcttgcgctttttgcgagcgcaacaaatgcgttcattattccacaatgctcacttgctccaagttccattattacacagttcctcccaccagttacttcaatgggcttcgaacacccagctgtgcaagcctataggctacaacaagcaattgcggcgagcgtcttacaacaaccaatttcccagttgcaacaacaatccttggcacatctaacaatacaaaccatcgcaacgcaacagcaacaacaattcctaccagcactgagccacctagccatggtgaaccctgccgcctac

SEQ ID NO: 344295 - DNA, 63 bp, Zea mays
  unsure (1)..(63): unsure at all n locations
ggcgaccacgcgttctaanctaaacattcacaaacatttttttttaaacacactatcaacaac

SEQ ID NO: 344296 - DNA, 59 bp, Zea mays
acccgtccggttttttggatgatgtttgtggcgtcccagaaataagaaagtacatttct

SEQ ID NO: 344297 - DNA, 377 bp, Zea mays
attttcagcattcagaaacacaccaagcgaagcgcactagcaacaacctaacaacagtggctaccaagatattagccctccttgcgcttcttgcccttttagtgagcgcaacaaatgcgttcattattccacagtgctcacttgctcctagtgccattattccacagttcctcccaccagttacttcaatgggcttcgaacatccagccgtgcaagcctacaggctacaactagcgcttgcggcgagcgtcttacaacaaccaattgcccaattgcaacaacaatccttggcacatctaaacctacaaaccatcgcaacgcaacagcaacaacagtttctgccatcactgagccacctagccgtggtgaaccctgtc

SEQ ID NO: 344298 - DNA, 375 bp, Zea mays
ctttctgcaagtgctgctacggcgaccattttcccgcaatgctcgcaagctcctatagcttcccttcttcccccgtacctctcaccagcggtgtcttcggtatgtgaaaacccaattcttcaaccctacaggatccaacaggcaatcgcagctggcatcttacctttatcacccttgttcctccaacaatcatcagccctattacaacagttacctttggtgcatttattggcacaaaacatcagggcacaacaactacaacaacttgtgctagcaaaccttgctgcctactctcagcaacagcagttttttccattcaaccaactaggttcattgaactctgcttcttatttgcaacaacaacaactaccattc

SEQ ID NO: 344299 - DNA, 387 bp, Zea mays
tcgatttttccgaaatgcttgcaaggttctattggttcccttttttccccgtacctctcaccagcgggggcttccgtatgtgaaaacccaattcttcaaccctacaggatccaacaggcaatcacagctggcatcttacctttatcacccttgttcctccaacaatcatcagccctattacatcagttacctttggtgcatttattggcacaaaacatcagggcacaacaactacaacaacttgtgctagcaaaccttgctgcctactctcagcaacagcagtttcttccattcaaccaacttgctttgacaaacccagcagcgttctaccaacaacccatcattggtggtgccctcttttagatttcttatgagttatagttcaat

SEQ ID NO: 344300 - DNA, 83 bp, Zea mays
gttctagatcgcgagcggccgccctttttttttcttttttttttttttttttggtggggtttttttttagttctagatcgcga

SEQ ID NO: 344301 - DNA, 325 bp, Zea mays
  unsure (1)..(325): unsure at all n locations
agaccattagctttatctactccatagcgcagaagaacccgatcgacaccagtgcggtgttgctcgttgccctcgctctcctggctctcgctgcgagcgccacctccacgcatacaagcggcggctgctgctgccagccaccgacgccggttcatactaccgtcactgtgcatctgccacctcctttttacaagccaccttctaagcatgccctttctaccttttatattttttctgctgagcattttcctcaaatagtatcatttttctttttactttttttttgtggactattattntaattttttattactttatttttttt

SEQ ID NO: 344302 - DNA, 259 bp, Zea mays
agcccataccctacttaacctttttttcccaaacctaacccaccgacacaggcgatgctcttgccaactttccttatcccaacccaagctccatatttcataataactcttctttctttcagcaacaacctccaatttctgtctccaatatctttttttatttctgatagcattattttcacacccatactttttactctccaaccttatttttttttatataccaaatctttttctttcatctaattttttttctttc

SEQ ID NO: 344303 - DNA, 381 bp, Zea mays
tgcgttcattattccacagtgctcacttgctcctagtgccattattccacagttcctgccaccagttacttcaatgggcttcgaacatccagccgtgcaagcctacaggctacaactagcgcttgcggcgagcgtcttacaacaaccaattgcccaattgcaacaacaatccttggcacatctaaacctacaaaccatcgcaacgcaacagcaacaacagtttctgccatcactgagccacctagccgtggtgaaccctgtcgcctacttgcaacagcagctacttgcatccaacccacttgctctggcgaacgtagctgcataccagcaacaacaacgtctgcaacagtttatgccagcgctcagtcaactagccatggt

SEQ ID NO: 344304 - DNA, 385 bp, Zea mays
attcagaaacacaccaagcgaagcgcactagcaacaacctaacaacaatggctaccaagatattatccctccttgcgcttcttgcgctttttgcgagcgcaacaaatgcgtccattattccacaatgctcacttgctcctagttccattattccacagttcctcccaccagttacttcaatggccttcgaacacccagctgtgcaagcctataggctacaacaagcgattgcggcgagcgtcttacaacaaccaattgcccaattgcaacaacaatccttggcacatctaacaatacaaaccatcgcaacgcaacagcaacaacagttcctaccagcactgagccacctagccatggtgaaccctgtcgcctacttgcaacagca

SEQ ID NO: 344305 - DNA, 384 bp, Zea mays
gaccaacaagcaacatagaaagtggaatccagtagcaacaatagagcaacaatggcgaccaagatattttccctccttatgctccttgctctttctgcatgtgttgctaacgcgacaattttccctcaatgctcacaagctcctatagcttcccttcttcccccataccttccatcaatgatagcttcagtatgtgaaaacccagctcttcaaccctataggctccaacaagcaatcgcagcaagcaacatacctttatcacccttgtttcaacaatcgccagccctatctttggtgcagtcattggtacaaaccatcagggcacagcagctgcagcaactcgtgctacctgtgatcaaccaagtagctctggcaaacctttct

SEQ ID NO: 344306 - DNA, 389 bp, Zea mays
agccttccgaagaaccacaccaggcgaagcacattatcaacaacctaacaacaatggctaccaagatattatccctccttgcgcttcttgcgctttttgcgagcgcaacaaatgcgttcattattccacaatgctcacttgctccaagttccattattacacagttcctcccaccagttacttcaatgggcttcgaacacccagctgtgcaagcctataggctacaacaagcaattgcggcgagcgtcttacaacaaccaatttcccagttgcaacaacaatccttggcacatctaacaatacaaaccatcgcaacgcaacagcaacaacaattcctaccagcactgagccacctagccatggtgaaccctgccgcctacttgcaacag

SEQ ID NO: 344307 - DNA, 385 bp, Zea mays
aagcaacatagaaagtggaatccagtagcaacaatagagcaacaatggcgaccaagatattttccctccttatgctccttgctctttctgcatgtgttgctaacgcgacaattttccctcaatgctcacaagctcctatagcttcccttcttcccccataccttccatcaatgatagcttcagtatgtgaaaacccagctcttcaaccctataggctccaacaagcaatcgcagcaagcaacatacctttatcacccttgtttcaacaatcgccagccctatctttggtgcagtcattggtacaaaccatcagggcacagcagctgcagcaactcgtgctacctgtgatcaaccaagtagctctggcaaacctttctccctactc

SEQ ID NO: 344308 - DNA, 385 bp, Zea mays
caacaagcaacatagaaagtggaatccagtagcaacaatagagcaacaatggagaccaagatattttccctccttatgctccttgctctttctacatgtgttgctaacgcgacaattttccctcaatgctcacaagctcctatagcttccctttttcccccataccttccatcaattatagcttcagtatgtgaaaacccagctcttcaaccatataggcttcaacaagcaatcgcagcaagcaacatacctttatcgcccttgttgtgtcaacaatcgccagccctatctttggtgcagtcattggtacaaaccatcagggcacaacagctgcagcaactcgtgctacctgtgatcaaccaagtagctctggcaaacctttctc

SEQ ID NO: 344309 - DNA, 377 bp, Zea mays
gcaacagcagtttcttccattcaaccaactggctgcattgaactctgctgcttatttgcaacaacaactaccattcagtcagctagctgctgcctacccccagcaatttcttccattcaaccaactggcagcattgaactctgctgcttatttacaacagcaacagctaccaccattcagccagctagctgatgtgagccctgttgccttcttgacacaacaacagttgttgccgttctacctgcacgctgcgcctaacgctggcaccctcttacaactgcaacaattgctgccattcaaccaacttgctttgacaaacccaacagcgttctaccaacaacccatcattggtggtgccctcttttagattgcttatg

SEQ ID NO: 344310 - DNA, 386 bp, Zea mays
gcaacatagaaagcacaatagtgtaccaacaatggcagccaaaatattttgcctccttatgctccttggtctttctgcaagtgctgctacggcgaccattttcccacaatgctcacaagctcctatagcttcccttcttcccccgtacctctcaccagcggtgtcttcggtatgtgaaaacccaattcttcaaccctataggatccaacaggcaatcgcagctggcatcttacctttatcacccttgttcctccaacaatcatcagccctattacagcagttacctttggtgcatttattggcacaaaacatcagggcacaacaactacaacaacttgtgctagcaaaccttgctgcctactctcagcaacaacagtttcttccat

SEQ ID NO: 344311 - DNA, 376 bp, Zea mays
tattttgagcattcagaaacacaccaagcgaagcgcactagcaacgacctaacaacaatggctaccaagatattagccctccttgcgcttcttgccctttttgtgagcgcaacaaatgcgttcattattccacaatgctcacttgctcctagtgccattattccacagttcctcccaccagttacttcaatgggcttcgaacacctagctgtgcaagccaacatgcaacaacaagcgcttgcggcgagcgtcttacaacaaccaattgcccaattgcaacaacaatccttgccacatctaacaatacaagccatcacaacgcaacagcaacaacagttcctaccagcactgagccacctagccatggtgaaccctg

SEQ ID NO: 344312 - DNA, 370 bp, Zea mays
  unsure (1)..(370): unsure at all n locations
cttcggtatgtgaaaacccaattcttcaactcctacaggatccaacaggcaatcggaggtggcattttacctttatgacccttgttcctccaacaatcatcagccctattacaacagttacctttggttcatttattggcacaaaacatgatgggtcaacaactacaacaacttgtgctagcaaaccttggtgcctactcttagctacagcaaggtggtttcattcaaccaaactaaanttttttatgaacacttttttcttttttttcaacattcaacaaacctcttcttttttgttggtatttttttttttttattactccctctattattttttttttttcaattattttttattttattggtatat

SEQ ID NO: 344313 - DNA, 380 bp, Zea mays
ctaacaacaatggctaccaagatattatccctccttgcgcttcttgcgctttttgcgagcgcaacaaatgcgtccattattccacaatgctcacttgctcctagttccattattccacagttcctcccaccagttacttcaatggccttcgaacacccagctgtgcaagcctataggctacaacaagcgattgcggcgagcgtcttacaacaaccaattgcccaattgcaacaacaatccttggcacatctaacaatacaaaccatcgcaacgcaacatcaacaacagttcctaccagcactgagccacctagccatggtgaaccctgtcgcctacttgcaacagcagctgcttgcatccaacccacttgctctagcaat

SEQ ID NO: 344314 - DNA, 373 bp, Zea mays
gaaagcacaatagtgtaccaacaatggcagccaaaatattttgcctccttatgctccttggtctttctgcaagtgctgctacggcgaccattttcccgaaatgctcgcaagctcctatagcttcccttcttcccccgtacctctcaccagcggtgtcttcggtatgtgaaaacccaattcttcaaccctacaggatccaacaggcaatcacagctggcatcttacctttatcacccttgttcctccaacaatcatcagccctattacatcagttacctttggtgcatttattggcacaaaacatcatggcacaacaactacaacaacttgtgctagcaaaccttgctgcctactctcagcaacagcagtttct

SEQ ID NO: 344315 - DNA, 379 bp, Zea mays
gagaccaacaagcaacatagaaagtggaatccagtagcaacaatagagcaacaatggagaccaagatattttccctccttatgctccttgctctttctacatgtgttgctaacgcgacaattttccctcaatgctcacaagctcctatagcttccctttttcccccataccttccatcaattatagcttcagtatgtgaaaacccagctcttcaaccatataggcttcaacaagcaatcgcagcaagcaacatacctttatcgcccttgttgtgtcaacaatcgccagccctatctttggtgcagtcattggtacaaaccatcaaggcacaacagctgcagcaactcgtgctacctgtgatcaaccaagtagctctggc

SEQ ID NO: 344316 - DNA, 386 bp, Zea mays
gagcattcagaaacacaccaagcgaagctacctagcaacgacttaacaacaatggctaccaagatattagccctccttgcgcttcttgccctttttgtgagcgcaacaaatgcgttcattattccacaatgctcacttgctcctagtgccattataccacagttcctccgaccagttacttcaatgggcttcgaacacctagctgtgcaagcctacaggctacaacaagcgcttgcggcgagcgtcttacaacaaccaattaaccaattgcaacaacaatccttggcacatctaaccatacaaaccatcgcaacacaacagcaacaacagttcctaccagcactgagccaactagatgtggtgaaccctgtcgcctacttgcaaca

SEQ ID NO: 344317 - DNA, 375 bp, Zea mays
attttgagcattcagaaacacaccaagcgaagcacattagcaacaacctaacaacaatggctaccaagatattatccctccttgcgcttcttgcgctttttgcgagcgcaacaaatgcgttcattattccacaatgctcacttgctccaagttccattattacacagttcctcccaccagttacttcaatgggcttcgaacacccagctgtgcaagcctataggctacaacaagcaattgcggcgagcgtcttacaacaaccaatttcccagttgcaacaacaatccttggcacatctaacaatacaaaccatcgcaacgcaacagcaacaacaattcctaccagcactgagccacctagccatggtgaaccctg

SEQ ID NO: 344318 - DNA, 393 bp, Zea mays
taccggtacggaatggccggacccacccgtccgattttcagcattcagaaacacaccaagcgaagcgcactagcaacaacctaacaacaatggctaccaagatattagccctccttgcgcttcttgcccttttagtgagcgcaacaaatgcgttcattattccacagtgctcacttgctcctagtgccattattccacagttcctcccaccagttacttcaatgggcttcgaacatccagccgtgcaagcctacaggctacaactagcgcttgcggcgagcgtcttacaacaaccaattgcccaattgcaacaacaatccttggcacatctaaacctacaaaccatcgcaacgcaacagcaacaacagtttctgccatcactgagccacctag

SEQ ID NO: 344319 - DNA, 394 bp, Zea mays
cgagaaacacaccgagcgaagcacattagcaacaacctaacaacaatggctaccaagatattatccctccttgcgcttcttgcgctttttgcgagcgcaacaaatgcgttcattattccacaatgctcacttgctccaagttccattattacacagttcctcccaccagttacttcaatgggcttcgaacacccagctgtgcaagcctataggctacaacaagcaattgcggcgagcgtcttacaacaaccaatttcccagttgcaacaacaatccttggcacatctaacaatacaaaccatcgcaacgcaacagcaacaacaattcctaccagcactgagccacctagccatggtgaaccctgccgcctacttgcaacagcagttgcttgcat

SEQ ID NO: 344320 - DNA, 75 bp, Zea mays
cacaacacacaaataaacctttttttctaccacctatcaccaccaaaacaagagttttattattcctttcactcc

SEQ ID NO: 344321 - DNA, 378 bp, Zea mays
cccacgcgtccgcagaccattagctttatctactccagagcgcagaagaacccgatcgacaccatgagggtgttgctcgttgccctcgctctcctggctctcgctgcgagcgccacctccacgcatacaagcggcggctgcggctgccagccaccgccgccggttcatctaccgccgccggtgcatctgccacctccggttcacctgccacctccggtgcatctcccaccgccggtccacctgccgccgccggtccacctgccaccgccggtccatgtgccgccgccggttcatctgccgccgccaccatgccactaccctactcaaccgtcccggcctcagcctcatccccagccacacccatgcccgtgccaacag

SEQ ID NO: 344322 - DNA, 378 bp, Zea mays
aatattttgagcattcagaaacacaccaagcgaagcacattagcaacaacctaacaacaatggctaccaagatattatccctccttgcgcttcttgcgctttttgcgagcgcaacaaatgcgttcattattccacaatgctcacttgctccaagttccattattacacagttcctcccaccagttacttcaatgggcttcgaacacccagctgtgcaagcctataggctacaacaagcaattgcggcgagcgtcttacaacaaccaatttcccagttgcaacaacaatccttggcacatctaacaatacaaaccatcgcaacgcaacagcaacaacaattcctaccagcactgagccacctagccatggtgaaccctg

SEQ ID NO: 344323 - DNA, 373 bp, Zea mays
agccctatctttggtgcagtcattggtacaaaccatcagggcacagcagctgcagcaactcgtgctacctgtgatcaaccaagtagctctggcaaacctttctccctactctcagcaacaacaatttcttccattcaaccaactgtctacattgaaccgtgctgcttatttgcagcaacaactattaccattcagccagctagctactgcctactctcagcaacaacaacttcttccatttaaccaattggccgcactgaaccccgctgcttatttgcagcagcaaatactactaccatttagccagctagctgcagcaagccgtgcttccttcttgacacagcaacagttgctgcctttctaccagcagttt

SEQ ID NO: 344324 - DNA, 262 bp, Zea mays
gaaaacccagctcttcaaccctataggctccaacaagcaatcgcagcaagcaacagacctttatcacccttgtttcaacaatcgccagccctatctttggtgcagtcattggtacaaaccatcagggcacagcagctgcagcaactcgtgctacctgtgatcaaccaagtagctctggcaaacctttctccctactctcagcaacaacaatttcttccattcaaccaactgtctacattgaaccgtgctgcttatttgcagc

SEQ ID NO: 344325 - DNA, 360 bp, Zea mays
gaaacacaccaagcgaagcgctctatcaacaacctaacaacaatggctaccaagatattatccctccttgcgcttcttgcgctttttgcgagcgcaacaaatgcgtccattattccacaatgctcacttgctcctagttccattattccacagttcctcccaccagttacttcaatggccttcgaacacccagctgtgcaagcctataggctacaacaagcgattgcggcgagcgtcttacaacaaccaattgcccaattgcaacaacaatccttggcacatctaacaatacaaaccatcgcaacgcaacagcaacaacagttcctaccagcactgagccacctagccatggtgaaccct

SEQ ID NO: 344326 - DNA, 378 bp, Zea mays
cttcaaccctataggctccatcttgtctaatcgcagcaagcaacataccttgatgagccttgtttcaacaatcgccagccctatctttggtgcagtcattggtacaaaccatcagggcacagcagctgcagcaactcgtgctacctgtgatcaaccaagtagctctggcaaacctttctccctactctcagcaacaacaatttcttccattcaaccaactgtctacattgaaccgtgctgcttatttgcagcaacaactattaccattcagccagctagctactgcctactctcagcaacaacaacttcttccatttaaccaattggccgcactgaaccccgctgcttatttgcagcagcaaatactactaccattta

SEQ ID NO: 344327 - DNA, 378 bp, Zea mays
gcattcagaaacacaccaagcgaatcgcactagcaacaacctaacaacaatggctaccaagatattagccctccttgcgcttcttgcccttttagtgagcgcaacaaatgcgttcattattccacagtgctcacttgctcctagtgccattattccacagttcctcccaccagttacttcaatgggcttcgaacatccagccgtgcaagcctacaggctacaactagcgcttgcggcgagcgtcttacaacaaccaattgcccaattgcaacaacaatccttggcacatctaaacctacaaaccatcgcaacgcaacagcaacaacagtttctgccatcactgagccacctagccgtggtgaaccctgtcgcctactt

SEQ ID NO: 344328 - DNA, 361 bp, Zea mays
attgagaccaactagcaacatataaagcacaatagtgtaccaacaatggcaggcaaaatattttgcttccttatgctccttggtctttctgcaagtgctgctaccgcaaccattttcccacaatgctcacaagctcctatagcttcctttcttcccccatacctctcaccagcggtgtcttcagtatgtgaaaacccaattcttcaaccctacaggatccaacaggcaatcgcagcaggcatcttacctttatcacccttgttcctccaacaaccgtcagccctattacagcagttacctttggtgcatttgttggcacaaaacatcaaggcacaacatctacaacaacttgtgctaggaa

SEQ ID NO: 344329 - DNA, 374 bp, Zea mays
ggaatacagtagcaacaatagagcaacaatggcggccaagatattttccatccttatgctccttgctctttctgcatgtgttgctaacgcgaccatttttcctcaatactcacaagctcctatagctgcccttcttcccccataccttccatcaatgaccgcttcagtatgtgaaaacccagcccttcaaccctacaggctccaacaagcaatcgcaacaagcaacttacctttatcacccctgttctttcaacaatcgccagccctatctttggtgcagtcattggtacaaaccatcagggcacaacagctgcagcaactcgtgctaccagtgatcagccaagtagctctggcaaacctttctccctactctc

SEQ ID NO: 344330 - DNA, 376 bp, Zea mays
cggacgcgtgggttgagaccaactagcaacatagaaagcacaatagtgtaccaacaatggcagccaaaatattttgcttccttatgctccttggtctttctgcaagtgttgctaccgcaaccattttcccacaatgctcacaagctcctatagcttcccttcttcccccatacctctcaccagcggtgtcttcaatgtgtgaaaacccaattgttcaaccctacaggatccaacaggcaatcgcaacaggcatcttaccattatcacccttgttcctccaacaaccgtcagccctattacagcagttacctttggtccatttggtggcacaaaacatcagggcacaacaactacaacaacttgtgctagcaaacct

SEQ ID NO: 344331 - DNA, 380 bp, Zea mays
ccaactagcaacatagaaagcacaatagtgtaccaacaatggcagctaaaatattttgcctccttatgctccttggtctttctgcaagtgctgctacggcgaccattttcccacaatgctcacaagctcctatagcttcccttcttcccccgtacctctcaccaacggtgtcttcggtatgtgaaaacccaattcttcaaccctacaggatccaacaggcaatcgcagctggcatcttacctttatcacccttgttcctccaacaatcatcagccctattacagcagttacctttggtgcatttattggcacaaaacatcagggcacaacaactacaacaacttgtgctagcaaaccttgctgcctactctcagcaacag

SEQ ID NO: 344332 - DNA, 204 bp, Zea mays
aaaaagcatgagcaaaagttggatcgctagtgggctgggtcccgggcattatgcataggagtatgacatggtggtagacgattgataaatgatggatgagaaactgggttggtggctggaactgtcataactactgtgcattctatggcgcaatatgggtcgccttgatatgaatcgagttactgttcgttttactgtacttat

SEQ ID NO: 344333 - DNA, 374 bp, Zea mays
attttgagcattcagaaacacaccaagcgaagcgcactagcaacgacctaacaacaatggctaccaagatattagccctccttgcgcttcttgccctttttgtgagcgcaacaaatgcgttcattattccacaatgctcacttgctcctagtgccattattccacagttcctcccaccagttacttcaatgggcttcgaacacctagctgtgcaagccaacatgcaacaacaagcgcttgcggcgagcgtcttacaacaaccaattgcccaattgcaacaacaatccttgccacatctaacaatacaagccatcacaacgcaacagcaacaacagttcctaccagcactgagccacctagccatggtgaaccct

SEQ ID NO: 344334 - DNA, 376 bp, Zea mays
tagcaaaccttgctgcctactctcagcaacagcagtttcttccattcaaccaactagctgcattgaactctgcttcttatttgcaacaacaacaactaccattcagccagctacctgctgcctacccccagcaatttcttccattcaaccaactggcagcattgaactctcctgcttatttacagcagcaacaactactaccattcagccagctagctggtgtgagccctgctaccttcttgatacaaccacagttgttgccgttctaccagcacgctgcgcctaacgctggcaccctcttacaactgcaacaattgctgccattcaaccaacttgctttgacaaacccagcagcgttctaccaacaacccatcat

SEQ ID NO: 344335 - DNA, 372 bp, Zea mays
attttgagcattcagaaacacaccaagcgaagcgcactagcaacgacctaacaacaatggctaccaagatattagccctccttgcgcttcttgccctttttgtgagcgcaacaaatgcgttcattattccacaatgctcacttgctcctagtgccattattccacagttcctcccaccagttacttcaatgggcttcgaacacctagctgtgcaagccaacatgcaacaacaagcgcttgcggcgagcgtcttacaacaaccaattgcccaattgcaacaacaatccttgccacatctaacaatacaagccatcacaacgcaacagcaacaacagttcctaccagcactgagccacctagccatggtgaacc

SEQ ID NO: 344336 - DNA, 379 bp, Zea mays
tatttagaccaactagcaacatagaaagcacaatagtgtaccaacaatggcagccaaaatattttgcctccttatgctccttggtatttctgcaagtgctgctacggcgaccattttcccgcaatgctcacaagctcctatagcttcccttcttcccccgtacctctcaccagcggtgtcttcggtatgtgaaaacccaattcttcaaccctacaggatccaacaggcaatcgcagctggcatcttacctttatcacccttgttcctccaacaatcatcagccctattacagcagttacctttggtgcatttattggcacaaaacatcagggcacaacaactacaacaacttgtgctagcaaaccttgctgcctactct

SEQ ID NO: 344337 - DNA, 373 bp, Zea mays
agaccaactagcaacatagaaagctcaatagtgtaccaacaatggcagccaaaatattttgcctccttatgctccttggtctttctgcaagtgctgctacggcgaccattttcccacaatgctcacaagctcctatagcttcccttcttcccccgtacctctcaccagcggtgtcttcggtatgtgaaaacccaattcttcaaccctataggatccaacaggcaatcgcagctggcatcttacctttatcacccttgttcctccaacaatcatcagccctattacagcagttacctttggtgcatttattggcacaaaacatcagggcacaacaactacaacaacttgtgctagcaaaccttgctgcctactc

SEQ ID NO: 344338 - DNA, 381 bp, Zea mays
aaacacaccaagcgaagcacattagcaacaacctaacaacaatggctaccaagatattatccctccttgcgcttcttgcgctttttgcgagcgcaacaaatgcgttcattattccacaatgctcacttgctccaagttccattattacacagttcctcccaccagttacttcaatgggcttcgaacacccagctgtgcaagcctataggctacaacaagcaattgcggcgagcgtcttacaacaaccaatttcccagttgcaacaacaatccttggcacatctaacaatacaaaccatcgcaacgcaacagcaacaacaattcctatcagcactgagccacctagccatggtgaaccctgccgcctacttgcaacagcagt

SEQ ID NO: 344339 - DNA, 378 bp, Zea mays
attcagaaacacaccaagcgaagcgcactagcaacaacctaacaacaatggctaccaagatattagccctccttgcgcttcttgcccttttagtgagcgcaacaaatgcgttcattattccacagtgctcacttgctcctagtgccattattccacagttcctcccaccagttacttcaatgggcttcgaacatccagccgtgcaagcctacaggctacaactagcgcttgcggcgagcgtcttacaacaaccaattgcccaattgcaacaacaatccttggcacatctaaacctacaaaccatcgcaacgcaacagcaacaacagtttctgccatcactgagccacctagccgtggtgaaccctgtcgcctacttgc

SEQ ID NO: 344340 - DNA, 378 bp, Zea mays
gttgcaacaacaatccttggcacatctaacaatacaaaccatcgcaacgcaacagcaacaacaattcctaccagcactgagccacctagccatggtgaaccctgccgcctacttgcaacagcagttgcttgcatcaaacccacttgctctggcaaacgtagttgcaaaccagccacaacaacagctgcaacagtttctgccagcgctcagtcaactagccatggtgaaccctgccgcctacctacaacagcaacaactgctttcatctagcccgctcgctgtggccaatgcacctacatacctgcaacaacaattgttgcaacagattgtaccagctctgactcagctagttgtggcaaaccctgctgcctacttgca

SEQ ID NO: 344341 - DNA, 376 bp, Zea mays
gggtcttcagaccattagctttatctactccagagcgcagaagaacccgatcgacaccatgagggtgttgctcgttgccctcgctctcctggctctcgctgcgagcgccacctccacgcatacaagcggcggctgcggctgccagccaccgccgccggttcatctaccgccgccggtgcatctgccacctccggttcacctgccacctccggtgcatctcccaccgccggtccacctgccgtcgccggtccacctgccaccgtcggtccatgtgccgccgccggttcatctgccgccgtcaccatgccactaccctactcaaccgtcccggcctcagcctcatccccagccacacccatgcccgtgccaacagccg

SEQ ID NO: 344342 - DNA, 377 bp, Zea mays
attgagaccaactagcaacatagaaagcacaatagtgtaccaacaatggcagccaaaatattttgcttccttatgctccttggtctttctgcaagtgttgctaccgcaaccattttcccacaatgctcacaagctcctatagcttcccttcttcccccatacctctcaccagcggtgtcttcaatgtgtgaaaacccaattgttcaaccctacaggatccaacaggcaatcgcaacaggcatcttaccattatcacccttgttcctccaacaaccgtcagccctattacagcagttacctttggtccatttggtggcacaaaacatcagggcacaacaactacaacaacttgtgctagcaaaccttgctgcatactc

SEQ ID NO: 344343 - DNA, 375 bp, Zea mays
tagcaacatagaaagcacaattgtgtaccaacaatggcagctaaaatattttgcctccttatgctccttggtctttctgcaagtgctgctacggcgaccattttcccacaatgctcacaagctcctatagcttcccttcttcccccgtacctctcaccaacggtgtcttcggtatgtgaaaacccaattcttcaaccctacaggatccaacaggcaatcgcagctggcatcttacctttatcacccttgttcctccaacaatcatcagccctattacagcagttacctttggtgcatttattggcacaaaacatcagggcacaacaactacaacaacttgtgctagcaaaccttgctgcctactctcagcaacag

SEQ ID NO: 344344 - DNA, 351 bp, Zea mays
tgcaacatataaagctcaatattttttcaacaatggcagctaaaatatttggccgccttatgctccttggtctctctgcaagtgctgctacggcgaccattttcccacaatgctcacaagctcctatagctttccttcttccaccgtacctcttaccaactgtgttcttggtatgtgaaaacccaattcttaaccctacatgatccaacaggcaatcgcagcttgcattttacctttattacccttgttcctccaacaattatcagtcctattacagcagttaccttttgtgcttttattggcacataacattatgtcacaacaactacaacaacttgtgctatcaaacct

SEQ ID NO: 344345 - DNA, 376 bp, Zea mays
gaaagtggaatccagtagcaacaatagagcaacaatggagaccaagatattttccctccttatgctccttgctctttctacatgtgttgctaacgcgacaattttccctcaatgctcacaagctcctatagcttccctttttcccccataccttccatcaattatagcttcagtatgtgaaaacccagctcttcaaccatataggcttcaacaagcaatcgcagcaagcaacatacctttatcgcccttgttgtgtcaacaatcgccagccctatctttggtgcagtcattggtacaaaccatcagggcacaacagctgcagcaactcgtgctacctgtgatcaaccaagtagctctggcaaacctttctccctac

SEQ ID NO: 344346 - DNA, 331 bp, Zea mays
tcattgagaccactagcacataaagcacatatgtccaacaatggcagcaaaatattttgcttcttatgctccttgtctttctgcagtgctgctccgaaccattttcacatgctcacaagctctatagcttctttttcccccatacctctaccagcgggtcttcagtatgtgaaaacccaattttaaccctacagatcaacaggcatccagcagcattaccttatacccttgttcctcaacaccgtagccctattacagcagtacctttggtgcatttgtgcacaaaacataaggcacacactcaacaacttggctagaacctgctgctact

SEQ ID NO: 344347 - DNA, 358 bp, Zea mays
cagaaacacaccaagcgaagcacattagcaacaacctaacaacaatggctaccaagatattatccctccttgcgcttcttgcgctttttgcgagcgcaacaaatgcgttcattattccacaatgctcacttgctccaagttccattattacacagttcctcccaccagttacttcaatgggcttcgaacacccagctgtgcaagccctataggctacaacaagcaattgcggcgagcgtcttacaacaaccaatttcccagttgcaacaacaatccttggcacatctaacaatacaaaccatcgcaacgcaacatcaacaacaattcctaccagcactgagccacctagccatggtga

SEQ ID NO: 344348 - DNA, 377 bp, Zea mays
agaaatctcgtgtggaacaaaagggtaaaagctcgtttgattctgatttccagtacgaatacgaaccgccaccatgccactaccctactcaaccgccccggcctcagcctcatccccagccacacccatgcccgtgccaacagccgcatccaagcccgtgccagctgcagggaacctgcggcgttggcagcaccccgatcctgggccagtgcgtcgagttcctgaggcatcagtgcagcccgacggcgacgccctactgctcgcctcagtgccagtcgttgcggcagcagtgttgccagcagctcaggcaggtggagccgcagcaccggtaccaggcgatcttcggcttggtcctccagtccatcctgcagcagcag

SEQ ID NO: 344349 - DNA, 374 bp, Zea mays
cccacgcgtccgccaactagcaacatagaaagcacaatagtgtaccaacaatggcagccaaaatattttgcttccttatgctccttggtctttctgcaagtgttgctaccgcaaccattttcccacaatgctcacaagctcctatagcttcccttcttcccccatacctctcaccagcggtgtcttcaatgtgtgaaaacccaattgttcaaccctacaggatccaacaggcaatcgcaacaggcatcttaccattatcacccttgttcctccaacaaccgtcagccctattacagcagttacctttggtccatttggtggcacaaaacatcagggcacaacaactacaacaacttgtgctagcaaaccttgct

SEQ ID NO: 344350 - DNA, 375 bp, Zea mays
caacaagcaacatagaaagtggaatacagtagcaacaatagagcaacaatggcggccaagatattttccatccttatgctccttgctctttctgcatgtgttgctaacgcgaccatttttcctcaatactcacaagctcctatagctgcccttcttcccccataccttccatcaatgaccgcttcagtatgtgaaaacccagcccttcaaccctacaggctccaacatgcaatcgcaacaagcaacttacctttatcacccctgttctttcaacaatcgccagccctatctttggtgcagtcattggtacaaaccatcatggcacaacagcttcagcaactcgtgctaccagtgatcagccaagtatctctggca

SEQ ID NO: 344351 - DNA, 377 bp, Zea mays
tggacgtcagcctagcaattagctcatcgactccagattggagaactcgacaccatgaaggtgctgatcgttgcccttgctctcctggcgctcgctgcgagcgccgcctccagtacaagcggcggctgtggctgccagacaccaccgtttcatctaccgcctccgttctatatgccgcctccgttctatctgccgccgcagcagcagccgcagccatggcaataccccactcaaccaccgcagctaagcccgtgccagcagttcggatcctgcggcgtcggcagcgtcggcagcccgttcctgggccagtgcgtcgagttcctgaggcaccagtgcagcccggcggcgacgccctacggctcgccacagtgccaggc

SEQ ID NO: 344352 - DNA, 377 bp, Zea mays
attttgagcattcagaaacacaccttgcgaagcacattagcaacaacctaacagcaatggctaccaagatattatccctccttgcgcttcttgcgctttttgcgagcgcaacaaatgcgttcattattccacaatgctcacttgctccaagttccattattacacagttcctcccaccagttacttcaatgggcttcgaacacccagctgtgcaagcctataggctacaacaagcaattgcggcgagcgtcttacaacaaccaatttcccagttgcaacaacaatccttggcacatctaacaatacaaaccatcgcaacgcaacagcaacaacaattcctaccagcactgagccacctagccatggtgaaccctgcc

SEQ ID NO: 344353 - DNA, 371 bp, Zea mays
agaccaactagcaacatagaatgctcaatagtgtaccaacaatggcaggtgagggattttgcctccttatgctccttggtctttctgcaagtgctgctacggcgaccattttcccacaatgctcacaagctcctatagcttcccttcttcccccgtacctctcaccaacggtgtcttcggtatgtgaaaacccaattcttcaaccctacaggatccaacaggcaatcgcagctggcatcttacctttatcacccttgttcctccaacaatcatcagccctattacagcagttacctttggtgcatttattggcacaaaacatcagggcacaacaactacaacaacttgtgctagcaaaccttgctgcctac

SEQ ID NO: 344354 - DNA, 362 bp, Zea mays
cagaaacacaccaagcgaagcacattatcaacaacctaacaacaatggctaccaagatattatccctccttgcgcttcttgcgctttttgcgagcgcaacaaatgcgttcattattccacaatgctcacttgctccaagttccattattacacagttcctcccaccagttacttcaatgggcttcgaacacccagctgtgcaagcctataggctacaacaagcaattgcggcgagcgtcttacaacaaccaatttcccagttgcaacaacaatccttggcacatctaacaatacaaaccatcgcaacgcaacagcaacaacaattcctaccagcactgagccacctagccatggtgaaccct

SEQ ID NO: 344355 - DNA, 187 bp, Zea mays
tgcgtacacggtctccctcttcctgtcagtagtagagtgagagtgaggcagcgagggggagacaaggggaaatggggaagggagcccaggggaaccatgcggcggcggcgttcggccaggtggaagacaacatggcggctttattttttcacaagaaactccctgtagttggtgcaatgggagtttg

SEQ ID NO: 344356 - DNA, 377 bp, Zea mays
gagcattttcccgcaatgctcacatgctcctatagcttcccttcttcccccatgcctctcaccagcgatgtcttcagtatgtgaaaatccaattcttctaccctacaggatccaacaggcaatcgcagcaggcatcttacctttatcacccttgttcctccaacaatcatcagccctattacagcagttacctttggtgcatttattggcacaaaacatcagggcacaacaactacaacaactcgtgctagcaaaccttgctgcctactctcagcaacagcagttacctttggtgcatttgttggcacaaaacatcagggcacaacaactacaacaactcgtgctagcaaaccttgctgcctactctcagcaacaac

SEQ ID NO: 344357 - DNA, 363 bp, Zea mays
  unsure (1)..(363): unsure at all n locations
gcgagcggccgccctttttttttttttttttttttttttttttttttttttttgggtgtttttttttttttttttttttttttttttttttttntggggccctttccaaattaaaacctgtttattttttttttaaaaaaaaacattgcttttttccctgtaaaaaatgggccgggcccattttacaccggttaaaatgggttattgctttccctaggtcttttacggcatgggccccaattttacatggcttttgctcacaaaaaaaaaagccgggctccctattcctaagcatttaaaggggagggggccccaaaaaaacttgggggggcttttgttggggccctttgcgaacattttttt

SEQ ID NO: 344358 - DNA, 188 bp, Zea mays
gaaacacaccaagctaagcgctctttcaacaacctaacaacaatggctaggaagatattatccctccttgcgcttcttgcccttttagtgagcgcaacaaatgcgttcattattccacagtgctcacttgctcctagtgccattattccacagttcctcccaccagttactttaatgggcttttaaca

SEQ ID NO: 344359 - DNA, 379 bp, Zea mays
caacaagcaacatagaaagtggaatccagtagcaacaatagagcaacaatggcgaccaagatattttccctccttatgctccttgctctttctgcatgtgttgctaacgcgacaattttccctcaatgctcacaagctcctatagcttcccttcttcccccataccttccatcaatgatagcttcagtatgtgaaaacccagctcttcaaccctataggctccaacaagcaatcgcagcaagcaacatacctttatcacccttgtttcaacaatcgccagccctatctttggtgcagtcattggtacaaaccatcatggcacagcagctgcagcaactcgtgctacctgtgatcaaccaagtagctctggcaaaccttt

SEQ ID NO: 344360 - DNA, 376 bp, Zea mays
tagcaacatagaaagcacaatagtgtaccaacaatggcagctaaaatattttgcctccttatgctccttggtctttctgcaagtgctgctacggcgaccattttcccacaatgctcacaagctcctatagcttcccttcttcccccgtacctctcaccaacggtgtcttcggtatgtgaaaacccaattcttcaaccctacaggatccaacaggcaatcgcagctggcatcttacctttatcacccttgttcctccaacaatcatcagccctattacagcagttacctttggtgcatttattggcacaaaacatcagggcacaacaactacaacaacttgtgctagcataccttgctgcctactctcagcaacagc

SEQ ID NO: 344361 - DNA, 112 bp, Zea mays
ggccaactgccataagcacattgccaacagcgcaatttgctcttactctgttttgagtgctgtcggaccattttcactgtacctctatgttcttttcccgtccttacacggg

SEQ ID NO: 344362 - DNA, 390 bp, Zea mays
attcccggtcgcccacgcgtcgaccataatcatattatcttagttgtataggcaccaaatcaaatctgcaacatcaattatctaactccaaaaaccatgaagctggtgcttgggttcttgctttcattgctttagtatcaagtgtttcttgtacacagacaggcggctgcagctgtggtcaacaacaaagccatgagcagcaacatcatccacaacaacatcatccacaaaaacaacaacatcaaccaccaccacaacatcaccagcagcagctacaccaacaacatcaagttcacatgcaaccacaaaaacatcagctacaacaagaagttcatgttcaacaacaacaacaacatccgcagcaccaacaacaacaacaacatcagcacc

SEQ ID NO: 344363 - DNA, 377 bp, Zea mays
gcaacatagaaagtggaatacagtagcaacaatagagcaacaatggcggccaagatattttccatccttatgctccttgctctttctgcatgtgttgctaacgcgaccatttttcctcaatactcacaagctcctatagctgcccttcttcccccataccttccatcaatgaccgcttcagtatgtgaaaacccagcccttcaaccctacaggctccaacaagcaatcgcaacaagcaacttacctttatcacccctgttctttcaacaatcgccagccctatctttggtgcagtcattggtacaaaccatcagggcacaacagctgcagcaactcgtgctaccagtgatcagccaagtagctctggcaaacctttc

SEQ ID NO: 344364 - DNA, 376 bp, Zea mays
gagaccaacaagcaacatagattgttgaatccagtagcaacaatagagcaacgggggagaccaagatattttccctccttatgctccttgctctttctacatgtgttgctaacgcgacaattttccctcaatgctcacaagctcctatagcttccctttttcccccatatcttccatcaattatagcttcagtatgtgaaaacccagctcttcaaccatataggcttcaacaagcaatcgcagcaagcaacatacctttatcgcccttgttgtgtcaacaatcgccagccctatctttggtgcagtcattggtacaaaccatcagggcacaacagctgcagcaactcgtgctacctgtgatcaaccaagtagctct

SEQ ID NO: 344365 - DNA, 378 bp, Zea mays
gcacaatagtgtaccaacaattgcttccaaaatattttgcctccttatgctccgtggtctttctgcaagtgctgctacggcgaccattttcccgaaatgctcgcaagctcctatagcttcccttcttcccccgtacctctcaccagcggtgtcttcggtatgtgaaaacccaattcttcaaccctacaggatccaacaggcaatcacagctggcatcttacctttatcacccttgttcctccaacaatcatcagccctattacatcagttacctttggtgcatttattggcacaaaacatcagggcacaacaactacaacaacttgtgctagcaaaccttgctgcctactctcagcaacagcagtttcttccattcaa

SEQ ID NO: 344366 - DNA, 375 bp, Zea mays
atagaaagcacaatagtgtaccaacaatggcagccaaaatattttgcctccttatgctccttggtctttctgcaagtgctgctacggcgaccattttcccgcaatgctcgcaagctcctatagcttcccttcttcccccgtacctctcaccagcggtgtcttcggtatgtgaaaacccaattcttcaaccctacaggatccaacaggcaatcgcagctggcatcttacctttatcacccttgttcctccaacaatcatcagccctattacaacagttacctttggtgcatttattggcacaaaacatcagggcacaacaactacaacaacttgtgctagcaaaccttgctgcctactctcagcaacagcagtttc

SEQ ID NO: 344367 - DNA, 378 bp, Zea mays
cggacgcgtgggaaagcggcagtgcgtagagaggatcgtcgaacagaacagcatgaagatggtcatcgttctcgtcgtgtgcctggctctgtcagctgccagcgcctctgcaatgcagatgccctgcccctgcgcggggctgcagggcttgtacggcgctggcgccggcctgacgacgatgatgggcgccggcgggctgtacccctacgcggagtacctgaggcagccgcagtgcagcccgctggcggcggcgccctactacgccgggtgtgggcagacgagcgccatgtaccagccgctccggcaacagtgctgccagcagcagatgaggatgatggacgtgcagtccgtcgcgcagcagctgcagatgatgatgca

SEQ ID NO: 344368 - DNA, 424 bp, Zea mays
  unsure (1)..(424): unsure at all n locations
ccgggcccgacccacgcccgtccggatcaatacaagtatgcgacagggctcgtacatatgtatttggtgagggagtgatcnnncggcgctngnnagaagagtnatggctaannngatcgcnncgcagcnncgccgctggctgtgcgtgcggcngcctgtngnccttcgtctggtccctggtgggggccgttgcnccgtctgtccaagggcgatgtgtcgagccggcatgagggctcatgggaccctgcatgtgtctggcatggaggggtccaggatgaggcccgcttcgatctcgtgtccgccatggtccctcgtaccggcatgctataccggcgtgcggtcgtcgtgcggcnnccgttccggtgtgggcatccgggcttccggatggcggtgtctgccaagcagctccaggtacgtgaagccg

SEQ ID NO: 344369 - DNA, 382 bp, Zea mays
acagttcctcccaccagttacttcaatgttcttcgaacatccagccgtgcaagcctacaggctacaactagcgcttgcggcgagcgtcttacaacaaccaattgcccaattgcaacaacaatccttggcacatctaaacctacaaaccatcgcaacgcaacatcaacaacagtttctgccatcactgagccacctagccgtggtgaaccctgtcgcctacttgcaacagcagctacttgcatccaacccacttgctctggcgaacgtagctgcataccagcaacaacaacgtctgcaacagtttatgccagcgctcagtcaactagccatggtgaaccctgtcgcctacctacaacagcaacaattgctttcatctagcccg

SEQ ID NO: 344370 - DNA, 382 bp, Zea mays
ccgcccacgcgtccgtagcaacatagaaagctcaatagtgtaccaacaatggcagctaaaatattttgcctccttatgctccttggtctttctgcaagtgctgctacggcgaccattttcccacaatgctcacaagctcctatagcttcccttcttcccccgtacctctcaccaacggtgtcttcggtatgtgaaaacccaattcttcaaccctacaggatccaacaggcaatcgcagctggcatcttacctttatcacccttgttcctccaacaatcatcagccctattacagcagttacctttggtgcatttattggcacaaaacatcagggcacaacaactacaacaacttgtgctagcaaaccttgctgcctactctc

SEQ ID NO: 344371 - DNA, 378 bp, Zea mays
aacacaccaagcgaagcgcactagctacaacctaacaacaatggctaccaagatattagccctccttgcgcttcttgcccttttagtgagcgcaacaaatgcgttcattattccacagtgctcacttgctcctagtgccattattccacagttcctcccaccagttacttcaatgggcttcgaacatccagccgtgcaagcctacaggctacaactagcgcttgcggcgagcgtcttacaacaaccaattgcccaattgcaacaacaatccttggcacatctaaacctacaaaccatcgcaacgcaacagcaacaacagtttctgccatcactgagccacctagccgtggtgaaccctgtcgcctacttgcaacagca

SEQ ID NO: 344372 - DNA, 377 bp, Zea mays
ctgggtcttcagaccattagctttatctactccagagcgcagaagaacccgatcgacaccatgagggtgttgctcgttgccctcgctctcctggctctcgctgcgagcgccacctccacgcatacaagcggcggctgcggctgccagccaccgccgccggttcatctaccgccgccggtgcatctgccacctccggttcacctgccacctccggtgcatctcccaccgccggtccacctgccgccgccggtccacctgccaccgccggtccatgtgccgccgccggttcatctgccgtcgccaccatgccactaccctactcaaccgccccggcctcagcctcatccccagccacacccatgcccgtgccaacagcc

SEQ ID NO: 344373 - DNA, 377 bp, Zea mays
attttgagcattcagaaacacaccatgcgaagcgcactagcaacaacctaacaacaatggctaccaagatattatccctccttgcgcttcttgcgctttttgcgagcgcaacaaatgcgtccattattccacaatgctcacttgctcctagttccattattccacagttcctcccaccagttacttcaatggccttcgaacacccagctgtgcaagcctataggctacaacaagcgattgcggcgagcgtcttacaacaaccaattgcccaattgcaacaacaatccttggcacatctaacaatacaaaccatcgcaacgcaacagcaacaacagttcctaccagcactgagccacctagccatggtgaaccctgtc

SEQ ID NO: 344374 - DNA, 376 bp, Zea mays
caacaagcaacatagaaagtggaatccagtagcaacaatagagcaacaatggcgaccaagatattttccctccttatgctccttgctctttctgcatgtgttgctaacgcgacaattttccctcaatgctcacaagctcctatagcttcccttcttcccccataccttccatcaatgatagcttcagtatgtgaaaacccagctcttcaaccctataggctccaacaagcaatcgcagcaagcaacatacctttatcacccttgtttcaacaatcgccagccctatctttggtgcagtcattggtacaaaccatcagggcacagcagctgcagcaactcgtgctacctgtgatcaaccaagtagctctggcaaacc

SEQ ID NO: 344375 - DNA, 377 bp, Zea mays
cagaaacacaccaagcgaagcacattagcaacaacctaacaacaatggctaccaagatattatccctccttgcgcttcttgcgctttttgcgagcgcaacaaatgcgttcattattccacaatgctcacttgctccaagttccattattacacagttcctcccaccagttacttcaatgggcttcgaacacccagctgtgcaagcctataggctacaacaagcaattgcggcgagcgtcttacaacaaccaatttcccagttgcaacaacaatccttggcacatctaacaatacaaaccatcgcaacgcaacagcaacaacaattcctaccagcactgagccacctagccatggtgaaccctgccgcctacttgcaa

SEQ ID NO: 344376 - DNA, 374 bp, Zea mays
attttgagcattcagaaacacaccaagcgaagcacattagcaacaacctaacaacaatggctaccaagatattatccctccttgcgcttcttgcgctttttgcgagcgcaacaaatgcgttcattattccacaatgctcacttgctccaagttccattattacacagttcctcccaccagttacttcaatgggcttcgaacacccagctgtgcaagcctataggctacaacaagcaattgcggcgagcgtcttacaacaaccaatttcccagttgcaacaacaatccttggcacatctaacaatacaaaccatcgcaacgcaacagcaacaacaattcctaccagcactgagccacctagccatggtgaaccct

SEQ ID NO: 344377 - DNA, 370 bp, Zea mays
cccccataccttccatcaatgatagcttcagtatgtgaaaacccagctcttcaaccctataggctccaacaagcaatcgcagcaagcaacatacctttatcacccttgtttcaacaatcgccagccctatctttggtgcagtcattggtacaaaccatcagggcacagcagctgcagcaactcgtgctacctgtgatcaaccaagtagctctggcaaacctttctccctactctcagcaacaacaatttcttccattcaaccaactgtctacattgaaccgtgctgcttatttgcagcaacaactattaccattcagccagctagctactgcctactctcagcaacaacaacttcttccatttaaccaat

SEQ ID NO: 344378 - DNA, 376 bp, Zea mays
attgagaccaactagcaacatagaaagcacaatagtgtaccaacaatggcagccaaaatattttgcctccttatgctccttggtctttctgcaagtgctgctacggcgaccattttcccacaatgctcacaagctcctatagcttcccttcttcccccgtacctctcaccagcggtgtcttcggtatgtgaaaacccaattcttcaaccctataggatccaacaggcaatcgcagctggcatcttacctttatcacccttgttcctccaacaatcatcagccctattacagcagttacctttggtgcatttattggcacaaaacatcagggcacaacaactacaacaacttgtgctagcaaaccttgctgcctact

SEQ ID NO: 344379 - DNA, 371 bp, Zea mays
atctaaacctacaaaccatcgcaacgcaacagcaacaacagtttctgccatcactgagccacctagccgtggtgaaccctgtcgcctacttgcaacagcagctacttgcatccaacccacttgctctggcgaacgtagctgcataccagcaacaacaacgtctgcaacagtttatgccagcgctcagtcaactagccatggtgaaccctgtcgcctacctacaacagcaacaattgctttcatctagcccgctcgctgtgggcaatgcacctacgtacctacaacaacagttgctgcaacagattgtaccagctctgactcagctagctgtggcaaaccctactgcctacttgcaacagttgctttcattc

SEQ ID NO: 344380 - DNA, 368 bp, Zea mays
cagcattcataaacacaccaagcgttgcgcactagcaacaacctaacaacaatggctaccaagatattagccctccttgcgcttcttgcccttttagtgagcgcaacaaatgcgttcattattccacagtgctcacttgctcctagtgccattattccacagttcctcccaccagttacttcaatgggcttcgaacatccagccgtgcaagcctacaggctacaactagcgcttgcggcgagcgtcttacaacaaccaattgcccaattgcaacaacaattcttggcacatctaaacctacaaaccatcgcaacgcatcagcaacaacagtttctgccatcactgagccacctaaccgttgtgaaccc

SEQ ID NO: 344381 - DNA, 366 bp, Zea mays
cattcatcttagtagtataggcaccaaatcaaatctgcaacatcaattatctaactccaaaaaccatgaagctggtgcttgtggttcttgctttcattgctttagtatcaagtgtttcttgtacacagacaggcggctgcagctgtggtcaacaacaaagccatgagcagcaacatcatccacaacaacatcatccacataaacaacaacatcaaccaccaccacaacatcaccagcagcagcatcaccaacaacaacaagttcacatgcaaccacaaaaacatcagcaacaacaagaagttcatgttcaacaacaacaacatcaaccgcatctccaacaacatcaacaacaacagcaccaacaac

SEQ ID NO: 344382 - DNA, 374 bp, Zea mays
caactagcaacatagaaagcacaattgtgtaccaacaatggcagccaaaatattttgcttccttatgctccttggtctttctgcaagtgctgctaccgcaaccattttcccacaatgctcacaagctcctatagcttcctttcttcccccatacctctcaccagcggtgtcttcagtatgtgaaaacccaattcttcaaccctacaggatccaacaggcaatcgcagcaggcatcttacctttatcacccttgttcctccaacaaccgtcagccctattacagcagttacctttggtgcatttgttggcacaaaacatcaaggcacaacaactacaacaacttgtgctaggaaaccttgctgcctactctcagc

SEQ ID NO: 344383 - DNA, 375 bp, Zea mays
cagaaacacaccaagcgaagcacattagcaacaacctaacaacaatggctaccaagatattatccctccttgcgcttcttgcgctttttgcgagcgcaacaaatgcgttcattattccacaatgctcacttgctccaagttccattattacacagttcctcccaccagttacttcaatgggcttcgaacacccagctgtgcaagcctataggctacaacaagcaattgcggcgagcgtcttacaacaaccaatttcccagttgcaacaacaatccttggcacatctaacaatacaaaccatcgcaacgcaacagcaacaacaattcctaccagcactgagccacctagccatggtgaaccctgccgcctacttgc

SEQ ID NO: 344384 - DNA, 375 bp, Zea mays
ctttatctactccagagcgcataataacccgatcgacaccatgagggtgttgcgtggggccctcgctctcctggctctcgctgcgagcgccacctccacgcatacaagcggcggctgcggctgccagccaccgccgccggttcatctaccgccgccggtgcatctgccacctccggttcacctgccacctccggtgcatctcccaccgccggtccacctgccgccgccggtccacctgccaccgccggtccatgtgccgccgccggttcatctgccgccgccaccatgccactaccctactcaaccgccccggcctcagcctcattccccagccacacccatgcccgtgccaacagccgcatccaagcccgtgcc

SEQ ID NO: 344385 - DNA, 375 bp, Zea mays
aagcaacatagaaagtggaatccagtagcaacaatagagcaacaatggcgaccaagatattttccctccttatgctccttgctctttctgcatgtgttgctaacgcgacaattttccctcaatgctcacaagctcctatagcttcccttcttcccccataccttccatcaatgatagcttcagtatgtgaaaacccagctcttcaaccctataggctccaacaagcaatcgcagcaagcaacatacctttatcacccttgtttcaacaatcgccagccctatctttggtgcagtcattggtacaaaccatcagggcacagcagctgcagcaactcgtgctacctgtgatcaaccaagtagctctggcaaaccttt

SEQ ID NO: 344386 - DNA, 367 bp, Zea mays
attcagaaacacaccaagcgattctctctagcaacaacctaacaacaatggcgtgcaagatattatccctccttgcgcttcttgcgctttttgcgagcgcaacaaatgcgtccattattccacaatgctcacttgctcctagttccattattccacagttcctcccaccagttacttcaatggccttcgaacacccatctgtgcaagcctatatgctacaacaagcgattgcggcgagcgtcttacaacaaccaattgcccaattgcaacaacattccttggcacatctaacaatacataccatcgcaacgcaacagcaacaacagttcctaccatcacttagccacctagccatggttgaaccctg

SEQ ID NO: 344387 - DNA, 379 bp, Zea mays
cgtccgttggttcttcaaaccattacctttttttactccagagcgcagaagaacccgaggggggccatgagggtgttgctcgttgccctcgctctcctggctctcgctgcgagcgccacctccacgcttacaagcggcggctgcggctgccagccaccgccgccggttcatctaccgccgccggtgcatctgccacctccggttcacctgccacctccggtgcattttccaccgtcggtccacctgccgccgccggtccacctgccaccgtcggtccatgtgccgccgccggttcatctgccgtcgccaccatgccactaccctactcaaccgtcccggccttagccttatccccaggcacacccatgcccgtgccaac

SEQ ID NO: 344388 - DNA, 376 bp, Zea mays
aaacacaccaagcgaagcgcactatcaacgacctaacaacaatggctaccaagatattagccctccttgcgcttcttgccctttttgtgagcgcaacaaatgcgttcattattccacaatgctcacttgctcctagtgccattattccacagttcctcccaccagttacttcaatgggcttcgaacacctagctgtgcaagccaacatgcaacaacaagcgcttgcggcgagcgtcttacaacaaccaattgcccaattgcaacaacaatccttgccacatctaacaatacaagccatcacaacgcaacagcaacaacagttcctaccagcactgagccacctagccatggtgaaccctgccgcctacttgcaaga

SEQ ID NO: 344389 - DNA, 259 bp, Zea mays
aaaaaaaaaaaaaaaaaaaaaaaatttttttaaaaaacaacgggcgcaccaaaaagggggggcaaatctaaaatacacaaacattcaaaaggggcggcccttttatagataacaaatttatggatcccttttttccgaccccttacaacgttccgcgtggccccaaccttaattttcctggctggatttttcaacaaaaattactggccaacccttgtcgccccctaaccatttagaacgcccgccaatccccttttaa

SEQ ID NO: 344390 - DNA, 373 bp, Zea mays
agattggagaactcgacaccatgaaggtgctgatcgttgcccttgctctcctggcgctcgctgcgagcgccgcctccagtacaagcggcggctgtggctgccagacaccaccgtttcatctaccgcctccgttctatatgccgcctccgttctatctgccgccgcagcagcagccgcagccatggcaataccccactcaaccaccgcagctaagcccgtgccagcagttcggatcctgcggcgtcggcagcgtcggcagcccgttcctgggccagtgcgtcgagttcctgaggcaccagtgcagcccggcggcgacgccctacggctcgccacagtgccaggcgctgcagcagcagtgctgccaccagatcag

SEQ ID NO: 344391 - DNA, 376 bp, Zea mays
agaaagtggaatccagtagcaacaatagatcaacaatggcgaccaagatattttccctccttatgctccttgctctttctgcatgtgttgctaacgcgacaattttccctcaatgctcacaagctcctatagcttcccttcttcccccataccttccatcaatgatagcttcagtatgtgaaaacccagctcttcaaccctataggctccaacaagcaatcgcagcaagcaacatacctttatcacccttgtttcaacaatcgccagccctatctttggtgcagtcattggtacaaaccatcagggcacagcagctgcagcaactcgtgctacctgtgatcaaccaagtagctctggcaaaaccttctccctactc

SEQ ID NO: 344392 - DNA, 291 bp, Zea mays
tattatctcctccttgcgctttttgcccttttagtgagcgcaacaaatgcgttctttattccacagtgctcacttgctcctagtgccattattccacagttcctcccaccagttacttcaatgggcttcgaacatccagccttgcaagcctacatgctacatctagcgcttgcggttagcgtcttacatcaaccaattgcccaattgcaacaacaattccttggcacattttaacctacataccatttcaactcatcatcaacaacagtatctgccatcactgatccacct

SEQ ID NO: 344393 - DNA, 373 bp, Zea mays
cagcattcagaaacacaccaagcgaagcgcactagcaacaacctaacaacaatggctaccaagatattagccctccttgcgcttcttgcccttttagtgagcgcaacaaatgcgttcattattccacagtgctcacttgctcctagtgccattattccacagttcctcccaccagttacttcaatgggcttcgaacatccagccgtgcaagcctacaggctacaactagcgcttgcggcgagcgtcttacaacaaccaattgcccaattgcaacaacaatccttggcacatctaaacctacaaaccatcgcaacgcaacagcaacaacagtttctgccatcactgagccacctagccgtggtgaaccctgtcg

SEQ ID NO: 344394 - DNA, 388 bp, Zea mays
  unsure (1)..(388): unsure at all n locations
acccacgcgtccggagaccaactagcaacatatttttgtttcaatattgnaccaataatggcagggggagtattttgcctcattatgctccttggtctttctgcaagtgctgctactgctagcattttcccgcaatgctcacaagctcctatagcttcccttcttcccccatacctctcaccagctatgtcttcagtatgtgaaaatccaattcttctaccctacatgatccaacaggcaatcgcatcaggcatcttacctttatcaccctttgttccttcaacaatcatcagccctattacagcagttacctttggtgcatttattgtcacaaaacatcatggcacaacatctacaacaactcttgctagcaaaccttgctgcctac

SEQ ID NO: 344395 - DNA, 213 bp, Zea mays
atcctccgaaccgtaggtgcgggggcgatccatggacacccacatcgcacccgcgaacggggcggcgtctaaccaaacagctggctgcccggcgtaggctccggtgtgcccgatggctttcacacctgctcattctgcggagaccctgttatcgggggaggcgtattggggcgccaccttctgcgtcgcctcatgcatttatgcatcaacgac

SEQ ID NO: 344396 - DNA, 375 bp, Zea mays
gcaacatagaaagtggaatccagtagcaacaatagagcaacaatggcgaccaagatattttccctccttatgctccttgctctttctgcatgtgttgctaacgcgacaattttccctcaatgctcacaagctcctatagcttcccttcttcccccataccttccatcaatgatagcttcagtatgtgaaaacccagctcttcaaccctataggctccaacaagcaatcgcagcaagcaacatacctttatcacccttgtttcaacaatcgccagccctatctttggtgcagtcattggtacaaaccatcagggcacagcagctgcagcaactcgtgctacctgtgatcaaccaagtagctctggcaaacctttct

SEQ ID NO: 344397 - DNA, 213 bp, Zea mays
ggcgacccacgcgtccggcggcagtgcgtatagaggatcgtttttttgaacagcatgaagatggtcatcgggcgtggtgtgtgcctggctctgtcagctgccagcgcctctgcaatgcatatgccctgcccctgcgcggggctgcagggcttgtacggcgctggcgccgtcctgacgactatgatgggcgccggcggtctgttcccttactct

SEQ ID NO: 344398 - DNA, 368 bp, Zea mays
gcacaatagtgtaccaacaatggcagccaaaatattttgcctccttatgctccttggtctttctgcaagtgctgctacggcgaccattttcccgcaatgctcgcaagctcctatagcttcccttcttcccccgtacctctcaccagcggtgtcttcggtatgtgaaaacccaattcttcaaccctacaggatccaacaggcaatcgcagctggcatcttacctttatcacccttgttcctccaacaatcatcagccctattacaacagttacctttggtgcatttattggcacaaaacatcagggcacaacaactacaacaacttgtgctagcaaaccttgctgcctactctcagcaacagcagtttc

SEQ ID NO: 344399 - DNA, 377 bp, Zea mays
atcgactccagattggagaactcgacaccatgaaggtgctgatcgttgcccttgctctcctggcgctcgctgcgagcgccgcctccagtacaagcggcggctgtggctgccagacaccaccgtttcatctaccgcctccgttctatatgccgcctccgttctatctgccgccgcagcagcagccgcagccatggcaataccccactcaaccaccgcagctaagcccgtgccagcagttcggatcctgcggcgtcggcagcgtcggcagcccgttcctgggccagtgcgtcgagttcctgaggcaccagtgcagcccggcggcgacgccctacggctcgccacagtgccaggcgctgcagcagcagtgctgccaccag

SEQ ID NO: 344400 - DNA, 207 bp, Zea mays
ggcgacccacgcgtccggcgcagtgcgtatagaggatcttttaacagaacagcatgaagatggtcaggggggtcgttttgtgcctggctctgtcagctgccatctcctctgcaatgcagatgccctgcccctgctcggggctgcatggcttgtacggctctggcgccggcctgacgacgatgatgggcgccgtgcggtctgtacccc

SEQ ID NO: 344401 - DNA, 89 bp, Zea mays
attatttgtcattcaataatttttttttttggctgatgtacacctcctccggagaataataaattatattcccacacaaaaaaaataaa

SEQ ID NO: 344402 - DNA, 125 bp, Zea mays
  unsure (1)..(125): unsure at all n locations
cgggtccgaccccacgccgnntccggtcagtccctagcatattagctcaatcgtactccatgattggggagaancctcgacaccatgagagggtgcttgnnatcgttgcnnccttgctttctcct

SEQ ID NO: 344403 - DNA, 379 bp, Zea mays
catagaaagcacaatagtgtaccatcattggcagccaaaatattttgcctccttatgctccttggtctttctgcaagtgctgctacggcgaccattttcccgaaatgctcgcaagctcctatagcttcccttcttcccccgtacctctcaccagcggtgtcttcggtatgtgaaaacccaattcttcaaccctacaggatccaacaggcaatcacagctggcatcttacctttatcacccttgttgctacaacaattatcagccctattacatcagctacctgtggtgcatttattggctcaatacattaaggcacaacaactacaacaacttgtgctagcaaaccttgctgactactctcatcaacagcagcatcttc

SEQ ID NO: 344404 - DNA, 376 bp, Zea mays
accaagcgaagcgcactagcaacaacctaacaacaatggctaccaagatattagccctccttgcgcttcttgcccttttagtgagcgcaacaaatgcgttcattattccacagtgctcacttgctcctagtgccattattccacagttcctcccaccagttacttcaatgggcttcgaacatccagccgtgcaagcctacaggctacaactagcgcttgcggcgagcgtcttacaacaaccaattgcccaattgcaacaacaatccttggcacatctaaacctacaaaccatcgcaacgcaacagcaacaacagtttctgccatcactgagccacctagccgtggtgaaccctgtcgcctacttgcaacagcagct

SEQ ID NO: 344405 - DNA, 369 bp, Zea mays
tgctcacttgctcctagtgccattattccacagttcctcccaccagttacttcaatgggcttcgaacacctagctgtgcaagccaacatgcaacaacaagcgcttgcggcgagcgtcttacaacaaccaattgcccaattgcaacaacaatccttgccacatctaacaatacaagccatcacaacgcaacagcaacaacagttcctaccagcactgagccacctagccatggtgaaccctgccgcctacttgcaagagcagctgcttgcatccaacccacttgctctggcgaacgtagttgcaaaccagcaacaacaacagctacaacagtttctgccaacgctcagtcaactagccatggtgaaccct

SEQ ID NO: 344406 - DNA, 336 bp, Zea mays
caacaatggcagccaaaatattttgcttccttatgctccttggtctttctgcaagtgctgctaccgcaaccattttcccacaatgctcacaagctcctatagcttcctttcttcccccatacctctcaccagcggtgtcttcagtatgtgaaaacccaattcttcaaccctacaggatccaacaggcaatcgcagcaggcatcttacctttatcacccttgttcctccaacaaccgtcagccctattacagcagttacctttggtgcatttgttggcacaaaacatcaaggcacaacaactacaacaacttgtgctaggaaaccttgctgcctact

SEQ ID NO: 344407 - DNA, 223 bp, Zea mays
atttgctctagctctggcttttgcaggctgtcggcgaccattttccaaagctccagctctatgcttcttttcccgtccttaccagcgggtcttcgatgtgaaaacccaacttaaccctcagaccacagatcacagtggcattaccttataccctgtctcaacaatatagcctattacatagtccttgggcttattgccaaacatagcacacactcacactggc

SEQ ID NO: 344408 - DNA, 203 bp, Zea mays
agctaaactgtggcaggcagctatgttttttacgagctagctccgcgcgcgctagggggcgtcacgtacgtgctgtgatcaactgtctagttctctacttgacgcggacaccctgacccgcgcgcgctccttgtccatggtcgtctttcttattttcttttttctattttattttattattttacttttttttttatatttta

SEQ ID NO: 344409 - DNA, 291 bp, Zea mays
acccacgcgtccgtataaacacaccaatcgaatttttgtattctacatacctaacaacatatggctggcagggatattattcccttctttgcacattctagcacatttttgctagctactacaaattctgtttattatttccacatttcttactctactccaattttccatttattacacagtattcctcccaccagtttacttcaatacgctttctaacaccctatttgttcaatctctataattatacaactaatcatttgctgctaatctactttacaacataccata

SEQ ID NO: 344410 - DNA, 222 bp, Zea mays
gcacaatagtgtaccaacaatttttttcaaaatatttcgcttccttatgcgccggtgtctttcttcaattgctgctaccccaaccattttcccacaatgctcacaagctcctatagctttctttcttcccccataccttttaccatcttagtcttcagtatgtgaaaacccaattctttaaccctacatgatccaacatgcattcacatcatgcatttttac

SEQ ID NO: 344411 - DNA, 388 bp, Zea mays
caacaagcaacatagaaagtggaatccagtagcaacaatagagcaacaatggcgaccaagatattttccctccttatgctccttgctctttctgcatgtgttgctaacgcgacaattttccctcaatgctcacaagctcctatagcttcccttcttcccccataccttccatcaatgatagcttcagtatgtgaaaacccagctcttcaaccctataggctccaacaagcaatcgcagcaagcaaccatacctttatcacccttgtttcaacaatcgccagccctatctttggtgcagtcattggtacaaaccatcagggcacagcagctgcagcaactcgtgctacctgtgatcaaccaagtagctctggcaaacctttctccctac

SEQ ID NO: 344412 - DNA, 382 bp, Zea mays
cacatctaaacctacaaaccatcgcaacgcaacagcaacaacagtttctgccatcactgagccacctagccgtggtgaaccctgtcgcctacttgcaacagcagctacttgcatccaacccacttgctctggcgaacgtagctgcataccagcaacaacaacgtctgcaacagtttatgccagcgctcagtcaactagccatggtgaaccctgtcgcctacctacaacagcaacaattgctttcatctagcccgctcgctgtgggcaatgcacctacgtacctacaacaacagttgctgcaacagattggaccagctctgactcagctagctgtggcaaaccctactgcctacttgcaacagttgcttccattcaaccaact

SEQ ID NO: 344413 - DNA, 378 bp, Zea mays
acccttgttcctccaacaatcatcagccctattacatcagttacctttggtgcatttattggcacaaaacatcagggcacaacaactacaacaacttgtgctagcaaaccttgctgcctactctcagcaacagcagtttcttccattcaaccaactagctgcattgaactctgcttcttatttgcaacaacaacaactaccattcagccagctacctgctgcctacccccagcaatttcttccattcaaccaactggcagcattgaactctcctgcttatttacagcagcaacaactactaccattcagccagctagctggtgtgagccctgctaccttcttgatacaaccacagttgttgccgttctaccagcacgc

SEQ ID NO: 344414 - DNA, 195 bp, Zea mays
atctttggcattcaaacactctatcattcctatcacactagcaacaaccgggccgcaaattttaccaatatattatccctccacaccctcatcaccctgtttctgaacacatcaaatgcctatcattattacacaatgctcacttgcatcctacctacaatattccacaaactctcccatcaattactttcatca

SEQ ID NO: 344415 - DNA, 82 bp, Zea mays
cgcgtccggcgagctaacacactatattatccttttttctcttacacctacatgcaactacgggtgggtggttataatttat

SEQ ID NO: 344416 - DNA, 375 bp, Zea mays
attttgagcattcagaaacacaccaagcgaagcgcactagcaacaacctaacaacaatggctaccaagatattatccctccttgcgcttcttgcgctttttgcgagcgcaacaaatgcgtccattattccacaatgctcacttgctcctagttccattattccacagttcctcccaccagttacttcaatggccttcgaacacccagctgtgcaagcctataggctacaacaagcgattgcggcgagcgtcttacaacaaccaattgcccaattgcaacaacaatccttggcacatctaacaatacaaaccatcgcaacgcaacagcaacaacagttcctaccagcactgagccacctagccatggtgaaccctg

SEQ ID NO: 344417 - DNA, 379 bp, Zea mays
ctctcaccagcggtgtcttcagtatgtgaaaacccaattcttcaaccctacaggatccaacaggcaatcgcagcaggcatcttacctttatcacccttgttcctccaacaaccgtcagccctattacagcagttacctttggtgcatttgttggcacaaaacatcaaggcacaacaactacaacaacttgtgctaggaaaccttgctgcctactctcagcaacagcagtttcttccattcaaccaactggctgcattgaactctgctgcttatttgcaacaacaactaccattcagtcagctagctgctgcctacccccagcaatttcttccattcaaccaactggcagcattgaactctgctgcttatttacaacagc

SEQ ID NO: 344418 - DNA, 382 bp, Zea mays
caactagcaacatagaaagcacaatagtgtaccaacaatggcagccaaaatattttgcttccttatgctccttggtctttctgcaagtgctgctaccgcaaccattttcccacaatgctcacaagctcctatagcttcctttcttcccccatacctctcaccagcggtgtcttcagtatgtgaaaacccaattcttcaaccctacaggatccaacaggcaatcgcagcaggcatcttacctttatcacccttgttcctccaacaaccgtcagccctattacagcagttacctttggtgcatttgttggcacaaaacatcaaggcacaacaactacaacaacttgtgctaggaaaccttgctgcctactctcagcaacagcag

SEQ ID NO: 344419 - DNA, 383 bp, Zea mays
caactagcaacatagaaagcacaatagtgtaccaacaatggcagccaaaatattgtgcgtccttatgctccttggtctttctgcaagtgctgctacggcgaccattttcccgaaatgctcgcaagctcctatagcttcccttcttcccccgtaacctctcaccagcggtgtcttcggtatgtgaaaacccaattcttcaaccctacaggatccaacaggcaatcacagctggcatcttacctttatcacccttgttcctccaacaatcatcagccctattacatcagttacctttggtgcatttattggcacaaaacatcagggcacaacaactacaacaacttgtgctagcaaaccttgctgcctactcttagcaacagcag

SEQ ID NO: 344420 - DNA, 380 bp, Zea mays
cggacgcgtgggcggacgcgtgggtgagcattcagaaacacaccaagcgaagcgcactagcaacaacctaacaacaatggctaccaagatattatccctccttgcgcttcttgcgctttttgcgagcgcaacaaatgcgtccattattccacaatgctcacttgctcctagttccattattccacagttcctcccaccagttacttcaatggccttcgaacacccagctgtgcaagcctataggctacaacaagcgattgcggcgagcgtcttacaacaaccaattgcccaattgcaacaacaatccttggcacatctaacaatacaaaccatcgcaacgcaacagcaacaacagttcctaccagcactgagccacctag

SEQ ID NO: 344421 - DNA, 380 bp, Zea mays
  unsure (1)..(380): unsure at all n locations
gcaacatagaaagcacaatagtgtaccaacaatggcagccaaaatattttgcctccttatgctccttggtctttctgcaagtgctgctacggcgaccattttcccgaaatgctcgcaagctcctatagcttcccttcttcccccgtacctctcaccagcggtgtcttcggtatgtgaaaacccaattcttcaaccctacaggatccaacaggcaatcacagctggcatcttacctttatcacccttgttcctncaacaatcatcagccctattacatcagttacctttggtgcatttattggcacaaaacatcagggcacaacaactacaacaacttgtgctagcaaaccttgctgcctactctcagcaacagcagtttc

SEQ ID NO: 344422 - DNA, 377 bp, Zea mays
attttgagcattcagaaacacaccaagcgaagcgcactagcaacaacctaacaacaatggctaccaagatattatccctccttgcgcttcttgcgctttttgcgagcgcaacaaatgcgtccattattccacaatgctcacttgctcctagttccattattccacagttcctcccaccagttacttcaatggccttcgaacacccagctgtgcaagcctataggctacaacaagcgattgcggcgagcgtcttacaacaaccaattgcccaattgcaacaacaatccttggcacatctaacaatacaaaccatcgcaacgcaacagcaacaacagttcctaccagcactgagccacctagccatggtgaaccctgtc

SEQ ID NO: 344423 - DNA, 382 bp, Zea mays
agaaagcacaatagtgtaccaacaatggcagccaaaatattttgcctccttatgctccttggtctttctgcaagtgctgctacggcgaccattttcccgcaatgctcgcaagctcctatagcttcccttcttcccccgtacctctcaccagcggtgtcttcggtatgtgaaaacccaattcttcaaccctacaggatccaacaggcaatcgcagctggcatcttacctttatcacccttgttcctccaacaatcatcagccctattacaacagttacctttggtgcatttattggcacaaaacatcagggcacaacaactacaacaacttgtgctagcaaaccttgctgcctactctcagcaacagcagtttcttccattca

SEQ ID NO: 344424 - DNA, 302 bp, Zea mays
caaaaacacaccaagcgaatttctttatcaacaacctaacaacaatgggtggccgtatattatcccttcttgcgcttcttgcactttttgcgagcgcaacatatgcgtccattattccacaatgctcacttgctcctagatccattattccacagttcctcccaccagttacttcaatggcctttgaacacccagctgtgcaagcctataggctacaacaagctattgctgctagcgttcttacaacaaccaatttcccaattgtaacaacattccttggcacatctaacaattcataccat

SEQ ID NO: 344425 - DNA, 165 bp, Zea mays
  unsure (1)..(165): unsure at all n locations
gggggagcacgcgnncgaaaanaacaacaaaaaaatttttttattttcccaacaatcactactatggtcggttttttaataattctcaaacccccccctccacacaattctaccactaccatatctccacatatctacaaatttttcaatatccaacaattttaa

SEQ ID NO: 344426 - DNA, 357 bp, Zea mays
attcaaaaacacaaccaggcaaaccgccctagcaacgacctaacaacaatggctaccaagaatttagccctccttgcgcttcttgccctttttgggagcgcaacaaatgcgttcattattccacaatgctcacttgctcctagtgccattattccacagttcctcccaccagttacttcaatgggcttcgaacacctagctgtgcaagccaacatgcaacaacaagcgcttgcggcgagcgtcttacaacaaccaattgcccaattgcaacaacaatccttgccacatctaacaatacaagccatcacaacgcaacagcaacaacagttcctaccagcactgagccacctagccatg

SEQ ID NO: 344427 - DNA, 379 bp, Zea mays
agcgcaacaaatgcgttcattattccacaatgctcacttgctcctagtgccattattccacagttcctcccaccagttacttcaatgggcttcgaacacctagctgtgcaagccaacatgcaacaacaagcgcttgcggcgagcgtcttacaacaacaatggctaccaagatattagccctccttgcgcttcttgccctttttgtgagcgcaacaaatgcgttcattattccacaatgctcacttgctcctagtgccattattccacagttcctcccaccagttacttcaatgggcttcgaacacctagctgtgcaagccaacatgcaacaacaagcgcttgcggcgagcgtcttacaacaaccaattgcccaattgca

SEQ ID NO: 344428 - DNA, 199 bp, Zea mays
ttccttttttccccggacctctcaacaagcgggtctttggtatgggaaacccaattctttaaccctatggatccaacagcaatcgagctgcatctaccttatcaccctgttctcaacatatcagctattacagcagtacttgggcttattgcacaaacataggacacactacaacacttggctgcaacctgtgctactt

SEQ ID NO: 344429 - DNA, 164 bp, Zea mays
gtgacatactagccacatataaggtttattttttacacaacacaaccttacaaggcagagggtcatcttattatcaatgctttctcatatagcaaacatactgagaccattatctcactatgctatcacaccattatcttttcactattttttcactgaacatt

SEQ ID NO: 344430 - DNA, 102 bp, Zea mays
cccacgctcacaccaggaagctctcctcccggttcctgggggcccccgaatccttcctccggccgttgcttccaacgcccgcggccggcccttcttcggggg

SEQ ID NO: 344431 - DNA, 137 bp, Zea mays
ttcaccaacatatcacaaacttatttttctactaccaacacaccctagcattcgacgcgaacttactatatttaacactccatcctacctacaacacatacaacagctactttaatccactaccaatggttaaccca

SEQ ID NO: 344432 - DNA, 297 bp, Zea mays
agaaaagcacaatagtggtcccaacaatggcagcccaaaaaatttggcttcctaatgctcctgggcttttttgaggtctgttaccgaaccattttccacatgctcacagctctatacttcctttttcccatactttacagggggtttcagttggaaaccaattttaacctcagatcacaggcatgagcaggatttaccttataccctgtcctcacaccgcagcctatacagagtaccttgggatttgtgcacaaacataagccaacactacacaactggctaggaacctgtgctact

SEQ ID NO: 344433 - DNA, 380 bp, Zea mays
gcaacatagaaagcacaatagtgtaccaacaatggcagccaaaatattttgcttccttatgctccttggtctttctgcaagtgctgctaccgcaaccattttcccacaatgctcacaagctcctatagcttcctttcttcccccatacctctcaccagcggtgtcttcagtatgtgaaaacccaattcttcaaccctacaggatccaacaggcaatcgcagcaggcatcttacctttatcacccttgttcctccaacaaccgtcagccctattacagcagttacctttggtgcatttgttggcacaaaacatcaaggcacaacaactacaacaacttgtgctaggaaaccttgctgtctactctcagcaacagcagtttc

SEQ ID NO: 344434 - DNA, 375 bp, Zea mays
caacaagcaacatagaaagtggaatccagtagcaacaatagagcaacaatggagaccaagatattttccctccttatgctccttgctctttctacatgtgttgctaacgcgacaattttccctcaatgctcacaagctcctatagcttccctttttcccccataccttccatcaattatagcttcagtatgtgaaaacccagctcttcaaccatataggcttcaacaagcaatcgcagcaagcaacataccctttatcgcccttgttgtgtcaacaatcgccagccctatctttggtgcagtcattggtacaaaccatcagggcacaacagctgcagcaactcgtgctacctgtgatcaaccaaagagctctggc

SEQ ID NO: 344435 - DNA, 349 bp, Zea mays
  unsure (1)..(349): unsure at all n locations
attttgagcattcagaaacacaccaagcgaagcacattagcaacaacctaacaacaatggctaccaagatattatccctccttgcgcttcttgcgctttttgcgagcgcaacaaatgcgttcattattccacaatgctcacttgctccaagttccattattacacagttcctcccaccagttacttcaatgggcttcgaacacccagctgtgcaagcctataggctacaacaagcaattgcggcgagcgtcttacaacaaccaatttcccagttgcaacaacaatccttggcacatctaacaatacaaaccatcgcaacgcaacagcaacaacaattnctaccagcact

SEQ ID NO: 344436 - DNA, 379 bp, Zea mays
attttgagcattcagaaacacaccatgcgaagcacattagcaacaacctaacagcaatggctaccaagatattatccctccttgcgcttcttgcgctttttgcgagcgcaacaaatgcgttcattattccacaatgctcacttgctccaagttccattattacacagttcctcccaccagttacttcaatgggcttcgaacacccagctgtgcaagcctataggctacaacaagcaattgcggcgagcgtcttacaacaaccaatttcccagttgcaacaacaatccttggcacatctaacaatacaaaccatcgcaacgcaacagcaacaacaattcctaccagcactgagccacctagccatggtgaaccctgccgc

SEQ ID NO: 344437 - DNA, 378 bp, Zea mays
aagcaacatagaaagtggaatacagtagcaacaatagagcaacaatggcggccaggatattttccatccttatgctccttgctctttctgcatgtgttgctaacgcgaccatttttcctcaatactcacaagctcctatagctgcccttcttcccccataccttccatcaatgaccgcttcagtatgtgaaaacccagcccttcaaccctacaggctccaacaagcaatcgcaacaagcaacttacctttatcacccctgttctttcaacaatcgccagccctatctttggtgcagtcattggtacaaaccatcagggcacaacagctgcagcaactcgtgctaccagtgatcagccaagtagctctggcaaaccttt

SEQ ID NO: 344438 - DNA, 271 bp, Zea mays
aacatacatatctataatcattcttatttaccatacctcagcattcggggcggggtttatctaatgttactatttccccccatgacccattatacccttaatacgactattcatgtgtaattacttcacaaacttatttttatcatcaataccatcatccttctttaaacatctcattcatctttttcattccataaacattatctttcccttatcttactactatccctaacactcattttaatttctttaccccacctaacaattctat

SEQ ID NO: 344439 - DNA, 379 bp, Zea mays
cagaaacacaccaagcgaagcgcactagcaacaacctaacaacaatggctaccaagatattagccctccttgcgcttcttgcccttttagtgagcgcaacaaatgcgttcattattccacagtgctcacttgctcctagtgccattattccacagttcctcccaccagttacttcaatgggcttcgaacatccagccgtgcaagcctacaggctacaactagcgcttgcggcgagcgtcttacaacaaccaattgcccaattgcaacaacaatccttggcacatctaaacctacaaaccatcgcaacgcaacagcaacaacagtttctgccatcactgagccacctagccgtggtgaaccctgtcgcctacttgcaaca

SEQ ID NO: 344440 - DNA, 380 bp, Zea mays
caactagcaacatagaaagcacaatattgtaccaataatggcagccaaaatattttgcctcattatgctccttggtctttctgcaagtgctgctacggcgagcattttcccgcaatgctcacaagctcctatagcttcccttcttcccccatacctctcaccagcgatgtcttcagtatgtgaaaatccaattcttctaccctacaggatccaacaggcaatcgcagcaggcatcttacctttatcacccttgttcctccaacaatcatcagccctattacagcagttacctttggtgcatttattggcacaaaacatcagggcacaacaactacaaaacatcagggcacaacaactacaacaactcgtgctagcaaacc

SEQ ID NO: 344441 - DNA, 320 bp, Zea mays
ctactagctacatataaagctcttttttacaccacaaatggcacctcaaggcgggggggcttattatgcttctcgttcttcctccaaccgctgatacaggaagccttcactctgagagaacacaagcttctatccctatactttttaacacatacctgtcaccagcaacatacttagattaccaaaattcaaacaatctaccctacttgatccaacacactaattgatacagactattaccttacatacccttgtgcctctaacactcactatgaccattacagtagctacctctaacgcatttaccgacactaaacatc

SEQ ID NO: 344442 - DNA, 169 bp, Zea mays
ccattcaaccaacttgcttatttatttttcacaccgtctaccaacaacccgcattgttttttccctcttttaaatttctcacaaattatcaatcaataataaaattttttgtctgattcttatggctttccagaaataataatgtacatttctagattctttaaaaatt

SEQ ID NO: 344443 - DNA, 378 bp, Zea mays
aagcaacatagaaagtggaatccagtagcaacaatagagcaacaatggagaccagagatattttccctccttatgctccttgctctttctacatgtgttgctaacgcgacaattttccctcaatgctcacaagctcctatagcttccctttttcccccataccttccatcaattatagcttcagtatgtgaaaacccagctcttcaaccatataggcttcaacaagcaatcgcagcaagcaacatacctttatcgcccttgttgtgtcaacaatcgccagccctatctttggtgcagtcattggtacaaaccatcagggcacaacagctgcagcaactcgtgctacctgtgatcaaccaagtagctctggcaaacctt

SEQ ID NO: 344444 - DNA, 379 bp, Zea mays
cggacgcgtgggataaagcacaattttgtaccaacaatggcagccaaaatattgggcctccttatgctccttggtctttctgcaagtgctgctacggcgaccattttcccgcaatgctcgcaagctcctatagcttcccttcttcccccgtacctctcaccagcggtgtcttcggtatgtgaaaacccaattcttcaaccctacaggatccaacaggcaatcgcagctggcatcttacctttatcacccttgttcctccaacaatcatcagccctattacaacagttacctttggtgcatttattggcacaaaacattagggcacaacaactacaacaacttgtgctagcaaaccttgctgcctactctcagcaacagc

SEQ ID NO: 344445 - DNA, 374 bp, Zea mays
gcaacatagaaagtggaatccagtttcaacaatagagcaacaatggcgaccaagatattttccctccttatgctccttgctctttctgcatgtgttgctaacgcgacaattttccctcaatgctcacaagctcctatagcttcccttcttcccccataccttccatcaatgatagcttcagtatgtgaaaacccagctcttcaaccctataggctccaacaagcaatcgcagcaagcaacatacctttatcacccttgtttcaacaatcgccagccctatctttggtgcagtcattggtacaaaccatcagggcacagcagctgcagcaactcgtgctacctgtgatcaaccaagtagctctggcaaacctttc

SEQ ID NO: 344446 - DNA, 376 bp, Zea mays
tagcaacatagaaagcacaatagtgtaccaacaatggcagccaaaatattttggctccttatgctccttggtctttctgcaagtgctgctacggcgaccattttcccgaaatgctcgcaagctcctatagcttcccttcttcccccgtacctctcaccagcggtgtcttcggtatgtgaaaacccaattcttcaaccctacaggatccaacaggcaatcacagctggcatcttacctttatcacccttgttcctccaacaatcatcagccctattacatcagttacctttggtgcatttattggcacaaaacatcagggcacaacaactacaacaacttgtgctagcaaaccttgctgcctactctcagcaacagc

SEQ ID NO: 344447 - DNA, 382 bp, Zea mays
caactagcaacatagaaagcacaatagtgtaccaacaatggcagccaaaatattttgcctccttatgctccttggtctttctgcaagtgctgctacggcgaccattttcccgaaatgctcgcaagctcctatagcttcccttcttcccccgtacctctcaccagcggtgtcttcggtatgtgaaaacccaattcttcaaccctacaggatccaacaggcaatcacagctggcatcttacctttatcacccttgttcctccaacaatcatcagccctattacatcagttacctttggtgcatttattggcacaaaacatcagggcacaacaactacaacaacttgtgctagcaaaccttgctgcctactctcagcaacagcag

SEQ ID NO: 344448 - DNA, 350 bp, Zea mays
attgagaccaactagcaacatagaaagcacaatagtgtaccaacaatggcagccaaaatattttgcttccttatgctccttggtctttctgcaagtgctgctaccgcaaccattttcccacaatgctcacaagctcctatagcttcctttcttcccccatacctctcaccagcggtgtcttcagtatgtgaaaacccaattcttcaaccctacaggatccaacaggcaatcgcagcaggcatcttacctttatcacccttgttcctccaacaaccgtcagccctattacagcagttacctttggtgcatttgttggcacaaaacatcaaggcacaacaactacaacaact

SEQ ID NO: 344449 - DNA, 376 bp, Zea mays
cggacgcgtgggcggacgcgtggtgccgttcgttcatctaccgccgccggtgcgtgggccacctccggttcacctgccacctccggtgcatctcccaccgccggtccacctgccgccgccggtccacctgccaccgccggtccatgtgccgtcgccggttcatctgccgccgccaccatgccactaccctactcaaccgccccggcctcagcctcatccccagccacacccatgcccgtgccaacagccgtattcaagcccgtgccagctgcagggaacctgcggcgttggcagcaccccgatcctgggccagtgcgtcgagtttctgaggcatcagtgcagcccgacggcgacgccctactgctcgcctcagtgc

SEQ ID NO: 344450 - DNA, 381 bp, Zea mays
  unsure (1)..(381): unsure at all n locations
accaagcgaagctacctaccaacgacttaacaacaatggctaccaagatattagccgtccttgcgcttcttgccctttttgtgagcgcaacanatgcgttcattattccacaatgctcacttgctcctagtgccattataccacagttcctccgaccagttacttcaatgggcttcgaacacctagctgtgcaagcctacaggctacaacaagcgcttgcggcgagcgtcttacaacaaccaattaaccaattgcaacaacaatccttggcacatctaaccatacaaaccatcgcaacacaacagcaacaacagttcctaccagcactgagccaactagatgtggtgaaccctgtcgcctacttgcaacagcaggtgcttg

SEQ ID NO: 344451 - DNA, 381 bp, Zea mays
tagcaacatagaaagcacaatagtgtaccaacaatggcagccaaaatattttgcttccttatgctccttggtctttctgcaagtgttgctaccgcaaccattttcccacaatgctcacaagctcctatagcttcccttcttcccccatacctctcaccagcggtgtcttcaatgtgtgaaaacccaattgttcaaccctacaggatccaacaggcaatcgcaacaggcatcttaccattatcacccttgttcctccaacaaccgtcagccctattacagcagttacctttggtccatttggtggcacaaaacatcagggcacaacaactacaacaacttgtgctagcaaaccttgctgcatactctcaacaacatcagttt

SEQ ID NO: 344452 - DNA, 324 bp, Zea mays
gctgccagcgcctctgcaatgcatatgccctgcccctgcgcggggctgcagggggtgtacggcgctggcgccggcctgacgacgatgatgggcgccggcgggctgtacccctacgcggagtacctgaggcagccgcagtgcagcccgctggcggcggcgccctactacgccgggtgtgggcagacgagcgccatgtaccagccgctccggcaacagtgctgccagcagcagatgaggatgatggacgtgcagtccgtctcgcagcagctgtagatgatgatgcagtttgagcgtgccgctgtcgccagcagcagcctgtacgag

SEQ ID NO: 344453 - DNA, 314 bp, Zea mays
ccttgttcctccaacaagggtgatattttttacagcagttacctatgtgccatttggtggcacaaaacatcaaggcacaacaactacaacaacttgtgctagcaaaccttgctgcatactctcagcaacatcagtttcttacattcaaccaactggctgcattgaactctgctgattatttgcaacaacaattgctgccattcaaccaacttgctttgacaaacccagcagcgttctaccaacaacccatcattgctggtgccctcttttagatttcttatgagttatagttcaataataaagtcctttgtctg

SEQ ID NO: 344454 - DNA, 376 bp, Zea mays
cctttatcgcccttgttgtgtcaacaatcgccagccctatctttggtgcagtcattggtacaaaccatcagggcacaacagctgcagcaactcgtgctacctgtgatcaaccaagtagctctggcaaacctttctccctactctccgcaacaacaatttcttccattcaaccaactgtctacactgaaccctgctgcttatttgcagcaacaactattaccatttagccagctagctactgcctactctcaacaacaacaacttcttccatttaaccaattggccgcactgaaccccgctgcttatttgcagcagcaaatactactaccatttagccagctagctacagcaagccgtgcttccttcttgacacaac

SEQ ID NO: 344455 - DNA, 243 bp, Zea mays
cctagatcatacaacaaagctcatttttttaacaacactagcacactaactagggggggtgtttaattctctataactatcttcatacacacatacggcaaccattcatctaaattgttacacagctccaacacctttatatctttactcgtacctttaacaatcatcaatattaactatttcaaaactcaattttttaacctcataaaactcaacaaggcataacaaattgaatccaaccac

SEQ ID NO: 344456 - DNA, 250 bp, Zea mays
aagcacatagaaagtggaatccagtagcaacaatagagcaacaatggcgaccaagatattttccctccttatgctccttgctctttctgcatgtgttgctaacgcgacaattttccctcaatgctcacaagctcctatagcttcccttcttcccccataccttccatcaatgatagcttcagtatgtgaaaacccagctcttcaaccctataggctccaacaagcaatcgcagcaagcaacataccttta

SEQ ID NO: 344457 - DNA, 383 bp, Zea mays
  unsure (1)..(383): unsure at all n locations
gaccaactagcaacatagaaagcacattattgtaccaacaatggcagccaaaatatttggcctccttatgctccttggtctttctgcaagtgctgctacggcgaccattttcccacaatgctcacaagctcctatagcttcccttcttcccccgtacctctcaccagcggtgtcttcggtatgtgaaaacccaattcttcaaccctataggatccaacaggcaatcgcagctggcatcttacctttatcacccttgttcctccaacaatcatcagccctattacagcagttacctttggtgcatttattggcacaaaacatcagggcacaacaactacaacaactngtgctagcanaccttgctgcctactctcagcaacaac

SEQ ID NO: 344458 - DNA, 373 bp, Zea mays
  unsure (1)..(373): unsure at all n locations
gaccaactagcaacatanaattcattatagtgtaccaacaatggcagccaggagggttttgcctccttatgctccttggtctttctgcaagtgctgctacggcgaccattttcccacattgctcacaagctcctatagcttcccttcttcccccgtacctctcaccagcggtgtcttcggtatgtgaaaacccaattcttcaaccctataggatccaacaggcaatctcagctggcatcttacctttatcacccttgttcctccaacaatcatcagccctattacagcagttacctttggtgcatttattggcacataacattaaggtacaacaacttcaacaacttgtgctagcaaaccttgcttgctactc

SEQ ID NO: 344459 - DNA, 379 bp, Zea mays
aagcgaagcacattagcaacaacctaacaacaatggctaccaagatattatccctccttgcgcttcttgcgctttttgcgagcgcaacaaatgcgttcattattccacaatgctcacttgctccaagttccattattacacagttcctcccaccagttacttcaatgggcttcgaacacccagctgtgcaagcctataggctacaacaagcaattgcggcgagcgtcttacaacaaccaatttcccagttgcaacaacaatccttggcacatctaacaatacaaaccatcgcaacgcaacagcaacaacaattcctaccagcactgagccacctagccatggtgaaccctgccgcctacttgcaacagcagttgcttgc

SEQ ID NO: 344460 - DNA, 360 bp, Zea mays
attgagaccaacaagcaacatagaatgtggaatccagtagcaacaatagagcaacaatggcgaccaagatattttccctccttatgctccttgctctttctgcatgtgttgctaacgcgacaattttccctcaatgctcacaagctcctatagcttcccttcttcccccataccttccatcaatgatagcttcagtatgtgaaaacccagctcttcaaccctataggctccaacaagcaatcgcagcaagcaacatacctttatcacccttgtttcaacaatcgccagccctatctttggtgcagtcattggtacaaaccatcagggcacagcagctgcagcaactcgtgctacctgtga

SEQ ID NO: 344461 - DNA, 361 bp, Zea mays
gcaacatagaaagcacaatagtgtaccaacaatggcagccaaaatattttggttccttatgctccttggtctttctgcaagtgttgctaccgcaaccattttcccacaatgctcacaagctcctatagcttcccttcttcccccatacctctcaccagcggtgtcttcaatgtgtgaaaacccaattgttcaaccctacaggatccaacaggcaatcgcaacaggcatcttaccattatcacccttgttcctccaacaaccgtcagccctattacagcagttacctttggtccatttggtggcacaaaacatcagggctcaacaactacaacaacttgtgctagcaaaccttgctgaatac

SEQ ID NO: 344462 - DNA, 375 bp, Zea mays
tgagcattcagaaacacaccaagcgtagcgcactagcaacaacctaacaacaatggctaccaagatattatccctccttgcgcttcttgcgctttttgcgagcgcaacaaatgcgtccattattccacaatgctcacttgctcctagttccattattccacagttcctcccaccagttacttcaatggccttcgaacacccagctgtgcaagcctataggctacaacaagcgattgcggcgagcgtcttacaacaaccaattgcccaattgcaacaacaatccttggcacatctaacaatacaaaccatcgcaacgcaacagcaacaacagttcctaccagcactgagccacctagccatggtgaaccctgtcgc

SEQ ID NO: 344463 - DNA, 371 bp, Zea mays
ggcagccaaaatattttgcctccttatgctccttggtatttctgcaagtgctggtacggcgaccattttcccgcaatgctcacaagctcctatagcttcccttcttcccccgtacctctcaccagcggtgtcttcggtatgtgaaaacccaattcttcaaccctacaggatccaacaggcaatcgcagctggcatcttacctttatcacccttgttcctccaacaatcatcagccctattacagcagttacctttggtgcatttattggcacaaaacatcaaggcacaacaactacaacaacttgggctagcaaaccttggtggctactcttaacaacagcagtttcttccattcaaccaactagctgcat

SEQ ID NO: 344464 - DNA, 146 bp, Zea mays
  unsure (1)..(146): unsure at all n locations
ggttgggaanaancggacgaccaaaacaccgggaataaaaacaataaaaaaatttttttaaaaaaaaaacaaaaaacccgccgtttattaattctcacccccccacctccccactctccctacaactccacctccaccatacaaac

SEQ ID NO: 344465 - DNA, 226 bp, Zea mays
tattgagaccaacatgcaacatttgtttgtttaacacacgagcaacacaagggcagcaattttttacaaaatattttccatcctaatgctccttgctctatctgcatgtgttgctaacgcgaccatttttcctcaatactcacaagctcctatagctgccctacttcccccataccttccaataatgaccgcttcagtatgtgaaaacccagccctttaaccctac

SEQ ID NO: 344466 - DNA, 373 bp, Zea mays
gggtcttcagaccattagctttatctacttcagagcgcagaagaacccgatcgacaccatgagggtgttgctcgttgccctcgctctcctggctctcgctgcgagcgccacctccacgcatacaagcggcggctgcggctgccagccaccgccgccggttcatctaccgccgccggtgcatctgccacctccggttcacctgccacctccggtgcatctcccaccgccggtccacctgccgccgccggtccacctgccaccgccggtccatgtgccgccgccggttcatctgccgccgccaccatgccactaccctactcaaccgccccggcctcagcctcatccccagccacacccatgcccgtgccaacag

SEQ ID NO: 344467 - DNA, 369 bp, Zea mays
cagcaacagcagtttcttccattcaaccaactagctgcattgaactctgcttcttatttgcaacaacaacaactaccattcagccagctacctgctgcctacccccagcaatttcttccattcaaccaactggcagcattgaactctcctgcttatttacagcagcaacaactactaccattcagccagctagctggtgtgagccctgctaccttcttgatacaaccacagttgttgccgttctaccagcacgctgcgcctaacgctggcaccctcttacaactgcaacaattgctgccattcaaccaacttgctttgacaaacccagcagcgttctaccaacaacccatcattggtggtgccctcttt

SEQ ID NO: 344468 - DNA, 360 bp, Zea mays
caacaatggagaccaagatattttttcttcttatgctccttgctctttctacgtgtgttgctaacgcgacaattttccctcaatgctcacaagctcctatagcttccctttttcccccataccttccatcaattatagcttcagtatgtgaaaacccagctcttcaaccatataggcttcaacaagcaatcgcagcaagcaacatacctttatcgcccttgttgtgtcaacaatcgccagccctatctttggtgcagtcattggtacaaaccatcagggcacaacagctgcagcaactcgtgctacctgtgatcaaccaagtagctctggcaaacctttctccctactcttcgcaacaac

SEQ ID NO: 344469 - DNA, 361 bp, Zea mays
tttcagcattcagaaacacaccaagtgtttcgcactagcaacaacctaacaacaatggctaccaagatattagccctccttgcgcttcttgcccttttagtgagcgcaacaaatgcgttcattattccacagtgctcacttgctcctagtgccattattccacagttcctcccaccagttacttcaatgggcttcgaacatccagccgtgcaagcctacaggctacaactagcgcttgcggcgagcgtcttacaacaaaccaattgcccaattgcaacaacaatccttggcacatctaaacctacaaaccatcgcaacgcaacagcaacaacagtttctgccatcactgagccacctagcc

SEQ ID NO: 344470 - DNA, 365 bp, Zea mays
attcagaaacacaccaagcgaagcacattagcaacaacctaacaacaatggctaccaagatattatccctccttgcgcttcttgcgctttttgcgagcgcaacaaatgcgttcattattccacaatgctcacttgctccaagttccattattacacagttcctcccaccagttacttcaatgggcttcgaacacccagctgtgcaagcctataggctacaacaagcaattgcggcgagcgtcttacaacaaccaatttcccagttgcaacaacaatccttggcacatctaacaatacaaaccatcgcaacgcaacagcaacaacaattcctaccagcactgagccacctagccatggtgaaccct

SEQ ID NO: 344471 - DNA, 368 bp, Zea mays
ccaactagcaacatagaaagcacatttgtgtaccaacaatggcagccaaaatattttgcctccttatgctccttggtatttctgcaagtgctgctacggcgaccattttcccgcaatgctcacaagctcctatagcttcccttcttcccccgtacctctcaccagcggtgtcttcggtatgtgaaaacccaattcttcaaccctacaggatccaacaggcaatcgcagctggcatcttacctttatcacccttgttcctccaacaatcatcagccctattacagcagttacctttggtgcatttattggcacaaaacatcagggcacaacaactacaacaacttgtgctagcaaaccttgctgcctac

SEQ ID NO: 344472 - DNA, 348 bp, Zea mays
cggacgcgtgggcggacgcgtgggcaactagccatggtgaaccctgccgcctacctacaacagcaacaactgctttcatctagcccgctcgctgtggccaatgcacctacatacctgcaacaagaattgttgcaacagattgtaccagctctaactcagctagctgtggcaaaccctgttgcctacttgcaacagctgcttccattcaaccaactaactatgtcgaactctgttgcgtacctacaacagcgacaacagttacttaatccattggcagtggctaacccattggtcgctgccttcctacagcagcaacaattgctgccatacaaccggttctctttgatg

SEQ ID NO: 344473 - DNA, 367 bp, Zea mays
gcaaagcggcagtgcgtagagaggatcgtcgaacagaacagcatgaagatggtcatcgttctcgtcgtgtgcctggctctgtcagctgccagcgcctctgcaatgcagatgccctgcccctgcgcggggctgcagggcttgtacggcgctggcgccggcctgacgacgatgatgggcgccggcgggctgtacccctacgcggagtacctgaggcagccgcagtgcagcccgctggcggcggcgccctactacgccgggtgtgggcagacgagcgccatgtaccagccgctccggcaacagtgctgccagcagcagatgaggatgatggacgtgcagtccgtcgcgcagcagctgcagatgatgatgc

SEQ ID NO: 344474 - DNA, 401 bp, Zea mays
aaaaaaaaaaaaaaatttttattaaaaaaaaaaaaaaaaaaaaaaaaaaaatctcgtctgatattttaaaaaaaaaaataataaaaaaaacaaaaaaaaacaaaaaaaaaaattaaaagaaataaaaaaaaaaaaatattaataataaaaaaaagaaaaacaaatataaaaaaaaaataaaaaaataataaaaaaaaaaacaaaaaaaaaaaaaaataaaaaaaaaaaataaaaaaaaagtaaaaataaaaaaatataaaaattataatataaaaaaaaataaaaacaaaaaaaatataaaaataatataaaaaaaaaaataaataaaaaaaaacaataaaataacaaaaaaacaaaaataataaaacaaaagatataaaaaaaataataaaaataaaaat

SEQ ID NO: 344475 - DNA, 194 bp, Zea mays
attttcagcattcagaaacacaccatgtgttgcgcactagcaacaacctaacaacaatggctaccaagatattagccctccttgcgcttcttgcccttttagtgagcgcaacaaatgcgttcattattccacagtgctcacttgctcctagtgccattattccacaagtccttccaccagttacttcaatgggc

SEQ ID NO: 344476 - DNA, 181 bp, Zea mays
gacccacgcgtacggccacacgtccgttaagcacttttttgtaccaacaatggcaactaaaatgtccgtccttcttatgctccttggtctttatgcaagcagctgctactgcaaccatatgcccacaatgctcacaagcgtttatagctttgcaccgcgctcctgacctactaacaacgat

SEQ ID NO: 344477 - DNA, 365 bp, Zea mays
gagaccaacaagcaacatagaaagtggaatacagtagcaacaatagagcaacggtggcggccaagatattttccatccttatgctccttgctctttctgcatgtgttgctaacgcgaccatttttcctcaatactcacaagctcctatagctgcccttcttcccccataccttccatcaatgaccgcttcagtatgtgaaaacccagcccttcaaccctacaggctccaacaagcaatcgcaacaagcaacttacctttatcacccctgttctttcaacaatcgccagccctatctttggtgcagtcattggtacaaaccatcagggcacaacagctgcagcaactcgtgctaccagtgatcagc

SEQ ID NO: 344478 - DNA, 366 bp, Zea mays
cagaaacacaccaagcgaagcacattagcaacaacctaacaacaatggctaccaagatattatccctccttgcgcttcttgcgctttttgcgagcgcaacaaatgcgttcattattccacaatgctcacttgctccaagttccattattacacagttcctcccaccagttacttcaatgggcttcgaacacccagctgtgcaagcctataggctacaacaagcaattgcggcgagcgtcttacaacaaccaatttcccagttgcaacaacaatccttggcacatctaacaatacaaaccatcgcaacgcaacagcaacaacaattcctaccagcactgagccacctagccatggtgaaccctgccg

SEQ ID NO: 344479 - DNA, 336 bp, Zea mays
ccacgcgttcgaagcaacatagaatgtggaatccagtagcaacaatagagcaacaatggagaccaagatattttccctccttatgctccttgctctttctacatgtgttgctaacgcgacaattttccctcaatgctcacaagctcctatagcttccctttttcccccataccttccatcaattatagcttcagtatgtgaaaacccagctcttcaaccatataggcttcaacaagcaatcgcagcaagcaacatacctttatcgcccttgttgtgtcaacaatcgccagccctatctttggtgcagtcattggtacaaaccatcagggcacaaca

SEQ ID NO: 344480 - DNA, 359 bp, Zea mays
gaccaacaagcattatagaaggtgttttttagtagcaacaatagagcaacaatggagaccaagatatttttcctccttatgctccttgctctttctacatgtgttgctaacgcgacaattttccctcaatgctcacaagctcctatagcttccctttttcccccataccttccatcaattatagcttcagtatgtgaaaacccagctcttcaaccatataggcttcaacaagcaatcgcagcaagcaacatacctttatcgtccttgttgtgtcaacaatcgccagccctatctttggtgcagtcattggtacaaaccattatgggccaacagttgcagcaactcgtgctacctgtgat

SEQ ID NO: 344481 - DNA, 228 bp, Zea mays
agaccattagctttatctacttcattgcgcagaagaacccgatcgacacgatgcgggtgttgctcgttgccctcgctctcctggctctcgctgcgagcgccacctccacgcatacaagcggcggctgcgtctgccagccaccgacgccggttcatctaccgccgccggtgcatctgccacctccggttcacctgccacctccggtgcatttaccaccgccgttccacc

SEQ ID NO: 344482 - DNA, 187 bp, Zea mays
aaaaaaaaaaaaaaaaaaaaaaaaaaaaaaaaaaaaaaaaaaaaaaaaaaaaaaaaaaaaaaaaaaaaaaaaaaaaaaaaaaaaaaaaaaaaaaaaaaaaaaaaaaaaaaaaaaaaaaaaaaaaaaaaaaaaaaaaaaaaaaaagaaaaaaaaaaaaaaaatgaaaaaaaaaaaaaaaaaaaaaaaa

SEQ ID NO: 344483 - DNA, 392 bp, Zea mays
gaacggccgggccgacccacgcgtaacaattttgagcattcagaaacattttttgcgaagcacattagcaacaacctggcagcaattgctaccaagatattatccctccttgcgcttcttgcgctttttgcgagcgcaacaaatgcgttcattattccacaatgctcacttgctccaagttccattattacacagttcctcccaccagttacttcaatgggcttcgaacacccagctgtgcaagcctataggctacaacaagcaattgcggcgagcgtcttacaacaaccaattttccagttgcaacaacaatccttggcacatctaacaatacaaaccatcgcaacgcaacagcaacaacaattcctaccagcactgagccacctaaccat

SEQ ID NO: 344484 - DNA, 184 bp, Zea mays
atttcttatgagttataatttaattataaatctaaaagacggaaaaaccggggttttttttaaaaaaaaaacacacctccccacaacaaatcaataaaatataactccacaaaaacaaccaaataatacaaaacttcataaataaattcaaattctcctcccttttaaatatatccaactttac

SEQ ID NO: 344485 - DNA, 142 bp, Zea mays
gggggatttgaggttcacacaccctccaaagtgtcagactcctacttacctcgcaaccatactaccttgtactacctgaaatctttatttatatatatattcaaaatgttaaacaaaaaaataaaaaaacaaaggtcttcca

SEQ ID NO: 344486 - DNA, 365 bp, Zea mays
tagaaagtggaatccagtagcaacaatagagcaacaatggcgaccaagatattttccctccttatgctccttgctctttctgcatgtgttgctaacgcgacaattttccctcaatgctcacaagctcctatagcttcccttcttcccccataccttccatcaatgatagcttcagtatgtgaaaacccagctcttcaaccctataggctccaacaagcaatcgcagcaagcaacatacctttatcacccttgtttcaacaatcgccagccctatctttggtgcagtcattggtacaaaccatcagggcacagcagctgcagcaactcgtgctacctgtgatcaaccaagtagctctggcaaacct

SEQ ID NO: 344487 - DNA, 275 bp, Zea mays
  unsure (1)..(275): unsure at all n locations
accaagcgaagcgcactagcaacaaacctaacaacaatggctaccaagatattagccctccttgcgcttcttgcccttttagtgagcgcaacaaatgcgttcattattccacagtgctcacttgctcctagtgccattattccacagttcctcccaccagttacttcaatgggcttcgaacatccagccgtgcaagcctacaggctacaactagcgcttgcggcgagcgtcttacaacaacccatcattggtggtgcnccnctttngatttctta

SEQ ID NO: 344488 - DNA, 306 bp, Zea mays
atcaccaccactgggtcttcagactattagctttatctactccagagcgcagaagaacccgatcgacaccatgagggtgttgctcgttgccctcgctctcctggctctcgctgcgagcgccacctccacgcatacaagcggcggctgcggctgccagccaccgccgccggttcatctaccgccgccggtgcatctgccacctccggttcacctgccacctccggtgcatttcccaccgccggtccacctgccgtcgctcggtccacctgccaccgccggtccatggtgccgccgccgttttcattt

SEQ ID NO: 344489 - DNA, 61 bp, Zea mays
  unsure (1)..(61): unsure at all n locations
aaaaaaaaaaaattttaatttgtagaaaaaaaaaaaaaaaaaaaanggggggggggggttt

SEQ ID NO: 344490 - DNA, 376 bp, Zea mays
  unsure (1)..(376): unsure at all n locations
gccgaccacgcgtccgatagaagcacaatagtgtaccttatttgcagccaaaatatttngcttccggtggcttcttggtctttctgcaagtgctgctaccgcaaccattttcccacaatgctcacaagctcctatagcttcctttcttcccccatacctctcaccagcggtgtcttcagtatgtgaaaacccaattcttcaaccctacaggatccaacaggcaatcgcagcaggcatcttacctttatcacccttgttcctccaacaaccgtcagccctattacagcagttacctttggtgcatttgttggcacaaaacatcaaggcacaacaactacaacaacttgtgctaggaaaccttgctgcctactctcag

SEQ ID NO: 344491 - DNA, 365 bp, Zea mays
gagaccaacaagcaacatagaaagtggaatccagtagcaacaatagagcaacaatggagaccaagatattttccctccttatgctccttgctctttctacatgtgttgctaacgcgacaattttccctcaatgctcacaagctcctatagcttccctttttcccccataccttccatcaattatagcttcagtatgtgaaaacccagctcttcaaccatataggcttcaacaagcaatcgcagcaagcaacatacctttatcgcccttgttgtgtcaacaatcgccagccctatctttggtgcagtcattggtacaaaccatcagggcacaacagctgcagcaactcgtgctacctgtgatcaac

SEQ ID NO: 344492 - DNA, 364 bp, Zea mays
gtggaatccagtatcaacaatagattatctttggagaccaagatattttccctccttatgctccttgctctttctacatgtgttgctaacgcgacaattttccctcaatgctcacaagctcctatagcttccctttttcccccataccttccatcaattatagcttcagtatgtgaaaacccagctcttcaaccatataggcttcaacaagcaatcgcagcaagcaacatacctttatcgcccttgttgtgtcaacaatcgccagccctatctttggtgcagtcattggtacaaaccatcagggcacaacagctgcagcaactcgtgctacctgtgatcaaccaagtagctctggcaaaccttt

SEQ ID NO: 344493 - DNA, 364 bp, Zea mays
gcaacatagaaagcacaatattgtttcaataatggcagccaaaatattttgccgcaggatgctccttggtctttctgcaagtgctgctacggcgagcattttcccgcaatgctcacaagctcctatagcttcccttcttcccccatacctctcaccagcgatgtcttcagtatgtgaaaatccaattcttctaccctacaggatccaacaggcaatcgcagcaggcatcttacctttatcacccttgttcctccaacaatcatcagccctattacagcagttacctttggtgcatttattggcacaaaacatcagggcacaacaactacaacaactcgtgctagcaaaccttgctgcctactct

SEQ ID NO: 344494 - DNA, 362 bp, Zea mays
gttgcaaaccagcaacaacatcaactgcaacagtttctgccagcgcttagtcaactagccatggtgaaccctgccgcctacctacaacagcaacaactgctttcatctagcccgctcgctgtggccaatgcacctacatacctgcaacaagaattgttgcaacagattgtaccagctctaactcagctagctgtggcaaaccctgttgcctacttgcaacagctgcttccattcaaccaactaactatgtcgaactctgttgcgtacctacaacagcgacaacagttacttaatccattggcagtggctaacccattggtcgctgccttcctacagcagcaacaattgctgccatacaaccg

SEQ ID NO: 344495 - DNA, 364 bp, Zea mays
ttcagcattcagaaacacaccaagtgaatcgcactagcaacaacctaacaacaatggctaccaagatattagccctccttgcgcttcttgcccttttagtgagcgcaacaaatgcgttcattattccacagtgctcacttgctcctagtgccattattccacagttcctcccaccagttacttcaatgggcttcgaacatccagccgtgcaagcctacaggctacaactagcgcttgcggcgagcgtcttacaacaaccaattgcccaattgcaacaacaatccttggcacatctaaacctacaaaccatcgcaacgcaacagcaacaacagtttctgccatcactgagccacctagccgtggt

SEQ ID NO: 344496 - DNA, 194 bp, Zea mays
acgaccacacatccataccattttctttatttactccagagcgcaaaaaaacccgttcttacatcattagtttgttgctcgttacaatcgatctcctggctctatttgcaagcgccacctcaactcatacaaacggaagatattattgctatcaatttcttcattttaattaaccaacaattatataattttaa

SEQ ID NO: 344497 - DNA, 363 bp, Zea mays
  unsure (1)..(363): unsure at all n locations
gaaagcacaatagtgtaccaacaatggcagccaaaatattttgcctccttatgctccttggtctttctgcaagtgctgctacggcgaccattttcccacaatgctcacaagctcctatagcttnccttcttcccccgcacctctcaccagcggtgtnttcggtatgtgaaaacccaattcttcaaccctataggatccaacaggcaatcgcagctggcatcttacctttatcactnttgttnctncaacaatcatcagccctattacagcagttacctttggtgcatttattggcacaaaacatcagggcacaacaactacaacaacttgtgctagcaaaccttgctgcctactctcagcaac

SEQ ID NO: 344498 - DNA, 363 bp, Zea mays
aacaatcatcagccctattacattttttacctttggtgcatttattggcacatgacatcatggcacaacaactacaacaacttgtgctagcaaaccttgctgcctactctcagcaacagcagtttcttccattcaaccaactagctgcattgaactctgcttcttatttgcaacaacaacaactaccattcagccagctacctgctgcctacccccagcaatttcttccattcaaccaactggcagcattgaactctcctgcttatttacagcagcaacaactactaccattcagccagctagctggtgtgagccctgctaccttcttgatacaaccacagttgttgccgttctaccagcacg

SEQ ID NO: 344499 - DNA, 362 bp, Zea mays
ggaaaccttgctgcctactctcagtaacagcagtttcttccattcaaccaactggctgcattgaactctgctgcttatttgcaacaacaactaccattcagtcagctagctgctgcctacccccagcaatttcttccattcaaccaactggcagcattgaactctgctgcttatttacaacagcaacagctaccaccattcagccagctagctgatgtgagccctgttgccttcttgacacaacaacagttgttgccgttctacctgcacgctgcgcctaacgctggcaccctcttacaactgcaacaattgctgccattcaaccaacttgctttgacaaacccaacagcgttctaccaaca

SEQ ID NO: 344500 - DNA, 361 bp, Zea mays
gagaccaacaagcaacatagtatgtttaatccagtagcaacaatagagcggcagtggagaccaagatattttccctccttatgctccttgctctttctacatgtgttgctaacgcgacaattttccctcaatgctcacaagctcctatagcttccctttttcccccataccttccatcaattatagcttcagtatgtgaaaacccagctcttcaaccatataggcttcaacaagcaatcgcagcaagcaacatacctttatcgcccttgttgtgtcaacaatcgccagccctatctttggtgcagtcattggtacaaaccatcagggcacaacagctgcagcaactcgtgctacctgtgat

SEQ ID NO: 344501 - DNA, 265 bp, Zea mays
ctgtggtaacttttcttacacctctatctataaactcctaacgtctaaatgatcctatagtccactcttttactgttctttttttttctttaaatcataatcaaactagcttttaccctattgtttcacacgagattatttttcttcttgaacttatattatgacaccttttttatctttttaacactattttctttcctaatcaaacttcttaccttacaatttttttcaaccgtatctattaaataatattttttactttttt

SEQ ID NO: 344502 - DNA, 359 bp, Zea mays
cttgctcctagttccattattccacagttcctcccaccagttacttcaatggccttcgaacacccagctgtgcaagcctataggctacaacaagcgattgcggcgagcgtcttacaacaaccaattgcccaattgcaacaacaatccttggcacatctaacaatacaaaccatcgcaacgcaacagcaacaacagttcctaccagcactgagccacctagccatggtgaaccctgtcgcctacttgcaacagcagctgcttgcatccaacccacttgctctagcaaacgtagttgcaaaccagcaacaacaacaactgcaacagtttctgccagcgcttagtcaactagccatggtgaa

SEQ ID NO: 344503 - DNA, 201 bp, Zea mays
ctcctcctacatacaaattttttttatctcacacaaaaacacagtggcgttcaatcaaccaactctgcaaacctatcttctacaacaagcatattgtggcaaccctactactacaacctaaatgcctaaccgcaacaactatccttgctacatttaacataccaaacaataacaacagattaactatatcaaatcctacct

SEQ ID NO: 344504 - DNA, 382 bp, Zea mays
gcaacatagaaagcacaatagtgtaccaacaatggcagccaaaatattttgcctccttatgctccttggtctttctgcaagtgctgctacggcgaccattttcccgaaatgctcgcaagctcctatagcttcccttcttcccccgtacctctcaccagcggtgtcttcggtatgtgaaaacccaattcttcaaccctacaggatccaacaggcaatcacagctggcatcttacctttatcacccttgttcctccaacaatcatcagccctattacatcagttacctttggtgcatttattggcacaaaacatcagggcacaacaactacaacaacttgtgctagcaaaccttgctgcctactctcagcaacagcagtttctt

SEQ ID NO: 344505 - DNA, 363 bp, Zea mays
attcagaaacacaccaagtcgaagcacattagcaacaacctaacaacaatggctaccacgatattatccctccttgcgcttcttgcgctttttgcgagcgcaacaaatgcgttcattattgcacaatgctcacttgctccaagatccattattacacagatccttccaccagttacttcaatgggcttcgaacacccagctgtgcaagcctataggctacaacaagcaattgcggcgagcgtcttacaacaaccaattttccagttgcaacaacaatccttggcacatttaacaatacaaaccattgtaacgcaacagcaacaacaattcctaccagcactgattcacctagccatggtgaac

SEQ ID NO: 344506 - DNA, 369 bp, Zea mays
catagaaagcacaatagtgtaccaacaatggcagccaaaatattttgcttccttatgctccttggtctttctgcaagtgttgctaccgcaaccattttcccacaatgctcacaagctcctatagcttcccttcttcccccatacctctcaccagcggtgtcttcaatgtgtgaaaacccaattgttcaaccctacaggatccaacaggcaatcgcaacaggcatcttaccattatcacccttgttcctccaacaaccgtcagccctattacagcagttacctttggtccatttggtggcacaaaacatcagggcacaacaactacaacaacttgtgctagcaaaccttgctgcatactctcagcaacat

SEQ ID NO: 344507 - DNA, 374 bp, Zea mays
attttgagcattcagaaacacacctagcgaagcgcactagcaacgacctaacaacaatggctaccaagatattagccctccttgcgcttcttgccctttttgtgagcgcaacaaatgcgttcattattccacaatgctcacttgctcctagtgccattattccacagttcctcccaccagttacttcaatgggcttcgaacacctagctgtgcaagccaacatgcaacaacaagcgcttgcggcgagcgtcttacaacaaccaattgcccaattgcaacaacaatccttgccacatctaacaatacaagccatcacaacgcaacagcaacaacagttcctaccagcactgagccacctagccatggtgaaccct

SEQ ID NO: 344508 - DNA, 379 bp, Zea mays
gcacaatagtgtaccaacaatggcatccaaaatattttgcctccttatgctccttggtctttctgcaagtgctgctacggcgaccattttcccacaatgctcacaagctcctatagcttcccttcttcccccgtacctctcaccagcggtgtcttcggtatgtgaaaacccaattcttcaaccctataggatccaacaggcaatcgcagctggcatcttacctttatcacccttgttcctccaacaatcatcagccctattacagcagttacctttggtgcatttattggcacaaaacatcagggcacaacaactacaacaacttgtgctagcaaaccttgctgcctactctcagcaacaacagtttctttcattcaac

SEQ ID NO: 344509 - DNA, 387 bp, Zea mays
  unsure (1)..(387): unsure at all n locations
cgaccacgcgtncgaatattattatcttgtagtataggcaccaaatcaaatctgcaacatcaattatctaactccaaaaaccatgaagctggtgcttgtggttcttgctttcattgctttagtatcaagtgttttttgtacacagacaggcggctgcagctgtggtcaacaacaaagccatgagcagcaacattattcacaacaacatcattcacaaaaacaacaacattaaccaccaccacaacattaccagcagcagcaacaccaacaacaacaagttcacatgcaaccacaaaaacattagcaacaacaagaagtttatgtttaacaacaacaacaacaaccgtagtacccaccacaacaacaacaacagggccaacaacaaca

SEQ ID NO: 344510 - DNA, 318 bp, Zea mays
caactagcaacataaaaagcacaatattgtaccaacaatggcagccaaaatattttgcctccttatgctccttggtctttctgcaagtgctgctacggcgaccattttcccgaaatgctcgcaagctcctatagcttcccttcttcccccgtacctctcaccagcggtgtcttcggtatgtgaaaacccaattcttcaaccctacaggatccaacaggcaatcacagctggcatcttacctttatcacccttgttcctccaacaatcatcagccctattacatcagttaccttttgtgcatttattggcacaaaacat

SEQ ID NO: 344511 - DNA, 360 bp, Zea mays
ttcagcattcagaaacacaccaagcgaagtcgcactagcaacaacctaacaacaatggcgtaccaagatattagccctccttgcgcttcttgcccttttagtgagcgcaacaaatgcgttcattattccacagtgctcacttgctcctagtgccattattccacagttcctcccaccagttacttaaatgggcttcgaacatccagccgtgcaagcctacaggctacaactagcgcttgcggcgagcgttttacaacaaccaattgcccaattgcaacaacaatccttggcacattttaaacctacaaaccatctgaacgtaacagcatcaacagtttttgccatcactgagccacctag

SEQ ID NO: 344512 - DNA, 376 bp, Zea mays
caacaattgcttccggtactcaacattggcagccaaaatattttgcctgcttatgctccttggactttctgcaagtgctgctacggctaccattttcccgaaatgctcgcaagctcctatagcttcccttcttcccccgtacctctcaccagcggtgtcttcggtatgtgaaaacccaattcttcaaccctacaggatccaacaggcaatcacagctggcatcttacctttatcacccttgttcctccaacaatcatcagccctattacatcagttacctttggtgcatttattggcacaaaacatcatggcacaacaactacaacaacttgtgctagcaaaccttgctgcctactctcagcaacagcagtttctt

SEQ ID NO: 344513 - DNA, 84 bp, Zea mays
actacggcctgctgcgtgctacgtcatatatagtgtatagtgaaaccaaaatacaggccactggccgacaacgtacagcctggg

SEQ ID NO: 344514 - DNA, 202 bp, Zea mays
atgcgaccttgtagttctggtattgggtgaccgaaattcatttaactgaccgggggtttacagctgccagactggaaaaacccaggcaccgcctaacttaaatatgtcgcatcacatctatctgtcgccagatgacgtaatagcgacaaggcccgaaccgactgaactacccaacataagcccaggctgaatggccaatggc

SEQ ID NO: 344515 - DNA, 374 bp, Zea mays
caactagcaacatagaaagcacaattgtgtaccaacaatggcagccaaaatattttgcttccttatgctccttggtctttctgcaagtgttgctaccgcaaccattttcccacaatgctcacaagctcctatagcttcccttcttcccccatacctctcaccagcggtgtcttcaatgtgtgaaaacccaattgttcaaccctacaggatccaacaggcaatcgcaacaggcatcttaccattatcacccttgttcctccaacaaccgtcagccctattacagcagttacctttggtccatttggtggcacaaaacatcagggcacaacaactacaacaacttgtgctagcaaaccttgctgcatactctcagc

SEQ ID NO: 344516 - DNA, 380 bp, Zea mays
attcagccagctagttgctgcctacccccagcaatttcttccattcaaccaactagcagcattgaactctgctgcttatttacagcagcaacaactactaccattcagccagctagctgatgtgagccctgctgccttcttgacacaacaacagttgttgccgttctacctgcacgctatgcctaacgctggcaccctcttacaactgcaacaattgctgccattcaaccaacttgctttgacaaactcaacagtgttctaccaacaacccatcattggtggtgccctcttttagattgcttatgagttatagttcaataatgaagttttttggatgatgtttgtggcgtcccagaaataagaaagtacatttctaaaat

SEQ ID NO: 344517 - DNA, 380 bp, Zea mays
tccgttcaaaaacacaccaagcgaagcgcactatcaacaacctaacaacaatggctaccaagatattatccctccttgcgcttcttgcgctttttgcgagcgcaacaaatgcgtccattattccacaatgctcacttgctcctagttccattattccacagttcctcccaccagttacttcaatggccttcgaacacccagctgtgcaagcctataggctacaacaagcgattgcggcgagcgttttacaacaaccaattgcccaattgcaacaacaatccttggcacatttaacaatacaaaccttcgcaacgcaacagcaacaacagtttctaccagcactgagccacctagccatggggaaccttgtcttttattta

SEQ ID NO: 344518 - DNA, 377 bp, Zea mays
attgagaccaactagcaacatagaaagcacaatagtgtaccaacaatggcagccaaaatattttgcctccttatgctccttggtctttctgcaagtgctgctacggcgaccattttcccgaaatgctcgcaagctcctatagcttcccttcttcccccgtacctctcaccagcggtgtcttcggtatgtgaaaacccaattcttcaaccctacaggatccaacaggcaatcacagctggcatcttacctttatcacccttgttcctccaacaatcatcagccctattacatcagttacctttggtgcatttattggcacaaaacatcagggcacaacaactacaacaacttgtgctagcaaaccttgctgcctactc

SEQ ID NO: 344519 - DNA, 293 bp, Zea mays
cacctactaccattcagccagctagctgttttgagccctgctgccttcttgacacagcaacatttgttgccgttctacctgcacactgcgcctaacgttggcaccctcttacaactgcaacaattgctgccattcgaccaacttgctttgacaaacccagcagtgttctaccaacaacccatcattggtggtgccctcttttagattgcttatgagttatagttcaataataaagttttttttgctgatatttgtggcttcccagaaataagaaagtacatttctagattctt

SEQ ID NO: 344520 - DNA, 351 bp, Zea mays
caactagcaacatagaaagcacaatagtgtaccaacaatggcagccaaaatattttgcctccttatgctccttggtctttctgcaagtgctgctacggcgaccattttcccacaatgctcacaagctcctatagcttcccttcttcccccgtacctctcaccagcggtgtcttcggtatgtgaaaacccaattcttcaaccctataggatccaacaggcaatcgcagctggcatcttacctttatcacccttgttcctccaacaatcatcagccctattacagcagttacctttggtgcatttattggcacaaaacatcagggcacaacaactacaacaacttgtgctagc

SEQ ID NO: 344521 - DNA, 279 bp, Zea mays
gcacaatagtgtaccaacaatggcagccaaaatattttgcctccttatgctccttggtctttctgcaagtgctgctacggcgaccattttcccgcaatgctcgcaagctcctatagcttcccttcttcccccggacctctcaccagcggtgtctccggtatgtgaaaacccaattcttcaaccctacaggatccaacacgcgattgcagttggcattttacctggattacccttgttcctccaacaatcatcagtcctattacaacagttacctttggt

SEQ ID NO: 344522 - DNA, 248 bp, Zea mays
aaccacagtacgcgacgcaccatgcgaacagccttacaacaatgcttacaacgatggttgccatgattgagctcctcgtcgtgctagtggccgtttcagagggggcaataattgcacagagttttctagagcgtagagttgtttttagagagtttttccaacagtttcttccacgggtttttaaaagggctttggaacaagcatccgggcaacattaagggttacagtgggctttttcaacgcctttt

SEQ ID NO: 344523 - DNA, 373 bp, Zea mays
gcggcggctgtggctgccagacaccaccgtttcatctaccgcctccgttctatatgccgcctccgttctatctgccgccgcagcagcagccgcagccatggcaataccccactcaaccaccgcagctaagcccgtgccagcagttcggatcctgcggcgtcggcagcgtcggcagcccgttcctgggccagtgcgtcgagttcctgaggcaccagtgcagcccggcggcgacgccctacggctcgccacagtgccaggcgctgcagcagcagtgctgccaccagatcaggcaggtggagccgctgcaccggtaccaggcgacatacggtgtggtcctgcagtccttcctgcagcagcagccgcagggcgagct

SEQ ID NO: 344524 - DNA, 377 bp, Zea mays
accaagcgaagcgcactagcaacaacctaacaacaatggctaccaagatattagccctccttgcgcttcttgcccttttagtgagcgcaacaaatgcgttcattattccacagtgctcacttgctcctagtgccattattccacagttcctcccaccagttacttcaatgggcttcgaacattcagccgtgcaagcctacaggctacaactagcgcttgcggcgagcgtcttacaacaaccaattgcccaattgcaacaacaatccttggcacatctaaacctacaaaccatcgcaacgcaacagcaacaacagtttctgccatcactgagccacctagccgtggtgaaccctgtcgcctacttgcaacagcagcta

SEQ ID NO: 344525 - DNA, 381 bp, Zea mays
cggacgcgtgggttcagaaacacatcaagcgaagcgcactagcaacgacctaacaacagtggctaccaagatattagccctccttgcgcttcttgccctttttgtgagcgcaacaaatgcgttcattattccacaatgctcacttgctcctagtgccattattccacagttcctcccaccagttacttcaatgggcttcgaacacctagctgtgcaagccaacatgcaacaacaagcgcttgcggcgagcgtcttacaacaaccaattgcccaattgcaacaacaatccttgccacatctaacaatacaagccatcacaacgcaacagcaacaacagttcctaccagcactgagccacctagccatggtgaaccctgccgc

SEQ ID NO: 344526 - DNA, 366 bp, Zea mays
aaagaaaaaagaaaaaagaggaaggagaaaaataaaaaatataataaaataaaaaaaaaaatagataaagaaaaaagaataaagaaaaaaatagaataaagaaaaaaaagaaaaagatagagaaaaaggaaaagataaaaaaaaaaaaaaagaagaaaagaaagaaaaaaataaaaggaagaaaaaaataaaaaaaaaaaagaaaattataaaaagaaaaaaaatggaataaaaaaaaataaaagaaaaaaaaaataaagataaaaaaataaaaaaaaaatggaaaaaaaaataatagaaaaaaaaaaataaaataaaagtaaaaaaaaaaaaaaataataagaaaatatataaaaagatattaag

SEQ ID NO: 344527 - DNA, 377 bp, Zea mays
cagaaacacaccaagcgaagcgcactagcaacaacctaacaacaatggctaccaagatattatccctccttgcgcttcttgcgctttttgcgagcgcaacaaatgcgtccattattccacaatgctcacttgctcctagttccattattccacagttcctcccaccagttacttcaatggccttcgaacacccagctgtgcaagcctataggctacaacaagcgattgcggcgagcgtcttacaacaaccaattgcccaattgcaacaacaatccttggcacatctaacaatacaaaccatcgcaacgcaacagcaacaacagttcctaccagcactgagccacctagccatggtgaaccctgtcgcctacttgcaa

SEQ ID NO: 344528 - DNA, 345 bp, Zea mays
gcaacatagaaagcacaatagtgtaccaacaatggcagccaaaatattttgcctccttatgctccttggtctttctgcaagtgctgctacggcgaccattttcccgaaatgctcgcaagctcctatagcttcccttcttcccccgtacctctcaccagcggtgtcttcggtatgtgaaaacccaattcttcaaccctacaggatccaacaggcaatcacagctggcatcttacctttatcacccttggtcctccaacaatcatcagccctattacatcagttacctttggtgcatttattggcacaaaacatcagggcacaacaactacaacaacttgtgctagc

SEQ ID NO: 344529 - DNA, 381 bp, Zea mays
cctagttccattattccacagttttttccaccagttacttcaatggccttcgaacacccagctgtgcaagcctataggctacaacaagcgattgcggcgagcgtcttacaacaaccaattgcccaattgcaacaacaatccttggcacatctaacaatacaaaccatcgcaacgcaacagcaacaacagttcctaccagcactgagccacctagccatggtgaaccctgtcgcctacttgcaacagcagctgcttgcatccaacccacttgctctagcaaacgtagttgcaaaccagcaacaacaacaactgcaacagtttctgccagcgcttagtcaactagccatggtgaaccctgccgcctacctacaacagcaacaa

SEQ ID NO: 344530 - DNA, 377 bp, Zea mays
attttgagcattcagaaacacaccaagcgaagctacctagcaacgacttaacaacaatggctaccaagatattagccctccttgcgcttcttgccctttttgtgagcgcaacaaatgcgttcattattccacaatgctcacttgctcctagtgccattataccacagttcctccgaccagttacttcaatgggcttcgaacacctagctgtgcaagcctacaggctacaacaagcgcttgcggcgagcgtcttacaacaaccaattaaccaattgcaacaacaatccttggcacatctaaccatacaaaccatcgcaacacaacagcaacaacagttcctaccagcactgagccaactagatgtggtgaaccctgtc

SEQ ID NO: 344531 - DNA, 374 bp, Zea mays
attttcagcattcagaaacacaccaagcgaagcgcactagcaacaacctaacaacaatggctaccaagatattagccctccttgcgcttcttgcccttttagtgagcgcaacaaatgcgttcattattccacagtgctcacttgctcctagtgccattattccacagttcctcccaccagttacttcaatgggcttcgaacatccagccgtgcaagcctacaggctacaactagcgcttgcggcgagcgtcttacaacaaccaattgcccaattgcaacaacaatccttggcacatctaaacctacaaaccatcgcaacgcaacagcaacaacagtttctgccatcactgagccacctagccgtggtgaaccct

SEQ ID NO: 344532 - DNA, 381 bp, Zea mays
caactagcaacatagaaagcacaatattgtaccaataatggcagccaaaatattgtgcctcattatgctccttggtctttctgcaagtgctgctacggcgagcattttcccgcaatgctcacaagctcctatagcttcccttcttcccccatacctctcaccagcgatgtcttcagtatgtgaaaatccaattcttctaccctacaggatccaacaggcaatcgcagcaggcatcttacctttatcacccttgttcctccaacaatcatcagccctattacagcagttacctttggtgcatttattggcacaaaacatcagggcacaacaactacaacaactcgtgctagcaaaccttgctgcctactctcagcaacagca

SEQ ID NO: 344533 - DNA, 374 bp, Zea mays
gcaattagctcatcgactccagattggagaactcgacaccatgaaggtgctgatcgttgcccttgctctcctggcgctcgctgcgagcgccgcctccagtacaagcggcggctgtggctgccagacaccaccgtttcatctaccgcctccgttctatatgccgcctccgttctatctgccgccgcagcagcagccgcagccatggcaataccccactcaaccaccgcagctaagcccgtgccagcagttcggatcctgcggcgtcggcagcgtcggcagcccgttcctgggccagtgcgtcgagttcctgaggcaccagtgcagcccggcggcgacgccctacggctcgccacagtgccaggcgctgcagcagc

SEQ ID NO: 344534 - DNA, 377 bp, Zea mays
gtcaatcgcagctggcatcttacctttatcaccctcgatcgttcaacaataatcagccctattacaacagttacctttggtgcatttattggcacaaaacatgaggggacaacaactacaacaacttgtgctagcaaaccttgctggctactctcagcaacagcagtttctttcattcaaccaactaggttcattgaactctgcttcttatttgcaacaacaacaactaccattcagccagctacctgctgcctacccccagcaatttcttccattcaaccaactagcagcattgaactcttctgcttatttacagcagcaacaactactaccattcagccagctagctggtgtgagccctgctaccttcttgacac

SEQ ID NO: 344535 - DNA, 378 bp, Zea mays
  unsure (1)..(378): unsure at all n locations
cggggtctttaaaccattaactttatttacttcaaaacgcaaaaaaacccgatcggcaacattagggtggtggttggtggccttggttttcttggttttggttgagagcgccacttacacacatacaagcggcggttgcggttgccagccaccgccgccggttcatataccgccgccggtgcatctgccacctccggttcacctgccacctccggtgcatctcccaccgccggtccacctgccgncgccggtccacctgccaccgccggtccatgtgccgccgccggttcatctgccgccgccaccatgccactaccctactcaaccgccccggcctcagcctcatccccagccacacccatgcccgtgccaacagcc

SEQ ID NO: 344536 - DNA, 381 bp, Zea mays
tctgcttttaatttgcaacaacaacatcttctattcagccagctacctgctggctacccccagcaatttcttccattcaaccaactggcagcattgaactctcctgcttatttacagcagcaacaactactaccattcagccagctagctggtgtgagccctgctaccttcttgatacaaccacagttgttgccgttctaccagcacgctgcgcctaacgctggcaccctcttacaactgcaacaattgctgccattcaaccaacttgctttgacaaacccagcagcgttctaccaacaacccatcattggtggtgccctcttttagatttcttatgagttatagttcaaaaataaagttttttgtctgatgtttgtggct

SEQ ID NO: 344537 - DNA, 382 bp, Zea mays
gagaccaactagcaacatagaaagcacaattgtgtaccaacaatggcagctaaaatattttgcctccttatgctccttggtctttctgcaagtgctgctacggcgaccattttcccacaatgctcacaagctcctatagcttcccttcttcccccgtacctctcaccaacggtgtcttcggtatgtgaaaacccaattcttcaaccctacaggatccaacaggcaatcgcagctggcatcttacctttatcacccttgttcctccaacaatcatcagccctattacagcagttacctttggtgcatttattggcacaaaacatcagggcacaacaactacaacaacttgtgctagcaaaccttgctgcctactctcagcaac

SEQ ID NO: 344538 - DNA, 384 bp, Zea mays
ccaactagcaacatagaaagcacattagtgttccaacaatggcagccaaaatattttgcctccttatgctccttggtctttctgcaagtgctgctacggcgaccattttcccgcaatgctcgcaagctcctatagcttcccttcttcccccgtacctctcaccagcggtgtcttcggtatgtgaaaacccaattcttcaaccctacaggatccaacaggcaatcgcagctggcatcttacctttatcacccttgttcctccaacaatcatcagccctattacaacagttacctttggtgcatttattggcacaaaacatcagggcacaacaactacaacaacttgtgctagcaaaccttgcttgctacttttagcaacagcagt

SEQ ID NO: 344539 - DNA, 377 bp, Zea mays
aatattttgagcattcagaaacacttcaagcgaagcgcactagcaacgacctaacaacaatggctaccaagatattagccctccttgcgcttcttgccctttttgtgagcgcaacaaatgcgttcattattccacaatgctcacttgctcctagtgccattattccacagttcctcccaccagttacttcaatgggcttcgaacacctagctgtgcaagccaacatgcaacaacaagcgcttgcggcgagcgtcttacaacaaccaattgcccaattgcaacaacaatccttgccacatctaacaatacaagccatcacaacgcaacagcaacaacagttcctaccagcactgagccacctagccatggtgaaccct

SEQ ID NO: 344540 - DNA, 376 bp, Zea mays
gtgaaaacccaattcttcaaccctacaggatccaacaggcaatcgcagctggcatcttacctttatcacccttgttcctccaacaatcatcagccctattacagcagttacctttggtgcatttattggcacaaaacatcagggcacaacaactacaacaacttgtgctagcaaaccttgctgcctactctcagcaacagcagtttcttccattcaaccaactagctgcattgaactctgcttcttatttgcaacaacaacaactaccattcagccagctatctgctgcctacccccagcaatttcttccattcaaccaactgacagcattgaactctcctgcttatttacagcagcaacaactactaccattcag

SEQ ID NO: 344541 - DNA, 380 bp, Zea mays
aaggtggaatccagtaccaccaatagagcaccaatggcgaccaagatattttccctccttatgctccttgctctttctgcatgtgttgctaacgcgacaattttccctcaatgctcacaagctcctatagcttcccttcttcccccataccttccatcaatgatagcttcagtatgtgaaaacccagctcttcaaccctataggctccaacaagcaatcgcagcaagcaacatacctttatcacccttgtttcaacaatcgccagccctatctttggtgcagtcattggtacaaaccatcagggcacagcaagccgtgcttccttcttgacacagcaacagttgctgcctttctaccagcagtttgcggctaaccccgca

SEQ ID NO: 344542 - DNA, 360 bp, Zea mays
cccacgcgtccggaccaacaagcaacatagaaagtggaatccagtagcaacaatagagcaacaatggcgaccaagatattttccctccttatgctccttgctctttctgcatgtgttgctaacgcgacaattttccctcaatgctcacaagctcctatagcttcccttcttcccccataccttccatcaatgatagcttcagtatgtgaaaacccagctcttcaaccctataggctccaacaagcaatcgcagcaagcaacatacctttatcacccttgtttcaacaatcgccagccctatctttggtgcagtcattggtacaaaccatcagggcacagcagctgcagcaactcgtgcta

SEQ ID NO: 344543 - DNA, 374 bp, Zea mays
ttcagaaacacaccaagcttagcgttctagcaacaacctaacaacaatggctgggaagatattagccctccttgcgcttcttgcccttttagggagcgcaacaaatgcgttcattattccacagtggttacttgcttctagtgcccatattccacagttccttccaccagttacttcaatgggcttcgaacattcagccgtgcaagcctacaggctacaactagcgcttgcggcgagcggcttacaacaaccaattgcccaattgcaacaacaatccttggcacatctaaacctacaaaccatcgcaacgcaacagcaacaacagtttttgccatcactgtaccacctagccgtggtgaaccctgtcgcctact

SEQ ID NO: 344544 - DNA, 175 bp, Zea mays
gcagcagcagcccttctttttggagcagcatcacaggggagatcgatcaatcaatcagcgagcaaagcccgcaccgcaccaggtggtagcttgcaattggcaaccccgcggaaccttcttcttcgaggcattccatatagttgcggcgggcccttattgccagcagagttcacca

SEQ ID NO: 344545 - DNA, 394 bp, Zea mays
caacaattgctgccattcaaccaatttgctttgacaaacctagcagtgttctaccaacaacccatcattggtggtgccctcttttagatttcttatgagttatagttcaatattaaagtttttggccggatgttgggggtttccaggaaataggaagagccattttttaaaaaaaaataaatttatttggtcttttttaaattttaattattttcgcctttttatttttatattgtggttgttttttttattggagatctttttatatttttattttatttttttttattttttattattaattgatattctttttatctattttttttaatattacacaaaaatatgggtgtgttgctcttcttcttttagtttttttataaaaatatttttt

SEQ ID NO: 344546 - DNA, 207 bp, Zea mays
gccgttatactcctataactgtgttaagcaataaagtaccatacattatgatgtttgtactatgatatttgaataagaatactaattgtaattataatgctactaaaaaaaaaaaaaaaaaaaaaaaaaaaaaaaaaaaaaaaaaaaaaaaaaaaaaaaaaaaaaaaaaaaaaaaaaaaaaaaatgtgaaaaaaaaaaaatttaaaa

SEQ ID NO: 344547 - DNA, 383 bp, Zea mays
cggcaacatagaaagggggaatccagtttcaacaatagagcaacaatggcgaccaagatattttccctccttatgctccttgctctttctgcatgtgttgctaacgcgacaattttccctcaatgctcacaagctcctatagcttcccttcttcccccataccttccatcaatgatagcttcagtatgtgaaaacccagctcttcaaccctataggctccaacaagcaatcgcagcaagcaacatacctttatcacccttgtttcaacaatcgccagccctatctttggtgcagtcattggtacaaaccatcagggcacagcagctgcagcaactcgtgctacctgtgatcaaccaagtagctctggcaaacctttctcccta

SEQ ID NO: 344548 - DNA, 153 bp, Zea mays
gcaaagcggcagtgcgtagagaggatcgtcgaacagaacagcatgaagatggtcatcgttctcgtcgtgtgcctggctctgtcagctgccagcgcctctgcaatgcagatgccctgcccctgcgcggggctgcagggcttgtacggcgctggc

SEQ ID NO: 344549 - DNA, 380 bp, Zea mays
cccacgcgtccgcccacgcttccgtctactcgtccgccaactagcaacatagaaggcacaatagtgtaccaacaatggcagccaaaatattttgcctccttatgctccttggtctttctgcaagtgctgctacggcgaccattttcccgaaatgctcgcaagctcctatagcttcccttcttcccccgtacctctcaccagcggtgtcttcggtatgtgaaaacccaattcttcaaccctacaggatccaacaggcaatcacagctggcatcttacctttatcacccttggtccttcaacaatcatcagccctattacatcagttacctttggtgcatttattggcacaaaacatcagggcacaacaactacaacaactt

SEQ ID NO: 344550 - DNA, 380 bp, Zea mays
caactagcaacatagaaagcacaatagtgtaccaacaatggcagccaaaatatgttgcctccttatgctccttggtctttctgcaagtgctgctacggcgaccattttcccacaatgctcacaagctcctatagcttcccttcttcccccgtacctctcaccagcggtgtcttcggtatgtgaaaacccaattcttcaaccctataggatccaacaggcaatcgcagctggcatcttacctttatcacccttgttcctccaacaatcatcagccctattacagcagttacctttggtgcatttattggcacaaaacatcagggcacaacaactacaacaacttgtgctagcaaaccttgctgcctactctcagcaacaac

SEQ ID NO: 344551 - DNA, 322 bp, Zea mays
caatagtgtaccaacaatggcagccaaaatattttgcttccttatgctccttggtctttctgcaagtgttgctaccgcaaccattttcccacaatgctcacaagctcctatagcttcccttcttcccccatacctctcaccagcggtgtcttcaatgtgtgaaaacccaattgttcaaccctacaggatccaacaggcaatcgcaacaggcattttaccattatcacccttgtttcttcaacaaccgtcagccctattacagcagttacctttggtccatttggtggcacaaaacattagggcacaacaactacaacaactt

SEQ ID NO: 344552 - DNA, 89 bp, Zea mays
  unsure (1)..(89): unsure at all n locations
naaaaaaaaaaaaaaaaaaaaaaaaaaaaaaaattaaaaaaaaaaaaaaaaaaaaaagaaaaaaaaaaaaaaaaaaaaaaaaaaaaaaa

SEQ ID NO: 344553 - DNA, 276 bp, Zea mays
gcggcagtgcgtagagaggatcgtcgaacagaacagcatgaagatggtcatcgtgctcgtcgtgtgcctggctctgtcagctgccagcgcctctgcaatgcagatgccctgcccctgcgcggggctgcagggcttgtacggcgctggcgccggcctgacgacgatgatgggcgccggcgggctgtacccctacgcggagtacctgaggcagccgcagtgcagcccgctggcggtggcgccctactacgccgggtgtgggcagacgagcgccatgta

SEQ ID NO: 344554 - DNA, 388 bp, Zea mays
  unsure (1)..(388): unsure at all n locations
agcattcagaaacacaccaagcgaagcgcactagcaacaacctaacaacaatggctaccaagatattagccctccttgcgcttcttgcccttttagtgagcgcaacaaatgcgttcattattccacagtgctcacttgctcctagtgccattattccacagttcctcccaccagntacttaatgggcttcgaacatccagccgtgcaagcctacaggctacaactagcgcttgcggcgagcgtcttacaacaaccaattgcccaattgcaacaacaattcttggcacatctaaacctacaaaccatcgcaacgcaacagcaacaacagtttctgccatcactgagccacctagccgtggtgaaccctgtcgcctacttgcaacagcag

SEQ ID NO: 344555 - DNA, 373 bp, Zea mays
cagaaacacaccaagcgaagcgctctatcaacaacctaacaacaatggctaccaagatattatccctccttgcgcttcttgcgctttttgcgagcgcaacaaatgcgtccattattccacaatgctcacttgctcctagttccattattccacagttcctcccaccagttacttcaatggccttcgaacacccagctgtgcaagcctataggctacaacaagcgattgcggcgagcgtcttacaacaaccaattgcccaattgcaacaacaatccttggcacatctaacaatacaaaccatcgcaacgcaacagcaacaacagttcctaccagcactgagccacctagccatggtgaaccctgtcgcctactt

SEQ ID NO: 344556 - DNA, 149 bp, Zea mays
  unsure (1)..(149): unsure at all n locations
cggcgccacgcgtcgtagattagaaccaccagcgaagcgcctagcacaacctacaacaatgngtaccaagatattagccctccttgcgcttcttgcccttttagtgagcgcaacaaatgcgtttcattatttccacaagtgggctcact

SEQ ID NO: 344557 - DNA, 378 bp, Zea mays
  unsure (1)..(378): unsure at all n locations
tttcaaaaccacaccaagcgaagcgcactatcaacaacctaacaacaatggctaccaagatattagccctccttgcgcttcttgcccttttagtgagcgcaacanatgcgttcattattccacagtgctcacttgctcctagtgccattattccacagttcctcccaccagttacttcaatgggcttcgaacatccagccgtgcaagcctacaggctacaactagcgcttgcggcgagcgtcttacaacaaccaattgcccaattgcaacaacaatccttggcacatctaaacctacataccatcgcaacgcaacagcaacaacagtttctgccatcactgagccacctagccgtggtgaaccctgtcgcctacttgc

SEQ ID NO: 344558 - DNA, 245 bp, Zea mays
ggcgaccacgcgtccgaaatgcgttcattattccacaatgctcacttgctcctagtgccattataccacagttcctgcgaccagttactttaatgggcttcgaacacctagctgtgcaagcctacaggctacaacaagcgcttgcggcgagcgtcttacaacaaccaatttaccaattgcaacaacaattcttggcacatttaaccatacaaaccatcgcaacacaacagcaacaacagtttcta

SEQ ID NO: 344559 - DNA, 367 bp, Zea mays
caactagcaacatagaaagcacaatagtgtaccaacaatggcagccaaaatattttgcttccttatgctccttggtctttctgcaagtgttgctaccgcaaccattttcccacaatgctcacaagctcctatagcttccctttttcccccatacctctcaccagcggtgtcttcaatgtgtgaaaacccaattgttcaaccctacaggatccaacaggcaatcgcaacaggcatcttaccattatcacccttgttcctccaacaaccgtcagccctattacagcagttacctttggtccatttggtggcacaaaacattagggcacaacaactacaacaacttgtgctagcaaaccttgctgcatac

SEQ ID NO: 344560 - DNA, 362 bp, Zea mays
attgagaccaactagcaacatagaaagcacaatagtgtaccaacaatggcagccaaaatattttgcttccttatgctccttggtctttctgcaagtgttgctaccgcaaccattttcccacaatgctcacaagctcctatagcttcccttcttcccccatacctctcaccagcggtgtcttcaatgtgtgaaaacccaattgttcaaccctacaggatccaacaggcaatcgcaacaggcatcttaccattatcacccttgttcctccaacaaccgtcagccctattacagcagttacctttggtccatttggtggcacaaaacatcagggcacaacaactacaacaacttgtgctagcaaa

SEQ ID NO: 344561 - DNA, 175 bp, Zea mays
ccacaggctgcgcgatggtgcttgttggtcttcggctacggctccctcatctggaaccccggcttcgacttcgacgacaaaatcctcggcttcatcaagggctacaagcgcacctttaatctcgcttgcattgaccacagaggcacaccggagcattcggcgagggcccgcgcgc

SEQ ID NO: 344562 - DNA, 136 bp, Zea mays
ctgggtcttcagaccattagctttatctactctcagagcgcaaaagaacccgatcgacaccatgagggtgttgctcgttgccctcgctctcctggctctcgctgtgagcgccaccttcacgcatacaagcggtggt

SEQ ID NO: 344563 - DNA, 377 bp, Zea mays
aatgggcttcgaacacctagctgtgcaagccaacatgcaacaacaagcgcttgcggcgagcgtcttacaacaaccaattgcccaattgcaacaacaatccttgccacatctaacaatacaagccatcacaacgcaacagcaacaacagttcctaccagcactgagccacctagccatggtgaaccctgccgcctacttgcaagagcagctgcttgcatccaacccacttgctctggcgaacgtagttgcaaaccagcaacaacaacagctacaacagtttctgccaacgctcagtcaactagccatggtgaaccctgccgcctacgtacaacaacaacaactgctttcatctagcccgctcgctgtgggcaatgcac

SEQ ID NO: 344564 - DNA, 379 bp, Zea mays
gagaccaactagcaacataaaaagcacaatagtgtaccaacaatggcagccaaaatattgcgcctccttatgctccttggtctttctgcaagtgctgctacggcgaccattttcccacaatgctcacaagctcctatagcttcccttcttcccccgtacctctcaccagcggtgtcttcggtatgtgaaaacccaattcttcaaccctataggatccaacaggcaatcgcagctggcatcttacctttatcacccttgttcctccaacaatcatcagccctattacagcagttacctttggtgcatttattggcacaaaacatcagggcacaacaactacaacaacttgtgctagcaaaccttgctgcctactctcagc

SEQ ID NO: 344565 - DNA, 374 bp, Zea mays
gagaccaactagcaacatagaaagttcaatagtgtaccaacaatggcagccaaaatattttgcctccttatgctccttggtctttctgcaagtgctgctacggcgaccattttcccacaatgctcacaagctcctatagcttcccttcttcccccgtacctctcaccagcggtgtcttcggtatgtgaaaacccaattcttcaaccctataggatccaacaggcaatcgcagctggcatcttacctttatcacccttgttcctccaacaatcatcagccctattacagcagttacctttggtgcatttattggcacaaaacattagggcacaacaactacaacaacttgtgctagcaaaccttgctgtctactc

SEQ ID NO: 344566 - DNA, 375 bp, Zea mays
gccactcatacgggtggttccattttaccggatccacagcacagggggcgtagagatctaggcctccaatgcatcttggccttttatgtttgctgaacttatgtcatgtatttcttacatgtctatcttgttttaatgctctcattttcttatattctcctttcattttttgtaccattgtttatttatttatattttttttgttttattttatttcgtatgagctttttgatttattttattttttttttttatgttattcttttcttttttattttttttttttttttttactttatttgtctacttgtatttttgtattctttttctcacttaatttttttttttttatactttcttacgtatctatttttt

SEQ ID NO: 344567 - DNA, 376 bp, Zea mays
cggacgcgtgggttgagcattcattaacacaccaagcgaagctacctagcaacgacttaacaacaatggctaccaagatattagccctccttgcgcttcttgccctttttgtgagcgcaacaaatgcgttcattattccacaatgctcacttgctcctagtgccattataccacagttcctccgaccagttacttcaatgggcttcgaacacctagctgtgcaagcctacaggctacaacaagcgcttgcggtgagcgttttacaacaaccaattaaccaattgcaacaacaatccttggcacatttaaccatacaaaccattgcaacacaacagcaacaacagttcctaccagcactgagccaactagatgtggt

SEQ ID NO: 344568 - DNA, 370 bp, Zea mays
ctgacgcgtgcactcgaggctcgcattggtcgcaaaatatgtcgcctccttatgctcctgggtctttctgcaagtgctgctacggcgaccattttcccgcaatgctcgcaagctcctatagcttcccttcttcccccctacctgtcaccagcggtgtcttctgtatgtgaaaacccaagtcttcaaccctacaggatccaacaggcaatcgcagctggcatcttacctttatcacccttgttcctccaacaatcatcagccctattacaacagttacctttggtgcatttattggcacaaaacatcagggcacaacaactacaacaacttgtgctagcaaaccttgctgcctactctcagcaacagcagt

SEQ ID NO: 344569 - DNA, 383 bp, Zea mays
ggacgtcagcctagcaattagctcatcgactccagattggagaactcgacaccatgaaggtgctgatcgttgcccttgctctcctggcgctcgctgcgagcgccgcctccagtacaagcggcggctgtggctgccagacaccaccgtttcatctaccgcctccgttctatatgccgcctccgttctatctgccgccgcagcagcagccgcagccatggcaataccccactcaaccaccgcagctaagcccgtgccagcagttcggatcctgcggcgtcggcagcgtcggcagcccgttcctgggccagtgcgtcgagttcctgaggcaccagtgcagcccggcggcgacgccctacggctcgccacagtgccaggcgctgcag

SEQ ID NO: 344570 - DNA, 383 bp, Zea mays
cagaaacacaccaagcgaagcgcactagcaacaacctaacaacaatggctaccaagatattagccctccttgcgcttcttgcccttttagtgagcgcaacaaatgcgttcattattccacagtgctcacttgctcctagtgccattattccacagttcctcccaccagttacttcaatgggcttcgaacatccagccgtgcaagcctacaggctacaactagcgcttgcggcgagcgtcttacaacaaccaattgcccaattgcaacaacaatccttggcacatctaaacctacaaaccatcgcaacgcaacagcaacaacagtttctgccatcactgagccacctagccgtggtgaaccctgtcgcctacttgcaacagcag

SEQ ID NO: 344571 - DNA, 120 bp, Zea mays
aaccaacacacaaaaattttcactttttcaacaaaaaaacaacaagcggcaccgaaatattttaccaaattatactccccactattactacctcattaattaacaaccacaattctaccc

SEQ ID NO: 344572 - DNA, 242 bp, Zea mays
gccagctgcagggaacctgcggcgttggcagcaccccgatcctgggccagtgcgtcgagtttctgaggcatcagtgcagcccgacggcgacgccctactgctcgcctcagtgccagtcgttgcggcagcagtgttgccagcagctcaggcaggtggagccgcagcaccggtaccaggcgatcttcggcttggtcctccagtccattctgcagcagcagccgcaaagcggtcaggtcgtgggg

SEQ ID NO: 344573 - DNA, 366 bp, Zea mays
cccacgcgtccggaccattagctttatctactccagagcgcagaagaacccgatcgacaccatgagggtgttgctcgttgccctcgctctcctggctctcgctgcgagcgccacctccacgcatacaagcggcggctgcggctgccagccaccgccgccggttcatctaccgccgccggtgcatctgccaccttcggttcacctgccacctccggtgcatcttccaccgccggtccacctgccggcgccggtccacctgccaccgtcggtccatgtgccgccgccggttcatctgccgtcgccaccatgccactaccctactcaaccggcccggccttagccttatccccagccacacccatgccc

SEQ ID NO: 344574 - DNA, 366 bp, Zea mays
aagcaacatagaaagcgttatccattagcaacaatagagcaacaatggagaccgggatattttccctccttatgctccttgctctttctacatgtgttgctaacgcgacaattttccctcaatgctcacaagctcctatagcttccctttttcccccataccttccatcaattatagcttcagtatgtgaaaacccagctcttcaaccatataggcttcaacaagcaatcgcagcaagcaacatacctttatcgcccttgttgtgtcaacaatcgccagccctatctttggtgcagtcattggtacaaaccattagggcacaacagctgcagcaactcgtgctacctgtgatcaaccaagtagctc

SEQ ID NO: 344575 - DNA, 374 bp, Zea mays
attttgagcattcagaaacacaccaagcgaagctacctagcaacgacttaacaacaatggctaccaagatattagccctccttgcgcttcttgccctttttgtgagcgcaacaaatgcgttcattattccacaatgctcacttgctcctagtgccattataccacagttcctccgaccagttacttcaatgggcttcgaacacctagctgtgcaagcctacaggctacaacaagcgcttgcggcgagcgtcttacaacaaccaattaaccaattgcaacaacaatccttggcacatctaaccatacaaaccatcgcaacacaacagcaacaacagtttctaccagcactgagccaactagatgtggtgaaccct

SEQ ID NO: 344576 - DNA, 285 bp, Zea mays
ttcagcattcataaacacaccaagtttttcgttctagcaacaacctaacaacaggggctaccaagatattagccctccttgcgcttcttgcccttttagtgagcgcaacaatagcgttcattattccacagtgctcacttgctcctagtgccatcattccacagtttctcccaccagttacttcaatgggcttcgatcattcacccgtgcaagcctacatgcttcaactagcgcttgctgtgtgcgtcttacttcaaccaattgctcaattgcaactacttttct

SEQ ID NO: 344577 - DNA, 239 bp, Zea mays
cgcggcgttagcaaccctctggaggtgtggatttggcgcgtgaaggcgattgaggccgggttccgttcgtggatggctaatcaacccatccaaatcgaggccgatttgtccttatattaattttttatttttattaatttttatttttttttttatattttaattttattttttatttttacatattatttttatatttaattttttattctattttttataatttttataatactttt

SEQ ID NO: 344578 - DNA, 370 bp, Zea mays
gagctacataccatgaactatatttactcaacagcgcaaaacaacactattcggcaccattatggctgttggtctttctgcaagcgctgctacctcaaccattatgccacaatgctcacaagctactatagcttgctttcttcccccatacctctcaccagcggtgtcttcagtatgtgaaaacccaattcttcaaccctacaggatccaacaggcaatcgcagcaggcatcttacctttatcacccttgttcctccaacaaccgtcagccctattacagcagttacctttggtgcatttgttggcacaaaacatcaaggcacaacaactacaacaacttgtgctaggaaaccttgctgcctactctcag

SEQ ID NO: 344579 - DNA, 376 bp, Zea mays
attgagaccaactagcaacatagaaagcacaatagtgtaccaacaatggcagccaaaatattttgcctccttatgctccttggtctttctgcaagtgctgctacggcgaccattttcccgcaatgctcgcaagctcctatagcttcccttcttcccccgtacctctcaccagcggtgtcttcggtatgtgaaaacccaattcttcaaccctacaggatccaacaggcaatcgcagctggcatcttacctttatcacccttgttcctccaacaatcatcagccctattacaacagttacctttggtgcatttattggcacaaaacatcagggcacaacaactacaacaacttgtgctagcaaaccttgctgcctact

SEQ ID NO: 344580 - DNA, 211 bp, Zea mays
aaagcacaatagtgtacttacaattgtagccaaaatatttcgcctcctgatgcgccttggtttttctgcaagtgctgctacggcgaccattttcccgaaatgctcgcaagcttctatagcttcccttcttcccccgtacctctcaccagcggtgtctcctggttttttgaaaacccaattatttaaccttacaggatccaacatgcattta

SEQ ID NO: 344581 - DNA, 376 bp, Zea mays
agaccaacaagcaacatagaaagtggaatccagtagcaacaatagagcaacaatggcgaccaagatattttccctccttatgctccttgctctttctgcatgtgttgctaacgcgacaattttccctcaatgctcacaagctcctatagcttcccttcttcccccataccttccatcaatgatagcttcagtatgtgaaaacccagctcttcaaccctataggctccaacaagcaatcgcagcaagcaacatacctttatcacccttgtttcaacaatcgccagccctatctttggtgcagtcattggtacaaaccatcagggcacagcagctgcagcaactcgtgctacctgtgatcaaccaagtagctctggca

SEQ ID NO: 344582 - DNA, 377 bp, Zea mays
caacaatccttggcacatctaaacctacaaaccatcgcaacgcaacagcaacaacagtttctgccatcactgagccacctagccgtggtgaaccctgtcgcctacttgcaacagcagctacttgcatccaacccacttgctctggcgaacgtagctgcataccagcaacaacaacgtctgcaacagtttatgccagcgctcagtcaactagccatggtgaaccctgtcgcctacctacaacagcaacaattgctttcatctagcccgctcgctgtgggcaatgcacctacgtacctacaacaacagttgctgcaacagattgtaccagctctgactcagctagctgtggcaaaccctactgcctacttgcaacagtt

SEQ ID NO: 344583 - DNA, 138 bp, Zea mays
gatcaccaaagcgtaagtgcgtattttaggattgttgaacacaacaaccatgaagagggtgatggtttttagtgagggcctggctctgtcagctgccagcgccttagcaatgcaaatgccctgcccctgcgcggtgct

SEQ ID NO: 344584 - DNA, 321 bp, Zea mays
atcagcaaagcggcagtgcgtagagaggatcgtcgaacagaacagcatgaagatggtcatcgttctcgtcgtgtgcctggctctgtcagctgccagcgcctctgcaatgcagatgccctgcccctgcgcggggctgcagggcttgtacggcgctggcgccggcctgacgacgatgatgggcgccggcgggctgtacccctacgcggagtacctgaggcagccgcagtgcagcccgctggcggcggcgccctactacgccgggtgtgggcagacgagcgccatgtaccagccgctccggcaacagtgctgccagcagcatat

SEQ ID NO: 344585 - DNA, 143 bp, Zea mays
cttgctttgacaaacccagcagcattctacctacaacccatcattggtggtgccctcttttagatttcttatgagttatagttcaataataaagttttttgtctgatgtttgtggcttcccagaaataagaaagtacatttct

SEQ ID NO: 344586 - DNA, 369 bp, Zea mays
tttcagcattcagaaacacaccaagtttagctttctagcaacaacctaacaacaatggctaccaagatattagccctccttgcgcttcttgcccttttagtgagcgcaacaaatgcgttcattattccacagtgctcacttgctcctagtgccattattccacagttcctcccaccagttacttcaatgggcttcgaacatccagccgtgcaagcctacaggctacaactagcgcttgcggcgagcgtcttacaacaaccaattgcccaattgcaacaacaatccttggcacatctaaacctacaaaccatcgcaacttaacagcaacaacagtttttgtcatttctgagccatctatccgtggtgtac

SEQ ID NO: 344587 - DNA, 379 bp, Zea mays
  unsure (1)..(379): unsure at all n locations
gttggttgaatggaagaaattgtctacactgaaccctgctgcttatttgcagcaacaactattaccatttagccagctagctactgcctactctcaacaacaacaacttcttccatttaaccaattggccgcactgaaccccgctgcttatttgcagcagcaaatactactaccatttagccagctagctacagcaagccgtgcttccttcttgacacaacaacagttgctgccgttctaccagcagtttgcggctaaccccgcaacccttttacaactacaacaattgttgccctttgtccaacttgctttgacaaacccagcagcctnctaccaacaacacatnattggtggtgccctcttttagattgcttattag

SEQ ID NO: 344588 - DNA, 375 bp, Zea mays
aaaaccccgggcgacccacgcgtcctttgactcgcgaacttagttctgtgtgttttacccgacaccgggcaggggcacgtctggttttatcttgcgctcgttcactccatcttaggtttttactttgacatgcacattagctactactgctgttcctgttggaggatttttcaggcttacttgttttcttattagtaattgttttatctgtggtcttaattatattttttttttgtgtcagtttttttttttttttattattcttctattcttatttgtttttttttttatttttcgtatattttcttttattatttttatttttttattttttattttttttttttttttattgactttttttttttttttttt

SEQ ID NO: 344589 - DNA, 389 bp, Zea mays
ccgggcggcccaacccgtccgccacctagcaccatagaaggcacatttgtgttccaacaatggcagccaaaatatgtggcttccttatgctccttggtctttctgcaagtgctgctaccgcaaccattttcccacaatgctcacaagctcctatagcttcctttcttcccccatacctctcaccagcggtgtcttcagtatgtgaaaacccaattcttcaaccctacaggatccaacaggcaatcgcagcaggcatcttacctttatcacccttgttcctccaacaaccgtcagccctattacagcagttacctttggtgcatttgttggcacaaaacatcaaggcacaacaactacaacaacttgtgctaggaaaccttgctggctac

SEQ ID NO: 344590 - DNA, 230 bp, Zea mays
cacaccaagcgaagcgtattagcttttacctaacaacaatggctaccaagatagtagcctttcttgcgcttcttgcccttcttgtgagctcaacaaatgcttttcataattttacaattctttattttttattattcttttatttatctgttttttctatatagttattttaatttatttttttttatttttttcttttattttatttttttatttttttctcttttatt

SEQ ID NO: 344591 - DNA, 375 bp, Zea mays
ctgccacctccggtgcatttcccaccgccggtccacctgccgccgccggtccacctgccaccgccggtccatgtgccgccgccggttcatctgccgccgccaccatgccactaccctactcaaccgccccggcctcagcctcatccccagccacacccatgcccgtgccaacagccgcatccaagcccgtgccagctgcagggaacctgcggcgttggcagcaccccgatcctgggccagtgcgtcgagtttctgaggcatcagtgcagcccgacggcgacgccctactgctcgcctcagtgccagtcgttgcggcagcagtgttgccagcagctcaggcaggtggagccgcagcaccggtaccaggcgatcttc

SEQ ID NO: 344592 - DNA, 381 bp, Zea mays
cagaaacacaccaagcgaagcacattagcaacatcctaacaacaatggctaccaagatattatccctccttgcgcttcttgcgctttttgcgagcgcaacaaatgcgttcattattccacaatgctcacttgctccaagttccattattacacagttcctcccaccagttacttcaatgggcttcgaacacccagctgtgcaagcctataggctacaacaagcaattgcggcgagcgtcttacaacaaccaatttcccagttgcaacaacaatccttggcacatctaacaatacaaaccatcgcaacgcaacagcaacaacaattcctaccagcactgagccacctagccatggtgaaccctgccgcctacttgcaacagt

SEQ ID NO: 344593 - DNA, 379 bp, Zea mays
gccctattacagcagttacctttggtccattttttggcacaaaacatcagggcacaacaactacaacaacttgtgctagcaaaccttgctgcatactctcagcaacatcagtttcttccattcaaccaactggctgcattgaactctgctgcttatttgcaacaacaattaccattcagccagctagttgctgcctacccccagcaatttcttccattcaaccaactagcagcattgaactctgctgcttatttacagcagcaacaactactaccattcagccagctagctgatgtgagccctgctgccttcttgacacaacaacagttgttgccgttctacctgcacgctatgcctaacgctggcaccctcttacaac

SEQ ID NO: 344594 - DNA, 121 bp, Zea mays
ctcgcgtgtcctcgacatgggcgcgcagctgtcgcaggcgctgaagccggtgcggcagatgaagcatcacgcgtgcagcttcgcgctgtacgcccacgacttgcaccgccaggtggaggtc

SEQ ID NO: 344595 - DNA, 373 bp, Zea mays
  unsure (1)..(373): unsure at all n locations
cccacgcgtccggcacaattgtgtttcaacaatggcagccaaaatagggggcctgcttatgctccttggtctttctgcaagtgctgctacggcgaccattttcccgaaatgctcgcaagctcctatagcttcccttcttcccccgtacctctcaccagcggtgtcttcggtatgtgaaaacccaattcttcaaccctacaggatccaacaggcaatcacagctggcatcttacctttatcacccttgttcctccaacaatcatcagccctattacatcagttacctntggtgcatttattggcacaaaacatcagggcacaacaactacaacaacttgtgctagcaaaccttgctgcctactctcagcaacag

SEQ ID NO: 344596 - DNA, 337 bp, Zea mays
gccattgcttagggtagtgcgcggtttttttgaaggtggactggatgctactggaaggttatatcttgaggaagacgatgaagctgctggtgctgattggggtgatgaagacttggatattgttgatgtaagttaggtgttttcttattatttattatttttatttttttattatattttttatttttatatactttttttttactttatttttttattttttttttttttttttatttttttttttttttttattttaatattttttttttcttatttttttttttttttcattttttttttctttttattttttatttagtttttttttttttta

SEQ ID NO: 344597 - DNA, 231 bp, Zea mays
gggtcttcagaccattatttttatttactccagagcgcagaagaacgccgatcgacaccatgagggtgttgctcgttgccctcgctcttctggctctcgctgtgagcgccaccttcacgcatacaagcggcggttgctgctgccagccaccgtcgtcggttcatataccgtcgccggtgcattctgctatcttcggttcatctgccacctttcggagcatttttcactcgt

SEQ ID NO: 344598 - DNA, 364 bp, Zea mays
attgagaccaactagcaacatagattgcacaatagtgtaccaacaatggcagccaaaatattttgcctccttatgctccttggtctttctgcaagtgctgctacggcgaccattttcccgaaatgctcgcaagctcctatagcttcccttcttcccccgtacctctcaccagcggtgtcttcggtatgtgaaaacccaattcttcaaccctacaggatccaacaggcaatcacagctggcatcttacctttatcacccttgttcctgcaacaatcatcagccctattacatcagttacctttggtgcatttattggcacaaaacatcagggcacaacaactacaacaacttgtgctagcaaacc

SEQ ID NO: 344599 - DNA, 369 bp, Zea mays
gagcattcagaaacacaccaagcgaagcgcactagcaacgacctaacaacaatggctaccaagatattagccctccttgcgcttcttgccctttttgtgagcgcaacaaatgcgttcattattccacaatgctcacttgctcctagtgccattattccacagttcctcccaccagttacttcaatgggcttcgaacacctagctgtgcaagccaacatgcaacaacaagcgcttgcggcgagcgtcttacaacaaccaattgcccaattgcaacaacaatccttgccacatctaacaatacaagccatcacaacgcaacagcaacaacagttcctaccagcactgagccacctagccatggtgaaccct

SEQ ID NO: 344600 - DNA, 373 bp, Zea mays
tgctgtaatagggctgtttattgttttaggaacaagggtgataaagggaaggtgccagctgttacctttggtgcatttattggcacaaaacatcagggcacaacaactacaacaacttgtgctagcaaaccttgctgcctactctcagcaacagcagtttcttccattcaaccaactagctgcattgaactctgcttcttatttgcaacaacaacaactaccattcagccagctatctgctgcctacccccagcaatttcttccattcaaccaactgacagcattgaactcttctgcttatttacagcagcaacaactactaccattcagccagctaggtggtgtgagccctgctacctttttgacacaacca

SEQ ID NO: 344601 - DNA, 359 bp, Zea mays
gggtcttcagaccattagctttatctactccagagcgcagaagaacccgatcgacaccatgagggtgttgctcgttgccctcgctctcctggctctcgctgcgagcgccacctccacgcatacaagcggcggctgcggctgccagccaccgccgccggttcatctaccgccgccggtgcatctgccacctccggttcacctgccacctccggtgcatctcccaccgccggtccacctgccgtcgtcggtccacctgccaccgtcggtccatgtgccgccgccggttcatttgccgtcgtcaccatgccactaccctacttaaccgtcccggtctcagtcttatccccagccacactcat

SEQ ID NO: 344602 - DNA, 346 bp, Zea mays
gcaacatagaaagtggtatccagtttcaacaatagagcaacaatggcgaccaagatattttccctccttatgctccttgctctttctgcatgtgttgctaacgcgacaattttccctcaatgctcacaagctcctatagcttcccttcttcccccataccttccatcaatgatagcttcagtatgtgaaaacccagctcttcaaccctataggctccaacaagcaatcgcagcaagcaacatacctttatcacccttgtttcaacaatcgccagccctatctttggtgcagtcattggtaccaaccaataaggcacagcagctgcagcaactcgggcttcctgtga

SEQ ID NO: 344603 - DNA, 255 bp, Zea mays
cccagccacacccatgcccgtgccttcagccgcatccaagcccgtgccagctgcagggaacctgcggcgttggcagcaccccgatcctgggccagtgcgtcgagtttctgaggcatcagtgcagcccgacggcgacgccctactgctcgcctcagtgccagtcgttgcggcagcagtgttgccagcagctcaggcaggtggagccgcagcaccggtaccaggcgatcttcggcttgggccttcagtccattctgc

SEQ ID NO: 344604 - DNA, 348 bp, Zea mays
agaaagcacaatagtgtaccaacaatggcagccaaaatattttgcctccttatgctccttggtctttctgcaagtgctgctacggcgaccattttcccacaatgctcacaagctcctatagcttcccttcttcccccgtacctctcaccagcggtgtcttcggtatgtgaaaacccaattcttcaaccctataggatccaacaggcaatcgcagctggcatcttacctttatcacccttgttcctccaacaatcatcaggcctattacagcagttacctttggggcatttattggcacaaaacatcagggcacaacaacttcaacaacttgtgcttgcaaacccttgt

SEQ ID NO: 344605 - DNA, 382 bp, Zea mays
caccaagcgaagcacattagcaacaacctaacaacaatggctaccaagatattatccctccttgcgcttcttgcgctttttgcgagcgcaacaaatgcgttcattattccacaatgctcacttgctccaagttccattattacacagttcctcccaccagttacttcaatgggcttcgaacacccagctgtgcaagcctataggctacaacaagcaattgcggcgagcgtcttacaacaaccaatttcccagttgcaacaacaatccttggcacatctaacaatacaaaccatcgcaacgcaacagcaacaacaattcctaccagcactgagccacctagccatggtgaaccctgccgcctacttgcaacagcagttgcttg

SEQ ID NO: 344606 - DNA, 379 bp, Zea mays
caacaagcaacatagaaagtggaattcagtagtaacaatagagcaacaatggcgaccaagagtatttttcctccttatgctccttgctctttctgcatgtgttgctaacgcgacaattttccctcaatgctcacaagctcctatagcttcccttcttcccccataccttccatcaatgatagcttcagtatgtgaaaacccagctcttcaaccctataggctccaacaagcaatcgcagcacgcaacatacctttatcacccttgtttcaacaatcgccagccctatctttggtgcagtcattggtacaaaccatcagggcacagcagctgcagcaactcgtgctacctgtgatcaaccaagtagctctggcaaacctt

SEQ ID NO: 344607 - DNA, 376 bp, Zea mays
tatcagtaccatcaatcatcattcattttagttgtataggcaccaaatcaaatctgcaacatcaattatctaactccaaaaaccatgaagctggtgcttgtggttcttgctttcattgctttagtatcaagtgtttcttgtacacagacaggcggctgcagctgtggtcaacaacaaagccatgagcagcaacatcatccacaacaacatcatccacaaaaacaacaacatcaaccaccaccacaacatcaccagcagcagcaacaccaacaacaacaagttcacatgcaaccacaaaaacattagcaacaacaagaagttcatgttcaacaacaacatcatcaaccgcagcacctacaacaacaacaacaacagc

SEQ ID NO: 344608 - DNA, 379 bp, Zea mays
ggttctccgacgaggccgtggagtggagacttccctccgcgccggccgtcgaggaggtggatgggccggacggggtcgacgtcgtccccgccgaaggcgcgttcgggttcgacaccggcgtcagggacgtggagctggttgggccggtggagctcaagcttgctggcaaccaggacggtagcctcgtcgagctccagttaccttcggggaatgccacatacacaaggcttaagaggatatttgttgcggatggcattgcattaaaggtcattggtgcacagaaagtttctgtaacccaccctcacagtataggtcttctatcaaatggaagtttgttggctagtaacaacgacctaagccaaatatggcctttgagcta

SEQ ID NO: 344609 - DNA, 165 bp, Zea mays
ccaggctctccgacaaggccgtggagtgtagactttttttcgcgccagacgtcgaggaggtatgctggttggtacggggtcaacggctgctacggcgaccgttttttcagattggtcaccagcgtctatagcgtgccgctttgcgcgccgctggagctcaagcgt

SEQ ID NO: 344610 - DNA, 149 bp, Zea mays
tcgacagccgcatccaagccctttcctttttcagggaacctgcggcgaggggagcagggtctatcctgggccagtgcgctcaagttattagaggcattagagcagtccgactgtgacgccctactgctcgccttagtgccagttgttgc

SEQ ID NO: 344611 - DNA, 371 bp, Zea mays
agaccaactagcaacatagaaagcacaatagagtaccaacaatggcaggcaaagtattttgcctacttatgctcctcggtatttctgcaagtgctgctacagcgaccattttcccgcaatgctcacaagctcctatagcttcccttcttcccccgtacctctcaccagcggtgtcttcggtatgtgaaaacccaattcttcaaccctacaggatccaacaggcaatcgcagctggcatcttacctttatcacccttgttcctccaacaatcatcagccctattacagcagttacctttggtgcatttattggcacaaaacatcagggcacaacaactacaacaacttgtgctagcaaaccttgctgcctac

SEQ ID NO: 344612 - DNA, 352 bp, Zea mays
agcattcagaaacacaccaagcgaagcgcactagcaacgacctaacaacaatggctaccaagatattagccctccttgcgcttcttgccctttttgtgagcgcaacaaatgcgttcattattccacaatgctcacttgctcctagtgccattattccacagttcctcccaccagttacttcaatgggcttcgaacacctagctgggcaagccaacatgcaacaacaagcgcttgcggcgagcgttttacaacaaccaaatgcccaattgcaacaacaattcctgccacattttacaattcaagccattacaacgcaacagctacaacagtttctaccagcacttagccacct

SEQ ID NO: 344613 - DNA, 360 bp, Zea mays
gcttatttacagcagcaacaactactaccattcagccagctagctggtgtgagccctgctaccttcttgacacaaccacagttgttgccgttctaccagcacgctgcgcctaacgctggcaccctcttacaactgcaacaattgctgccattcaaccaacttgctttgacaaacctagcagtgttctaccaacaacccatcattggtggtgccctcttttagatttcttatgagttatagttcaataataaagttttttgtctgatgtttgtggcttcccagaaataagaaagtacatttcttaaataaaaaaatatattataatttatttttattttatataaatttattaataaaaat

SEQ ID NO: 344614 - DNA, 369 bp, Zea mays
aatattttgagcattcagaaacacaccaagcgaagcacattagcaacaacctaacaacaatggctaccaagatattatccctccttgcgcttcttgcgctttttgcgagcgcaacaaatgcgttcattattccacaatgctcacttgctccaagttccattattacacagttcctcccaccagttacttcaatgggcttcgaacacccagctgtgcaagcctataggctacaacaagcaattgcggcgagcgtcttacaacaaccaatttcccagttgcaacaacaatccttggcacatctaacaatacaaaccatcgcaacgcaacagcaacaacaattcctaccagcactgagccacctagccatgg

SEQ ID NO: 344615 - DNA, 360 bp, Zea mays
gagcattcagaaacacaccaagcgaagcgcactagcaacgacctaacaacaatggctaccaagatattagccctccttgcgcttcttgccctttttgtgagcgcaacaaatgcgttcattattccacaatgctcacttgctcctagtgccattattccacagttcctcccaccagttacttcaatgggcttcgaacacctagctgtgcaagccaacatgcaacaacaagcgcttgcggcgagcgtcttacaacaaccaattgcccaattgcaacaacaatccttgccacatctaacaattcaagccattacaacgcaacagcaacaacagtttctaccagcactgagccacctagccatg

SEQ ID NO: 344616 - DNA, 366 bp, Zea mays
agcgaagcgcactagcaacaacctatacaacaatggctaccaagatattagccctccttgcgcttcttgcccttttagtgagcgcaacaaatgcgttcattattccacagtgctcacttgctcctagtgccattattccacagttcctcccaccagttacttcaatgggcttcgaacatccagccgtgcaagcctacaggctacaactagcgcttgcggcgagcgtcttacaacaaccaattgcccaattgcaacaacaatccttggcacatctaaacctacaaaccatcgcaacgcaacagcaacaacagtttctgccattactgagccacctagcccgggtgaaccctgtcgcctacttgcaac

SEQ ID NO: 344617 - DNA, 370 bp, Zea mays
cttcggtatgtgaaaacccaattcttcaaccctacaggatccaacaggcaatcgcagctggcatcttacctttatcacccttgttcctccaacaatcatcagccctattacaacagttacctttggtgcatttattggcacaaaacatcagggcacaacaactacaacaacttgtgctagcaaaccttgctgcctactctcagcaacagcagtttcttccattcaaccaactaggttcattgaactctgcttcttatttgcaacaacaacaactaccattcagccagctacctgctgcctacccccagcaatttcttccattcaaccaactagcagcattgaactctcctgcttatttacagcagcaaca

SEQ ID NO: 344618 - DNA, 295 bp, Zea mays
agctcatcgactccagattggagaactcgacaccatgaaggtgctgatcgttgcccttgctctcctggcgctcgctgcgagcgccgcctccagtacaagcggcggctgtggctgccagacaccaccgtttcatctaccgcctccgttctatatgccgcctccgttctatctgccgccgcagctaagcccgtgccagcagttcggatcctgcggcgtcggcagcgtcggcagcccgttcctgggccagtgcgtcgagttcctgaggcaccagtgcagcccggcggcgacgccctac

SEQ ID NO: 344619 - DNA, 152 bp, Zea mays
attgataccaactagcaacatacatagtgtagtacactagcaacatcttagcaccaatgggagccaagatttttgccctccttgccctccttgctctttcagcaagcgctgctacctcgacttttattccacaatgctcacaacaatacctc

SEQ ID NO: 344620 - DNA, 108 bp, Zea mays
  unsure (1)..(108): unsure at all n locations
tcgcaagtacttggccagtccctctactgtttccaaatcntggaacatgcnttcagcgggcatagggacttcttctgtggctcatcgaagtgggatgaaacattggaa

SEQ ID NO: 344621 - DNA, 365 bp, Zea mays
attgagaccaacaagcaacatagaaagtggaatccagtagcaacaatagagcaacaatggcgaccaagatattttccctccttatgctccttgctctttctgcatgtgttgctaacgcgacaattttccctcaatgctcacaagctcctatagcttcccttcttcccccataccttccatcaatgatagcttcagtatgtgaaaacccagctcttcaaccctataggctccaacaagcaatcgcagcaagcaacatacctttatcacccttgtttcaacaatcgccagccctatctttggtgcagtcattggtacaaaccatcagggcacagcagctgcagcaactcgtgctacctgtgatcaac

SEQ ID NO: 344622 - DNA, 363 bp, Zea mays
gaccaactagcaacatagaaagcacaatagtgtaccaacaatggcagccaaaatattttgcttccttatgctccttggtctttctgcaagtgctgctaccgcaaccattttcccacaatgctcacaagctcctatagcttcctttcttcccccatacctctcaccagcggtgtcttcagtatgtgaaaacccaattcttcaaccctacaggatccaacaggcaatcgcagcaggcatcttacctttatcacccttgttcctccaacaaccgtcagccctattacagcagttacctttggtgcatttgttggcacaaaacatcaaggcacaacaactacaacaacttgtgctaggaaaccttgc

SEQ ID NO: 344623 - DNA, 364 bp, Zea mays
gcgaagcgcactagcaacaacctaacaacaatggctaccaagatattagccctccttgcgcttcttgcccttttagtgagcgcaacaaatgcgttcattattccacagtgctcacttgctcctagtgccattattccacagttcctcccaccagttacttcaatgggcttcgaacatccagccgtgcaagcctacaggctacaactagcgcttgcggcgagcgtcttacaacaaccaattgcccaattgcaacaacaatccttggcacatctaaacctacaaaccatcgcaacgcaacagcaacaacagtttctgccatcactgagccacctagccgtggtgaaccctgtcgcctacttgcaac

SEQ ID NO: 344624 - DNA, 317 bp, Zea mays
aagcaacatagaaagtggaatccagtagcaacaatagagcaacaatggcgaccaagatattttccctccttatgctccttgctctttctgcatgtgttgctaacgcgacaattttccctcaatgctcacaagctcctatagcttcccttcttcccccataccttccatcaatgatagcttcagtatgtgaaaacccagctcttcaaccctataggctccaacaagcaatcgcagcaagcaacatacctttatcacccttgtttcaacaatcgccagccctatctttggtgcagtcattggtacaaaccattagggca

SEQ ID NO: 344625 - DNA, 335 bp, Zea mays
gctccttgctctttctgcatgtgttgctaacgcgacacttgtacgtgaaggctgacaagctcgtatagctggccttctttccccataccttccatcaatgatagcttcagtgtgtgaaaacccagctcttcaaccctataggctccaacaagcaatcgcagcaagcaacatacctgtatcacccttggttcaacaatcgccagccctatctttggtgcagacattggtacaaaccatcagggcacaacagctgcagcaacttgtgctacctgtgaacaaccaagcaggtctggcaaacctttctccctactgtcaacaacaaccatttttttcat

SEQ ID NO: 344626 - DNA, 146 bp, Zea mays
caactagcaacatagaaagcacaatagtgtaccaacaatggcagctaaaatattttgcctccttatgctccttggtctttctgcaagtgctgctacggcgaccatttttccacaatgctcacaagctcctatagctttccctttct

SEQ ID NO: 344627 - DNA, 361 bp, Zea mays
gtggaatccagtagcaacaatagagcaacaatggagaccaagatattttccctccttatgctccttgctctttctacatgtgttgctaacgcgacaattttccctcaatgctcacaagctcctatagcttccctttttcccccataccttccatcaattatagcttcagtatgtgaaaacccagctcttcaaccatataggcttcaacaagcaatcgcagcaagcaacatacctttatcgcccttgttgtgtcaacaatcgccagccctatctttggtgcagtcattggtacaaaccatcagggcacaacagctgcagcaactcgtgctacctgtgatcaaccaagtagctctggcaaacc

SEQ ID NO: 344628 - DNA, 276 bp, Zea mays
gaaagtggaatccagtagcaacaatagatcaacaatggcgaccaagatattttccctccttatgctccttgctctttctgcatgtgttgctaacgcgacaattttccctcaatgctcacaagctcctatagcttcccttcttcccccataccttccatcaatgatagcttcagtatgtgaaaacccagctcttcaaccctataggctccaacaagcaatcgcagcaagcaacatacctttatcacccttgtttcaacaatcgccagccctatcttt

SEQ ID NO: 344629 - DNA, 365 bp, Zea mays
atttagaccaactagcaacatatttagcacaatagtgtaccaacaatggcagccaaaatattttgcctccttatgctccttggtatttctgcaagtgctgctacggcgaccattttcccgcaatgctcacaagctcctatagcttcccttcttcccccgtaccttttaccagcggtgtcttcggtatgtgaaaacccaattcttcaaccctacaggatccaacaggcaatcgcagctggcatcttacctttatcacccttgttcctccaacaatcattagccctattacagcagttacctttggtgcatttattggcacaaaacattagggcacaacaactacaacaacttgtgctagcaaacct

SEQ ID NO: 344630 - DNA, 366 bp, Zea mays
caaatgcgtccattattccacaatgctcacttgctcctagttccattattccacagttcctcccaccagttacttcaatggccttcgaacacccagctgtgcaagcctataggctacaacaagcgattgcggcgagcgtcttacaacaaccaattgcccaattgcaacaacaatccttggcacatctaacaatacaaaccatcgcaacgcaacagcaacaacagttcctaccagcactgagccacctagccatggtgaaccctgtcgcctacttgcaacagcagctgcttgcatccaacccacttgctctagcaaacgtagttgcaaaccagcaacaacaacaactgcaacagtttttggcagcgc

SEQ ID NO: 344631 - DNA, 352 bp, Zea mays
gcaacatagaaagcacaatagtgtaccaacaatggcagccaaaatattttgcctgcttatgctccttggtatttctgcaagtgctgctacggcgaccattttcccgcaatgctcacaagctcctatagcttcccttcttcccccgtacctctcaccagcggtgtcttcggtatgtgaaaacccaattcttcaaccctacaggatccaacaggcaatcgcagctggcatcttacctttatcacccttgttcctccaacaatcatcagccctattacagcagttacctttggtgcatttattggcacaaaacatcagggcacaacaactacaacaacttgtgctagcaaacctt

SEQ ID NO: 344632 - DNA, 349 bp, Zea mays
attgagaccaactagcaacatagaaagcacaatagtgtaccaacaatggcagccaaaatattttgcctccttatgctccttggtctttctgcaagtgctgctacggcgaccattttcccgaaatgctcgcaagctcctatagcttcccttcttccctcgtacctctcaccagcggtgtctttggtatgtgaaaacccaattcttcaaccctacaggatccaacaggcaatcacagcttgcatcttacctttattacccttggtccttcaacaatcattagccctattacatcagttacctttggtgcatttattggcacaaaacattagggcacaacagctacaacaac

SEQ ID NO: 344633 - DNA, 128 bp, Zea mays
cagaccattagctttatctactccagagcgcagaagaacccgatcgacaccatgagggtgttgctcgttgccctcgctctcctggctctcgctgcgagcgccacctccacgcatacaaagcggcggct

SEQ ID NO: 344634 - DNA, 240 bp, Zea mays
aattagctcatcgactccagattggagaactcgacaccatgaaggtgctgatcgttgcccttgctctcctggcgctcgctgcgagcgccgcctccagtacaagcggcggctgtggctgccagacaccaccgtttcatctaccgcctccgttctatatgccgcctccgttctatctgccggcgcaacagcagccgcagccatggcaataccccactcaaccaccgcagctaaacccgggcc

SEQ ID NO: 344635 - DNA, 265 bp, Zea mays
ttccattattccacagttcctcccaccagttacttcaatggccttcgaacacccagctgtgcaagcctataggctacaacaagcgattgcggcgagcgtcttacaacaaccaattgcccaattgcaacaacaatccttggcacatctaacaatacaaaccatcgcaacgcaacagcaacaacagttcctaccagcactgagccacctagccatggtgaaccctgtcgcctacttgcaacagcagctgcttgcattcaacccactt

SEQ ID NO: 344636 - DNA, 352 bp, Zea mays
gcaacatagaaagcacaataagtgttctcttcaatggcagccaaaatattttgcctgcttatgctccttggtctttctgcaagtgctgctacggcgaccatttttccgaaatgctcgcaagctcctatagctttccttcttcccccgtacctctcaccagcggtgtcttcggtatgtgaaaacccaattcttcaaccctacaggatccaacaagcaatcacagctggcatcttacctttattaccctttgtttctccaacaaatcattagtcctattacatcagttaccctttggtgcatttattggcacaaaacaatatgggtcaaccacctccacaacctgtgcttgcaa

SEQ ID NO: 344637 - DNA, 371 bp, Zea mays
cgagcgtcttacaacaaccaattgtccaattgcaacaacaatccttgccacatctaacaatacaagccatcacaacgcaacagcaacaacagttcctaccagcactgagccacctagccatggtgaaccctgccgcctacttgcaagagcagctgcttgcatccaacccacttgctctggcgaacgtagttgcaaaccagcaacaacaacagctacaacagtttctgccaacgctcagtcaactagccatggtgaaccctggcggctacgtacaacaacaacaactgctttcatctagcccgctcgctgtgggcaatgcacctacatacctgcaacaacaattggtgcaacagattgtaccagctctgact

SEQ ID NO: 344638 - DNA, 242 bp, Zea mays
gtgaaccctgccgcctacttgcatcagcagttgcttgcatcaaacccacttgctctggcaaacgtagttgcaaaccagccacaacaacagctgcaacagtttctgccagcgctcagtcaactagccatggtgaaccctgccgcctacctacaacagcaacaactgctttcatctagcccgctcgctgtggccaatgcacctacatacctgcaacaacaattgttgcaacagattgtaccagc

SEQ ID NO: 344639 - DNA, 294 bp, Zea mays
gtggaatccagtagcaacaatagatcaacaatggcgaccaagatattttccctccttatgctccttgctctttctgcatgtgttgctaacgcgacaattttccctcaatgctcacaagctcctatagcttcccttcttcccccataccttccatcaatgatagcttcagtatgtgaaaacccagctcttcaaccctataggcttcaacaagcaatcgcagcaagcaacatacctttatcacccttggttcaacaatcgccagccctatctttggtggcatcattggtaccaacc

SEQ ID NO: 344640 - DNA, 128 bp, Zea mays
attgataccaactagcaacatacatagtgaagtacactagcaacatcttagcaccaatgggagccaagatttttgccctccttgccctccttgctctttagcaagcgctggtacctgactttatccac

SEQ ID NO: 344641 - DNA, 119 bp, Zea mays
attttgagcattcagaaacacaccagcgagcgcactacacgacctaacaacaaggctaccagatatagccctctggcttttgccctttggagcgcacaagcttcattttcaatgctact

SEQ ID NO: 344642 - DNA, 328 bp, Zea mays
tagcaacatagaaagcacaatagtgtaccaacaatggcagccaaaatattttgcttccttatgctccttggtctttctgcaagtgttgctaccgcaaccattttcccacaatgctcacaagctcctatagcttcccttcttcccccatacctctcaccagcggtgtctttaatgtgtgaaaacccaattggtcaaccctacaagatccaacaggcaatcgcaacaagcattttaccattatcacccttggttcttcaacaaccgtcaggcctattacagcaggtacctttggtccatttggtggcacaaaacattaaggcacaacaac

SEQ ID NO: 344643 - DNA, 367 bp, Zea mays
tagcaacatagaaagcacaatagtgtaccaacaatggcagccaaaatattttgcttccttatgctccttggtctttctgcaagtgctgctaccgcaaccattttcccacaatgctcacaagctcctatagctttctttctttccccatacctctcaccagcggtgtcttcagtatgtgaaaacccaattctttaaccctacaggatccaacaggcaatcgcagcaggcatcttacctttatcacccttggttcttcaacaaccgtcagtcctattacagcaggtacctttggtgcctttggtggcacaaaacattaaggtacaacaacttcaacaacttttgcttggaaacctttgttgctactttt

SEQ ID NO: 344644 - DNA, 162 bp, Zea mays
cccacgcgtccgcccacgcgtcctttacaatagtgtaccaacaatggcagccaaaatattttgcttccttatgctccttggtctttctgcaagtgttgctaccgcaaccattttcccacaatgctcacaagctcctatagcttccctttcttcctcccatac

SEQ ID NO: 344645 - DNA, 245 bp, Zea mays
gcaacatagaaagcacaatagtgttccaacaatggcagccaaaatattttgcttccttatgctccttggtctttctgcaagtgttgctaccgcaaccattttcccacaatgctcacaagctcctatagcttcccttcttcccccatacctctcaccagcggtgtcttcaatgtgtgaaaacccaattgttcaaccctacaggatccaacaggcaatcgcaacaagcatcttaccattatcaccct

SEQ ID NO: 344646 - DNA, 131 bp, Zea mays
caacaagcaacatagaaagtggaattcagtagcaacaatagagcaacaatggcgaccaagatattttccctccttatgctccttgctctttctgcatgtgttgctaacgcgacaatttccctaatgctcac

SEQ ID NO: 344647 - DNA, 75 bp, Zea mays
gcaattagctcatcgaatccagattgtttaactcgccaccataaaggagcggatcgttgtccttgctctcctggc

SEQ ID NO: 344648 - DNA, 103 bp, Zea mays
gtgaatcgcacatagactccagttttgttgtactctcaccaaaaaggaacggatccgtgctcttgctctcttggcgctttgctgttgcgccagcaccagtaca

SEQ ID NO: 344649 - DNA, 300 bp, Zea mays
cagaaacacaccaagcgaagcgcactagcaacaacctaacaacaatggctaccaagatattatccctccttgcgcttcttgcgctttttgcgagcgcaacaaatgcgtccattattccacaatgctcacttgctcctagttccattattccacagttcctcccaccagttacttcaatggccttcgaacacccagctgtgcaagcctataggctacaacaagcgattgcggcgagcgtcttacaacaaccaattgcccaattgcaacaacaatccttggcacatttaacaatacaaacca

SEQ ID NO: 344650 - DNA, 365 bp, Zea mays
ggagccgaagctgtagaaactttcgtgctagccgcagcaagagtcacagccctgttgctagcagtaggcatgaaaaggctgctgttatttcaggatctactcaacctaacttggggtatgcagagcacaaaagccctccaagatctcactctggggatgaccatgtgaaccaccctgaccaaaaggatgaccacatgggaaatgggaagatggaaagggttgatcttgattgctcgcccagcccacaatatgacaaggctgcttcatatagtcctgcgtacaatggcaaagccagggactcgatgagtcctaatggtcagccaaaagcagatgccaaatatgtcaaaccttctgggaaacctgag

SEQ ID NO: 344651 - DNA, 355 bp, Zea mays
gaaagcacaatagtgtaccaacaatggcagccaaaatattttgcctccttatgctccttggtctttctgcaagtgctgctacggcgaccattttcccgaaatgctcgcaagctcctatagcttcccttcttcccccgtacctctcaccagcggtgtcttcggtatgtgaaaacccaattcttcaaccctacaggatccaacaggcaatcacagctggcatcttacctttatcacccttgttccttcaacaatcatcagccctattacatcagttacctttggtgcatttattggcacaaaacattaaggcacaacaactacaacaacttgtgctagcaaaccttgctggctactt

SEQ ID NO: 344652 - DNA, 337 bp, Zea mays
gcaacatagaaagcacaatagtgtaccaacaatggcagccaaaatattttgcctccttatgctccttggtctttctgcaagtgctgctacggcgaccattttcccgaaatgctcgcaagctcctatagctttccttctttccccgtacctctcaccagcggtgtcttcggtatgtgaaaacccaattcttcaaccctacaggatccaacaggcaatcacagctggcatcttacctttatcacccttggtcctccaacaatcatcagccctattacatcaggtacctttggtgcatttattggcacaaaacattaaggcgcaacaactaccacaactt

SEQ ID NO: 344653 - DNA, 368 bp, Zea mays
aacacaccaagcgaagcgcactagcaacaacctaacaacaatggctaccaagatattagccctccttgcgcttcttgcccttttagtgagcgcaacaaatgcgttcattattccacagtgctcacttgctcctagtgccattattccacagtttctcccaccagttacttcaatgggcttcgaacatccagccgtgcaagcctacaggctacaactagcgcttgcggcgagcgtcttacaacaaccaattggccaattgcaacaacaatccttggcacatctaaacctacaaaccattgcaacgcaacagcaacaacaggttctggcatcactgagccacctagccggggtgaaccctgtcgcctact

SEQ ID NO: 344654 - DNA, 113 bp, Zea mays
  unsure (1)..(113): unsure at all n locations
tcggtgtgaatccagtagncaacatttgagcaacaatggtgaccaagatatttggggtgcttatgctccttgctctttctgcatggggtgctaacgcgacaatttttttaatg

SEQ ID NO: 344655 - DNA, 308 bp, Zea mays
cagaccattagctttatctactccagagcgcagaagaacccgatcgacaccatgagggtgttgctcgttgccctcgctctcctggctctcgctgcgagcgccacctccacgcatacaagcggcggctgcggctgccagccaccgccgccggttcatctaccgccgccggtgcatctgccacctccggttcacctgccacctccggtgcatcttccaccggcggtccacctgccgccgccggtccacctgccaccgccggtccatgtgccgccgccggttcatctggcggcggcaccatgccactaccc

SEQ ID NO: 344656 - DNA, 367 bp, Zea mays
accccgtcatcgatctcgtttcaaatccatccatcctcgtttcctccgtcccgcagcatctcaaccccatggccaagatcaagatcgggatcaatgggttcggcaggatcggaaggctggtggccagggtggccctgcagagtgacgatgtcgagctcgtcgccgtgaacgaccccttcatcagcaccgactacatgacctacatgttcaagtacgacactgtgcacggacagtggaagcaccatgaagtcaaggtgaaggactccaaaacccttctttttggtgagaaggaggttgctgtgtttggctgcaggaacccttgggagatcccgtggggttcgggtggtgctgaatattttgttgagtc

SEQ ID NO: 344657 - DNA, 366 bp, Zea mays
attcagaaacacaccaagcgaagcgcactagcaacaacctaacaacaatggctaccaagatattagccctccttgcgcttcttgcccttttagtgagcgcaacaaatgcgttcattattccacagtgctcacttgctcctagtgccattattccacagttcctcccaccagttacttcaatgggcttcgaacatccagccgtgcaagcctacaggctacaactagcgcttgcggcgagcgtcttacaacaaccaattgcccaattgcaacaacaatccttggcacatctaaacctacaaaccatcggaacgcaacagcaacaacagtttctggcatcactgagccacctagccgtggtgaaccctg

SEQ ID NO: 344658 - DNA, 361 bp, Zea mays
gcaacatagaaagcacaatagtgtaccaacaatggcagccaaaatattttgcctccttatgctccttggtctttctgcaagtgctgctacggcgaccattttcccgaaatgctcgcaagctcctatagcttcccttcttcccccgtacctctcaccagcggtgtcttcggtatgtgaaaacccaattcttcaaccctacaggatccaacaggcaatcacagctggcatcttacctttatcacccttgttcctccaacaatcatcagccctattacatcagttacctttggtgcatttattggcacaaaacatcagggcacaacaactacaacaacttgtgctagcaaaccttgctggctac

SEQ ID NO: 344659 - DNA, 371 bp, Zea mays
cccacgcgtccgattgagaccaactagcaacatagaaagcacaatagtgtaccaacaatggcagctaaaatattttgcctccttatgctccttggtctttctgcaagtgctgctacggcgaccattttcccacaatgctcacaagctcctatagcttcccttcttcccccgtacctctcaccaacggtgtcttcggtatgtgaaaacccaattcttcaaccctacaagatccaacaagcaatcgcagctggcatcttacctttatcacccttggtcctccaacaatcatcagccctattacagcagttacctttggtgcatttattggcacaaaacattaaggcacaacaactacaacaacttgtgcttgc

SEQ ID NO: 344660 - DNA, 373 bp, Zea mays
caaagcggcagtgcgtagagaggatcgtcgaacagaacagcatgaagatggtcatcgttctcgtcgtgtgcctggctctgtcagctgccagcgcctctgcaatgcagatgccctgcccctgcgcggggctgcagggcttgtacggcgctggcgccggcctgacgacgatgatgggcgccggcgggctgtacccctacgcggagtacctgaggcagccgcagtgcagcccgctggcggcggcgccctactacgccgggtgtgggcagacgagcgccatgtaccagccgcttcggcaacagtgctgtcagcagcagatgaagatgatggacgtgcagttcgtcgcgcaacagctgcagatgatgatgcagcttga

SEQ ID NO: 344661 - DNA, 193 bp, Zea mays
ggcaggcaggacggcgaggagggcaggaagaccgaagaccgagccgagcgggggcacgggacgggaacgggacaggaccccaaaaacgcagagccaagcggcccgggcgaccgagccgcgagaacgcgggggcgagccggccgggccccagcgagggccgggccgacgccaagggggagcggagacgccacag

SEQ ID NO: 344662 - DNA, 322 bp, Zea mays
caccatcgacaacgtcaaggccattatccaggacaaggagggcatcccaccggaccagcagcgtttgatcttcgctggcaagcagctggaggatggccgcacccttgcggattacaacatccagaaggagagcaccctccacctggtgctccgtctcaggggtggcatgcagatctttgtgaagacactcactggcaagacaatcacccttgaggtggagtcttcggataccattgacaatgtcaaggccaagatccaggacaaggagggcattccaccgcaccagcagtgccttatttttgtcggttagcacccccccccc

SEQ ID NO: 344663 - DNA, 376 bp, Zea mays
caccaagcgaagcgcactagcaacgacctaacaacaatggctaccaagatattagccctccttgcgcttcttgccctttttgtgagcgcaacaaatgcgttcattattccacaatgctcacttgctcctagtgccattattccacagttcctcccaccagttacttcaatgggcttcgaacacctagctgtgcaagccaacatgcaacaacaagcgcttgcggcgagcgtcttacaacaaccaattgcccaattgcaacaacaatccttgccacatctaacaatacaagccatcacaacgcaacagcaacaacagttcctaccagcactgagccacctagccatggtgaaccctgccgcctacttgcaagagcagc

SEQ ID NO: 344664 - DNA, 210 bp, Zea mays
  unsure (1)..(210): unsure at all n locations
cgcgtncgatttgtgcattcagaaacacaccttgcgttttgcactagcaacaacctaacagcaatggctaccaagatattatccctccttgcgcttcttgcgctatttgcgagcgcaacaaatgcgtacattattccacaatgctcacttgctcctagttccattatttcacaagttcttccaccagttactttaatgggcttcgaacac

SEQ ID NO: 344665 - DNA, 380 bp, Zea mays
ggcaatcgcagctggcatcttacttttattacccttgttcctccaacaatcatgagccctattacaacagttacctttggtgcatttattggcacaaaacatcagggcacaacaactacaacaacttgtgctagcaaaccttgctgcctactctcagcaacagcagtttcttccattcaaccaactaggttcattgaactctgcttcttatttgcaacaacaacaactaccattcagccagctacctgctgcctacccccagcaatttcttccattcaaccaactagcagcattgaactcttctgcttatttacagcagcaacaactactaccattcagccagctagcttgtgtgagccctgctacctttttgacacaac

SEQ ID NO: 344666 - DNA, 266 bp, Zea mays
cacgcgtacgaccaagtaaatctcactatcaacttccttttatcaatggctaccaagaccttggccggggcttgtcttatagcccttcacgggagcgcaacaatagctttcatttttccacaatgctcaactagctcctagtgccattattctcacaagttcctgccaccagttactttaatgggcttggcacaacctagctgcgcaagccaacatgcaacatcttgtgctagccgtgagcgccttactacaaccaattgcctaat

SEQ ID NO: 344667 - DNA, 393 bp, Zea mays
catcaatcatcattcatcttagtagtattttcaccaaatcaaatctgcaacatcaattatctaactccaaaaaccatgaagctggtgcttgtggttcttgctttcattgctttagtatcaagtgtttcttgtacacagacaggcggctgcagctgtggtcaacaacaaagccatgagcagcaacatcatccacaacaacatcatccacaaaaacaacaacatcaaccaccaccacaacatcaccagcagcagcaacaccaacaacaacaagttcacatgcaaccacaaaaacatcagcaacaacaagaagttcatgttcaacaacaacaacaacaaccgcagcaccaacaacaacaacaaccacagcaccaacaacaacatcaatgtgaaggg

SEQ ID NO: 344668 - DNA, 358 bp, Zea mays
  unsure (1)..(358): unsure at all n locations
gcattcagaaacacaccaagcgaagctacctagcaacgacttaacaacaatggctaccaagatattagccctccttgcgcttcttgccctttttgtgagcgcaacaaatgcgttcattattccacaatgctcacttgctcctagtgccattataccacagttcctccgaccagttacttcaatgggcttcgaacacctagctgtgcaagcctacaggctacaacaagcgcttgcggcgagcgtcttacaacaaccaattaaccaattgcaacaacaatccttggcacatctaaccatacaaaccatcgcaacacaacagcaacaacagttnctaccagcactgagccaactagatgtg

SEQ ID NO: 344669 - DNA, 368 bp, Zea mays
atttagaccaactagcaacatagaaagcacaatagtgtaccaacaatggcagccaaaatattttgcctccttatgctccttggtatttctgcaagtgctgctacggcgaccattttcccgcaatgctcacaagctcctatagcttcccttcttcccccgtacctctcaccagcggtgtcttcggtatgtgaaaacccaattcttcaaccctacaggatccaacaggcaatcgcagctggcatcttacctttatcacccttgtttctccaacaattatcagccctattacagcagttacctttggtgcatttattggcacaaaacattagggcacaacacctacaacaacttgtgctagcaaacctttg

SEQ ID NO: 344670 - DNA, 386 bp, Zea mays
aagcaacatagaaagtggaatccagtagcaacaatagagcaacaatggagaccaagatattttccctccttatgctccttgctctttctacatgtgttgctaacgcgacaattttccctcaatgctcacaagctcctatagcttccctttttcccccataccttccatcaattatagcttcagtatgtgaaaacccagctcttcaaccatataggcttcaacaagcaatcgcagcaagcaacatacctttatcgcccttgttgtgtcaacaatcgccagccctatctttggtgcagtcattggtacaaaccatcagggcacaacagctgcagcaactcgtgctacctgtgatcaaccaagtagctctggcaaacctttcttcctac

SEQ ID NO: 344671 - DNA, 94 bp, Zea mays
  unsure (1)..(94): unsure at all n locations
ggaanncnccgggtcggacccacgccgtccgcaganaacacanccaatgcgatagcacatttatgcttcannnacctaacaaccannatggcta

SEQ ID NO: 344672 - DNA, 386 bp, Zea mays
aacacaccaagcgaagcgcactattaacttcctaacaacaatggctaccaagatattagccctccttgcgcttcttgccctttttgtgagcgcaacaaatgcgttcattattccacaatgctcacttgctcctagtgccattattccacagttcctcccaccagttacttcaatgggcttcgaacacctagctgtgcaagccaacatgcaacaacaagcgcttgcggcgagcgtcttacaacaaccaattgcccaattgcaacaacaatccttgccacatctaacaatacaagccatcacaacgcaacagcaacaacagttcctaccagcactgagccacctagccatggtgaaccctgccgcctacttgcaagagcagctgcttg

SEQ ID NO: 344673 - DNA, 301 bp, Zea mays
cccataatattttcagcattcagattcactccaagcgaagcgcactagcaacaacctgacaacaatggctaccaagatattagccctccttgcgcttcttgcccttttagtgagcgcaacaaatgcgttcattattccacagtgctcacttgctcctagtgccattattccacagttcctcccaccagttacttcaatgggcttcgaacattcagccgtgcaagcctacaggctacaactagcgcttgcggcgagcgttttacaacaaccaattgcccaattgcaacaacaatccttggca

SEQ ID NO: 344674 - DNA, 274 bp, Zea mays
ggaactgtggaataatgttcttcttacttctagctgtgcaagccaacatgcaacaacagagcgcttgcggcgagcgtcttacaacaaccaattgcccaattgcaacaacaatccttgccacatctaacaatacaagccatcacaacgcaacagcaacaacagttcctaccagcactgagccacctagccatggtgaaccctgtcgcctacttgcaagagcagttgtttgcatccaacccacttgctttggcgaacgtagttgcaaaccagcaac

SEQ ID NO: 344675 - DNA, 196 bp, Zea mays
ctccaggtctctctctcctctcctatactctcaagtcccatccggatccgagacgctggaggcggagcgcccccccgtgacggcggcggcgacgatggggcgcggcaagatcgagatcaagcggatcgagaacgccaccaaccgccaggtgacctactccaagcgccggacggggatcatgaagaagtctctctta

SEQ ID NO: 344676 - DNA, 358 bp, Zea mays
  unsure (1)..(358): unsure at all n locations
tttncaagacgattggttttagatgttgggnagggagaggtcggaatcttgcgggaggaactggctggaccgctgggtggaggagaggtacacggacgacgagaagaacgccaagattcttgaagtggataatggtaagttatggtggtttgtgtttaagaggngcggcggcggcggcggcggccaccatnaccagtggttgtgttttatgattatgtangagcagaacagccggagctacgcgaccatgccggagtnggggggtaaggattttattattgtgcattattnttttgttagtttgtcgaccgtgggcatggcggacgaggccctgagcccgctgcgcgtggcagcggat

SEQ ID NO: 344677 - DNA, 344 bp, Zea mays
tgagcattcagaaacacaccaagcgaagcgcactagcaacaacctaacaacaatggctaccaagatattatccctccttgcgcttcttgcgctttttgcgagcgcaacaaatgcgtccattattccacaatgctcacttgctcctagttccattattccacagttcctcccaccagttacttcaatggccttcgaacacccagctgtgcaagcctataggctacaacaagcgattgcggcgagcgtcttacaacaaccaattgcccaattgcaacaacaatcctttgcacatctaacaatacaaaccatcgcaacgcaacagcaacaacagtttctaccagcac

SEQ ID NO: 344678 - DNA, 397 bp, Zea mays
  unsure (1)..(397): unsure at all n locations
gcaacatagaaagtggaatccagtatcaacaatagagcaacaatggcgaccaagatattttccctccttatgctccttgctctttctgcatgtgttgctaacgcgacaattttccctcaatgctcacaagctcctatagcttcccttcttcccccataccttncatcaatgatagctttagtatgtgaaaacccacctcttcaaccctataggcttcaacaagcaattgnagtaagcaacatacctttatcacccttgtttcaacaatcgccagccctatctttggtgcagtcattggtacaaaccatcagggcccagtagttgcagcaactcgtgctacctgtgatcaaccaagtagctctggcaaacctttctccctactctcagcaacaacaat

SEQ ID NO: 344679 - DNA, 108 bp, Zea mays
aaaaaaaaaaaaaaaaaaaaaaaaaaaaaaaaaaaaaaaaaaaaaaaaaaaaaaaaaaaaaaaaaaaaaaataaaaaaaaaaaaaaaaaaaaaaaaaaaaaaaaaaag

SEQ ID NO: 344680 - DNA, 149 bp, Zea mays
tacccgagttattatatactacttttactttccgccaccttcgcttcgctagcggggcgtacccactcacccgttgtctccaaactcatttctcccgagcgccgccgcgagcctttgatccagcttttgtcatggctttccttaccgga

SEQ ID NO: 344681 - DNA, 393 bp, Zea mays
attttgagcattcagaaacacaccatgcgaagcacattagcaacaacctaacaacaatggctaccaagatattatccctccttgcgcttcttgcgctttttgcgagcgcaacaaatgcgttcattattccacaatgctcacttgctccaagttccattattacacagttcctcccaccagttacttcaatgggcttcgaacacccagctgtgcaagcctataggctacaacaagcaattgcggcgagcgtcttaccacaaccaatttcccagttgcaacaacaatccttggcacatctaacaatacaaaccatcgcaacgcaacagcaacaacaattcctaccagcactgagccacctagccatggtgaaccctgccgcctacttgcaacagc

SEQ ID NO: 344682 - DNA, 355 bp, Zea mays
  unsure (1)..(355): unsure at all n locations
tttaagcattcaaaaacacaccaagcgaagcgcactagcaacaacctaacaacaatggctaccaagatattagccctccttgcgcttcttgcccttttagtgagcgcaacaaatgcgttcattattccacaatgctcacttgctcctagtgccattattccacagttccttccaccagttactttaaagggcttcgaacatncaaccgggcaagcctacaggctacaactagcgcttgcggcgagcgtcttacaacaaccaattgcccaattgcaacaacaatccttggcacatctaaacctacaaaccatcgcaacgcaacagcaacaacagtttctgccatnactgagccacc

SEQ ID NO: 344683 - DNA, 362 bp, Zea mays
agaccaactagcaacatagaaagctcaatagtgtaccaacaatggcagccaaaatattttgcttccttatgctccttggtctttctgcaagtgttgctaccgcaaccattttcccacaatgctcacaagctcctatagcttcccttcttcccccatacctctcaccagcggtgtcttcaatgtgtgaaaacccaattgttcaaccctacaggatccaacaggcaatcgcaacaggcatcttaccattatcacccttgttcctccaacaaccgtcagccctattacagcagttacctttggtccatttggtggcacaaaacatcagggcacaacaactacaacaacttgtgctagcaaacctt

SEQ ID NO: 344684 - DNA, 362 bp, Zea mays
gaccaactagcaacatagaaagcactatagtgtaccaacaatggcagccaaaatattttgcctccttatgctccttggtctttctgcaagtgctgctacggcgaccattttcccgaaatgctcgcaagctcctatagcttcccttcttcccccgtacctctcaccagcggtgtcttcggtatgtgaaaacccaattcttcaaccctacaggatccaacaggcaatcacagctggcatcttacctttatcacccttgttcctccaacaatcatcagccctattacatcagttacctttggtgcatttattggcacaaaacatcagggcacaacaactacaacaacttgtgctagcaaaccttg

SEQ ID NO: 344685 - DNA, 360 bp, Zea mays
cgttcgcaacttgcaaagcacaaagctctaccatcaacggccgctgaaatattaagcctgctgacgctccttggtctttctgcaagtgctgctacggcgaccattttcccacaatgctcacaagctcctatagcttcccttcttcccccgtacctctcaccaacggtgtcttcggtatgtgaaaacccaattcttcaaccctacaggatccaacaggcaatcgcagctggcatcttacctttatcacccttgttcctccaacaatcatcagccctattacagcagttacctttggtgcatttattggcacaaaacatcagggcacaacaactacaacaacttgtgctagcaaaccttgct

SEQ ID NO: 344686 - DNA, 362 bp, Zea mays
gtcccataaataataattaatcttattgtcttaggcaccaaatcaaatctgcaacatcaattatttaactccaaaaaccatgaagctggtgcttgtggttcttgctttcattgctttagtatcaagtgtttcttgtacacagacaggcggctgcagctgtggtcaacaacaaagccatgagcagcaacatcatccacaacaacatcatccacaaaaacaacaacatcaaccaccaccacaacatcaccagcagcagcaacaccaacaacaacaagttcacatgcaaccacataaacatcagcaacaacaagaagttcatgttcaacaacaacaacaacaaccgcagcaccaacaacaacatc

SEQ ID NO: 344687 - DNA, 363 bp, Zea mays
gcgaagcgcactagcaacaacctaacatctttttctaccaagatattagccctccttgcgcttcttgcccttttagtgagcgcaccaaatgcgttcattattccacagtgctcacttgctcctagtgccattattccacagttcctcccaccagttacttcaatgggcttcgaacatccagccgtgcaagcctacaggctacaactagcgcttgcggcgagcgtcttacaacaaccaattgcccaattgcaacaacaatccttggcacatctaaacctacaaaccatcgcaacgcaacagcaacaacagtttctgccatcactgagccacctagccgtggtgaaccctgtcgcctacttgcaa

SEQ ID NO: 344688 - DNA, 354 bp, Zea mays
attgagaccaacaagcaacatagattgtggaatacagtagcaacaatagagcagcaatggcggccaagatattttccatccttatgctccttgctctttctgcatgtgttgctaacgcgaccatttttcctcaatactcacaagctcctatagctgcccttcttcccccataccttccatcaatgaccgcttcagtatgtgaaaacccagcccttcaaccctacaggctccaacaagcaatcgcaacaagcaacttacctttatcacccctgttctttcaacaatcggcaggcctatctttggtgcagtcattggtacaaaccatcatggcacaacagctgcagcaactcgtgc

SEQ ID NO: 344689 - DNA, 362 bp, Zea mays
attgagaccaacaagcaacatagaatgtggaatccagtagcaacaatagagcaacaatggcgaccaagatattttccctccttatgctccttgctctttctgcatgtgttgctaacgcgacaattttccctcaatgctcacaagctcctatagcttcccttcttcccccataccttccatcaatgatagcttcagtatgtgaaaacccagctcttcaaccctataggctccaacaagcaatcgcagcaagcaacatacctttatcacccttgtttcaacaatcgccagccctatctttggtgcagtcattggtacaaaccatcagggcacagcagctgcagcaactcgtgctacctgtgatc

SEQ ID NO: 344690 - DNA, 362 bp, Zea mays
agcaacatagaaagcacaatagtgttccaacaatggcagctaaaatattttgcctccttatgctccttggtctttctgcaagtgctgctacggcgaccattttcccacaatgctcacaagctcctatagcttcccttcttcccccgtacctctcaccaacggtgtcttcggtatgtgaaaacccaattcttcaaccctacaggatccaacaggcaatcgcagctggcatcttacctttatcacccttgttcctccaacaatcatcagccctattacagcagttacctttggtgcatttattggcacaaaacatcagggcacaacaactacaacaacttgtgctagcaaaccttgctgcctac

SEQ ID NO: 344691 - DNA, 361 bp, Zea mays
cggacgcgtgggttttgagcattcataatcacaccaagcgaagcgcactagcaacgacctaacaacaatggctaccaagatattagccctccttgcgcttcttgccctttttgtgagcgcaacaaatgcgttcattattccacaatgctcacttgctcctagtgccattattccacagttcctcccaccagttacttcaatgggcttcgaacacctagctgtgcaagccaacatgcaacaacaagcgcttgcggcgagcgtcttacaacaaccaattgcccaattgcaacaacaatccttgccacatctaacaatacaagccatcacaacgcaacagcaacaacagttcctaccagcactg

SEQ ID NO: 344692 - DNA, 363 bp, Zea mays
attttcagcattcagaaacacaccatgctttgcgcactagcaacaacctaacaacaatggctaccaagatattagccctccttgcgcttcttgcccttttagtgagcgcaacaaatgcgttcattattccacagtgctcacttgctcctagtgccattattccacagttcctcccaccagttacttcaatgggcttcgaacatccagccgtgcaagcctacaggctacaactagcgcttgcggcgagcgtcttacaacaaccaattgcccaattgcaacaacaatccttggcacatctaaacctacaaaccatcgcaacgcaacagcaacaacagtttctgccatcactgagccacctagccg

SEQ ID NO: 344693 - DNA, 365 bp, Zea mays
gcacaatagtgtaccaacaatggcatccaaaatattttgcctccttatgctccttggtatttctgcaagtgctgctacggcgaccattttcccgcaatgctcacaagctcctatagcttcccttcttcccccgtacctctcaccagcggtgtcttcggtatgtgaaaacccaattcttcaaccctacaggatccaacaggcaatcgcagctggcatcttacctttatcacccttgttcctccaacaatcatcagccctattacagcagttacctttggtgcatttattggcacaaaacatcagggcacaacaactacaacaacttgtgctagcaaaccttgctgcctactctcagcaacagcagt

SEQ ID NO: 344694 - DNA, 361 bp, Zea mays
cggacgcgtgggtcagcattcagaatcacaccaagcgaagcgcactagcaacaacctaacaacaatggctaccaagatattagccctccttgcgcttcttgcccttttagtgagcgcaacaaatgcgttcattattccacagtgctcacttgctcctagtgccattattccacagttcctcccaccagttacttcaatgggcttcgaacatccagccgtgcaagcctacaggctacaactagcgcttgcggcgagcgtcttacaacaaccaattgcccaattgcaacaacaatccttggcacatctaaacctacaaaccatcgcaacgcaacagcaacaacagtttctgccatcactgagc

SEQ ID NO: 344695 - DNA, 99 bp, Zea mays
gcgttctcatgggaaagattccaccttcttcagaatactccaggctggccggggggctgttcttgctatttatgtaaggctggagcttatggaaggagt

SEQ ID NO: 344696 - DNA, 382 bp, Zea mays
ttcccggtcggcccaacccgtccggaaggtggattccagtagcaccatttgagctccattggcggccaagatattttccagccttatgctccttgctctttctgcatgtgttgctaacgcgaccatttttcctcaatactcacaagctcctatagctgcccttcttcccccataccttccatcaatgaccgcttcagtatgtgaaaacccagcccttcaaccctacaggctccaacaagcaatcgcaacaagcaacttacctttatcacccctgttctttcaacaatcgccagccctatctttggtgcagtcattggtacaaaccatcagggcacaacagctgcagcaactcgtgctaccagtgatcagccaagtagctctg

SEQ ID NO: 344697 - DNA, 312 bp, Zea mays
  unsure (1)..(312): unsure at all n locations
cttctatcagtaccatcaatcatctttcatcttagtagtataggcaccaagtggggtctgcaacatcaattatctaactccaaaaaccatgaagctggtgcttgtggttcttgctttcattgctttannatcaagtgcctacttgtacacagacaggcggctgcagatgaggacaacttcatttgtctttagccacatcattttttcacatctctttttttcattatatcatatacattaacctccaccacttcttttccatttcttgttatctcacttttcaactagtttcctctctttttcataatcttt

SEQ ID NO: 344698 - DNA, 255 bp, Zea mays
ctcgaggtacctccattcgcagttttttcgtgtcctcggagccgcgggagatgggggatcaggagaccgtagctgtggttgaggcacctaccctgtatcttggtgaaccgatgttttgttaaactttcttatttttaaaaaaaaaattacctttatcaggtcctttgctaccccaaaatttttcattaacaatgaaaatgaacttctgtattaagagaacactactaccatcagcagctagctgtggagcctgta

SEQ ID NO: 344699 - DNA, 136 bp, Zea mays
aactcgccgtctgtcttctgctttctcatttcggcctctgtcccttgcaagtgggatcttacctccaaccatgggtaaagagaagtcccacatcaacattgtggttttattccttgttaactattattagtttttt

SEQ ID NO: 344700 - DNA, 264 bp, Zea mays
tgctctcactgtccaccggccagatctgggtgctctctccgaagctggccgcggacggccggacagtggagctgcacaagtgcgcggtcgtcgagctcgagccggcgcggcccgtgtacgcaatggaagtcgcaatgggaaggctgctgctcggggaggttggcggtttgcgcgtcttcccgctacggggtttgatgaagggtggaaaggagagggatgtgaagaaggaagttgctgtggttgtaggaaggtagggctgtcaca

SEQ ID NO: 344701 - DNA, 365 bp, Zea mays
gccggcctgacgacgatgatgggcgccgtcgggctgtacccctacgcggagtacctgaggcagccgcagtgcagcccgctggcggcggcgccctactacgccgggtgtgggcagacgagcgccatgtaccagccgctccggcaacagtgctgccagcagcagatgaggatgatggacgtgcagtccgtcgcgcagcagctgcagatgatgatgcagcttgagcgtgccgctgccgccagcagcagcctgtacgagccagctctgatgcagcagcagcagcagctgctggcagcccagggtctcaaccccatggccatgatgatggcgcagaacatgccggccatgggtggactctaccagtacca

SEQ ID NO: 344702 - DNA, 237 bp, Zea mays
ttccggtcgaccacgcgtcggtagctactgcctactttacatcttcttcttttccattaaccaattgggcggctgaaccccgctgtttatttgcagcagcaaatactactaccatttagccagctagctacagcaagccgtgctttctttttgacacaacaacagttgctgcctgtctaccatcagtttgtggttaaccccagatccttttttcaacttcatcaatttgttgttctt

SEQ ID NO: 344703 - DNA, 131 bp, Zea mays
taaattggtctcgccctgtagcggttcattaagctgctgaggtagatggttttcttcttttttttttaggtgttggtttctcttcttctttttcttcttatatctcttttattctcttttcttcttttcta

SEQ ID NO: 344704 - DNA, 71 bp, Zea mays
  unsure (1)..(71): unsure at all n locations
acaatagtgtaccaacaatggcagtttaaaatatnnngcctccttatgctggggggtctttttgcaagtgc

SEQ ID NO: 344705 - DNA, 316 bp, Zea mays
cctactcctccacccagctcgctgcttccggaatccggagagctcgcgtcgcgcgtgcgcgggcgtgggtgcgtgcggcggctaagcaccagcaccaccctctcgcgtcgcgcgcgcgtctcgatggccgacggcgagccttccctcacgcgctggaccttcgaggatttcgtggtccactacgaagcgcgcttttttcttcggcgcgtggccgactgttactgcgacggatatggtataaatttacctcttgccagtctaatctctatcatactttataatattttttttttatttttatattttctatactttt

SEQ ID NO: 344706 - DNA, 161 bp, Zea mays
  unsure (1)..(161): unsure at all n locations
ataccaactagcaacatacatagtgtagtacagtagcaacatcttagcaccaatggcagncaagatttttgccctccttgccctacttgctatttcagcaagtgttgctaccgcttctattattccacaatgctcacaacaattcctctctccggcgacag

SEQ ID NO: 344707 - DNA, 209 bp, Zea mays
gctttatctactccagagcgcagattaacccgatcgacaccatgagggtgttgcgtcgttgccctcgctctcctggctctcgctgcgagcgccacctccacgcatacaagcggcggctgcggctgccagccaccgccgccggttcatctaccgccgccggtgcatctgccacctccgtgtcacctgccaccttcggtgcatattccacc

SEQ ID NO: 344708 - DNA, 385 bp, Zea mays
tcccgggcggaccaacccttccgaccaactagcaccatagaaagcacatttttgtaccaacaatggcagccaaaatattttgcttccttatgctccttggtctttctgcaagtgctgctaccgcaaccattttcccacaatgctcacaagctcctatagcttcctttcttcccccatacctctcaccagcggtgtcttcagtatgtgaaaacccaattcttcaaccctacaggatccaacaggcaatcgcagcaggcatcttacctttatcacccttgttcctccaacaaccgtcagccctattacagcagttacctttggtgcatttgttggcacaaaacatcaaggcacaacaactacaacaacttgtgctaggaaaccttgc

SEQ ID NO: 344709 - DNA, 360 bp, Zea mays
gctttcagaaccccaccaagcgatttgttctaccaacaacctaacaacaatgggtgccaagatattatccctccttgcgcttcttgcgctttttgcgagcgcaacaaatgcgtccattattccacaatgctcacttgctcctagttccattattccacagttcctcccaccagttacttcaatggccttcgaacacccagctgtgcaagcctataggctacaacaagcgattgcggcgagcgtcttacaacaaccaattgcccaattgcaacaacaatccttggcacatctaacaatacaaaccattgcaacgcaacagcaacaacagttcctaccagcactgagccacctagccatggt

SEQ ID NO: 344710 - DNA, 289 bp, Zea mays
cttcttaccaagcggtgtcttcggtttttgttttcccaattcttcaacccttcaggggccggacaggcaatcacaggtggcatcttacctttatcacccttgttgcttcaacaatcatcagccctattacatcagttacctttggtgcatttattggcacacaacatcatggcacaacaactacaacatcttgtgctagcaaaccttgttgcctactctcagcatcagctagtttttccattcaaccaactagtctgaatttgtactcttttttcttatttgcaactac

SEQ ID NO: 344711 - DNA, 152 bp, Zea mays
cacgcgttcgttcagaaacacaccaagcgaagcacattatttaacaacctaacaacaatggctacggggggattatccctccttgcgcttcttgcgctttttgcgagcgcaacaaatttcgtcattattccacaatgctcacttgctccaag

SEQ ID NO: 344712 - DNA, 358 bp, Zea mays
attcagaaacacaccaagcgattcttttctagcaacgacctaacaacaatgggtaccaagatattagccctccttgcgcttcttgccctttttgtgagcgcaacaaatgcgttcattattccacaatgctcacttgctcctagtgccattattccacagttcctcccaccagttacttcaatgggcttcgaacacctagctgtgcaagccaacatgcaacaacaagcgcttgcggcgagcgtcttacaacaaccaattgcccaattgcaacaacaatccttgccacatctaacaatacatgccatcacaacgcaacagcaacaacagttcctaccagcactgagccacctagccatgg

SEQ ID NO: 344713 - DNA, 360 bp, Zea mays
gagaccaactagcaacatagaaagcacaatagtgtaccaacaatggcagccaaaatattttgcttccttatgctccttggtctttctgcaagtgctgctaccgcaaccattttcccacaatgctcacaagctcctatagcttcctttcttcccccatacctctcaccagcggtgtcttcagtatgtgaaaacccaattcttcaaccctacaggatccaacaggcaatcgcagcaggcatcttacctttatcacccttgttcctccaacaaccgtcagccctattacagcagttacctttggtgcatttgttggcacaaaacatcaaggcacaacaactacaacaacttgtgctaggaaac

SEQ ID NO: 344714 - DNA, 357 bp, Zea mays
cgcagctaagcccgtgccagcagttcggatcctgcggcgtcggcagcgtcggcagcccgttcctgggccagtgcgtcgagttcctgaggcaccagtgcagcccggcggcgacgccctacggctcgccacagtgccaggcgctgcagcagcagtgctgccaccagatcaggcaggtggagccgctgcaccggtaccaggcgacatacggtgtggtcctgcagtccttcctgcagcagcagccgcagggcgagctcgcggcgctgatggcggcccatgtagcgcagcagctgacggcgatgtgcggcctgcagctgcagcagccaggtccctgcccttgcaacgcagctgccgtcggtg

SEQ ID NO: 344715 - DNA, 361 bp, Zea mays
caactagcaacatagaaagcacaattgtgtaccaacaatggcagctaaaatattttgcctccttatgctccttggtctttctgcaagtgctgctacggcgaccattttcccacaatgctcacaagctcctatagcttcccttcttcccccgtacctctcaccaacggtgtcttcggtatgtgaaaacccaattcttcaaccctacaggatccaacaggcaatcgcagctggcatcttacctttatcacccttgttcctccaacaatcatcagccctattacagcagttacctttggtgcatttattggcacaaaacatcagggcacaacaactacaacaacttgtgctagcaaaccttgct

SEQ ID NO: 344716 - DNA, 340 bp, Zea mays
gaccacgcgttcggcacattagcaacaacctaacaacaatggctaccaagatattatccctccttgcgcttcttgcgctttttgcgagcgcaacaaatgcgttcattattccacaatgctcacttgctccaagttccattattacacagttccttccaccagttacttcaatgggcttcgaacacccagctgtgcaagcctataggctacaacaagcaattgcggcgagcgttttacaacaaccaatttcccagttgcaacaacaatccttggcacatctaacaatacaaaccatcgcaacgcatcagcaacaacaatttctaccagcactgagccacct

SEQ ID NO: 344717 - DNA, 308 bp, Zea mays
  unsure (1)..(308): unsure at all n locations
ggcagatcgatgagcgcacgcagctttcctgatgaggatgggaccaccgacgccgacggtgcgccccagcacggtgatgcatgacaccgacacgaagaggttcagccaccggtctggcaccttccacagtcccttggcatacagcttcagctctgccttgtgcacgcggtccaaccgtcattaccgctcttgatgcatagaagttctctggttattttttattgcaatattttcacaattcatggaagaacgnntncagttgtgatactttttacaaaagttgacagtgatgcgactattctattttt

SEQ ID NO: 344718 - DNA, 360 bp, Zea mays
caactagcaacatagaaagcacaattgtgtaccaacaatggcagccaaaatattttgcttccttatgctccttggtctttctgcaagtgctgctaccgcaaccattttcccacaatgctcacaagctcctatagcttcctttcttcccccatacctctcaccagcggtgtcttcagtatgtgaaaacccaattcttcaaccctacaggatccaacaggcaatcgcagcaggcatcttacctttatcacccttgttcctccaacaaccgtcagccctattacagcagttacctttggtgcatttattggcacaaaacatcagggcacaacaactacaacaacttgtgctagcaaaccttgc

SEQ ID NO: 344719 - DNA, 360 bp, Zea mays
attttcagcattcagaaacacaccatgcgaagcgcactagcaacaacctaacaacaatggctaccaagatattagccctccttgcgcttcttgcccttttagtgagcgcaacaaatgcgttcattattccacagtgctcacttgctcctagtgccattattccacagttcctcccaccagttacttcaatgggcttcgaacatccagccgtgcaagcctacaggctacaactagcgcttgcggcgagcgtcttacaacaaccaattgcccaattgcaacaacaatccttggcacatctaaacctacaaaccatcgcaacgcaacagcaacaacagtttctgccatcactgagccacctag

SEQ ID NO: 344720 - DNA, 179 bp, Zea mays
gtttcctagaaataatcaatatattgattgacatttatctcgataaaaaaaggggaaaaaaaaaaaaaaaaaaaaaaaaaaaaaaaaaaaaaaaaaaaaaaaaaaaaaaaaaaaaaaaaaaaaaaaaaaaaaaaaatataaaaaaaaaaataaaaaaataaaataaaaatatttgggtc

SEQ ID NO: 344721 - DNA, 363 bp, Zea mays
gggccgcgtgggtttcagcattcataaacacaccaagcgaagcgcactagcaacaacctaacaacaatggctaccaagatattagccctccttgcgcttcttgcccttttagtgagcgcaacaaatgcgttcattattccacagtgctcacttgctcctagtgccattattccacagttcctcccaccagttacttcaatgggcttcgaacatccagccgtgcaagcctacaggctacaactagcgcttgcggcgagcgtcttacaacaaccaattgcccaattgcaacaacaatccttggcacatctaaacctacaaaccatcgcaacgcaacagcaacaacagtttctgccatcactgagc

SEQ ID NO: 344722 - DNA, 220 bp, Zea mays
gaatcacaccaagcgaagcgctctttctatcaacctaacaacaatggctaccaagggattagtcctccttgcgcttcttgcccttttagtgagcgcaacaaatgcgttcattattccacagtgctcactcgctcctagtgccattattccacagtttcttccaccagtttcttcaatgtgctttgtacatccagccgtgcatgcctacattctacaactt

SEQ ID NO: 344723 - DNA, 356 bp, Zea mays
agcaacatagaaagcacaatagtgttccaacaatggcagccaaaatattttgcctgcttatgctccttggtctttctgcaagtgctgctacggcgaccattttcccgaaatgctcgcaagctcctatagcttcccttcttcccccgtacctctcaccagcggtgtcttcggtatgtgaaaacccaattcttcaaccctacaggatccaacaggcaatcacagctggcatcttacctttatcacccttgttcctccaacaatcatcagccctattacatcagttacctttggtgcatttattggcacaaaacatcagggcacaacaactacaacaacttgtgctagcaaaccttgct

SEQ ID NO: 344724 - DNA, 386 bp, Zea mays
tcccggtccgaccaacccgtccggctctttctgcatgtgttgctaactcgacttttttccctcaatgctcacaagctgcgatagcttcccttcttcccccataccttccatcaatgatagcttcagtatgtgaaaacccagctcttcaaccctataggctccaacaagcaatcgcagcaagcaacatacctttatcacccttgtttcaacaatcgccagccctatctttggtgcagtcattggtacaaaccatcagggcacagcagctgcagcaactcgtgctacctgtgatcaaccaagtagctctggcaaacctttctccctactctcagcaacaacaatttcttccattcaaccaactgtctacattgaaccgtgctgcttat

SEQ ID NO: 344725 - DNA, 94 bp, Zea mays
tcgagcaacatagaaagaacaatggtgctccaacaacggcatccactagatcctggggggttatgccccttggtctttttgcaaccatttgtta

SEQ ID NO: 344726 - DNA, 353 bp, Zea mays
ttcagaaacacaccaagcgaagcgcactatcaacaacctaacaacaatggctaccaagatattagccctccttgcgcttcttgcccttttagtgagcgcaacaaatgcgttcattattccacagtgctcacttgctcctagtgccattattccacagttcctcccaccagttacttcaatgggcttcgaacatccagccgtgcaagcctacaggctacaactagcgcttgcggcgagcgtcttacaacaaccaattgcccaattgcaacaacaatccttggcacatctaaacctacaaaccatcgcaacgcaacagcaacaacagtttctgccatcactgagccacctagccg

SEQ ID NO: 344727 - DNA, 359 bp, Zea mays
ggcagtgcgtagagaggatcgttttttcagaacagcatgaagatggtcatcggtgcgtggtcgtgtgcctggctctgtcagctgccagcgcctctgcaatgcagatgccctgcccctgcgcggggctgcagggcttgtacggcgctggcgccggcctgacgacgatgatgggcgccggcgggctgtacccctacgcggagtacctgaggcagccgcagtgcagcccgctggcggcggcgccctactacgccgggtgtgggcagacgagcgccatgtaccagccggtccggcaacagtgctgccagcagcagatgaggatgatggacgtgcagtccgtcgcgcagcagctgcatatgatg

SEQ ID NO: 344728 - DNA, 357 bp, Zea mays
gcaacatagaaagcacaatagtgttctcaacaatggcagccaaaatattttgcgcgtgcttatgctccttggtctttctgcaagtgctgctacggcgaccattttcccgaaatgctcgcaagctcctatagcttcccttcttcccccgtacctctcaccagcggtgtcttcggtatgtgaaaacccaattcttcaaccctacaggatccaacaggcaatcacagctggcatcttacctttatcacccttgttcctccaacaatcatcagccctattacatcagttacctttggtgcatttattggcacaaaacatcaggtcacaacaactacaacatcttgtgctagcataccttgc

SEQ ID NO: 344729 - DNA, 368 bp, Zea mays
attgagaccaactagcaacatataatgcacaatagtgtaccaacaatggcagccggaatattttgcttccttatgctccttggtctttctgcaagtgttgcttccgtaaccatttttccactatgctcacaagctcctatagcttcccttctttcccctttccttttacttgtataattttttttgcatgttattctctttatttaatccctcacgttccttccccctcttattattatctctttttttttatcttcactcttttctttcttatttccttttcttaatttttgtttatcttattctatttttattctaacttttcataaattatctctttttgcccctatacatacttatatttatac

SEQ ID NO: 344730 - DNA, 241 bp, Zea mays
ggccgtggcgcccacgctgcgcgcctcggtgctggccgcgctgcccccgtccgaccgctgggtggtcttcgtggggccctacgagcaccactccaacctgctcacctggcgggagagcctcgcggaggtggtggaggtcggtctgcccgcccctgattgcatcggttgtcctgggcttgtgaaaacccaatttttcaaccctatagtattcaacatgtaatgtgagggggcattttatctt

SEQ ID NO: 344731 - DNA, 356 bp, Zea mays
aactagcaacatagaaagcacaatattgtaccaacaatggcagccaaaatatttggcctccttatgctccttggtctttctgcaagtgctgctacggcgaccattttcccacaatgctcacaagctcctatagcttcccttcttcccccgtacctctcaccagcggtgtcttcggtatgtgaaaacccaattcttcaaccctataggatccaacaggcaatcgcagctggcatcttacctttatcacccttgttcctccaacaatcatcagccctattacagcagttacctttggtgcatttattggcacaaaacattaaggcacaacaactacaacaacttgtgctagcaaacct

SEQ ID NO: 344732 - DNA, 360 bp, Zea mays
tcgcccacgcgtccgcgcacacactcacttccagatctcccccaaatccacccgtcgggacctccgcttcaagatgcagatctttgtgaaaaccctgaccggcaagactatcaccctcgaggtggagtcgtctgacaccattgacaacgttaaggccaagatccaggacaaggagggcatccccccagaccagcagcggctcatcttcgctggcaaacagcttgaggacgggcgcacgcttgctgactacaacatccagatggagagcaccctccaccttgtgctccgcctcaggggaggcatgcagatctttgtgaaaaccctgaccggcaagactatcaccctcgaggtggagtcctc

SEQ ID NO: 344733 - DNA, 361 bp, Zea mays
attttgagcattcagaaacacaccaagcgtagcacattagcaacaacctaacaacagtggctaccaagatattatccctccttgcgcttcttgcgctttttgcgagcgcaacaaatgcgttcattattccacaatgctcacttgctccaagttccattattacacagttcctcccaccagttacttcaatgggcttcgaacacccagctgtgcaagcctataggctacaacaagcaattgcggcgagcgtcttacaacaaccaatttcccagttgcaacaacaatccttggcacatctaacaatacaaaccatcgcaacgcaacagcaacaacaattcctaccagcactgagccacctagc

SEQ ID NO: 344734 - DNA, 339 bp, Zea mays
  unsure (1)..(339): unsure at all n locations
caacattgtcagccaaaatatttggcctccttaggctccttggtctttctgcaagtgctgctacggcgaccattttcccacaatgctcacaagctcctatagcttcccttcttcccccgtacctctcaccagcggtgtcttcggtatgtgaaaacccaattcttcaaccctataggatccaacaggcaatcgcagctggcatcttacctttatcacccttgttcctccaacaatcatcagccctattacagcagttacctttggtgcatntattggcacaaaacatcatggcacaacaactacaacaacttgtgctagcaaaccttgctgcctactctc

SEQ ID NO: 344735 - DNA, 265 bp, Zea mays
  unsure (1)..(265): unsure at all n locations
cgttcgaacaactatcaacaaacttggtgctaggttaactcttgctnnngcctactctcagncaacagcgagttgtcttccatttcataccatactgtgctgcnnattgaactctgtctgcttatttgggcaacaaccaactacncnnattcagtcatgcttagcttttgctgcctaccnnncccagcatatttctttccatttcatacccatactggcatnngcattgaacntnncttgcttgcttatttaccaacnnagcaac

SEQ ID NO: 344736 - DNA, 305 bp, Zea mays
aacatcaccaacaatttttttttttttgcaacaacactaacatagtctgatctattccaatgtcagagtcattatcaacaacatcaacaacaatttcagggtcatgacaagcagcaacatccactacatcctcacaattttatcatgtccagtaaaaatcacatcatctacaatgtcattgtcaggatcttcaacagaccacaaggcgcatctattactactattgcattagctcaaatctaaaaaacttgtcatgaattccatatgcatcattgcagcccctttgttatgccttttttccaatc

SEQ ID NO: 344737 - DNA, 171 bp, Zea mays
cgcaaattgcaccaagaaatccatctagaggccgtcgacaggggaattaatggcgtcgtcgtctagcagcagccaccgccgcctcatcctcgcagccgccgtcctgctctccgtgctcgcggttgtcagtgccagcgccgtgaccccctgcatgcctgtgtggtcctttct

SEQ ID NO: 344738 - DNA, 205 bp, Zea mays
gaatccacaaaacagcatcaatttgttttccaacatattctccatcctaacgcggggggctttcactacatgtgtcgccctcacgccacttgcccctcaaacgctcacaagctatctatagctttctttcttcatccatccctgccatcaattattgccccagtttgccaaaaccactcatttctaccctatccaatcctacatg

SEQ ID NO: 344739 - DNA, 366 bp, Zea mays
caaccaattgcccaattgcaacaactatccttggcacatctaaacctacaaaccatcgcaacgcaacagcaacaacagtttctgccatcactgagccacctagccgtggtgaaccctgtcgcctacttgcaacagcagctacttgcatccaacccacttgctctggcgaacgtagctgcataccagcaacaacaacgtctgcaacagtttatgccagcgctcagtcaactagccatggtgaaccctgtcgcctacctacaacagcaacaattgctttcatctagcccgctcgctgtgggcaatgcacctacgtacctacaacaacagttgctgcaacagattgtaccagctctgactcagctagct

SEQ ID NO: 344740 - DNA, 372 bp, Zea mays
ttagaaagcacattagtgtaccaacattgtcagctaaaatattttgcctccttatgctccttggtctttctgcaagtgctgctacggcgaccattttcccacaatgctcacaagctcctatagcttcccttcttcccccgtacctctcaccaacggtgtcttcggtatgtgaaaacccaattcttcaaccctacaggatccaacaggcaatcgcagctggcatcttacctttatcacccttgttcctccaacaatcatcagccctattacagcagttacctttggtgcatttattggcacaaaacatcagggcacaacaactacaacaacttgtgctagcaaaccttgctgcctactctcagcaacagcagt

SEQ ID NO: 344741 - DNA, 391 bp, Zea mays
aacgggcgggaccaccgcgtccgaataagccctattacataagttacctttggtgcatttattggcacaaaacataagggcacaacaactacaacaacttgtgctagcaaaccttgctgcctactctcagcaacagcagtttcttccattcaaccaactagctgcattgaactctgcttcttatttgcaacaacaacaactaccattcagccagctacctgctgcctacccccagcaatttcttccattcaaccaactggcagcattgaactctcctgcttatttacagcagcaacaactactaccattcagccagctagctggtgtgagccctgctaccttcttgatacaaccacagttgttgccgttctaccagcacgctgcgcctaac

SEQ ID NO: 344742 - DNA, 315 bp, Zea mays
cagtaccatcaatcatcatttttcttattagtataggcaccaaatcaaatgggggacatcaattatctaactccaaaaaccatgaagctggtgcttgtggttcttgctttcattgctttagtatcaagtgttccttgttcacatacttgcgtctgtagctgttgtcaacatcaaattcatgagcattaacatcatccacaacaacatcatccacaaaaacaacaacatcaaccaccacctcatcatcaccatgctcatcatctccaacaacaacaagttcacatgcttccacaaatacatcagctacaacatgat

SEQ ID NO: 344743 - DNA, 366 bp, Zea mays
gtagcaacaatagagcaacaatggctaccaagatattttccctccttatgctccttgctctttctgcatgtgttgctaacgcgacaattttccctcaatgctcacaagctcctatagcttcccttcttcccccataccttccatcaatgatagcttcagtatgtgaaaacccagctcttcaaccctataggctccaacaagcaatcgcagcaagcaacatacctttatcacccttgtttcaacaatcgccagccctatctttggtgcagtcattggtacaaaccatcagggcacagcagctgcagcaactcgtgctacctgtgatcaaccaagtagctctggcaaacctttctccctactctcagc

SEQ ID NO: 344744 - DNA, 366 bp, Zea mays
caacaagcaacatagaaagtggaatccagtagcaacaatagagcaacaatggagaccaagatattttccctccttatgctccttgctctttctacatgtgttgctaacgcgacaattttccctcaatgctcacaagctcctatagcttccctttttcccccataccttccatcaattatagcttcagtatgtgaaaacccagctcttcaaccatataggcttcaacaagcaatcgcagcaagcaacatacctttatcgcccttgttgtgtcaacaatcgccagccctatctttggtgcagtcattggtacaaaccatcagggcacaacagctgcagcaactcgtgctacctgtgatcaaccaagta

SEQ ID NO: 344745 - DNA, 365 bp, Zea mays
tagcaacatagaaagcacaatagtgtaccaacaatggcagccaaaatattttgcctccttatgctccttggtctttctgcaagtgctgctacggcgaccattttcccgaaatgctcgcaagctcctatagcttcccttcttcccccgtacctctcaccagcggtgtcttcggtatgtgaaaacccaattcttcaaccctacaggatccaacaggcaatcacagctggcatcttacctttatcacccttgttcctccaacaatcatcagccctattacatcagttacctttggtgcatttattggcacaaaacatcagggcacaacaactacaacaacttgtgctagcaaaccttgctgcctactc

SEQ ID NO: 344746 - DNA, 366 bp, Zea mays
caactagcaacatagaaagcacaattgtgtaccaacaatggcagccaaaatattttgcctccttatgctccttggtctttctgcaagtgctgctacggcgaccattttcccgcaatgctcgcaagctcctatagcttcccttcttcccccgtacctctcaccagcggtgtcttcggtatgtgaaaacccaattcttcaaccctacaggatccaacaggcaatcgcagctggcatcttacctttatcacccttgttcctccaacaatcatcagccctattacaacagttacctttggtgcatttattggcacaaaacatcagggcacaacaactacaacaacttgtgctagcaaaccttgctgccta

SEQ ID NO: 344747 - DNA, 187 bp, Zea mays
cggacgcgtgggttcagaccattatctttatctactccagagcgcagaagaacccgatcgacaccatgagggtgttgctcgttgccctcgctctcctggctctcgctgcgagcgccacctccactcatacaagcggcggctgttgctgccagccaccgtcgccgtttcttctaccgtcgtctgtgca

SEQ ID NO: 344748 - DNA, 192 bp, Zea mays
cggacgcgtgggttcagaccattatgtctttatctactccagagcgcagaagaacccgatcgacaccatgagggtgttgcttgttgccctcgttctcctggctcttgctgcgagcgccacctccactcatacaagcggtggttgtggttgccagccaccgccgccggatattctaccgtcgactgttgcatc

SEQ ID NO: 344749 - DNA, 144 bp, Zea mays
cagatcagcacggcagcgtagaggcggcagaacaagagatggatgtctgggtgccgcttgagtgccgccttgagcatgccctgcccctggcggggctgaggctgacgctcccgctgcacatatggcccgcgctgccctccgggt

SEQ ID NO: 344750 - DNA, 365 bp, Zea mays
cagcattcagaaacacaccaagcgttgcgcactagcaacaacctaacaacaatggctaccaagatattagccctccttgcgcttcttgcccttttagtgagcgcaacaaatgcgttcattattccacagtgctcacttgctcctagtgccattattccacagttcctcccaccagttacttcaatgggcttcgaacatccagccgtgcaagcctacaggctacaactagcgcttgcggcgagcgtcttacaacaaccaattgcccaattgcaacaacaatccttggcacatctaaacctacaaaccatcgcaacgcaacatcaacaacagtttctgccatcactgagccacctagccgtggtgaa

SEQ ID NO: 344751 - DNA, 365 bp, Zea mays
aagcggcagtgcgtagagaggatcgtcgaacagaacagcatgaagatggtcatcgttctcgtcgtgtgcctggctctgtcagctgccagcgcctctgcaatgcagatgccctgcccctgcgcggggctgcagggcttgtacggcgctggcgccggcctgacgacgatgatgggcgccggcgggctgtacccctacgcggagtacctgaggcagccgcagtgcagcccgctggcggcggcgccctactacgccgggtgtgggcagacgagcgccatgtaccagccgctccggcaacagtgctgccagcagcagatgaggatgatggacgtgcagtccgtcgcgcagcagctgcagatgatgatgca

SEQ ID NO: 344752 - DNA, 368 bp, Zea mays
caactagcaacatagaaagcacaattgtgtaccaacaatggcagccaaaatattttgcttccttatgctccttggtctttctgcaagtgctgctaccgcaaccattttcccacaatgctcacaagctcctatagcttcctttcttcccccatacctctcaccagcggtgtcttcagtatgtgaaaacccaattcttcaaccctacaggatccaacaggcaatcgcagcaggcatcttacctttatcacccttgttcctccaacaaccgtcagccctattacagcagttacctttggtgcatttgttggcacaaaacatcaaggcacaacaactacaacaacttgtgctaggaaaccttgctgcctact

SEQ ID NO: 344753 - DNA, 291 bp, Zea mays
cccacgcgtccgcagcaaaagcggcagtgcgtagagaggatcgtcgaacagaacagcatgaagatggtcatcgttctcgtcgtgtgcctggctctgtcagctgccagcgcctctgcaatgcagatgccctgcccctgcgcggggctgcagggcttgtacggcgctggcgccggcctgacgacgatgatgggcgccggcgggctgtacccctacgcggagtacctgaggcagccgtagtgcatccctgtggcggtggcgccctactacgccgggtgtgggcagactagcgcc

SEQ ID NO: 344754 - DNA, 117 bp, Zea mays
aaaaaaatattataataaataccttttttttttaaaacaaaaagataaaataaacagggggaacattttgaataatacaaaacaactgacaagaaaatgaaaaatgggggccccttt

SEQ ID NO: 344755 - DNA, 367 bp, Zea mays
tagaaagcacaatagtgtaccaactttggcagccaaaatattttgcttccttatgctccttggtctttctgcaagtgctgctaccgcaaccattttcccacaatgctcacaagctcctatagcttcctttcttcccccatacctctcaccagcggtgtcttcagtatgtgaaaacccaattcttcaaccctacaggatccaacaggcaatcgcagcaggcatcttacctttatcacccttgttcctccaacaaccgtcagccctattacagcagttacctttggtgcatttgttggcacaaaacatcaaggcacaacaactacaacaacttgtgctaggaaaccttgctgcctactctcagcaacag

SEQ ID NO: 344756 - DNA, 367 bp, Zea mays
attcagaaacacaccaagcgaagcgccctttcaacaacctaacaacaatggctaccaagatattatccctccttgcgcttcttgcgctttttgcgagcgcaacaaatgcgtccattattccacaatgctcacttgctcctagttccattattccacagttcctcccaccagttacttcaatggccttcgaacacccagctgtgcaagcctataggctacaacaagcgattgcggcgagcgtcttacaacaaccaattgcccaattgcaacaacaatccttggcacatctaacaatacaaaccatcgcaacgcaacagcaacaacagttcctaccagcactgagccacctagccatggtgaaccctgt

SEQ ID NO: 344757 - DNA, 368 bp, Zea mays
attttcagcattcagaaacacaccaagcgaagcgcactagcaacaacctaacaacaatggctaccaagatattagccctccttgcgcttcttgcccttttagtgagcgcaacaaatgcgttcattattccacagtgctcacttgctcctagtgccattattccacagttcctcccaccagttacttcaatgggcttcgaacatccagccgtgcaagcctacaggctacaactagcgcttgcggcgagcgtcttacaacaaccaattgcccaattgcaacaacaatccttggcacatctaaacctacaaaccatcgcaacgcaacagcaacaacagtttctgccatcactgagccacctagccgtggtg

SEQ ID NO: 344758 - DNA, 367 bp, Zea mays
gaccaacaagcaacatagaaagtggaatccagtagcaacaatagagcaacaatggcgaccaagatattttccctccttatgctccttgctctttctgcatgtgttgctaacgcgacaattttccctcaatgctcacaagctcctatagcttcccttcttcccccataccttccatcaatgatagcttcagtatgtgaaaacccagctcttcaaccctataggctccaacaagcaatcgcagcaagcaacatacctttatcacccttgtttcaacaatcgccagccctatctttggtgcagtcattggtacaaaccatcagggcacagcagctgcagcaactcgtgctacctgtgatcaaccaagtag

SEQ ID NO: 344759 - DNA, 85 bp, Zea mays
aaaaaaaaaaaaaaaaaaaaaatattaaaaaaaaaaaaaaaaaaaaaaaaaaaaaaaaaaaaaaaaaaaaaaaaaaaaaaaaaag

SEQ ID NO: 344760 - DNA, 368 bp, Zea mays
gcacaatagtgtaccaacaatggcagctaaaatatttggcctcctaatgctcctgggtctttctgcaagtgctgctacggcgaccattttcccacaatgctcacaagctcctatagcttcccttcttcccccgtacctctcaccaacggtgtcttcggtatgtgaaaacccaattcttcaaccctacaggatccaacaggcaatcgcagctggcatcttacctttatcacccttgttcctccaacaatcatcagccctattacagcagttacctttggtgcatttattggcacaaaacatcaaggcacaacaactacaacaacttgtgctagcaaaccttgctgcctactctcagcaacagcagtttc

SEQ ID NO: 344761 - DNA, 365 bp, Zea mays
caacaagcaacatagaaagtggaatccattagcaacaatagagcaacaatggcgaccaagatattttccctccttatgctccttgctctttctgcatgtgttgctaacgcgacaattttccctcaatgctcacaagctcctatagcttcccttcttcccccataccttccatcaatgatagcttcagtatgtgaaaacccagctcttcaaccctataggctccaacaagcaatcgcagcaagcaacatacctttatcacccttgtttcaacaatcgccagccctatctttggtgcagtcattggtacaaaccatcagggcacagcagctgcagcaactcgtgctacctgtgatcaaccaagtagc

SEQ ID NO: 344762 - DNA, 369 bp, Zea mays
attttcagcattcaaaaacacaccaagcgaagcgcactagcaacaacctaacaacaatggctaccaagatattagccctccttgcgcttcttgcccttttagtgagcgcaacaaatgcgttcattattccacagtgctcacttgctcctagtgccattattccacagttcctcccaccagttacttcaatgggcttcgaacatccagccgtgcaagcctacaggctacaactagcgcttgcggcgagcgtcttacaacaaccaattgcccaattgcaacaacaatccttggcacatctaaacctacaaaccatcgcaacgcaacagcaacaacagtttctgccatcactgagccacctagccgtggtga

SEQ ID NO: 344763 - DNA, 366 bp, Zea mays
gcaacatagaaagcacaatagggtaccaccattggcggccaaaatatttggcctcctgatgctccttggtctttctgcaagtgctgctacggcgaccattttcccgcaatgctcgcaagctcctatagcttcccttcttcccccgtacctctcaccagcggtgtcttcggtatgtgaaaacccaattcttcaaccctacaggatccaacaggcaatcgcagctggcatcttacctttatcacccttgttcctccaacaatcatcagccctattacaacagttacctttggtgcatttattggcacaaaacatcagggcacaacaactacaacaacttgtgctagcaaaccttgctgcctactctca

SEQ ID NO: 344764 - DNA, 368 bp, Zea mays
ctcacttgctccaagttccattattacacagttcctcccaccagttacttcaatgggcttcgaacacccagctgtgcaagcctataggctacaacaagcaattgcggcgagcgtcttacaacaaccaatttcccagttgcaacaacaatccttggcacatctaacaatacaaaccatcgcaacgcaacagcaacaacaattcctaccagcactgagccacctagccatggtgaaccctgccgcctacttgcaacagcagttgcttgcatcaaacccacttgctctggcaaacgtagttgcaaaccagccacaacaacagctgcaacagtttctgccagcgctcagtcaactagccatggtgaaccctg

SEQ ID NO: 344765 - DNA, 244 bp, Zea mays
tcgacgtttgtgttggggaaggaaagaagaacagagaaactataaaggtgagggcctgaacgaagatgttgcgggtacgggcagggggagggcgcgactggtggcgggcagcggacccgtgccaaacaagctcactggggggttctggcggtcgaccggcggtcggcagtgggacacgcactgctctccaaccacagcctctcgccagtgtcgggcaagacaggttgctgcagggggtgcacct

SEQ ID NO: 344766 - DNA, 368 bp, Zea mays
caactagcaacatagaaagcacaattgtgtaccaacaatggcagccaaaatattttgcctccttatgctccttggtctttctgcaagtgctgctacggcgaccattttcccacaatgctcacaagctcctatagcttcccttcttcccccgtacctctcaccagcggtgtcttcggtatgtgaaaacccaattcttcaaccctataggatccaacaggcaatcgcagctggcatcttacctttatcacccttgttcctccaacaatcatcagccctattacagcagttacctttggtgcatttattggcacaaaacatcagggcacaacaactacaacaacttgtgctagcaaaccttgctgcctact

SEQ ID NO: 344767 - DNA, 366 bp, Zea mays
aacaacttgtgctagcaaaccttgctgcatactctcagcaacatcagtttcttgcattcaaccaactggctgcattgaactctgctgcttatttgcaacaacaattaccattcagccagctagttgctgcctacccccagcaatttcttccattcaaccaactagcagcattgaactctgctgcttatttacagcagcaacaactactaccattcagccagctacctgctgcctacccccagcaatttcttccattcaaccaactagcagcattgaactctcctgcttatttacagcagcaacaactactaccattcagccagctagctggtgtgagccctgctaccttcttgacacaaccacagt

SEQ ID NO: 344768 - DNA, 369 bp, Zea mays
aacacaccaagcgaagcgcactagctacgacctaacaacaatggctaccaagatattagccctccttgcgcttcttgccctttttgtgagcgcaacaaatgcgttcattattccacaatgctcacttgctcctagtgccattattccacagttcctcccaccagttacttcaatgggcttcgaacacctagctgtgcaagccaacatgcaacaacaagcgcttgcggcgagcgtcttacaacaaccaattgcccaattgcaacaacaatccttgccacatctaacaatacaagccatcacaacgcaacagcaacaacagttcctaccagcactgagccacctagccatggtgaaccctgccgcctactt

SEQ ID NO: 344769 - DNA, 365 bp, Zea mays
attgagaccaactagcaacatagaaagcacaatagtgtaccaacaatggcagccaaaatattttgcctccttatgctccttggtctttctgcaagtgctgctacggcgaccattttcccacaatgctcacaagctcctatagcttcccttcttcccccgtacctctcaccagcggtgtcttcggtatgtgaaaacccaattcttcaaccctataggatccaacaggcaatcgcagctggcatcttacctttatcacccttgttcctccaacaatcatcagccctattacagcagttacctttggtgcatttattggcacaaaacatcagggcacaacaactacaacaacttgtgctagcaaacct

SEQ ID NO: 344770 - DNA, 389 bp, Zea mays
  unsure (1)..(389): unsure at all n locations
tcccgggtccgaacccacgccgtncgtaactatgcaacatatgaaaggcacattattggtcccaacaatgggcagccaaaatattgtggcgtccttatgctccttggtctttctgcaagtgctgctaccgcaaccattttcccacaatgctcacaagctcctatagcttcctttcttcccccatacctctcaccagcggtgtcttcagtatgtgaaaacccaattcttcaaccctacaggatccaacaggcaatcgcagcaggcatcttacctttatcacccttgttccttcaacaaccgtcagccctattacagcagttacctttggtgcattttgtggcacaaaacatcaaggcacaacaactacaacaacttgtgctaggaaacct

SEQ ID NO: 344771 - DNA, 328 bp, Zea mays
ggctaccaagatattagccctccttgcgcttctggcccttttagtgagcgcaacaaatgcgttcattattccacagggctcacttgctcctagggccattattccacagttcctcccaccagttacttcaatgggcttcgaacatccagccgtgcaagcctacaggctacaactagcgcttgcggcgagcgtcttacaacatccaattgcccaattgcaacaacaatccttggcacatctaaacctacaaaccatcgcaacgcaacagcaacaacagtttctgccatcactgagccacctagccgtggtgaaccctgtcgcctacttg

SEQ ID NO: 344772 - DNA, 363 bp, Zea mays
ccaactagcaacatagaaagcacaatagtgtaccaacaatggcagccaaaatattttgcctccttatgctccttggtctttctgcaagtgctgctacggcgaccattttcccgcaatgctcgcaagctcctatagcttcccttcttcccccgtacctctcaccagcagtgtcttcggtatgtgaaaacccaattcttcaaccctacaggatccaacaggcaatcgcagctggcatcttacctttatcacccttgttcctccaacaatcatcagccctattacaacagttacctttggtgcatttattggcacaaaacatcagggcacaacaactacaacaacttgtgctagcaaaccttgctg

SEQ ID NO: 344773 - DNA, 368 bp, Zea mays
cagcattcagaaacacaccatgcgtagcgcactagcaacaacctaacaacaatggctaccaagatattagccctccttgcgcttcttgcccttttagtgagcgcaacaaatgcgttcattattccacagtgctcacttgctcctagtgccattattccacagttcctcccaccagttacttcaatgggcttcgaacatccagccgtgcaagcctacaggctacaactagcgcttgcggcgagcgtcttacaacaaccaattgcccaattgcaacaacaatccttggcacatctaaacctacaaaccatcgcaacgcaacagcaacaacagtttctgccatcactgagccacctagccgtggtgaaccc

SEQ ID NO: 344774 - DNA, 369 bp, Zea mays
cggacgcgtggggaaacacaccaagtcgaagcgcactagcaacaacctaacaacaatggctaccaagatattatccctccttgcgcttcttgcgctttttgcgagcgcaacaaatgcgtccattattccacaatgctcacttgctcctagttccattattccacagttcctcccaccagttacttcaatggccttcgaacacccagctgtgcaagcctataggctacaacaagcgattgcggcgagcgtcttacaacaaccaattgcccaattgcaacaacaatccttggcacatctaacaatacaaaccatcgcaacgcaacagcaacaacagttcctaccagcactgagccacctagccatggtgaa

SEQ ID NO: 344775 - DNA, 369 bp, Zea mays
ctcacttgctcctagtgccattataccacagttcctccgaccagttacttcaatgggcttcgaacacctagctgtgcaagcctacaggctacaacaagcgcttgcggcgagcgtcttacaacaaccaattaaccaattgcaacaacaatccttggcacatctaaccatacaaaccatcgcaacacaacagcaacaacagttcctaccagcactgagccaactagatgtggtgaaccctgtcgcctacttgcaacagcaggtgcttgcatccaacccacttgctctggcaaacgtagctgcataccaacaacaacaacaattgcaacagtttctgccagcgctcagtcaactagccatggtgaaccctgg

SEQ ID NO: 344776 - DNA, 365 bp, Zea mays
attgagaccaactagcaacatagaaagcacaatagtgtaccaacaatggcagccaaaatattttgcctccttatgctccttggtctttctgcaagtgctgctacggcgaccattttcccgaaatgctcgcaagctcctatagcttcccttcttcccccgtacctctcaccagcggtgtcttcggtatgtgaaaacccaattcttcaaccctacaggatccaacaggcaatcacagctggcatcttacctttatcacccttgttcctccaacaatcatcagccctattacatcagttacctttggtgcatttattggcacaaaacatcagggcacaacaactacaacaacttgtgctagcaaacct

SEQ ID NO: 344777 - DNA, 367 bp, Zea mays
gctcaatggcgaccaagatatttttcctccttatgctccttgctctttctgcatgtgttgctaacgcgacaattttccctcaatgctcacaagctcctatagcttcccttcttcccccataccttccatcaatgatagcttcagtatgtgaaaacccagctcttcaaccctataggctccaacaagcaatcgcagcaagcaacatacctttatcacccttgtttcaacaatcgccagccctatctttggtgcagtcattggtacaaaccatcagggcacagcagctgcagcaactcgtgctacctgtgatcaaccaagtagctctggcaaacctttctccctactctcagcaacaacaatttcttcc

SEQ ID NO: 344778 - DNA, 372 bp, Zea mays
tcgcattcagaaacacaccaagcgaagctctctagcaacaacctaacaacaatggctaccaagatattagccctccttgcgcttcttgcccttttagtgagcgcaacaaatgcgttcattattccacagtgctcacttgctcctagtgccattattccacagttcctcccaccagttacttcaatgggcttcgaacatccagccgtgcaagcctacaggctacaactagcgcttgcggcgagcgtcttacaacaaccaattgcccaattgcaacaacaatccttggcacatctaaacctacaaaccatcgcaacgcaacagcaacaacagtttctgccatcactgagccacctagccgtggtgaaccctgtc

SEQ ID NO: 344779 - DNA, 389 bp, Zea mays
tcccggcggaccacccgtccgagcattcagaaacacaccaagcttgttcattagcaacaacctaacaacaatggctaccaagatattatccctccttgcgcttcttgcgctttttgcgagcgcaacaaatgcgttcattattccacaatgctcacttgctccaagttccattattacacagttcctcccaccagttacttcaatgggcttcgaacacccagctgtgcaagcctataggctacaacaagcaattgcggcgagcgtcttacaacaaccaatttcccagttgcaacaacaatccttggcacatctaacaatacaaaccatcgcaacgcaacagcaacaacaattcctaccagcactgagccacctagccatggtgaaccctg

SEQ ID NO: 344780 - DNA, 363 bp, Zea mays
tatagcttcagtatgtgaaaacccatctcttcaaccatataggcttcaacaagcaatcgcagcaagcaacatacctttatcgcccttgttgtgtcaacaatcgccagccctatctttggtgcagtcattggtacaaaccatcagggcacaacagctgcagcaactcgtgctacctgtgatcaaccaagtagctctggcaaacctttctccctactctccgcaacaacaatttcttccattcaaccaactgtctacactgaaccctgctgcttatttgcagcatcaactattaccatttagccagctagctactgcctactctcaacaacaacaacttcttccatttaaccaattggccgcact

SEQ ID NO: 344781 - DNA, 365 bp, Zea mays
tatagcttcagtatgtgaaaacccatctcttcaaccatataggcttcaacaagcaatcgcagcaagcaacatacctttatcgcccttgttgtgtcaacaatcgccagccctatctttggtgcagtcattggtacaaaccatcagggcacaacagctgcagcaactcgtgctacctgtgatcaaccaagtagctctggcaaacctttctccctactctccgcaacaacaatttcttccattcaaccaactgtctacactgaaccctgctgcttatttgcagcaacaactattaccatttagccagctagctactgcctactctcaacaacaacaacttctttcatttaaccaattggccgcactga

SEQ ID NO: 344782 - DNA, 366 bp, Zea mays
aaacacaccaagcgaagcgcactatctacaacctaacaacaatggctaccaagatattagccctccttgcgcttcttgcccttttagtgagcgcaacaaatgcgttcattattccacagtgctcacttgctcctagtgccattattccacagttcctcccaccagttacttcaatgggcttcgaacatccagccgtgcaagcctacaggctacaactagcgcttgcggcgagcgtcttacaacaaccaattgcccaattgcaacaacaatccttggcacatctaaacctacaaaccatcgcaacgcaacagcaacaacagtttctgccatcactgagccacctagccgtggtgaaccctgtcgcct

SEQ ID NO: 344783 - DNA, 368 bp, Zea mays
tttgagaccaacaggcaccatagaaggtggattacagttgcaccaatagagcaacaatggcggccaagatattttccatccttatgctccttgctctttctgcatgtgttgctaacgcgaccatttttcctcaatactcacaagctcctatagctgcccttcttcccccataccttccatcaatgaccgcttcagtatgtgaaaacccagcccttcaaccctacaggctccaacaagcaatcgcaacaagcaacttacctttatcacccctgttctttcaacaatcgccagccctatctttggtgcagtcattggtacaaaccatcagggcacaacagctgcagcaactcgtgctaccagtgatcagc

SEQ ID NO: 344784 - DNA, 201 bp, Zea mays
cacgcgtcgcaatagccaacagttcaatattgccttactctgttttgcagtgctgtcgaccattttcccatgctaagctcctatgcttcttttcccgaccttaccacggcttgttggaaaacccaatttaacctcagaccaacgcaccactggcattacttataccctgtctccatatacctaaccattccttgggcatat

SEQ ID NO: 344785 - DNA, 368 bp, Zea mays
gcacaatagtgtaccaacaatggctgccaaaatattttgcctccttatgctccttggtatttctgcaagtgctgctacggcgaccattttcccgcaatgctcacaagctcctatagcttcccttcttcccccgtacctctcaccagcggtgtcttcggtatgtgaaaacccaattcttcaaccctacaggatccaacaggcaatcgcagctggcatcttacctttatcacccttgttcctccaacaatcatcagccctattacagcagttacctttggtgcatttattggcacaaaacatcagggcacaacaactacaacaacttgtgctagcaaaccttgctgcctactctcagcaacagcagtttc

SEQ ID NO: 344786 - DNA, 370 bp, Zea mays
tgagcattcagaaacacaccaagcgaatcacattagcaacaacctaacaacaatggctaccaagatattatccctccttgcgcttcttgcgctttttgcgagcgcaacaaatgcgttcattattccacaatgctcacttgctccaagttccattattacacagttcctcccaccagttacttcaatgggcttcgaacacccagctgtgcaagcctataggctacaacaagcaattgcggcgagcgtcttacaacaaccaatttcccagttgcaacaacaatccttggcacatctaacaatacaaaccatcgcaacgcaacagcaacaacaattcctaccagcactgagccacctagccatggtgaaccct

SEQ ID NO: 344787 - DNA, 371 bp, Zea mays
aatattttgagcattcagaaacacaccatgcgaagcacattagcaacaacctaacaacaatggctaccaagatattatccctccttgcgcttcttgcgctttttgcgagcgcaacaaatgcgttcattattccacaatgctcacttgctccaagttccattattacacagttcctcccaccagttacttcaatgggcttcgaacacccagctgtgcaagcctataggctacaacaagcaattgcggcgagcgtcttacaacaaccaatttcccagttgcaacaacaatccttggcacatctaacaatacaaaccatcgcaacgcaacagcaacaacaattcctaccagcactgagccacctagccatggtg

SEQ ID NO: 344788 - DNA, 367 bp, Zea mays
caactagcaacatagaaagcacaattgtttcccaacaatggcagctaaaatatttggcctccttatgctccttggtctttctgcaagtgctgctacggcgaccattttcccacaatgctcacaagctcctatagcttcccttcttcccccgtacctctcaccaacggtgtcttcggtatgtgaaaacccaattcttcaaccctacaggatccaacaggcaatcgcagctggcatcttacctttatcacccttgttcctccaacaatcatcagccctattacagcagttacctttggtgcatttattggcacaaaacatcagggcacaacaactacaacaacttgtgctagcaaaccttgctgcctac

SEQ ID NO: 344789 - DNA, 364 bp, Zea mays
agaaagtggaatccagtagcaacaatagagcaacaatggcgaccaagatattttccctccttatgctccttgctctttctgcatgtgttgctaacgcgacaattttccctcaatgctcacaagctcctatagcttcccttcttcccccataccttccatcaatgatagcttcagtatgtgaaaacccagctcttcaaccctataggctccaacaagcaatcgcagcaagcaacatacctttatcacccttgtttcaacaatcgccagccctatctttggtgcagtcattggtacaaaccatcagggcacagcagctgcagcaactcgtgctacctgtgatcaaccaagtagctctggcaaacct

SEQ ID NO: 344790 - DNA, 365 bp, Zea mays
catagaaagcacaatagtgtaccaacaatggcagctaaaatattttgcctccttatgctccttggcctttctgcaagtgctgctacggcgaccattttcccacaatgctcacaagctcctatagcttcccttcttcccccgtacctctcaccaacggtgtcttcggtatgtgaaaacccaattcttcaaccctacaggatccaacaggcaatcgcagctggcatcttacctttatcacccttgttcctccaacaatcatcagccctattacagcagttacctttggtgcatttattggcacaaaacatcagggcacaacaactacaacaacttgtgctagcaaaccttgctgcctactctcagca

SEQ ID NO: 344791 - DNA, 348 bp, Zea mays
aacaacttgttccatttaaccaattggccgcactgaaccccgctgcttatttgcagcagcaaatactactaccatttagccagctagctgcagcaagccgtgcttccttcttgacacagcaacagttgctgcctttctaccagcagtttgcggctaaccccgcaaccctcttacaactacaacaattgttgccctttgtccaacttgctttgacaaacccagcagcctcctaccaacaacacatcattggtggtgccctcttttagattgcttattagttgtaattcaataataaagttttttggatgatgtatgtggccaaccagaaataagaagttacatttccag

SEQ ID NO: 344792 - DNA, 371 bp, Zea mays
gcgctcatccccagccagacccatgcccgtgccaacagccgcattcaagcccgtgccagctgcagggaacctgcggcgttggcagcaccccgatcctgggccagtgcgtcgagttcctgaggcatcagtgcagcccgacggcgacgccctactgctcgcctcagtgccagtcgttgcggcagcagtgttgccagcagctcaggcaggtggagccgcagcaccggtaccaggcgatcttcggcttggtcctccagtccatcctgcagcagcagccgcaaagcggccaggtcgcggggctgttggcggcgcagatagcgcagcaactgacggcgatgtgcggcctgcagcagccgactccatgcccctacgct

SEQ ID NO: 344793 - DNA, 184 bp, Zea mays
gtctttctgcaagtgctgctacggcgaccattttcccacaatgctcacaagctcctatagcttcccttcttcccccgtacctctcaccaacggtgtcttcggtatgtgaaaacccaattcttcaaccctacaggatccaacaggcaatcgcagctggcatcttacctttagttctagatcgcga

SEQ ID NO: 344794 - DNA, 368 bp, Zea mays
agcattcagaaacacaccaagcgaagcgcactagcaacgacctaacaacaatggctaccaagatattagccctccttgcgcttcttgccctttttgtgagcgcaacaaatgcgttcattattccacaatgctcacttgctcctagtgccattattccacagttcctcccaccagttacttcaatgggcttcgaacacctagctgtgcaagccaacatgcaacaacaagcgcttgcggcgagcgtcttacaacaaccaattgcccaattgcaacaacaatccttgccacatctaacaatacaagccatcacaacgcaacagcaacaacagttcctaccagcactgagccacctagccatggtgaaccct

SEQ ID NO: 344795 - DNA, 201 bp, Zea mays
  unsure (1)..(201): unsure at all n locations
aacaaanncttcaatgtaacctattttgaccaacagaaccacggtgcttatttgcagcagtgagaccggctctgtcagctgccagcgcctctgaaatgcagatgccctgcccctgcgcggggctgcagggcttgtacggcgctggcgccggcctgacgacgatgatgggcgccagagggctgtacccgtacgcggagtacc

SEQ ID NO: 344796 - DNA, 246 bp, Zea mays
  unsure (1)..(246): unsure at all n locations
gaacccccgggcgacccacgcgaccggcggcagagcaagcacaggancgtttcaccaaacaccaccaaaatggggagcggcgcaactgcgcccgctccgcaacaccaccacctaaccagcacccgcccgccccggcgacaagaggcatgacccccgacccccaccagcacaacaaggaaccaaacccaaactcaacctacgaaccacagcatatcaccgcatctacctaatacccagctccacaca

SEQ ID NO: 344797 - DNA, 169 bp, Zea mays
tcggcatcatataatgaacacgtatttttttcctaacacaaccaaactaggtggggggcttattcttcaaagtactctctgcaattgctcataaccgtgagccataatgtccgcaatggcccactatgctgctatagtctgcccttctacccgcccgtaccttctcacc

SEQ ID NO: 344798 - DNA, 198 bp, Zea mays
agaaagtatttccttcgtcctgaatctctgatctctcacggagttcccctgtatggcgacgcctcgctcaccgagccccagcgccgccgcgcgtctcgattctgcgccgctgctgggcggcgcctccggcggcgggtcccgtcgccgaggtggagcgcttcgtcggccctccctccgaggcgcggtgcggctgctgct

SEQ ID NO: 344799 - DNA, 367 bp, Zea mays
cactaccctactcaaccgccccggcctcagcctcatccccagccacacccatgcccgtgccaacagccgcatccaagcccgtgccagctgcagggaacctgcggcgttggcagcaccccgatcctgggccagtgcgtcgagttcctgaggcatcagtgcagcccgacggcgacgccctactgctcgcctcagtgccagtcgttgcggcagcagtgttgccagcagctcaggcaggtggagccgcagcaccggtaccaggcgatcttcggcttggtcctccagtccatcctgcagcagcagccgcaaagcggccaggtcgcggggctgttggcggcgcagatagcgcagcaactgacggcgatgtgcg

SEQ ID NO: 344800 - DNA, 369 bp, Zea mays
attgagaccaacaagcaacatagatagtggaatccagtagcaacaatagagcaacaatggcgaccaagatattttccctccttatgctccttgctctttctgcatgtgttgctaacgcgacaattttccctcaatgctcacaagctcctatagcttcccttcttcccccataccttccatcaatgatagcttcagtatgtgaaaacccagctcttcaaccctataggctccaacaagcaatcgcagcaagcaacatacctttatcacccttgtttcaacaatcgccagccctatctttggtgcagtcattggtacaaaccatcagggcacagcagctgcagcaactcgtgctacctgtgatcaaccaag

SEQ ID NO: 344801 - DNA, 374 bp, Zea mays
atcaaccacaaccacaacattactttgtggagtaacaccaacaccatcaagtggacatgctacacacaaaaacatcagcatcatcatgatgtttatgttcaacaactgcatcgacaaccggagaaccttcaacaactgcatcaacagctcctacagcatcatttatgtgaaggtcaacaacatcattaccaacaatcacatgggcatgtgcaacatctcgaacagtgtcatgtgcaacacgaaggacagagccgtgagctacatcattaacaacattttcagggtcatgacaggcatatacaaccacaacagcctgatgcatatcatcagggccaggaaaaatcacaacagcaacactgtcattgacaggagca

SEQ ID NO: 344802 - DNA, 371 bp, Zea mays
cggacgcgtgggtagcaacaatagagcaccaatggcgaccaagatattttccctccttatgctccttgctctttctgcatgtgttgctaacgcgacaattttccctcaatgctcacaagctcctatagcttcccttcttcccccataccttccatcaatgatagcttcagtatgtgaaaacccagctcttcaaccctataggctccaacaagcaatcgcagcaagcaacatacctttatcacccttgtttcaacaatcgccagccctatctttggtgcagtcattggtacaaaccatcatggcacagcagctgcagcaactcgtgctacctgtgatcaaccaagtagctctggcaaacctttctccctact

SEQ ID NO: 344803 - DNA, 375 bp, Zea mays
ttgagaccaactagcaccatagaaggcacaatagtgtaccaacaatggcagccaaaatattttgcctccttatgctccttggtctttctgcaagtgctgctacggcgaccattttcccgcaatgctcgcaagctcctatagcttcccttcttcccccgtacctctcaccagcggtgtcttcggtatgtgaaaacccaattcttcaaccctacaggatccaacaggcaatcgcagctggcatcttacctttatcacccttgttcctccaacaatcatcagccctattacaacagttacctttggtgcatttattggcacaaaacatcagggcacaacaactacaacaacttgtgctagcaaaccttgctgcctact

SEQ ID NO: 344804 - DNA, 356 bp, Zea mays
  unsure (1)..(356): unsure at all n locations
gagaccaactagcaacatagatagctcaatagtgtaccaacaatggcagccaaaatattttgcttccttatgctccttggtctttctgcaagtgttgctaccgcaaccattttcccacaatgctcacaagctcctatagcttcccttcttcccccatacctctcaccagcggtgtcttcaatgtgtgaaaacccaattgttcaaccctacaggatccaacaggcaatcgcaacaggcatcttaccattatcacccttgttcctccaacaaccgtcagccctattacagcagttacctttggtccatttggtggcacaaaacatcanggcacaacaactacaacaacttgtgctagc

SEQ ID NO: 344805 - DNA, 367 bp, Zea mays
caactagcaacatagaaagcacaatagtgtaccaacaatggcagccaaaatatgttgcttccttatgctccttggtctttctgcaagtgctgctaccgcaaccattttcccacaatgctcacaagctcctatagcttcctttcttcccccatacctctcaccagcggtgtcttcagtatgtgaaaacccaattcttcaaccctacaggatccaacaggcaatcgcagcaggcatcttacctttatcacccttgttccttcaacaaccgtcagccctattacagcagttacctttggtgcatttgttggcacaaaacatcaaggcacaacaacttcaacaacttgtgctaggaaaccttgctgcctac

SEQ ID NO: 344806 - DNA, 372 bp, Zea mays
cagaaacacaccaagcgaagcgcactagcaacaacctaacaacaatggctaccaagatattatccctccttgcgcttcttgcgctttttgcgagcgcaacaaatgcgtccattattccacaatgctcacttgctcctagttccattattccacagttcctcccaccagttacttcaatggccttcgaacacccagctgtgcaagcctataggctacaacaagcgattgcggcgagcgtcttacaacaaccaattgcccaattgcaacaacaatccttggcacatctaacaatacaaaccatcgcaacgcaacagcaacaacagttcctaccagcactgagccacctagccatggtgaaccctgtcgcctact

SEQ ID NO: 344807 - DNA, 373 bp, Zea mays
gcaacatagaaagcacaatagtgtaccatcaatggcagccaaaatattttgcttgcttatgctccttggtctttctgcaagtgttgctaccgcaaccattttcccacaatgctcacaagctcctatagcttcccttcttcccccatacctctcaccagcggtgtcttcaatgtgtgaaaacccaattgttcaaccctacaggatccaacaggcaatcgcaacaggcatcttaccattatcacccttgttcctccaacaaccgtcagccctattacagcagttacctttggtccatttggtggcacaaaacatcagggcacaacaactacaacaacttgtgctagcaaaccttgctgcatactctcagcaacat

SEQ ID NO: 344808 - DNA, 371 bp, Zea mays
attcagaaacacaccaagcgaagcgcactatcaacgacctaacaacaatggctaccaagatattagccctccttgcgcttcttgccctttttgtgagcgcaacaaatgcgttcattattccacaatgctcacttgctcctagtgccattattccacagttcctcccaccagttacttcaatgggcttcgaacacctagctgtgcaagccaacatgcaacaacaagcgcttgcggcgagcgtcttacaacaaccaattgcccaattgcaacaacaatccttgccacatctaacaatacaagccatcacaacgcaacagcaacaacagttcctaccagcactgagccacctagccatggtgaaccctgccgcc

SEQ ID NO: 344809 - DNA, 266 bp, Zea mays
cgattccgtcgccacgctccttagccactgcactaaagccatatgtccaacatggcgcaaaatatttgctctatgctctgtattttgagtgctgtcgcaccttttcccatgctacagcttatgtccttttccctcctctaccacgggctcgttggaacccattttacctacgaccacgcatcagtgcattaccttatacctgtctcacatatagcctatcacagtacttgtcattatgccaacatagccacactcacactggctgc

SEQ ID NO: 344810 - DNA, 374 bp, Zea mays
gcgaagcgcactagcaacaacctatctacaatggctaccaagatattagccctccttgcgcttcttgcccttttagtgagcgcaacaaatgcgttcattattccacagtgctcacttgctcctagtgccattattccacagttcctcccaccagttacttcaatgggcttcgaacatccagccgtgcaagcctacaggctacaactagcgcttgcggcgagcgtcttacaacaaccaattgcccaattgcaacaacaatccttggcacatctaaacctacaaaccatcgcaacgcaacagcaacaacagtttctgccatcactgagccacctagccgtggtgaaccctgtcgcctacttgcaacagcagctact

SEQ ID NO: 344811 - DNA, 369 bp, Zea mays
cggacgcgtgggccaacaggcaatcgcagctggcatcttacctttatcacccttgttcctccaacaatcatcagccctattacaacagttacctttggtgcatttattggcacaaaacatcagggcacaacaactacaacaacttgtgctagcaaaccttgctgcctactctcagcaacagcagtttcttccattcaaccaactaggttcattgaactctgcttcttatttgcaacaacaacaactaccattcagccagctacctgctgcctacccccagcaatttcttccattcaaccaactagcagcattgaactctcctgcttatttacagcagcaacaactactaccattcagccagctagctgg

SEQ ID NO: 344812 - DNA, 372 bp, Zea mays
gcaaagcggcagtgcgtagagaggatcgtcgaacagaacagcatgaagatggtcatcgttctcgtcgtgtgcctggctctgtcagctgccagcgcctctgcaatgcagatgccctgcccctgcgcggggctgcagggcttgtacggcgctggcgccggcctgacgacgatgatgggcgccggcgggctgtacccctacgcggagtacctgaggcagccgcagtgcagcccgctggcggcggcgccctactacgccgggtgtgggcagacgagcgccatgtaccagccgctccggcaacagtgctgccagcagcagatgaggatgatggacgtgcagtccgtcgcgcagcagctgcagatgatgatgcagctt

SEQ ID NO: 344813 - DNA, 372 bp, Zea mays
tttgagcattcagaaacacaccaagcgaagctacctagcaacgacttaacaacaatggctaccaagatattagccctccttgcgcttcttgccctttttgtgagcgcaacaaatgcgttcattattccacaatgctcacttgctcctagtgccattataccacagttcctccgaccagttacttcaatgggcttcgaacacctagctgtgcaagcctacaggctacaacaagcgcttgcggcgagcgtcttacaacaaccaattaaccaattgcaacaacaatccttggcacatctaaccatacaaaccatcgcaacacaacagcaacaacagttcctaccagcactgagccaactagatgtggtgaaccct

SEQ ID NO: 344814 - DNA, 370 bp, Zea mays
gaccattagctttatctactccagagcgcagaagaacccgatcgacaccatgagggtgttgctcgttgccctcgctctcctggctctcgctgcgagcgccacctccacgcatacaagcggcggctgcggctgccagccaccgccgtcggttcatctaccgccgccggtgcatctgccacctccggttcacctgccacctccggtgcatcttccaccgccggtccacctgccgtcgccggtccacctgccaccgccggtccatgtgccgtcgccggttcatctgccgccgccaccatgccactaccctactcaaccgccccggcctcagcctcatccccagccacacccatgcccgtgccaacagccgcat

SEQ ID NO: 344815 - DNA, 367 bp, Zea mays
caactagcaacatagaaagcacaatagtgtaccaacaatggcagccaaaatattttgcctccttatgctccttggtatttctgcaagtgctgctacggcgaccattttcccgcaatgctcacaagctcctatagcttcccttcttcccccgtacctctcaccagcggtgtcttcggtatgtgaaaacccaattcttcaaccctacaggatccaacaggcaatcgcagctggcatcttacctttatcacccttgttcctccaacaatcatcagccctattacagcagttacctttggtgcatttattggcacataacatcagggcacaacaactacaacaacttgtgctagcaaaccttgctgcctac

SEQ ID NO: 344816 - DNA, 357 bp, Zea mays
atcagtaccatcaatcatcattcatcttagtagtataggcaccaaatcaaatctgcaacatcaattatctaactccaaaaaccatgaagctggtgcttgtggttcttgctttcattgctttagtatcaagtgtttcttgtacacagacaggcggctgcagctgtggtcaacaacaaagccatgagcagcaacatcatccacaacaacatcatccacaaaaacaacatcatctaccaccaccacaacatcaccagcagctgcaacaccaacaacaacaagttcacatgcaaccacataaacatcagcaacaacaagaagttcatgttcaacaacaacaacaacatccgcagcaccaac

SEQ ID NO: 344817 - DNA, 371 bp, Zea mays
attcagaaacacaccaagcgttgctcattagcaacaacctaacaacaatggctaccaagatattatccctccttgcgcttcttgcgctttttgcgagcgcaacaaatgcgttcattattccacaatgctcacttgctccaagttccattattacacagttcctcccaccagttacttcaatgggcttcgaacacccagctgtgcaagcctataggctacaacaagcaattgcggcgagcgtcttacaacaaccaatttcccagttgcaacaacaatccttggcacatctaacaatacaaaccatcgcaacgcaacagcaacaacaattcctaccagcactgagccacctagccatggtgaaccctgccgcc

SEQ ID NO: 344818 - DNA, 370 bp, Zea mays
ccaactagcaacatagaaagcacaatagtgtaccaacaatggcagccaaaatattttgcctccttatgctccttggtctttctgcaagtgctgctacggcgaccattttcccacaatgctcacaagctcctatagcttcccttcttcccccgtacctctcaccagcggtgtcttcggtatgtgaaaacccaattcttcaaccctataggatccaacaggcaatcgcagctggcatcttacctttatcacccttgttcctccaacaatcatcagccctattacagcagttacctttggtgcatttattggcacaaaacatcagggcacaacaactacaacaacttgtgctagcaaaccttgctgcctactc

SEQ ID NO: 344819 - DNA, 375 bp, Zea mays
cacctagcaacatagaaggcacatttttgtcccaacaatggcagccaaaatattttgcctccttatgctccttggtctttctgcaagtgctgctacggcgaccattttcccacaatgctcacaagctcctatagcttcccttcttcccccgtacctctcaccagcggtgtcttcggtatgtgaaaacccaattcttcaaccctataggatccaacaggcaatcgcagctggcatcttacctttatcacccttgttcctccaacaatcatcagccctattacagcagttacctttggtgcatttattggcacaaaacatcagggcacaacaactacaacaacttgtgctagcaaaccttgctgcctactctcagca

SEQ ID NO: 344820 - DNA, 376 bp, Zea mays
gccagccaccgccgccggttcatttaccgccgccggtgcatctgccacctccggttcacctgccacctccggtgcatctcccaccgccggtccacctgccgccgccggtccacctgccaccgccggtccatgtgccgccgccggttcatctgccgtcgccaccatgccactaccctactcaaccgccccggcctcagcctcatccccagccacacccatgcccgtgccaacagccgcatccaagcccgtgccagctgcagggaacctgcggcgttggcagcaccccgatcctgggccagtgcgtcgagttcctgaggcatcagtgcagcccgacggcgacgccctactgctcgcctcagtgccagtcgttgcggca

SEQ ID NO: 344821 - DNA, 373 bp, Zea mays
cccacgcgtccgattttgagcattttgaaacacaccaagcgaagcacattagcaacaacctaacaacaatggctaccaagatattatccctccttgcgcttcttgcgctttttgcgagcgcaacaaatgcgttcattattccacaatgctcacttgctccaagttccattattacacagttcctcccaccagttacttcaatgggcttcgaacacccagctgtgcaagcctataggctacaacaagcaattgcggcgagcgtcttacaacaaccaatttcccagttgcaacaacaatccttggcacatctaacaatacaaaccatcgcaacgcaacagcaacaacaattcctaccagcactgagccacctagc

SEQ ID NO: 344822 - DNA, 368 bp, Zea mays
gcacaatagtgcaccaacaatggctttcaaaatattttgcttccttatgctccttggtctttctgcaagtgttgctaccgcaaccattttcccacaatgctcacaagctcctatagcttcccttcttcccccatacctatcaccagcggtgtcttcaacgtgtgaaaacccaattgttcaaccctacaggatccaacaggcattcgcaacaggcatcttaccattatcacccttgttccttcaacaaccgtctgccctattacagtagttacctttggtccatttggtggcacaaaacatgatggcacaacaactacaacaacttgtgctagcaaaccttgctgcatactctcagcaacatcagtttc

SEQ ID NO: 344823 - DNA, 367 bp, Zea mays
caatagtgtaccaacaatggcagccaaaatattttgcctccttatgctccttggtatttctgcaagtgctgctacggcgaccattttcccgcaatgctcacaagctcctatagcttcccttcttcccccgtacctctcaccagcggtgtcttcggtatgtgaaaacccaattcttcaaccctacaggatccaacaggcaatcgcagctggcatcttacctttatcacccttgttcctccaacaatcatcagccctattacagcagttacctttggtgcatttattggcacaaaacatcagggcacaacaactacaacaacttgtgctagcaaaccttgctgcctactctcagcaacagcagtttctt

SEQ ID NO: 344824 - DNA, 373 bp, Zea mays
tggactcgtgggcggacgcgtgttctgacgcgtgggattgagaccaacaagcgacatagaaagtggaatccagttgcaacaatagagcaacaatggcgaccaagatattttccctccttatgctccttgctctttctgcatgtgttgctaacgcgacaattttccctcaatgctcacaagctcctatagcttcccttcttcccccataccttccatcaatgatagcttcagtatgtgaaaacccagctcttcaaccctataggctccaacaagcaatcgcagcaagcaacatacctttatcacccttgtttcaacaatcgccagccctatctttggtgcagtcattggttcaaaccattcatggcacagcatc

SEQ ID NO: 344825 - DNA, 363 bp, Zea mays
caacatacctttatcacccttgtttcaacaatcgccagccctatctttggtgcagtcattggtacaaaccatcagggcacagcagctgcagcaactcgtgctacctgtgatcaaccaagtagctctggcaaacctttctccctactctcagcaacaacaatttcttccattcaaccaactgtctacattgaaccgtgctgcttatttgcagcaacaactattaccattcagccagctagctactgcctactctcagcaacaacaacttcttccatttaaccaattggccgcactgaaccccgctgcttatttgcagcagcaaatactactaccatttagccagctagctgcagcaagccgtgc

SEQ ID NO: 344826 - DNA, 181 bp, Zea mays
cctgtctttgaggttgtccgaccattccacatgctacactctatgcttcttttcccatccttaccacggttcaaggtgaaaacccatgtaacctcagatccaacgcaccacagcttaccattataccctgtctcacacctagccttacgattccttggtcatgggccaaaatagccacact

SEQ ID NO: 344827 - DNA, 371 bp, Zea mays
ccagcggtgtcttcggtatgtgaaaacccaattcttcaaccctataggatccaacaggcaatcgcagctggcatcttacctttatcacccttgttcctccaacaatcatcagccctattacagcagttacctttggtgcatttattggcacaaaacatcagggcacaacaactacaacaacttgtgctagcaaaccttgctgcctactctcagcaacaacagtttcttccattcaaccaactagctgcattgaactctgcttcttatttgcaacaacaacaactaccattcagccagctatctgctgcctacccccagcaatttcttccattcaaccaactgacagctttgaactctcctgcttatttaca

SEQ ID NO: 344828 - DNA, 364 bp, Zea mays
agaccattagctttatctactccatagcgcagaagaacccgatcgacaccatgagggtgttgctcgttgccctcgctctcctggctctcgctgcgagcgccacctccacgcatacaagcggcggctgcggctgccagccaccgccgccggttcatctaccgccgccggtgcatctgccacctccggttcacctgccacctccggtgcatctcccaccgccggtccacctgccgccgccggtccacctgccaccgccggtccatgtgccgccgccggttcatctgccgccgccaccatgccactaccctactcaaccgacccggcctcagcctcatccccagccacacccatgcccgtgccaaca

SEQ ID NO: 344829 - DNA, 368 bp, Zea mays
gcaacatagaaagcacaatagtgttccaacaatggcagccaaaatattttgcttccttatgctccttggtctttctgcaagtgttgctaccgcaaccattttcccacaatgctcacaagctcctatagcttcccttcttcccccatacctctcaccagcggtgtcttcaatgtgtgaaaacccaattgttcaaccctacaggatccaacaggcaatcgcaacaggcatcttaccattatcacccttgttcctccaacaaccgtcagccctattacagcagttacctttggtccatttggtggcacaaaacatcagggcacaacaactacaacaacttgtgctagcaaaccttgctgcatactctcagc

SEQ ID NO: 344830 - DNA, 375 bp, Zea mays
gcaacatagaaagtggaatccagttgcaacaatagagcaacaatggcgaccaagatattttccctccttatgctccttgctctttctgcatgtgttgctaacgcgacaattttccctcaatgctcacaagctcctatagtttcccttcttcccccataccttccatcaatgatagcttcagtatgtgaaaacccagctcttcaaccctataggctccaacaagcaatcgcagcaagcaacatacctttatcacccttgtttcaacaatcgccagccctatctttggtgcagtcattggtacaaaccatcagggcacagcagctgcagcaactcgtgctacctgtgatcaaccaagtagctctggcaaacctttct

SEQ ID NO: 344831 - DNA, 164 bp, Zea mays
caattgctgccattcaaccaacttgctttgacaaacccagcagtgttctaccaacaacccatcattggtggtgccctcttttagatttcttatgagttatagttcaataataaagttttttatctgatgtttgtggcttcccagaaataagaaagtacatttct

SEQ ID NO: 344832 - DNA, 360 bp, Zea mays
gttggcttctcctccccctccggttcggtttcgggttcgtgaggttctccggggttcggtttcgtgggtgagcggatcgagatggcggcgtcggatgttgagtaccgctgcttcgtctgcggcctcgcctgggccacggacgaccactccctccacaacgccttcagcacctacggggaggtcctcgagtccaagatcatcctcgatcgggagacgcagaggtcccgcggcttcggcttcgtcaccttctccacggaggaggcgatgcggaacgccatcgagggcatgaacggcatggagctggacggccgctacatcaccgtcaacgaggcccagtcccgcggcggccgtggaggcggc

SEQ ID NO: 344833 - DNA, 371 bp, Zea mays
attttgagcattcagaaacacaccaagcgaagcgcactagcaacgacctaacaacaatggctaccaagatattagccctccttgcgcttcttgccctttttgtgagcgcaacaaatgcgttcattattccacaatgctcacttgctcctagtgccattattccacagttcctcccaccagttacttcaatgggcttcgaacacctagctgtgcaagccaacatgcaacaacaagcgcttgcggcgagcgtcttacaacaaccaattgcccaattgcaacaacaatccttgccacatctaacaatacaagccatcacaacgcaacagcaacaacagttcctaccagcactgagccacctagccatggtgaac

SEQ ID NO: 344834 - DNA, 170 bp, Zea mays
cacctcgtcacataagccatttccaactggcgcaaaattgtcctatgctcctggtcttttgaggttgtccgaaccatttcactgtacgctctatgcttcttttcccatccttacacgggttcaagggaaaaccaatgtaacctcagaccaagcatcacagcttaccatta

SEQ ID NO: 344835 - DNA, 195 bp, Zea mays
aaaaaaaaaaaaaaaaaaaaaaatttattttaacaaaggcaaacaaaattaaaagggggcgcctataaaaaaaaaacgctactgacatactagatcctacgatctactttcctaaggtttcgagctttctacttccattttcctggcccttactttacaaccccttgccttgcttaactctgtcgttacccaatt

SEQ ID NO: 344836 - DNA, 369 bp, Zea mays
cggaagtttgaggcaataacaggtctgtgatgcccgtgccaacagccgcatccaagcccgtgccagctgcagggaacctgcggcgttggcagcaccccgatcctgggccagtgcgtcgagtttctgaggcatcagtgcagcccgacggcgacgccctactgctcgcctcagtgccagtcgttgcggcagcagtgttgccagcagctcaggcaggtggagccgcagcaccggtaccaggcgatcttcggcttggtcctccagtccatcctgcagcagcagccgcaaagcggccaggtcgcggggctgttggcggcgcagatagcgcagcaactgacggcgatgtgcggcctgcagcagccgactccatgc

SEQ ID NO: 344837 - DNA, 368 bp, Zea mays
cggaagtttgaggcaataacaggtctgtgatgcccgtgccaacagccgcatccaagcccgtgccagctgcagggaacctgcggcgttggcagcaccccgatcctgggccagtgcgtcgagtttctgaggcatcagtgcagcccgacggcgacgccctactgctcgcctcagtgccagtcgttgcggcagcagtgttgccagcagctcaggcaggtggagccgcagcaccggtaccaggcgatcttcggcttggtcctccagtccatcctgcagcagcagccgcaaagcggccaggtcgcggggctgttggcggcgcagatagcgcagcaactgacggcgatgtgcggcctgcagcagccgactccatg

SEQ ID NO: 344838 - DNA, 322 bp, Zea mays
tcggggatttgctccattgggttgtatgctataataagcctggctatcttaaaatctcggaggcgtgacgataacttcaagataaacgacaattgtatgcgacggctaccaaaataatttctttcttgaactgccttacttttaaatatctcatgcattatgctcctcgaatcagttctactacattgtaattccacttagaaaactttgccaccggtccgattactcactctttagatacccgaatatttatgggggtagcccccagccaggactgacattcaaaaacaaattgagagaatattattacgggtgtttatac

SEQ ID NO: 344839 - DNA, 320 bp, Zea mays
ggaataatggccttcgaacacccatctgtgcaagcctataggctacaacaagcgattgcggcgagcgtcttacaacaaccaattgcccaattgcaacaacaatccttggcacatctaacaatacaaaccatcgcaacgcaacagcaacaacagttcctaccagcactgagccatctagccatggtgaaccctgtcgcctacttgcaacagcagctgcttgcatccaacccacttgctctagcaaacgtagttgcaaaccagcaacaacaacaactgcaacagtttctgccagcgcttagtcaactagccatggtgaaccc

SEQ ID NO: 344840 - DNA, 378 bp, Zea mays
agcgaagctacctagcaacgacttaacaacaatggctaccaagatattagccctccttgcgcttcttgccctttttgtgagcgcaacaaatgcgttcattattccacaatgctcacttgctcctagtgccattataccacagttcctccgaccagttacttcaatgggcttcgaacacctagctgtgcaagcctacaggctacaacaagcgcttgcggcgagcgtcttacaacaaccaattaaccaattgcaacaacaatccttggcacatctaaccatacaaaccatcgcaacacaacagcaacaacagttcctaccagcactgagccaactagatgtggtgaaccctgtcgcctacttgcaacagcaggtgcttgc

SEQ ID NO: 344841 - DNA, 378 bp, Zea mays
cggaagtttgaggcaataacaggtctgtgatgcccgtgccaacagccgcatccaagcccgtgccagctgcagggaacctgcggcgttggcagcaccccgatcctgggccagtgcgtcgagtttctgaggcatcagtgcagcccgacggcgacgccctactgctcgcctcagtgccagtcgttgcggcagcagtgttgccagcagctcatgcaggtggagccgcagcaccggtaccaggcgatcttcggcttggtcctccagtccatcctgcagcagcagccgcaaagcggccaggtcgcggggctgttggcggcgcagatagcgcaacaactgacggcgatgtgcggcctgcagcaaccgactccatgcccctacgct

SEQ ID NO: 344842 - DNA, 370 bp, Zea mays
ccaacaagcaacatagaaagtggaatccagtagcaacaatagagcaacaatggcgaccaagatattttccctccttatgctccttgctctttctgcatgtgttgctaacgcgacaattttccctcaatgctcacaagctcctatagcttcccttcttcccccataccttccatcaatgatagcttcagtatgtgaaaacccagctcttcaaccctataggctccaacaagcaatcgcagcaagcaacatacctttatcacccttgtttcaacaatcgccagccctatctttggtgcagtcattggtacaaaccatcagggcacagcagctgcagcaactcgtgctacctgtgatcaaccaagtagctctg

SEQ ID NO: 344843 - DNA, 372 bp, Zea mays
caccagcggtgtcttcaatgtgtgaaaacccaattgttcaaccctacaggatccaacaggcaatcgcaacaggcatcttaccattatcacccttgttcctccaacaaccgtcagccctattacagcagttacctttggtccatttggtggcacaaaacatcagggcacaacatctacaacaacttgtgctagcaaaccttgctgcatactctcagcaacatcagtttcttccattcaaccaactggctgcattgaactctgctgcttatttgcaacaacaattaccattcagccagctagttgctgcctacccccagcaatttcttccattcaaccaactagcagcattgaactctgctgcttatttacagc

SEQ ID NO: 344844 - DNA, 374 bp, Zea mays
cagatcagcaaagcggcagtgcgtagagaggatcgtcgaacagaacagcatgaagatggtcatcgttctcgtcgtgtgcctggctctgtcagctgccagcgcctctgcaatgcagatgccctgcccctgcgcggggctgcagggcttgtacggcgctggcgccggcctgacgacgatgatgggcgccggcgggctgtacccctacgcggagtacctgaggcagccgcagtgcagcccgctggcggcggcgccctactacgccgggtgtgggcagacgagcgccatgtaccagccgctccggcaacagtgctgccagcagcagatgaggatgatggacgtgcagtccgtcgcgcagcagctgcagatgatgatgc

SEQ ID NO: 344845 - DNA, 379 bp, Zea mays
caacaggctacatacaaagtggattccagttgcaacattagagcaacaatggcgaccaagatatttcccctccttatgctccttgctctttctgcatgtgtcgctaacgcgacaattttccctcaatgctcacaagctcctatagcttcccttctttccccataccttccatcaatgatagcttcagtatgtgaaaacccagctcttcaaccctataggctccaacaagcaatcgcagcaagcaacatacctttatcaccctagtttcaacaatcgccagccctatctttggtgcagtcattggtacaaaccatcagggcacagcagctgcagcaactcgtgctacctgtgatcaaccaagttgctctggcaaaccttt

SEQ ID NO: 344846 - DNA, 373 bp, Zea mays
agcaattagctcatcgactccagattggagaactcgacaccatgaaggtgctgatcgttgcccttgctctcctggcgctcgctgcgagcgccgcctccagtacaagcggcggctgtggctgccagacaccaccgtttcatctaccgcctccgttctatatgccgcctccgttctatctgccgccgcagcagcagccgcagccatggcaataccccactcaaccaccgcagctaagcccgtgccagcagttcggatcctgcggcgtcggcagcgtcggcagcccgttcctgggccagtgcgtcgagttcctgaggcaccagtgcagcccggcggcgacgccctacggctcgccacagtgccaggcgctgcagca

SEQ ID NO: 344847 - DNA, 383 bp, Zea mays
aacaagcaacatagaaagtggaatccagtagcaacaatagagcaacaatggagaccaagatattttccctccttatgctccttgctctttctacatgtgttgctaacgcgacaattttccctcaatgctcacaagctcctatagcttccctttttcccccataccttccatcaattatagcttcagtatgtgaaaacccagctcttcaaccatataggcttcaacaagcaatcgcagcaagcaacatacctttatcgcccttgttgtgtcaacaatcgccagccctatctttggtgcagtcattggtacaaaccatcagggcacaacagctgcagcaactcgtgctacctgtgatcaaccaagtagctctggcaaacctttct

SEQ ID NO: 344848 - DNA, 372 bp, Zea mays
ctcccaccgccggtccacctgcctccgccggtccacctgccaccgccggtccatgtgccgccgccggttcatctgccgccgccaccatgccactaccctactcaaccgccccggcctcagcctcatccccagccacacccatgcccgtgccaacagccgcatccaagcccgtgccagctgcagggaacctgcggcgttggcagcaccccgatcctgggccagtgcgtcgagttcctgaggcatcagtgcagcccgacggcgacgccctactgctcgcctcagtgccagtcgttgcggcagcagtgttgccagcagctcaggcaggtggagccgcagcaccggtaccaggcgatcttcggcttggtcctccag

SEQ ID NO: 344849 - DNA, 110 bp, Zea mays
gtgccctcttttagatttgtcaaatcaagtgggctgaatggcaccacttgtcgcggttgtaagagggttcctgcgctagcgtcaccattccagtactatcctcaacatct

SEQ ID NO: 344850 - DNA, 355 bp, Zea mays
caactagcaacatagaaagcacaattttgtaccaacaatggcagctaaaatatgttgcctccttatgctccttggtctttctgcaagtgctgctacggcgaccattttcccacaatgctcacaagctcctatagcttcccttcttcccccgtacctctcaccaacggtgtcttcggtatgtgaaaacccaattcttcaaccctacaggatccaacaggcaatcgcagctggcatcttacctttatcacccttgttcctccaacaatcatcagccctattacagcagttacctttggtgcatttattggcacaaaacatcagggcacaacaactacaacaacttgtgctagcaaac

SEQ ID NO: 344851 - DNA, 350 bp, Zea mays
aagcggcagtgcgtagagaggatcgtcgaacagaacagcatgaagatggtcatcgttctcgtcgtgtgcctggctctgtcagctgccagcgcctctgcaatgcagatgccctgcccctgcgcggggctgcagggcttgtacggcgctggcgccggcctgacgacgatgatgggcgccggcgggctgtacccctacgcggagtacctgaggcagccgcagtgcagcccgctggcggcggcgccctactacgccgggtgtgggcagacgagcgccatgtaccagccgctccggcaacagtgctgccagcagcagatgaagatgatggacgtgcagtccgtcgcgcagcagct

SEQ ID NO: 344852 - DNA, 355 bp, Zea mays
tgctcacttgctcctagtgccattattccacagttcctcccaccagttacttcaatgggcttcgaacacctagctgtgcaagccaacatgcaacaacaagcgcttgcggcgagcgtcttacaacaaccaattgcccaattgcaacaacaatccttgccacatctaacaatacaagccatcacaacgcaacagcaacaacagttcctaccagcactgagccacctagccatggtgaaccctgccgcctacttgcaagagcagctgcttgcatccaacccacttgctctggcgaacgtagttgcaaaccagcaacaacaacagctacaacagtttctgccaacgctcagtcaactag

SEQ ID NO: 344853 - DNA, 354 bp, Zea mays
cagcctagcaattagctcatcgactccagattggagaactcgacaccatgaaggtgctgatcgttgcccttgctctcctggcgctcgctgcgagcgccgcctccagtacaagcggcggctgtggctgccagacaccaccgtttcatctaccgcctccgttctatatgccgcctccgttctatctgccgccgcagcagcagccgcagccatggcaataccccactcaaccaccgcagctaagcccgtgccagcagttcggatcctgcggcgtcggcagcgtcggcagcccgttcctgggccagtgcgtcgagttcctgaggcaccagtgcagcccggcggcgacgccctacggct

SEQ ID NO: 344854 - DNA, 354 bp, Zea mays
ttcagaaacacaccaagcgaagcgcactagcaacaacctaacaacaatggctaccaagatattagccctccttgcgcttcttgcccttttagtgagcgcaacaaatgcgttcattattccacagtgctcacttgctcctagtgccattattccacagttcctcccaccagttacttcaatgggcttcgaacatccagccgtgcaagcctacaggctacaactagcgcttgcggcgagcgtcttacaacaaccaattgcccaattgcaacaacaatccttggcacatctaaacctacaaaccatcgcaacgcaacagcaacaacagtttctgccatcactgagccacctagccgt

SEQ ID NO: 344855 - DNA, 355 bp, Zea mays
gcaggtgcttgcatccaacccacttgctctggcaaacgtagctgcataccaacaacaacaacaattgcaacagtttctgccagcgctcagtcaactagccatggtgaaccctgccgcctacctacaacagcaacaactgctttcatctagccctctcgttgtgggtaatgcacctacatacctgcaacaacaattgctgcaacagattgtaccagctctgactcagctagctgtggcaaaccctgctgcctacttgcaacagctgcttccattcaaccaactgactgtgtcgaactctgctgcgtacctacaacagcgacaacagttacttaatccactagcagtgcctaaccca

SEQ ID NO: 344856 - DNA, 351 bp, Zea mays
agctcatcgactccagattggagaactcgacaccatgaaggtgctgatcgttgcccttgctctcctggcgctcgctgcgagcgccgcctccagtacaagcggcggctgtggctgccagacaccaccgtttcatctaccgcctccgttctatatgccgcctccgttctatctgccgccgcagcagcagccgcagccatggcaataccccactcaaccaccgcagctaagcccgtgccagcagttcggatcctgcggcgtcggcagcgtcggcagcccgttcctgggccagtgcgtcgagttcctgaggcaccagtgcagcccggcggcgacgccctacggctcgccacagtg

SEQ ID NO: 344857 - DNA, 353 bp, Zea mays
gtggaatacagtagcaacaatagagcaacaatggcggccaagatattttccatccttatgctccttgctctttctgcatgtgttgctaacgcgaccatttttcctcaatactcacaagctcctatagctgcccttcttcccccataccttccatcaatgaccgcttcagtatgtgaaaacccagcccttcaaccctacaggctccaacaagcaatcgcaacaagcaacttacctttatcacccctgttctttcaacaatcgccagccctatctttggtgcagtcattggtacaaaccatcagggcacaacagctgcagcaactcgtgctaccagtgatcagccaagtagctct

SEQ ID NO: 344858 - DNA, 351 bp, Zea mays
aagcacaatagtgtaccaacaatggcagccaaaatattttgcctccttatgctccttggtctttctgcaagtgctgctacggcgaccattttcccgaaatgctcgcaagctcctatagcttcccttcttcccccgtacctctcaccagcggtgtcttcggtatgtgaaaacccaattcttcaaccctacaggatccaacaggcaatcacagctggcatcttacctttatcacccttgttcctccaacaatcatcagccctattacatcagttacctttggtgcatttattggcacaaaacatcagggcacaacaactacaacaacttgtgctagcaaaccttgctgcctac

SEQ ID NO: 344859 - DNA, 351 bp, Zea mays
ttgagaccaactagcaacatagaaagcacaatagtgtaccaacaatggcagccaaaatattttgcctccttatgctccttggtctttctgcaagtgctgctacggcgaccattttcccgaaatgctcgcaagctcctatagcttcccttcttcccccgtacctctcaccagcggtgtcttcggtatgtgaaaacccaattcttcaaccctacaggatccaacaggcaatcacagctggcatcttacctttatcacccttgttcctccaacaatcatcagccctattacatcagttacctttggtgcatttattggcacaaaacatcagggcacaacaactacaacaacttg

SEQ ID NO: 344860 - DNA, 350 bp, Zea mays
gcgccggcctgacgacgatgatgggcgccggcgggctgtacccctacgcggagtacctgaggcagccgcagtgcagcccgctggcggcggcgccctactacgccgggtgtgggcagacgagcgccatgtaccagccgctccggcaacagtgctgccagcagcagatgaggatgatggacgtgcagtccgtcgcgcagcagctgcagatgatgatgcagcttgagcgtgccgctgccgccagcagcagcctgtacgagccagctctgatgcagcagcagcagcagctgctggcagcccagggtctcaaccccatggccatgatgatggcgcagaacatgccggccatgggt

SEQ ID NO: 344861 - DNA, 345 bp, Zea mays
ctcctagtgccattattccacagttcctcccaccagttacttcaatgggcttcgaacatccagccgtgcaagcctacaggctacaactagcgcttgcggcgagcgtcttacaacaaccaattgcccaattgcaacaacaatccttggcacatctaaacctacaaaccatcgcaacgcaacagcaacaacagtttctgccatcactgagccacctagccgtggtgaaccctgtcgcctacttgcaacagcagctacttgcatccaacccacttgctctggcgaacgtagctgcataccagcaacaacaacgtctgcaacagtttatgccagcgctcagtcaactag

SEQ ID NO: 344862 - DNA, 356 bp, Zea mays
ttcagaaacacaccaagcgaagcacattagcaacaacctaacaacaatggctaccaagatattatccctccttgcgcttcttgcgctttttgcgagcgcaacaaatgcgttcattattccacaatgctcacttgctccaagttccattattacacagttcctcccaccagttacttcaatgggcttcgaacacccagctgtgcaagcctataggctacaacaagcaattgcggcgagcgtcttacaacaaccaatttcccagttgcaacaacaatccttggcacatctaacaatacaaaccatcgcaacgcaacagcaacaacaattcctaccagcactgagccacctagccatgg

SEQ ID NO: 344863 - DNA, 135 bp, Zea mays
gttgatcgcgagcggccgcccttttttttttttttttttttttttttttatgagaatctagaaatgtactttcttatttctgggaagccacaaacatcatccaaaaaacttcattattgaactataactcataag

SEQ ID NO: 344864 - DNA, 350 bp, Zea mays
agcgaagcgcactagcaacgacctaacaacaatggctaccaagatattagccctccttgcgcttcttgccctttttgtgagcgcaacaaatgcgttcattattccacaatgctcacttgctcctagtgccattattccacagttcctcccaccagttacttcaatgggcttcgaacacctagctgtgcaagccaacatgcaacaacaagcgcttgcggcgagcgtcttacaacaaccaattgcccaattgcaacaacaatccttgccacatctaacaatacaagccatcacaacgcaacagcaacaacagttcctaccagcactgagccacctagccatggtgaaccctg

SEQ ID NO: 344865 - DNA, 351 bp, Zea mays
gggacgcgtgggggcaatcgcagcaggcatcttacctttatcacccttgttcctccaacaaccgtcagccctattacagcagttacctttggtgcatttgttggcacaaaacatcaaggcacaacaactacaacaacttgtgctaggaaaccttgctgcctactctcagcaacagcagtttcttccattcaaccaactggctgcattgaactctgctgcttatttgcaacaacaactaccattcagtcagctagctgctgcctacccccagcaatttcttccattcaaccaactggcagcattgaactctgctgcttatttacaacagcaacagctaccaccattcagcca

SEQ ID NO: 344866 - DNA, 352 bp, Zea mays
cccacgcgtccgattttgagcattcagaaacacaccaagcgaagcgcactagcaacgacctaacaacaatggctaccaagatattagccctccttgcgcttcttgccctttttgtgagcgcaacaaatgcgttcattattccacaatgctcacttgctcctagtgccattattccacagttcctcccaccagttacttcaatgggcttcgaacacctagctgtgcaagccaacatgcaacaacaagcgcttgcggcgagcgtcttacaacaaccaattgcccaattgcaacaacaatccttgccacatctaacaatacaagccatcacaacgcaacagcaacaacagttcct

SEQ ID NO: 344867 - DNA, 352 bp, Zea mays
attgagaccaactagcaacatagaaagcacaatagtgtaccaacaatggcagccaaaatattttgcctccttatgctccttggtctttctgcaagtgctgctacggcgaccattttcccgaaatgctcgcaagctcctatagcttcccttcttcccccgtacctctcaccagcggtgtcttcggtatgtgaaaacccaattcttcaaccctacaggatccaacaggcaatcacagctggcatcttacctttatcacccttgttcctccaacaatcatcagccctattacatcagttacctttggtgcatttattggcacaaaacatcagggcacaacaactacaacaacttg

SEQ ID NO: 344868 - DNA, 347 bp, Zea mays
caactagcaacatagaaagcacaatagtgtaccaacaatggcagccaaaatattttgcttccttatgctccttggtctttctgcaagtgttgctaccgcaaccattttcccacaatgctcacaagctcctatagcttcccttcttcccccatacctctcaccagcggtgtcttcaatgtgtgaaaacccaattgttcaaccctacaggatccaacaggcaatcgcaacaggcatcttaccattatcacccttgttcctccaacaaccgtcagccctattacagcagttacctttggtccatttggtggcacaaaacattagggcacaacaactacaacaacttgtgc

SEQ ID NO: 344869 - DNA, 351 bp, Zea mays
cagccacacccatgcccgtgccaacagccgcatccaagcccgtgccagctgcagggaacctgcggcgttggcagcaccccgatcctgggccagtgcgtcgagtttctgaggcatcagtgcagcccgacggcgacgccctactgctcgcctcagtgccagtcgttgcggcagcagtgttgccagcagctcacgcaggtggagccgcagcaccggtaccaggcgatcttcggcttggtcctccagtccatcctgcagcagcagccgcaaagcggccaggtcgtggggctgttggcggcgcagatagcgcagcaactgacggcgatgtgcggcctgcagcagccgacttcatgc

SEQ ID NO: 344870 - DNA, 353 bp, Zea mays
agaccaactagcaacatagaaagcacaatagtgtaccaacaatggcagccaaaatattttgcctccttatgctccttggtctttctgcaagtgctgctacggcgaccattttcccgcaatgctcgcaagctcctatagcttcccttcttcccccgtacctctcaccagcggtgtcttcggtatgtgaaaacccaattcttcaaccctacaggatccaacaggcaatcgcagctggcatcttacctttatcacccttgttcctccaacaatcatcagccctattacaacagttacctttggtgcatttattggcacaaaacatcagggcacaacaactacaacaacttgtgcta

SEQ ID NO: 344871 - DNA, 349 bp, Zea mays
ggaatccagtagcaacaatagagcaacaatggcgaccaagatattttccctccttatgctccttgctctttctgcatgtgttgctaacgcgacaattttccctcaatgctcacaagctcctatagcttcccttcttcccccataccttccatcaatgatagcttcagtatgtgaaaacccagctcttcaaccctataggctccaacaagcaatcgcagcaagcaacatacctttatcacccttgtttcaacaatcgccagccctatctttggtgcagtcattggtacaaaccatcagggcacagcagctgcagcaactcgtgctacctgtgatcaaccaagtagctctg

SEQ ID NO: 344872 - DNA, 353 bp, Zea mays
  unsure (1)..(353): unsure at all n locations
attttgagcattcagaaacacaccaagcgaagcacattagcaacaacctaacaacaatggctaccaagatattatccctccttgcgcttcttgcgctttttgcgagcgcaacaaatgcgttcattattccacaatgctcacttgctccaagttccattattacacagttcctcccaccagttacttcaatgggcttcgaacacccagctgtgcaagcctataggctacaacaagcaattgcggcgagcgtcttacaacaaccaatttcccagttgcaacaacaatccttggcacatctaacaatacaaaccatcgcaacgcaacagcaacaacaattnctaccagcactgagc

SEQ ID NO: 344873 - DNA, 354 bp, Zea mays
gagcattcagaaacacaccaagcgtagcacattagcaacaacctaacaacaatggctaccaagatattatccctccttgcgcttcttgcgctttttgcgagcgcaacaaatgcgttcattattccacaatgctcacttgctccaagttccattattacacagttcctcccaccagttacttcaatgggcttcgaacacccagctgtgcaagcctataggctacaacaagcaattgcggcgagcgtcttacaacaaccaatttcccagttgcaacaacaatcctggcacaatttaccattcaaaccatcggaacgcaacaagaaccacaattcctaccagcactgagccacctag

SEQ ID NO: 344874 - DNA, 353 bp, Zea mays
gagaccaactagcaacatagaaagcacaatagtgtaccaacaatggcagccaaaatattttgcttccttatgctccttggtctttctgcaagtgctgctaccgcaaccattttcccacaatgctcacaagctcctatagcttcctttcttcccccatacctctcaccagcggtgtcttcagtatgtgaaaacccaattcttcaaccctacaggatccaacaggcaatcgcagcaggcatcttacctttatcacccttgttcctccaacaaccgtcagccctattacagcagttacctttggtgcatttgttggcacaaaacatcaaggcacaacaactacaacaacttgtgct

SEQ ID NO: 344875 - DNA, 356 bp, Zea mays
ggaatccagtagcaacaatagagcaacaatggagaccaagatattttccctccttatgctccttgctctttctacatgtgttgctaacgcgacaattttccctcaatgctcacaagctcctatagcttccctttttcccccataccttccatcaattatagcttcagtatgtgaaaacccagctcttcaaccatataggcttcaacaagcaatcgcagcaagcaacatacctttatcgcccttgttgtgtcaacaatcgccagccctatctttggtgcagtcattggtacaaaccatcagggcacaacagctgcagcaactcgtgctacctgtgatcaaccaagtagctctggcaa

SEQ ID NO: 344876 - DNA, 356 bp, Zea mays
gaccaacaagcaacatagaaagtggaatccagtagcaacaatagagcaacaatggcgaccaagatattttccctccttatgctccttgctctttctgcatgtgttgctaacgcgacaattttccctcaatgctcacaagctcctatagcttcccttcttcccccataccttccatcaatgatagcttcagtatgtgaaaacccagctcttcaaccctataggctccaacaagcaatcgcagcaagcaacatacctttatcacccttgtttcaacaatcgccagccctatctttggtgcagtcattggtacaaaccatcagggcacagcagctgcagcaactcgtgctacctgtgat

SEQ ID NO: 344877 - DNA, 351 bp, Zea mays
agcattcagaaacacaccaagcgaagcgcactagcaacaacctaacaacaatggctaccaagatattagccctccttgcgcttcttgcccttttagtgagcgcaacaaatgcgttcattattccacagtgctcacttgctcctagtgccattattccacagttcctcccaccagttacttcaatgggcttcgaacatccagccgtgcaagcctacaggctacaactagcgcttgcggcgagcgtcttacaacaaccaattgcccaattgcaacaacaatccttggcacatctaaacctacaaaccatcgcaacgcaacagcaacaacagtttctgccatcactgagccacc

SEQ ID NO: 344878 - DNA, 351 bp, Zea mays
attttgagcattcagaaacacaccatgcgaagcgcactagcaacgacctaacaacaatggctaccaagatattagccctccttgcgcttcttgccctttttgtgagcgcaacaaatgcgttcattattccacaatgctcacttgctcctagtgccattattccacagttcctcccaccagttacttcaatgggcttcgaacacctagctgtgcaagccaacatgcaacaacaagcgcttgcggcgagcgtcttacaacaaccaattgcccaattgcaacaacaatccttgccacatctaacaatacaagccatcacaacgcaacagcaacaacagttcctaccagcactga

SEQ ID NO: 344879 - DNA, 350 bp, Zea mays
cagcattcagaaacacaccaagcgaagcgcactagcaacaacctaacaacaatggctaccaagatattagccctccttgcgcttcttgcccttttagtgagcgcaacaaatgcgttcattattccacagtgctcacttgctcctagtgccattattccacagttcctcccaccagttacttcaatgggcttcgaacatccagccgtgcaagcctacaggctacaactagcgcttgcggcgagcgtcttacaacaaccaattgcccaattgcaacaacaatccttggcacatctaaacctacaaaccatcgcaacgcaacagcaacaacagtttctgccatcactgagcca

SEQ ID NO: 344880 - DNA, 118 bp, Zea mays
gggaaatctcctctatccatccctctctatctatatatgtaataatgcagtaagacgacacacattatcatgtgtggtatgaccaataatatatgcatcataataaagttttggtttt

SEQ ID NO: 344881 - DNA, 352 bp, Zea mays
cagaaacacaccaagcgaagcgcactagcaacaacctaacaacaatggctaccaagatattagccctccttgcgcttcttgcccttttagtgagcgcaacaaatgcgttcattattccacagtgctcacttgctcctagtgccattattccacagttcctcccaccagttacttcaatgggcttcgaacatccagccgtgcaagcctacaggctacaactagcgcttgcggcgagcgtcttacaacaaccaattgcccaattgcaacaacaatccttggcacatctaaacctacaaaccatcgcaacgcaacagcaacaacagtttctgccatcactgagccacctagccgt

SEQ ID NO: 344882 - DNA, 357 bp, Zea mays
aactagcaacatagaaagcacaatagtgtaccaacaatggcagctaaaatattttgcctccttatgctccttggtctttctgcaagtgctgctacggcgaccattttcccacaatgctcacaagctcctatagcttcccttcttcccccgtacctctcaccaacggtgtcttcggtatgtgaaaacccaattcttcaaccctacaggatccaacaggcaatcgcagctggcatcttacctttatcacccttgttcctccaacaatcatcagccctattacagcagttacctttggtgcatttattggcacaaaacatcagggcacaacaactacaacaacttgtgctagcaaacctt

SEQ ID NO: 344883 - DNA, 356 bp, Zea mays
gcaattagctcatcgactccagattggagaactcgacaccatgaaggtgctgatcgttgcccttgctctcctggcgctcgctgcgagcgccgcctccagtacaagcggcggctgtggctgccagacaccaccgtttcatctaccgcctccgttctatatgccgcctccgttctatctgccgccgcagcagcagccgcagccatggcaataccccactcaaccaccgcagctaagcccgtgccagcagttcggatcctgcggcgtcggcagcgtcggcagcccgttcctgggccagtgcgtcgagttcctgaggcaccagtgcagcccggcggcgacgccctacggctcgccacagt

SEQ ID NO: 344884 - DNA, 352 bp, Zea mays
acggtgtcttcggtatgtgaaaacccaattcttcaaccctacaggatccaacaggcaatcgcagctggcatcttacctttatcacccttgttcctccaacaatcatcagccctattacagcagttacctttggtgcatttattggcacaaaacatcagggcacaacaactacaacaacttgtgctagcaaaccttgctgcctactctcagcaacagcagtttcttccattcaaccaactagctgcattgaactctgcttcttatttgcaacaacaacaactaccattcagccagctatctgctgcctacccccagcaatttcttccattcaaccaactgacagcattgaact

SEQ ID NO: 344885 - DNA, 339 bp, Zea mays
ccctccctcccactccacctatcattacaaatgcctctaccccccatcggggggggtattttaaattgattacccttgttacttcaacaatgatgatgcctattacagtaggtacctttggtgcatttattggcacaaaatatgagggcacaacaactacaacaacttgtgctagcaaaccttgctgtctactcttagcaacagcatttgcttgcattcaaccaactagctgcattgaactctgcttcttatttgcaacaacaacaactaccatttagccagctatctgatgcctacccccagaaatttcttccattcaaccaactgacagcattgaac

SEQ ID NO: 344886 - DNA, 352 bp, Zea mays
cttcggtatgtgaaaacccaattcttcaaccctacaggatccaacaggcaatcgcagctggcatcttacctttatcacccttgttcctccaacaatcatcagccctattacagcagttacctttggtgcatttattggcacaaaacatcagggcacaacaactacaacaacttgtgctagcaaaccttgctgcctactctcagcaacagcagtttcttccattcaaccaactagctgcattgaactctgcttcttatttgcaacaacaacaactaccattcagccagctatctgctgcctacccccagcaatttcttccattcaaccaactgacagcattgaactctcctgc

SEQ ID NO: 344887 - DNA, 352 bp, Zea mays
agatattttccctccttatgctccttgctctttctacatgtgttgctaacgcgacaattttccctcaatgctcacaagctcctatagcttccctttttcccccataccttccatcaattatagcttcagtatgtgaaaacccagctcttcaaccatataggcttcaacaagcaatcgcagcaagcaacatacctttatcgcccttgttgtgtcaacaatcgccagccctatctttggtgcagtcattggtacaaaccatcagggcacaacagctgcagcaactcgtgctacctgtgatcaaccaagtagctctggcaaacctttctccctactctccgcaacaacaatttct

SEQ ID NO: 344888 - DNA, 355 bp, Zea mays
gaaacacaccaagcgaagcacattatcaacaacctaacaacaatggctaccaagatattatccctccttgcgcttcttgcgctttttgcgagcgcaacaaatgcgttcattattccacaatgctcacttgctccaagttccattattacacagttcctcccaccagttacttcaatgggcttcgaacacccagctgtgcaagcctataggctacaacaagcaattgcggcgagcgtcttacaacaaccaatttcccagttgcaacaacaatccttggcacatctaacaatacaaaccatcgcaacgcaacagcaacaacaattcctaccagcactgagccacctagccatggtga

SEQ ID NO: 344889 - DNA, 353 bp, Zea mays
atcgactccagatgggagaactcgacaccatgaaggtgctgatcgttgcccttgctctcctggcgctcgctgcgagcgccgcctccagtacaagcggcggctgtggctgccagacaccaccgtttcatctaccgcctccgttctatatgccgcctccgttctatctgccgccgcagcagcagccgcagccatggcaataccccactcaaccaccgcagctaagcccgtgccagcagttcggatcctgcggcgtcggcagcgtcggcagcccgttcctgggccagtgcgtcgagttcctgaggcaccagtgcagcccggcggcgacgccctacggctcgccacagtgccaggcg

SEQ ID NO: 344890 - DNA, 351 bp, Zea mays
gatcagcaaagcggcagtgcgtagagagtatcgtcgaacagaacagcatgaagatggtcatcgttctcgtcgtgtgcctggctctgtcagctgccagcgcctctgcaatgcagatgccctgcccctgcgcggggctgcagggcttgtacggcgctggcgccggcctgacgacgatgatgggcgccggcgggctgtacccctacgcggagtacctgaggcagccgcagtgcagcccgctggcggcggcgccctactacgccgggtgtgggcagacgagcgccatgtaccagccgctccggcaacagtgctgccagcagcagatgaggatgatggacgtgcagtccgtcgcgc

SEQ ID NO: 344891 - DNA, 355 bp, Zea mays
caacaagcaacatagaaagtggaatccagtagcaacaatagagcaacaatggagaccaagatattttccctccttatgctccttgctctttctacatgtgttgctaacgcgacaattttccctcaatgctcacaagctcctatagcttccctttttcccccataccttccatcaattatagcttcagtatgtgaaaacccagctcttcaaccatataggcttcaacaagcaatcgcagcaagcaacatacctttatcgcccttgttgtgtcaacaatcgccagccctatctttggtgcagtcattggtacaaaccatcagggcacaacagctgcagcaactcgtgctacctgtga

SEQ ID NO: 344892 - DNA, 284 bp, Zea mays
caactactaccattcagccagctagctggtgtgagccctgctaccttcttgacacaaccacagttgttgccgttctaccagcacgctgcgcctaacgctggcaccctcttacaactgcaacaattgctgccattcaaccaacttgctttgacaaacctagcagtgttctaccaacaacccatcattggtggtgccctcttttagatttcttatgagttatagttcaataataaagttttttgtctgatgtttgtggcttcccagaaataagaaagtacatttct

SEQ ID NO: 344893 - DNA, 357 bp, Zea mays
cagaaacacaccaagcgaagcgcactagcaacaacctaacaacaatggctaccaagatattatccctccttgcgcttcttgcgctttttgcgagcgcaacaaatgcgtccattattccacaatgctcacttgctcctagttccattattccacagttcctcccaccagttacttcaatggccttcgaacacccagctgtgcaagcctataggctacaacaagcgattgcggcgagcgtcttacaacaaccaattgcccaattgcaacaacaatccttggcacatctaacaatacaaaccatcgcaacgcaacagcaacaacagttcctaccagcactgagccacctagccatggtga

SEQ ID NO: 344894 - DNA, 351 bp, Zea mays
atagaaagcacaatagtgtaccaacaatggcagctaaaatattttgcctccttatgctccttggtctttctgcaagtgctgctacggcgaccattttcccacaatgctcacaagctcctatagcttcccttcttcccccgtacctctcaccaacggtgtcttcggtatgtgaaaacccaattcttcaaccctacaggatccaacaggcaatcgcagctggcatcttacctttatcacccttgttcctccaacaatcatcagccctattacagcagttacctttggtgcatttattggcacaaaacatcagggcacaacaactacaacaacttgtgctagcaaaccttgctg

SEQ ID NO: 344895 - DNA, 348 bp, Zea mays
ggacgtcagcctagcaattagctcatcgactccagattggagaactcgacaccatgaaggtgctgatcgttgcccttgctctcctggcgctcgctgcgagcgccgcctccagtacaagcggcggctgtggctgccagacaccaccgtttcatctaccgcctccgttctatatgccgcctccgttctatctgccgccgcagcagcagccgcagccatggcaataccccactcaaccaccgcagctaagcccgtgccagcagttcggatcctgcggcgtcggcagcgtcggcagcccgttcctgggccagtgcgtcgagttcctgaggcaccagtgcagcccggcggcga

SEQ ID NO: 344896 - DNA, 355 bp, Zea mays
gggtcttcagaccattagctttatctactccagagcgcagaagaacccgatcgacaccatgagggtgttgctcgttgccctcgctctcctggctctcgctgcgagcgccacctccacgcatacaagcggcggctgcggctgccagccaccgccgccggttcatctaccgccgccggtgcatctgccacctccggttcacctgccacctccggtgcatctcccaccgccggtccacctgccgccgccggtccacctgccaccgccggtccatgtgccgccgccggttcatctgccgccgccaccatgccactaccctactcaaccgccccggcctcagcctcatccccagccacac

SEQ ID NO: 344897 - DNA, 356 bp, Zea mays
acacaccaagcgaagcgcactagcaacgacctaacaacaatggctaccaagatattagccctccttgcgcttcttgccctttttgtgagcgcaacaaatgcgttcattattccacaatgctcacttgctcctagtgccattattccacagttcctcccaccagttacttcaatgggcttcgaacacctagctgtgcaagccaacatgcaacaacaagcgcttgcggcgagcgtcttacaacaaccaattgcccaattgcaacaacaatccttgccacatctaacaatacaagccatcacaacgcaacagcaacaacagttcctaccagcactgagccacctagccatggtgaaccc

SEQ ID NO: 344898 - DNA, 129 bp, Zea mays
taaaaaaaaaaaaaaaaaaaaaaatttatttaaaaaaaaggggggcggggtatgggggggataaaaatttacgcacgcgtgcgcgggtaatagatattttttgttttggtataaaataaaattaaattg

SEQ ID NO: 344899 - DNA, 354 bp, Zea mays
agaaagcacaatagtgtaccaacaatggctgccaaaatattttgcttccttatgctccttggtctttctgcaagtgctgctaccgcaaccattttcccacaatgctcacaagctcctatagcttcctttcttcccccatacctctcaccagcggtgtcttcagtatgtgaaaacccaattcttcaaccctacaggatccaacaggcaatcgcagcaggcatcttacctttatcacccttgttcctccaacaaccgtcagccctattacagcagttacctttggtgcatttgttggcacaaaacatcaaggcacaacaactacaacaacttgtgctaggaaaccttgctgcctac

SEQ ID NO: 344900 - DNA, 359 bp, Zea mays
gaagaacccgatcgacaccatgagggtgttgctcgtggccctcgctctcctggctcttgctgtgagcgccacctccacgcatacaagcggcggttgcggctgccagccaccgtcgccggttcatctaccggcgccggtgcatctgccacctccggttcacctgccacctccggtgcatcttccaccgccggtccacctgccggcgccggtgcacctgccaccgccggtgcatgtgccggcgccggttcatctgccggcgccactatgccactaccctactcaaccgccccggcctcagcctcatcctcagccacacccatgcccgtgccaacagccgtatccaagcccgtgccagctgc

SEQ ID NO: 344901 - DNA, 359 bp, Zea mays
ttcagcattcagaaacacaccaagcgaagcgcactagcaacaacctaacaacaatggctaccaagatattagccctccttgcgcttcttgcccttttagtgagcgcaacaaatgcgttcattattccacagtgctcacttgctcctagtgccattattccacagttcctcccaccagttacttcaatgggcttcgaacatccagccgtgcaagcctacaggctacaactagcgcttgcggcgagcgtcttacaacaaccaattgcccaattgcaacaacaatccttggcacatctaaacctacaaaccatcgcaacgcaacagcaacaacagtttctgccatcactgagccacctagcc

SEQ ID NO: 344902 - DNA, 346 bp, Zea mays
agaccaactagcaacatagaatgctcaatagtgtaccaacaatggcagccaaaatattttgcttccttatgctccttggtctttctgcaagtgttgctaccgcaaccattttcccacaatgctcacaagctcctatagcttcccttcttcccccatacctctcaccagcggtgtcttcaatgtgtgaaaacccaattgttcaaccctacaggatccaacaggcaatcgcaacaggcatcttaccattatcacccttgttcctccaacaaccgtcagccctattacagcagttacctttggtccaatttggtggcacaaaacattagggcacaacaactacaacaac

SEQ ID NO: 344903 - DNA, 348 bp, Zea mays
caactagcaacatagaaagcacaatagtgtaccaacaatggcagccaaaatattttgcctccttatgctccttggtatttctgcaagtgctgctacggcgaccattttcccgcaatgctcacaagctcctatagcttcccttcttcccccgtacctctcaccagcggtgtcttcggtatgtgaaaacccaattcttcaaccctacaggatccaacaggcaatcgcagctggcatcttacctttatcacccttgttcctccaacaatcatcagccctattacagcagttacctttggtgcatttattggcacaaaacatcagggcacaacaactacaacaacttgtgct

SEQ ID NO: 344904 - DNA, 348 bp, Zea mays
caatagtgtaccaacaatggcagctaaaatattttgcctccttatgctccttggtctttctgcaagtgctgctacggcgaccattttcccacaatgctcacaagctcctatagcttcccttcttcccccgtacctctcaccaacggtgtcttcggtatgtgaaaacccaattcttcaaccctacaggatccaacaggcaatcgcagctggcatcttacctttatcacccttgttcctccaacaatcatcagccctattacagcagttacctttggtgcatttattggcacaaaacatcagggcacaacaactacaacaacttgtgctagcaaaccttgctgcctactc

SEQ ID NO: 344905 - DNA, 354 bp, Zea mays
caacaatggcagccaaaatattttgcttccttatgctccttggtctttctgcaagtgctgctaccgcaaccattttcccacaatgctcacaagctcctatagcttcctttcttcccccatacctctcaccagcggtgtcttcagtatgtgaaaacccaattcttcaaccctacaggatccaacaggcaatcgcagcaggcatcttacctttatcacccttgttcctccaacaaccgtcagccctattacagcagttacctttggtgcatttgttggcacaaaacatcaaggcacaacaactacaacaacttgtgctaggaaaccttgctgcctactctcagcaacagcagtttc

SEQ ID NO: 344906 - DNA, 302 bp, Zea mays
cttatttacagcagcaacaactactaccattcagccagctagctggtgtgagccctgctaccttcttgatacaaccacagttgttgccgttctaccagcacgctgcgcctaacgctggcaccctcttacaactgcaacaattgctgccattcaaccaacttgctttgacaaacccagcagcgttctaccaacaacccatcattggtggtgccctcttttagatttcttatgagttatagttcaataataaagttttttgtctgatgtttgtggcttcccagaaataagaaagtacatttctt

SEQ ID NO: 344907 - DNA, 251 bp, Zea mays
gccctgctaccttcttgacacaactcacagttgttgccgttctaccagcacgctgcgcctaacgctggcaccctcttacaactgcaacaattgctgccattcaaccaacttgctttgacaaacccagcagcattctaccaacaacccatcattggtggtgccctcttttagatttcttatgagttatagttcaataataaagttttttgtctgatgtttgtggcttcccagaaataagaaagtacatttct

SEQ ID NO: 344908 - DNA, 185 bp, Zea mays
caactagcaacatagaaagcacaatattgtaccaataatggcagccaaaatattttgcctcattatgctccttggtctttctgcaagtgctgctacggcgagcattttcccgcaatgctcacaagctcctatagcttcccttcttcccccatacctctcaccagcgatgtcttcagtatgtgaaa

SEQ ID NO: 344909 - DNA, 348 bp, Zea mays
gcgaagcgcactagcaacaacctaacaacaatggctaccaagatattagccctccttgcgcttcttgcccttttagtgagcgcaacaaatgcgttcattattccacagtgctcacttgctcctagtgccattattccacagttcctcccaccagttacttcaatgggcttcgaacatccagccgtgcaagcctacaggctacaactagcgcttgcggcgagcgtcttacaacaaccaattgcccaattgcaacaacaatccttggcacatctaaacctacaaaccatcgcaacgcaacagcaacaacagtttctgccatcactgagccacctagccgtggtgaaccct

SEQ ID NO: 344910 - DNA, 357 bp, Zea mays
attgagaccaactagcaacatagaaagcacaatagtgtaccaacaatggcagccaaaatattttgcttccttatgctccttggtctttctgcaagtgttgctaccgcaaccattttcccacaatgctcacaagctcctatagcttcccttcttcccccatacctctcaccagcggtgtcttcaatgtgtgaaaacccaattgttcaaccctacaggatccaacaggcaatcgcaacaggcatcttaccattatcacccttgttcctccaacaaccgtcagccctattacagcagttacctttggtccatttggtggcacaaaacatcagggcacaacaactacaacaacttgtgcta

SEQ ID NO: 344911 - DNA, 56 bp, Zea mays
ccctccctcccactccacccatcattacaaatccctctccccccccccccagggga

SEQ ID NO: 344912 - DNA, 209 bp, Zea mays
cagaccattagctttatctactccagagcgcagaagaacccgatcgacaccatgagggtgttgctcgttgccctcgctctcctggctctcgctgcgagcgccacctccacgcatacaagcggcggctgcggctgccagccaccgccgccggttcatctaccgccgccggtgcatctgccacctccggttcacctgccacctccggtgca

SEQ ID NO: 344913 - DNA, 255 bp, Zea mays
gttctagatcgcgagcggccgcccttttttttctttattttgctcgacggggggtgggtttgtgttgttgctgttccttttttggcacattgttcacgcgccccttttgcttattttttttctgggtgctgttgactaacagcgtcttcggtttttgagggaaaaaagtgcatctgttaaggaaacaaaggtgacacctgggggggttttaccctgacagcccacctgccggggggggcaacaaccctattacag

SEQ ID NO: 344914 - DNA, 355 bp, Zea mays
caacaagcaacatagaaagtggaatccagttgcaacaatagagcaacaatggagaccaagatattttccctccttatgctccttgctctttctacatgtgttgctaacgcgacaattttccctcaatgctcacaagctcctatagcttccctttttcccccataccttccatcaattatagcttcagtatgtgaaaacccagctcttcaaccatataggcttcaacaagcaatcgcagcaagcaacatacctttatcgcccttgttgtgtcaacaatcgccagccctatctttggtgcaggcattggtacaaaccatcagggcacaacagctgcagcaactcgtgctacctgtga

SEQ ID NO: 344915 - DNA, 357 bp, Zea mays
agcaacatagaaagtggaatccagtagcaacaatagagcaacaatggcgaccaagatattttccctccttatgctccttgctctttctgcatgtgttgctaacgcgacaattttccctcaatgctcacaagctcctatagcttcccttcttcccccataccttccatcaatgatagcttcagtatgtgaaaacccagctcttcaaccctataggctccaacaagcaatcgcagcaagcaacatacctttatcacccttgtttcaacaatcgccagccctatctttggtgcagtcattggtacaaaccatcagggcacagcagctgcagcaactcgtgctacctgtgatcaaccaagg

SEQ ID NO: 344916 - DNA, 362 bp, Zea mays
tcgcattcagaaacacaccaagctaatttcattagcaacaacctaacaacaatggctaccaagatattatccctccttgcgcttcttgcgctttttgcgagcgcaacaaatgcgttcattattccacaatgctcacttgctccaagttccattattacacagttcctcccaccagttacttcaatgggcttcgaacacccagctgtgcaagcctataggctacaacaagcaattgcggcgagcgtcttacaacaaccaatttcccagttgcaacaacaatccttggcacatttaacaatacaaaccatcgcaacgcaacagcaacaacaattcctaccagcactgagccacctagccatggt

SEQ ID NO: 344917 - DNA, 355 bp, Zea mays
cagttacctttggtgcatttattgttacataacatcagggcacaacaactacaacaacttgtgctagcaaaccttgctgcctactctcagcaacagcagtttcttccattcaaccaactagctgcattgaactctgcttcttatttgcaacaacaacaactaccattcagccagctacctgctgcctacccccagcaatttcttgcattcaaccaactggcagcattgaactctcctgcttatttacagcagcaacaactactaccattcagccagctagctggtgtgagccctgctaccttctcgatacaaccacagttgctgcctgtttaccagcacgctgcgcctaacgctg

SEQ ID NO: 344918 - DNA, 357 bp, Zea mays
cggacgcgtgggcggacgcgtggggcaacataaaaagcacaatagtgtaccaacaatggcaggccaaaatatttggcctcctaatgctcctgggcctttttgcaggggctgttacggcgacaattttcccacattgctaacaggctcctatagcttcccttcttcccccgtacctctcaccagcggtgtcttcggtatgtgaaaacccaattcttcaaccctataggatccaacaggcaatcgcagctggcatcttacctttatcacccttgttcctccaacaatcatcagccctattacagcagttaccttgggcgcatttattggcacaaaacatgagggcacaacaactacaac

SEQ ID NO: 344919 - DNA, 197 bp, Zea mays
caacaagcaacatagaaagtggaatccagtagcaacaatagagcaacaatggcgaccaagatattttccctccttatgctccttgctctttctgcatgtgttgctaacgcgacaattttccctcaatgctcacaagctcctatagctttccttcttcccccataccttccatcaatgaatagcttcagtatggtgaa

SEQ ID NO: 344920 - DNA, 352 bp, Zea mays
gcaacatagaaagcacaatagtgtaccaacaatggcagccaaaatattttgcttccttatgctccttggtctttctgcaagtgctgctaccgcaaccattttcccacaatgctcacaagctcctatagcttcctttcttcccccatacctctcaccagcggtgtcttcagtatgtgaaaacccaattcttcaaccctacaggatccaacaggcaatcgcagcaggcatcttacctttatcacccttgttcctccaacaaccgtcagccctattacagcagttacctttggtgcatttgttggcacaaaacatcaaggcacaacaactacaacaacttgtgctaggaaacctt

SEQ ID NO: 344921 - DNA, 365 bp, Zea mays
attgagaccaactagcaacatagaaagcacaatagtgtaccaacaatggcagccaaaatattttgcttccttatgctccttggtctttctgcaagtgctgctaccgcaaccattttcccacaatgctcacaagctcctatagcttcctttcttcccccatacctctcaccagcggtgtcttcagtatgtgaaaacccaattcttcaaccctacaggatccaacaggcaatcgcagcaggcatcttacctttatcacccttgttcctccaacaaccgtcagccctattacagcagttacctttggtgcatttgttggcacaaaacatcaaggcacaacaactacaacaacttgtgctaggaaacct

SEQ ID NO: 344922 - DNA, 362 bp, Zea mays
ggggacggggtcggcacggggcgatgaggagcagcgaggccatggagctcctgggcttccatccctactccaggccctccccttccgagatcgcagaagcatattcttgttcgaaggacggaagaagatcagggagtaggatggaagttcatgttatgcgttctggtgttccgactagccacggaagatcaaatagaacgttggttaaagccccgtttctcctcataacgtttgcagcagtttcttttggcgccttcagcgcatcaagagcgtatcaacggcaaaaggaactgtgttcctctcagaacccctttctaccatagaggaagacggtgggctctgtccatgttctcatagacgag

SEQ ID NO: 344923 - DNA, 369 bp, Zea mays
attgagaccaactagcaacatagattgctcaatattgttccaacaatggcagccaaaatattttgcctccttatgctccttggtctttctgcaagtgctgctacggcgaccattttcccgcaatgctcgcaagctcctatagcttgccttcttcccccgtacctctcaccagcggtgtcttcggtatgtgaaaacccaattcttcaaccctacaggatccaacaggcaatcgcagctggcatcttacctttatcacccttgatgctacaacaatcatcagccctattacaacagttacctttggtgcattcattggcacaaaacattatggcacatcaactacaacaacttgtgctagcaaaccttgct

SEQ ID NO: 344924 - DNA, 393 bp, Zea mays
aatttccgggccggaccaacccgtccggtcttcagaccattagctttatctactccagagcgcagaagaacccgatcgacaccatgagggtgttgctcgttgccctcgctctcctggctctcgctgcgagcgccacctccacgcatacaagcggcggctgcggctgccagccaccgccgccggttcatctaccgccgccggtgcatctgccacctccggttcacctgccacctccggtgcatctcccaccgccggtccacctgccgccgccggtccacctgccaccgccggtccatgtgccgccgccggttcatctgccgccgccaccatgccactaccctactcaaccgccccggcctcagcctcatccccagccacacccatgcccgtgcc

SEQ ID NO: 344925 - DNA, 367 bp, Zea mays
agcaaagcggcagtgcgtagagtggatcgtcgaacagaacagcatgaagatggtcatcgttctcgtcgtgtgcctggctctgtcagctgccagcgcctctgcaatgcagatgccctgcccctgcgcggggctgcagggcttgtacggcgctggcgccggcctgacgacgatgatgggcgccggcgggctgtacccctacgcggagtacctgaggcagccgcagtgcagcccgctggcggcggcgccctactacgccgggtgtgggcagacgagcgccatgtaccagccgctccggcaacagtgctgccagcagcagatgaggatgatggacgtgcagtccgtcgcgcagcagctgcagatgatgatg

SEQ ID NO: 344926 - DNA, 379 bp, Zea mays
agccttcggtttttttaattcccatcaatcatctttcatcttagtagtataggcaccaaatcaaatctgcaacatcaattatctaactccaaaaaccatgaagctggtgcttgtggttcttgctttcattgctttagtatcaagtgtttcttgtacacagacaggcggctgcagctgtggtcaacaacaaagccatgagcagcaacatcatccacaacaacatcatccacaaaaacaacaacatcaaccaccaccacaacatcaccagcagcagcaacaccaacaacaacaagttcacatgcaaccacaaaaacatcagcaacaacaagaagttcatgttcaacaacaacaacaacaaccgcagcaccaacaacaacaa

SEQ ID NO: 344927 - DNA, 361 bp, Zea mays
caactagcaacatagaaagcacaattgtgtaccaacaatggcagccaaaatattttgcctccttatgctccttggtctttctgcaagtgctgctacggcgaccattttcccacaatgctcacaagctcctatagcttcccttcttcccccgtacctctcaccagcggtgtcttcggtatgtgaaaacccaattcttcaaccctataggatccaacaggcaatcgcagctggcatcttacctttatcacccttgttcctccaacaatcatcagccctattacagcagttacctttggtgcatttattggcacaaaacatcagggcacaacaactacaacaacttgtgctagcaaaccttgct

SEQ ID NO: 344928 - DNA, 329 bp, Zea mays
cttccgttggactttaaaaacacaccaagcgaactacctagcccgacttaacaacaatggctaccaagatatagccctccttgcgcttcttgccctttttgtgagcgcaacaaatgcgttcattattccacaatgctcacttgctcctagtgccattataccacagttcctccgaccagttacttcaatgggcttcgaacacctagctgtgcaagcctacaggctacaacaagcgcttgcggcgagcgtcttacaacaaccaattaaccaattgcaacaacaatccttggcacatctaaccatacaaaccatcgcaacacaacagcaac

SEQ ID NO: 344929 - DNA, 357 bp, Zea mays
caacaagcaacatagaaagtggaatccagtagcaacaatagagcaacaatggagaccaagatattttccctccttatgctccttgctctttctacatgtgttgctaacgcgacaattttccctcaatgctcacaagctcctatagcttccctttttcccccataccttccatcaattatagcttcagtatgtgaaaacccagctcttcaaccatataggcttcaacaagcaatcgcagcaagcaacatacctttatcgcccttgttgtgtcaacaatcgccagccctatctttggtgcagtcattggtacaaaccatcagggcacaacagctgcagcaactcgtgctacctgtgatc

SEQ ID NO: 344930 - DNA, 367 bp, Zea mays
tgagaccaactagcaacatagaaagttctatagtgtaccaacaatggcagccaaaatattttgcttccttatgctccttggtctttctgcaagtgttgctaccgcaaccattttcccacaatgctcacaagctcctatagcttcccttcttcccccatacctctcaccagcggtgtcttcaatgtgtgaaaacccaattgttcaaccctacaggatccaacaggcaatcgcaacaggcatcttaccattatcacccttgttcctccaacaaccgtcagccctattacagcagttacctttggtccatttggtggcacaaaacatcagggcacaacaactacaacaacttgtgctagcaaaccttgct

SEQ ID NO: 344931 - DNA, 370 bp, Zea mays
tcggggacccctgggtcaacatttaaaaatcacaccaagcgaagcgcactagcaacaacctaacaacaatggctaccaagatattagccctccttgcgcttcttgcccttttagtgagcgcaacaaatgcgttcattattccacagtgctcacttgctcctagtgccattattccacagttcctcccaccagttacttcaatgggcttcgaacatccagccgtgcaagcctacaggctacaactagcgcttgcggcgagcgtcttacaacaaccaattgcccaattgcaacaacaatccttggcacatctaaacctacaaaccatcgcaacgcaacagcaacaacagtttctgccatcactgagccacct

SEQ ID NO: 344932 - DNA, 365 bp, Zea mays
cccacgcgtccggttggcttctccttcccctccggttcgggttcgggttcgtgaggttctccggggttcggtttcgtgggtgagcggatcgagatggcggcgtcggatgttgagtaccgctgcttcgtcggcggcctcgcctgggccacggacgaccactccctccacaacgccttcagcacctacggcgaggtcctcgagtccaagatcatcctcgatcgggagacgcagaggtcccgcggcttcggcttcgtcaccttctccacggaggaggcgatgctgaacgccatcgagggcatgaacggcaaggagctggacggccgcaacatcaccgtcaacgaggcccagtcccgcggcggccgtgg

SEQ ID NO: 344933 - DNA, 365 bp, Zea mays
gctttatctactccagagcgcagaagaacccgatcgacaccatgagggtgttgctcgttgccctcgctctcctggctctcgctgcgagcgccacctccacgcatacaagcggcggctgcggctgccagccaccgccgccggttcatctaccgccgccggtgcatctgccacctccggttcacctgccacctccggtgcatctcccaccgccggtccacctgccgccgccggtccacctgccaccgccggtccatgtgccgccgccggttcatctgccgtcgccaccatgccactaccctactcaaccgccccggcctcagcctcatccccagccacacccatgcccgtgccaacagccgcatcca

SEQ ID NO: 344934 - DNA, 367 bp, Zea mays
attttcagcattcagaaacacaccaagcgaagcgcactagcaacaacctaacaacaatggctaccaagatattagccctccttgcgcttcttgcccttttagtgagcgcaacaaatgcgttcattattccacagtgctcacttgctcctagtgccattattccacagttcctcccaccagttacttcaatgggcttcgaacatccagccgtgcaagcctacaggctacaactagcgcttgcggcgagcgtcttacaacaaccaattgcccaattgcaacaacaatccttggcacatctaaacctacaaaccatcgcaacgcaacagcaacaacagtttctgccatcactgagccacctagccgtggt

SEQ ID NO: 344935 - DNA, 372 bp, Zea mays
cacaaaaacaacaacatcaaccaccacctcaacatcaccagcagcagcaacaccaacaacaacaagttcacatgcaaccacaaaaacatcagcaacaacaagaagttcatgttcaacaacaacaacaacaaccgcagcaccaacaacaacaacaacaacagcaccaacaacaacatcaatgtgaaggccaacaacaacatcaccaacaatcacaaggccatgtgcaacaacacgaacagagccatgagcaacaccaaggacagagccatgagcaacaacatcaacaacaattccagggtcatgacaagcagcaacaaccacaacagcctcagcaatatcagcagggccaggaaaaatcacaacagcaacaat

SEQ ID NO: 344936 - DNA, 369 bp, Zea mays
gcgaagcgcactagcaacaacctaacatcaatggctaccaagatattatccctccttgcgcttcttgcgctttttgcgagcgcaacaaatgcgtccattattccacaatgctcacttgctcctagttccattattccacagttcctcccaccagttacttcaatggccttcgaacacccagctgtgcaagcctataggctacaacaagcgattgcggcgagcgtcttacaacaaccaattgcccaattgcaacaacaatccttggcacatctaacaatacaaaccatcgcaacgcaacagcaacaacagttcctaccagcactgagccacctagccatggtgaaccctgtcgcctacttgcaacagcag

SEQ ID NO: 344937 - DNA, 367 bp, Zea mays
ctggtgtgagccctgctaccttcttgacacaaccacaattgttgccgttctaccagcacgctgcgcctaacgctggcaccctcttacaactgcaacaattgctgccattcaaccaacttgctttgacaaacccaacagcattctaccaacaacccatcattggtggtgccctcttttagatttcttatgagttatagttcaataataaagttttttgtctgatgtttgtggcttcccagaaataagaaagtacatttctaaaaaaaaaaaaaaaaaaaaaaaaaaaaaaaaaaaaaaaaaaaaaaacaaaaaaaaaaaaaaaaaaaaaaaaaaaaaattatttaaaaaaaaaaaaaataaaacaaaa

SEQ ID NO: 344938 - DNA, 363 bp, Zea mays
cttgctcctagtgccattattccacagttcctcccaccagttacttcaatgggcttcgaacacctagctgtgcaagccaacatgcaacaacaagcgcttgcggcgagcgtcttacaacaaccaattgcccaattgcaacaacaatccttgccacatctaacaatacaagccatcacaacgcaacagcaacaacagttcctaccagcactgagccacctagccatggtgaaccctgccgcctacttgcaagagcagctgcttgcatccaacccacttgctctggcgaacgtagttgcaaaccagcaacaacaacagctacaacagtttctgccaacgctcagtcaactagccatggtgaaccct

SEQ ID NO: 344939 - DNA, 346 bp, Zea mays
cttgctcacagtaccataatctctttttttatcccaccagttacttcaatgggaggtgttctcctagctgtgcatgccaacatgcatcaacaagccctcgaagggagcgattaacaacaactaattgcccaattgcaacaacaattacttgccacatttaacaaaacaagccattaaatcgcatcagaaccaccagttgcgacaatctatgagccacataacgatgttgaaccctgccgtctacatgcaacgaactagtcatgtgaaacaaacaatctgcgcacatataagaattgcaaacatgcaacgcaacagctacaacagttttttccaacacttagtcaac

SEQ ID NO: 344940 - DNA, 395 bp, Zea mays
tgaatttccgggtcggcccaacccgtccgattttgagcattcagaaacacaccaagttaagcgcactagcaacaacctaacaacaatggctaccaagatattatccctccttgcgcttcttgcgctttttgcgagcgcaacaaatgcgtccattattccacaatgctcacttgctcctagttccattattccacagttcctcccaccagttacttcaatggccttcgaacacccagctgtgcaagcctataggctacaacaagcgattgcggcgagcgtcttacaacaaccaattgcccaattgcaacaacaatccttggcacatctaacaatacaaaccatcgcaacgcaacagcaacaacagttcctaccagcactgagccacctagccatgg

SEQ ID NO: 344941 - DNA, 364 bp, Zea mays
attttaagcattcagaaacactctttgcgaagcgcactatcaacaacctaacagcaatggcttccaagatattagccctccttgcgcttcttgcccttttagtgagcgcaacaaatgcgttcattattccacagtgctcacttgcttctagtgccattattccacagttcctcccaccagttacttaaatgggcttagaacattcatccgtgcaagcctacaggctacaactagcgcttgcggcgagcgttttacaacaaccaattgcccaattgcaacaacaatccttggcacatgtaaacctacaaaccatcggaacgcaacagcaacaacagtttctgccatcactgagccacctagccgt

SEQ ID NO: 344942 - DNA, 362 bp, Zea mays
ccaactagcaacatagaaagcactttagtgtaccaacaatggcagccaaaatattttgcttccttatgctccttggtctttctgcaagtgctgctaccgcaaccattttcccacaatgctcacaagctcctatagcttcctttcttcccccatacctctcaccagcggtgtcttcagtatgtgaaaacccaattcttcaaccctacaggatccaacaggcaatcgcagcaggcatcttacctttatcacccttgttcctccaacaaccgtcagccctattacagcagttacctttggtgcatttgttggcacaaaacatcaaggcacaacaactacaacaacttgtgctaggaaaccttgct

SEQ ID NO: 344943 - DNA, 366 bp, Zea mays
cagaccattagctttatctactccagatcgcagaagaacccgatcgacaccatgagggtgttgctcgttgccctcgctctcctggctctcgctgcgagcgccacctccggttcacctgccacctccggtgcatctcccaccgccggttcatctgccgccgccaccatgccactaccctactcaaccgccccggcctcagcctcatccccagccacacccatgcccgtgccaacagccgcatccaagcccgtgccagctgcagggaacctgcggcgttggcagcaccccgatcctgggccagtgcgtcgagttcctgaggcatcagtgcagcccgacggcgacgccctactgctcgcctcagtgcca

SEQ ID NO: 344944 - DNA, 367 bp, Zea mays
agaccattagctttatctactccagagcgcagaagaacccgatcgacaccatgagggtgttgctcgttgccctcgctctcctggctctcgctgcgagcgccaccttcacgcatacaagcggcggctgcggctgccagccaccgccgccggttcatctaccgccgccggtgcatctgccacctccggttcacctgccacctccggtgcatctcccaccgccggtccacctgccgccgccggtccacctgccaccgccggtccatgtgccgccgccggttcatctgccgccgtcaccatgccactaccctactcaaccgccccggcctcagcctcatccccagccacacccatgcccgtgccaacagcc

SEQ ID NO: 344945 - DNA, 368 bp, Zea mays
agaccaacaagcaacatagaaagtggaatccagtagcaacaatagagcaacaatggcgaccaagatattttccctccttatgctccttgctctttctgcatgtgttgctaacgcgacaattttccctcaatgctcacaagctcctatagcttcccttcttcccccataccttccatcaatgatagcttcagtatgtgaaaacccagctcttcaaccctataggctccaacaagcaatcgcagcaagcaacatacctttatcacccttgtttcaacaatcgccagccctatctttggtgcagtcattggtacaaaccatcagggcacagcagctgcagcaactcgtgctacctgtgatcaaccaagtag

SEQ ID NO: 344946 - DNA, 329 bp, Zea mays
acctaacaccattggctaccaagatattagccctccttgcgcttcttgccctttttgtgagcgcaacaaatgcgttcattattccacaatgctcacttgctcctagtgccattattccacagttcctcccaccagttacttcaatgggcttcgaacacctagctgtgcaagccaacatgcaacaacaagcgcttgcggcgagcgtcttacaacaaccaattgcccaattgcaacaacaatccttgccacatctaacaatacaagccatcacaacgcaacagcaacaacagttcctaccagcactgagccacctagccatggtgaaccct

SEQ ID NO: 344947 - DNA, 364 bp, Zea mays
cccacgcgtccgctttctccctactctcagcaacaacaatttcttccattcaaccaactgtctacattgaaccgtgctgcttatttgcagcaacaactattaccattcagccagctagctactgcctactctcagcaacaacaacttcttccatttaaccaattggccgcactgaaccccgctgcttatttgcagcagcaaatactactaccatttagccagctagctgcagcaagccgtgcttccttcttgacacagcaacagttgctgcctttctaccagcagtttgcggctaaccccgcaaccctcttacaactacaacaattgttgccctttgtccaacttgctttgacaaacccagcag

SEQ ID NO: 344948 - DNA, 263 bp, Zea mays
cgggctttaagaaccacaccaagcgaagggcactagcaacaacctaacacatggctacaagatttagccctctgggctttggcctttagggccacaaaggtcatattcacaggtactgtctaggctattaagtctcacagtactaaggttgacacagcggcagcacagtcactggctgcgggcgctacacaccatgccattgcacacaatctggcattaacacaacatgacgacagcacacagtttgcatactggcacagcgg

SEQ ID NO: 344949 - DNA, 111 bp, Zea mays
taacaacacaccaataaaaaattattattattcaacaaaaaaacaaaaataaggggagaatttattaaacaataataaaacccttgccctaactaaaaaaaacaaaaagct

SEQ ID NO: 344950 - DNA, 363 bp, Zea mays
gaaacacaccaagcgaagcgcactatcaacaacctaacaacaatggctaccaagatattatccctccttgcgcttcttgcgctttttgcgagcgcaacaaatgcgtccattattccacaatgctcacttgctcctagttacattattccacagttcctcccaccagttacttcaatggccttcgaacacccagctgtgcaagcctataggctacaacaagcgattgcggcgagcgtcttacaacaaccaattgcccaattgcaacaacaatccttggcacatctaacaatacaaaccatcgcaacgcaacagcaacaacagttcctaccagcactgagccacctagccatggtgaaccctgtc

SEQ ID NO: 344951 - DNA, 367 bp, Zea mays
agaccattagctttatctactccagagcgcagaagaacccgatcgacaccatgagggtgttgctcgttgccctcgctctcctggctctcgctgcgagcgccacctccacgcatacaagcggcggctgcggctgccagccaccgccgccggttcatctaccgccgccggtgcatctgccacctccggttcacctgccacctccggtgcatctcccaccgccggtccacctgccgccgccggtccacctgccaccgccggtccatgtgccgccgccggttcatctgccgccgccaccatgccactaccctactcaaccgccccggcctcagcctcatccccagccacacccatgcccgtgccaacagcc

SEQ ID NO: 344952 - DNA, 369 bp, Zea mays
cagaaacacaccaagcgaagcacattatcaacaacctaacaacaatggctaccaagatattatccctccttgcgcttcttgcgctttttgcgagcgcaacaaatgcgttcattattccacaatgctcacttgctccaagttccattattacacagttcctcccaccagttacttcaatgggcttcgaacacccagctgtgcaagcctataggctacaacaagcaattgcggcgagcgtcttacaacaaccaatttcccagttgcaacaacaatccttggcacatctaacaatacaaaccatcgcaacgcaacagcaacaacaattcctaccagcactgagccacctagccatggtgaaccctgccgcct

SEQ ID NO: 344953 - DNA, 373 bp, Zea mays
tcggttttttgtcccagaccggggggttcttgttgtggtaaccaccaaggccatgagcgggatcttcttccacaacaccatcttccacaaaaacaacaacatcaaccgccaccacaacatcaccagcagcagtaacaccaacaacaacatgttcacatgcaaccacaaaaacatcagcaaaaacaagaagttcatgttcaacaacaacaacaacatccgctggaccgacaacatcaacatcaacagcaccaacaacaacatcaatgtgaaggccaacatcaacatcaccaacaatcacaaggccatgtgcaacaacacgaacagagccatgagctacaccaaggacagagccatgagctacatcatcaacaac

SEQ ID NO: 344954 - DNA, 366 bp, Zea mays
attcagaaacacaccaagcgaagctttctagcaacaacctaacaacaatggctaccaagatattagccctccttgcgcttcttgcccttttagtgagcgcaacaaatgcgttcattattccacagtgctcacttgctcctagtgccattattccacagttcctcccaccagttacttcaatgagcttcgaacatccagccgtgcaagcctacaggctacaactagcgcttgcggcgagcgtcttacaacaaccaattgcccaattgcaacaacaatccttggcacatctaaacctacaaaccatcgcaacgcaacagcaacaacagtttctgccatcactgagccacctagccgtggtgaaccctg

SEQ ID NO: 344955 - DNA, 196 bp, Zea mays
aaaaaaaaaaaaaaaaaaaaaattttttaaaaaaaaaaaaaaaaaaaaaaaaaaagaggggtcatgcaaattataagatacctgcccttacttcacttatatgcggccgccgcgttttcggtttccctggtcccatccccgtcctctcgccgttagtcttctacttctggtgacggggtaccccctttccttgccg

SEQ ID NO: 344956 - DNA, 367 bp, Zea mays
agccttccgtttttgggctttcagaaacacaccaagcgaagcgcactagcacaacctaacacatggctccaagtattatcctcttgccttttgcccttttgcgaggcgcacataagcgttcattattccacaatgctcacttgctcctaattccattattccacagttcctcccaccagttacttcaatggccttcgaacacccagctgtgcaagcctataggctacaacaagcgattgcggcgagcgtcttacaacaaccaattgcccaattgcaacaacaatccttggcacatctaacaatacaaaccatcgcaacgcaacagcaacaacagttcctaccagcactgagccacctagccatggtg

SEQ ID NO: 344957 - DNA, 369 bp, Zea mays
tttcagcattcagaaacacaccaagcgaagcgcactagcaacaacctaacaacaatggctaccaagatattagccctccttgcgcttcttgcccttttagtgagcgcaacaaatgcgttcattattccacagtgctcacttgctcctagtgccattattccacagttcctcccaccagttacttcaatgggcttcgaacatccagccgtgcaagcctacaggctacaactagcgcttgcggcgagcgtcttacaacaaccaattgcccaattgcaacaacaatccttggcacatctaaacctacaaaccatcgcaacgcaacagcaacaacagtttctgccatcactgagccacctagccgtggtgaac

SEQ ID NO: 344958 - DNA, 368 bp, Zea mays
catctagcaacatataaagcacatttgtgtaccaacaatggcagccaaaatattttgcctccttatgctccttggtctttctgcaagtgctgctacggcgaccattttcccgaaatgctcgcaagctcctatagcttcccttcttcccccgtacctctcaccagcggtgtcttcggtatgtgaaaacccaattcttcaaccctacaggatccaacaggcaatcacagctggcatcttacctttatcacccttgttcctccaacaatcatcagccctattacatcagttacctttggtgcatttattggcacaaaacatcagggcacaacaactacaacaacttgtgctagcaaaccttgctgcctact

SEQ ID NO: 344959 - DNA, 366 bp, Zea mays
aactagcaacatagaaagcacaatagtgtaccaacaatggcagccaaaatattttgcttccttatgctccttggtctttctgcaagtgttgctaccgcaaccattttcccacaatgctcacaagctcctatagcttcccttcttcccccatacctctcaccagcggtgtcttcaatgtgtgaaaacccaattgttcaaccctacaggatccaacaggcaatcgcaacaggcatcttaccattatcacccttgttcctccaacaaccgtcagccctattacagcagttacctttggtccatttggtggcacaaaacatcagggcacaacaactacaacaacttgtgctagcaaaccttgctgcatac

SEQ ID NO: 344960 - DNA, 370 bp, Zea mays
cagaaacacaccaagcgaagcgcactatcaacaacctaacaacaatggctaccaagatattatccctccttgcgcttcttgcgctttttgcgagcgcaacaaatgcgtccattattccacaatgctcacttgctcctagttccattattccacagttcctcccaccagttacttcaatggccttcgaacacccagctgtgcaagcctataggctacaacaagcgattgcggcgagcgtcttacaacaaccaattgcccaattgcaacaacaatccttggcacatctaacaatacaaaccatcgcaacgcaacagcaacaacagttcctaccagcactgagccacctagccatggtgaaccctgtcgccta

SEQ ID NO: 344961 - DNA, 360 bp, Zea mays
aaaggaccattgtggtcccaccattggcggccaaaatattttgcctccttatgctccttggtctttctgcaagtgctgctacggcgaccattttcccgaaatgctcgcaagctcctatagcttcccttcttcccccgtacctctcaccagcggtgtcttcggtatgtgaaaacccaattcttcaaccctacaggatccaacaggcaatcacagctggcatcttacctttatcacccttgttcctccaacaatcatcagccctattacatcagttacctttggtgcatttattggcacaaaacatcagggcacaacaactacaacaacttgtgctagcaaaccttgctgcctactctcagc

SEQ ID NO: 344962 - DNA, 363 bp, Zea mays
gatcagcaaagcggcagtgcgtagagaggatcgtcgaacagaacagcatgaagatggtcatcgttctcgtcgtgtgcctggctctgtcagctgccagcgcctctgcaatgcagatgccctgcccctgcgcggggctgcagggcttgtacggcgctggcgccggcctgacgacgatgatgggcgccggcgggctgtacccctacgcggagtacctgaggcagccgcagtgcagcccgctggcggcggcgccctactacgccgggtgtgggcagacgagcgccatgtaccagccgctccggcaacagtgctgccagcagcagatgaggatgatggacgtgcagtccgtcgcgcagcagctgcaga

SEQ ID NO: 344963 - DNA, 205 bp, Zea mays
aaaaaaaaaaaaaaaaaaaaaaaatttaaaaaaaaaaaaaaaaaaaaaaaaaaaaaaaaaaataaaaaaaaaaaaaaaaaaaaaaaataaaaaaaaaaaaaaaaaaaaaaaaaaaaaaaaggggggggcctttttaggggatccaagttttcttccccttccttgcgacgtcttacttttttttttgggccccctaatttcattt

SEQ ID NO: 344964 - DNA, 303 bp, Zea mays
attttgagcattcagaaacacacttagcgaagcacattagcaacaacctaacaacaatggctaccaagatattatccctccttgcgcttcttgcgctttttgcgagcgcaacaaatgcgttcattattccacaatgctcacttgctccaagttccattattacacagttccttccaccagttacttcaatgggcttcgaacacccagctgtgcaagcctataggctacaacaagcaattgcggcgagcgtcttacaacaaccaatttcccagttgcaacaacaatcctttgcacatctaacaa

SEQ ID NO: 344965 - DNA, 371 bp, Zea mays
cttcggtatgtgaaaacccaattcttcaaccctacaggatccaacaggcaatcacagctggcatcttacctttatcacccttgttcctccaacaatcatcagccctattacatcagttacctttggtgcatttattggcacaaaacatcagggcacatcaactacaacaacttgtgctagcaaaccttgctgcctactctcagcaacagcagtttcttccattcaaccaactagctgcattgaactctgcttcttatttgcaacaacaacaactaccattcagccagctacctgctgcctacccccagcaatttcttccattcaaccaactggcagcattgaactctcctgcttatttacagcagcaacaa

SEQ ID NO: 344966 - DNA, 368 bp, Zea mays
cccataccttccatcaatgatagcttcagtatgtgaaaacccagctcttcaaccctataggctccaacaagcaatcgcagcaagcaacatacctttatcacccttgtttcaacaatcgccagccctatctttggtgcagtcattggtacaaaccatcagggcacagcagctgcagcaactcgtgctacctgtgatcaaccaagtagctctggcaaacctttctccctactctcagcaacaacaatttcttccattcaaccaactgtctacattgaaccgtgctgcttatttgcagcaacaactattaccattcagccagctagctactgcctactctcagcaacaacaacttcttccatttaaccaat

SEQ ID NO: 344967 - DNA, 146 bp, Zea mays
cctggcgctcgctgcgagcgccgcctccagtacaagcggcggctgtggctgccagacaccaccgtttcatctaccgtctccgttctatatgccgcctccgtctatctgccgccgcagcagcagccgcagccatggaatacccacta

SEQ ID NO: 344968 - DNA, 361 bp, Zea mays
aacaatggcagccaaaatattttgcctccttatgctccttggtctttctgcaagtgctgctacggcgaccattttcccgaaatgctcgcaagctcctatagcttcccttcttcccccgtacctctcaccagcggtgtcttcggtatgtgaaaacccaattcttcaaccctacaggatccaacaggcaatcacagctggcatcttacctttatcacccttgttcctccaacaatcatcagccctattacatcagttacctttggtgcatttattggcacaaaacatcagggcacaacaactacaacaacttgtgctagcaaaccttgctgcctactctcagcaacagcagtttcttccattc

SEQ ID NO: 344969 - DNA, 365 bp, Zea mays
ttattgagaccaactagcaacatagaaagcacaatagtgtaccaacaatggcagccaaaatattttgcctccttatgctccttggtctttctgcaagtgctgctacggcgaccattttcccgaaatgctcgcaagctcctatagcttcccttcttcccccgtacctctcaccagcggtgtcttcggtatgtgaaaacccaattcttcaaccctacaggatccaacaggcaatcacagctggcatcttacctttatcacccttgttcctccaacaatcatcagccctattacatcagttacctttggtgcatttattggcacaaaacatcagggcacaacaactacaacaacttgtgctagcaaac

SEQ ID NO: 344970 - DNA, 377 bp, Zea mays
agccgtcggttttggggctttcagaaaacacaccaagcgaagcacattagcaacaacctaacaacaatggctaccaagatattatcccctccttgggcttcttgcgctttttgcgagcgcaacaaatgcgttcattattccacaatgctcacttgctccaagttccattattacacagttcctcccaccagttacttcaatgggcttcgaacacccagctgtgcaagcctataggctacaacaagcaattgcggcgagcgtcttacaacaaccaatttcccagttgcaacaacaatccttggcacatctaacaatacaaaccatcgcaacgcaacagcaacaacaattcctaccagcactgagccacctagccatgg

SEQ ID NO: 344971 - DNA, 312 bp, Zea mays
agcgaagcgcactagcaacaacctaacaacaatggctaccaagatattagccctccttgcgcttcttgcccttttagtgagcgcaacaaatgcgttcattattccacagtgctcacttgctcctagtgccattattccacagttcctcccaccagttacttcaatgggcttcgaacattcagccgtgcaagcctacaggctacaactagcgcttgcggcgagcgtcttacaacaaccaattgcccaattgcaacaacaatccttggcacatctaaacctacaaaccatcgcaacgcaacagcaacaacagtt

SEQ ID NO: 344972 - DNA, 281 bp, Zea mays
gttctagatcgcgagcggccgccctttttttctttgtctttttttttctgtttaacttttttgtcaaatgctttgttttttccttcttctttttcaagaactcgcaaagggaacttcttatttttgggtggccccctccattattcaaaaaactttttttttgaattcccactcctaagcgacttaaaaggggggcccccccactatcttgtgaggcgcgggacccgccggttcttccaaatgatctacgccctaaagcaccaattcctgtgaagccaaaa

SEQ ID NO: 344973 - DNA, 376 bp, Zea mays
gtccgaatagctcatcgactccagattgtgaactcgacaccatgaaggtgctgatcgttgcccttgctctcctggcgctcgctgcgagcgccgcctccagtacaagcggcggctgtggctgccagacaccaccgtttcatctaccgcctccgttctatatgccgcctccgttctatctgccgtcgcagcagcagccgcagccatggcaataccccactcaaccaccgcagctaagcccgtgccagcagttcggatcctgcggcgtcggcagcgtcggcagcccgttcctgggccagtgcgtcgagttcctgaggcaccagtgcagcccggcggcgacgccctacggctcgccacagtgccaggcgctgcagcagca

SEQ ID NO: 344974 - DNA, 347 bp, Zea mays
caactagcaacatagaaagcacaattttgtaccaacaatggcagccaaaatattttgcctccttatgctccttggtctttctgcaagtgctgctacggcgaccattttcccgaaatgctcgcaagctcctatagcttcccttcttcccccgtacctctcaccagcggtgtcttcggtatgtgaaaacccaattcttcaaccctacaggatccaacaggcaatcacagctggcatcttacctttatcacccttgttcctccaacaatcatcagccctattacatcagttacctttggtgcatttattggcacaaaacatcagggcacaacaactacaacaacttgtgc

SEQ ID NO: 344975 - DNA, 357 bp, Zea mays
catagaaagcacaatagtgtaccaacaatggcagccaaaatattttgcctccttatgctccttggtctttctgcaagtgctgctacggcgaccattttcccgcaatgctcgcaagctcctatagcttcccttcttcccccgtacctctcaccagcggtgtcttcggtatgtgaaaacccaattcttcaaccctacaggatccaacaggcaatcgcagctggcatcttacctttatcacccttgttcctccaacaatcatcagccctattacaacagttacctttggtgcatttattggcacaaaacatcagggcacaacaactacaacaacttgtgctagcaaaccttgctgcctac

SEQ ID NO: 344976 - DNA, 364 bp, Zea mays
attttgagcattcagaaacacaccaagcgaagcgcactagcaacgacctaacaacaatggctaccaagatattagccctccttgcgcttcttgccctttttgtgagcgcaacaaatgcgttcattattccacaatgctcacttgctcctagtgccattattccacagttcctcccaccagttacttcaatgggcttcgaacacctagctgtgcaagccaacatgcaacaacaagcgcttgcggcgagcgtcttacaacaaccaattgcccaattgcaacaacaatccttgccacatctaacaatacaagccatcacaacgcaacagcaacaacagttcctaccagcactgagccacctagccat

SEQ ID NO: 344977 - DNA, 348 bp, Zea mays
agaaagcacaatagtgtaccaacaatggcagccaaaatattttgcctccttatgctccttggtctttctgcaagtgctgctacggcgaccattttcccgcaatgctcgcaagctcctatagcttcccttcttcccccgtacctctcaccagcggtgtcttcggtatgtgaaaacccaattcttcaaccctacaggatccaacaggcaatcgcagctggcatcttacctttatcacccttgttcctccaacaatcatcagccctattacaacagttacctttggtgcatttattggcacaaaacatcagggcacaacaactacaacaacttgtgctagcaaaccttgct

SEQ ID NO: 344978 - DNA, 353 bp, Zea mays
cagaccattagctttatctactccagagcgcagaagaacccgatcgacaccatgagggtgttgctcgttgccctcgctctcctggctctcgctgcgagcgccacctccacgcatacaagcggcggctgcggctgccagccaccgccgccggttcatctaccgccgccggtgcatctgccacctccggttcacctgccacctccggtgcatctcccaccgccggtccacctgccgtcgccggtccacctgccaccgccggtccatgtgccgccgccggttcatctgccgccgccaccatgccactaccctactcaaccgccccggcctcagcctcatccccagccacacccatg

SEQ ID NO: 344979 - DNA, 366 bp, Zea mays
cagaaacacaccaagcgaagctacctagcaacgacttaacaacaatggctaccaagatattagccctccttgcgcttcttgccctttttgtgagcgcaacaaatgcgttcattattccacaatgctcacttgctcctagtgccattataccacagttcctccgaccagttacttcaatgggcttcgaacacctagctgtgcaagcctacaggctacaacaagcgcttgcggcgagcgtcttacaacaaccaattaaccaattgcaacaacaatccttggcacatctaaccatacaaaccatcgcaacacaacagcaacaacagttcctaccagcactgagccaactagatgtggtgaaccctgtcg

SEQ ID NO: 344980 - DNA, 364 bp, Zea mays
gaaacacaccaagcgaagcgcactatcaacaacctaacaacaatggctaccaagatattagccctccttgcgcttcttgcccttttagtgagcgcaacaaatgcgttcattattccacagtgctcacttgctcctagtgccattattccacagttcctcccaccagttacttcaatgggcttcgaacatccagccgtgcaagcctacaggctacaactagcgcttgcggcgagcgtcttacaacaaccaattgcccaattgcaacaacaatccttggcacatctaaacctacaaaccatcgcaacgcaacagcaacaacagtttctgccatcactgagccacctagccgtggtgaaccctgtcg

SEQ ID NO: 344981 - DNA, 352 bp, Zea mays
attttgagcattcagaaacacaccaagcgaagcgcactagcaacgacctaacaacaatggctaccaagatattagccctccttgcgcttcttgccctttttgtgagcgcaacaaatgcgttcattattccacaatgctcacttgctcctagtgccattattccacagttcctcccaccagttacttcaatgggcttcgaacacctagctgtgcaagccaacatgcaacaacaagcgcttgcggcgagcgtcttacaacaaccaattgcccaattgcaacaacaatccttgccacatctaacaatacaagccatcacaacgcaacagcaacaacagttcctaccagcactgag

SEQ ID NO: 344982 - DNA, 348 bp, Zea mays
caaccatattattgagaccaacaagcaacatagaaagtggaatccagtagcaacaatagagcatcaatggagaccaagatattttccctccttatgctccttgctctttctacatgtgttgctaacgcgacaattttccctcaatgctcacaagctcctatagcttccctttttcccccataccttccatcaattatagcttcagtatgtgaaaacccagctcttcaaccatataggcttcaacaagcaatcgcagcaagcaacatacctttatcgcccttgttgtgtcaacaatcgccagccctatctttggtgcagtcattggtacaaaccatcagggcacaacag

SEQ ID NO: 344983 - DNA, 362 bp, Zea mays
gagaccaactagcaacatataaagctcaatagtgtaccaacaatggcagccaaaatattttgcctccttatgctccttggtctttctgcaagtgctgctacggcgaccattttcccgcaatgctcgcaagctcctatagcttcccttcttcccccgtacctctcaccagcggtgtcttcggtatgtgaaaacccaattcttcaaccctacaggatccaacaggcaatcgcagctggcatcttacctttatcacccttgttcctccaacaatcatcatccctattacaacagttacctttggtgcatttattggcacaaaacattagggcacaaccaactacaacaacttgtgctagcaaacc

SEQ ID NO: 344984 - DNA, 169 bp, Zea mays
caattgctgccattcaaccaacttgctttgacaaacccagcagtgttctaccaacaacccatcattggtggtgccctcttttagatttcttatgagttatagttcaataataaagttttttatctgatgtttgtggcttcccagaaataagaaagtacatttctagatt

SEQ ID NO: 344985 - DNA, 349 bp, Zea mays
gcaacatagaaagcacaatagtgtaccaacaatggcagccaaaatattttgcctccttatgctccttggtatttctgcaagtgctgctacggcgaccattttcccgcaatgctcacaagctcctatagcttcccttcttcccccgtacctctcaccagcggtgtcttcggtatgtgaaaacccaattcttcaaccctacaggatccaacaggcaatcgcagctggcatcttacctttatcacccttgttcctccaacaatcatcagccctattacagcagttacctttggtgcatttattggcacaaaacatcagggcacaacaactacaacaacttgtgctagcaaac

SEQ ID NO: 344986 - DNA, 363 bp, Zea mays
accattagctttatctactccagagcgcagaagaacccgatcgacaccatgagggtgttgctcgttgccctcgctctcctggctctcgctgcgagcgccacctccacgcatacaagcggcggctgcggctgccagccaccgccgccggttcatctaccgccgccggtgcatctgccacctccggttcacctgccacctccggtgcatctcccaccgccggtccacctgccgccgccggtccacctgccaccgccggtccatgtgccgccgccggttcatctgccgccgccaccatgccactaccctactcaaccgccccggcctcagcctcatccccagccacacccatgcccgtgccaacag

SEQ ID NO: 344987 - DNA, 353 bp, Zea mays
cttctccaccaccaccactggacgtcagcctagcaattagctcatcgactccagattggagaactcgacaccatgaaggtgctgatcgttgcccttgctctcctggcgctcgctgcgagcgccgcctccagtacaagcggcggctgtggctgccagacaccaccgtttcatctaccgcctccgttctatatgccgcctccgttctatctgccgccgcagcagcagccgcagccatggcaataccccactcaaccaccgcagctaagcccgtgccagcagttcggatcctgcggcgtcggcagcgtcggcagcccgttcctgggccagtgcgtcgagttcctgaggcaccagtg

SEQ ID NO: 344988 - DNA, 351 bp, Zea mays
agcaaagcggcagtgcgtagagaggatcgtcgaacagaacagcatgaagatggtcatcgttctcgtcgtgtgcctggctctgtcagctgccagcgcctctgcaatgcagatgccctgcccctgcgcggggctgcagggcttgtacggcgctggcgccggcctgacgacgatgatgggcgccggcgggctgtacccctacgcggagtacctgaggcagccgcagtgcagcccgctggcggcggcgccctactacgccgggtgtgggcagacgagcgccatgtaccagccgctccggcaacagtgctgccagcagcagatgaggatgatggacgtgcagtccgtcgcgcagca

SEQ ID NO: 344989 - DNA, 360 bp, Zea mays
tttcagcattcagaaacacaccaagcgaagcgcactagcaacaacctaacaacaatggctaccaagatattagccctccttgcgcttcttgcccttttagtgagcgcaacaaatgcgttcattattccacagtgctcacttgctcctagtgccattattccacagttcctcccaccagttacttcaatgggcttcgaacatccagccgtgcaagcctacaggctacaactagcgcttgcggcgagcgtcttacaacaaccaattgcccaattgcaacaacaatccttggcacatctaaacctacaaaccatcgcaacgcaacagcaacaacagtttctgccatcactgagccacctagcc

SEQ ID NO: 344990 - DNA, 359 bp, Zea mays
tttcagcattcagaaacacaccaagcgaagcgcactatcaacaacctaacaacaatggctaccaagatattagccctccttgcgcttcttgcccttttagtgagcgcaacaaatgcgttcattattccacagtgctcacttgctcctagtgccattattccacagttcctcccaccagttacttcaatgggcttcgaacatccagccgtgcaagcctacaggctacaactagcgcttgcggcgagcgtcttacaacaaccaattgcccaattgcaacaacaatccttggcacatctaaacctacaaaccatcgcaacgcaacagcaacaacagtttctgccatcactgagccacctagc

SEQ ID NO: 344991 - DNA, 361 bp, Zea mays
tacaacaacttgtgctagcaaaccttgctgcctactctcagcaacagcagtttcttccattcaaccaactagctgcattgaactctgcttcttatttgcaacaacaacaactaccattcagccagctacctgctgcctacccccagcaatttcttccattcaaccaactggcagcattgaactctcctgcttatttacagcagcaacaactactaccattcagccagctagctggtgtgagccctgctaccttcttgatacaaccacagttgttgccgttctaccagcacgctgcgcctaacgctggcaccctcttacaactgcaacaattgctgccattcaaccaacttgctttgacaaa

SEQ ID NO: 344992 - DNA, 351 bp, Zea mays
ggaatacagtagcaacaatagagcatcaatggcggccaagatattttccatccttatgctccttgctctttctgcatgtgttgctaacgcgaccatttttcctcaatactcacaagctcctatagctgcccttcttcccccataccttccatcaatgaccgcttcagtatgtgaaaacccagcccttcaaccctacaggctccaacaagcaatcgcaacaagcaacttacctttatcacccctgttctttcaacaatcgccagccctatctttggtgcagtcattggtacaaaccatcagggcacaacagctgcagcaactcgtgctaccagtgatcagccaagtagctct

SEQ ID NO: 344993 - DNA, 351 bp, Zea mays
gggcacaacaactacaacaacttgtgctagcaaaccttgctgcatactctcagcaacatcagtttcttccattcaaccaactggctgcattgaactctgctgcttatttgcaacaacaattaccattcagccagctagttgctgcctacccccagcaatttcttccattcaaccaactagcagcattgaactctgctgcttatttacagcagcaacaactactaccattcagccagctagctgatgtgagccctgctgccttcttgacacaacaacagttgttgccgttctacctgcacgctatgcctaacgctggcaccctcttacaactgcaacaattgctgccattca

SEQ ID NO: 344994 - DNA, 323 bp, Zea mays
ggcagcattgaactctcctgcttatttacagcagcaacaactactaccattcagccagctagctggtgtgagccctgctaccttcttgatacaaccacagttgttgccgttctaccagcacgctgcgcctaacgctggcaccctcttacaactgcaacaattgctgccattcaaccaacttgctttgacaaacccagcagcgttctaccaacaacccatcattggtggtgccctcttttagatttcttatgagttatagttcaataataaagttttttgtctgatgtttgtggcttcccagaaataagaaagtacatttctag

SEQ ID NO: 344995 - DNA, 350 bp, Zea mays
attttgagcattcagaaacacaccaagcgaagcacattagcaacaacctaacaacaatggctaccaagatattatccctccttgcgcttcttgcgctttttgcgagcgcaacaaatgcgttcattattccacaatgctcacttgctccaagttccattattacacagttcctcccaccagttacttcaatgggcttcgaacacccagctgtgcaagcctataggctacaacaagcaattgcggcgagcgtcttacaacaaccaatttcccagttgcaacaacaatccttggcacatctaacaatacaaaccatcgcaacgcaacagcaacaacaattcctaccagcactg

SEQ ID NO: 344996 - DNA, 349 bp, Zea mays
gcaacatagaaagtggaatccagtttcaacaatagagcaacaatggagaccaagatattttccctccttatgctccttgctctttctacatgtgttgctaacgcgacaattttccctcaatgctcacaagctcctatagcttccctttttcccccataccttccatcaattatagcttcagtatgtgaaaacccagctcttcaaccatataggcttcaacaagcaatcgcagcaagcaacatacctttatcgcccttgttgtgtcaacaatcgccagccctatctttggtgcagtcattggtacaaaccatcagggcacaacagctgcagcaactcgtgctacctgtga

SEQ ID NO: 344997 - DNA, 355 bp, Zea mays
aagcaacatagaaagtggaatccagtagcaacaatagagcaacaatggagaccaagatattttccctccttatgctccttgctctttctacatgtgttgctaacgcgacaattttccctcaatgctcacaagctcctatagcttccctttttcccccataccttccatcaattatagcttcagtatgtgaaaacccagctcttcaaccatataggcttcaacaagcaatcgcagcaagcaacatacctttatcgcccttgttgtgtcaacaatcgccagccctatctttggtgcagtcattggtacaaaccatcaaggcacaacagctgcagcaactcgtgctacctgtgatcaa

SEQ ID NO: 344998 - DNA, 351 bp, Zea mays
aagcaacatagaaagtggaatccagtagcaacaatagagcaacaatggagaccaagatattttccctccttatgctccttgctctttctacatgtgttgctaacgcgacaattttccctcaatgctcacaagctcctatagcttccctttttcccccataccttccatcaattatagcttcagtatgtgaaaacccagctcttcaaccatataggcttcaacaagcaatcgcagcaagcaacatacctttatcgcccttgttgtgtcaacaatcgccagccctatctttggtgcagtcattggtacaaaccatcatggcacaacagctgcagcaactcgtgctacctgtga

SEQ ID NO: 344999 - DNA, 358 bp, Zea mays
cagaaacacaccaagcgaagcgcactagcaacaacctaacaacaatggctaccaagatattatccctccttgcgcttcttgcgctttttgcgagcgcaacaaatgcgtccattattccacaatgctcacttgctcctagttccattattccacagttcctcccaccagttacttcaatggccttcgaacacccagctgtgcaagcctataggctacaacaagcgattgcggcgagcgtcttacaacaaccaattgcccaattgcaacaacaatccttggcacatctaacaatacaaaccatcgcaacgcaacagcaacaacagttcctaccagcactgagccacctagccatggtgaa

SEQ ID NO: 345000 - DNA, 257 bp, Zea mays
atcgcgagcggccgcccttttttttttttttatgagttatagttcaataagaaaggtttttgactgatgtttgtggcttcccacaattatgaaagcacatttctagattctcaaaataaaaaatatcaaaaattctaaaaatactaaaatataatttaaatattataaattttattctttttcatattccttattaatttataaatacattatcttattattaccttcctaataattaattaattaacttaatatta

SEQ ID NO: 345001 - DNA, 358 bp, Zea mays
gcattcagaaacacaccaagcgaagcacattagcaacaacctaacaacaatggctaccaagatattatccctccttgcgcttcttgcgctttttgcgagcgcaacaaatgcgttcattattccacaatgctcacttgctccaagttccattattacacagttcctcccaccagttacttcaatgggcttcgaacacccagctgtgcaagcctataggctacaacaagcaattgcggcgagcgtcttacaacaaccaatttcccagttgcaacaacaatccttggcacatctaacaatacaaaccatcgcaacgcaacagcaacaacaattcctaccagcactgagccacctagccatg

SEQ ID NO: 345002 - DNA, 357 bp, Zea mays
attttgagcattcagaaacacaccaagcgaagcacattagcaacaacctaacaacaatggctaccaagatattatccctccttgcgcttcttgcgctttttgcgagcgcaacaaatgcgttcattattccacaatgctcacttgctccaagttccattattacacagttcctcccaccagttacttcaatgggcttcgaacacccagctgtgcaagcctataggctacaacaagcaattgcggcgagcgtcttacaacaaccaatttcccagttgcaacaacaatccttggcacatctaacaatacaaaccatcgcaacgcaacagcaacaacaattcctaccagcactgagccacc

SEQ ID NO: 345003 - DNA, 350 bp, Zea mays
caactagcaacatagaaagcacaattgtgtaccaacaatggcagccaaaatattttgcctccttatgctccttggtctttctgcaagtgctgctacggcgaccattttcccgaaatgctcgcaagctcctatagcttcccttcttcccccgtacctctcaccagcggtgtcttcggtatgtgaaaacccaattcttcaaccctacaggatccaacaggcaatcacagctggcatcttacctttatcacccttgttcctccaacaatcatcagccctattacatcagttacctttggtgcatttattggcacaaaacatcagggcacaacaactacaacaacttgtgctag

SEQ ID NO: 345004 - DNA, 353 bp, Zea mays
agaccattagctttatctactccagagcgcagaagaacccgatcgacaccatgagggtgttgctcgttgccctcgctctcctggctctcgctgcgagcgccacctccacgcatacaagcggcggctgcggctgccagccaccgccgccggttcatctaccgccgccggtgcatctgccacctccggttcacctgccacctccggtgcatctcccaccgccggtccacctgccgccgccggtccacctgccaccgccggtccatgtgccgccgccggttcatctgccgccgccaccatgccactaccctactcaaccgccccggcctcagcctcatccccagccacacccatgc

SEQ ID NO: 345005 - DNA, 353 bp, Zea mays
attgagaccaactagcaacatagaaagcacaatagtgtaccaacaatggcagctaaaatattttgcctccttatgctccttggtctttctgcaagtgctgctacggcgaccattttcccacaatgctcacaagctcctatagcttcccttcttcccccgtacctctcaccaacggtgtcttcggtatgtgaaaacccaattcttcaaccctacaggatccaacaggcaatcgcagctggcatcttacctttatcacccttgttcctccaacaatcatcagccctattacagcagttacctttggtgcatttattggcacaaaacatcagggcacaacaactacaacaacttgt

SEQ ID NO: 345006 - DNA, 355 bp, Zea mays
ttcagaaacacaccaagcgaatcgctctagcaacaacctaacaacaatggctaccaagatattatccctccttgcgcttcttgcgctttttgcgagcgcaacaaatgcgtccattattccacaatgctcacttgctcctagttccattattccacagttcctcccaccagttacttcaatggccttcgaacacccagctgtgcaagcctataggctacaacaagcgattgcggcgagcgtcttacaacaaccaattgcccaattgcaacaacaatccttggcacatctaacaatacaaaccatcgcaacgcatcagcaacaacagttcctaccagcactgagccacctagccatg

SEQ ID NO: 345007 - DNA, 348 bp, Zea mays
ccaactagcaacatagaaagctcatttgtgtaccaacaatggcagccaaaatatgttgcttccttatgctccttggtctttctgcaagtgctgctaccgcaaccattttcccacaatgctcacaagctcctatagcttcctttcttcccccatacctctcaccagcggtgtcttcagtatgtgaaaacccaattcttcaaccctacaggatccaacaggcaatcgcagcaggcatcttacctttatcacccttgttcctccaacaaccgtcagccctattacagcagttacctttggtgcatttgttggcacaaaacatcaaggcacaacaactacaacaacttgtgc

SEQ ID NO: 345008 - DNA, 357 bp, Zea mays
ccagattggagaactcgacaccatgaaggtgctgatcgttgcccttgctctcctggcgctcgctgcgagcgccgcctccagtacaagcggcggctgtggctgccagacaccaccgtttcatctaccgcctccgttctatatgccgcctccgttctatctgccgccgcagcagcagccgcagccatggcaataccccactcaaccaccgcagctaagcccgtgccagcagttcggatcctgcggcgtcggcagcgtcggcagcccgttcctgggccagtgcgtcgagttcctgaggcaccagtgcagcccggcggcgacgccctacggctcgccacagtgccaggcgctgcagcagca

SEQ ID NO: 345009 - DNA, 352 bp, Zea mays
gagaccaacaagcaacatagaaagtttaatccagtagcaacaatagagcaacagtggcgaccaagatattttccctccttatgctccttgctctttctgcatgtgttgctaacgcgacaattttccctcaatgctcacaagctcctatagcttcccttcttcccccataccttccatcaatgatagcttcagtatgtgaaaacccagctcttcaaccctataggctccaacaagcaatcgcagcaagcaacatacctttatcacccttgtttcaacaatcgccagccctatctttggtgcagtcattggtacaaaccatcagggcacagcagctgcagcaactcgtgctacc

SEQ ID NO: 345010 - DNA, 356 bp, Zea mays
agaaagcacaatagtgtaccaacaatggcagccaaaatattttgcctccttatgctccttggtctttctgcaagtgctgctacggcgaccattttcccgaaatgctcgcaagctcctatagcttcccttcttcccccgtacctctcaccagcggtgtcttcggtatgtgaaaacccaattcttcaaccctacaggatccaacaggcaatcacagctggcatcttacctttatcacccttgttcctccaacaatcatcagccctattacatcagttacctttggtgcatttattggcacaaaacatcagggcacaacaactacaacaacttgtgctagcaaaccttgctgcctactc

SEQ ID NO: 345011 - DNA, 356 bp, Zea mays
cagaaacacaccaagcgaagcgcactagctacaacctaacaacaatggctaccaagatattagccctccttgcgcttcttgcccttttagtgagcgcaacaaatgcgttcattattccacagtgctcacttgctcctagtgccattattccacagttcctcccaccagttacttcaatgggcttcgaacatccagccgtgcaagcctacaggctacaactagcgcttgcggcgagcgtcttacaacaaccaattgcccaattgcaacaacaatccttggcacatctaaacctacaaaccatcgcaacgcaacagcaacaacagtttctgccatcactgagccacctagccgtggtg

SEQ ID NO: 345012 - DNA, 352 bp, Zea mays
gaccaactagcaacatagaaagcacaatagtgtaccaacaatggcagccaaaatattttgcctccttatgctccttggtctttctgcaagtgctgctacggcgaccattttcccgaaatgctcgcaagctcctatagcttcccttcttcccccgtacctctcaccagcggtgtcttcggtatgtgaaaacccaattcttcaaccctacaggatccaacaggcaatcacagctggcatcttacctttatcacccttgttcctccaacaatcatcagccctattacatcagttacctttggtgcatttattggcacaaaacatcagggcacaacaactacaacaacttgtgcta

SEQ ID NO: 345013 - DNA, 353 bp, Zea mays
cagaaacacaccaagcgaagcacattagcaacaacctaacaacaatggctaccaagatattatccctccttgcgcttcttgcgctttttgcgagcgcaacaaatgcgttcattattccacaatgctcacttgctccaagttccattattacacagttcctcccaccagttacttcaatgggcttcgaacacccagctgtgcaagcctataggctacaacaagcaattgcggcgagcgtcttacaacaaccaatttcccagttgcaacaacaatccttggcacatctaacaatacaaaccatcgcaacgcaacagcaacaacaattcctaccagcactgagccacctagccatg

SEQ ID NO: 345014 - DNA, 353 bp, Zea mays
gcaacatagaaagtggaatccagtttcaacaatagagcaacaatggcgaccaagatattttccctccttatgctccttgctctttctgcatgtgttgctaacgcgacaattttccctcaatgctcacaagctcctatagcttcccttcttcccccataccttccatcaatgatagcttcagtatgtgaaaacccagctcttcaaccctataggctccaacaagcaatcgcagcaagcaacatacctttatcacccttgtttcaacaatcgccagccctatctttggtgcagtcattggtacaaaccatcagggcacagcagctgcagcaactcgtgctacctgtgatcaacca

SEQ ID NO: 345015 - DNA, 352 bp, Zea mays
caactagcaacatagaaagcacaatagtgtaccaacaatggcagccaaaatattttgcttccttatgctccttggtctttctgcaagtgctgctaccgcaaccattttcccacaatgctcacaagctcctatagcttcctttcttcccccatacctctcaccagcggtgtcttcagtatgtgaaaacccaattcttcaaccctacaggatccaacaggcaatcgcagcaggcatcttacctttatcacccttgttcctccaacaaccgtcagccctattacagcagttacctttggtgcatttgttggcacaaaacatcaaggcacaacaactacaacaacttgtgctagga

SEQ ID NO: 345016 - DNA, 349 bp, Zea mays
cagaaacacaccagcgaactctctatcacaacctaacaacaatggctaccaggatattagccctccttgcgcttcttgcccttttagtgagcgcaacaaatgcgttcattattccacagtgctcacttgctcctagtgccattattccacagttcctcccaccagttacttcaatgggcttcgaacatccagccgtgcaagcctacaggctacaactagcgcttgcggcgagcgtcttacaacaaccaattgcccaattgcaacaacaatccttggcacatctaaacctacaaaccatcgcaacgcaacagcaacaacagtttctgccatcactgagccacctagccgt

SEQ ID NO: 345017 - DNA, 350 bp, Zea mays
ggacgtcagcctagcaattagctcatcgactccagattggagaactcgacaccatgaaggtgctgatcgttgcccttgctctcctggcgctcgctgcgagcgccgcctccagtacaagcggcggctgtggctgccagacaccaccgtttcatctaccgcctccgttctatatgccgcctccgttctatctgccgccgcagcagcagccgcagccatggcaataccccactcaaccaccgcagctaagcccgtgccagcagttcggatcctgcggcgtcggcagcgtcggcagcccgttcctgggccagtgcgtcgagttcctgaggcaccagtgcagcccggcggcgacg

SEQ ID NO: 345018 - DNA, 354 bp, Zea mays
ctagcaattagctcatcgactccagattggagaactcgacaccatgaaggtgctgatcgttgcccttgctctcctggcgctcgctgcgagcgccgcctccagtacaagcggcggctgtggctgccagacaccaccgtttcatctaccgcctccgttctatatgccgcctccgttctatctgccgccgcagcagcagccgcagccatggcaataccccactcaaccaccgcagctaagcccgtgccagcagttcggatcctgcggcgtcggcagcgtcggcagcccgttcctgggccagtgcgtcgagttcctgaggcaccagtgcagcccggcggcgacgccctacggctcgcc

SEQ ID NO: 345019 - DNA, 355 bp, Zea mays
agaaacacaccaagcgaagcgcactagctacaacctaacaacaatggctaccaagatattatccctccttgcgcttcttgcgctttttgcgagcgcaacaaatgcgtccattattccacaatgctcacttgctcctagttccattattccacagttcctcccaccagttacttcaatggccttcgaacacccagctgtgcaagcctataggctacaacaagcgattgcggcgagcgtcttacaacaaccaattgcccaattgcaacaacaatccttggcacatctaacaatacaaaccatcgcaacgcaacagcaacaacagttcctaccagcactgagccacctagccatggtg

SEQ ID NO: 345020 - DNA, 355 bp, Zea mays
gcattcagaaacacaccaagcgaagcgcactagcaacaacctaacaacaatggctaccaagatattatccctccttgcgcttcttgcgctttttgcgagcgcaacaaatgcgtccatcattccacaatgctcacttgctcctagttccattattccacagttcctcccaccagttacttcaatggccttcgaacacccagctgtgcaagcctataggctacaacaagcgattgcggcgagcgtcttacaacaaccaattgcccaattgcaacaacaatccttggcacatctaacaatacaaaccatcgcaacgcaacagcaacaacagttcctaccagcactgagccacctagcc

SEQ ID NO: 345021 - DNA, 355 bp, Zea mays
caactagcaacatagaaagcacaacttctacaacaacttgtgctagcaaaccttgctgcctactctcagcaacagcagtttcttccattcaaccaactagctgcattgaactctgcttcttatttgcaacaacaacaactaccattcagccagctacctgctgcctacccccagcaatttcttccattcaaccaactggcagcattgaactctcctgcttatttacagcagcaacaactactaccattcagccagctagctggtgtgagccctgctaccttcttgatacaaccacagttgttgccgttctaccagcacgctgcgcctaacgctggcaccctcttacaactgcaac

SEQ ID NO: 345022 - DNA, 356 bp, Zea mays
gaaacacaccaagcgaagcgcactttcaacgacctaacaacaatggctaccaagatattagccctccttgcgcttcttgccctttttgtgagcgcaacaaatgcgttcattattccacaatgctcacttgctcctagtgccattattccacagttcctcccaccagttacttcaatgggcttcgaacacctagctgtgcaagccaacatgcaacaacaagcgcttgcggcgagcgtcttacaacaaccaattgcccaattgcaacaacaatccttgccacatctaacaatacaagccatcacaacgcaacagcaacaacagttcctaccagcactgagccacctagccatggtgaa

SEQ ID NO: 345023 - DNA, 351 bp, Zea mays
caactagcaacatagaaagcacaattgtgtaccaacaatggcagccaaaatatgttgcttccttatgctccttggtctttctgcaagtgttgctaccgcaaccattttcccacaatgctcacaagctcctatagcttcccttcttcccccatacctctcaccagcggtgtcttcaatgtgtgaaaacccaattgttcaaccctacaggatccaacaggcaatcgcaacaggcatcttaccattatcacccttgttcctccaacaaccgtcagccctattacagcagttacctttggtccatttggtggcacaaaacatcagggcacaacaactacaacaacttgtgctatc

SEQ ID NO: 345024 - DNA, 354 bp, Zea mays
gcaacatagaaagcacaatagtgtaccaacaatggcagccaaaatattttgcttccttatgctccttggtctttctgcaagtgctgctaccgcaaccattttcccacaatgctcacaagctcctatagcttcctttcttcccccatacctctcaccagcggtgtcttcagtatgtgaaaacccaattcttcaaccctacaggatccaacaggcaatcgcagcaggcatcttacctttatcacccttgttcctccaacaaccgtcagccctattacagcagttacctttggtgcatttgttggcacaaaacatcaaggcacaacaactacaacaacttgtgctaggaaaccttgc

SEQ ID NO: 345025 - DNA, 232 bp, Zea mays
gctgcttatttgcagcagcaaatactactaccatttagccagctagctgcagcaagccgtgcttccttcttgacacagcaacagttgctgcctttctaccagcagtttgcggctaaccccgcaaccctcttacaactacaacaattgttgccctttgtccaacttgctttgacaaacccagcagcctcctaccaacaacacatcattggtggtgccctcttctagatcgcga

SEQ ID NO: 345026 - DNA, 353 bp, Zea mays
gttggcacaaaacatcaaggcacatcaactacaacaacttgtgctaggaaaccttgctgcctactctcagcaacagcagtttcttccattcaaccaactggctgcattgaactctgctgcttatttgcaacaacaactaccattcagtcagctagctgctgcctacccccagcaatttcttccattcaaccaactggcagcattgaactctgctgcttatttacaacagcaacagctaccaccattcagccagctagctgatgtgagccctgttgccttcttgacacaacaacagttgttgccgttctacctgcacgctgcgcctaacgctggcaccctcttacaactgcaac

SEQ ID NO: 345027 - DNA, 357 bp, Zea mays
gcggcagtgcttaaagaggttcttcaatggccttcgaacacccagctgtgcaagcctataggctacaacaagcgattgcggcgagcgtcttacaacaaccaattgcccaattgcaacaacaatccttggcacatctaacaatacaaaccatcgcaacgcaacagcaacaacagttcctaccagcactgagccacctagccatggtgaaccctgtcgcctacttgcaacagcagctgcttgcatccaacccacttgctctagcaaacgtagttgcaaaccagcaacatcaacaactgcaacagtttctgccagcgcttagtcaactagccatggtgaaccctgccgcctacctacaac

SEQ ID NO: 345028 - DNA, 349 bp, Zea mays
atagaaagcacaatagtgtaccaacaatggcagccaaaatattttgcctccttatgctccttggtctttctgcaagtgctgctacggcgaccattttcccgaaatgctcgcaagctcctatagcttcccttcttcccccgtacctctcaccagcggtgtcttcggtatgtgaaaacccaattcttcaaccctacaggatccaacaggcaatcacagctggcatcttacctttatcacccttgttcctccaacaatcatcagccctattacatcagttacctttggtgcatttattggcacaaaacatcagggcacaacaactacaacaacttgtgctagcaaaccttgc

SEQ ID NO: 345029 - DNA, 353 bp, Zea mays
taggaaaccttgctgcctactctcagcaacagcagtttcttccattcaaccaactggctgcattgaactctgctgcttatttgcaacaacaactaccattcagtcagctagctgctgcctacccccagcaatttcttccattcaaccaactggcagcattgaactctgctgcttatttacaacagcaacagctaccaccattcagccagctagctgatgtgagccctgttgccttcttgacacaacaacagttgttgccgttctacctgcacgctgcgcctaacgctggcaccctcttacaactgcaacaattgctgccattcaaccaacttgctttgacaaacccaacagcg

SEQ ID NO: 345030 - DNA, 375 bp, Zea mays
ggcccgacccacccatgcgtaaagctcattattgtaccaacaatgtcctactaccatttatgctgccttatgctccttggtctttctgcaagtgctgctaccgcaaccattttcccacaatgctcacaagctcctatagcttcctttcttcccccatacctatcaccagcggtgtcttcagtatgtgaaaacccaattcttcaaccctacaggatccaacaggcaatcgcagcaggcatcttacctttatcacccttgttcctccaacaaccgtcagccctattacagcagttacctttggtgcatttgttggcacaaaacatcaaggcacaacaactacaacaacttgtgctaggaaaccttgctgcctactct

SEQ ID NO: 345031 - DNA, 355 bp, Zea mays
cattgaaccgtgctgcttatttgcagcaacaactattaccattcagccagctagctactgcctactctcagcaacaacaacttcttccatttaaccaattggccgcactgaaccccgctgcttatttgcagcagcaaatactactaccatttagccagctagctgcagcaagccgtgcttccttcttgacacagcaacagttgctgcctttctaccagcagtttgcggctaaccccgcaaccctcttacaactacaacaattgttgccctttgtccaacttgctttgacaaacccagcagcctcctaccaacaacacatcattggtggtgccctcttttagattgcttattagtt

SEQ ID NO: 345032 - DNA, 357 bp, Zea mays
gcggcagtgcgtagagaggatcgtcgaacagaacagcatgaagatggtcatcgttctcgtcgtgtgcctggctctgtcagctgccagcgcctctgcaatgcagatgccctgcccctgcgcggggctgcagggcttgtacggcgctggcgccggcctgacgacgatgatgggcgccggcgggctgtacccctacgcggagtacctgaggcagccgcagtgcagcccgctggcggcggcgccctactacgccgggtgtgggcagacgagcgccatgtaccagccgctccggcaacagtgctgccagcagcagatgaggatgatggacgtgcagtccgtcgcgcagcagctgcagatgat

SEQ ID NO: 345033 - DNA, 352 bp, Zea mays
ccattagctttatctactccagagcgcagaagaacccgatcgacaccatgagggtgttgctcgttgccctcgctctcctggctctcgctgcgagcgccacctccacgcatacaagcggcggctgcggctgccagccaccgccgccggttcatctaccgccgccggtgcatctgccacctccggttcacctgccacctccggtgcatctcccaccgccggtccacctgccgccgccggtccacctgccaccgccggtccatgtgccgccgccggttcatctgccgccgccaccatgccactaccctactcaaccgccccggcctcagcctcatccccagccacacccatgccc

SEQ ID NO: 345034 - DNA, 110 bp, Zea mays
aaccaacttgctttgacaaacccagcagcattttaccaacaacccatcattggtggtgccggcttttagatttcttatgagttatagttcaataataaagttttttgtct

SEQ ID NO: 345035 - DNA, 409 bp, Zea mays
gggtcttcagaccattagctttatctactccagagcgcagaagaacccgatcgacaccatgagggtgttgctcgttgccctcgctctcctggctctcgctgcgagcgccacctccacgcatacaagcggcggctgcggctgccagccaccgccgccggttcatctaccgccgccggtgcatctgccacctccggttcacctgccacctccggtgcatctcccaccgccggtccacctgccgccgccggtccacctgccaccgccggtccatgtgccgccgccggttcatctgccgccgccaccatgccactaccctactcaaccgccccggcctcagcctcattcccagccacacccatgcccgtgccaacagccgcatccaagcccgtgccagctgcagggaacctgc

SEQ ID NO: 345036 - DNA, 413 bp, Zea mays
attttgagcattcagaaacacaccaagcgattttcattagcaacaacctaacaacaatggctaccaagatattatccctccttgcgcttcttgcgctttttgcgagcgcaacaaatgcgttcattattccacaatgctcacttgctccaagttccattattacacagttcctcccaccagttacttcaatgggcttcgaacacccagctgtgcaagcctataggctacaacaagcaattgcggcgagcgtcttacaacaaccaatttcccagttgcaacaacaatccttggcacatctaacaatacaaaccatcgcaacgcaacagcaacaacaattcctaccagcactgagccacctagccatggtgaaccctgccgcctacttgcaacagcagttgcttgcatcaaaccca

SEQ ID NO: 345037 - DNA, 418 bp, Zea mays
cgacccacgcgttcgcaacaagcaacatagaaagtggaatccagtagtttcttttgagcaacaatggcgaccaagatattgtcccttcttatgctccttgctctttctgcatgtgttgctaacgcgacaattttccctcaatgctcacaagctcctatagcttaccttcttcccccataccttccatcaatgatagcttcagtatgtgaaaacccagctcttcaaccctataggctccaacaagcaatcgcagcaagcaacatacctttatcacccttgtttcaacaatcgccagccctatctttggtgcagtcattgttacaaaccatcagggcacagcagctgcagcaactcgtgctacctgtgatcaaccaagtagctctggcaaacctttctccctactctcagcaacaacaat

SEQ ID NO: 345038 - DNA, 299 bp, Zea mays
tgccgttctacctgcacgctgcgcctaacgctgtcaccctcttacaactgcaacaagtgctgccattcaaccaacttgctttgacaaacccaacagcgttctaccaacaacccatcattggtggtgccctcttttagattgcttatgagttatagttcaataatgaagttttttggatgatgtttgcggcttcccagaaataagaaagtacatttctaaaaaaaataaaaaatgtatataaaataattaaatttaaataaattattaaaattttgatacaaatttatcatttcttattt

SEQ ID NO: 345039 - DNA, 118 bp, Zea mays
caacaacccatcattggtggtgccctcttttatatttcttatgagttatagttcaataataaagttttttgtctgatgtttgtggcttcccagaaataagaaagtacatttctagatt

SEQ ID NO: 345040 - DNA, 418 bp, Zea mays
caacaagcaacatagaaagtggaatccagtagcaacaatagagcaacaatggagaccaagatattttccctccttatgctccttgctctttctacatgtgttgctaacgcgacaattttccctcaatgctcacaagctcctatagcttccctttttcccccataccttccatcaattatagcttcagtatgtgaaaacccagctcttcaaccatataggcttcaacaagcaatcgcagcaagcaacatacctttatcgcccttgttgtgtcaacaatcgccagccctatctttggtgcagtcattggtacaaaccatcagggcacaacagctgcagcaactcgtgctacctgtgatcaaccaagtagctctggcaaacctttctccctactctccgcaacaacaatttcttccattca

SEQ ID NO: 345041 - DNA, 409 bp, Zea mays
caccaagcgaagcgcactagcaacaacctatactacaatggctaccaagatattagccctccttgcgcttcttgcccttttagtgagcgcaacaaatgcgttcattattccacagtgctcacttgctcctagtgccattattccacagttcctcccaccagttacttcaatgggcttcgaacatccagccgtgcaagcctacaggctacaactagcgcttgcggcgagcgttttacaacaaccaattgcccaattgcaacaacaatccttggcacatctaaacctacaaaccatcgcaacgcaacagcaacaacagtttctgccatcactgagccacctagccgtggtgaaccctgtcggctacttgcaacagcagctacttgcatccaacccacttgctctggcgaac

SEQ ID NO: 345042 - DNA, 392 bp, Zea mays
caacaagcaacatagaaagtggaatccagtagcaacaatagagcaacaatggcgaccaagatattttccctccttatgctccttgctctttctgcatgtgttgctaacgcgacaattttccctcaatgctcacaagctcctatagcttcccttcttcccccataccttccatcaatgatagcttcagtatgtgaaaacccagctcttcaaccctataggctccaacaagcaatcgcagcaagcaacatacctttatcacccttgtttcaacaatcgccagccctatctttggtgcagtcattggtacaaaccatcagggcacagcagctgcagcaactcgtgctacctgtgatcaaccaagtagctctggcaccctcttacaactgcaacaa

SEQ ID NO: 345043 - DNA, 399 bp, Zea mays
ggaccaactagcacatagaaagcacaattttgtccaacaaggcagccaaaatattggcttcttatgctcacttggtctttctgcaagtgttgctaccgcaaccattttcccacaatgctcacaagctcctatagcttcccttcttcccccatacctctcaccagcggtgtcttcaatgtgtgaaaacccaattgttcaaccctacaggatccaacaggcaatcgcaacaggcatcttaccattatcacccttgttcctccaacaaccgtcagccctattacagcagttacctttggtccatttggtggcacaaaacatcagggcacaacaactacaacaacttgtgctagcaaaccttgctgcatactctcagcaacatcagtttttttcattcaacca

SEQ ID NO: 345044 - DNA, 389 bp, Zea mays
cttgctcctagtgccattattccacagttccttccattagttacttcaatgggcttcgaacacctagctgtgcaagccaacatgcaacaacaagcgcttgcggcgagcgtcttacaacaaccaattgcccaattgcaacaacaatccttgccacatctaacaatacaagccatcacaacgcaacagcaacaacagttcctaccagcactgagccacctagccatggtgaaccctgccgcctacttgcaagagcagctgcttgcatccaacccacttgctctggcgaacgtagttgcaaaccagcaacaacaacagctacaacagtttctgccaacgctcagtcaactagccatggtgaaccctgccgtctacgtacaacaacaacaact

SEQ ID NO: 345045 - DNA, 290 bp, Zea mays
caactagcaacatagaaagcacaatagtgtaccaacaatggcagccaaaatattttgcctcctttatgctccttggtctttctgcaagtgctgctacggcgaccattttcccacaatgctcacaagctcctatagcttcccttcttcccccgtacctctcaccagcggtgtcttcggtatgtgaaaacccaattcttcaaccctataggatccaacaggcaatcgcagctggcatcttacctttatcacccttgttcctccaacaatcaatagccctattacagcaagta

SEQ ID NO: 345046 - DNA, 407 bp, Zea mays
cttcggtatgtgaaaacccaattcttcaaccctacaggatccaacaggcaatcacagctggcatcttacctttatcacccttgttcctccaacaatcatcagccctattacatcagttacctttggtgcatttattggcacaaaacatcagggcacaacaactacaacaacttgtgctagcaaaccttgctgcctactctcagcaacagcagtttcttccattcaaccaactagctgcattgaactctgcttcttatttgcaacaacaacaactaccattcagccagctacctgctgcctacccccagcaatttcttccattcaaccaactggcagcattgaactctcctgcttatttacagcagcaacaactactaccattcagccagctagctggtgtgagccct

SEQ ID NO: 345047 - DNA, 405 bp, Zea mays
agaccattagctttatctactccagagcgcagattaacccgatcgacaccatgagggtgttgctcgttgccctcgctctcctggctctcgctgcgagcgccacctccacgcatacaagcggcggctgcggctgccagccaccgccgccggttcatctaccgccgccggtgcatctgccacctccggttcacctgccacctccggtgcatctcccaccgccggtccacctgccgccgccggtccacctgccaccgtcggtccatgtgccgccgccggttcatctgccgccgccaccatgccactaccctactcaaccgccccggcctcagccttatccccagccacacccatgctcgtgccaacagccgcattcaagcccgtgccagctgcagggaacctgcggcg

SEQ ID NO: 345048 - DNA, 414 bp, Zea mays
aagcaacatagaaagtggaatccagtatttactttagagcaacaatggcgaccaagatatggtccctccttatgctccttgctctttctgcatgtgttgctaacgcgacaattttccctcaatgctcacaagctcctatagcttcccttcttcccccataccttccatcaatgatagcttcagtatgtgaaaacccagctcttcaaccctataggctccaacaagcaatcgcagcaagcaacatacctttatcacccttgtttcaacaatcgccagccctatctttggtgcagtcattggtacaaaccatcagggcacagcagctgcagcaactcgtgctacctgtgatcaaccaagtagctctggcaaacctttctccctactctcagcaacaacaatttcttccattcaacc

SEQ ID NO: 345049 - DNA, 416 bp, Zea mays
tcgcaacacaacagcaacaacagttcctaccagtacttagccaactagatgtggtgaaccctgtcgcctacttgcaacagcaggtgcttgcatccaacccacttgctctggcaaacgtagctgcataccaacaacaacaacaattgcaacagtttctgccagcgctcagtcaactagccatggtgaaccctgccgcctacctacaacagcaacaactgctttcatctagccctctcgttgtgggtaatgcacctacatacctgcaacaacaattgctgcaacagattgtaccagctctgactcagctagctgtggcaaaccctgctgcctacttgcaacagctgcttccattcaaccaactgactgtgtcgaactctgctgcgtacctacaacagcgacaacagttacttaatcca

SEQ ID NO: 345050 - DNA, 116 bp, Zea mays
cttcaaccctacaggatccaacaagcatttttttctggcatcttacctttatcacccgtgggccttcaacaatcatcagccctattacaacagttaccctttggtgcatttattgg

SEQ ID NO: 345051 - DNA, 416 bp, Zea mays
cggacgcgtgggttcagaaacacaccaagcgatgcatattagcaacaacctaacaacaatggctaccaagatattatccctccttgcgcttcttgcgctttttgcgagcgcaacaaatgcgttcattattccacaatgctcacttgctccaagttccattattacacagttcctcccaccagttacttcaatgggcttcgaacacccagctgtgcaagcctataggctacaacaagcaattgcggcgagcgtcttacaacaaccaatttcccagttgcaacaacaatccttggcacatctaacaatacaaaccatcgcaacgcaacagcaacaacaattcctaccagcactgagccacctagccatggtgaaccctgccgtctacttgcaacagcagttgcttgcatcaaacccac

SEQ ID NO: 345052 - DNA, 337 bp, Zea mays
  unsure (1)..(337): unsure at all n locations
caaacgcgtccgatcttagaccaacnntagcaacatagaaagcacatattgtgtaccaacaatggcagccaaaatatgtggcctccttatgctccttggtatntctgcaagtgctgctacggcgaccattttcccgcaatgctcacaagctcctatagcttcccttcttcccccgtacctcttaccagcggtgtcttcggtatgtgaaaacccaattcttaaaccctacagggaccaacatgcaatcgcagctggcatcttacctttatcacccttggttcctccaacaataatcagcccctataacagcagttaccctntggtgcatttattggca

SEQ ID NO: 345053 - DNA, 412 bp, Zea mays
caactagcaacatagaaagcacaatagtgtaccaacaatggcagccaaaatattttgcttccttatgctccttggtctttctgcaagtgctgctaccgcaaccattttcccacaatgctcacaagctcctatagcttcctttcttcccccatacctctcaccagcggtgtcttcagtatgtgaaaacccaattcttcaaccctacaggatccaacaggcaatcgcagcaggcatcttacctttatcacccttgttcctccaacaaccgtcagccctattacagcagttacctttggtgcatttgttggcacaaaacatcaaggcacaacaactacaacaacttgtgctaggaaaccttgctgcctactctcagcaacagcagtttcttccattcaaccaactggctgcattg

SEQ ID NO: 345054 - DNA, 391 bp, Zea mays
gagcattcagaaacacaccaagcgaagcgcactagcatcgacctaacaacaatggctaccaggatattagccctccttgcgcttcttgccctttttgtgagcgcaacaaatgcgttcattattccacaatgctcacttgctcctagtgccattattccacagttcctcccaccagttacttcaatgggcttcgaacacctagctgtgcaagccaacatgcaacaacaagcgcttgcggcgagcgtcttacaacaaccaattgcccaattgcaacaacaatccttgccacatctaacaatacaagccatcacaacgcaacagcaacaacagttcctaccagcactgaaccaactagccatggtgaaccctgccgcctacttgcaagagcagc

SEQ ID NO: 345055 - DNA, 407 bp, Zea mays
aacacaccaagcgaagcgcactagcaacatcctaacaacaatggctaccaagatattatccctccttgcgcttcttgcgctttttgcgagcgcaacaaatgcgtccattattccacaatgctcacttgctcctagttccattattccacagttcctcccaccagttacttcaatggccttcgaacacccagctgtgcaagcctataggctacaacaagcgattgcggcgagcgtcttacaacaaccaattgcccaattgcaacaacaatccttggcacatctaacaatacaaaccatcgcaacgcaacagcaacaacagttcctaccagcactgagccacctagccatggtgaaccctgtcgcctacttgcaacagcagctgcttgcattcaacccacttgctctag

SEQ ID NO: 345056 - DNA, 404 bp, Zea mays
caacatagaaagtggaatccagtagcaacttttgtagcaacaatggagaccaagatattttccctccttatgctccttgctctttctacatgtgttgctaacgcgacaattttccctcaatgctcacaagctcctatagcttccctttttcccccataccttccatcaattatagcttcagtatgtgaaaacccagctcttcaaccatataggcttcaacaagcaatcgcagcaagcaacatacctttatcgcccttgttgtgtcaacaatcgccagccctatctttggtgcagtcattggtacaaaccatcagggcacaacagctgcagcaactcgtgctacctgtgatcaaccaagtagctctggcaaacctttctccctactctccgcaacaacaatttct

SEQ ID NO: 345057 - DNA, 288 bp, Zea mays
ctagcaacatagaaagcacaatagtgtaccaactttgtcagccaaaatattttgcttccttatgctccttggtctttctgcaagtgctgctaccgcaaccattttcccacaatgctcacaagctcctatagcttcctttcttcccccatacctctcaccagcggtgtcttcagtatgtgaaaacccaattcttcaaccctacaggatccaacaggcaatcgcagcaggcatcttacctttatcacccttgttcctccaacaaccgtcaggccctattacagcaagtta

SEQ ID NO: 345058 - DNA, 408 bp, Zea mays
caacaagcaacatagaaagtggaatccagtagtttctttagagcaacaatggcgaccaagatattgtccctccttatgctccttgctctttctgcatgtgttgctaacgcgacaattttccctcaatgctcacaagctcctatagcttcccttcttcccccataccttccatcaatgatagcttcagtatgtgaaaacccagctcttcaaccctataggctccaacaagcaatcgcagcaagcaacatacctttatcacccttgtttcaacaatcgccagccctatctttggtgcagtcattggtacaaaccatcagggcacagcagctgcagcaactcgtgctacctgtgatcaaccaagtagctctggcaaacctttctccctactctcagcaacaacaatttctt

SEQ ID NO: 345059 - DNA, 410 bp, Zea mays
caacaagcaacatagaaagtggaatccagtatcaacaatagagcaacaatggagaccaagatattttccctccttatgctccttgctctttctacatgtgttgctaacgcgacaattttccctcaatgctcacaagctcctatagcttccctttttcccccataccttccatcaattatagcttcagtatgtgaaaacccagctcttcaaccatataggcttcaacaagcaatcgcagcaagcaacatacctttatcgcccttgttgtgtcaacaatcgccagccctatctttggtgcagtcattggtacaaaccatcagggcacaacagctgcagcaactcgtgctacctgtgatcaaccaagtagctctggcaaacctttctccctactctccgcaacaacaatttct

SEQ ID NO: 345060 - DNA, 415 bp, Zea mays
tatttagaccaactagcaacatagaaagcacaatagtgtaccaacaatggcagccaaaatattttgcctccttatgctccttggtatttctgcaagtgctgctacggcgaccattttcccgcaatgctcacaagctcctatagcttcccttcttcccccgtacctctcaccagcggtgtcttcggtatgtgaaaacccaattcttcaaccctacaggatccaacaggcaatcgcagctggcatcttacctttatcacccttgttcctccaacaatcatcagccctattacagcagttacctttggtgcatttattggcacaaaacatcagggcacaacaactacaacaacttgtgctagcaaaccttgctgcctactctcagcaacagcagtttcttccattcaaccaactagct

SEQ ID NO: 345061 - DNA, 52 bp, Zea mays
ctttccctcttcgtcttcgcttggccggtgggttgtgcggtggggatgcggt

SEQ ID NO: 345062 - DNA, 328 bp, Zea mays
gggctgcctgttccgccgcatcacgctctacggcttcgacccgccgcggatcaacgtgggcgggccgtgcttcccggcgctgggcggcatgttcgccaaggccaagtacgagaagcccggactggagctcaccaccaaggccgccgtggccaagggcaagcacggcttcctgcccatgcctaagaagtcgtacggcaagtcggacgcgttcgcggacaccatcccgatggcgtcgcacccgtcgccgttcgcggcggccgccgccgccgtcgtcgtggcggacgaggcgaccatcgccgaggcagtggcggtgtgcgcggcggcgtac

SEQ ID NO: 345063 - DNA, 409 bp, Zea mays
aatagtgtaccaacaatggcagccaaaatattttgcttccttatgctccttggtctttctgcaagtgctgctacggcgaccattttcccacaatgctcacaagctcctatagcttcccttcttcccccgtacctttcaccagcggtgtcttcggtatgtgaaaacccaattcttcaaccctataggatccaacaggcaatcgcagctggcatcttacctttatcacccttgttcctccaacaatcatcagccctattacagcagttacctttggtgcatttattggcacaaaacatcagggcacaacaactacaacaacttgtgctagcaaaccttgctgcctactctcagcaacaacagtttctttcattcaaccaactagctgcattgaactctgcttcttatttgc

SEQ ID NO: 345064 - DNA, 406 bp, Zea mays
cagaaacacaccaagcgaagcgcactagcaacgacctaacaacaatggctaccaagatattagccctccttgcgcttcttgccctttttgtgagcgcaacaaatgcgttcattattccacaatgctcacttgctcctagtgccattattccacagttcctcccaccagttacttcaatgggcttcgaacacctagctgtgcaagccaacatgcaacaacaagcgcttgcggcgagcgtcttacaacaaccaattgcccaattgcaacaacaatccttgccacatctaacaatacaagccatcacaacgcaacagcaacaacagttcctaccagcactgagccacctagccatggtgaaccctgccgcctacttgcaagagcagctgcttgcatccaacccacttgc

SEQ ID NO: 345065 - DNA, 396 bp, Zea mays
gccgcaccaggagcaaattcctcctctctcgagggcggttgcgtgctcgcgtgaagaaggccggggccctatctctccgatcgcggtagggcgttcgcagcgccgattcgagccgacgattggccgtccgcgaaggtactatttgaacactgaactaaaaattggagtttcttttcttatttgacatcttgatgtgccaaaatcaagctctcgttaaaggtcaaacaaatgggcaaaatttgggctctttgattagttttttcagtgttaagtggtgaatctactgtggtaaatgggagagctgatccagttgatctatatgccttgtgaggactattttgtcctcaataagaatatatgttcaaccatactgtgggacttgggttgcccttagat

SEQ ID NO: 345066 - DNA, 231 bp, Zea mays
tagatcgcgagcggacgccctttctttttttatgttatctgcatgctcgcgtgaagaaggaggtgtccttatctttacgatcgtggaagggtgttagaagtttttaatttagcctattattgtttctgttcgttaaggtactattatgaatattgaactaaaaattgaagtttatttttttaatagatattctagatgtgtcaaaattaagcttttgataatggttataca

SEQ ID NO: 345067 - DNA, 394 bp, Zea mays
attttgagcattcagaaacacaccaagcgaagtgcactagcaacgacctaacaacaatggctaccaagatattagccctccttgcgcttcttgccctttttgtgagcgcaacaaatgcgttcattattccacaatgctcacttgctcctagtgccattattccacagttcctcccaccagttacttcaatgggcttcgaacacctagctgtgcaagccaacatgcaacaacaagcgcttgcggcgagcgtcttacaacaaccaattgcccaattgcaacaacaatccttgccacatctaacaatacaagccatcacaacgcaacagcaacaacagttcctaccagcactgagccacctagccatggtgaaccctgccgcctacttgcaagagca

SEQ ID NO: 345068 - DNA, 373 bp, Zea mays
agcaaagcggcagtgcgtagagaggatcgtcttacagaacagcatgaagatggtcatcgttctcgtcgtgtgcctggctctgtcagctgccagcgcctctgcaatgcagatgccctgcccctgcgcggggctgcagggcttgtacggcgctggcgccggcctgacgacgatgatgggcgccggcgggctgtacccctacgcggagtacctgaggcagccgcagtgcagcccgctggcggcggcgccctactacgccgggtgtgggcagacgagcgccatgtaccagccgctccggcaacagtgctgccagcagcagatgaggatgatggacgtgcagtccgtcgcgcagcagctgcagatgatgatgcagctt

SEQ ID NO: 345069 - DNA, 405 bp, Zea mays
ctggacgtcagcctagcaattagctcatcgacttcagattggagaactcgacaccatgaaggtgctgatcgttgcccttgctctcctggcgctcgctgcgagcgccgcctccagtacaagcggcggctgtggctgccagacaccaccgtttcatctaccgcctccgttctatatgccgcctccgttctatctgccgccgcagcagcagccgcagccatggcaataccccactcaaccaccgcagctaagcccgtgccagcagttcggatcctgcggcgtcggcagcgtcggcagcccgttcctgggccagtgcgtcgagttcctgaggcaccagtgcagcccggcggcgacgccctacggctcgccacagtgccaggcgctgcagcagcagtgctgccaccagat

SEQ ID NO: 345070 - DNA, 403 bp, Zea mays
cccacgcgtccgcccacgcgtccgccctttctttcgcccacgcgtccgaagattttggtgaggcaatggggttctagggacaagagaaggtgaaggtcaagcagatggcttgaggatcgaggtaccatggctaatgtgaagaagcgattacttgcaagatgtcgacggactaatcagattgtgaagagtcatatagtgatgaagaccacaacattagaagacatgatttgaagtcatctgtttaactcataaatgatgagatgatttaaatcataacactcgagggtttctagctcaagacaagtgacaaagcatggtcaaaagtccaaggaagaaggtatcaaagatagaacctataaagggctcacagttgtgcagactttaagaagaagatagcagtgcg

SEQ ID NO: 345071 - DNA, 373 bp, Zea mays
cggacgcgtgggttgagaccaacaagcaacatttattgtggaatccagtagcaacaatagagcagcaatggcgaccaagatattttccctccttatgctccttgctctttctgcatgtgttgctaacgcgacaattttccctcaatgctcacaagctcctatagcttcccttcttcccccataccttccatcaatgatagcttcagtatgtgaaaacccagctcttcaaccctataggctccaacaagcaatcgcagcaagcaacatacctttatcacccttgtttcaacaatcgccagccctatctttggtgcagtcattggtacaaaccatcaaggcacagcagctgcagcaactcgtgctacctgtgatc

SEQ ID NO: 345072 - DNA, 404 bp, Zea mays
gagaccaacaagcaacatagaaagtggaatccattatcaacaatagagcaacaatggcgaccaagatattttccctccttatgctccttgctctttctgcatgtgttgctaacgcgacaattttccctcaatgctcacaagctcctatagcttcccttcttcccccataccttccatcaatgatagcttcagtatgtgaaaacccagctcttcaaccctataggctccaacaagcaatcgcagcaagcaacatacctttatcacccttgtttcaacaatcgccagccctatctttggtgcagtcattggtacaaaccatcagggcacagcagctgcagcaactcgtgctacctgtgatcaaccaagtagcttctgcaaacctttctccctactctcagcaacaa

SEQ ID NO: 345073 - DNA, 412 bp, Zea mays
cagaaacacaccaagcgaagcgcactagcaacatcctaacaacaatggctaccaagatattatccctccttgcgcttcttgcgctttttgcgagcgcaacaaatgcgtccattattccacaatgctcacttgctcctagttccattattccacagttcctcccaccagttacttcaatggccttcgaacacccagctgtgcaagcctataggctacaacaagcgattgcggcgagcgtcttacaacaaccaattgcccaattgcaacaacaatccttggcacatctaacaatacaaaccatcgcaacgcaacagcaacaacagttcctaccagcactgagccacctagccatggtgaaccctgtcgcctacttgcaacagcagctgcttgcatccaacccacttgctctagc

SEQ ID NO: 345074 - DNA, 306 bp, Zea mays
  unsure (1)..(306): unsure at all n locations
gcacaatagtgtaccaacaatggcagctaaaatattttgcctccttatgctccttggtctttctgcaagtgctgctacggcgaccattttcccacaatgctcacaagctcctatagcttcccttcttcccccgtacctctcaccaacggtgtcttcggtatgtgaaaacccaattcttcaaccctacaggatccaacaggcaatcgcagctggcatcttacctttatcaccctngttcctccaacaatcatcagccctattacagcagttaccttggtgcattattgcacaaacataggcacacac

SEQ ID NO: 345075 - DNA, 415 bp, Zea mays
gaccaacaagcaacatagaaagtggaatccagtttcaacaatagagcaacaatggagaccaagatattttccctccttatgctccttgctctttctacatgtgttgctaacgcgacaattttccctcaatgctcacaagctcctatagcttccctttttcccccataccttccatcaattatagcttcagtatgtgaaaacccagctcttcaaccatataggcttcaacaagcaatcgcagcaagcaacatacctttatcgcccttgttgtgtcaacaatcgccagccctatctttggtgcagtcattggtacaaaccatcagggcacaacagctgcagcaactcgtgctacctgtgatcaaccaagtagctctggcaaacctttctccctactctccgcaacaacaatttcttt

SEQ ID NO: 345076 - DNA, 401 bp, Zea mays
ttcagcattcagaaacacaccaagcgaagcgcactatcaacaacctaacaacaatggctaccaagatattagccctccttgcgcttcttgcccttttagtgagcgcaacaaatgcgttcattattccacagtgctcacttgctcctagtgccattattccacagttcctcccaccagttacttcaatgggcttcgaacatccagccgtgcaagcctacaggctacaactagcgcttgcggcgagcgtcttacaacaaccaattgcccaattgcaacaacaatccttggcacatctaaacctacaaaccatcgcaacgcaacagcaacaacagtttctgccatcactgagccacctagccgtggtgaaccctgtcgcctacttgcaacagcagctacttgca

SEQ ID NO: 345077 - DNA, 127 bp, Zea mays
agcgctctcactagcctcgcattccgtccctgcttttctagggcaggccgctgaggtctgggagaggaggaggaggaagaaattgcctctacggttaagccgtcggattgcatgttgttccttttct

SEQ ID NO: 345078 - DNA, 400 bp, Zea mays
gagcattcagaaacacaccaagcgaagcgtactatcaacgacctaacaacaatggctaccgaggatattagccctccttgcgcttcttgccctttttgtgagcgcaacaaatgcgttcattattccacaatgctcacttgctcctagtgccattattccacagttcctcccaccagttacttcaatgggcttcgaacacctagctgtgcaagccaacatgcaacaacaagcgcttgcggcgagcgtcttacaacaaccaattgcccaattgcaacaacaatccttgccacatctaacaatacaagccatcacaacgcaacagcaacaacagttcctaccagcactgagccacctagccatggtgaaccctgccgcctacttgcaagagcagctgcttgca

SEQ ID NO: 345079 - DNA, 373 bp, Zea mays
agaaagcacaatagtgtaccaacaatggctgctataaatattttgcttccttatgctccttggtctttctgcaagtgctgctaccgcaaccattttcccacaatgctcacaagctcctatagcttcctttcttcccccatacctctcaccagcggtgtcttcagtatgtgaaaacccaattcttcaaccctacaggatccaacaggcaatcgcagcaggcatcttacctttatcacccttgttcctccaacaaccggcaagccttattacagcagttacctttggtgcatttgttggcacaaaacatcaaggcacaacaactacaacaacttgtgctaggaaaccttgctgcctactctcagcaacagcagtt

SEQ ID NO: 345080 - DNA, 401 bp, Zea mays
cgcaatgctcgcaagctcctatagcttcccttcttccttcgtacctctcaccagcggtgtcttcggtatgtgaaaacccaattcttcaaccctacaggatccaacaggcaatcgcagctggcatcttacctttatcacccttgttcctccaacaatcatcagccctattacaacagttacctttggtgcatttattggcacaaaacatcagggcacaacaactacaacaacttgtgctagcaaaccttgctgcctactctcagcaacagcagtttcttccattcaaccaactaggttcattgaactctgcttcttatttgcaacaacaacaactaccattcagccagctacctgctgcctacccccagcaattttttccattcaaccaactagcagcattg

SEQ ID NO: 345081 - DNA, 399 bp, Zea mays
gagcattcagaaacacaccaagcgaagtttcctagcaacgacttaacaacaatggctaccaagatattagccctccttgcgcttcttgccctttttgtgagcgcaacaaatgcgttcattattccacaatgctcacttgctcctagtgccattataccacagttcctccgaccagttacttcaatgggcttcgaacacctagctgtgcaagcctacaggctacaacaagcgcttgcggcgagcgtcttacaacaaccaattaaccaattgcaacaacaatccttggcacatttaaccatacaaaccatcgtaacacaacagcaacaacagtttctaccagcactgtgccaactagatgtggggaaccctgtcgcctacttgcaacagcaggtgctttga

SEQ ID NO: 345082 - DNA, 403 bp, Zea mays
cggacgcgtgggttttcagcattcagaatcacaccaagcgaagcgcactagcaacaacctaacaacaatggctaccaagatattagccctccttgcgcttcttgcccttttagtgagcgcaacaaatgcgttcattattccacagtgctcacttgctcctagtgccattattccacagttcctcccaccagttacttcaatgggcttcgaacatccagccgtgcaagcctacaggctacaactagcgcttgcggcgagcgtcttacaacaaccaattgcccaattgcaacaacaatccttggcacatctaaacctacaaaccatcgcaacgcatcagcaacaacagtttctgccatcactgagccacctagccgtggtgaaccctgtcgcctacttgcaacag

SEQ ID NO: 345083 - DNA, 262 bp, Zea mays
ggaagggtcgggtagagcgacgcgttcggagcatagatcgagagcggcaggcgaagctcattagttttattttaacaacaatggctaccatttttttttttttttttgggatttttttttttgatattttttttttttatttttttttattttttattttttttggggaaaaaaaaattttttttttgaattaaatggggaatttgggggattgtgaaaattgaaatgggtactattgggggggggggaaaaatttatattt

SEQ ID NO: 345084 - DNA, 367 bp, Zea mays
gcgaagcacattagcaacaacctaacaacaatggctaccaagatattatccctccttgcgcttcttgcgctttttgcgagcgcaacaaatgcgttcattattccacaatgctcacttgctccaagttccattattacacagttcctcccaacagttacttcaatgggcttcgaacacccagctgtgcaagcctataggctacaacaagcaattgcggcgagcgtcttacaacaaccaatttcccagttgcaacaacaatccttggcacatctaacaatacaaaccatcgcaacgcaacagcaacaacaaattctaccagcactgagccacctagccatggtgaaccctgccgcctacttgcaacagc

SEQ ID NO: 345085 - DNA, 350 bp, Zea mays
agcctagcaattagctcatcgactccagattgtttaactcgacaccatgaaggtgctgatcgttgcccttgctctcctggcgctcgctgcgagcgccgcctccagtacaagcggcggctgtggctgccagacaccaccgtttcatctaccgcctccgttctatatgccgcctccgttctatctgccgccgcagcagcagccgcagccatggcaataccccactcaaccaccgcagctaagcccgtgccagcagttcggatcctgcggcgtcggcagcgtcggcagcccgttcctgggccagtgcgtcgagttcctgaggcaccagtgcagcccgggggcgacgccctacg

SEQ ID NO: 345086 - DNA, 370 bp, Zea mays
  unsure (1)..(370): unsure at all n locations
aagcaacatagaaagtggaatccagtagcaacattagagcaacaatggcgaccaagatattttccctccttatgctccttgctctttctgcatgtgttgctaacgcgacaattttccctcaatgctcacaagctcctatagcttcccttcttcccccataccttccatcaatgatagcttcagtatgtgaaaacccagctcttcaaccctataggctccaacaagcaatcgcagcaagcaacatacctttatcacccttgtntcaacaatcgccagccctatctttggtgcagtcattggtacaaaccatcagggcacagcagctgcagcaactcgtgctacctgtgatcaaccaaggtagctttggcaa

SEQ ID NO: 345087 - DNA, 356 bp, Zea mays
acccattctgagcattcagaaacacaccaagcgaagtttactatcaacgacctaacaacaatggctaccaagatattagccctccttgcgcttcttgccctttttgtgagcgcaacaaatgcgttcattattccacaatgctcacttgctcctagtgccattattccacagttcctcccaccagttacttcaatgggcttcgaacacctagctgtgcaagccaacatgcaacaacaagcgcttgcggcgagcgtcttacaacaaccaattgcccaattgcaacaacaatccttgccacatctaacaatacaagccatcacaacgcaacagcaacaacagtttctaccagcactgag

SEQ ID NO: 345088 - DNA, 125 bp, Zea mays
  unsure (1)..(125): unsure at all n locations
attttcagcattcagaaacacaccaagcgtaagcgtcactancaacaacctaacaacaatggctaccaagatattagccctccttgcgcttcttgcccttttagtgagcgcaacaaatgcgttca

SEQ ID NO: 345089 - DNA, 355 bp, Zea mays
ggaaacccggcccgacccacgcgtccgcttcagtatgtgaaaacccatctcttcaaccatttatgcttcaacaagcaatcgcagcaggcaacataccttccatcaattatagcttcagtatgtgaaaacccagctcttcaaccatataggcttcaacaagcaatcgcagcaagcaacatacctttatcgcccttgttgggtcaacaatcgccagccctatctttggtgcagtcattggtacaaaccatcagggcacaacagctgcagcaactcgtgcttcctgtgatcaaccaagtagctctggcaaaccttttttcctacttttcgcaacaacaatttctttcatttaaccaac

SEQ ID NO: 345090 - DNA, 402 bp, Zea mays
attgagaccaacaagcaacatagaaagtggaattcattagcaacaatagagcaacaatggcgaccaagatattttccctccttatgctccttgctctttctgcatgtgttgctaacgcgacaattttccctcaatgctcacaagctcctatagcttcccttcttcccccataccttccatcaatgatagcttcagtatgtgaaaacccagctcttcaaccctataggctccaacaagcaatcgcagcaagcaacatacctttatcacccttgtttcaacaatcgccagccctatctttggtgcagtcattggtacaaaccatcagggcacagcagctgcagcaactcgtgctacctgtgatcaaccaagtagctctggcaaacctttcttcctactctcagc

SEQ ID NO: 345091 - DNA, 271 bp, Zea mays
acccactctttcgctgacgcacaatcacattcttaaccggtttcattattaatcaccaaaacaccaacgctcgccataaatataaaccttcctgatcatcctacatttttcgttacctcaacataacacttcatcatttcataaaaccttctaacttctaattccatcattacaaaccccataccatcaatcactgaaagctacatcatacacacacctatccatgcaaacctatatcatcaaacaatcaataccagcattcaacatcaat

SEQ ID NO: 345092 - DNA, 54 bp, Zea mays
atcacctactatagtcaacatcacctgtcttatattcattccaatccacaccaa

SEQ ID NO: 345093 - DNA, 52 bp, Zea mays
gcacacactatacgcaacaaaaccggacttttttttattcctatccacatca

SEQ ID NO: 345094 - DNA, 398 bp, Zea mays
tcggaacaaggccaagaccatggatatggccaggcttctcttctcctaaaatttggctaagcgcatctcctttccatgcaacctttccatgactagtgtcagctaaacttggttcttgcactaatagttccttcaacgcaaccttgtaaaagcataagtgtactcattaagcgttatggaagaagtatttcaaatcagtaaaatgtagcacatttgcaaagtttattgtaccacatgtgggtttgtgttctttgtgatgttactcttgtgtgtattgatatacaatacagccctatggtggtattcttctctgaatctctttctctttgttccaaattatattttcttaatttatgtaaggacattactgtttgttctagaattttaattttcttttt

SEQ ID NO: 345095 - DNA, 313 bp, Zea mays
tcgaaaaaaaaaaaaaataaaaaaaaaaaaaaaaaattttttaaaaaaaaaaaaaaaaaaaaaaaaaaaaataaaaaaaaataaatataataaaaaaaataattaataaataaatggggtggtagattttgtgtatttattttattctttttttttatttttttttttgtttttatttttttttttttttatattttttttttttttttttttttttttttatttttttttttttttttttttgtttttatttttttattttttttttttttttttttttttattattttttttttttttttttttttttttt

SEQ ID NO: 345096 - DNA, 77 bp, Zea mays
gaaaggaataatatataaggaaaaaagatgtttttatactaaaaaaaaaaaaaaaaagaggggaaattttaaaatca

SEQ ID NO: 345097 - DNA, 371 bp, Zea mays
caacaagcaacatagaaagtggaatccagtttctatcaatagagcaacaatggagaccaagatattttccctccttatgctccttgctctttctacatgtgttgctaacgcgacaattttccctcaatgctcacaagctcctatagcttccctttttcccccataccttccatcaattatagcttcagtatgtgaaaacccagctcttcaaccatataggcttcaacaagcaatcgcagcatgcaacatacctttatcgcccttgttgtgtcaacaatcgccagccctatctttggtgcagtcattgtgacaaaccattatggcacaacagctgcagcaactcgtgctaccttgtgatcaaccaagtagct

SEQ ID NO: 345098 - DNA, 166 bp, Zea mays
agcacccatctctcgctcgaactccggacttttttcatctcctcccgacatctactttgggaggctcgcgaaccttcacaatggcctcaaccgttgtgtcggtcgacgtgaagctctacaagcttcgtgctgaggacgccaaacttattcagatcagcgagatctt

SEQ ID NO: 345099 - DNA, 409 bp, Zea mays
aggcaatcacagctggcatcttacctttattatccttgttcctccaacaatcatcagccctattacatcagttacctttggtgcatttattggcacaaaacatcagggcacaacaactacaacaacttgtgctagcaaaccttgctgcctactctcagcaacagcagtttcttccattcaaccaactagctgcattgaactctgcttcttatttgcaacaacaacaactaccattcagccagctacctgctgcctacccccagcaatttcttccattcaaccaactggcagcattgaactctcctgcttatttacagcagcaacaactactaccattcagccagctagctggtgtgagccctgctaccttcttgatacaaccacagttgttgccgttctaccagcacgc

SEQ ID NO: 345100 - DNA, 415 bp, Zea mays
ctcatcgactccagattggagaactcgacaccatgaaggtgctgatcgttgcccttgctgtcctggcgctcgctgcgagcgccgcctccagtacaagcggcggctgtggctgccagacaccaccgtttcatctaccgcctccgttctatatgccgcctccgttctatctgccgccgcagcagcagccgcagccatggcaataccccactcaaccaccgcagctaagcccgtgccagcagttcggatcctgcggcgtcggcagcgtcggcagcccgttcctgggccagtgcgtcgagttcctgaggcaccagtgcagcccggcggcgacgccctacggctcgccacagtgccaggcgctgcagcagcagtgctgccaccagatcaagcaggtggagccgatgcaccggtaccaggc

SEQ ID NO: 345101 - DNA, 409 bp, Zea mays
accaagcgaagctacctagcaacgacttaacaacaatggctaccaagatattagccctccttgcgcttcttgccctttttgtgagcgcaacaaatgcgttcattattccacaatgctcacttgctcctagtgccattataccacagttcctccgaccagttacttcaatgggcttcgaacacctagctgtgcaagcctacaggctacaacaagcgcttgcggcgagcgtcttacaacaaccaattaaccaattgcaacaacaatccttggcacatctaaccatacaaaccatcgcaacacaacagcaacaacagttcctaccagcactgagccaactagatgtggtgaaccctgtcgcctacttgcaacagcaggtgcttgcatccaacccacttgctctggcaaacgt

SEQ ID NO: 345102 - DNA, 418 bp, Zea mays
cggacgcgtgggttcagaaacacaccaagcgattcgcactagcaacaacctaacaacaatgggtaccaagatattatccctccttgcgcttcttgcgctttttgcgagcgcaacaaatgcgtccattattccacaatgctcacttgctcctagttccattattccacagttcctcccaccagttacttcaatggccttcgaacacccagctgtgcaagcctataggctacaacaagcgattgcggcgagcgtcttacaacaaccaattgcccaattgcaacaacaatccttggcacatctaacaatacaaaccatcgcaacgcaacagcaacaacagttcctaccagcactgagccacctagccatggtgaaccctgtcgcctacttgcaacaagagctgtttgcattcaacccactt

SEQ ID NO: 345103 - DNA, 147 bp, Zea mays
tggcgctttgttcggaaatccggtgcccgctctttgttcgatgaacttctaccaccaccggaggggtatgtgggcagcagctggccaggtggacatgggggcagcggctggccagatggacatggtagcagctggctctggcgctgt

SEQ ID NO: 345104 - DNA, 413 bp, Zea mays
gagcattcagaaacacaccaagcgaagcgtctattatcaacgacctaacaacaatggctacggggatattatccctccttgcgcttcttgccctttttgtgagcgcaacaaatgcgttcattattccacaatgctcacttgctcctagtgccattatttcacagttcctcccaccagttacttcaatgggcttcgaacacctagctgtgcatgccaacatgcaacaacaagcgcttgcggcgagcgtcttacaacaaccaattgcccaattgtaacaacaatccttgccacatctaacaatacaagccattacaacgcatcagcaacaacagtttctaccagctctgagccacctagccatggtgaaccctgccgcctacttgcaagagtagttgcttgcattccacccactt

SEQ ID NO: 345105 - DNA, 398 bp, Zea mays
ggcaatcacagctggcatcttacctttattattcttgttcctccaacaatcatcaggccgattacatcagttacctttggtgcatttattggcacaaaacatcagggcacaacaactacaacaacttgtgctagcaaaccttgctgcctactctcagcaacagcagtttcttccattcaaccaactagctgcattgaactctgcttcttatttgcaacaacaacaactaccattcagccagctacctgctgtctacccccagcaatttcttccattcaaccaactggcagcattgaactctcctgcttatttacagcagcaacaactactaccattcagccagctagctggtgtgagccctgctaccttcttgatacaaccacagttgttgtcgttct

SEQ ID NO: 345106 - DNA, 417 bp, Zea mays
attgagaccaactagcaacatagaaagcacaattgtttaccaacaatggcagccaaaatattgtgcctccttatgctccttggtctttctgcaagtgctgccacggcgaccattttcccgcaatgctcgcaagctcctatagcttcccttcttcccccgtacctctcaccagcggtgtcttcggtatgtgaaaacccaattcttcaaccctacaggatccaacaggcaatcgcagctggcatcttacctttatcacccttgttcctccaacaatcatcagccctattacaacagttacctttggtgcatttattggcacaaaacattagggcacaacaactacaacaacttgtgctagcaaaccttgctgtctactctcagcaacagcagtttcttccattcaaccaactaggttca

SEQ ID NO: 345107 - DNA, 413 bp, Zea mays
tagcaacatagaaagcacaatagtgtaccatctttggcagccaaaatattttgcctccttatgctccttggtctttctgcaagtgctgctacggcgaccattttcccgaaatgctcgcaagctcctatagcttcccttcttcccccgtacctctcaccagcggtgtcttcggtatgtgaaaacccaattcttcaaccctacaggatccaacaggcaatcacagctggcatcttacctttatcacccttgttcctccaacaatcatcagccctattacatcagttacctttggtgcatttattggcacaaaacatcagggcacaacatctacaacaacttgtgctagcaaaccttgttgtcaacttttagtaacagtagtttcttccattctacctactagcttgattgaactc

SEQ ID NO: 345108 - DNA, 410 bp, Zea mays
ttgaagagctgggttttcaaccatataggcttcaacaagcaatcgcagcaagcaacatacctgtatcgcccttgttgtgtcaacaatcgccagccctatctttggtgcagtcattggtacaaaccatcagggcacaacagctgcagcaactcgtgctacctgtgatcaaccaagtagctctggcaaacctttctccctactctccgcaacaacaatttcttccattcaaccaactgtctacactgaaccctgctgcttatttgcagcaacaactattaccatttagccagctagctactgtctactctcaacaacaacaacttcttccatttaaccaattggccgcactgaaccccgctgcttatttgcagcagcaaatactactaccatttagccagttagcttcagta

SEQ ID NO: 345109 - DNA, 420 bp, Zea mays
cagaaacacaccaagcgaagcgcactagcaacatcctaacaacaatggctaccaagatattatccctccttgcgcttcttgcgctttttgcgagcgcaacaaatgcgtccattattccacaatgctcacttgctcctagttccattattccacagttcctcccaccagttacttcaatggccttcgaacacccagctgtgcaagcctataggctacaacaagcgattgcggcgagcgtcttacaacaaccaattgcccaattgcaacaacaatccttggcacatctaacaatacaaaccatcgcaacgcaacagcaacaacagtttctaccagcactgagccacctagccatggtgaaccctgtcgcctacttgcaacagcagctgcttgcatccaacccacttgctctagcaaacgtag

SEQ ID NO: 345110 - DNA, 393 bp, Zea mays
attttgagcattcaaaaacacaccaagcgatgctctctagcaacaacctaacaacaatggcgtgcgaatatattatccctccttgcgcttcttgcgctttttgcgagcgcaacaaatgcgtccattattccacaatgctcacttgctcctagttccattattccacagttcctcccaccagttacttcaatggccttcgaacacccagctgtgcaagcctataggctacaacaagcgattgctgcgagcgtcttacaacaaccaattgcccaattgcaacatcaatccttgtcacatttaacaatacataccattgtaacgcaacatcaacaacagttcctaccagcactgagccacctagccatggtgaaccctgtcgtctacttgcaacag

SEQ ID NO: 345111 - DNA, 86 bp, Zea mays
attcaataataaagatttttggatgatgtatgtgtccaaccagaaataagaagttacatgggcagattctaaaaaaaaaaaataaa

SEQ ID NO: 345112 - DNA, 297 bp, Zea mays
caacaagcaacatagaaagtggaatccagtttttatcaatagagcaacaatggagaccaagatattttccctccttatgctccttgctctttctacatgtgttgctaacgcgacaattttccctcaatgctcacaagctcctatagctttcctttttcccccataccttccatcaattatagctttagtatgtgaaaacccagctcttcaaccatataggcttcaacaagcaatcgcagcatgcaacatacctttatcgtccttgttgtgtcaacattcatcagtcctatctttgtt

SEQ ID NO: 345113 - DNA, 412 bp, Zea mays
tgcatttgttggcacaaaacatcaaggcacaacaactacaacaacttgtgctaggaaaccttgctgcctactctcagcaacagcagtttcttccattcaaccaactggctgcattgaactctgctgcttatttgcaacaacaactaccattcagtcagctagctgctgcctacccccagcaatttcttccattcaaccaactggcagcattgaactctgctgcttatttacaacagcaacagctaccaccattcagccagctagctgatgtgagccctgttgccttcttgacacaacaacagttgttgccgttctacctgcacgctgcgcctaacgctggcaccctcttacaactgcaacaattgctgccattcaaccaacttgctttgacaaacccaacagcgttctacca

SEQ ID NO: 345114 - DNA, 396 bp, Zea mays
gcaattagctcatcgactccagattggagaactcgtcaccatgaaggtgctgatcgttgcccttgctctcctggcgctcgctgcgagcgccgcctccagtacaagcggcggctgtggctgccagacaccaccgtttcatctaccgcctccgttctatatgccgcctccgttctatctgccgccgcagcagcagccgcagccatggcaataccccactcaaccaccgcagctaagcccgtgccagcagttcggatcctgcggcgtcggcagcgtcggcagcccgttcctgggccagtgcgtcgagttcctgaggcaccagtgcagcccggcggcgacgccctacggctcgccacagtgccaggcgctgcagcagcagtgctgccaccagatcaggca

SEQ ID NO: 345115 - DNA, 242 bp, Zea mays
agaccaacaagcaacatagaaagtggaatccattttcatcaatagagcaacaatggcgaccaagatattttccctccttatgctccttgctctttccgcatgtgttgctaacgcgacaatttttccttaatgctcacaagcttctatagctttcctttttaccccataccttccatcaatgattgcttctagattttgattacctctctcttcaaccctatacgctccaacaagctctctct

SEQ ID NO: 345116 - DNA, 274 bp, Zea mays
atcactactcaaacctttaaatgagcgttttgatgagaggacagggcgcttgacacagcgtgacattaaccatggcgaaacaaacgggctaccagaagtgcatactggtgtgcatacattaatggaaggactaaaccaaaggaagcgcccaactaagctgacaatggaccaaacactgcagcaagttgttcaggcgaaggttagtgagacaaaaaatagcacaaaggagaggaccttgaaggtgaacgtcacatagaatgacactgaacaagat

SEQ ID NO: 345117 - DNA, 392 bp, Zea mays
caacaagcaacatagaaagtggaatccagtattaacaatagagcaacaatggcgaccaagatattttccctccttatgctccttgctctttctgcatgtgttgctaacgcgacaattttccctcaatgctcacaagctcctatagcttcccttcttcccccataccttccatcaatgatagcttcagtatgtgaaaacccagctcttcaaccctataggctccaacaagcaatcgcagcaagcaacatacctttatcacccttgtttcaacaatcgccagccctatctttggtgcagtcattggtacaaaccatcagggcacagcagctgcagcaactcgtgctacctgtgatcaaccaagtatctctggcaaacctttctccctactttca

SEQ ID NO: 345118 - DNA, 112 bp, Zea mays
gcggcagtgcgtagagaggatcgtcgaacttttcagcatgaagatggtcatcgttctcgtcgtgtgccaggctatgtcagatgccaacgcctttgcaatgcatatgccctgc

SEQ ID NO: 345119 - DNA, 174 bp, Zea mays
cttctatcagttccatcaatcatagtttattttagtagtgtaggcaccaaataaaatctgcagcatcaattatctaactccaaaaaccatgaagctggtgcttgtgcgtttcgctatcattgctttagaatcaagggttacatagtacacagacaggcggctgcagatgtggtc

SEQ ID NO: 345120 - DNA, 327 bp, Zea mays
caaagcggcagtgcgtagagaggatcgtcgaacagaacagcatgaagatggtcatcgttctcgtcgtgtgcctggctctgtcagctgccagcgcctctgcaatgcagatgccctgcccctgcgcggggctgcagggcttgtacggcgctggcgccggcctgacgacgatgatgggcgccggcgggctgtacccctacgcggagtacctgaggcagccgcagtgcagcccgctggcggcggcgccctactacgccgggtgtgggcagacgagcgccatgtaccagccgctccggcaacagtgctgccagcagcagatgatgattatgg

SEQ ID NO: 345121 - DNA, 415 bp, Zea mays
attttgagcattcagaaacacaccaagcgtatttctacctagcaacgacttaacaacaatggctaccaagatattagccctccttgcgcttcttgccctttttgtgagcgcaacaaatgcgttcattattccacaatgctcacttgctcctagtgccattataccacagttcctccgaccagttacttcaatgggcttcgaacacctagctgtgcaagcctacaggctacaacaagcgcttgctgcgagcgtcttacaacaaccaattaaccaattgcaacaacaattcttggcacatctaaccatacaaaccattgcaacacaacagcaacaacagtttctaccagcactgatccaactagatgtggtgaaccctgtcgcctacttgcaacagcaggtgcttgcatccaaccca

SEQ ID NO: 345122 - DNA, 265 bp, Zea mays
gagaccaactagcaacatagaaagcacatttttgtaccaacaatggcagccaaaatattttgcttccttatgctccttggtctttctgcaagtgctgctaccgcaaccattttcccacaatgctcacaggctggctatggcgtgcgttcttcccccatacctctcaccagcggtgtcttcagtatgtgaatacccaattcttcaaccctacaggatccaacatgcaatttttgcaggtatcttacttttattcatccttgtttct

SEQ ID NO: 345123 - DNA, 397 bp, Zea mays
gtgcaagcctataggctacaacaagcgattgttgtgagcgtcttacaacaaccaattgcccaattgttacaacaatccttggcacatctaacaatacaaaccatcgcaacgcaacagcaacaacagttcctaccagcactgagccacctagccatggtgaaccctgtcgcctacttgcaacagcagctgcttgcatccaacccacttgctctagcaaacgtagttgcaaaccagcaacaacaacaactgcaacagtttctgccagcgcttagtcaactagccatggtgaaccctgccgcctacctacaacagcaacaactgctttcatctagcccgctcgctgtggccaatgcacctacatacctgcaacaagaattgttgcaacagattgtaccag

SEQ ID NO: 345124 - DNA, 397 bp, Zea mays
cccccataccttccatcaatgatagcttcattttgtgaaaacccagctcttcaaccctataggctccaacaagcaatcgcagcacgcaacatacctttatcacccttgtttcaacaatcgccagccctatctttggtgcagttattggtacaaaccattagggcacagcagctgcagcaactcgtgctacctgtgatcaaccaagtagctctggcaaacctttctccctactctcagcaacaacaatttctttcattcaaccaactgtctacattgaaccgtgctgcttatttgcagcaacaactattaccattcagccagctagctactgcctacttttagctacaacaacttctttcatttaaccaattggctcgactgaaccccgctgtttatt

SEQ ID NO: 345125 - DNA, 347 bp, Zea mays
ccggccggaatacccggccgaccacgcgtccggcggctgtggctgccagacaccaccgtttcatctaccgcctccgttctatatgccgcctccggtctatctgccgccgcagcagcagccgcagccatggcaataccccactcaaccaccgcagctaagcccgtgccagcagttcggatcctgcggcgtcggcagcgtcggcagcccgttcctgggccagtgcgtcgagttcctgaggcaccagtgcagcccggcggcgacgccctacggctcgccacagtgccaggcgctgcagcagcagtgctgccaccagatcaggcaggtggagtcgctgcaccggtaccagg

SEQ ID NO: 345126 - DNA, 421 bp, Zea mays
aacacaccaagcgaagcgcactagcaacgacctaacaacaatggctaccaagatattagccctccttgcgcttcttgccctttttgtgagcgcaacaaatgcgttcattattccacaatgctcacttgctcctagtgccattattccacagttcctcccaccagttacttcaatgggcttcgaacacctagctgtgcaagccaacatgcaacaacaagcgcttgcggcgagcgtcttacaacaaccaattgcccaattgcaacaacaatccttgccacatctaacaatacaagccatcacaacgcaacagcaacaacagttcctaccagcactgagccacctagccatggtgaaccctgccgcctacttgcaagagcagctgcttgcatccaacccacttgctctggcgaacgtagttgca

SEQ ID NO: 345127 - DNA, 178 bp, Zea mays
gatcagcaaagcggcagtgcgtagagaggatcgttttacagaacagcatgaagatggtcatcgttctcgtcgtgtgcctggctctgtcagctgccagcgcctctgcaatgcagatgccctgcccctgcgcggtgctgcagggcttgtacggcgctggctccggcctgacgactatgat

SEQ ID NO: 345128 - DNA, 408 bp, Zea mays
ccaactagcaacatagaaagcacaatagtgtaccatcaatggcagccaaaatattttgcctccttatgctccttggtctttctgcaagtgctgctacggcgaccattttcccgaaatgctcgcaagctcctatagcttcccttcttcccccgtacctctcaccagcggtgtcttcggtatgtgaaaacccaattcttcaaccctacaggatccaacaggcaatcacagctggcattttacctttatcacccttgatccttcaacaatcatcagccctattacatcagttacctttggtgcatttattggcacaaaacatcagggcacaacaactacaacaacttgtgctagcaaaccttgctgcctactctcagtaacagcagtttcttccattcaaccaactagctt

SEQ ID NO: 345129 - DNA, 340 bp, Zea mays
attttcagcattcagaaacacaccaagcgaagttcactagcaacaacctaacaacaatggctaccaagatattagccctccttgcgcttcttgcccttttagtgagcgcaacaaatgcgttcattattccacagtgctcacttgctcctagtgccattattccacagttccttccaccagttacttcaatgggctttgaacattcagccgtgcaagcctacaggctacaactagcgcttgcggcgagcgtcttacaacaaccaattgcccaattgcaacaacaattcttggcacatttaaacctacaaaccatcgtaacgcatcatcatcaacaagtttt

SEQ ID NO: 345130 - DNA, 418 bp, Zea mays
gcaacatagaaagcacaatagtgtaccaacaatggcagctaaaatattttgcctccttatgctccttggtctttctgcaagtgctgctacggcgaccattttcccacaatgctcacaagctcctatagcttcccttcttcccccgtacctctcaccaacggtgtcttcggtatgtgaaaacccaattcttcaaccctacaggatccaacaggcaatcgcagctggcatcttacctttatcacccttgttcctccaacaatcatcagccctattacagcagttacctttggtgcatttattggcacaaaacatcagggcacaacaactacaacaacttgtgctagcaaaccttgctgcctactctcagcaacagcagtttcttccattcaaccaactagctgcattgaactctgcttct

SEQ ID NO: 345131 - DNA, 368 bp, Zea mays
gtttcatacaatgcgcaacagagaacgatttatttctgagcaaaaatataaccacggggggctctatgatatcagttcatgggctgctacataaaccattctaccgcaatgcatacaagcccctatagccaccctgctagctccatactatcttaccaatagccacatctgtatgtggaaactcaattattaaactccacactatccaacatgcaatatcaaatatcaaatcaccattaacacctttgtttcttcaacattccttatccataatacataaaccacattttatgtaatgattgccttcaaatcataatggacaaataattactactacttgacttcggcaatcttacctacatactctt

SEQ ID NO: 345132 - DNA, 331 bp, Zea mays
gtttattccaatccacaacacaaagcgatttattcttaagcatcacaacatcgacggggggagtttctataataactctaggtacatttaatactttaaaccataccaatgcatacataacaatcaattaccaccatcatcagaacattctaccgacgctgaacccatttttattcttacaacaccattctcttgcatccaacctacttcctgtagcaaacctagtatccatctatcaacaacaacaattgtcccttattctgccagcggctatataactacccatattctaacctgttgcctatctacaaacgatacatctgcatcaatt

SEQ ID NO: 345133 - DNA, 171 bp, Zea mays
ctctctcgtcctcgtcccgactcgcagtttttttatgatggtgaccaacatggtggagggggggtctaacacggtcactaagccgatcgacaccatgctcgccgtcatgggcgacagtcgacgttgactacgacgtgctgggcgctgaccctaacgcagcgccgcttttag

SEQ ID NO: 345134 - DNA, 277 bp, Zea mays
tccagatcagcaaagcggcagtgcgtagagagtatcgtcgaacagaacagcatgaagatggtcatcgttctcgtcgtgtgcctggctctgtcagctgccagcgcctctgcaatgcagatgccctgcccctgcgcggggctgcagggcttgtacggcgctggcgccggcctgacgacgatgatgggcgccggcgggctgtacccctacgcggagtacctgaggcagtcgcagtgcagcccgctggcggcggcgccctactacgccgggtgtgggcaga

SEQ ID NO: 345135 - DNA, 414 bp, Zea mays
ctagcaacatagaaagcacaatagtgtaccaacattgtcagccaaaatattttgcttccttatgctccttggtctttctgcaagtgctgctaccgcaaccattttcccacaatgctcacaagctcctatagcttcctttcttcccccatacctctcaccagcggtgtcttcagtatgtgaaaacccaattcttcaaccctacaggatccaacaggcaatcgcagcaggcattttacctttatcacccttgttccttcaacaaccgtcagccctattacagcagttacctttggtgcatttgttggcacaaaacatcaaggcacaacaactacaacatcttgtgctaggaaaccttgttgtctactttcagcaacaacagtttctttcattcaaccaactggctgcatttgaact

SEQ ID NO: 345136 - DNA, 418 bp, Zea mays
agcgaagcgcactagcaacaacctaacaacaatggctaccaagatattagccctccttgcgcttcttgcccttttagtgagcgcaacaaatgcgttcattattccacagtgctcacttgctcctagtgccattattccacagttcctcccaccagttacttcaatgggcttcgaacatccagccgtgcaagcctacaggctacaactagcgcttgcggcgagcgtcttacaacaaccaattgcccaattgcaacaacaatccttggcacatctaaacctacaaaccatcgcaacgcaacagcaacaacagtttctgccatcactgagccacctagccgtggtgaaccctgtcgcctacttgcaacagcagctacttgcatccaacccacttgctctggcgaacgtagctgcataccag

SEQ ID NO: 345137 - DNA, 267 bp, Zea mays
aaaagcgcccgagcggccgtttccataccaccactggtcttcaccctttttcttatctactccagagcgcagaagacccgatcgacaccatgagggtgttgctcgttgccctcgctctcctggctctcgctgcgagcgccacctccacgcatacaagcggcggctgcggctgccagccaccgacgccggttcatctaccgccgccggtgcatctgccaccttcggttcacctgccatcttcggtgcatattccacctgctgttcacc

SEQ ID NO: 345138 - DNA, 415 bp, Zea mays
gcaacatagaaagcacaatagtgtaccaacattggcagccaaaatattttgcctccttatgctccttggtctttctgcaagtgctgctacggcgaccattttcccgaaatgctcgcaagctcctatagcttcccttcttcccccgtacctctcaccagcggtgtcttcggtatgtgaaaacccaattcttcaaccctacaggatccaacaggcaatcacagctggcatcttacctttatcacccttgttcctccaacaatcatcagccctattacatcagttacctttggtgcatttattggcacaaaacatcagggcacaacaactacaacaacttgtgctagcaaaccttgctgcctactctcagcaacagcagtttcttccattcaaccaactagctgcattgaactctgct

SEQ ID NO: 345139 - DNA, 418 bp, Zea mays
cggcagtgcgtagagaggatcgtcgaacagaacagcatgaagatggtcatcgttctcgtcgtgtgcctggctctgtcagctgccagcgcctctgcaatgcagatgccctgcccctgcgcggggctgcagggcttgtacggcgctggcgccggcctgacgacgatgatgggcgccggcgggctgtacccctacgcggagtacctgaggcagccgcagtgcagcccgctggcggcggcgccctactacgccgggtgtgggcagacgagcgccatgtaccagccgctccggcaacagtgctgccggcagcagatgaggatgatggacgtgcagtccgtcgcgcagcagctgcagatgatgatgcagcttgagcgtgccgctgccgccagcagcagcctgtacgagccagctctgatgcagc

SEQ ID NO: 345140 - DNA, 426 bp, Zea mays
ggtcttcagaccattagctttatctactccagatcgcagaagaacccgatcgacaccatgagggtgttgctcgttgccctcgctctcctggctctcgctgcgagcgccacctccacgcatacaagcggcggctgcggctgccagccaccgccgccggttcatctaccgccgccggtgcatctgccacctccggttcacctgccacctccggtgcatctcccaccgccggtccacctgccgccgccggtccacctgccaccgccggtccatgtgccgccgccggttcatctgccgccgccaccatgccactaccctactcaaccgccccggcctcagcctcatccccagccacacccatgcccgtgccaacagccgcatccaagcccgtgccagctgcagggaacctgcggcgttggcagcacccct

SEQ ID NO: 345141 - DNA, 196 bp, Zea mays
aaagcacaatagtgtaccaacaatggcagtcaatatattttgcttccttatgctccttggtctttctgcaagtgttgctaccgcaaccattttcccacaatgctcacaagctcctatagcttcccttcttcccccatacctctcaccagcggtgtcttcaatgtgtgaaaacccaattgttcaaccctacaggatc

SEQ ID NO: 345142 - DNA, 442 bp, Zea mays
  unsure (1)..(442): unsure at all n locations
ggccggcccacgcgncgcgctnctatcagnnccancnnncntcatncaacttagttgtctnggcnccaaatcaaatctgcagcatcaattatctaactccaaaaaccatgaagctggtgcttgtggttcttgctttcattgctttagtatcaagtgtttcttgtacacagacaggcggctgcagctgtggtcaacaacaaagccatgagcagcaacatcatccacaacaacatcatccacaaaaacaacaacatcaaccaccaccacaacatcaccagcagcagcaacaccaacaacaacatgttcacatgcaaccacaaaaacatcagcaacaacaagaagttcatgttcaacaacaacaacaacaaccgcagcaccaacaacaacaacaacaacagcaccaacaacaacatcaatgtgaaggccaacaacaacatcacca

SEQ ID NO: 345143 - DNA, 359 bp, Zea mays
caactagcaacatagaaagcacaatagtgtacctacattggcagctaaaatattttgcctccttatgctccttggtctttctgcaagtgctgctacggcgaccattttcccacaatgctcacaagctcctatagcttcccttcttcccccgtacctctcaccaacggtgtcttcggtatgtgaaaacccaattcttcaaccctacaggatccaacaggcaatcgcagctggcatcttacctttatcacccttgttcctccaacaatcatcagcccctattacagcagttaccctttggtgcatttaattggcacataacatcagggcacaacaactacaacaacttgtgctagcaaacc

SEQ ID NO: 345144 - DNA, 419 bp, Zea mays
caggggaggcatgcagatctttgtgaaaaccctttctttcaagactatcaccctcgaggtggagtgctctgacaccattgacaacgtcaaggccaagatccaggacaaggagggcatccctccagaccagcagcggctcatctttgctgggaagcagcttgaggacgggcgcacgcttgccgactacaacatccagaaggagagcaccctccacttggtgctgcgcctcaggggaggcatgcagatcttcgtgaagaccctgaccggcaaaactatcaccctcgaggtggagtcttcagacaccatcgacaacgtcaaggccaagatccaggacaaggagggcattcccccagaccagcagcggctcatctttgctggaaagcagcttgaggacgggcgcacgctggccgactacaaca

SEQ ID NO: 345145 - DNA, 357 bp, Zea mays
  unsure (1)..(357): unsure at all n locations
acccacgcgnccggtccaactagcaacatagaaagcacaattttgtttcaacaatggcagccaaaatatggggctggcttatgctccttggtctttctgcaagtgctgctaccgcaaccattttcccacaatgctcacaagctcctatagcttcctttcttcccccatacctctcaccagcggtgtcttcagtatgtgaaaacccaattcttcaaccctacaggatccaacaggcaatcgcagcaggcatcttacctttatcacccttgttcctncaacaaaccgtaggcctattacaagcagtacctttggtgcatttgttggcacaaaacattaaggcacaacaactacaacaac

SEQ ID NO: 345146 - DNA, 415 bp, Zea mays
atttagaccaactagcaacatagaaagcacaatattgtaccaacaatggcagccaaaatattttgcctccttatgctccttggtatttctgcaagtgctgctacggcgaccattttcccgcaatgctcacaagctcctatagcttcccttcttcccccgtacctctcaccagcggtgtcttcggtatgtgaaaacccaattcttcaaccctacaggatccaacaggcaatcgcagctggcatcttacctttatcacccttgttcctccaacaatcatcagccctattacagcagttacctttggtgcatttattggcacaaaacatcagggcacaacaactacaacaacttgtgctagcaaaccttgctgcctactctcagcaacagcagtttcttccattcaaccaactagctg

SEQ ID NO: 345147 - DNA, 402 bp, Zea mays
  unsure (1)..(402): unsure at all n locations
ancaancancanncancnnagnagnanaggcaccaaatcaaancngcaacancaannatcnaacgccaaaaaccangaagcnggngcnngnggnncnngcnnncanngcnnnagnancaagngnnncngggacacagacaggcggcngcagcngnggncaacaacaaagccangagcagcaacancanccacaacaacancagccacaaaaacaacaacancaaccaccaccacaacagcaccagcagcagcaacaccaacaacaacaaggncacangcaaccacaaaaacancagcaacaacaagaagnncangnncaacaacaacaacaacaaccgcagcaccaacaacaacaacaacaacagcaccaacaacaacancaaggggaaggccaacaacaac

SEQ ID NO: 345148 - DNA, 422 bp, Zea mays
attgagaccaacaagcaacatagaaagtggaattcagtagcaacaatagagcaacaatggcgaccaagatattttccctccttatgctccttgctctttctgcatgtgttgctaacgcgacaattttccctcaatgctcacaagctcctatagcttcccttcttcccccataccttccatcaatgatagcttcagtatgtgaaaacccagctcttcaaccctataggctccaacaagcaatcgcagcaagcaacatacctttatcacccttgtttcaacaatcgccagccctatctttggtgcagtcattggtacaaaccatcagggcacagcagctgcagcaactcgtgctacctgtgatcaaccaagtagctctggcaaacctttcttccctactcttagcaacaaccaattctttcatt

SEQ ID NO: 345149 - DNA, 417 bp, Zea mays
tgagcatcagaaacacaccaagcgaagcgcactagctacaacctaacaacaatggctaccaagatattatccctccttgcgcttcttgcgctttttgcgagcgcaacaaatgcgtccattattccacaatgctcacttgctcctagttccattattccacagttcctcccaccagttacttcaatggccttcgaacacccagctgtgcaagcctataggctacaacaagcgattgcggcgagcgtcttacaacaaccaattgcccaattgcaacaacaatccttggcacatctaacaatacaaaccatcgcaacgcaacagcaacaacagttcctaccagcactgagccacctagccatggtgaaccctgtcgcctacttgcaacagcagctgcttgcatccaacccacttgctcta

SEQ ID NO: 345150 - DNA, 412 bp, Zea mays
tgagaccaacaagcaacatagaaagtggaatccagtttcaacaatagagcaacaatggcgaccaagatattttccctccttatgctccttgctctttctgcatgtgttgctaacgcgacaattttccctcaatgctcacaagctcctatagcttcccttcttcccccataccttccatcaatgatagcttcagtatgtgaaaacccagctcttcaaccctataggctccaacaagcaatcgcagcaagcaacatacctttatcacccttgtttcaacaatcgccagccctatctttggtgcagtcattggtacaaaccatcagggcacagcagctgcagcaactcgtgctacctgtgatcaaccaagtagctctggcaaacctttctccctactctcagcaacaacaatttc

SEQ ID NO: 345151 - DNA, 425 bp, Zea mays
  unsure (1)..(425): unsure at all n locations
gaccacgcgttcgttgagaccacangcaacatagaaagtggaatacagttcaacaatagagcaacaatggcggccaagatattttccatccttatgctccttgctctttctgcatgtgttgctaacgcgaccatttttcctcaatactcacaagctcctatagctgcccttcttcccccataccttccatcaatgaccgcttcagtatgtgaaaacccagcccttcaaccctacaggctccaacaagcaatcgcaacaagcaacttacctttatcacccctgttctttcaacaatcgccagccctatctttggtgcagtcattggtacaaaccatcagggcacaacagctgcagcaactcgtgctaccagtgatcagccaagtagctctggcaaaccttttctcctactcttagcaacaacaatt

SEQ ID NO: 345152 - DNA, 313 bp, Zea mays
cggacgcgtgggcggacgcgtgggcggacgcgtgggtttgagcattcagaaacacaccaagcgaagcacattagcaacaacctaacaacaatggctaccaagatattatccctccttgcgcttcttgcgctttttgcgagcgcaacaaatgcgttcattattccacaatgctcacttgctccaagttccattattacacagttcctcccaccagttacttcaatgggcttcgaacacccagctgtgcaagcctataggctacaacaagcaattgcggcgagcgtcttacaacaaccaattttccagttgcaac

SEQ ID NO: 345153 - DNA, 418 bp, Zea mays
aagcgaagcacattagcaacaacctaacatcatttgctaccaagatattatccctccttgcgcttcttgcgctttttgcgagcgcaacaaatgcgttcattattccacaatgctcacttgctccaagttccattattacacagttcctcccaccagttacttcaatgggcttcgaacacccagctgtgcaagcctataggctacaacaagcaattgcggcgagcgtcttacaacaaccaatttcccagttgcaacaacaatccttggcacatctaacaatacaaaccatcgcaacgcaacagcaacaacaattcctaccagcactgagccacctagccatggtgaaccctgccgcctacttgcaacagcagttgcttgcatcaaacccacttgctctggcaaacgtagttgcaaacca

SEQ ID NO: 345154 - DNA, 409 bp, Zea mays
  unsure (1)..(409): unsure at all n locations
agaccanagctnnactactccagagcgcattttaacccgatcgacaccatgagggtgttgctcgttgccctcgctctcctggctctcgctgcgagcgccacctccacgcatacaagcggcggctgcggctgccagccaccgccgccggttcatctaccgccgccggtgcatctgccacctccggttcacctgccacctccggtgcatctcccaccgccggtccacctgccgccgccggtccacctgccaccgccggtccatgtgccgccgccggttcatctgccgccgccaccatgccactaccctactcaacctgcccggcctcagcctcattcccagccacacccatgcccgtgccaacagccgcatccaagcccgtgccagctgcagggaacctgcggcgttggca

SEQ ID NO: 345155 - DNA, 414 bp, Zea mays
cagtcattggtacaaaccatcagggcacaacagttgcagcaactcgtgctacctgtgatcaaccaagtagctctggcaaacctttctccctactctccgcaacaacaatttcttccattcaaccaactgtctacactgaaccctgctgcttatttgcagcaacaactattaccatttagccagctagctactgcctactctcaacaacaacaacttcttccatttaaccaattggccgcactgaaccccgctgcttatttgcagcagcaaatactactaccatttagccagctagctacagcaagccgtgcttccttcttgacacaacaacagttgctgccgttctaccagcagtttgcggctaaccccgcaaccctcttacaactacaacaattgttgccctttgtccaactt

SEQ ID NO: 345156 - DNA, 420 bp, Zea mays
tagcaacatagaaagcacaatagtgtaccaacattggcagccaaaatattttgcttccttatgctccttggtctttctgcaagtgttgctaccgcaaccattttcccacaatgctcacaagctcctatagcttcccttcttcccccatacctctcaccagcggtgtcttcaatgtgtgaaaacccaattgttcaaccctacaggatccaacaggcaatcgcaacaggcatcttaccattatcacccttgttcctccaacaaccgtcagccctattacagcagttacctttggtccatttggtggcacaaaacattagggcacaacaactacaacaacttgtgctagcaaaccttgctgcatactctcagcaacatcagtttctttcattcaaccaactggctgcattgaactctgctgct

SEQ ID NO: 345157 - DNA, 152 bp, Zea mays
  unsure (1)..(152): unsure at all n locations
canncaaccaacnagcngcaangaacncngcanacaaaaagcaacaacaacaacaaccaggcagccagcaancngcggccaacccccagcaaanacnnccaagcaaccaacggacagcaangaacncaccagcggagagacagcagcaacaa

SEQ ID NO: 345158 - DNA, 334 bp, Zea mays
gcaacatagaaagcacaatagtgtaccaacaatggcagccaaaatattttgcttccttatgctccttggtctttctgcaagtgttgctaccgcaaccattttcccacaatgctcacaagctcctatagcttccctttttccccaatacctttaccagcggtgtcttcaatgtgtgaaaacccaattggtcaaccctacaggatccaacaggcaatcgcaacaggcatcttaccattatcacccttgttcctccaacaaccgtcagccctattacagcagttacctttggtccatttggtggcacaaaacattaaggcacaacaactacaacaac

SEQ ID NO: 345159 - DNA, 261 bp, Zea mays
cccacgcgtccgcagaaacacaccaagcgaagcacattagcaacaacctaacaacaatggctaccaagatattatccccccttgcgcttcttgcgctttttgcgagcgcaacaaatgcgttcattattccacaatgctcacttgctccaagttccattattacacagttcctcccaccagttacttcaatgggcttcgaacacccagctgtgcaagcctataggctacaacaagcaattgcggcgagcgtcttacaacaac

SEQ ID NO: 345160 - DNA, 420 bp, Zea mays
cagaaacacaccaagcgaagcgcactagcaacgacctatcaacaatggctaccaagatattagccctccttgcgcttcttgccctttttgtgagcgcaacaaatgcgttcattattccacaatgctcacttgctcctagtgccattattccacagttccttccaccagttacttcaatgggcttcgaacacctagctgtgcaagccaacatgcaacaacaagcgcttgcggcgagcgtcttacaacaaccaattgcccaattgcaacaacaatccttgccacatctaacaatacaagccatcacaacgcaacagcaacaacaagttctaccagcactgagccacctagccatggtgaaccctgccgcctacttgcaagagcagctgcttgcattcaacccactgctctgcgaacgtagtt

SEQ ID NO: 345161 - DNA, 356 bp, Zea mays
gccacctagccatggtgaaccctgccgcctacttgcaacagcagttgcttgcatcaaacccacttgctctggcaaacgtagttgcaaaccagccacaacaacagctgcaacagtttctgccagcgctcagtcaactagccatggtgaaccctgccgcctacctacaacagcaacaactgcttttatctagcccgctcgctgtggccaatgcacctacatacctgcaacaacaattgttgcaacagattgtaccagctctgacttagcttgttgtggtacaccctgctgcctacttgtaacagctgcttccatttcaaccaactgactatgttgaactctgctgcgtacctacaaca

SEQ ID NO: 345162 - DNA, 365 bp, Zea mays
agcaacatagaaagtggaatccagtagcaacaatagagcaacaatggagaccaagatattttccctccttatgctccttgctctttctacatgtgttgctaacgcgacaattttccctcaatgctcacaagctcctatagcttccctttttcccccataccttccatcaattatagcttcagtatgtgaaaacccagctcttcaaccatataggcttcaacaagcaatcgcagcaagcaacatacctttatcgcccttgttgtgtcaacaaatcgcagccctatctttggtgcagtcattggtacaaaccatcagggcacaacagctgcagcaacttgtgctacctgtgatcaaccaagtagctc

SEQ ID NO: 345163 - DNA, 412 bp, Zea mays
ggacgtcagcctagcaattagctcatcgactccagattggagaactcgacaccatgaaggtgctgatcgttgcccttgctctcctggcgctcgctgcgagcgccgcctccagtacaagcggcggctgtggctgccagacaccaccgtttcatctaccgcctccgttctatatgccgcctccgttctatctgccgccgcagcagcagccgcagccatggcaataccccactcaaccaccgcagctaagcccgtgccagcagttcggatcctgcggcgtcggcagcgtcggcagcccgttcctgggccagtgcgtcgagttcctgaggcaccagtgcagcccggcggcgacgccctacggctcgccacagtgccaggcgctgcagcagcagtgctgccaccagatcaggcaggt

SEQ ID NO: 345164 - DNA, 414 bp, Zea mays
gcaattagctcatcgactccagattggagaactcgacaccatgaaggtgctgatcgttgcccttgctctcctggcgctcgctgcgagcgccgcctccagtacaagcggcggctgtggctgccagacaccaccgtttcatctaccgcctccgttctatatgccgcctccgttctatctgccgccgcagcagcagccgcagccatggcaataccccactcaaccaccgcagctaagcccgtgccagcagttcggatcctgcggcgtcggcagcgtcggcagcccgttcctgggccagtgcgtcgagttcctgaggcaccagtgcagcccggcggcgacgccctacggctcgccacagtgccaggcgctgcagcagcagtgctgccaccagatcaggcaggtggagccgctgcaccg

SEQ ID NO: 345165 - DNA, 412 bp, Zea mays
agaccattagctttatctactccagagcgcattttaacccgatcgacaccatgagggtgttgctcgttgccctcgctctcctggctctcgctgcgagcgccacctccacgcatacaagcggcggctgcggctgccagccaccgtcgccggttcatctaccgccgccggtgcatttgccacctccggttcacctgtcacctccggtgcatctcccaccgccggtccacctgccgccgccggtccacctgccaccgccggtccatgtgccgccgacggttcatctgccgccgtcaccatgccactaccctactcaacccgctcggtctcaatcttattcctagccccacccatgcccgtgccaacagccgcatccaagtccgtgccagttgcagggaaacctgcggcgttggca

SEQ ID NO: 345166 - DNA, 365 bp, Zea mays
  unsure (1)..(365): unsure at all n locations
tgagaccaactagcaacatagaaagcacaatagtgtaccaacaatggcagccaaaatattttgcctccttatgctccttggtctttctgcaagtgctgctacggcgaccattttcccgaaatgctcgcaagctcctatagcttcccttcttcccccgtacctctcaccagcggtgtcttcggtatgtgaaaacccaattcttcaaccctacaggatccaacaggcaatcacagctggcatcttacctttatcacccttgttcctccaacaatcatcagccctattacatcagttacctntggtgcatttattggcacaaaacattaaggcacaacaactacaacaacttgtgctagcaaaccttg

SEQ ID NO: 345167 - DNA, 389 bp, Zea mays
  unsure (1)..(389): unsure at all n locations
caactagcaacatagaaagcacaatagtgtaccatcattggcagccaaaatatttngcctccttatgctccttggtctttctgcaagtgctgctacggcgaccattttcccgaaatgctcgcaagctcctatagcttcccttctttccccgtacctctcaccagcggtgtcttcggtatgtgaaaacccaattcttcaaccctacaggatccaacaggcaatcacagctggcatcttacctttatcacccttgttcctccaacaatcatcagccctattacatcagttacctttggtgcatttattggcacaaaacattatggcacaacaactacaacaacttgtgctagcaaaaccttgttgcctactcttagcaacagcagtttctt

SEQ ID NO: 345168 - DNA, 412 bp, Zea mays
cggacgcgtgggtgagaccaactagcaacatataaagctcaatagtgtaccaacaatggcaggcaaaatattttgcctccttatgctccttggtctttctgcaagtgctgctacggcgaccattttcccacaatgctcacaagctcctatagcttcccttcttcccccgtacctctcaccagcggtgtcttcggtatgtgaaaacccaattcttcaaccctataggatccaacaggcaatcgcagctggcatcttacctttatcacccttgttcctccaacaatcatcagccctattacagcagttacctttggtgcatttattggcacaaaacattatggcacaacaactacaacaacttgtgctagcaaaccttgctgtctactctcagcaacaacagtttctttcattt

SEQ ID NO: 345169 - DNA, 428 bp, Zea mays
gcattcagaaacacaccaagcgaagcgcactagtaactacctaacaacaatggctaccaagatattagccctccttgcgcttcttgccctttttgtgagcgcaacaaatgcgttcattattccacaatgctcacttgctcctagtgccattattccacagttcctcccaccagttacttcaatgggcttcgaacacctagctgtgcaagccaacatgcaacaacaagcgcttgcggcgagcgtcttacaacaaccaattgcccaattgcaacaacaatccttgccacatctaacaatacaagccatcacaacgcaacagcaacaacagtttctaccagcactgagccacctagccatggtgaaccctgccgtctacttgcaagagcagctgcttgcattcaacccacttgctctggcgaacgtagttg

SEQ ID NO: 345170 - DNA, 420 bp, Zea mays
gaaagcacaatagtgtaccaacaatggcagccaaaattttttgcttccttatgctccttggtctttctgcaagtgttgctaccgcaaccattttcccacaatgctcacaagctcctatagcttcccttcttcccccatacctctcaccagcggtgtcttcaatgtgtgaaaacccaattgttcaaccctacaggatccaacaggcaatcgcaacaggcatcttaccattatcacccttgttcctccaacaaccgtcagccctattacagcagttacctttggtccatttggtggcacaaaacatcagggcacaacaactacaacaacttgtgctagcaaaccttgctgcatactctcagcaacatcagtttcttccattcaaccaactggctgcattgaactctgctgcttatttgcaac

SEQ ID NO: 345171 - DNA, 386 bp, Zea mays
agcattcagaaacacaccaagcgaagcgcactatcaacaacctaacaacaatggctaccaagatattagccctccttgcgcttcttgcccttttagtgagcgcaacaaatgcgttcattattccacagtgctcacttgctcctagtgccattattccacagatcctcccaccagttacttcaatgggcttcgaacattcagccgtgcaagcctacaggctacaactagcgcttgcggcgaccgttatcacccttcgtcctgcaacaatcatcagccctatcacatcacgtacctttggcgcatttattggcacaaaacatcacggcacaacatctacaacatcttgcgctagcaaaccgtgctgcctactctcaacaacagcagtt

SEQ ID NO: 345172 - DNA, 115 bp, Zea mays
  unsure (1)..(115): unsure at all n locations
ttnttagcattcacaaacacaccaagctattttttctatcaacaacctaacaacaatggggagctagatattagctctttcttgcgcttcttgccctttaagtgagcgcaacaat

SEQ ID NO: 345173 - DNA, 413 bp, Zea mays
tggcaacatagaaagcacaatagtgtactttctatttggcagccaaaatattttgcctgcttatgctccttggtatttctgcaagtgctgctacggcgaccattttcccgcaatgctcacaagctcctatagcttcccttcttcccccgtacctctcaccagcggtgtcttcggtatgtgaaaacccaattcttcaaccctacaggatccaacaggcaatcgcagctggcatcttacctttatcacccttgttcctccaacaatcatcagccctattacagcagttacctttggtgcatttattggcacaaaacatcaggtcacaacaactacaacaacttgtgctagcaaaccttgctgtctactctcagcaacagcagtttcttccattcaaccaactagctgcattgaac

SEQ ID NO: 345174 - DNA, 420 bp, Zea mays
gcaacatagaaagcacaatagtgtaccaacaatggcagccaaaatattttgcctccttatgctccttggtctttctgcaagtgctgctacggcgaccattttcccgaaatgctcgcaagctcctatagcttcccttcttcccccgtacctctcaccagcggtgtcttcggtatgtgaaaacccaattcttcaaccctacaggatccaacaggcaatcacagctggcatcttacctttatcacccttgttcctccaacaatcatcagccctattacatcagttacctttggtgcatttattggcacaaaacatcagggcacaacaactacaacaacttgtgctagcaaaccttgctgcctactctcagcaacagcagtttcttccattcaaccaactagctgcattgaactctgcttctta

SEQ ID NO: 345175 - DNA, 421 bp, Zea mays
cagaaacacaccaagcgaagctacctagcaacgtcttaacaacaatggctaccaagatattagccctccttgcgcttcttgccctttttgtgagcgcaacaaatgcgttcattattccacaatgctcacttgctcctagtgccattataccacagttcctccgaccagttacttcaatgggcttcgaacacctagctgtgcaagcctacaggctacaacaagcgcttgcggcgagcgtcttacaacaaccaattaaccaattgcaacaacaatccttggcacatctaaccatacaaaccatcgcaacacaacagcaacaacagttcctaccagcactgagccaactagatgtggtgaaccctgtcgcctacttgcaacagcaggtgcttgcatccaacccacttgctctggcaaacgtagc

SEQ ID NO: 345176 - DNA, 395 bp, Zea mays
cggacgcgtgggcagaccattagctttatctactccagagcgcagaagaacccgatcgacaccatgagggtgttgctcgttgccctcgctctcctggctctcgctgcgagcgccacctccacgcatacaagcggcggctgcggctgccagccaccgccgccggttcatctaccgccgccggtgcatctgccacctccggttcacctgccacctccggtgcatctcccaccgccggtccacctgccgccgccggtccacctgccaccgccggtccatgtgccgccgccggttcatctgccgccgccaccatgccactaccctactcaaccgccccggcctcagcctcatcctcagccacacccatgcccgtgccaacagccgcattcaagcccgtg

SEQ ID NO: 345177 - DNA, 423 bp, Zea mays
agctcatcgactccagattggagaactcgacaccatgttaggtgctgatcgttgcccttgctctcctggcgctcgctgcgagcgccgcctccagtacaagcggcggctgtggctgccagacaccaccgtttcatctaccgcctccgttctatatgccgcctccgttctatctgccgccgcagcagcagccgcagccatggcaataccccactcaaccaccgcagctaagcccgtgccagcagttcggatcctgcggcgtcggcagcgtcggcagcccgttcctgggccagtgcgtcgagttcctgaggcaccagtgcagcccggcggcgacgccctacggctcgccacagtgccaggcgctgcagcagcagtgctgccaccagatcaggcaggtggagccgctgcaccggtaccaggcgacat

SEQ ID NO: 345178 - DNA, 449 bp, Zea mays
ggaataccgggccgaccacgcgtccggaaagcacaatagtgtaccaacaatggcagcttttagtttttgcctccttatgctccttggtctttctgcaagtgctgctacggcgaccatttttccacaatgctcacaagctcctatagcttcccttcttcccccgtacctctcaccaacggtgtcttcggtatgtgaaaacccaattcttcaaccctacaggatccaacaggcaatcgcagctggcatcttacctttatcacccttgttccttcaacaatcatcagccctattacagcagttacctttggtgcatttattggcacaaaacatcagggcacatcaactacaacaactttgtgctagcaaacctttgctgcctactctcagcaacagcagtttctttcattcaaaccactagctgcattgaactctggtttttattttgcaac

SEQ ID NO: 345179 - DNA, 417 bp, Zea mays
cagaaacacaccaagcgaagcgcactagcaacattctaacaacaatggctaccaagatattatccctccttgcgcttcttgcgctttttgcgagcgcaacaaatgcgtccattattccacaatgctcacttgctcctagttccattattccacagttcctcccaccagttacttcaatggccttcgaacacccagctgtgcaagcctataggctacaacaagcgattgcggcgagcgtcttacaacaaccaattgcccaattgcaacaacaatccttggcacatctaacaatacaaaccatcgcaacgcaacagcaacaacagttcctaccagcactgagccacctagccatggtgaaccctgtcgcctacttgcaacagcagctgcttgcatccaacccacttgctctagcaaacg

SEQ ID NO: 345180 - DNA, 415 bp, Zea mays
attgagaccaactagcaacatagaaagcacaattttgtaccaacaatggcagccaaaatattttgcttccttatgctccttggtctttctgcaagtgctgctaccgcaaccattttcccacaatgctcacaagctcctatagcttcctttcttcccccatacctctcaccagcggtgtcttcagtatgtgaaaacccaattcttcaaccctacaggatccaacaggcaatcgcagcaggcatcttacctttatcacccttgttcctccaacaaccgtcagccctattacagcagttacctttggtgcatttgttggcacaaaacattaaggcacaacaactacaacaacttgtgctaggaaaccttgctgcctactctcagcaacagcagtttcttccattcaaccaactggctg

SEQ ID NO: 345181 - DNA, 359 bp, Zea mays
acagcattgaactctcctgcttatttacagcagtttacttctactaccattcagccagctagctggtgtgagccctgctaccttcttgacacaaccacagttgttgccgttctaccagcacgctgcgcctaacgctggcaccctcttacaactgcaacaattgctgccattcaaccaacttgctttgacaaacccagcagcattctaccaacaacccatcattggtggtgccctcttttagatttcttatgagttatagttcaataataaagttttttgtctgatgtttgtggcttcccagaaataagaaagtacatttctagttataaaaaatttaataattaaattttataaataat

SEQ ID NO: 345182 - DNA, 338 bp, Zea mays
ttttgagcattcagaaacacaccaagcgatgcacattagcaacaacctaacaacaatggctaccaagatattatccctccttgcgcttcttgcgctttttgcgagcgcaacaaatgcgttcattattccacaatgctcacttgctccaagttccattattacacagttcctcccaccagttacttcaatgggcttcgaacacccagctgtgcaagcctataggcttcaacaagcaattgcggcgagcgttttacaacaaccaattttccagtttgaacaacaatccttggcacattttacaatacaaaccaattgatcgctacagcaacaacaatttc

SEQ ID NO: 345183 - DNA, 414 bp, Zea mays
tagaaagcacaatagtgtaccaacaatggcagcctaattattttgcctccttatgctccttggtatttctgcaagtgctgctacggcgaccattttcccgcaatgctcacaagctcctatagcttcccttcttcccccgtacctctcaccagcggtgtcttcggtatgtgaaaacccaattcttcaaccctacaggatccaacaggcaatcgcagctggcatcttacctttatcacccttgttcctccaacaatcatcagccctattacagcagttacctttggtgcatttattggcacaaaacatcagggcacaacaactacaacaacttgtgctagcaaaccttgctgcctactctcagcaacagcagtttcttccattcaaccaactagctgcattgaactctgcttctta

SEQ ID NO: 345184 - DNA, 423 bp, Zea mays
agcattcagaaacacaccaagcgaagcgcactatcatctacctaacaacaatggctaccaagatattagccctccttgcgcttcttgccctttttgtgagcgcaacaaatgcgttcattattccacaatgctcacttgctcctagtgccattattccacagttcctcccaccagttacttcaatgggcttcgaacacctagctgtgcaagccaacatgcaacaacaagcgcttgcggcgagcgtcttacaacaaccaattgcccaattgcaacaacaatccttgccacatctaacaatacaagccatcacaacgcatcagcaacaacagtttctaccagcactgagccacctagccatggtgaaccctgccgtctacttgcaagagcagctgcttgcatccaacccacttgctcttgcgaacg

SEQ ID NO: 345185 - DNA, 416 bp, Zea mays
gcaacatagaaagcacaatagtgtaccaacaatgtcattcaaaatattttgcctccttatgctccttggtctttctgcaagtgctgctacggcgaccattttcccgcaatgctcgcaagctcctatagcttcccttcttcccccgtacctctcaccagcggtgtcttcggtatgtgaaaacccaattcttcaaccctacaggatccaacaggcaatcgcagctggcatcttacctttatcacccttgttcctccaacaatcatcagccctattacaacagttacctttggtgcatttattggcacaaaacatcagggcacaacaactacaacaacttgtgctagcaaaccttgttgcctactctaagaaacagcagtttcttccattcaaccaacttggttcattgaactctggtt

SEQ ID NO: 345186 - DNA, 383 bp, Zea mays
  unsure (1)..(383): unsure at all n locations
catcaatcatcattcatcttagtagtattggtanctaaatcaaatctgcaacatcaattatctaactccaaaaaccatgaagctggtgcttgtggttcttgctttcattgctttagtatcaagtgtttcttgtacacagacaggcggctgcagctgtggtcaacaacaaagccatgagcagcaacatcatccacaacaacatcatccacaaaaacaacaacatcaaccaccaccacaacatcaccagcagtagcaacaccaacaacaacaagtttacatgcaaccacaaaaacattagcaacaacaagaagttcatgttcaacaacaacaacaacaaccgcagttccaacaacatcaacaacaacagcaccaacaacaacatt

SEQ ID NO: 345187 - DNA, 299 bp, Zea mays
atagaaagcacaatagtgtaccaacaatgtcagttaaaatattttgcctccttatgctccttggtctttctgcaagtgctgctacggcgaccattttcccacaatgctcacaagctcctatagcttcccttcttcccccgtacctctcaccaacggtgtcttcggtatgtgaaaacccaattctttaaccctacaggatccaacaggcaatcgcagctggcatcttacctttatcacccttgttccttcaacaattatcaaccctattacagcagttacctttggtgcatttattggca

SEQ ID NO: 345188 - DNA, 387 bp, Zea mays
attgagaccaacaagcaacatagaaagtggaatccagtagcaacaatagagcaacaatggagaccaagatattttccctccttatgctccttgctctttctacatgtgttgctaacgcgacaattttccctcaatgctcacaagctcctatagcttccctttttcccccataccttccatcaattatagcttcagtatgtgaaaacccagctcttcaaccatataggcttcaacaagcaatcgcagcaagcaacatacctttatcgcccttgttgtgtcaacaatcgccagccctatctttggtgcagtcattggtacaaaccatcagggcacaacagctgcagcaactcgtgctacctgtgatcaaccaagtagctctggcaaacc

SEQ ID NO: 345189 - DNA, 410 bp, Zea mays
gcaacatagaaagcacaatagtgtaccaacaattgcagccaaaatattttgcctccttatgctccttggtctttctgcaagtgctgctacggcgaccattttcccacaatgctcacaagctcctatagcttcccttcttcccccgtacctctcaccagcggtgtcttcggtatgtgaaaacccaattcttcaaccctataggatccaacaggcaatcgcagctggcatcttacctttatcacccttgttcctccaacaatcatcagccctattacagcagttacctttggtgcatttattggcacataacatcagggcacaacaactacaacaacttgtgctagcaaaccttgctgcctactctcagcaacaacagtttcttccattcaaccaactagcttgcattgaac

SEQ ID NO: 345190 - DNA, 425 bp, Zea mays
  unsure (1)..(425): unsure at all n locations
gagcattcagaaacacaccaagcgaagcgcactagcaacaacctaacaacaatggctaccaagatattatccctccttgcgcttcttgcgctttttgcgagcgcaacaaatgcgtccattattccacaatgctcacttgctcctagttccattattccacagttcctcccaccagttacttcaatggccttcgaacacccagctgtgcaagcctataggctacaacaagcgattgcggcgagcgtcttacaacaaccaattgcccaattgcaacaacaatccttggcacatctaacaatacaaaccatcgcaacgcaacagcaacaacagttcctaccagcactgagccacctagccatggtgaaccctgtcgcctacttgcaacagcagctgcttgcatncaacccacttgctctagcanacgt

SEQ ID NO: 345191 - DNA, 409 bp, Zea mays
gttacctttggtgcatttattggcacaaaacatcatgtcacaacaactacaacaacttgtgctagcaaaccttgctgcctactctcagcaacagcagtttcttccattcaaccaactaggttcattgaactctgcttcttatttgcaacaacaacaactaccattcagccagctacctgctgcctacccccagcaatttcttccattcaaccaactagcagcattgaactctcctgcttatttacagcagcaacaactactaccattcagccagctagctggtgtgagccctgctaccttcttgacacaaccacagttgttgccgttctaccagcacgttgcgcctaacgctggcaccctttaacaactgcaacaattgctgccattcaaccaacttgctttgacaaac

SEQ ID NO: 345192 - DNA, 423 bp, Zea mays
  unsure (1)..(423): unsure at all n locations
tagaaagcacaatagtgtaccaacaatggcagccaaaatattttgcttccttatgctccttggtctttctgcaagtgttgctaccgcaaccattttcccacaatgctcacaagctcctatagcttcccttcttcccccatacctctcaccagcggtgtcttcaatgtgtgaaaacccaattgttcaaccctacaggatccaacaggcaatcgcaacaggcatcttaccattatcacccttgttcctccaacaaccgtcagccctattacagcagttacctttggtccatntggtggcacaaaacatcagggcacaacaactacaacaacttgtgctagcaaaccttgctgcatactctcagcaacatcagtttctttcattcaaccaactggctgcattgaactctgctgcttatttgcaaca

SEQ ID NO: 345193 - DNA, 251 bp, Zea mays
cggacgcgtgggttgagcattcagaaacacaccaagctaagcgcactagcaacgacctaacaacaatggctaccaagatattagccctccttgcgcttcttgccctttttgtgagcgcaacaaatgcgttcattatttcacaatgctcacttgctcctagtgccattattccacagtttcttccaccagctactctaatgggcttctaacacccatctgtgcaagccaacatgcaacaacaagtgcttgtg

SEQ ID NO: 345194 - DNA, 430 bp, Zea mays
cagcattcagaaacacaccaagcgaagcgcactagcaacaacctaacaacaatggctaccaagatattagccctccttgcgcttcttgcccttttagtgagcgcaacaaatgcgttcattattccacagtgctcacttgctcctagtgccattattccacagttcctcccaccagttacttcaatgggcttcgaacatccagccgtgcaagcctacaggctacaactagcgcttgcggcgagcgtcttacaacaaccaattgcccaattgcaacaacaatccttggcacatctaaacctacaaaccatcgcaacgcaacagcaacaacagtttctgccatcactgagccacctagccgtggtgaaccctgtcgcctacttgcaacagcagctacttgcatccaacccacttgctctggcgaacgtagctg

SEQ ID NO: 345195 - DNA, 149 bp, Zea mays
tcgatccaatccatatcagcaaagcggcagtttttttttagtatcgacgaacatatcagaatgcggagtgtcatcgttctacatgtgtgcctggctttagaagcatgtcatttcctacgtaatgcatatgcctcgcccctgtgcgtagc

SEQ ID NO: 345196 - DNA, 417 bp, Zea mays
cagaaacacaccaagcgaagcgcactagcaacatcctaacaacaatggctaccaagatattagccctccttgcgcttcttgcccttttagtgagcgcaacaaatgcgttcattattccacagtgctcacttgctcctagtgccattattccacagttcctcccaccagttacttcaatgggcttcgaacatccagccgtgcaagcctacaggctacaactagcgcttgcggcgagcgtcttacaacaaccaattgcccaattgcaacaacaatccttggcacatctaaacctacaaaccatcgcaacgcaacagcaacaacagtttctgccatcactgagccacctagccggggtgaaccctgtcgcctacttgcaacagcagctacttgcattcaacccacttgctctggcgaacg

SEQ ID NO: 345197 - DNA, 422 bp, Zea mays
  unsure (1)..(422): unsure at all n locations
tcagaaacacaccaagcgaagctacctagcaacgacttaacaacaatggctaccaagatattagccctccttgcgcttcttgccctttttgtgagcgcaacaaatgcgttcattattccacaatgctcacttgctcctagtgccattataccacagttcctccgaccagttacttcaatgggcttcgaacacctagctgtgcaagcctacaggctacaacaagcgcttgcggcgagcgtcttacaacaaccaattaaccaattgcaacaacaatccttggcacatctaaccatacaaaccatcgcaacacaacagcaacaacagttcctaccagcactgagccaactagatgtggtgaaccctgtcgcctacttgcaacagcaggtgcttgcatccaacccacttgctctggcanacgtagc

SEQ ID NO: 345198 - DNA, 402 bp, Zea mays
gcaacatagaaagtggaatacagtagcaacaatagagcaacaatggcggccaagatattttccatccttatgctccttgctctttctgcatgtgttgctaacgcgaccatttttcctcaatactcacaagctcctatagctgcccttcttcccccataccttccatcaatgaccgcttcagtatgtgaaaacccagcccttcaaccctacaggctccaacaagcaatcgcaacaagcaacttacctttatcacccctgttctttcaacaatcgccagccctatctttggtgcagtcattggtacaaaccatcagggcacaacagctgcagcaactcgtgctaccagtgatcagccaagtagctctggcaaacctttctccctactctcagcaacaacaattt

SEQ ID NO: 345199 - DNA, 406 bp, Zea mays
accaactagcaacatagaaagcacaatagtgtaccaacaatggcagccaaaatattttgcctccttatgctccttggtctttctgcaagtgctgctacggcgaccattttcccgaaatgctcgcaagctcctatagcttcccttcttcccccgtacctctcaccagcggtgtcttcggtatgtgaaaacccaattcttcaaccctacaggatccaacaggcaatcacagctggcatcttacctttatcacccttgttcctccaacaatcatcagccctattacatcagttacctttggtgcatttattggcacaaaacatcagggcacaacaactacaacaacttgtgctagcaaaccttgcttctactctcagcaacagcagtttttttcattaaccaacttgct

SEQ ID NO: 345200 - DNA, 454 bp, Zea mays
accggatggatcccggtcgcccacgcgtcgaactagcaacatagaaagcacaatagtgtaccaacaatggcagccaaaatattttgcctccttatgctccttggtctttctgcaagtgctgctacggcgaccattttcccgaaatgctcgcaagctcctatagcttcccttcttcccccgtacctctcaccagcggtgtcttcggtatgtgaaaacccaattcttcaaccctacaggatccaacaggcaatcacagctggcatcttacctttatcacccttgttcctccaacaatcatcagccctattacatcagttacctttggtgcatttattggcacaaaacatcagggcacaacaactacaacaacttgtgctagcaaaccttgctgcctactctcagcaacagcagtttcttccattcaaccaactagctgcattgaactctgcttctt

SEQ ID NO: 345201 - DNA, 399 bp, Zea mays
agaaagtggaatccagtagcaacaatagagcatcatttgcgaccaagatattttccctccttatgctccttgctctttctgcatgtgttgctaacgcgacaattttccctcaatgctcacaagctcctatagcttcccttcttcccccataccttccatcaatgatagcttcagtatgtgaaaacccagctcttcaaccctataggctccaacaagcaatcgcagcaagcaacatacctttatcacccttgtttcaaacaatcgccagccctatctttggtgcaagcattggtacaaaccatcagggcacaacagttgcagcaactcgtgctacctgtgatcaaccaagtagcttttggcaaacctttttccctacttttagcaacaacaatttttttc

SEQ ID NO: 345202 - DNA, 424 bp, Zea mays
gcgaagcgcactagcaacaacctaacaacaatgtctaccaagatattagccctccttgcgcttcttgcccttttagtgagcgcaacaaatgcgttcattattccacagtgctcacttgctcctagtgccattattccacagttcctcccaccagttacttcaatgggcttcgaacatccagccgtgcaagcctacaggctacaactagcgcttgcggcgagcgtcttacaacaaccaattgcccaattgcaacaacaatccttggcacatctaaacctacaaaccatcgcaacgcaacagcaacaacagtttctgccatcactgagccacctagccgtggtgaaccctgtcgcctacttgcaacagcagctacttgcatccaacccacttgctctggcgaacgtagctgcataccagcaacaac

SEQ ID NO: 345203 - DNA, 426 bp, Zea mays
agaaacacaccaagcgaagctacctagcaacgtcttaacaacaatggctaccaagatattagccctccttgcgcttcttgccctttttgtgagcgcaacaaatgcgttcattattccacaatgctcacttgctcctagtgccattataccacagttcctccgaccagttacttcaatgggcttcgaacacctagctgtgcaagcctacaggctacaacaagcgcttgcggcgagcgtcttacaacaaccaattaaccaattgcaacaacaatccttggcacatctaaccatacaaaccatcgcaacacaacagcaacaacagttcctaccagcactgagccaactagatgtggtgaaccctgtcgcctacttgcaacagcaggtgcttgcatccaacccacttgctctggcaaacgtagctgcata

SEQ ID NO: 345204 - DNA, 392 bp, Zea mays
cagaaacacaccaagcgaagcgcactagcaacattctaacaacaatggctaccaagatattagccctccttgcgcttcttgcccttttagtgagcgcaacaaatgcgttcattattccacagtgctcacttgctcctagtgccattattccacagttcctcccaccagttacttcaatgggcttcgaacatccagccgtgcaagcctacaggctacaactagcgcttgcggcgagcgtcttacaacaaccaattgcccaattgcaacaacaatccttggcacatctaaacctacaaaccatcgcaacgcaacagcaacaacagtttctgccatcactgagccacctagccgtggtgaaccctgtcgcctacttgcaacagcagctacttgca

SEQ ID NO: 345205 - DNA, 319 bp, Zea mays
attttgagcattcagaaacacaccaagcgtttctcactagcaacaacctaacaacaatggctaccaagatattatccctccttgcgcttcttgcgctttttgcgagcgcaacaaatgcgtccattattccacaatgctcacttgctcctagttccattattccacagttcctcccaccagattcttcaatggccttcgaacacccagctgtgcaagcctataggctacaacaagcgattgcggcgagcgttttacaacaaccaattgcccaattgcaacaacaatttctggcacatctaacaatacaaaccattgcaac

SEQ ID NO: 345206 - DNA, 420 bp, Zea mays
ggtatgtgaaaacccaattcttcaaccctacattatccaacaggcaatcgcagctggcatcttacctttatcacccttgttcctccaacaatcatcagccctattacagcagttacctttggtgcatttattggcacaaaacatcagggcacaacaactacaacaacttgtgctagcaaaccttgctgcctactctcagcaacagcagtttcttccattcaaccaactagctgcattgaactctgcttcttatttgcaacaacaacaactaccattcagccagctatctgctgcctacccccagcaatttcttccattcaaccaactgacagcattgaactcttctgcttatttacagcagcaacaactactaccattcagccagctagctggtgtgagccctgctaccttcttgacaca

SEQ ID NO: 345207 - DNA, 420 bp, Zea mays
gtttcttgtacacagacaggcggctgcagctgtggtcaacaacaaagccatgagcagcaacatcatccacaacaacatcatccacaaaaacaacaacatcaaccaccaccacaacatcaccagctgcagcaactcgtgctacctgtgatcaaccaagtagctctggcaaacctttctccctactctccgcaacaacaatttcttccattcaaccaactgtctacactgaaccctgctgcttatttgcagcaacaactattaccatttagccagctagctactgcctactctcaacaacaacaactttttccatttaaccaattggccgcactgaaccccgctgcttatttgcagcagcaaatactactaccatttaaccagctagctacagcaagccgttgcttcttcttgacacaacaa

SEQ ID NO: 345208 - DNA, 436 bp, Zea mays
cggacgcgtgggtagcaacatagaaagcacaatagtgtaccaacaatggcagccaaaatattttgcctccttatgctccttggtctttctgcaagtgctgctacggcgaccattttcccgaaatgctcgcaagctcctatagcttcccttcttcccccgtacctctcaccagcggtgtcttcggtatgtgaaaacccaattcttcaaccctacaggatccaacaggcaatcacagctggcatcttacctttatcacccttgttcctccaacaatcatcagccctattacatcagttacctttggtgcatttattggcacaaaacatcagggcacaacaactacaacaacttgtgctagcaaaccttgctgcctactctcagcaacagcagtttcttccattcaaccaactagctgcattgaactctgcttcttatt

SEQ ID NO: 345209 - DNA, 436 bp, Zea mays
attttgagcattcagaaacacaccaagcgaagcgcactatcaacaacctaacaacaatggctaccaagatattatccctccttgcgcttcttgcgctttttgcgagcgcaacaaatgcgtccattattccacaatgctcacttgctcctagttccattattccacagttcctcccaccagttacttcaatggccttcgaacacccagctgtgcaagcctataggctacaacaagcgattgcggcgagcgttttacaacaaccaattgcccaattgcaacaacaattcttgtcacatctaacaatacaaaccatcgcaacgcaacagcaacaacagttcctaccagcactgagccacctagccatggtgaaccctgtcgcctacttgcaacaagagcttgtttgcatccaacccacttgctctagcaaacgtagttg

SEQ ID NO: 345210 - DNA, 451 bp, Zea mays
caacaagcaacatagaaagtggaatccagtagcaacaatagagcaacaatggcgaccaagatattttccctccttatgctccttgctctttctgcatgtgttgctaacgcgacaattttccctcaatgctcacaagctcctatagcttcccttcttcccccataccttccatcaatgatagcttcagtatgtgaaaacccagctcttcaaccctataggctccaacaagcaatcgcagcaagcaacatacctttatcacccttgtttcaacaatcgccagccctatctttggtgcagtcattggtacaaaccatcagggcacagcagctgcagcaactcgtgctacctgtgatcaaccaagtagctctggcaaacctttctccctactctcagcaacaacaatttttttccattcaaccaactgtctacattgaaccgtgctgcttatttg

SEQ ID NO: 345211 - DNA, 434 bp, Zea mays
cagcattcagaaacacaccaagcgaagcgcactagcaacaacctaacaacaatggctaccaagatattagccctccttgcgcttcttgcccttttagtgagcgcaacaaatgcgttcattattccacagtgctcacttgctcctagtgccattattccacagttcctcccaccagttacttcaatgggcttcgaacatccagccgtgcaagcctacaggctacaactagcgcttgcggcgagcgtcttacaacaaccaattgcccaattgcaacaacaatccttggcacatctaaacctacaaaccatcgcaacgcaacagcaacaacagtttctgccatcactgagccacctagccgtggtgaaccctgtcgcctacttgcaacagcagctacttgcatccaacccacttgctctggcgaacgtagctgcata

SEQ ID NO: 345212 - DNA, 426 bp, Zea mays
gcattcagaaacacaccaagcgaagcgcactattatcatcctaacaacaatggctaccaagatattatccctccttgcgcttcttgcgctttttgcgagcgcaacaaatgcgtccattattccacaatgctcacttgctcctagttccattattccacagttcctcccaccagttacttcaatggccttcgaacacccagctgtgcaagcctataggctacaacaagcgattgcggcgagcgtcttacaacaaccaattgcccaattgcaacaacaattcttggcacatctaacaatacaaaccatttcaacgcaacagcaacaacagttcctaccagcactgagccacctagccatggtgaaccctgtcgcctacttgcaacagcagctgcttgcatccaacccacttgctttagcaaacgtagt

SEQ ID NO: 345213 - DNA, 442 bp, Zea mays
gcattcagaaacacaccaagcgaagcgcactatcaacaacctaacaacaatggctaccaagagattagccctccttgcgcttcttgcccttttagtgagcgcaacaaatgcgttcattattccacagtgctcacttgctcctagtgccattattccacagttcctcccaccagttacttcaatgggcttcgaacatccagccgtgcaagcctacaggctacaactagcgcttgcggcgagcgtcttacaacaaccaattgcccaattgcaacaacaatccttggcacatctaaacctacaaaccatcgcaacgcaacagcaacaacagtttctgccatcactgagccacctagccgtggtgaaccctgtcgcctacttgcaacagcagctacttgcatccaacccacttgctctggcgaacgtagctgcataccagcaacaa

SEQ ID NO: 345214 - DNA, 380 bp, Zea mays
gaccgaccgaattcggcacgccacgcttcggcacaagaaagcacctagcgtaccaacattggcagacaaaatcttcagcctctttatggttcttgttctttctggaggtgctggtgctgtgagcatgcgcaacaaatgctcgcatgattctatagcgctcatttgttcctagttccattaaccaacagtgtcttcgacctgtgactacaaaggtcttcaaacatacaggtgtgaacgggtattggctgcagcaagcgaacgttgatagcgcttgacaataacacattgatcagtcgtatcacatcagctagctacgtgtgcatttatagaccatagcatgaggcagcaacaactgctacaactagcgctgggacacctag

SEQ ID NO: 345215 - DNA, 274 bp, Zea mays
ccacaacaactgcaacaacttgtgctagcaatccttgctgcatactctcagcaacatcagtttttttcattcaaccaactggctgtattgaactctgctgcttatctgcaacaacaattaccatacaggcagctagtggctgcctacccccagcaatcttttccattcaaccaactagcagcattgaactctgctgcttatttacagcagcaacaactactaccattcagtcaggtagctgatgtgagccctgctggcttcatgacacaacaac

SEQ ID NO: 345216 - DNA, 432 bp, Zea mays
caacatagaaagcacaatagtgtaccaacaatggcagctaaaatattttgcctccttatgctccttggtctttctgcaagtgctgctacggcgaccattttcccacaatgctcacaagctcctatagcttcccttcttcccccgtacctctcaccaacggtgtcttcggtatgtgaaaacccaattcttcaaccctacaggatccaacaggcaatcgcagctggcatcttacctttatcacccttgttcctccaacaatcatcagccctattacagcagttacctttggtgcatttattggcacaaaacatcagggcacaacaactacaacaacttgtgctagcaaaccttgctgcctactttaagcacagcagttttttccattcaaccaactagctgcattgaactctgctttttatttgcaacaacaac

SEQ ID NO: 345217 - DNA, 443 bp, Zea mays
ccaagcgaagcgcactagcaacgacctaacaacaatggctaccaagatattagccctccttgcgcttcttgccctttttgtgagcgcaacaaatgcgttcattattccacaatgctcacttgctcctagtgccattattccacagttcctcccaccagttacttcaatgggcttcgaacacctagctgtgcaagccaacatgcaacaacaagcgcttgcggcgagcgtcttacaacaaccaattgcccaattgcaacaacaatccttgccacatctaacaatacaagccatcacaacgcaacagcaacaacagtttctaccagcactgagccacctagccatggtgaaccctgccgtctacttgcaagagcagctgcttgcattcaacccacttgctctggcgaacgtagttgcaaccagcaacaacaacagcttcaacagtt

SEQ ID NO: 345218 - DNA, 437 bp, Zea mays
cagttcctcccaccagttacttcaatgttcttttaacacccagctgtgcaagcctataggctacaacaagcgattgcggcgagcgtcttacaacaaccaattgcccaattgcaacaacaatccttggcacatctaacaatacaaaccatcgcaacgcaacagcaacaacagttcctaccagcactgagccacctagccatggtgaaccctgtcgcctacttgcaacagcagctgcttgcatccaacccacttgctctagcaaacgtagttgcaaaccagcaacaacaacaactgcaacagtttctgccagcgcttagtcaactagccatggtgaaccctgccgcctacctacaacagcaacaactgctttcatctagcccgctcgctgtggccaatgcacctacatacctgcaacaagaattgttgcaacagattgt

SEQ ID NO: 345219 - DNA, 436 bp, Zea mays
caactagcaacatagaaagcacaatagtgtaccaacaatggcagccaaaatattttgcctccttatgctccttggtctttctgcaagtgctgctacggcgaccattttcccacaatgctcacaagctcctatagcttcccttcttcccccgtacctctcaccagcggtgtcttcggtatgtgaaaacccaattcttcaaccctataggatccaacaggcaatcgcagctggcatcttacctttatcacccttgttcctccaacaatcatcagccctattacagcagttacctttggtgcatttattggcacaaaacatcagggcacaacaactacaacaacttgtgctagcaaaccttgctgcctactttcagcaacaacagtttctttcattcaaccaactagctggattgaactctgcttcttaattgcaacaa

SEQ ID NO: 345220 - DNA, 437 bp, Zea mays
ctccgtctcggcctccccctccactccccgccttcgaacatccggcgccatccgcacccccgcaccccaactcccctcgtccttcacggtcgcgatggtggtgtccatggcgtcgccttaggggcgatcgatctaggagaaagtgctggagcacgtggcgtcgtaccaccagcaacaacggaggcagaagctacgcaagagcctcacctacaccggcggcgagctctcgttcgctgttcggggccatggggacgacctcgtcttcacgttcgtcggggcatagaaggaggacatgcctcttgagcacgtcttcaaaatcattagttatttcatcttgcaacagatccgatggcaaaagtgtgtgtttatggttcctgagtcagatgatctttttttaagttttagatgtgatagatattagtatgaaagataaaaac

SEQ ID NO: 345221 - DNA, 437 bp, Zea mays
gcattcagaaacacaccaagcgaagcgcactagtaacaacctaacaacaatggctaccaagatattagccctccttgcgcttcttgcccttttagtgagcgcaacaaatgcgttcattattccacagtgctcacttgctcctagtgccattattccacagttcctcccaccagttacttcaatgggcttcgaacatccagccgtgcaagcctacaggctacaactagcgcttgcggcgagcgtcttacaacaaccaattgcccaattgcaacaacaatccttggcacatctaaacctacaaaccatcgcaacgcaacagcaacaacagtttctgccatcactgagccacctagccgtggtgaaccctgtcgcctacttgcaacagcagctacttgcatccaacccacttgctctggcgaacgtagctgcataccagc

SEQ ID NO: 345222 - DNA, 195 bp, Zea mays
gagcattcagaaacacaccaagcgaagttcactatgcaacgacctaacaacaatggctaccaagatattagccctccttgcgcttcttgccctttttgtgagcgcaacaaatgcgttcattattccacaatgctcacttgctcctagtgccattatttcacagatccttccaccagtttctttaatgggctttga

SEQ ID NO: 345223 - DNA, 325 bp, Zea mays
attgagaccaactagcaacatagaaagcacaatagtgttccaacaatggcagccaaaatattttgcctccttatgctccttggtctttctgcaagtgctgctacggcgaccattttcccacaatgctcacaagctcctatagcttcccttcttcccccgtacctctcaccagcggtgtcttcggtatgtgaaaacccaattcttcaaccctataggatccaacaggcaatcgcagctggcatcttacctttatcacccttgttcctccaacaatcatcagccctataacagcagttacccttggtgcatttattggcacaaaata

SEQ ID NO: 345224 - DNA, 434 bp, Zea mays
caccaagcgaagcgcactagcaacaacctaacatcaatggctaccaagatattagccctccgggcgcttcttgcccttttagtgagcgcaacaaatgcgttcattattccacagtgctcacttgctcctagtgccattattccacagttcctcccaccagttacttcaatgggcttcgaacatccagccgtgcaagcctacaggctacaactagcgcttgcggcgagcgtcttacaacaaccaattgcccaattgcaacaacaatccttggcacatctaaacctacaaaccatcgcaacgcaacagcaacaacagtttctgccatcactgagccacctagccgtggtgaaccctgtcgcctacttgcaacagcagctacttgcatccaacccacttgcttctgcgaacgtagctgcataccagcaacaacaacg

SEQ ID NO: 345225 - DNA, 254 bp, Zea mays
ctcatccgaattcccaggcaggcaggtcggcgtggagggcaggaagaccgaagaccgagccgtgcgggggctcgggacgggaacgggacaggaccccaaaatctcagatccttcctgcccgcccgcccgtgcccgttgacgcgtctttctttccggtctgtccctaccttttttcttttcttttttaggtggatcgtttacgccacatgctgtgcgatggtgtttttggtttttgattactgattccttaattt

SEQ ID NO: 345226 - DNA, 229 bp, Zea mays
aatacatacacatcgatgccttccagtttacctgtacgcaacatgttcgcgtaattcccgccgagtgtgagctcttgcatgagcactcgcgaaccacatgtggcgcttgtttgctgtgcaagtgcaagtgagtgcagtgaccggctctcgctcgttcttaatcattgtacccgtttcgctggtctcaaaaaataaaaaaaaattattatattattatttatataaatat

SEQ ID NO: 345227 - DNA, 444 bp, Zea mays
attttgagcattcagaaacacaccaagcgaagcacattttcaacaacctaacaacaatggctaccaagatattatccctccttgcgcttcttgcgctttttgcgagcgcaacaaatgcgttcattattccacaatgctcacttgctccaagttccattattacacagttcctcccaccagttacttcaatgggcttcgaacacccagctgtgcaagcctataggctacaacaagcaattgcggcgagcgtcttacaacaaccaatttcccagttgcaacaacaatccttggcacatctaacaatacaaaccatcgcaacgcaacagcaacaacaattcctaccagcactgagccacctagccatggtgaaccctgccgcctacttgcaacagcagttgcttgcattaaactcacttgctctggcaaacgtagttgaaaaccagc

SEQ ID NO: 345228 - DNA, 382 bp, Zea mays
  unsure (1)..(382): unsure at all n locations
gcaacatagaaagcacaatagtgtaccaacaatggcagccaaaatattttgcctccttatgctcctgggtctttctgcaagtgctgctacggcgaccattttcccgaaatgctcgcaagctcctatagcttcccttcttcccccgtacctctcaccagcggtgtcttcggtatgtgaaaacccaattcttcaaccctacaggatccaacaggcaatcacagctggcatcttacctttatcacccttgntcctccaacaatcatcagccctattacatcagttacctttggtgcatttattggcacaaaacattagggcacaacaactacaacaacttgtgctagcaaaccttgctgcctactttcagcaacaagcagtttct

SEQ ID NO: 345229 - DNA, 328 bp, Zea mays
caattagctcatcgactccagattggagaacttgacaccatgaaggtgctgatcgttgcccttgctctcctggcgctcgctgcgagcgccgcctccagtacaagcggcggctgtggctgccagacaccaccgtttcatctaccgcctccgttctatatgccgcctccgttctatctgccgccgcagcagcagccgcagccatggcaataccccactcaaccaccgcagctaagcccgtgccagcagttcggatcctgcggcgtcggcagcgtcggcagcccgttcctgggccagtgcgtcgagttcctgaggcaccagtgcagcccgg

SEQ ID NO: 345230 - DNA, 444 bp, Zea mays
cagaaacacaccaagcgaagcgcactatcaacaacctaacaacaatggctaccaagatattatccctccttgcgcttcttgcgctttttgcgagcgcaacaaatgcgtccattattccacaatgctcacttgctcctagttccattattccacagttcctcccaccagttacttcaatggccttcgaacacccagctgtgcaagcctataggctacaacaagcgattgcggcgagcgtcttacaacaaccaattgcccaattgcaacaacaatccttggcacatctaacaatacaaaccatcgcaacgcaacagcaacaacagttcctaccagcactgagccacctagccatggtgaaccctgtcgcctacttgcaacagcagctgcttgcattcaacccacttgctctagcaaacgtagttgcaaaccagcaacaacaacaac

SEQ ID NO: 345231 - DNA, 385 bp, Zea mays
ctccttgctctttctgcatgtgttgcttacgctacaattttccctcaatgctcacaagctcctatagcttcccttcttcccccataccttccatcaatgatagcttcagtatgtgaaaacccagctcttcaaccctataggctccaacaagcaatcgcagcaagcaacatacctttatcacccttgattcaacaatcgccagccctatctttggtgcagtcattggtacaaaccatcagggcacagcagctgcagcaactcgtgctacctgtgatcaaccaagtagctttggcaaaccttttttcctactcttagtaacaacaatttttttcttccaaccaactgtctacattgaaccgtgccgtttatttgcttcaacaacttt

SEQ ID NO: 345232 - DNA, 405 bp, Zea mays
cccacgcgtccgtttgcctccttatgctccttggtctttctgcaagtgctgctacggcgaccatttgcccgaaatgctcgcaagctcctatagcttcccttcttcccccgtacctctcaccagcggtgtcttcggtatgtgaaaacccaattcttcaaccctacaggatccaacaggcaatcacagctggcatcttacctttatcacccttgttcctccaacaatcatcagccctattacatcagttacctttggtgcatttattggcacaaaacatcagggcacaacaactacaacaacttgtgctagcaaaccttgctgcctactctcagcaacagcagtttcttccattcaaccaactagctgcattgaactctgcttcttatttgcaacaacaacaactac

SEQ ID NO: 345233 - DNA, 435 bp, Zea mays
agaaagcacaatagtgtaccaacaatggcagccaaaatattttgcttccttatgctccttggtctttctgcaagtgttgctaccgcaaccattttcccacaatgctcacaagctcctatagcttcccttcttcccccatacctctcaccagcggtgtcttcaatgtgtgaaaacccaattgttcaaccctacaggatccaacaggcaatcgcaacaggcatcttaccattatcacccttgttcctccaacaaccgtcagccctattacagcagttacctttggtccatttggtggcacaaaacatcagggcacaacaactacaacaacttgtgctagcaaaccttgctgcatactctcagcaacatcagtttcttccattcaaccaactggctgcattgaactctgctgcttatttgcaacaacaattaccattc

SEQ ID NO: 345234 - DNA, 72 bp, Zea mays
  unsure (1)..(72): unsure at all n locations
gtaagacgacacacattattacatatattgatagagagggatggatngnggagattgggcaatttttattaa

SEQ ID NO: 345235 - DNA, 323 bp, Zea mays
agaccaactagcaacatagaaagcacatttgttttccaacaatggcagccaaaatattgggccttcttatgctccttggtctttctgcaagtgctgctacggcgaccattttcccgcaatgctcgcaagctcctatagcttcccttcttcccccgtacctctcaccagcggtgtcttcggtatgtgaaaacccaatttcttaaccctacaggatccaacaggcaatctgcagctggcatcttacctttatcacccttgttccttcaacaattcataacccttataccaacaggtacctttggtgcatttattggcacaaaaac

SEQ ID NO: 345236 - DNA, 442 bp, Zea mays
attttgagcattcagaaacacaccaagcgaagcacattatcaacaacctaacaacaatggctaccaagatattatccctccttgcgcttcttgcgctttttgcgagcgcaacaaatgcgttcattattccacaatgctcacttgctccaagttccattattacacagttcctcccaccagttacttcaatgggcttcgaacacccagctgtgcaagcctataggctacaacaagcaattgcggcgagcgtcttacaacaaccaatttcccagttgcaacaacaatccttggcacatctaacaatacaaaccatcgcaacgcaacagcaacaacaattcctaccagcactgagccacctagccatggtgaaccctgccgcctacttgcaacagcagttgcttgcatcaaacccacttgctctggcaaacgtagttgcaaacca

SEQ ID NO: 345237 - DNA, 428 bp, Zea mays
  unsure (1)..(428): unsure at all n locations
ccgcaacaacaatttcttccattcaaccaactgtctacactgaaccctgctgcttatttgcagcaacaactattaccatttagccaacaagcaacatagaaagtggaatccagtagcaacaatagagcaacaatggagaccaagatattttccctccttatgctccttgctctttctacatgtgttgctaacgcgacaattttccctcaatgctcacaagctcctatagcttccctttttcccccataccttccatcaattatagcttcagtatgtgaaaacccagctcttcaaccatataggcttcaacaagcaatcgcagcaagcaacatacctttatcgcccttgttgtgtcaacaatcggcagccctatctttggtgcagtcattggtacanaccatcagggcacaacagctgcagcaactcgt

SEQ ID NO: 345238 - DNA, 387 bp, Zea mays
gcacaacaactacaacaactcgtgctagcaaactttgttgcctactctcagcaacagcagtgggcgcttgggtgcatttgttggcacaaaacatcatggcacaacatctacaacaactcgtgctagcaaaccttgctgcctacttttagcaacaacagtttctgtcattcaaccaactagctgcattgaactctgctgcttatttgcagcaacaacaactactaccattcagccagctagctgctgtctacccccggcaattttttccattcaaccaactggcagcattgaactctttatgcttatgtacaacaacaacaactactaccatttagtcatgttagctgttgtgagccctgctgtctttttgacacagtatcatttgtt

SEQ ID NO: 345239 - DNA, 363 bp, Zea mays
agcggcagtgcgtagagaggatcgtcgaacagttcatcatgaagatggtcatcgttctcgtcgtgtgcctggctctgtcagctgccagcgcctctgcaatgcagatgccctgcccctgcgcggggctgcagggcttgtacggcgctggcgccggcctgacgacgatgatgggcgccggcgggctgtacccctacgcggagtacctgaggcagccgcagtgcagcccgctggcggcggcgccctactacgccgggtgtgggcagacgagcgccatgtaccagccgctccggcaacagtgctgccagcagcagatgaggatgatggacgtgcagtccgtcgcgcagcagctgcagatgatgatgc

SEQ ID NO: 345240 - DNA, 240 bp, Zea mays
atccaatccagatcagcaaagcggcagtgcgtttagaggatcgtcgaacagaacagcatgaagatggtcatcgttctcgtcgtgtgcctggctctgtcagctgccagcgcctctgcaatgcagatgccctgcccctgcgcggggctgcagggcttgtacggcgctggcgccggcctgacgacgatgatgggcgccggcgggctgtacccttacgcggagtaccttgggcagtcttagtgc

SEQ ID NO: 345241 - DNA, 327 bp, Zea mays
attattgagaccaactagcaacatagaaagcacaatagtgtaccaacaatggcagccaaaagattttgcttccttatgctccttggtctttctgcaagtgttgctaccgcaaccattttcccacaatgctcacaagctcctatagcttcccttcttcccccatacctctcaccagcggtgtcttcaatgtgtgaaaacccaattgttcaaccctacaggatccaacaggcaatcgcaacaggcattttaccattatcacccttgttcctccaacaaccgtcagccctattacagcagttacctttggtccatttgggggccaaaaca

SEQ ID NO: 345242 - DNA, 391 bp, Zea mays
  unsure (1)..(391): unsure at all n locations
aaagttctctctctccgtatctcgcttcgccaccgccggcgagaggtagggtttcgtgcgccaccgtcacttacgcccgccatggccgagacctccacgtatcagattctggtgcgtctcctcgacgggcgtaccagatgtctccgcttctccacgcccaccgtttccggcgccgtgctcctcgacgccgtcgcgtcgatctatcgcgttcccgncgacgctctccgcctcgtcaccggcggcatcgacgtatctgcctcttacgtcctcgccgcagcagctgatggccagttcccctactcgtcagcgctccttcgccttcgaggaagccggcgaccgccagctagaaaagctcgccgagaacttcattaaaaagaaggccaaggaagcg

SEQ ID NO: 345243 - DNA, 406 bp, Zea mays
gctcctagtgccattattccacagttcctcccttcagttacttcaatgggcttcgaacatccagccgtgcaagcctacaggctacaactagcgcttgcggcgagcgtcttacaacaaccaattgcccaattgcaacaacaatccttggcacatctaaacctacaaaccatcgcaacgcaacagcaacaacagtttctgccatcactgagccacctagccgtggtgaaccctgtcgcctacttgcaacagcagctacttgcattcaacccacttgctctggcgaacgtagctgcataccagcaacaacaacgtctgcaacagtttatgccagcgctcagtcaactagccatggtgaaccctgtcgcctacctacaacagcaacaattgcttttatttagcccgctcg

SEQ ID NO: 345244 - DNA, 432 bp, Zea mays
tgagcattcagaaacacaccaagcgaagcgcactagcaacgacctaacaacaatggctaccgagatattagccctccttgcgcttcttgccctttttgtgagcgcaacaaatgcgttcattattccacaatgctcacttgctcctagtgccattattccacagttcctcccaccagttacttcaatgggcttcgaacacctagctgtgcaagccaacatgcaacaacaagcgcttgcggcgagcgtcttacaacaaccaattgcccaattgcaacaacaatccttgccacatctaacaatacaagccatcacaacgcaacagcaacaacagttcctaccagcactgagccacctagccatggtgaaccctgccgcctacttgcaagagcagctgcttgcatccaacccacttgctctggcgaacgtagttgc

SEQ ID NO: 345245 - DNA, 434 bp, Zea mays
gcaacatagaaagcacaatagtgtaccaacaatggcagccaaaatattttgcctccttatgctccttggtctttctgcaagtgctgctacggcgaccattttcccgcaatgctcgcaagctcctatagcttcccttcttcccccgtacctctcaccagcggtgtcttcggtatgtgaaaacccaattcttcaaccctacaggatccaacaggcaatcgcagctggcatcttacctttatcacccttgttcctccaacaatcatcagccctattacaacagttacctttggtgcatttattggcacaaaacatcagggcacaacaactacaacaacttgtgctagcaaaccttgctgcctactctcagcaacagcagtttcttccattcaaccaactaggttcattgaactctgcttcttatttgcaacaacaac

SEQ ID NO: 345246 - DNA, 232 bp, Zea mays
cagatcagcaaagcggcagtgcgtagagaggatcgtcgtacagaacagcatgaagatggtcatcgttctcgtcgtgtgcctggctctgtcagctgccagcgcctctgcaatgcagatgccctgcccctgcgcggggctgcagggcttgtacggcgctggcgccggcctgacgacgatgatgggcgccggcgggctgtacccctacgcggagtacctgaggcagtcttagtgc

SEQ ID NO: 345247 - DNA, 445 bp, Zea mays
cagcattcagaaacacaccaagcgaagcgcactagcatcaacctaacaacaatggctaccaagatattagccctccttgcgcttcttgcccttttagtgagcgcaacaaatgcgttcattattccacagtgctcacttgctcctagtgccattattccacagttcctcccaccagttacttcaatgggcttcgaacatccagccgtgcaagcctacaggctacaactagcgcttgcggcgagcgtcttacaacaaccaattgcccaattgcaacaacaatccttggcacatctaaacctacaaaccatcgcaacgcaacagcaacaacagttttctgccatcactgagccacctagccgtggggaaccctgtcggctacttgcaacagcagctacttgcatccaacccacttgctcttgccgaacgtagctgcataccagcaaca

SEQ ID NO: 345248 - DNA, 57 bp, Zea mays
gaccattagctttatctactccagagcgcagattaaccttatcgacaccatgagggt

SEQ ID NO: 345249 - DNA, 411 bp, Zea mays
gcaacatagaaagcacaatagtgtaccaacaatttcagccaaaatattttgcctccttatgctccttggtctttctgcaagtgctgctacggcgaccattttcccgaaatgctcgcaagctcctatagcttcccttcttcccccgtacctctcaccagcggtgtcttcggtatgtgaaaacccaattcttcaaccctacaggatccaacaggcaatcacagctggcatcttacctttatcacccttgttcctccaacaatcatcagccctattacatcagttacctttggtgcatttattggcacaaaacatcagggcacaacaactacaacaacttgtgctagcaaaccttgctgcctactcttagcaacagcagttttttccattcaaccaactagctgcattgaactc

SEQ ID NO: 345250 - DNA, 401 bp, Zea mays
gcacaatagtgtaccaacaatggcagccaaaatattttgcttccttatgctccttggtctttctgcaagtgctgctaccgcaaccattttcccacaatgctcacaagctcctatagcttcctttcttcccccatacctctcaccagcggtgtcttcagtatgtgaaaacccaattcttcaaccctacaggatccaacaggcaatcgcagcaggcatcttacctttatcacccttgttcctccaacaaccgtcagccctattacagcagttacctttggtgcatttgttggcacaaaacatcaaggtacaacaactacaacaacttgtgctaggaaaccttgctgcctactcttaacacagcagtttctttcattcaaccaactggctgcattgaactctgc

SEQ ID NO: 345251 - DNA, 132 bp, Zea mays
caacaattgctgccatttagccaacttgctttgacgaatcctaccaccttattacagcagcccaccattggtggtgccatcttctagatttttttatgctttatactgtaataataaagttctcatactgat

SEQ ID NO: 345252 - DNA, 418 bp, Zea mays
aaagtggaatccagtagcaacaatagagcaacattggcgaccaagatattttccctccttatgctccttgctctttctgcatgtgttgctaacgcgacaattttccctcaatgctcacaagctcctatagcttcccttcttcccccataccttccatcaatgatagcttcagtatgtgaaaacccagctcttcaaccctataggctccaacaagcaatcgcagcaagcaacatacctttatcacccttgtttcaacaatcgccagccctatctttggtgcagtcattggtacaaaccatcagggcacagcagctgcagcaactcgtgctacctgtgatcaaccaagtagctctggcaaacctttctccctactctcagcaacaacaatttcttccattcaaccaactgtctacattga

SEQ ID NO: 345253 - DNA, 426 bp, Zea mays
attgagaccaactagcaacatagaaagcacaatagtgtaccaacaatggcagccaaaatattttgcttccttatgctccttggtctttctgcaagtgttgctaccgcaaccattttcccacaatgctcacaagctcctatagcttcccttcttcccccatacctctcaccagcggtgtcttcaatgtgtgaaaacccaattgttcaaccctacaggatccaacaggcaatcgcaacaggcatcttaccattatcacccttgttcctccaacaaccgtcagccctattacagcagttacctttggtccatttggtggcacaaaacatcagggcacaacaactacaacaacttgtgctagcaaaccttgctgcatactctcagcaacatcagtttctttcattcaaccaactggctgcattgaactct

SEQ ID NO: 345254 - DNA, 428 bp, Zea mays
  unsure (1)..(428): unsure at all n locations
ggtcttcagaccattagctttatctactccagagcgcataagaacccgatcgacaccatgagggtgttgctcgttgccctcgctctcctggctctcgctgcgagcgccacctccacgcatacaagcggcggctgcggctgccagccaccgccgccggttcatctaccgccgccggtgcatctgccacctccggttcacctgccacctccggtgcatctcccaccgccggtccacctgccgccgccggtccacctgccaccgncggtccatgtgccgccgccggttcatctgccgccgccaccatgccactaccctactcaaccgccccggcctcagcctcatccccagccacacccatgcccgggccaacaggcgcattcaagcccgggccagctgcagggaaacctgcggcgttggcagcacccccg

SEQ ID NO: 345255 - DNA, 412 bp, Zea mays
actggacgtcagcctagcaattagctcatcgactccagattggagaactcgacaccatgaaggtgctgatcgttgcccttgctctcctggcgctcgctgcgagcgccgcctccagtacaagcggcggctgtggctgccagacaccaccgtttcatctaccgcctccgttctatatgccgcctccgttctatctgccgccgcagcagcagccgcagccatggcaataccccactcaaccaccgcagctaagcccgtgccagcagttcggatcctgcggcgtcggcagcgtcggcagcccgttcctgggccagtgcgtcgagttcctgaggcaccagtgcagcccggcggcgacgccctacggctcgccacagtgccaggcgctgcagcagcagtgctgccaccagatcaggca

SEQ ID NO: 345256 - DNA, 407 bp, Zea mays
agcggcagtgcgtagagaggatcgtcgaacagaacagtttgaagatggtcatcgttctcgtcgtgtgcctggctctgtcagctgccagcgcctctgcaatgcagatgccctgcccctgcgcggggctgcagggcttgtacggcgctggcgccggcctgacgacgatgatgggcgccggcgggctgtacccctacgcggagtacctgaggcagccgcagtgcagcccgctggcggcggcgccctactacgccgggtgtgggcagacgagcgccatgtaccagccgctccggcaacagtgctgccagcagcagatgaggatgatggacgtgcagtccgtcgcgcagcagctgcagatgatgatgccatcttgagcgtgccgctgccgccagcagcagtctgtacgagcc

SEQ ID NO: 345257 - DNA, 430 bp, Zea mays
aactagcaacatagaaagcacaatagtgtaccatcattgtcagccaaaatattttgcctccttatgctccttggtctttctgcaagtgctgctacggcgaccattttcccgaaatgctcgcaagctcctatagcttcccttcttcccccgtacctctcaccagcggtgtcttcggtatgtgaaaacccaattcttcaaccctacaggatccaacaggcaatcacagctggcatcttacctttatcacccttgttccttcaacaatcatcagccctattacatcagttacctttggtgcatttattggcacaaaacattagggcacaacaactacaacaacttgtgctagcaaaccttgctggctactttcagcaacagcattttcttccattcaaccaactagctgcatttgactcttgttcttattttg

SEQ ID NO: 345258 - DNA, 433 bp, Zea mays
attttcagcattcagaaacacaccaagctaagttcactagcaacaacctaacaacaatggctaccaagatattagccctccttgcgcttcttgcccttttagtgagcgcaacaaatgcgttcattattccacagtgctcacttgctcctagtgccattattccacagttcctcccaccagttacttcaatgggcttcgaacatccagccgtgcaagcctacaggctacaactagcgcttgcggcgagcgtcttacaacaaccaattgcccaattgcaacaacaatccttggcacatctaaacctacaaaccatcgcaacgcaacagcaacaacagtttctgccatcactgagccacctagccgtggtgaaccctgtcgcctacttgcaacagcagcttcttgcattcaacccacttgctctggcgaacgtagc

SEQ ID NO: 345259 - DNA, 415 bp, Zea mays
gttgccctcgctctcctggctctcgctgcgagttccacctccacgcatacaagcggcggctgcggctgccagccaccgccgccggttcatctaccgccgccggtgcatctgccacctccggttcacctgccacctccggtgcatctcccaccgccggtccacctgccgccgccggtccacctgccaccgccggtccatgtgccgccgccggttcatctgccgccgccaccatgccactaccctactcaaccgccccggcctcagcctcatccccagccacacccatgcccgtgccaacagccgcatccaagcccgtgccagctgcagggaacctgcggcgttggcagcaccccgatcctgggccagtgcgtcgagtttctgaggcatcagtgcagcccgacggcgacgccctact

SEQ ID NO: 345260 - DNA, 443 bp, Zea mays
accaagcgaagcgcactagcaacaacctaacaacaatggctaccaagatattagccctccttgcgcttcttgcccttttagtgagcgcaacaaatgcgttcattattccacagtgctcacttgctcctagtgccattattccacagttcctcccaccagttacttcaatgggcttcgaacatccagccgtgcaagcctacaggctacaactagcgcttgcggcgagcgtcttacaacaaccaattgcccaattgcaacaacaatccttggcacatctaaacctacaaaccatcgcaacgcaacagcaacaacaagttctgccatcactgagccacctagccgtggtgaaccctgtcgcctacttgcaacagcagctacttgcatccaacccacttgctctggcgaacgtagctgcataccagcaacaacaacgtctgcaacag

SEQ ID NO: 345261 - DNA, 429 bp, Zea mays
agcaacatagaaagcacaatagtgtaccaacaatggcagccaaaatattttgcctccttatgctccttggtctttctgcaagtgctgctacggcgaccattttcccgcaatgctcgcaagctcctatagcttcccttcttcccccgtacctctcaccagcggtgtcttcggtatgtgaaaacccaattcttcaaccctacaggatccaacaggcaatcgcagctggcatcttacctttatcacccttgttcctccaacaatcatcagccctattacaacagttacctttggtgcatttattggcacaaaacatcagggcacaacaactacaacaacttgtgctagcaaaccttgctgcctactctcagcaacagcagtttcttccattcaaccaactaggttcattgaactctgcttcttatttgcaac

SEQ ID NO: 345262 - DNA, 432 bp, Zea mays
caggcaatcgcagctggcatcttacctttatcacccttgttcctccaacaatcatcagccctattacagcagttacctttggtgcatttattggcacaaaacatcagggcacaacaactacaacaacttgtgctagcaaaccttgctgcctactctcagcaacagcagtttcttccattcaaccaactagctgcattgaactctcctgcttatttacagcagcaacaactactaccattcagccagctagctggtgtgagccctgctaccttcttgacacaaccacagttgttgccgttctaccagcacgctgcgcctaacgctggcaccctcttacaactgcaacaattgctgccattcaaccaacttgctttgacaaacctagcagtgttctaccaacaacccataattggtggtgcccctttttagatt

SEQ ID NO: 345263 - DNA, 425 bp, Zea mays
tgggcttcgaacacccagctgtgcaagcctatatgctacaacaagcaattgcggcgagcgtgttacaacaaccaatttcccagttgcaacaacaatccttggcacatctaacaatacaaaccatcgcaacgcaacagcaacaacaattcctaccagcactgagccacctagccatggtgaaccctgccgcctacttgcaacagcagttgcttgcatcaaacccacttgctctggcaaacgtagttgcaaaccagccacaacaacagctgcaacagtttctgccagcgctcagtcaactagccatggtgaaccctgccgcctacctacaacagcaacaactgctttcatctagcccgctcgctgtggccaatgcacctacatacctgcaacaacaatttgtgcaacagattgtaccagctctgact

SEQ ID NO: 345264 - DNA, 434 bp, Zea mays
agcattcagaaacacaccaagcgaagcgcactatcatcaacctaacaacaatggctaccaagatattatccctccttgcgcttcttgcgctttttgcgagcgcaacaaatgcgtccattattccacaatgctcacttgctcctagttccattattccacagttcctcccaccagttacttcaatggccttcgaacacccagctgtgcaagcctataggctacaacaagcgattgcggcgagcgtcttacaacaaccaattgcccaattgcaacaacaatccttggcacatctaacaatacaaaccatcgcaacgcaacagcaacaacagtttctaccagcacttgagccacctagccatggtgaaccctgtcgcctacttgcaacagcagctgcttgcatccaacccacttgctctagcaaacgtagttgcaaa

SEQ ID NO: 345265 - DNA, 436 bp, Zea mays
agcattcagaaacacaccaagcgaagcgcactatcatcaacctaacaacaatggctaccaaggtattatccctccttgcgcttcttgcgctttttgcgagcgcaacaaatgcgtccattattccacaatgctcacttgctcctagttccattattccacagttcctcccaccagttacttcaatggccttcgaacacccagctgtgcaagcctataggctacaacaagcgattgcggcgagcgtcttacaacaaccaattgcccaattgcaacaacaatccttggcacatctaacaatacaaaccatcgcaacgcaacagcaacaacagtttctaccagcactgagccacctagccatggtgaaccctgtcgcctacttgcaacaagtatttgtttgcatccaacccacttgctttagcaaacgtagttgcaaacc

SEQ ID NO: 345266 - DNA, 430 bp, Zea mays
  unsure (1)..(430): unsure at all n locations
gcaacaactactaccattcagccagctagctggtgtgagccctgctaccttcttgatacaaccacagttgttgccgttctaccagcacgctgcgcctaacgctggcaccctcttacaactgcaacaattgctgccattcaaccaacttgctttgacaaacccagcagcgttctaccaacaacccatcattggtggtgccctcttttagatttcttatgagttatagttcaataataaagttttttgtctgatgtttgtggcttcccagaaataagaaagtacatttctaaaaatatataattataattttaattatatttttctttttttttttttttttatatatttttaaaatttcattagtttatctttgtccnttttttcctaaaataattttatttattttggggtttattatttttatatattt

SEQ ID NO: 345267 - DNA, 442 bp, Zea mays
  unsure (1)..(442): unsure at all n locations
cacaatgctcacttgctcctagtgccattattccacagttcctcccaccagttacttcaatgggcttcgaacacctagctgtgcaagccaacatgcaacaacaagcgcttgcggcgagcgtcttacaacaaccaattgcccaattgcaacaacaatccttgccacatctaacaatacaagccatcacaacgcaacagcaacaacagttcctaccagcactgagccacctagccatggtgaaccctgccgcctacttgcaagagcagctgcttgcatccaacccacttgctctggcgaacgtagttgcaaaccagcaacaacaacagctacaacagtttctgccaacgctcagtcaactagccatggtgaaccctgccgcctacgtacaacaacaacaactgctntcatctagcccgctcgctgtgggcaatgcacctacata

SEQ ID NO: 345268 - DNA, 425 bp, Zea mays
cattcagaaacacaccaagcgaagcgcactagcaacaatctaacaacaatggctaccaagatattaggcctccttgcgcttcttgcccttttagtgagcgcaacaaatgcgttcattattccacagtgctcacttgctcctagtgccattattccacagttcctcccaccagttacttcaatgggcttcgaacatccagccgtgcaagcctacaggctacaactagcgcttgcggcgagcgtcttacaacaaccaattgcccaattgcaacaacaatccttggcacatctaaacctacaaaccatcgcaacgcaacagcaacaacagttttctgccatcactgagccacctagccggggtgaaccctggcgcctacttgcaacagcagctacttgcatccaacccacttgctctggcgaacgtag

SEQ ID NO: 345269 - DNA, 361 bp, Zea mays
  unsure (1)..(361): unsure at all n locations
tgggtcttcagaccattagctttatctactccatagcgcagaagaacccgatcgacaccatgagggtgttgctcgttgccctcgctctcctggctctcgctgcgagcgccacctccacgcatacaagcggcggctgcggctgccagccaccgccgccggttcatctaccgccgccggtgcatctgccacctccggttcacctgccacctccggtgcatctcccaccgccggtccacctgccgncgccggtccacctgccaccgccggtccatgtgccgtcgccggttcatctgccgccgccaccaatccactaccctactcaaccgtcccctccttgatcaaggaggccatgaagatggga

SEQ ID NO: 345270 - DNA, 169 bp, Zea mays
tgggtcttcagaccattagctttatctactccagagcgtagaagaacccgatcgacaccatgagggtgttgctcgttgccctcgctctcctggctctcgctgcgagcgccaccttcacgcatacaagcggcggctgtggctgtcagccaccgccgtcggttcatctacc

SEQ ID NO: 345271 - DNA, 397 bp, Zea mays
aagcaacatagaaagtggaatccagtagcaacattagatcaacaatggcgaccaagatattttccctccttatgctccttgctctttctgcatgtgttgctaacgcgacaattttccctcaatgctcacaagctcctatagcttcccttcttcccccataccttccatcaatgatagcttcagtatgtgaaaacccagctcttcaaccctataggctccaacaagcaatcgcagcaagcaacatacctttatcacccttgtttcaacaatcgccagccctatctttggtgcagtcattggtacaaaccatcagggcacagcagctgcagcaactcgtgctacctgtgatcaaccaagtagctcttgcaaacctttctcctacctttagaacaacaat

SEQ ID NO: 345272 - DNA, 427 bp, Zea mays
aagcaacatagaaagtggaatccagtagcaacattagagcaacaatggcgaccaagatattggccctccttatgctccttgctctttctgcatgtgttgctaacgcgacaattttccctcaatgctcacaagctcctatagcttcccttcttcccccataccttccatcaatgatagcttcagtatgtgaaaacccagctcttcaaccctataggctccaacaagcaatcgcagcaagcaacatacctttatcacccttgtttcaacaatcgccagccctatctttggtgcagtcattggtacaaaccatcagggcacaggagctgcagcaactcgtgctacctgtgatcaaccaagtagctctggcaaacctttctccctactctcagcaacaacaatttcttccattcaaccaactgtctacatt

SEQ ID NO: 345273 - DNA, 311 bp, Zea mays
accacgcgtccgatcaatcatcattcatcttagtgttatattcaccaaatcaaatctgcaacatcaattatctaactccaaaaaccatgaagctggtgcttgtggttcttgctttcattgctttagtatcaagtgtttgttgtacacagacaggcggttgcagttgtggtcaacaacaaagccatgagcagcaacattatgcacaacaacattattcacaaaaacaacagcatcaaccaccatcacaacatgacctgttgccgctacaccaacagcaactcgtacacatgcaaccactattacatcagtta

SEQ ID NO: 345274 - DNA, 374 bp, Zea mays
cagaaacacaccaagcgaagctcactagcaacaacctaacaacaatggctaccaagatattatccctccttgcgcttcttgcgctttttgcgagcgcaacaaatgcgtccattattccacaatgctcacttgctcctagttccattattccacagttcctcccaccagttacttcaatggccttcgaacacccagctgtgcaagcctataggctacaacaagcgattgcggcgagcgtcttacaacaaccaattgcccaattgcaacaacaatccttggcacatctaacaatacaaaccatcgcaacgcaacagcaacaacagttcctaccagcactgagccacctagccatggtgaaccctgtcgcctacttg

SEQ ID NO: 345275 - DNA, 356 bp, Zea mays
attgagaccaacaagcaacatagaaagtggaatccagtagcaacaatagagcaacaatggagaccaagatattttccctccttatgctccttgctctttctacatgtgttgctaacgcgacaattttccctcaatgctcacaagctcctatagcttccctttttcccccataccttccatcaattatagcttcagtatgtgaaaacccagctcttcaaccatataggcttcaacaagcaatcgcagcaagcaacatacctttatcgcccttgttgtgtcaacaatcgccagccctatctttggtgcagtcattggtacaaaccatcagggcacaacagctgcagcaactcgtgcta

SEQ ID NO: 345276 - DNA, 416 bp, Zea mays
  unsure (1)..(416): unsure at all n locations
ccggnaacggaacgggccgggctccgacccacgcggtctcattgtctccacagggcatcactatgcatgctcaagccagtaccacacagggcctcccaccagttacttcaatgggcttcgaacatccagccgtgcaagcctacaggctacaactagcgcttgcggcgagcgtcttacaacaaccaattgcccaattgcaacaacaatccttggcacatctaaacctacaaaccatcgcaacgcaacagcaacaacagtttctgccatcactgagccacctagccgtggtgaaccctgtcgcctacttgcaacagcagctacttgcatccaacccacttgctctggcgaacgtagctgcataccagcaacaacaacgtctgcaacagtttatgccagcgctcagtcaactagccatg

SEQ ID NO: 345277 - DNA, 374 bp, Zea mays
  unsure (1)..(374): unsure at all n locations
cccacgcgtccggaaacacaccaagcgaagcgcactagcaacaacctaacaacaatggctaccaagatattagccctccttgcgcttcttgcccttttagtgagcgcaacanatgcgttcattattccacagtgctcacttgctcctagtgccattattccacagttcctcccaccagttacttcaatgggcttcgaacatccagccgtgcaagcctacaggctacaactagcgcttgcggcgagcgtcttacaacaaccaattgcccaattgcaacaacaatccttggcacatctaaacctacaaaccatcgcaacgcaacagcaacaacagtttctgccatcactgagccacctagccgtggtgaaccctgt

SEQ ID NO: 345278 - DNA, 374 bp, Zea mays
gagcattcagaaacacaccaagcgatgcacattagcaacaacctaacaacaatggctaccaagatattatccctccttgcgcttcttgcgctttttgcgagcgcaacaaatgcgttcattattccacaatgctcacttgctccaagttccattattacacagttcctcccaccagttacttcaatgggcttcgaacacccagctgtgcaagcctataggctacaacaagcaattgcggcgagcgtcttacaacaaccaatttcccagttgcaacaacaatccttggcacatctaacaatacaaaccatcgcaacgcaacagcaacaacaattcctaccagcactgagccacctagccatggtgaaccctgccgc

SEQ ID NO: 345279 - DNA, 377 bp, Zea mays
tcgtggacgcgtggggcaacatataatgcacaatagtgtaccaacaatggcagctaaaatattttgcctccttatgctccttggtctttctgcaagtgctgctacggcgaccattttcccacaatgctcacaagctcctatagcttcccttcttcccccgtacctctcaccaacggtgtcttcggtatgtgaaaacccaattcttcaaccctacaggatccaacaggcaatcgcagctggcatcttacctttatcacccttgttcctccaacaatcatcagccctattacagcagttacctttggtgcatttattggcacaaaacatcagggcacaacaactacaacaacttgtgctagcaaaccttgctgcctact

SEQ ID NO: 345280 - DNA, 409 bp, Zea mays
ccggaacggaacggccgggccgacccacgcgtacatacacgcgtccgcaacaagctatcattgaaagtggaatccagtagcaacaatagagcaacaatggcgaccaagatattttccctccttatgctccttgctctttctgcatgtgttgctaacgcgacaattttccctcaatgctcacaagctcctatagcttcccttcttcccccataccttccatcaatgatagcttcagtatgtgaaaacccagctcttcaaccctataggctccaacaagcaatcgcagcaagcaacatacctttatcacccttgtttcaacaatcgccagccctatctttggtgcagtcattggtacaaaccatcagggcacagcagctgcagcaactcgtgctacctgtgatcaaccaag

SEQ ID NO: 345281 - DNA, 370 bp, Zea mays
caacaagcaacatagaaagtggaatacagtagcaacaatagagcaacaatggcggccaagatattttccatccttatgctccttgctctttctgcatgtgttgctaacgcgaccatttttcctcaatactcacaagctcctatagctgcccttcttcccccataccttccatcaatgaccgcttcagtatgtgaaaacccagcccttcaaccctacaggctccaacaagcaatcgcaacaagcaacttacctttatcacccctgttctttcaacaatcgccagccctatctttggtgcagtcattggtacaaaccatcagggcacaacagctgcagcaactcgtgctaccagtgatcagccaagtagctc

SEQ ID NO: 345282 - DNA, 376 bp, Zea mays
gcaacatagaaagcacaatattgtaccaataatggcagccaaaatattttgcctcattatgctccttggtctttctgcaagtgctgctacggcgagcattttcccgcaatgctcacaagctcctatagcttcccttcttcccccatacctctcaccagcgatgtcttcagtatgtgaaaatccaattcttctaccctacaggatccaacaggcaatcgcagcaggcatcttacctttatcacccttgttcctccaacaatcatcagccctattacagcagttacctttggtgcatttattggcacaaaacatcagggcacaacaactacaacaactcgtgctagcaaaccttgctgcctactctcagcaacagcag

SEQ ID NO: 345283 - DNA, 372 bp, Zea mays
aatattttgagcattcagaaacacaccaagcgaagcgcactagcaacgacctaacaacaatggctaccaagatattagccctccttgcgcttcttgccctttttgtgagcgcaacaaatgcgttcattattccacaatgctcacttgctcctagtgccattattccacagttcctcccaccagttacttcaatgggcttcgaacacctagctgtgcaagccaacatgcaacaacaagcgcttgcggcgagcgtcttacaacaaccaattgcccaattgcaacaacaatccttgccacatctaacaatacaagccatcacaacgcaacagcaacaacagttcctaccagcactgagccacctagccatggtga

SEQ ID NO: 345284 - DNA, 82 bp, Zea mays
aaaaaaaaaaaaataaaaaaaaaatttaaaaaaaaaaaaaaaaaaaaaaaaaaagagaaaaattaaaaaaaaaaaaaaaaag

SEQ ID NO: 345285 - DNA, 377 bp, Zea mays
  unsure (1)..(377): unsure at all n locations
cgcacacaccgnccggtccccgatctcctatcccctcgtcgatccaaagatgcagatcttcgtcaagaccctcactggaaagactatcaccctcgaggtggagtcttctgacaccattgacaacgtcaaggccaagatccaggacaaggagggcatccccccggaccagcagcggctcatctttgctggcaagcagctcgaggacgggcgcacacttgccgactacaacatccagaaggagagcaccctccaccttgttctccgcctcaagggaggcatgcagatcttcgtcaagaccctcactggaaagactatcaccctcgaggtggagtcttatgacaccatcgacaacgtcaaggccaagatccaggacaagg

SEQ ID NO: 345286 - DNA, 375 bp, Zea mays
attgagaccaacaagcaacatagaaagtggaatccagtagcaacaatagagcaacaatggcgaccaagatattttccctccttatgctccttgctctttctgcatgtgttgctaacgcgacaattttccctcaatgctcacaagctcctatagcttcccttcttcccccataccttccatcaatgatagcttcagtatgtgaaaacccagctcttcaaccctataggctccaacaagcaatcgcagcaagcaacatacctttatcacccttgtttcaacaatcgccagccctatctttggtgcagtcattggtacaaaccatcagggcacagcagctgcagcaactcgtgctacctgtgatcaaccaagtagctc

SEQ ID NO: 345287 - DNA, 376 bp, Zea mays
aatattttgagcattcagaaacacaccatgcgaagcacattagcaacaacctaacaacaatggctaccaagatattatccctccttgcgcttcttgcgctttttgcgagcgcaacaaatgcgttcattattccacaatgctcacttgctccaagttccattattacacagttcctcccaccagttacttcaatgggcttcgaacacccagctgtgcaagcctataggctacaacaagcaattgcggcgagcgtcttacaacaaccaatttcccagttgcaacaacaatccttggcacatctaacaatacaaaccatcgcaacgcaacagcaacaacaattcctaccagcactgagccacctagccatggtgaaccc

SEQ ID NO: 345288 - DNA, 367 bp, Zea mays
gcattcagaaacacaccaagcgaatcgcactagcaacgacctaacaacaatggctaccaagatattagccctccttgcgcttcttgccctttttgtgagcgcaacaaatgcgttcattattccacaatgctcacttgctcctagtgccattattccacagttcctcccaccagttacttcaatgggcttcgaacacctagctgtgcaagccaacatgcaacaacaagcgcttgcggcgagcgtcttacaacaaccaattgcccaattgcaacaacaatccttgccacatctaacaatacaagccatcacaacgcaacagcaacaacagttcctaccagcactgagccacctagccatggtgaaccct

SEQ ID NO: 345289 - DNA, 367 bp, Zea mays
gaaagcacaatagtgtaccaacaatggcagccaaaatattttgcctccttatgctccttggtatttctgcaagtgctgctacggcgaccattttcccgcaatgctcacaagctcctatagcttcccttcttcccccgtacctctcaccagcggtgtcttcggtatgtgaaaacccaattcttcaaccctacaggatccaacaggcaatcgcagctggcatcttacctttatcacccttgttcctccaacaatcatcagccctattacagcagttacctttggtgcatttattggcacaaaacatcagggcacaacaactacaacaacttgtgctagcaaaccttgctgcctactctcagcaacagca

SEQ ID NO: 345290 - DNA, 359 bp, Zea mays
attttcagcattcagaaacacaccaagctaagcgcactagcaacaacctaacaacaatggctaccaagatattagccctccttgcgcttcttgcccttttagtgagcgcaacaaatgcgttcattattccacagtgctcacttgctcctagtgccattattccacagttcctcccaccagttacttcaatgggcttcgaacatccagccgtgcaagcctacaggctacaactagcgcttgcggcgagcgtcttacaacaaccaattgcccaattgcaacaacaatccttggcacatctaaacctacaaaccatcgcaacgcaacagcaacaacagtttctgccatcactgagccaccta

SEQ ID NO: 345291 - DNA, 373 bp, Zea mays
tgagcattcagaaacacaccaagctaagcgcactagcaacaacctaacaacaatggctaccaagatattatccctccttgcgcttcttgcgctttttgcgagcgcaacaaatgcgtccattattccacaatgctcacttgctcctagttccattattccacagttcctcccaccagttacttcaatggccttcgaacacccagctgtgcaagcctataggctacaacaagcgattgcggcgagcgtcttacaacaaccaattgcccaattgcaacaacaatccttggcacatctaacaatacaaaccatcgcaacgcaacagcaacaacagttcctaccagcactgagccacctagccatggtgaaccctgtc

SEQ ID NO: 345292 - DNA, 374 bp, Zea mays
caactagcaacatagaaagcacaatagtgtaccaacaatggcagccaaaatattttgcttccttatgctccttggtctttctgcaagtgttgctaccgcaaccattttcccacaatgctcacaagctcctatagcttcccttcttcccccatacctctcaccagcggtgtcttcaatgtgtgaaaacccaattgttcaaccctacaggatccaacaggcaatcgcaacaggcatcttaccattatcacccttgttcctccaacaaccgtcagccctattacagcagttacctttggtccatttggtggcacaaaacatcagggcacaacaactacaacaacttgtgctagcaaaccttgctgcatactctcagc

SEQ ID NO: 345293 - DNA, 373 bp, Zea mays
cacccatgcccgtgccaacagccgcattcaagcccgtgccagctgcagggaacctgcggcgttggcagcaccccgatcctgggccagtgcgtcgagttcctgaggcatcagtgcagcccgacggcgacgccctactgctcgcctcagtgccagtcgttgcggcagcagtgttgccagcagctcaggcaggtggagccgcagcaccggtaccaggcgatcttcggcttggtcctccagtccatcctgcagcagcagccgcaaagcggccaggtcgcggggctgttggcggcgcagatagcgcagcaactgacggcgatgtgcggcctgcagcagccgactccatgcccctacgctgctgccggcggtgtccccc

SEQ ID NO: 345294 - DNA, 368 bp, Zea mays
agcattcagaaacacaccaagcgaatctcactagcaacgacctaacaacaatggctaccaagatattagccctccttgcgcttcttgccctttttgtgagcgcaacaaatgcgttcattattccacaatgctcacttgctcctagtgccattattccacagttcctcccaccagttacttcaatgggcttcgaacacctagctgtgcaagccaacatgcaacaacaagcgcttgcggcgagcgtcttacaacaaccaattgcccaattgcaacaacaatccttgccacatgtaacaatacaagccatcacaacgcaacagcaacaacagtttctaccagcactgagccacctagccatggtgaaccct

SEQ ID NO: 345295 - DNA, 365 bp, Zea mays
gacagggagagaaaagggatgcatcggtggtggatcgctttgggtgcatggtggcggcgatggagccagagcagtcggggacagggccgtgacgtgcccggccgcgatccaccggtggcaggaccggccgcccgcgctgctctgctgcatgcatggctcaacgggaaacgcatacgaggcgactgcacgtcggccattagccggccctgccagtcccagtcccgttaaccacgccggcactgggaccgctgggcgggcgaccagacatgaagatgatgttttggttagggacgacgcttgcatgcgctaagatgaggtgaacctgcccttgatccggcatccttttcttggcaggttggtgactc

SEQ ID NO: 345296 - DNA, 376 bp, Zea mays
attttgagcattcagaaacacaccaagcgaagcgcactagcaacaacctaacaacaatggctaccaagatattatccctccttgcgcttcttgcgctttttgcgagcgcaacaaatgcgtccattattccacaatgctcacttgctcctagttccattattccacagttcctcccaccagttacttcaatggccttcgaacacccagctgtgcaagcctataggctacaacaagcgattgcggcgagcgtcttacaacaaccaattgcccaattgcaacaacaatccttggcacatctaacaatacaaaccatcgcaacgcaacagcaacaacagttcctaccagcactgagccacctagccatggtgaaccctgt

SEQ ID NO: 345297 - DNA, 372 bp, Zea mays
gcaacatagaatgtggaatccaattgcaacaatagaacaacaatgacgaccaagatattttccctccttatgctccatgctctttctgcatgtgttgctaatgcgaccattttccctcaacgctcacaagctcctatagctgcccttcttcacccatacctcccatcaatgatagattcagtatgtgaaaacccagctcttcaaccctataggctccaacaagcaaatgcagcaagcaacttacctttatcaccctcgttgtttcaacaatcgccatccctatctttggtgcagtcattggtacaaaccatcggggcacaacagctgcagcaactcttgctacttgtgatcaaccaagtagctctggcaaac

SEQ ID NO: 345298 - DNA, 370 bp, Zea mays
cttcctttcttcccccatacctcttaccagcggtgtcttcagtatgtgaaaacccaattcttcaaccctacaggatccaacaggcaatcgcagcaggcatcttacctttatcacccttgttcctccaacaaccgtcagccctattacagcagttacctttggtgcatttgttggcacaaaacatcaaggcacaacaactacaacaacttgtgctaggaaaccttgctgcctactctcagcaacagcagtttcttccattcaaccaactggctgcattgaactctgctgcttatttgcaacaacaactaccattcagtcagctagctgctgcctacccccagcaatttcttccattcaaccaactggcagc

SEQ ID NO: 345299 - DNA, 357 bp, Zea mays
gttttgtgccaacaactaccattcattcagctagctgttgcctacccccagcaatttcttccattcaaccaactggcagcattgaactctgctgcttatttacaacagcaacagctaccaccattcagccagctagctgatgtgagccctgttgccttcttgacacaacaacagttgttgccgttctacctgcacgctgcgcctaacgctggcaccctcttacaactgcaacaattgctgccattcaaccaacttgctttgacaaacccaacagggttctaccaacaacccatcattggtggtgccctcttttagattgcttatgagtcataggtcaataatgaagttttttggatg

SEQ ID NO: 345300 - DNA, 374 bp, Zea mays
aagcaacatagaaagtggaattcattagcaacaatagagcaacaatggagaccaagatattttccctccttatgctccttgctctttctacatgtgttgctaacgcgacaattttccctcaatgctcacaagctcctatagcttcccttttttcccccataccttccatcaattatagcttcagtatgtgaaaacccagctcttcaaccatataggcttcaacaagcaatcgcagcaagcaacatacctttatcgcccttgttgtgtcaacaatcgccagccctatctttggtgcagtcattggtacaaaccatcagggcacaacagctgcagcaactcgtgctacctgtgatcaaccaagtagctctggcaaa

SEQ ID NO: 345301 - DNA, 370 bp, Zea mays
gacacacacacaccacaccacggctccgctagtgagaagcagagcgggaggacacgcggcgcggactgcgatggctcgtgcgctcggcgcttgcgtgctgctcgccgtcctgctcggtgccctggcgccggcgccggcgccggcggcggccgcgcgcgcccacgacgaccagggcagcggggccggcatacggcagccgagcggcgagtaccgcgggaggaaggtgggggccaggaccgaggtgcgggacgtggagggcgacggcgaggtgcaggagctcggccggttctccgtcgccgagtacaaccggcagctccgagaaggtggcggcggcggcggcaggctcgagttcggcagggtggtggcggcg

SEQ ID NO: 345302 - DNA, 376 bp, Zea mays
agcaacatagaaagcacaatagtgttccaacaatggcagctaaaatattttgcctccttatgctccttggtctttctgcaagtgctgctacggcgaccattttcccacaatgctcacaagctcctatagcttcccttcttcccccgtacctctcaccaacggtgtcttcggtatgtgaaaacccaattcttcaaccctacaggatccaacaggcaatcgcagctggcatcttacctttatcacccttgttcctccaacaatcatcagccctattacagcagttacctttggtgcatttattggcacaaaacatcagggcacaacaactacaacaacttgtgctagcaaaccttgctgcctactctcagcaacagca

SEQ ID NO: 345303 - DNA, 273 bp, Zea mays
  unsure (1)..(273): unsure at all n locations
cattgctgctttcttgagacaacaacatttgttgccattttacccacaggttgtgggaaacattaatgccttcttgcaacagcaacaattgctaccattctacccacagaatgtggcaaacattgttgccttcttacaacaacaacaattgttgccatttagccaacatgctttgacgaatcctaccaccttattgcaaccgcccaccattggtggtgccatcttctagattttttatgatttatactgtaataataaagttctcatgctgna

SEQ ID NO: 345304 - DNA, 328 bp, Zea mays
cagaaataagaagttacatttccagatactaatgtgaaaaaaaaacaacagagggggggctttcaataaaccaacgagctaaaaacaaaaacaacaaagttctaccaacaaacccatcatagaaggagccctcctttacatggcccatgtgttgtcgctccctccctccattttttgaataaataaattataggggcccccccccttagagagtacatcttttcctcccccgtgtgggccgttaaatttttttttttaggccccctaaataaacctgtctcgcgcccttttaccactcctctgtgttggaaaaacccgggttttcccc

SEQ ID NO: 345305 - DNA, 377 bp, Zea mays
caacaagcaacatagaaagtggaatccagtagcaacaatagagcaacaatggcgaccaagatattttccctccttatgctccttgctctttctgcatgtgttgctaacgcgacaattttccctcaatgctcacaagctcctatagcttcccttcttcccccataccttccatcaatgatagcttcagtatgtgaaaacccagctcttcaaccctataggctccaacaagcaatcgcagcaagcaacatacctttatcacccttgtttcaacaatcgccagccctatctttggtgcagtcattggtacaaaccatcagggcacagcagctgcagcaactcgtgctacctgtgatcaaccaagtagctctggcaaacct

SEQ ID NO: 345306 - DNA, 374 bp, Zea mays
cccacgcgtccgcaactagcatcatagaaagcacaatagtgtaccaacaatggcagccaaaatattttgcctccttatgctccttggtctttctgcaagtgctgctacggcgaccattttcccacaatgctcacaagctcctatagcttcccttcttcccccgtacctctcaccagcggtgtcttcggtatgtgaaaacccaattcttcaaccctataggatccaacaggcaatcgcagctggcatcttacctttatcacccttgttcctccaacaatcatcagccctattacagcagttacctttggtgcatttattggcacaaaacatcagggcacaacaactacaacaacttgtgctagcaaaccttgctg

SEQ ID NO: 345307 - DNA, 374 bp, Zea mays
gatatggatcgatagcggcacaattcttacttgctccaagttccattattacacagttcctcccaccagttacttcaatgggcttcgaacacccagctgtgcaagcctataggctacaacaagcaattgcggcgagcgtcttacaacaaccaatttcccagttgcaacaacaatccttggcacatctaacaatacaaaccatcgcaacgcaacagcaacaacaattcctaccagcactgagccacctagccatggtgaaccctgccgcctacttgcaacagcagttgcttgcatcaaacccacttgctctggcaaacgtagttgcaaaccagccacaacaacagctgcaacagtttctgccagcgctcagtcaa

SEQ ID NO: 345308 - DNA, 369 bp, Zea mays
gagcattcagaaacacaccaagcgaagcacattagcaacaacctaacaacaatggctaccaagatattatccctccttgcgcttcttgcgctttttgcgagcgcaacaaatgcgttcattattccacaatgctcacttgctccaagttccattattacacagttcctcccaccagttacttcaatgggcttcgaacacccagctgtgcaagcctataggctacaacaagcaattgcggcgagcgtcttacaacaaccaatttcccagttgcaacaacaatccttggcacatctaacaatacaaaccatcgcaacgcaacagcaacaacaattcctaccagcactgagccacctagccatggtgaaccct

SEQ ID NO: 345309 - DNA, 370 bp, Zea mays
catcgactccagattggagaactcgacaccatgaaggtgctgatcgttgcccttgctctcctggcgctcgctgcgagcgccgcctccagtacaagcggcggctgtggctgccagacaccaccgtttcatctaccgcctccgttctatatgccgcctccgttctatctgccgccgcagcagcagccgcagccatggcaataccccactcaaccaccgcagctaagcccgtgccagcagttcggatcctgcggcgtcggcagcgtcggcagcccgttcctgggccagtgcgtcgagttcctgaggcaccagtgcagcccggcggcgacgccctacggctcgccacagtgccaggcgctgcagcagcagtgct

SEQ ID NO: 345310 - DNA, 307 bp, Zea mays
  unsure (1)..(307): unsure at all n locations
aaaaaaataaaaataattaaaaatttattttataaaggnggtgaaaaaaaaaaaagggggataaataaaataaataaaagagaaataataaaagaaaaataaaaaaataaaaatgacaaacaaaaaaataaaaaggggggggccccctaaaagattcaaaacttctttctttttgtttgcgaagcattatttttatttttggggcccctaaatataaattatcggggcttagttttaaaacaggtgttatgggaaaaactctttggtttcaaaattaaattgnnttgtcaaaacttttttttttttt

SEQ ID NO: 345311 - DNA, 367 bp, Zea mays
gagcattcagaaacacaccaagcgaagctcattagcaacaacctaacaacaatggctaccaagatattatccctccttgcgcttcttgcgctttttgcgagcgcaacaaatgcgttcattattccacaatgctcacttgctccaagttccattattacacagttcctcccaccagttacttcaatgggcttcgaacacccagctgtgcaagcctataggctacaacaagcaattgcggcgagcgtcttacaacaaccaatttcccagttgcaacaacaatccttggcacatctaacaatacaaaccatcgcaacgcaacagcaacaacaattcctaccagcactgagccacctagccatggtgaacc

SEQ ID NO: 345312 - DNA, 374 bp, Zea mays
ctagcaattagctcatcgactccagattggagaactcgacaccatgaaggtgctgatcgttgcccttgctctcctggcgctcgctgcgagcgccgcctccagtacaagcggcggctgtggctgccagacaccaccgtttcatctaccgcctccgttctatatgccgcctccgttctatctgccgccgcagcagcagccgcagccatggcaataccccactcaaccaccgcagctaagcccgtgccagcagttcggatcctgcggcgtcggcagcgtcggcagcccgttcctgggccagtgcgtcgagttcctgaggcaccagtgcagcccggcggcgacgccctacggctcgccacagtgccaggcgctgcagc

SEQ ID NO: 345313 - DNA, 360 bp, Zea mays
ggtgcatctcccaccgccggtccacctgccgccgccggtccacctgccaccgccggtccatgtgccgccgccggttcatctgccgccgccaccatgccactaccctactcaaccgccccggcctcagcctcatccccagccacacccatgcccgtgccaacagccgcatccaagcccgtgccagcagctcaggcaggtggagccgcagcaccggtaccaggcgatcttcggcttggtcctccagtccatcctgcagcagcagccgcaaagcggccaggtcgcggggctgttggcggcgcagatagcgcagcaactgacggcgatgtgcggcctgcagcagccgactccatgcccctacgc

SEQ ID NO: 345314 - DNA, 87 bp, Zea mays
aaaaaaaaaaaaaaaaaaaaatttattaaaaaaaaaataaaaaaaaaaaaaaaggggaaaattaaaaaaaaaaaaaaaaaaaaaaag

SEQ ID NO: 345315 - DNA, 376 bp, Zea mays
tttgagcattcagaaacacaccaattgaagcgcactagcaacaacctaacaacaatggctaccaagatattatccctccttgcgcttcttgcgctttttgcgagcgcaacaaatgcgtccattattccacaatgctcacttgctcctagttccattattccacagttcctcccaccagttacttcaatggccttcgaacacccagctgtgcaagcctataggctacaacaagcgattgcggcgagcgtcttacaacaaccaattgcccaattgcaacaacaatccttggcacatctaacaatacaaaccatcgcaacgcaacagcaacaacagttcctaccagcactgagccacctagccatggtgaaccctgtcg

SEQ ID NO: 345316 - DNA, 375 bp, Zea mays
agaccaactagcaacatagaaagcacaatagtgtaccaacaatggcagccaaaatattttgcctccttatgctccttggtctttctgcaagtgctgctacggcgaccattttcccacaatgctcacaagctcctatagcttcccttcttcccccgtacctctcaccagcggtgtcttcggtatgtgaaaacccaattcttcaaccctataggatccaacaggcaatcgcagctggcatcttacctttatcacccttgttcctccaacaatcatcagccctattacagcagttacctttggtgcatttattggcacaaaacatcagggcacaacaactacaacaacttgtgctagcaaaccttgctgtctactctc

SEQ ID NO: 345317 - DNA, 378 bp, Zea mays
attagctttatctactccagagcgcagaagaacccgatcgacaccatgagggtgttgctcgttgccctcgctctcctggctctcgctgcgagcgccacctccacgcatacaagcggcggctgcggctgccagccaccgccgccggttcatctaccgccgccggtgcatctgccacctccggttcacctgccacctccggtgcatctcccaccgccggtccacctgccgccgccggtccacctgccaccgccggtccatgtgccgccgccggttcatctgccgacgccaccatgccactaccctactcaaccgccccggcctcagcctcatccccagccacacccatgcccgtgccaacagccgcatccaagcccgtgc

SEQ ID NO: 345318 - DNA, 378 bp, Zea mays
catagaaagcacaatagtgtaccaacaatggcagctaaaatattttgcctccttatgctccttggtctttctgcaagtgctgctacggcgaccattttcccacaatgctcacaagctcctatagcttcccttcttcccccgtacctctcaccaacggtgtcttcggtatgtgaaaacccaattcttcaaccctacaggatccaacaggcaatcgcagctggcatcttacctttatcacccttgttcctccaacaatcatcagccctattacagcagttacctttggtgcatttattggcacaaaacatcagggcacaacaactacaacaacttgtgctagcaaaccttgctgcctactctcagcaacagcagtttctt

SEQ ID NO: 345319 - DNA, 259 bp, Zea mays
tcgatcacaatacatatcagccgtttattcaccaaatcaaatctgcaacatcgggtgtctatcttcaaaaaccatgaagctgctgcttgtggtacctgcttccatcgctttacaatcaagcgtatcttgtacacagacaggctgtacgttttttttttttttttctttttttttagcagctacatctttcacaacaacaatgttccacacatcaacttcattaaccatcacgacaatatcaccttttgcatcaacacca

SEQ ID NO: 345320 - DNA, 373 bp, Zea mays
gatcagcaaagcggcagtgcgtagagaggatcgtcgaacagaacagcatgaagatggtcatcgttctcgtcgtgtgcctggctctgtcagctgccagcgcctctgcaatgcagatgccctgcccctgcgcggggctgcagggcttgtacggcgctggcgccggcctgacgacgatgatgggcgccggcgggctgtacccctacgcggagtacctgaggcagccgcagtgcagcccgctggcggcggcgccctactacgccgggtgtgggcagacgagcgccatgtaccagccgctccggcaacagtgctgccagcagcagatgaggatgatggacgtgcagtccgtcgcgcagcagctgcagatgatgatgca

SEQ ID NO: 345321 - DNA, 177 bp, Zea mays
gttctagatcgcgagcggcgccctttttttttttttttaagaaagactttttattttgggaagccacaaacatagacaaaaaacttatattgaactataactataagaaattaaagagggcaccaccaagagggtgtggtgaagctgtgggttgcaaacagtgttgatgcattattg

SEQ ID NO: 345322 - DNA, 374 bp, Zea mays
tggacgtcagcctagcaattatctcatcgactccagattggagaactcgacaccatgaaggtgctgatcgttgcccttgctctcctggcgctcgctgcgagcgccgcctccagtacaagcggcggctgtggctgccagacaccaccgtttcatctaccgcctccgttctatatgccgcctccgttctatctgccgccgcagcagcagccgcagccatggcaataccccactcaaccaccgcagctaagcccgtgccagcagttcggatcctgcggcgtcggcagcgtcggcagcccgttcctgggccagtgcgtcgagttcctgaggcaccagtgcagcccggcggcgacgccctacggctcgccacagtgcca

SEQ ID NO: 345323 - DNA, 376 bp, Zea mays
gcaacatagaaagcacaatagtgtttcaacaatggcagccaaaatattttgcctccttatgctccttggtctttctgcaagtgctgctacggcgaccattttcccacaatgctcacaagctcctatagcttcccttcttcccccgtacctctcaccagcggtgtcttcggtatgtgaaaacccaattcttcaaccctataggatccaacaggcaatcgcagctggcatcttacctttatcacccttgttcctccaacaatcatcagccctattacagcagttacctttggtgcatttattggcacaaaacatcagggcacaacaactacaacaacttgtgctagcaaaccttgctgcctactctcagcaacaacag

SEQ ID NO: 345324 - DNA, 381 bp, Zea mays
cacgcgcgcgtgagcttaaagaaacacaccaggcgtatcgcactagcaacgacttaacaacaggggctaccaagatattagccctccttgcgcttcttgccctttttgtgagcgcaacaaatgcgttcattattccacaatgctcacttgctcctagtgccattattccacagttcctcccaccagttacttcaatgggcttcgaacacctagctgtgcaagccaacatgcaacaacaagcgcttgcggcgagcgtcttacaacaaccaattgcccaattgcaacaacaatccttgccacatctaacaatacaagccatcacaacgcaacagcaacaacagttcctaccagcactgagccacctagccatggtgaaccctg

SEQ ID NO: 345325 - DNA, 376 bp, Zea mays
caacaacagtttctgccatcactgagccacctagccggggtgaaccctgtcgcctacttgcaacagcagctacttgcatccaacccacttgctctggcgaacgtagctgcataccagcaacaacaacgtctgcaacagtttatgccagcgctcagtcaactagccatggtgaaccctgtcgcctacctacaacagcaacaattgctttcatctagcccgctcgctgtgggcaatgcacctacgtacctacaacaacagttgctgcaacagattgtaccagctctgactcagctagctgtggcaaaccctactgcctacttgcaacagttgcttccattcaaccaactggctgtgtcgaactctgctgtgtacctac

SEQ ID NO: 345326 - DNA, 375 bp, Zea mays
gtcagcctagcaattagctcatcgactccagattggagaactcgacaccatgaaggtgctgatcgttgcccttgctctcctggcgctcgctgcgagcgccgcctccagtacaagcggcggctgtggctgccagacaccaccgtttcatctaccgcctccgttctatatgccgcctccgttctatctgccgccgcagcagcagccgcagccatggcaataccccactcaaccaccgcagctaagcccgtgccagcagttcggatcctgcggcgtcggcagcgtcggcagcccgttcctgggccagtgcgtcgagttcctgaggcaccagtgcagcccggcggcgacgccctacggctcgccacagtgccaggcgct

SEQ ID NO: 345327 - DNA, 375 bp, Zea mays
ctccaaaaaccattaagctggtgcttgtggttcttgctttcattgctttagtatgaagtgtttcttgtacacagacaggcggctgcagctgtggtcaacaacaaagccatgagcagcaacatcatccacaacaacatcatccacaccaacaacaacaagttcacatgcaaccacaaaaacatcagcaacaacaagaagttcatgttcaacaacaacaacaacaaccgcagcaccaacaacaacaacaacaacagcaccaacaacaacatcaatgtgaaggccaacaacaacatcaccaacaatcacaaggccatgtgcaacaacacgaacagagccatgagcaacaccaaggacagagccatgagcaacaacatc

SEQ ID NO: 345328 - DNA, 369 bp, Zea mays
caactagcaacatagaaagcacaatagtgtaccaacaatggcagccaaaatattttgcttccttatgctccttggtctttctgcaagtgctgctaccgcaaccattttcccacaatgctcacaagctcctatagcttcctttcttcccccatacctctcaccagcggtgtcttcagtatgtgaaaacccaattcttcaaccctacaggatccaacaggcaatcgcagcaggcatcttacctttatcacccttgttcctccaacaaccgtcagccctattacagcagttacctttggtgcatttgttggcacaaaacatcaaggcacaacaactacaacaacttgtgctaggaaaccttgctgcctactc

SEQ ID NO: 345329 - DNA, 375 bp, Zea mays
tccagagcgcagaagaacccgatcgacaccatgagggtgttgctcgttgccctcgctctcctggctctcgctgcgagcgccacctccacgcatacaagcggcggctgcggctgccagccaccgccgccggttcatctaccgccgccggtgcatctgccacctccggttcacctgccacctccggtgcatctcccaccgccggtccacctgccgccgccggtccacctgccaccgccggtccatgtgccgccgccggttcatctgccgccgccaccatgccactaccctactcaaccgccccggcctcagcctcatccccagccacacccatgcccgtgccaacagccgcatccaagcccgtgccagctgcaggga

SEQ ID NO: 345330 - DNA, 355 bp, Zea mays
attgagaccaactagcaacatagatagcacaatagtgtaccaacaatggcagccaaaatattttgcttccttatgctccttggtctttctgcaagtgctgctaccgcaaccattttcccacaatgctcacaagctcctatagcttcctttcttcccccatacctctcaccagcggtgtcttcagtatgtgaaaacccaattcttcaaccctacaggatccaacaggcaatcgcagcaggcatcttacctttatcacccttgttcctccaacaaccgtcagccctattacagcagttacctttggtgcattttgtggcacaaaacatcaaggcacaacaaactacacaacttgtgc

SEQ ID NO: 345331 - DNA, 261 bp, Zea mays
attttgagcattcagaaacacacctagcgaagctacctagcaacgacttaacaacaatggctaccaagatattagccctccttgcgcttcttgccctttttgtgagcgcaacaaatgcgttcattattccacaatgctcacttgctcctagtgccattataccacagttcctccgaccagttacttcaatgggcttcgaacacctagctgtgcaagcctacaggctacaacaagcgcttgcggcgagcgtcttacaacaac

SEQ ID NO: 345332 - DNA, 404 bp, Zea mays
  unsure (1)..(404): unsure at all n locations
caccggcccgganggaagggccgacccacccatgcgtactgaacacacagggacgaacaatggcactcatacatggtttgcctccttatgctccttggtctttctgcaagtgctgctacggcgaccattttcccacaatgctcacaagctcctatagcttcccttcttcccccgtacctctcaccagcggtgtcttcggtatgtgaaaacccaattcttcaaccctataggatccaacaggcaatcgcagctggcatcttacctttatcacccttgttcctccaacaatcatcagccctattacagcagttacctttggtgcatttattggcacaaaacatcagggcacaacaactacaacaacttgtgctagcaaaccttgctgcctacttttagcaacaaca

SEQ ID NO: 345333 - DNA, 374 bp, Zea mays
cggacgcgtgggtagcaacatagatagcacaatagtgtaccaacaatggcagccaaaatattttgcctccttatgctccttggtctttctgcaagtgctgctacggcgaccattttcccgaaatgctcgcaagctcctatagcttcccttcttcccccgtacctctcaccagcggtgtcttcggtatgtgaaaacccaattcttcaaccctacaggatccaacaggcaatcacagctggcatcttacctttatcacccttgttcctccaacaatcatcagccctattacatcagttacctttggtgcatttattggcacaaaacatcagggcacaacaactacaacaacttgtgctagcaaaccttgctgccta

SEQ ID NO: 345334 - DNA, 368 bp, Zea mays
  unsure (1)..(368): unsure at all n locations
ggtccatgcgcagcgggcggcggctgtctcctcggctcctcccctgcggccgagctcgcccctcgccccgccgcctcaactcgtctcgcccgcgaccgatttcctccctccgctcgccgcgccgcaacccggagataaggccgcgctcgatcgagaaccacctggggtccatcgtcatcgcgaccagctccggcgaggcgtccgccctttgcagcccggtgtctctgcgaccggcacacagctccagagggtgtcttggactgaagaagatatcagcaaagcttgaaaaggactgagagatgtcatngggctatgctgagaaagctgtcctaccggaggatgtggggactgggggaaatgctgagatc

SEQ ID NO: 345335 - DNA, 374 bp, Zea mays
agaccaacaagcaacatagaaagtggaatccagtagcaacaatagagcaacaatggcgaccaagatattttccctccttatgctccttgctctttctgcatgtgttgctaacgcgacaattttccctcaatgctcacaagctcctatagcttcccttcttcccccataccttccatcaatgatagcttcagtatgtgaaaacccagctcttcaaccctataggctccaacaagcaatcgcagcaagcaacatacctttatcacccttgtttcaacaatcgccagccctatctttggtgcagtcattggtacaaaccatcagggcacagcagctgcagcaactcgtgctacctgtgatcaaccaagtagctctgg

SEQ ID NO: 345336 - DNA, 362 bp, Zea mays
attagctcatcgactccagattggttaactcgacaccatgaaggtgctgatcgttgcccttgctctcctggcgctcgctgcgagcgccgcctccagtacaagcggcggctgtggctgccagacaccaccgtttcatctaccgcctccgttctatatgccgcctccgttctatctgccgccgcagcagcagccgcagccatggcaataccccactcaaccaccgcagctaagcccgtgccagcagttcggatcctgcggcgtcggcagcgtcggcagcccgttcctgggccagtgcgtcgagttcctgaggcaccagtgcagcccggcggcgacgccctacggctcgccacagtgccaggcgc

SEQ ID NO: 345337 - DNA, 373 bp, Zea mays
cgccggtccatgtgccgccgccggttcatctgccgccgccaccatgccactaccctactcaaccgccccggcctcagcctcatccccagccacacccatgcccgtgccaacagccgcatccaagcccgtgccagctgcagggaacctgcggcgttggcagcaccccgatcctgggccagtgcgtcgagtttctgaggcatcagtgcagcccgacggcgacgccctactgctcgcctcagtgccagtcgttgcggcagcagtgttgccagcagctcaagcaggtggagccgcagcaccggtaccaggcgatcttcggcttggtcctccagtccatcctgcagcagcagccgcaaagcggccaggtcgcggggct

SEQ ID NO: 345338 - DNA, 352 bp, Zea mays
gtcagcctagcaattagctcatcgactccagattggagaactcgacaccatgaaggtgctgatcgttgcccttgctctcctggcgctcgctgcgagcgccgcctccagtacaagcggcggctgtggctgccagacaccaccgtttcatctaccgcctccgttctatatgccgcctccgttctatctgccgccgcagcagcagccgcagccatggcaataccccactcaaccaccgcagctaagcccgtgccagcagttcggatcctgcggcgtcggcagcgtcggcagcccgttcctgggccagtgcgtcgaggtcctgaggcaccagtgcagcccggcggcgacgccctac

SEQ ID NO: 345339 - DNA, 376 bp, Zea mays
caatcatcagccctattacaacagtttcctttggtgcatttattggcacaaagcgtcagggcacaacaactacaacaacttgtgctagcaaaccttgctgcctactctcagcaacagcagtttcttccattcaaccaactaggttcattgaactctgcttcttatttgcaacaacaacaactaccattcagccagctacctgctgcctacccccagcaatttcttccattcaaccaactagcagcattgaactctcctgcttatttacagcagcaacaactactaccattcagccagctagctggtgtgagccctgctaccttcttgacacaaccacagttgttgccgttctaccagcacgttgcgcctaacgctg

SEQ ID NO: 345340 - DNA, 395 bp, Zea mays
cgggaaggactggccggacccacccgtccgattttgagcattcagaaacacacctttcttagcacattagcaacaacctaacaacaatggctaccaagatattatccctccttgcgcttcttgcgctttttgcgagcgcaacaaatgcgttcattattccacaatgctcacttgctccaagttccattattacacagttcctcccaccagttacttcaatgggcttcgaacacccagctgtgcaagcctataggctacaacaagcaattgcggcgagcgtcttacaacaaccaatttcccagttgcaacaacaatccttggcacatctaacaatacaaaccatcgcaacgcaacagcaacaacaattcctaccagcactgagccacctagccatg

SEQ ID NO: 345341 - DNA, 377 bp, Zea mays
aagcaccatagaaggtggaatccagtttcaccaatagagcaacaatggagaccaagatattttccctccttatgctccttgctctttctacatgtgttgctaacgcgacaattttccctcaatgctcacaagctcctatagcttccctttttcccccataccttccatcaattatagcttcagtatgtgaaaacccagctcttcaaccatataggcttcaacaagcaatcgcagcaagcaacatacctttatcgcccttgttgtgtcaacaatcgccagccctatctttggtgcagtcattggtacaaaccatcagggcacaacagctgcagcaactcgtgctacctgtgatcaaccaagtagctctggcaaacctt

SEQ ID NO: 345342 - DNA, 286 bp, Zea mays
aacaactactaccattcagccagcttgttggtgtgagccctgctaccttcttgatacaaccacagttgttgccgttctaccagcacgctgcgcctaacgctggcaccctcttacaactgcaacaattgctgccattcaaccaacttgctttgacaaacccagcagcgttctaccaacaacccatcattggtggtgccctcttttagatttcttatgagttatagttcaataataaagttttttgtctgatgtttgtggcttcccagaaataagaaagtacatttct

SEQ ID NO: 345343 - DNA, 379 bp, Zea mays
aaatgcgttcattattccacaatgctcatttgctcctagtgccattataccacagttgctccgaccagttacttcaatgggcttcgaacacctagctgtgcaagcctacaggctacaacaagcgcttgcggcgagcgtcttacaacaaccaattaaccaattgcaacaacaatccttggcacatctaaccatacaaaccatcgcaacacaacagcaacaacagttcctaccagcactgagccaactagatgtggtgaaccctgtcgcctacttgcaacagcaggtgcttgcatccaacccacttgctctggcaaacgtagctgcataccaacaacaacaacaattgcaacagtttctgccagcgctcagtcaactagcc

SEQ ID NO: 345344 - DNA, 364 bp, Zea mays
  unsure (1)..(364): unsure at all n locations
ttttgagcattcagaaacacattatgcgaagcgcactagcaacaacctaacaacaatggctaccaagatattatccctccttgcgcttcttgcgctttttgcgagcgcaacaaatgcgtccattattccacaatgctcacttgctcctagttccattattccacagttcctcccaccagttacttcaatggccttcgaacacccagctgtgcaagcctataggctacaacaagccattgcggcgagcgtcttacaacaaccaattgcccaattggaacaacaatccttggcacatntaacaatacaaaccatcgcaacgcaacaagaacaacagtttctaccagcactgagccacctagccatg

SEQ ID NO: 345345 - DNA, 377 bp, Zea mays
attgagaccaactagcaacatagatttcacaatagtgtaccaacaatggcagccaaaatattttgcttccttatgctccttggtctttctgcaagtgttgctaccgcaaccattttcccacaatgctcacaagctcctatagcttcccttcttcccccatacctctcaccagcggtgtcttcaatgtgtgaaaacccaattgttcaaccctacaggatccaacaggcaatcgcaacaggcatcttaccattatcacccttgttcctccaacaaccgtcagccctattacagcagttacctttggtccatttggtggcacaaaacatcagggcacaacaactacaacaacttgtgctagcaaacctttcttcctactt

SEQ ID NO: 345346 - DNA, 377 bp, Zea mays
atgaacaattgaaatgaaaagaataatgtattgttccaaaaaaaaaaaatagagaaaaataaaaaaaaaaaaaaaaaaaaaaaaaaaaaataaaaaaaaaaataatttataaaaatattaataaaacaattaaaaattaataaataaatatttaaaaaaaaaaaataatatatataaaaataggtgcccccctttcttgaaatcccacctttccttccccttcctctcctccattaccttttttttcattttctcctaattccatatcatggcctttttttttcctccctttgtctgtttaaacccttgttttaccccattttatactttttgtaacactcctccttttcccttatttcccttattcctttttttcc

SEQ ID NO: 345347 - DNA, 377 bp, Zea mays
attcagaaacacaccaagcgaagcacattagcaacaacctaacaacaatggctaccaagatattatccctccttgcgcttcttgcgctttttgcgagcgcaacaaatgcgttcattattccacaatgctcacttgctccaagttccattattacacagttcctcccaccagttacttcaatgggcttcgaacacccagctgtgcaagcctataggctacaacaagcaattgcggcgagcgtcttacaacaaccaatttcccagttgcaacaacaatccttggcacatctaacaatacaaaccatcgcaacgcaacagcaacaacaattcctaccagcactgagccacctagccatggtgaaccctgccgcctacttg

SEQ ID NO: 345348 - DNA, 375 bp, Zea mays
attttgagcattcagaaacactttaatcgaagcacattagcaacaacctagcaacaatggctaccaagatattatccctccttgcgcttcttgcgctttttgcgagcgcaacaaatgcgttcattattccacaatgctcacttgctccaagttccattattacacagttcctcccaccagttacttcaatgggcttcgaacacccagctgtgcaagcctataggctacaacaagcaattgcggcgagcgtcttacaacaaccaatttcccagttgcaacaacaatccttggcacatctaacaatacaaaccatcgcaacgcaacagcaacaacaattcctaccagcactgagccacctagccatggtgaaccctg

SEQ ID NO: 345349 - DNA, 375 bp, Zea mays
aagcaacatagaaagtggaatacagttttaacaatagagcaacaatggcggccaagatattttccatccttatgctccttgctctttctgcatgtgttgctaacgcgaccatttttcctcaatactcacaagctcctatagctgcccttcttcccccataccttccatcaatgaccgcttcagtatgtgaaaacccagcccttcaaccctacaggctccaacaagcaatcgcaacaagcaacttacctttatcacccctgttctttcaacaatcgccagccctatctttggtgcagtcattggtacaaaccatcagggcacaacagctgcagcaactcgtgctaccagtgatcagccaagtagctctggcaaacc

SEQ ID NO: 345350 - DNA, 374 bp, Zea mays
atcagcaaagcggcagtgcgtagagtggttcgtcgaacagaacagcatgaagatggtcatcgttctcgtcgtgtgcctggctctgtcagctgccagcgcctctgcaatgcagatgccctgcccctgcgcggggctgcagggcttgtacggcgctggcgccggcctgacgacgatgatgggcgccggcgggctgtacccctacgcggagtacctgaggcagccgcagtgcagcccgctggcggcggcgccctactacgccgggtgtgggcagacgagcgccatgtaccagccgctccggcaacagtgctgccagcagcagatgaggatgatggacgtgcagtccgtcgcgcagcagctgcagatgatgatgcagc

SEQ ID NO: 345351 - DNA, 281 bp, Zea mays
cgacccacccgtccgaaaaaaaaaaaaatttataaaaaataataatataacaacaaaaaaaaaaaaaaaaagggagagttttttaaaaaaaaaaaataaaaaaaaaaattgggcttctattaaaaaaataacaaacttacttatcctttactaccacctatttttcctctctatatttagaacctggtgctctttttactggctcctgttttattccccctttttttgggatccccctcttttatttaacctacactttttttttccccccttcccctctt

SEQ ID NO: 345352 - DNA, 376 bp, Zea mays
caacaagcaacatataaagtggaattcattagcaacaatagagcaacaatggcggccgagatattttccatccttatgctccttgctctttctgcatgtgttgctaacgcgaccatttttcctcaatactcacaagctcctatagctgcccttcttcccccataccttccatcaatgaccgcttcagtatgtgaaaacccagcccttcaaccctacaggctccaacaagcaatcgcaacaagcaacttacctttatcacccctgttctttcaacaatcgccagccctatctttggtgcagtcattggtacaaaccatcagggcacaacagctgcagcaactcgtgctaccagtgatcagccaagtagctctggcaa

SEQ ID NO: 345353 - DNA, 145 bp, Zea mays
  unsure (1)..(145): unsure at all n locations
aataacccgnnggaccacccacgcgtccggacaaacccatcagcattctactaatatacccatcattggtggtgccctctgttagatttcttatgagttatagttcaataataaagttttttgtctgatgtttgtggcttcccag

SEQ ID NO: 345354 - DNA, 373 bp, Zea mays
cccacgcgtccgcccacgcgtttttctacgcgtccgtgaggaaagaggtgctgcagtagaggtaaatgttgtggataagatagcagaggatgtcgagtcgcctgtggctgaagaggagaaactggtaccggaagttgagaagggcgaggaggtaggttctgggagtgcagttggtggcgagttgagtgatgaggaggaggttgaggtctctccctctcctctgggcgaggaggtggcagaggtggcagaaccacaggataaggtagcccatgtttctgaagctaatggtgaattgggtgatgggaaagaagcgagtgatgatgtggttgctctgggaggtggagaagccacttacaaggatgctgttggtgat

SEQ ID NO: 345355 - DNA, 376 bp, Zea mays
  unsure (1)..(376): unsure at all n locations
ctgggtcttcagaccattagctttatctactccagagcgcagaagaacccgatcgacgccatgagggtgttgctcgttgccctcgctctcctggctctcgctgcgagcgccacctccacgcatacaagcggcggctgcggctgccagccaccgccgccggttcatctaccgccgccggtgcatctgccacctccggttcacctgccacctccggtgcatctcccaccgccggtccacctgccgccgccggtccacctgccaccgccggtccatgtgccgccgccggttcatctgccgncgccaccatgccactaccctactcaaccgccccggcctcagcctcatccccagccacacccatgctcgtgccaacagc

SEQ ID NO: 345356 - DNA, 376 bp, Zea mays
gcaacatagaaagcacaatagtgtaccatcaatggcagccaaaatattttgcttccttatgctccttggtctttctgcaagtgttgctaccgcaaccattttcccacaatgctcacaagctcctatagcttcccttcttcccccatacctctcaccagcggtgtcttcaatgtgtgaaaacccaattgttcaaccctacaggatccaacaggcaatcgcaacaggcatcttaccattatcacccttgttcctccaacaaccgtcagccctattacagcagttacctttggtccatttggtggcacaaaacatcagggcacaacaactacaacaacttgtgctagcaaaccttgctgcatactctcagcaacatcag

SEQ ID NO: 345357 - DNA, 374 bp, Zea mays
attttgagcattcataaacacacctttcgaagcgcactagcaacgacctaacaggaatggctaccaagatattagccctccttgcgcttcttgccctttttgtgagcgcaacaaatgcgttcattattccacaatgctcacttgctcctagtgccattattacacagttcctcccaccagttacttcaatgggcttagaacacctagctgtgcaagccaacatgcaacaacaagcgcttgcggcgagcgtcttacaacaaccaattgcccaattgcaacaacaatccttgtcacatgtaacaatacaagccatcacaacgcaacagcaacaacagttcctaccagcactgagccacctagccatggtgaaccct

SEQ ID NO: 345358 - DNA, 370 bp, Zea mays
caacaagcaacatataaagtggaatacagtagcaacaatagagcaacaatggctgccaagatattttccatccttatgctccttgctctttctgcatgtgttgctaacgcgaccatttttcctcaatactcacaagctcctatagctgcccttcttcccccataccttccatcaatgaccgcttcagtatgtgaaaacccagcccttcaaccctacaggctccaacaagcaatcgcaacaagcaacttacctttatcacccctgttctttcaacaatcgccagccctatctttggtgcagtcattggtacaaaccatcagggcacaacagctgcagcaactcgtgctaccagtgatcagccaagtagctc

SEQ ID NO: 345359 - DNA, 377 bp, Zea mays
attgagaccatctagcaactattttatcacaatagtgtaccaacaatggcggccaaaatattttgcctccttatgctccttggtctttctgcaagtgctgctacggcgaccattttcccacaatgctcacaagctcctatagcttcccttcttcccccgtacctctcaccagcggtgtcttcggtatgtgaaaacccaattcttcaaccctataggatccaacaggcaatcgcagctggcatcttacctttatcacccttgttcctccaacaatcatcagccctattacagcagttacctttggtgcatttattggcacaaaacatcagggcacaacaactacaacaacttgtgctagcaaaccttgctgcctactt

SEQ ID NO: 345360 - DNA, 377 bp, Zea mays
attttgagcattcagaaacacacctttctaagcacattagcaacaacctaacaacaatggctaccaagatattatccctccttgcgcttcttgcgctttttgcgagcgcaacaaatgcgttcattattccacaatgctcacttgctccaagttccattattacacagttcctcccaccagttacttcaatgggcttcgaacacccagctgtgcaagcctataggctacaacaagcaattgcggcgagcgtcttacaacaaccaatttcccagttgcaacaacaatccttggcacatctaacaatacaaaccatcgcaacgcaacagcaacaacaattcctaccagcactgagccacctagccatggtgaaccctgcc

SEQ ID NO: 345361 - DNA, 396 bp, Zea mays
ggggcggacccacgcgtccggcacaatagtgtaccaacaatggcagccaaaatattttgcctccttatgctccttggtctttctgcaagtgctgctacggcgaccattttcccacaatgctcacaagctcctatagcttcccttcttcccccgtacctctcaccagcggtgtcttcggtatgtgaaaacccaattcttcaaccctataggatccaacaggcaatcgcagctggcatcttacctttatcacccttgttcctccaacaatcatcagccctattacagcagttacctttggtgcatttattggcacaaaacatcagggcacaacaactacaacaacttgtgctagcaaaccttgctgcctactctcagcaacaacagtttcttccattc

SEQ ID NO: 345362 - DNA, 376 bp, Zea mays
aatattttgagcattcagaaacacattatgcgaagcgcactagcaacgacctaacaacaatggctaccaagatattagccctccttgcgcttcttgccctttttgtgagcgcaacaaatgcgttcattattccacaatgctcacttgctcctagtgccattattccacagttcctcccaccagttacttcaatgggcttcgaacacctagctgtgcaagccaacatgcaacaacaagcgcttgcggcgagcgtcttacaacaaccaattgcccaattgcaacaacaatccttgccacatctaacaatacaagccatcacaacgcaacagcaacaacagttcctaccagcactgagccacctagccatggtgaaccc

SEQ ID NO: 345363 - DNA, 379 bp, Zea mays
attttgagcattcagaaacacaccatgctaagcacattagcaacaacctaacaacaatggctaccaagatattatccctccttgcgcttcttgcgctttttgcgagcgcaacaaatgcgttcattattccacaatgctcacttgctccaagttccattattacacagttcctcccaccagttacttcaatgggcttcgaacacccagctgtgcaagcctataggctacaacaagcaattgcggcgagcgtcttacaacaaccaatttcccagttgcaacaacaatccttggcacatctaacaatacaaaccatcgcaacgcaacagcaacaacagctgcaacagtttctgccagcgctcagtcaactagccatggtgaa

SEQ ID NO: 345364 - DNA, 372 bp, Zea mays
gggtcttcagaccattagctttatttactccagagcgcagaagaacccgatcgacaccatgagggtgttgctcgttgccctcgctctcctggctctcgctgcgagcgccacctccacgcatacaagcggcggctgcggctgccagccaccgccgccggttcatctaccgccgccggtgcatctgccacctccggttcacctgccacctccggtgcatctcccaccgccggtccacctgccgccgccggtccacctgccaccgtcggtccatgtgccgccgccggttcatctgccgccgccaccatgccactaccctactcaaccgccccggccttagcctcattcccagccacacccatgcccgtgccaaca

SEQ ID NO: 345365 - DNA, 377 bp, Zea mays
cggacgcgtgggcaaagcggcagtgcgtagagaggatcgtcgaacagaacagcatgaagatggtcatcgttctcgtcgtgtgcctggctctgtcagctgccagcgcctctgcaatgcagatgccctgcccctgcgcggggctgcagggcttgtacggcgctggcgccggcctgacgacgatgatgggcgccggcgggctgtacccctacgcggagtacctgaggcagccgcagtgcagcccgctggcggcggcgccctactacgccgggtgtgggcagacgagcgccatgtaccagccgctccggcaacagtgctgccagcagcagatgaggatgatggacgtgcagtccgtcgcgcagcagctgcagatgatgatg

SEQ ID NO: 345366 - DNA, 378 bp, Zea mays
atttagaccaactagcaacatagtaagcacaatagtgtaccaacaatggcaggcaaaatattttgcctccttatgctccttggtatttctgcaagtgctgctacggcgaccattttcccgcaatgctcacaagctcctatagcttcccttcttcccccgtacctctcaccagcggtgtcttcggtatgtgaaaacccaattcttcaaccctacaggatccaacaggcaatcgcagctggcatcttacctttatcacccttgttcctccaacaatcatcagccctattacagcagttacctttggtgcatttattggcacaaaacatcatggcacaacaactacaacaacttgtgctagcaaaccttgctgcctactct

SEQ ID NO: 345367 - DNA, 375 bp, Zea mays
ttttgagcattcataaacacacttatctaagctacctagcaacgacttaacaacggtggctaccaagatattagccctccttgcgcttcttgccctttttgtgagcgcaacaaatgcgttcattattccacaatgctcacttgctcctagtgccattataccacagttcctccgaccagttacttcaatgggcttcgaacacctagctgtgcaagcctacaggctacaacaagcgcttgcggcgagcgtcttacaacaaccaattaaccaattgcaacaacaatccttggcacatctaaccatacaaaccattgcaacacaacagcaacaacagttcctaccagcactgagccaactagatgtggtgaaccctgt

SEQ ID NO: 345368 - DNA, 396 bp, Zea mays
cggaccaagccttccgtggccccgtgggtttaaaacacactttttgaaccacattaccaacaacctaacagcaatggctaccaagatattatccctccttgcgcttcttgcgctttttgcgagcgcaacaaatgcgttcattattccacaatgctcacttgctccaagttccattattacacagttcctcccaccagttacttcaatgggcttcgaacacccagctgtgcaagcctataggctacaacaagcaattgcggcgagcgtcttacaacaaccaatttcccagttgcaacaacaatccttggcacatctaacaatacaaaccatcgcaacgcaacagcaacaacaattcctaccagcactgagccacctagccatggtgaaccctgccgc

SEQ ID NO: 345369 - DNA, 379 bp, Zea mays
gtggaatccagtagcaacaatagatcttttttggcgaccaagatattttccctccttatgctccttgctctttctgcatgtgttgctaacgcgacaattttccctcaatgctcacaagctcctatagcttcccttcttcccccataccttccatcaatgatagcttcagtatgtgaaaacccagctcttcaaccctataggctccaacaagcaatcgcagcaagcaacatacctttatcacccttgtttcaacaatcgccagccctatctttggtgcagtcattggtacaaaccatcagggcacagcagctgcagcaactcgtgctacctgtgatcaaccaagtagctctggcaaacctttctccctactctcagcaac

SEQ ID NO: 345370 - DNA, 375 bp, Zea mays
atgcgttcattattccacaatgtttacttgctcctagtgccattattccacagttcctcccaccagttacttcaatgggcttcgaacacctagctgtgcaagccaacatgcaacaacaagcgcttgcggcgagcgtcttacaacaaccaattgcccaattgcaacaacaatccttgccacatctaacaatacaagccatcacaacgcaacagcaacaacagttcctaccagcactgagccacctagccatggtgaaccctgccgcctacttgcaagagcagctgcttgcatccaacccacttgctctggcgaacgtagttgcaaaccagcaacaacaacagctacaacagtttctgccaacgctcagtcaactag

SEQ ID NO: 345371 - DNA, 374 bp, Zea mays
cttcggtatgtgaaaacccatttcttcataccctacaggatccaacaggcagtcgcagctggcatcttacctttatcacccttgttcctccaacaatcatcagccctattacagcagttacctttggtgcatttattggcacaaaacatcagggcacaacaactacaacaacttgtgctagcaaaccttgctgcctactctcagcaacagcagtttcttccattcaaccaactagctgcattgaactctgcttcttatttgcaacaacaacaactaccattcagccagctacctgttgcctacccccagcaatttcttccattcaaccaactggcagcattgaactctcctgcttatttacagcagcaacaact

SEQ ID NO: 345372 - DNA, 375 bp, Zea mays
ttgagaccaacaagcaacatagaatgttttatccagtagcaacaatagagcaacaatggcgaccaagatattttccctccttatgctccttgctctttctgcatgtgttgctaacgcgacaattttccctcaatgctcacaagctcctatagcttcccttcttcccccataccttccatcaatgatagcttcagtatgtgaaaacccagctcttcaaccctataggctccaacaagcaatcgcagcaagcaacatacctttatcacccttgtttcaacaatcgccagccctatctttggtgcagtcattggtacaaaccatcagggcacagcagctgcagcaactcgtgctacctgtgatcaaccaagtagctct

SEQ ID NO: 345373 - DNA, 377 bp, Zea mays
caactagcaacatagaaagcacaattttttaccaacaatggcagccaaaatattttgcttccttatgctccttggtctttctgcaagtgttgctaccgcaaccattttcccacaatgctcacaagctcctatagcttcccttcttcccccatacctctcaccagcggtgtcttcaatgtgtgaaaacccaattgttcaaccctacaggatccaacaggcaatcgcaacaggcatcttaccattatcacccttgttcctccaacaaccgtcagccctattacagcagttacctttggtccatttggtggcacaaaacatcagggcacaacaactacaacaacttgtgctagcaaaccttgctgcatactctcagcaac

SEQ ID NO: 345374 - DNA, 380 bp, Zea mays
attgagaccaactagcaacatagattgttcaatattgtaccaataatggcagccgaaatattttgcctcattatgctccttggtctttctgcaagtgctgctacggcgagcattttcccgcaatgctcacaagctcctatagcttcccttcttcccccatacctctcaccagcgatgtcttcagtatgtgaaaatccaattcttctaccctacaggatccaacaggcaatcgcagcaggcatcttacctttatcacccttgttcctccaacaatcatcagccctattacagcagttacctttggtgcatttattggcacaaaacatcagggcacaacaactacaacaactcgtgctagcaaaccttgctgcctactctca

SEQ ID NO: 345375 - DNA, 376 bp, Zea mays
agaaagtggaatccagtagcaacattttttcaacaatggcgaccaagatattttccctccttatgctccttgctctttctgcatgtgttgctaacgcgacaattttccctcaatgctcacaagctcctatagcttcccttcttcccccataccttccatcaatgatagcttcagtatgtgaaaacccagctcttcaaccctataggctccaacaagcaatcgcagcaagcaacatacctttatcacccttgtttcaacaatcgccagccctatctttggtgcagtcattggtacaaaccatcagggcacagcagctgcagcaactcgtgctacctgtgatcaaccaagtagctctggcaaacctttctccctactc

SEQ ID NO: 345376 - DNA, 375 bp, Zea mays
gaccaactagcaacatagaaagttctatagtgtaccaacaatggcagccaaaatattttgcctccttatgctccttggtctttctgcaagtgctgctacggcgaccattttcccgcaatgctcgcaagctcctatagcttcccttcttcccccgtacctctcaccagcggtgtcttcggtatgtgaaaacccaattcttcaaccctacaggatccaacaggcaatcgcagctggcatcttacctttatcacccttgttcctccaacaatcatcagccctattacaacagttacctttggtgcatttattggcacaaaacatcagggcacaacaactacaacaacttgtgctagcaaaccttgctgcctactctca

SEQ ID NO: 345377 - DNA, 380 bp, Zea mays
tctttagtatcaattgtttcttgtttatagacaggcggctgcagctgtggtcaggaacaaagccatgagcagcaacatcatccacaacaacatcatccacaaaaacaacaacatcaaccaccaccacaacatcaccagcagcagcaacaccaacaacaacaagttcacatgcaaccacaaaaacatcagcaacaacaagaagttcatgttcaacaacaacaacaacaaccgcagcaccaacaacaacaacaacaacagcaccaacaacaacatcaatgtgaaggccaacaacaacatcaccaacaatcacaaggccatgtgcaacaacacgaacagagccatgagcaacaccaaggacagagccatgagcaacaacatca

SEQ ID NO: 345378 - DNA, 372 bp, Zea mays
tcacaagctcctatagcttcccttttttccccgtacctctcaccaacggtgtcttcggtatgtgaaaacccaattcttcaaccctacaggatccaacaggcaatcgcagctggcatcttacctttatcacccttgttcctccaacaatcatcagccctattacagcagttacctttggtgcatttattggcacaaaacatcagggcacaacaactacaacaacttgtgctagcaaaccttgctgcctactctcagcaacagcagtttcttccattcaaccaactagctgcattgaactctgcttcttatttgcaacaacaacaactaccattcagccagctatctgctgcctacccccagcaatttcttcca

SEQ ID NO: 345379 - DNA, 311 bp, Zea mays
ccaactagcaacatataaagctcattgtgtaccaacaatggcagccaaaggggggtgccttcttatgctccttggtctttctgcaagtgctgctactgcgaccatttttcccgaaatgctcgcaagctcctatagcttcccttctttccccgtacctctcaccagcggtgtcttcggtatgtgaaaacccaattcttcaaccctacaggatccaactggcaatcacagctggcatcttacctttatcacccttgttcctccaacaatcatcagccctattacatcagttacctttggagcatttattggtt

SEQ ID NO: 345380 - DNA, 395 bp, Zea mays
ggcggcccaacccgtccgttcagaaacacaccaagcgaagcgttttatcaacaacctaacaacaatggctacgaagatattatccctccttgcgcttcttgcgctttttgcgagcgcaacaaatgcgtccattattccacaatgctcacttgctcctagttccattattccacagttcctcccaccagttacttcaatggccttcgaacacccagctgtgcaagcctataggctacaacaagcgattgcggcgagcgtcttacaacaaccaattgcccaattgcaacaacaatccttggcacatctaacaatacaaaccatcgcaacgcaacagcaacaacagttcctaccagcactgagccacctagccatggtgaaccctgtcgcctacttgc

SEQ ID NO: 345381 - DNA, 378 bp, Zea mays
cgtcagcctagcaattagctcatcgtctccagattggagaactcgacaccatgaaggtgctgatcgttgcccttgctctcctggcgctcgctgcgagcgccgcctccagtacaagcggcggctgtggctgccagacaccaccgtttcatctaccgcctccgttctatatgccgcctccgttctatctgccgccgcagcagcagccgcagccatggcaataccccactcaaccaccgcagctaagcccgtgccagcagttcggatcctgcggcgtcggcagcgtcggcagcccgttcctgggccagtgcgtcgagttcctgaggcaccagtgcagcccggcggcgacgccctacggctcgccacagtgccaggcgctgc

SEQ ID NO: 345382 - DNA, 328 bp, Zea mays
caccagcggtgtcttcggtatgtgattacccaattcttcaaccctataggatccaacaggctatcgcagctggcatcttacctttatcacccttgttcctccaacaatcatcagccctattacagcagttacctttggtgcatttattggcacaaaacatcagggcacaacaactacaacaacttgtgctagcaaaccttgctgcctactctcagcaacaacagtttcttccattcaaccaactagctgcattgaactttgctttttatttgcaacaacaaacactaccattcaggcagctatctgctggctacccccagcaattttt

SEQ ID NO: 345383 - DNA, 374 bp, Zea mays
caacaacctaacaacaatggctaccatgatattagccctccttgcgcttcttgcccttttagtgagcgcaacaaatgcgttcattattccacagtgctcacttgctcctagtgccattattccacagttcctcccaccagttacttcaatgggcttcgaacatccagccgtgcaagcctacaggctacaactagcgcttgcggcgagcgtcttacaacaaccaattgcccaattgcaacaacaatccttggcacatctaaacctacaaaccatcgcaacgcaacagcaacaacagtttctgccatcactgagccacctagccgtggtgaaccctgtcgcctacttgcaacagcagctacttgcatccaacccac

SEQ ID NO: 345384 - DNA, 284 bp, Zea mays
gaccaactagcaacatagaatgcattatagtgtaccaacaatggcagccaaaatattttgcttccttatgctccttggtctttctgcaagtgctgctaccgcaaccattttcccacaatgctcacaagctcctatagcttcctttcttcccccatacctctcaccagcggtgtcttcagtatgtgaaaacccaattcttcaaccctacaggatccaacaagcaattgcagcaggcattttacctttatcaccctttgttccttcaacaaccggcaggcctatta

SEQ ID NO: 345385 - DNA, 379 bp, Zea mays
gagcattcagaaacacaccaagcgtttcgcactagcaacaacctaacaacaatggctaccaagatattatccctccttgcgcttcttgcgctttttgcgagcgcaacaaatgcgtccattattccacaatgctcacttgctcctagttccattattccacagttcctcccaccagttacttcaatggccttcgaacacccagctgtgcaagcctataggctacaacaagcgattgcggcgagcgtcttacaacaaccaattgcccaattgcaacaacaatccttggcacatctaacaatacaaaccatcgcaacgcaacagcaacaacagttcctaccagcactgagccacctagccatggtgaaccctgtcgcctact

SEQ ID NO: 345386 - DNA, 381 bp, Zea mays
attttcagttttcataaactctcttttcgaagcgcactagcaacaacctagcagagaatggctaccaagatattagccctccttgcgcttcttgcccttttagtgagcgcaacaaatgcgttcattattccacagtgctcacttgctcctagtgccattattccacagttcctcccaccagttacttcaatgggcttcgaacatccagccgtgcaagcctacaggctacaactagcgcttgcggcgagcgtcttacaacaaccaattgcccaattgcaacaacaattcttggcacatttaaacctacaaaccatcgcaacgcaacagcaacaacagtttctgccatcactgagccacctagccgtggtgaaccctgtcgcc

SEQ ID NO: 345387 - DNA, 138 bp, Zea mays
attcagaaacacaccaaagcacaagtgcgtaccaacacctaacaacaatgggtgggaagatattagccctccttgcgcttcttgccctttttgggagcgcaacaaatgcgttcattatttcacaaagctcacttgctt

SEQ ID NO: 345388 - DNA, 378 bp, Zea mays
tagaaacacaccattcgaagcgcattattaacgacctaacaccaatggctaccaggatattagccctccttgcgcttcttgccctttttgtgagcgcaacaaatgcgttcattattccacaatgctcacttgctcctagtgccattattccacagttcctcccaccagttacttcaatgggcttcgaacacctagctgtgcaagccaacatgcaacaacaagcgcttgcggcgagcgtcttacaacaaccaattgcccaattgcaacaacaatccttgccacatctaacaatacaagccatcacaacgcaacagcaacaacagttcctaccagcactgagccacctagccatggtgaaccctgccgcctacttgcaag

SEQ ID NO: 345389 - DNA, 380 bp, Zea mays
ttcgtgctacctgttatcaaccaagttgttctggcaaacctttctccctactctgcgcaacaacaatttcttccattcaaccaactgtctacactgaaccctgctgcttatttgcagcaacaactattaccatttagccagctagctactgcctactctcaacaacaacaacttcttccatttaaccaattggccgcactgaaccccgctgcttatttgcagcagcaaatactactaccatttagccagctagctacagcaagccgtgcttccttcttgacacaacaacagttgctgccgttctaccagcagtttgcggctaaccccgcaaccctcttacaactacaacaattgttgccctttgtccaacttgctttgac

SEQ ID NO: 345390 - DNA, 358 bp, Zea mays
  unsure (1)..(358): unsure at all n locations
cgcacacaccgnccggtccccgatcttcgatcccctcgtcgatccaaagatgcagatcttcgtcaagaccctcactggaaagactatcaccctcgaggtggagtcttctgacaccattgacaacgtcaaggccaagatccaggacaaggagggcatccccccggaccagcagcggctcatctttgctggcaagcagctcgaggacgggcgcacacttgccgactacaacatccagaaggagagcaccctccaccttgttctccgcctcaggggaggcatgcagatcttcgtcaagacccttactggaaagactatcaccctcgaggtggagtcttctgacaccatcgacaacgtcaag

SEQ ID NO: 345391 - DNA, 375 bp, Zea mays
attcagaaacacaccaagcgatgcgtattagcaacgacctaacaacaatggctaccaagatattagccctccttgcgcttcttgccctttttgtgagcgcaacaaatgcgttcattattccacaatgctcacttgctcctagtgccattattccacagttcctcccaccagttacttcaatgggcttcgaacacctagctgtgcaagccaacatgcaacaacaagcgcttgcggcgagcgtcttacaacaaccaattgcccaattgcaacaacaatccttgccacatctaacaatacaagccatcacaacgcaacagcaacaacagttcctaccagcactgagccacctagccatggtgaaccctgccgcctact

SEQ ID NO: 345392 - DNA, 374 bp, Zea mays
caactagcaacatagaaagcacaattgtgtaccaacaatggcagctaaaatattttgcctccttatgctccttggtctttctgcaagtgctgctacggcgaccattttcccacaatgctcacaagctcctatagcttcccttcttcccccgtacctctcaccaacggtgtcttcggtatgtgaaaacccaattcttcaaccctacaggatccaacaggcaatcgcagctggcatcttacctttatcacccttgttcctccaacaatcatcagccctattacagcagttacctttggtgcatttattggcacaaaacatcagggcacaacaactacaacaacttgtgctagcaaaccttgctgcctactctcagc

SEQ ID NO: 345393 - DNA, 377 bp, Zea mays
gcaacatagatagcacaatagttgttctaacaatggcagccaaaatattttgcgtccttatgctccttgggctttctgcaaatgctgctacggcgaccattttcccgaaatgctcgcaagctcctatagcttcccttcttcccccgtacctctcaccagcggtgtcttcggtatgtgaaaacccaattcttcaaccctacaggatccaacaggcaatcacagctggcatcttacctttatcacccttgttcctccaacaatcatcagccctattacatcagttacctttggtgcatttattggcacaaaacatcagggcacaacaactacaacaacttgtgctagcaaaccttgctgcctactctcagcaacagcag

SEQ ID NO: 345394 - DNA, 373 bp, Zea mays
attcagaaacacaccaagcgaagcgtactagcaacaacctaacaacaatggctaccaagatattagccctccttgcgcttcttgcccttttagtgagcgcaacaaatgcgttcattattccacagtgctcacttgctcctagtgccattattccacagttcctcccaccagttacttcaatgggcttcgaacatccagccgtgcaagcctacaggctacaactagcgcttgcggcgagcgtcttacaacaaccaattgcccaattgcaacaacaatccttggcacatctaaacctacaaaccatcgcaacgcaacagcaacaacagtttctgccatcactgagccacctagccgtggtgaaccctgtcgccta

SEQ ID NO: 345395 - DNA, 369 bp, Zea mays
attgagaccaactagcaacatagaatgcacaatagtgtaccaacaatggcagccaaaatattttgcttccttatgctccttggtctttctgcaagtgttgctaccgcaaccattttcccacaatgctcacaagctcctatagcttcccttcttcccccatacctctcaccagcggtgtcttcaatgtgtgaaaacccaattgttcaaccctacaggatccaacaggcaatcgcaacaggcatcttaccattatcacccttgttcctccaacaaccgtcagccctattacagcagttacctttggtccatttggtggcacaaaacatcagggcacaacaactacaacaacttgtgctagcaaaccttgct

SEQ ID NO: 345396 - DNA, 395 bp, Zea mays
gacgccacgactacgcgtcttaaaaccattagctttatctactccagagcgcagaagaacccgatcgacaccatgagggtgttgctcgttgccctcgctctcctggctctcgctgcgagcgccacctccacgcatacaagcggcggctgcggctgccagccaccgccgccggttcatctaccgccgccggtgcatctgccacctccggttcacctgccacctccggtgcatctcccaccgccggtccacctgccgccgccggtccacctgccaccgccggtccatgtgccgccgcagatagcgcagcaactgacggcgatgtgcggcctgcagcagccgactccatgcccctacgctgctgccggcggtgtcccccactgaagaaactatgtgct

SEQ ID NO: 345397 - DNA, 381 bp, Zea mays
ggtgcatttattggcacaaaacatcatggcacaacaactacaacaacttgtgctagcaaaccttgctgcctactctcagcaacagcagtttcttccattcaaccaactaggttcattgaactctgcttcttatttgcaacaacaacaactaccattcagccagctacctgctgcctacccccagcaatttcttccattcaaccaactagcagcattgaactctcctgcttatttacagcagcaacaactactaccattcagccagctagctggtgtgagccctgctaccttcttgacacaaccacagttgttgccgttctaccagcacgttgcgcctaacgctggcaccctcttacaactgcaacaattgctgccattcaa

SEQ ID NO: 345398 - DNA, 376 bp, Zea mays
aactagcaacataaaaagcacaatattgttccaacaatggcagccaaaatattttgcctgcttatgctccttggtctttctgcaagtgctgctacggcgaccattttcccgcaatgctcgcaagctcctatagcttcccttcttcccccgtacctctcaccagcggtgtcttcggtatgtgaaaacccaattcttcaaccctacaggatccaacaggcaatcgcagctggcatcttacctttatcacccttgttcctccaacaatcatcagccctattacaacagttacctttggtgcatttattggcacaaaacatcagggcacaacaactacaacaacttgtgctagcaaaccttgctgcctactctcagcaac

SEQ ID NO: 345399 - DNA, 376 bp, Zea mays
cccacgcgtccgcccacgcgtccgcatctagcaacatagaaagcacaatattgtaccaataatggcagccaaaatattttgcctcattatgctccttggtctttctgcaagtgctgctacggcgagcattttcccgcaatgctcacaagctcctatagcttcccttcttcccccatacctctcaccagcgatgtcttcagtatgtgaaaatccaattcttctaccctacaggatccaacaggcaatcgcagcaggcatcttacctttatcacccttgttcctccaacaatcatcagccctattacagcagttacctttggtgcatttattggcacaaaacatcagggcacaacaactacaacaactcgtgctagca

SEQ ID NO: 345400 - DNA, 250 bp, Zea mays
tacgtcgaatcggtgccagccacctcataagggatccatttccttgacacaagcaccaagatatttcctcttatgctcgcttttgatggtgtaccacatttctaagctacgcttatgttcttttccatccttccataagatgtcagatggaaaacccactttaaccctatagctcaacagaatccacagacataccttataccctgttaacaatcgcgctatttgggcagcattgtcaaccatagccaca

SEQ ID NO: 345401 - DNA, 374 bp, Zea mays
cagaaacacaccaagcgaagcgcactagcaacaacctaacaacaatggctaccgagatattatccttcctggcgcttttggcccttttggcagccccacaaatgccttcattattccacaatgctcacttgcttctaagtccattattccacagttcctcccaccagttacttcaatggccttcgaacacccagctgtgcaagcctataggctacaacaagcgattgcggcgagcgtcttacaacaaccaattgcccaattgcaacaacaatccttggcacatctaacaatacaaaccatcgcaacgcaacagcaacaacagttcctaccagcactgagccacctagccatggtgaaccctgtcgcctacttgc

SEQ ID NO: 345402 - DNA, 370 bp, Zea mays
catcaatcatcattcatcttagtagtataggcaccaaatcaaatctgcaacatcaattatctaactccaaaaaccatgaagctggtgcttgtggttcttgctttcattgctttagtatcaagtgtttcttgtacacagacaggcggctgcagctgtggtcaacaacaaagccatgagcagcaacatcatccacaacaacatcatccacaaaaacaacaacatcaaccaccaccacaacatcaccagcagcagcaacaccaacaacaacaagttcacatgcaaccacaaaaacatcagcaacaacaagaagttcatgttcaacaacaacaacaacaaccgcagcaccaacaacaacaacaacaacagcacc

SEQ ID NO: 345403 - DNA, 371 bp, Zea mays
cagaaacacaccaagcgaagcacattagcaacaacctaacaacaatggctaccaagatattatccctccttgcgcttcttgcgctttttgcgagcgcaacaaatgcgttcattattccacaatgctcacttgctccaagttccattattacacagttcctcccaccagttacttcaatgggcttcgaacacccagctgtgcaagcctataggctacaacaagcaattgcggcgagcgtcttacaacaaccaatttcccagttgcaacaacaatccttggcacatctaacaatacaaaccatcgcaacgcaacagcaacaacaattcctaccagcactgagccacctagccatggtgaaccctgccgcctac

SEQ ID NO: 345404 - DNA, 379 bp, Zea mays
gcaacatagaaagtggaatccagtttcaactttagagcaacaatggcgaccaagatattttccctccttatgctccttgctctttctgcatgtgttgctaacgcgacaattttccctcaatgctcacaagctcctatagcttcccttcttcccccataccttccatcaatgatagcttcagtatgtgaaaacccagctcttcaaccctataggctccaacaagcaatcgcagcaagcaacatacctttatcacccttgtttcaacaatcgccagccctatctttggtgcagtcattggtacaaaccatcagggcacagcagctgcagcaactcgtgctacctgtgatcaaccaagtagctctggcaaacctttctccct

SEQ ID NO: 345405 - DNA, 379 bp, Zea mays
cttctatcagtaccatcaatcatcattcatcttagtagtataggcaccaaatcaaatctgcaacatcaattatctaactccaaaaaccatgaagctggtgcttgtggttcttgctttcattgctttagtatcaagtgtttcttgtacacagacaggcggctgcagctgtggtcaacaacaaagccatgagcagcaacatcatccacaacaacatcatccacaaaaacaacaacatcaaccaccaccacaacatcaccagcagcagcaacaccaacaacaacaagttcacatgcaaccacaaaaacatcagcaacaacaagaagttcatgttcaacaacaacaacaacaaccgcagcaccaacaacaacaacaacaacag

SEQ ID NO: 345406 - DNA, 375 bp, Zea mays
caaaaacacacaaagggaagtgcactagcaacttcctaacaacaatggctaccaagatattagccctccttgcgctcctttccctttcagtgagcgcaacaactgcattcattattccacaatgctcacttgctcctaatgccattattccacagttcctcccatcagttacatcaatgggcatcgaacaccctattgtgcaagcctataggctacaacaagcgcttgcggcgagcgtcttacaacaaccgtttgcccaattacaacaacaatccttggcacatctaaccatacaaaccatcgcaacacaactagagcaacagtttgtgcccgcattgagccaactagccgcagtgaaccctgtctcctacttgc

SEQ ID NO: 345407 - DNA, 375 bp, Zea mays
attttgagcattcagaaacacaccttgcgattcgcactagcaacgacctaacaacaatggctaccaagatattagccctccttgcgcttcttgccctttttgtgagcgcaacaaatgcgttcattattccacaatgctcacttgctcctagtgccattattccacagttcctcccaccagttacttcaatgggcttcgaacacctagctgtgcaagccaacatgcaacaacaagcgcttgcggcgagcgtcttacaacaaccaattgcccaattgcaacaacaatccttgccacatctaacaatacaagccatcacaacgcaacagcaacaacaagtcctaccagcactgagccacctagccatggtgaaccctg

SEQ ID NO: 345408 - DNA, 367 bp, Zea mays
caactagcaacatagaaagcacaattgtgtaccaacaatggccgccaaaatctggagcttccttatgctcctgggtctttctgcaagtgttgctaccgcaaccattttcccacattgctcacaagctactatagctaaccttcttcccccatacctctcaccagcggtgtcttcaatgtgtgaaaacccaattgttcaaccctacaggatccaacaggcaatcgcaacaggcatgtgaccattatcacccttgttcctacaacaaccgtcagccctattacagcagttaccttcggtccatttggcggcacaaaacatcacggcacaacaactacatcaacttgtgctagcaaacctcgctgcatac

SEQ ID NO: 345409 - DNA, 371 bp, Zea mays
aaacacaccaagcgaagcgcactattaacaacctaacaacaatggctaccaagatattagccctccttgcgcttcttgcccttttagtgagcgcaacaaatgcgttcattattccacagtgctcacttgctcctagtgccattattccacagttcctcccaccagttacttcaatgggcttcgaacatccagccgtgcaagcctacaggctacaactagcgcttgcggcgagcgtcttacaacaaccaattgcccaattgcaacaacaatccttggcacatctaaacctacaaaccatcgcaacgcaacagcaacaacagtttctgccatcactgagccacctagccgtggtgaaccctgtcgcctacttg

SEQ ID NO: 345410 - DNA, 369 bp, Zea mays
ctagttgctgcctacccccagcaatttcttccattcaaccaactagcagcattgaactctgctgcttatttacagcagcaacaactactaccattcagccagctagctgatgtgagccctgctgccttcttgacacaacaacagttgttgccgttctacctgcacgctatgcctaacgctggcaccctcttacaactgcaacaattgctgccattcaaccaacttgctttgacaaactcaacagtgttctaccaacaacccatcattggtggtgccctcttttagattgcttatgagttatagttcaataatgaagttttttggatgatgtttgtggcgtcccagaaataagaaagtacatttctaaaa

SEQ ID NO: 345411 - DNA, 380 bp, Zea mays
cagaaacacaccaagcgaagcgcacttgcaacaacctaacaacaatggctaccaagatattagccctccttgcgcttcttgcccttttagtgagcgcaacaaatgcgttcattattccacagtgctcacttgctcctagtgccattattccacagttcctcccaccagttacttcaatgggcttcgaacatccagccgtgcaagcctacaggctacaactagcgcttgcggcgagcgtcttacaacaaccaattgcccaattgcaacaacaatccttggcacatctaaacctacaaaccatcgcaacgcaacagcaacaacagtttctgccatcactgagccacctagccgtggtgaaccctgtcgcctacttgcaacag

SEQ ID NO: 345412 - DNA, 377 bp, Zea mays
caactagcaacatagaaagcacaattttgtaccaacaatggcagccaaaatattttgccgccttatgctccttggtctttctgcaagtgctgctacggcgaccattttcccgaaatgctcgcaagctcctatagtttcccttcttcccccgtacctctcaccagcggtgtcttcggtatgtgaaaacccaattcttcaaccctacaggatccaacaggcaatcacagctggcatcttacctttatcacccttgttcctccaacaatcatcagccctattacatcagttacctttggtgcatttattggcacaaaacatcagggcacaacaactacaacaacttgtgctagcaaaccttgctgcctactctcagcaac

SEQ ID NO: 345413 - DNA, 377 bp, Zea mays
ccaagttccattattacacagttcttcccatcagttacttcaatgggcttcgaacacccagctgtgcaagcctataggctacaacaagcaattgcggcgagcgtcttacaacaaccaatttcccagttgcaacaacaatccttggcacatctaacaatacaaaccatcgcaacgcaacagcaacaacaattcctaccagcactgagccacctagccatggtgaaccctgccgcctacttgcaacagcagttgcttgcatcaaacccacttgctctggcaaacgtagttgcaaaccagccacaacaacagctgcaacagtttctgccagcgctcagtcaactagccatggtgaaccctgccgcctacctacaacagca

SEQ ID NO: 345414 - DNA, 374 bp, Zea mays
caacaagcaacatagaaagtttaattcagtagcaacaatagagcaacaatggcgaccaagatattttccctccttatgctccttgctctttctgcatgtgttgctaacgcgacaattttccctcaatgctcacaagctcctatagcttcccttcttcccccataccttccattaatgatagcttcagtatgtgaaaacccagctcttcaaccctataggctccaacaagcaatcgcagcacgcaacatacctttatcacccttgtttcaacaatcgccagccctatctttggtgcagtcattggtacaaaccatcagggcacagcagctgcagcaactcgtgctacctgtgatcaaccaagtagctctggcata

SEQ ID NO: 345415 - DNA, 377 bp, Zea mays
attctaaaacacaagaagcttaccttatctatcaacaacctaacaacaatggctgcgaagatattagccctccttgcgcttcttgccctttgagagagcgcaacaaatgcgtgcattattccacagagctcacttgctcctagtgccattattccacagttcctcccaccagttacttcaatgggctttgaacatacagccgtgcaagcctacaggctacaactagcgcttgcggcgagcgtcttacaacaaccaattgcccaattgcaacaacaatccttggcacatctaaacctacaaaccatcgcaacgcaacagcaacaacagtttctgccatcactgagccacctagccgtggtgaaccctgtcgcctactt

SEQ ID NO: 345416 - DNA, 375 bp, Zea mays
aagcaacatagaaagtggaatccagtagcaacaatagagcaacaatggagaccaagatattttccctccttatgctccttgctctttctacatgtgttgctaacgcgacaattttccctcaatgctcacaagctcctatagcttccctttttcccccataccttccatcaattatagcttcagtatgtgaaaacccagctcttcaaccatataggcttcaacaagcaatcgcagcaagcaacatacctttatcgcccttgttgtgtcaacaatcgccagccctatctttggtgcagtcattggtacaaaccatcagggcacaacagctgcagcaactcgtgctacctgtgatcaaccaagtagctctggcaaacc

SEQ ID NO: 345417 - DNA, 379 bp, Zea mays
gaccaactagcaacatagaaagcacattattgtaccaacaatggcagccaaaatatttggcttccttatgctccttggtctttctgcaagtgttgctaccgcaaccattttcccacaatgctcacaagctcctatagcttcccttcttcccccatacctctcaccagcggtgtcttcaatgtgtgaaaacccaattgttcaaccctacaggatccaacaggcaatcgcaacaggcatcttaccattatcacccttgttcctccaacaaccgtcagccctattacagcagttacctttggtccatttggtggcacaaaacatcagggcacaacaactacaacaacttgtgctagcaaaccttgctgcatactctcagcaa

SEQ ID NO: 345418 - DNA, 368 bp, Zea mays
gaccaacaagcaacatagaaagtggaatccagtagcaacaatagagcaacaatggcgaccaagatattttccctccttatgctccttgctctttctgcatgtgttgctaacgcgacaattttccctcaatgctcacaagctcctatagcttcccttcttcccccataccttccatcaatgatagcttcagtatgtgaaaacccagctcttcaaccctataggctccaacaagcaatcgcagcaagcaacatacctttatcacccttgtttcaacaatcgccagccctatctttggtgcagtcattggtacaaaccatcagggcacagcagctgcagcaactcgtgctacctgtgatcaaccaagtagc

SEQ ID NO: 345419 - DNA, 372 bp, Zea mays
cagaaacacaccaagcgaagcgcactagcaacaacctaacaacaatggctaccaagatattagccctccttgcgcttcttgcccttttagtgagcgcaacaaatgcgttcattattccacagtgctcacttgctcctagtgccattattccacagttcctcccaccagttacttcaatgggcttcgaacatccagccgtgcaagcctacaggctacaactagcgcttgcggcgagcgtcttacaacaaccaattgcccaattgcaacaacaatccttggcacatctaaacctacaaaccatcgcaacgcaacagcaacaacagtttctgccatcactgagccacctagccgtggtgaaccctgtcgcctact

SEQ ID NO: 345420 - DNA, 449 bp, Zea mays
  unsure (1)..(449): unsure at all n locations
tccatcgccgtctcgcggaaaggagaggcnnnatggcgattgcactattgtatcatnncctaggaaacccgtcgccggagcccaagagtatgaagctnnngcagtcctccaaggggaacgtctcaggagaggcgatcgaagagcacatatcgcagtagggggaccgagatatgggtaccgcgaggaaaaagtgcaaagccgagggctgagacgaccatccacgaccagaagctcgagatagtagaggacaaggagaaaaggggaaggtgaccnngtacccgaaaaaacctcgtcacttatgnncaccatttgccctaaccccgaagggcccaggaagcatctatttgaagcttgggctactacgcccactncagcatctccaatcggtaaaacatatattctcgcactcaaggcaggttacccctggtctggctccaatgcttcgtctg

SEQ ID NO: 345421 - DNA, 404 bp, Zea mays
ggaaatcccgggggcgccccacccgtccgtaaaaggcacaatagtgtcccaccattggttgccaaaatatttggcctccttatgctcctgggtctttctgcaagtgctgctacggcgaccattttcccgcaatgctcgcaagctcctatagcttcccttcttcccccgtacctctcaccagcggtgtcttcggtatgtgaaaacccaattcttcaaccctacaggatccaacaggcaatcgcagctggcatcttacctttatcacccttgttcctccaacaatcatcagccctattacaacagttacctttggtgcatttattggcacaaaacatcagggcacaacaactacaacaacttgtgctagcaaaccttgctgcctactctcagcaacagcagtttct

SEQ ID NO: 345422 - DNA, 377 bp, Zea mays
cagaccattagctttatctactccatagcgcagaagaacccgatcgacaccatgagggtgttgctcgttgccctcgctctcctggctctcgctgcgagcgccacctccacgcatacaagcggcggctgcggctgccagccaccgccgccggttcatctaccgccgccggtgcatctgccacctccggttcacctgccacctccggtgcatctcccaccgccggtccacctgccgccgccggtccacctgccaccgccggtccatgtgccgccgccggttcatctgccgccgccaccatgccactaccctactcaaccgccccggcctcagcctcatccccagccacacccatgcccgtgccaacagccgcatccaag

SEQ ID NO: 345423 - DNA, 375 bp, Zea mays
cacctggcaccatagaaggcccatttttgttccaataatggcagccaaaatatttggcctcattatgctccttggtctttctgcaagtgctgctacggcgagcattttcccgcaatgctcacaagctcctatagcttcccttcttcccccatacctctcaccagcgatgtcttcagtatgtgaaaatccaattcttctaccctacaggatccaacaggcaatcgcagcaggcatcttacctttatcacccttgttcctccaacaatcatcagccctattacagcagttacctttggtgcatttattggcacaaaacatcagggcacaacaactacaacaactcgtgctagcaaaccttgctgcctactctcagca

SEQ ID NO: 345424 - DNA, 375 bp, Zea mays
gcctagcaattagctcatcgactccagattggagaactcgacaccatgaaggtgctgatcgttgcccttgctctcctggcgctcgctgcgagcgccgcctccagtacaagcggcggctgtggctgccagacaccaccgtttcatctaccgcctccgttctatatgccgcctccgttctatctgccgccgcagcagcagccgcagccatggcaataccccactcaaccaccgcagctaagcccgtgccagcagttcggatcctgcggcgtcggcagcgtcggcagcccgttcctgggccagtgcgtcgagttcctgaggcaccagtgcagcccggcggcgacgccctacggctcgccacagtgccaggcgctgcag

SEQ ID NO: 345425 - DNA, 374 bp, Zea mays
attggcacaaaacatcagggcacaacaactacaacaacttgtgctagcaaaccttgctgcctactctcagcaacagcagtttcttccattcaaccaactaggttcattgaactctgcttcttatttgcaacaacaacaactaccattcagccagctacctgctgcctacccccagcaatttcttccattcaaccaactagcagcattgaactctcctgcttatttacagcagcaacaactactaccattcagccagctagctggtgtgagccctgctaccttcttgacacaaccacagttgttgccgttctaccagcacgttgcgcctaacgctggcaccctcttacaactgcaacaattgctgccattcaacc

SEQ ID NO: 345426 - DNA, 405 bp, Zea mays
  unsure (1)..(405): unsure at all n locations
cggaatncccgggcggcccaacccgtccgaacctggcaccatagaaggcacatttttgttccaccaatggcagccaaaatatttggcctccttatgctcctgggtctttctgcaagtgctgctacggcgaccattttcccgaaatgctcgcaagctcctatagcttcccttcttcccccgtacctctcaccagcggtgtcttcggtatgtgaaaacccaattcttcaaccctacaggatccaacaggcaatcacagctggcatcttacctttatcacccttgttcctccaacaatcatcagccctattacatcagttacctttggtgcatttattggcacaaaacatcagggcacaacaactacaacaacttgtgctagcaaaccttgctgcctactctcagcaa

SEQ ID NO: 345427 - DNA, 375 bp, Zea mays
cccacgcgtccggcaacatagaaagtggaatccagtagcaacaatagagcaacaatggagaccaagatattttccctccttatgctccttgctctttctacatgtgttgctaacgcgacaattttccctcaatgctcacaagctcctatagcttccctttttcccccataccttccatcaattatagcttcagtatgtgaaaacccagctcttcaaccatataggcttcaacaagcaatcgcagcaagcaacatacctttatcgcccttgttgtgtcaacaatcgccagccctatctttggtgcagtcattggtacaaaccatcagggcacaacagctgcagcaactcgtgctacctgtgatcaaccaagtagct

SEQ ID NO: 345428 - DNA, 372 bp, Zea mays
gaccaactagcaacatagaaagcacaatagtgtaccaacaatggcagccaaaatattttgcttccttatgctccttggtctttctgcaagtgttgctaccgcaaccattttcccacaatgctcacaagctcctatagcttcccttcttcccccatacctctcaccagcggtgtcttcaatgtgtgaaaacccaattgttcaaccctacaggatccaacaggcaatcgcaacaggcatcttaccattatcacccttgttcctccaacaaccgtcagccctattacagcagttacctttggtccatttggtggcacaaaacatcagggcacaacaactacaacaacttgtgctagcaaaccttgctgcatactc

SEQ ID NO: 345429 - DNA, 317 bp, Zea mays
acaccatgagggggtggttggtggccttggttttcctggttttggttggaagcgccacctccacgcatacaagcggcggttgcggttgccagccaccgccgccggttaatctaccgccgccggtgcatctgccacctccggttcacctgccacctccggggcatttcccaccgccggtccacctgccgccgccggtccacctgccaccgccggtccatgtgccgccgccggttcatctgccgccgccaccatgccactaccctactcaaccgccccggcctcagcctcatccccagccacacccatgcccgtgccaa

SEQ ID NO: 345430 - DNA, 291 bp, Zea mays
  unsure (1)..(291): unsure at all n locations
ttcttnncccccataccccttccatnnncaatagataagcgttcacgtgatgtgaaaaccccacgctnncttcaaccnnctatatggctctcaaccaagcannatcgcagcaaagcaaccatacnnctttatnncacccttgtttcaaccaatcgccacgccctatctnttggtgcccagtcattggtactaaaccatcagnggcactnagcagctgcaagcaaccctcgtgcctacctgtagatacaaccaaagtagcttttctggcaaactctttcttccctacttctc

SEQ ID NO: 345431 - DNA, 375 bp, Zea mays
cggacgcgtgggcggacgcgtgggtttcatcattcagaaacacaccaagcgaagcgcactagcaacaacctaacaacaatggctaccaagatattagccctccttgcgcttcttgcccttttagtgagcgcaacaaatgcgttcattattccacagtgctcacttgctcctagtgccattattccacagttcctcccaccagttacttcaatgggcttcgaacatccagccgtgcaagcctacaggctacaactagcgcttgcggcgagcgtcttacaacaaccaattgcccaattgcaacaacaatccttggcacatctaaacctacaaaccatcgcaacgcaacagcaacaacagtttctgccatcactgagc

SEQ ID NO: 345432 - DNA, 375 bp, Zea mays
caatggcagctaaaatattttgcctccttatgctccttggtctttctgcaagtgctgctacggcgaccattttcccacaatgctcacaagctcctatagcttcccttcttcccccgtacctctcaccaacggtgtcttcggtatgtgaaaacccaattcttcaaccctacaggatccaacaggcaatcgcagctggcatcttacctttatcacccttgttcctccaacaatcatcagccctattacagcagttacctttggtgcatttattggcacaaaacatcagggcacaacaactacaacaacttgtgctagcaaaccttgctgcctactctcagcaacagcagtttcttccattcaaccaactagctgcat

SEQ ID NO: 345433 - DNA, 194 bp, Zea mays
gctccttctccatcttcgttgttttttccgcctgcttcaacaccaccacgccgtttccgcaccccgacgccgcccaagaaacagaaactgaggcggcggccaggacaccggcgtcccctctctcgtcgctgggccgcgcgccggcggcagacgccgacgaggaggatggcgagcccagcgggatgagcatggac

SEQ ID NO: 345434 - DNA, 79 bp, Zea mays
gcatcaccatgggtggcagtgtcagtgtgagcaatgacctgaatgaacaattgaaatgaaaagaaaaaagtattgttcc

SEQ ID NO: 345435 - DNA, 372 bp, Zea mays
gagcattcagaaacacaccaagcgatgcacattagcaacaacctaacaacaatggctaccaagatattatccctccttgcgcttcttgcgctttttgcgagcgcaacaaatgcgttcattattccacaatgctcacttgctccaagttccattattacacagttcctcccaccagttacttcaatgggcttcgaacacccagctgtgcaagcctataggctacaacaagcaattgcggcgagcgtcttacaacaaccaatttcccagttgcaacaacaatccttggcacatctaacaatacaaaccatcgcaacgcaacagcaacaacaattcctaccagcactgagccacctagccatggtgaaccctgcc

SEQ ID NO: 345436 - DNA, 347 bp, Zea mays
  unsure (1)..(347): unsure at all n locations
aaaattatttggccttccttatgcttcctgggtattttctgcaagtgcttgctcacggcgaccatttttcccgcaatgctcacaagctcctatagcttcccttcttcccccgtacctctcaccagcggtgtcttcggtatgtgaaaacccaattcttcaaccctacaggatccaacaggcaatcgcagctggcatcttacctttatcacccttgttcctccaacaatcatcagccctattacagcagttacctttggtgcatttattggcacanaacatcanggcacaacaactacaacaacttgtgctagcaaaccttgctgcctactctcagcaacagcagtttc

SEQ ID NO: 345437 - DNA, 184 bp, Zea mays
  unsure (1)..(184): unsure at all n locations
ctcaaccaccgcagctaattccgngccagcagtacagaaccagcaccggggggggtatttttttcatcatttttgtccttttttctctattaattacttaatcaaattctacaattttttcatatatctcacattgctctattccttattacattcatatcaccatcagttctataataatttt

SEQ ID NO: 345438 - DNA, 372 bp, Zea mays
gagaccaactagcaacatagaaagcacaatattgtaccaataatggcagccaaaatattttgcctcattatgctccttggtctttctgcaagtgctgctacggcgagcattttcccgcaatgctcacaagctcctatagcttcccttcttcccccatacctctcaccagcgatgtcttcagtatgtgaaaatccaattcttctaccctacaggatccaacaggcaatcgcagcaggcatcttacctttatcacccttgttcctccaacaatcatcagccctattacagcagttacctttggtgcatttattggcacaaaacatcagggcacaacaactacaacaactcgtgctagcaaaccttgctgcctac

SEQ ID NO: 345439 - DNA, 310 bp, Zea mays
caacatgcaacatagaaagtggattttagtagcaacaatagagcaacaatggcgaccaagatattttccctccttatgctccttgctctttctgcatgtgttgctaacgcgacaattttcccttaatgctcacaagctcctatagctttccttctttccccataccttccatcaatgatagcttcagtatgtgaaaacccagctctttaaccctataggctccaacaagcaatcgcagcaagcaacatacctttatcacccttgtttcaacaatcgccagccctattcttggtgcagtcattgcttcaat

SEQ ID NO: 345440 - DNA, 379 bp, Zea mays
gtccgtttaaaaaccataccaagcgaaccgtactatcaccaacctaacaccaatggctaccaagatattatccctccttgcgcttcttgcgctttttgcgagcgcaacaaatgcgtccattattccacaatgctcacttgctcctagttccattattccacagttcctcccaccagttacttcaatggccttcgaacacccagctgtgcaagcctataggctacaacaagcgattgcggcgagcgtcttacaacaaccaattgcccaattgcaacaacaatccttggcacatctaacaatacaaaccatcgcaacgcaacagcaacaacagttcctaccagcactgagccacctagccatggtgaaccctgtcgcctac

SEQ ID NO: 345441 - DNA, 373 bp, Zea mays
aagcctagcaattagctcatcgacttcagattggagaactcgacaccatgaaggtgctgatcgttgcccttgctctcctggcgctcgctgcgagcgccgcctccagtacaagcggcggctgtggctgccagacaccaccgtttcatctaccgcctccgttctatatgccgcctccgttctatctgccgccgcagcagcagccgcagccatggcaataccccactcaaccaccgcagctaagcccgtgccagcagttcggatcctgcggcgtcggcagcgtcggcagcccgttcctgggccagtgcgtcgagttcctgaggcaccagtgcagcccggcggcgacgccctacggctcgccacagtgccaggcgct

SEQ ID NO: 345442 - DNA, 374 bp, Zea mays
attgagaccaactagcaacatagaaagcactatagtgtaccaacaatggcagccaaaatattttgcctccttatgctccttggtctttctgcaagtgctgctacggcgaccattttcccacaatgctcacaagctcctatagcttcccttcttcccccgtacctctcaccagcggtgtcttcggtatgtgaaaacccaattcttcaaccctataggatccaacaggcaatcgcagctggcatcttacctttatcacccttgttcctccaacaatcatcagccctattacagcagttacctttggtgcatttattggcacaaaacatcagggcacaacaactacaacaacttgtgctagcaaaccttgctgccta

SEQ ID NO: 345443 - DNA, 378 bp, Zea mays
tagcaacatagaaagcacaatagtgtaccaacaatggcagccaaaatattttgcctccttatgctccttggtctttctgcaagtgctgctacggcgaccattttcccgaaatgctcgcaagctcctatagcttcccttcttcccccgtacctctcaccagcggtgtcttcggtatgtgaaaacccaattcttcaaccctacaggatccaacaggcaatcacagctggcatcttacctttatcacccttgttcctccaacaatcatcagccctattacatcagttacctttggtgcatttattggcacaaaacattagggcacaacaactacaacaacttgtgctagcaaaccttgctgcctactctcagcaacagcag

SEQ ID NO: 345444 - DNA, 372 bp, Zea mays
ggtcttcagaccattagctttatctactccagagcgcagaagaacccgatcgacaccatgagggtgttgctcgttgccctcgctctcctggctctcgctgcgagcgccacctccacgcatacaagcggcggctgcggctgccagccaccgccgccggttcatctaccgccgccggtgcatctgccacctccggttcacctgccacctccggtgcatctcccaccgccggtccacctgccgccgccggtccacctgccaccgccggtccatgtgccgccgccggttcatctgccgccgccaccatgccactaccctactcaaccgccccggcctcagcctcatccccagccacacccatgcccgtgccaacag

SEQ ID NO: 345445 - DNA, 373 bp, Zea mays
attttgagcattcagaaacacaccaagcgaagcacattagcaacaacctaacaacaatggctaccaagatattatccctccttgcgcttcttgcgctttttgcgagcgcaacaaatgcgttcattattccacaatgctcacttgctccaagttccattattacacagttcctcccaccagttacttcaatgggcttcgaacacccagctgtgcaagcctataggctacaacaagcaattgcggcgagcgtcttacaacaaccaatttcccagttgcaacaacaatccttggcacatctaacaatacaaaccatcgcaacgcaacagcaacaacaattcctaccagcactgagccacctagccatggtgaaccc

SEQ ID NO: 345446 - DNA, 372 bp, Zea mays
attcagaaacacaccaagcgtatacgcactagcaacaacctaacaacaatggctaccaagatattagccctccttgcgcttcttgcccttttagtgagcgcaacaaatgcgttcattattccacagtgctcacttgctcctagtgccattattccacagttcctcccaccagttacttcaatgggcttcgaacatccagccgtgcaagcctacaggctacaactagcgcttgcggcgagcgtcttacaacaaccaattgcccaattgcaacaacaatccttggcacatctaaacctacaaaccatcgcaacgcaacagcaacaacagtttctgccatcactgagccacctagccgtggtgaaccctgtcgcc

SEQ ID NO: 345447 - DNA, 371 bp, Zea mays
aacttggcaccataaaaggcacatttttgttccaccaatggcagccaaaatatttggcgtccttatgctcctgggcctttctgcaagtgctgttacggcgaccattttcccgaaatgctcgcaggctcctatagcttcccttcttcccccgtacctttaaccagcggtgtcttcggtatgtgaaaacccaattcttcaaccctacaggatccaacaggcaatcacagctggcatcttacctttatcacccttgttcctccaacaatcatcagccctattacatcagttacctttggtgcatttattggcacaaaacatcagggcacaacaactacaacaacttgtgctagcaaaccttgctgcctactctc

SEQ ID NO: 345448 - DNA, 378 bp, Zea mays
cgacccacgcgtgcgtttaaagcatctataaacacaccattcgaagcgcactagcaacaaccgaacaggagtggctaccaagatattatccctccttgcgcttcttgcgctttttgcgagcgcaacaaatgcgtccattattccacaatgctcacttgctcctagttccattattccacagttcctcccaccagttacttcaatggccttcgaacacccagctgtgcaagcctataggctacaacaagcgattgcggcgagcgtcttacaacaaccaattgcccaattgcaacaacaatccttggcacatctaacaatacaaaccatcgcaacgcaacagcaacaacagttcctaccagcactgagccacctagccat

SEQ ID NO: 345449 - DNA, 375 bp, Zea mays
attttgagcattcaaaaccacaccttgcgatgcacattagcaacaacctaacaccaatggctaccaagatattatccctccttgcgcttcttgcgctttttgcgagcgcaacaaatgcgttcattattccacaatgctcacttgctccaagttccattattacacagttcctcccaccagttacttcaatgggcttcgaacacccagctgtgcaagcctataggctacaacaagcaattgcggcgagcgtcttacaacaaccaatttcccagttgcaacaacaatccttggcacatctaacaatacaaaccatcgcaacgcaacagcaacaacaattcctaccagcactgagccacctagccatggtgaaccctg

SEQ ID NO: 345450 - DNA, 196 bp, Zea mays
  unsure (1)..(196): unsure at all n locations
tanccaccaaatcaaaactgcaacattaatgttataacgccaaaaaccatgaagcggcgtcgtgtttttattgctttgagtgctccacaaccaaangacaagctgcacacagacactcgcgctacaccaccaggtcaacaacaaactcatgagcataaacctcatccacaacaacatcctccacaaaaacaacaac

SEQ ID NO: 345451 - DNA, 332 bp, Zea mays
  unsure (1)..(332): unsure at all n locations
gtcacgcagcgttaaaatactatggtatatggtggcacaaatttggcgactactggggggccattcattcaactagctcgactatgatgcaccaatgagaatatggcttggagatttcaaagggcacatctgaggacttacaaattataaattggtggcacaccctgcttatgaatacaacgtttttctctgggtctaacaagagctgatatttcagtgacagtctggagctgtgttcattcctggaaatattgattcagccaatgacaaagtgcactttccgaacaggcaatatgatcttnctgcttggtcagttagtattctttctgact

SEQ ID NO: 345452 - DNA, 372 bp, Zea mays
attcagaaacacaccaagcgaagcgtactagcaacaacctaacaacaatggctaccaagatattatccctccttgcgcttcttgcgctttttgcgagcgcaacaaatgcgtccattattccacaatgctcacttgctcctagttccattattccacagttcctcccaccagttacttcaatggccttcgaacacccagctgtgcaagcctataggctacaacaagcgattgcggcgagcgtcttacaacaaccaattgcccaattgcaacaacaatccttggcacatctaacaatacaaaccatcgcaacgcaacagcaacaacagttcctaccagcactgagccacctagccatggtgaaccctgtcgcct

SEQ ID NO: 345453 - DNA, 383 bp, Zea mays
aagcacaatagtgtaccaacaatgtctagctaaaatattttgcctccttatgctccttggtctttctgcaagtgctgctacggcgaccattttcccacaatgctcacaagctcctatagcttcccttcttcccccgtacctctcaccaacggtgtcttcggtatgtgaaaacccaattcttcaaccctacaggatccaacaggcaatcgcagctggcatcttacctttatcacccttgttcctccaacaatcatcagccctattacagcagttacctttggtgcatttattggcacaaaacatcagggcacaacaactacaacaacttgtgctagcaaaccttgctgcctactctcagcaacagcagtttcttccattcaacc

SEQ ID NO: 345454 - DNA, 376 bp, Zea mays
gcaacatagaaagcacaatagtgtatcaacaatggcagccaaaatattttgcctccttatgctccttggtctttctgcaagtgctgctacggcgaccattttcccgaaatgctcgcaagctcctatagcttcccttcttcccccgtacctctcaccagcggtgtcttcggtatgtgaaaacccaattcttcaaccctacaggatccaacaggcaatcacagctggcatcttacctttatcacccttgttcctccaacaatcatcagccctattacatcagttacctttggtgcatttattggcacaaaacatcagggcacaacaactacaacaacttgtgctagcaaaccttgctgcctactctcagcaacagcag

SEQ ID NO: 345455 - DNA, 375 bp, Zea mays
ctaacaacaatggctacctttatattatccctccttgcgcttcttgcgctgtttgcgagcgcaacaaatgcgtccattattccacaatgctcacttgctcctagttccattattccacagttcctcccaccagttacttcaatggccttcgaacacccagctgtgcaagcctataggctacaacaagcgattgcggcgagcgtcttacaacaaccaattgcccaattgcaacaacaatccttggcacatctaacaatacaaaccatcgcaacgcaacagcaacaacagttcctaccagcactgagccacctagccatggtgaaccctgtcgcctacttgcaacagcagctgcttgcatacaacccacttgctcta

SEQ ID NO: 345456 - DNA, 383 bp, Zea mays
ctcccaccgccggtccacctgccgtcgtcggtccacctgccaccgccggtccatgtgccgccgccggttcatctgccgccgccaccatgccactaccctactcaaccgccccggcctcagcctcatccccagccacacccatgcccgtgccaacagccgcatccaagcccgtgccagctgcagggaacctgcggcgttggcagcaccccgatcctgggccagtgcgtcgagttcctgaggcatcagtgcagcccgacggcgacgccctactgctcgcctcagtgccagtcgttgcggcagcagtgttgccagcagctcaggcaggtggagccgcagcaccggtaccaggcgatcttcggcttggtcctccagtccatcctgca

SEQ ID NO: 345457 - DNA, 389 bp, Zea mays
  unsure (1)..(389): unsure at all n locations
cttccgttggaacccacctggcaccataaattgttcattagtgtaccaacaatggcagccaaaatattttgcttccttatgctccttggtctttctgcaagtgttgctaccgcaaccattttcccacaatgctcacaagctcctatagcttcccttcttcccccatacctctcaccagcggtgtcttcaatgtgtgaaaacccaattgttcaaccctacaggatccaacaggcaatcgcaacaggcatcttaccattatcacccttgttcctccaacaaccgtcagccctattacagcagntacctttggtccatttggtggcacaaaacatcagggcacaacaactacaacaacttgtgctagcaaaccttgctgcatactctcagca

SEQ ID NO: 345458 - DNA, 380 bp, Zea mays
gaaacacaccaagcgaagcttcttttctaacgacttaacaacaatggctaccaagatattagccctccttgcgcttcttgccctttttgtgagcgcaacaaatgcgttcattattccacaatgctcacttgctcctagtgccattataccacagttcctccgaccagttacttcaatgggcttcgaacacctagctgtgcaagcctacaggctacaacaagcgcttgcggcgagcgtcttacaacaaccaattaaccaattgcaacaacaatccttggcacatctaaccatacaaaccatcgcaacacaacagcaacaacagttcctaccagcactgagccaactagatgtggtgaaccctgtcgcctacttgcaacagc

SEQ ID NO: 345459 - DNA, 380 bp, Zea mays
gaccattagctttatctactcttgagcgcagaagaacccgatcgacaccatgagggtgttgctcgttgccctcgctctcctggctctcgctgcgagcgccacctccacgcatacaagcggcggctgcggctgccagccaccgccgccggttcatctaccgccgccggtgcatctgccacctccggtaccaggcgatcttcggcttggtcctccagtccatcctgcagcagcagccgcaaagcggccaggtcgcggggctgttggcggcgcagatagcgcagcaactgacggcgatgtgcggcctgcagcagccgactccatgcccctacgctgctgccggcggtgtcccccactgaagaaactatgtgctgtagtatagc

SEQ ID NO: 345460 - DNA, 376 bp, Zea mays
catagaaagcacaatagtgtacttacaatggcagccaaaatattttgcctgcttatgctccttggtctttctgcaagtgctgctacggcgaccattttcccgcaatgctcgcaagctcctatagcttcccttcttcccccgtacctctcaccagcggtgtcttcggtatgtgaaaacccaattcttcaaccctacaggatccaacaggcaatcgcagctggcatcttacctttatcacccttgttcctccaacaatcatcagccctattacaacagttacctttggtgcatttattggcacaaaacatcagggcacaacaactacaacaacttgtgctagcaaaccttgctgcctactctcagcaacagcagtttc

SEQ ID NO: 345461 - DNA, 379 bp, Zea mays
gcaaagcggcagtgcgtagagagtgttcgtcgaacagaacagcatgaagatggtcatcgttctcgtcgtgtgcctggctctgtcagctgccagcgcctctgcaatgcagatgccctgcccctgcgcggggctgcagggcttgtacggcgctggcgccggcctgacgacgatgatgggcgccggcgggctgtacccctacgcggagtacctgaggcagccgcagtgcagcccgctggcggcggcgccctactacgccgggtgtgggcagacgagcgccatgtaccagccgctccggcaacagtgctgccagcagcagatgaggatgatggacgtgcagtccgtcgcgcagcaactgcagatgatgatgcagcttgagcgt

SEQ ID NO: 345462 - DNA, 380 bp, Zea mays
aacaataaaaggcacattagggtactttcattggcagccaaaatattttgcctccttatgctccttggtctttctgcaagtgctgctacggcgaccattttcccgcaatgctcgcaagctcctatagcttcccttcttcccccgtacctctcaccagcggtgtcttcggtatgtgaaaacccaattcttcaaccctacaggatccaacaggcaatcgcagctggcatcttacctttatcacccttgttcctccaacaatcatcagccctattacaacagttacctttggtgcatttattggcacaaaacatcagggcacaacaactacaacaacttgtgctagcaaaccttgctgcctactctcagcaacagcagtttct

SEQ ID NO: 345463 - DNA, 353 bp, Zea mays
ccaacaatggcagccaaaatattttgcctccttatgctccttggtatttctgcaagtgctgctacggcgaccattttcccgcaatgctcacaagctcctatagcttcccttcttcccccgtacctctcaccagcggtgtcttcggtatgtgaaaacccaattcttcaaccctacaggatccaacaggcaatcgcagctggcatcttacctttatcacccttgttcctccaacaatcatcagccctattacagcagttacctttggtgcatttattggcacaaaacatcagggcacaacaactacaacaacttgtgctagcaaaccttgctgcctactctcagcaacagcagtt

SEQ ID NO: 345464 - DNA, 197 bp, Zea mays
ggcgtgaaagaaaaactccggtatgtcgaatggcggcggcggagaagcccgcggcggtgcggcgagcggaggagctggtggagagggagatgggcgggcgccacacctcccacgactcctcacacgctcttatagttcgagaccttgcgctttacctctcacccgatgagtgtctcttctgtccataccgacttctt

SEQ ID NO: 345465 - DNA, 383 bp, Zea mays
cagcctagcaattagctcatctactccagattggagaactcgacaccatgaaggtgctgatcgttgcccttgctctcctggcgctcgctgcgagcgccgcctccagtacaagcggcggctgtggctgccagacaccaccgtttcatctaccgcctccgttctatatgccgcctccgttctatctgccgccgcagcagcagccgcagccatggcaataccccactcaaccaccgcagctaagcccgtgccagcagttcggatcctgcggcgtcggcagcgtcggcagcccgttcctgggccagtgcgtcgagttcctgaggcaccagtgcagcccggcggcgacgccctacggctcgccacagtgccaggcgctgcagcagcag

SEQ ID NO: 345466 - DNA, 383 bp, Zea mays
attagctcatcgactccagattggtgatctcgacaccatgaaggtgctgatcggtggccttgctctcctggcgctcgctgcgagcgccgcctccagtacaagcggcggctgtggctgccagacaccaccgtttcatctaccgcctccgttctatatgccgcctccgttctatctgccgccgcagcagcagccgcagccatggcaataccccactcaaccaccgcagctaagcccgtgccagcagttcggatcctgcggcgtctgcagcgtcggcagcccgttcctgggccagtgcgtcgagttcctgaggcaccagtgcagcccggcggcgacgccctacggctcgccacagggccaggcgctgcagcagcattgctgtcacc

SEQ ID NO: 345467 - DNA, 382 bp, Zea mays
gaaagcacaatagtgtaccaacattttgcatgccaaaatattttgcctccttatgctccttggtctttctgcaagtgctgctacggcgaccattttcccgaaatgctcgcaagctcctatagcttcccttcttcccccgtacctctcaccagcggtgtcttcggtatgtgaaaacccaattcttcaaccctacaggatccaacaggcaatcacagctggcatcttacctttatcacccttgttcctccaacaatcatcagccctattacatcagttacctttggtgcatttattggcacaaaacatcagggcacaacaactacaacaacttgtgctagcaaaccttgctgcctactctcagcaacagcagtttctatcattc

SEQ ID NO: 345468 - DNA, 379 bp, Zea mays
attaagaccaactagcaacatagaaagcacaatagtgtaccaacaatggcaaccaaaatattttgcttccttatgctccttggtctttctgcaagtgctgctaccgcgaccattttcccgcaatgctcacaagctcctatagcttcccttcttcccccatacctctcaccagcggtgtcttcagtatgtgaaaacccaattcttcaaccctacaggatccaacaggcaatcgcagcaggcatcttacctttatcacccttgttcctccaacaaccgtcagccctattacagcagttacctttggtgcatttgttggcacaaaacatcagggcacaacaactacaacaacttgtgctagcaaaccttgctgcctactctc

SEQ ID NO: 345469 - DNA, 326 bp, Zea mays
gtgagcactgcggaataatcccactgtatctcccaccagttacttcaatgggctgggaacatccagtcgtgcaagcctacacgctacaactagcgcttgcggcgagcgtgttacaacaaccaattgcccaattgcaacaacaatccttggcacatctaaacctacaaaccatcgcaacgcaacagcaacaacagtttctgccatcactgagccacctagccgtggtgaaccctgtcgtctacttgcaacagcagctacttgcattcaacccacttgctctggcgaacgtagctgcataccagcaacaacaacgtctgcaacagttt

SEQ ID NO: 345470 - DNA, 380 bp, Zea mays
cgactccagattggagaactcgactctcatgaaggtgctgatcgttgcccttgctctcctggcgctcgctgcgagcgccgcctccagtacaagcggcggctgtggctgccagacaccaccgtttcatctaccgcctccgttctatatgccgcctccgttctatctgccgccgcagcagcagccgcagccatggcaataccccactcaaccaccgcagctaagcccgtgccagcagttcggatcctgcggcgtcggcagcgtcggcagcccgttcctgggccagtgcgtcgagttcctgaggcaccagtgcagcccggcggcgacgccctacggctcgccacagtgccaggcgctgcagcagcagtgctgccaccagatca

SEQ ID NO: 345471 - DNA, 381 bp, Zea mays
agcaaagcggcagtgcgtagagaggatcgtcgaacagaacagcatgaagatggtcatcgttctcgtcgtgtgcctggctctgtcagctgccagcgcctctgcaatgcagatgccctgcccctgcgcggggctgcagggcttgtacggcgctggcgccggcctgacgacgatgatgggcgccggcgggctgtacccctacgcggagtacctgaggcagccgcagtgcagcccgctggcggcggcgccctactacgccgggtgtgggcagacgagcgccatgtaccagccgctccggcaacagtgctgccagcagcagatgaggatgatggacgtgcagtccgtcgcgcagcagctgcagatgatgatgcagcttgagcgtgc

SEQ ID NO: 345472 - DNA, 385 bp, Zea mays
  unsure (1)..(385): unsure at all n locations
cgcaaccttaaaaggcccaatagggttttatacaatggcagccaaaatattttgcctgcttatgctccttggtctttctgcaagtgctgctacggcgaccattttcccgaaatgctcgcaagctcctatagcttcccttcttcccccgtacctctcaccagcggtgtcttcggtatgtgaaaacccaattcttcaaccctacaggatccaacaggcaatcacagctggcatcttacctttatcacccttgttcctccaacantnatcagccctattacatcagttacctttggtgcatttattggcacaaaacatcagggcacaacaactacaacaacttgtgctagcaaaccttgctgcctactctcagcaacagcagtttctt

SEQ ID NO: 345473 - DNA, 379 bp, Zea mays
gtggaatccagtagcaacaatagttcaacaatggagaccaagatattttccctccttatgctccttgctctttctacatgtgttgctaacgcgacaattttccctcaatgctcacaagctcctatagcttccctttttcccccataccttccatcaattatagcttcagtatgtgaaaacccagctcttcaaccatataggcttcaacaagcaatcgcagcaagcaacatacctttatcgcccttgttgtgtcaacaatcgccagccctatctttggtgcagtcattggtacaaaccatcagggcacaacagctgcagcaactcgtgctacctgtgatcaaccaagtagctctggcaaacctttctccctactctccgc

SEQ ID NO: 345474 - DNA, 259 bp, Zea mays
  unsure (1)..(259): unsure at all n locations
gaccattagctttatctactccatttcgcagaagaacccgatcgacaccatgagggtgttgctcgttgccctcgctctcctggctctcgctgcgagcgccacctccacgcatacaagcggcggctgcggctgccagccaccgccgccggttcatctaccgccgccggtgcatctgccacctccggttcacctgccaaccagaaataagaagttacatttccagattctaatgtgatattggtctccaagggtgttcgnt

SEQ ID NO: 345475 - DNA, 373 bp, Zea mays
cagatcagcaaagcggcagtgcgttgagaggatcgtcgaacagaacagcatgaagatggtcatcgttctcgtcgtgtgcctggctctgtcagctgccagcgcctctgcaatgcagatgccctgcccctgcgcggggctgcagggcttgtacggcgctggcgccggcctgacgacgatgatgggcgccggcgggctgtacccctacgcggagtacctgaggcagccgcagtgcagcccgctggcggcggcgccctactacgccgggtgtgggcagacgagcgccatgtaccagccgctccggcaacagtgctgccagcagcagatgaggatgatggacgtgcagtccgtcgcgcagcagctgcagatgatgatg

SEQ ID NO: 345476 - DNA, 380 bp, Zea mays
ctggacgtcagcctagcaattagcttattgactccagattggagaactcgacaccatgaaggtgctgatcgttgcccttgctctcctggcgctcgctgcgagcgccgcctccagtacaagcggcggctgtggctgccagacaccaccgtttcatctaccgcctccgttctatatgccgcctccgttctatctgccgccgcagcagcagccgcagccatggcaataccccactcaaccaccgcagctaagcccgtgccagcagttcggatcctgcggcgtcggcagcgtctgcagcccgttcctgggccagtgcgtcgagttcctgaggcaccagtgcagcccggcggcgacgccctacggctcgccacagtgccaggcgc

SEQ ID NO: 345477 - DNA, 381 bp, Zea mays
gtggaatccagtagcaacaattttttaacaatggcgaccaagatattttccctccttatgctccttgctctttctgcatgtgttgctaacgcgacaattttccctcaatgctcacaagctcctatagcttcccttcttcccccataccttccatcaatgatagcttcagtatgtgaaaacccagctcttcaaccctataggctccaacaagcaatcgcagcaagcaacatacctttatcacccttgtttcaacaatcgccagccctatctttggtgcagtcattggtacaaaccatcagggcacagcagctgcagcaactcgtgctacctgtgatcaaccaagtagctctggcaaacctttctccctactctcagcaacaa

SEQ ID NO: 345478 - DNA, 381 bp, Zea mays
attttgagcattcagaaacacattattcgaagctacctagcaacgacttaacaacaatggctaccaagatattagccctccttgcgcttcttgccctttttgtgagcgcaacaaatgcgttcattattccacaatgctcacttgctcctagtgccattataccacagttcctccgaccagttacttcaatgggcttcgaacacctagctgtgcaagcctacaggctacaacaagcgcttgcggcgagcgtcttacaacaaccaattaaccaattgcaacaacaatccttggcacatctaaccatacaaaccatcgcaacacaacagcaacaacagttcctaccagcactgagccaactagatgtggtgaaccctgtcgcct

SEQ ID NO: 345479 - DNA, 382 bp, Zea mays
aactagcaacatagaaagcacatttgtgtaccaacaatggcagccaaaatattttgcctccttatgctccttggtatttctgcaagtgctgctacggcgaccattttcccgcaatgctcacaagctcctatagcttcccttcttcccccgtacctctcaccagcggtgtcttcggtatgtgaaaacccaattcttcaaccctacaggatccaacaggcaatcgcagctggcatcttacctttatcacccttgttcctgcaacaatcatcagccctattacagcagttacctttggtgcatttattggcacaaaacatcagggcacaacaactacaacaacttgtgctagcaaaccttgctgcctactctcagcaacagcagt

SEQ ID NO: 345480 - DNA, 381 bp, Zea mays
attagctcatcgactccagattgtagaactcgacaccatgaaggtgctgatcgttgcccttgctctcctggcgctcgctgcgagcgccgcctccagtacaagcggcggctgtggctgccagacaccaccgtttcatctaccgcctccgttctatatgccgcctccgttctatctgccgccgcagcagcagccgcagccatggcaataccccactcaaccaccgcagctaagcccgtgccagcagttcggatcctgcggcgtcggcagcgtcggcagcccgttcctgggccagtgcgtcgagttcctgaggcaccagtgcagcccggcggcgacgccctacggctcgccacagtgccaggcgctgcagcagcagtgctgcca

SEQ ID NO: 345481 - DNA, 382 bp, Zea mays
attgagaccaactagcaacatatttagcacaatagtgtaccaacaatggcagcgcaaaatattttgcctccttatgctccttggtctttctgcaagtgctgctacggcgaccattttcccgaaatgctcgcaagctcctatagcttcccttcttcccccgtacctctcaccagcggtgtcttcggtatgtgaaaacccaattcttcaaccctacaggatccaacaggcaatcacagctggcatcttacctttatcacccttgttcctccaacaatcatcagccctattacatcagttacctttggtgcatttattggcacaaaacatcagggcacaacaactacaacaacttgtgctagcaaaccttgctgcctactctcag

SEQ ID NO: 345482 - DNA, 248 bp, Zea mays
agcagaaccagcagcaccgtcgaggcttccagcagcgacgcgcaggcgcccatgcaggccatgccgctcccgccgtcgctcgagctggacctgttccaccgcgcggcggccgcggccacgggcacgggcgctgccgccgtacgcttccctttcggcagcatccccgttacgcacccgtactactttttcgggcaggccgcaaccgcagccgcggaagcagggtgccgtgtgctcaagctggcgccggc

SEQ ID NO: 345483 - DNA, 390 bp, Zea mays
cttccgaggctttcaaaaacacaccaagcgtttttacctagcaacgacttaacaacaatggctaccaagatattagccctccttgcgcttcttgccctttttgtgagcgcaacaaatgcgttcattattccacaatgctcacttgctcctagtgccattataccacagttcctccgaccagttacttcaatgggcttcgaacacctagctgtgcaagcctacaggctacaacaagcgcttgcggcgagcgtcttacaacaaccaattaaccaattgcaacaacaatccttggcacatctaaccatacaaaccatcgcaacacaacagcaacaacagttcctaccagcactgagccaactagatgtggtgaaccctgtcgcctacttgcaa

SEQ ID NO: 345484 - DNA, 374 bp, Zea mays
attttgagcattcagaaacacacctttttaagcgcactagcaacgacctaacaacaatggctaccaagatattagccctccttgcgcttcttgccctttttgtgagcgcaacaaatgcgttcattattccacaatgctcacttgctcctagtgccattattccacagttcctcccaccagttacttcaatgggcttcgaacacctagctgtgcaagccaacatgcaacaacaagcgcttgcggcgagcgtcttacaacaaccaattgcccaattgcaacaacaatccttgccacatctaacaatacaagccatcacaacgcaacagcaacaacagttcctaccagcactgagccacctagccatggtgaaccct

SEQ ID NO: 345485 - DNA, 299 bp, Zea mays
gcagaagaacccgatcgacaccattagggtgttgctcgttgccctcgctctcctggctctcgctgcgagcgccacctccacgcatacaagcggcggctgcggctgccagccaccgccgccggttcatctaccgccgccggtgcatctgccacctccggttcacctgccacctccggtgcatctcccaccgccggtccacctgccgccgccggtccacctgccaccgtcggtccatgtgccgtcgtcggttcatctgccgccgtcaccatgccactaccctacttaaccgtcccggccct

SEQ ID NO: 345486 - DNA, 372 bp, Zea mays
gagaccaactagcaacatagaatgtacaatagtgtaccaacaatggcagccaaaatattttgcctccttatgctccttggtctttctgcaagtgctgctacggcgaccattttcccgaaatgctcgcaagctcctatagcttcccttcttcccccgtacctctcaccagcggtgtcttcggtatgtgaaaacccaattcttcaaccctacaggatccaacaggcaatcacagctggcatcttacctttatcacccttgttcctccaacaatcatcagccctattacatcagttacctttggtgcatttattggcacaaaacatcagggcacaacaactacaacaacttgtgctagcaaaccttgctgcctac

SEQ ID NO: 345487 - DNA, 380 bp, Zea mays
ctggacgtcagcctagcaattagctcatcgactccagattggagaactcgacaccatgaaggtgctgatcgttgcccttgctctcctggcgctcgctgcgagcgccgcctccagtacaagcggcggctgtggctgccagacaccaccgtttcatctaccgcctccgttctatatgccgcctccgttctatctgccgccgcagcagcagccgcagccatggcaataccccactcaaccaccgcagctaagcccgtgccagcagttcggatcctgcggcgtcggcagcgtcggcagcccgttcctgggccagtgcgtcgagttcctgaggcaccagtgcagcccggcggcgacgccctacggttcgccacagtgccaggcgc

SEQ ID NO: 345488 - DNA, 295 bp, Zea mays
tccatctgcaagctgtggcaaacattgctgctttcttgagacaacaacatttgttgccattttacccacaggttgtgggaaacattaatgccttcttgcaacagcaacaattgctaccattctacccacagaatgtggcaaacattgttgccttcttacaacaacaacaattgttgccatttagccaacatgctttgacgaatcctaccaccttattgcaaccgcccaccattggtggtgccatcttctagattttttatgatttatactgtaataataaagttctcatgctgat

SEQ ID NO: 345489 - DNA, 384 bp, Zea mays
caaatgcgttcattattccacatttttcacttgctccaagttccattattacacagttccttccaccagttacttcaatgggcttcgaacacccagctgtgcaagcctataggctacaacaagcaattgcggcgagcgtcttacaacaaccaatttcccagttgcaacaacaatccttggcacatctaacaatacaaaccatcgcaacgcaacagcaacaacaattcctaccagcactgagccacctagccatggtgaaccctgccgcctacttgcaacagcagttgcttgcatcaaacccacttgctctggcaaacgtagttgcaaaccagccacaacaacagctgcaacagtttctgccagcgctcagtcaactagccatgg

SEQ ID NO: 345490 - DNA, 364 bp, Zea mays
  unsure (1)..(364): unsure at all n locations
caggcgaagcgcactagcaacaacctatcaacaatggctaccaagatattagccctccttgcgcttcttgccctttttagtgagcgcaacatatgcgttcattattccacagtgctcacttgctcctagtgccattattccacagttccttccaccagttacttcaatgggcttcgaacattcagccgtgcaagcctacaggctacaactagcgcttgcggcgagcgtcttacaacaaccaattgcccaattgcaacaacaatncttggcacatctaaacctacaaaccatcgcaacgcaacatctacaacagtttctgccatcactnnnccaccctaccgtggtgaacccctgtcgcctactt

SEQ ID NO: 345491 - DNA, 383 bp, Zea mays
atggagaccacctggcaccatagattgttcattagtgtaccaacaatggcagccaaaatattttgcttccttatgctccttggtctttctgcaagtgctgctaccgcaaccattttcccacaatgctcacaagctcctatagcttcctttcttcccccatacctctcaccagcggtgtcttcagtatgtgaaaacccaattcttcaaccctacaggatccaacaggcaatcgcagcaggcatcttacctttatcacccttgttcctccaacaaccgtcagccctattacagcagttacctttggtgcatttgttggcacaaaacatcaaggcacaacaactacaacaacttgtgctaggaaaccttgctgcctactctcagca

SEQ ID NO: 345492 - DNA, 364 bp, Zea mays
aattagctcatcgactccagattgtttgttctcgacaccatgaaggtgctgatcgttgcccttgctctcctggcgctcgctgcgagcgccgcctccagtacaagcggcggctgtggctgccagacaccaccgtttcatctaccgcctccgttctatatgccgcctccgttctatctgccgccgcagcagcagccgcagccatggcaataccccactcaaccaccgcagctaagcccgtgccagcagttcggatcctgcggcgtctgcagcgtcggcagcccgttcctgggccagtgcgtcgagttcctgaggcaccagtgcagcccggcggcgacgccctacggctcgccacagtgccaggcgc

SEQ ID NO: 345493 - DNA, 380 bp, Zea mays
atcgactccatattggagaacttgtcaccatgaaggtgctgatcgttgcccttgctctcctggcgctcgctgcgagcgccgcctccagtacaagcggcggctgtggctgccagacaccaccgtttcatctaccgcctccgttctatatgccgcctccgttctatctgccgccgcagcagcagccgcagccatggcaataccccactcaaccaccgcagctaagcccgtgccagcagttcggatcctgcggcgtcggcagcgtcggcagcccgttcctgggccagtgcgtcgagttcctgaggcaccagtgcagcccggcggcgacgccctacggctcggcacagtgccaggcgctgcagcagcagtgctgccaccagatc

SEQ ID NO: 345494 - DNA, 381 bp, Zea mays
cggacgcgtggtcaactagcatctttaaagcacaatagtgtaccaacaatggcagccaaaatattttgcctccttatgctccttggtctttctgcaagtgctgctacggcgaccattttcccgcaatgctcgcaagctcctatagcttcccttcttcccccgtacctctcaccagcggtgtcttcggtatgtgaaaacccaattcttcaaccctacaggatccaacaggcaatcgcagctggcatcttacctttatcacccttgttcctccaacaatcatcagccctattacaacagttacctttggtgcatttattggcacaaaacatcatggcacaacaactacaacaacttgtgctagcaaaccttgctgcctactct

SEQ ID NO: 345495 - DNA, 373 bp, Zea mays
attttgagcattcagaaacacactttgcgaagctacctagcaacgacttaacaacaatggctaccaagatattagccctccttgcgcttcttgccctttttgtgagcgcaacaaatgcgttcattattccacaatgctcacttgctcctagtgccattataccacagttcctccgaccagttacttcaatgggcttcgaacacctagctgtgcaagcctacaggctacaacaagcgcttgcggcgagcgtcttacaacaaccaattaaccaattgcaacaacaatccttggcacatctaaccatacaaaccatcgcaacacaacagcaacaacagttcctaccagcactgagccaactagatgtggtgaaccc

SEQ ID NO: 345496 - DNA, 403 bp, Zea mays
ccggggcggcccaagccgtccggcaacatagaaagcacaatagtgtttttacaatggcagccaaaatattttgcctccttatgctccttggtctttctgcaagtgctgctacggcgaccattttcccacaatgctcacaagctcctatagcttcccttcttcccccgtacctctcaccagcggtgtcttcggtatgtgaaaacccaattcttcaaccctataggatccaacaggcaatcgcagctggcatcttacctttatcacccttgttcctccaacaatcatcagccctattacagcagttacctttggtgcatttattggcacaaaacatcagggcacaacaactacaacaacttgtgctagcaaaccttgctgcctactctcagcaacaacagtttct

SEQ ID NO: 345497 - DNA, 383 bp, Zea mays
gtggaatccagtagcaacaatagatcttcaatggcgaccaagatattttccctccttatgctccttgctctttctgcatgtgttgctaacgcgacaattttccctcaatgctcacaagctcctatagcttcccttcttcccccataccttccatcaatgatagcttcagtatgtgaaaacccagctcttcaaccctataggctccaacaagcaatcgcagcaagcaacatacctttatcacccttgtttcaacaatcgccagccctatctttggtgcagtcattggtacaaaccatcagggcacagcagctgcagcaactcgtgctacctgtgatcaaccaagtagctctggcaaacctttctccctactctcagcaacaaca

SEQ ID NO: 345498 - DNA, 383 bp, Zea mays
tcaactagcaacatttaaagcacatttgtgtaccaacaatggcagctaaaatatgttgcctccttatgctccttggtctttctgcaagtgctgctacggcgaccattttcccacaatgctcacaagctcctatagcttcccttcttcccccgtacctctcaccaacggtgtcttcggtatgtgaaaacccaattcttcaaccctacaggatccaacaggcaatcgcagctggcatcttacctttatcacccttgttcctccaacaatcatcagccctattacagcagttacctttggtgcatttattggcacaaaacatcagggcacaacaactacaacaacttgtgctagcaaaccttgctgcctactctcagcaacagcag

SEQ ID NO: 345499 - DNA, 391 bp, Zea mays
cttccggaccaactagcaacttagaaagcactttagtgtaccaacaatggcagccaaaatattttgcctccttatgctccttggtctttctgcaagtgctgctacggcgaccattttcccgaaatgctcgcaagctcctatagcttcccttcttcccccgtacctctcaccagcggtgtcttcggtatgtgaaaacccaattcttcaaccctacaggatccaacaggcaatcacagctggcatcttacctttatcacccttgttcctccaacaatcatcagccctattacatcagttacctttggtgcatttattggcacaaaacatcagggcacaacaactacaacaacttgtgctagcaaaccttgctgcctactctcagcaacagcag

SEQ ID NO: 345500 - DNA, 382 bp, Zea mays
agaccaactagcaacatagaaagctcaatagtgtaccaacaatggcagccaaaagattttgcctccttatgctccttggtctttctgcaagtgctgctacggcgaccattttcccgcaatgctcgcaagctcctatagcttcccttcttcccccgtacctctcaccagcggtgtcttcggtatgtgaaaacccaattcttcaaccctacaggatccaacaggcaatcgcagctggcatcttacctttatcacccttgttcctccaacaatcatcagccctattacaacagttacctttggtgcatttattggcacaaaacatcagggcacaacaactacaacaacttgtgctagcaaaccttgctgcctactctcagcaaca

SEQ ID NO: 345501 - DNA, 380 bp, Zea mays
attgagaccaactagcaacatagtattgcacaatagtgtaccaacaatggcagccaaaatattttgcttccttatgctccttggtctttctgcaagtgctgctaccgcaaccattttcccacaatgctcacaagctcctatagcttcctttcttcccccatacctctcaccagcggtgtcttcagtatgtgaaaacccaattcttcaaccctacaggatccaacaggcaatcgcagcaggcatcttacctttatcacccttgttcctccaacaaccgtcagccctattacagcagttacctttggtgcatttgttggcacaaaacatcaaggcacaacaactacaacaacttgtgctaggaaaccttgctgcctactctc

SEQ ID NO: 345502 - DNA, 382 bp, Zea mays
gcaacatagaaagtggaatccagtttcaacaatagagcaacaatggagaccaagatattttccctccttatgctccttgctctttctacatgtgttgctaacgcgacaattttccctcaatgctcacaagctcctatagcttccctttttcccccataccttccatcaattatagcttcagtatgtgaaaacccagctcttcaaccatataggcttcaacaagcaatcgcagcaagcaacatacctttatcgcccttgttgtgtcaacaatcgccagccctatctttggtgcagtcattggtacaaaccatcagggcacaacagctgcagcaactcgtgctacctgtgatcaaccaagtagctctggcaaacctttctccct

SEQ ID NO: 345503 - DNA, 378 bp, Zea mays
  unsure (1)..(378): unsure at all n locations
gccttcctggaaggaccattggggtcccacctttggcagccaaaatattttgcttccttatgctccttggtctttctgcaagtgctgctaccgcaaccattttcccacaatgctcacaagctcctatagcttcctttcttcccccatacctctcaccagcggtgtcttnagnatgtgaaaacccaattcttcaaccctacaggatccaacaggcaatcgcagcaggcatcttacctttatcacccttgttcctccaacaaccgtcagccctattacagcagttacctttggtgcatctgttggcacaaaacatcaaggcacaacaactacaacaacttnngctaggaaaccttgctgcctactcttagcaacagcagt

SEQ ID NO: 345504 - DNA, 303 bp, Zea mays
aaaaaaaaaaaaaaaaaaaaaatatataaaaaaaaaaaaaaaaaaaaaaaaaaaagaaaaaaaaaaaaaaaaaaaaaaaaaaaaaaaaaaaaaaaaaaaaaaaaaaaaaaaaaaaaaaaaaaaaaaaaaaaaaaaaagggggggccttatatagagcccaacataaataaccccaaaatgcaaaatgccaaactctttaatggtgaacccaaaaaaaagcaaacggagcgagcttcaaacactttttaccggaaaaacaacaagtgccacccaaaaaaatggtttcaaaaaaaacacccatta

SEQ ID NO: 345505 - DNA, 379 bp, Zea mays
ggccgtaagcctagcaattagctcttttactccagattggagaactcgacaccatgaaggtgctgatcgttgcccttgctctcctggcgctcgctgcgagcgccgcctccagtacaagcggcggctgtggctgccagacaccaccgtttcatctaccgcctccgttctatatgccgcctccgttctatctgccgccgcagcagcagccgcagccatggcaataccccactcaaccaccgcagctaagcccgtgccagcagttcggatcctgcggcgtcggcagcgtcggcagcccgttcctgggccagtgcgtcgagttcctgaggcaccagtgcagcccggcggcgacgccctacggctcgccacaatgccaggcgct

SEQ ID NO: 345506 - DNA, 325 bp, Zea mays
tcggttgcaaaacctggttgattccttttattaccataagtttcttccattcaaccaactggctgcattgaactctgctgcttatttgcaacaacaattaccattcagccagctagttgctgcctacccccagcaatttcttccattcaaccaactagcagcattgaactctgctgcttatttacagcagcaacaactactaccattcagccagctagctgatgtgagccctgctgcctttttgacacaacaacagttgttgccgttctacctgcacgctatgcctaacgctggcaccctcttacaactgcaacaattgctggca

SEQ ID NO: 345507 - DNA, 139 bp, Zea mays
aaacccagcagcctcctaccaacatttctttattggtggtgccctcttttagattggtgattagttgtaattcaataataaagttttttggatgatgtatgtggccaaccagaaataagaagttacatttccagattct

SEQ ID NO: 345508 - DNA, 292 bp, Zea mays
  unsure (1)..(292): unsure at all n locations
tccgngcantcaaccaccaaagccatcgtttatcgtaccctgccagtgctggcaaagaggggcgcgaccaaacagatccaatccaatggcgatggcaccgcccgcagcatgcgtcgtcttgttccccgcccgcccggcggcgtccacggtcgggccccgcgccgccgcgggcaccggggcggtccacgctgtcgcggtgtcggcggagggagccaagtggtgggcgccgctgctggggtggtcgtggaagggcgacttccttttaggcccctgttccctttcatgattaagt

SEQ ID NO: 345509 - DNA, 358 bp, Zea mays
gcaacatagaaagtggaatccagtttcaacaatagagcaacaatggcgaccaagatattttccctccttatgctccttgctctttctgcatgtgttgctaacgcgacaattttccctcaatgctcacaagctcctatagcttcccttcttcccccataccttccatcaatgatagcttcagtatgtgaaaacccagctcttcaaccctataggctccaacaagcaatcgcagcaagcaacatacctttatcacccttgtttcaacaatcgccagccctatctttggtgcagtcattggtacaaaccatcagggcacagcagctgcagcaactcgtgctacctgtgatcaaccaagtag

SEQ ID NO: 345510 - DNA, 380 bp, Zea mays
gtgctgcttatttgcagcaacaactattaccattcagccagctagctactgcctactctcagcaacaacaacttcttccatttaaccaattggccgcactgaaccccgctgcttatttgcagcagcaaatactactaccatttagccagctagctgcagcaagccgtgcttccttcttgacacagcaacagttgctgcctttctaccagcagtttgcggctaaccccgcaaccctcttacaactacaacaattgttgccctttgtccaacttgctttgacaaacccagcagcctcctaccaacaacacatcattggtggtgccctcttttagattgcttattagttgtaattcaataataaagttttttggatgatgtat

SEQ ID NO: 345511 - DNA, 386 bp, Zea mays
gtggaatccagtttcaacaatagttttttcaatggcgaccaagatattttccctccgtatgctccctgctctttctgcatgtgttgctaacccgccaattttccctcaatgctaacaagctccattagcttccttttttcccccataccttccatcaatgatagcttcagtatgtgaaaacccagctcttcaaccctataggctccaacaagcaatcgcagcaagcaacatacctttattacccttgtttcaacaatcgccagccctatctttggtgcagtcattggtacaaaccatcagggcacagcagctgcagcaactcgtgctacctgtgatcaaccaagtagctctggcaaacctttctccctactctcagcaacaacaat

SEQ ID NO: 345512 - DNA, 375 bp, Zea mays
gttgcaaaccagcaacaacaacaactgcaacagtttctgccagcgcttagtcaactagccatggtgaaccctgccgcctacctacaacagcaacaactgctttcatctagcccgctcgctgtggccaatgcacctacatacctgcaacaagaattgttgcaacagattgtaccagctctaactcagctagctgtggcaaaccctgttgcctacttgcaacagctgcttccattcaaccaactaactatgtcgaactctgttgcgtacctacaacagcgacaacagttacttaatccattggcagtggctaacccattggtcgctgccttcctacagcagcaacaattgctgccatacaaccggttctctttgatg

SEQ ID NO: 345513 - DNA, 373 bp, Zea mays
caatagtgtaccaacaatggcagtctaaatattttgcctccttatgctccttggtatttctgcaagtgctgctacggcgaccattttcccgcaatgctcacaagctcctatagcttcccttcttcccccgtacctctcaccagcggtgtcttcggtatgtgaaaacccaattcttcaaccctacaggatccaacaggcaatcgcagctggcatcttacctttatcacccttgttcctccaacaatcatcagccctattacagcagttacctttggtgcatttattggcacaaaacatcatggcacaacaactacaacaacttgtgctagcaaaccttgctgcctactctcagcaacagcagtttcttccattc

SEQ ID NO: 345514 - DNA, 416 bp, Zea mays
gccggcagggaccggtacgttattggctgggcccacccatgcgtagcaacatagaaagcacaatagtgttccaacaatggcagccaaaatattttgcctccttatgctccttggtctttctgcaagtgctgctacggcgaccattttcccgaaatgctcgcaagctcctatagcttcccttcttcccccgtacctctcaccagcggtgtcttcggtatgtgaaaacccaattcttcaaccctacaggatccaacaggcaatcacagctggcatcttacctttatcacccttgttcctccaacaatcatcagccctattacatcagttacctttggtgcatttattggcacaaaacatcatggcacaacaactacaacaacttgtgctagcaaaccttgctgtctactcttagcaac

SEQ ID NO: 345515 - DNA, 361 bp, Zea mays
acccacctggcaccttaaaaggcacttttttgtcccaacaatggcagccaaaatattttgcttccttatgctccttggtctttctgcaagtgctgctaccgcaaccattttcccacaatgctcacaagctcctatagcttcctttctttccccatacctctcaccagcggtgtcttcagtatgtgaaaacccaattcttcaaccctacaagatccaacaggcaatcgcagcaggcatcttacctttatcacccttgttccttcaacaaccgtcagccctattacagcagttacctttggtgcatttgttggcacaaaacatcaaggcacaacaactacaacaacttgtgctaggaaacctt

SEQ ID NO: 345516 - DNA, 371 bp, Zea mays
attattgagaccaactagcaacatagaaagcacaatattgtaccaataatggcagccaaaatattttgcctcattatgctccttggtctttctgcaagtgctgctacggcgagcattttcccgcaatgctcacaagctcctatagcttcccttcttcccccatacctctcaccagcgatgtcttcagtatgtgaaaatccaattcttctaccctacaggatccaacaggcaatcgcagcaggcatcttacctttatcacccttgttcctccaacaatcatcagccctattacagcatgtacctttggtgcatttattggcacataacatcatggcacatcaactacaacaactcgtgctagcaaaccttgc

SEQ ID NO: 345517 - DNA, 367 bp, Zea mays
attgagaccaactagcaacatataaagcacaatagtgtaccaacaatggcagccaaaatattttgcttccttatgctccttggtctttctgcaagtgttgctaccgcaaccattttcccacaatgctcacaagctcctatagcttcccttcttcccccatacctctcaccagcggtgtcttcaatgtgtgaaaacccaattgttcaaccctacaggatccaacaggcaatcgcaacaggcatcttaccattatcacccttgttcctccaacaaccgtcagccctattacagcagttacctttggtccatttggtggcacaaaacatcatggcacaacaactacaacaacttgtgctagcaaaccttg

SEQ ID NO: 345518 - DNA, 371 bp, Zea mays
attttcagcattcagaaacacaccaagcgaagcgcactagcaacaacctaacaacaatggctaccaagatattagccctccttgcgcttcttgcccttttagtgagcgcaacaaatgcgttcattattccacagtgctcacttgctcctagtgccattattccacagttcctcccaccagttacttcaatgggcttcgaacatccagccgtgcaagcctacaggctacaactagcgcttgcggcgagcgtcttacaacaaccaattgcccaattgcaacaacaatccttggcacatctaaacctacaaaccatcgcaacgcaacagcaacaacagtttctgccatcactgagccacctagccgtggtgaac

SEQ ID NO: 345519 - DNA, 375 bp, Zea mays
gcgaagcgcactagcaacgacctaacaacaatggctaccaagatattagccctccttgcgcttcttgccctttttgtgagcgcaacaaatgcgttcattattccacaatgctcacttgctcctagtgccattattccacagttcctcccaccagttacttcaatgggcttcgaacacctagctgtgcaagccaacatgcaacaacaagcgcttgcggcgagcgtcttacaacaaccaattgcccaattgcaacaacaatccttgccacatctaacaatacaagccatcacaacgcaacagcaacaacagttcctaccagcactgagccacctagccatggtgaaccctgccgcctacttgcaagagcagctgctt

SEQ ID NO: 345520 - DNA, 387 bp, Zea mays
acccttccggaaacacaccaagcgaagcgcactatcttcgacctaacaccaatggctaccaagattttagccctccttgcgcttcttgccctttttgtgagcgcaacaaatgcgttcattattccacaatgctcacttgctcctagtgccattattccacagttcctcccaccagttacttcaatgggcttcgaacacctagctgtgcaagccaacatgcaacaacaagcgcttgcggcgagcgtcttacaacaaccaattgcccaattgcaacaacaatccttgccacatctaacaatacaagccatcacaacgcaacagcaacaacagttcctaccagcactgagccacctagccatggtgaaccctgccgcctacttgcaagag

SEQ ID NO: 345521 - DNA, 85 bp, Zea mays
tcgtccggcggcggcggcgggttttctttttttggtaagggggtagggaagagggcgaatgggtgaaccccaccaccgttttccc

SEQ ID NO: 345522 - DNA, 76 bp, Zea mays
gctgttctctctctgcaacaactgtacatagtttgtgtactcgaccctattcgttggatatagccgcagtgacaat

SEQ ID NO: 345523 - DNA, 372 bp, Zea mays
gcaacatagaaagtggaatccagtatcaacaatagagcaacaatggcgaccaagatattttccctccttatgctccttgctctttctgcatgtgttgctaacgcgacaattttccctcaatgctcacaagctcctatagcttcccttcttcccccataccttccatcaatgatagcttcagtatgtgaaaacccagctcttcaaccctataggctccaacaagcaatcgcagcaagcaacatacctttatcacccttgtttcaacaatcgccagccctatctttggtgcagtcattggtacaaaccatcagggcacagcagctgcagcaactcgtgctacctgtgatcaaccaagtagctctggcaaacctt

SEQ ID NO: 345524 - DNA, 372 bp, Zea mays
gtcagcctagcaattagctcattttctccagattggagaactcgacaccatgaaggtgctgatcgttgcccttgctctcctggcgctcgctgcgagcgccgcctccagtacaagcggcggctgtggctgccagacaccaccgtttcatctaccgcctccgttctatatgccgcctccgttctatctgccgccgcagcagcagccgcagccatggcaataccccactcaaccaccgcagctaagcccgtgccagcagttcggatcctgcggcgtcggcagcgtcggcagcccgttcctgggccagtgcgtcgagttcctgaggcaccagtgcagcccggcggcgacgccctacggctcgccacagtgccaggc

SEQ ID NO: 345525 - DNA, 374 bp, Zea mays
tctagatcgcgagtggccgccctttttttttttttttctaaatagtgaagaattattttttactatactaggcttacacatcgatataaaaaataattcttcactatttagaaaaagaaaataaaagtgagaaaatgagagtgtaacacctgaatttgatggatattagagaaaaaaatttatacccccaaattcagggtattatagatctgacccccttaataggaatctcacccccgagattcaagaagaagctagcaagaaaacgaggttggttcataggttgttcacaactttcttgagttgactttgactctacaagcttaacttggggattggtttgctttgactttcagatgcttgagaccgatcga

SEQ ID NO: 345526 - DNA, 377 bp, Zea mays
aagcaacatagaaagtggaatccagtagcaacaatagagcaacaatggcgaccaagatattttccctccttatgctccttgctctttctgcatgtgttgctaacgcgacaattttccctcaatgctcacaagctcctatagcttcccttcttcccccataccttccatcaatgatagcttcagtatgtgaaaacccagctcttcaaccctataggctccaacaagcaatcgcagcaagcaacatacctttatcacccttgtttcaacaatcgccagccctatctttggtgcagtcattggtacaaaccatcagggcacagcagctgcagcaactcgtgctacctgtgatcaaccaagtagctctggcaaacctttct

SEQ ID NO: 345527 - DNA, 375 bp, Zea mays
cagaaacacaccaagcgaagcacattagctacaacctaacaacaatggctaccaagatattatccctccttgcgcttcttgcgctttttgcgagcgcaacaaatgcgttcattattccacaatgctcacttgctccaagttccattattacacagttcctcccaccagttacttcaatgggcttcgaacacccagctgtgcaagcctataggctacaacaagcaattgcggcgagcgtcttacaacaaccaatttcccagttgcaacaacaatccttggcacatctaacaatacaaaccatcgcaacgcaacagcaacaacaattcctaccagcactgagccacctagccatggtgaaccctgccgcctacttgc

SEQ ID NO: 345528 - DNA, 374 bp, Zea mays
agaccaacaagcaacatagaaagtggaatacagtagcaacaatagagcaacaatggcggccaagatattttccatccttatgctccttgctctttctgcatgtgttgctaacgcgaccatttttcctcaatactcacaagctcctatagctgcccttcttcccccataccttccatcaatgaccgcttcagtatgtgaaaacccagcccttcaaccctacaggctccaacaagcaatcgcaacaagcaacttacctttatcacccctgttctttcaacaatcgccagccctatctttggtgcagtcattggtacaaaccatcagggcacaacagctgcagcaactcgtgctaccagtgatcagccaagtagctc

SEQ ID NO: 345529 - DNA, 375 bp, Zea mays
agcgaagcacattagcaacaacctaacatcaatggctaccaagatattatccctccttgcgcttcttgcgctttttgcgagcgcaacaaatgcgttcattattccacaatgctcacttgctccaagttccattattacacagttcctcccaccagttacttcaatgggcttcgaacacccagctgtgcaagcctataggctacaacaagcaattgcggcgagcgtcttacaacaaccaatttcccagttgcaacaacaatccttggcacaacaactacaacaacttgtgctagcaaaccttgctgcctactctcagcaacagcagtttcttccattcaaccaactagctgcattgaactctgcttcttatttgca

SEQ ID NO: 345530 - DNA, 128 bp, Zea mays
accaactagcaacatataaagctcttttacaattccaacaatggcagccatagggtgttgccttcttatgctacttggtctaacatctattgctgctactgttaccattttttcacattgcttacatg

SEQ ID NO: 345531 - DNA, 375 bp, Zea mays
ttcagaaacacaccaagcgaagcgcactatcaacaacctaacaacaatggctaccaagatattagccctccttgcgcttcttgcccttttagtgagcgcaacaaatgcgttcattattccacagtgctcacttgctcctagtgccattattccacagttcctcccaccagttacttcaatgggcttcgaacatccagccgtgcaagcctacaggctacaactagcgcttgcggcgagcgtcttacaacaaccaattgcccaattgcaacaacaatccttggcacatctaaacctacaaaccatcgcaacgcaacagcaacaacagtttctgccatcactgagccacctagccgtggtgaaccctgtcgcctactt

SEQ ID NO: 345532 - DNA, 374 bp, Zea mays
caacatagaaagtggaatccagttttttcaatagagcaacaatggagaccaagatattttccctccttatgctccttgctctttctacatgtgttgctaacgcgacaattttccctcaatgctcacaagctcctatagcttccctttttcccccataccttccatcaattatagcttcagtatgtgaaaacccagctcttcaaccatataggcttcaacaagcaatcgcagcaagcaacatacctttatcgcccttgttgtgtcaacaatcgccagccctatctttggtgctgtcattggtacaaaccaatatggcacatcagctgctgcaactcgtgctacctgtgatcaaccaagttgctctggcaaccctt

SEQ ID NO: 345533 - DNA, 376 bp, Zea mays
aagcaacatagaagggggaatccagtgtcaacaatagagccacaatggagaccaagatattttccctccttatgctccttgctctttctacatgtgttgctaacgcgacaattttccctcaatgctcacaagctcctatagcttccctttttcccccatacctttcatcaattatagcttcagtatgtgaaaacccagctcttcaaccatataggctttaacaagcaatcgcagcaagcaacatacctttattggccttgttgtgtcaacaatcgccagccctatctttggtgcagtcattggtacaaaccatcagggcacaacagctgcagcaactcgtgctacctgtgatcaaccaagtagctctggcaaacct

SEQ ID NO: 345534 - DNA, 360 bp, Zea mays
gcacaatagtgtaccaacaatggcagtcaaaatattttgcctccttatgctccttggtctttctgcaagtgctgctacggcgaccattttcccgaaatgctcgcaagctcctatagcttcccttcttcccccgtacctctcaccagcggtgtcttcggtatgtgaaaacccaattcttcaaccctacaggatccaacaggcaatcacagctggcatcttacctttatcacccttgttcctccaacaatcatcagccctattacatcagttacctttggtgcatttattggcacaaaacattatggcacaacatctacaacaacttgtgctagcaaaccttgctgcctactctcagcaaca

SEQ ID NO: 345535 - DNA, 376 bp, Zea mays
cagaaacacaccaagcgaagcacattatcaacaacctaacaacaatggctaccaagatattatccctccttgcgcttcttgcgctttttgcgagcgcaacaaatgcgttcattattccacaatgctcacttgctccaagttccattattacacagttcctcccaccagttacttcaatgggcttcgaacacccagctgtgcaagcctataggctacaacaagcaattgcggcgagcgtcttacaacaaccaatttcccagttgcaacaacaatccttggcacatctaacaatacaaaccatcgcaacgcaacagcaacaacaattcctaccagcactgagccacctagccatggtgaaccctgccgtctacttgca

SEQ ID NO: 345536 - DNA, 373 bp, Zea mays
cagcaacaacaacaactgcaacagtttctgccagcgcttagtcaactagccatggtgaaccctgccgcctacctacaacagcaacaactgctttcatctagcccgctcgctgtggccaatgcacctacatacctgcaacaagaattgttgcaacagattgtaccagctctaactcagctagctgtggcaaaccctgttgcctacttgcaacagctgcttccattcaaccaactaactatgtcgaactctgttgcgtacctacaacagcgacaacagttacttaatccattggcagtggctaacccattggtcgctgccttcctacagcagcaacaattgctgccatacaaccggttctctttgatgaatcctg

SEQ ID NO: 345537 - DNA, 372 bp, Zea mays
agccttccattgggacccacctggcaccatagaatgctcaatagggtaccaacaatggcagccaaaatattttgcctccttatgctccttggtctttctgcaagtgctgctacggcgaccattttcccgcaatgctcgcaagctcctatagcttcccttcttcccccgtacctctcaccagcggtgtcttcggtatgtgaaaacccaattcttcaaccctacaggatccaacaggcaatcgcagctggcatcttacctttatcacccttgttcctccaacaatcatcagccctattacaacagttacctttggtgcatttattggcacaaaacatcagggcacaacaactacaacaacttgtgctagcaaac

SEQ ID NO: 345538 - DNA, 106 bp, Zea mays
aaaaaaaaaaaaaaaaaaaaaaaaatttttaaaaaaaaaaaaaaaaaaaaaaaaaaagagaaaaaaaaaaaaaaaaaaaaaaaaaaaaaaaaaaaaaaaaaaaaag

SEQ ID NO: 345539 - DNA, 377 bp, Zea mays
caacaatggcgaccaagatattttcccttcttatgctccttgctctttctgcatgtggtgctaacgcgacaattttccctcaatgctcacaagctcctatagcttcccttcttcccccataccttccatcaatgatagcttcagtatgtgaaaacccagctcttcaaccctataggctccaacaagcaatcgcagcaagcaacatacctttatcacccttgtttcaacaatcgccagccctatctttggtgcagtcattggtacaaaccatcatggcacagcagctgcagcaactcgtgctacctgtgatcaaccaagtagctctggcaaacctttctccctactcttagcaacaacaatttcttccattcaaccaa

SEQ ID NO: 345540 - DNA, 372 bp, Zea mays
gcattcagaaacacaccaagcgttgttcactagcaacaacctaacaacaatggctaccaagatattagccctccttgcgcttcttgcccttttagtgagcgcaacaaatgcgttcattattccacagtgctcacttgctcctagtgccattattccacagttcctcccaccagttacttcaatgggcttcgaacatccagccgtgcaagcctacaggctacaactagcgcttgcggcgagcgtcttacaacaaccaattgcccaattgcaacaacaatccttggcacatctaaacctacaaaccatcgcaacgcaacagcaacaacagtttctgccatcactgagccacctagccgtggtgaaccctgtcgc

SEQ ID NO: 345541 - DNA, 374 bp, Zea mays
ccaactagcaacatagaaagcactttagtgtaccaacaatggcagccaaaatattttgcctccttatgctccttggtctttctgcaagtgctgctacggcgaccattttcccgcaatgctcgcaagctcctatagcttcccttcttcccccgtacctctcaccagcagtgtcttcggtatgtgaaaacccaattcttcaaccctacaggatccaacaggcaatcgcagctggcatcttacctttatcacccttgttcctccaacaatcatcagccctattacaacagttacctttggtgcatttattggcacaaaacatcagggcacaacaactacaacaacttgtgctagcaaaccttgctgcctactctcag

SEQ ID NO: 345542 - DNA, 106 bp, Zea mays
cttccgtttttgattcgcaagcggccgccctttttttttttttttttaagacaaaaaactttattattgaactataactcataagaaatctaaaaaagggcccccc

SEQ ID NO: 345543 - DNA, 386 bp, Zea mays
agccttcggtcaagatttaaaaaacacaccaagcgaatcgcactagcaacaacctaacaacaatggctaccaagatattagccctccttgcgcttcttgcccttttagtgagcgcaacaaatgcgttcattattccacagtgctcacttgctcctagtgccattattccacagttcctcccaccagttacttcaatgggcttcgaacatccagccgtgcaagcctacaggctacaactagcgcttgcggcgagcgtcttacaacaaccaattgcccaattgcaacaacaatccttggcacatctaaacctacaaaccatcgcaacgcaacagcaacaacagtttctgccatcactgagccacctagccgtggtgaaccctgtcgcc

SEQ ID NO: 345544 - DNA, 379 bp, Zea mays
atcgcgagcggccgcccttttttttttttttttttttttttttgggcgacgaattctgttccattttactacgtacattcatgtatcgcttccactttacatagagctgactagattcagacaagattcaatgatgggttctgacgtctcaccaaacaaaacatgcataatactgtggacccactacagttcaaacttcaatcagctaagcacagcagcagctacagctggagtacacagacacagcagcacacaacacgcgcgcccaaaaagggagaagaacacgaccaccagcttcttccgatcctatcctccaattttctcttccaaagctccaatcccaaagaacaagacagttgttgccggtgagatcgactgg

SEQ ID NO: 345545 - DNA, 328 bp, Zea mays
gcagtgttctaccaacaaccacagttgttgccgttctaccagcacgttgcgcctaacgctggcaccctcttacaactgcaacaattgctgccattcaaccaacttgctttgacaaacccagcagtgttctaccaacaacccatcattggtggtgccctcttttagatttcttatgagttatagttcaataataaagttttttatctgatgtttgtggcttcccagaaataagaaagtacatttctagaacaaatatttataaaaaaaaaaaaagaaaaaagtaaactgtaatttaatatataaagttttgtataaaaaaacaataaaa

SEQ ID NO: 345546 - DNA, 146 bp, Zea mays
gtccgtgcgaccattttcgaaagttttttgctcctatagctttccaattttccggggaccttttaccagcggtggctcccgtatgtgaaaacccaattctttaaccctacaggatccaacaggcattcacagctggcatcttacct

SEQ ID NO: 345547 - DNA, 374 bp, Zea mays
agcattcagaaacacaccaagcgattcgcactagcaacaacctaacaacaatggctaccaagatattagccctccttgcgcttcttgcccttttagtgagcgcaacaaatgcgttcattattccacagtgctcacttgctcctagtgccattattccacagttcctcccaccagttacttcaatgggcttcgaacatccagccgtgcaagcctacaggctacaactagcgcttgcggcgagcgtcttacaacaaccaattgcccaattgcaacaacaatccttggcacatctaaacctacaaaccatcgcaacgcaacagcaacaacagtttctgccatcactgagccacctagccgtggtgaaccctgtcgcc

SEQ ID NO: 345548 - DNA, 363 bp, Zea mays
caacaatggcgaccaagatattttccctccttatgctccttgctctttctgcatgtgttgctaacgcgacaattttccctcaatgctcacaagctcctatagcttcccttctttccccataccttccatcaatgatagcttcagtatgtgaaaacccagctcttcaaccctataggctccaacaagcaatcgcagcaagcaacatacctttatcacccttgttttaacaatcgccagccctatctttggtgcagtcattggtacaaaccatcagggcacagcagctgcagcaactcgtgctacctgtgatcaaccaagtagctctggcaaacctttctccctactctcagcaacaacaatttc

SEQ ID NO: 345549 - DNA, 363 bp, Zea mays
gaccattagctttatctactccagagcgcagaagaacccgatcgacaccatgagggtgttgctcgttgccctcgctctcctggctctcgctgcgagcgccaccttcacgcatacaagcggcggatgcggctgtcagccaccgtcgccggttcatctaccgccggcggtgcatctgccacctccggttcacctgccacctccggtgcatagtccaccgccggttcacctgccgccgccggtccacctgtcaccggcggtccatgtgccgccgccggttcatctgccgtcgtcaccatgccactaccctactcaaccgccccggcctcaggctcattctcagccacacccatgcccgtgccaaca

SEQ ID NO: 345550 - DNA, 386 bp, Zea mays
agccttccgaaccataaaaagcacaatagtgtacctacaatggcagccaaaatattttgcctccttatgctccttggtctttctgcaagtgctgctacggcgaccattttcccgaaatgctcgcaagctcctatagcttcccttcttcccccgtacctctcaccagcggtgtcttcggtatgtgaaaacccaattcttcaaccctacaggatccaacaggcaatcacagctggcatcttacctttatcacccttgttcctccaacaatcatcagccctattacatcagttacctttggtgcatttattggcacaaaacatcagggcacaacaactacaacaacttgtgctagcaaaccttgctgcctactctcagcaacagcagtt

SEQ ID NO: 345551 - DNA, 371 bp, Zea mays
  unsure (1)..(371): unsure at all n locations
cttcagaccattagctttatctactccagagcgcagaagaacccgatcgacaccatgagggtgttgctcgttgccctcgctctcctggctctcgctgcgagcgccacctccacgcatacaagcggcggctgcggctgccagccaccgccgccggttcatctaccgtcgccggtgcatctgccacctccggttcacctgccaccttcggtgcatcttccaccgtcggtccacctgccgccgccggtccacctgccaccgccggtccatgtgccgncgtcggttcatctgccgccggcaccatgccactaccctacttaaccgccccggccttagccttatccccagccacacccatgcccgtgccaacagcc

SEQ ID NO: 345552 - DNA, 374 bp, Zea mays
caacaactacaacaacttgtgctaggaaaccttgctgcctactctcagcaacagcagtttcttccattcaaccaactggctgcattgaactctgctgcttatttgcaacaacaactaccattcagtcagctagctgctgcctacccccagcaatttcttccattcaaccaactggcagcattgaactctgctgcttatttacaacagcaacagctaccaccattcagccagctagctgatgtgagccctgttgccttcttgacacaacaacagttgttgccgttctacctgcacgctgcgcctaacgctggcaccctcttacaactgcaacaattgctgccattcaaccaacttgctttgacaaacccaacagc

SEQ ID NO: 345553 - DNA, 372 bp, Zea mays
ccaactagcaacatagaaagcacaatagtgtaccaacaatggcagccaaaatattttgcttccttatgctccttggtctttctgcaagtgctgctaccgcaaccattttcccacaatgctcacaagctcctatagcttcctttcttcccccatacctctcaccagcggtgtcttcagtatgtgaaaacccaattcttcaaccctacaggatccaacaggcaatcgcagcaggcatcttacctttatcacccttgttcctccaacaaccgtcagccctattacagcagttacctttggtgcatttgttggcacaaaacatcaaggcacaacaactacaacaacttgtgctaggaaaccttgctgcctactctc

SEQ ID NO: 345554 - DNA, 302 bp, Zea mays
acccttccggccgtttgctccgggctgctgttctgcgcctccacaggctttggccttgtgtttaagtttaagcttacctcagccatggtaagagagtcccataacattgggtattggcatgtgcttggaagtaaccccatggcactgtctcaagctggagcatgcagcgtgtgatgagagtcagaggagccgtgaagaacaacgtcttagtccctgggctgacagctaagctgacggagagagatcaccatgatttgtctgggagttggaccaccagtctactgactgcatgagccctgaca

SEQ ID NO: 345555 - DNA, 219 bp, Zea mays
agcattcataaacacaccaagttttttctcactatcaacaacctaacaacaaggggtgccaatatattagccctccttgcgcttcttgcccttttagtgagcgcaacaaatgcgttcattattccacagagctcacttgctcctagtgccattatttcacagtttctcccaccagttacttcaatgggcttcatacattcagccgtgcaagcctacatg

SEQ ID NO: 345556 - DNA, 326 bp, Zea mays
  unsure (1)..(326): unsure at all n locations
cccacgcgtcccatcaactactaccattcatccaggtagctggggtgagccctgctaccttcttgacacaaccacagttgttgccgttctaccagcacgctgcgcctaacgctggcaccctnttacaactgcaacaattgctgccattcaaccaacttgctttgacaaacccagcagcattctaccaacaacccatcattggtggtgccctcttttagatttcttatgagttatagttcaataataaagttttttgtctgatgtttgtggcttcccagaaataagaaagtacatttctaaaaaaaaaaaataaatttaaaatataa

SEQ ID NO: 345557 - DNA, 154 bp, Zea mays
tcgttgcaacatagaaaggacaattgtgtttctaccatggccggccaaatattttggttgcctattcttcctgggctttctggaagggcttggtccggaaccatttttccacaatggtcacaagctcctatagcttcctttttttccccatacc

SEQ ID NO: 345558 - DNA, 367 bp, Zea mays
gtgcatttgttggcacaaaacatttttgcacaacaactacaacaacttgtgctaggaaaccttgctgcctactctcagcaacagcagtttcttccattcaaccaactggctgcattgaactctgctgcttatttgcaacaacaactaccattcagtcagctagctgctgcctacccccagcaatttcttccattcaaccaactggcagcattgaactctgctgcttatttacaacagcaacagctaccaccattcagccagctagctgatgtgagccctgttgccttcttgacacaacaacagttgttgccgttctacctgcacgctgtgcctaacgctggcaccctcttacaactgcaacaattgc

SEQ ID NO: 345559 - DNA, 371 bp, Zea mays
cagcggtgtcttcggtatgtgaaatctccaattcttcaaccctacaggatccaacaggcaatcgcagctggcatcttacctttatcacccttgttcctccaacaatcatcagccctattacagcagttacctttggtgcatttattggcacaaaacatcagggcacaacaactacaacaacttgtgctagcaaaccttgctgcctactctcagcaacagcagtttcttccattcaaccaactagctgcattgaactctgcttcttatttgcaacaacaacaactaccattcagccagctacctgttgcctacccccagcaatttcttccattcaaccaactggcagcattgaactcttctgcttatttaca

SEQ ID NO: 345560 - DNA, 388 bp, Zea mays
cccacgcgtccgaaagcggcagtgtttatagaggatcgtcgaacagaacagcatgaagatggtcatcgttctcgtcgtgtgcctggctctgtcagctgccagcgcctctgcaatgcagatgccctgcccctgcgcggggctgcagggcttgtacggcgctggcgccggcctgacgacgatgatgggcgccggcgggctgtacccctacgcggagtacctgaggcagccgcagtgcagcccgctggcggcggcgccctactacgccgggtgtgggcagacgagcgccatgtaccagccgctccggcaacagtgctgccagcagcagatgaggatgatggacgtgcagtccgtcgcgcaacagcttgagatgatgatgcaacttgagcgt

SEQ ID NO: 345561 - DNA, 391 bp, Zea mays
agaccaactagcaacatagaatgtacaatagtgtaccaacaatggcagccaaaatattttgcttccttatgctccttggtctttctgcaagtgctgctaccgcaaccattttcccacaatgctcacaagctcctatagcttcctttcttcccccatacctctcaccagcggtgtcttcagtatgtgaaaacccaattcttcaaccctacaggatccaacaggcaatcgcagcaggcatcttacctttatcacccttgttcctccaacaaccgtcagccctattacagcaggtacctttggtgcatttgttggcacaaaacatcaaggcacaacaactacaacaacttgtgctaggaaaccttgctgcctactctcagcaacagcagttttc

SEQ ID NO: 345562 - DNA, 379 bp, Zea mays
gttggttgaatggaagaaattgtctacattgaaccgtgctgcttatttgcagcaacaactattaccattcagccagctagctactgcctactctcagcaacaacaacttcttccatttaaccaattggccgcactgaaccccgctgcttatttgcagcagcaaatactactaccatttagccagctagctgcagcaagccgtgcttccttcttgacacagcaacagttgctgcctttctaccagcagtttgcggctaaccccgcaaccctcttacaactacaacaattgttgccctttgtccaacttgctttgacaaacccagcagcctcctaccaacaacacatcattgggggtgccctcttttagattgcttattag

SEQ ID NO: 345563 - DNA, 388 bp, Zea mays
aactagcaacatagaaagcacaatatttgtccaacaatggcagccaaaatatttggcctccttatgctccttggtctttctgcaagtgctgctacggcgaccattttcccacaatgctcacaagctcctatagcttcccttcttcccccgtacctctcaccagcggtgtcttcggtatgtgaaaacccaattcttcaaccctataggatccaacaggcaatcgcagctggcatcttacctttatcacccttgttcctccaacaatcatcagccctattacagcagttacctttggtgcatttattggcacaaaacatcagggcacaacaactacaacaacttgtgctagcaaaccttgctgcctactctcagcaacaacagtttcttt

SEQ ID NO: 345564 - DNA, 393 bp, Zea mays
cagaaacacaccaagcgaagcgcactagcaacaacctaacaacaatggctaccaagatattatccctccttgcgcttcttgcgctttttgcgagcgcaacaaatgcgtccattattccacaatgctcacttgctcctagttccattattccacagttcctcccaccagttacttcaatggccttcgaacacccagctgtgcaagcctataggctacaacaagcgattgcggcgagcgtcttacaacaaccaattgcccaattgcaacaacaatccttggcacatctaacaatacaaaccatcgcaacgcaacagcaacaacagttcctaccagcactgagccacctagccatggtgaaccctgtcgcctacttgcaacagcagctgcttgcat

SEQ ID NO: 345565 - DNA, 311 bp, Zea mays
gaccattagctttatctactccagatcgcagaagaacccgatcgacaccatgagggtgttgctcgttgccctcgctctcctggctcccgctgcgagcgccacctccacgcatacaagcggcggctgcggctgccagccaccgccgccggttcatctaccgccgccggtgcatctgccaccttcggttcacctgccacctccggtgcatctcccaccgccgtgccacctgccgccggttcatatgtcgtcgccaccatgccactaccctacttaacttgcccgatcttagtctcatacccagcctcacccat

SEQ ID NO: 345566 - DNA, 386 bp, Zea mays
cagcattcagaaacacaccaattttttcgcactagcaacaacctaacaacaatggctaccaagatattagccctccttgcgcttcttgcccttttagtgagcgcaacaaatgcgttcattattccacagtgctcacttgctcctagtgccattattccacagttcctcccaccagttacttcaatgggcttcgaacatccagccgtgcaagcctacaggctacaactagcgcttgcggcgagcgtcttacaacaaccaattgcccaattgcaacaacaatccttggcacatctaaacctacaaaccatcgcaacgcaacagcaacaacagtttctgccatcactgagccacctagccgtggtgaaccctgtcgcctacttgcaaca

SEQ ID NO: 345567 - DNA, 371 bp, Zea mays
caactagcaacatagaaagcacatatgtgtaccaacaatggcagctaaaatattttgcctccttatgctccttggtctttctgcaagtgctgctacggcgaccattttcccacaatgctcacaagctcctatagcttcccttcttcccccgtacctctcaccaacggtgtcttcggtatgtgaaaacccaattcttcaaccctacaggatccaacaggcaatcgcagctggcatcttacctttatcacccttgttcctccaacaatcatcagccctattacagcagttacctttggtgcatttattggcacaaaacatcagggcacaacaactacaacaacttgtgctagcaaaccttgctgcctactttc

SEQ ID NO: 345568 - DNA, 392 bp, Zea mays
attttgagcattcagaaacacaccttgcgaagcgcactagcaacaacctaacaacaatggctaccaagatattatccctccttgcgcttcttgcgctttttgcgagcgcaacaaatgcgtccattattccacaatgctcacttgctcctagttccattattccacagttcctcccaccagttacttcaatggccttcgaacacccagctgtgcaagcctataggctacaacaagcgattgcggcgagcgtcttacaacaaccaattgcccaattgcaacaacaatccttggcacatctaacaatacaaaccatcgcaacgcaacagcaacaacagttcctaccagcactgagccacctagccatggtgaaccctgtcgcctacttgcaacag

SEQ ID NO: 345569 - DNA, 385 bp, Zea mays
  unsure (1)..(385): unsure at all n locations
ccaactagcaacatagaaagcttattagtgtaccaacaatggcagccaaaatattttgcctccttatgctccttggtctttctgcaagtgctgctacggcgaccattttcccgcaatgctcgcaagctcctatagcttcccttcttcccccgtacctctcaccagcggtgtcttcggtatgtgaaaacccaattcttcaaccctacaggatccaacaggcaatcgcagctggcatcttacctttatcacccttgttccttcaacaatnatnagccctattacaacagttacctttggtgcatttattggcacaaaacatcagggcacaacaactacaacaacttgtgctagcaaaccttgctgcctactctcagcaacagcaagt

SEQ ID NO: 345570 - DNA, 389 bp, Zea mays
agcattcagaaacacaccaagcgaatcacattagcaacaacctaacaacaatggctaccaagatattatccctccttgcgcttcttgcgctttttgcgagcgcaacaaatgcgttcattattccacaatgctcacttgctccaagttccattattacacagttcctcccaccagttacttcaatgggcttcgaacacccagctgtgcaagcctataggctacaacaagcaattgcggcgagcgtcttacaacaaccaatttcccagttgcaacaacaatccttggcacatctaacaatacaaaccatcgcaacgcaacagcaacaacaattcctaccagcactgagccacctagccatggtgaaccctgccgcctacttgcaacagcag

SEQ ID NO: 345571 - DNA, 387 bp, Zea mays
agaccattagctttatctactccagagcgcagaagaacccgatcgacaccatgagggtgttgctcgttgccctcgctctcctggctctcgctgcgagcgccacctccacgcatacaagcggcggctgcggctgccagccaccgccgccggttcatctaccgccgccggtgcatctgccacctccggttcacctgccacctccggtgcatctcccaccgccggtccacctgccgccgccggtccacctgccaccgccggtccatgtgccgccgccggttcatctgccgccgccaccatgccactaccctactcaaccgccccggcctcagcctcatccccagccacacccatgcccgtgccaacagccgcatccaagcccgtgccagc

SEQ ID NO: 345572 - DNA, 394 bp, Zea mays
tagaaacacaccattcgaagcgcatttttaacaacctaacaacaatggctaccaagatattatccctccttgcgcttcttgcgctttttgcgagcgcaacaaatgcgtccattattccacaatgctcacttgctcctagttccattattccacagttcctcccaccagttacttcaatggccttcgaacacccagctgtgcaagcctataggctacaacaagcgattgcggcgagcgtcttacaacaaccaattgcccaattgcaacaacaatccttggcacatctaacaatacaaaccatcgcaacgcaacagcaacaacagttcctaccagcactgagccacctagccatggtgaaccctgtcgcctacttgcaacagcagctgcttgcatc

SEQ ID NO: 345573 - DNA, 386 bp, Zea mays
attttcagcattcagaaacacattttgcgaagcgcactagcaacaacctaacaacaatggctaccaagatattagccctccttgcgcttcttgcccttttagtgagcgcaacaaatgcgttcattattccacagtgctcacttgctcctagtgccattattccacagttcctcccaccagttacttcaatgggcttcgaacatccagccgtgcaagcctacaggctacaactagcgcttgcggcgagcgtcttacaacaaccaattgcccaattgcaacaacaatccttggcacatctaaacctacaaaccatcgcaacgcaacagcaacaacagtttctgccatcactgagccacctagccgtggtgaaccctgtcgcctacttg

SEQ ID NO: 345574 - DNA, 386 bp, Zea mays
gcacaatagtgtaccaacaatgtcttccaaaatattttgcctccttatgctccttggtctttctgcaagtgctgctacggcgaccattttcccgcaatgctcgcaagctcctatagcttcccttcttcccccgtacctctcaccagcggtgtcttcggtatgtgaaaacccaattcttcaaccctacaggatccaacaggcaatcgcagctggcatcttacctttatcacccttgttcctccaacaatcatcagccctattacaacagttacctttggtgcatttattggcacaaaacatcagggcacaacaactacaacaacttgtgctagcaaaccttgctgcctactcttagcaacagcagtttcttccattcaaccaactag

SEQ ID NO: 345575 - DNA, 388 bp, Zea mays
actagcaacatagaaagcacaatattgtaccaacaatggcagccaaaatattttgcctccttatgctccttggtctttctgcaagtgctgctacggcgaccattttcccacaatgctcacaagctcctatagcttcccttcttcccccgtacctctcaccagcggtgtcttcggtatgtgaaaacccaattcttcaaccctataggatccaacaggcaatcgcagctggcatcttacctttatcacccttgttcctccaacaatcatcagccctattacagcagttacctttggtgcatttattggcacaaaacatcagggcacaacaactacaacaacttgtgctagcaaaccttgctgcctactctcagcaacaacagtttcttcc

SEQ ID NO: 345576 - DNA, 342 bp, Zea mays
caactagcaacatagaaagcatttttttgtaccaacaatggcagccaaaatattttgcctccttatgctccttggtctttctgcaagtgctgctacggcgaccattttcccgcaatgctcgcaagctcctatagcttcccttcttcccccgtacctctcaccagcggtgtcttcggtatgtgaaaacccaattcttcaaccctacaggatccaacaggcaatcgcagctggcatcttacctttatcacccttgttcctccaacaatcatcagccctattacaacagttacctttggtgcatttattggcacaaaacatcatggcacaacaacttcaacaact

SEQ ID NO: 345577 - DNA, 387 bp, Zea mays
gaatccagtagcaacaatagagcatcaatggagaccaagatattttccctccttatgctccttgctctttctacatgtgttgctaacgcgacaattttccctcaatgctcacaagctcctatagcttccctttttcccccataccttccatcaattatagcttcagtatgtgaaaacccagctcttcaaccatataggcttcaacaagcaatcgcagcaagcaacatacctttatcgcccttgttgtgtcaacaatcgccagccctatctttggtgcagtcattggtacaaaccatcagggcacaacagctgcagcaactcgtgctacctgtgatcaaccaagtggctacactgaaccctgctgcttattttcagcaacaactatta

SEQ ID NO: 345578 - DNA, 389 bp, Zea mays
cccacgcgtccggagcgtcttacaacaaccaattgcccaattgcaacaacaatccttgccacatctaacaatacaagccatcacaacgcaacagcaacaacagttcctaccagcactgagccacctagccatggtgaaccctgccgcctacttgcaagagcagctgcttgcatccaacccacttgctctggcgaacgtagttgcaaaccagcaacaacaacagctacaacagtttctgccaacgctcagtcaactagccatggtgaaccctgccgcctacgtacaacaacaacaactgctttcatctagcccgctcgctgtgggcaatgcacctacatacctgcaacaacaattgttgcaacagattgtaccagctctgactcaactag

SEQ ID NO: 345579 - DNA, 391 bp, Zea mays
gagcattcagaaacacaccaagcgatgctcactagcaacaacctaacaacaatggctaccaagatattatccctccttgcgcttcttgcgctttttgcgagcgcaacaaatgcgtccattattccacaatgctcacttgctcctagttccattattccacagttcctcccaccagttacttcaatggccttcgaacacccagctgtgcaagcctataggctacaacaagcgattgcggcgagcgtcttacaacaaccaattgcccaattgcaacaacaatccttggcacatctaacaatacaaaccatcgcaacgcaacagcaacaacagttcctaccagcactgagccacctagccatggtgaaccctgtcgcctacttgcaacagcagc

SEQ ID NO: 345580 - DNA, 290 bp, Zea mays
ggcacaacagctactaccattttatttttaggttgtgggaaacattaatgccttcttgcaacagcaacaattgctaccattctacccacagaatgtggcaaacattgttgccttcttacaacaacaacaattgttgccatttagccaacatgctttgacgaatcctaccaccttattgcaaccgcccaccattggtggtgccatcttctagattttttatgatttatactgtaataataaagttttcatgctgatatgtgcgacctctcaaattattatatattaatttt

SEQ ID NO: 345581 - DNA, 209 bp, Zea mays
cccacgcttacgaaaggcctaaatcgttgagtatgcgaaccgcggggagactgggatgcattctcaactatcgtgactacagaagtgcaacaaggctcgcaatttagtactatactattgtatatatcatcttgtgtcattttcccaaagaatcattgatatacctaatcacaataatatacacttaaattagcatctgcaaccacaac

SEQ ID NO: 345582 - DNA, 389 bp, Zea mays
cggacgcgtgggctagcaacatagttagcacaatagtgtaccaacaatggcagccaaaatattttgcttccttatgctccttggtctttctgcaagtgttgctaccgcaaccattttcccacaatgctcacaagctcctatagcttcccttcttcccccatacctctcaccagcggtgtcttcaatgtgtgaaaacccaattgttcaaccctacaggatccaacaggcaatcgcaacaggcatcttaccattatcacccttgttcctccaacaaccgtcagccctattacagcagttacctttggtccatttggtggcacaaaacatcagggcacaacaactacaacaacttgtgctagcaaaccttgctgcatactctcagcaacatc

SEQ ID NO: 345583 - DNA, 386 bp, Zea mays
cacaccaagcgaagcgcactatctttaacctaacaacaatggctaccaagatattatccctccttgcgcttcttgcgctttttgcgagcgcaacaaatgcgtccattattccacaatgctcacttgctcctagttccattattccacagttcctcccaccagttacttcaatggccttcgaacacccagctgtgcaagcctataggctacaacaagcgattgcggcgagcgtcttacaacaaccaattgcccaattgcaacaacaatccttggcacatctaacaatacaaaccatcgcaacgcaacagcaacaacagttcctaccagcactgagccacctagccatggtgaaccctgtcgcctacttgcaacagcagctgcttgca

SEQ ID NO: 345584 - DNA, 363 bp, Zea mays
cggacgcgtgggtgcgagcgccacttccacgcatacaagcggcggctgcggctgccagccaccgccgccggttcatctaccgccgccggtgcatctgccacctccggttcacctgccacctccggtgcatctcccaccgccggtccacctgccgccgccggtccacctgccaccgccggtccatgtgccgtcgccggttcatctgccgccgccaccatgccactaccctactcaaccgccccggcctcagccttatccccagccacacccatgcccgtgccaacagccgcatccaagcccgtgccagctgcagggaacctgcggcgttggcagcaccccgatcctgggccagtgcgtctagtt

SEQ ID NO: 345585 - DNA, 146 bp, Zea mays
ctgctttcccctcgctccagagtccataccccagacgagcggttggagcttcggcgtgcggtttacattcccttgcctgctctgatggccgtcgacgaagaggcgatcgagattcttccgcagcaacagcagcagcagccgccgtc

SEQ ID NO: 345586 - DNA, 394 bp, Zea mays
cattagctttatctactccagagcgcatatagaacccgatcgacaccatgagggtgttgctcgttgccctcgctctcctggctctcgctgcgagcgccacctccacgcatacaagcggcggctgcggctgccagccaccgccgccggttcatctaccgccgccggtgcatctgccacctccggttcacctgccacctccggtgcatctcccaccgccggtccacctgccgccgccggtccacctgccaccgccggtccatgtgccgccgccggttcatctgccgccgccaccatgccactaccctactcaaccgccccggcctcagcctcatccccagccacacccatgcccgtgccaacagccgcattcaagcccgtgccagctgcagggaac

SEQ ID NO: 345587 - DNA, 362 bp, Zea mays
gcaacatagaaagcacaatagtgttccaacaatggcagctaaaatattttgcctccttatgctccttggtctttctgcaagtgctgctacggcgaccattttcccacaatgctcacaagctcctatagcttcccttcttcccccgtacctctcaccaacggcgtcttcggtatgtgaaaacccaattcttcaaccctacaggatccaacaggcaatcgcagctggcatcttacctttatcacccttgttcctccaacaatcatcagccctattacagcagctacctttggtgcatctattggcacaaaacatttgggcacaacaactacaacaacttgtgctagcaaaccttgctgcctact

SEQ ID NO: 345588 - DNA, 386 bp, Zea mays
caactagcaacatagaaagcacaatattgtaccaacaatggcagccaaaatattttgcctccttatgctccttggtatttctgcaagtgctgctacggcgaccattttcccgcaatgctcacaagctcctatagcttcccttcttcccccgtacctctcaccagcggtgtcttcggtatgtgaaaacccaattcttcaaccctacaggatccaacaggcaatcgcagctggcatcttacctttatcacccttgttcctccaacaatcatcagccctattacagcagttacctttggtgcatttattggcacaaaacatcagggcacaacaactacaacaacttgtgctagcaaaccttgctgcctactctcagcaacagcagtttc

SEQ ID NO: 345589 - DNA, 390 bp, Zea mays
ccattagctttatctactccagagcgcagaagaacccgatcgacaccatgagggtgttgctcgttgccctcgctctcctggctctcgctgcgagcgccacctccacgcatacaagcggcggctgcggctgccagccaccgccgccggtccatgtgccgccgccggttcatctgccgccgccaccatgccactaccctactcaaccgccccggcctcagcctcatccccagccacacccatgcccgtgccaacagccgcatccaagcccgtgccagctgcagggaacctgcggcgttggcagcaccccgatcctgggccagtgcgtcgagttcctgaggcatcagtgcagcccgacggcgacgccctactgctcgccttagtgccagtcgt

SEQ ID NO: 345590 - DNA, 393 bp, Zea mays
gagcattcagaaacacaccaagcgaagcgcactagcaacgacctaacaacaatggctaccaagatattagccctccttgcgcttcttgccctttttgtgagcgcaacaaatgcgttcattattccacaatgctcacttgctcctagtgccattattccacagttcctcccaccagttacttcaatgggcttcgaacacctagctgtgcaagccaacatgcaacaacaagcgcttgcggcgagcgtcttacaacaaccaattgcccaattgcaacaacaatccttgccacatctaacaatacaagccatcacaacgcaacagcaacaacagttcctaccagcactgagccacctagccatggtgaaccctgccgcctacttgcaagagcagctg

SEQ ID NO: 345591 - DNA, 391 bp, Zea mays
agaccaactagcaacatagaaagcttaatagtgtaccaacaatggcagccaaaatattttgcctccttatgctccttggtctttctgcaagtgctgctacggcgaccattttcccgcaatgctcgcaagctcctatagcttcccttcttcccccgtacctctcaccagcggtgtcttcggtatgtgaaaacccaattcttcaaccctacaggatccaacaggcaatcgcagctggcatcttacctttatcacccttgttcctccaacaatcatcagccctattacaacagttacctttggtgcatttattggcacaaaacatcagggcacaacaactacaacaacttgtgctagcaaaccttgctgcctactctcagcaacagcagtttct

SEQ ID NO: 345592 - DNA, 393 bp, Zea mays
tagcaacatagaaagcacaatagtgtaccaacaatggcagctaaaatattttgcctccttatgctccttggtctttctgcaagtgctgctacggcgaccattttcccacaatgctcacaagctcctatagcttcccttcttcccccgtacctctcaccaacggtgtcttcggtatgtgaaaacccaattcttcaaccctacaggatccaacaggcaatcgcagctggcatcttacctttatcacccttgttcctccaacaatcatcagccctattacagcagttacctttggtgcatttattggcacaaaacatcagggcacaacaactacaacaacttgtgctagcaaaccttgctgcctactctcagcaacagcagtttcttccattcaac

SEQ ID NO: 345593 - DNA, 391 bp, Zea mays
tttcagcattcagaaacacaccaagttttgcgcactagcaacaacctaacaacaatggctaccaagatattagccctccttgcgcttcttgcccttttagtgagcgcaacaaatgcgttcattattccacagtgctcacttgctcctagtgccattattccacagttccttccaccagttacttcaatgggcttcgaacatccagccgtgcaagcctacaggctacaactagcgcttgcggcgagcgtcttacaacaaccaattgcccaattgcaacaacaattcttggcacatctaaacctacaaaccatcgcaacgcaacagcaacaacagtttttgccatcactgagccacctagccgtggtgaaccctggcgcctacttgcaacagc

SEQ ID NO: 345594 - DNA, 386 bp, Zea mays
gcaacatagaaagcacaatagttttccaacaatggcagccaaaatattttgcctgcttatgctccttggtatttctgcaagtgctgctacggcgaccattttcccgcaatgctcacaagctcctatagcttcccttcttcccccgtacctctcaccagcggtgtcttcggtatgtgaaaacccaattcttcaaccctacaggatccaacaggcaatcgcagctggcatcttacctttatcacccttgttcctccaacaatcatcagccctattacagcagttacccttggtgcatttattggcacaaaacattagggcacaacaaactacaacaacttgtgctagcaaaccttgctgcctactttcagcaccagctatttctttca

SEQ ID NO: 345595 - DNA, 313 bp, Zea mays
caaagcggcagtgcgtagagaggatcgtcgaacagaacagcatgaagatggtcatcgttctcgtcgtgtgcctggctctgtcagctgccagcgcctctgcaatgcagatgccctgcccctgcgcggggctgcagggcttgtacggcgctggcgccggcctgacgacgatgatgggcgccggcgggctgtacccctacgcggagtacctgaggcagccgcagtgcagcccgctggcggcggcgccctactacgccgggtgtgggcagacgagcgccatgtaccagccgttccggcaacagtgcttccagcagca

SEQ ID NO: 345596 - DNA, 384 bp, Zea mays
cagaaacacaccaagcgaagcgcactatcaacaacctaacaacaatggctaccaagatattatccctccttgcgcttcttgcgctttttgcgagcgcaacaaatgcgtccattattccacaatgctcacttgctcctagttccattattccacagttcctcccaccagttacttcaatggccttcgaacacccagctgtgcaagcctataggctacaacaagcgattgcggcgagcgtcttacaacaaccaattgcccaattgcaacaacaatccttggcacatctaacaatacaaaccatcgcaacgcaacagcaacaacagttcctaccagcactgagccacctagccatggtgaaccctgtcgcctacttgcaacagcagc

SEQ ID NO: 345597 - DNA, 385 bp, Zea mays
cggacgcgtgggttttgagcattcataaacacaccaagcgaagctacctagcaacgacttaacaacaatggctaccaagatattagccctccttgcgcttcttgccctttttgtgagcgcaacaaatgcgttcattattccacaatgctcacttgctcctagtgccattataccacagttcctccgaccagttacttcaatgggcttcgaacacctagctgtgcaagcctacaggctacaacaagcgcttgcggcgagcgtcttacaacaaccaattaaccaattgcaacaacaatccttggcacatctaaccatacaaaccatcgcaacacaacagcaacaacagttcctaccagcactgagccaactagatgtggtgaaccct

SEQ ID NO: 345598 - DNA, 336 bp, Zea mays
attgagaccaacaagcaacatagaaagtggaatccagtagcaacaatagagcaacaatggagaccaagatattttccctccttatgctccttgctctttctacatgtgttgctaacgcgacaattttccctcaatgctcacaagctcctatagcttccctttttcccccataccttccatcaattatagcttcagtatgtgaaaacccagctcttcaaccatataggcttcaacaagcaatcgcagcaagcaacatacctttatcgcccttgttgtgtcaacaatcgccagccctatctttggtgcagtcattggtacaaaccattagggcacaac

SEQ ID NO: 345599 - DNA, 383 bp, Zea mays
cagcaaagcggcagtgcgtagagaggatcgtcgaacagaacagcatgaagatggtcatcgttctcgtcgtgtgcctggctctgtcagctgccagcgcctctgcaatgcagatgccctgcccctgcgcggggctgcagggcttgtacggcgctggcgccggcctgacgacgatgatgggcgccggcgggctgtacccctacgcggagtacctgaagcagccgcagtgcagcccgctggcggcggcgccctactacgccgggtgtgggcagacgagcgccatgtaccagccgctccggcaacagtgctgccagcagcagatgaggatgatggacgtgcagtccgtcgcgcaacagctgcagatgatgatgcagcttgagcgtgcc

SEQ ID NO: 345600 - DNA, 390 bp, Zea mays
aaagcacaatagtgtaccaacaatttcagccaaaatattttgcctccttatgctccttggtctttctgcaagtgctgctacggcgaccattttcccacaatgctcacaagctcctatagcttcccttcttcccccgtacctctcaccagcggtgtcttcggtatgtgaaaacccaattcttcaaccctataggatccaacaggcaatcgcagctggcatcttacctttatcacccttgttcctccaacaatcatcagccctattacagcagttacctttggtgcatttattggcacaaaacatcagggcacaacaactacaacaacttgtgctagcaaaccttgctgcctactctcagcaacaacagtttcttccattcaaccaactagg

SEQ ID NO: 345601 - DNA, 388 bp, Zea mays
acaagcaacatagaaagtggaatctattagcaacaatagagcaacaatggagaccaagatattttccctccttatgctccttgctctttctacatgtgttgctaacgcgacaattttccctcaatgctcacaagctcctatagcttccctttttcccccataccttccatcaattatagcttcagtatgtgaaaacccagctcttcaaccatataggcttcaacaagcaatcgcagcaagcaacatacctttatcgcccttgttgtgtcaacaatcgccagccctatctttggtgcagtcattggtacaaaccatcagggcacaacagctgcagcaactcgtgctacctgtgatcaaccaagtagctctggcaaacctttcttcctac

SEQ ID NO: 345602 - DNA, 388 bp, Zea mays
aacatagaaagcacaatagtgtactaacaatggcagccaaaatattttgcctccttatgctccttggtctttctgcaagtgctgctacggcgaccattttcccgcaatgctcgcaagctcctatagcttcccttcttcccccgtacctctcaccagcggtgtcttcggtatgtgaaaacccaattcttcaaccctacaggatccaacaggcaatcgcagctggcatcttacctttatcacccttgttcctccaacaatcatcagccctattacaacagttacctttggtgcatttattggcacaaaacatcagggcacaacaactacaacaacttgtgctagcaaaccttgctgcctactctcagcaacagcagtttcttccattcaa

SEQ ID NO: 345603 - DNA, 395 bp, Zea mays
attttgagcattcagaaacactcttatcgaagcgcactagcaacgacctaacaacaatggctaccaagatattagccctccttgcgcttcttgccctttttgtgagcgcaacaaatgcgttcattattccacaatgctcacttgctcctagtgccattattccacagttcctcccaccagttacttcaatgggcttcgaacacctagctgtgcaagccaacatgcaacaacaagcgcttgcggcgagcgtcttacaacaaccaattgcccaattgcaacaacaatccttgccacatctaacaatacaagccatcacaacgcaacagcaacaacagttcctaccagcactgaaccacctagccatggtgaaccctgccgcctacttgcaagagcag

SEQ ID NO: 345604 - DNA, 391 bp, Zea mays
cagaaacacaccaagcgaagcgcactatcaacaacctaacaacaatggctaccaagatattatccctccttgcgcttcttgcgctttttgcgagcgcaacaaatgcgtccattattccacaatgctcacttgctcctagttccattattccacagttcctcccaccagttacttcaatggccttcgaacacccagctgcgcaagcctataggctacaacaagcgattgcggcgagcgtcttacaacaaccaattgcccaattgcaacaacaatccttggcacatctaacaatacaaaccatcgcaacgcaacagcaacaacagttcctaccagcactgagccacctagccatggtgaaccctgtcgcctacttgcaacagcagctgcttgc

SEQ ID NO: 345605 - DNA, 389 bp, Zea mays
  unsure (1)..(389): unsure at all n locations
attagctttatctactccagagcgcatatagaacccgatcgacaccatgagggtgttgctcgttgccctcgctctcctggctctcgctgcgagcgccacctccacgcatacaagcggcggctgcggctgccagccaccgccgccggttcatctaccgccgccggtgcatctgccacctccggttcacctgccacctccggtgcatctcccaccgccggtccacctgccgccgccggtccacctgccaccgccggtccatgtgccgccgccggttcatctgccgncgncaccatgccactaccctactcaaccgccccggccttagcctcatcctcagccacacccatgcccgtgccaacagccgcattcaagcccgtgccagctgcagg

SEQ ID NO: 345606 - DNA, 390 bp, Zea mays
ctcacaagctcctatagctgcccttttttccccataccttccatcaatgaccgcttcagtatgtgaaaacccagcccttcaaccctacaggctccaacaagcaatcgcaacaagcaacttacctttatcacccctgttctttcaacaatcgccagccctatctttggtgcagtcattggtacaaaccatcagggcacaacagctgcagcaactcgtgctaccagtgatcagccaagtagctctggcaaacctttctccctactctcagcaacaacaatttcttccattcaaccaactgtctacactgaaccctgctgcttatttgcagcaacaacaactactaccattcagccagctagctactgcctactctcagcagcaacaatttct

SEQ ID NO: 345607 - DNA, 388 bp, Zea mays
attagctcatcgactccagattggataactcgacaccatgaaggtgctgatcgttgcccttgctctcctggcgctcgctgcgagcgccgcctccagtacaagcggcggctgtggctgccagacaccaccgtttcatctaccgcctccgttctatatgccgcctccgttctatctgccgccgcagcagcagccgcagccatggcaataccccactcaaccaccgcagctaagcccgtgccagcagttcggatcctgcggcgtcggcagcgtcggcagcccgttcctgggccagtgcgtcgagttcctgaggcaccagtgcagcccggcggcgacgccctacggctcgccacagtgccaggcgctgcagcagcagtgctgccaccagatc

SEQ ID NO: 345608 - DNA, 394 bp, Zea mays
cggacgcgtgggcaacaagcaacatataaagtggaatccagtagcaacaatagagcaacaatggagaccaagatattttccctccttatgctccttgctctttctacatgtgttgctaacgcgacaattttccctcaatgctcacaagctcctatagcttccctttttcccccataccttccatcaattatagcttcagtatgtgaaaacccagctcttcaaccatataggcttcaacaagcaatcgcagcaagcaacatacctttatcgcccttgttgtgtcaacaatcgccagccctatctttggtgcagtcattggtacaaaccatcagggcacaacagctgcagcaactcgtgctacctgtgatcaaccaagtagctctggcaaaccttt

SEQ ID NO: 345609 - DNA, 389 bp, Zea mays
aagcgaagcacattagcaacaacctaacaacaatggctaccaagatattatccctccttgcgcttcttgcgctttttgcgagcgcaacaaatgcgttcattattccacaatgctcacttgctccaagttccattattacacagttcctcccaccagttacttcaatgggcttcgaacacccagctgtgcaagcctataggctacaacaagcaattgcggcgagcgtcttacaacaaccaatttcccagttgcaacaacaatccttggcacatctaacaatacaaaccatcgcaacgcaacagcaacaacaattcctaccagcactgagccacctagccatggtgaaccctgccgcctacttgcaacagcagttgcttgcatcaaaccca

SEQ ID NO: 345610 - DNA, 387 bp, Zea mays
attttcagcattcagaaacacattttgcgaagcgcactagcaacaacctaacaacaatggctaccaagatattagccctccttgcgcttcttgcccttttagtgagcgcaacaaatgcgttcattattccacagtgctcacttgctcctagtgccattattccacagttcctcccaccagttacttcaatgggcttcgaacatccagccgtgcaagcctacaggctacaactagcgcttgcggcgagcgtcttacaacaaccaattgcccaattgcaacaacaatccttggcacatctaaacctacaaaccattcgaacgcaacagcaacaacagtttctgccatcactgagccacctagccgtggtgaaccctgtcgcctacttgc

SEQ ID NO: 345611 - DNA, 92 bp, Zea mays
agccttccggccacacattataatgtgtggtatgtccaataatatatgcatcataataaagttttggtttaaaaaaaaaaaaaaaggcggcg

SEQ ID NO: 345612 - DNA, 380 bp, Zea mays
gaaacacaccaagcgaagcgcactatcttctacctaacaacaatggctaccaagagattagccctccttgcgcttcttgccctttttgtgagcgcaacaaatgcgttcattattccacaatgctcacttgctcctagtgccattattccacagttcctcccaccagttacttcaatgggcttcgaacacctagctgtgcaagccaacatgcaacaacaagcgcttgcggcgagcgtcttacaacaaccaattgcccaattgcaacaacaatccttgccacatctaacaatacaagccatcacaacgcaacagcaacaacagtttctaccagcactgagccacctagccatggtgaaccctgccgtctacttgcaagagca

SEQ ID NO: 345613 - DNA, 396 bp, Zea mays
attttgagcattcagaaacacactatgcgaagcacattagcaacaacctaacaacaatggctaccaagatattatccctccttgcgcttcttgcgctttttgcgagcgcaacaaatgcgttcattattccacaatgctcacttgctccaagttccattattacacagttcctcccaccagttacttcaatgggcttcgaacacccagctgtgcaagcctataggctacaacaagcaattgcggcgagcgtcttacaacaaccaatttcccagttgcaacaacaatccttggcacatctaacaatacaaaccatcgcaacgcaacagcaacaacaattcctaccagcactgagccacctagccatggtgaaccctgccgcctacttgcaacagcagt

SEQ ID NO: 345614 - DNA, 396 bp, Zea mays
gaaacacaccaagcgaagcgcactttcaacgacctaacaacaatggctaccaagatattagccctccttgcgcttcttgccctttttgtgagcgcaacaaatgcgttcattattccacaatgctcacttgctcctagtgccattattccacagttcctcccaccagttacttcaatgggcttcgaacacctagctgtgcaagccaacatgcaacaacaagcgcttgcggcgagcgtcttacaacaaccaattgcccaattgcaacaacaatccttgccacatctaacaatacaagccatcacaacgcaacagcaacaacagttcctaccagcactgagccacctagccatggtgaaccctgccgcctacttgcaagagcagctgcttgcatccaac

SEQ ID NO: 345615 - DNA, 399 bp, Zea mays
gaaacacaccaagcgaagcgcactttcttctacctaacaacaatggctaccaagatattagccctccttgcgcttcttgccctttttgtgagcgcaacaaatgcgttcattattccacaatgctcacttgctcctagtgccattattccacagttcctcccaccagttacttcaatgggcttcgaacacctagctgtgcaagccaacatgcaacaacaagcgcttgcggcgagcgtcttacaacaaccaattgcccaattgcaacaacaatccttgccacatctaacaatacaagccatcacaacgcaacagcaacaacagttcctaccagcactgagccacctagccatggtgaaccctgccgcctacttgcaagagcagctgcttgcattcaaccca

SEQ ID NO: 345616 - DNA, 391 bp, Zea mays
atacaaaccatcgcaacgcaacattatacaacaattcctaccagcactgagccacctagccatggtgaaccctgccgcctacttgcaacagcagttgcttgcatcaaacccacttgctctggcaaacgtagttgcaaaccagccacaacaacagctgcaacagtttctgccagcgctcagtcaactagccatggtgaaccctgccgcctacctacaacagcaacaactgctttcatctagcccgctcgctgtggccaatgcacctacatacctgcaacaacaattgttgcaacagattgtaccagctctgactcagctagttgtggcaaaccctgctgcctacttgcaacagctgctttcattcaaccaactgactatgtcgaactctgct

SEQ ID NO: 345617 - DNA, 390 bp, Zea mays
caaatgcgttcattattccacagttttcacttgctcctagtgccattattccacagttcctcccaccagttacttcaatgggcttcgaacatccagccgtgcaagcctacaggctacaactagcgcttgcggcgagcgtcttacaacaaccaattgcccaattgcaacaacaatccttggcacatctaaacctacaaaccatcgcaacgcaacagcaacaacagtttctgccatcactgagccacctagccgtggtgaaccctgtcgcctacttgcaacagcagctacttgcatccaacccacttgctctggcgaacgtagctgcataccagcaacaacaacgtctgcaacagtttatgccagcgctcagtcaactagccatggtgaacc

SEQ ID NO: 345618 - DNA, 345 bp, Zea mays
gaccaactagcaacatagaaagcacaatagtgtaccaacaatggcagccaaaatattttgcctccttatgctccttggtctttctgcaagtgctgctacggcgaccattttcccgaaatgctcgcaagctcctatagcttcccttcttcccccgtacctctcaccagcggtgtcttcggtatgtgaaaacccaattcttcaaccctacaggatccaacaggcaatcacaagctggcatcttacctttatcacccttgttcctccaacaatcatcagccctattacaatcagtacctttggtgcatttattggcacaaaacatgaggggacaacaactacaacaac

SEQ ID NO: 345619 - DNA, 383 bp, Zea mays
cccacgcgtccgaagcacaatagtgtaccaacaatggcagccaaaatattttgcttccttatgctccttggtctttctgcaagtgctgctaccgcaaccattttcccacaatgctcacaagctcctatagcttcctttcttcccccatacctctcaccagcggtgtcttcagtatgtgaaaacccaattcttcaaccctacaggatccaacaggcaatcgcagcaggcatcttacctttatcacccttgttcctccaacaaccgtcagccctattacagcagttacctttggtgcatttgttggcacaaaacatcaaggcacaacaactacaacaacttgtgctaggaaaccttgctgcctactctcaacaacagcagtttct

SEQ ID NO: 345620 - DNA, 378 bp, Zea mays
attgagaccaactagcaacatatattgtcacaatagtgtaccaacaatggcagccaaaatattttgcttccttatgctccttggtctttctgcaagagctgctaccgcaaccattttcccacaatgctcacaagctcctatagcttcctttcttcccccatacctctcaccagcggtgtcttcagtatgtgaaaacccaattcttcaaccctacaggatccaacaggcaatcgcagcaggcatattacctttatcacccttgttcctgcaacaaccgccagtcctattacagcagttacctttggtgcatttgttggcacaaaacattaaggtacaactactacaacaacttgtgctaggaaaccttggtgcccactt

SEQ ID NO: 345621 - DNA, 387 bp, Zea mays
ccggaccggaatcggaagggtcgacccaagcgacccattcagaaacacaccaagcgaagcgcactatcaacaacctaacaacaatggctaccaagatattagccctccttgcgcttcttgcccttttagtgagcgcaacaaatgcgttcattattccacagtgctcacttgctcctagtgccattattccacagttcctcccaccagttacttcaatgggcttcgaacattcagccgtgcaagcctacaggctacaactagcgcttgcggcgagcgtcttacaacaaccaattgcccaattgcaacaacaatccttggcacatctaaacctacaaaccatcgcaacgcaacagcaacaacagtttctgccatcactgagccacctag

SEQ ID NO: 345622 - DNA, 385 bp, Zea mays
gacatagtggactcaacaatggcagtctaatattttgcctcctatgctcctgggtctttctgcaagtgctgctacggcgaccattttcccgcaatgctcgcaagctcctatagcttcccttcttcccccgtacctctcaccagcggtgtcttcggtatgtgaaaacccaattcttcaaccctacaggatccaacaggcaatcgcagctggcatcttacctttatcacccttgttcctccaacaatcatcagccctattacaacagttacctttggtgcatttattggcacaaaacatcagggcacaacaactacaacaacttgtgctagcaaaccttgctgcctactctcagcaacagcagtttcttccattcaaccaactaggg

SEQ ID NO: 345623 - DNA, 389 bp, Zea mays
gcgaagcgcactagcaacaacctaacaacaatggctaccaagatattagccctccttgcgcttcttgcccttttagtgagcgcaacaaatgcgttcattattccacagtgctcacttgctcctagtgccattattccacagttcctcccaccagttacttcaatgggcttcgaacatccagccgtgcaagcctacaggctacaactagcgcttgcggcgagcgtcttacaacaaccaattgcccaattgcaacaacaatccttggcacatctaaacctacaaaccatcgcaacgcaacagcaacaacagtttctgccatcactgagccacctagccgtggtgaaccctgtcgcctacttgcaacagcagctacttgcatccaacccact

SEQ ID NO: 345624 - DNA, 410 bp, Zea mays
gaccggaacggccgggccgacccgaccgacccgttcgtagcaacataaaaagcacaatagtgtaccaacaatggcagccaaaatattttgcctccttatgctccttggtctttctgcaagtgctgctacggcgaccattttcccgaaatgctcgcaagctcctatagcttcccttcttcccccgtacctctcaccagcggtgtcttcggtatgtgaaaacccaattcttcaaccctacaggatccaacaggcaatcacagctggcatcttacctttatcacccttgttcctccaacaatcatcagccctattacatcagttacctttggtgcatttattggcacaaaacatcagggcacaacaactacaacaacttgtgctagcaaaccttgctgcctactctcagcaac

SEQ ID NO: 345625 - DNA, 385 bp, Zea mays
attcagaaacacaccaagcgaagcgcactagcaacaacctaacaacaatggctaccaagatattagccctccttgcgcttcttgcccttttagtgagcgcaacaaatgcgttcattattccacagtgctcacttgctcctagtgccattattccacagttcctcccaccagttacttcaatgggcttcgaacatccagccgtgcaagcctacaggctacaactagcgcttgcggcgagcgtcttacaacaaccaattgcccaattgcaacaacaatccttggcacatctaaacctacaaaccatcgcaacgcaacagcaacaacagtttttgccatcactgagccacctagccgtggtgaaccctgtcgcctacttgcaacagca

SEQ ID NO: 345626 - DNA, 387 bp, Zea mays
attttcagcattcagaaacacaccaagcgaagcgcactagcaacaacctaacaacaatggctaccaagatattagccctccttgcgcttcttgcccttttagtgagcgcaacaaatgcgttcattattccacagtgctcacttgctcctagtgccattattccacagttcctcccaccagttacttcaatgggcttcgaacatccagccgtgcaagcctacaggctacaactagcgcttgcggcgagcgtcttacaacaaccaattgcccaattgcaacaacaatccttggcacatctaaacctacaaaccatcgcaacgcaacagcaacaacagtttctgccatcactgagccacctagccgtggtgaaccctgtcgcctacttgc

SEQ ID NO: 345627 - DNA, 387 bp, Zea mays
gcaacatagaaagcacaatagtgtaccaacaatggcagccaaaatattttgcttccttatgctccttggtctttctgcaagtgctgctaccgcaaccattttcccacaatgctcacaagctcctatagcttcctttcttcccccatacctctcaccagcggtgtcttcagtatgtgaaaacccaattcttcaaccctacaggatccaacaggcaatcgcagcaggcatcttacctttatcacccttgttcctccaacaaccgtcagccctattacagcagttacctttggtgcatttgttggcacaaaacatcaaggcacaacaactacaacaacttgtgctaggaaaccttgctgcctactctcagcaacagcagtttcttccatt

SEQ ID NO: 345628 - DNA, 388 bp, Zea mays
cagaaacacaccaagcgaagcgcactagcaacaacctaacaacaatggctaccaagatattagccctccttgcgcttcttgcccttttagtgagcgcaacaaatgcgttcattattccacagtgctcacttgctcctagtgccattattccacagttcctcccaccagttacttcaatgggcttcgaacatccagccgtgcaagcctacaggctacaactagcgcttgcggcgagcgtcttacaacaaccaattgcccaattgcaacaacaatccttggcacatctaaacctacaaaccatcgcaacgcaacagcaacaacagtttctgccatcactgagccacctagccgtggtgaaccctgtcgcctacttgcaacagcagctact

SEQ ID NO: 345629 - DNA, 76 bp, Zea mays
  unsure (1)..(76): unsure at all n locations
gaaaaaaaaccgggngaaaaacacaaacgcaaaaacacacaaataaaaatttatttaaaacaacaaaacaacaaaa

SEQ ID NO: 345630 - DNA, 354 bp, Zea mays
  unsure (1)..(354): unsure at all n locations
caacaagcaacatagaaaggggaattcagtagcaacaatagagcaacaatggcgaccaagatattttccctccttatgctccttgctctntctgcatgtgttgctaacgcgacaattttccctcaatgctcacaagctcctatagcttcccttcttcccccataccttccatcaatgatagcttcagtatgtgaaaacccagctcttcaaccctataggctccaacaagcaatcgcagcaagcaacatacctttatcacccttgtttcaacaatcgccagccctatctttggtgcagtcattggtacaaaccatcaaggcacagcagctgcagcaactcgtgctacctgtgatc

SEQ ID NO: 345631 - DNA, 380 bp, Zea mays
cccacgcgtccgaatattttgagcattcagaaacacaccaagcgaagcgcactagcaacgacctaacaacaatggctaccaagatattagccctccttgcgcttcttgccctttttgtgagcgcaacaaatgcgttcattattccacaatgctcacttgctcctagtgccattattccacagttcctcccaccagttacttcaatgggcttcgaacacctagctgtgcaagccaacatgcaacaacaagcgcttgcggcgagcgtcttacaacaaccaattgcccaattgcaacaacaatccttgccacatctaacaatacaagccatcacaacgcaacagcaacaacagttcctaccagcactgagccacctagccatg

SEQ ID NO: 345632 - DNA, 383 bp, Zea mays
  unsure (1)..(383): unsure at all n locations
atagaaagcacattattgtaccattattggcagccaaaatatttggcctaatggggctccttggtctttctgcaagtgctgctacggcgagcattttcccgcaatgctcacaagctcctatagcttcccttcttcccccatacctctcaccagcgatgtcttcagtatgtgaaaatccaattcttctaccctacaggatccaacaggcaatcgcagcaggcatcttacctttatcacccttgttcctccaacaatcatcagccctattacagcagttacctttggtgcatttattggcacanaacatcatggcacaacaactacaacaactcgtgctagcaaaccttgctgcctactctcagcaacaacagtttctgccattc

SEQ ID NO: 345633 - DNA, 286 bp, Zea mays
cgcgtcgattggcatcaaaccacagcgagacatacacacctacacatggtccaagaatatccctctgcctcttgcctttgcagccacaaatgcgtatattcaaatgctacttgctcaagtcaatacacagtctccaccagtcttaatgggcttgacacactggcagctatggtacacagcaatgcgggcgtttacacaccaattcagtgcaacacaatctggaatctaacatcaaccatgacgacagcacaacattctacacactgccactagcagggacctgcgc

SEQ ID NO: 345634 - DNA, 207 bp, Zea mays
  unsure (1)..(207): unsure at all n locations
aaaaaaaaaaaaaataaacacaacattttttttaaaaaaaaaaaacaacataacatcggtgggtttccaaaatattatggcctcctccagcttcttgcgactttccgcgagcgcaacaaangcggggcccccgttctaaagaatccaagtttactaccccctgcttgcaacgaaataacttttttttggggtcccctaaattcaatt

SEQ ID NO: 345635 - DNA, 288 bp, Zea mays
ctagatctacatcacaagctttctttctttttaacaatttaaactcagacggggggtatattcttgaagtgattagaccgactgaatgctgccaagttatattaaaaagcgcaaggttaggcatccacttgcaagttacaacagcccttatattattacacaagtatgggaataaaaattacaacaattgacactcttctaacgaacaaaaccaaatcttacatattcagcatgagcagcagcttcatgcagtttctatcttgagtctattacccaaaacattaagca

SEQ ID NO: 345636 - DNA, 382 bp, Zea mays
gagcattcagaaacacaccaagcgaagcttattagcaacaacctaacaacaatggctaccaagatattatccctccttgcgcttcttgcgctttttgcgagcgcaacaaatgcgttcattattccacaatgctcacttgctccaagttccattattacacagttcctcccaccagttacttcaatgggcttcgaacacccagctgtgcaagcctataggctacaacaagcaattgcggcgagcgtcttacaacaaccaatttcccagttgcaacaacaatccttggcacatctaacaatacaaaccatcgcaacgcaacagcaacaacaattcctaccagcactgagccacctagccatggtgaaccctgccgactacttgc

SEQ ID NO: 345637 - DNA, 385 bp, Zea mays
attgagaccaacaagcaacatttaatgtggaatccagtagcaacaatagagcaacaatggagaccaagatattttccctccttatgctccttgctctttctacatgtgttgctaacgcgacaattttccctcaatgctcacaagctcctatagcttccctttttcccccataccttccatcaattatagcttcagtatgtgaaaacccagctcttcaaccatataggcttcaacaagcaatcgcagcaagcaacatacctttatcgcccttgttgtgtcaacaatcgccagccctatctttggtgcagtcattggtacaaaccatcaaggcacaacagctgcagcaactcgtgctacctgtgatcaaccaagtagctctggcaaa

SEQ ID NO: 345638 - DNA, 383 bp, Zea mays
gagcattcagaaacacaccattcgttgcacattagcaacaacctaacaacaatggctaccaagatattatccctccttgcgcttcttgcgctttttgcgagcgcaacaaatgcgttcattattccacaatgctcacttgctccaagttccattattacacagttcctcccaccagttacttcaatgggcttcgaacacccagctgtgcaagcctataggctacaacaagcaattgcggcgagcgtcttacaacaaccaatttaccagttgcaacaacaatccttggcacatctaacaatacaaaccatcgcaacgcaacagcaacaacaattcctaccagcactgaaccacctagccatggtgaaccctgccgcctacttgca

SEQ ID NO: 345639 - DNA, 371 bp, Zea mays
accaagcgaagcgcactagcaacgacctaacaacaatggctaccaagatattagccctccttgcgcttcttgccctttttgtgagcgcaacaaatgcgttcattattccacaatgctcacttgctcctagtgccattattccacagttcctcccaccagttacttcaatgggcttcgaacacctagctgtgcaagccaacatgcaacaacaagcgcttgcggcgagcgtcttacaacaaccaattgcccaattgcaacaacaatccttgccacatctaacaatacaagccatcacaacgcaacagcaacaacagttcctaccagcactgagccacctagccatggtgaaccctgccgcctacttgcaagag

SEQ ID NO: 345640 - DNA, 389 bp, Zea mays
cagaaacacaccaagcgaagcacattagctacaacctaacaacaatggctaccaagatattatccctccttgcgcttcttgcgctttttgcgagcgcaacaaatgcgttcattattccacaatgctcacttgctccaagttccattattacacagttcctcccaccagttacttcaatgggcttcgaacacccagctgtgcaagcctataggctacaacaagcaattgcggcgagcgtcttacaacaaccaatttcccagttgcaacaacaatccttggcacatctaacaatacaaaccatcgcaacgcaacagcaacaacaattcctaccagcactgagccacctagccatggtgaaccctgccgcctacttgcaacagcagttgctt

SEQ ID NO: 345641 - DNA, 387 bp, Zea mays
gagcattcagaaacacaccaagcgttttatattagcaacaacctaacaacaatggctaccaagatattatccctccttgcgcttcttgcgctttttgcgagcgcaacaaatgcgttcattattccacaatgctcacttgctccaagttccattattacacagttcctcccaccagttacttcaatgggcttcgaacacccagctgtgcaagcctataggctacaacaagcaattgcggcgagcgtcttacaacaaccaatttcccagttgcaacaacaatccttggcacatctaacaatacaaaccatcgcaacgcaacagcaacaacaattcctaccagcactgagccacctagccatggtgaaccctgccgcctacttgcaacag

SEQ ID NO: 345642 - DNA, 371 bp, Zea mays
ccaacaagcaacatagaaagtgtgttacagtagcaacaatagagcaacaatggcggccaagatattttccatccttatgctccttgctctttctgcatgtgttgctaacgcgaccattttcccgcaatgctcgcaagctcctatagcttcccttcttcccccgtacctctcaccagcggtgtcttcggtatgtgaaaacccaattcttcaaccctacaggatccaacaggcaatcgcagctggcatcttacctttatcacccttgttcctccaacaatcatcagccctattacaacagttaccttttgtgcatttattggcacaaaacatcagggcacaacaactacaacaacttgtgctagcaaaccttg

SEQ ID NO: 345643 - DNA, 384 bp, Zea mays
caaaccctaacttctccctgtttttgtccaccgccgccgccattgaatgcagcttcagcactgcaatggcgtttcaggggaagaatcgccaggtcctcgaggtcgatccggcggacgatcctacagctgaggtggccaccgccttcgatcgtctctccgtttcgcccatccccaatccgtctgcatctgccgccgtcgttcaggtctgttctccttacgccctcaacaacagtggtacccagcagcctcagtcgtcgtccactcgtgatgccaccatggttcctttacctcctgcaagtgtgctgtcttaccggtaccaagaggtccttaattgccttcacgacgccattaacgagatgcaacaagtttcaatgaatttgaagt

SEQ ID NO: 345644 - DNA, 371 bp, Zea mays
gcaacatagaaagcacaatagtgtatcatttatggcagccaaaatattttgcctccttatgctccttggtctttctgcaagtgctgctacggcgaccattttcccgcaatgctcgcaagctcctatagcttcccttcttcccccgtacctctcaccagcggtgtcttcggtatgtgaaaacccaattcttcaaccctacaggatccaacaggcaatcgcagctggcatcttacctttatcacccttgttcctccaacaatcatcagccctattacaacagttacctttggtgcatttattggcacaaaacattatggcacaacaacttcaacaacttgtgcttgcaaaccttgctgtctacttttaacaac

SEQ ID NO: 345645 - DNA, 274 bp, Zea mays
aatgccttgcccttgcgcggggctgcagggttggaacggcgctggcgccggcctgacaacaatgatgggcgccggcggcctgaacccttacgcggagtacctgaggcagccgcagtgcagcccgctggcggcggcgccctactacgccgggtgtgggcagacgagcgccatgtaccagccgctccggcaacagtgctgccagcagcagatgatgatgatggacgtgcagtccgtcgcgcagcaactgcagatgatgatgcagcttgagcgtgcc

SEQ ID NO: 345646 - DNA, 121 bp, Zea mays
gttctagatcgcgagcggccgcccttttttttttttttttttaaaatttttttttttttttttttttttttttttttttttttttaaatttttttatatttaattttttttattttaaaaa

SEQ ID NO: 345647 - DNA, 112 bp, Zea mays
gttctagatcgcgagcggccgccatcttctagattttttatgatttatactgtaataataaagttctcatgctgatatgtgcgacctctcagtaataaagtattagagatct

SEQ ID NO: 345648 - DNA, 404 bp, Zea mays
cggggcggcccaacccgtccggaaataaacagaataatggtggagggaaaccagaatccaaatacttaaaattgggggactcaaaaagccagaaaggggaagagcataggtcaaacgcagcaactacccttgtgaggaagctccggtggagcacccttggtctgcaatttgattggtcaaagcggaactacgatgtatcacttccacacaacaagattccaggtgctctagctagtcttgccaaaaagatggctattccagctatgccttctggagaagaattcaagccagaagctgctatagtgaactattacggtccaagtgacatgcttggggccatgttgatgacatggaagcagattggacaaaacctattgtaagcataagtttgggctgcaaatgca

SEQ ID NO: 345649 - DNA, 383 bp, Zea mays
ttagaccaactagcaacatagaatgttcaatagtgtaccaacaatggcagccaaaatattttgcctccttatgctccttggtatttctgcaagtgctgctacggcgaccattttcccgcaatgctcacaagctcctatagcttcccttcttcccccgtacctctcaccagcggtgtcttcggtatgtgaaaacccaattcttcaaccctacaggatccaacaggcaatcgcagctggcatcttacctttatcacccttgttcctccaacaatcatcagccctattacagcagttacctttggtgcatttattggcacaaaacatcagggcacaacaactacaacaacttgtgctagcaaaccttgctgcctactctcagcaac

SEQ ID NO: 345650 - DNA, 274 bp, Zea mays
attcagccagctagctggtgtgagccctgctaccttcttgacacaaccacagttgttgccgttctaccagcacgttgcgcctaacgctggcaccctcttacaactgcaacaattgctgccattcaaccaacttgctttgacaaacccagcagtgttctaccaacaacccatcattggtggtgccctcttttagatttcttatgagttatagttcaataataaagttttttatctgatgtttgtggcttcccagaaataagaaagtacatttctg

SEQ ID NO: 345651 - DNA, 382 bp, Zea mays
gcagtttcttccattcaaccaactatctgcattgaactctgcttcttatttgcaacaacaacaactaccattcagccagctatctgctgcctacccccagcaatttcttccattcaaccaactgacagcattgaactctcctgcttatttacagcagcaaaccctactgcctacttgcaacagttgcttccattcaaccaactggctgtgtcgaactctgctgtgtacctacaacagcgacaacagttacttaatccactagcagtggctaacccattggtcgctaacttcctgcagcagcaacaattgctgccatacaaccagttctctttgatgaaccctgccttgcagcaacccatcgttggaggtgccatcttttaga

SEQ ID NO: 345652 - DNA, 386 bp, Zea mays
gtgaaaacccaattcttcaaccctacaggatccaacaggcaatcgcagcaggcatcttacctttatcacccttgttcctccaacaaccgtcagccctattacagcagttacctttggtgcatttgttggcacaaaacatcaaggcacaacaactacaacaacttgtgctaggaaaccttgctgcctactctcagcaacagcagtttcttccattcaaccaactggctgcattgaactctgctgcttatttgcaacaacaactaccattcagtcagctagctgctgcctacccccagcaatttcttccattcaaccaactggcagcattgaactctgctgcttatttacaacagcaacagctaccaccattcagccagctagctgat

SEQ ID NO: 345653 - DNA, 382 bp, Zea mays
cccacgcgtccgcagcattcagaaacacaccaagcgaagcgcactagcaacaacctaacaacaatggctaccaagatattagccctccttgcgcttcttgcccttttagtgagcgcaacaaatgcgttcattattccacagtgctcacttgctcctagtgccattattccacagatcctcccaccagttacttcaatgggcttcgaacatccagccgtgcaagcctacaggctacaactagcgcttgcggcgagcgtcttacaacaaccaattgcccaattgcaacaacaatccttggcacatttaaacctacaaaccatggcaacgcaacagcaacaacagtttctgacatcactgagccacctagcctgggtgaaccctg

SEQ ID NO: 345654 - DNA, 364 bp, Zea mays
  unsure (1)..(364): unsure at all n locations
aagcaacatagaaagtggaatccagtagcaccaatagagcaacaatggagaccaagatattttccctccttatgctccttgctctttctacatgtgttgctaacgcgacaattttncctcaatgctcacaagctcctatagcttccctttttcccccataccttccatcaattatagcttcagtatgtgaaaacccagctcttcaaccatataggcttcaacaagcaatcgcagcaagcaacatacctttatcgcccttgttgtgtcaacaatcgccagccctatctttggtgcagtcattggtacaaaccatcanggcacaacagctgcagcaactcgtgctacctgtgatcaaccaagtagc

SEQ ID NO: 345655 - DNA, 380 bp, Zea mays
  unsure (1)..(380): unsure at all n locations
atagaaagcacaatagtgtcccaacattggcagccaaaatatttggcctcctaatgctccttggtctttctgcaagtgctgctacggcaaccattttcccgaaatgctcgcaggctcctatagcttcccttcttcccccgaacctctcaccagcggtgtcttcggtatgtgaaaacccaattcttcaaccctacaggatccaacaggcaatcgcagctggcatcttacctttatcacccttgttcctccaacaatcatcagccctattacaacagttacctttggtgcatttattggcacanaacatcaaggcacaacaactacaacaacttgtgctagcaaaccttgctgcctactctcagcaacagcagtttcttcca

SEQ ID NO: 345656 - DNA, 341 bp, Zea mays
aattagctcatcgactccagattggagaactcgacaccatgaaggtgctgatcgttgccctggctctcctggcgctcgctgcgagcgccgcctccagtacaagcggcggctgtggctgccagacaccaccgtttcatctaccgcctccgttctatatgccgcctccgttctatctgccgccgcagcagcagccgcagccatggcaataccccactcaaccaccgcagctaagcccgtgccagcagttcggatcctgcggcgtcggcagcgtcggcagcccgttcctgggccagtgcgtcgagttcctgaggcaccagtgcaagccggcggcgacgccctac

SEQ ID NO: 345657 - DNA, 384 bp, Zea mays
gcttcaacaagcaatcgcagcatgttacatacctttatcgcccttgttgtgtcaacaatcgccagccctatctttggtgcagtcattggtacaaaccatcagggcacaacagctgcagcaactcgtgctacctgtgatcaaccaagtagctctggcaaacctttctccctactctccgcaacaacaatttcttccattcaaccaactgtctacactgaaccctgctgcttatttgcagcaacaactattaccatttagccagctagctactgcctactctcaacaacaacaacttcttccatttaaccaattggccgcactgaaccccgctgcttatttgcagcagcaaatactactaccatttagccagctagctacagcaag

SEQ ID NO: 345658 - DNA, 239 bp, Zea mays
gggcgacccacgcgttcggctttatctactccagagcgttgtttatcccgagcgacaccatgagggcggtgggggttgttctcgctctgctggctctcgctgcgagcgccaccttcacgcatacaagcggcggatgcggctgccagccaccgccgccggttcatctaccgccgacggtgcatttgccacctccggagtacctgccacctacggtgcatctcccaccgccggaccacctg

SEQ ID NO: 345659 - DNA, 386 bp, Zea mays
aactagcaacatagaaagcacaatagtgtaccaacaatggcagccaaaatattttgcctccttatgctccttggtctttctgcaagtgctgctacggcgaccattttcccgcaatgctcgcaagctcctatagcttcccttcttcccccgtacctctcaccagcggtgtcttcggtatgtgaaaacccaattcttcaaccctacaggatccaacaggcaatcgcagctggcatcttacctttatcacccttgttcctccaacaatcatcagccctattacaacagttacctttggtgcatttattggcacaaaacatcagggcacaacaactacaacaacttgtgctagcaaaccttgctgcctactctcagcaacagcagtttct

SEQ ID NO: 345660 - DNA, 387 bp, Zea mays
aactagcaacatagaaagcactatattgtaccaacaatggcagccaaagtcgtgggcctacttatgctccttggtctttctgcaagtgctgctacggcgaccattttcccgcaatgctcgcaagctcctatagcttaccttcttcccccgtacctctcaccagcggtgtcttcggtatgtgaaaacccaattcttcaaccctacaggatccaacacgcaatcgcagctggcatcttacctttatcacccttgttcctccaacaatcatcagccctattacaacagttacctttggtgcatttattggcacaaaacatcagggcacaacaactacaacaacttgtgctagcaaaccttgctgcctactctcagcaacagcagtttctt

SEQ ID NO: 345661 - DNA, 169 bp, Zea mays
atccagatcagcaaaagcggcagtgcgtatagagggaatcgtcgaacagaacaagcaggaagaatggtcatcgttctcgtcgtgtgcctggctctgtcagctgccagcgcctctgcaatgcagatgccctgcccctgcgccgggctgcaaggcttgtacggcgctggcg

SEQ ID NO: 345662 - DNA, 387 bp, Zea mays
  unsure (1)..(387): unsure at all n locations
gcattcagaaacacaccaagcgaagcactttagcaacaacctaacaacaatggctaccaagatattatccctccttgcgcttcttgcgctttttgcgagcgcaacaaatgcgttcattattccacaatgctaacttgctccaagttccattattacacagttcctcccaccagttacttcaatgggcttcgaacacccagctgtgcaagcctataggctacaacaagcaattgcggcgagcgtcttacaacaaccaatttcccagttgcaacaacaatccttggcacatctaacaatacaaaccatcgcaacgcaacagcaacaacaattcctaccagcactgagccacctagccatggtgaaccctgccgnctacttgcaacagca

SEQ ID NO: 345663 - DNA, 382 bp, Zea mays
ccaactagcaacatagaaggcacattagtgtaccaacaatggcagccaaaatattttgcctccttatgctccttggtctttctgcaagtgctgctacggcgaccattttcccacaatgctcacaagctcctatagcttcccttcttcccccgtacctctcaccagcggtgtcttcggtatgtgaaaacccaattcttcaaccctataggatccaacaggcaatcgcagctggcatcttacctttatcacccttgttcctccaacaatcatcagccctattacagcagttacctttggtgcatttattggcacaaaacatcagggcacaacaactacaacaacttgtgctagcaaaccttgctgcctactctcagcaacaaca

SEQ ID NO: 345664 - DNA, 390 bp, Zea mays
gggtcttcagaccattagctttatctactccagagcgcagaagaacccgatcgacaccatgagggtgttgctcgttgccctcgctctcctggctctcgctgcgagcgccacctccacgcatacaagcggcggctgcggctgccagccaccgccgccggttcatctaccgccgccggtgcatctgccacctccggttcacctgccacctccggtgcatctcccaccgccggtccacctgccgccgccggtccacctgccaccgccggtccatgtgccgccgccggttcatctgccgccgccaccatgccactaccctactcaaccgccccggcctcagcctcatccccagccacacccatgcccgtgccaacagccgcatccaagcccgtg

SEQ ID NO: 345665 - DNA, 390 bp, Zea mays
  unsure (1)..(390): unsure at all n locations
ctcatccccagccacacccatgcccgtgccaacagccgcatccaagcccgtgccagctgcagggaacctgcggcgttggcagcaccccgatcctgggccagtgcgtcgagtttctgaggcatcagtgcagcccgacggcgacgccctactgctcgcctcagtgccagtcgttgcggcagcagtgttgccagcagctcaagcaggtggagccgcagcaccggtaccaggcgatcttcggcttggtcctccagtccatcctgcagcagcagccgcaaagcggccaggtcgcggggctgttggcggcgcanatagcgcagcaactgacggcgatgtgcggcctgcagcagccgactccatgcccctacgctgctgccggcggtgtcccccact

SEQ ID NO: 345666 - DNA, 381 bp, Zea mays
agcaacatagaaagcacaatagtgtaccaacaatggcagccaaaatattttgcctccttatgctccttggtctttctgcaagtgctgctacggcgaccattttcccgaaatgctcgcaagctcctatagcttcccttcttcccccgtacctctcaccagcggtgtcttcggtatgtgaaaacccaattcttcaaccctacaggatccaacaggcaatcacagctggcatcttacctttatcacccttgttcctccaacaatcatcagccctattacatcagttacctttggtgcatttattggcacaaaacatcagggcacaacaactacaacaacttgtgctagcaaaccttgctgcctactctcagcaacagcagtttc

SEQ ID NO: 345667 - DNA, 382 bp, Zea mays
gctttatctactccagagcgcagaataacccgatcgacaccatgagggtgttgctcgttgccctcgctctcctggctctcgctgcgagcgccacctccacgcatacaagcggcggctgcggctgccagccaccgccgccggttcatctaccgccgccggtgcatctgccacctccggttcacctgccacctccggtgcatctcccaccgccggtccacctgccgccgccggtccacctgccaccgccggtccatgtgccgccgccggttcatctgccgccgccaccatgccactaccctactcaaccgccccggcctcagcctcatccccagccacacccatgcccgtgccaacagccgcatccaagcccgtgccagctgca

SEQ ID NO: 345668 - DNA, 383 bp, Zea mays
  unsure (1)..(383): unsure at all n locations
caacaagcaacatanaaagtttaattcagtagcaacaatagagcaacaatctcgaccaagatattttccctccttatgctccttgctctttctacatgtgttgctaacgcgacaattttccctcaatgctcacaagctcctatagcttccctttttcccccataccttccatcaattatagcttcagtatgtgaaaacccagctcttcaaccatataggcttcaacaagcaatcgcagcaagcaacatacctttatcgcccttgttgtgtcaacaatcgccagccctatctttggtgcagtcattggtacaaaccatcaaggcacaacagctgcagcaactcgtgctacctgtgatcaaccaaatagctcttgcaaacctttc

SEQ ID NO: 345669 - DNA, 387 bp, Zea mays
attcagaaacacaccaagcgaagcgcactagcaacaacctaacaacaaggcttgcaggatattagccctccttgcgcttcttgcccttttagtgagcgcaacaaatgcgttcattattccacagtgctcacttgctcctagtgccattattccacagttcctcccaccagttacttcaatgggcttcgaacatccagccgtgcaagcctacaggctacaactagcgcttgcggcgagcgtcttacaacaaccaattgcccaattgcaacaacaatccttggcacatctaaacctacaaaccatcgcaacgcaacagcaacaacagtttctgccatcactgagccacctagccgtggtgaaccctgtcgcctacttgcaacagcagct

SEQ ID NO: 345670 - DNA, 377 bp, Zea mays
aactagcaacatagaaagcacaatattgtaccaacaatggcagccaaagtgttgggcctacttatgctccttggtctttctgcaagtgctgctacggcgaccattttcccgcaatgctcgcaagctcctatagcttcccttcttcccccgtacctctcaccagcggtgtcttcggtatgtgaaaacccaattcttcaaccctacaagatccaacacgcaatcgcagctggcatcttacctttatcacccttgttcctgcaacaatcatcagccctattacaacagttacctttggtgcatttattggcacaaaacatcaaggcacaacaactacaacaacttgtgctagcaaaccttgctgcctactctcagcaaca

SEQ ID NO: 345671 - DNA, 257 bp, Zea mays
  unsure (1)..(257): unsure at all n locations
caaaaaattgaattccanaaccacaatttttttaccattgaaacccaaaaaaaacgcctgtgctaatcttccttctccttccaccataaatacttaccccaccatttttccttaattcttaacaacctctaatactttccttttttcccccataccttccataaatattaccttcatattttaaaaacccactttttaaaccatttanccttaaccaaccaatcccaccaaccaacataccttattccccctttttt

SEQ ID NO: 345672 - DNA, 405 bp, Zea mays
aaaacccccggccacccaacccttccggaaattgaaatccattaccaacattttttaccaatgaaaaccaaaaaatttcccgtccttatcctccttcctctttctacatatgttgctaacccaacaattttccctcaatgctcacaacctcctatagcttccctttttcccccataccttccatcaattatagcttcagtatgtgaaaacccacctcttcaaccatataggcttcaacaagcaatcgcagcaagcaacatacctttatcgcccttgttgtgtcaacaatcgccagccctatctttggtgcagtcattggtacaaaccatcagggcacaacagctgcagcaactcgtgctacctgtgatcaaccaagtagctctggcaaacctttctccctactct

SEQ ID NO: 345673 - DNA, 306 bp, Zea mays
  unsure (1)..(306): unsure at all n locations
aaaaggcaaaaaaaaaatttatttcaaacaacaaaaaaaagatttcgtntttattaaaaatggggcgcaaaaaaaaaaaaaaacaannnnnnataatntcacaancttatataactttcctttttccccataccttacattaattataacttcaatatattaaaacccatttttttaaccatatatnctataacaaacaatttaaacaatcaacatacctttatcatccttaattatattaacaaataactatacctatctttctttcaatcattataacaaaccattattatacaacaacttcaa

SEQ ID NO: 345674 - DNA, 385 bp, Zea mays
agaccattagctttatctactccagttcgcagaagaacccgatcgacaccgtccgtttgttgctcgttgccctcgctctcctggctctcgctgcgagcgccacctccacgcatacaagcggcggctgcggctgccagccaccgccgccggttcatctaccgccgccggtgcatctgccacctccggttcacctgccacctccggtgcatctcccaccgccggtccacctgccgccgccggtccacctgccaccgccggtccatgtgccgccgccggttcatctgccgccgccaccatgccactaccctactcaaccgccccggcctcagcctcatcctcagccacacccatgcccgtgccaacagccgcatccaagcccgtgcca

SEQ ID NO: 345675 - DNA, 385 bp, Zea mays
gcctagcaattagctcatcgactccagattggagaactcgacaccatgaaggtgctgatcgttgcccttgctctcctggcgctcgctgcgagcgccgcctccagtacaagcggcggctgtggctgccagacaccaccgtttcatctaccgcctccgttctatatgccgcctccgttctatctgccgccgcagcagcagccgcagccatggcaataccccactcaaccaccgcagctaagcccgtgccagcagttcggatcctgcggcgtcggcagcgtcggcagcccgttcctgggccagtgcgtcgagttcctgaggcaccagtgcaagccggcggcgacgccctacggctcgccacagtgccaggcgctgcagcagcagtgct

SEQ ID NO: 345676 - DNA, 386 bp, Zea mays
  unsure (1)..(386): unsure at all n locations
aactagcaacatanaaagcacaattctgtaccaacaatggcagccaaaatattttgcctccttatgctccttggtctttctgcaagtgctgctacggcgaccattttcccgcaatgctcgcaagctcctatagcttcccttcttcccccgtacctctcaccagcggtgtcttcggtatgtgaaaacccaattcttcaaccctacaggatccaacaggcaatcgcagctggcatcttacctttatcacccttgttcctgcaacaatcatcagccctattacaacagttacctttggtgcatttattggcacaaaacatcagggcacaacaactacaacaacttgtgctagcaaaccttgctgcctactctcagcaacagcagtttct

SEQ ID NO: 345677 - DNA, 386 bp, Zea mays
  unsure (1)..(386): unsure at all n locations
agaccaactagcaccataaaaggcccatttttgtcccaacaatggcagccaaaatatttggcctcctaatgctcctgggcctttctgcaagtgctgctacggcgaccattttcccgcaatgctcgcaagctcctatagcttcccttcttcccccgaacctttcaccagcggtgtcttcggtatgtgaaaacccaattcttcaaccctacaggatccaacaggcaatcgcagctggcatcttacctttatcacccttgttcctccaacaatcatcagccctattacaacagttacctttggtgcatttattggcacaaaacatcanggcacaacaactacaacaacttgtgctagcaaaccttgctgcctactctcagcaacagcag

SEQ ID NO: 345678 - DNA, 196 bp, Zea mays
cctacaaggatccaaacaggcaatcgcaacaggcgatcttaccattatcaccctttgttccttcaacaaccgtcagccctattacagcaggtacctttggtccatttggtggcacaaaacattagggcacaacaactacaacaacttgtgctagcaaaccttgctgcatactctcagcaacatcagtttcttccat

SEQ ID NO: 345679 - DNA, 137 bp, Zea mays
gaccgcaccattgttgagtacatctaatatggtgcttctcatacacggcatgtggtttcctacgaaatgaatcaatatatgtgattgaggatttatctgcgataacaaaaaaaaagaaaaagggcgcgccgcttcta

SEQ ID NO: 345680 - DNA, 382 bp, Zea mays
attgagaccaactagcaacatagaatgcacaatagtgtaccaacaatggcagccaaaatattttgcctccttatgctccttggtctttctgcaagtgctgctacggcgaccattttcccgaaatgctcgcaagctcctatagcttcccttcttcccccgtacctctcaccagcggtgtcttcggtatgtgaaaacccaattcttcaaccctacaggatccaacaggcaatcacagctggcatcttacctttatcacccttgttcctccaacaatcatcagccctattacatcagttacctttggtgcatttattggcacaaaacatcagggcacaacaactacaacaacttgtgctagcaaaccttgctgcctactctcagc

SEQ ID NO: 345681 - DNA, 388 bp, Zea mays
accaaatcaaatctgcaacatcaattatctaactccaaaaaccatgaagctggtgcttgtggttcttgctttcattgctttagtatcaagtgtttcttgtacacagacaggcggctgcagctgtggtcaacaacaaagccatgagcagcaacatcatccacaacaacatcatccacaaaaacaacaacatcaaccaccaccacaacatcaccagcagcagcaacaccaacaacaacaagttcacatgcaaccacaaaaacatcagcaacaacaagaagttcatgttcaacaacaacaacaacaaccgcagcaccaacaacaacaacaacaacaacaacatcaccaacaatcacaaggccatgtgcaacaacacgaacagagccatgag

SEQ ID NO: 345682 - DNA, 354 bp, Zea mays
ccaacaagcaacatagaaagtggaatccagtagcaacaatagagcaacaatggcgaccaagatattttccctccttatgctccttgctctttctgcatgtgttgctaacgcgacaattttccctcaatgctcacaagctcctatagcttcccttcttcccccataccttccatcaatgatagcttcagtatgtgaaaacccagctcttcaaccctataggctccaacaagcaatcgcagcaagcaacatacctttatcacccttgtttcaacaatcgccagccctatctttggtgcagtcattggtacaaaccatcagggcacagcagctgcagcaactcgtgctacctgtgat

SEQ ID NO: 345683 - DNA, 384 bp, Zea mays
gagaccaactagcaacatagaaagcacaatagtgtaccaacaatggcagccaaaatattttgcctccttatgctccttggtctttctgcaagtgctgctacggcgaccattttcccgcaatgctcgcaagctcctatagcttcccttcttcccccgtacctctcaccagcggtgtcttcggtatgtgaaaacccaattcttcaaccctacaggatccaacaggcaatcgcagctggcatcttacctttatcacccttgttcctccaacaatcatcagccctattacaacagttacctttggtgcatttattggcacaaaacatcagggcacaacaactacaacaacttgtgctagcaaaccttgctgcctactctcagcaacag

SEQ ID NO: 345684 - DNA, 384 bp, Zea mays
agcattcagaaacacaccaagctaatcgcactagcaacgacctaacaacaatggctaccaagatattagcccttcttgcgcttcttgcccttgttgagagcgcaacaaatgctttcattattccacaatgctcacttgctactagtgccattattccacagttcctcccaccagttacttcaatgggcttcgaacacctagctgtgcaagccaacatgcaacaacaagcgcttgcggcgagcgtcttacaacaaccaattgcccaattgcaacaacaattcttgccacatctaacaatacaagccatcacaacgcaacagcaacaacagttcctaccagcactgagccacctagccatggtgaaccctgccgcctacttgcaag

SEQ ID NO: 345685 - DNA, 500 bp, Zea mays
  unsure (1)..(500): unsure at all n locations
ggaaggaaccgggtcggacccaccgccagtccgtatgcagaangcgggtgcctggnnagactatgtctgtgcggttgggtgggtctcnaaccagatnngtagagagggcttnntgggtgnncctcgcnncttccnntgtatgcntnntggagagggtngnnttcccagnnntcgggtnntgatgaaaactggatacccattgtnnttgatgctttctgggctttttcagcaagaagggggtttnntttcaagaacccttggtnntagagggtacccnntcaaatctggtgacccttcgagtcggtttcaaaccaatcattcttcgtgcagtgaaaggagccgccgagttggnggatgacccaatggacttgatgaaggaaaccctatanctgaggttgctcagttgcttttgtggattgtgcgaggattaagggaactagctcagtttgatcatctcaagctcnattgagattgagcctcgctcagcacatctatatcag

SEQ ID NO: 345686 - DNA, 382 bp, Zea mays
ttcattttagaagtattttcaccaaatcaaatctgcaacatcaatggtctaactccaaaaaccatgaagctggtgcttgtggttcttgctttcattgctttagtatcaagtgtttcttgtacacagacaggcggctgcagctgtggtcaacaacaaagccatgagcagcaacatcatccacaacaacatcatccacaaaaacaacaacatcaaccaccaccacaacatcaccagcagcagcaacaccaacaacaacaagttcacatgcaaccacaaaaacatcagcaacaacaagaagttcatgttcaacaacaacaacaacaaccgcagcaccaacaacaacaacaacaacagcaccaacaacaacatcaatgtgaaggcc

SEQ ID NO: 345687 - DNA, 350 bp, Zea mays
gagaccaacaagcaacatagaatgtggaatccagtagcaacaatagagcaacaatggagaccaagatattttccctccttatgctccttgctctttctacatgtgttgctaacgcgacaattttccctcaatgctcacaagctcctatagcttccctttttcccccataccttccatcaattatagcttcagtatgtgaaaacccagctcttcaaccatataggcttcaacaagcaatcgcagcaagcaacatacctttatcgcccttgttgtgtcaacaatcgccagccctatctttggtgcagtcattggtacaaaccattagggcacaacagctgcaacaactcgtg

SEQ ID NO: 345688 - DNA, 406 bp, Zea mays
ggacggaccggccggaccgacccacgcgttcgcaacaagcaacatagaaagtgttttccagtagcaacaatagagcaacaatggagaccaagatattttccctccttatgctccttgctctttctacatgtgttgctaacgcgacaattttccctcaatgctcacaagctcctatagcttccctttttcccccataccttccatcaattatagcttcagtatgtgaaaacccagctcttcaaccatataggcttcaacaagcaatcgcagcaagcaacatacctttatcgcccttgttgtgtcaacaattgccagccctatctttggtgcagtcattggtacaaaccatcagggcacaacagctgcagcaactcgtgctacctgtgatcaaccaagtagctctggc

SEQ ID NO: 345689 - DNA, 385 bp, Zea mays
aactagcaacatagaaagcacaattgtgtaccaacaatggcagccaaaatattttgcttccttatgctccttggtctttctgcaagtgctgctaccgcaaccattttcccacaatgctcacaagctcctatagcttcctttcttcccccatacctctcaccagcggtgtcttcagtatgtgaaaacccaattcttcaaccctacaggatccaacaggcaatcgcagcaggcatcttacctttatcacccttgttcctccaacaaccgtcagccctattacagcagttacctttggtgcatttgttggcacaaaacatcaaggcacaacaactacaacaacttgtgctaggaaaccttgctgcctactctcagcaacagcagtttc

SEQ ID NO: 345690 - DNA, 391 bp, Zea mays
caattcttcaaccctacaggatccaacattcaatcacagctggcatcttacctttatcacccttgttcctccaacaatcatcagccctattacatcagttacctttggtgcatttattggcacaaaacatcagggcacaacaactacaacaacttgtgctagcaaaccttgctgcctactctcagcaacagcagtttcttccattcaaccaactagctgcattgaactctgcttcttatttgcaacaacaacaactaccattcagccagctacctgctgcctacccccagcaatttcttccattcaaccaactggcagcattgaactctcctgcttatttacagcagcaacaactactaccattcagccagctagctggtgtgagccctgg

SEQ ID NO: 345691 - DNA, 383 bp, Zea mays
cccacgcgtccgagaccaactagcaacatagaaagcacaatagtgtaccaacaatggcagccaaaatattttgcctccttatgctccttggtatttctgcaagtgctgctacggcgaccattttcccgcaatgctcacaagctcctatagcttcccttcttcccccgtacctctcaccagcggtgtcttcggtatgtgaaaacccaattcttcaaccctacaggatccaacaggcaatcgcagctggcatcttacctttatcacccttgttcctccaacaatcatcagccctattacagcagttacctttggtgcatttattggcacaaaacatcagggcacaacaactacaacaacttgtgctagcaaaccttgctgcctac

SEQ ID NO: 345692 - DNA, 385 bp, Zea mays
gagcattcagaaacacaccaagcgtagcacattagcaacaacctaacaacaatggctaccaagatattatccctccttgcgcttcttgcgctttttgcgagcgcaacaaatgcgttcattattccacaatgctcacttgctccaagttccattattacacagttcctcccaccagttacttcaatgggcttcgaacacccagctgtgcaagcctataggctacaacaagcaattgcggcgagcgtcttacaacaaccaatttcccagttgcaacaacaatccttggcacatctaacaatacaaaccatcgcaacgcaacagcaacaacaattcctaccagcactgagccacctagccatggtgaaccctgccgcctacttgcaac

SEQ ID NO: 345693 - DNA, 386 bp, Zea mays
aagcaacataaaaggtggaatccagtttcaacaatagagcaacaatggagaccaagatattttccctccttatgctccttgctctttctacatgtgttgctaacgcgacaattttccctcaatgctcacaagctcctatagcttccctttttcccccataccttccatcaattatagcttcagtatgtgaaaacccagctcttcaaccatataggcttcaacaagcaatcgcagcaagcaacatacctttatcgcccttgttgtgtcaacaatcgccagccctatctttggtgcagtcattggtacaaaccatcagggcacaacagctgcagcaactcgtgctacctgtgatcaaccaagtagctctggcaaacctttctccctac

SEQ ID NO: 345694 - DNA, 362 bp, Zea mays
aaaaaccgggggggacccacgcgtccggagcattcaaaaacacaccaagcgaatcgcactagcaacaacctaacaacaatggctaccaagatattagccctccttgcgcttcttgcccttttagtgagcgcaacaaatgcgttcattattccacagtgctcacttgctcctagtgccattattccacagttcctcccaccagttacttcaatgggcttcgaacatccagccgtgcaagcctacaggctacaactagcgcttgcggcgagcgtcttacaacaaccaattgcccaattgcaacaacaatccttggcacatctaaacctacaaaccatcgcaacgcatcagcaacaacagttttt

SEQ ID NO: 345695 - DNA, 385 bp, Zea mays
gcaacatagaaggtggaatccagtttcttcaatagagcaacaatggcggccaagatattttccatccttatgctccttgctctttctgcatgtgttgctaacgcgaccatttttcctcaatactcacaagctcctatagctgcccttcttcccccataccttccatcaatgaccgcttcagtatgtgaaaacccagcccttcaaccctacaggctccaacaagcaatcgcaacaagcaacttacctttatcacccctgttctttcaacaatcgccagccctatctttggtgcagtcattggtacaaaccatcagggcacaacagctgcagcaactcgtgctaccagtgatcagccaagtagctctggcaaacctttctccctact

SEQ ID NO: 345696 - DNA, 388 bp, Zea mays
agaccaactagcaacatagaaagttctaatagtgtaccaacaatggcagccaaaatattttgcttccttatgctccttggtctttctgcaagtgctgctaccgcaaccattttcccacaatgctcacaagctcctatagcttcctttcttcccccatacctctcaccagcggtgtcttcagtatgtgaaaacccaattcttcaaccctacaggatccaacaggcaatcgcagcaggcatcttacctttatcacccttgttcctccaacaaccgtcagccctattacagcagttacctttggtgcatttgttggcacaaaacatcaaggcacaacaactacaacaacttgtgctaggaaaccttgctgcctactctcagcaacagcagt

SEQ ID NO: 345697 - DNA, 236 bp, Zea mays
gatcagcaaagcggcagtgcgtattgaggatcgtcgaacagaacagcatgaagatggtcatcgttctcgtcgtgtgcctggctctgtcagctgccagcgcctctgcaatgcagatgccctgcccctgcgcggggctgcagggcttgtacggcgctggcgccggcctgacgacgatgatgggcgccggcgggctgtacccctacgcggagttcctgaggcagccgcagtgcagcccg

SEQ ID NO: 345698 - DNA, 389 bp, Zea mays
attggcacaaaacatcagggcacatcaactacaacaacttgtgctagcaaaccttgctgcctactctcagcaacagcagtttcttccattcaaccaactagctgcattgaactctgcttcttatttgcaacaacaacaactaccattcagccagctacctgctgcctacccccagcaatttcttccattcaaccaactggcagcattgaactctcctgcttatttacagcagcaacaactactaccattcagccagctagctggtgtgagccctgctaccttcttgatacaaccacagttgttgccgttctaccagcacgctgcgcctaacgctggcaccctcttacaactgcaacaattgctgccattcaaccaacttgctttgacaa

SEQ ID NO: 345699 - DNA, 388 bp, Zea mays
caactagcaacatagaaagcacaatagtgtaccaacaatggcagccaaaatattttgcctccttatgctccttggtctttctgcaagtgctgctacggcgaccattttcccacaatgctcacaagctcctatagcttcccttcttcccccgtacctctcaccagcggtgtcttcggtatgtgaaaacccaattcttcaaccctataggatccaacaggcaatcgcagctggcatcttacctttatcacccttgttcctccaacaatcatcagccctattacagcagttacctttggtgcatttattggcacaaaacatcagggcacaacaactacaacaacttgtgctagcaaaccttgctgcctactctcagcaacaacagtttctt

SEQ ID NO: 345700 - DNA, 313 bp, Zea mays
cagtcccatcaatcatcatttatcttagtagtataggcaccaaatcaaatctgcaacatcaattatctaactccaaaaaccatgaagctggtgcttgtggttcttgctttcattgctttagtatcaagtgtttcttgtacacagacaggcggctgcagctgtggtcaacaacatagccatgagcagcaacatcatccacaacaacatcatccacaaaaacaacaacatcaaccaccaccacaacatcaccagcaggagcaacaccaacaacaacaagttcacatgcaaccacaaaaacatcagcaacaacaag

SEQ ID NO: 345701 - DNA, 387 bp, Zea mays
gcattcagaaacacaccaagcgaagcacattagcaacaacctaacaacaatggctaccaagatattatccctccttgcgcttcttgcgctttttgcgagcgcaacaaatgcgttcattattccacaatgctcacttgctccaagttccattattacacagttcctcccaccagttacttcaatgggcttcgaacacccagctgtgcaagcctataggctacaacaagcaattgcggcgagcgtcttacaacaaccaatttcccagttgcaacaacaatccttggcacatctaacaatacaaaccaccgcaacgcaacagcaacaacaattcctaccagcactgagccacctagccatggtgaaccctgccgcctacttgcaacagca

SEQ ID NO: 345702 - DNA, 386 bp, Zea mays
gagaccaacaagcaacatagaaagtggaatccagtagcaacaatagagcaacaatggcgaccaagatattttccctccttatgctccttgctctttctgcatgtgttgctaacgcgacaattttccctcaatgctcacaagctcctatagcttcccttcttcccccataccttccatcaatgatagcttcagtatgtgaaaacccagctcttcaaccctataggctccaacaagcaatcgcagcaagcaacatacctttatcacccttgtttcaacaatcgccagccctatctttggtgcagtcattggtacaaaccatcagggcacagcagctgcagcaactcgtgctacctgtgatcaaccaagtagctctggcaaacctttct

SEQ ID NO: 345703 - DNA, 381 bp, Zea mays
agcattaagaaacacaccaagcgaagttacctagcaacgacttaacaacaatggctaccaagatattagccctccttgcgcttcttgccctttttgtgagcgcaacaaatgcgttcattattccacaatgctcacttgctcctagtgccattataccacagttcctccgaccagttacttcaatgggcttcgaacacctagctgtgcaagcctacaggctacaacaagcgcttgcggcgagcgtcttacaacaaccaattaaccaattgcaacaacaatccttggcacatctaaccatacaaaccatcgcaacacaacagcaacaacagtttctaccagcactgagccaactagatgtggtgaaccctgtcgcctacttgc

SEQ ID NO: 345704 - DNA, 386 bp, Zea mays
ggcatcttacctttatcacccttgttcttccaacaaccgtcagccctattacagcagttacctttggtgcatttgttggcacaaaacatcaaggcacaacaactacaacaacttgtgctaggaaaccttgctgcctactctcagcaacaacagtttcttccattcaaccaactagctgcattgaactctgcttcttatttgcaacaacaacaactaccattcagccagctatctgctgcctacccccagcaatttcttccattcaaccaactgacagctttgaactctcctgcttatttacagcagcaacaactactaccattcagccagctagctggtgtgagccctgctaccttcttgacacaaccacaattgttgccgttcta

SEQ ID NO: 345705 - DNA, 387 bp, Zea mays
gagaccaactagcaacatagaaagcacaatagtgtaccaacaatggcagccaaaatattttgcctccttatgctccttggtctttctgcaagtgctgctacggcgaccattttcccgcaatgctcgcaagctcctatagcttcccttcttcccccgtacctctcaccagcggtgtcttcggtatgtgaaaacccaattcttcaaccctacaggatccaacaggcaatcgcagctggcatcttacctttatcacccttgttcctccaacaatcatcagccctattacaacagttacctttggtgcatttattggcacaaaacatcagggcacaacaactacaacaacttgtgctagcaaaccttgctgcctactctcagcaacagcag

SEQ ID NO: 345706 - DNA, 382 bp, Zea mays
caaagcggcagtgcgtagagaggatcgtcgaacagaacagcatgaagatggtcatcgttctcgtcgtgtgcctggctctgtcagctgccagcgcctctgcaatgcagatgccctgcccctgcgcggggctgcagggcttgtacggcgctggcgccggcctgacgacgatgatgggcgccggcgggctgtacccctacgcggagtacctgaggcagccgcagtgcagcccgctggcggcggcgccctactacgccgggtgtgggcagacgagcgccatgtaccagccgctccggcaacagtgctgccagcagcagatgaggatgatggacgtgcagtccgtcgcgcagcagctgcagatgatgatgcagcttgagcgtgccgc

SEQ ID NO: 345707 - DNA, 384 bp, Zea mays
agaccattagctttatctactccagagcgcagaagaacccgatcgacaccatgagggtgttgctcgttgccctcgctctcctggctctcgctgcgagcgccacctccacgcatacaagcggcggctgcggctgccagccaccgccgccggttcatctaccgccgccggtgcatctgccacctccggttcacctgccacctccggtgcatctcccaccgccggtccacctgccgccgccggtccacctgccaccgccggtccatgtgccgccgccggttcatctgccgccgccaccatgccactaccctactcaaccgccccggcctcagcctcatccccagccacacccatgcccgtgccaacagccgcattcaagcccgtgcc

SEQ ID NO: 345708 - DNA, 390 bp, Zea mays
tttctatcagtaccatcaatcatcttttatcttagtagtataggcaccaaatcaggatctgtaacatcaattatctaactccaaaaaccatgaagctggtgcttgtggttcttgctttcattgctttagtatcaagtgtttcttgtacacagacaggcggttgcagctgtggtcaacaacaaagccatgagcagcaacatcatccacaacatcatcatccacaaaaacaacaacatcaaccaccaccacaacatcatcagcagcagcaacaccaacaacaacaagttcacatgcaaccacaaaaacatcagcaacaacatgaagtacatgtttaacaacaacaacaacaaccgttataccaacaacaacaacaactacatgtccaacaac

SEQ ID NO: 345709 - DNA, 386 bp, Zea mays
actagcaacatagaaagcacaatagtgttccaacaatggcagccaaaatattttgcctccttatgctccttggtctttctgcaagtgctgctacggcgaccattttcccgaaatgctcgcaagctcctatagcttcccttcttcccccgtacctctcaccagcggtgtcttcggtatgtgaaaacccaattcttcaaccctacaggatccaacaggcaatcacagctggcatcttacctttatcacccttgttcctccaacaatcatcagccctattacatcagttacctttggtgcatttattggcacaaaacatcagggcacaacaactacaacaacttgtgctagcaaaccttgctgcctactctcagcaacagcagtttctt

SEQ ID NO: 345710 - DNA, 385 bp, Zea mays
aagcacaatattgtaccaacaatgtcagccaaaatattttgcctccttatgctccttggtatttctgcaagtgctgctacggcgaccattttcccgcaatgctcacaagctcctatagcttcccttcttcccccgtacctctcaccagcggtgtcttcggtatgtgaaaacccaattcttcaaccctacaggatccaacaggcaatcgcagctggcatcttacctttatcacccttgttcctccaacaatcatcagccctattacagcagttacctttggtgcatttattggcacaaaacatcagggcacaacaactacaacaacttgtgctagcaaaccttgctgcctactcttagcaacagcagtttctttcattcaaccaac

SEQ ID NO: 345711 - DNA, 388 bp, Zea mays
cttgctcctagtgccattattccacagttcctcccaccagttacttcaatgggcttcgaacatccagccgtgcaagcctacaggctacaactagcgcttgcggcgagcgtcttacaacaaccaattgcccaattgcaacaacaatccttggcacatctaaacctacaaaccatcgcaacgcaacagcaacaacagtttctgccatcactgagccacctagccgtggtgaaccctgtcgcctacttgcaacagcagctacttgcatccaacccacttgctctggcgaacgtagctgcataccagcaacaacaacgtctgcaacagtttatgccagcgctcagtcaactagccatggtgaaccctgtcgcctacctacaacagcaacaat

SEQ ID NO: 345712 - DNA, 387 bp, Zea mays
gatcgtcgaacagaacagcatgaatatggtcatcgttctcgtcgtgtgcctggctctgtcagctgccagcgcctctgcaatgcagatgccctgcccctgcgcggggctgcagggcttgtacggcgctggcgccggcctgacgacgatgatgggcgccggcgggctgtacccctacgcggagtacctgaggcagccgcagtgcagcccgctggcggcggcgccctactacgccgggtgtgggcagacgagcgccatgtaccagccgctccggcaacagtgctgccagcagcagatgaggatgatggacgtgcagtccgtcgcgcagcagctgcagatgatgatgcagcttgagcgtgccgctgccgccagcagcagcctgtacgagcc

SEQ ID NO: 345713 - DNA, 389 bp, Zea mays
agaaagcacaatagtgtaccaacattggcagccaaaatattttgcctccttatgctccttggtctttctgcaagtgctgctacggcgaccattttcccacaatgctcacaagctcctatagcttcccttcttcccccgtacctctcaccagcggtgtcttcggtatgtgaaaacccaattcttcaaccctataggatccaacaggcaatcgcagctggcatcttacctttatcacccttgttcctccaacaatcatcagccctattacagcagttacctttggtgcatttattggcacaaaacatcagggcacaacaactacaacaacttgtgctagcaaaccttgctgcctactctcagcaacagcagtttcttccattcaaccaact

SEQ ID NO: 345714 - DNA, 222 bp, Zea mays
agcattcatacacacatcaagttattcgcactgccaacagccttacaacaagggtaccacaatgtttaccctgcttttagttcttgctgttctagttggcgcaacagatggcgccactaatgcacagagtttacttgagtgctgagtcgttattacagagattcttccacaagttacttcaatgggctcttaaaatgcattcgtacaagcctacaggctaga

SEQ ID NO: 345715 - DNA, 336 bp, Zea mays
gctcgttgccctcgctctcctggctctcgctgcgagcgccacctccacgcatacaagcggcggctgcggctgccagccaccgccgccggttcatctaccgccgccggtgcatctgccacctccggttcacctgccacctgcggtgcatctaccaccgccggtccacctgccgacggcggtccacctgccaccggcggtccatgtgccgccgtcggttcatatgccgccgccaccatgccactaccctactcaaccgtcccggcctcagcctcatccccagccacacccatgcccgtgccaacagccgcatgcaagcccgtgccagctgcagggaac

SEQ ID NO: 345716 - DNA, 388 bp, Zea mays
aacctggcaccatagaaggcacatttttgtcccaacaatggcagccaaaatatttggcttccttatgctccttggtctttctgcaagtgctgctaccgcaaccattttcccacaatgctcacaagctcctatagcttcctttcttcccccatacctctcaccagcggtgtcttcagtatgtgaaaacccaattcttcaaccctacaggatccaacaggcaatcgcagcaggcatcttacctttatcacccttgttcctccaacaaccgtcagccctattacagcagttacctttggtgcatttgttggcacaaaacatcaaggcacaacaactacaacaacttgtgctaggaaaccttgctgcctactctcagcaacagcagtttctt

SEQ ID NO: 345717 - DNA, 389 bp, Zea mays
attttgagcattcagaaacacaccaagttaagcacattagcaacaacctaacaacaatggctaccaagatattatccctccttgcgcttcttgcgctttttgcgagcgcaacaaatgcgttcattattccacaatgctcacttgctccaagttccattattacacagttcctcccaccagttacttcaatgggcttcgaacacccagctgtgcaagcctataggctacaacaagcaattgcggcgagcgtcttacaacaaccaatttcccagttgcaacaacaatccttggcacatctaacaatacaaaccatcgcaacgcaacagcaacaacaattcctaccagcactgagccacctagccatggtgaaccctgccgcctacttgcaa

SEQ ID NO: 345718 - DNA, 389 bp, Zea mays
acaacattaaccaccaccacaacattttttgcagcagcaacaccaacaacaacaagttcacatgcaaccacaaaaacatcagcaacaacaagaagttcatgttcaacaacaacaacaacaaccgcagcaccaacaacaacaacaacaacagcaccaacaacaacatcaatgtgaaggccaacaacaacatcaccaacaatcacaaggccatgtgcaacaacacgaacagagccatgagcaacaccaaggacagagccatgagcaacaacatcaacaacaattccagggtcatgacaagcagcaacaaccacaacagcctcagcaatatcagcagggccaggaaaaatcacaacagcaacaatgtcattgccaggagcagtaacagacta

SEQ ID NO: 345719 - DNA, 369 bp, Zea mays
gagcattcagaaacacaccaagcgtttcacattagcaacaacctaacaacaatggctaccaagatattatccctccttgcgcttcttgcgctttttgcgagcgcaacaaatgcgttcattattccacaatgctcacttgctccaagttccattattacacagttcctcccaccagttacttcaatgggcttcgaacacccagctgtgcaagcctataggctacaacaagcaattgcggcgagcgtcttacaacaaccaatttcccagttgcaacaacaatccttggcacatctaacaatacaaaccatcgcaacgcaacagcaacaacaattcctaccagcactgagccacctagccatggtgaaccct

SEQ ID NO: 345720 - DNA, 387 bp, Zea mays
accattagctttatctactccagtatcgcagaagaacccgatcgacaccatgagggtgttgctcgttgccctcgctctcctggctctcgctgcgagcgccacctccacgcatacaagcggcggctgcggctgccagccaccgccgccggttcatctaccgccgccggtgcatctgccacctccggttcacctgccacctccggtgcatctcccaccgccggtccacctgccgccgccggtccacctgccaccgccggtccatgtgccgccgccggttcatctgccgccgccaccatgccactaccctactcaaccgccccggccttagcctcatccccagccacacccatgcccgtgccaacagccgcatccaagcccgtgccagct

SEQ ID NO: 345721 - DNA, 388 bp, Zea mays
gttgcaacaacaatccttggcacatttaacaatacaaaccatcgcaacgcaacagcaacaacaattcctaccagcactgagccacctagccatggtgaaccctgccgcctacttgcaacagcagttgcttgcatcaaacccacttgctctggcaaacgtagttgcaaaccagccacaacaacagctgcaacagtttctgccagcgctcagtcaactagccatggtgaaccctgccgcctacctacaacagcaacaactgctttcatctagcccgctcgctgtggccaatgcacctacatacctgcaacaacaattgttgcaacagattgtaccagctctgactcagctagttgtggcaaaccctgctgcctacttgcaacagctgctt

SEQ ID NO: 345722 - DNA, 385 bp, Zea mays
cagcattcagaaacacaccaagcgaagcgcactagcaacaacctaacaacaatggctaccaagatattagccctccttgcgcttcttgcccttttagtgagcgcaacaaatgcgttcattattccacagtgctcacttgctcctagtgccattattccacagttcctcccaccagttacttcaatgggcttcgaacatccagccgtgcaagcctacaggctacaactagcgcttgcggcgagcgtcttacaacaaccaattgcccaattgcaacaacaatccttggcacatctaaacctacaaaccatcgcaacgcaacagcaacaacagtttctgccatcactgagccacctagccgtggtgaaccctgtcgcctacttgcaac

SEQ ID NO: 345723 - DNA, 390 bp, Zea mays
caattagctcatcgactccagattggagaactcgacaccatgaaggtgctgatcgttgcccttgctctcctggcgctcgctgcgagcgccgcctccagtacaagcggcggctgtggctgccagacaccaccgtttcatctaccgcctccgttctatatgccgcctccgttctatctgccgccgcagcagcagccgcagccatggcaataccccactcaaccaccgcagctaagcccgtgccagcagttcggatcctgcggcgtcggcagcgtcggcagcccgttcctgggccagtgcgtcgagttcctgaggcaccagtgcagcccggcggcgacgccctacggctcgccacagtgccaggcgctgcagcagcagtgctgccaccagatc

SEQ ID NO: 345724 - DNA, 152 bp, Zea mays
  unsure (1)..(152): unsure at all n locations
cccccagnncagatttctttccatttcaaccccaactgnngcagcattgaaccctctcctnggcttatttacccagcagcaacaacctaccctaccattnnncagccagcttagcnntggtgtgagggccctnnngctacctntnncttgat

SEQ ID NO: 345725 - DNA, 387 bp, Zea mays
gagaccaactagcaacatagaaagcacaatagtgtaccaacaatggcagctaaaatattttgcctccttatgctccttggtctttctgcaagtgctgctacggcgaccattttcccacaatgctcacaagctcctatagcttcccttcttcccccgtacctctcaccaacggtgtcttcggtatgtgaaaacccaattcttcaaccctacaggatccaacaggcaatcgcagctggcatcttacctttatcacccttgttcctccaacaatcatcagccctattacagcagttacctttggtgcatttattggcacaaaacatcagggcacaacaactacaacaacttgtgctagcaaaccttgctgcctactctcagcaacagcag

SEQ ID NO: 345726 - DNA, 364 bp, Zea mays
ctaccatttggccagctagctacaacaagccccgcttccttcttgacacaacaacaattgcttccgttctaccagcagtttgtggctaaccccgcaacccttttacaactgcaacagttgctgccctttgtccaacttgctttgacaaacccagcagccttctaccaacaacacatcattggcggtgccctcttttagattgcttattagttgtcattcaataatgaagttttttggctgatgtatgtggcctcctagaaataagaagttatatttccaaaaaaaaaaattttaaatttatttaattatatttttatataaaattaaatttatataaattatttatcatatatatatttaataa

SEQ ID NO: 345727 - DNA, 384 bp, Zea mays
caaagcggcagtgcgtagagaggatcgtcgaacagaacagcatgaagatggggatcgttctcgtcgtgtgcctggctctgtcagctgccagcgcctctgcaatgcagatgccctgcccctgcgcggggctgcagggcttgtacggcgctggcgccggcctgacgacgatgatgggcgccggcgggctgtacccctacgcggagtacctgaggcagccgcagtgcagcccgctggcggcggcgccctactacgccgggtgtgggcagacgagcgccatgtaccagccgctccggcaacagtgctgccagcagcagatgaggatgatggacgtgcagtccgtcgcgcagcaactgcagatgatgatgcagcttgagcgtgccgctg

SEQ ID NO: 345728 - DNA, 382 bp, Zea mays
gagaccaacaagcaacatagaaagtggaatacagtagcaacaatagagcaacaatggcggccaagatattttccatccttatgctccttgctctttctgcatgtgttgctaacgcgaccatttttcctcaatactcacaagctcctatagctgcccttcttcccccataccttccatcaatgaccgcttcagtatgtgaaaacccagcccttcaaccctacaggctccaacaagcaatcgcaacaagcaacttacctttatcacccctgttctttcaacaatcgccagccctatctttggtgcagtcattggtacaaaccatcaaggcacaacagctgcagcaactcgtgctaccagtgatcagccaagtagctctggcaaa

SEQ ID NO: 345729 - DNA, 381 bp, Zea mays
caactagcaacatagaaagcacaatagtgtaccaacaatggcagccaaaatattttgcctccttatgctccttggtctttctgcaagtgctgctacggcgaccattttcccacaatgctcacaagctcctatagcttcccttcttcccccgtacctctcaccagcggtgtcttcggtatgtgaaaacccaattcttcaaccctataggatccaacaggcaatcgcagctggcatcttacctttatcacccttgttcctccaacaatcatcagccctattacagcagttacctttggtgcatttattggcacaaaacatcagggcacaacaactacaacaacttgtgctagcaaaccttgctgcctactctcagcaacaaca

SEQ ID NO: 345730 - DNA, 384 bp, Zea mays
gcccgttcctgggccagtgcgtcgtgttcctgaggcaccagtgcagcccggcggcgacgccctacggctcgccacagtgccaggcgctgcagcagcagtgctgccaccagatcaggcaggtggagccgctgcaccggtaccaggcgacatacggtgtggtcctgcagtccttcctgcagcagcagccgcagggcgagctcgcggcgctgatggcggcccaggtagcgcagcagctgacggcgatgtgcggcctgcagctgcagcagccaggtccctgcccttgcaacgcagctgccggcggtgtctactactgaggaaactatgtactgtagtaataatgtaatggagccgctgactagctacctagctcgctagtttactcat

SEQ ID NO: 345731 - DNA, 390 bp, Zea mays
aagcacaatagtgtaccaacaatggcagccaaaatattttgcctccttatgctccttggtctttctgcaagtgctgctacggcgaccattttcccgaaatgctcgcaagctcctatagcttcccttcttcccccgtacctctcaccagcggtgtcttcggtatgtgaaaacccaattcttcaaccctacaggatccaacaggcaatcacagctggcatcttacctttatcacccttgttcctccaacaatcatcagccctattacatcagttacctttggtgcatttattggcacaaaacatcagggcacaacaactacaacaacttgtgctagcaaaccttgctgcctactctcagcaacagcagtttcttccattcaaccaactagct

SEQ ID NO: 345732 - DNA, 385 bp, Zea mays
atagaaagcacaatagtgtaccaacaatggcagccaaaatattttgcctccttatgctccttggtctttctgcaagtgctgctacggcgaccattttcccgaaatgctcgcaagctcctatagcttcccttcttcccccgtacctctcaccagcggtgtcttcggtatgtgaaaacccaattcttcaaccctacaggatccaacaggcaatcacagctggcatcttacctttatcacccttgttcctccaacaatcatcagccctattacatcagttacctttggtgcatttattggcacaaaacatcagggcacaacaactacaacaacttgtgctagcaaaccttgctgcctactctcagcaacagcagtttcttccattcaa

SEQ ID NO: 345733 - DNA, 260 bp, Zea mays
gctgatgtgagccctgttgccttcttgacacaacaacagttgttgccgttctacctgcacgctgcgcctaacgctggcaccctcttacaactgcaacaattgctgccattcaaccaacttgctttgacaaacccaacagcgttctaccaacaacccatcattggtggtgccctcttttagattgcttatgagttatagttcaataatgaagttttttggatgatgtttgtggcttcccagaaataagaaagtacatttct

SEQ ID NO: 345734 - DNA, 388 bp, Zea mays
attttgagcattcagaaacacaccaagcgaagctacctagcaacgacttaacaacaatggctaccaagatattagccctccttgcgcttcttgccctttttgtgagcgcaacaaatgcgttcattattccacaatgctcacttgctcctagtgccattataccacagttcctccgaccagttacttcaatgggcttcgaacacctagctgtgcaagcctacaggctacaacaagcgcttgcggcgagcgtcttacaacaaccaattaaccaattgcaacaacaatccttggcacatctaaccatacaaaccatcgcaacacaacagcaacaacagttcctaccagcactgagccaactagatgtggtgaaccctgtcgcctacttgca

SEQ ID NO: 345735 - DNA, 388 bp, Zea mays
atcgactccagattggagaactcgacaccatgaaggtgctgatcgttgcccttgctctcctggcgctcgctgcgagcgccgcctccagtacaagcggcggctgtggctgccagacaccaccgtttcatctaccgcctccgttctatatgccgcctccgttctatctgccgccgcagcagcagccgcagccatggcaataccccactcaaccaccgcagctaagcccgtgccagcagttcggatcctgcggcgtcggcagcgtcggcagcccgttcctgggccagtgcgtcgagttcctgaggcaccagtgcagcccggcggcgacgccctacggctcgccacagtgccaggcgctgcagcagcagtgctgccaccagatcaggcaggt

SEQ ID NO: 345736 - DNA, 384 bp, Zea mays
caactagcatcatagaaagcttatttgtgtaccaacaatggcagccaaaatatggtgcttccttatgctccttggtctttctgcaagtgctgctaccgcaaccattttcccacaatgctcacaagctcctatagcttcctttcttcccccatacctctcaccagcggtgtcttcagtatgtgaaaacccaattcttcaaccctacaggatccaacaggcaatcgcagcaggcatcttacctttatcacccttgttcctccaacaaccgtcagccctattacagcagttacctttggtgcatttgttggcacaaaacatcaaggcacaacaactacaacaacttgtgctaggaaaccttgctgcctactctcagcaacagcagtt

SEQ ID NO: 345737 - DNA, 366 bp, Zea mays
  unsure (1)..(366): unsure at all n locations
gactacccaacatctcagaagggagggagcgaccctcnncacctggtggcctcnncgctctcagggnnngtggcctgcccagattttctgtagaatgacaaattgacctgtgcaagacactatcacctttggagggtggaggaggctctgacanccattgaccaatgtgaagtgccaagtatccccaggacaaggagtgtgcattccctctcagaccccagcagcgtctggaaatctttgctggcatagcagctcggaaggatggtgcgcacctctcgcgcgactacgaacattcagaagtgagaagtacccttcacgcttgttctccgtcctcagggtgtggtatgcaagatctttgcgaagacc

SEQ ID NO: 345738 - DNA, 387 bp, Zea mays
gtaccatcaatcatcattcatcttattagtataggcaccaaatcaaatctgcaacatcaattatctaactccaaaaaccatgaagctggtgcttgtggttcttgctttcattgctttagtatcaagtgtttcttgtacacagacaggcggctgcagctgtggtcaacaacaaagccatgagcagcaacatcatccacaacaacatcatccacaaaaacaacaacatcaaccaccaccacaacatcaccagcagcagcaacaccaacaacaacaagttcacatgcaaccacaaaaacatcagcaacaacaagaagttcatgttcaacaacaacaacaacaaccgcagcaccaacaacaacaacaacaacagcaacaacaacaacatca

SEQ ID NO: 345739 - DNA, 386 bp, Zea mays
tagcaacatagaaagcacaatagtgtaccaacaatggcagccaaaatattttggctccttatgctccttggtctttctgcaagtgctgctacggcgaccattttcccacaatgctcacaagctcctatagcttcccttcttcccccgtacctctcaccagcggtgtcttcggtatgtgaaaacccaattcttcaaccctataggatccaacaggcaatcgcagctggcatcttacctttatcacccttgttcctccaacaatcatcagccctattacagcagttacctttggtgcatttattggcacaaaacatcagggcacaacaactacaacaacttgtgctagcaaaccttgctgcctactctcagcaacaacagtttcttcc

SEQ ID NO: 345740 - DNA, 393 bp, Zea mays
catcaatcatcattcatctttttattataggcaccaaatcaaatctgcaacatcaattatctaactccaaaaaccatgaagctggtgcttgcggttcttgctttcattgctttagtatcaagtgtttcttgtacacagacaggctgctgcagctgtggtcaacaacaaagtcatgagcagcaacatcatccacaacaacatcatccacataaacaactacatcaaccaccaccacaacatcacctgcagcagcatcaccaacaacaacaattcacatgcatccacaaaacacatcaccaccatcaagaagttcatgttcaacaacaacaacaacaaccgcagcaccaacaacaacaacaacaacagcaccaacaacaacatcaatgtgaaggc

SEQ ID NO: 345741 - DNA, 391 bp, Zea mays
gcattcagaaacacaccaagctaatcgcactagcaacaacctaacaacaatggctaccaagatattatccctccttgcgcttcttgcgctttttgcgagcgcaacaaatgcgtccattattccacaatgctcacttgctcctagttccattattccacagttcctcccaccagttacttcaatggccttcgaacacccagctgtgcaagcctataggctacaacaagcgattgcggcgagcgtcttacaacaaccaattgcccaattgcacaacaatccttggcacatctaacaatacaaaccatcgcaacgcaacagcaacaacagttcctaccagcactgagccacctagccatggtgaaccctgtcgcctacttgcaacagcagctgc

SEQ ID NO: 345742 - DNA, 395 bp, Zea mays
  unsure (1)..(395): unsure at all n locations
atcgactccagattggagaactcgtcaccatgaaggtgctgatcgttgcccttgctctcctggcgctcgctgcgagcgccgcctncagtacaagcggcggctgtggctgccagacaccaccgtttcatctaccgcctccgttctatatgccgcctccgttctatctgccgccgcagcagcagccgcagccatggcaataccccactcaaccaccgcagctaagcccgtgccagcagttcggatcctgcggcgtcggcagcgtcggcagcccgtcctgggccagtgcgtcgagttcctgaggcaccagtgcagcccggcggcgacgccctacggctcgccacagtgccaggcgctgcagcagcagtgctgccaccagatcaggcaggtggagccgc

SEQ ID NO: 345743 - DNA, 397 bp, Zea mays
agaaagcacaatagggtcccaacattggtagccaaaatattttgcctccttatgctccttggtctttctggcaagtgctgctacggcgaccattttcccgcaatgctcgcaagctcctatagcttcccttcttcccccgtacctctcaccagcggtgtcttcggtatgtgaaaacccaattcttcaaccctacaggatccaacaggcaatcgcagctggcatcttacctttatcacccttgttcctccaacaatcatcagccctattacaacagtacctttggtgcatttattggcacaaaacatcagggcacaacaactacaacaacttgtgctagcaaaccttgctgcctactctcagcaacagcagtttcttccattcaaccaactaggttcat

SEQ ID NO: 345744 - DNA, 396 bp, Zea mays
aactacaacaacttgtgctagcaattcttgctgcctactctcagcaacaacagtttcttccattcaaccaactagctgcattgaactctgcttcttatttgcaacaacaacaactaccattcagccagctatctgctgcctacccccagcaatttcttccattcaaccaactgacagctttgaactctcctgcttatttacagcagcaacaactactaccattcagccagctagctggtgtgagccctgctaccttcttgacacaaccacaatgttgccgttctaccagcacgctgcgcctaacgctggcaccctcttacaactgcaacaattgctgccattcaaccaacttgctttgacaaacccaacagcattctaccaacaacccatcattgg

SEQ ID NO: 345745 - DNA, 336 bp, Zea mays
  unsure (1)..(336): unsure at all n locations
tcgtatagctggcttttttcctttatatcttccatcaattatagcttcagtatgtgaaaacccagctcttcaaccatataggcttcaacaagcaatcgcagcaagcaacatacctttatcgcccttgttgtgtcaacaatcgccagccctatctttggtgcagtcattggtacaaaccatcagggcacaacagctgcagcaactcgtgctacctgtgatcaaccaagtagctctggcaaacctttctccctactctccgcaacaacatttcttncattcaaccaactgtctacactgaaccctgctgcttatttgcagcaacaactattaccattt

SEQ ID NO: 345746 - DNA, 345 bp, Zea mays
cagaaacacaccaagcgaagcgctttagcaacaacctaacaacaatggctaccaagatattatccctccttgcgcttcttgcgctttttgcgagcgcaacaaatgcgtccattattccacaatgctcacttgctcctagttccattattccacagttcctcccaccagttacttcaatggccttcgaacacccagctgtgcaagcctataggctacaacaagcgattgcggcgagcgtcttacaacaaccaattgcccaattgcacaacaatccttggcacatctaacaatacaaaccatcgcaacgcaacagcaacaacagttcctaccagcactgagccacct

SEQ ID NO: 345747 - DNA, 390 bp, Zea mays
attgagaccaacaagcaacatatttagtggaatacagtagcaacaatagagcaacaatggcggccaagatattttccatccttatgctccttgctctttctgcatgtgttgctaacgcgaccatttttcctcaatactcacaagctcctatagctgcccttcttcccccataccttccatcaatgaccgcttcagtatgtgaaaacccagcccttcaaccctacaggctccaacaagcaatcgcaacaagcaacttacctttatcaccctgttctttcaacaatcgccagccctatctttggtgcagtcattggtacaaaccatcagggcacaacagctgcagcaactcgtgctaccagtgatcagccaagtagctctggcaaacctttc

SEQ ID NO: 345748 - DNA, 394 bp, Zea mays
attttgagcattcagaaacacacttagcgaagcgcactagcaacgacctaacaacaatggctaccaagatattagccctccttgcgcttcttgccctttttgtgagcgcaacaaatgcgttcattattccacaatgctcacttgctcctagtgccattattccacagttcctcccaccagttacttcaatgggcttcgaacacctagctgtgcaagccaacatgcaacaacaagcgcttgcggcgagcgtcttacaacaaccaattgccaattgcaacaacaatccttgccacatctaacaatacaagccatcacaacgcaacagcaacaacagttcctaccagcactgagccacctagccatggtgaaccctgccgcctacttgcaagagcag

SEQ ID NO: 345749 - DNA, 395 bp, Zea mays
atcgactccagattggagaactcgtcaccatgaaggtgctgatcgttgcccttgctctcctggcgctcgctgcgagcgccgtctccagtacaagcggcggctgtggctgccagacaccaccgtttcatctaccgcctccgttctatatgccgcctccgttctatctgccgccgcagcagcagccgcagccatggcaataccccactcaaccaccgcagctaagcccgtgccagcagttcggatcctgcggcgtcggcagcgtcggcagcccttcctgggccagtgcgtcgagttcctgaggcaccagtgcagcccggcggcgacgccctacggctcgccacagtgccaggcgctgcagcagcagtgctgccaccagatcaggcaggtggagccgc

SEQ ID NO: 345750 - DNA, 241 bp, Zea mays
cagaaacacaccaagcgaagcgcactagttacaacctaacaacaatggctaccaagatattatcccttcttgcgcttcttgcgctttttgcgagcgcaacaaatgcgtccattattccacaatgctcacttgctcctagttccattattccacagtttcctcccaccagttaccttcaatgggccttcgaacaccccaggctgtgccaagcccttatagggctacaaaccaaggcgatttg

SEQ ID NO: 345751 - DNA, 396 bp, Zea mays
cagcattcagaaccacaccaagcgttgttcactaccaccaacctaacaccaatggctaccaagatattagccctccttgcgcttcttgcccttttagtgagcgcaacaaatgcgttcattattccacagtgctcacttgctcctagtgccattattccacagttcctcccaccagttacttcaatgggcttcgaacatccagccgtgcaagcctacaggctacaactagcgcttgcggcgagcgtcttacaacaaccaattgcccaattgcacaacaatccttggcacatctaaacctacaaaccatcgcaacgcaacagcaacaacagtttctgccatcactgagccacctagccgtggtgaaccctgtcgcctacttgcaacagcagctacttg

SEQ ID NO: 345752 - DNA, 388 bp, Zea mays
gaccaactagcaacatagaatgcacaatagtgtaccaacaatggcagccaaaatattttgcctccttatgctccttggtctttctgcaagtgctgctacggcgaccattttcccgaaatgctcgcaagctcctatagcttcccttcttcccccgtacctctcaccagcggtgtcttcggtatgtgaaaacccaattcttcaaccctacaggatccaacaggcaatcacagctggcatcttacctttatcacccttgttcctccaacaacatcagccctattacatcagttacctttggtgcatttattggcacaaaacatcagggcacaacaactacaacaacttgtgctagcaaaccttgctgcctactctcagcaacagcagtttc

SEQ ID NO: 345753 - DNA, 395 bp, Zea mays
attttcagcattcagaaacacacctagcgaagcgcactagcaacaacctaacaacaatggctaccaagatattagccctccttgcgcttcttgcccttttagtgagcgcaacaaatgcgttcattattccacagtgctcacttgctcctagtgccattattccacagttcctcccaccagttacttcaatgggcttcgaacatccagccgtgcaagcctacaggctacaactagcgcttgcggcgagcgtcttacaacaaccaattgccaattgcaacaacaatccttggcacatctaaacctacaaaccatcgcaacgcaacagcaacaacagtttctgccatcactgagccacctagccgtggtgaaccctgtcgcctacttgcaacagcagc

SEQ ID NO: 345754 - DNA, 396 bp, Zea mays
caatagtgtaccaacaatggcagccaatttattttgcctccttatgctccttggtctttctgcaagtgctgctacggcgaccattttcccgcaatgctcgcaagctcctatagcttcccttcttcccccgtacctctcaccagcggtgtcttcggtatgtgaaaacccaattcttcaaccctacaggatccaacaggcaatcgcagctggcatcttacctttatcacccttgttcctccaacaatcatcagccctattacaacagttaccttggtgcatttattggcacaaaacatcagggcacaacaactacaacaacttgtgctagcaaaccttgctgcctactctcagcaacagcagtttcttccattcaaccaactaggttcattgaactct

SEQ ID NO: 345755 - DNA, 388 bp, Zea mays
gcgaccattttcccgcaatgctcgtaagctcctatagcttcccttcttcccccgtacctctcaccagcggtgtcttcggtatgtgaaaacccaattcttcaaccctacaggatccaacaggcaatcgcagctggcatcttacctttatcacccttgttcctccaacaatcatcagccctattacaacagttacctttggtgcatttattggcacaaaacatcagggcacaacaactacaacaacttgtgctagcaaaccttgctgccactctcagcaacagcagtttcttccattcaaccaactaggttcattgaactctgcttcttatttgcaacaacaacaactaccattcagccagctacctgctgcctacccccagcaatttct

SEQ ID NO: 345756 - DNA, 391 bp, Zea mays
gcaacatagaaagcacaatagtgttccaacaatggcagccaaaatattttgcctccttatgctccttggtctttctgcaagtgctgctacggcgaccattttcccacaatgctcacaagctcctatagcttcccttcttcccccgtacctctcaccagcggtgtcttcggtatgtgaaaacccaattcttcaaccctataggatccaacaggcaatcgcagctggcatcttacctttatcacccttgttcctccaacaatcatcagcctattacagcagttacctttggtgcatttattggcacaaaacatcagggcacaacaactacaacaacttgtgctagcaaaccttgctgcctactctcagcaacaacagtttcttccattcaacc

SEQ ID NO: 345757 - DNA, 290 bp, Zea mays
gaactgcaacataaagcacatgtgccaactggcagcaaaatatttgctcttactcttggctttctgagtgctgtcgcaccatttccacatgctacgctctatgcttcttttccccgaccttaccacggtttggttgtgaaaacccatcttaaccctatggatccaacagcatcagtgcattaccttataccctgtctcaacaatcaagcctatacgagtccttgggcattatgcacaaacatagcacacactcaacaactggtacaaacctgtgctcttagaacacagtt

SEQ ID NO: 345758 - DNA, 395 bp, Zea mays
cagcctagcaattagctcatcgactccagattggagaactcgacaccatgaaggtgctgatcgttgcccttgctctcctggcgctcgctgcgagcgccgcctccagtacaagcggcggctgtggctgccagacaccaccgtttcatctaccgcctccgttctatatgccgcctccgttctatctgccgccgcagcagcagccgcagccatggcaataccccactcaaccaccgcagctaagcccgtgccagcagttcggatcctgcggcgtcgcagcgtcggcagcccgttcctgggccagtgcgtcgagttcctgaggcaccagtgcagcccggcggcgacgccctacggctcgccacagtgccaggcgctgcagcagcagtgctgccaccaga

SEQ ID NO: 345759 - DNA, 379 bp, Zea mays
cttaaatcatcattcatctaagtagttttggcaccaaatcaaatctgcaccatcaattttttaactccaaaaaccatgaagctggtgcttgtggttcttgctttcattgctttagtatcaagtgtttcttgtacacagacaggcggctgcagctgtggtcaacaacaaagccatgagcagcaacatcatccacaacaacatcatccacaaaaacaacaacatcaaccaccaccacaacatcaccagcagcagcaacaccaacaacaacaagtcacatgcaaccacaaaaacatcagcaacaacaagaagttcatgttcaacaacaacaacaacaaccgcagcaccaacaacaacaacaacaacagcaccaacaacaaca

SEQ ID NO: 345760 - DNA, 394 bp, Zea mays
attgagaccaactagcaacatagatagcacaatagtgtaccaacaatggcagccaaaatattttgcttccttatgctccttggtctttctgcaagtgttgctaccgcaaccattttcccacaatgctcacaagctcctatagcttcccttcttcccccatacctctcaccagcggtgtcttcaatgtgtgaaaacccaattgttcaaccctacaggatccaacaggcaatcgcaacaggcatcttaccattatcacccttgttcctccacaaccgtcagccctattacagcagttacctttggtccatttggtggcacaaaacatcagggcacaacaactacaacaacttgtgctagcaaaccttgctgcatactctcagcaacatcagtttct

SEQ ID NO: 345761 - DNA, 393 bp, Zea mays
ctaacaacaatggctaccaagatattatccctccttgcgcttcttgcgctttttgcgagcgcaacaaatgcgttcattattccacaatgctcacttgctccaagttccattattacacagttcctcccaccagttacttcaatgggcttcgaacacccagctgtgcaagcctataggctacaacaagcaattgcggcgagcgtcttacaacaaccaatttcccagttgcaacaacaatccttggcacatctaacaatacaaaccatcgaacgcaacagcaacaacaattcctaccagcactgagccacctagccatggtgaaccctgccgcctacttgcaacagcagttgcttgcatcaaacccacttgctctggcaaacgtagttgcaaacc

SEQ ID NO: 345762 - DNA, 391 bp, Zea mays
cagaaacacaccaagcgaagctacttagcaacgacttaacaacaatggctaccaagatattagccctccttgcgcttcttgccctttttgtgagcgcaacaaatgcgttcattattccacaatgctcacttgctcctagtgccattataccacagttcctccgaccagttacttcaatgggcttcgaacacctagctgtgcaagcctacaggctacaacaagcgcttgcggcgagcgtcttacaacaaccaattaaccaattgcaacacaatccttggcacatctaaccatacaaaccatcgcaacacaacagcaacaacagttcctaccagcactgagccaactagatgtggtgaaccctgtcgcctacttgcaacagcaggtgcttgca

SEQ ID NO: 345763 - DNA, 394 bp, Zea mays
attgagaccaacaagcaacatagattgtggaatccagtagcaacaatagagcaacaatggcgaccaagatattttccctccttatgctccttgctctttctgcatgtgttgctaacgcgacaattttccctcaatgctcacaagctcctatagcttcccttcttcccccataccttccatcaatgatagcttcagtatgtgaaaacccagctcttcaaccctataggctccaacaagcaatcgcagcaagcaacatacctttatcacccttgttcaacaatcgccagccctatctttggtgcagtcattggtacaaaccatcagggcacagcagctgcagcaactcgtgctacctgtgatcaaccaagtagctctggcaaacctttctccctac

SEQ ID NO: 345764 - DNA, 393 bp, Zea mays
cccacgcgtccgcccacgcgttcgtattacagtagcaacaatagagcaacaatggcggccaagatattttccatccttatgctccttgctctttctgcatgtgttgctaacgcgaccatttttcctcaatactcacaagctcctatagctgcccttcttcccccataccttccatcaatgaccgcttcagtatgtgaaaacccagcccttcaaccctacaggctccaacaagcaatcgcaacaagcaacttacctttatcacccctgtctttcaacaatcgccagccctatctttggtgcagtcattggtacaaaccatcagggcacaacagctgcagcaactcgtgctaccagtgatcagccaagtagctctggcaaacctttctccctact

SEQ ID NO: 345765 - DNA, 251 bp, Zea mays
ggccgtgggattgaccctagcaacatagaacacaatatgccaactggcgcatattgttcttactcttggtctttctgaggtgtaccgaccatttcactgtacgctctatgcttcttttcccataccttaccacggtttaatgggaaaaccaatgtaaccctcagccaacaggcaaccacagattaccatatacctgtctcaaccgagctatacgagtcctggcattgggccaacatagccacactcacact

SEQ ID NO: 345766 - DNA, 391 bp, Zea mays
attgagaccaacaagcaacatttttagtggaatccagtagcaacaatagagcaacaatggagaccaagatattttccctccttatgctccttgctctttctacatgtgttgctaacgcgacaattttccctcaatgctcacaagctcctatagcttccctttttcccccataccttccatcaattatagcttcagtatgtgaaaacccagctcttcaaccatataggcttcaacaagcaatcgcagcaagcaacatacctttatcgccttgttgtgtcaacaatcgccagccctatctttggtgcagtcattggtacaaaccatcaaggcacaacagctgcagcaactcgtgctacctgtgatcaaccaagtagctctggcaaacctttct

SEQ ID NO: 345767 - DNA, 396 bp, Zea mays
gcctagcaattagctcatcgactccagattggagaactcgacaccatgaaggtgctgatcgttgcccttgctctcctggcgctcgctgcgagcgccgcctccagtacaagcggcggctgtggctgccagacaccaccgtttcatctaccgcctccgttctatatgccgcctccgttctatctgccgccgcagcagcagccgcagccatggcaataccccactcaaccaccgcagctaagcccgtgccagcagttcggatcctgcggcgtcggagcgtcggcagcccgttcctgggccagtgcgtcgagttcctgaggcaccagtgcagcccggcggcgacgccctacggctcgccacagtgccaggcgctgcagcagcagtgctgccaccagatca

SEQ ID NO: 345768 - DNA, 394 bp, Zea mays
cagcagttacctttggtccatttggtggcacaaaacatcagggcacaacaactacaacaacttgtgctagcaaaccttgctgcatactctcagcaacatcagtttcttccattcaaccaactggctgcattgaactctgctgcttatttgcaacaacaattaccattcagccagctagttgctgcctacccccagcaatttcttccattcaaccaactagcagcattgaactctgctgcttatttacagcagcaacaactactaccattcaccagctagctgatgtgagccctgctgccttcttgacacaacaacagttgttgccgttctacctgcacgctatgcctaacgctggcaccctcttacaactgcaacaattgctgccattcaacca

SEQ ID NO: 345769 - DNA, 395 bp, Zea mays
gcaacatagaaagcacaatagtgttcctacaatggcagccaaaatattttgcttccttatgctccttggtctttctgcaagtgttgctaccgcaaccattttcccacaatgctcacaagctcctatagcttcccttcttcccccatacctctcaccagcggtgtcttcaatgtgtgaaaacccaattgttcaaccctacaggatccaacaggcaatcgcaacaggcatcttaccattatcacccttgttcctccaacaaccgtcagccctatacagcagttacctttggtccatttggtggcacaaaacatcagggcacaacaactacaacaacttgtgctagcaaaccttgctgcatactctcagcaacatcagtttcttccattcaaccaact

SEQ ID NO: 345770 - DNA, 392 bp, Zea mays
caacatagaaagtggaatccagtatcaacaatagagcaacaatggcgaccaagatattttccctccttatgctccttgctctttctgcatgtgttgctaacgcgacaattttccctcaatgctcacaagctcctatagcttcccttcttcccccataccttccatcaatgatagcttcagtatgtgaaaacccagctcttcaaccctataggctccaacaagcaatcgcagcaagcaacatacctttatcacccttgtttcaacaatcgccgccctatctttggtgcagtcattggtacaaaccatcagggcacagcagctgcagcaactcgtgctacctgtgatcaaccaagtagctctggcaaacctttctccctactctcagcaacaac

SEQ ID NO: 345771 - DNA, 392 bp, Zea mays
cggacgcgtgggctagcaacatagtaagcacaatagtgtaccaacaatggcagccaaaatattttgcctccttatgctccttggtctttctgcaagtgctgctacggcgaccattttcccgcaatgctcgcaagctcctatagcttcccttcttcccccgtacctctcaccagcggtgtcttcggtatgtgaaaacccaattcttcaaccctacaggatccaacaggcaatcgcagctggcatcttacctttatcacccttgttcctccacaatcatcagccctattacaacagttacctttggtgcatttattggcacaaaacatcagggcacaacaactacaacaacttgtgctagcaaaccttgctgcctactctcagcaacagcagtt

SEQ ID NO: 345772 - DNA, 392 bp, Zea mays
agaaagcacaatagtgtaccaacattggcagctaaaatattttgcctccttatgctccttggtctttctgcaagtgctgctacggcgaccattttcccacaatgctcacaagctcctatagcttcccttcttcccccgtacctctcaccaacggtgtcttcggtatgtgaaaacccaattcttcaaccctacaggatccaacaggcaatcgcagctggcatcttacctttatcacccttgttcctccaacaatcatcagccctattacacagttacctttggtgcatttattggcacaaaacatcagggcacaacaactacaacaacttgtgctagcaaaccttgctgcctactctcagcaacagcagtttcttccattcaaccaactagct

SEQ ID NO: 345773 - DNA, 392 bp, Zea mays
cggacgcgtgggcaactagcatcatagaaagcacaatagtgtaccaacaatggcagccaaaatattttgcctccttatgctccttggtctttctgcaagtgctgctacggcgaccattttcccgaaatgctcgcaagctcctatagcttcccttcttcccccgtacctctcaccagcggtgtcttcggtatgtgaaaacccaattcttcaaccctacaggatccaacaggcaatcacagctggcatcttacctttatcacccttgttctccaacaatcatcagccctattacatcagttacctttggtgcatttattggcacaaaacatcagggcacaacaactacaacaacttgtgctagcaaaccttgctgcctactctcagcaacagca

SEQ ID NO: 345774 - DNA, 391 bp, Zea mays
caactagcaacatagaaagcacaatagtgtaccaacaatggcagccaaaatattttgcttccttatgctccttggtctttctgcaagtgttgctaccgcaaccattttcccacaatgctcacaagctcctatagcttcccttcttcccccatacctctcaccagcggtgtcttcaatgtgtgaaaacccaattgttcaaccctacaggatccaacaggcaatcgcaacaggcatcttaccattatcacccttgttcctccaacaaccgcagccctattacagcagttacctttggtccatttggtggcacaaaacatcagggcacaacaactacaacaacttgtgctagcaaaccttgctgcatactctcagcaacatcaagttcttccat

SEQ ID NO: 345775 - DNA, 394 bp, Zea mays
gtagggagaaaggtttgccagtagtttctctcagcaacaacaatttcttccattcaaccaactgtctacattgaaccgtgctgcttatttgcagcaacaactattaccattcagccagctagctactgcctactctcagcaacaacaacttcttccatttaaccaattggccgcactgaaccccgctgcttatttgcagcagcaaatactactaccatttagccagctagctgcagcaagccgtgcttccttcttgacacagcaacagtgctgcctttctaccagcagtttgcggctaaccccgcaaccctcttacaactacaacaattgttgccctttgtccaacttgctttgacaaacccagcagcctcctaccaacaacacatcattggtg

SEQ ID NO: 345776 - DNA, 381 bp, Zea mays
atcagcaaagcggcagtgcgtagagaggatcgtcgaacagaacagcatgaagatggtcatcgttctcgtcgtgtgcctggctctgtcagctgccagcgcctctgcaatgcagatgccctgcccctgcgcggggctgcagggcttgtacggcgctggcgccggcctgacgacgatgatgggcgccggcgggctgtacccctacgcggagtacctgaggcagccgcagtgcagcccgctggcggcggcgccctactacgccgggtgtgggcagcgagcgccatgtaccagccgctccggcaacagtgctgccagcagcagatgaggatgatggacgtgcagtccgtcgcgcagcagctgcagatgatgatgcagcttgagcgt

SEQ ID NO: 345777 - DNA, 391 bp, Zea mays
cagaaacacaccaagcgaagcgcactagcaacaacctaacaacaatggctaccaagatattatccctccttgcgcttcttgcgctttttgcgagcgcaacaaatgcgtccattattccacaatgctcacttgctcctagttccattattccacagttcctcccaccagttacttcaatggccttcgaacacccagctgtgcaagcctataggctacaacaagcgattgcggcgagcgtcttacaacaaccaattgcccaattgcaacaacaaccttggcacatctaacaatacaaaccatcgcaacgcaacagcaacaacagttcctaccagcactgagccacctagccatggtgaaccctgtcgcctacttgcaacagcagctgcttgca

SEQ ID NO: 345778 - DNA, 392 bp, Zea mays
gcgaagcgcactagcaacaacctatcatcaatggctaccaagatattatccctccttgcgcttcttgcgctttttgcgagcgcaacaaatgcgtccattattccacaatgctcacttgctcctagttccattattccacagttcctcccaccagttacttcaatggccttcgaacacccagctgtgcaagcctataggctacaacaagcgattgcggcgagcgtcttacaacaaccaattgcccaattgcaacaacaatccttggcacattaacaatacaaaccatcgcaacgcaacagcaacaacagttcctaccagcactgagccacctagccatggtgaaccctgtcgcctacttgcaacagcagctgcttgcatccaacccacttgct

SEQ ID NO: 345779 - DNA, 394 bp, Zea mays
caagcctacaggctacaactagcgtttttggcgagcgtcttacaacaaccaattgcccaattgcaacaacaatccttggcacatctaaacctacaaaccatcgcaacgcaacagcaacaacagtttctgccatcactgagccacctagccgtggtgaaccctgtcgcctacttgcaacagcagctacttgcatccaacccacttgctctggcgaacgtagctgcataccagcaacaacaacgtctgcaacagtttatgccagcgctcagtcactagccatggtgaaccctgtcgcctacctacaacagcaacaattgctttcatctagcccgctcgctgtgggcaatgcacctacgtacctacaacaacagttgctgcaacagattgtaccagc

SEQ ID NO: 345780 - DNA, 261 bp, Zea mays
gatgagcacaataggaccaactggcagccaaaatatttgctcttactcttggtcttttgaggctgtcgcaccatttccaagctccagctctatgcttcttttccccgaccttaccacgggcttggatggaaaacccaattttaaccctcagaccaacgcatacagtcttactataccctgtctcacatatagcctatatagtccttgggcttatgccaaaatagcaacactcacactggctgcaaactgtgctacttacac

SEQ ID NO: 345781 - DNA, 394 bp, Zea mays
ctggacgtcagcctagcaattagctcatcgactccagattggagaactcgacaccatgaaggtgctgatcgttgcccttgctctcctggcgctcgctgcgagcgccgcctccagtacaagcggcggctgtggctgccagacaccaccgtttcatctaccgcctccgttctatatgccgcctccgttctatctgccgccgcagcagcagccgcagccatggcaataccccactcaaccaccgcagctaagcccgtgccagcagttcggatctgcggcgtcggcagcgtcggcagcccgttcctgggccagtgcgtcgagttcctgaggcaccagtgcagcccggcggcgacgccctacggctcgccacagtgccaggcgctgcagcagcagtgct

SEQ ID NO: 345782 - DNA, 395 bp, Zea mays
gctttatctactccagagcgcatatgtaacccgatcgacaccatgagggtgttgctcgttgccctcgctctcctggctctcgctgcgagcgccacctccacgcatacaagcggcggctgcggctgccagccaccgccgccggttcatctaccgccaccatgccactaccctactcaaccgccccggcctcagcctcatccccagccacacccatgcccgtgccaacagccgcatccaagcccgtgccagctgcagggaacctgcggcgttgcagcaccccgatcctgggccagtgcgtcgagtttctgaggcatcagtgcagcccgacggcgacgccctactgctcgcctcagtgccagtcgttgcggcagcagtgttgccagcagctcaggcag

SEQ ID NO: 345783 - DNA, 395 bp, Zea mays
agcattcagaaacacaccaatttatgcgcactagcaacaacctaacaacaatggctaccaagatattagccctccttgcgcttcttgcccttttagtgagcgcaacaaatgcgttcattattccacagtgctcacttgctcctagtgccattattccacagttcctcccaccagttacttcaatgggcttcgaacatccagccgtgcaagcctacaggctacaactagcgcttgcggcgagcgtcttacaacaaccaattgcccaattgaacaacaatccttggcacatctaaacctacaaaccatcgcaacgcaacagcaacaacagtttctgccatcactgagccacctagccgtggtgaaccctgtcgcctacttgcaacagcagctacttg

SEQ ID NO: 345784 - DNA, 395 bp, Zea mays
gcaacatagaaagcacaatagtgttccatcaatggcagccaaaatattttgcttccttatgctccttggtctttctgcaagtgctgctaccgcaaccattttcccacaatgctcacaagctcctatagcttcctttcttcccccatacctctcaccagcggtgtcttcagtatgtgaaaacccaattcttcaaccctacaggatccaacaggcaatcgcagcaggcatcttacctttatcacccttgttcctccaacaaccgtcagccctatacagcagttacctttggtgcatttgttggcacaaaacatcaaggcacaacaactacaacaacttgtgctaggaaaccttgctgcctactctcagcaacagcagtttcttccattcaaccaact

SEQ ID NO: 345785 - DNA, 83 bp, Zea mays
  unsure (1)..(83): unsure at all n locations
ccgggtccgaccccacgccgnntccgatttttgagcccattcagaaacccacaccatagcttatagtcgcactanngcaacga

SEQ ID NO: 345786 - DNA, 396 bp, Zea mays
attggctcatcgactccagattggttatctcgacaccatgaaggtgctgatcgttgcccttgctctcctggcgctcgctgcgagcgccgcctccagtacaagcggcggctgtggctgccagacaccaccgtttcatctaccgcctccgttctatatgccgcctccgttctatctgccgccgcagcagcagccgcagccatggcaataccccactcaaccaccgcagctaagcccgtgccagcagttcggatcctgcggcgtcggcagcgtcgcagcccgttcctgggccagtgcgtcgagttcctgaggcaccagtgcagcccggcggcgacgccctacggctcgccacagtgccaggcgctgcagcagcagtgctgccaccagatcaggcaggtg

SEQ ID NO: 345787 - DNA, 397 bp, Zea mays
gtaccatcaatcatcattcattttattagtataggcaccaaatcaaatctgcaacatcaattatctaactccaaaaaccatgaagctggtgcttgtggttcttgctttcattgctttagtatcaagtgtttcttgtacacagacaggcggctgcagctgtggtcaacaacaaagccatgagcagcaacatcatccacaacaacatcatccacaaaaacaacaacatcaaccaccaccacaacatcaccagcagcagcaacaccaacaacacaagttcacatgcaaccacaaaaacatcagcaacaacaagaagttcatgttcaacaacaacaacaacaaccgcagcaccaacaacaacaacaacaacagcaccaacaacaacatcaatgtgaaggcc

SEQ ID NO: 345788 - DNA, 102 bp, Zea mays
  unsure (1)..(102): unsure at all n locations
gaaccancaatcattcacccattttttttagaaccggcaccaaaccgaaagaggggggagtatttaaaaaacgccaaaaaccacgaagcgggggctcgggac

SEQ ID NO: 345789 - DNA, 396 bp, Zea mays
agcctagcaattagctcatcgacttcatattggagaactcgacaccatgaaggtgctgatcgttgcccttgctctcctggcgctcgctgcgagcgccgcctccagtacaagcggcggctgtggctgccagacaccaccgtttcatctaccgcctccgttctatatgccgcctccgttctatctgccgccgcagcagcagccgcagccatggcaataccccactcaaccaccgcagctaagcccgtgccagcagttcggatcctgcggcgtcgcagcgtcggcagcccgttcctgggccagtgcgtcgagttcctgaggcaccagtgcagcccggcggcgacgccctacggctcgccacagtgccaggcgctgcagcagcagtgctgccaccagatc

SEQ ID NO: 345790 - DNA, 386 bp, Zea mays
ccaactagcaacatagaaagttcattagtgtaccaacaatggcagccaaaatattttgcttccttatgctccttggtctttctgcaagtgttgctaccgcaaccattttcccacaatgctcacaagctcctatagcttcccttcttcccccatacctctcaccagcggtgtcttcaatgtgtgaaaacccaattgttcaaccctacaggatccaacaggcaatcgcaacaggcatcttaccattatcacccttgttcctccaacaaccgcagccctattacagcagttacctttggtccatttggtggcacaaaacatcagggcacaacaactacaacaacttgtgctagcaaaccttgctgcatactctcagcaacatcagtttc

SEQ ID NO: 345791 - DNA, 395 bp, Zea mays
agaccattagctttatctaccctagagcgcagaagaacccgatcgacaccatgagggtgttgctcgttgccctcgctctcctggctctcgctgcgagcgccacctccacgcatacaagcggcggctgcggctgccagccaccgccgccggttcatctaccgccgccggtgcatctgccacctccggttcacctgccacctccggtgcatctcccaccgccggtccacctgccgccgccggtccacctgccaccgccggtccatgtgccgccccggttcatctgccgccgccaccatgccactaccctactcaaccgccccggcctcagcctcatccccagccacacccatgcccgtgccaacagccgcatccaagcccgtgccagctgcagggaa

SEQ ID NO: 345792 - DNA, 413 bp, Zea mays
ggcggcccaacccgtccgacctagcaacatataaagcacaattttgtaccaacaatggcagccaaaatatttggcctccttatgctcctgggtctttctgcaagtgctgctacggcgaccattttcccacaatgctcacaagctcctatagcttcccttcttcccccgtacctctcaccagcggtgtcttcggtatgtgaaaacccaattcttcaaccctataggatccaacaggcaatcgcagctggcatcttacctttatcacccttgttcctccaacaatcatcagcctattacagcagttacctttggtgcatttattggcacaaaacatcagggcacaacaactacaacaacttgtgctagcaaaccttgctgcctactctcagcaacaacagtttcttccattcaac

SEQ ID NO: 345793 - DNA, 381 bp, Zea mays
cggacgcgtgggaagcgaagcgcttttttaacaacctaacaacaatggctaccaagatattatccctccttgcgcttcttgcgctttttgcgagcgcaacaaatgcgtccattattccacaatgctcacttgctcctagttccattattccacagttcctcccaccagttacttcaatggccttcgaacacccagctgtgcaagcctataggctacaacaagcgattgcggcgagcgtcttacaacaaccaattgcccaattgcaacaacaatcttggcacatctaacaatacaaaccatcgcaacgcaacagcaacaacagtttctaccagcactgagccacctagccatggtgaaccctgtcgcctacttgcaacagca

SEQ ID NO: 345794 - DNA, 414 bp, Zea mays
gccgacccacgcgtccgattttcagcattctgaaacacaccatgctaagcgcactagcaacaacctaacaacaatggctaccaagatattagccctccttgcgcttcttgcccttttagtgagcgcaacaaatgcgttcattattccacagtgctcacttgctcctagtgccattattccacagttcctcccaccagttacttcaatgggcttcgaacatccagccgtgcaagcctacaggctacaactagcgcttgcggcgagcgtcttacaacaaccaattgcccaatgcaacaacaatccttggcacatctaaacctacaaaccatcgcaacgcaacagcaacaacagtttctgccatcactgagccacctagccgtggtgaaccctgtcgcctacttgcaacagcagcta

SEQ ID NO: 345795 - DNA, 391 bp, Zea mays
caacaagcaacatagaaagtggaattcagtagcaacaatagagcaacaatggagaccaagatattttccctccttatgctccttgctctttctacatgtgttgctaacgcgacaattttccctcaatgctcacaagctcctatagcttccctttttcccccataccttccatcaattatagcttcagtatgtgaaaacccagctcttcaaccatataggcttcaacaagcaatcgcagcaagcaacatacctttatcgcccttgttgtgcaacaatcgccagccctatctttggtgcagtcattggtacaaaccatcagggcacaacagctgcagcaactcgtgctacctgtgatcaaccaagtagctctggcaaacctttctccctactc

SEQ ID NO: 345796 - DNA, 395 bp, Zea mays
attgagaccaactagcaacatatttagcacaatagtgtaccaacaatggcagccaaaatattttgcctccttatgctccttggtctttctgcaagtgctgctacggcgaccattttcccgaaatgctcgcaagctcctatagcttcccttcttcccccgtacctctcaccagcggtgtcttcggtatgtgaaaacccaattcttcaaccctacaggatccaacaggcaatcacagctggcatcttacctttatcacccttgttcctccacaatcatcagccctattacatcagttacctttggtgcatttattggcacaaaacatcagggcacaacaactacaacaacttgtgctagcaaaccttgctgcctactctcagcaacagcagtttctt

SEQ ID NO: 345797 - DNA, 396 bp, Zea mays
caacatagaaagtggaatccagtatctaacaatagagcaacaatggagaccaagatattttccctccttatgctccttgctctttctacatgtgttgctaacgcgacaattttccctcaatgctcacaagctcctatagcttccctttttcccccataccttccatcaattatagcttcagtatgtgaaaacccagctcttcaaccatataggcttcaacaagcaatcgcagcaagcaacatacctttatcgcccttgttgtgtcaacaatgccagccctatctttggtgcagtcattggtacaaaccatcagggcacaacagctgcagcaactcgtgctacctgtgatcaaccaagtagctctggcaaacctttctccctactctccgcaacaac

SEQ ID NO: 345798 - DNA, 390 bp, Zea mays
ataggctccaacaagcaatctcagttgcaacatacctttatcacccttgtttcaacaatcgccagccctatctttggtgcagtcattggtacaaaccatcagggcacagcagctgcagcaactcgtgctacctgtgatcaaccaagtagctctggcaaacctttctccctactctcagcaacaacaatttcttccattcaaccaactgtctacattgaaccgtgctgcttatttgcagcaacaactattaccattcagccagctagctatgcctactctcagcaacaacaacttcttccatttaaccaattggccgcactgaaccccgctgcttatttgcagcagcaaatactactaccatttagccagctagctgcagcaagccgtgct

SEQ ID NO: 345799 - DNA, 395 bp, Zea mays
agaccaactagcaacatagaaagcacaatagtgtaccaacaatggcagccaaaatattttgcctccttatgctccttggtctttctgcaagtgctgctacggcgaccattttcccgaaatgctcgcaagctcctatagcttcccttcttcccccgtacctctcaccagcggtgtcttcggtatgtgaaaacccaattcttcaaccctacaggatccaacaggcaatcacagctggcatcttacctttatcacccttgttcctccaacaatcatagccctattacatcagttacctttggtgcatttattggcacaaaacatcagggcacaacaactacaacaacttgtgctagcaaaccttgctgcctactctcagcaacagcagtttcttccat

SEQ ID NO: 345800 - DNA, 432 bp, Zea mays
cgggaatggactgggtcggacccacgcgatgcgtccacgcgtccgcccacgcgtacgtccactcgttcgcccacgcgtccgcttgctcctagtgccattattccacagttcctcccaccagttacttcaatgggcttcgaacacctagctgtgcaagccaacatgcaacaacaagcgcttgcggcgagcgtcttacaacaaccaattgcccaattgcaacaacaatccttgccacatctaacaatacaagccatcacaacgcaacagcaacaacagttcctaccagcactgagccacctagccatgggaaccctgccgcctacttgcaagagcagctgcttgcatccaacccacttgctctggcgaacgtagttgcaaaccagcaacaacaacagctacaacagtttctgccaacgctcagtcaactagcca

SEQ ID NO: 345801 - DNA, 394 bp, Zea mays
attttcagcattcagaaacacaccaagcgaagcgcactagcaacaacctaacaacaatggctaccaagatattagccctccttgcgcttcttgcccttttagtgagcgcaacaaatgcgttcattattccacagtgctcacttgctcctagtgccattattccacagttcctcccaccagttacttcaatgggcttcgaacatccagccgtgcaagcctacaggctacaactagcgcttgcggcgagcgtcttacaacaaccaattgccaattgcaacaacaatccttggcacatctaaacctacaaaccatcgcaacgcaacagcaacaacagtttctgccatcactgagccacctagccgtggtgaaccctgtcgcctacttgcaacagcag

SEQ ID NO: 345802 - DNA, 394 bp, Zea mays
attgagaccaactagcaacatataaagcacaatagtgtaccaacaatggcagccaaaatattttgcctccttatgctccttggtctttctgcaagtgctgctacggcgaccattttcccgcaatgctcgcaagctcctatagcttcccttcttcccccgtacctctcaccagcggtgtcttcggtatgtgaaaacccaattcttcaaccctacaggatccaacaggcaatcgcagctggcatcttacctttatcacccttgttcctccacaatcatcagccctattacaacagttacctttggtgcatttattggcacaaaacatcagggcacaacaactacaacaacttgtgctagcaaaccttgctgcctactctcagcaacagcagtttct

SEQ ID NO: 345803 - DNA, 392 bp, Zea mays
cagaaacacaccaagcgaagcttcttagcaacgacttaacaacaatggctaccaagatattagccctccttgcgcttcttgccctttttgtgagcgcaacaaatgcgttcattattccacaatgctcacttgctcctagtgccattataccacagttcctccgaccagttacttcaatgggcttcgaacacctagctgtgcaagcctacaggctacaacaagcgcttgcggcgagcgtcttacaacaaccaattaaccaattgcaacaaaatccttggcacatctaaccatacaaaccatcgcaacacaacagcaacaacagttcctaccagcactgagccaactagatgtggtgaaccctgtcgcctacttgcaacagcaggtgcttgcat

SEQ ID NO: 345804 - DNA, 384 bp, Zea mays
cagcattcagaaacacaccaagcgaagcgcactagcaacaacctaacaacaatggctaccaagatattagccctccttgcgcttcttgcccttttagtgagcgcaacaaatgcgttcattattccacagtgctcacttgctcctagtgccattattccacagttcctcccaccagttacttcaatgggcttcgaacatccagccgtgcaagcctacaggctacaactagcgcttgcggcgagcgtcttacaacaaccaattgcccaattgcaacaacaatccttggcacatctaaacctacaaaccatcgcaacgcaacagcaacaacagtttctgccatcactgagccacctagccgtggtgaaccctgtcgcctacttgcaa

SEQ ID NO: 345805 - DNA, 360 bp, Zea mays
cacactcgtacggagacaaagaacgtgggattgaggaacaacaaaccatgaacgatggcgacgaatatacttgttctgctgatgctcgttgctagcgctgcatgcagtgcatagcgcaacatttggctgtcaaagatcacaggttcatatagcgtctctgatttatacataccttccattatatatggcgtcgaacagtgaaacacaagcatgttaaaacctatagtgcaaccaacaagaaatagcagcgtagcaacataccttgatcacgccttgtttgaacaatcggcagccctatctttggccaggcattgggacaaaccatgcacgaacgaaacctgcagcaactccctatagctg

SEQ ID NO: 345806 - DNA, 395 bp, Zea mays
ccggaacggaagggccgacccacgcgacgcgattttgagcattcaaaaacacaccatgcgttgcgcactagcaacgacctaaccccagtggctaccaagatataagccctccttgcgcttcttgccctttttgtgagcgcaacaaatgcgttcatgattacacaatgctcacttgctcctagtgccattattccacagatcctcccaccagttacttcaatgggcttcgaacacctagctgtgcaagccaacatgcaacaacaagcgcttgcggcgagcgtcttacaacaaccaattgcccaattgcaacaacaatccttgccacatctaacaatacaagccatcacaacgcaacagcaacaacagttcctaccagcactgagccacctagccat

SEQ ID NO: 345807 - DNA, 396 bp, Zea mays
  unsure (1)..(396): unsure at all n locations
cgtncggagcattcagaaacacaccaagcgattcttattagcaacaacctaacaacaatggctaccaagatattatccctccttgcgcttcttgcgctttttgcgagcgcaacaaatgcgttcattattccacaatgctcacttgctccaagttccattattacacagttcctcccaccagttacttcaatgggcttcgaacacccagctgtgcaagcctataggctacaacaagcaattgcggcgagcgtcttacaacaaccaatttcccagttgcaacaacaatccttggcacatctaacaatacaaaccatcgcaacgcaacagcaacaacaattcctaccagcactgagccacctagccatggtgaaccctgccgcctacttgcaacagcag

SEQ ID NO: 345808 - DNA, 385 bp, Zea mays
caacaagcaacatagaaagtggaattcagtagcaacaatagagcaacaatggcgaccaagatattttccctccttatgctccttgctctttctgcatgtgttgctaacgcgacaattttccctcaatgctcacaagctcctatagcttcccttcttcccccataccttccatcaatgatagcttcagtatgtgaaaacccagctcttcaaccctataggctccaacaagcaatcgcagcaagcaacatacctttatcacccttgtttcaacaatcgccagccctatctttggtgcagtcattggtacaaaccatcagggcacagcagctgcagcaactcgtgctacctgtgatcaaccaagtagctctggcaaacctttctccct

SEQ ID NO: 345809 - DNA, 297 bp, Zea mays
aagaaacacatcaagaggcgctacgttttatctacttaacaacactgcgtaccaagatattagtcaatgctgagctgcttgcattgtttgcgagcgcaacacatgcgttcaatattccacagcgctaacttgcgtaaaccgacattttacacacatatacgctcgaccaggcacttcaatgggcgcaacaacacctagattgtgcaatgtctacaggaatacaacaacgggcttgtggtgagcgcattacaacaaccaaaccaccaagtgccacaacaatccttggcatcatgttac

SEQ ID NO: 345810 - DNA, 386 bp, Zea mays
tcggaacatacaaagaggaatccagtcgtaacaatagagcaacaatggagaccaagatattttccctccttatgctccttgctctttctacatgtgttgctaacgcgacaattttccctcaatgctcacaagctcctatagcttccctttttcccccataccttccatcaattatagcttcagtatgtgaaaacccagctcttcaaccatataggcttcaacaagcaatcgcagcaagcaacatacctttatcgcccttgttgtgtcaacaatcgccagccctatctttggtgcagtcattggtacaaaccatcagggcacaacagctgcagcaactcgtgctacctgtgatcaaccaagtagctctggcaaacctttctccctac

SEQ ID NO: 345811 - DNA, 383 bp, Zea mays
aaacacaccaagcgaagcacattatcaacaacctaacaacaatggctaccaagatattatccctccttgcgcttcttgcgctttttgcgagcgcaacaaatgcgttcattattccacaatgctcacttgctccaagttccattattacacagttcctcccaccagttacttcaatgggcttcgaacacccagctgtgcaagcctataggctacaacaagcaattgcggcgagcgtcttacaacaaccaatttcccagttgcaacaacaatccttggcacatctaacaatacaaaccatcgcaacgcaacagcaacaacaattcctaccagcactgagccacctagccatggtgaaccctgccgcctacttgcaacagcagttg

SEQ ID NO: 345812 - DNA, 385 bp, Zea mays
cggacgcgtgggcggacgcgttcgctgacgcgtgggcggacgcgtgggcagaaacacaccaagcgaagcgcactagcaacaacctaacaacaatggctaccaagatattatccctccttgcgcttcttgcgctttttgcgagcgcaacaaatgcgtccattattccacaatgctcacttgctcctagttccattattccacagttcctcccaccagttacttcaatggccttcgaacacccagctgtgcaagcctataggctacaacaagcgattgcggcgagcgtcttacaacaaccaattgcccaattgcaacaacaatccttggcacatctaacaatacaaaccatcgcaacgcaacagcaacaacagttcctaccagcact

SEQ ID NO: 345813 - DNA, 382 bp, Zea mays
acacaccaagcgaagcacattagcatcaacctaacaacaatggctaccaagatattatccctccttgcgcttcttgcgctttttgcgagcgcaacaaatgcgttcattattccacaatgctcacttgctccaagttccattattacacagttcctcccaccagttacttcaatgggcttcgaacacccagctgtgcaagcctataggctacaacaagcaattgcggcgagcgtcttacaacaaccaatttcccagttgcaacaacaatccttggcacatctaacaatacaaaccatcgcaacgcaacagcaacaacaattcctaccagcactgagccacctagccatggtgaaccctgccgcctacttgcaacagcagttgc

SEQ ID NO: 345814 - DNA, 381 bp, Zea mays
agcattcagaaacacaccaagcgaatcgcactagcaacaacctaacaacaatggctaccaagatattagccctccttgcgcttcttgcccttttagtgagcgcaacaaatgcgttcattattccacagtgctcacttgctcctagtgccattattccacagttcctcccaccagttacttcaatgggcttcgaacatccagccgtgcaagcctacaggctacaactagcgcttgcggcgagcgtcttacaacaaccaattgcccaattgcaacaacaatccttggcacatctaaacctacaaaccatcgcaacgcaacagcaacaacagtttctgccatcactgagccacctagccgtggtgaaccctgtcgcctacttgc

SEQ ID NO: 345815 - DNA, 379 bp, Zea mays
caacaagcaacatagaaagtggaatccagttgcaacaatagagcaacaatggagaccaagatattttccctccttatgctccttgctctttctacatgtgttgctaacgcgacaattttccctcaatgctcacaagctcctatagcttccctttttcccccataccttccatcaattatagcttcagtatgtgaaaacccagctcttcaaccatataggcttcaacaagcaatcgcagcaagcaacatacctttatcgcccttgttgtgtcaacaatcgccagccctatctttggtgcagtcattggtacaaaccatcagggcacaacagctgcagcaactcgtgctacctgtgatcaaccaagtagctctggcaaacc

SEQ ID NO: 345816 - DNA, 389 bp, Zea mays
agaccattagctttatctactccagagcgcagaagaacccgatcgacaccatgagggtgttgctcgttgccctcgctctcctggctctcgctgcgagcgccacctccacgcatacaagcggcggctgcggctgccagccaccgccgccggttcatctaccgccgccggtgcatctgccacctccggttcacctgccacctccggtgcatctcccaccgccggtccacctgccgccgccggtccacctgccaccgccggtccatgtgccgccgccggttcatctgccgccgccaccatgccactaccctactcaaccgccccggcctcagcctcatccccagccacacccatgcccgtgccaacagccgcatccaagcccgtgccagctg

SEQ ID NO: 345817 - DNA, 385 bp, Zea mays
ttcaaccatataggcttcaacaagcaattgcagcaagcaacatacctttatcgcccttgttgtgtcaacaatcgccagccctatctttggtgcagtcattggtacaaaccatcagggcacaacagctgcagcaactcgtgctacctgtgatcaaccaagtagctctggcaaacctttctccctactctccgcaacaacaatttcttccattcaaccaactgtctacactgaaccctgctgcttatttgcagcaacaactattaccatttagccagctagctactgcctactctcaacaacaacaacttcttccatttaaccaattggccgcactgaaccccgctgcttatttgcagcagcaaatactactaccatttagccagct

SEQ ID NO: 345818 - DNA, 372 bp, Zea mays
gaaacacacacctagcgaagcgcactagcaacgacctaacaacaatggctaccaagatattagcccttcttgcgcttcttgccctttttgtgagcgcaacaaatgcgttcattatttcacaatgctcacttgctcctagtgccattattccacaattcctcccaccagttacttcaatgggcttcgaacacccagctgtgcatgcctacaggctacaacaagcgcattacaacaaccaattgcccaattacagcaacaatccttggcacatctaacaatacaaaccatcgcaacgcaacagcaacaacagttcctaccagcactgagccacctagccatggtgaaccctgccgcctacttgcaacagcaact

SEQ ID NO: 345819 - DNA, 384 bp, Zea mays
cacccatgcccgtgccaacagccgtatccaagcccgtgccagctgcagggaacctgcggcgttggcagcaccccgatcctgggccagtgcgtcgagtttctgaggcatcagtgcagcccgacggcgacgccctactgctcgcctcagtgccagtcgttgcggcagcagtgttgccagcagctcaggcaggtggagccgcagcaccggtaccaggcgatcttcggcttggtcctccagtccatcctgcagcagcagccgcaaagcggccaggtcgcggggctgttggcggcgcagatagcgcagcaactgacggcgatgtgcggcctgcagcagccgactccatgcccctacgctgctgccggcggtgtcccccactgaagaaac

SEQ ID NO: 345820 - DNA, 365 bp, Zea mays
gcacgctgcgcctaacgctggcactctcttacaactgcaacaattgctgccattcaaccaacttgctttgacaaacccagcagcgttctaccaacaacccatcattggtggtgccctcttttagatttcttatgagttatagttcaataataaagttttttgtctgatgtttgtggcttcccagaaataagaaagtacatttctagattcttaaaaaaaaaaaaaaaaaaaaaaaaaaaaaaaaaaaaaaaaaaaaaaaataaaaaaaaaaaaaaaaaaaaaaaaaaaaaaaaaatggggaaaaaaaaaaaaaattttaaaaaaaaaaaaaaaaaagggggggcccttttaagggatccaagttt

SEQ ID NO: 345821 - DNA, 383 bp, Zea mays
gaatccagtagcaacaatagagcatcaatggcgaccaagatattttccctccttatgctccttgctctttctgcatgtgttgctaacgcgacaattttccctcaatgctcacaagctcctatagcttcccttcttcccccataccttccatcaatgatagcttcagtatgtgaaaacccagctcttcaaccctataggctccaacaagcaatcgcagcaagcaacatacctttatcacccttgtttcaacaatcgccagccctatctttggtgcagtcattggtacaaaccatcagggcacagcagctgcagcaactcgtgctacctgtgatcaaccaagtagctctggcaaacctttctccctactctcagcaacaacaatt

SEQ ID NO: 345822 - DNA, 384 bp, Zea mays
agcattcagaaacacaccaagcgaatcacattagcaacaacctaacaacaatggctaccaagatattatccctccttgcgcttcttgcgctttttgcgagcgcaacaaatgcgttcattattccacaatgctcacttgctccaagttccattattacacagttcctcccaccagttacttcaatgggcttcgaacacccagctgtgcaagcctataggctacaacaagcaattgcggcgagcgtcttacaacaaccaatttcccagttgcaacaacaatccttggcacatctaacaatacaaaccatcgcaacgcaacagcaacaacaattcctaccagcactgagccacctagccatggtgaaccctgccgcctacttgcaac

SEQ ID NO: 345823 - DNA, 387 bp, Zea mays
agaccattagctttatctactccagagcgcagaagaacccgatcgacaccatgagggtgttgctcgttgccctcgctctcctggctctcgctgcgagcgccaccttcacgcatacaagcggcggctgcggctgccagccaccgccgccggttcatctaccgccgccggtgcatctgccacctccggttcacctgccacctccggtgcatctcccaccgccggtccacctgccgccgccggtccacctgccaccgccggtccatgtgccgccgccggttcatctgccgccgccaccatgccactaccctactcaaccgccccggcctcagcctcatccccagccacacccatgcccgtgccaacagccgcatccaagcccgtgccagc

SEQ ID NO: 345824 - DNA, 385 bp, Zea mays
caacaagcaacatagaaagtggaatttattagcaacaatagagcaacaatggagaccaagatattttccctccttatgctccttgctctttctacatgtgttgctaacgcgacaattttccctcaatgctcacaagctcctatagcttccctttttcccccataccttccatcaattatagcttcagtatgtgaaaacccagctcttcaaccatataggcttcaacaagcaatcgcagcaagcaacatacctttatcgcccttgttgtgtcaacaatcgccagccctatctttggtgcagtcattggtacaaaccatcagggcacaacagctgcagcaactcgtgctacctgtgatcaaccaagtagctctggcaaacctttctc

SEQ ID NO: 345825 - DNA, 385 bp, Zea mays
agaccaactagcaacatagaaagcacatttgtgtaccaacaatggcagccaaaatattttgcctccttatgctccttggtctttctgcaagtgctgctacggcgaccattttcccacaatgctcacaagctcctatagcttcccttcttcccccgtacctctcaccagcggtgtcttcggtatgtgaaaacccaattcttcaaccctataggatccaacaggcaatcgcagctggcatcttacctttatcacccttgttcctccaacaatcatcagccctattacagcagttacctttggtgcatttattggcacaaaacatcagggcacaacaactacaacaacttgtgctagcaaaccttgctgcctactctcagcaacaaca

SEQ ID NO: 345826 - DNA, 382 bp, Zea mays
agcaacatagaaagcacaatagtgtaccaacaatggcagccaaaatattttgcctccttatgctccttggtctttctgcaagtgctgctacggcgaccattttcccgaaatgctcgcaagctcctatagcttcccttcttcccccgtacctctcaccagcggtgtcttcggtatgtgaaaacccaattcttcaaccctacaggatccaacaggcaatcacagctggcatcttacctttatcacccttgttcctccaacaatcatcagccctattacatcagttacctttggtgcatttattggcacaaaacatcagggcacaacaactacaacaacttgtgctagcaaaccttgctgcctactctcagcaacagcagtttct

SEQ ID NO: 345827 - DNA, 381 bp, Zea mays
cggacgcgtgggttgagaccaactatcaacatagaaagcacaatagtgtaccaacaatggcagccaaaatattttgcctccttatgctccttggtctttctgcaagtgctgctacggcgaccattttcccgaaatgctcgcaagctcctatagcttcccttcttcccccgtacctctcaccagcggtgtcttcggtatgtgaaaacccaattcttcaaccctacaggatccaacaggcaatcacagctggcatcttacctttatcacccttgttcctccaacaatcatcagccctattacatcagttacctttggtgcatttattggcacaaaacatcagggcacaacaactacaacaacttgtgctagcaaaccttgctg

SEQ ID NO: 345828 - DNA, 381 bp, Zea mays
agaaagcacaatagtgtaccatcaatggcagccaaaatattttgcctccttatgctccttggtatttctgcaagtgctgctacggcgaccattttcccgcaatgctcacaagctcctatagcttcccttcttcccccgtacctctcaccagcggtgtcttcggtatgtgaaaacccaattcttcaaccctacaggatccaacaggcaatcgcagctggcatcttacctttatcacccttgttcctccaacaatcatcagccctattacagcagttacctttggtgcatttattggcacaaaacatcagggcacaacaactacaacaacttgtgctagcaaaccttgctgcctactctcagcaacagcagtttcttccattc

SEQ ID NO: 345829 - DNA, 378 bp, Zea mays
agcaacatagaaagtggaatccagttgcatcaatagagcaacaatggcgaccaagatattttccctccttatgctccttgctctttctgcatgtgttgctaacgcgacaattttccctcaatgctcacaagctcctatagcttcccttcttcccccataccttccatcaatgatagcttcagtatgtgaaaacccagctcttcaaccctataggctccaacaagcaatcgcagcaagcaacatacctttatcacccttgtttcaacaatcgccagccctatctttggtgcagtcattggtacaaaccatcagggcacagcagctgcagcaactcgtgctacctgtgatcaaccaaagataggtctggcaaacctttct

SEQ ID NO: 345830 - DNA, 131 bp, Zea mays
gttctagatcgcgagcggccgccctttttttttttttttagaatctggaaatgtaactttttatttctggtgccctcataccggcatgtgtttcctagaaataatcaatatattgattgagatttatcttg

SEQ ID NO: 345831 - DNA, 386 bp, Zea mays
caccaagcgaagcacattagcaacttcctaacaacaatggctaccaagatattatccctccttgcgcttcttgcgctttttgcgagcgcaacaaatgcgttcattattccacaatgctcacttgctccaagttccattattacacagttcctcccaccagttacttcaatgggcttcgaacacccagctgtgcaagcctataggctacaacaagcaattgcggcgagcgtcttacaacaaccaatttcccagttgcaacaacaatccttggcacatctaacaatacaaaccatcgcaacgcaacagcaacaacaattcctaccagcactgagccacctagccatggtgaaccctgccgcctacttgcaacagcagttgcttgcatt

SEQ ID NO: 345832 - DNA, 384 bp, Zea mays
tttcagcattcagaaacacaccaagtgatgcgcactagcaacaacctaacaacaatggctaccaagatattagccctccttgcgcttcttgcccttttagtgagcgcaacaaatgcgttcattattccacagtgctcacttgctcctagtgccattattccacagttcctcccaccagttacttcaatgggcttcgaacatccagccgtgcaagcctacaggctacaactagcgcttgcggcgagcgtcttacaacaaccaattgcccaattgcaacaacaatccttggcacatctaaacctacaaaccatcgcaacgcaacagcaacaacagtttctgccatcactgagccacctagccgtggtgaaccctgtcgcctacttg

SEQ ID NO: 345833 - DNA, 315 bp, Zea mays
agcatacaaaaacacaccaagtaaatttcactaacaacaacctaacaacaggcggcgccaaaacaatagcccacgcgccacaacaagccctgcaagagaacgcaacaaatgcgaacattaacccacagagcacacttgcaacaagtgccattaacccacagcaacaaccaccagggaccacaaagggccatgaacacaacacccacacaagccaacaagctccaactaaaaactgccgacagcgacctacaaccaccaaatgacaaataccaacaacaaaacttgccacacataaaccttcaaaccatctgcaac

SEQ ID NO: 345834 - DNA, 382 bp, Zea mays
gaccaactagcaacatagaaagcacaatagtgtaccaacaatggcagccaaaatattttgcttccttatgctccttggtctttctgcaagtgctgctaccgcaaccattttcccacaatgctcacaagctcctatagcttcctttcttcccccatacctctcaccagcggtgtcttcagtatgtgaaaacccaattcttcaaccctacaggatccaacaggcaatcgcagcaggcatcttacctttatcacccttgttcctccaacaaccgtcagccctattacagcagttacctttggtgcatttgttggcacaaaacatcaaggcacaacaactacaacaacttgtgctaggaaaccttgctgcctactctcagcaacag

SEQ ID NO: 345835 - DNA, 389 bp, Zea mays
  unsure (1)..(389): unsure at all n locations
cagaccattagctttatctactccagagcgcagaaaaacccgatcgacaccatgaggggggttgctcgttgccctcgctctcctggctctcgctgcgaggcgccacctncacgcatacaagcggcggctgcggctgccagccaccgccgccggttcatctaccgccgccggtgcatctgccacctncggttcacctgccacctccggtgcatcttccaccgccggtccacctgccgccgccggtccacctgccaccgccggtccatgtgccgccgccggttcatctgccgncgncaccatgccactaccctactcaaccgccccggcctcagcctcatccccagccacacccatgcccgtgccaacagccgcatccaagcccgtgccag

SEQ ID NO: 345836 - DNA, 385 bp, Zea mays
caactagcaacatagaaagcacaatagtgtaccaacaatggcagccaaaatattttgcttccttatgctccttggtctttctgcaagtgctgctaccgcaaccattttcccacaatgctcacaagctcctatagcttcctttcttcccccatacctctcaccagcggtgtcttcagtatgtgaaaacccaattcttcaaccctacaggatccaacaggcaatcgcagcaggcatcttacctttatcacccttgttcctccaacaaccgtcagccctattacagcagttacctttggtgcatttgttggcacaaaacatcaaggcacaacaactacaacaacttgtgctaggaaaccttgctgcctactctcagcaacagcagttt

SEQ ID NO: 345837 - DNA, 384 bp, Zea mays
cttacctttataacccttgttccttcaacaatcatcagccctattacagcagttacctttggtgcatttattggcacaaaacatcagggcacaacaactacaacaacttgtgctagcaaaccttgctgcctactctcagcaacagcagtttcttccattcaaccaactagctgcattgaactctgcttcttatttgcaacaacaacaactaccattcagccagctatctgctgcctacccccagcaatttcttccattcaaccaactgacagcattgaactctcctgcttatttacagcagcaacaactactaccattcagccagctagctggtgtgagccctgctaccttcttgacacaaccacagttgttgccgttctacca

SEQ ID NO: 345838 - DNA, 383 bp, Zea mays
gtgaaaacccagctcttcaaccctataggctccaacaagcaatcgcagcaagcaacatacctttatcacccttgtttcaacaatcgccagccctatctttggtgcagtcattggtacaaaccatcagggcacagcagctgcagcaactcgtgctacctgtgatcaaccaagtagctctggcaaacctttctccctactctcagcaacaacaatttcttccattcaaccaactgtctacattgaaccgtgctgcttatttgcagcaacaactattaccattcagccagctagctactgcctactctcagcaacaacaacttcttccatttaaccaattggccgcactgaaccccgctgcttatttgcagcagcaaatactacta

SEQ ID NO: 345839 - DNA, 386 bp, Zea mays
agctttatctactccagagcgcagatgaacccgatcgacaccatgagggtgttgctcgttgccctcgctctcctggctctcgctgcgagcgccacctccacgcatacaagcggcggctgcggctgccagccaccgccgccggttcatctaccgccgccggtgcatctgccacctccggttcacctgccacctccggtgcatctcccaccgccggtccacctgccgccgccggtccacctgccaccgccggtccatgtgccgccgccggttcatctgccgccgccaccatgccactaccctactcaaccgccccggcctcagcctcatccccagccacacccatgcccgtgccaacagccgcatccaagcccgtgccagctgcaggg

SEQ ID NO: 345840 - DNA, 381 bp, Zea mays
gcaacatagaaagcacaatagtgtaccaacaatggcagccaaaatattttgcttccttatgctccttggtctttctgcaagtgctgctaccgcaaccattttcccacaatgctcacaagctcctatagcttcctttcttcccccatacctctcaccagcggtgtcttcagtatgtgaaaacccaattcttcaaccctacaggatccaacaggcaatcgcagcaggcatcttacctttatcacccttgttcctccaacaaccgtcagccctattacagcagttacctttggtgcatttgttggcacaaaacatcaaggcacaacaactacaacaacttgtgctaggaaaccttgctgcctactctcagcaacagcagtttct

SEQ ID NO: 345841 - DNA, 381 bp, Zea mays
cccacgcgtccggaccaacaagcatcatagaaagtggaatccagtagcaacaatagagcaacaatggagaccaagatattttccctccttatgctccttgctctttctacatgtgttgctaacgcgacaattttccctcaatgctcacaagctcctatagcttccctttttcccccataccttccatcaattatagcttcagtatgtgaaaacccagctcttcaaccatataggcttcaacaagcaatcgcagcaagcaacatacctttatcgcccttgttgtgtcaacaatcgccagccctatctttggtgcagtcattggtacaaaccatcagggcacaacagctgcagcaactcgtgctacctgtgatcaaccaagta

SEQ ID NO: 345842 - DNA, 368 bp, Zea mays
cccacgcgtccggcattcagaaactcaccaagcgaagcgcactagcaacgacctaacaacaatggctaccaagatattagccctccttgcgcttcttgccctttttgtgagcgcaacaaatgcgttcattattccacaatgctcacttgctcctagtgccattattccacagttcctcccaccagttacttcaatgggcttcgaacacctagctgtgcaagccaacatgcaacaacaagcgcttgcggcgagcgtcttacaacaaccaattgcccaattgcaacaacaatccttgccacatctaacaatacaagccatcacaacgcaacagcaacaacagttcctaccagcactgagccacctagcca

SEQ ID NO: 345843 - DNA, 382 bp, Zea mays
acacaccaagcgaagcacattagcttcaacctaacaacaatggctaccaagatattatccctccttgcgcttcttgcgctttttgcgagcgcaacaaatgcgttcattattccacaatgctcacttgctccaagttccattattacacagttcctcccaccagttacttcaatgggcttcgaacacccagctgtgcaagcctataggctacaacaagcaattgcggcgagcgtcttacaacaaccaatttcccagttgcaacaacaatccttggcacatctaacaatacaaaccatcgcaacgcaacagcaacaacaattcctaccagcactgagccacctagccatggtgaaccctgccgcctacttgcaacagcagttgc

SEQ ID NO: 345844 - DNA, 382 bp, Zea mays
cgcagctaagcccgtgccagcagttcggatcctgcggcgtcggcagcgtcggcagcccgttcctgggccagtgcgtcgagttcctgaggcaccagtgcagcccggcggcgacgccctacggctcgccacagtgccaggcgctgcagcagcagtgctgccaccagatcaggcaggtggagccgctgcaccggtaccaggcgacatacggtgtggtcctgcagtccttcctgcagcagcagccgcagggcgagctcgcggcgctgatggcggcccaggtagcgcagcagctgacggcgatgtgcggcctgcagctgcagcagccaggtccctgcccttgcaacgcagctgccggcggtgtctactactgaggaaactatgtact

SEQ ID NO: 345845 - DNA, 388 bp, Zea mays
aagcgaagcacattagcaacaacctaacatcaatggctaccaagatattatccctccttgcgcttcttgcgctttttgcgagcgcaacaaatgcgttcattattccacaatgctcacttgctccaagttccattattacacagttcctcccaccagttacttcaatgggcttcgaacacccagctgtgcaagcctataggctacaacaagcaattgcggcgagcgtcttacaacaaccaatttcccagttgcaacaacaatccttggcacatctaacaatacaaaccatcgcaacgcaacagcaacaacaattcctaccagcactgagccacctagccatggtgaaccctgccgcctacttgcaacagcagttgcttgcatcaaaccc

SEQ ID NO: 345846 - DNA, 384 bp, Zea mays
cccacgcgtccgataggtttaaacatgctttcgcagcaagcaacatacctttatcgcccttgttgtgtcaacaatcgccagccctatctttggtgcagtcattggtacaaaccatcagggcacaacagctgcagcaactcgtgctacctgtgatcaaccaagtagctctggcaaacctttctccctactcttcgcaacaacaatttcttccattcaaccaactgtctacactgaaccctgctgcttatttgcagcaacaactattaccatttagccagctagctactgcctactctcaacaacaacaacttcttccatttaaccaattggccgcactgaaccccgctgcttatttgcagcagcaaatactactaccatttagcc

SEQ ID NO: 345847 - DNA, 381 bp, Zea mays
ggtaagcctagcaattagctcatctacttcagattggagaactcgacaccatgaaggtgctgatcgttgcccttgctctcctggcgctcgctgcgagcgccgcctccagtacaagcggcggctgtggctgccagacaccaccgtttcatctaccgcctccgttctatatgccgcctccgttctatctgccgccgcagcagcagccgcagccatggcaataccccactcaaccaccgcagctaagcccgtgccagcagttcggatcctgcggcgtcggcagcgtcggcagcccgttcctgggccagtgcgtcgagttcctgaggcaccagtgcagcccggcggcgacgccctacggctcgccacagtgccaggcgctgcagc

SEQ ID NO: 345848 - DNA, 386 bp, Zea mays
cagaaacacaccaagcgaagcacattatcaacaacctaacaacaatggctaccaagatattatccctccttgcgcttcttgcgctttttgcgagcgcaacaaatgcgttcattattccacaatgctcacttgctccaagttccattattacacagttcctcccaccagttacttcaatgggcttcgaacacccagctgtgcaagcctataggctacaacaagcaattgcggcgagcgtcttacaacaaccaatttcccagttgcaacaacaatccttggcacatctaacaatacaaaccatcgcaacgcaacagcaacaacaattcctaccagcactgagccacctagccatggtgaaccctgccgcctacttgcaacagcagttg

SEQ ID NO: 345849 - DNA, 386 bp, Zea mays
cagaaacacaccaagcgaagcgcactagcaacgacctaacaacaatggctaccaagatattagccctccttgcgcttcttgccctttttgtgagcgcaacaaatgcgttcattattccacaatgctcacttgctcctagtgccattattccacagttcctcccaccagttacttcaatgggcttcgaacacctagctgtgcaagccaacatgcaacaacaacaacagttcctaccagcactgagccacctagccatggtgaaccctgccgcctacttgcaagagcagctgcttgcatccaacccacttgctctggcgaacgtagttgcaaaccagcaacaacaacagctacaacagtttctgccaacgctcagtcaactagccatg

SEQ ID NO: 345850 - DNA, 275 bp, Zea mays
  unsure (1)..(275): unsure at all n locations
cggacgcgngggnangganaccaactagcaacanacanagngaagnacacgagcaacancnnagcaccaangggagccaagannnnngcccnccnngcccnccnggcncnnncagcaagcgcngcnaccncgacnnnnannccacaaggcncacaacaanaccncncnccggcgacagccgngggannncaanacccaacnanacaanccnacanggnacaagaggccanccaagcaagcancnnacggncannagcannaacccnccaacaacc

SEQ ID NO: 345851 - DNA, 388 bp, Zea mays
catgccactaccctactcaaccgccccggtctcagcctcatccccagccacacccatgcccgtgccaacagccgcatccaagcccgtgccagctgcagggaacctgcggcgttggcagcaccccgatcctgggccagtgcgtcgagtttctgaggcatcagtgcagcccgacggcgacgccctactgctcgcctcagtgccagtcgttgcggcagcagtgttgccagcagctcaggcaggtggagccgcagcaccggtaccaggcgatcttcggcttggtcctccagtccatcctgcagcagcagccgcaaagcggccaggtcgcggggctgttggcggcgcagatagcgcagcaactgacggcgatgtgcggcctgcagcagccgac

SEQ ID NO: 345852 - DNA, 388 bp, Zea mays
gcaacatagaaagcacaatagtgtaccaacaatggcagccaaaatattttgcctccttatgctccttggtatttctgcaagtgctgctacggcgaccattttcccgcaatgctcacaagctcctatagcttcccttcttcccccgtacctctcaccagcggtgtcttcggtatgtgaaaacccaattcttcaaccctacaggatccaacaggcaatcgcagctggcatcttacctttatcacccttgttcctccaacaatcatcagccctattacagcagttacctttggtgcatttattggcacaaaacatcagggcacaacaactacaacaacttgtgctagcaaaccttgctgcctactctcagcaacagcagtttcttccattc

SEQ ID NO: 345853 - DNA, 385 bp, Zea mays
tagcaacatagaaagcacaatagtgtacttacaatggcagccaaaatattttgcttccttatgctccttggtctttctgcaagtgctgctaccgcaaccattttcccacaatgctcacaagctcctatagctccctttcttaccccatacctttcaccagcggtgtcttcagtttgtgaaaacccaattcttcaaccctacaggatccaacaggcaatcgcagcaggcatcttacctttatcacccttgttcctccaacaaccgttagccctattacagcaggtacctttggtgcatttgttggcacaaaacatcaaggcacaacaactacaacaacttgtgctaggaaaccttgctgcctactctcagcaacagcagtttgttc

SEQ ID NO: 345854 - DNA, 245 bp, Zea mays
cacactagcgatccaacaatggtcttcagattggagaacttgacaccacgaaggggctgatctgtaggcgctgtttcctgagccatgctgcgagacgggtcaacagctcatgtagctgctgtggttgccagacaccaccgaccaatgtaccgtctagcgtgtgtaaaccgacttctttatatctgcaggatccaacagggaactcagacatggcattacaccactaaaacactggagcttacaac

SEQ ID NO: 345855 - DNA, 367 bp, Zea mays
atggagaccaactagcaacatagattgcacaatagtgtaccaacaatggcggccaaaatattttgcctccttatgctccttggtctttctgcaagtgctgctacggcgaccattttcccgaaatgctcgcaagctcctatagcttcccttcttcccccgtacctctcaccagcggtgtcttcggtatgtgaaaacccaattcttcaaccctacaggatccaacaggcaatcacagctggcatcttacctttatcacccttgttcctccaacaatcatcagccctattacatcagttacctttggtgcatttattggcacaaaacatcagggcacaacaactacaacaacttgtgctagcaaaccttg

SEQ ID NO: 345856 - DNA, 387 bp, Zea mays
agaccaactagcaacatagaaagcataatagtgtaccaacaatggcagccaaaatattttgcttccttatgctccttggtctttctgcaagtgttgctaccgcaaccattttcccacaatgctcacaagctcctatagcttcccttcttcccccatacctctcaccagcggtgtcttcaatgtgtgaaaacccaattgttcaaccctacaggatccaacaggcaatcgcaacaggcatcttaccattatcacccttgttcctccaacaaccgtcagccctattacagcagttacctttggtccatttggtggcacaaaacatcagggcacaacaactacaacaacttgtgctagcaaaccttgctgcatactctcagcaacatcagt

SEQ ID NO: 345857 - DNA, 375 bp, Zea mays
atttagaccaactagcaacatagaatgcacaatagtgtaccaacaatggcaggggaaatattttgcctccttatgctccttggtatttctgcaagtgctgctacggcgaccattttcccgcaatgctcacaagctcctatagcttcccttcttcccccgtacctctcaccagcggtgtcttcggtatgtgaaaacccaattcttcaaccctacaggatccaacaggcaatcgcagctggcatcttacctttatcacccttgttcctccaacaatcatcagccctattacagcagttacctttggtgcatttattggcacaaaacatcagggcacaacaactacaacaacttgtgctagcaaaccttgctgcctac

SEQ ID NO: 345858 - DNA, 277 bp, Zea mays
gtgctgtaaaccctaatcaggagtgattatccgtgagccatgagtagttgcagctggttcaaggatgccatctccaatgtgggtgccaggagaaatggagttactggactgggaacttaatgctgagaatatatccacaaggcagcttaggcttgtagtgcccatatctgtcagatgaggtcatgctgggatgcagatgttgggggcggagagactgctcatgagtgggttaagaaaagacagacagagctgtagaggctgcagagaccatgctttg

SEQ ID NO: 345859 - DNA, 379 bp, Zea mays
  unsure (1)..(379): unsure at all n locations
cggggnggaccaacgcgtccggattggagaactcgacaccatgaaggtgctgatcgttgcccttgctctcctggcgctcgctgcgagcgccgcctccagtacaagcggcggctgtggctgccagacaccaccgtttcatctaccgcctccgttctatatgccgcctccgttctatctgccgccgcagcaacagccgcagccatggcaataccccactcaaccaccgcagctaagcccgtgccagcagttcggatcctgcggcgtcggcagcgtcggcagcccgttcctgggccagtgcgtcgagttcctgaggcaccagtgcaagccggcggcgacgccctacggctcgccacagtgccaggcgctgcaacagcagtgc

SEQ ID NO: 345860 - DNA, 288 bp, Zea mays
  unsure (1)..(288): unsure at all n locations
aaaaaaaaaaaaaaaaaaaaaattataataaaaaaaaaaaaaaaagnntngggggggtttttttctaattaaaggtacccaatatttcgtactatttaggggccccccgttttataggtcccaggtttccctcccctgccttccgaccttttatctttttattagttcccccgaattccatttaactgccccccttttaacaccccttgacctggaaaaccctttgcctccccaaattaacccccttttccccccttcccctttttccccctttcattttttgccaaa

SEQ ID NO: 345861 - DNA, 373 bp, Zea mays
gcggcggctgcggctgccagccaccgccgccggttcatctaccgccgccggttcatctgccgccgccaccatgccactaccctactcaaccgccccggcctcagcctcatccccagccacacccatgcccgtgccaacagccgcatccaagcccgtgccagctgcagggaacctgcggcgttggcagcaccccgatcctgggccagtgcgtcgagttcctgaggcatcagtgcagcccgacggcgacgccctactgctcgcctcagtgccagtcgttgcggcagcagtgttgccagcagctcaggcaggtggagccgcagcaccggtaccaggcgatcttcggcttggtcctccagtccatcctgcagcagca

SEQ ID NO: 345862 - DNA, 403 bp, Zea mays
  unsure (1)..(403): unsure at all n locations
cggaanggaagggccgacccgacccacgcgtacgtagcacgtacatagcacagatagtgtaccaacaatggctgccaaaacattggggctccttatgctccttggtctttctgcaagtgctgctacggcgaccattttcccgcaatgctcgcaagctcctatagcttcccttcttcccccgtacctctcaccagcggtgtcttcggtatgtgaaaacccaattcttcaaccctacaggatccaacaggcaatcgcagctggcatcttacctttatcacccttgttcctccaacaatcatcagccctattacaacagttacctttggtgcatttattggcacaaaacatcagggcacaacaactacaacaacttgtgctagcaaaccttgctgcctactctcag

SEQ ID NO: 345863 - DNA, 391 bp, Zea mays
gggccgacccgacccacgcgtacgtcaacaagcaacatagcaaagtggttttcagtagcaacaatagagcaacaatggcgaccaagatattttccctccttatgctccttgctctttctgcatgtgttgctaacgcgacaattttccctcaatgctcacaagctcctatagcttcccttcttcccccataccttccatcaatgatagcttcagtatgtgaaaacccagctcttcaaccctataggctccaacaagcaatcgcagcaagcaacatacctttatcacccttgtttcaacaatcgccagccctatctttggtgcagtcattggtccaaaccatcaaggcacagcagctgcagcaactcgtgctacctgtgatcaaccaagtagc

SEQ ID NO: 345864 - DNA, 370 bp, Zea mays
attgagaccaacttgcaacattgatttcacaatagtgtaccaacaatggcagggaaaatattttgcttccttatgctccttggtctttctgcaagtgctgctaccgcaaccattttcccacaatgctcacaagctcctatagcttcctttcttcccccatacctctcaccagcggtgtcttcagtatgtgaaaacccaattcttcaaccctacaggatccaacaggcaatcgcagcaggcatcttacctttatcacccttgttcctccaacaaccgtcagccctattacagcagttacctttggtgcatttgttggcacaaaacatcaaggcacaacatctacaacaacttgtgctaggaaaccttgctg

SEQ ID NO: 345865 - DNA, 230 bp, Zea mays
gaaccattagctatactatagcgcaaaaaccgagcacctgggggttgtcgtgctgctttgcttgtgagcgccactcacatcacggggtgggtgcccacgcgctcattaccgcgcgacattgcacctcggtacctgcactcggcattccacgcgtcactccgcgcggtcactgcacgcggccaggcccccggtattgcgcgcacagcgatcaacctgccactgcagaacct

SEQ ID NO: 345866 - DNA, 373 bp, Zea mays
gcaacatagaaagcacaatattgtaccaataatggcagccaaaatattttgcctcattatgctccttggtctttctgcaagtgctgctacggcgagcattttcccgcaatgctcacaagctcctatagcttcccttcttcccccatacctctcaccagcgatgtcttcagtatgtgaaaatccaattcttctaccctacaggatccaacaggcaatcgcagcaggcatcttacctttatcacccttgttcctccaacaatcatcagccctattacagcagttacctttggtgcatttattggcacaaaacatcagggcacaacaactacaacaactcgtgctagcaaaccttgctgcctactctcagcaacag

SEQ ID NO: 345867 - DNA, 284 bp, Zea mays
gtcaaagccagcatgcgggaagggtttcctgccactaatcacatttgctatgggcgtggttctcgcatcctgccgtttactatcaccttccaggacagcgtaagtgtagatatcttgcaagcgctcattacttgcttgaatggattgttaatggacctgtcttgagatgattatgcgcatcgtcctggtatgctgcttgaatgaatttatgtcgcactcattgagaccgactgtctgaacaacgcaatgtatctcatggttgaaggagccatccgcagtataac

SEQ ID NO: 345868 - DNA, 341 bp, Zea mays
  unsure (1)..(341): unsure at all n locations
gccctttgtccaacttgctttgacaaactcagcagcctcctaccaacaacacatcattggtggtgccctcttttagattgcttattagttgtaattcaataataaagttttttggatgatgtatgtggccaaccagaaataagaagttacatttccagattctaaaaaaaaaaaaaaaaaaaaaaaaaaaaaaaaaaaaataaaaaaaaaaaaaaaaaaaagaaaaaaaaaaaaaataaaaaaacaaatgcttgtcttttcatctacaattagggggcaaacattgattgtactcttagtaacatccacttttttttctaattttaaaanntgggggcggg

SEQ ID NO: 345869 - DNA, 375 bp, Zea mays
caacaatagagcaacaatggcgaccaagatattttccctccttatgctccttgctctttctgcatgtgttgctaacgcgacaattttccctcaatgctcacaagctcctatagcttcccttcttcccccataccttccatcaatgatagcttcagtatgtgaaaacccagctcttcaaccctataggctccaacaagcaatcgcagcaagcaacatacctttatcacccttgtttcaacaatcgccagccctatctttggtgcagtcattggtacaaaccatcagggcacagcagctgcagcaactcgtgctacctgtgatcaaccaagtagctctggcaaacctttctccctactctcagcaacaacaatttct

SEQ ID NO: 345870 - DNA, 375 bp, Zea mays
agcattcagaaacacaccaagcgaagcgcactagcaacaacctaacaacaatggctaccaagatattagccctccttgcgcttcttgcccttttagtgagcgcaacaaatgcgttcattattccacagtgctcacttgctcctagtgccattattccacagttcctcccaccagttacttcaatgggcttcgaacatccagccgtgcaagcctacaggctacaactagcgcttgcggcgagcgtcttacaacaaccaattgcccaattgcaacaacaatccttggcacatctaaacctacaaaccatcgcaacgcaacaacaacgtctgcaacagtttatgccagcgctcagtcaactagccatggtgaaccctg

SEQ ID NO: 345871 - DNA, 375 bp, Zea mays
attcagaaacacaccaagcgaagcgcactatcaacgacctaacaacaatggctaccaagatattagccctccttgcgcttcttgccctttttgtgagcgcaacaaatgcgttcattattccacaatgctcacttgctcctagtgccattattccacagttcctcccaccagttacttcaatgggcttcgaacacctagctgtgcaagccaacatgcaacaacaagcgcttgcggcgagcgtcttacaacaaccaattgcccaattgcaacaacaatccttgccacatctaacaatacaagccatcacaacgcaacagcaacaacagttcctaccagcactgagccacctagccatggtgaaccctgccgcctact

SEQ ID NO: 345872 - DNA, 284 bp, Zea mays
agcaaagcggcagtgcgtagagaggatcgtcgaacagaacagcatgaagatggtcatcgttctcgtcgtgtgcctggctctgtcagctgccagcgcctctgcaatgcagatgccctgcccctgcgcggggctgcagggcttgtacggcgctggcgccggcctgacgacgatgatgggcgccggcgggctgtacccctacgcggagtacctgaggcagccgcagtgcagcccgctggcggcggcgccctactacgccgggtgtgggcagacgagcgccatgtacc

SEQ ID NO: 345873 - DNA, 371 bp, Zea mays
cagaaacacaccaagcgaagcacattagcaacaacctaacaacaatggctaccaagatattatccctccttgcgcttcttgcgctttttgcgagcgcaacaaatgcgttcattattccacaatgctcacttgctccaagttccattattacacagttcctcccaccagttacttcaatgggcttcgaacacccagctgtgcaagcctataggctacaacaagcaattgcggcgagcgtcttacaacaaccaatttcccagttgcaacaacaatccttggcacatctaacaatacaaaccatcgtaacgcaacagcaacaacaatttctaccagcactgagccacctagccatggtgaaccctgccgcctac

SEQ ID NO: 345874 - DNA, 371 bp, Zea mays
attttcagcattcagaaacacaccatgcgaagcgcactagcaacaacctaacaacaatggctaccaagatattagccctccttgcgcttcttgcccttttagtgagcgcaacaaatgcgttcattattccacagtgctcacttgctcctagtgccattattccacagttcctcccaccagttacttcaatgggcttcgaacatccagccgtgcaagcctacaggctacaactagcgcttgcggcgagcgtcttacaacaaccaattgcccaattgcaacaacaatccttggcacatctaaacctacaaaccatcgcaacgcaacagcaacaacagtttctgccatcactgagccacctagccgtggtgaac

SEQ ID NO: 345875 - DNA, 373 bp, Zea mays
caccaagcgaagcgcactagcaacaacctaacaacaatggctaccaagatattatccctccttgcgcttcttgcgctttttgcgagcgcaacaaatgcgtccattattccacaatgctcacttgctcctagttccattattccacagttcctcccaccagttacttcaatggccttcgaacacccagctgtgcaagcctataggctacaacaagcgattgcggcgagcgtcttacaacaaccaattgcccaattgcaacaacaatccttggcacatctaacaatacaaaccatcgcaacgcaacagcaacaacagttcctaccagcactgagccacctagccatggtgaaccctgtcgcctacttgcaacagc

SEQ ID NO: 345876 - DNA, 372 bp, Zea mays
caactagcaacatagaaagcacaattgtgtaccaacaatggcagccaaaatattttgcctccttatgctccttggtctttctgcaagtgctgctacggcgaccattttcccacaatgctcacaagctcctatagcttcccttcttcccccgtacctctcaccagcggtgtcttcggtatgtgaaaacccaattcttcaaccctataggatccaacaggcaatcgcagctggcatcttacctttatcacccttgttcctccaacaatcatcagccctattacagcagttacctttggtgcatttattggcacaaaacatcagggcacaacaactacaacaacttgtgctagcaaaccttgctgcctactctca

SEQ ID NO: 345877 - DNA, 373 bp, Zea mays
gagaccaactagcaacatagaaagcacattagtgtaccaacaatggcagccaaaatattttgcctccttatgctccttggtctttctgcaagtgctgctacggcgaccattttcccacaatgctcacaagctcctatagcttcccttcttcccccgtacctctcaccagcggtgtcttcggtatgtgaaaacccaattcttcaaccctataggatccaacaggcaatcgcagctggcatcttacctttatcacccttgttcctccaacaatcatcagccctattacagcagttacctttggtgcatttattggcacaaaacatcagggcacaacaactacaacaacttgtgctagcaaaccttgctgcctact

SEQ ID NO: 345878 - DNA, 374 bp, Zea mays
ccaactagcaacatagaaagcacaatattgtaccaacaatggcagccaaaatattttgcttccttatgctccttggtctttctgcaagtgctgctaccgcaaccattttcccacaatgctcacaagctcctatagcttcctttcttcccccatacctctcaccagcggtgtcttcagtatgtgaaaacccaattcttcaaccctacaggatccaacaggcaatcgcagcaggcatcttacctttatcacccttgttcctccaacaaccgtcagccctattacagcagttacctttggtgcatttgttggcacaaaacatcaaggcacaacaactacaacaacttgtgctaggaaaccttgctgcctactctcag

SEQ ID NO: 345879 - DNA, 374 bp, Zea mays
  unsure (1)..(374): unsure at all n locations
cgtcagcctagcaattagctcatcgtctccagattggagaactcgacaccatgaaggtgctgatcgttgcccttgctctcctggcgctcgctgcgagcgccgcctccagtacaagcggcggctgtggctgccagacaccaccgtttcatctaccgcctccgttctatatgccgcctccgttctatctgccgccgcagcagcagccgcagccatggcaataccccactcaaccaccgcagctaagcccgtgccagcagttcggatcctgcggcgtcggcagcgtcggcagcccgttcctgggccagtgcgtcgagttcctgaggcaccagtgcagnccggcggcgacgccctacggctcgccacagtgccaggcg

SEQ ID NO: 345880 - DNA, 371 bp, Zea mays
ccgatcgacaccatgagggtgttgttcgttgccctcgctctcctggctctcgctgcgagcgccacctccacgcatacaagcggcggctgcggctgccagccaccgccgccggttcatctaccgccgccggtgcatctgccacctccggttcacctgccacctccggtgcatctcccaccgccggtccacctgccgccgccggtccacctgccaccgccggtccatgtgccgccgccggttcatctgccgccgccaccatgccactaccctactcaaccgccccggcctcagcctcatccccagccacacccatgcccgtgccaacagccgcatccaagcccgtgccagctgcagggaacctgcggcgttgg

SEQ ID NO: 345881 - DNA, 367 bp, Zea mays
cacaatagtgtaccaacaatggctttcaaaatattttgcctccttatgctccgtggtctttctgcaagtgctgctacggcgaccattttcccgcaatgctcgcaagctcctatagcttcccttcttcccccgtacctctcaccagcggtgtcttcggtatgtgaaaacccaattcttcaaccctacaggatccaacaggcaatcgcagctggcatcttacctttatcacccttgttcctccaacaatcatcagccctattacaacagttacctttggtgcatttattggcacaaaacatcagggcacaacaactacaacaacttgtgctagcaaaccttgctgcctactctcagcaacagcagtttc

SEQ ID NO: 345882 - DNA, 372 bp, Zea mays
gcaacatagaaagtggaatccattttcaacaatagagcaacaatggcgaccaagatattttccctccttatgctccttgctctttctgcatgtgttgctaacgcgacaattttccctcaatgctcacaagctcctatagcttcccttcttcccccataccttccatcaatgatagcttcagtatgtgaaaacccagctcttcaaccctataggctccaacaagcaatcgcagcaagcaacatacctttatcacccttgtttcaacaatcgccagccctatctttggtgcagtcattggtacaaaccatcagggcacagcagctgcagcaactcgtgctacctgtgatcaaccaagtagctctggcaaacctt

SEQ ID NO: 345883 - DNA, 373 bp, Zea mays
cagaaacacaccaagcgaagcgcactagcaacgacctaacaacaatggctaccaagatattagccctccttgcgcttcttgccctttttgtgagcgcaacaaatgcgttcattattccacaatgctcacttgctcctagtgccattattccacagttcctcccaccagttacttcaatgggcttcgaacacctagctgtgcaagccaacatgcaacaacaagcgcttgcggcgagcgtcttacaacaaccaattgcccaattgcaacaacaatccttgccacatctaacaatacaagccatcacaacgcaacagcaacaacagttcctaccagcactgagccacctagccatggtgaaccctgccgcctactt

SEQ ID NO: 345884 - DNA, 368 bp, Zea mays
caacaagcaacatagaaagtggaattcagtagcaacaatagagcaacaatggagaccaagatattttccctccttatgctccttgctctttctacatgtgttgctaacgcgacaattttccctcaatgctcacaagctcctatagcttccctttttcccccataccttccatcaattatagcttcagtatgtgaaaacccagctcttcaaccatataggcttcaacaagcaatcgcagcaagcaacatacctttatcgcccttgttgtgtcaacaatcgccagccctatctttggtgcagtcattggtacaaaccatcagggcacaacagctgcagcaactcgtgctacctgtgatcaaccaagtagc

SEQ ID NO: 345885 - DNA, 371 bp, Zea mays
gcattcagaaacacaccaagcgaagcgctctagcaacaacctaacaacaatggctaccaagatattagccctccttgcgcttcttgcccttttagtgagcgcaacaaatgcgttcattattccacagtgctcacttgctcctagtgccattattccacagttcctcccaccagttacttcaatgggcttcgaacatccagccgtgcaagcctacaggctacaactagcgcttgcggcgagcgtcttacaacaaccaattgcccaattgcaacaacaatccttggcacatctaaacctacaaaccatcgcaacgcaacagcaacaacagtttctgccatcactgagccacctagccgtggtgaaccctgtcg

SEQ ID NO: 345886 - DNA, 370 bp, Zea mays
gtaccatcaatcatcattcatcttagtagtataggcaccaaatcaaatctgcaacatcaattatctaactccaaaaaccatgaagctggtgcttgtggttcttgctttcattgctttagtatcaagtgtttcttgtacacagacaggcggctgcagctgtggtcaacaacaaagccatgagcagcatcatcatccacaacaacatcatccacaaaaacaacaacatcaaccaccaccacaacatcaccagcagcagcaacaccaacaacaacacgttcacatgcaaccacaaaaacatcagcaacaacaagaagttcatgttcaacaacaacaacaacaaccgcagcaccaacaacaacaacaacaacag

SEQ ID NO: 345887 - DNA, 372 bp, Zea mays
caacaagcaacatagaaagtggaatccagtagcaacaatagagcaacaatggagaccaagatattttccctccttatgctccttgctctttctacatgtgttgctaacgcgacaattttccctcaatgctcacaagctcctatagcttccctttttcccccataccttccatcaattatagcttcagtatgtgaaaacccagctcttcaaccatataggcttcaacaagcaatcgcagcaagcaacatacctttatcgcccttgttgtgtcaacaatcgccagccctatctttggtgcagtcattggtacaaaccatcagggcacaacagctgcagcaactcgtgctacctgtgatcaaccaagtagctctg

SEQ ID NO: 345888 - DNA, 378 bp, Zea mays
  unsure (1)..(378): unsure at all n locations
cgatntttcccgcaatgcttcgcaagccttctttatgcttcccttcttcccccgtacctctcaccagcggtgtcttcggtatgtgaaaacccaattcttcaaccctacaggatccaacaggcaatcgcagctggcatcttacctttatcacccttgttcctccaacaatcatcagccctattacaacagttacctttggtgcatttattggcacaaaacatcagggcacaacaactacaacaacttgtgctagcaaaccttgctgcctactctcagcaacagcagtttcttccattcaaccaactaggttcattgaactctgcttcttatttgcaacaacaacaactaccattcagccagctacctgctgcctacccc

SEQ ID NO: 345889 - DNA, 67 bp, Zea mays
aaaaaaaaaaaaaaaaaaaaattttttaaaaaaaaaaaaaaaaaaaaaaaaaaaaaaaaaaaaaaag

SEQ ID NO: 345890 - DNA, 374 bp, Zea mays
cagaaacacaccaagcgaagcgcactagcaacaacctaacaacaatggctaccaagatattagccctccttgcgcttcttgcccttttagtgagcgcaacaaatgcgttcattattccacagtgctcacttgctcctagtgccattattccacagttcctcccaccagttacttcaatgggcttcgaacatccagccgtgcaagcctacaggctacaactagcgcttgcggcgagcgtcttacaacaaccaattgcccaattgcaacaacaatccttggcacatctaaacctacaaaccatcgcaacgcaacagcaacaacagtttctgccatcactgagccacctagccgtggtgaaccctgtcgcctacttg

SEQ ID NO: 345891 - DNA, 369 bp, Zea mays
attcagaaacacaccaagcgaagcgcactagcaacaacctaacaacaatggctaccaagatattatccctccttgcgcttcttgcgctttttgcgagcgcaacaaatgcgtccattattccacaatgctcacttgctcctagttccattattccacagttcctcccaccagttacttcaatggccttcgaacacccagctgtgcaagcctataggctacaacaagcgattgcggcgagcgtcttacaacaaccaattgcccaattgcaacaacaatccttggcacatctaacaatacaaaccatcgcaacgcaacagcaacaacagttcctaccagcactgagccacctagccatggtgaaccctgtcg

SEQ ID NO: 345892 - DNA, 375 bp, Zea mays
caactagcaacataaaaggcccattttttaccaacaatggcagcccaaaatatttggcctccttatgctccttggtctttctgcaagtgctgctacggcgaccattttcccgcaatgctcgcaagctcctatagcttcccttcttcccccgtacctctcaccagcggtgtcttcggtatgtgaaaacccaattcttcaaccctacaggatccaacaggcaatcgcagctggcatcttacctttatcacccttgttcctccaacaatcatcagccctattacaacagttacctttggtgcatttattggcacaaaacatcagggcacaacaactacaacaacttgtgctagcaaaccttgctgcctactctcagca

SEQ ID NO: 345893 - DNA, 372 bp, Zea mays
cggacgcgtgggctggacgtcagcctagcaattagctcatcgactccagattggagaactcgacaccatgaaggtgctgatcgttgcccttgctctcctggcgctcgctgcgagcgccgcctccagtacaagcggcggctgtggctgccagacaccaccgtttcatctaccgcctccgttctatatgccgcctccgttctatctgccgccgcagcagcagccgcagccatggcaataccccactcaaccaccgcagctaagcccgtgccagcagttcggatcctgcggcgtcggcagcgtcggcagcccgttcctgggccagtgcgtcgagttcctgaggcaccagtgcagcccggcggcgacgccctacgg

SEQ ID NO: 345894 - DNA, 372 bp, Zea mays
gttctagatcgcgagcggccgcccttttttttttttttttagaaatgtactttcttatttctgggaagccacaaacatcagacaaaaaactttattattgaactataactcataagaaatctaaaagagggcacaacaactacaacaacttgtgctagcaaaccttgctgcctactctcagcaacagcagtttcttccattcaaccaactagctgcattgaactctgcttcttatttgcaacaacaacaactaccattcagccagctatctgctgcctacccccagcaatttcttccattcaaccaactgacagcattgaactctcctgcttatttacagcagcaacaactactaccattcagtcagctagc

SEQ ID NO: 345895 - DNA, 374 bp, Zea mays
gcaacatagaaagcacaatagtgttccaacaatggcagccaaaatattttgcctccttatgctccttggtctttctgcaagtgctgctacggcgaccattttcccacaatgctcacaagctcctatagcttcccttcttcccccgtacctctcaccagcggtgtcttcggtatgtgaaaacccaattcttcaaccctataggatccaacaggcaatcgcagctggcatcttacctttatcacccttgttcctccaacaatcatcagccctattacagcagttacctttggtgcatttattggcacaaaacatcagggcacaacaactacaacaacttgtgctagcaaaccttgctgcctactctcagcaacaac

SEQ ID NO: 345896 - DNA, 374 bp, Zea mays
caacaagcaacatagaaagtggaatccagtagcaacaatagagcaacaatggagaccaagatattttccctccttatgctccttgctctttctacatgtgttgctaacgcgacaattttccctcaatgctcacaagctcctatagcttccctttttcccccataccttccatcaattatagcttcagtatgtgaaaacccagctcttcaaccatataggcttcaacaagcaatcgcagcaagcaacatacctttatcgcccttgttgtgtcaacaatcgccagccctatctttggtgcagtcattggtacaaaccatcagggcacaacagctgcagcaactcgtgctacctgtgatcaaccaagtagctctggc

SEQ ID NO: 345897 - DNA, 375 bp, Zea mays
gtggaatccagtagcaacaatagagtaacaatggcgaccaagatattttccctccttatgctccttgctctttctgcatgtgttgctaacgcgacaattttccctcaatgctcacaagctcctatagcttcccttcttcccccataccttccatcaatgatagcttcagtatgtgaaaacccagctcttcaaccctataggctccaacaagcaatcgcagcaagcaacatacctttatcacccttgtttcaacaatcgccagccctatctttggtgcagtcattggtacaaaccatcagggcacagcagctgcagcaactcgtgctacctgtgatcaaccaagtagctctggcaaacctttctccctactctcag

SEQ ID NO: 345898 - DNA, 366 bp, Zea mays
ggaccaacaggcaacataaaaggtgtattccagtagcaacaatagagcaacaatggcgaccaagatattttccctccttatgctccttgctctttctgcatgtgttgctaacgcgacaattttccctcaatgctcacaagctcctatagcttcccttcttcccccataccttccatcaatgatagcttcagtatgtgaaaacccagctcttcaaccctataggctccaacaagcaatcgcagcaagcaacatacctttatcacccttgtttcaacaatcgccagccctatctttggtgcagtcattggtacaaaccatcagggcacagcaagccgtgctttctttttgacacagcaacagttgctg

SEQ ID NO: 345899 - DNA, 372 bp, Zea mays
gagcattcagaaacacaccaagcgatgcacattagcaacaacctaacaacaatggctaccaagatattatccctccttgcgcttcttgcgctttttgcgagcgcaacaaatgcgttcattattccacaatgctcacttgctccaagttccattattacacagttcctcccaccagttacttcaatgggcttcgaacacccagctgtgcaagcctataggctacaacaagcaattgcggcgagcgtcttacaacaaccaatttcccagttgcaacaacaatccttggcacatctaacaatacaaaccatcgcaacgcaacagcaacaacaatttctaccagcactgagccacctagccatggtgaaccctgcc

SEQ ID NO: 345900 - DNA, 375 bp, Zea mays
cagaaacacaccaagcgaagcgcactagcaacgacctaacaacaatggctaccaagatattagccctccttgcgcttcttgccctttttgtgagcgcaacaaatgcgttcattattccacaatgctcacttgctcctagtgccattattccacagttcctcccaccagttacttcaatgggcttcgaacacctagctgtgcaagccaacatgcaacaacaagcgcttgcggcgagcgtcttacaacaaccaattgcccaattgcaacaacaatccttgccacatctaacaatacaagccatcacaacgcaacagcaacaacagttcctaccagcactgagccacctagccatggtgaaccctgccgcctacttgc

SEQ ID NO: 345901 - DNA, 373 bp, Zea mays
gcaacatagaaagcacaatagtgttccaacaatggcagccaaaatattttgcctccttatgctccttggtatttctgcaagtgctgctacggcgaccattttcccgcaatgctcacaagctcctatagcttcccttcttcccccgtacctctcaccagcggtgtcttcggtatgtgaaaacccaattcttcaaccctacaggatccaacaggcaatcgcagctggcatcttacctttatcacccttgttcctccaacaatcatcagccctattacagcagttacctttggtgcatttattggcacaaaacatcagggcacaacaactacaacaacttgtgctagcaaaccttgctgcctactctcagcaacag

SEQ ID NO: 345902 - DNA, 371 bp, Zea mays
accacaccaagcgaagcgcactagcaacaacctaacaacaatggctaccaagatattagccctccttgcgcttcttgcccttttagtgagcgcaacaaatgcgttcattattccacagtgctcacttgctcctagtgccattattccacagttcctcccaccagttacttcaatgggcttcgaacatccagccgtgcaagcctacaggctacaactagcgcttgcggcgagcgtcttacaacaaccaattgcccaattgcaacaacaatccttggcacatctaaacctacaaaccatcgcaacgcaacagcaacaacagtttctgccatcactgagccacctagccgtggtgaaccctgtcgcctacttgc

SEQ ID NO: 345903 - DNA, 376 bp, Zea mays
ttttcagcattcagaaacacaccaagcgtagcgcactagcaacaacctaacaacaatggctaccaagatattagccctccttgcgcttcttgcccttttagtgagcgcaacaaatgcgttcattattccacagtgctcacttgctcctagtgccattattccacagttcctcccaccagttacttcaatgggcttcgaacatccagccgtgcaagcctacaggctacaactagcgcttgcggcgagcgtcttacaacaaccaattgcccaattgcaacaacaatccttggcacatctaaacctacaaaccatcgcaacgcaacagcaacaacagtttctgccatcactgagccacctagccgtggtgaaccctgtc

SEQ ID NO: 345904 - DNA, 378 bp, Zea mays
cagaaacacaccaagcgaagcgcactagcatcgacctaacaacaatggctaccaagatattagccctccttgcgcttcttgccctttttgtgagcgcaacaaatgcgttcattattccacaatgctcacttgctcctagtgccattattccacagttcctcccaccagttacttcaatgggcttcgaacacctagctgtgcaagccaacatgcaacaacaagcgcttgcggcgagcgtcttacaacaaccaattgcccaattgcaacaacaatccttgccacatctaacaatacaagccatcacaacgcaacagcaacaacagttcctaccagcactgagccacctagccatggtgaaccctgccgcctacttgcaag

SEQ ID NO: 345905 - DNA, 378 bp, Zea mays
tagcaacatagaaagcacaatagtgtaccaacaatggcagccaaaatattttgcttccttatgctccttggtctttctgcaagtgctgctaccgcaaccattttcccacaatgctcacaagctcctatagcttcctttcttcccccatacctctcaccagcggtgtcttcagtatgtgaaaacccaattcttcaaccctacaggatccaacaggcaatcgcagcaggcatcttacctttatcacccttgttcctccaacaaccgtcagccctattacagcagttacctttggtgcatttgttggcacaaaacatcaaggcacaacaactacaacaacttgtgctaggaaaccttgctgcctactctcagcaacagcag

SEQ ID NO: 345906 - DNA, 371 bp, Zea mays
caactagcaacatagaaagcacaatagtgtaccaacaatggcagccaaaatattttgcctccttatgctccttggtatttctgcaagtgctgctacggcgaccattttcccgcaatgctcacaagctcctatagcttcccttcttcccccgtacctctcaccagcggtgtcttcggtatgtgaaaacccaattcttcaaccctacaggatccaacaggcaatcgcagctggcatcttacctttatcacccttgttcctccaacaatcatcagccctattacagcagttacctttggtgcatttattggcacaaaacatcagggcacaacaactacaacaacttgtgctagcaaaccttgctgcctactctc

SEQ ID NO: 345907 - DNA, 373 bp, Zea mays
gcaattagctcatcgactccagattggagaactcgacaccatgaaggtgctgatcgttgcccttgctctcctggcgctcgctgcgagcgccgcctccagtacaagcggcggctgtggctgccagacaccaccgtttcatctaccgcctccgttctatatgccgcctccgttctatctgccgccgcagcagcagccgcagccatggcaataccccactcaaccaccgcagctaagcccgtgccagcagttcggatcctgcggcgtcggcagcgtcggcagcccgttcctgggccagtgcgtcgagttcctgaggcaccagtgcagcccggcggcgacgccctacggctcgccacagtgccaggcgctgcagcag

SEQ ID NO: 345908 - DNA, 373 bp, Zea mays
attgagaccaacaagcaacatataatgtggaatccagtagcaacaatagagcaacaatggcgaccaagatattttccctccttatgctccttgctctttctgcatgtgttgctaacgcgacaattttccctcaatgctcacaagctcctatagcttcccttcttcccccataccttccatcaatgatagcttcagtatgtgaaaacccagctcttcaaccctataggctccaacaagcaatcgcagcaagcaacatacctttatcacccttgtttcaacaatcgccagccctatctttggtgcagtcattggtacaaaccatcagggcacagcagctgcagcaactcgtgctacctgtgatcaaccaagtagg

SEQ ID NO: 345909 - DNA, 372 bp, Zea mays
  unsure (1)..(372): unsure at all n locations
ncaactagcaccatagaaggcacaatagtgtaccaacaatggcagctaaaatattttgcctccttatgctccttggtctttctgcaagtgctgctacggcgaccattttcccacaatgctcacaagctcctatagcttcccttcttcccccgtacctctcaccaacggtgtcttcggtatgtgaaaacccaattcttcaaccctacaggatccaacaggcaatcgcagctggcatcttacctttatcacccttgttcctccaacaatcatcagccctattacagcagttacctttggtgcatttattggcacaaaacatcagggcacaacaactacaacaacttgtgctagcaaaccttgctgcctactctc

SEQ ID NO: 345910 - DNA, 376 bp, Zea mays
  unsure (1)..(376): unsure at all n locations
cggacgcgtgggattttgagcanttttaaacacaccaagcgaagcgcactagcagcgacctaacaacaatggctaccaagatattagccctccttgcgcttcttgccctttttgtgagcgcaacaaatgcgttcattattccacaatgctcacttgctcctagtgccattattccacagttcctcccaccagttacttcaatgggcttcgaacacctagctgtgcaagccaacatgcaacaacaagcgcttgcggcgagcgtcttacaacaaccaattgcccaattgcaacaacaatccttgccacatctaacaatacaagccatcacaacgcaacagcaacaacagttcctaccagcactgagccacctagccat

SEQ ID NO: 345911 - DNA, 376 bp, Zea mays
caagcaacatagaaagtggaatccagtagcaacaatagagcaacaatggcgaccaagatattttccctccttatgctccttgctctttctgcatgtgttgctaacgcgacaattttccctcaatgctcacaagctcctatagcttcccttcttcccccataccttccatcaatgatagcttcagtatgtgaaaacccagctcttcaaccctataggctccaacaagcaatcgcagcaagcaacatacctttatcacccttgtttcaacaatcgccagccctatctttggtgcagtcattggtacaaaccatcagggcacagcagctgcagcaactcgtgctacctgtgatcaaccaagtagctctggcaaaccttt

SEQ ID NO: 345912 - DNA, 375 bp, Zea mays
aggcaccatagaaggtggaatccatttgcaacaatagagcaacaatggagaccaagatattttccctccttatgctccttgctctttctacatgtgttgctaacgcgacaattttccctcaatgctcacaagctcctatagcttccctttttcccccataccttccatcaattatagcttcagtatgtgaaaacccagctcttcaaccatataggcttcaacaagcaatcgcagcaagcaacatacctttatcgcccttgttgtgtcaacaatcgccagccctatctttggtgcagtcattggtacaaaccatcagggcacaacagctgcagcaactcgtgctacctgtgatcaaccaagtagctcttgcaaacc

SEQ ID NO: 345913 - DNA, 371 bp, Zea mays
cactcatgcatcacaaaacatccttttatcagtaccatcaatcatcattcatcttagtagtataggcaccaaatcaaatctgcaacatcaattatctaactccaaaaaccatgaagctggtgcttgtggttcttgctttcattgctttagtatcaagtgtttcttgtacacagacaggcggctgcagctgtggtcaacaacaaagccatgagcagcaacatcatccacaacaacatcatccacaaaaacaacaacatcaaccaccaccacaacatcaccagcagcagcaacaccaacaacaacaagttcacatgcaaccacaaaaacatcagcaacaacaagaagttcatgttcaacaacaacaacaacaa

SEQ ID NO: 345914 - DNA, 363 bp, Zea mays
gtggaatccagtagcaacaatagagcaacaatggagaccaagatattttccctccttatgctccttgctctttctacatgtgttgctaacgcgacaattttccctcaatgctcacaagctcctatagcttccctttttcccccataccttccatcaattatagcttcagtatgtgaaaacccagctcttcaaccatataggcttcaacaagcaatcgcagcaagcaacatacctttatcgcccttgttgtgtcaacaatcgccagccctatctttggtgcagtcattggtacaaaccatcatggcacaacagctgcagcaactcgtgctacctgtgatcaaccaagtagctctggcaaacctt

SEQ ID NO: 345915 - DNA, 364 bp, Zea mays
attttgagcattcagaaacacacctttcgaagcgcactagcaacaacctaacaacaatggctaccaagatattatccctccttgcgcttcttgcgctttttgcgagcgcaacaaatgcgtccattattccacaatgctcacttgctcctagttccattattccacagttcctcccaccagttacttcaatggccttcgaacacccagctgtgcaagcctataggctacaacaagcgattgcggcgagcgtcttacaacaaccaattgcccaattgcaacaacaatccttggcacatctaacaatacaaaccatcgcaacgcaacagcaacaacagttcctaccagcactgagccacctagccat

SEQ ID NO: 345916 - DNA, 366 bp, Zea mays
aactagcaacatataaagcacaatagtgtaccaacaatggcagccaaaatattctgcttccttatgctccttggtctttctgcaagtgttgctaccgcaaccattttcccacaatgctcacaagctcctatagcttcccttcttcccccatacctctcaccagcggtgtcttcaatgtgtgaaaacccaattgttcaaccctacaggatccaacaggcaatcgcaacaggcatcttaccattatcacccttgttcctccaacaaccgtcagccctattacagcagttacctttggtccatttggtggcacaaaacatcagggcacaacaactacaacaacttgtgctagcaaaccttgctgcatac

SEQ ID NO: 345917 - DNA, 145 bp, Zea mays
  unsure (1)..(145): unsure at all n locations
nnnaaaaaaaaataaaaaaaaaaaattttaatctattttnncaaaaaaaaaaaaaaaaaaaaggaaaacttaaaaatatttgggggccccctgcccccgtaaaaaactttcctgagggttatttgaaacaatcaaatttggggcc

SEQ ID NO: 345918 - DNA, 359 bp, Zea mays
agcaactcgtgctacctgtgatcaactcaagtttctctggcaaacctttctccctactctccgcaacaacaatttcttccattcaaccaactgtctacactgaaccctgctgcttatttgcagcaacaactattaccatttagccagctagctactgcctactctcaacaacaacaacttcttccatttaaccaattggccgcactgaaccccgctgcttatttgcagcagcaaatactactaccatttagccagctagctacagcaagccgtgcttccttcttgacacaacaacagttgctgccgttctaccagcagtttgcggctaaccccgcaaccctcttacaactacaacaatt

SEQ ID NO: 345919 - DNA, 373 bp, Zea mays
  unsure (1)..(373): unsure at all n locations
cgtcacgcctagcagcatataaagcacaatagtgtgccaacatatggcagccaaaatattttgcttccttatgctccttggtctttctncttgcgcttcttgccctttttgtgagcgcaacaaatgcgttcattattacacaatgctcacttgctcctagtgccattataccacagttcctccgaccagttacttcaatgggcttcgaacacctagctgtgcaagcctacaggctacaacaagcgcttgcggcgagcgtcttacaacaaccaattaaccaattgcaacaacaatccttggcacatctaaccatacaaaccatcgcaacacaacagcaacaacagttcctaccagcactgagccaactagatgt

SEQ ID NO: 345920 - DNA, 363 bp, Zea mays
attttgagcattcaaaaacacaccatgcgaagcacattagcaacaacctaacaacaatggctaccaagatattatccctccttgcgcttcttgcgctttttgcgagcgcaacaaatgcgttcattattccacaatgctcacttgctccaagttccattattacacagttcctcccaccagttacttcaatgggcttcgaacacccagctgtgcaagcctataggctacaacaagcaattgcggcgagcgtcttacaacaaccaatttcccagttgcaacaacaatccttggcacatctaacaatacaaaccatcgcaacgcaacagcaacaacaattcctaccagcactgagccacctagcca

SEQ ID NO: 345921 - DNA, 367 bp, Zea mays
gcaattagctcatcgactccagattggagaactcgacaccatgaaggtgctgatcgttgcccttgctctcctggcgctcgctgcgagcgccgcctccagtacaagcggcggctgtggctgccagacaccaccgtttcatctaccgcctccgttctatatgccgcctccgttctatctgccgccgcagcagcagccgcagccatggcaataccccactcaaccaccgcagctaagcccgtgccagcagttcggatcctgcggcgtcggcagcgtcggcagcccgttcctgggccagtgcgtctagttcctgaggcaccagtgcagcccggcggcgacgccctacggctcgccacagtgccaggcgctg

SEQ ID NO: 345922 - DNA, 362 bp, Zea mays
atattttcagcattcagaaacacaccaagcgaagcgcactagcaacaacctaacaacaatggctaccaagatattagccctccttgcgcttcttgcccttttagtgagcgcaacaaatgcgttcattattccacagtgctcacttgctcctagtgccattattccacagttcctcccaccagttacttcaatgggcttcgaacatccagccgtgcaagcctacaggctacaactagcgcttgcggcgagcgtcttacaacaaccaattgcccaattgcaacaacaatccttggcacatctaaacctacaaaccatcgcaacgcaacagcaacaacagtttctgccatcactgagccacctag

SEQ ID NO: 345923 - DNA, 337 bp, Zea mays
  unsure (1)..(337): unsure at all n locations
ggatcatacacaccgaagtttactctgttcagccgagcaccaacgggagccacggggngcgtgggccgaggaggcgccgcgcctgaagaggcggccgtatccggaccggcacacagactgcgcacaacaatacttgctgtggggggacagacgaccgataagaagtaccgagcgtaaacagttctacatgaggcacgaggcgctccaagcacgcaaataacggtaccaatcataaagccttcaacgaccatatgctttatggccccagtcacccttagagcatccgtgtctgcaaaggaattgtggcacaacaactgcaacaacagatgctaccaac

SEQ ID NO: 345924 - DNA, 229 bp, Zea mays
agaccattagctttatctactccatttcgcttaagaacccgaccgacaccatgagggtgttgctcgttgccctagctctcctggctctcgctgcgagcgccaccttcacgcatacaagcggcgggtgcggctgccagccaccgtcgacggttcatctaccgccgccggtgcatctaccaccatcggtttacctgccaccttcggagcatctaccaccgccggtccacct

SEQ ID NO: 345925 - DNA, 394 bp, Zea mays
ccggtttccaggtcgacccagcgtccgcccacgcgtccgattgagaccaacttgcattttagaaagcacaatagtgtaccaacaatggcagccaaaatattttgcctccttatgctccttggtctttctgcaagtgctgctacggcgaccattttcccgcaatgctcgcaagctcctatagcttcccttcttcccccgtacctctcaccagcggtgtcttcggtatgtgaaaacccaattcttcaaccctacaggatccaacaggcaatcgcagctggcatcttacctttatcacccttgttcctccaacaatcatcagccctattacaacagttacctttggtgcatttattggcacaaaacatcagggcacaacaactacaacaacttgtgc

SEQ ID NO: 345926 - DNA, 362 bp, Zea mays
caccaagcgaagcgcactttcaacatcctaacaacaatggctaccaagatattagccctccttgcgcttcttgcccttttagtgagcgcaacaaatgcgttcattattccacagtgctcacttgctcctagtgccattattccacagttcctcccaccagttacttcaatgggcttcgaacatccagccgtgcaagcctacaggctacaactagcgcttgcggcgagcgtcttacaacaaccaattgcccaattgcaacaacaatccttggcacatctaaacctacaaaccatcgcaacgcaacagcaacaacagtttctgccatcactgagccacctagccgtggtgaaccctgtcgccta

SEQ ID NO: 345927 - DNA, 365 bp, Zea mays
gcaacaacaatccttggctcatctaaacctacaaaccatcgcaacgcaacagcaacaacagtttctgccatcactgagccacctagccgtggtgaaccctgtcgcctacttgcaacagcagctacttgcatccaacccacttgctctggcgaacgtagctgcataccagcaacaacaacgtctgcaacagtttatgccagcgctcagtcaactagccatggtgaaccctgtcgcctacctacaacagcaacaattgctttcatctagcccgctcgctgtgggcaatgcacctacgtacctacaacaacagttgctgcaacagattgtaccagctctgactcagctagctgtggcaaaccctactg

SEQ ID NO: 345928 - DNA, 59 bp, Zea mays
gtcagtgtgagcaatgacctgaatgtacaattgaaatgaaaagaaaaaagtattgttcc

SEQ ID NO: 345929 - DNA, 128 bp, Zea mays
ctcttttagattgcttattagttgttattctttaataaagttttttggatgatgtatgtggccaaccagaaataagaagttacatttccagattctaatgtgatattggtctccaagggtgttcgatt

SEQ ID NO: 345930 - DNA, 366 bp, Zea mays
cagaccattagctttatctactccatagcgctgaagaacccgatcgacaccatgagggtgttgctcgttgccctcgctctcctggctctcgctgcgagcgccacctccacgcatacaagcggcggctgcggctgccagccaccgccgccggttcatctaccgccgccggtgcatctgccaccttcggttcacctgccacctccggtgcatctcccaccgccggtccacctgccgccgccggtccacctgccaccgccggtccatgtgccgccgccggttcatctgccgtcgccaccatgccactaccctactcaaccgtcccggacttagcctcattcccagccacacccatgcccgtgccaacag

SEQ ID NO: 345931 - DNA, 355 bp, Zea mays
ccaacaagcaacatagaaagtggaatccagtagcaacaatagagcaacaatggcgaccaagatattttccctccttatgctccttgctctttctgcatgtgttgctaacgcgacaattttccctcaatgctcacaagctcctatagcttcccttcttcccccataccttccatcaatgatagcttcagtatgtgaaaacccagctcttcaaccctataggctccaacaagcaatcgcagcaagcaacatacctttatcacccttgtttcaacaatcgccagccctatctttggtgcagtcattggtacaaaccatcagggcacagcagctgcagcaactcgtgctacctgtgatc

SEQ ID NO: 345932 - DNA, 375 bp, Zea mays
  unsure (1)..(375): unsure at all n locations
ccgaccacgcgtncgattttagcattcagaaacacaccatgcgaagcgcactagcaacaacctaacaacaatggctaccaagatattagccctccttgcgcttcttgcccttttagtgagcgcaacaaatgcgttcattattccacagtgctcacttgctcctagtgccattattccacagttcctcccaccagttacttcaatgggcttcgaacatccagccgtgcaagcctacaggctacaactagcgcttgcggcgagcgtcttacaacaaccaattgcccaattgcaacaacaatccttggcacatctaaacctacaaaccatcgcaacgcaacagcaacaacagtttctgtcgtcactgagccacctagc

SEQ ID NO: 345933 - DNA, 369 bp, Zea mays
attttgagcattcagaaacacaccatgcgattcgcactagcaacgacctaacaacaatggctaccaagatattagccctccttgcgcttcttgccctttttgtgagcgcaacaaatgcgttcattattccacaatgctcacttgctcctagtgccattattccacagttcctcccaccagttacttcaatgggcttcgaacacctagctgtgcaagccaacatgcaacaacaagcgcttgcggcgagcgtcttacaacaaccaattgcccaattgcaacaacaatccttgccacatctaacaatacaagccatcacaacgcaacagcaacaacagttcctaccagcactgagccacctagccatggtga

SEQ ID NO: 345934 - DNA, 343 bp, Zea mays
ttttgcgagcgcaacaaatgcgtccattattccacaatgctcacttgctcctagttccattattccacagttcctcccaccagttacttcaatggccttcgaacacccagctgtgcaagcctataggctacaacaagcgattgcggcgagcgtcttacaacaaccaattgcccaattgcaacaacaatccttggcacatctaacaatacaaaccatcgcaacgcaacagcaacaacagttcctaccagcactgagccacctagccatggtgaaccctgtcgcctacttgcaacagcagctgcttgcatccaacccacttgctctagcaaacgtagttgcaaac

SEQ ID NO: 345935 - DNA, 366 bp, Zea mays
gagaccaactagcaacatttaaagctcaatagtgtaccaacaatggcagccaaaatattttgcctccttatgctccttggtctttctgcaagtgctgctacggcgaccattttcccgcaatgctcgcaagctcctatagcttcccttcttcccccgtacctctcaccagcggtgtcttcggtatgtgaaaacccaattcttcaaccctacaggatccaacaggcaatcgcagctggcatcttacctttatcacccttgttcctccaacaatcatcagccctattacaacagttacctttggtgcatttattggcacaaaacatcagggcacaacaactacaacaacttgtgctagcaaaccttgct

SEQ ID NO: 345936 - DNA, 367 bp, Zea mays
aaagcacaatagtgtaccaacaatggcagcctaaatattttgcctccttatgctccttggtatttctgcaagtgctgctacggcgaccattttcccgcaatgctcacaagctcctatagcttcccttcttcccccgtacctctcaccagcggtgtcttcggtatgtgaaaacccaattcttcaaccctacaggatccaacaggcaatcgcagctggcatcttacctttatcacccttgttcctccaacaatcatcagccctattacagcagttacctttggtgcatttattggcacaaaacatcagggcacaacaactacaacaacttgtgctagcaaaccttgctgcctactctcagcaacagcag

SEQ ID NO: 345937 - DNA, 372 bp, Zea mays
gtccggttaccttgggtgcattaatgggctcaaattttcagggcacaacaactacaacaacttgtgctagcaaaccttgctgcctactctcagcaacagcagtttcttccattcaaccaactagctgcattgaactctgcttcttatttgcaacaacaacaactaccattcagccagctagctggtgtgagccctgctaccttcttgacacaaccacagttgttgccgttctaccagcacgctgcgcctaacgctggcaccctcttacaactgcaacaattgctgccattcaaccaacttgctttgacaaacctagcagtgttctaccaacaacccatcattggtggtgccctcttttagatttcttatgag

SEQ ID NO: 345938 - DNA, 382 bp, Zea mays
cgcgtccggtcaacaacaaatttcttgagcagctttatctttcacaacaacagcatccacaaaaacaacagcatcaaccaccaccacaacatcaccagcagcagcaacaccaacaacaacaagttcacatgcaaccacaaaaacatcagcaacaacaagaagttcatgttcaacaacaacaacaacaaccgcagcaccaacaacaacaacaacaacagcaccaacaacaacatcaatgtgaaggccaacaacaacatcaccaacaatcacaaggccatgtgcaacaacacgaacagagccatgagcaacaccaaggtcagagccatgagcaacaacatcaacaacaattccagggtcatgacaaggtgcaacaaccacaaca

SEQ ID NO: 345939 - DNA, 359 bp, Zea mays
acttagaccaactagcaacatagaatgcacattagtgtaccaacaatggcagccaaaatattttgcctccttatgctccttggtatttctgcaagtgctgctacggcgaccattttcccgcaatgctcacaagctcctatagcttcccttcttcccccgtacctctcaccagcggtgtcttcggtatgtgaaaacccaattcttcaaccctacaggatccaacaggcaatcgcagctggcatcttacctttatcacccttgttcctccaacaatcatcagtcctattacagcagttaccttctgtgcatatattggtgcaaaaaatcagggcacaacatctacaacaacttgtgctagc

SEQ ID NO: 345940 - DNA, 363 bp, Zea mays
ccagttacttcaatgggcttcgaacatccagccgtgcaagcctacaggctacaactagcgcttgcggcgagcgtcttacaacaaccaattgcccaattgcaacaacaatccttggcacatctaaacctacaaaccatcgcaacgcaacagcaacaacagtttctgccatcactgagccacctagccgtggtgaaccctgtcgcctacttgcaacagcagctacttgcatccaacccacttgctctggcgaacgtagctgcataccagcaacaacaacgtctgcaacagtttatgccagcgctcagtcaactagccatggtgaaccctgtcgcctacctacaacagcaacaattgctttcatct

SEQ ID NO: 345941 - DNA, 362 bp, Zea mays
cggacgcgtgggctcccacctgtttcttcaatggccttcgaacacccagctgtgcaagcctataggctacaacaagcgattgcggcgagcgtcttacaacaaccaattgcccaattgcaacaacaatccttggcacatctaacaatacaaaccatcgcaacgcaacagcaacaacagttcctaccagcactgagccacctagccatggtgaaccctgtcgcctacttgcaacagcagctgcttgcatccaacccacttgctctagcaaacgtagttgcaaaccagctacaacaacaactgcaacagtttctgccagcgcttagtcaactagccatggtgaaccctgccgcctacctacaaca

SEQ ID NO: 345942 - DNA, 365 bp, Zea mays
gcaacatagaaagtggaatccagtatcaacaatagagcaacaatggagaccaagatattttccctccttatgctccttgctctttctacatgtgttgctaacgcgacaattttccctcaatgctcacaagctcctatagcttccctttttcccccataccttccatcaattatagcttcagtatgtgaaaacccagctcttcaaccatataggcttcaacaagcaatcgcagcaagcaacatacctttatcgcccttgttgtgtcaacaatcgccagccctatctttggtgcagtcattggtacaaaccatcagggcacaacagctgcagcaactcgtgctacctgtgatcaaccaagtagctct

SEQ ID NO: 345943 - DNA, 369 bp, Zea mays
  unsure (1)..(369): unsure at all n locations
agaccaacaagcaacattgtatagtttgttcagnagcaacaatagagcaacaatggcggccaagatattttccatccttatgctccttgctctttctgcatgtgttgctaacgcgaccatttttcctcaatactcacaagctcctatagctgcccttcttcccccataccttccatcaatgaccgcttcagtatgtgaaaacccagcccttcaaccctacaggctccaacaagcaatcgcaacaagcaacttacctttatcacccctgttctttcaacaatcgccagccctatctttggtgcagtcattggtacaaaccatcagggcacaacagctgctgcaactcgtgctaccagtgatcagccaagt

SEQ ID NO: 345944 - DNA, 362 bp, Zea mays
agaccaacaagcaacatataaagtggaatacagtagcaacaatagagcaacaatggcggccaagatattttccatccttatgctccttgctctttctgcatgtgttgctaacgcgaccatttttcctcaatactcacaagctcctatagctgcccttcttcccccataccttccatcaatgaccgcttcagtatgtgaaaacccagcccttcaaccctacaggctccaacaagcaatcgcaacaagcaacttacctttatcacccctgttctttcaacaatcgccagccctatctttggtgcagtcattggtacaaaccatcagggcacaacagctgcagcaactcgtgctaccagtgatca

SEQ ID NO: 345945 - DNA, 364 bp, Zea mays
aaagtggaatacagtagcaacaatttatcatcaatggcggccaagatattttccatccttatgctccttgctctttctgcatgtgttgctaacgcgaccatttttcctcaatactcacaagctcctatagctgcccttcttcccccataccttccatcaatgaccgcttcagtatgtgaaaacccagcccttcaaccctacaggctccaacaagcaatcgcaacaagcaacttacctttatcacccctgttctttcaacaatcgccagccctatctttggtgcagtcattggtacaaaccatcagggcacaacagctgcagcaactcgtgctaccagtgatcagccaagtagctctggcaaacc

SEQ ID NO: 345946 - DNA, 73 bp, Zea mays
ccaatttccaagtgggtggtggtattacgctcgccgcaattgcttgttgtagcctataggcttgcacagctgg

SEQ ID NO: 345947 - DNA, 365 bp, Zea mays
caaccaattgcccaattgcaacaactatccttggcacatctaacaatacaaaccatcgcaacgcaacagcaacaacagttcctaccagcactgagccacctagccatggtgaaccctgtcgcctacttgcaacagcagctgcttgcatccaacccacttgctctagcaaacgtagttgcaaaccagcaacaacaacaactgcaacagtttctgccagcgcttagtcaactagccatggtgaaccctgccgcctacctacaacagcaacaactgctttcatctagcccgctcgctgtggccaatgcacctacatacctgcaacaagaattgttgcaacagattgtaccagctctaactcagctagc

SEQ ID NO: 345948 - DNA, 364 bp, Zea mays
tgagcattcagaaacacaccaagcgtagcgctctagcaacgacctaacaacaatggctaccaagatattagccctccttgcgcttcttgccctttttgtgagcgcaacaaatgcgttcattattccacaatgctcacttgctcctagtgccattattccacagttcctcccaccagttacttcaatgggcttcgaacacctagctgtgcaagccaacatgcaacaacaagcgcttgcggcgagcgtcttacaacaaccaattgcccaattgcaacaacaatccttgccacatctaacaatacaagccatcacaacgcaacagcaacaacagttcctaccagcactgagccacctagccatggtg

SEQ ID NO: 345949 - DNA, 365 bp, Zea mays
cagaaacacaccaagcgaatctctctatcaacaacctaacaacaatggctaccaagatattagccctccttgcgcttcttgcccttttagtgagcgcaacaaatgcgttcattattccacagtgctcacttgctcctagtgccattattccacaggtcctcccaccagttacttcaatgggcttcgaacatccagccgtgcaagcctacaggctacaactagcgcttgcggcgagcgtcttacaacaaccaattgcccaattgcaacaacaattcttggcacatctaaacctacaaaccattgcaacgcaacagcaacaacagtttctgccatcactgagccacctagccgtggtgaaccctgtc

SEQ ID NO: 345950 - DNA, 369 bp, Zea mays
gagcattcagaaacacaccaagcgtttcgcactagcaacaacctaacaacaatggctaccaagatattatccctccttgcgcttcttgcgctttttgcgagcgcaacaaatgcgtccattattccacaatgctcacttgctcctagttccattattccacagttcctcccaccagttacttcaatggccttcgaacacccagctgtgcaagcctataggctacaacaagcgattgcggcgagcgtcttacaacaaccaattgcccaattgcaacaacaatccttggcacatctaacaatacaaaccatcgcaacgcaacagcaacaacagttcctaccagcactgagccacctagccatggtgaaccct

SEQ ID NO: 345951 - DNA, 370 bp, Zea mays
ccaactagcaacatagaatgcacaatagtgtaccaacaatggcagctaaaatattttgcctccttatgctccttggtctttctgcaagtgctgctacggcgaccattttcccacaatgctcacaagctcctatagcttcccttcttcccccgtacctctcaccaacggtgtcttcggtatgtgaaaacccaattcttcaaccctacaggatccaacaggcaatcgcagctggcatcttacctttatcacccttgttcctccaacaatcatcagccctattacagcagttacctttggtgcatttattggcacaaaacatcagggcacaacaactacaacaacttgtgctagcaaaccttgctgcctactc

SEQ ID NO: 345952 - DNA, 364 bp, Zea mays
attgagaccaacaagcaacatagaatgtggtatccagtagcaacaatagagcaacaatggagaccaagatattttccctccttatgctccttgctctttctacatgtgttgctaacgcgacaattttccctcaatgctcacaagctcctatagcttccctttttcccccataccttccatcaattatagcttcagtatgtgaaaacccagctcttcaaccatataggcttcaacaagcaatcgcagcaagcaacatacctttatcgcccttgttgtgtcaacaatcgccagccctatctttggtgcagtcattggtacaaaccatcagggcacaacagctgcagcaactcgtgctacctgtgat

SEQ ID NO: 345953 - DNA, 367 bp, Zea mays
gaaaagcggcagtgcgtaaagaggttcgtttaacagaacagcatgaagatggtcatcgttctcgtcgtgtgcctggctctgtcagctgccagcgcctctgcaatgcagatgccctgcccctgcgcggggctgcagggcttgtacggcgctggcgccggcctgacgacgatgatgggcgccggcgggctgtacccctacgcggagtacctgaggcagccgcagtgcagcccgctggcggcggcgccctactacgccgggtgtgggcagacgagcgccatgtaccagccgctccggcaacagtgctgccagcagcagatgaggatgatggacgtgcagtccgtcgcgcagcagctgcagatgatgatgc

SEQ ID NO: 345954 - DNA, 344 bp, Zea mays
acttcttccatttaaccaattggcctcactgaaccccgctgcttatttgcagcagcaaatactactaccatttagccagctagctacagcaagccgtgcttccttcttgacacaacaacagttgctgccgttctaccagcagtttgcggctaaccccgcaaccctcttacaactacaacaattgttgccctttgtccaacttgctttgacaaacccagcagcctcctaccaacaacacatcattggtggtgccctcttttagattgcttattagatgtaattcaataataaagttttttggatgatgtatgtggccaaccagaaataaaaagttacatttccag

SEQ ID NO: 345955 - DNA, 364 bp, Zea mays
cgccggttcatctgccgccttcaccatgccactaccctactcaaccgccccggcctcagcctcatccccagccacacccatgcccgtgccaacagccgcatccaagcccgtgccagctgcagggaacctgcggcgttggcagcaccccgatcctgggccagtgcgtcgagttcctgaggcatcagtgcagcccgacggcgacgccctactgctcgcctcagtgccagtcgttgcggcagcagtgttgccagcagctcaggcaggtggagccgcagcaccggtaccaggcgatcttcggcttggtcctccagtccatcctgcagcagcagccgcaaagcggccaggtcgcggtgctgttggcggc

SEQ ID NO: 345956 - DNA, 308 bp, Zea mays
caaagcggcagtgcgtagagtggatcttcgaacagaacagcatgaagatggtcatcgttctcgtcgtgtgcctggctctgtcagctgccagcgcctctgcaatgcagatgccctgcccctgcgcggggctgcatggcttgtacggcgctggcgccggcctgacgacgatgatgggcgccggcgggctgtacccctacgcggagtacctgaggcagccgcagtgcatcccgctggcggcggcgccctactactccgggtgtgggcagactagcgccatgttccagtcgctccggcatcagtgcttgtca

SEQ ID NO: 345957 - DNA, 345 bp, Zea mays
ctagccgttcagacatcttgtagcaagagccattttgatagtctatgccatgcttgtcagctaggctgctatgctcgcccccctttctctagttcctcctctcgggttgatcaggcctttgatcttgtacattgtgatctatggacttctcatgttttcaacctttcagattatgaatattacttggtgattgtggatgaccttttccattgcgattgaagtaggatactttccacactctttcgcacttttttgcttgggtctccacccagttcggccgcctggtttgtgctctccagtgcgacaatggttgcgagttcaacaactccaccttccgctctttct

SEQ ID NO: 345958 - DNA, 276 bp, Zea mays
agaccaactagcaacatataaagctcaatagtgtaccaacaatggcagccaaaatattttgcctccttatgctccttggtctttctgcaagtgctgctacggcgaccattttcccacaatgctcacaagctcctatagcttcccttcttcccccgtacctctcaccagcggtgtcttcggtatgtgaaaacccaattcttcaaccctataggatccaacaggcaatcgcagctggcatcttacctttatcacccttgttcctccaacaatcatcag

SEQ ID NO: 345959 - DNA, 334 bp, Zea mays
cagcattcagaaacactccaagctatagcgcactagcaacaacctaacaacaatggctaccaagatattagccctccttgcgcttcttgcccttttagtgagcgcaacaaatgcgttcattattccacagtgctcacttgctcctagtgccattattccacagttcctcccaccagttacttcaatgggcttcgaacatccagccgtgcaagcctacaggctacaactagcgcttgggcgagcgttttacaacaaccaattgcccaatttgaacaacaatccttggcacatctaaacctacaaaccatcgcaacgcaacagcaacaacagtttt

SEQ ID NO: 345960 - DNA, 329 bp, Zea mays
  unsure (1)..(329): unsure at all n locations
gaaagcacaatagngtaccaacaatggcagccaaaatattttgcctccttatgctccttggtctttctgcaagtgctgctacggcgaccattttcccgcaatgctcgcaagctcctatagcttcccttcttcccccgtacctctcaccagcggtgtcttcggtatgtgaaaacccaattcttcaaccctacaggatccaacaggcaatcgcagctggcatcttacctttatcacccttgttcctccaacaatcatcagccctattacaacagttacctttggtgcatttattggcacaaaacatcagggcacaacaactacaacaactt

SEQ ID NO: 345961 - DNA, 212 bp, Zea mays
  unsure (1)..(212): unsure at all n locations
ctgggtcttcagaccattagctttatctacttcagagcgcagaagaacccgatcgacaccatgagggtgttgctcgttgccctcgctctcctggctctcgctgcgagcgccacctccacgcatacaagcggcggctgcggctgccagccaccgccgccggttcatcttnngtcgcctgtgcatatgtctcctacggttcagctgccacctcc

SEQ ID NO: 345962 - DNA, 365 bp, Zea mays
agaaagcacaatagtgtaccaacaatggcagccaaaatattttgcttccttatgctccttggtctttctgcaagtgttgctaccgcaaccattttcccacaatgctcacaagctcctatagcttcccttcttcccccatacctctcaccagcggtgtcttcaatgtgtgaaaacccaattgttcaaccctacaggatccaacaggcaatcgcaacaggcatcttaccattatcacccttgttcctccaacaaccgtcagccctattacagcagttacctttggtccatttggtggcacaaaacatcagggcacaacaactacaacaacttgtgctagcaaaccttgctgcatactctcagcaaca

SEQ ID NO: 345963 - DNA, 366 bp, Zea mays
cagcattcagaaacacaccaagcgtttcgcactagcaacaacctaacaacaatggctaccaagatattagccctccttgcgcttcttgcccttttagtgagcgcaacaaatgcgttcattattccacagtgctcacttgctcctagtgccattattccacagttcctcccaccagttacttcaatgggcttcgaacatccagccgtgcaagcctacaggctacaactagcgcttgcggcgagcgtcttacaacaaccaattgcccaattgcaacaacaatccttggcacatctaaacctacaaaccatcgcaacgcaacagcaacaacagtttctgccatcactgagccacctagccgtggtgaac

SEQ ID NO: 345964 - DNA, 77 bp, Zea mays
caagatttttgccctccttgccctccttgctctttcagcaagcgctgctacctcgacttttattccacaatgctcac

SEQ ID NO: 345965 - DNA, 368 bp, Zea mays
caactagcaccatagaaagcacatttttgtaccaacaatggcagccaaaatattttgcctccttatgctccttggtctttctgcaagtgctgctacggcgaccattttcccgaaatgctcgcaagctcctatagcttcccttcttcccccgtacctctcaccagcggtgtcttcggtatgtgaaaacccaattcttcaaccctacaggatccaacaggcaatcacagctggcatcttacctttatcacccttgttcctccaacaatcatcagccctattacatcagttacctttggtgcatttattggcacaaaacatcagggcacaacaactacaacaacttgtgctagcaaaccttgctgcctact

SEQ ID NO: 345966 - DNA, 212 bp, Zea mays
gccacagcaaacacaaggggctttcatcgcgcgacggagcacataggggccaagagatgtccctccttatgctccatgcctgcagcatgtgttgataacgagaccatttatgtcagtgccaacaagctcatatagctcccgtccatctgcaatcacctgatgaatataagtcagatgtgaaaacccactgttagacatatggcttaacaagc

SEQ ID NO: 345967 - DNA, 75 bp, Zea mays
ggcaggcaggtcggcgaggagggctttaagtcttaagaccgagccgagcggggtgctgatcgtgacccttgctct

SEQ ID NO: 345968 - DNA, 364 bp, Zea mays
tgagaccaactagcaacatattaatgttcaatagtgtaccaacaatggcagccaaaatattttgcttccttatgctccttggtctttctgcaagtgttgctaccgcaaccattttcccacaatgctcacaagctcctatagcttcccttcttcccccatacctctcaccagcggtgtctttaatgtgtgaaaacccaattgttcaaccctacaggatccaacaggcaatctcaacaggcatcttaccattatcacccttgttccttcaacaaccgttagccctattacagcagttacctttggtccatttggtggcacaaaacattcagggcacaacaactacaacaacttgtgctagcaaacc

SEQ ID NO: 345969 - DNA, 349 bp, Zea mays
caacaacaacaacaattgcaacagtttctgccagcgctcagtcaactagccatggtgaaccctgccgcctacctacaacagcaacaactgctttcatctagccctctcgttgtgggtaatgcacctacatacctgcaacaacaattgctgcaacagattgtaccagctctgactcagctagctgtggcaaaccctgctgcctacttgcaacagctgcttccattcaaccaactgactgtgtcgaactctgctgcgtacctacaacagcgacaacagttacttaatccactagcagtgcctaacccattggtcactgcctttctacagcagcaacaattgctaccataca

SEQ ID NO: 345970 - DNA, 352 bp, Zea mays
agcattcagaaacacaccatgttattcgcactagcaacgacctaacaacaatggctaccaagatattagccctccttgcgcttcttgccctttttgtgagcgcaacaaatgcgttcattattccacaatgctcacttgctcctagtgccattattccacagttcctcccaccagttacttcaatgggcttcgaacacctagctgtgcaagccaacatgcaacaacaagcgcttgcggcgagcgtcttacaacaaccaattgcccaattgcaacaacaatccttgccacatctaacaatacaagccatcacaacgcaacagcaacaacagtttctaccagcactgagccacct

SEQ ID NO: 345971 - DNA, 380 bp, Zea mays
gccctccttgcgcttcttgcccttttagtgagcgcaacaaatgcgttcattattccacagtgctcacttgctcctagtgccattattccacagttcctcccaccagttacttcaatgggcttcgaacatccagccgtgcaagcctacaggctacaactagcgcttgcggcgagcgtcttacaacaaccaattgcccaattgcaacaacaatccttggcacatctaaacctacaaaccatcgcaacgcaacagcaacaacagtttctgccatcactgagccacctagccgtggtgaaccctgtcgcctacttgcaacagcagctacttgcatccaacccacttgctctggcgaacgtagctgcataccagcaacaacaacg

SEQ ID NO: 345972 - DNA, 393 bp, Zea mays
  unsure (1)..(393): unsure at all n locations
gtgcgtcttcagaccattagctttatctactccagagcgcagaagaacccgatcgacaccatgagggtgttgctcgttgccctcgctctcctggctctcgctgcgagcgccacctccacgcatacaagcggcggctgcggctgccagccaccgccgccggttcatctaccgccgccggtgcatctgccacctccggttcacctgccacctccggtgcatctcccaccgccggtccacctgccgccgccggtccacctgccaccgccggtccatgtgccgccgccggttcatctgccgccgccaccatgccactaccctactcaaccgccccggcctcagcctcatccccagccacacccatgcccgtgccaacagccgcatncaagcccgtgc

SEQ ID NO: 345973 - DNA, 379 bp, Zea mays
aaagcacaatagtgtaccaacaatggcattcaaaatattttgcctccttatgctccttggtctttctgcaagtgctgctacggcgaccattttcccgaaatgctcgcaagctcctatagcttcccttcttcccccgtacctctcaccagcggtgtcttcggtatgtgaaaacccaattcttcaaccctacaggatccaacaggcaatcacagctggcatcttacctttatcacccttgttcctccaacaatcatcagccctattacatcagttacctttggtgcatttattggcacaaaacatcagggcacaacaactacaacaacttgtgctagcaaaccttgctgcctactctcagcaacagcagtttcttccattc

SEQ ID NO: 345974 - DNA, 370 bp, Zea mays
gctctgtcagctgccagcgcctctgcaatgcagatgccctgcccctgcgcggggctgcagggcttgtacggcgctggcgccggcctgacgacgatgatgggcgccggcgggctgtacccctacgcggagtacctgaggcagccgcagtgcagcccgctggcggcggcgccctactacgccgggtgtgggcagacgagcgccatgtaccagccgctccggcaacagtgctgccagcagcagatgaggatgatggacgtgcagtccgtcgcgcagcagctgcagatgatgatgcagcttgagcgtgccgctgccgccagcagcagcctgtacgagccagctctgatgcagcagcagcagcagctgctggcag

SEQ ID NO: 345975 - DNA, 460 bp, Zea mays
  unsure (1)..(460): unsure at all n locations
aggtacccggaacggaattgcccgggctcagacccacgcccgtccgnncatcatatcatcannttcatcttagtattgtataggcaccccaaatctagaatctgcagacatcgaattattctaacctccaaagaacctatgaanngctggtgcttnngtggttcttgggctttcattgctttagtnatcaagtgtttcnttgtacacagaccaggcggctgcagctgtggtcaacaacaaagccatgagcagcaacatcatccacaacaacatcatccacaaaaacaacaacatcaaccaccaccacaacatcaccagcagcagcaacaccaacaacaacaagttcacatgcaaccacaaaaacatcagcaacaacaagaagttcatgttcaacaacaacaacaacaaccgcagcaccaacaacaacaacaacaacagcaccaacaacaacatcaatgtg

SEQ ID NO: 345976 - DNA, 373 bp, Zea mays
gagaccaacaagcaacatagaaagttgaatacagtagcaacaatagagcaacaatggcggccaagatattttccatccttatgctccttgctctttctgcatgtgttgctaacgcgaccatttttcctcaatactcacaagctcctatagctgcccttcttcccccataccttccatcaatgaccgcttcagtatgtgaaaacccagcccttcaaccctacaggctccaacaagcaatcgcaacaagcaacttacctttatcacccctgttctttcaacaatcgccagccctatctttggtgcagtcattggtacaaaccatcagggcacaacagctgcagcaactcgtgctaccagtgatcagccaagtagc

SEQ ID NO: 345977 - DNA, 379 bp, Zea mays
caacaagcaacatagaaagtggaattcagtagcaacaatagagcaacaatggagaccaagatattttccctccttatgctccttgctctttctacatgtgttgctaacgcgacaattttccctcaatgctcacaagctcctatagcttccctttttcccccataccttccatcaattatagcttcagtatgtgaaaacccagctcttcaaccatataggcttcaacaagcaatcgcagcaagcaacatacctttatcgcccttgttgtgtcaacaatcgccagccctatctttggtgcagtcattggtacaaaccatcagggcacaacagctgcagcaactcgtgctacctgtgatcaaccaagtagctctggcaaacc

SEQ ID NO: 345978 - DNA, 391 bp, Zea mays
gcagtttcttccattcaaccaactagctgtattgaactctgcttcttatttgcaacagcaacaactaccattcagccagctacctgctgcctacccccagcaatttcttccattcaaccaactggcagcattgaactctcctgcttatttacagcagcaacaactactaccattcagccagctagctggtgtgagccctgctaccttcttgatacaaccacaggtgttgccgttctaccagcacgctgcgcctaacgctggcaccctcttacaactgcaacaattgctgccattcaaccaacttgctttgacaaacccagcagcgttctaccaacaacccatcattggtggtgccctcttttagatgtcttatgagttatagttcaataat

SEQ ID NO: 345979 - DNA, 95 bp, Zea mays
aaaaaaaaaaaaaaaaaaaaaaaattattttaaaaaaataaaaaagggaaaaaagaaaagaaagaacaagcttacaaacgcatacatgctgcgcg

SEQ ID NO: 345980 - DNA, 379 bp, Zea mays
caacaagcaacatagaaagtggaatccagtagcaacaatagagcaacaatggagaccaagatattttccctccttatgctccttgctctttctacatgtgttgctaacgcgacaattttccctcaatgctcacaagctcctatagcttccctttttcccccataccttccatcaattatagcttcagtatgtgaaaacccagctcttcaaccatataggcttcaacaagcaatcgcagcaagcaacatacctttatcgcccttgttgtgtcaacaatcgccagccctatctttggtgcagtcattggtacaaaccatcagggcacaacagctgcagcaactcgtgctacctgtgatcaaccaagtagctcttgcaaacc

SEQ ID NO: 345981 - DNA, 383 bp, Zea mays
attagctttatctactccagagcgcagaagaacccgatcgacaccatgagggtgttgctcgttgccctcgctctcctggctctcgctgcgagcgccacctccacgcatacaagcggcggctgcggctgccagccaccgccgccggttcatctaccgccgccggtgcatctgccacctccggttcacctgccacctccggtgcatctcccaccgccggtccacctgccgccgccggtccacctgccaccgccggtccatgtgccgccgccggttcatctgccgccgccaccatgccactaccctactcaaccgccccggcctcagcctcatccccagccacacccatgcccgtgccaacagccgcatccaagcccgtgccagct

SEQ ID NO: 345982 - DNA, 382 bp, Zea mays
cagaaacacaccaagcgaagcgcactagcaacgacctaacaacaatggctaccaagatattagccctccttgcgcttcttgccctttttgtgagcgcaacaaatgcgttcattattccacaatgctcacttgctcctagtgccattattccacagttcctcccaccagttacttcaatgggcttcgaacacctagctgtgcaagccaacatgcaacaacaagcgcttgcggcgagcgtcttacaacaaccaattgcccaattgcaacaacaatccttgccacatctaacaatacaagccatcacaacgcaacagcaacaacagttcctaccagcactgagccacctagccatggtgaaccctgccgcctacttgcaagagca

SEQ ID NO: 345983 - DNA, 388 bp, Zea mays
caagcaacatagaaagtggaatccagtagcaacaatagagcaacaatggcgaccaagatattttccctccttatgctccttgctctttctgcatgtgttgctaacgcgacaattttccctcaatgctcacaagctcctatagcttcccttcttcccccataccttccatcaatgatagcttcagtatgtgaaaacccagctcttcaaccctataggctccaacaagcaatcgcagcaagcaacatacctttatcacccttgtttcaacaatcgccagccctatctttggtgcagtcattggtacaaaccatcagggcacagcagctgcagcaactcgtgctacctgtgatcaaccaagtagctcttgcaaacctttctccctactctc

SEQ ID NO: 345984 - DNA, 261 bp, Zea mays
tcgactcacattaaaagggttcttttttcacactagaccacaatggggcgatgattttccatcttatgccccttgcctctccatgctgtgtgcaacgcgacacttgtttctttattctacaagctccttagttttgtttctctcctatacttccataatgattgctcagtatctgaatcccagatcttaacctatggcccatcagcattttatcatgcaacatactttttcacccttggttatcaatttcagatctttttt

SEQ ID NO: 345985 - DNA, 388 bp, Zea mays
agcattcagaaacacaccaagcgaagcgcactagcaacaacctaacaacaatggctaccaagatattatccctccttgcgcttcttgcgctttttgcgagcgcaacaaatgcgtccattattccacaatgctcacttgctcctagttccattattccacagttcctcccaccagttacttcaatggccttcgaacacccagctgtgcaagcctataggctacaacaagcgattgcggcgagcgtcttacaacaaccaattgcccaattgcaacaacaatccttggcacatctaacaatacaaaccatcgcaacgcaacagcaacaacagttcctaccagcactgagccacctagccatggtgaaccctgtcgcctacttgcaacagca

SEQ ID NO: 345986 - DNA, 381 bp, Zea mays
  unsure (1)..(381): unsure at all n locations
ctgggtcttcagaccattagctttatctactccagagcgcagaagaacccgatcgacaccatgagggtgttgctcgttgccctcgctctcctggctctcgctgcgagcgccacctccacgcatacaagcggcggctgcggctgccagccaccgccgccggttcatctaccgccgccggtgcatctgccacctccggttcacctgccacctccggtgcatctcccaccgccggtccacctgccgccgccggtccacctgccaccgccggtccatgtgccgccgccggttcatctgccgccgccaccatgccactaccctactcaaccgccccggcctcagcctcatncncagccacacccatgcccgtgccaacagccgcat

SEQ ID NO: 345987 - DNA, 376 bp, Zea mays
gcaacatagaaagcacaatagtgtaccaacaatggcagccaaaatattttgcttccttatgctccttggtctttctgcaagtgctgctaccgcaaccattttcccacaatgctcacaagctcctatagcttcctttcttcccccatacctctcaccagcggtgtcttcagtatgtgaaaacccaattcttcaaccctacaggatccaacaggcaatcgcagcaggcatcttacctttatcacccttgttcctccaacaaccgtcagccctattacagcagttacctttggtgcatttgttggcacaaaacatcaaggcacaacaactacaacaacttgtgctaggaaaccttgctgcctactctcaacaacagcag

SEQ ID NO: 345988 - DNA, 379 bp, Zea mays
aaacacaccaagcgaagcgttctatcaacaacctaacaacaatggctaccaagatattatccctccttgcgcttcttgcgctttttgcgagcgcaacaaatgcgtccattattccacaatgctcacttgctcctagttccattattccacagttcctcccaccagttacttcaatggccttcgaacacccagctgtgcaagcctataggctacaacaagcgattgcggcgagcgtcttacaacaaccaattgcccaattgcaacaacaatccttggcacatctaacaatacaaaccatcgtaacgcaacagtaacatcagttcctaccagcactgagccacctagccatggtgaaccctgttgcctacttgcaacagca

SEQ ID NO: 345989 - DNA, 232 bp, Zea mays
aggacgcgtgggctcccttttttttgcaaatcctgcagacaccaccggtcgtcgttctcttcgggacaggataaaagggtagagagaggtgaggcgcgttgtaccagccgatctgttttgtcctgacgcatttgttacgacttcttcagtcttagtctggagcaagatgtgtgccggtggcaggttgacctagaagtagtgtgagaagcagcagcatatttatctagctatc

SEQ ID NO: 345990 - DNA, 386 bp, Zea mays
caactagcaacatagaaagcacaatagtgtaccaacaatggcagccaaaatattttgcctccttatgctccttggtctttctgcaagtgctgctacggcgaccattttcccgcaatgctcgcaagctcctatagcttcccttcttcccccgtacctctcaccagcggtgtcttcggtatgtgaaaacccaattcttcaaccctacaggatccaacaggcaatcgcagctggcatcttacctttatcacccttgttcctccaacaatcatcagccctattacaacagttacctttggtgcatttattggcacaaaacatcagggcacaacaactacaacaacttgtgctagcaaaccttgctgcctactctcagcaacagcagtttc

SEQ ID NO: 345991 - DNA, 390 bp, Zea mays
tttcagcattcagaaacacaccaagcgattcgcactagcaacaacctaacaacaatggctaccaagatattagccctccttgcgcttcttgcccttttagtgagcgcaacaaatgcgttcattattccacagtgctcacttgctcctagtgccattattccacagttcctcccaccagttacttcaatgggcttcgaacatccagccgtgcaagcctacaggctacaactagcgcttgcggcgagcgtcttacaacaaccaattgcccaattgcaacaacaatccttggcacatctaaacctacaaaccatcgcaacgcaacagcaacaacagtttctgccatcactgagccacctagccgtggtgaaccctgtcgcctacttgcaacag

SEQ ID NO: 345992 - DNA, 388 bp, Zea mays
attttgagcattcagaaacacaccaagctatagcgcactagcaacaacctaacaacaatggctaccaagatattatccctccttgcgcttcttgcgctttttgcgagcgcaacaaatgcgtccattattccacaatgctcacttgctcctagttccattattccacagttcctcccaccagttacttcaatggccttcgaacacccagctgtgcaagcctataggctacaacaagcgattgcggcgagcgtcttacaacaaccaattgcccaattgcaacaacaatccttggcacatctaacaatacaaaccatcgcaacgcaacagcaacaacagttcctaccagcactgagccacctagccatggtgaaccctgtcgcctacttgc

SEQ ID NO: 345993 - DNA, 377 bp, Zea mays
cccacgcgtccggcggcagtgcgtagagaggatcgtcgaacagaacagcatgaagatggtcatcgttctcgtcgtgtgcctggctctgtcagctgccagcgcctctgcaatgcagatgccctgcccctgcgcggggctgcagggcttgtacggcgctggcgccggcctgacgacgatgatgggcgccggcgggctgtacccctacgcggagtacctgaggcagccgcagtgcagcccgctggcggcggcgccctactacgccgggtgtgggcagacgagcgccatgtaccagccgctccggcaacagtgctgccagcagcagatgaggatgatggacgtgcagtccgtcgcgcagcagctgcagatgatgatgcagc

SEQ ID NO: 345994 - DNA, 383 bp, Zea mays
aactagcaacatagaaagcacaattttgtaccaacaatggcagccaaaatattttgcctccttatgctccttggtctttctgcaagtgctgctacggcgaccattttcccacaatgctcacaagctcctatagcttcccttcttcccccgtacctctcaccagcggtgtcttcggtatgtgaaaacccaattcttcaaccctataggatccaacaggcaatcgcagctggcatcttacctttatcacccttgttcctccaacaatcatcagccctattacagcagttacctttggtgcatttattggcacaaaacatcagggcacaacaactacaacaacttgtgctagcaaaccttgctgcctactctcagcaacaacagtt

SEQ ID NO: 345995 - DNA, 152 bp, Zea mays
  unsure (1)..(152): unsure at all n locations
aacccncncactttccaccttttttttccacccacagcaggggcaggccggccgcgtcttttaaaggaggaggagctcgataaggccgcttggcagagccgtgttatggcacgatgttctgagctgcgctggaaggatcgggatcctggcca

SEQ ID NO: 345996 - DNA, 389 bp, Zea mays
attttgagcattcagaaacacaccaagctaagctacctagcaacgacttaacaacaatggctaccaagatattagccctccttgcgcttcttgccctttttgtgagcgcaacaaatgcgttcattattccacaatgctcacttgctcctagtgccattataccacagttcctccgaccagttacttcaatgggcttcgaacacctagctgtgcaagcctacaggctacaacaagcgcttgcggcgagcgtcttacaacaaccaattaaccaattgcaacaacaatccttggcacatctaaccatacaaaccatcgcaacacaacagcaacaacagttcctaccagcactgagccaactagatgtggtgaaccctgtcgcctacttgcaa

SEQ ID NO: 345997 - DNA, 377 bp, Zea mays
tcgttgccctcgctctcctgttttttgctgcgagcgccacctccacgcatgcgggcggcggctgcggctgccagccaccgccgccggttcatctaccgccgccggtgcatctgccacctccggttcacctgccaccgccggtccatgtgccgccgccggttcatctgccgccgccaccatgccactaccctactcaaccgccccggcctcagcctcatccccagccacacccatgcccgtgccaacagccgcatccaagcccgtgccagctgcagggaacctgcggcgttggcagcaccccgatcctgggccagtgcgttgagtttctgaggcatcagtgcagcccgacggcgactccctactgctcgcctcagtgc

SEQ ID NO: 345998 - DNA, 131 bp, Zea mays
  unsure (1)..(131): unsure at all n locations
cggaannnncccgggtcggacccacgcccgtccccgcccacgccgtnctcgctctacgccgtctcgtgtgtacgtcagnncctagnnnaattagcttcatgcgacggtgccagattggggagaaaactcga

SEQ ID NO: 345999 - DNA, 378 bp, Zea mays
attgagaccaacaagcaacatagatagtggaatccagtagcaacaatagagcaacaatggcgaccaagatattttccctccttatgctccttgctctttctgcatgtgttgctaacgcgacaattttccctcaatgctcacaagctcctatagcttcccttcttcccccataccttccatcaatgatagcttcagtatgtgaaaacccagctcttcaaccctataggctccaacaagcaatcgcagcaagcaacatacctttatcacccttgtttcaacaatcgccagccctatctttggtgcagacattggtacaaaccatcagggcacagcagctgcagcaactcgtgctacctgtgatcaaccaagtagctctgg

SEQ ID NO: 346000 - DNA, 388 bp, Zea mays
ggcacaacagctgcagcaactcgtgctaccagtgatcagccaagtagctctggcaaacctttctccctactctcagcaacaacaatttcttccattcaaccaactgtctacactgaaccctgctgcttatttgcagcaacaacaactactaccattcagccagctagctactgcctactctcagcagcaacaatttcttccatttaaccaattcgccgcactgaacccctctgcttatttccagcagcaaatactactaccatttggccagctagctacaacaagccccgcttccttcttgacacaacaacaattgcttccgttctaccagcagtttgtggctaaccccgcaacccttttacaactgcaacagttgctgccctttgtc

SEQ ID NO: 346001 - DNA, 404 bp, Zea mays
ccgggcgacccacgcgtcgtcgacaccatgaaggctgatcgttgtccttgctctcctggcgctcgctgcgagcgccgcctccagtacaagcggcggctgtggctgccagacaccaccgtttcatctaccgcctccgttctatatgccgcctccgttctatctgccgccgcagcagcagccgcagccatggcaataccccactcaaccaccgcagctaagcccgtgccagcagttcggatcctgcggcgtcggcagcgtcggcagcccgttcctgggccagtgcgtcgagttcctgaggcaccagtgcagcccggcggcgacgccctacggctcgccacagtgccaggcgctgcagcagcagtgctgccaccagatcaggcaggtggagccgctgcaccggtacc

SEQ ID NO: 346002 - DNA, 378 bp, Zea mays
gtgctagcaaaccttgctgcctactctcagcaacagcagtttcttccattcaaccaactagctgcattgaactctgcttcttatttgcaacaacaacaactaccattcagccagctatctgctgcctacccccagcaatttcttccattcaaccaactgacagcattgaactctcctgcttatttacagcagcaacaactactaccattcagccagctagctggtgtgagccctgctaccttcttgacacaaccacagttgttgccgttctaccagcacgctgcgcctaacgctggcaccctcttacaactgcaacaattgctgccattcaaccaacttgctttgacaaacccagcagcattctaccaacaacccatc

SEQ ID NO: 346003 - DNA, 377 bp, Zea mays
caagcgaagcgcactagcaacaacttattaacaatggctaccaagatattagccctgcttgcgcttcttgcccttttagtgagcgcaacaaatgcgttcattattccacagtgctcacttgctcctagtgccattattccacagttcctcccaccagttacttcaatgggcttcgaacatccagccgtgcaagcctacaggctacaactagcgcttgcggcgagcgtcttacaacaaccaattgcccaattgcaacaacaatccttggcacatctaaacctacaaaccatcgcaacgcaacagcaacaacagtttctgccatcactgagccacctagccgtggtgaaccctgtcgcctacttgcaacagcagctact

SEQ ID NO: 346004 - DNA, 376 bp, Zea mays
tttcagcattcagaaacacaccaagcgattcgcactagcaacaacctaacaacaatggctaccaagatattagccctccttgcgcttcttgcccttttagtgagcgcaacaaatgcgttcattattccacagtgctcacttgctcctagtgccattattccacagttcctcccaccagttacttcaatgggcttcgaacatccagccgtgcaagcctacaggctacaactagcgcttgcggcgagcgtcttacaacaaccaattgcccaattgcaacaacaatccttggcacatctaaacctacaaaccatcgcaacgcaacagcaacaacagtttctgccatcactgagccacctagccgtggtgaaccctgtcg

SEQ ID NO: 346005 - DNA, 388 bp, Zea mays
ggcgcgggtgcatgctgacagtctatagactctctctatagctgctcacctacaattctaattcacgtggcacgtctgttttactaactgttcgtgtacttgtggaataactccttgtgcgttaccccaaactattatatcagcacttgtcagcatcaatcctcctcttttcgcctagcttggtcgataatagtcgaagtaggctccgcactcgattcgtcctttaccaacatgttgcgcagtcctgatatggctaatgggacgcgctcctgtagcggtcgcattaatgcgcggtcgggtgttggtggttaacacgcagtcgtgacccgttacactttgtcaagcgccctagctgcccgcttcatttcgatttgttgccattcctttc

SEQ ID NO: 346006 - DNA, 374 bp, Zea mays
caacatagaaagcacaatagtgtactaacaatggcagccaaaatattttgcttccttatgctccttggtctttctgcaagtgctgctaccgcaaccattttcccacaatgctcacaagctcctatagcttcctttcttcccccatacctctcaccagcggtgtcttcagtatgtgaaaacccaattcttcaaccctacaggatccaacaggcaatcgcagcaggcatcttacctttatcacccttgttcctccaacaaccgtcagccctattacagcagttacctttggtgcatttgttggcacaaaacatcaaggcacaacaactacaacaacttgtgctaggaaaccttgctgcctactctcagcaacagca

SEQ ID NO: 346007 - DNA, 376 bp, Zea mays
gtggaatacagtagcaacaatagatcaacaatggcggccaagatattttccatccttatgctccttgctctttctgcatgtgttgctaacgcgaccatttttcctcaatactcacaagctcctatagctgcccttcttcccccataccttccatcaatgaccgcttcagtatgtgaaaacccagcccttcaaccctacaggctccaacaagcaatcgcaacaagcaacttacctttatcacccctgttctttcaacaatcgccagccctatctttggtgcagtcattggtacaaaccatcagggcacaacagctgcagcaactcgtgctaccagtgatcagccaagtagctctggcaaacctttcttcctactctc

SEQ ID NO: 346008 - DNA, 373 bp, Zea mays
cccacgcgtccgagaccaacaagcaacatataaagtggaatacagtagcaacaatagagcaacaatggcggccaagatattttccatccttatgctccttgctctttctgcatgtgttgctaacgcgaccatttttcctcaatactcacaagctcctatagctgcccttcttcccccataccttccatcaatgaccgcttcagtatgtgaaaacccagcccttcaaccctacaggctccaacaagcaatcgcaacaagcaacttacctttatcacccctgttctttcaacaatcgccagccctatctttggtgcagtcattggtacaaaccatcagggcacaacagctgcagcaactcgtgctaccagtgatc

SEQ ID NO: 346009 - DNA, 381 bp, Zea mays
caactagcaacatagaaagcacaatagtgtaccaacaatggcagccaaaatattttgcttccttatgctccttggtctttctgcaagtgttgctaccgcaaccattttcccacaatgctcacaagctcctatagcttcccttcttcccccatacctctcaccagcggtgtcttcaatgtgtgaaaacccaattgttcaaccctacaggatccaacaggcaatcgcaacaggcatcttaccattatcacccttgttcctccaacaaccgtcagccctattacagcagttacctttggtccatttggtggcacaaaacatcagggcacaacaactacaacaacttgtgctagcaaaccttgctgcctactctcagcaacaaca

SEQ ID NO: 346010 - DNA, 365 bp, Zea mays
caacaagcaacataaaaagtttaattcagtagcaacaatagagcaacaatggcgaccacgatattttccctgcttatgctccttgctctttctacatgtgttgctaacgcgacaattttccctcaatgctcacaagctcctatagcttacctttttcccccataccttctatcaattatagcttcagtatgtgaaaacccagctcttcaaccatataggcttcaacaagcaatcgcagcaagcaacatacctttatcgcccttgttgcgacaacaatcgccagccctatctttggtgcagtcatagctacaaaccatcagggcacaacagctgcagcaactcgcgctacctgtgatcaaccaagt

SEQ ID NO: 346011 - DNA, 382 bp, Zea mays
attgagaccaactagcaacatagaaagcacaatagtgtaccaacaatggcagccaaaatattttgcttccttatgctccttggtctttctgcaagtgttgctaccgcaaccattttcccacaatgctcacaagctcctatagcttcccttcttcccccatacctctcaccagcggtgtcttcaatgtgtgaaaacccaattgttcaaccctacaggatccaacaggcaatcgcaacaggcatcttaccattatcacccttgttcctccaacaaccgtcagccctattacagcagttacctttggtccatttggtggcacaaaacatcagggcacaacaactacaacaacttgtgctagcaaaccttgctgcatactctcagc

SEQ ID NO: 346012 - DNA, 384 bp, Zea mays
ctagcaacatagaaagcacaatagtttaccaacaatggcagccaaaatattttgcttccttatgctccttggtctttctgcaagtgctgctaccgcaaccattttcccacaatgctcacaagctcctatagcttcctttcttcccccatacctctcaccagcggtgtcttcagtatgtgaaaacccaattcttcaaccctacaggatccaacaggcaatcgcagcaggcatcttacctttatcacccttgttcctccaacaaccgtcagccctattacagcagttacctttggtgcatttgttggcacaaaacatcaaggcacaacaactacaacaacttgtgctaggaaaccttgctgcctactctcagcaacagcagtttct

SEQ ID NO: 346013 - DNA, 372 bp, Zea mays
agcgaacacattagcaacaacctaactcaatggctaccaagatattatccctccttgcgcttttgcgcttttgcgagcgcacaaatgcgttcattattccacaatgctcacttgcttaagttcattattacacagttcctcccaccagttacttcaatgggcttcgaacacccagctgtgcaagcctataggctacaacaagcaattgcggcgagcgtcttacaacaaccaatttcccagttgcaacaacaatccttggcacatctaacaatacaaaccatcgcaacgcaacagcaacaacaattcctaccagcactgagccacctagccatggtgaaccctgccgcctacttgcaacagcagttgcttgca

SEQ ID NO: 346014 - DNA, 371 bp, Zea mays
gaccaacaagcaacatagaaagtgtaatccagtagcaacaatagagcaacaatggagaccaagatattttccctccttatgctccttgctctttctacatgtgttgctaacgcgacaattttccctcaatgctcacaagctcctatagcttccctttttcccccataccttccatcaattatagcttcagtatgtgaaaacccagctcttcaaccatataggcttcaacaagcaatcgcagcaagcaacatacctttatcgcccttgttgtgtcaacaatcgccagccctatctttggtgcagtcattggtacaaaccatcagggcacaacagctgcagcaactcgtgctacctgtgatcaaccaagtagc

SEQ ID NO: 346015 - DNA, 382 bp, Zea mays
agaccaacaagcaacatagaaagtggaatccagtagcaacaatagagcaacaatggcgaccaagatattttccctccttatgctccttgctctttctgcatgtgttgctaacgcgacaattttccctcaatgctcacaagctcctatagcttcccttcttcccccataccttccatcaatgatagcttcagtatgtgaaaacccagctcttcaaccctataggctccaacaagcaatcgcagcaagcaacatacctttatcacccttgtttcaacaatcgccagccctatctttggtgcagtcattggtacaaaccatcagggcacagcagctgcagcaactcgtgctacctgtgatcaaccaagtagctctggcaaacctt

SEQ ID NO: 346016 - DNA, 378 bp, Zea mays
gcacaatagtgtaccaacaatggcagccaaaatattttgcctccttatgctccttggtctttctgcaagtgctgctacggcgaccattttcccgaaatgctcgcaagctcctatagcttcccttcttcccccgtacctctcaccagcggtgtcttcggtatgtgaaaacccaattcttcaaccctacaggatccaacaggcaatcacagctggcatcttacctttatcacccttgttcctccaacaatcatcagccctattacatcagttacctttggtgcatttattggcacaaaacatcagggcacaacaactacaacaacttgtgctagcaaaccttgctgcctactctcagcaacagcagtttcttccattcaa

SEQ ID NO: 346017 - DNA, 379 bp, Zea mays
caacaagcaacatagaaagtggaattcagtagcaacaatagagcaacaatggcgaccaagatattttccctccttatgctccttgctctttctgcatgtgttgctaacgcgacaattttccctcaatgctcacaagctcctatagcttcccttcttcccccataccttccatcaatgatagcttcagtatgtgaaaacccagctcttcaaccctataggctccaacaagcaatcgcagcaagcaactcgtgctacctgtgatcaaccaagtagctctggcaaacctttctccctactctcagcaacaacaatttcttccattcaaccaactgtctacattgaaccgtgctgcttatttgcagcaacaactattaccatt

SEQ ID NO: 346018 - DNA, 375 bp, Zea mays
atcagggcacagcagctgcagcaactcgtgctacctgtgatcaaccaagtagctctggcaaacctttctccctactctcagcaacaacaatttcttccattcaaccaactgtctacattgaaccgtgctgcttatttgcagcaacaactattaccattcagccagctagctactgcctactctcagcaacaacaacttcttccatttaaccaattggccgcactgaaccccgctgcttatttgcagcagcaaatactactaccatttagccagctagctgcagcaagccgtgcttccttcttgacacagcaacagttgctgcctttctaccagcagtttgcggctaaccccgcaaccctcttacaactacaacaa

SEQ ID NO: 346019 - DNA, 376 bp, Zea mays
tgcttatttgcagcaacaactattaccattcagccagctagctactgcctactgtcagcaacaacaacttcttccatttaaccaattggccgcactgaaccccgctgcttatttgcagcagcaaatactactaccatttagccagctagctgcagcaagccgtgcttccttcttgacacagcaacagttgctgcctttctaccagcagtttgcggctaaccccgcaaccctcttacaactacaacaattgttgccctttgtccaacttgctttgacaaacccagcagcctcctaccaacaacacatcattggtggtgccctcttttagattgcttattagttgtaattcaataataaagttttttggatgatgtat

SEQ ID NO: 346020 - DNA, 153 bp, Zea mays
aaactattcagcactagcaacaaccttttgttttcggccgcccagccaagaacgcgcgcgtggcgtatctcgcttgtcgccaccacaacacaggcacgccctacagcacgcctcaagggcactcctagtggcattattgcacagagactctca

SEQ ID NO: 346021 - DNA, 386 bp, Zea mays
gcaacatagaaagtggaatccagtttcaacaatagagcaacaatggcgaccaagatattttccctccttatgctccttgctctttctgcatgtgttgctaacgcgacaattttccctcaatgctcacaagctcctatagcttcccttcttcccccataccttccatcaatgatagcttcagtatgtgaaaacccagctcttcaaccctataggctccaacaagcaatcgcagcaagcaacatacctttatcacccttgtttcaacaatcgccagccctatctttggtgcagtcattggtacaaaccatcagggcacagcagctgcagcaactcgtgctacctgtgatcaaccaagtagctctggcaaacctttctccctactctca

SEQ ID NO: 346022 - DNA, 361 bp, Zea mays
aatattttgagcattcagaaacacaccaagcgaagcacattagcaacaacctaacaacaatggctaccaagatattatccctccttgcgcttcttgcgctttttgcgagcgcaacaaatgcgttcattattccacaatgctcacttgctccaagttccattattacacagttcctcccaccagttacttcaatgggcttcgaacacccagctgtgcaagcctataggctacaacaagcaattgcggcgagcgtcttacaacaaccaatttcccagttgcaacaacaatccttggcacatctaacaatacaaaccatcgcaacgcaacagcaacaacaattcctaccagcactgagccacct

SEQ ID NO: 346023 - DNA, 380 bp, Zea mays
caactagcaacatagaaagcacaatattgtaccaacaatggcagccaaaatattttgcctccttatgctccttggtatttctgcaagtgctgctacggcgaccattttcccgcaatgctcacaagctcctatagcttcccttcttcccccgtacctctcaccagcggtgtcttcggtatgtgaaaacccaattcttcaaccctacaggatccaacaggcaatcgcagctggcatcttacctttatcacccttgttcctccaacaatcatcagccctattacagcagttacctttggtgcatttattggcacaaaacatcagggcacaacaactacaacaacttgtgctagcaaaccttgctgcctactctcagcaacagc

SEQ ID NO: 346024 - DNA, 380 bp, Zea mays
aagcgaagcgcactagcaacaacctaacaacaatggctaccaagatattatccctccttgcgcttcttgcgctttttgcgagcgcaacaaatgcgtccattattccacaatgctcacttgctcctagttccattattccacagttcctcccaccagttacttcaatggccttcgaacacccagctgtgcaagcctataggctacaacaagcgattgcggcgagcgtcttacaacaaccaattgcccaattgcaacaacaatccttggcacatctaacaatacaaaccatcgcaacgcaacagcaacaacagttcctaccagcactgagccacctagccatggtgaaccctgtcgcctacttgcaacagcagctgcttgca

SEQ ID NO: 346025 - DNA, 381 bp, Zea mays
tggacgtcagcctagcaattagcttatcgactccagattggagaactcgacaccatgaaggtgctgatcgttgcccttgctctcctggcgctcgctgcgagcgccgcctccagtacaagcggcggctgtggctgccagacaccaccgtttcatctaccgcctccgttctatatgccgcctccgttctatctgccgccgcagcagcagccgcagccatggcaataccccactcaaccaccgcagctaagcccgtgccagcagttcggatcctgcggcgtcggcagcgtcggcagcccgttcctgggccagtgcgtcgagttcctgaggcaccagtgcagcccggcggcgacgccctacggctcgccacagtgccaggcgctg

SEQ ID NO: 346026 - DNA, 153 bp, Zea mays
cggacgcgtgggtgctttgacaaactcaacagtgttctaccaacaacccatcattggtggtgccctcttttagattgcttatgagttatagttcaataatgaagttttttggatgatgtttgtggcgtcccagaaataagaaagtacatttct

SEQ ID NO: 346027 - DNA, 316 bp, Zea mays
caactagaacatagaaagcacaattgtgtaccaacaatggcagccaaaatattttgcctccttatgctccttggtctttctgcaagtgctgctacggcgaccattttcccacaatgctcacaagctcctatagcttcccttcttcccccgtacctctcaccagcggtgtcttcggtatgtgaaaacccaattcttcaaccctataggatccaacatgcaatcgcagctggcatcttacctttatcacccttgttcctccaacaatcatcagccctatttcagcagttacctttggtgcatttattgtcacaaaaca

SEQ ID NO: 346028 - DNA, 358 bp, Zea mays
caccaagcaagcgcactagctactttctctaacaacaatggctaccaagatattagccctccttgcgcttcttgccctttttgtgagcgcaacaaatgcgttcattattccacaatgctcacttgctcctagtgccattattccacagttcctcccaccagttacttcaatgggcttcgaacacctagctgtgcaagccaacatgcaacaacaagcgcttgcggcgagcgtcttacaacaaccaattgcccaattgcaacaacaatccttgccacatcttacaattcaagccatcacaacgcaacagcaacaacagtttctaccatcactgagccaccttgccatggtgaaccctgcc

SEQ ID NO: 346029 - DNA, 371 bp, Zea mays
  unsure (1)..(371): unsure at all n locations
cgtncgattgagaccaacagcaacatagatttctttttagtgtaccaacaatggcagccaaaatattttgcctccttatgctccttggcctttctgcaagtgctgctacggcgaccattttcccacaatgctcacaagctcctatagcttcccttcttcccccgtacctctcaccagcggtgtcttcggtatgagaaaacccaattcttcaaccctataggatccaacaggctatcgcagctggcattttacctttatcacccttgttcctccaacaatcatcagccctattacagcagttacctttggtgcatttattggcactaaacatcatggcacaacatcttctacaacttgtgctagcaaacctt

SEQ ID NO: 346030 - DNA, 372 bp, Zea mays
gagaccaacaagaacatagaaagtgtattccagtagcaacaatagagcaacaatggcgaccaagatattttccctccttatgctccttgctctttctgcatgtgttgctaacgcgacaattttccctcaatgctcacaagctcctatagcttcccttcttcccccataccttccatcaatgatagcttcagtatgtgaaaacccagctcttcaaccctataggctccaacaagcaatcgcagcaagcaacatacctttatcacccttgtttcaacaatcgccagccctatctttggtgcagtcattggtacaaaccatcagggcacagcagctgcagcaactcgtgctacctgtgatcaaccaagtagctct

SEQ ID NO: 346031 - DNA, 367 bp, Zea mays
caaccaactgtcacattgaaccgtgctgcttatttgcagcaacaactattaccattcagccagctagctactgcctactctcagcaacaacaacttcttccatttaaccaattggccgcactgaaccccgctgcttatttgcagcagcaaatactactaccatttagccagctagctgcagcaagccgtgcttccttcttgacacagcaacagttgctgcctttctaccagcagtttgcggctaaccccgcaaccctcttacaactacaacaattgttgccctttgtccaacttgctttgacaaacccagcagcctcctaccaacaacacatcattggtggtggccctctttagattgcttattagt

SEQ ID NO: 346032 - DNA, 387 bp, Zea mays
aagggccgacccaaccctcccacgagaagtaacaaccaagcgaagctcattatcaacaacctaacaacaatggctaccaagatattatccctccttgcgcttcttgcgctttttgcgagcgcaacaaatgcgttcattattccacaatgctcacttgctccaagttccattattacacagttcctcccaccagttacttcaatgggcttcgaacacccagctgtgcaagcctataggctacaacaagcaattgcggcgagcgtcttacaacaaccaatttcccagttgcaacaacaatccttggcacatctaacaatacaaaccatcgcaacgcaacagcaacaacaatttctaccagcactgtgccacctagccatggtgaaccct

SEQ ID NO: 346033 - DNA, 157 bp, Zea mays
gcagtttctccattcaacctattttctgcattgaactctgctgcttattggcgacaacatctaccattcagtcagctagctgctgcctacccccagcattcattttgatgcaaccaactggctgtattaaactctgctgcttatttactacagcaac

SEQ ID NO: 346034 - DNA, 373 bp, Zea mays
ttttgagcattctaaacacaccaatcgatgctacctagcaacgacttaacaacaatggctaccaagatattagccctccttgcgcttcttgccctttttgtgagcgcaacaaatgcgttcattattccacaatgctcacttgctcctagtgccattataccacagttcctccgaccagttacttcaatgggcttcgaacacctagctgtgcaagcctacaggctacaacaagcgcttgcggcgagcgtcttacaacaaccaattaaccaattgcaacaacaatccttggcacatctaaccatacaaaccatcgcaacacaacagcaacaacagttcctaccagcactgagccaactagatgtggtgaaccctg

SEQ ID NO: 346035 - DNA, 304 bp, Zea mays
aaaagagggcacaccaatgatgggttattgttcaataataaagttttttgtctgatgtttgtggcttcccagaaataagaaagtacatttcttaaaataaaaaaaaaataaaataaaaaaaaaatataaaaaaaaaaaaaaaattaaaaaaaaaaaaaaatttttttttaaaaaaaaaaaaaaaaaataaataaaaaattaaaaaatttataaaaaaaaaatttttaaaaaaaaaaaaaatggggtggtctttttaaaaaatacaaaattaacatccgtagtataaaaatatattttctttttt

SEQ ID NO: 346036 - DNA, 354 bp, Zea mays
gaccacgcgtacggttggatcctgtaggttgaacaggcattctcaacaggcatcttaccattatcacccttgttcctccaacaaccgtcagccctattacagcagttacctttggtccatttggtggcacaaaacatcagggcacaacaactacaacaacttgtgctagcaaaccttgctgcatactctcagcaacatcattttcttccattcaaccaactggctgcattgaactctgctgcttatttgcaacatcaattaccattcatccagctagttgctgcctacccccagcaattttttgcattcaaccaactagcagcattgaactctgctgcttatttacagcagcaa

SEQ ID NO: 346037 - DNA, 274 bp, Zea mays
ctagcaactagaaagcacatttgttttccaacaatggcagccaaaatattttgcctccttatgctccttggtctttctgcaagtgctgctacggcgaccattttcccacaatgctcacaagctcctatagcttcccttcttcccccgtacctctcaccagcggtgtcttcggtatgtgaaaacccaattcttcaaccctataagatccaacaggcaatcgcagctgggatcttacctttatcacccttgttccttcaacaatcatcaaccctat

SEQ ID NO: 346038 - DNA, 369 bp, Zea mays
ctgggtctcagaccattagctttatctactccagagcgcagaagaacccgatcgacaccatgagggtgttgctcgttgccctcgctctcctggctctcgctgcgagcgccacctccacgcatacaagcggcggctgcggctgccagccaccgccgccggttcatctaccgccgccggtgcatctgccaccttcggttcacctgccacctccggtgcatcttccaccgccggtccacctgccgccgccggtccacctgccaccgccggtccatgtgccgccgccggttcatctgccgtcgccaccatgccactaccctacttaaccgccccggtcttagtctcatacccagccacacccatgcccctgcc

SEQ ID NO: 346039 - DNA, 373 bp, Zea mays
cccacgcgtccgttttcagcattcataatcacaccaagcgaagcgcactagcaacaacctaacaacaatggctaccaagatattagccctccttgcgcttcttgcccttttagtgagcgcaacaaatgcgttcattattccacagtgctcacttgctcctagtgccattattccacagttcctcccaccagttacttcaatgggcttcgaacatccagccgtgcaagcctacaggctacaactagcgcttgcggcgagcgtcttacaacaaccaattgcccaattgcaacaacaatccttggcacatctaaacctacaaaccatcgcaacgcaacagcaacaacagtttctgccatcactgagccacctagcc

SEQ ID NO: 346040 - DNA, 111 bp, Zea mays
gtcagcctacaattagctcattttctccagataggagaactcgacaccatgaaggtgctgatcgttgcccttgccctcctggcgctcgctgcgagcgccgcctacagtaca

SEQ ID NO: 346041 - DNA, 341 bp, Zea mays
gcaacataaaagcacaatattgttccaacaatggcagccaaaatattttgcttccttatgctccttggtctttctgcaagtgttgctaccgcaaccattttcccacaatgctcacaagctcctatagcttcccttcttcccccatacctctcaccagcggtgtcttcaatgtgtgaaaacccaattgttcaaccctacatgatccaacaggcaatcgcaacaggcattttaccattatcacccttgttccttcaacaaccgtcagccctattacagctgttacctttggtccatttggtggcacaaaacatcagggtacaacaactacaacaacttgtgct

SEQ ID NO: 346042 - DNA, 382 bp, Zea mays
cgacccacgcgttcgattgagaccaacagcaacatagattgtctcaatagtgtaccaacaatggcagctaaaatattttgcctccttatgctccttggtctttctgcaagtgctgctacggcgaccattttcccacaatgctcacaagctcctatagcttcccttcttcccccgtacctctcaccaacggtgtcttcggtatgtgaaaacccaattcttcaaccctacaggatccaacaggcaatcgcagctggcatcttacctttatcacccttgttcctccaacaatcatcagccctattacagcagttacctttggtgcatttattggcacaaaacatcagggcacaacaactacaacaacttgtgctagcaaaccttg

SEQ ID NO: 346043 - DNA, 68 bp, Zea mays
  unsure (1)..(68): unsure at all n locations
naaaaaaaaaataaaaaaaaaaatttattttaaaaaaaaaaaaaaaaaaaaaaaaaaaaaaatattag

SEQ ID NO: 346044 - DNA, 374 bp, Zea mays
cagaaacacaccagcgaagcacatttgctacaacctaacaacaatggctaccaagatattatccctccttgcgcttcttgcgctttttgcgagcgcaacaaatgcgttcattattccacaatgctcacttgctccaagttccattattacacagttcctcccaccagttacttcaatgggcttcgaacacccagctgtgcaagcctataggctacaacaagcaattgcggcgagcgtcttacaacaaccaatttcccagttgcaacaacaatccttggcacatctaacaatacaaaccatcgcaacgcaacagcaacaacaattcctaccagcactgagccacctagccatggtgaaccctgccgcctacttgc

SEQ ID NO: 346045 - DNA, 374 bp, Zea mays
cagaaacacaccagcgaagcgcacttcctacaacctaacaacattggctaccaagatattagccctccttgcgcttcttgcccttttagtgagcgcaacaaatgcgttcattattccacagtgctcacttgctcctagtgccattattccacagttcctcccaccagttacttcaatgggcttcgaacatccagccgtgcaagcctacaggctacaactagcgcttgcggcgagcgtcttacaacaaccaattgcccaattgcaacaacaatccttggcacatctaaacctacaaaccatcgcaacgcaacagcaacaacagtttctgccatcactgagccacctagccgtggtgaaccctgtcgcctacttgc

SEQ ID NO: 346046 - DNA, 370 bp, Zea mays
attttgacattcagaaacacaccattcgaagctacctagcaacgacttaacaacaatggctaccaagatattagccctccttgcgcttcttgccctttttgtgagcgcaacaaatgcgttcattattccacaatgctcacttgctcctagtgccattataccacagttcctccgaccagttacttcaatgggcttcgaacacctagctgtgcaagcctacaggctacaacaagcgcttgcggcgagcgtcttacaacaaccaattaaccaattgcaacaacaatccttggcacatctaaccatacaaaccatcgcaacacaacagcaacaacaggttctaccagcactgagccaactagatgtggtgaac

SEQ ID NO: 346047 - DNA, 217 bp, Zea mays
cagaaataaaagttacattttcagtgtctaaaaaaaaaaaaaaaaaaaaaaaaaaaaaaaaaaaaaaaaaaaaaaaaaaaaaaaaaaaataaaaaaaaaaaaaaaaaaataaaaaaaaaaaaaaataaataataataataaattaaaataaataatatgaaaaaaattctaatattataatttattggggggcctcttttttataatataaaatttt

SEQ ID NO: 346048 - DNA, 268 bp, Zea mays
tacaactgcacaattgctgttatttataccaacttgctttgacaaacccagcagcattctaccaacaacccatcattggtggtgccctcttttagatttcttatgagttatagttcaataataaagttttttgtctgatgtttgtggcttcccagaaataagaaagtacatttctaaaaaaaaaaaaatatgtatcatacaaaaattttaaatattttaatatttttattatatgtgtgtcttttatttatatttttatatcaattat

SEQ ID NO: 346049 - DNA, 370 bp, Zea mays
gcgaagcgcctagcaacgacctatcaacaatggctaccaagatattagccctccttgcgcttcttgccctttttgtgagcgcaacaaatgcgttcattattccacaatgctcacttgctcctagtgccattattccacagttcctcccaccagttacttcaatgggcttcgaacacctagctgtgcaagccaacatgcaacaacaagcgcttgcggcgagcgtcttacaacaaccaattgcccaattgcaacaacaattcttgccacatctaacaatacaagccatcacaacgcatcagcaacaacagttcctaccagcactgagccacctagccatggtgaaccctgccgcctacttgcaagagcagct

SEQ ID NO: 346050 - DNA, 368 bp, Zea mays
gagcattcagaacacaccaagcgtttcttctctagcaacgacttaacaacaatggctaccaagatattagccctccttgcgcttcttgccctttttgtgagcgcaacaaatgcgttcattattccacaatgctcacttgctcctagtgccattataccacagttcctccgaccagttacttcaatgggcttcgaacacctagctgtgcaagcctacaggctacaacaagcgcttgcggcgagcgtcttacaacaaccaattaaccaattgcaacaacaatccttggcacatctaaccatacaaaccatcgcatcacatcatctacaacagttcctaccagcactgatcacactatatggggcgaaccc

SEQ ID NO: 346051 - DNA, 381 bp, Zea mays
  unsure (1)..(381): unsure at all n locations
ntccggctggcatcnttcctttatcaccacttgttttctccaacaatcatctagccctattacatcagttacctttggtgcatttattggcacaaaacatcagggcacaacaactacaacaacttgtgctagcaaaccttgctgcctactctcagcaacagcagtttcttccattcaaccaactagctgcattgaactctgcttcttatttgcaacaacaacaactaccattcagccagctacctgctgcctacccccagcaatttcttccattcaaccaactggcagcattgaactctcctgcttatttacagcagcaacaactactaccattcagccagctagctggtgtgagccctgctaccttcttgatacaaccac

SEQ ID NO: 346052 - DNA, 374 bp, Zea mays
gcaacatagaaagggaatccagtttcatcattagagcaacaatggcgaccaagatattttccctccttatgctccttgctctttctgcatgtgttgctaacgcgacaattttccctcaatgctcacaagctcctatagcttcccttcttcccccataccttccatcaatgatagcttcagtatgtgaaaacccagctcttcaaccctataggctccaacaagcaatcgcagcaagcaacatacctttatcacccttgtttcaacaatcgccagccctatctttggtgcagtcattggtacaaaccatcagggcacagcagctgcagcaactcgtgctacctgtgatcaaccaagtagctctggcaaacctttct

SEQ ID NO: 346053 - DNA, 373 bp, Zea mays
attttgagcattcaaaacacacctttctatgctacctagcaacgacttaacaacaatggctaccaagatattagccctccttgcgcttcttgccctttttgtgagcgcaacaaatgcgttcattattccacaatgctcacttgctcctagtgccattataccacagttcctccgaccagttacttcaatgggcttcgaacacctagctgtgcaagcctacaggctacaacaagcgcttgcggcgagcgtcttacaacaaccaattaaccaattgcaacaacaatccttggcacatctaaccatacaaaccatcgcaacacaacagcaacaacagttcctaccagcactgagccaactagatgtggtgaaccct

SEQ ID NO: 346054 - DNA, 98 bp, Zea mays
tggcggtccctcttttagattgcttattagttgtcattcaataatgaagttttttggctgatgtatgtggcctcctagaaataagaagttatatttcc

SEQ ID NO: 346055 - DNA, 100 bp, Zea mays
tataaaaaaaaaaaaaaaatttttttattaaaaaaaaaaaaaaaaaaaaaagaaaaaaaaaaaaaaaaaaaaatttaaatggtgggatgtgggggggggt

SEQ ID NO: 346056 - DNA, 293 bp, Zea mays
gcaacatagaatcacaatagtgttccatcaatggcagccaaaatattttgcctccttatgctccttggtctttctgcaagtgctgctacggcgaccattttcccgaaatgctcgcaagctcctatagcttcccttcttcccccgtacctctcaccagcggtgtcttcggtatgtgaaaacccaattcttcaaccctacaggatccaacaggcaatcacagctggcatcttacctttatcacccttgttcctccaacaatcatcagccctattacatcaagtacctttggggca

SEQ ID NO: 346057 - DNA, 368 bp, Zea mays
gagcattctaaacacaccaagcgttgcacattagcaacaacctaacaacaatggctaccaagatattatccctccttgcgcttcttgcgctttttgcgagcgcaacaaatgcgttcattattccacaatgctcacttgctccaagttccattattacacagttcctcccaccagttacttcaatgggcttcgaacacccagctgtgcaagcctataggctacaacaagcaattgcggcgagcgtcttacaacaaccaatttcccagttgcaacaacaatccttggcacatctaacaatacaaaccatcgcaacgtaacaacaacaacttcttccatttaaccaattggccgcactgaaccccgctgct

SEQ ID NO: 346058 - DNA, 369 bp, Zea mays
caacaataagcaacaatggagacctagatattttccctccttatgctccttgctctttctacatgtgttgctaacgcgacaattttccctcaatgctcacaagctcctatagcttccctttttcccccataccttccatcaattatagcttcagtatgtgaaaacccagctcttcaaccatataggcttcaacaagcaatcgcagcaagcaacatacctttatcgcccttgttgtgtcaacaatcgccagccctatctttggtgcagtcattggtacaaaccatcagggcacaacagctgcagcaactcgtgctacctgtgatcaaccaagtagctctggcaaacctttctccctactctccgcaacaa

SEQ ID NO: 346059 - DNA, 364 bp, Zea mays
agaccattagcttatctactccagagcgcagaagaacccgatcgacaccatgagggtgttgctcgttgccctcgctctcctggctctcgctgcgagcgccacctccacgcatacaagcggcggctgcggctgccagccaccgccgccggttcatctaccgccgccggtgcatctgccacctccggttcacctgccacctccggtgcatctcccaccgccggtccacctgccgccgccggtccacctgccaccgccggtccatgtgccgccgccggttcatctgccgccgtcaccatgccactaccctactcaaccgccccggcctcagcctcatcctcagccacacccatgcccgtgccaacag

SEQ ID NO: 346060 - DNA, 256 bp, Zea mays
  unsure (1)..(256): unsure at all n locations
tccggctggncaccacttctatccgagagtcttcttttgactcccatagccagctccgcttccccctggttccgcgccgacagccgattgcaaccccaaggctatccgcgtgtgccgcgccgccaggggctcctctgggctgcgtgcgagggcccgctcgcagnntccccggagtgaggggacctgttctgtacgatagggaaggggcgatcgtttgaaggtgggtgggttctcaattgagaagaaagcttcgatc

SEQ ID NO: 346061 - DNA, 177 bp, Zea mays
gtattaacacttacacatgattcttctccgcgagtggttcgagaccgacgcggtgctcatggtcagcctcagcaactacctcttcttcaccatcctcaccgtcatcattggtcgtgataaaggtccataatgacccccgtgacttgatccatcacggcggttagttggccaagatct

SEQ ID NO: 346062 - DNA, 193 bp, Zea mays
caatagttaccaacaatggcttttttaatattttgcctccttatgctccttggtctttctgcaagtgctgctacggcgaccattttcccacaatgctcacaagctcctatagcttaccttcttaccccgtacctttcaccagcggtgtcttcggattgtgaaaacccaattcttcatccctattggatccaac

SEQ ID NO: 346063 - DNA, 372 bp, Zea mays
gcaacatagaagcacaatagtgtaccaacaatggcagccaaaatattttgcttccttatgctccttggtctttctgcaagtgttgctaccgcaaccattttcccacaatgctcacaagctcctatagcttcccttcttcccccatacctctcaccagcggtgtcttcaatgtgtgaaaacccaattgttcaaccctacaggatccaacaggcaatcgcaacaggcatcttaccattatcacccttgttcctccaacaaccgtcagccctattacagcagttacctttggtccatttggtggcacaaaacatcagggcacaacaactacaacaacttgtgctagcaaaccttgctgcatactctcagcaacat

SEQ ID NO: 346064 - DNA, 370 bp, Zea mays
ggcacaacactacaacaacttgtgctaggaaaccttgctgcctactctcagcaacagcagtttcttccattcaaccaactggctgcattgaactctgctgcttatttgcaacaacaactaccattcagtcagctagctgctgcctacccccagcaatttcttccattcaaccaactggcagcattgaactctgctgcttatttacaacagcaacagctaccaccattcagccagctagctgatgtgagccctgttgccttcttgacacaacaacagttgttgccgttctacctgcacgctgcgcctaacgctggcaccctcttacaactgcaacaattgctgccattcaaccaacttgctttgacaaacc

SEQ ID NO: 346065 - DNA, 371 bp, Zea mays
ccctttttccccataccttccatctattatagcttcagtatgtgaaaacccagctcttcaaccatataggcttcaacaagcaatcgcagcaagcaacatacctttatcgcccttgttgtgtcaacaatcgccagccctatctttggtgcagtcattggtacaaaccatcagggcacaacagctgcagcaactcgtgctacctgtgatcaaccaagtagctctggcaaacctttctccctactctccgcaacaacaatttcttccattcaaccaactgtctacactgaaccctgctgcttatttgcagcaacaactattaccatttagccagctagctactgcctactctcaacaacaacaacttctttcat

SEQ ID NO: 346066 - DNA, 375 bp, Zea mays
tcgaagcacaatagttaccaacaatggcagcctaaatattttgcctccttatgctccttggtatttctgcaagtgctgctacggcgaccattttcccgcaatgctcacaagctcctatagcttcccttcttcccccgtacctctcaccagcggtgtcttcggtatgtgaaaacccaattcttcaaccctacaggatccaacaggcaatcgcagctggcatcttacctttatcacccttgttcctccaacaatcatcagccctattacagcagttacctttggtgcatttattggcacaaaacatcagggcacaacaactacaacaacttgtgctagcaaaccttgctgcctactctcagcaaacagcagtttctt

SEQ ID NO: 346067 - DNA, 386 bp, Zea mays
gggcggacccacgcgtccgagctttcataacacaccaagcgaatcgttttagcaacgacctaacaacaatggctaccaagatattagccctccttgcgcttcttgccctttttgtgagcgcaacaaatgcgttcattattccacaatgctcacttgctcctagtgccattattccacagttcctcccaccagttacttcaatgggcttcgaacacctagctgtgcaagccaacatgcaacaacaagcgcttgcggcgagcgtcttacaacaaccaattgcccaattgcaacaacaatccttgccacatctaacaatacaagccatcacaacgcaacagcaacaacagttcctaccagcactgagccacctagccatggtgaaccct

SEQ ID NO: 346068 - DNA, 402 bp, Zea mays
  unsure (1)..(402): unsure at all n locations
ggaattnccgggngggccccacccgtccgaaacaggcaactaaaaagtggattcttttagcaacaatagagcaacaatggcgaccaagatattttccctccttatgctccttgctctttctgcatgtgttgctaacgcgacaattttccctcaatgctcacaagctcctatagcttcccttcttcccccataccttccatcaatgatagcttcagtatgtgaaaacccagctcttcaaccctataggctccaacaagcaatcgcagcaagcaacatacctttatcacccttgtttcaacaatcgccagccctatctttggtgcagtcattggtacaaaccatcagggcacagcagctgcagcaactcgtgctacctgtgatcaaccaagtagctctggcaaa

SEQ ID NO: 346069 - DNA, 363 bp, Zea mays
gaccaacagcaacatagaaagcactatattgtaccaataatggcagccaaaatattttgcctcattatgctccttggtctttctgcaagtgctgctacggcgagcattttcccgcaatgctcacaagctcctatagcttcccttcttcccccatacctctcaccagcgatgtcttcagtatgtgaaaatccaattcttctaccctacaggatccaacaggcaatcgcagcaggcatcttacctttatcacccttgttcctccaacaatcatcagccctattacagcagttacctttggtgcatttattggcacaaaacatcagggcacaacaactacaacaactcgtgctagcaaaccttgct

SEQ ID NO: 346070 - DNA, 366 bp, Zea mays
tggacgtcagctagcaattagctcatcgactccagattggagaactcgacaccatgaaggtgctgatcgttgcccttgctctcctggcgctcgctgcgagcgccgcctccagtacaagcggcggctgtggctgccagacaccaccgtttcatctaccgcctccgttctatatgccgcctccgttctatctgccgccgcagcagcagccgcagccatggcaataccccactcaaccaccgcagctaagcccgtgccagcagttcggatcctgcggcgtcggcagcgtcggcagcccgttcctgggccagtgcgtcgagttcctgaggcaccagtgcagcccggcggcgacgccctacggctcgccac

SEQ ID NO: 346071 - DNA, 369 bp, Zea mays
gctgtgcagcctacaggctacaactagcgcttgcggcgagcgtcttacaacaaccaattaaccaattgcaacaacaatccttggcacatctaaccatacaaaccatcgcaacacaacagcaacaacagttcctaccagcactgagccaactagatgtggtgaaccctgtcgcctacttgcaacagcaggtgcttgcatccaacccacttgctctggcaaacgtagctgcataccaacaacaacaacaattgcaacagtttctgccagcgctcagtcaactagccatggtgaaccctgccgcctacctacaacagcaacaactgcttttatccagccctctcgttgtgggtgatgcacctacatacctgc

SEQ ID NO: 346072 - DNA, 65 bp, Zea mays
agacgacaacattatcatgtgtggtatgaccaataatatatgcatcataataaagttttggtttt

SEQ ID NO: 346073 - DNA, 212 bp, Zea mays
aacaacatcataacaaaaacaactttcttttaccaccaccacaacatcaccagcagctgcaacaccaacaacaacaagttcacatgctaccacaaaaacatcagcaacaacaagaagttcatgttcaacaacaacaacaacatccgtagcaccaactacaacaacatcaacagctccaacaacatcatcaatgtgaaggccaacaacaactt

SEQ ID NO: 346074 - DNA, 316 bp, Zea mays
agaccaactagcacatagaaagctcaattgtgtaccaacaatggcagctaaaatattttgcctccttatgctccttggtctttctgcaagtgctgctacggcgaccattttcccacaatgctcacaagctcctatagcttcccttcttcccccgtacctctcaccaacggtgtcttcggtatgtgaaaacccaattcttcaaccctacaggatccaacaggcaatcgcagctggcatcttacctttatcacccttgttcctccaacaatcatcagccctattacagcagttacctttggtgcatttattggcacaa

SEQ ID NO: 346075 - DNA, 364 bp, Zea mays
attcagaacacaccaagcgattttctctatcaacgacctaacaacaatggctaccaagatattagccctccttgcgcttcttgccctttttgtgagcgcaacaaatgcgttcattattccacaatgctcacttgctcctagtgccattattccacagtttctcccaccagttacttcaatgggcttcgaacacctagctgtgcaagccaacatgcaacaacaagcgcttgcggcgagcgtcttacaacaaccaattgcccaattgcaacaacaatccttgccacatctaacaatacaagccatcacaacgcaacagcaacaacagttcctaccagcactgagccacctagccatggtgaaccct

SEQ ID NO: 346076 - DNA, 273 bp, Zea mays
  unsure (1)..(273): unsure at all n locations
ggaannncccgggnncgacccangcgtnncgattcggttgtgaaaacccaattttttatccctacaggatccaacaggcattcacagctggcatcttacctttatcacccttgttcctccaacaatcatcatccctattacatcagttacctttggtgcatttattggcacaaaacatcatgtcactacaactacaacatcttgtgctagcaaaccttgctttctactctcataaacagcatttttttccattcaaccatctatgttcattta

SEQ ID NO: 346077 - DNA, 368 bp, Zea mays
  unsure (1)..(368): unsure at all n locations
atatnnnnacattcagaaacacaccaagcgaagcgcactagcaacgacctaacaacaatggctaccaagatattagccctccttgcgcttcttgccctttttgtgagcgcaacaaatgcgttcattattccacaatgctcacttgctcctagtgccattattccacagttcctcccaccagttacttcaatgggcttcgaacacctagctgtgcaagccaacatgcaacaacaagcgcttgcggcgagcgtcttacaacaaccaattgcccaattgcaacaacaatccttgccacatctaacaatacaagccatcacaacgcaacagcaacaactgtttctaccagctctgagccaccttagccatgg

SEQ ID NO: 346078 - DNA, 66 bp, Zea mays
gcgtcaactgcagccctactcgggctcccccgccaacttggcggcctaaacggggcggttaaaccg

SEQ ID NO: 346079 - DNA, 371 bp, Zea mays
cggacgcgtgggcgcagtgcgtatagaggatcgtcgaacagaacagcatgaagatggtcatcgttctcgtcgtgtgcctggctctgtcagctgccagcgcctctgcaatgcagatgccctgcccctgcgcggggctgcagggcttgtacggcgctggcgccggcctgacgacgatgatgggcgccggcgggctgtacccctacgcggagtacctgaggcagccgcagtgcagcccgctggcggcggcgccctactacgccgggtgtgggcagacgagcgccatgtaccagccgctccggcaacagtgctgccagcagcagatgaggatgatggacgtgcagtccgtcgcgcagcagctgcagatgatgatg

SEQ ID NO: 346080 - DNA, 370 bp, Zea mays
gaccaactagcacatagaaagcacaatagtgtaccaacaatggcagccaaaatattttgcttccttatgctccttggtctttctgcaagtgctgctaccgcaaccattttcccacaatgctcacaagctcctatagcttcctttcttcccccatacctctcaccagcggtgtcttcagtatgtgaaaacccaattcttcaaccctacaggatccaacaggcaatcgcagcaggcatcttacctttatcacccttgttcctccaacaaccgtcagccctattacagcagttacctttggtgcatttgttggcacaaaacatcaaggcacaacaactacaacaacttgtgctaggaaaccttgctgcctact

SEQ ID NO: 346081 - DNA, 366 bp, Zea mays
gcaacacaacaacaacaagttcacttgcaaccacaaaaacatcagcaacaacaatttcttccattcaaccaactgtctacattgaaccgtgctgcttatttgcagcaacaactattaccattcagccagctagctactgcctactctcagcaacaacaacttcttccatttaaccaattggccgcactgaaccccgctgcttatttgcagcagcaaatactactaccatttagccagctagctgcagcaagccgtgcttccttcttgacacagcaacagttgctgcctttctaccagcagtttgcggctaaccccgcaaccctcttacaactacaacaattgttgccctttgtccaacttgctttg

SEQ ID NO: 346082 - DNA, 367 bp, Zea mays
attcaacaactggcagcattttactctcctgcttatttacagcagcaacaactactaccattcagccagctagctggtgtgagccctgctaccttcttgatacaaccacagttgttgccgttctaccagcacgctgcgcctaacgctggcaccctcttacaactgcaacaattgctgccattcaaccaacttgctttgacaaacccagcagcgttctaccaacaacccatcattggtggtgccctcttttagatttcttatgagttatagttcaataataaagttttttgtctgatgtttgtggcttcccagaaataagaaagtacatttttagattcttaaaaaaaaaaaaaaagggcggccgctc

SEQ ID NO: 346083 - DNA, 315 bp, Zea mays
agcggcagtgcgtagagaggatcgtttaacagaacagcatgaagatggtcatcgttctcgtcgtgtgcctggctctgtcagctgccagcgcctctgcaatgcagatgccctgcccctgcgcggggctgcagggcttgtacggcgctggcgccggcctgacgacgatgatgggcgccggcgggctgtacccctacgcggagtacctgaggcagccgcagtgcagcccgctggcggcggcgccctactacgccgggtgtgggcagacgagcgccatgtaccatccgctccggcaacatttgctgccagcagcagatg

SEQ ID NO: 346084 - DNA, 319 bp, Zea mays
ccagagcgcagaagaacccgatcgacaccatgagggtgttgctcgttgccctcgctctcctggctctcgctgcgagcgccacctccacgcatacaagcggcggctgcggctgccagccaccgccgccggttcatctaccgccgccggtgcatctgccacctccggttcacctgccacctccggtgcatctcccaccgccggtccacctgccgccgccggtccacctgccaccgtcggtccatgtgccgccgccggttcatctgccgccgccaccatgccactaccctactcaaccggcccggtctcagcctcatcccca

SEQ ID NO: 346085 - DNA, 100 bp, Zea mays
aatattttgagcattcagaaactcatcaagcgaagcacattagcaacaacctaacaacaatggctaccaagatagagcccttcttgcgctactgcgcttt

SEQ ID NO: 346086 - DNA, 300 bp, Zea mays
ctgtcgcctacttgcaacagcagctactttcatccaacccacttgctctggcgaacgtagctgcataccagcaacaacaacgtctgcaacagtttatgccagcgctcagtcaactagccatggtgaaccctgtcgcctacctacaacagcaacaattgctttcatctagcccgctcgctgtgggcaatgcacctacgtacctacaacaacagttgctgcaacagattgtaccagctctgactcaactaggtgtggcaaaccctactgcctacttgcaacagttgctttcattcaaccaac

SEQ ID NO: 346087 - DNA, 343 bp, Zea mays
gaaagtggaatccagtagcaacaatagatcaacaatggcgaccaagatattttccctgcttatgctccttgctctttctgcatgtgttgctaacgcgacaattttccctcaatgctcacaagctcctatagcttcccttcttaccccataccttccatcaatgatagcttcagtatgtgaaaacccagctcttcaaccctataggctccaacacgcaatcgcagcaagcaacataccccaatcaccctagtttcaacaatcgccagccctatctttggtgcagtcattggtacaaaccatcagggcacaccatctgcagcaactcgttctacctgtgatcaac

SEQ ID NO: 346088 - DNA, 322 bp, Zea mays
catcaatcatcattcatcttagtattatttgcaccaaatcaaatctgcaacatcgattatctaactccaaaaaccatgaagctggtgcttgtggttcttgctttcattgctttagtatcaagtgtttcttgtacacagacaggcggctgcagctgtggtcaacaacaaagccatgagcagcaacatcatccacaacaacatcattcacaaaaacaacaacatcaaccaccaccacaacatcaccagcagcagcaacaccatcaacaacatgttcacatgctaccacataaacatcagctacaacaagaagttcatgttcaac

SEQ ID NO: 346089 - DNA, 289 bp, Zea mays
tcgcccacacttgcggggtcttcataccattagctttatctactccagagcgcagaagaacccgatcgacaccatgagggtgttgctcgttgccctcgctctcctggctctcgctgcgagcgccacctccacgcatacaagcggcggctgcggctgccagccaccgccgccggttcatctaccgccgccggtgcatctgccacctccggttcacctgccacctccggtgcattttccaccgccggtccacctgccgccgccggtccacctgccaccgccggtccatgtg

SEQ ID NO: 346090 - DNA, 362 bp, Zea mays
cccacgcgtccgcaacaagcaacatagaaagtggaatccagtagcaacaatagagcaacaatggagaccaagatattttccctccttatgctccttgctctttctacatgtgttgctaacgcgacaattttccctcaatgctcacaagctcctatagcttccctttttcccccataccttccatcaattatagcttcagtatgtgaaaacccagctcttcaaccatataggcttcaacaagcaatcgcagcaagcaacatacctttatcgcccttgttgtgtcaacaatcgccagccctatctttggtgcagtcattggtacaaaccatcagggcacaacagctgcagcaactcgggctacc

SEQ ID NO: 346091 - DNA, 255 bp, Zea mays
ccggttccggtcgacccagcgtcggatagcttaccccatgcggtcggggccgcgggtgggaggcagggtgcgctgacctgaggagaacaggacaaaaatgaccctggacaccggcctaaggacagctgcagcatggacaggggctgggacctggccccgtctgaaccggtgcacagttatcggccgcggtcggggcggcgtcagggggctactgcacgcaaggttcagaatgccgctggaccacgcgaagcgggc

SEQ ID NO: 346092 - DNA, 369 bp, Zea mays
aattagctcatcgactccagattggagaactcgacaccatgaaggtgctgatcgttgcccttgctctcctggcgctcgctgcgagcgccgcctccagtacaagcggcggctgtggctgccagacaccaccgtttcatctaccgcctccgttctatatgccgcctccgttctatctgccgccgcagcagcagccgcagccatggcaataccccactcaaccaccgcagctaagcccgtgccagcagttcggatcctgcggcgtcggcagcgtcggcagcccgttcctgggccagtgcgtcgagttcctgaggcaccagtgcagcccggcggcgacgccctacggctcgccacagtgccaggcgctgcagc

SEQ ID NO: 346093 - DNA, 351 bp, Zea mays
agcattcagaaacacaccaagcgaatcgcactagcaacgacctaacaacaatggctaccaagatattagccctccttgcgcttcttgccctttttgtgagcgcaacaaatgcgttcattattccacaatgctcacttgctcctagtgccattattccacagttcctcccaccagttacttcaatgggcttcgaacacctagctgtgcaagccaacatgcaacaacaagcgcttgcggcgagcgtcttacaacaaccaattgcccaattgcaacaacaatccttgccacatctaacaatacaagccatcacaacgcaacagcaacaacagttcctaccagcactgagccacc

SEQ ID NO: 346094 - DNA, 370 bp, Zea mays
aaagtggaatccagtagcaacaatagagcaacaatggcgaccaagatattttccctccttatgctccttgctctttctgcatgtgttgctaacgcgacaattttccctcaatgctcacaagctcctatagcttcccttcttcccccataccttccatcaatgatagcttcagtatgtgaaaacccagctcttcaaccctataggctccaacaagcaatcgcagcaagcaacatacctttatcacccttgtttcaacaatcgccagccctatctttggtgcagtcattggtacaaaccatcagggcacagcagctgcagcaactcgtgctacctgtgatcaaccaagtagctctggcaaaccttttctcct

SEQ ID NO: 346095 - DNA, 359 bp, Zea mays
tgagcattcaaaaacacaccaagcttttcgcactagcaacaacctaacaacaatggctaccaagatattatccctccttgcgcttcttgcgctttttgcgagcgcaacaaatgcgtccattattccacaatgctcacttgctcctagttccattattccacagttcctcccaccagttacttcaatggccttcgaacacccagctgtgcaagcctataggctacaacaagcgattgcggcgagcgtcttacaacaaccaattgcccaattgcaacaacaatccttggcacatctaacaatacaaaccatcgcaacgcaacagcaacaacagttcctaccaacactgagccacctagcca

SEQ ID NO: 346096 - DNA, 136 bp, Zea mays
ggctggcaccattttacaagtgttttgattgctgcaatacaaccaacttggtgggacaaatttaggagagttctaccaacagcgcattattgatggggccctatttcggatcaattatgacttatagttcagtaac

SEQ ID NO: 346097 - DNA, 373 bp, Zea mays
tttgagcattcagaaacacaccatgttgaagctacctagcaacgacttaacaacagtggctaccaagatattagccctccttgcgcttcttgccctttttgtgagcgcaacaaatgcgttcattattccacaatgctcacttgctcctagtgccattataccacagttcctccgaccagttacttcaatgggcttcgaacacctagctgtgcaagcctacaggctacaacaagcgcttgcggcgagcgtcttacaacaaccaattaaccaattgcaacaacaatccttggcacatctaaccatacaaaccatcgcaacacaacagcaacaacagtttctatcagtactgagccaactagatgtggtgaaccct

SEQ ID NO: 346098 - DNA, 322 bp, Zea mays
attgagaccaacaagcaacatagaatgttttatccagtagcaacaatagagcaacagtggcgaccaagatattttccctccttatgctccttgctctttctgcatgcgttgctaacgcgacaatttttcctcaatgctcacaagctcctatagcttcccttcttcccccataccttccatcaatgatagcttcagtatgtgaaaacccagctcttcaaccctataggctccaacaagcaatcgcaacatgcaacatacctctatcaccctagtttcaacaatcgccagccctatctttggtgcagacattggtacaaaccat

SEQ ID NO: 346099 - DNA, 319 bp, Zea mays
gcactcatgcatcacaaaacatccttctatcagtaccatcaatcatcattcatgttagtagtataggcaccaaatcaaatctgcaacatcaattatctaactccaaaaaccatgaagctggtgcttgtggttcttgctttcattgctttagtatcaagtgtttcttgtacacagacaggcggctgcagctgtggtcaacaacaaagccatgagcagcaacatcatccacaacaacatcatccacaaaaacaacaacatcaaccaccaccacaacatcaccagcagcagcaacaccaacaacaacaagttcacatgcaac

SEQ ID NO: 346100 - DNA, 367 bp, Zea mays
cagaaacacaccaagcgaagcgcactagcaacaacctaacaacaatggctaccaagatattagccctccttgcgcttcttgcccttttagtgagcgcaacaaatgcgttcattattccacagtgctcacttgctcctagtgccattattccacagttcctcccaccagttacttcaatgggcttcgaacatccagccgtgcaagcctacaggctacaactagcgcttgcggcgagcgtcttacaacaaccaattgcccaattgcaacaacaatccttggcacatctaaacctacaaaccatcgcaacgcaacagcaacaacagtttctgccatcactgagccacctagccgtggtgaaccctgtcgc

SEQ ID NO: 346101 - DNA, 352 bp, Zea mays
attttgagcattcagaaacacaccatgcgaagcgcactagcaacgacctaacaacaatggctaccaagatattagccctccttgcgcttcttgccctttttgtgagcgcaacaaatgcgttcattattccacaatgctcacttgctcctagtgccattattccacagttcctcccaccagttacttcaatgggcttcgaacacctagctgtgcaagccaacatgcaacaacaagcgcttgcggcgagcgtcttacaacaaccaattgcccaattgcaacaacaatccttgccacatctaacaatacaagccatcacaactcagcagcatcaacagttcctaccagcactgag

SEQ ID NO: 346102 - DNA, 320 bp, Zea mays
cccacgcgtccgcagaaacacaccttgctatagcgcactagcaacaacctaacaacaatggctaccaagatattatccctccttgcgcttcttgcgctttttgcgagcgcaacaaatgcgtccattattccacaatgctcacttgctcctagttccattattccacagttcctcccaccagttacttcaatggccttcgaacacccagctgtgcaagcctataggctacaacaagcgattgctgcgagcgtcttacaacaaccaattgcccaattgcaacaacaatccttggcacatctaacattacaaaccatcgcaac

SEQ ID NO: 346103 - DNA, 372 bp, Zea mays
attgagaccaactagcaacatagaaagctcaatagtgtaccaacaatggcagccaaaatattttgcctccttatgctccttggtctttctgcaagtgctgctacggcgaccattttcccgcaatgctcgcaagctcctatagcttcccttcttcccccgtacctctcaccagcggtgtcttcggtatgtgaaaacccaattcttcaaccctacaggatccaacaggcaatcgcagctggcatcttacctttatcacccttgttcctccaacaatcatcagccctattacaacagttacctttggtgcatttattggcacaaaacattagggcacaacaactacaacaacttgtgctagcaaaccttgctgcc

SEQ ID NO: 346104 - DNA, 372 bp, Zea mays
attttgagcattcagaaacacaccaagcgaagcacattagcaacaacctaacaacaatggctaccaagatattatccctccttgcgcttcttgcgctttttgcgagcgcaacaaatgcgttcattattccacaatgctcacttgctccaagttccattattacacagttcctcccaccagttacttcaatgggcttcgaacacccagctgtgcaagcctataggctacaacaagcaattgcggcgagcgtcttacaacaaccaatttcccagttgcaacaacaatccttggcacatctaacaatacaaaccatcgcaacgcaacagcaacaacaattcctaccagcactgagccacctagccatggtgaacc

SEQ ID NO: 346105 - DNA, 321 bp, Zea mays
aaagtggaatccagtagcaacaatatagcaacaatggcgaccaagatattttccctccttatgctccttgctctttctgcatgtgttgctaacgcgacaattttccctcaatgctcacaagctcctatagcttcccttcttcccccataccttccatcaatgatagcttcagtatgtgaaaacccagctcttcaaccctataggctccaacaagcaatcgcagcaagcaacatacctttatcacccttgtttcaacaatcgccagccctatctttggtgcagtcattggtacaaaccatcagggcacagcagctgcagcaa

SEQ ID NO: 346106 - DNA, 169 bp, Zea mays
gttctagatcgcgagcggccgcccttattttttttttttattattatatttttggtttttttttataatttttatcttcatatttcacttatactacaattttaataaaattatacaaacaaatatattatatctttttaaaaaattaattataatacaaatataaaat

SEQ ID NO: 346107 - DNA, 312 bp, Zea mays
attttcagcattcagaaacacaccatgcgaagcgcactagcaacaacctaacaacaatggctaccaagatattagccctccttgcgcttcttgcccttttagtgagcgcaacaaatgcgttcattattccacagtgctcacttgctcctagtgccattattccacagttcctcccaccagttacttcaatgggcttcgaacatccagccgtgcaagcctacaggctacaactagcgcttgcggcgagcgtcttacaacaaccaattgcccaattgcaacaacaatccttggcacatctaaacctacaaacca

SEQ ID NO: 346108 - DNA, 383 bp, Zea mays
cccgggcggcccaacccgtccggcaacatagaaagcacaatagtgttccaacaatggcagctaaaatattttgcctccttatgctccttggtctttctgcaagtgctgctacggcgaccattttcccacaatgctcacaagctcctatagcttcccttcttcccccgtacctctcaccaacggtgtcttcggtatgtgaaaacccaattcttcaaccctacaggatccaacaggcaatcgcagctggcatcttacctttatcacccttgttcctccaacaatcatcagccctattacagcagttacctttggtgcatttattggcacaaaacatcagggcacaacaactacaacaacttgtgctagcaaaccttgctgcctac

SEQ ID NO: 346109 - DNA, 191 bp, Zea mays
gagcattcagaaacacaccatgtctttgcacattagcaacaacctaacaacaatggctaccaagatattatccctccttgcgcttcttgcgctttttgcgagcgcaacaaatgcgttcattattccacaatgctcacttgctccaagtttcattattacacagttcctcccacctgtttcttcaatgggct

SEQ ID NO: 346110 - DNA, 314 bp, Zea mays
gttcgtagcgaaggcagcatcagcttctactgttggatttgcaatattcattattgggttcttgactcagcttgttaccacctttgggttcccttattcggctgactacaaaaagttgtaccggacattgtggtctttatttcctcctgatttatttgccaaagccctcaacattctaggcaaggcaacagccactcctgaggataaaggtgttagctggaatcagcgtggggagtgcccatcttatgagactgactgtgtcattactattgatgatttatataagtggctcatattcacatctttcttgtggt

SEQ ID NO: 346111 - DNA, 152 bp, Zea mays
attagctttatctactccagagcgcagaataacccgatcgacaccatgagggtgtggctcgttgccctcgctctcctggctctcgctgcgagcgccacctccacgcatacaagcggcggctgctgttgccagccaccgtcgtcggttcatct

SEQ ID NO: 346112 - DNA, 330 bp, Zea mays
  unsure (1)..(330): unsure at all n locations
cgcggacgcgtgggcggaccgcgtgggtagtatagtggaatccagtagcaacaatagagcaacaatggcgaccaagatattttccctccttatgctccttgctctntctgcatgtgttgctaacgcgacaattttccctcaatgctcacaagctcctatagcttcccttcttcccccataccttccatcaatgatagcttcagtatgtgaaaacccagctcttcaaccctatatgctccaacaagcaatcgcagcaagcaacatacctttatcacccttgtttcaacaatcgccagccctatctttggtgcagtcattggtacaaaccat

SEQ ID NO: 346113 - DNA, 334 bp, Zea mays
ctagcaacatagaaagcacaatagtgtaccaacaatggcagccaaaatattttgcctccttatgctccttggtctttctgcaagtgctgctacggcgaccattttcccacaatgctcacaagctcctatagcttcccttcttcccccgtacctctcaccagcggtgtcttcggtatgtgaaaacccaattcttcaaccctataggatccaacaggcaatcgcagctggcatcttacctttatcacccttgttcctccaacaatcatcagccctattacagcagttacctttggtgcatttattggcacaaaacatcatggcacaacaactacaa

SEQ ID NO: 346114 - DNA, 294 bp, Zea mays
  unsure (1)..(294): unsure at all n locations
caaatgcgttcattattccacagtgctcacttgctcctagtgccattattccacaggtcctcccaccagttacttcaatgggcttcgaacatccagccgtgcaagcctacaggctacaactagcgcttgcggcgagcgtcttacaacaaccaattgcccaattgcaacaacaatccttggcacatctaaacctacaaaccatcgcagcgcatcaatatcaacagtttctgccatcactgaaccatctagccgnggtgaaccctgtcgcctacttgtaacagcagctacttgcat

SEQ ID NO: 346115 - DNA, 367 bp, Zea mays
ctgggtcttcagaccattagctttatctactccagagcgcagaagaacccgatcgacaccatgagggtgttgctcgttgccctcgctctcctggctctcgctgcgagcgccacctccacgcatacaagcggcggctgcggctgccagccaccgccgccggttcatctaccgccgccggtgcatctgccacctccggttcacctgccacctccggtgcatctcccaccgccggtccacctgccgccgccggtccacctgccaccgccggtccatgtgccgccgccggttcatctgccgtcgccaccatgccactaccctacttaaccgccccggtcttagactgatccgcagccacacccatgcccgt

SEQ ID NO: 346116 - DNA, 368 bp, Zea mays
ggagaccaagatattttccctccttatgctccttgctctttctacatgtgttgctaacgcgacaattttccctcaatgctcacaagctcctatagcttccctttttcccccataccttccatcaattatagcttcagtatgtgaaaacccagctcttcaaccatataggcttcaacaagcaatcgcagcaagcaacatacctttatcgcccttgttgtgtcaacaatcgccagccctatctttggtgcagtcattggtacaaaccatcagggcacaacagctgcagcaactcgtgctacctgtgatcaaccaagtagctctggcaaacctttctccctactctccgcaacaacaatttcttccattca

SEQ ID NO: 346117 - DNA, 363 bp, Zea mays
gcaacatagaaagcacaatagtgtatcaacaatggcagccaaaatattttgcctgcttatgctccttggtctttctgcaagtgctgctacggcgaccattttcccgaaatgctcgcaagctcctatagcttcccttcttcccccgtacctctcaccagcggtgtcttcggtatgtgaaaacccaattcttcaaccctacaggatccaacaggcaatcacagctggcatcttacctttatcacccttgttcctccaacaatcatcagccctattacatcagttacctttggtgcatttattggcacaaaacatcagggcacaacaactacaacaacttgtgctagcaaaccttgctgcctactc

SEQ ID NO: 346118 - DNA, 369 bp, Zea mays
caacaagcaacatagaaagtggaattcagtagcaacaatagagcaacaatggcgaccaagatattttccctccttatgctccttgctctttctgcatgtgttgctaacgcgacaattttccctcaatgctcacaagctcctatagcttcccttcttcccccataccttccatcaatgatagcttcagtatgtgaaaacccagctcttcaaccctataggctccaacaagcaatcgcagcaagcaacatacctttatcacccttgtttcaacaatcgccagccctatctttggtgcagtcattggtacaaaccatcagggcacagcagctgcagcaactcgtgctacctgtgatcaaccaagtagctctg

SEQ ID NO: 346119 - DNA, 369 bp, Zea mays
gaaagcacaatagtgtaccaacaatggcagccaaaatattttgcttccttatgctccttggtctttctgcaagtgctgctaccgcaaccattttcccacaatgctcacaagctcctatagcttcctttcttcccccatacctctcaccagcggtgtcttcagtatgtgaaaacccaattcttcaaccctacaggatccaacaggcaatcgcagcaggcatcttacctttatcacccttgttcctccaacaaccgtcagccctattacagcagttacctttggtgcatttgttggcacaaaacatcaaggcacaacaactacaacaacttgtgctaggaaaccttgctgcctactctcagcaacagcagt

SEQ ID NO: 346120 - DNA, 372 bp, Zea mays
gaaacacaccaagcgaagcacattatcatcaacctaacaacaatggctaccaagatattatccctccttgcgcttcttgcgctttttgcgagcgcaacaaatgcgttcattattccacaatgctcacttgctccaagttccattattacacagttcctcccaccagttacttcaatgggcttcgaacacccagctgtgcaagcctataggctacaacaagcaattgcggcgagcgtcttacaacaaccaatttcccagttgcaacaacaatccttggcacatctaacaatacaaaccatcgcaacgcaacagcaacaacaattcctaccagcactgagccacctagccatggtgaaccctgccgcctacttg

SEQ ID NO: 346121 - DNA, 369 bp, Zea mays
gcaacatagaaagcacaatagtgttctcaacaatggcagccaaaatattttgccgccttatgctccttggtctttctgcaagtgctgctacggcgaccattttcccgcaatgctcgcaagctcctatagcttcccttcttcccccgtacctctcaccagcggtgtcttcggtatgtgaaaacccaattcttcaaccctacaggatccaacaggcaatcgcagctggcatcttacctttatcacccttgttcctccaacaatcatcagccctattacaacagttacctttggtgcatttattggcacaaaacatcagggcacaacaactacaacaacttgtgctagcaaaccttgctgcctactctcagc

SEQ ID NO: 346122 - DNA, 359 bp, Zea mays
gcacacacacacaaccagatctccttcaaatccacccgtcggcacctccgcttgaagatgcagatctttgtgaaaaccctgaccggcaagactatcaccctcgaggtggagtcgtctgacaccattgacaacgttaaggccaagatccaggacaaggagggcatccccccagaccagcagcggctcatcttcgctggcaaacagcttgaggacgggcgcacgcttgctgactacaacatccagaaggagagcaccctccaccttgtgctccgcctcaggggaggcatgcagatctttgtgaaaaccctgaccggcaagactatcaccctcgaggtggagtcctctgacaccattgacaa

SEQ ID NO: 346123 - DNA, 320 bp, Zea mays
gagaccaactagcaacatatatagttcaatagtgtaccaacaatggcagccaaaatattttgcttccttatgctccttggtctttctgcaagtgctgctaccgcaaccattttcccacaatgctcacaagctcctatagcttcctttcttcccccatacctctcaccagcggtgtcttcagtatgtgaaaacccaattcttcaaccctacaggatccaacaggcaatcgcagcaggcatcttacctttatcacccttgttcctccaacaaccgtcagccctattacagcagttacctttggtgcatttgttggcacaaaa

SEQ ID NO: 346124 - DNA, 325 bp, Zea mays
  unsure (1)..(325): unsure at all n locations
cgtncgattttgagcattcataaacacactatgctttagcacattagcaacaacctaacagcagtggctaccaagatattatccctccttgcgcttcttgcgctttttgcgagcgcaacaaatgcgttcattattccacaatgctcacttgctccaagttccattattacacagttcctcccaccagttacttcaatgggcttcgaacacccagctttgcaagcctataggctacaacaagcaattgcggcgagctgtcttacaacaaccaattttccagttgcaacaacaatccttggcacatctaacaatacaaaccattgca

SEQ ID NO: 346125 - DNA, 372 bp, Zea mays
gtcagcctagcaattagctcatcgactctagattggagaactcgacaccatgaaggtgctgatcgttgcccttgctctcctggcgctcgctgcgagcgccgcctccagtacaagcggcggctgtggctgccagacaccaccgtttcatctaccgcctccgttctatatgccgcctccgttctatctgccgccgcagcagcagccgcagccatggcaataccccactcaaccaccgcagctaagcccgtgccagcagttcggatcctgcggcgtcggcagcgtcggcagcccgttcctgggccagtgcgtcgagttcctgaggcaccagtgcagcccggcggcgacgccctacggctcgccacagtgccaggc

SEQ ID NO: 346126 - DNA, 178 bp, Zea mays
  unsure (1)..(178): unsure at all n locations
ggccgacccacgcgnncggtggaagcaagagatctcacacggtttctcttacgaggaggagcacaaggtttacgggcgggatattcccttggacggccacatgcacggcgctgacgttgatttggctgccttcggtgattacgcctcgaagactcaagagctcgactagatgactcgc

SEQ ID NO: 346127 - DNA, 317 bp, Zea mays
actagcaacatagaaagcacattattgtaccaacaatggcagccaaaatattgggcttccttatgctccttggtctttctgcaagtgctgctaccgcaaccattttcccacaatgctcacaagctcctatagcttcctttcttcccccatacctctcaccagcggtgtcttcagtatgtgaaaacccaattcttcaaccctacaggatccaacatgcaatcgcagcaggcatcttacctttatcacccttgttcctccaacaaccgtcagccctattacagcagttacctttggtgcatttgttggcacaaaaacat

SEQ ID NO: 346128 - DNA, 354 bp, Zea mays
agcgcactagcaacaacctaacatctatggctaccaagatattagccctccttgcgcttcttgcccttttagtgagcgcaacaaatgcgttcattattccacagtgctcacttgctcctagtgccattataccacagttcctcccaccagttacttcaatgggcttcgaacatccagccgtgcaagcctacaggctacaactagcgcttgcggtgagcgtcttacaacaaccaattgcccaattgcaacaacaatccttggcacatctaaacctacaaaccatcgtatcgcatcagcaacaacagtttctgacattactgaaccacctagccgtggtgaaccctgtagcctact

SEQ ID NO: 346129 - DNA, 369 bp, Zea mays
ttgagaccaacatgtcaacatatatattggaatacagtagcaacaatagagcaacaatggcggccaagatattttccatccttatgctccttgctctttctgcatgtgttgctaacgcgaccatttttcctcaatactcacaagctcctatagctgcccttcttcccccataccttccatcaatgaccgcttcagtatgtgaaaacccagcccttcaaccctacaggctccaacaagcaatcgcaacaagcaacttacctttatcacccctgttctttcaacaatcgccagccctatctttggtgcagtcattggtacaaaccatcagggcacaacagctgcagcaactcgtgctaccagtgatcagcc

SEQ ID NO: 346130 - DNA, 322 bp, Zea mays
tgagcattcataaacacaccaagcgtagtgcactagcaacgacctaacaacaatggctaccaagatattagccctccttgcgcttcttgccctttttgtgagcgcaacaaatgcgttcattattccacaatgctcacttgctcctagtgccattattccacagttcctcccaccagttacttcaatgggcttcgaacacctagctgtgcaagccaacatgcaacaacaagcgcttgcggcgagcgtcttacaacaaccaattgcccaattgcaacaacaatccttgccacatctaacaatacaagccatcacaacgcaacag

SEQ ID NO: 346131 - DNA, 372 bp, Zea mays
gaaacacaccaagcgaagcgctctatcaacaacctaacaacaatggctaccaagatattagccctccttgcgcttcttgcccttttagtgagcgcaacaaatgcgttcattattccacagtgctcacttgctcctagtgccattattccacagttcctcccaccagttacttcaatgggcttcgaacatccagccgtgcaagcctacaggctacaactagcgcttgcggcgagcgtcttacaacaaccaattgcccaattgcaacaacaatccttggcacatctaaacctacaaaccatcgcaacgcaacagcaacaacagtttctgccatcactgagccacctagccggggtgaaccctgtcgcctacttg

SEQ ID NO: 346132 - DNA, 365 bp, Zea mays
  unsure (1)..(365): unsure at all n locations
attttgagcattcagaaacactcctagcgaagcacattagcaacaacctaacaacaatggctaccaagatattatccctccttgcgcttcttgcgctttttgcgagcgcaacaaatgcgttcattattccacaatgctcacttgctccaagttccattattacacagttcctcccaccagttacttcaatgggcttcgaacacccagctgtgcaagcctataggctacaacaagcaattgcggcgagcgtcttacaacaaccaatttcccagttgcaacaacaatccttggcacatctaacaatacaaaccatcgcaacgcaacagcaacaacaattnctaccagcactgagccacctagccatg

SEQ ID NO: 346133 - DNA, 372 bp, Zea mays
tgagcattcagaaacacaccatgctaagcgcactagcaacaacctaacaacaatggctaccaagatattatccctccttgcgcttcttgcgctttttgcgagcgcaacaaatgcgtccattattccacaatgctcacttgctcctagttccattattccacagttcctcccaccagttacttcaatggccttcgaacacccagctgtgcaagcctataggctacaacaagcgattgcggcgagcgtcttacaacaaccaattgcccaattgcaacaacaatccttggcacatctaacaatacaaaccatcgcaacgcaacagcaacaacagttcctaccagcactgagccacctagccatggtgaaccctgt

SEQ ID NO: 346134 - DNA, 373 bp, Zea mays
  unsure (1)..(373): unsure at all n locations
gtgccattataccacagttcctcctaccagttacttcaatgggcttcgaacacctagctgtgcaagcctacaggctacaacaagcgcttgcggcgagcgtcttacaacaaccaattaaccaattgcaacaacaatccttggcacatctaaccatacaaaccatcgcaacacaacagcaacaacagttcctaccagcactgagccaactagatgtggtgaaccctgtcgcctacttgcaacagcaggtgcttgcatccaacccacttgctctggcaaacgtagctgcataccaacaacaacaacaattgcaacagtttctgccagcgctcagtcaactagccatggtgaaccctgccgnctacctacaacagca

SEQ ID NO: 346135 - DNA, 369 bp, Zea mays
attgagaccaactagcaacatagatagcacaatagtgtaccaacaatggcagccaaaatattttgcttccttatgctccttggtctttctgcaagtgctgctaccgcaaccattttcccacaatgctcacaagctcctatagcttcctttcttcccccatacctctcaccagcggtgtcttcagtatgtgaaaacccaattcttcaaccctacaggatccaacaggcaatcgcagcaggcatcttacctttatcacccttgttcctccaacaaccgtcagccctattacagcagttacctttggtgcatttgttggcacaaaacatcaaggcacaacaactacaacaacttgtgctaggaaaccttgct

SEQ ID NO: 346136 - DNA, 367 bp, Zea mays
cattcagaaacacaccaagcgaagctcactagcaacaacctaacaacaatggctaccaagatattatccctccttgcgcttcttgcgctttttgcgagcgcaacaaatgcgtccattattccacaatgctcacttgctcctagttccattattccacagttcctcccaccagttacttcaatggccttcgaacacccagctgtgcaagcctataggctacaacaagcgattgcggcgagcgtcttacaacaaccaattgcccaattgcaacaacaatccttggcacatctaacaatacaaaccatcgcaacgcaacagcaacaacagttcctaccagcactgagccacctagccatggtgaaccctg

SEQ ID NO: 346137 - DNA, 371 bp, Zea mays
attgagaccaactagcaacatagatagcacaatagtgtaccaacaatggcagccaaaatattttgcttccttatgctccttggtctttctgcaagtgttgctaccgcaaccattttcccacaatgctcacaagctcctatagcttcccttcttcccccatacctctcaccagcggtgtcttcaatgtgtgaaaacccaattgttcaaccctacaggatccaacaggcaatcgcaacaggcatcttaccattatcacccttgttcctccaacaaccgtcagccctattacagcagttacctttggtccatttggtggcacaaaacatcagggcacaacaactacaacaacttgtgctatcaaaccttgctgc

SEQ ID NO: 346138 - DNA, 370 bp, Zea mays
  unsure (1)..(370): unsure at all n locations
attagctttatctactccagagcgcagattaacccgatcgacaccatgagggtgttgcgtcgttgccctcgctctcctggctctcgctgcgagcgccacctccacgcatacaagcggcggctgcggctgccagccaccgccgccggttcatctaccgccgccggtgcatctgccacctccggttcacctgccacctccggtgcatctcccaccgccggtccacctgccgccgccggtccacctgccaccgccggtccatgtgccgccgccggttcatctgccgccgccaccatgccactaccctactcaaccgccccggcctnagcctcatccccagccacacccatgcccgtgccaacagccgcatcca

SEQ ID NO: 346139 - DNA, 356 bp, Zea mays
cagcattcataaacacaccaagcgtatatcttactagcaacaacctaacaacaatggctgccaagatattagccctccttgcgcttcttgcccttttagtgagcgcaacaaatgcgttcattattccacagtgctcacttgctcctagtgccattattccacagttcctcccaccagttacttcaatgggcttcgaacatccagccgtgcaagcctacaggctacaactagcgcttgcggcgagcgtcttacaacaaccaattgcccaattgcaacaacaatccttggcacatctaaacctacaaaccatcgcaacgcaacagcaacaacaggttctgtcatcactgagccaccta

SEQ ID NO: 346140 - DNA, 369 bp, Zea mays
caactagcaacatagaaagcacaattttgtaccaacaatggcagccaaaatattttgcctccttatgctccttggtctttctgcaagtgctgctacggcgaccattttcccacaatgctcacaagctcctatagcttcccttcttcccccgtacctctcaccagcggtgtcttcggtatgtgaaaacccaattcttcaaccctataggatccaacaggcaatcgcagctggcatcttacctttatcacccttgttcctccaacaatcatcagccctattacagcagttacctttggtgcatttattggcacaaaacatcagggcacaacaactacaacaacttgtgctagcaaaccttgctgcctactc

SEQ ID NO: 346141 - DNA, 339 bp, Zea mays
acaccaagcgaagcgcactagcaactacctaacaacaatggctaccaagatatgagccctccttgcgcttcttgcccttttagtgagcgcaacaaatgcgttcattattccacagtgctcacttgctcctagtgccattattccacagttcctcccaccagttacttcaatgggcttcgaacatccagccgtgcaagcctactggctacaactagcgcttgcggcgagcgtcttacaacaaccaattgcccaattgcaacaacaatccttggcacatttaaacctacaaaccatcgcaactcaacagcaacaacagtttttgccattactgatccacct

SEQ ID NO: 346142 - DNA, 368 bp, Zea mays
gcgaagcgcactatcaacgacctatcaacaatggctaccaagatattagccctccttgcgcttcttgccctttttgtgagcgcaacaaatgcgttcattattccacaatgctcacttgctcctagtgccattattccacagttcctcccaccagttacttcaatgggcttcgaacacctagctgtgcaagccaacatgcaacaacaagcgcttgcggcgagcgtcttacaacaaccaattgcccaattgcaacaacaatccttgccacatctaacaatacaagccatcacaacgcaacagcaacaacagttcctaccagcactgagccacctagccatggtgaaccctgccgcctacttgcaagagca

SEQ ID NO: 346143 - DNA, 157 bp, Zea mays
cgtccgaaaggggaagggcgaaaaggggatcgtttaacagaacagcatgaaaatggggggcggtctcgtcgtgtgcctggctctgcccagctgccagcgcctttgcaatgcagtgccctgcccctgcgcggagctgaagggcttgtacggcgctggc

SEQ ID NO: 346144 - DNA, 345 bp, Zea mays
attccacagttcctcccaccagttacttcaatgggcttcgaacatccagccgtgcaagcctacaggctacaactagcgcttgcggcgagcgtcttacaacaccaattgcccaattgcaacaacaatccttggcacatctaaacctacaaaccatcgcaacgcaacagcaacaacagttctgccatcactgagccacctagccgtggtgaaccctgtcgcctacttgcaacagcagctacttgcatccaacccacttgctctggcgaacgtagctgcataccagcaacaacaacgtctgcaacagtttatgccagcgctcagtcaactagccatggtgaaccctgt

SEQ ID NO: 346145 - DNA, 349 bp, Zea mays
gcaacatagaaagtggaatccagtatcaacaatagagcaacaatggcgaccaagatattttccctccttatgctccttgctctttctgcatgtgttgctaaccgacaattttccctcaatgctcacaagctcctatagcttcccttcttcccccataccttccatcaatgatagcttagtatgtgaaaacccagctcttcaaccctataggctccaacaagcaatcgcagcaagcaacatacctttatcacccttgtttcaacaatcgccagccctatctttggtgcagtcattggtacaaaccatcagggcacagcagctgcagcaactcgtgctacctgtgatcaac

SEQ ID NO: 346146 - DNA, 352 bp, Zea mays
cccgatcgacaccatgagggtgtttcttgttgccctcgctctcctggctctcggtgggagcgccacctccacgcatacaagcggcggctgcggctgccagccaccgcgccggttcatctaccgccgccggtgcatctgccacctccggttcacctgccacctccggtgcatcttccaccgcggtccacctgccgtcgccggtccacctgtcaccgccggtccatgtgccgccgccggttcatctgccgccggcaccatgccactaccctactcaaccgccccgtactcagcctcatccccagccacacccatgcccgtgccaacagccgcatccaagcccgtgccagctgca

SEQ ID NO: 346147 - DNA, 140 bp, Zea mays
caacatagaaggcacatttttttaccaacaatggcagcacaaaatatgggggcgtgtccttattgctccttggggtctttctcgcaaagtgcctgcttacccgcaaactcatttttccccaccaaatgctttcacaaagc

SEQ ID NO: 346148 - DNA, 353 bp, Zea mays
agaccaacaagcaacatagaaagtgttattcagtagcaacaatagagcaacaatggcgaccaagatattttccctccttatgctccttgctctttctgcatgtgttctaacgcgacaattttccctcaatgctcacaagctcctatagcttcccttcttcccccataccttccatcaatgttagcttcagtatgtgaaaacccagctcttcaaccctataggctccaacaagcaatcgcagcaagcaacatacctttatcacccttgtttcaacaatcgccagccctatctttggtgcagtcattggtacaaaccatcagggcacagcagctgcagcaactcgtgctacctgt

SEQ ID NO: 346149 - DNA, 349 bp, Zea mays
cccacgcgtccgaattagcttatttactccagattggagaactcgacaccatgggggtgctgatcgttgcccttgctctcctggcgctcgctgcgagcgccgctccagtacaagcggcggctgtggctgccagacaccaccgtttcatctaccgcctccgttctatatgccgcctccttctatctgccgccgcagcagcagccgcagccatggcaataccccactcaaccaccgcagctaagcccgtgccagcagttcggatcctgcggcgtcggcagcgtcggcagcccgttcctgggccagtgcgtcgagttcctgaggcaccagtgcagcccggcggcgacgccct

SEQ ID NO: 346150 - DNA, 367 bp, Zea mays
gacccacgcgtccgattttgagcattcagaaacacacctagctttagctacctagcaacgacttaacagcagtggctaccaagatattagccctccttgcgcttcttgccctttttgtgagccaacaaatgcgttcattattccacaatgctcacttgctcctagtgccattataccacagttcctccgaccagtacttcaatgggcttcgaacacctagctgtgcaagcctacaggctacaacaagcgcttgcggcgagcgttttacaacaaccaattaaccaattgcaacaacaatccttggcacatctaaccatacaaaccatcgcaacacaacagcaacaacagttcctaccagcactgagcc

SEQ ID NO: 346151 - DNA, 351 bp, Zea mays
agagcaccctccacctggtgctccttctcaggggtggcatgcagatctttgtggagacactcactggcaagacaatcacccttgaggtggagtcttcggatacattgacaatgtcaaggccaagatccaggacaaggagggcatcccaccggaccagcagcgcctcatcttcgccggaagcagctggaggatggccgcaccctggcggactacaacatccagaaggagagcaccctccacctggtgctccgcctcaggggtggcatgcagatttttgtgaagacattgactggcaagaccatcaccttggaggtggagagctctgacaccattgacaatgtgaaggccaag

SEQ ID NO: 346152 - DNA, 351 bp, Zea mays
accaactagcaacatagaaagcacattagtgtaccaacaatggcagccaaagatagtttgcttccttatgctccttggtctttctgcaagtgttgctaccgcaccattttcccacaatgctcacaagctcctatagcttcccttcttcccccatacctctcaccagcggtgtcttcaatgtgtgaaaacccaattgttcaaccctacaggatccaacaggcaatcgcaacaggcatcttaccattatcacccttgttcctccaacaaccgtcagccctattacagcagttacctttggtccatttggtggcacaaaacatcagggcacaacaactacaacaacttgtgcta

SEQ ID NO: 346153 - DNA, 358 bp, Zea mays
gcgtccggaacatagaaagtggaatccagtttcattaatagagcaacaatggagaccaagataggttccctccttatgctccttgctctttctacatgtgttgctaacgcgaaattttccctcaatgctcacaagctcctatagcttccctttttcccccataccttccatcaattatagcttcagatgtgaaaacccagctcttcaaccatataggcttcaacaagcaatcgcagcaagcaacatacctttatcgcccttgttgtgtcaacaatcgccagccctatctttggtgcagtcattggtacaaaccatcagggcacaacagctgcagcaactcgtgctacctgtgatcaac

SEQ ID NO: 346154 - DNA, 348 bp, Zea mays
gggcagtgcgtagagaggatcgtttaatagaacagcatgaagatggtcatcgggcgggtcgtgtgcctggctctgtcagctgccagcgcctctgcaatgcagatccctgcccctgcgcggggctgcagggcttgtacggcgctggcgccggcctgacgacgatgatgggcgccggcggctgtacccctacgcggagtacctgaggcagccgcagtgcagcccgctggcggcggcgccctactacgccgggtgtgggcagacgagcgccatgtaccagccgctccggcaacagtgctgccagcagcagatgaggatgatggacgtgcagtccgtcgcgcagcagctgca

SEQ ID NO: 346155 - DNA, 354 bp, Zea mays
aatattttgagcattcagaaacacaccattcgaagcgcactagcaacaacctaacagcgaatggctaccaagatattatccctccttgcgcttcttgcgctttttgcagcgcaacaaatgcgtccattattccacaatgctcacttgctcctagttccattattccacagttcctcccaccgttacttcaatggccttcgaacacccagctgtgcaagcctataggctacaacaagcgattgcggcgagcgtcttacaacaaccaattgcccaattgcaacaacaatccttggcacatctaacaatacaaaccatcgcaacgcaacagcaacaacagttcctaccagcactgag

SEQ ID NO: 346156 - DNA, 350 bp, Zea mays
agcattcagaaacacaccaagcgattcgcactagcaacaacctaacaacgatgggtaccaagatattagccctccttgcgcttcttgcccttttagtgagcgcacaaatgcgttcattattccacagtgctcacttgctcctagtgccattattccacagttcctcccaccagttactcaatgggcttcgaacatccagccgtgcaagcctacaggctacaactagcgcttgcggcgagcgtcttacaacaaccaattgcccaattgcaacaacaatccttggcacatctaaacctacaaaccatcgcaacgcaacagcaacaacagtttctgccatcactgagccacct

SEQ ID NO: 346157 - DNA, 351 bp, Zea mays
ggagcgcacacacacacaactagatttcccccaaatccacccgtcggcaggtggggttcaagatgcagatctttgtgaaaaccctgaccggcaagactatcacctcgaggtggagtcgtctgacaccattgacaacgttaaggccaagatccaggacaaggagggcatccccccagaccagcagcggctcatcttcgctggcaaacagcttgaggacgggcgcacgcttgctgactacaacatccagaaggagagcaccctccaccttgtgctccgcctcaggggaggcatgcagatctttgtgaaaaccctgaccggcaagactatcaccctcgaggtggagtcctctga

SEQ ID NO: 346158 - DNA, 350 bp, Zea mays
aaaatattttgcctccttattctctttggtctttctgcaagtgctgctacggggaccattttcccgcaatgctcgcaagctcctatagcttcccttcttccccgtacctctcaccagcggtgtcttcggtatgtgaaaacccaattcttcaaccctacaggatccaacaggcaatcgagctggcatcttacctttatcacccttgttcctccaacaatcatcagccctattacaacagttacctttggtgcatttattggcacaaaacatcagggcacaacaactacaacaacttgtgctagcaaaccttgctgcctactctcagcaacagcagtttcttccattcaacc

SEQ ID NO: 346159 - DNA, 352 bp, Zea mays
cccacgcgtccggcaacataaaatgtactttagtgtaccaacaatggcagccaggatgttttgcctccttatgctccttggtctttctgcaagtgctgctacggcgccattttcccgcaatgctcgcaagctcctatagcttcccttcttcccccgtacctctcaccagcggtgtcttcgtatgtgaaaacccaattcttcaaccctacaggatccaacaggcaatcgcagctggcatcttacctttatcacccttgttcctccaacaatcatcagccctattacaacagttacctttggtgcatttattggcacaaaacatcagggcacaacaactacaacaacttgtgct

SEQ ID NO: 346160 - DNA, 333 bp, Zea mays
gaaagaaccatactaaaccaacatttttagccaaaatataacaactactgatgcgactatatttttcttcatgggcctctacggccaccatgtgagcgcaacctcacaagcatcatatagacaatcgctcactcgctgctcctgccaccattgcacagttccttataccaaaacctaaatgttgaaccctacacgtaccaacacacgctaacatgtaacatcaaacctttatcacccgcgtttcacaaccactaattagccaaattacacaacaaaccttggcagattttacatgtcacagaatatcagcgcacacacaactacacacaactt

SEQ ID NO: 346161 - DNA, 340 bp, Zea mays
gatcagcaaagcggcagtgcgtatttaggatcgtcgaacagaacagcatgaagggggtcatcgttctcgtcgtgtgcctggctctgtcagctgccagcgccttgcaatgcagatgccctgcccctgcgcggggctgcagggcttgtacggcgctggcgccggcctgacgacgatgagggcgccggcgggctgtacccctacgcggagtacctgaggcagccgcagtgcagcccgctggcggcggcgccctactacgccgggtgtgggcagacgagcgccatgtaccagccgctccggcaacagtgctgccagcagcagatgaggatgatggacgtgcagt

SEQ ID NO: 346162 - DNA, 350 bp, Zea mays
caggatccaacaggcaatcgcaacttgctttttaccattatcacccttgttcctgcagcaaccgtcagccctattacagcagttacctttggtccatttggtggcacaaaacatcagggcacaacaactacaacaacttgtgctagcaaaccttgctgcatactctcagcaacatcagtttttccattcaaccaactggctgcattgaactctgctgcttatttgcaacaacaattaccattcagccagctagttgctgcctacccccagcaatttcttccattcaaccaactagcagcattgaactctgctgcttatttacagcagcaacaactactaccattcagcca

SEQ ID NO: 346163 - DNA, 363 bp, Zea mays
cccacgcgtccgcaactagcaacatagaaagcacaatagttgtaccaacaatggcagccaaaatatggtgcgtccttatgctccttggtctttctacaagaagctgctactgcgaccatttcccgcaatgctcgcaagctcctatagcttgccttcttcccccgtacctctcaccagcggtgtcttcggtatggaaaacccaattcttcaaccctacaggatccaacaggcaatcgcagctggcatcttacctttatcacccttgttcctccaacaatcatcagccctattacaacagttacctttggtgcatttattggcacaaaacatcagggcacaacaactacaacaacttgtgctagc

SEQ ID NO: 346164 - DNA, 61 bp, Zea mays
gtctgatgtttgtggcttcctagttataagaaagtacatttctaaaaaaagaggaaaaggt

SEQ ID NO: 346165 - DNA, 349 bp, Zea mays
attttgagcattcagaaacacacttttcgaagcacattagcaacaacctggcggcgaatggctaccaagatattatccctccttgcgcttcttgcgctttttgcagcgcaacaaatgcgttcattattccacaatgctcacttgctccaagttccattattacacagttcctcccaccattacttcaatgggcttcgaacacccagctgtgcaagcctataggctacaacaagcaattgcggcgagcgtcttacaacaaccaatttcccagttgcaacaacaatccttggcacatctaacaatacaaaccatcgcaacgcaacagcaacaacaattcctaccagcactg

SEQ ID NO: 346166 - DNA, 350 bp, Zea mays
aattgcccaattgcaacaacattctttgccacatctaacaatacaagccagcgcgacgcaacagcaacaacagttcctaccagcactgagccacctagccatgtgaaccctgccgcctacttgcaagagcagctgcttgcatccaacccacttgctctggcgaacgtagttgcaaaccgcaacaacaacagctacaacagtttcttccaacgctcagacaactagccatggtgaaccctgccgtctacgtacaacaacaacaactgctttcatctagcccgctcgctgtgggcaatgcacctacatacctgcaacaacaattgttgcaacagattgtaccagctctgact

SEQ ID NO: 346167 - DNA, 348 bp, Zea mays
cccacgcgtccggagaccaacttgtaacatagaaagtggaatccagtagcggcggtagagcaacaatggcgaccaagatattttccctccttatgctccttgtctttctgcatgtgttgctaacgcgacaattttccctcaatgctcacaagctcctatagcttcccttcttccccctaccttccatcaatgatagcttcagtatgtgaaaacccagctcttcaaccctataggctccaacaagcaatcgcagcaagcaacatacctttatcacccttgtttcaacaatcgccagccctatctttggtgcagtcattggtacaaaccatcagggcacagcagctgcag

SEQ ID NO: 346168 - DNA, 350 bp, Zea mays
gaccaactagcaacatagaatgcataatagtgtaccaacaatggcagccgaaagagttttgcctccttatgctccttggtctttctgcaagtgctgctacggcaccattttcccgcaatgctcgcaagctcctatagcttcccttcttcccccgtacctctcaccagcggtgtcttcgtatgtgaaaacccaattcttcaaccctacaggatccaacaggcaatcgcagctggcatcttacctttatcacccttgttcctccaacaatcatcagccctattacaacagttacctttggtgcatttattggcacaaaacatcagggcacaacaactacaacaacttgtgct

SEQ ID NO: 346169 - DNA, 351 bp, Zea mays
atttagaccaactagcaacatagattgttcaatagtgtaccaacaatggcaggcgaagtattttgcctccttatgctccttggtatttctgcaagtgctgctacgggaccattttcccgcaatgctcacaagctcctatagcttcccttcttcccccgtacctctcaccagcggtgtctcggtatgtgaaaacccaattcttcaaccctacaggatccaacaggcaatcgcagctggcatcttacctttatcacccttgttcctccaacaatcatcagccctattacagcagttacctttggtgcatttattggcacaaaacatcagggcacaacaactacaacaacttgt

SEQ ID NO: 346170 - DNA, 353 bp, Zea mays
attttcagcattcagaaacacaccttgttaagcgcactagcaacaacctaacaggcaggggctaccaagatattagccctccttgcgcttcttgcccttttagtgaggcaacaaatgcgttcattattccacagtgctcacttgctcctagtgccattattccacagttcctcccaccagtacttcaatgggcttcgaacatccagccgtgcaagcctacaggctacaactagcgcttgcggcgagcgtcttacaacaaccaattgcccaattgcaacaacaatccttggcacatctaaacctacaaaccatcgcaacgcaacagcaacaacagtttctgccatcactgagct

SEQ ID NO: 346171 - DNA, 350 bp, Zea mays
caacaagcaacatagaaagtggaattcatttgcaacaatagagcaacaatggcggccgagatattttccctgcttatgctccttgctctttctgcatgtgttgctacgcgacaattttccctcaatgctcacaagctcctatagcttcccttcttcccccataccttccatcaatgatagcttcagtatgtgaaaacccagctcttcaaccctataggctccaacaagcaatcgcagcaagcaacatacctttatcacccttgtttcaacaatcgccagccctatctttggtgcagtcattggtacaaaccatcagggcacagcagctgcagcaactcgtgctacctgtg

SEQ ID NO: 346172 - DNA, 330 bp, Zea mays
atccttcaccattcctagcatttctcagtcccaacaatatagcaacaatggcgggcattatattttccattcctatcctcctttctctttctgcatttttttcaactctaccatttttccttaatacttacaattcttctattgcatcttcttctactctattcctatcatttttgactttttcttttttttataaccctttcttattacctatcttcttttatctatcttttcttatcaatctacttatcttttattactcctgtttttttaacattctatatttttatttttttttccactttatttttttttcttatttttttttta

SEQ ID NO: 346173 - DNA, 347 bp, Zea mays
tacagcaccttttggacaagcaaccacattctttttgtgttactatcggggtggaacattacttttcagatttctgttatcatttgcaatcttagcaagcaggaaagcataaataaactcgataagagcaaaggagcttagaaggaaagagtaatgtagtgaatgtgggcgactttatttaagtagcatataaatctagatgaagacatggagtgattagtcaaacctggctgacctccaaccggtctccaggttctactttcttaagtgcatatggcaactcttctatttctccttctggcatctgaattacagtttgccagctgcattgacaatagtagaggtta

SEQ ID NO: 346174 - DNA, 121 bp, Zea mays
aaaaaaaaaaaaaaaaaaaattatattaaaaaaaaaaaaaaaaaaaaaaagaaaagaaaaattaaaaaaaagaaaaaaaaaaaaaaaaaaaaaaaaaaaaaaaaaaaaaaaaaaaaaaaag

SEQ ID NO: 346175 - DNA, 353 bp, Zea mays
gtcttcagaccattagctttatctactccagagcgcagaagaacccgatcgacgccaggagggtgttgctcgttgccctcgctctcctggctctcgctgcgagcgcacctccacgcatacaagcggcggctgcggctgccagccaccgccgccggttcatctaccgccgccggtgcatctgcacctccggttcacctgccacctccggtgcatctcccaccgccggtccacctgccgccgccggtccacctgccaccgccggtccatgtgccgccgccggttcatctgccgccgccaccatgccactaccctactcaaccgccccggcctcagcctcatccccagccacaccc

SEQ ID NO: 346176 - DNA, 290 bp, Zea mays
  unsure (1)..(290): unsure at all n locations
agttatcgagccacgagtatttcgtccatccctagtggtaggccggcaaggtcggctggtggagacctcgagtcgagtcgaccatggtggcgcgcgggcagggcgggacagggcggaggaggaggccgtggctcgttgggagagctagaaggatgcgtagatcgtcttcgtgttcaaggnttttgtttttttttttttttctctgatctaatttatttttttattttatcttatcttttatttttttttaatatgttactttcttttttatttttattattatctatttt

SEQ ID NO: 346177 - DNA, 361 bp, Zea mays
cccacgcgtccggaaagtggaatccagtagcaacatttgttcaacaatggagaccaagatatttgcccgccttatgctccttgctctttctacatgtgttgctaacgcgacaatttccctcaatgctcacaagctcctatagcttccctttttcccccataccttccatcaattatagcttcagtatgtgaaacccagctcttcaaccatataggcttcaacaagcaatcgcagcaagcaacatacctttatcgcccttgttgtgtcaacaatcgccagccctatctttggtgcagtcattggtacaaaccatcagggcacaacagctgcagcaactcgtgctacctgtgatcaaccaagt

SEQ ID NO: 346178 - DNA, 351 bp, Zea mays
attgagaccaacaagcaacatagtttgtttaatccagtagcaacaatagagcaggaggggcgaccaagatattttccctccttatgctccttgctctttctgcatggttgctaacgcgacaattttccctcaatgctcacaagctcctatagcttcccttcttcccccataccttccataatgatagcttcagtatgtgaaaacccagctcttcaaccctataggctccaacaagcaatcgcagcaagcaacatacctttatcacccttgtttcaacaatcgccagccctatctttggtgcagtcattggtacaaaccatcagggcacagtagctgcagcaactcgtgcta

SEQ ID NO: 346179 - DNA, 349 bp, Zea mays
gcctagcaattagctcatcgactccagattggagaactcgacaccatgaaggtgctgatcgttgcccttgctctcctggcgctcgctgcgagcgccgcctccatacaagcggcggctgtggctgccagacaccaccgtttcatctaccgcctccgttctatatgccgcctccgttcttctgccgccgcagcagcagccgcagccatggcaataccccactcaaccaccgcagctaagcccgtgccagcagttcggatcctgcggcgtcggcagcgtcggcagcccgttcctgggccagtgcgtcgagttcctgaggcaccagtgcagcccggcggcgacgccctacggc

SEQ ID NO: 346180 - DNA, 175 bp, Zea mays
agcggcagtgcgtagagaggatcgtctaacagaacagcatgaagatgggcgtgggtctcgtcgtgtgcctggctctgtcagctgccagcgcctctgcaatgcaatgccctgcccctgcgcggggctgcagggcttgtacggcgctggcgcctgcctgacgactatgatgggcgcc

SEQ ID NO: 346181 - DNA, 349 bp, Zea mays
gaccaactagcaacatagaatgcacaatagtgtaccaacaatggcagccgagaggttttgcttccttatgctccttggtctttctgcaagtgctgctaccgcaccattttcccacaatgctcacaagctcctatagcttcctttcttcccccatacctctcaccagcggtgtcttcagatgtgaaaacccaattcttcaaccctacaggatccaacaggcaatcgcagcaggcatcttacctttatcacccttgttcctccaacaaccgtcagccctattacagcagttacctttggtgcatttgttggcacaaaacatcaaggcacaacaactacaacaacttgtgct

SEQ ID NO: 346182 - DNA, 353 bp, Zea mays
  unsure (1)..(353): unsure at all n locations
attagctttatctactccagagcgcagaagaacccgatcgacaccatgagggtggtgcgcgttgccctcgctctcctggctctcgctgcgagcgccacctccacgctacaagcggcggctgcggctgccagccaccgccgccggttcatctaccgccgccggtgcatctgccacctccggtcacctgccacctccggtgcatctcccaccgccggtccacctgccgccgccggtccacctgccaccgncggtccatgtgccgccgccggttcatctgccgccgccaccatgccactaccctactcaaccagtgcgtcgagttcctgaggcatcagtgcagcccgacggcgacg

SEQ ID NO: 346183 - DNA, 349 bp, Zea mays
attttgagcattcagaaacacaccttgcgaagcacattagcaacaacctaacagcaatggctaccaagatattatccctccttgcgcttcttgcgctttttggagcgcaacaaatgcgttcattattccacaatgctcacttgctccaagttccattattacacagttcctcccacagttacttcaatgggcttcgaacacccagctgtgcaagcctataggctacaacaagcaattgcggcgagcgtcttacaacaaccaatttcccagttgcaacaacaatccttggcacatctaacaatacaaaccatcgcaacgcaacagcaacaacaattcctaccagcactgg

SEQ ID NO: 346184 - DNA, 348 bp, Zea mays
attttcagcattcagaaacacacctagcgaagcgcactagcaacaaccggacagcaatggctaccaagatattagccctccttgcgcttcttgcccttttaggagcgcaacaaatgcgttcattattccacagtgctcacttgctcctagtgccattattccacagttcctcccacagttacttcaatgggcttcgaacatccagccgtgcaagcctacaggctacaactagcgcttgcggcgagcgtcttacaacaaccaattgcccaattgcaacaacaatccttggcacatctaaacctacaaaccatcgcaacgcaacagcaacaacagtttctgccatcactg

SEQ ID NO: 346185 - DNA, 348 bp, Zea mays
ctagcaacatagaaagcacattagtgtaccaacaatggcagctaaaatagttgggctccttatgctccttggtctttctgcaagtgctgctacggcgaccatttcccacaatgctcacaagctcctatagcttcccttcttcccccgtacctctcaccaacggtgtcttcggtatggaaaacccaattcttcaaccctacaggatccaacaggcaatcgcagctggcatcttacctttatcacccttgttcctccaacaatcatcagccctattacagcagttacctttggtgcatttattggcacaaaacatcagggcacaacaactacaacaacttgtgctagcaa

SEQ ID NO: 346186 - DNA, 354 bp, Zea mays
tcagcattcagaaacacaccaagcttagttcactagcaacaacctaacaacaatggctgccaagatattagccctccttgcgcttcttgcccttttagtgagcgcacaaatgcgttcattattccacagtgctcacttgctcctagtgccattattccacagttcctcccaccagttacttaatgggcttcgaacatccagccgtgcaagcctacaggctacaactagcgcttgcggcgagcgtcttacaacaaccaattgcccaattgcaacaacaatccttggcacatctaaacctacaaaccatcgcaacgcaacagcaacaacagtttctgccatcactgagccacctag

SEQ ID NO: 346187 - DNA, 351 bp, Zea mays
cagaccattagctttatctactccatagttcagaagaacccgatcgacaccatgagggggttgctcgttgccctcgctctcctggctctcgctgcgagcgccaccccacgcatacaagcggcggctgcggctgccagccaccgccgccggttcatctaccgccgccggtgcatctgccactccggttcacctgccacctccggtgcatctcccaccgccggtccacctgccgccgccggtccacctgccaccgccggtccatgtgccgccgccggttcatctgccgccgtcaccatgccactaccctactcaaccgccccggccttagcctcatccccagccacacccatg

SEQ ID NO: 346188 - DNA, 51 bp, Zea mays
accactcgtaccatcaatctaacttttttttcctcaaccgtcacctctcaa

SEQ ID NO: 346189 - DNA, 241 bp, Zea mays
caacaatagagcaacaatggctacctatatattttccctccttattctccttgcgctttcttcatgtgttgctaaccccacaattttccctcaatgctcacatcttctatagcttccctgcgaaccccacacctcccatcatatttattttttttttttttaaactcatctctttaatttttttttttcttacaatcaaacccaacatgtaacatactctaattaccctttttataacaat

SEQ ID NO: 346190 - DNA, 347 bp, Zea mays
caccaagcgaagcgcactagcaactacctaacaacaatggctaccaagatattggccctccttgcgcttcttgccctttttgtgagcgcaacaaatgcgttattattccacaatgctcacttgctcctagtgccattattccacagttcctcccaccagttacttcaatgggcttcaacacctagctgtgcaagccaacatgcaacaacaagcgcttgcggcgagcgtcttacaacaaccaattgcccaattgcaacaacaatccttgccacatctaacaatacaagccatcacaacgcaacagcaacaacagttcctaccagcactgagccacctagccatggtga

SEQ ID NO: 346191 - DNA, 347 bp, Zea mays
tagcaacatagaaagcacaatagtgtaccaacaatggcagccaaaataggttggctccttatgctccttggtctttctgcaagtgctgctacggcgaccatttcccacaatgctcacaagctcctatagcttcccttcttcccccgtacctctcaccagcggtgtcttcggtatgtaaaacccaattcttcaaccctataggatccaacaggcaatcgcagctggcatcttacctttatcacccttgttcctccaacaatcatcagccctattacagcagttacctttggtgcatttattggcacaaaacatcagggcacaacaactacaacaacttgtgctagcaa

SEQ ID NO: 346192 - DNA, 322 bp, Zea mays
gttgcaaataagaacaactaccatttagtcagctacctgctgcctacccccagggaggggttccattcaaccaactagcagcattgaactctcctgcttatttacacagcaacaactactaccattcagccagctagctggtgtgagccctgctaccttcttgacacaaccacagttgtgccgttctaccagcacgttgcgcctaacgctggcaccctcttacaactgcaacaattgctgccattcaaccaacttgctttgacaaacccagcagtgttctaccaacaacccatcattggtggtgccctcttttagatttctt

SEQ ID NO: 346193 - DNA, 350 bp, Zea mays
gaaagcacaatagtgtaccaacaatggcagccaaaatattttgcctccttatgcgccttggtctttctgcaagtgctgctacggcgaccattttcccgaaatgtcgcaagctcctatagcttcccttcttcccccgtacctctcaccagcggtgtcttcggtatgtgaaaacccaatcttcaaccctacaggatccaacaggcaatcacagctggcatcttacctttatcacccttgttcctccaacaatcatcagccctattacatcagttacctttggtgcatttattggcacaaaacatcagggcacaacaactacaacaacttgtgctagcaaaccttgctgccta

SEQ ID NO: 346194 - DNA, 363 bp, Zea mays
ccacccgtccgattatggagaccacctggcaccatttaaggcacaatagtgtcccaacaatggcggcggaaatattttgcttccttatgctccttggtctttctgcaagtgttgctccgcaaccattttcccacaatgctcacaagctcctatagcttcccttcttcccccatacctctcaccagcggtgcttcaatgtgtgaaaacccaattgttcaaccctacaggatccaacaggcaatcgcaacaggcatcttaccattatcacccttgttcctccaacaaccgtcagccctattacagcagttacctttggtccatttggtggcacaaaacatcagggcacaacaactacaacaactt

SEQ ID NO: 346195 - DNA, 347 bp, Zea mays
gcattcagaaacacaccaagcgaatcgcactagcaacaacctaacaacgatggggaccaagatattagccctccttgcgcttcttgcccttttagtgagcgcacaaatgcgttcattattccacagtgctcacttgctcctagtgccattattccacagttcctcccaccagttactcaatgggcttcgaacatccagccgtgcaagcctacaggctacaactagcgcttgcggcgagcgtcttacaacaaccaattgcccaattgcaacaacaatccttggcacatctaaacctacaaaccatcgcaacgcaacagcaacaacagtttctgccatcactgagccac

SEQ ID NO: 346196 - DNA, 379 bp, Zea mays
accgtacggaatccggggccagccacgcgtgcggtgaaaacccaattcttcaaccctacaggatccaacaggcaatcgcagctggcgtcttacctttatcacccttgttcctccaacaatcatcagccctattacacagttacctttggtgcatttattggcacaaaacatcagggcacaacaactacaacaacttgtgctagcaaacctgctgcctactctcagcaacagcagtttcttccattcaaccaactaggttcattgaactctgcttcttatttgcaacaacaacaactaccattcagccagctacctgctgcctacccccagcaatttcttccattcaaccaactagcagcattgaactctcctgcttatt

SEQ ID NO: 346197 - DNA, 352 bp, Zea mays
gtggaatccagtagcaacaatagatcattaatggagaccaagatattttccctggtggtgctccttgctctttctacatgtgttgctaacgcgacaattttccctaatgctcacaagctcctatagcttccctttttcccccataccttccatcaattatagcttcagtatgtgaaaaccagctcttcaaccatataggcttcaacaagcaatcgcagcaagcaacatacctttatcgcccttgttgtgtcaacaatcgccagccctatctttggtgcagtcattggtacaaaccatcagggcacaacagctgcagcaactcgtgctacctgtgatcaaccaagtagctctg

SEQ ID NO: 346198 - DNA, 101 bp, Zea mays
aagaacccgatcgacaccatgtggttgttgctcgatgccctcgctctccgggcgctctttttaagcgctggctccacgcatacaagcggtgtttttttatt

SEQ ID NO: 346199 - DNA, 159 bp, Zea mays
aaaaaaaaaaaaataaaaaattttttttaaacacaaaaaaaaaaaaaacacggcggtttatataaaatattaagtctctccccacaccacttccaatacataaaaataaataaaaacacttctcccccccccccacgataaccaactttaaccccctct

SEQ ID NO: 346200 - DNA, 409 bp, Zea mays
aggaaggccggggcgacccacgcgtacgatttgcactcatgcatcacaatacattcttctatcagtaccatcaatcatgatggatcttagtagtatgggcaccaaatcaaatctgcaacatcaattatctaactccaaaaaccatgaagctggtgcttgtggttcttgctttcattgctttagtatcaagtgtttcttgtacacagacaggcggctgcagctgtggtcaacaacaaagccatgagcagcaacatcatccacaacaacatcatccacaaaaacaacaacatcaaccaccaccacaacatcaccagcagcagcaacaccaacaacaacaagttcacatgcaaccacaaaaacatcagcaacaacaagaagttcatgttcaacaacaacaacaacaaccgga

SEQ ID NO: 346201 - DNA, 296 bp, Zea mays
gacccacacatccgttttttttttttttttttttttttttttttttttttttttttttttttttgtgggtattttaaattgtgggtctttttaattttttttttttttttttttttttttaaaaaaccccggccccccctttaaaaaaacccaaactaacccccccctccatccaaacaaaaacctttttaaaagtccccccaaaattaaaataaccccccctcctttaacaaccgcgaaaccggaaaacaccccgcctaccccaacaaaaattccttaaaaaaaatccccctttc

SEQ ID NO: 346202 - DNA, 397 bp, Zea mays
  unsure (1)..(397): unsure at all n locations
ccgacccaaaccgatcgtcgtgtgcctggctctgtcatttgtcagcgcctctgcaatgcanatgccgtggcgcctgcgcgggggtggagggcttgtacggcgctggcgccggcctgacgacgatgatgggcgccggcgggctgtacccctacgcggagtacctgaggcagccgcagtgcagcccgctggcggcggcgccctactacgccgggtgtgggcagacgagcgccatgtaccagccgctccggcaacagtgctgccagcagcagatgaggatgatggacgtgcagtccgtcgcgcagcagctgcagatgatgatgcagcttgagcgtgccgctgccgccagcagcaacctgtacgagccagctctgatgcagcagcagcagcagctgctggc

SEQ ID NO: 346203 - DNA, 335 bp, Zea mays
attttgagcattcagaaacacaccatgcgaagctacctagcaacgacttaacagcaatggctaccaagatattagccctccttgcgcttcttgccctttttgtgagcgcaacaaatgcgttcattattccacaatgctcacttgctcctagtgccattataccacagttcctccgaccagttacttcaatgggcttcgaacacctagctgtgcaagcctacaggctacaacaagcgcttgcggcgagcgtcttacaacaaccaattaaccaattgcaacaacaatccttggcacatctaaccatacaaaccatcgcaacacaacagcaacaacag

SEQ ID NO: 346204 - DNA, 226 bp, Zea mays
acgtattattactcactaaccagttaactttcaaaggacagactggcaccaacggggggcacaaaaatactatgttcacttatgttgatagctcttaccgcaagtgttgccacaaggacaatattgacacaatgctcacatgcatggatcgtttcgatacatcaacgataactataagcatcgttgcaataaactgaaggaacccctgcttatcaaccctgcctta

SEQ ID NO: 346205 - DNA, 385 bp, Zea mays
gctccttggtctttctgcaagtgtttctaccgcaaccattttcccacagtgctggcaagctcctatagcttcccttcttcccccatacctctcaccagcggtgtcttcaatgtgtgaaaacccaattgttcaaccctacaggatccaacaggcaatcgcaacaggcatcttaccattatcacccttgttcctccaacaaccgtcagccctattacagcagttacctttggtccatttggtggcacaaaacatcagggcacaacaactacaacaacttgtgctagcaaaccttgctgcatactctcagcaacatcagtttcttccattcaaccaactggctgcattgaactctgctgcttatttgcaacaacaattaccattcagc

SEQ ID NO: 346206 - DNA, 382 bp, Zea mays
gaaacacaccaagcgaagcacattatcaacaacctaacaacaatggctaccaggggattatccctccttgcgcttcttgcgctttttgcgagcgcaacaaatgcgttcattattccacaatgctcacttgctccaagttccattattacacagttcctcccaccagttacttcaatgggcttcgaacacccagctgtgcaagcctataggctacaacaagcaattgcggcgagcgtcttacaacaaccaatttcccagttgcaacaacaatccttggcacatctaacaatacaaaccatcgcaacgcaacagcaacaacaattcctaccagcactgagccacctagccatggtgaaccctgccgcctacctacaacagcaac

SEQ ID NO: 346207 - DNA, 408 bp, Zea mays
  unsure (1)..(408): unsure at all n locations
aaggggcgggccacgcgtacgccattatcacccttgttcctccaacatccttcagccctattacagcagntacctggggggcatttggtggcgcagaacatcagggcacaacaactacaacaacttgtgctagcaaaccttgctgcatactctcagcaacatcagtttcttccattcaaccaactggctgcattgaactctgctgcttatttgcaacaacaattaccattcagccagctagttgctgcctacccccagcaatttcttccattcaaccaactagcagcattgaactctgctgcttatttacagcagcaacaactactaccattcagccagctagctgatgtgagccctgctgccttcttgacacaacaacagttgttgccgttctacctgcacgctatg

SEQ ID NO: 346208 - DNA, 233 bp, Zea mays
aaaaacggggcggccgacgcgtacggaaccaacaacaacaacaacaacagttttttcaacaacatcaatgtgaaggccgggagcgttattaccaacggtggcacggccatgtgcaacaacacgaacagagccatgagcaacaccaaggacagagccatgagcaacaacatcaacaacaattcctggccctgatccgaacatttagtgcctggttagtggaaccatcacctgtg

SEQ ID NO: 346209 - DNA, 414 bp, Zea mays
cgacgccacgacgtacccgatcatcagtgtcatcttagtacgtttatgtgcaccaacatcaaatctgcaacatcgggtgggctaactcacaaaagcgcggtgaagctggtgcttgtggttcttgctttcattgctttagtatcaagtgtttcttgtacacagacaggcggctgcagctgtggtcaacaacaaagccatgagcagcaacatcatccacaacaacatcatccacaaaaacaacaacatcaaccaccaccacaacatcaccagcagcagcaacaccaacaacaacaagttcacatgcaaccacaaaaacatcagcaacaacaagaagttcatgttcaacaacaacaacaacaaccgcagcaccaacaacaacaacaacaacagcaccaacaacaacatcaatgtgaa

SEQ ID NO: 346210 - DNA, 172 bp, Zea mays
  unsure (1)..(172): unsure at all n locations
gaaggaaaaaaagggccggccaaagaacaaacacattacaatacaccataaaatttttttgtaccacaacaaacaaaaaaacgggccggtactattataatccaggacctctccccaaantacccacccaataactcgcacaacattcttcttaaactatcacaacctcctc

SEQ ID NO: 346211 - DNA, 338 bp, Zea mays
gatcagcaaagcggcagtgcgtagagaggatcgtcgaacagaacagcatgaagggggtcatcgttctcgtcgtgtgcctggctctgtcagctgccagcgcctctgcaatgcagatgccctgcccctgcgcggggctgcagggcttgtacggcgctggcgccggcctgacgacgatgatgggcgccggcgggctgtacccctacgcggagtacctgaggcagccgcagtgcagcccgctggcggcggcgccctactacgccgggtgtgggcagacgagcgccatgtaccagccgctccggcaacagtgctgccagcagcagatgaagatgatggacgtg

SEQ ID NO: 346212 - DNA, 385 bp, Zea mays
tgagaccaactagcaacatagaaagcacaatagtgtaccaacaatggcaggcaggatattttgcctccttatgctccttggtctttctgcaagtgctgctacggcgaccattttcccgcaatgctcgcaagctcctatagcttcccttcttcccccgtacctctcaccagcggtgtcttcggtatgtgaaaacccaattcttcaaccctacaggatccaacaggcaatcgcagctggcatcttacctttatcacccttgttcctccaacaatcatcagccctattacaacagttacctttggtgcatttattggcacaaaacatcagggcacaacaactacaacaacttgtgctagcaaaccttgctgcctactctcagcaacag

SEQ ID NO: 346213 - DNA, 385 bp, Zea mays
gaacaagcaacatagaaagtggaatttttttgcaacaatagagcaacaatggcggccaggatattttccctgcttatgctccttgctctttctgcatgcgttgataacgcgacaattttgcctcaatgctcacaagctcctatagcttcccttcttcccccataccttccatcaatgatagcttcagtatgtgaaaacccagctcttcaaccctataggctccaacacgcaatcgcagcaagcaacatacctttatcacccttgtttcaacaattgccagccctatctttggtgcaggcattggtacaaaccatcagggcacagcagctgcagcaactcgtgctacctgtgatcaaccaagtagctctggcaaacctttctccct

SEQ ID NO: 346214 - DNA, 407 bp, Zea mays
taggaaaacccggggcgcgccacgcgtccgcaacaagcaacatataaagtggaatttagttgcaacaatagagcaacaatggcgggcgggatattttccctccttatgctccttgctctttctgcatgtgttgctaacgcgacaattttccctcaatgctcacaagctcctatagcttcccttcttcccccataccttccatcaatgatagcttcagtatgtgaaaacccagctcttcaaccctataggctccaacaagcaatcgcagcaagcaacatacctttatcacccttgtttcaacaatcgccagccctatctttggtgcagtcattggtacaaaccatcagggcacagcagctgcagcaactcgtgctacctgtgatcaaccaagtagctctggcaaacct

SEQ ID NO: 346215 - DNA, 407 bp, Zea mays
aaaaaacccgggcggcccacacgtacggaacaagcaacataaaacgtggaattttttatcaacaatagaccaacaacggcggccaggatattatacctgcggatgctccttgctctttctgcatgtgtcgctaacgcgacaattttccctcaatgctcacaagctcctatagcttcccttcttcccccataccttccatcaatgatagcttcagtatgtgaaaacccagctcttcaaccctataggctacaacaagcaatcgcagcaagcaacatacctttatcacccttgtttcaacaatcgccagccctatctttggtgcagtcattggtacaaaccatcaaggcacagcagctgcagcaactcgtgctacctgtgatcaaccaagtagctctggcaaacctttc

SEQ ID NO: 346216 - DNA, 381 bp, Zea mays
agcattcagaaacacaccaagttattcgcactagcaacaacctaacaacagggggtaccaagatattatccgtccttgcgcttcttgcgctttttgcgagcgcaacaaatgcgtccattattccacaatgctcacttgctcctagttccattattccacagttcctcccaccagttacttcaatggccttcgaacacccagctgtgcaagcctataggctacaacaagcgattgcggcgagcgtcttacaacaaccaattgcccaattgcaacaacaatccttggcacatctaacaatacaaaccatcgcaacgcaacagcaacaacagttcctaccagcactgagccacctagccatggtgaaccctgtcgcctacttgc

SEQ ID NO: 346217 - DNA, 325 bp, Zea mays
gaaaagaacgggccggccgacccatacgtaccaagcaacataaaaacaccaattttttaccaccaatagcacaccaacaacggcggggacttaatatcttcggatgctccgcaatctttcctaccgcaaccctaaacccacaatgctcacaaactgctatcaatctcctattgctcccatacttctcaccaaccttgcatcaaagatactcaaaaccctcattaaaccccacttctggaaccctctagccttcaacacatcattgtccatagcaacatatctttatcacctttcctccaacaatcgccagatttatcctacttgc

SEQ ID NO: 346218 - DNA, 298 bp, Zea mays
  unsure (1)..(298): unsure at all n locations
ggaaggaacgaaaacccgggcgacccacacgtccgacaatgcatcatataacatttatttctataccaacaaaacactaacacgcggcggacaatataaaagggtggtgtaatctaaccaagtaagtanctccaatccaactacatacacttatcattaaatgctcacacattactctccatctattacttaactcattccttcaaaccttattggcaactttctacaaactaccaacattttaaccactatctcttacaacatataatctctacctgcaacatacaatactcactct

SEQ ID NO: 346219 - DNA, 356 bp, Zea mays
aggggcgcgccacgcgtacggagcattcagaaacacaccaagcgttgctttttagcaacaacttaacaacaatggctggcaagatattatccctgcttgcgcttcttgcgctttttgcgagcgcaacaaatgcgttcattattccacaatgctcacttgctccaagtgccattattccacagttcctcccaccagttacttcaatgggcttcgaacacccagctgtgcaagcctataggctacaacaagcaattgcggcgagcgtcttacaacaaccaatttaccaattgcaacaacaatccttggcacatgtaaccatacaaaccatcgcaacgcaacagcaacaacaagttcta

SEQ ID NO: 346220 - DNA, 337 bp, Zea mays
  unsure (1)..(337): unsure at all n locations
aaaaaacggnnggggnngaaaaaaaaaaanaanaaanaaaaaaaaaataanaatttttattttaataaaaaaaaaaaaaaaaaaaaagacggggggggtaaaaaaaaaggggggggggggaaaaaaaaaaaaaaaaaaaaaaaaaaaataaaaaaataaaaaaaaaaataaaaaaaaaaaataaaaaaataataaaaaaaaaaaaaatattaatataaaaataaaattatatataaaaaaaaaatatttaaaaaatttataataaataataaaataatataataagataaaaaaaaaatattatataaataaaaataaaaaaaaatatattaataaa

SEQ ID NO: 346221 - DNA, 341 bp, Zea mays
gcgtccgaacaagcaacataaaaagcacaattttttaccaacaatccaacacaaacaacggcggggatttataatcttcggccgctccgcaagagttcctaccgcaaccattaaaccacaatgctcacaagctcatataaatctcctacttccctcatacctctaaccaacctaccatcaaatgtttcaaaacccaattactcaaccgttcagcatcccactagccaacagcacatcatttaccactgcgtcatatagttaccacctaccctccaacaatcgttacacttatcccactagcaacatttgactctgctgctgattcaccacatcaacaacta

SEQ ID NO: 346222 - DNA, 382 bp, Zea mays
attgagaccaactagcaacatagattgcacaatagtgtaccaacaatggcggccggaatattttgcttgcgtatgctccttggactttctgcaagtgctgctaccgcaaccattttcccacaatgctcacaagctcctatagcttcctttcttcccccatacctctcaccagcggtgtcttcagtatgtgaaaacccaattcttcaaccctacaggatccaacaggcaatcgcagcaggcatcttacctttatcacccttgttcctccaacaaccgtcagccctattacagcagttacctttggtgcatttgttggcacaaaacatcaaggcacaacaactacaacaacttgtgctaggaaaccttgctgcctactctcagc

SEQ ID NO: 346223 - DNA, 388 bp, Zea mays
aaacccggggcggcccacgcgtccgcaactagcaacatagaaagcacaattgtgtaccaacaatggcagacaaaatatggggggtacttatgctcgttggactctctgcaagtgttgctaccgcaaccattttcccacaatgctcacaagctcctatagctttccttcttcccccatacctctcaccagcggtgtattcaatgtgtgaaaacccaattgttcaaccctacaggatccaacaggcaatcgcaacaacaattaccattcagccagctagttgctgcctacccccagcaatttcttccattcaaccaactagcagcattgaactctgctgcttatttacagcagcaacaactactaccattcagccagctagctgatgtga

SEQ ID NO: 346224 - DNA, 386 bp, Zea mays
gagcattcagaaacacaccaagcgatttttattagcaacaacctaacaacaatgggctcggaagatattatcccggcttgcgcttcttgcgctttttgcgagcgcaacaaatgcgttcattattccacaatgctcacttgctccaagttccattattacacagttcctcccaccagttacttcaatgggcttcgaacacccagctgtgcaagcctataggctacaacaagcaattgcggcgagcgtcttacaacaaccaatttcccagttgcaacaacaatccttggcacatctaacaatacaaaccatcgcaacgcaacagcaacaacaattcctaccagcactgagccacctagccatggtgaaccctgccgcctacttgcaac

SEQ ID NO: 346225 - DNA, 334 bp, Zea mays
aaaggaaaggaaaggggggggcgacacacgcgtccggccgccggttcatctaccgttttttttatgccactaccctactcaaccgggccgggcttatactcagggggggccacacccatgcccgtgccaacagccgcatccaagcccgtgccagctgcagggaacctgcggcgttggcagcaccccgatcctgggccagtgcgtcgagtttctgaggcatcagtgcagcccgacggcgacgccctactgctcgccttagtgccagtcgttgcggcagcagtgttgccagcagcttatgcaggtggagccgcagcaccggtaccaggcgatcttc

SEQ ID NO: 346226 - DNA, 366 bp, Zea mays
gaaaaaacgggccggccacgcgaccgattgagaccaactagcaacatagattttttaatagtgtaccaacaatggcagccgggggattttgattccttatgctccttggactttctgcaagtgttgctaccgcaaccattttcccacaatgctcacaagctcctatagcttcccttcttcccccatacctctcaccagcggtgtcttcaatgtgtgaaaacccaattgttcaaccctacaggatccaacaggcaatcgcaacaggcatcttaccattatcacccttgttcctccaacaaccgtcagccctattacagcagttacctttggtccatttggtggcacaaaacatcatggcacaacaac

SEQ ID NO: 346227 - DNA, 380 bp, Zea mays
gaaggaaaagccggggcgacccacacgtccgattcagaaacacaccaagcgtttctttctagcaacaacctaacaacaatgggtggcaagatattatccctggttgcgcttcttgcgctttttgcgagcgcaacaaatgcgtccattattccacaatgctcacttgctcctagttccattattccacagttcctcccaccagttacttcaatggccttcgaacacccagctgtgcaagcctataggctacaacaagcgattgcggcgagcgtcttacaacaaccaattgcccaattgcaacaacaatccttggcacatctaacaatacaaaccatcgcaacgcaacagcaacaacagttcctaccagcactgagccacct

SEQ ID NO: 346228 - DNA, 380 bp, Zea mays
tgcatttattggcacaaaacatcagtgcacaacaactacaacaacttgggctgggaaaccttgctgcctggtctcagcaacagcagtttcttccattcaaccaactagctgcattgaactctgcttcttatttgcaacaacaacaactaccattcagccagctacctgctgcctacccccagcaatttcttccattcaaccaactggcagcattgaactctcctgcttatttacagcagcaacaactactaccattcagccagctagctggtgtgagccctgctaccttcttgatacaaccacagttgttgccgttctaccagcacgctgcgcctaacgctggcaccctcttacaactgcaacaattgctgccattcaac

SEQ ID NO: 346229 - DNA, 410 bp, Zea mays
aggaagggccggggcgacccacacgtccgcaacaagcaacatagaaagtttaattcagtagcaacaatagagcaacaggggcgggcaagatattttccatgcttatgctccttgctctttctgcatgtgttgctaacgcgaccatttttcctcaatactcacaagctcctatagctgcccttcttcccccataccttccatcaatgaccgcttcagtatgtgaaaacccagcccttcaaccctacaggctccaacaagcaatcgcaacaagcaacttacctttatcacccctgttctttcaacaatcgccagccctatctttggtgcagtcattggtacaaaccatcagggcacaacagctgcagcaactcgtgctaccagtgatcagccaagtagctctggcaaacctt

SEQ ID NO: 346230 - DNA, 309 bp, Zea mays
gggaaaaaaaggggccgacccacacgtccgaaccttgcaacataaaaagaacaattttttatcaacaatccaacaccaacaacggcggggatttatacacttctgccgctccacaattcttcataccccaacactataaccacaatgctcacaaaatcatatcaatttcctatttcccccatacctccaacctacctaccatcaaatatttcaataccctattaacaaacacttctgcaaccctatagcctacaacacatcatttcccacagcgtcatacatttaccacctatcctccaacaaccgtta

SEQ ID NO: 346231 - DNA, 348 bp, Zea mays
gcaacattgcaacatacaaaagacacaatttttgtatcaacaatagcaccaccaacaatgcgcggggatttatacatcgtcggcctctcctcaattgttgctaccgcaaccattaaaccacaatgctcacaagataatattaatttcctacttcccccatacctacaaccaaccttccatcaaatatttgaaaaccctattaacaaacacttcagcaaccatctaggcttcaacacaccatttaccattgagtcatatagttactacctacccacaaacaataattacatttaacccacttgcagcaatgaactctgatgattatttacacacaacacaactactacc

SEQ ID NO: 346232 - DNA, 362 bp, Zea mays
gaaggaaaaaaggggcccgccacgcgtccgcaacattcaacatcacaccaacaattcttttttaacaacaacctaacaacaatggccccgacaatttcaaccctgcttgccctaattgctctttacccaaaccctacaaccacaattattactccataatattcacttcctacaacttccattcttacacccttccttccatcaaatacttcaatacccttttaacacccacttctgcaaccctataggctacaacacaccatttcccctagcgtcatacaacaaccaacttcccatatgcaacaacaatacttatcccatttgacaatacaaaccactctaactattcaccaacaacactt

SEQ ID NO: 346233 - DNA, 393 bp, Zea mays
  unsure (1)..(393): unsure at all n locations
gaaaaaaggggcgagccacgcgtacggagcattcanaaacacaccaagcttttttttttaacaacaacctaacaacaacggctggcaatatattatccctggttgcgcttcttgcgctttttgcgagcgcaacaaatgcgttcattattccacaatgctcacttgctccaagttccattattacacagttcctcccaccagttacttcaatgcgcttcgaacacccagctgtgcaagcctataggctacaacaagcaattgcggcgagcgtcttacaacaaccaatttcccagttgcaacaacaatccttggcacatttaacaatacaaaccattgcaacgcaacagcaacaacaattcctaccagcacttagccacctagtcatggtgaacc

SEQ ID NO: 346234 - DNA, 86 bp, Zea mays
  unsure (1)..(86): unsure at all n locations
cggaaggaaaaanggggcgggcacgcgtacaaagctttcataaacacaccaacctttttttattaacaacaacctaacaacaatgg

SEQ ID NO: 346235 - DNA, 331 bp, Zea mays
gagcattcagaaacacaccattcgattcacattagcaacaacctaacaacggtggctaccaagatattatgcctccttgcgcttcttgcgctttttgcgagcgcaacaaatgcgttcattattccacaatgctcacttgctccaagttccattattacacagttcctcccaccagttacttcaatgggcttcgaacacccagctgtgcaagcctataggctacaacaagcaattgcggcgagcgtcttacaacaaccaatttcccagttgcaacaacaatccttggcacatgtaacaatacaaaccattggaacgcaacagcaacaacaat

SEQ ID NO: 346236 - DNA, 347 bp, Zea mays
aactagcaacatacaaagcacttttttgtaccaacaatggcagccaaaagggtgggcttccttatgctccgggggctttctgcaagtgctgctaccgcaaccattttcccacaatgctcacaagctcctatagcttcctttcttcccccatacctctcaccagcggtgtcttcagtatgtgaaaacccaattcttcaaccctacaggatccaacatgcaatcgcaccaggcatcttacctttatcacccttgttcctccaacaaccgtcagccctattacagcagttacctttgctgcatttgttggcacaaaacatcaaggcacaacaactacaacaacttgtgct

SEQ ID NO: 346237 - DNA, 488 bp, Zea mays
  unsure (1)..(488): unsure at all n locations
aacggaattcgccggggtcgagcccacgacagtccgcaccacaccaacctacgatctccctttaatattcacnnccgtcggcaccctccgcattcaaggatgcgagatcatttgatgagaagcggcctgacnncggacaagactttatcannccctcnngaggttggaagtcgtcttgacaaccatttgaccacacgttatagtgcctaagaatccagtgacaatggatgggcattcctccccagaccctagcagcggcttcaatcttcgcttggctaaacacgctttgaggacccgggcgcactgcttttgctgacttaccccacatccagaagggagatgcaccccttccaacctttgtgcttccgccttcagtgggacggcaatgctagattcttttgtgaaaaacccttgactcggcaatgacttattcaccctcgagtgtggagtccctctgacaaccattgacaacgttaaaggccaaagat

SEQ ID NO: 346238 - DNA, 397 bp, Zea mays
gaaaaacggggcggcccacgcgtccgggtcttcagaccattagctttatctactctagagcgcagaagaacccgatcgacgccgtgagggtgttgctcgtggccctcgctctcctggctctcgctgcgagcgccacctccacgcatacaagcggcggctgcggctgccagccaccgccgccggttcatctaccgccgccggtgcatctgccacctccggttcacctgccacctccggtgcatctcccaccgccggtccacctgccgccgccggtccacctgccaccgccggtccatgtgccgccgccggttcatctgccgccgccaccatgccactaccctactcaaccgccccggccttagcctcatccccagccacacccatgcccgtgccaaca

SEQ ID NO: 346239 - DNA, 383 bp, Zea mays
cagtagcaacaatagagcaacaatggagaccaagatattttccctccttatgcggcttgctctttctacatgtgttgctaacgcgacaattttccctcaatgctcacaagctcctatagcttccctttttcccccataccttccatcaattatagcttcagtatgtgaaaacccagctcttcaaccatataggcttcaacaagcaatcgcagcaagcaacatacctttatcgcccttgttgtgtcaacaatcgccagccctatctttggtgcagtcattggtacaaaccatcagggcacaacagctgcagcaactcgtgctacctgtgatcaaccaagtagctctggcaaacctttctccctactctccgcaacaacaatttc

SEQ ID NO: 346240 - DNA, 213 bp, Zea mays
caagcaacatagaaagtggaatccagtagcaacaatagagcaacaatggcgaccgagatattttccctccttatgctccttgctctttctgcatgtgttgctaacgcgacaattttccctcaatgctcacaagctcctatagcttcccttcttcccccataccttccatcaatgatagcttcagtatgtgaaaacccaactcttcaaccctat

SEQ ID NO: 346241 - DNA, 314 bp, Zea mays
aaaccgggccgcccaccgccgacctgcacatagaagacattttttaccacatggacacaaacaggggggtgatttgctctgggttctccgcaattgttgctaccgacgctttagccacaatgctaccacatgctataatttcctcattcccatacctctaaccaaccgcgataaatgtttaatacgcaatgaacaaacagttcggatccatctaggctacaacacgacatttacgatagctccagaagttaccacctaccctaaacaatcgaagatttaccaagtagcagcattgaactctgatgatgatttac

SEQ ID NO: 346242 - DNA, 301 bp, Zea mays
gtagtaaaaaaacggttcggcccacccgtccggaccttgcaacatataacgaaaaattttttaccaacaacaccacaccaacacacggcggaggagttttgcagctgcggccgctccgcaatacttgataccgcaacgctacccccacaatgctaacaagatgctaacaatttcctacttcccccattcttatatcaaaccttgcatcaaatgcttcaatacgctatgaatacacagttcatcaaccctctaggcaacaacacaccaatgcccatagcgtcatacagttaccacctaccct

SEQ ID NO: 346243 - DNA, 361 bp, Zea mays
aatattttgagcattcagaaacacaccaagcgaagcgcactagcaacgacctaacaacaatggctaccaagatattagccctccttgcgcttcttgccctttttgtgagcgcaacaaatgcgttcattattccacaatgctcacttgctcctagtgccattattccacagttcctcccaccagttacttcaatgggcttcgaacacctagctgtgcaagccaacatgcaacaacaagcgcttgcggcgagcgtcttacaacaaccaattgcccaattgcaacaacaatccttgccacatctaacaatacaagccatcacaacgcaacagcaacaacagttcctaccagcactgagccacct

SEQ ID NO: 346244 - DNA, 381 bp, Zea mays
cccacgcgtccgcaactagcattatttaaagcacaatagtgtaccaacaatggcggccaaaatattttgcttccttatgctccttggtctttctgcaagtgctgctaccgcaaccattttcccacaatgctcacaagctcctatagcttcctttcttcccccatacctctcaccagcggtgtcttcagtatgtgaaaacccaattcttcaaccctacaggatccaacaggcaatcgcagcaggcatcttacctttatcacccttgttcctccaacaaccgtcagccctattacagcagttacctttggtgcatttgttggcacaaaacattaaggcacaacaactacaacaacttgtgctaggaaaccttgctgcctactc

SEQ ID NO: 346245 - DNA, 391 bp, Zea mays
ggaaatcctcgggcgacccacacgtccggaccattagctttatctactccagtttgcagaagaacccgatcgacaccatgggggtgttgctcgatgccctcgctctcctggctctcgctgcgagcgccacctccacgcatacaagcggcggctgcggctgccagccaccgccgccggttcatctaccgccgccggtgcatctgccacctccggttcacctgccacctccggtgcatctcccaccgccggaccacctgccgccgccggtccacctgccaccgacggtccatgtgccgacgccggttcatctgccgccgccaccatgccactaccctactcaaccgccccggcctcagcctaattcacagccacacccatgctcgtgccaaca

SEQ ID NO: 346246 - DNA, 349 bp, Zea mays
acggtgaatgctttgagtttggttttccaattcaatggcacaggcttgttaatccaaagatggtgcccgataataaacatgcactgtcaccatcagaaacaactgctagtgcaccaagtcattcagttgaatattacatagagaagttcttaagtgacagtttttccaattctaacagatattctttcatagagaatgattcttacacatctgtagtgtgtactggcagcacaaatggacttactacccaaacccttccaaacttaccagatgataatgcaagaaacataactgtatcttggggattatatggcctcaggatggacatgtctgggaaaccttggacacc

SEQ ID NO: 346247 - DNA, 241 bp, Zea mays
aagaatcttagttgtttttgtttattttttgcactggtgtctttcatttccagtagatgctaggatctggaaatcaagtgaagggtaggatctatactacctgaggtgaattttcttgagaggagtatggggaagacgaaggggtggagagatagagagagagagatgctagctagattgattcaatcctggatgaaagaacaaatgctcttgcgaacgagtgaagctgccagcatgatct

SEQ ID NO: 346248 - DNA, 265 bp, Zea mays
ctcccactcgcggtagccggcggccgcggacgaggaggaaagcaggcaggccatggcgtctgcgtcttcgaccccagcggacgttcgcgagatgcaaaaagatctcgaggtacaagccaacgccctctgcatgatccaaagagacatctgccataaccaccacgtccgcatgcagtacaccatacatgtcggagagaacgagctcgtcctcaaagagctggagctgctcatcgatggggccaacgcgtacaagctcatcggaccg

SEQ ID NO: 346249 - DNA, 153 bp, Zea mays
ctcttccttccgatacccctagcaccaactcgacggggatagcagggacggcatcgaccgggggtgtttgaaagaacaagacgatctccaaaggaaacaagggctgcaagaaaaagaccgtccaccctttatctaacaaggattggtatgaca

SEQ ID NO: 346250 - DNA, 156 bp, Zea mays
cacaaaagcacagcactctgctctgctcggcttgccttgtcctgttgcttgccatatgggtgccaagatggtcctgcgtcgcttcgtagccctcgcggctctcgcctgcctcctccgtcctggcgcgtgcgtcgagctccaccgcaagctctccgg

SEQ ID NO: 346251 - DNA, 372 bp, Zea mays
gatttcctccggcgagagagaggaaccagtattaaaacacaagatacatagatgctgggactgtgctagtgagctgtgagatcgagagaacacactctccagcagcacggcaacatgtcttgcataggttcctcttgcaccgcaaccaacaagggaaaggagactgtggtggaggtgcatggagcggtggcggaggagaagcagcaggtgaggaacggagaggagactgcagcggaggacgactccggtgggtcggatccggattcggactctgaatcggatttagattcggagtcggactgggactcgtattcggaagatgaagaggagcgacagcagcagagaaagaaaaaggagaaacccaaaaacaag

SEQ ID NO: 346252 - DNA, 128 bp, Zea mays
cgacaagctcatcaaaaccgacgacgccgtcgtcgtcgactcaactcgctcctgctgcctgtgccttccctgcctctgaggatttgctagcggagagacttattatgagattcccgggttggtacctg

SEQ ID NO: 346253 - DNA, 336 bp, Zea mays
ggggtggcggcggctgccagctctcaaccgcggccgtgtccgtgctccgatggtgggggtgcgcccgagcccgggttcctttgggccggagctgcgaggcggtgccctgtgcctgcgtggctgtgctgcggctacgccgctctgtggctgtgctgcggctacgccgctctgcgcctgcgtgctcgtgccgtggctggtgcacacactgcaactttcaacagcacagtccttcaacttcgacacatgcagggcgacagccagtggccgtgcgcctgctcacggcggcggcgtgcaccatcgacaaggcccacacccatgtgttcgcatgctctggcg

SEQ ID NO: 346254 - DNA, 282 bp, Zea mays
ggctgttccacgtcgaccttgcgcggaacgcgctcgccggcgcgctcccgccgctgccgcccacgctacggtacctgtccgtcgctggcaacaccatggagggcacgctggagggggccttctgctctggcgacggcggctctgccagcccgcccctacccgccgacctggcgttcctcgacctgtccatgaacaacttctcgggccaaatcccggcggcgctgttcgcgctgccgggcctctcgtcactgctcctgtcgcggaacaacttcacgggtgcgc

SEQ ID NO: 346255 - DNA, 104 bp, Zea mays
gtactaaggccctgtttgtttaaggtttagggcttacgaattagccttcactcttactgggtttagatttccggtggcatttgtttgcttgtcttatatttagg

SEQ ID NO: 346256 - DNA, 162 bp, Zea mays
gcgggcgccgcgacgcccaccacggtcaccgcgcccgccgcgaccgaagccacggccgaacccgccgcgctctggaccacgctcgccgccgcgctccgccatggttaggtgagtgaagggcggggtggctggggcgcccctgagattgatgggggatgaggg

SEQ ID NO: 346257 - DNA, 442 bp, Zea mays
gcgagacacaccccatggcgtccttctgccgcgccgccgccgccggggcgaggtcagcggcgctccgctctaggtcgccgacggcgagaccgttcctggcggcgacgtctcctctcgcgccgccacgcttaaacaggcccctcgtggcggcggcggcggcgctggcgagtctggagtcgctcgtgccgctgcacagcgcggtggccgccgcgcggctgcggtcctgcatcgccgccggctccgcgtcctggagctgcctctcccaagattttgctctacctcggtaatgaaggttgaagaaggcgatcagttcagacggggctgccaagttcccatccgtctacacttgacgctcccagccccaagctccaaaagctcttggctgccagcagttctaagtgacgttagcgcttttggtgtgtgtgatgatggttctacgcgt

SEQ ID NO: 346258 - DNA, 242 bp, Zea mays
ctccttcatgacgagctttctccagctctgagcgcgcggagggatcggagaggcgcggaggaacgggggagaaggagaaggaggaagagcgggaagcggggcggcagccggcggggccggggccgggacaccgcgggtgccgacgtggagggagcgcgagaacaaccggcggcgggagcgccggcgccgcgcgatcgcgtccaagatcttcaccggcctgcgcgcccacggcaactacgctc

SEQ ID NO: 346259 - DNA, 150 bp, Zea mays
gccgtcgccacagcaacccttgcaccctcaatcccccacggcgaccatggccgcatcgcgggagtccctctccctggggggcacgatgccccgacataacggcaaggcgacggcgatcccgacctcgatcgacaactcgacttttatcgt

SEQ ID NO: 346260 - DNA, 285 bp, Zea mays
ctactgagctggagcggtctatgcagcaaagcatccttccaacctcctgctgaaagtggaggtgaatcttcaaaatccttgctgatgaatgagaaattgcaaacaggctcacataagttcgcacattctattgcagaatgcgagttgaatgacaaaaagaggcctcgagataacccaccgccatcttggagctactaaccgtaccatggatgcgatgtttgccagcagcaaatctcgtgctgttgctcgtgttttggtagagcacctgctgctgccgacgatgcg

SEQ ID NO: 346261 - DNA, 411 bp, Zea mays
acggtcgttccctcgctgggctgacctgccgacggatttcctctgctggatcggagaccggcgcgagctcaagtggtacgccagcgcgcggggcgtctgcacgtcgtggcgccgcgcgctcgtgccgccgtcgcccgcgctcctcgtgatcgcgaagagcgacagctgttacccctacgccgacgcatccctgcccacggggaggtccttcgagctcaccgccttcatctcaggatggcgctgcgtcagatccagcaacggctggctcgcgttctccgtccacgagaccgtctacgtgctcctcaaccccatcgccgcggtgcaaatcatcctcccaccgcttaactacggggacgagtacaatagccactgggactggtgggtttccaagatcgtcttcaccccgagcac

SEQ ID NO: 346262 - DNA, 448 bp, Zea mays
aactagcaacataaaaagcacaatagtgtaccaacaatggcagccaaaatattttgcttgctgatgctccttggtctttctgcaagtgctgctaccgcaaccattttcccacaatgctcacaagctcctatagctttctttcttcccccatacctatcaccagcggtgtcttcagtatgtgaaaacccaattcttcaaccctacaggatccaacaggcaatcgcagcaggcatcttacctttatcacccttgttactacaacaaaccgctagccctattacagcagttacctttggtgcatttgttggcacaaaacatcaaggcacaacaactacaacaacttgtgctaggaaaccttgctgcctactctcagcaacagcagtttcttccattcaaccaactggctgcattgaactctgctgcttatttgcaacaacaactaccattc

SEQ ID NO: 346263 - DNA, 126 bp, Zea mays
tgcgagccgctgctacagtatatccaccgcaacacctcatctcaagcgcaagacctcctggcggctatagctaaacgtctgatcccctcactaaaccgggttctggtggagaagctgctgaagccc

SEQ ID NO: 346264 - DNA, 60 bp, Zea mays
aaaaaaaaaaaaaaaaaaaaaaaaaaaaaaaaaaaaaaaaaaaaaaaaaaaaaaaaaaag

SEQ ID NO: 346265 - DNA, 344 bp, Zea mays
gcaccatccaaacagataagatagtctcattggacaaacaggagggcaaatttaccaatgtacgagcactggataaagtgaaacaaggtgctgaagtctctgaatcaagaaagagtgagccttctaataacgattatcatgaagttaatgaacagaagaacaaggatgaacgaatgggcttgcatagccttgaaatgttgaaggtaagagcaaaccttgaggaaaggttaaagaaaaaagggctctataatttgacacgcttgaagccagagaagtcaaaaaccaggacaactagtgataaaagtggcctgcagacattggatgattttgatgatgaagtgctg

SEQ ID NO: 346266 - DNA, 183 bp, Zea mays
gatgcattcatcctcaccggcgtctccatcgtaatttcctcagacagccgcaccacaacgtctgcctccgtagggtgcttgcttgaatcattacaatctggtagatttagtggtcgggctttacttcctactattcacaaacacactaccgagaagtctttaggtgcaatcaaagattgtgtc

SEQ ID NO: 346267 - DNA, 54 bp, Zea mays
ccaagattggattgcttgttaaagctcaatattgttattgaagtggtattgctt

SEQ ID NO: 346268 - DNA, 149 bp, Zea mays
cttaaacttacaacaaatatatgtgtggttcattcactagtaaataaagcattttttagattatttatagcagtacagctagcactcatgtactcggttttgtctgatgaccgcataccagtaattgtcctctgtacctctctttcttt

SEQ ID NO: 346269 - DNA, 112 bp, Zea mays
gctacatgtccagatacaggaggtggtgcaggtgcagctcacgaggttcacgtgcggcggcgtcattgtggggttcaccgcgaaccatgccgtccccgacggtcatgccacc

SEQ ID NO: 346270 - DNA, 250 bp, Zea mays
ggaatgtgatttttcaaagaagacaagggtgccattactagaacatctgagatgggagggttttatttctgagagatgatggaattaggatttaatgttggtacacttagaatttgagaagacaagttgcacaaatcaagaggaacactggaagggctaggaatagcatgtgtacaagccgactaggagaaaatgtattttatttgaacctctgaaaatatttagatactgcaattgtaagattttcgca

SEQ ID NO: 346271 - DNA, 128 bp, Zea mays
ctcgaaaggacaactactctgtcctaatggtgaagtcaacttgctgacttggcatggtacatatatcatcttgctgaaatctttttaaaggaagtccttactgatctctgagataatgaactgtaagg

SEQ ID NO: 346272 - DNA, 51 bp, Zea mays
aaagcttgtaatgcaccaatgcgtatgttttcaatacatgacaagtatgct

SEQ ID NO: 346273 - DNA, 180 bp, Zea mays
ggcacctacacctatggcacctccacccatggccctgcacccatggcacctctacctatggggcctacacccatggcacctgcacctatggcacaaccctggtttggccactccagctagcttctgcgcttatgccacggacaagatcagcgtcgatgcgtaccttgcaagtggcatcat

SEQ ID NO: 346274 - DNA, 213 bp, Zea mays
ccagccgctcaccgacccggccaagggagaggccgctgcgactgccgggtggctaatgatgattaatccacgacgacgacgtgtgtacttagaaaccgacgtaaatgcatgtgcatgtgcccggccgggtcgttagtacaccgacaagcatgagtgcactagcgctatggatcggactatatggtgcacaactgcacatgcatgcatataata

SEQ ID NO: 346275 - DNA, 258 bp, Zea mays
cgggcgaccacgcgtccgtagtttaggaagccgagcggtttcgactcccgggcgcccgcacccgcattgcccgccgcgcggcgtacaacggcgccgccttgtcccccgacgacgaggcctcgaccactttctccgacggcggcagcagcagctccgcctcctcccgctgggacttcgacgcgcagctggaccccaagacagaccgcggcctgctagagcggtgcgggaagctgctgagtagcatccacgcgttcaccc

SEQ ID NO: 346276 - DNA, 142 bp, Zea mays
gccgagctcctaaaaaccctacgagcgtgcttgatcggcggctgataagtgatggagatagacggtgacgcgtgttcgaatgcactttgtggatcattactaccgaacgttcgacaccaaccgtgcggcgctggttgggctg

SEQ ID NO: 346277 - DNA, 57 bp, Zea mays
gagagatttaagcacctcaccacacctttgttctttgttggatggagagttttaagc

SEQ ID NO: 346278 - DNA, 214 bp, Zea mays
ggagtctgcaaggtcaagacaatagcaaacggagagattcgctaggcacatctccgaactgcagccagctgacccaatctgtgaagtgctaaattttagcaccatgaacctaaacaagcctaaagccttttatgtttgaaaagtcgtgtacaagacaaactctccgtgaagagactccaaaaataccgatattaattggggttatacatgccct

SEQ ID NO: 346279 - DNA, 82 bp, Zea mays
aaaaaaaaaaaaaaaaaaaaaaaaaaaaaaaaaaaaaaaaaaaaaaaaaaaaaaaaaaaaaggggaaaaaaaaaaaaaagag

SEQ ID NO: 346280 - DNA, 315 bp, Zea mays
aatggcaattatgactctgctcctgtgatcgttagcttcttctcaaagcacaaggactccaaggcgcctagtgtatatgaagataaagagctgcttgagaattttggttgcaagaagggtaggaaaaagcccgtcagaagcttgggcctagctccaaagccagaagccagtgatgataaggatcagttcatgactgtggatggccagaggggccgtaggaagtctgctgggagcttgtactcagctagaaaggccgaagattcatattggtgtgatattatcatcagcgatttcgacgacggtgatagtgactat

SEQ ID NO: 346281 - DNA, 307 bp, Zea mays
acgacgaaggtcgcgctgctcgatacgttcacgtggcaggacggcatcgcggccaactacaaggcgaacggcttcacggtgtcgaacaccgacaccgcatgcaacctgaaggcaatggtccaggccgccacgcagtacggcgtcgcgaacgcgacggcattcggctcgtcgctgttctgctcgcagcagacctacacggtcgcgaacgcggaccagacctacatgttcgccgacacggtccacccgacgacgcacctgcacgcactgttcgcgcaattcgtcgaacagcagatcgcgaagtcgggcg

SEQ ID NO: 346282 - DNA, 204 bp, Zea mays
gctcaaggctctggctcgcgcacccctgtccctgttcgatccgcaccgcacacctagacgcacctccaactgcagcgcgccatacttgaccgcatcagcatggcatccacgggaacgacggcggcggcggcggcggtggcggtgccggaggtgaccctgcggtcgggcaacgggaagccgatgccgatggtgggcatgggcacg

SEQ ID NO: 346283 - DNA, 283 bp, Zea mays
gcccagtcgtcctagccaacaaaattcaattgagggttcttcagttcagccatgaagcttgagatgacagcagcggccatggtcttgctcctgctgacctcgggcgccgaggccaaggtgtgctactcgcgtagcaggaccttcaaggggtggtgctaccacagcatcaactgcatcgccatctgcatcaccgagggcgacaccagcgggttctgccaggccggggcctgcatgtgcacttatgagtgtctcaatggtgtcgtcgccggtggcggcggacagc

SEQ ID NO: 346284 - DNA, 85 bp, Zea mays
cccacgcgtccgctctgttgttaatttccgtgtaatttgctcctcccagatgggagaatcgaacgccgcttttttgttctatctg

SEQ ID NO: 346285 - DNA, 364 bp, Zea mays
gcattacgtacgtaccacagaggtgccaggttcgatgtcaggtcgaggaacgggtaaggccacctgccaagaagccacaaggcgtcgattcacaagtcatcagcactaatgacatgaaaaatgcagcagctagttggcagtaaagtgcttcgtttacatgaggtttatcaaacaaaagctgcaaagagcctaccacatcggcgtagctgcgtggacgatccactggaagacgacgtatagcgcggtccagaggaagaagtaggcgacccggaaccacgggaacctctgcagacagcgaaaccatgaaaacattcatcagcttcctctgtctttttttttccctgatcaccaagttgagtatgcg

SEQ ID NO: 346286 - DNA, 310 bp, Zea mays
cgtgctctctcgcagccgtcttgcatttcctgactgactggttttggtaggagacacagaggtaaggtcaggaggaggacttggaggagctttaccattccaagtttccctctgtaaataggaagctcacatcgccttccgtatccctgcctcgtctcgtccggagatctggtagtaggtagtctttgtctgtaacgctgtgtcggcacctcgaggacgaagatccaggggagcggggtgtttgtgtttcttctccgtccagccatatggtatggatcctagtgggcggcggtgcttcttcttctcttct

SEQ ID NO: 346287 - DNA, 258 bp, Zea mays
cccgcgctcccctccgtggcgtgcaacgcgttcctcggctcctgcaggcggcgacctcggaaaggcgggggcgtctcgtcgcgaggtcttgtctgtggattgaccaggcatttgaggccaggattttttggtgctctcattgttagctgactggtgagggtctggatctagcaatggcggaaaacacccacggtagtggtcgccacgtgcttggggacttgacaaatgttatttgcaagcgagcagccacatcagatc

SEQ ID NO: 346288 - DNA, 304 bp, Zea mays
ctcatcctcagatccgtctcctttaccccactggctggcgagcagcaaactccaggtgcagagcggacaagttcctcacgagcgttgagcgtgcattcgggtcactgaagagaagattcaagattttagatgatgcatctcctttcttccattttccaacacaagtcgatattgttgttgcttgttgtatcattcataattgggtcatacaagatgggagtgatgagtttattatacaagattctaattggcctagtcacagccatgctacatctttagttggccaagcaagtgagcatgctgc

SEQ ID NO: 346289 - DNA, 211 bp, Zea mays
gcgatgcgcgggttctcttctcgcccgcccctgcatatgcgcctacaagtcctcggcctcggccgcggccggtgtggcggcgaaggcgagcggcttcctcgcgctggcgaccgcgatgaaggacggcagggcgtcgccggccatgacgaccacgaccttggggggctcccggtcgagcggcaccaggacccgcaccgacgccggcttctcg

SEQ ID NO: 346290 - DNA, 117 bp, Zea mays
gtggaactatggatcagctcttgtgtgcacttgctgaaccagatacccagcagtaagctttggtttgttcgttttgagtggttggttaaccacatacttgttacagtcgattctgat

SEQ ID NO: 346291 - DNA, 243 bp, Zea mays
ggccgcccttttttttttttttttttttttttttttttttttttttacgatggcagcaaatttatttgaaattggtcatcaccatccttaaaacagttgagtcacatgccgcactaccacagttcgtgaacattacacacaatccctcgcctcacaaacagaagcatttatctttggcaatatgcggcggggagtcatggactgagaaacgtatcagcacaatatacttcacggcagaacctt

SEQ ID NO: 346292 - DNA, 79 bp, Zea mays
cggttaattttgcattttctttcagagttgtttgtgggttttgagttccatctcaagagagttgagtttatttatcttt

SEQ ID NO: 346293 - DNA, 409 bp, Zea mays
atcgacacaaccaccaccacaacttcttgtcctgttggtgatacgagtgagctagctagccatggcggacgctaaccctaccctgatgctcctgaccatctttctcctggtgacaagcgccacagcaggttgtatcagaattaacctcagccacagcggcatgcggtgcacccctggcgacgcgtgcccggtgatatgcgccaaaatcaagggcatagacggcaagtgcgaggatggagcatgcatgtgcacgatctgcgaccctcttcgtaccacccaagagcagcaacggattaatctaatccgtcgctgaatctgtttcgtttcatcgcatgcatatgtatcatgcatgttcattgtaataataagagcacgtgaccctatctttggtgatatggatcactcaccc

SEQ ID NO: 346294 - DNA, 62 bp, Zea mays
aaaaaaaaaaaaaaacaaaaacaaaaacaaaaaagataaaagaacaaaaaaaaaaaaaaatg

SEQ ID NO: 346295 - DNA, 229 bp, Zea mays
gccatttcatctatccatcccgcagctcttgtctctggcaaccgtacgcccaaccgtgttgccgcgccgcccacgaactactctccggcgctgcccatgacgacggtgtcgcgcgcgctcggctccgcgttcgcgggcttcacgcgggcgcccgcggtggcgcagaccgcgacgaccctgccctccccgtacggctcgtcggctctgcaccagcactggcgctggagcc

SEQ ID NO: 346296 - DNA, 64 bp, Zea mays
ctttccttgtcaattaacagtcaactaaaaaaaaaaaaaaaaaaaaaaaaaaaaaaaagaaaaa

SEQ ID NO: 346297 - DNA, 270 bp, Zea mays
gcggactgcaaggttgccctattggaggataagttcaggttgttgtatattaacctccaggggcggagcacgacacaaaaacaagggcagcaggctagcaactagcaagcagcaaaagcaggctagggaagaggccgtctagcaactagcaacaggcttgcaagcagctaagccaagcaagcagccgaagcaggctagtaagcagcaaactgagcaccaagcagtagtcgtctggcgaagcacggccaaccagcaggctagcaagcgcgc

SEQ ID NO: 346298 - DNA, 89 bp, Zea mays
gagtacttggagtcagttcgcctgtaatggacaccagacctgctgtgaatctgtttttaagcttccattgtaatacagcaatacaccat

SEQ ID NO: 346299 - DNA, 220 bp, Zea mays
  unsure (1)..(220): unsure at all n locations
gaaccgcaatgagatctgcaagtacctcttcaaggggatgatcataacggnccaggggggctgccaagaagccacaaggcgtctattcacaagtcatcagcactaatgacatgaaaaatgcagcagctagttggcagtaaagtgcttcgtttacatgaagtttatcaaacaatagctgcaaagagcctaccacatcggcgtagctgcgtggacgatccac

SEQ ID NO: 346300 - DNA, 328 bp, Zea mays
ggggtgactgctcttcagcaagtttgctcattttacacctggagaaaggatgtgaaatctggagatataaaaggtgcaataaatgaggctgctccagataaactaaaacctctgcatgtgtcagaggtttcgcgtgagtttcatcctaattttgcagcgaaatggaggaggtacatgtatattttccctcttgatgaggatgctgacttgattttaggggaagcacagtcctcaaaaacactagagaattctgaacacaacataaagcctcaaagctttgatgtgtccaaggttgatgaaattctcaaaccacttgctggaaagacat

SEQ ID NO: 346301 - DNA, 188 bp, Zea mays
ctacttccaagctaccaaggacgggcgcagacggaggaccagcgccgtcgtccaatcccctactagcggcaccggcacgaaggtcagtcgtccaatcccctactaggggaacagccggcggcacgaaggaaggatttggaggatgacagaagctgcagttacaaggtactggtgccatggatgtgtga

SEQ ID NO: 346302 - DNA, 324 bp, Zea mays
aagaaataacccttaggcatggctgcatgaccgtccgacaaggatagcctctcccttatcatcccaatacatgattccaaggaattacctgatggtttggttgattttgctgcagctttaagcccaggcgccattgtggtctccggatcgagcggattggctgatgggggagtggattgtaggtggctgtggtggaagatagtgtggtggcaagaggagcatctagagccacgatgagtagaagattggccggcttggggagggagaggtacggcgtgacggaagcatgttggacggcgccgccgcagtgactagaaaaagggc

SEQ ID NO: 346303 - DNA, 218 bp, Zea mays
gcggccgacctttttttttgttttttcttcacatagtactttgataaagccatgaagttcggacacaacagtttgacatagccatcaagttgacacacaaaagtgtcacaaagacaagttcacacaatcagttcaatacagagagctaagttcacatataaggtgcgttacttgcttagctgcatgataagccacctgttcctcctttatattgggag

SEQ ID NO: 346304 - DNA, 308 bp, Zea mays
gtccgcaggacacgacactcccgcagttcctcgacaggggggggtttccattccaggcggtggcggttggcggcggagatgagccgggggagcaagctccggtggctgtggcgcgcgccggcgcgggcgctggggcgggcgcgggacctgtacgtgcgggggctgacggggtgcgcgcgccacgtcccttccgacgccgcgttcgggtaccccgtgttcgtgccggcgccgctgtccaggaaccacagcgcctgcggctggggcgccaggtcgtcccgggccgactaggacctgcgcgagctggtccg

SEQ ID NO: 346305 - DNA, 120 bp, Zea mays
tccggctcgcctataaaagacgacaaggtgaagcttagttgtacatggacagcttgctccatggtggcaggtccgatctaaattcttgtcctcacatcgtatcttcctaaaattgttcaa

SEQ ID NO: 346306 - DNA, 273 bp, Zea mays
cgctcctaaaaccccgccagccagcggtgccgccgccggtgacatggacgacggcgacgctgccagacgcaaatccgtcccagattggctgaacagcccgatctggtctgcgcctccgccgtctccacgccacagctcccttccccccacggcaccgtccccccctcagccgccaccatctgctctgccctctccccagccacggcgggatccgactgccatccctactaccaacgccccacgcgacgccgatgtttcagacgacgaaggcaa

SEQ ID NO: 346307 - DNA, 154 bp, Zea mays
accttgtgtcccgacaacgttgggcgcccattctcgcaccgaacttcgttcggttaggttggatcacatcattcttaggcttgaactaggcttttagtctacacctgccgcctcaattaattcgctctggagggggagactcggaggcattatc

SEQ ID NO: 346308 - DNA, 219 bp, Zea mays
agcacatgtacttaccgcacaagctagcgcgcgcaggagctcagttcaggcaggagcgggagagatggagaaggcggaggaggcggcggtcgcggcggcgcaggagcagtggcagggcgtggtggaagccaacctgtcgtggaccccaggctctgccgcgtggacgaacatcgcgagcttctgcgcgctgcaccggtacctcccgggcatcgacttgtg

SEQ ID NO: 346309 - DNA, 97 bp, Zea mays
atggtatggtagcaaaaattagactccaacttatccgatccaataattgtctgttgagcttattttttcttcggaatgtgattccaatttagccctt

SEQ ID NO: 346310 - DNA, 122 bp, Zea mays
accgaatgtagttcagatggaagtatgtaggcggttctaaacagtttttgttatgcgacatatgctaatacttaggaaatgtgacatctatgatctatccaaattttgacgtcagcacacct

SEQ ID NO: 346311 - DNA, 411 bp, Zea mays
ctctgaatatcccctatatatctataatcaccctctcgagaggaaccagcacaaactcagagaactaccgtgctactagatacatagattgtcagctgtgagaagactcccatccccacaagcccatcatgtcttgcataggtggttcctcctcttccacggcgagcaacaagagaaagggaaaggagattgtggtggaggtgtcagctgtggtggaggaggaggagaagcagcagcagcagcagagaaagggaaaggaggttgcgttggaggaggtgccactgcctgcagtggcggagtcttacgacgattcagatttagattcgggttctggttgggacttctacgaggaggagtactcggagaagaaggagcaagagaggaaggaaaagaaacctgcatggctggata

SEQ ID NO: 346312 - DNA, 280 bp, Zea mays
aagatattggtgacaccatgaatgcctttgatatagtttttaatatgattgagtagcactagctacgaacaagaaaagttgaccttcagataaggggaacaagaaaataggctttatagcttatctgatacattagactgcatctttctttaccttgaacgtggtaatatgccaattagagactggttgcacctggagcttgtgcaaggtgggttagcctttgtgttattccttagcaggagctaatcataaggtgaaggctgaataatggatactaata

SEQ ID NO: 346313 - DNA, 428 bp, Zea mays
aaacaccccgaaccgagcctgcatttcggcgccctcatcaagcgaggcagtccccaacacactactacccaaacaaagcacaaaaaaatcggaagaaaagcaaattgcagcgcgtaccattccgtggcggggcctgatcgaggctggcggcgtcgagggcgaagaagcggctccgctagcgcgatcgccgctaccgacctcccgtcgccgcgagggggtagttactagttagcgccggagcgaccgacacgcgagccctaggcgggatccgcgctgccgccgcgggcgtgggtggagtccgcgggatcgcgacgtgaagcgtgccgctagatttggattcggacctgcgtttcgtgtttgtttgtttgtttttccttccagggaggaaggcgactagcgctagcgcctaccgaggcgcgggcaggtga

SEQ ID NO: 346314 - DNA, 398 bp, Zea mays
ctttcccacacactgcgtcctacgctgaagtcctgtcaaagccaatggagggtggcggcgcgaaccgagaaaacggcgacggcttcggcaaaaggcaggaacaaggtcctcatgatggacgtctaggtgcttagccgcagcagggcaagcgaacttcgtcaatcgtggagggttccgtagaccaaacttcggcaacagcttccaccaaaatgggtcgtacgatcaacctggtcgaggtaggcaggacttcaatcaaggcagctctggtcgccatactggtcgtggtcgctttggttattcagtgggtgatcagttcagttacaggacggtggagagcaatccagtcttggcaacaccaggtttggcacctgctgatgcagtggcacaagcggtagcgc

SEQ ID NO: 346315 - DNA, 380 bp, Zea mays
gtcgcgtccagaacccgcaacaaatcggccaccaccgtcctctcccttgctatgccattcctcctctccgccgccagcgccagcaccaccaccaaccctcatcctctctccccgttccctcgcagccagaacaatagccgcgtccaccgcctgcaacttccggcacgccgcctccccagcttccccgcggttgctccgggcgcttcctttgctcccctcccgcagaggctaggcatggcgtcgctggcggcgtcagcggccgccgcggcggaggtgacgcacctcacgcagcgcgacgcggcggagatcgacgagcagctcatgggcccgctcgggttcagcgtcgaccagctcatggaacttgctggattgagcgttgc

SEQ ID NO: 346316 - DNA, 352 bp, Zea mays
gagacatcgaggagaaatcggagcacaactgccaatgcgactgctcttaaaggcagctgcgaacttctacggatatttgtaacagaggctattcaacgctctgcttttatcgctgaagcggaggatggtgctgttattgaacccacccacctagagcgtgtgttgccgcagctgctcttggacttctgaggtaccccatggagcctccaaaagcatttatctaggcgtgtctgctatggaaggatacagatgcctggatgcatcaacagaatcttattgctgatctatgtcttgtaatctgtaaacacacgagatttctatatggctttataaaaatgcatgcatttcttgg

SEQ ID NO: 346317 - DNA, 106 bp, Zea mays
aattcaccaaccaaactccactgtctccaacttttcatcgcgttgctacgcctgctctgcatgacgaccaaggcttccagaagttcttctgggtggcaactggaaa

SEQ ID NO: 346318 - DNA, 329 bp, Zea mays
acgcgcaaacacaggagcaagaagtttgtctccccggccttatggcacctatgagcagtactagtgcgactattgttaggggcgtcatggctgtactaggcttagttcttctcatcgtttgtgcgagctcccagtcctgccaaggttggaaccactcgctggtggcggttccaaaattgaaggtgtggtgctatgtcctctttcgtagggaagagtgttcagataagtcctgccacttggtttgccaagacaaggataagttttaccgtcatggcgcctactgcgtggaaaagacttgggagtgctgcttgccaacttaaccggcggct

SEQ ID NO: 346319 - DNA, 124 bp, Zea mays
acggcataatctgactcgtatcgtctgatactgagtgatctcgcatcttttattgttgcgacatgggtatgttatatatgtgtacacgcgaaccgaaacttacgcaataattatttttggactc

SEQ ID NO: 346320 - DNA, 417 bp, Zea mays
tgatcgagcaagtcctgccattcgcccgtgaaacagtggatgtggtccttgatggacttgcatcaatgccaatgattatatcgcctagtgatcttgatgagttctcaaatttcctcaaagtgatgtgccagcaggcacgccattggatttccggtgaggggccgatgcccagtaatctgtacagcagggagtctgagcatggcgacacatggatatggaggtttcacaacatgtcgatggacatgctgaaaaggttggatgagtgcttgaagacattggagatggacctgtcattatcatcaaagagtgtcggggtcatggaaagtcaaaccacatgggctgctcgatcacacatcctggtcatgttgactgaactcgatttcatctcatcgatttatgaggatgtggggcacaacc

SEQ ID NO: 346321 - DNA, 294 bp, Zea mays
aaaaaaactctaaaggaaaagacagtgagaaggaaaggatcctatgaaggtacatgagacatacacgtgattaattaatggtctcatacattttgttttcttaaccgttttttttccttttctatgtcctttccttcctccatttcaatactacctttccacccttacctatttccttttgaaacaaaacctctttaaggaaataaatctctatcaagtgatatagaacagtcaaaggaaaagtagatttgcgcagggttttaggatgtggaaataaaagaaaagaggggcaag

SEQ ID NO: 346322 - DNA, 438 bp, Zea mays
  unsure (1)..(438): unsure at all n locations
tggtgaccaaattttgcagtggccatgcgcctcacttccccatgaaaaaggttcttttgctgctctggaagacagtgttgtgcactctgggcggctttgaggagctgcagagcatgaaggccgagaagcgcgccatcctggggctccccccgctgcctgaggacagcatcaaggtcatccgcaacatgagggctgcctcacccccggcctctgcctctgacctgattgagcagcagcagaaacggggccgtcgggagcacaaggcactcataaagcaggacaacttggatgccttcaacgagcgggatccctacaaggctgatgactctcgagaggaggaggaggagaatgatgacgacaacagtctggagggggagacgttcccccttgagcgggatgaggtcatgcctnccccactgcagcacccccagaccgaca

SEQ ID NO: 346323 - DNA, 413 bp, Zea mays
caaagattatgaaatatagaacgtagttcccatttccaagaaacttacttttctcaatggggaggtaagacagaccaacacacacacccatacataataggaccaaaatatattgtaaacagagcccaggcagtgagaaactaggggccatgagtaccacacctgcaggtgagacctttggtgtccgagccactcgcttgggttttggtagagtagggacgtcaagttccgcagaaaagcacaatgactcctgaattttcttctccttaagagggggacgtggagacttatctacttgattaaaagaaattagtaaagaaaatttagaaaggggttcaaaaactgttttaccaggagttggatgcagaagtaatgttatgatttctttgtaatagaaatgcatactatcccta

SEQ ID NO: 346324 - DNA, 347 bp, Zea mays
gcgtccgggcttctgggaccagaccctcagaaagcatccaggctccaactctcttcttggaggtcagtgggcgataggcagagggcctgtggggagatgctgcaggggtgggcagccctggaccttttcctcaggcttctaggcataacatttgaggtgagtcacctgatctcacagtttctcagaagaaaaactttttttgttgttattgccagaaaaaagcgttacaagtgtcaaaacggtattggctatctaaattgtgaaacacgggtcacggttttctttattcttcagtttacaggtggcaaaagatttatcaagtgagaaaatgaaaatggaaaaactat

SEQ ID NO: 346325 - DNA, 458 bp, Zea mays
ccttgaccttaattccagggtccagaattgattaagcttgccttcatttcttaactgcctggggggtttctttcattgaccttctttcaaaaaacaagaaagcatgtagagaaattggaactttcaaactctgctggcagaaatttaaaatgttacagccactttggaaaaatagttccttaagaaattaaaaagggttaccatatgatccagtaattcttctcctatgtatacccaagagaaaacatatgcctacacaaaaactggtatcctcatggcaacaccattcataatagccagaaagtggaaacaatccaatgtccatcaattgatgaatggaaaacaaaatgtggtgtatctatataagaagatattattctcagtataatgtatattcgatattatgagataaagtaaaagaaatggaatagttatttgtggtacaacatagataaact

SEQ ID NO: 346326 - DNA, 201 bp, Zea mays
  unsure (1)..(201): unsure at all n locations
cggccgaaaaacccgggccacgcccacccctccgccccttggggtnaaanataaaacgtccctgccatttccaaaaaacttacttttgtcaatgggggggggatacacatgtggggggatccacaaaaaaacaattgaaaaattttataaaaggacgcttgcccaaaatggaaaaggacttcttcaaaatttccttggtct

SEQ ID NO: 346327 - DNA, 111 bp, Zea mays
aacaaaaatagctaactacctctttttttttttttttttcacctcgaaaatgcataaaactggcggtatttcaaaaaaggaggtcgacacattttaaaaaaaaacccattt

SEQ ID NO: 346328 - DNA, 198 bp, Zea mays
  unsure (1)..(198): unsure at all n locations
acgatctcgaaaatgatgcagcacatatcctagcaacatgtagtacactctcnactaaaacgcgtggaactaagtataaatcggaaaagctggacaaaaaatcactgttcacatactcttcataaacggcacatgatgctgcgtcagtgacccatggacgtaacacaaactgaattgtctgattcttgctcataccct

SEQ ID NO: 346329 - DNA, 380 bp, Zea mays
catccttctaagatcttcgtaaactaccttatgatgcaataatttaatgttcctatacggattataggaagagaacatttaaatactgtaaaagggatttggtttagaaggttactatgtcagtttgtccagatatatcccatcaaagaaaacctagtggtagcaataaatcttctgaaaggacttcttatatttaagtacctttaaaacatctaaataattaaaaatatgccctgttaaaaatggagatggatttaggcaagttaggtaaacaacatttgaacagtctcacgtttcagttggtaagcctgatgaattttggttccttttccacccaaaactgatttagctggaattagtacattgtggcttccaaattg

SEQ ID NO: 346330 - DNA, 432 bp, Zea mays
atcaaccgcagccaccgtggcttccgaagggccatccagaccaaaggcatcaagttcgaaggggtccacaagggggggctctttaagaccgaccgggtcctgggcacagcccagctgaaactggatgccctggagacggcatgtgaggtccgagaggtccttgaggtcctggatggtcgcaggcccacaggggggcggctggaggtgatggttcggattcgcgagccactgacggcccagcagctggagaccacgactgagaggtggctggtcatcgaccccgtgccagcatctgtgcccacacaggttgttgggcccaaagggaaggctcctcccatacctgctcctacgagggagccagggaacagatcagcacggcccctgcatagtctcagtgtgctggccttcgaccaagagcgtctggagcggaag

SEQ ID NO: 346331 - DNA, 316 bp, Zea mays
gtccgtaaagctgaaatgtgctttgaaccactgctttggcatttgacttgcttgggaagcccactggctaaggctccagtgtatttttcttctggttattttcctttgctgcttttcattttgtagcatgtgtccttaaggagggagaaaaaatgattcttctgaaaatactcgtgtgttgacaatgtaatgaatgtgtcataagcacagtgcctgggacaccaactcaacaaaggttaattcttgccacccatgactcagacatttttgtccctttaacatcaaagttgaaagaagtaaattattcttttgaaac

SEQ ID NO: 346332 - DNA, 186 bp, Zea mays
ccttccgtttaaatcgcaaccggccgccctttttttttttttttttttttttttttttttttttttttgtggtttttttttttaaaaggtcgggttttttaaaaaccacaaaaattaaaaattaaaaaggtcctttgaggtcaatgagtcaacttctttgttttaaaaatggaaaaactgggaacc

SEQ ID NO: 346333 - DNA, 303 bp, Zea mays
cgagcggccgcccttttttttttttttttcatttccaaaaagaggttttatttactttgggggccaccagggcagctcgcagacatcaggtttcccagcagactttaggccaagctgttagggggaagaagaaacccaggcaaggaggggaactggccccaagtggtttccggttacatcttccctgcttctcttttctctgccgatcagtttggggtttctgtacccacaaaagtttcatgcagttttaatgaaatgaaaatactttttgttcaagggaatgggggccgcgggcggtgagga

SEQ ID NO: 346334 - DNA, 447 bp, Zea mays
gacggggctctgggttgggtgcgggggtgctggcggaggaactccacctcccggagttgtgggcgcctcccccaggcctgcgatcacgcggttgcgatgggactgtcgatttgagacggtgaggacgccgggagggacgcgccgccccctcgcgacctgccttggccggcggggccccggcgccgacgaccgccgtgtccctcggaatcataggcgaagcgggagaaggaagcgaaagccattgagaaaccggctggtcatcatgctccggagaacgttggggagtcagacagaacgcggcgggctgagatgatgctgggccggacattccgggtacttttggtcctactggttatagcttatgccactactttaggcaatggcaacgaaggcagcaagggtggggagttgtccctgcgatcatacaagctctttccatttcccccc

SEQ ID NO: 346335 - DNA, 389 bp, Zea mays
tttccatttatagtagtggtatataaaaagttttatataaacaagatgattttaaaatatggggttattacagtaagtacaaaaaaatcttgaataattaacctttgaaaatcactgcagtaaagctaaagcaacagtaaatggttataattaagagacttggctcttgaaaagcctcaccaatatctattcttttaatttttgttttctttcttctgattttacagctaacccacaatgtgacacgtatgtatatacaaagtggcacgtatgtatataaaccttaaattgtttaagatctatgtgagctgtgttactgcattatggggaacaacattaacgagtatctttcatgtctgtttcacagctaactactgtatttccagatg

SEQ ID NO: 346336 - DNA, 274 bp, Zea mays
tttgactacaactcggccttttacttgtggccgaacaaggttctggacgggcgcaatgacatctaggtgtactccttcccactctcccatgatgacgacttagcccacacgcagaacaatctgtggatactcgagatccccaagcatgtgtacgcgggcatgatgcatctaggacatatcatgatggtcaatctacacaaaaacttcctcgactacatcctgccctatttgcacaacgtcttctacaaataaatacataacttacttatcaaat

SEQ ID NO: 346337 - DNA, 324 bp, Zea mays
ccggaaggtttatcgttgaaaattaaattaacaacacatgaaatgggctttttctaagttcattgtttctgaccaaaagggggggagaaaaaaggtgagagtgagagaaagaggaaaccctcctaatcaaagtagagttataaagcttccactaatgaacacagttatccaattttctttatttattaaaaaagggaaacaatagaactcctgtaaatctatgtgcttgtaggtttccttgttgtgcatagccatcagtcatgtccaactctttgcaaccctatggaatgtagtaatttttgctattttatttatagtacttta

SEQ ID NO: 346338 - DNA, 443 bp, Zea mays
ctagttctagatcgcgagcggccgccctttttttttttttttggttgactgctcaaactggggagctataagccttttaaatagaatgagcagtcaaccaaaaaaaagaaaaagggcttccgatctcacctcacactgctgaaaaactacttcaaaatatcttgaaagagacaggccaccaatagcaggtttatgtaagcccttaacagcaccattaaagggagaaaaaaccatcagaaaattggcatgatgttcctgacagtccggccagcactgctgggacaggacatctctagccaaaccacaagtcctgccataatcaaactgaattatgaaacaaaagaaaacatcttgctctattttaagcaggtcataagccaaattattcttgaaaagtctttgcaggggaaaaaaacaaacccaatttgtagaggagaaaatga

SEQ ID NO: 346339 - DNA, 450 bp, Zea mays
  unsure (1)..(450): unsure at all n locations
gggcgttcctggaggccgtctggagtgcagtgaaggccgtctgcggaatgctgatggatatgtgctcctctgtggggcagctcttcggaaacctcatccaggtataggagccccagtgattctggaggaactccacctcatccagaaggccctgcacgatccccttcccggaaaccatcttctaaagcgacctttaccctcctgctcacccttgacccatcctttaactgccctcccctcctgtcctgcagggacgacaccacagcatcaggccaggttttccatctccaggtctgacctgtctgtcagggacggggatgctctgctgacctanggatgtgggagaggcttggaagcccggaggcgccaaggaccaaggtgccttccgtgggtcagcatgcctctgtgcctctgcctgtcgctccaaaccatgtcagatggggcgctgag

SEQ ID NO: 346340 - DNA, 313 bp, Zea mays
ctagttctagatcgcgagcggccgccctttttttttttttttttttttttttttagggtggggaggattttaatacagggatggaacattgtaatgggtaaggtcttgagaattggacaggatgtgcccgagacagcacggattgggaaggctgccctctaggccccaggtgctgggacgggacactccaagcgggtacgaccatgacctggggacacaagcaaggtcaggaaactctgagtccccttttcaaccctcatggacgccatctagcactttctatggaagaacgtgtgctatttttttgaaacca

SEQ ID NO: 346341 - DNA, 352 bp, Zea mays
gccagataatacccctattcaaatgtaaaagaatcagagcccaaagccaaaacagcatctagggggaaggctctcaaaggggggtacccacgccagctgccatcagcaaacctggaaactctaagaaatgcaaattgttgggctcaccccctcaaatcagaaaatttcaaatatctgtaactctacagtcttcccttcaaaatcctttactcattcaaaactcattaaaatactgtctcatgactagtgggaattacaacaaaaagattctcatttccatgtgcttctgctctgtcatgtctgattctttgtgaccccatggactgaaaccaccatgcttctctgtccatgg

SEQ ID NO: 346342 - DNA, 129 bp, Zea mays
cggccggaattccgggtccgccccacgccgtccggcttaatagccacatattcctagtgcctactgtatgcgacagtgcagctatagaacactggcgtcacagcagagttttttgacacctgctagaat

SEQ ID NO: 346343 - DNA, 406 bp, Zea mays
ccggcaagttccggcccttaaattgattgaaaatggaaaaatcaacacattggaccacataaccggcgcaatcgctgggcagggggacccagccagtgctgctgcggccgccgcaaccgccgctgccgtcatccctgccgtgtccacgccaccgcctttccagggtcgcccaataactccagtgtacacggtggctccaaatgttcagagaattcccactgccgggatctacggagccagttatgtgccatttgctgctccagccacagccacgatcgccacactacagaagaatgcagcggccgccgctgccatgtacggcggatacgcaggctacatacctaaggccttccccgccggtgctatccaagggcccatccacgacgtgtaccaaacttactgaaac

SEQ ID NO: 346344 - DNA, 458 bp, Zea mays
ccgttaaaccaaatggggctggtccatgttcaaatttttaataccaagcttgaaaagaaaaagatggctcattagccaggacaccatttcctgagtgctataattagatagaaaatacgaatgctttattttgcaacatggaaaatgtgttttttttaaaataaatttcatatttttcacgttatttttaaaaattttctgttaagcattagtctgaattttatcataattgaaacatatagttccaaacaatttaattttaaattgcttttaaagctctattcttctctacacttacagtcaaaatgaaaattcattgtatagtatttggaaatgtatttcacctgtaaagaaagaatgtctacatttcaaatggtttcaagtgaatacagaggaaccatcccctccagaaagtcagactacaattgtttacttttgtttttatgaatttttactca

SEQ ID NO: 346345 - DNA, 415 bp, Zea mays
tagatcgcgagcggccgccctttttttttttttttttttttttttttttttttttttttgggtttttttttttttttttttttttttttttttttttttttttttttttttttttttttttttttttttttttttttttttttttttttttttttttttttttgaaaaaaaaaaaaaactttttggggcccccggcttaaaaaaggggttttggaaaaactggggggcccccccccaaaaaattaaattttaatttttggggggggggggggaaaaaaaatcttaaaggggtttttttttttaaaaagggtttgggaaattctaaccaaaaaatataggttttttctttgggagcctataataaccccaaagatgtaaaccctttttgggaaaaaaaaagggggagtgcggggct

SEQ ID NO: 346346 - DNA, 285 bp, Zea mays
aaaagggaaaaaaaaaaaaaaaaaattttttttaaaatttttttatttatttattaaaaaaaaaaaaataaaaaaaaagggttaaaaaaaaaaaaaaaaaaatttttttaattaaaaaaaattataaaaatatttataaaaaatttgggtgaattatataaaataaatattttattaattttaaaaaaggaaaatattaattaaattataattagggggagaaaaaaataattaaaaaaagaaaaaaaaaaaaatttttaataaaaaaaatattttttttttttt

SEQ ID NO: 346347 - DNA, 423 bp, Zea mays
tattcactcatctccttgagtcctgacacctgtgactgcaaggcacgggaagccccatagctgccctgagtctcccctgagcttgtgagaagaggaactcacatagtctctggcccttctctcccagcctttgtgcttctgatcggaggcatcgaagttggcctgtcccacttcccctttttcgcctgcctctcatcggagtttgggctggtcagctctgtcctgggcttcagctactctcttgtctgttcgtggggaattacgagactgtcatgttctactggccctcactgctctgcctggccttcctgctgggccgcttcctgcacatatttgtcaaatctctgagggtccacctgggctgggagctccagatggaagaaaaacctttcctggaagttcaccaggcagagcatgtcaagc

SEQ ID NO: 346348 - DNA, 450 bp, Zea mays
  unsure (1)..(450): unsure at all n locations
gttttcctcactgacaataaacagagaccacctcagctgccagtgccttgcagccctgggcgaccctccccttgccaggcctaccttcttccctgcctccgctgtgcctcttggctggcatctccgctgacccaggagggcgtggaggggctgtccactgccgggggccctggcccctctctccctgcccctgggcaggacgccttcttctgcagggaccagtctctccctccttcccagagggaccagacggacgcctctgaccgtctccttcctgacgggcctgttgacctgccgctggagtcaccagctccagcgcctttcgggggccaggcaggtgacacaggcgaatccaggctggatgcgtcctgcggggcggccccgtcaggctgccttggtgtcagaacacctgngtggtggggactggggtgaactggggtagatacactg

SEQ ID NO: 346349 - DNA, 405 bp, Zea mays
ggttcctggagacttatacttacacgttcaccccctcctcaggtggtctgacagtccgtcagatttgtctgccacgtgtgcatagtctgagtacaggaagttgaattagttcttaataatgggaagaacctacattgtagaagagactgttggccagtatctttcaaacatcaatctgcagggaaaagcttttgtctctggtcttttaataggacagtgttcctcacaaaaggattatgtgattcttgccacaagaacaccacccaaagaagaacagaatgagagccccacacattccaaagccaaattggataacttggatgaagagtgggccacagaacacgcccaccaagtatccagggatgctaccaaggggacttttagttcttggagtatttattatta

SEQ ID NO: 346350 - DNA, 455 bp, Zea mays
tctagatcgcgagcggccgccctttttttttttttttaacttggcaatttgggaaggaggaagggtccataacatgactctgaacatgaatattgtctctcttagcaaatacggctagggtaatggtctaactctaaaccacaagattcaccttggttaaatcctccacttactggactagggggaggttatagcctcctaaggagctcacttaaaacataaaaataaatgtgatatgtctttattaaatgttaaaattaaacgtacacttttttttggatataaatgactacatttgactcctagattgaaatggtcttttaaaaggtatttttgttccagtttccatttttggttgtctttctggcatgcctgtactattattagtgtttatattgtaccctgatttggaaaagtattagattcagtctataccaatgtatttataaagtcca

SEQ ID NO: 346351 - DNA, 432 bp, Zea mays
cgggccggaatacccggtccgggcacgccgtccgctaaattggaaaaatgttggaaagattgaaatgaggtttggttgcaaccaaatatcaggtgctggagttgaggccacacacggctcggcctgtgagaggtcacttatgcaactgccccgcgaggccctggccgggaggtgagccacacggtcctgggatcctcggcccccatgcgggtcacattcatagagacagcctggcccactgggtacagcaaggcctgggggcttgtgaggtgcccccggcctcctgtggaaaccctggcaaagcatcctgggcttgcatgttgtctgccttggtgcaggtcatctgctggaccggtgggtcccgggcatgataggaagggcgcgagggttactgtgcggctgttagattgcattgacagtgatgccgcctgc

SEQ ID NO: 346352 - DNA, 233 bp, Zea mays
ccggccgaataccgggcgcgcaggcgtccgccctaaccttgttgttttaccaaatagagacttgacactgtaggtagaataccaaatccgtcgcgccacttgaatgtgtgggggggaacaacagaccaacattttgggggcccctcgattgaaaaaggaacttctcccactcttgctgccactgaaatggttaggactctctttgtgtaaataaaaccaatgctttcggaaaa

SEQ ID NO: 346353 - DNA, 457 bp, Zea mays
cttgggtcagcagccaggtggaatcagtgtacatggagatgtaccccctgtcccttcagtgagcatctctggtccccactgtgtgggtgggtgtgtctggcccagcttcacacagccattcattcagcaattcctccacgtactcagtgtagaagaagctgggctggaactgcagtgataaacaagaatgattaaggcagtgagcctacatccaccttaaaaagtccgctccgttcaggttcactgactctctctgctcccacagtgggcagcacactgtggacaggggagacactttctccccagccctcctcctgggcctgtgatggagcagcagggaaacatttcattctcctcactcagattaaatcactaagatttttctatttcagaacgtgaatggggagaggaaaggcaaattttgctgaattcaggacaacattcgcaaggtaattat

SEQ ID NO: 346354 - DNA, 450 bp, Zea mays
gttgttggagagctgtcacttactgctcattaatgattgattttttaaaccatctagattgttttcatgagaacaggggattaactatacggaatttattattggtcattaagggatattaaaatggaaaacctttacaagatgtatcctgtcttgctgcattcgaatgcctgagactctcctgccaatgtggggagggaaacaagagatcactcttccagatctctggcaaggagatccagttgaggagaggtggagtgaagagagaaattaagaaaaaaaatctatttttgctgtaataaaacactgtttacattttataacagcaataatttaccccaaataatcacttcagctattgttcagcttgttttaggggctaactgaactgtggctaccaatctattcagtgcagattgctaataatgggctactttgaaaacttatagc

SEQ ID NO: 346355 - DNA, 458 bp, Zea mays
ccgaaaaaaaaaaaaaaactatgggttagctcaaagtttgagaaaagttaagttcaggtggaaccaggtgttggcatggcaacacagaattttaaagtaaatctcctttgaactttgtatagagaaggggagaaaaacctgacacttgtagtttgtttcctcttggccgttaaaagaaagataaagtatgtctgacacttgcagctatttcctctgtttggagacccctagccttcctacctgttaccctctcagtactttactttaaaaatcttaggaagtaatgattattaaatggatattgcaaggcttgacatttagcaacttcttgatacattttgtcttttatgtttatcactattattgcagatacctaatatattttcaaaatatattaaagatacgttattgggagtttaagtgttttaaaaagtctacttttctttaatgagatttta

SEQ ID NO: 346356 - DNA, 431 bp, Zea mays
gcggatggcggcggcggcagcgatgacggcggcgggctgcggaggggctggggcggcacgcgccctctcccgcttccgaggctgcctggcaggcgcgctgctcggggactgcgtgggcgccgtctacgaggcgcgcgacaccgtcgacctgacgtcagtcctgcgtcaggtccaggatttggagccggaccccggctctcccgggagcgcgcggacagaagcactgtgctacacggacgacacagccatggccagggcgctggtgcagtccctgctggccaaggaggccttcgacgaggtggacatggctcacaggtttgctcaggagtacaagaaggaccctgaccggggttacggtgctggagtgatcaccgtcttcaggaaactcctaagccccagatgccgggatgtctttgagcctgcacgcgccc

SEQ ID NO: 346357 - DNA, 59 bp, Zea mays
tgcgaaacgtcatagcttcttctattagtgtcacgctaaattgcaattcacttggctct

SEQ ID NO: 346358 - DNA, 452 bp, Zea mays
tgttactcttgtaaaaccactggggtgttttaatccatgcatttttcttcactattcaagagtataaatctgttgggttgttaaaatacatttaaacaaacagttgagaaacagaagtttggtaccttgtcagatccccttaaggggaagagtttaagctataaaatagtggctttgtttttattccaaaacatacatctgctgtttgttttggatttattttacatgcgtttatatattttttaatactggttaaatcttagcatcttggctaaatcttagaattctggcccttcgtagccatattacagaagtctgtattgtaaaagctaaaggtctgaacaggtttccaaaaacttttactttcatgaggatataaccttagcagagacctgaataacatttattctttggtacgctatgcacgcgtgtgtatgtatgtatgtatgtat

SEQ ID NO: 346359 - DNA, 248 bp, Zea mays
gcgactccgcgctctgcttcggctgcaagttccagttcaagcctatccgggtgtcggagcccgtgctttccctgccggtgcgcagggggagcgtgactgtgctcagtggatacgctgctgatgaaatcacccactgcatccggcctcaggacatcaaggagcgcagagcggtcatcatcctcaggaagacgagattagatgcaccccgattggaaaccaagttcctgagcagcttcgtgctgccaccc

SEQ ID NO: 346360 - DNA, 455 bp, Zea mays
gggggcctcggccccgaatgttcttccttttctctgatgcacttctcatggccaagcctcgacgcccattgcatctgctgcagagtggcacctttgcctgccgggccctctaccccatgggcgagtgtcaactccacagggtctttggccactcaggaggcccttgtggtggactgctcagcctgtcctttccccatgagaagctactgcttatgtccacagaccaggaggagctgtcacactggtaccacagtctgactttggccatcagcagccagaagaactagcagaatcttacaattccagagtccaggatactgtggggataggtcagaatcaggggttcaaaggaatcttactaacaaaacacggactcttcatggtttgagaagaatcattttgtgtttgcctgagaccaagacacaccatgtcccttgaccagctcttaaagaatc

SEQ ID NO: 346361 - DNA, 140 bp, Zea mays
cggaattctcgctcttcttctgctgctaatttcaaataaaacctatccctgtgttgcggcgggtgaccttttaaacaagggctcgcgccgatacttatcctactacttgatacccttcttattaaataacccacttcatt

SEQ ID NO: 346362 - DNA, 283 bp, Zea mays
aacaaccggggggcaatggctaccaagatattatgcctccttgcgcttcttgcgctgcttgcgagcgcaacaaatgcgttcattattccacaatgctcacttgctccaagttacattattacacagatcctcccaccagttacttcaatgggcttcgaacacccagctgtgcaagcctatacgctacaacaagcaattgcggcgagcgtcttacaacaaccaatttcccaattgcaacaacaatccttggcacatctaacaatacaaaccatcgcaacgcaac

SEQ ID NO: 346363 - DNA, 383 bp, Zea mays
gacttagattgcaagcggggcgtctactctatccaagctaacctacccttccctgcggggcgatatcttagctatagtgtcacgtaacttaaattcaatggacgggccgtgacaacacaacgtctggactaacaaaaccgttacctaacttaattgaatcgcattacatcacatttacgtctggtgaggtggtataatagagaacaggaccgaacggactgcccatacacaacagcagcctgcattgaatatggaacgcgacctgcactgtaacatgaaattcagcgcgtgtggtggggacgttcagcgcaactggtacactagactgggcagtaacgtacgctcctttcgattaattaacttcctttctttacacgttacgt

SEQ ID NO: 346364 - DNA, 445 bp, Zea mays
  unsure (1)..(445): unsure at all n locations
agaccattagctttatctactccagagcgcagaagaacccgatcgacaccatgagggtggtgctcgttgccctcgctctcctggctctcgctgcgagcgccacctccacgcatacaagcggcggctgcggctgccagccaccgccgccggttcatctaccgccgccggtgcatctgccacctccggttcacctgccacctccggtgcatctcccaccgccggtccacctgccgccgccggtccacctgccaccgacggtccatgtgccgccgncggttcatctgccgccgccaccatgccactaccctactcaaccgccccggcctcagcctcatccccagccacacccatgcccgtgccaacagccgcatncaagcccgtgccagctgcatggaacctgcggcgttggcagcaccccgatcctgggccagtgcgtcgagttcct

SEQ ID NO: 346365 - DNA, 452 bp, Zea mays
tttgaggattcagaaacacaccaagcgaagcgcactagcaacaacctaacaacaatggctaccaagatattagccctccttgcgcttcttgcccttttagtgagcgcaacaaatgcgttcattattccacagtgctcacttgctcctagtgccattattccacagttcctcccaccagttacttcaatgggcttcgaacatccagccgtgcaagcctacaggctacaactagcgcttgcggcgagcgtcttacaacaaccaattgcccaattgcaacaacaatccttggcacatgtaaacctacaaaccatcgcaacgcaacagcaacaacagtttctgccatcactgagccacctagccgtggtgaaccctgtcgcctacttgcaacagcagctacttgcatccaacccacttgctctggcgaacgtagctgcataccagcaacaacaacg

SEQ ID NO: 346366 - DNA, 332 bp, Zea mays
cggacgcgtgggtgagcattcagaaacacaccaagcgaagcacattagcaacaacctggcaacaatggctaccaagatattatgcctccttgcgcttcttgcgctgtttgcgagcgcaacaaatgcgttcattattccacaatgctcacttgctccaagttacattattacacagatcctgccaccagttacttcaatgggcttcgaacacgcagctgtgcaagcctataagctacaacaagcaattgcggcgagcgtcttacaacaaccaatttcccaattgcaacaacgatccttggcacatctaacaatacaaaccatcgcaacgcaac

SEQ ID NO: 346367 - DNA, 354 bp, Zea mays
caacaagcaacatagaaagtggaatccagtagcaacaatagagcaacaatggcgaccaagatattttccctccttatgctccttgctctttctgcatgtgttgctaacgcgacaattttccctcaatgctcacaagctcctatagcttcccttcttaccccataccttccatcaatgatagcttcaagatgtgaaaacccagctcttcaaccctataggctccaacaagcaatcgcagcaagcaacatacctttatcacccttgtttcaacaatcgccagccctatctttggtgcaggcattggtacaaaccatgagggcacagcagctgcaggaactcgtgctacctgtgatc

SEQ ID NO: 346368 - DNA, 391 bp, Zea mays
attttgagcattcagaaacacaccaagcgaagcacattatcaacaacctaacaacaatggctaccaagatattatccctccttgcgcttcttgcgctttttgcgagcgcaacaaatgcgttcattattccacaatgctcacttgctccaagttacattattacacagttcctcccaccagttacttcaatgggcttcgaacacccagctgtgcaagcctataggctacaacaagcaattgcggcgagcgtcttacaacaaccaatttgccaggtgcaacaacaatccttggcacatgtaacaatacaaaccatcgcaacgcaacagcaacaacaattgctaccagcactgagccacctagccatggtgaaccctgccggctacttgcaaca

SEQ ID NO: 346369 - DNA, 146 bp, Zea mays
gctatacacagtaagcgcacgctatcgacaatggatgctaacatacgcgcgcatgctgcgctatatgtcttttatgggagcgcatcaattgcgttcattgtccgacagtgcacaatggcttgtatggccaaactccgcagttccta

SEQ ID NO: 346370 - DNA, 290 bp, Zea mays
ggtcaagggagaacgcggccagtatagtagagactagcatggctacgcgcacgtgcgaggagataacaagaataacgtgtaacaaccagttagttcattgggctggcctatacaacacggagattagcgaaaagggaaggttatccaactaaatgggctggaaaaacatcactgactggccagcttgcgacgtgacgggcagggacgccaggatcgtggttcgcatacagggagcagcttgaatgatggatgacacgcgccatgtatacacccattaattgcaggagagg

SEQ ID NO: 346371 - DNA, 489 bp, Zea mays
aaaaaaaaaagtgaataaaaaaaaaaaataaaaaaaaaattttttttttaaaaaaaaaaaataataaaaatttggtggtatataaaaaaaatattgtggatatataaaataaataaaaaataataaaataataaaaaaaaataaaaataaaaaaataaaaaaaaatataaaaaataataaaataaaaaaaaaaaaaaaaaaaaaaataaaaaaaaataaaaaaaaaaaaaatataaaaaaaaaataaaaaaaaaaatataaaaaaaaataaaaaaaaaaaaaaataaaataaataaaataaaaaaaaaaaataaaaaataaaataaaaaaaataattaaaaaataaatatatataaaaaaaataaaatttagaataataaaataaaaaaaaaaatataataaaaaaaaaaaaaaaataaaaaaaataatatataaaataaaataaatgaaaaattaataaaaatataaatatatatataaaaaaaatat

SEQ ID NO: 346372 - DNA, 406 bp, Zea mays
cagaccattagctttatctactccagagcgcagaagaacccgatcgacaccatgagggtgttgctcgttgccctcgctctcctggctctcgctgcgagcgccacctccacgcatacaagcggcggctgcggctgccagccaccgccgccggttcatctaccgccgccggtgcatctgccacctccggttcacctgccacctccggtgcatctcccaccgccggtccacctgccgccgccggtccacctgccaccgccggtccatgtgccgccgccggttcatctgccgccgccaccatgccactaccctactcaaccgccccggcctcagcctcatccccagccacacccatgcccgtgccaacagccgcatccaagcccgtgccagctgcagggaacctgcggcg

SEQ ID NO: 346373 - DNA, 394 bp, Zea mays
atttagaccaactagcaacatagaaagcacaatagtgtaccaacaatggcagccaaaatattttgcctccttatgctccttggtatttctgcaagtgctgctacggcgaccattttcccgcaatgctcacaagctcctatagcttcccttcttcccccgtacctctcaccagcggtgtcttcggtatgtgaaaacccaattcttcaaccctacaggatccaacaggcaatcgcagctggcatcttacctttatcacccttgttcctccaacaatcatcagccctattacagcagttacctttggtgcatttattggcacaaaacatcagggcacaacaactacaacaacttgtgctagcaaaccttgctgcctactctcagcaacagcagtttc

SEQ ID NO: 346374 - DNA, 388 bp, Zea mays
gcccggaacgaccgactcgaccgactgcatacgcaatatgcatcgatagcggtggatttcagtgatcacacaatatagcaacaatggcgaccaagatattttccctccttatgctccttgctctttctgcatgtgttgctaacgcgacaattttccctcaatgctcacaagctcctatagcttcccttcttcccccataccttccatcaatgatagcttcagtatgtgaaaacccagctcttcaaccctataggctccaacaagcaatcgcagcaagcaacatacctttatcacccttgtttcaacaatcgccagccctatctttggtgcagtcattggtacaaaccatcagggcacagcagctgcagcaactcgtgctacctgtgat

SEQ ID NO: 346375 - DNA, 434 bp, Zea mays
cggcccggaacgacccactcgacccacgcgcatcaatcatcattcatcttagtagtataggcaccaaatcaaatctgcaacatcaattatctaactccaaaaaccatgaagctggtgcttgtggttcttgctttcattgctttagtatcaagtgtttcttgtacacagacaggcggctgcagctgtggtcaacaacaaagccatgagcagcaacatcatccacaacaacatcatccacaaaaacaacaacatcaaccaccaccacaacatcaccagcagcagcaacaccaacaacaacaagttcacatgcaaccacaaaaacatcagcaacaacaagaagttcatgttcaacaacaacaacaacaaccgcagcaccaacaacaacaacaacaacagcaccaacaacaacatcaatgtgaaagccaacaacaaca

SEQ ID NO: 346376 - DNA, 384 bp, Zea mays
cggacgcgtgggagaaagcacaatagtgtaccaacaatggcagccaaaatattttgcttgcttatgctccttggtctttctgcaagtgctgctaccgcaaccattttcccacaatgctcacaagctcctatagcttcctttcttcccccatacctctcaccagcggtgtcttcagtatgtgaaaacccaattcttcaaccctacaggatccaacaggcaatcgcagcaggcatcttacctttatcacccttgttcctccaacaaccgtcagccctattacagcagttacctttggtgcatttgttggcacaaaacatcaaggcacaacaactacaacaacttgtgctaggaaaccttgctgcctactctcagcaacagcagttt

SEQ ID NO: 346377 - DNA, 108 bp, Zea mays
attttgagcattcagaaacacaccaagcgaagcacattagcaacaacctaacaacaatggctaccaagatattatccctccttgcgcttcttggcgcttttgcgagcg

SEQ ID NO: 346378 - DNA, 420 bp, Zea mays
aaagcggcagtgcgtaaagaggatcgtcgaacagaacagcatgaagatggtcatcgttctcgtcgtgtgcctggctctgtcagctgccagcgcctctgcaatgcagatgccctgcccctgcgcggggctgcagggcttgtacggcgctggcgccggcctgacgacgatgatgggcgccggcgggctgtacccctacgcggagtacctgaggcagccgcagtgcagcccgctggcggcggcgccctactacgccgggtgtgggcagacgagcgccatgtaccagccgctccggcaacagtgctgccagcagcagatgaggatgatggacgtgcagtccgtcgcgcagcagctgcagatgatgatgcagcttgagcgtgccgctgccgccagcagcagcctgtacgagccagctctgatgca

SEQ ID NO: 346379 - DNA, 383 bp, Zea mays
ctagcaacatagaaagcacaatagtgtaccaacaatggcagccaaaatattttgcctccttatgctccttggtctttctgcaagtgctgctacggcgaccattttcccgcaatgctcgcaagctcctatagcttcccttcttcccccgtacctctcaccagcggtgtcttcggtatgtgaaaacccaattcttcaaccctacaggatccaacaggcaatcgcagctggcatcttacctttatcacccttgttcctccaacaatcatcagccctattacaacagttacctttggtgcatttattggcacaaaacatcagggcacaacaactacaacaacttgtgctagcaaaccttgctgcctactctcagcaacaagcagttc

SEQ ID NO: 346380 - DNA, 411 bp, Zea mays
ggacagccggagccaagcgccctacaagtccagcagcttctcgccggcgacaacccgcgacgagggcggcggcaggacccgggaggtcgaccgcaacttctccctcggcgcgctccgcgacaagagggacctcccgtacggcggctccagagagcagtccatcagggaggaggacgagcaagagggaggtggtgaccatggggccgcgcgaggaggcggcgagggtccgggctcggtgggagggggatgcggcgagccggacctcgccgcgttgtcggcggaggtggacgcgttcctcgcgggccaggacgagggcacgccggtgagcgtcacggaagcgacgctggacaagttcgcgtccgccgtcgagctgctggtcgccaggtccgagggcgccgaagagaagtgggc

SEQ ID NO: 346381 - DNA, 414 bp, Zea mays
ccaactagcaacatagaaagcacaatagtgtaccaacaatggcagccaaaatattttgcgtccttatgctccttggtctttctgcaagtgctgctaccgcaaccattttcccacaatgctcacaagctcctatagcttcctttcttcccccatacctctcaccagcggtgtcttcagtatgtgaaaacccaattcttcaaccctacaggatccaacaggcaatcgcagcaggcatcttacctttatcacccttgttcctccaacaaccgtcagccctattacagcagttacctttggtgcatttgttggcacaaaacatcaaggcacaacaactacaacaacttgtgctaggaaaccttgctgcctactctcagcaacagcagtttcttccattcaaccaactggctgcattga

SEQ ID NO: 346382 - DNA, 369 bp, Zea mays
ggccgcggaggcggagctgcccccccacgccacgatggcggagtgccgcagcctcatcgagttcctccgcgcgttcgagcaccaccgcagggcggccgacatctccgcctccgcgtgctcccgatccaggcgggccggggcctcctccgccgcaggcggctccttctgcgacagcgccccgatggccgtggtcgacgcggtcatgctcctcgccgtcgtcaccgcgctcggcttcctcctgatcccctacctcaagctgctgctcctcgagatgggcgcgctgctccaccccgccgcgttctgcctcccggccgccgccttcttcggggccgccgtcgccgtcgccgcggccgtcgtcgcctgggagct

SEQ ID NO: 346383 - DNA, 335 bp, Zea mays
  unsure (1)..(335): unsure at all n locations
tttcagcattcagaaccacaccaagcgaagcgcactaccaccaacctaccaccaatggctaccaagatattagccctccttgcgcttctggcccttttagtgagcgcaacaaatgcgttcattattccacagtgctcacttgctcctagtgccattattccacagttcctcccaccagttacttcaatgggcttcgaacatncagccgtgcaagcctacaggctacaactagcgcttgcggcgagcgtcttacaacaaccaattgctcaattgcaacaacaatncttggcacatctaaacctacaaaaccatcgcaacgcaacagcaacaacaag

SEQ ID NO: 346384 - DNA, 403 bp, Zea mays
gcaacaactattaccatttagccagctagctactgcctactctcaacaacaacaacttcttccatttaaccaattggccgcactgaaccccgctgcttatttgcagcagcaaatactactaccatttagccagctagctacagcaagccgtgcttccttcttgacacaacaacagttgctgccgttctaccagcagtttgcggctaaccccgcaaccctcttacaactacaacaattgttgccctttgtccaacttgctttgacaaacccagcagcctcctaccaacaacacatcattggtggtgccctcttttagattgcttattagatgtaattcaataataaagttttttggatgatgtatgtggccaaccagaaataaaaagttacatttccagattct

SEQ ID NO: 346385 - DNA, 138 bp, Zea mays
ttttcaaaagatttgcacactctaaatggaaatgggaacgccccttgtagcggcatttaaaccgcgggggtggtggtgtttacgccacatgtacactttacatttgccagcgccttagccccggcccctggggttttt

SEQ ID NO: 346386 - DNA, 415 bp, Zea mays
attttgagcattcagaaacacaccaagcgaagcacattagcaacaacctaacaacaatggctaccaagatattatccctccttgcgcttcttgcgctttttgcgagcgcaacaaatgcgttcattattccacaatgctcacttgctccaagttccattattacacagttcctcccaccagttacttcaatgggcttcgaacacccagctgtgcaagcctataggctacaacaagcaattgcggcgagcgtcttacaacaaccaatttcccagttgcaacaacaatccttggcacatctaacaatacaaaccatcgcaacgcaacagcaacaacaattcctaccagcactgagccacctagccatggtgaaccctgccgcctacttgcaacagcagttgcttgcataaacccactt

SEQ ID NO: 346387 - DNA, 353 bp, Zea mays
gagcattcagaaacacaccaagcgaagcgcactatcaacgacctaacaacaatggctaccaagatattagccctccttgcgcttcttgccctttctgcgagcgcaacaaatgcgttcattattccacaatgctcacttgctcctagtgccattattccacagctcctcccaccagttacttcaatgggcttcgaacacctagctgtgcaagccaacatgcaacaacaagcgcttgcggcgagcgtattacaacaaccaattgcccaattgcaacaacaatccttgccacatctaacaatacaagccatcacaacgcaacagcaactacagttcctaccagcactgagccacct

SEQ ID NO: 346388 - DNA, 59 bp, Zea mays
gtcagtgtgagcaatgacctgaatgaacaattgaaatgaaaagaaaaaagtattgttcc

SEQ ID NO: 346389 - DNA, 417 bp, Zea mays
aagcgaagcacattaccaacaacctaacatcaatggctaccaagatattatccctccttgcgcttgttgcgctttttgcgagcgcaacaaatgcgttcattattccacaatgctcacttgctccaagttccattattacacagttcctcccaccagttacttcaatgggcttcgaacacccagctgtgcaagcctataggctacaacaagcaattgcggcgagcgtcttacaacaaccaatttcccagttgcaacaacaatccttggcacatctaacaatacaaaccatcgcaacgcaacagcaacaacaattcctaccagcactgagccacctagccatggtgaaccctgccgcctacttgcaacagcagttgcttgcatcaaacccacttgctcttgcaaacgtagttgcaaacc

SEQ ID NO: 346390 - DNA, 349 bp, Zea mays
cagcctagcaattagctcatctactccagattggagaactcgacaccatgaaggtgctgatcgttgcccttgctctcctggcgctcgctgcgagcgccgcctccagtacaagcggcggctgtggctgccagacaccaccgtttcatctaccgcctccgttctatatgccgcctccgttctatctgccgccgcagcagcagccgcagccatggcaataccccactcaaccaccgcagctaagcccgtgccagcagttcggatcctgcggcgtcggcagcgtcggcagcccgttcctgggccagtgcgtcgagttcctgaagcaccagtgcagcccggcggcgacgcccta

SEQ ID NO: 346391 - DNA, 419 bp, Zea mays
caacaagcaacatagaaagtggaatccagtagcaacaatagagcaacaatggagaccaagatattttccctccttatgctccttgctctttctacatgtgttgctaacgcgacaattttccctcaatgctcacaagctcctatagcttccctttttcccccataccttccatcaattatagcttcagtatgtgaaaacccagctcttcaaccatataggcttcaacaagcaatcgcagcaagcaacatacctttatcgcccttgttgtgtcaacaatcgccagccctatctttggtgcagtcattggtacaaaccatcagggcacaacagctgcagcaactcgtgctacctgtgatcaaccaagtagctctggcaaacctttctccctactctccgcaacaacaatttcttccattcaa

SEQ ID NO: 346392 - DNA, 187 bp, Zea mays
tatatgtgactctctcctgtatcggtgtatttaatttctttctttatttgtttttagttttttatttttttttttattttttttattatttttatttatttttttatctatctttttctattacattttatttcttaaatcttatttgattttattttctttttttcttatattttttttttcattt

SEQ ID NO: 346393 - DNA, 394 bp, Zea mays
tattattgagaccaactagcaacatagaaagcacaatagtgtaccaacaatggcagccaaaatattttgcctccttatgctccttggtctttctgcaagtgctgctacggcgaccattttcccgaaatgctcgcaagctcctatagcttcccttcttcccccgtacctctcaccagcggtgtcttcggtatgtgaaaacccaattcttcaaccctacaggatccaacaggcaatcacagctggcatcttacctttatcacccttgttcctccaacaatcatcagccctattacatcagttacctttggtgcatttattggcacaaaacatcagggcacaacaactacaacaacttgtgctagcaaaccttgctgcctactctcagcaacagcag

SEQ ID NO: 346394 - DNA, 391 bp, Zea mays
agcaagcaacatacctttatcgcccttgttgtgtcaacaatcgccagccctatctttggtgcagtcattggtacaaaccatcagggcacaacagctgcagcaactcgtgctacctgtgatcaaccaagtagctctggcaaacctttctccctactctccgcaacaacaatttcttccattcaaccaactgtctacactgaaccctgctgcttatttgcagcaacaactattaccatttagccagctagctactgcctactctcaacaacaacaacttcttccatttaaccaattggccgcactgaaccccgctgcttatttgcagcagcaaatactactaccatttagccagctagctacagcaagccgtgcttccttcttgacacaacaa

SEQ ID NO: 346395 - DNA, 407 bp, Zea mays
caacaagcaacatagaaagtggaatccagtagcaacaatagagcaacaatggcgaccaagatattttccctccttatgctccttgctctttctgcatgtgttgctaacgcgacaattttccctcaatgctcacaagctcctatagcttcccttcttcccccataccttccatcaatgatagcttcagtatgtgaaaacccagctcttcaaccctataggctccaacaagcaatcgcagcaagcaacatacctttatcacccttgtttcaacaatcgccagccctatctttggtgcagtcattggtacaaaccatcagggcacagcagctgcagcaactcgtgctacctgtgatcaaccaagtagctctggcaaacctttctccctactctcagcaacaacaatttct

SEQ ID NO: 346396 - DNA, 78 bp, Zea mays
cgcgggtgcatgcgacgtattaggtcttctatagtgaaacctatgttcaattcactgcacggcgttgtacaacaaaac

SEQ ID NO: 346397 - DNA, 405 bp, Zea mays
acccacgcgtccgcagaaacacaccaagcgaagcacattagcaacaacctaacaacaatggctaccaagatatgatccctccttgcgcttcttgcgctttttgcgagcgcaacaaatgcgttcattattccacaatgctcacttgctccaagttccattattacacagttcctcccaccagttacttcaatgggcttcgaacacccagctgtgcaagcctataggctacaacaagcaattgcggcgagcgtcttacaacaaccaatttcccagttgcaacaacaatccttggcacatctaacaatacaaaccatcgcaacgcaacagcaacaacaattcctaccagcactgaaccacctagccatggtgaaccctgccgcctacttgcaacagcagttgcttgca

SEQ ID NO: 346398 - DNA, 419 bp, Zea mays
ccaagcgaagcgcactagcaacaacctaacaacaatggctaccaagatattagccctccttgcgcttcttgcccttttagtgagcgcaacaaatgcgttcattattccacagtgctcacttgctcctagtgccattattccacagttcctcccaccagttacttcaatgggcttcgaacatccagccgtgcaagcctacaggctacaactagcgcttgcggcgagcgtcttacaacaaccaattgcccaattgcaacaacaatccttggcacatctaaacctacaaaccatcgcaacgcaacagcaacaacagtttctgccatcactgagccacctagccgtggtgaaccctgtcgcctacttgcaacagcagctacttgcatccaacccacttgctctggcgaacgtagctgcatacc

SEQ ID NO: 346399 - DNA, 402 bp, Zea mays
caatcataattcatcttagtagtataggcaccaaatcaaatctgcaacatcaattatctgactccaaaaaccatgaagctggtgcttgtggttcttgctttcattgctttaacatcaagtgtattttgtacacagacaggcggctgcagctgtggtcaacaacaaagccatgagcagcaacatcatccacaacaacatcatccacaaaaacaacaacatctaccaccaccacaacatcaccagctgcagcatcacccaacaccatcaagttcacatgcaaccacaaaaacatcagcagcatcaagacgttgatgttcaacaacaacaacaacaaccttagcaccaacaacatcaacaacatcagttcctacaacaacatgaatgtgaaggccaacaacaaca

SEQ ID NO: 346400 - DNA, 384 bp, Zea mays
agaccattagctttatctactccagagcgcagaagaacccgatcgacaccatgagggtgttgctcgttgccctcgctctcctggctctcgctgcgagcgccacctccacgcatacaagcggcggctgcggctgccagccaccgccgccggttcatctaccgccgccggtgcatctgccacctccggttcacctgccacctccggtgcatctcccaccgccggtccacctgccgccgccggtccacctgccaccgccggtccatgtgccgccgccggttcatctgccgccgccaccatgccactaccctactcaaccgccccggcctcagcctcatccccagccacacccatgcccgtgccaacagccgcatccaagcccgtgcc

SEQ ID NO: 346401 - DNA, 394 bp, Zea mays
tttgagcattcagaaacacaccaagcgaagcgcactagcaacgacctaacaacaatggctaccaagatattagccctccttgcgcttcttgccctttttgtgagcgcaacaaatgcgttcattattccacaatgctcacttgctcctagtgccattattccacagttcctcccaccagttacttcaatgggcttcgaacacctagctgtgcaagccaacatgcaacaacaagcgcttgcggcgagcgtcttacaacaaccaattgcccaattgcaacaacaatccttgccacatctaacaatacaagccatcacaacgcaacagcaacaacagttcctaccagcactgagccacctagccatggtgaaccctgccgcctacttgcaagagcagc

SEQ ID NO: 346402 - DNA, 412 bp, Zea mays
ttgagaccaactagcaacatagaaagcacaatagtgtaccaacaatggcagccaaaatattttgcctccttatgctccttggtctttctgcaagtgctgctacggcgaccattttcccgaaatgctcgcaagctcctatagcttcccttcttcccccgtacctctcaccagcggtgtcttcggtatgtgaaaacccaattcttcaaccctacaggatccaacaggcaatcacagctggcatcttacctttatcacccttgttcctccaacaatcatcagccctattacatcagttacctttggtgcatttattggcacaaaacatcagggcacaacaactacaacaacttgtgctagcaaaccttgctgcctactctcagcaacagcagtttcttccattcaaccaactagc

SEQ ID NO: 346403 - DNA, 394 bp, Zea mays
ctggacgtcagcctagcaattagctcatcgactccagattggagaactcgacaccatgaaggtgctgatcgttgcccttgctctcctggcgctcgctgcgagcgccgcctccagtacaagcggcggctgtggctgccagacaccaccgtttcatctaccgcctccgttctatatgccgcctccgttctatctgccgccgcagcagcagccgcagccatggcaataccccactcaaccaccgcagctaagcccgtgccagcagttcggatcctgcggcgtcggcagcgtcggcagcccgttcctgggccagtgcgtcgagttcctgaagcaccagtgcagcccggcggcgacgccctacggctcgccacagtgccaggcgctgcagcagcagtgc

SEQ ID NO: 346404 - DNA, 394 bp, Zea mays
atttagaccaactagcaacatataaagcacaatagtgtaccaacaatggcagccaaaatattttgcctccttatgctccttggtatttctgcaagtgctgctacggcgaccattttcccgcaatgctcacaagctcctatagcttcccttcttcccccgtacctctcaccagcggtgtcttcggtatgtgaaaacccaattcttcaaccctacaggatccaacaggcaatcgcagctggcatcttacctttatcacccttgttcctccaacaatcatcagccctattacagcagttacctttggtgcatttattggcacaaaacatcagggcacaacaactacaacaacttgtgctagcaaaccttgctgcctactctcagcaacagcagtttc

SEQ ID NO: 346405 - DNA, 394 bp, Zea mays
ggtcttcagaccattagctttatctactccagagcgcagaagaacccgatcgacaccatgagggtgttgctcgttgccctcgctctcctggctctcgctgcgagcgccacctccacgcatacaagcggcggctgcggctgccagccaccgccgccggttcatctaccgccgccggtgcatctgccacctccggttcacctgccacctccggtgcatctcccaccgccggtccacctgccgccgccggtccacctgccaccgccggtccatgtgccgccgccggttcatctgccgccgccaccatgccactaccctactcaaccgccccggcctcagcctcatccccagccacacccatgcccgtgccaacagccgcatccaagcccgtgccagc

SEQ ID NO: 346406 - DNA, 409 bp, Zea mays
ctagcaacatagaaagcacaatagtgtaccaacaatggcagctaaaatattttgcctccttatgctccttggtctttctgcaagtgctgctacggcgaccattttcccacaatgctcacaagctcctatagcttcccttcttcccccgtacctctcaccaacggtgtcttcggtatgtgaaaacccaattcttcaaccctacaggatccaacaggcaatcgcagctggcatcttacctttatcacccttgttcctccaacaatcatcagccctattacagcagttacctttggtgcatttattggcacaaaacatcagggcacaacaactacaacaacttgtgctagcaaaccttgctgcctactctcagcaacagcagtttcttccattcaaccaactagctgcattg

SEQ ID NO: 346407 - DNA, 420 bp, Zea mays
caactagcaacatagaaagcacaatagtgtaccaacaatggcagccaaaatattttgcctccttatgctccttggtctttctgcaagtgctgctacggcgaccattttcccgaaatgctcgcaagctcctatagcttcccttcttcccccgtacctctcaccagcggtgtcttcggtatgtgaaaacccaattcttcaaccctacaggatccaacaggcaatcacagctggcatcttacctttatcacccttgttcctccaacaatcatcagccctattacatcagttacctttggtgcatttattggcacaaaacatcagggcacaacaactacaacaacttgtgctagcaaaccttgctgcctactctcagcaacagcagtttcttccattcaaccaactagctgcattgaactctgc

SEQ ID NO: 346408 - DNA, 411 bp, Zea mays
agaccattagctttatctactccagagcgcagaagaacccgatcgacaccatgagggtgttgctcgttgccctcgctctcctggctctcgctgcgagcgccacctccacgcatacaagcggcggctgcggctgccagccaccgccgccggttcatctaccgccgccggtgcatctgccacctccggttcacctgccacctccggtgcatctcccaccgccggtccacctgccgccgccggtccacctgccaccgccggtccatgtgccgccgccggttcatctgccgccgccaccatgccactaccctactcaaccgccccggcctcagcctcatccccagccacacccatgcccgtgccaacagccgcatccaagcccgtgccagctgcagggaacctgcggcgttggca

SEQ ID NO: 346409 - DNA, 360 bp, Zea mays
gcattagatacaattacttcaaagcgcacaagagcgcgaacgacaccatgcggcagcaggagggtggcgttggtctcctgggttttgctgggagtgccagctagagccatacaaacggatactggcggtggctgccactgccagccactgatgtagcgtcatctacgcatgtgggagcatctgttaacttgcgatcacctgtgcatttccgagcatctgtcaacgtggggccacctgtcgacgtgggaccacctgtcaatgtgccgccatgtgctgatgtggggtcatcagcatgcgactacattactctaccgtactgaactgagcctgattcagagtcatacccatgcacatgcaaac

SEQ ID NO: 346410 - DNA, 242 bp, Zea mays
atccgagtaaatactcttttattggggccacataaaataaattagtgggcggttttttaacaccgtgctggtgggaaaaccgcggggctaaacaaaataaacttgtttgaaaaaatacctttttttggaggggtgattataaagaagagggccccgaacgttcctttttacaaaattttcgccctctttgtgtgtaaaggggccccccctttgtagcgttatataaagcggggggggtgggg

SEQ ID NO: 346411 - DNA, 398 bp, Zea mays
attgagaccaacaagcaacatataaagtgtaatacagtagcaacaatagagcaacaatggcggccaagatattttccatccttatgctccttgctctttctgcatgtgttgctaacgcgaccatttttcctcaatactcacaagctcctatagctgcccttcttcccccataccttccatcaatgaccgcttcagtatgtgaaaacccagcccttcaaccctacaggctccaacaagcaatcgcaacaagcaacttacctttatcacccctgttctttcaacaatcgccagccctatctttggtgcagtcattggtacaaaccatcagggcacaacagctgcagcaactcgtgctaccagtgatcagccaagtagctctggcaaacctttctccctac

SEQ ID NO: 346412 - DNA, 393 bp, Zea mays
ggacgtcagcctagcaattagctcatcgactccagattggagaactcgacaccatgaaggtgctgatcgttgcccttgctctcctggcgctcgctgcgagcgccgcctccagtacaagcggcggctgtggctgccagacaccaccgtttcatctaccgcctccgttctatatgccgcctccgttctatctgccgccgcagcagcagccgcagccatggcaataccccactcaaccaccgcagctaagcccgtgccagcagttcggatcctgcggcgtcggcagcgtcggcagcccgttcctgggccagtgcgtcgagttcctgaagcaccagtgcagcccggcggcgacgccctacggctcgccacagtgccaggcgctgcagcagcagtgct

SEQ ID NO: 346413 - DNA, 395 bp, Zea mays
gggtcttcagaccattagctttatctactccagagcgcagaagaacccgatcgacaccatgagggtgttgctcgttgccctcgctctcctggctctcgctgcgagcgccacctccacgcatacaagcggcggctgcggctgccagccaccgccgccggttcatctaccgccgccggtgcatctgccacctccggttcacctgccacctccggtgcatctcccaccgccggtccacctgccgccgccggtccacctgccaccgccggtccatgtgccgccgccggttcatctgccgccgccaccatgccactaccctactcaaccgccccggcctcagcctcatccccagccacacccatgcccgtgccaacagccgcatccaaacccgtgccagc

SEQ ID NO: 346414 - DNA, 404 bp, Zea mays
attttgagcattcagaaacacaccaagcgaagcacattagcaacaacctaacaacagatgggtaccaagatattatccctccttgcgcttcttgcgctttttgcgagcgcaacaaatgcgttcattattccacaatgctcacttgctccaagttccattattacacagttcctcccaccagttacttcaatgggcttcgaacacccagctgtgcaagcctataggctacaacaagcaattgcggcgagcgtcttacaacaaccaatttcccagttgcaacaacaatccttggcacatctaacaatacaaaccatcgcaacgcaacagcaacaacaattcctaccagcactgagccacctagccatggtgaaccctgccgcctacttgcaacagcagttgcttgc

SEQ ID NO: 346415 - DNA, 404 bp, Zea mays
  unsure (1)..(404): unsure at all n locations
ttcgaacacctagctgtgcaagcctacaggctacaacaagcgcttgcggcgagcgtcttacaacaaccaattaaccaattgcaacaacaatccttggcacatctaaccatacaaaccatcgcaacacaacagcaacaacagttcctaccagcactgagccaactagatgtggtgaaccctgtcggctacttgcaacaacaggtgcttgcattcaacccacttgctctggcaaacgtagctgcataccaacaacaacaacaattgcaacagtttctggcagcgctcaatcaactagccatggtgaaccctgtcgnctacctacaacagcaacaactgctttcatctagccctctcgttgtgggtaatgcacctacatacctgcaacaacaattgctgcaacagat

SEQ ID NO: 346416 - DNA, 408 bp, Zea mays
cagcattcagaaacacaccaagcgaagcgcactagcaacaacctaacaacaatggctaccgagaggttagccctccttgcgcttcttgcccttttagtgagcgcaacaaatgcgttcattattccacagtgctcacttgctcctagtgccattattccacagttcctcccaccagttacttcaatgggcttcgaacatccagccgtgcaagcctacaggctacaactagcgcttgcggcgagcgtcttacaacaaccaattgcccaattgcaacaacaatccttggcacatctaaacctacaaaccatcgcaacgcaacagcaacaacagtttctgccatcactgagccacctagccgtggtgaaccctgtcgcctacttgcaacagcagctacttgcatccaaccca

SEQ ID NO: 346417 - DNA, 400 bp, Zea mays
ctgggtcttcagaccattagctttatctactccagagcgcagaagaacccgatcgacacgatgagggtgttgctcgttgccctcgctctcctggctctcgctgcgagcgccacctccacgcatacaagcggcggctgcggctgccagccaccgccgccggttcatctaccgccgccggtgcatctgccacctccggttcacctgccacctccggtgcatctcccaccgccggtccacctgccgccgccggtccacctgccaccgccggtccatgtgccgccgccggttcatctgccgccgccaccatgccactaccctactcaaccgccccggcctcagcctcatccccagccacacccatgcccgtgccaacagccgcatccaagcccgtgccagctgc

SEQ ID NO: 346418 - DNA, 402 bp, Zea mays
gaccattagctttatctactccagagcgcataagaacccgatcgacaccatgagggtgtggctcgttgccctcgctctcctggctctcgctgcgagcgccacctccacgcatacaagcggcggctgcggctgccagccaccgccgccggttcatctaccgccgccggtgcatctgccacctccggttcacctgccaccttcggtgcatctcccaccgccggtccacctgccgccgccggtccacctgccaccgccggtccatgtgccgccgccggttcatctgccgccgccaccatgccactaccctactcaaccgccccggcctcagcctcatccccagccacacccatgcccgtgccaacagccgcatccaagcccgtgccagctgcagggaacctgcgg

SEQ ID NO: 346419 - DNA, 409 bp, Zea mays
  unsure (1)..(409): unsure at all n locations
cattagctttatctactccagagcgcagattaaccttatcgacaccatgagggtgttgcgcgttggcctcgctctcctggctctcgctgcgagcgccacctccacgcatacaagcggcggctgcggctgccagccaccgccgccggttcatctaccgccgccggtgcatctgccacctacggttcacctgccacctccggtgcatctaccaccgccggtccacctgccgccgccggtccacctgccaccgacggtccatgtgccgccgccggttcatctgccgccgccaccatgccactaccctactcaaccgccccggcctcagcctcattcccagccacacccatgcccgtgccaacagccgcatncaagcccgtgccagctgcagggaacctgcggcgttggcagc

SEQ ID NO: 346420 - DNA, 404 bp, Zea mays
cttcaaaccattaccttaatttcctccaattcgcaaaaaaccccgaccgacaccatgagggggtggttcgttgccctcgttctcctggctctcgctgcgagcgccacctccacgcatacaagcggcggctgcggctgccagccaccgccgccggttcatctaccgccgccggtgcatctgccacctccggttcacctgccacctccggtgcatctcccaccgccggtccacctgccgccgccggtccacctgccaccgccggtccatgtgccgccgccggttcatctgccgccgccaccatgccactaccctactcaaccgccccggcctcagcctcatccccagccacacccatgcccgtgccaacagccgcatccaagcccgtgccagctgcagggaacctg

SEQ ID NO: 346421 - DNA, 402 bp, Zea mays
gtcgaagatggagtcgccggaggcgtgctcttccggggaggcgtcccctgcctcgccgcgtccgctggcggcggcggcggagcgcccgtccgaggcggcggcgctgcgggcgctcgtcgaccgggtgcgcgccggggaggtggacgccgcccgcgaggtgcgccgcctcaccagggcgtccgcgaggcaccggcgcaagctcgccgcggccgtcgacccgctcgtcgccatgctccgctccgccgcgcccgaggctggggaggcccgcgctgctcgcgctgctcaacctcgccgtcagggacgagagaaataaaaccaagatagtggatgctggcgcacttgagcccctgcttggctacttgcaatcaagtgatccaaatttgcaggagtatgcgactgctg

SEQ ID NO: 346422 - DNA, 401 bp, Zea mays
tgtatttgcactcatgcatcacaaaacattcttctatcagtaccatcaatcatcattcagtgttaggagtataggcaccaaatcaaatctgcaacatcaattatctaactccaaaaaccatgaagctggtgcttgtggttcttgctttcattgctttagtatcaagtgtttcttgtacacagacaggcggctgcagctgtggtcaacaacaaagccatgagcagcaacatcatccacaacaacatcatccacaaaaacaacaacatcaaccaccaccacaacatcaccagcagcagcaacaccaacaacaacaagttcacatgcaaccacaaaaacatcagcaacaacaagaagttcatgttcaacaacaacaacaacaaccgcggcaccaacaacaacaa

SEQ ID NO: 346423 - DNA, 221 bp, Zea mays
atttttgttggcatgcggaacctctcgaggttcaatgcttaggtaccagtctatcagaggtggtggctaatatataatgccacctagatctaattgactgtctcgcgagcgacaaaaatgcgactaggaaaaaacatggctcactcgatcttaattgcattgtatcacatgcccttttagcaagttgtcgaatgacctaagagcacccaactgatcgagct

SEQ ID NO: 346424 - DNA, 406 bp, Zea mays
gaccattagctttatctactccagagcgcataagaacccgatcgacaccatgagggtggggctcgttgccctcgctctcctggctctcgctgcgagcgccacctccacgcatacaagcggcggctgcggctgccagccaccgccgacggttcatctaccgccgccggtgcatctgccacctccggttcacctgccacctccggtgcatctcccaccgccggtccacctgccgccgccggtccacctgccaccgccggtccatgtgccgccgccggttcatctgccgccgccaccatgccactaccctactcaaccgccccggcctcagcctcatacccagccacacccatgcccgtgccaacagccgcatccaagcccgtgccagctgcaaggaacctgcggcgtt

SEQ ID NO: 346425 - DNA, 400 bp, Zea mays
caactagcaacatagaaagcacaatagtgtaccaacaatggcagccaaaatatttggcctgcttatgctccttggtctttctgcaagtgctgctacggcgaccattttcccgaaatgctcgcaagctcctatagcttcccttcttcccccgtacctctcaccagcggtgtcttcggtatgtgaaaacccaattcttcaaccctacaggatccaacaggcaatcacagctggcatcttacctttatcacccttgttcctccaacaatcatcagccctattacatcagttacctttggtgcatttattggcacaaaacatcagggcacaacaactacaacaacttgtgctagcaaaccttgctgcctactctcagcaacagcagtttcttccattcaaccaa

SEQ ID NO: 346426 - DNA, 401 bp, Zea mays
gcaacatagaaagtggaatacagtatcaacaatagagcaacaatggcggccaagatatttgccatccttatgctccttgctctttctgcatgtgttgctaacgcgaccatttttcctcaatactcacaagctcctatagctgcccttcttcccccataccttccatcaatgaccgcttcagtatgtgaaaacccagcccttcaaccctacaggctccaacaagcaatcgcaacaagcaacttacctttatcacccctgttctttcaacaatcgccagccctatctttggtgcagtcattggtacaaaccatcagggcacaacagctgcagcaactcgtgctaccagtgatcagccaagtagctctggcaaacctttctccctactctcagcaacaacaatt

SEQ ID NO: 346427 - DNA, 60 bp, Zea mays
ggttaccttccccttccttccaaggtcttggttcttttatagggtcacctaaattcaatt

SEQ ID NO: 346428 - DNA, 406 bp, Zea mays
gaaacacaccaagcgaagcgcactaccaactacctaacaacaatggctaccaagatattagccctgcttgcgcttcttgccctttttgtgagcgcaacaaatgcgttcattattccacaatgctcacttgctcctagtgccattattccacagttcctcccaccagttacttcaatgggcttcgaacacctagctgtgcaagccaacatgcaacaacaagcgcttgcggcgagcgtcttacaacaaccaattgcccaattgcaacaacaatccttgccacatctaacaatacaagccatcacaacgcaacagcaacaacagttcctaccagcactgagccacctagccatggtgaaccctgccgcctacttgcaagagcagctgcttgcatccaacccacttgctt

SEQ ID NO: 346429 - DNA, 404 bp, Zea mays
agaccattagctttatctactccatagcgtagaagaacccgatcgacaccatgagggtggggctcgttgccctcgctctcctggctctcgctgcgagcgccacctccacgcatacaagcggcggctgcggctgccagccaccgccgccggttcatctaccgccgccggtgcatctgccacctccggttcacctgccacctccggtgcatctcccaccgccggtccacctgccgccgccggtccacctgccaccgccggtccatgtgccgccgccggttcatctgccgccgccaccatgccactaccctactcaaccgccccggcctcagcctcatccccagccacacccatgcccgtgccaacagccgcatccaagcccgtgccagctgcagggaacctgcggc

SEQ ID NO: 346430 - DNA, 401 bp, Zea mays
tgggtcttcagaccattagctttatctactccagagcgcagaagaacccgatcgacaccgtgagggtgttgctcgttgccctcgctctcctggctctcgctgcgagcgccacctccacgcatacaagcggcggctgcggctgccagccaccgccgccggttcatctaccgccgccggtgcatctgccacctccggttcacctgccacctccggtgcatctcccaccgccggtccacctgccgccgccggtccacctgccaccgccggtccatgtgccgccgccggttcatctgccgccgccaccatgccactaccctactcaaccgccccggcctcagcctcatccccagccacacccatgcccgtgccaacagccgcatccaagcccgtgccagctgcag

SEQ ID NO: 346431 - DNA, 405 bp, Zea mays
gaccattaccttaatctactccaaaccgctaaaaaccccgaccgacaccatgagggtgtggctggtggccctcgttctcctggctctcgctgcgagcgccacctccacgcatacaagcggcggctgcggctgccagccaccgccgccggttcatctaccgccgccggtgcatctgccacctccggttcacctgccacctccggtgcatctcccaccgccggtccacctgccgccgccggtccacctgccaccgccggtccatgtgccgccgccggttcatctgccgccgccaccatgccactaccctactcaaccgccccggcctcagcctcatccccagccacacccatgcccgtgccaacagccgcatccaagcccgtgccagctgcagggaacctgcggcgt

SEQ ID NO: 346432 - DNA, 403 bp, Zea mays
accataaaaggcacattactgtaccaccattggcagccaaaatatttggcctccttaggctcgtgggtatttctgcaagtgctgctacggcgaccattttcccgcaatgctcacaagctcctatagcttcccttcttcccccgtacctctcaccagcggtgtcttcggtatgtgaaaacccaattcttcaaccctacaggatccaacaggcaatcgcagctggcatcttacctttatcacccttgttcctccaacaatcatcagccctattacagcagttacctttggtgcatttattggcacaaaacatcagggcacaacaactacaacaacttgtgctagcaaaccttgctgcctactctcagcaacagcagtttcttccattcaaccaactagctgcatt

SEQ ID NO: 346433 - DNA, 402 bp, Zea mays
caaagcggcagtgcgtagagaggatcgtcgatacagaacagcatgaagatggtcatcgttctcgtcgtgtgcctggctctgtcagctgccagcgcctctgcaatgcagatgccctgcccctgcgcggggctgcagggcttgtacggcgctggcgccggcctgacgacgatgatgggcgccggcgggctgtacccctacgcggagtacctgaggcagccgcagtgcagcccgctggcggcggcgccctactacgccgggtgtgggcagacgagcgccatgtaccagccgctccggcaacagtgctgccagcagcagatgaggatgatggacgtgcagtccgtcgcgcagcagctgcagatgatgatgcagcttgagcgtgccgctgccgccagcagcagcctg

SEQ ID NO: 346434 - DNA, 404 bp, Zea mays
caacaagcaacatagaaagtggaatccagtttcaacaatagagcaacaatggcgaccaaggtattttccctccttatgctccttgctctttctgcatgtgttgctaacgcgacaattttccctcaatgctcacaagctcctatagcttcccttcttcccccataccttccatcaatgatagcttcagtatgtgaaaacccagctcttcaaccctataggctccaacaagcaatcgcagcaagcaacatacctttatcacccttgtttcaacaatcgccagccctatctttggtgcagtcattggtacaaaccatcagggcacagcagctgcagcaactcgtgctacctgtgatcaaccaagtaactctggcaaacctttctccctactctcagcaacaacaatt

SEQ ID NO: 346435 - DNA, 401 bp, Zea mays
cagaccattagctttatctactccagagcgcagaagaacccgatcgacaccatgagggtgtggctcgttgccctcgctctcctggctctcgctgcgagcgccacctccacgcatacaagcggcggctgcggctgccagccaccgccgccggttcatctaccgccgccggtgcatctgccacctccggttcacctgccacctccggtgcatctcccaccgccggtccacctgccgccgccggtccacctgccaccgccggtccatgtgccgccgccggttcatctgccgccgccaccatgccactaccctactcaaccgccccggcctcagcctcatccccagccacacccatgcccgtgccaacagccgcatccaagcccgtgccagctgcagggaacctg

SEQ ID NO: 346436 - DNA, 425 bp, Zea mays
  unsure (1)..(425): unsure at all n locations
cgggattccaggcacgcgccacgcgcacgcaacatanaaagtggaatccagttccaccattagagcaccattggcggccaagagattgtccatccttatgctccttgctctttctgcatgtgttgctaacgcgaccatttttcctcaatactcacaagctcctatagctgcccttcttcccccataccttccatcaatgaccgcttcagtatgtgaaaacccagcccttcaaccctacaggctccaacaagcaatcgcaacaagcaacttacctttatcacccctgttctttcaacaatcgccagccctatctttggtgcagtcattggtacaaaccatcagggcacagcagctgcagcaactcgtgctacctgtgatcaaccaagtagctctggcaaacctttctccctactctcagcaacaac

SEQ ID NO: 346437 - DNA, 63 bp, Zea mays
cgattattaccgcgtgctggcggcgacgtaatacttctattatggcgccacctaaattcaatt

SEQ ID NO: 346438 - DNA, 405 bp, Zea mays
gcaacatagaaagcacaatagtgtaccaacaatggcagccaaaatattttgcctgcttatgctccttggtatttctgcaagtgctgctacggcgaccattttcccgcaatgctcacaagctcctatagcttcccttcttcccccgtacctctcaccagcggtgtcttcggtatgtgaaaacccaattcttcaaccctacaggatccaacaggcaatcgcagctggcatcttacctttatcacccttgttcctccaacaatcatcagccctattacagcagttacctttggtgcatttattggcacaaaacatcagggcacaacaactacaacaacttgtgctagcaaaccttgctgcctactctcagcaacagcagtttcttccattcaaccaactagctgcatt

SEQ ID NO: 346439 - DNA, 245 bp, Zea mays
ggtctggccgaatccgggccgtctaagatccagcttactcgcttgctgcacgcatactggcgtagtgacctaattcattcactggccgtgtttcaacgcggactggaaaccctgcgttcccacttaatcgcttgcacacatccctttccagctgggtattgcgaaaggccgtccgatcgccttcccaaagttgccagctgatgggaatgggacgcccctgtacgggcattaagcgcagggtgtgg

SEQ ID NO: 346440 - DNA, 134 bp, Zea mays
tcgccgtccgactagtgtctagatacgcgagcagcgacggtctagaggatgagaggcttaccgtacgcggtgctatgcgaacgtcatatgctctttctatagctgtcaccataaattacatattcactaggcca

SEQ ID NO: 346441 - DNA, 417 bp, Zea mays
gcaacatagaaagcacaatagtgtaccaacaatggcagccaaaatattttgcttccttatgctccttggtctttctgcaagtgctgctaccgcaaccattttcccacaatgctcacaagctcctatagcttcctttcttcccccatacctctcaccagcggtgtcttcagtatgtgaaaacccaattcttcaaccctacaggatccaacaggcaatcgcagcaggcatcttacctttatcacccttgttcctccaacaaccgtcagccctattacagcagttacctttggtgcatttgttggcacaaaacatcaaggcacaacaactacaacaacttgtgctaggaaaccttgctgcctactctcagcaacagcagtttcttccattcaaccaactggctgcattgaactctgctgc

SEQ ID NO: 346442 - DNA, 399 bp, Zea mays
cagcattcagaaacacaccaagcgaagcgcactagcaacaacctaacaacaatggctgcggagatattagccctccttgcgcttcttgcccttttagtgagcgcaacaaatgcgttcattattccacagtgctcacttgctcctagtgccattattccacagttcctcccaccagttacttcaatgggcttcgaacatccagccgtgcaagcctacaggctacaactagcgcttgcggcgagcgtcttacaacaaccaattgcccaattgcaacaacaatccttggcacatctaaacctacaaaccatcgcaacgcaacagcaacaacagtttctgccatcactgagccacctagccgtggtgaaccctgtcgcctacttgcaacagcagctacttgca

SEQ ID NO: 346443 - DNA, 270 bp, Zea mays
ctgggtcttcatactcattagctttatctactccagagggctgaataacccgatcgacaccatgagggtgttgctcgttgccctcgctctcctggctctcgctgcgagcgccacctccacgcatacaagcggaggctgcggctgccagccaccgtcgccggttcatctaccgccgcctgtgcatctgccaccttcggttcacctgccacctccggtgcatcttccaccaacggtccacctgccgtcgtcagatcacctgccaccgccagt

SEQ ID NO: 346444 - DNA, 431 bp, Zea mays
tatcagtaccatcaatcatcattcatcttagtagtataggcaccaaatcaaatctgcagcgtggattatctaactccaaaaaccatgaagctggtgcttgtggttcttgctttcattgctttagtatcaagtgtttcttgtacacagacaggcggctgcagctgtggtcaacaacaaagccatgagcagcaacatcatccacaacaacatcatccacaaaaacaacaacatcaaccaccaccacaacatcaccagcagcagcaacaccaacaacaacaagttcacatgcaaccacaaaaacatcagcaacaacaagaagttcatgttcaacaacaacaacaacaaccgcagcaccaacaacaacaacaacaacagcaccaacaacaacatcaatgtgaaggccaacaacaacatcaccaacaatcacaagg

SEQ ID NO: 346445 - DNA, 418 bp, Zea mays
gaccattagctttatctactccagagcgcagaagaacccgatcgacaccatgagggtgttgctcgttgccctcgctctcctggctctcgctgcgagcgccacctccacgcatacaagcggcggctgcggctgccagccaccgccgccggttcatctaccgccgccggtgcatctgccacctccggttcacctgccacctccggtgcatctcccaccgccggtccacctgccgccgccggtccacctgccaccgccggtccatgtgccgccgccggttcatctgccgccgccaccatgccactaccctactcaaccgccccggcctcagcctcatccccagccacacccatgcccgtgccaacagccgcatccaagcccgtgccagctgcaaggaacctgcggcgttggcagcaccccg

SEQ ID NO: 346446 - DNA, 410 bp, Zea mays
gggcacagcagctgcagcaactcgtgctacctgtgatcaaccaagtagctctggcaaacgtttctccctactctcagcaacaacaatttcttccattcaaccaactgtctacattgaaccgtgctgcttatttgcagcaacaactattaccattcagccagctagctactgcctactctcagcaacaacaacttcttccatttaaccaattggccgcactgaaccccgctgcttatttgcagcagcaaatactactaccatttagccagctagctgcagcaagccgtgcttccttcttgacacagcaacagttgctgcctttctaccagcagtttgcggctaaccccgcaaccctcttacaactacaacaattgttgccctttgtccaacttgctttgacaaacccagca

SEQ ID NO: 346447 - DNA, 420 bp, Zea mays
gagaccaacaagcaacatagaaagtggaatacagtagcaacaatagagcaacaatggcgggcaagatattttccatccttatgctccttgctctttctgcatgtgttgctaacgcgaccatttttcctcaatactcacaagctcctatagctgcccttcttcccccataccttccatcaatgaccgcttcagtatgtgaaaacccagcccttcaaccctacaggctccaacaagcaatcgcaacaagcaacttacctttatcacccctgttctttcaacaatcgccagccctatctttggtgcagtcattggtacaaaccatcagggcacaacagctgcagcaactcgtgctaccagtgatcagccaagtagctctggcaaacctttctccctactctcagcaacaacaatttcttccat

SEQ ID NO: 346448 - DNA, 414 bp, Zea mays
atcgcagcaagcaacatacctttatcgcccttgttgtgtcaacaatcgccagccctatctgtggtgcagtcattggtacaaaccatcagggcacaacagctgcagcaactcgtgctacctgtgatcaaccaagtagctctggcaaacctttctccctactctccgcaacaacaatttcttccattcaaccaactgtctacactgaaccctgctgcttatttgcagcaacaactattaccatttagccagctagctactgcctactctcaacaacaacaacttcttccatttaaccaattggccgcactgaaccccgctgcttatttgcagcagcaaatactactaccatttagccagctagctacagcaagccgtgcttccttcttgacacaacaacagttgctgccgttctac

SEQ ID NO: 346449 - DNA, 223 bp, Zea mays
gaccaactagcaacatagaaagcacaataatgtaccgacaatggcagctaaaatattttgccctccttatgctccttgggctttctgcaagtgctggtaccgcgacccttttcccaccatggctaccagcccccattgccttccttttttccccgttccctttacccaccggggcctccggtttgtgaaaacccaattcttcaaccttacaggacccaccagg

SEQ ID NO: 346450 - DNA, 417 bp, Zea mays
attttgagcattcagaaacacaccaagcgaagctacctagcaacgacttaacaacaatgggtaccaatatattagccctccttgcgcttcttgccctttttgtgagcgcaacaaatgcgttcattattccacaatgctcacttgctcctagtgccattataccacagttcctccgaccagttacttcaatgggcttcgaacacctagctgtgcaagcctacaggctacaacaagcgcttgcggcgagcgtcttacaacaaccaattaaccaattgcaacaacaatccttggcacatctaaccatacaaaccatcgcaacacaacagcaacaacagttcctaccagcactgagccaactagatgtggtgaaccctgtcgcctacttgcaacagcaggtgcttgcatccaacccacttg

SEQ ID NO: 346451 - DNA, 407 bp, Zea mays
gcaaccattagctttatctactccaagcgcagaacaacccgacgacaccatgagggggtgctcgtgccctcgctctcctgctctcgctgcgagcgccacctccacgcatacaagcggcggtgggctgccagccaccgccgccggttcatctaccgcacgcgggcatctgccacctccggtcacctgccacctcgggcatctcccaccgcggccacctgccgccgccggtccacctgccaccgcggccatgtgccgccgccggttcatctgccgccgccaccatgccactaccctactcaaccgccccggcctcagcctcatccccagccacacccatgcccgtgccaacagccgcatccaagcccgtgccagctgcagggaacctgcggcgttggcagcaccccgat

SEQ ID NO: 346452 - DNA, 419 bp, Zea mays
cagaaacacaccaagcgaagctacctagcaacgacttaacaacaatggctaccaagatatgagccctccttgcgcttcttgccctttttgtgagcgcaacaaatgcgttcattattccacaatgctcacttgctcctagtgccattataccacagttcctccgaccagttacttcaatgggcttcgaacacctagctgtgcaagcctacaggctacaacaagcgcttgcggcgagcgtcttacaacaaccaattaaccaattgcaacaacaatccttggcacatctaaccatacaaaccatcgcaacacaacagcaacaacagttcctaccagcactgagccaactagatgtggtgaaccctgtcgcctacttgcaacagcaggtgcttgcatacaacccacttgctctggcaaacgta

SEQ ID NO: 346453 - DNA, 144 bp, Zea mays
tcgcagtccgctatgttctatgatcgtcgagcagagccagctctagagagatcgcaaagcttatcgtatcgcgtagcatagcgacagtcattatgcttcttctatagtagtcatcctaatattcatattcactaggcgcagtca

SEQ ID NO: 346454 - DNA, 258 bp, Zea mays
attgagaccaactagcaacatagaaagcacaatagtgtaccaacaatggcagccaaaatattttgcctccttatgctccttggtctttctgcaagtgctgctacggcgaccattttcccgcaatgctcgcaagctcctatagcttcccttcttcccccgtacctctcaccagcggtgtcttcggtatgtgaaaacccaattcttcaaccctacaggatccaacaggcaatcgcagctggcatcttacctttatcaccc

SEQ ID NO: 346455 - DNA, 413 bp, Zea mays
gggcacaacagctgcagcaactcgtgctacctgtgatcaaccaagtagctctggcaaacctgtctccctactctccgcaacaacaatttcttccattcaaccaactgtctacactgaaccctgctgcttatttgcagcaacaactattaccatttagccagctagctactgcctactctcaacaacaacaacttcttccatttaaccaattggccgcactgaaccccgctgcttatttgcagcagcaaatactactaccatttagccagctagctacagcaagccgtgcttccttcttgacacaacaacagttgctgccgttctaccagcagtttgcggctaaccccgcaaccctcttacaactacaacaattgttgccctttgtccaacttgctttgacaaacccagcagcc

SEQ ID NO: 346456 - DNA, 416 bp, Zea mays
gcttcagtatgtgaaaacccagctcttcaaccctataggctccaacaagcaatcgcagcaggcaacatacctttatcacccttgtttcaacaatcgccagccctatctttggtgcagtcattggtacaaaccatcagggcacagcagctgcagcaactcgtgctacctgtgatcaaccaagtagctctggcaaacctttctccctactctcagcaacaacaatttcttccattcaaccaactgtctacattgaaccgtgctgcttatttgcagcaacaactattaccattcagccagctagctactgcctactctcagcaacaacaacttcttccatttaaccaattggccgcactgaaccccgctgcttatttgcagcagcaaatactactaccatttagccagctagctgcagc

SEQ ID NO: 346457 - DNA, 420 bp, Zea mays
attgagaccaactagcaacatagaaagcacaatagtgtaccaacaatggcagccaaaatgttttgcctccttatgctccttggtctttctgcaagtgctgctacggcgaccattttcccgcaatgctcgcaagctcctatagcttcccttcttcccccgtacctctcaccagcggtgtcttcggtatgtgaaaacccaattcttcaaccctacaggatccaacaggcaatcgcagctggcatcttacctttatcacccttgttcctccaacaatcatcagccctattacaacagttacctttggtgcatttattggcacaaaacatcagggcacaacaactacaacaacttgtgctagcaaaccttgctgcctactctcagcaacagcagtttcttccattcaaccaactaggttcattg

SEQ ID NO: 346458 - DNA, 258 bp, Zea mays
ttctatatcgatagcgagcggtctatatgaaccaaggatacttacgcacgcatgcatcctaattcctattttatagattgacctaaattaaattaactgaccggccgtttacaaccaacggactgactaaacaatgccggtacccaacttaattaatttgcttgacatacatctttcttcagctagcttaattaataacaaacaggcaccgatcgatcttccttacaaacaggcaccctgaatgaataatgaaacgca

SEQ ID NO: 346459 - DNA, 137 bp, Zea mays
agactagtttctatgatctgcgagtcggcgcggtcctagagagatgccagagcgttatcgctacgcgatgcatagcgacagtcatatgtctctgtctatagttgtcacactaaaattcaattcactaggccagccgc

SEQ ID NO: 346460 - DNA, 414 bp, Zea mays
attttcagcattcagaaacacaccaagcgaagcgcactagcaacaacctaacaacaatggctaccaagatattagccctccttgcgcttcttgcccttttagtgagcgcaacaaatgcgttcattattccacagtgctcacttgctcctagtgccattattccacagttcctcccaccagttacttcaatgggcttcgaacatccagccgtgcaagcctacaggctacaactagcgcttgcggcgagcgtcttacaacaaccaattgcccaattgcaacaacaatccttggcacatctaaacctacaaaccatcgcaacgcaacagcaacaacagtttctgccatcactgagccacctagccgtggtgaaccctgtcgcctacttgcaacagcagctacttgcatccaacccac

SEQ ID NO: 346461 - DNA, 420 bp, Zea mays
atttagaccaactagcaacatagaaagcacaatagtgtaccaacaatggcagccaaaatattttgcctccttatgctccttggtatttctgcaagtgctgctacggcgaccattttcccgcaatgctcacaagctcctatagcttcccttcttcccccgtacctctcaccagcggtgtcttcggtatgtgaaaacccaattcttcaaccctacaggatccaacaggcaatcgcagctggcatcttacctttatcacccttgttcctccaacaatcatcagccctattacagcagttacctttggtgcatttattggcacaaaacatcagggcacaacaactacaacaacttgtgctagcaaaccttgctgcctactctcagcaacagcagtttcttccattcaaccaactagctgcattg

SEQ ID NO: 346462 - DNA, 420 bp, Zea mays
gcaacatagaaagcacaatattgtaccaataatggcagccaaaatattttgcctcattgtgctccttggtctttctgcaagtgctgctacggcgagcattttcccgcaatgctcacaagctcctatagcttcccttcttcccccatacctctcaccagcgatgtcttcagtatgtgaaaatccaattcttctaccctacaggatccaacaggcaatcgcagcaggcatcttacctttatcacccttgttcctccaacaatcatcagccctattacagcagttacctttggtgcatttattggcacaaaacatcagggcacaacaactacaacaactcgtgctagcaaaccttgctgcctactctcagcaacagcagttacctttggtgcatttgttggcacaaaacatcatggcacaaca

SEQ ID NO: 346463 - DNA, 414 bp, Zea mays
aatattttgagcattcaaaaacacaccaagcgaagcgcactagcaacgacctaacaacggtggctaccaagatattagccctccttgcgcttgttgcccttgttgggagcgcaacaaatgcgttcattattccacaatgcttacttgctcctagtgccattattccacagttcctaccaccagttacttcaatgggcttagaacacctagctgtgcaagccaacatgcaacaacaagcgcttgcggggagcgtattacaacaaccaattgcccaattgcaacaacaatccttgccacatataacaatacaagccatcacaacgcaacagcaacaacagttactaccagtactgagccacctagtcatggtgaaccctgccgactacttgcaagagcagctgcttgcatacaacc

SEQ ID NO: 346464 - DNA, 416 bp, Zea mays
caacaagcaacatagaaagtggaatccagtagcaacaatagagcaacaatggcgaccaagatattttccctccttatgctccttgctctttctgcatgtgttgctaacgcgacaattttccctcaatgctcacaagctcctatagcttcccttcttcccccataccttccatcaatgatagcttcagtatgtgaaaacccagctcttcaaccctataggctccaacaagcaatcgcagcaagcaacatacctttatcacccttgtttcaacaatcgccagccctatctttggtgcagtcattggtacaaaccatcagggcacagcagctgcagcaactcgtgctacctgtgatcaaccaagtagctctggcaaacctttctccctactctcagcaacaacaatttcttccattcaa

SEQ ID NO: 346465 - DNA, 240 bp, Zea mays
caggagagttcaatgctgccattcagccagctagctggtgtgagccctgctaccttcttgatacaaccaccagttgttgccgttctaccagcacgctgcgcctaacgctggcaccctcttacaactgcaacaattgctgccattcaaccaacttgctttgacaaacccagcagcgttctaccaacaacccatcattggtggtgccctctttcagatttctcatgagttatagatcaataa

SEQ ID NO: 346466 - DNA, 417 bp, Zea mays
ctgggtcttcagaccattagctttatctactccagagcgcagaagaacccgatcgacacgatgagggtgttgctcgttgccctcgctctcctggctctcgctgcgagcgccacctccacgcatacaagcggcggctgcggctgccagccaccgccgccggttcatctaccgccgccggtgcatctgccacctccggttcacctgccacctccggtgcatctcccaccgccggtccacctgccgccgccggtccacctgccaccgccggtccatgtgccgccgccggttcatctgccgccgccaccatgccactaccctactcaaccgccccggcctcagcctcatccccagccacacccatgcccgtgccaacagccgcatccaagcccgtgccagctgcaaggaacctgcggcgtt

SEQ ID NO: 346467 - DNA, 397 bp, Zea mays
aaaaaaaaaaacccacccacgcctacggttctagatccccagcatccactatatattttccaacccaacctacacctacatacctcgtcatttttaaaactatactctcacctaaaaccaattcacatcccatcgtataacaacatcctcactcctaaaaccctcaccttacccaacttaatctacttccaacacatccccctttaaccaactaccattatatcaaatactcccacacccatcctccttcccaacaatttcccaacctcaatcaataataacactccccctgtaatcattcattaaccccacatcttttcatccttacacacatacttacctctacactccccaactccctaactccagatcctttccctttatttccttcctttca

SEQ ID NO: 346468 - DNA, 199 bp, Zea mays
tccgggaggctatgggacgcgacaaacagagggaatggcatgtctcgcggtgcctgctctgcagtgcacgccttgatgcaatgccctgccctgccggctgcaggtgacggcctggcccgctacacgatatggcgccggggcttcccctaccgagactgagaccgatgacccgtggggcgccctatacccttgggcagac

SEQ ID NO: 346469 - DNA, 421 bp, Zea mays
gcacaatagtgtaccaacaatggcagccaaaatattttgcttccttatgctccttggtctttctgcaagtgctgctaccgcaaccattttcccacaatgctcacaagctcctatagcttcctttcttcccccatacctctcaccagcggtgtcttcagtatgtgaaaacccaattcttcaaccctacaggatccaacaggcaatcgcagcaggcatcttacctttatcacccttgttcctccaacaaccgtcagccctattacagcagttacctttggtgcatttgttggcacaaaacatcaaggcacaacaactacaacaacttgtgctaggaaaccttgctgcctactctcagcaacagcagtttcttccattcaaccaactggctgcattgaactctgctgcttatttgcaacaacaa

SEQ ID NO: 346470 - DNA, 420 bp, Zea mays
cagaaacacaccaagcgaagcacattagcaacaacctaacaacaatggctaccaagatattatccctccttgcgcttcttgcgctttttgcgagcgcaacaaatgcgttcattattccacaatgctcacttgctccaagttccattattacacagttcctcccaccagttacttcaatgggcttcgaacacccagctgtgcaagcctataggctacaacaagcaattgcggcgagcgtcttacaacaaccaatttcccagttgcaacaacaatccttggcacatctaacaatacaaaccatcgcaacgcaacagcaacaacaattcctaccagcactgagccacctagccatggtgaaccctgccgcctacttgcaacagcagttgcttgcatcaaacccacttgctctggcaaacgtag

SEQ ID NO: 346471 - DNA, 419 bp, Zea mays
ttgagaccaactagcaacatagaaagcacaatagtgtaccaacaatggcagccaaaagattttgcctccttatgctccttggtctttctgcaagtgctgctacggcgaccattttcccgaaatgctcgcaagctcctatagcttcccttcttcccccgtacctctcaccagcggtgtcttcggtatgtgaaaacccaattcttcaaccctacaggatccaacaggcaatcacagctggcatcttacctttatcacccttgttcctccaacaatcatcagccctattacatcagttacctttggtgcatttattggcacaaaacatcagggcacaacaactacaacaacttgtgctagcaaaccttgctgcctactctcagcaacagcagtttcttccattcaaccaactagctgcattg

SEQ ID NO: 346472 - DNA, 420 bp, Zea mays
cgacctaacaacaatggctaccaagatattagccctccttgcgcttcttgccctttttgtgagcgcaacaaatgcgtgcattattccacaatgctcacttgctcctagtgccattattccacagttcctcccaccagttacttcaatgggcttcgaacacctagctgtgcaagccaacatgcaacaacaagcgcttgcggcgagcgtcttacaacaaccaattgcccaattgcaacaacaatccttgccacatctaacaatacaagccatcacaacgcaacagcaacaacagttcctaccagcactgagccacctagccatggtgaaccctgccgcctacttgcaagagcagctgcttgcatccaacccacttgctctggcgaacgtagttgcaaaccatcaacaacaacagctacaaca

SEQ ID NO: 346473 - DNA, 389 bp, Zea mays
tgagaccaactagcaacatataaagcacaatattgtaccaataatggcagccaaaatatggtgcctcattatgctccttggtctttctgcaagtgctgctacggcgagcattttcccgcaatgctcacaagctcctatagcttcccttcttcccccatacctctcaccagcgatgtcttcagtatgtgaaaatccaattcttctaccctacaggatccaacaggcaatcgcagcaggcatcttacctttatcacccttgttcctccaacaatcatcagccctattacagcagttacctttggtgcatttattggcacaaaacatcagggcacaacaactacaacaactcgtgctagcaaaccttgctgcctactctcacaacaacagtt

SEQ ID NO: 346474 - DNA, 309 bp, Zea mays
acccacgcgcgaggcacgcgtccggctctagagagacagcggcttgtctgctcggtcgcgcggcgccccggctggggtgtgggctgcaccggtgagcggcctccagcccctcggcggctcggcacagaccggcagcccatcgcgcgagggcgtgcgtaggccctcggcgcgggcgcggctgcacgagcatggccggcgcgggggcacggccggcgcggctccccggcatccaagcggccccgcggcggtgcgggcagcaccggcgtgcggccctcggacccttggcggctcggcgcatgcgcgcccacc

SEQ ID NO: 346475 - DNA, 416 bp, Zea mays
  unsure (1)..(416): unsure at all n locations
ccggngtggagacccaggcgtgcgcgaagcttcagaaacacaccaagcgaagcgcactagcaacaacctaacaacaatggctaccaagatattatccctccttgcgcttcttgcgctttttgcgagcgcaacaaatgcgtccattattccacaatgctcacttgctcctagttccattattccacagttcctcccaccagttacttcaatggccttcgaacacccagctgtgcaagcctataggctacaacaagcgattgcggcgagcgtcttacaacaaccaattgcccaattgcaacaacaatccttggcacatctaacaatacaaaccatcgcaacgcaacagcaacaacagttcctaccagcactgagccacctagccatggtgaaccctgtcgcctacttgcaacagcagc

SEQ ID NO: 346476 - DNA, 389 bp, Zea mays
gaccaactagcaacatagaaagcacaatattgtaccaacaatggcagccaaaatattttgcctccttatgctccttggtctttctgcaagtgctgctacggcgaccattttcccgcaatgctcgcaagctcctatagcttcccttcttcccccgtacctctcaccagcggtgtcttcggtatgtgaaaacccaattcttcaaccctacaggatccaacaggcaatcgcagctggcatcttacctttatcacccttgttcctccaacaatcatcagccctattacaacagttacctttggtgcatttattggcacaaaacatcagggcacaacaactacaacaacttgtgctagcaaaccttgctgcctactctcagcaacagcagtttc

SEQ ID NO: 346477 - DNA, 382 bp, Zea mays
  unsure (1)..(382): unsure at all n locations
gggnggaccaagccgtccgatggagaccaacaggcaacataaaaagtgttaatccagtatcaacaatagagcaacaatggcgaccaagagattttccctccttatgctccttgctctttctgcatgtgttgctaacgcgacaattttccctcaatgctcacaagctcctatagcttcccttcttcccccataccttccatcaatgatagcttcagtatgtgaaaacccagctcttcaaccctatatgctccaacaagcaatcgcagcaagcaacatacctttatcacccttgtttcaacaatcgccagccctatctttggtgcagtcattggtacaaaccatcagggcacagcagctgcagcaactcgtgctacctgtgatc

SEQ ID NO: 346478 - DNA, 344 bp, Zea mays
gaccaactagcaacatagaaagcacaatagtgtaccaacaatggcagccaaaatattttgcttccttatgctcctgggtctttctgcaagtgctgctaccgcaaccattttccaacaatgctcacaagctcctatagcttcctttcttcccccatacctctcaccagcggtgtcttcagtatgtgaaaacccaattcttcaaccctacaggatccaacaggcaatcgcagcaggcatcttacctttatcacccttgttcctccaacaaccgtcagccctattacagcagttacctttggtgcatttgttggcacaaaacatcaaggcacaacaactacaaacac

SEQ ID NO: 346479 - DNA, 344 bp, Zea mays
cttcactccgaggatcggagtgaaaggagcactagctactggcagcatggtgagtctgtgtctgcaggcgaagaggcctcgggtgggggcggcgccactggttgtggcgaaccagatgggggcgttcgaggtgctgccccaggagctgatcctctccgtgctcaccgacctgtcgtcggccgcggacaagcccgccgacctcttcaacgtcatgcttgtgtgccaggagttctgcaggctggtgactaacccgcacgtgatccgggcggcgtcagtaagctgcgtgtccgtgctccctaccaggtggtgcacagctcccgtaccgatcctcctattctgcggtg

SEQ ID NO: 346480 - DNA, 395 bp, Zea mays
gagaccaactagcaacatagaaagcacaatagtgtaccaacaatggcagccaaaatattgggcttccttatgctccttggtctttctgcaagtgttgctaccgcaaccattttcccacaatgctcacaagctcctatagcttcccttcttcccccatacctctcaccagcggtgtcttcaatgtgtgaaaacccaattgttcaaccctacaggatccaacaggcaatcgcaacaggcatcttaccattatcacccttgttcctccaacaaccgtcagccctattacagcagttacctttggtccatttggtggcacaaaacatcaaggcacaacaactacaacaacttgtgctagcaaaccttgctgcatactctcagcaacatcagtttctttc

SEQ ID NO: 346481 - DNA, 112 bp, Zea mays
acccacgcgtgcgctaagttgtagatagtaagcgtacgttctttacgatccatgtttacgttcccatgcatgggacgccttcgtgctactatagagctacctaattgcaata

SEQ ID NO: 346482 - DNA, 90 bp, Zea mays
catttggacccaattgccaccatgtaaggataattgcgttcctaccacgggcggccaaacaggggggcctcctgatgttcctagaccttt

SEQ ID NO: 346483 - DNA, 392 bp, Zea mays
ccaactagcaacatagaaagcacaatagtgtaccaacaatggcagctaaaatattttgcctccttatgctccttggtctttctgcaagtgctgctacggcgaccattttcccacaatgctcacaagctcctatagcttcccttcttcccccgtacctctcaccaacggtgtcttcggtatgtgaaaacccaattcttcaaccctacaggatccaacaggcaatcgcagctggcatcttacctttatcacccttgttcctccaacaatcatcagccctattacagcagttacctttggtgcatttattggcacaaaacatcagggcacaacaactacaacaacttgtgctagcaaaccttgctgcctactctcagcaacagcagtttctttca

SEQ ID NO: 346484 - DNA, 416 bp, Zea mays
gggagacccaggcgtgcgtcatcattcatcttagtagtataggcaccaaatcaaatctgcaacatcaattatctaacggcaaaaacgatgaagctggtgcttgtggttcttgctttcattgctttagtatcaagtgtttcttgtacacagacaggcggctgcagctgtggtcaacaacaaagccatgagcagcaacatcatccacaacaacatcatccacaaaaacaacaacatcaaccaccaccacaacatcaccagcagcagcaacaccaacaacaacaagttcacatgcaaccacaaaaacatcagcaacaacaagaagttcatgttcaacaacaacaacaacaaccgcagcaccaacaacaacaacaacaacagcaccaacaacaacatcaatgtgaaggccaacaacaaca

SEQ ID NO: 346485 - DNA, 368 bp, Zea mays
  unsure (1)..(368): unsure at all n locations
cttcagaccattagctttatctactccagagcgcagaagaacccgatcgacaccatgagggtgttgctcgttgccctcgctctcctggctctcgctgcgagcgccacctccacgcatacaagcggcggctgcggctgccagccaccgccgccggttcatctaccgccgccggtgcatctgccacctgcggttcacctgccacctgcggtgcatctaccaccgccggtccacctgccgccgccggtccacctgccaccgncggtccatgtgccgccgccggttcatctgccgncgccaccatgccactaccctactcaaccgccccggcctcagcctcatccccagccacacccatgcccgtgccaaca

SEQ ID NO: 346486 - DNA, 380 bp, Zea mays
caaagcggcagtgcgtaaagaggatcgtccaacagaacagcatgaagatggtcatcgttctcgtcgtgtgcctggctctgtcagctgccagcgcctctgcaatgcagatgccctgcccctgcgcggtgctgcagggcttgtacggcgctggcgccggcctgacgacgatgatgggcgccggcgggctgtacccctacgcggagtacctgaggcagccgcagtgcagcccgctggcggcggcgccctactacgccgggtgtgggcagacgagcgccatgtaccagccgctccggcaacagtgctgccagcagcagatgaggatgatggacgtgcagtccgtcgcgcagcagctgcagatgatgatgcatgttgagcgtgcc

SEQ ID NO: 346487 - DNA, 394 bp, Zea mays
agcaaaccttgctgcctactctcagcaacagcagttacctttggtgcatttgttggcacaaaacatcagggcacaacaactacaacaactcgtgctagcaaaccttgctgcctactctcagcaacaacagtttctgccattcaaccaactagctgcattgaactctgctgcttatttgcagcaacaacaactactaccattcagccagctagctgctgcctacccccggcaatttcttccattcaaccaactggcagcattgaactctcatgcttatgtacaacaacaacaactactaccattcagccagctagctgctgtgagccctgctgccttcttgacacagcaacatttgttgccgttctacctgcacactgcgcctaacgttggcacc

SEQ ID NO: 346488 - DNA, 388 bp, Zea mays
gggcacaacaactacaacaacttgtgctagcaaaccttgctgcctactctcagcaacagcagtttcttccattcaaccaactagctgcattgaactctgcttcttatttgcaacaacaacaactaccattcagccagctacctgctgcctacccccagcaatttcttccattcaaccaactggcagcattgaactctcctgcttatttacagcagcaacaactactaccattcagccagctagctggtgtgagccctgctaccttcttgatacaaccacagttgttgccgttctaccagcacgctgcgcctaacgctggcaccctcttacaactgcaacaattgctgccattcaaccaacttgctttgacaaacccagcagcgttcta

SEQ ID NO: 346489 - DNA, 207 bp, Zea mays
  unsure (1)..(207): unsure at all n locations
aattcccgggggtcggacccacgcccgtccnngctagttcttagatnncgcgagcgtgtccgctctatgatgganntccaagcnnttacgtacccgcgtgnncatgcgacngnntcatagctnnncttctattagtggtcacncnntaaattcannattcactggccnnngtcgttttaccaaacgtcnnngtgacttgggaaannn

SEQ ID NO: 346490 - DNA, 391 bp, Zea mays
cagcctagcaattagctcatcgactccagattggagaactcgacaccatgaaggtgctgagcgttgcccttgctctcctggcgctcgctgcgagcgccgcctccagtacaagcggcggctgtggctgccagacaccaccgtttcatctaccgcctccgttctatatgccgcctccgttctatctgccgccgcagcagcagccgcagccatggcaataccccactcaaccaccgcagctaagcccgtgccagcagttcggatcctgcggcgtcggcagcgtcggcagcccgttcctgggccagtgcgtcgagttcctgaggcaccagtgcagcccggcggcgacgccctacggctcgccacagtgccaggcgctgcagcagcagtgcttgca

SEQ ID NO: 346491 - DNA, 375 bp, Zea mays
agaccaacaagcaacatagaaagtggaatccagtagcaacaatagagcaacaatggcgaccaagatattttccctccttatgctccttgctctttctgcatgtgttgctaacgcgacaattttccctcaatgctcacaagctcctatagcttcccttcttcccccataccttccatcaatgatagcttcagtatgtgaaaacccagctcttcaaccctataggctccaacaagcaatcgcagcaagcaacatacctttatcacccttgtttcaacaatcgccagccctatctttggtgcagtcattggtacaaaccatcagggcacagcagctgcagcaactcgtgctacctgtgatcaaccaagtagctctggc

SEQ ID NO: 346492 - DNA, 389 bp, Zea mays
ccaactagcaacatagaaagcacaatagtgtaccaacaatggcagccaaaatattttgcctccttatgctccttggtctttctgcaagtgctgctacggcgaccattttcccgcaatgctcgcaagctcctatagcttcccttcttcccccgtacctctcaccagcggtgtcttcggtatgtgaaaacccaattcttcaaccctacaggatccaacaggcaatcgcagctggcatcttacctttatcacccttgttcctccaacaatcatcagccctattacaacagttacctttggtgcatttattggcacaaaacatcatggcacaacaactacaacaacttgtgctagcaaaccttgctgcctactctcagcaacagcagtttctt

SEQ ID NO: 346493 - DNA, 369 bp, Zea mays
tccgattgagaccaacaagcaacatagaaagtgtaatacagtttcaacaatagagcaacaatggcggccaagagattttccatccttatgctccttgctctttctgcatgtgttgctaacgcgaccatttttcctcaatactcacaagctcctatagctgcccttcttcccccataccttccatcaatgaccgcttcagtatgtgaaaacccagcccttcaaccctacaggctccaacaagcaatcgcaacaagcaacttacctttatcacccctgttctttcaacaatcgccagccctatctttggtgcagtcattggtacaaaccatcagggcacaacagctgcagcaactcgtgctaccagtgatc

SEQ ID NO: 346494 - DNA, 395 bp, Zea mays
ggtcttcagaccattagctttatctactccagagcgcagaagaacccgatcgacaccatgagggtgttgctcgttgccctcgctctcctggctctcgctgcgagcgccacctccacgcatacaagcggcggctgcggctgccagccaccgccgccggttcatctaccgccgccggtgcatctgccacctccggttcacctgccacctccggtgcatctcccaccgccggtccacctgccgccgccggtccacctgccaccgccggtccatgtgccgccgccggttcatctgccgccgccaccatgccactaccctactcaaccgccccggcctcagcctcatccccagccacacccatgcccgtgccaacagccgcatccaagcccgtgccagct

SEQ ID NO: 346495 - DNA, 386 bp, Zea mays
aacatagaaagcacaatagtgtaccaacaatggcagccaaaatattttgcctccttatgctccttggtctttctgcaagtgctgctacggcgaccattttcccgcaatgctcgcaagctcctatagcttcccttcttcccccgtacctctcaccagcggtgtcttcggtatgtgaaaacccaattcttcaaccctacaggatccaacaggcaatcgcagctggcatcttacctttatcacccttgttcctccaacaatcatcagccctattacaacagttacctttggtgcatttattggcacaaaacatcagggcacaacaactacaacaacttgtgctagcaaaccttgctgcctactctcagcaacagcagtttcttccattc

SEQ ID NO: 346496 - DNA, 252 bp, Zea mays
ggtcttcagaccattagctttatctactccagagcgcagaagaacccgagcgacaccatgagggtgttgctcgttgccctcgctctcctggctctcgctgcgagcgccacctccacgcatacaagcggcggctgcggctgccagccaccgtcgccggttcatctaccgtcgccagtgcatctgccacctacgggtcacctgccacctgcggtgcatatcccaccgccggtccacctggcgacggcggtccac

SEQ ID NO: 346497 - DNA, 359 bp, Zea mays
cagaccattagctttatctactccagagctcagaagaacccgatcgacaccatgagggtgttgctcgttgccctcgctctcctggctctcgctgcgagcgccacctccacgcatacaagcggcggctgcggctgccagccaccgccgccggttcatctaccgccgccggtgcatctgccacctccggttcacctgccacctccggtgcatctcccaccgccggtccacctgccgccgccggtccacctgccaccgccggtccatgtgccgccgccggttcatctgccgccgccaccatgccactaccctactcaaccgccccggcctcagcctcatccccagccacacccatgcccgtg

SEQ ID NO: 346498 - DNA, 398 bp, Zea mays
gggtcttcagaccattagctttatctactccagagcgcagaagaacccgatcgacaccatgagggtgttgctcgttgccctcgctctcctggctctcgctgcgagcgccacctccacgcatacaagcggcggctgcggctgccagccaccgccgccggttcatctaccgccgccggtgcatctgccacctacggttcacctgccacctccggtgcatctcccaccgccggtccacctgccgccgccggtccacctgccaccgacggtccatgtgccgccgccggttcatctgccgccgccaccatgccactaccctactcaaccgccccggcctcagcctcatccccagccacacccatgcccgtgccaacagccgcatccaagcccgtgccagctgc

SEQ ID NO: 346499 - DNA, 368 bp, Zea mays
accattagctttatctactccagagcgcataagaacccgatcgacaccatgagggtgttgctcgttgccctcgctctcctggctctcgctgcgagcgccacctccacgcatacaagcggcggctgcggctgccagccaccgccgccggttcatctaccgccgccggtgcatctgccacctccggttcacctgccacctccggtgcatctcccaccgccggtccacctgccgccgccggtccacctgccaccgccggtccatgtgccgccgccggttcatctgccgccgccaccatgccactaccctactcaaccgccccggcctcagcctcatccccagccacacccatgcccgtgccaacagccgca

SEQ ID NO: 346500 - DNA, 318 bp, Zea mays
  unsure (1)..(318): unsure at all n locations
gggtcttcagaccattagctttatctactccagagcgcagaagaacccgatcgacaccatgagggtgttgctcgttgccctcgctctcctggctctcgctgcgagcgccacctccacgcatacaagcggcggctgcggctgccagccaccgccgccggttcatctaccgccgccggtgcatctgccacctccggttcacctgccacctccggtgcatctcccaccgccggtccacctgccgccgccggtccacctgccaccgccggtccatgtgccgccgccggttcatctgccgncgncaccatgccactaccctac

SEQ ID NO: 346501 - DNA, 59 bp, Zea mays
  unsure (1)..(59): unsure at all n locations
agtgcggacgtcatggagctcttctattagtgtcanncctaaannntcaattcactgnn

SEQ ID NO: 346502 - DNA, 384 bp, Zea mays
gctagcagcattaacagcacactagcgtaccaacaatggcagccaaaatattttgcgtgcttatgctcctcggtctttctgcaagtgctgctaccgcaaccattttcccacaatgctcacaagctcctatagcttcctttcttcccccatacctctcaccagcggtgtcttcagtatgtgaaaacccaattcttcaaccctacaggatccaacaggcaatcgcagcaggcatcttacctttatcacccttgttcctccaacaaccgtcagccctattacagcagttacctttggtgcatttgttggcacaaaacatcaaggcacaacaactacaacaacttgtgctaagaaaccttgctgcctactctcagcaacagcagtttc

SEQ ID NO: 346503 - DNA, 53 bp, Zea mays
acgcgtgcgagatgtataccgtaagcgtacagctctagactgaccatctttac

SEQ ID NO: 346504 - DNA, 371 bp, Zea mays
ggtcttcagaccattagctttatctactccagagcgcagaagaacccgatcgacaccatgagggtgttgctcgttgccctcgctctcctggctctcgctgcgagcgccacctccacgcatacaagcggcggctgcggctgccagccaccgccgccggttcatctaccgccgccggtgcatctgccacctccggttcacctgccacctccggtgcatctcccaccgccggtccacctgccgccgccggtccacctgccaccgccggtccatgtgccgccgccggttcatctgccgccgccaccatgccactaccctactcaaccgccccggcctcagcctcatccccagccacacccatgcccgtgccaaca

SEQ ID NO: 346505 - DNA, 330 bp, Zea mays
ccagctagcagcattaacagcacactaatcgtcaatggctgccaagatatgatccctgcgtgcgcttcttgcgctttttgcgagcgcaacaaatgcgtccattattccacaatgctcacttgctcctagttccattattccacagttcctcccaccagttacttcaatggccttcgaacacccagctgtgcaagcctataggctacaacaagcgattgcggcgagcgtcttacaacaaccaattgcccaattgcaacaacaatccttggcacatctaacaatacaaaccatcgcaacgcatcagcaacaacagttcctaccagcactgag

SEQ ID NO: 346506 - DNA, 134 bp, Zea mays
actcaacagtgttctaccaacaacccatcattggtggtgccctcttttagattgcttatgagttatagttcaataatgaagttttttggatgatgtttgtggcgtcccagaaataagaaagtacatttctagat

SEQ ID NO: 346507 - DNA, 335 bp, Zea mays
ccaccataaaaggcacaatagtgtaccaacaatggcagccaaaatattttgcctccttatgctccttggtatttctgcaagtgctgctacggcgaccattttcccgcaatgctcacaagctcctatagcttcccttcttcccccgtacctctcaccagcggtgtcttcggtatgtgaaaacccaattcttcaaccctacaggatccaacaggcaatcgcagctggcatcttacctttatcacccttgttcctccaacaatcatcagccctattacagcagttacctttggtgcatttattggcacaaaacatcagggcacaacaactacaacaac

SEQ ID NO: 346508 - DNA, 58 bp, Zea mays
atgcgaggtcatatctattgtatagtggcacctaaatacaggtcactggccgacaacg

SEQ ID NO: 346509 - DNA, 350 bp, Zea mays
gcgccacgcgtccgctggacgtagcctacaattagctcatcgactccagattggagaactcgacaccatgaaggtgctgatcgttgcccttgctctcctggcgctcgctgcgagcgccgcctccagtacaagcggcggctgtggctgccagacaccaccgtttcatctaccgcctccgttctatatgccgcctccgttctatctgccgccgcagcagcagccgcagccatggcaataccccactcaaccaccgcagctaagcccgtgccagcagttcggatcctgcggcgtcggcagcgtcggcagcccgttcctgggccagtgcgtcgagttcctgaggcaccagtgca

SEQ ID NO: 346510 - DNA, 375 bp, Zea mays
agccttccgaaaagcggcagggcgtaaagaggatcgtcgaacagaacagcatgaagatggtcatcgttctcggcgtgtgcctggctctgtcagctgccagcgcctctgcaatgcagatgccctgcccctgcgcggggctgcagggcttgtacggcgctggcgccggcctgacgacgatgatgggcgccggcgggctgtacccctacgcggagtacctgaggcagccgcagtgcagcccgctggcggcggcgccctactacgccgggtgtgggcagacgagcgccatgtaccagccgctccggcaacagtgctgccagcagcagatgaggatgatggacgtgcagtccgtcgcgcagcagctgcagatgatgatgc

SEQ ID NO: 346511 - DNA, 353 bp, Zea mays
cagaccattagctttatctactccagagcgcagaagaacccgatcgacaccatgagggtgttgctcgttgccctcgctctcctggctctcgctgcgagcgccacctccacgcatacaagcggcggctgcggctgccagccaccgccgccggttcatctaccgccgccggtgcatctgccacctccggttcacctgccacctccggtgcatctcccaccgccggtccacctgccgccgccggtccacctgccaccgccggtccatgtgccgccgccggttcatctgccgccgccaccatgccactaccctactcaaccgccccggcctcagcctcatccccagccacacccatg

SEQ ID NO: 346512 - DNA, 388 bp, Zea mays
gaccaactagcaacatagaaagcacaatattttaccaacaatggcagccaaaatatttggcctccttatgctccttggtctttctgcaagtgctgctacggcgaccattttcccgaaatgctcgcaagctcctatagcttcccttcttcccccgtacctctcaccagcggtgtcttcggtatgtgaaaacccaattcttcaaccctacaggatccaacaggcaatcacagctggcatcttacctttatcacccttgttcctccaacaatcatcagccctattacatcagttacctttggtgcatttattggcacaaaacatcagggcacaacaactacaacaacttgtgctagcaaaccctgctgcctactctcagcaacagcagttt

SEQ ID NO: 346513 - DNA, 385 bp, Zea mays
cgtcccggtttatctacctcaaaaccgcaaaaaacccttatcgtcaccatgagggtgttgctcgttgccctcgctctcctggctctcgctgcgagcgccacctccacgcatacaagcggcggctgcggctgccagccaccgccgccggttcatctaccgccgccggtgcatctgccacctccggttcacctgccacctccggtgcatctcccaccgccggtccacctgccgccgccggtccacctgccaccgccggtccatgtgccgccgccggttcatctgccgccgccaccatgccactaccctactcaaccgccccggcctcagcctcatccccagccacacccatgcccgtgccaacagccggatccaagcccgtgccagc

SEQ ID NO: 346514 - DNA, 407 bp, Zea mays
ccgggccgaccacgcgtccggaccattagctttatctactccagagcgcataagaacccgatcgacaccatgagggtgttgctcgttgccctcgctctcctggctctcgctgcgagcgccacctccacgcatacaagcggcggctgcggctgccagccaccgccgccggttcatctaccgccgccggtgcatctgccacctccggttcacctgccacctccggtgcatctcccaccgccggtccacctgccgccgccggtccacctgccaccgccggtccatgtgccgccgccggttcatctgccgccgccaccatgccactaccctactcaaccgccccggcctcagcctcatccccagccacacccatgcccgtgccaacagccgcattcaagcccgtgccagct

SEQ ID NO: 346515 - DNA, 245 bp, Zea mays
  unsure (1)..(245): unsure at all n locations
caaactgctggtagaacggaagcaattgtggctaaccccgcaacccttttacaactgcaacagttgctgccctttgtccaacttgctttgacaaacccagcagccttctaccaacaacacatcattggcggtgccctcttttagattgcttattagttgtcattcaataatgaagttttttggctgatgtatgtggcctcctagaaataagaagttatatttccaaaaaaaaaaaaatttnnnnt

SEQ ID NO: 346516 - DNA, 414 bp, Zea mays
  unsure (1)..(414): unsure at all n locations
agaccattagctttatctactccagagcgcagaagaacccgatcgacaccatgagggtgttgctcgttgccctcgctctcctggctctcgctgcgagcgccacctccacgcatacaagcggcggctgcggctgccagccaccgccgccggttcatctaccgccgccggtgcatctgccacctccggttcacctgccacctccggtgcatctcccaccgccggtccacctgccgccgccggtccacctgccaccgccggtccatgtgccgccgccggttcatctgccgccgccaccatgccactaccctactcaaccgccccggcctcagcctcatccccagccacacccatgcccgtgccaacagccgcatccaagcccgtgccagctgcanggaacctgcngcgttggcagca

SEQ ID NO: 346517 - DNA, 248 bp, Zea mays
cccacgcgtccgctgggtcttcagaccattttctttatctactccagagcgcataagaacccgatcgacaccatgagggtgttgctcgttgccctcgctctcctggctctcgctgcgagcgccacctccacgcatacaagcggcggctgcggctgccagccaccgccgccggttcatctaccgccgccggtgcatctgccacctccggttcacctgccacctccggtgcatatcccaccgacggtcca

SEQ ID NO: 346518 - DNA, 376 bp, Zea mays
  unsure (1)..(376): unsure at all n locations
gtggcttcccagaaataagaaagtacattttttaaaaaaaaaaaaaaaaaaaaaaaaaggggaatcttttaaaaaaaaaattaaaaaaaaaaaaaaaaaaaaaaaaaaaaaaaaaaaaaaaaaaattttaggaaaaaaaaaaaaaaaaaaaataaaaaaaaaaaaaaaaaaaaaaaaaaaaaaaaaaaaaaaaaggggtgnnnnnangggggggggcttttttagggttcaaattttttctccgggttgtttgaaattttttgttttttttttggggcccctaaattaattttttgggccgtgtttttaaaaaattttttttgggaaaaccttggtttttccaaatataatttctttgtaaaaattcctttttttt

SEQ ID NO: 346519 - DNA, 278 bp, Zea mays
  unsure (1)..(278): unsure at all n locations
ggaaaagggggccgacccacgcgttcgattttaaccaacaagcatcttatttagaggtatacagnccccacactcgtgcaggggaggcggtcaattatattttacattcttatacaaccagctcactctcatgtgttgcataacgcgaccaactgtacaaacatactcacaaactcatataactgcccttctacccaatacctttcatcaaggagccgttaatatgagaaaacccaacccatcaaccttacaagcattaacacagcaattaataacaa

SEQ ID NO: 346520 - DNA, 369 bp, Zea mays
gcgaagcacattagcaacaacctaacaacattggctaccaagatattatccctccttgcgcttcttgcgctttttgcgagcgcaacaaatgcgttcattattccacaatgctcacttgctccaagttccattattacacagttcctcccaccagttacttcaatgggcttcgaacacccagctgtgcaagcctataggctacaacaagcaattgcggcgagcgtcttacaacaaccaatttcccagttgcaacaacaatccttggcacatctaacaatacaaaccatcgcaacgcaacagcaacaacaattcctaccagcactgagccacctagccatggtgaaccctgccgcctacttgcaacagcag

SEQ ID NO: 346521 - DNA, 313 bp, Zea mays
caaacccttaaccttatctaccttccaaacccctaaaaatcccgaccgacaccatgagggtggggctcgttgccctcgctctcctggctctcgctgcgagcgccacctccacgcatacaagcggcggctgcggctgccagccaccgccgccggttcatctaccgccgccggtgcatctgccacctccggttcacctgccacctccggtgcatctcccaccgccggtccacctgccgtcgccggtccacctgccaccgccggtccatgtgccgccgccggttcatttgccgtcgtcaccatgccactactctac

SEQ ID NO: 346522 - DNA, 365 bp, Zea mays
attgagaccaacaagcaacatagaaagtggtatacagtaccaacaatcgagcagcgggggcggccaatatattttccatccttatgctccttgctctttctgcatgtgttgctaacgcgaccatttttcctcaatactcacaagctcctatagctgcccttcttcccacataccttccatcaatgaccgcttcagtatgtgaaaacccatcccttcaaccctacaggcttcaacaagcaatcgcaacaagcaacttacctttatcacccctgttctttaaacaatcgccagccctatctttggtgcagtcattggtacaaaccatcagggcacaacagctgcatcaactcgtgctaccagtgatc

SEQ ID NO: 346523 - DNA, 404 bp, Zea mays
  unsure (1)..(404): unsure at all n locations
ggtcttcagaccattagctttatctactccagagcgcagaagaacccgatcgacaccatgagggtgttgctcgttgccctcgctctcctggctctcgctgcgagcgccacctccacgcatacaagcggcggctgcggctgccagccaccgccgccggttcatctaccgccgccggtgcatctgccacctccggttcacctgccacctccggtgcatctcccaccgccggtccacctgccgccgccggtccacctgccaccgccggtccatgtgccgccgccggttcatctgccgccgccaccatgccactaccctactcaaccgccccggcctcagcctcatccccagccacacccatgcccgtgccaacagccgcatccaagcccgtgccagctgcanggaac

SEQ ID NO: 346524 - DNA, 250 bp, Zea mays
atgcgcctgcggggctattttatagtgatactgaaacccaaattaatggcagtggctttacaactacaacactgggactaccatgacgttacccatcattaatcgtattgcagtagatgcacatttccctatctgcagctatagcgataacgaccagaccgatagcgattgccaatagctacacaacctcaatcgcaaatgcaacacgcactctagctgatcattaacctcaagcgcagtggttgttacg

SEQ ID NO: 346525 - DNA, 304 bp, Zea mays
caaaaaaaaaaaaaaaaaaatataattaaaattttttttttttaaaaaaaaaaaaaaaaaggccggcccggtttaaaaaaaaaaaattttccaaacccaaccatccggcccccccgcttaaaaaaacccaaccctacaatcccttccatccaccgtcttattacatctataggaccaccaaaaaccaattcactgcccatctttataaaccttcatcacatgaaaaacccggccgttaccaaattaaataactttccaaaacatatctcttttcccaacagttttaaaaccaaaaaggcccaaa

SEQ ID NO: 346526 - DNA, 391 bp, Zea mays
gctttatctactccagagcgcagaagaacccgatcgacaccatgagggtgtcgctcgctggcggggctctcctggctctcgctgcgagcgccacctccacgcatacaagcggcggctgcggatgccagccaccggcggcggttcatctaccgccgccggtgcatctgccacctccggttcacctgccacctccggtgcatttcccaccgccggtccacctgccgccgccggtccacctgccaccgccggtccatgtgccgccgccggttcatctgccgccgccaccatgccactaccctactcaagcgactaggcctcagactcatcccgagccacacccatgcccgtgccaacagccggatccaagcccgtgccagctgcaaggaacctg

SEQ ID NO: 346527 - DNA, 344 bp, Zea mays
gaatacattagcaacaattgagcaacaatggcggccaaaatattttacatccttgggctgcttgctctttctgcatgtgttgctaacgcgaccatttttcctcaatactcacaagctcctatagctgcccttcttccgccatacctttcatcaatgaccgcttcagcatgtgaaaacccatcccttgaacactacacgcttcaacaagcaatcgcaacaagcaacttacctttatcacccgtgttctttcaacaatcgccagccctatcttcggcgcaatcattggtacaaaccatcagggcataacagctgcaacaactcgtgctaccagtgatcagccaact

SEQ ID NO: 346528 - DNA, 353 bp, Zea mays
tcgagccattgcagcaagcaacatacccttatcggccttggtggggcaaccaacggcaggcctatttttggggccagcaatgggtccaaacaatcagggcacaacagctgcagcaactcgtgctacctgtgatcaaccaagtagctctggcaaacctttctccctactctccgcaacaacaatttcttccattcaaccaactgtctacactgaaccctgctgcttatttgcagcaacaactattaccatttagccagctagctactgcctactctcaacaacaacaacttcttccatttaaccaattggccgcactgaaccccgctgcttatttgcagcagcaaatactacta

SEQ ID NO: 346529 - DNA, 350 bp, Zea mays
aaaaaaaaaaaaaaaaaaaaaaaaaaatattttaaaaaaaaaaaaaaaaaaaaaaacaaaagggaaaatataaaaaaaacttaaacaaaaaaaaaaaaaaaaaaaatgaacaaaaaaaaaaaataaaaaaaataaaaaggggggggccttttaaaaggtccaaatttttttaccccttaattccaattttttatctttttttttgggcccccaaattccattcccttgcccgacctttaacaccgttggaactggaaaaaccttgggctccccaaattaatttcctttgaaaacattccctttttcacaaattgggttattacaaaaaaggcccccccgttctccctttc

SEQ ID NO: 346530 - DNA, 105 bp, Zea mays
gacaacatccaacgcagcagtcatattttcaacaacgtcgcagcatgcgaggggctttgctcctagtgccacctgcaagcactgcaacagccaccattttacagc

SEQ ID NO: 346531 - DNA, 358 bp, Zea mays
cgggacccacctaccaccttaaaaggcccatttttgtctcaacaatggcagccaaaatatttggcctccttatgctccttggtctttctgcaagtgctgctacggcgaccattttcccacaatgctcacaagctcctatagcttcccttcttcccccgtacctctcaccagcggtgtcttcggtatgtgaaaacccaattcttcaaccctataggatccaacaggcaatcgcagctggcatcttacctttatcacccttgttcctccaacaatcatcagccctattacagcagttacctttggtgcatttattggcacaaaacatcagggcacaacaactacaacaacttgtgctagc

SEQ ID NO: 346532 - DNA, 56 bp, Zea mays
aaaacaatcaacatgaaaagaggcttaccgtattaacaacaactcaacaacggggg

SEQ ID NO: 346533 - DNA, 268 bp, Zea mays
caaacaataaaaaacactctaagcttagcgtattaaaaacaacaacaacaacatggggcaggggaatttgggggctttctttggctgacccacgcttacagacccggcaatacacggacatatctttccattagggtcacttaaatctaaatcactgatcgtacatttacaactacattgattgggaaaaccctgtctaacaccaactaaatcacctcgacatacatcaccattggcgcagatggagtaatttacaacagcctatcac

SEQ ID NO: 346534 - DNA, 57 bp, Zea mays
gaccaacatccagcgcagcccgctcagttgttccaaaccaacgtccgcgcgcatgcg

SEQ ID NO: 346535 - DNA, 56 bp, Zea mays
tctttcccctgcctgcgacgtaataactctttttttgtgtcccctaaattcaattg

SEQ ID NO: 346536 - DNA, 347 bp, Zea mays
attttgagcattcagaaacacaccaagcgaagcacattagcaacaacctaacaacaatggctaccaagatattatccctccttgcgcttcttgcgctttttgcgagcgcaacaaatgcgttcattattccacaatgctcacttgctccaagttccattattacacagttcctcccaccagttacttcaatgggcttcgaacacccagctgtgcaagcctataggctacaacaagcaattgcggcgagcgtcttacaacaaccaatttcccagttgcaacaacaatccttggcacatctaacaatacaaaccatcgcaacgcaacagcaacaacaatttctaccagca

SEQ ID NO: 346537 - DNA, 308 bp, Zea mays
acccactagccaccttaaaaggcccattagtgtaccaccaatggcagccaaaatatttggcgtccttatgctccttggtatttctgcaagtgctgctacggcgaccattttcccgcaatgctcacaagctcctatagcttcccttcttcccccgtacctctcaccagcggtgtcttcggtatgtgaaaacccaattcttcaaccctacaggatccaacaggcaatcgcagctggcatcttacctttatcacccttgttcctccaacaatcatcagccctattacagcagttacctttgggtgcattta

SEQ ID NO: 346538 - DNA, 131 bp, Zea mays
gaccaacatccagcgcagcccgctcagttgtatcccaccaacgtccgcgtgcatgcgatggcacctcatgctcctagtgccacctgaatgcactgcaccggccaccattttacagcaacgcgactgagcta

SEQ ID NO: 346539 - DNA, 360 bp, Zea mays
tgagcattcagaaacacaccaagcgaagcgcactagcaacgacctaacaacaatggctaccaagatattagccctccttgcgcttcttgccctttttgtgagcgcaacaaatgcgttcattattccacaatgctcacttgctcctagtgccattattccacagttcctcccaccagttacttcaatgggcttcgaacacctagctgtgcaagccaacatgcaacaacaagcgcttgcggcgagcgtcttacaacaaccaattgcccaattgcaacaacaatccttgccacatctaacaatacaagccatcacaacgcagcagcaacaacagttcctcccagcactgagccacctagccat

SEQ ID NO: 346540 - DNA, 393 bp, Zea mays
  unsure (1)..(393): unsure at all n locations
tgagcattcagaaacacaccaagcgaagcgcactagcaacgacctaacaacaatggctaccaagatattagccctccttgcgcttcttgccctttttgtgagcgcaacaaatgcgttcattattccacaatgctcacttgctcctagtgccattattccacagttcctcccaccagttacttcaatgggcttcgaacacctagctgtgcaagccaacatgcaacaacaagcgcttgcggcgagcgtcttacaacaaaccaattgcccaattgcaacaacaatccttgccacatctaacaatacaagccatcacaacgcaacagcaacaacagttcctaccagcactgagccacctagccatggtgaaccctgccgnctacttgcaagagcagc

SEQ ID NO: 346541 - DNA, 353 bp, Zea mays
tccaatggaacccacttgccaccttaaaaggcccattgttttcccaccattggcagccaaaatatttggcctcctaatgctcctgggtctttctgcaagtgctgctacggcgaccattttcccgcaatgctcgcaagctcctatagcttcccttcttcccccgtacctctcaccagcggtgtcttcggtatgtgaaaacccaattcttcaaccctacaggatccaacaggcaatcgcagctggcatcttacctttatcacccttgttcctccaacaatcatcagccctattacaacagttacctttggtgcatttattggcacaaaacatcagggcacaacaactacaacaac

SEQ ID NO: 346542 - DNA, 334 bp, Zea mays
  unsure (1)..(334): unsure at all n locations
ntccgccaccaagcaaaataaaagggggattccagtaccaccattagaccaccaatggcgaccaagagattgtccctccttatgctcctggctctttctgcatgtgttgctaacgcgacaattttccctcaatgctcacaagctcctatagcttcccttctttccccataccttccatcaatgatagcttcagtatgtgaaaacccagctcttcaaccctataggctccaacaagcaatcgcagcaagcaacatacctttatcacccttgtttcaacaatcgccagccctatctttggtgcagtcattggtacaaaccatcagggcacagcagc

SEQ ID NO: 346543 - DNA, 331 bp, Zea mays
atttgcactcatgcatcacaaaacatccttctatcagtaccatcaatcatcattcatcttagtagtataggcaccaaatcaaatctgcaacatcaattatctaactccaaaaaccatgaagctggtgcttgtggttcttgctttcattgctttagtatcaagtgtttcttgtacacagacaggcggctgcagctgtggtcaacaacaaagccatgagcagcaacatcatccacaacaacatcatccacaaaaacaacaacatcaaccaccaccacaacatcaccagcagcagcaacaccaacaacaacaagttcacatgcaaccacaaaaa

SEQ ID NO: 346544 - DNA, 112 bp, Zea mays
catcattggtggtgccctcttttagattgcttattagatgtaattcaataataaagttttttggatgatgtatgtggccaaccagaaataaaaagttacatttccagattct

SEQ ID NO: 346545 - DNA, 348 bp, Zea mays
  unsure (1)..(348): unsure at all n locations
caacaagcaacatagaaagtggaatccagtatcaacaatagagcaacaatggagaccaagatattttccctccttatgctccttgctctttctacatgtgttgctaacgcgacaattttccctcaatgctcacaagctcctatagcttccctttttcccccataccttccatcaattatagcttcagtatgtgaaaacccagctcttcaaccatataggcttcaacaagcaatcgcagcaagcaacatacctttatcgcccttgttgtgtcaacaatcgccagccctatctttggtgcagtcattggtacaaaccatcanggcacaacagctgcagcaactcgtgcta

SEQ ID NO: 346546 - DNA, 285 bp, Zea mays
gaccattagctttatctactccagagcgcagaagaacccgatcgacaccatgagggtgttgctcgttgccctcgctctcctggctctcgctgcgagcgccacctccacgcatacaagcggcggctgcggctgccagccaccgccgccggttcatctaccgccgccggtgcatctgccacctccggttcacctgccacctccggtgcatctcccaccgccggtccacctgccgccgccggtccacctgccaccgccggtccatgtgccgccgccggttcatctgcc

SEQ ID NO: 346547 - DNA, 301 bp, Zea mays
gctttatctactccagagcgcagaagaacccgatcgacaccatgagggtgttgctcgttgccctcgctctcctggctctcgctgcgagcgccacctccacgcatacaagcggcggctgcggctgccagccaccgccgccggttcatctaccgccgccggtgcatctgccacctccggttcacctgccacctccggtgcatctcccaccgccggtccacctgccgccgccggtccacctgccaccgccggtccatgtgccgccgccggttcatctgccgccgccaccatgccactaccctac

SEQ ID NO: 346548 - DNA, 381 bp, Zea mays
gatcagcaaagcggcagggcgtaaagaggatcgtcgaacagaacagcatgaagatggtcatcgttctcgtcgtgtgcctggctctgtcagctgccatcgcctctgcaatgcagatgccctgcccctgcgcggggctgcagggcttgtacggcgctggcgccggcctgacgacgatgatgggcgccggcgggctgtacccctacgcggagtacctgaggcagccgcagtgcagcccgctggcggcggcgccctactacgccgggtgtgggcagacgagcgccatgtaccagccgctccggcaacagtgctgccagcagcagatgaggatgatggacgtgcagtccgtcgcgcagcagctgcagatgatgatgcacattgagc

SEQ ID NO: 346549 - DNA, 397 bp, Zea mays
gaccaactagcaacatagaaagcacaatagtgtaccaacaatggcagccaaaatattttgccgccttatgctccttggtctttctgcaagtgctgctacggcgaccattttcccgaaatgctcgcaagctcctatagcttcccttcttcccccgtacctctcaccagcggtgtcttcggtatgtgaaaacccaattcttcaaccctacaggatccaacaggcaatcacagctggcatcttacctttatcacccttgttcctccaacaatcatcagccctattacatcagttacctttggtgcatttattggcacaaaacatcagggcacaacaactacaacaacttgtgctagcaaaccttgctgcctactctcagcaacagcagtttcttccattc

SEQ ID NO: 346550 - DNA, 384 bp, Zea mays
  unsure (1)..(384): unsure at all n locations
aactagcaacatagaaagcacaatagtgtaccaacaatggcagctaaaatattttgcctccgtatgctccttggtctttctgcaagtgctgctacggcgaccattttcccacaatgctcacaagctcctatagcttcccttcttcccccgtacctctcaccaacggtgtcttcggtatgtgaaaacccaattcttcaaccctacaggatccaacaggcaatcgcagctggcatcttacctttatcacccttgttcctccaacaatcatcagccctattacagcagttacctttggtgcatttattggcacaaaacaatagggcacaacaactacaacaactngtgctagcaaaccttgctgcctactctcagcaacagcagttt

SEQ ID NO: 346551 - DNA, 399 bp, Zea mays
gagcattcagaaacacaccaagcgaagcgcactagcaacgacctaacaacaatggctaccaagatattagccctccttgcgcttcttgccctttttgtgagcgcaacaaatgcgttcattattccacaatgctcacttgctcctagtgccattattccacagttcctcccaccagttacttcaatgggcttcgaacacctagctgtgcaagccaacatgcaacaacaagcgcttgcggcgagcgtcttacaacaaccaattgcccaattgcaacaacaatccttgccacatctaacaatacaagccatcacaacgcaacagcaacaacagttcctaccagcactgagccacctagccatggtgaaccctgccgcctacttgcaagagcagctgcttgca

SEQ ID NO: 346552 - DNA, 399 bp, Zea mays
gatcgatcgaggcacaagcccaacaacctctctctcgctctctctctctctatccgtgactgccatggagccgccggcgagctttctgcgcgaccaaggcggcggaggaggagcagaggagcaaagcggcacccagctggagcacgaggaggatgtcccctgcgtgctggacatgttcgtgcacgaggcgcggggcacccacaagaccatccgcgtctacggggaccaccaggacgtgtacgcgaggctggcgctgacgtcggcgcccgacgccggcgccagcgcgcgcctcggcgagcgcctcccgccactgcgcgtcgcccgcggaaggctggccgaggacgtgctcaagtgcgagctctggatgcgcagcggtggcgtcccggacgaccagctcct

SEQ ID NO: 346553 - DNA, 403 bp, Zea mays
gcaacatagaaagtggaatacagtatcaacaatagagctacaatggcggccaagatattttgcatccttatgctccttgctctttctgcatgtgttgctaacgcgaccatttttcctcaatactcacaagctcctatagctgcccttcttcccccataccttccatcaatgaccgcttcagtatgtgaaaacccagcccttcaaccctacaggctccaacaagcaatcgcaacaagcaacttacctttatcacccctgttctttcaacaatcgccagccctatctttggtgcagtcattggtacaaaccatcagggcacaacagctgcagcaactcgtgctaccagtgatcagccaagtagctctggcaaacctttctccctactctcagcaacaacaatttt

SEQ ID NO: 346554 - DNA, 206 bp, Zea mays
attttcagcattcagaaacacaccaagcgaagcgcactagcaacaacctaacaacaatggctgccaagatattagccctccttgcgcttcttgcccttttagtgagcgcaacaaatgcgttcattattccacagtgctcacttgctcctagtgccattattccacagttcctcccaccagttacttcaatgggctttgaaacatca

SEQ ID NO: 346555 - DNA, 390 bp, Zea mays
gctttatctactccagagcgcagaagaaccctatcgacaccatgagggtgttgctcgttgccctcgctctcctggctctcgctgcgagcgccacctccacgcatacaagcggcggctgcggctgccagccaccgccgccggttcatctaccgccgccggtgcatctgccacctccggttcacctgccacctccggtgcatcttccaccgccggtccacctgccgccgccggtccacctgccaccgccggtccatgtgccgccgccggttcatctgccgccgccaccatgccactaccctactcaaccgcccaggcctaagcctgatccccagccacacccatgctcgtgccaacagccgtattcaagcccgtgccagctgtatggaacct

SEQ ID NO: 346556 - DNA, 394 bp, Zea mays
caactagcaacatagaaagcacaatagtgtaccaacaatggcagctaaaatattttgcctccttatgctccttggtctttctgcaagtgctgctacggcgaccattttcccacaatgctcacaagctcctatagcttcccttcttcccccgtacctctcaccaacggtgtcttcggtatgtgaaaacccaattcttcaaccctacaggatccaacaggcaatcgcagctggcatcttacctttatcacccttgttcctccaacaatcatcagccctattacagcagttacctttggtgcatttattggcacaaaacatcagggcacaacaactacaacaacttgtgctagcaaaccttgctgcctactctcagcaacagcagtttcttccattc

SEQ ID NO: 346557 - DNA, 399 bp, Zea mays
caactagcaacatagaaagcacaatagtgtaccaacaatggcagctaaaatattttgcctcggtatgctccttggtctttctgcaagtgctgctacggcgaccattttcccacaatgctcacaagctcctatagcttcccttcttcccccgtacctctcaccaacggtgtcttcggtatgtgaaaacccaattcttcaaccctacaggatccaacaggcaatcgcagctggcatcttacctttatcacccttgttcctccaacaatcatcagccctattacagcagttacctttggtgcatttattggcacaaaacatcagggcacaacaactacaacaacttgtgctagcaaaccttgctgcctactctcagcaacagcagtttcttccattcaacca

SEQ ID NO: 346558 - DNA, 402 bp, Zea mays
cagaaacacaccaagcgaagcgcactagcaacgacctaacaacaatggctaccaagatattagccctccttgcgcttcttgccctttttgtgagcgcaacaaatgcgttcattattccacaatgctcacttgctcctagtgccattattccacagttcctcccaccagttacttcaatgggcttcgaacacctagctgtgcaagccaacatgcaacaacaagcgcttgcggcgagcgtcttacaacaaccaattgcccaattgcaacaacaatccttgccacatctaacaatacaagccatcacaacgcaacagcaacaacagttcctaccagcactgagccacctagccatggtgaaccctgccgcctacttgcaagagcagctgcttgcatccaacccac

SEQ ID NO: 346559 - DNA, 396 bp, Zea mays
attttgagcattcagaaacacaccaagcgaagcacattatcaacaacctaacaacaatggctgccaagatattatccctccttgcgcttcttgcgctttttgcgagcgcaacaaatgcgtccattattccacaatgctcacttgctcctagttccattattccacagttcctcccaccagttacttcaatggccttcgaacacccagctgtgcaagcctataggctacaacaagcgattgcggcgagcgtcttacaacaaccaattgcccaattgcaacaacaatccttggcacatctaacaatacaaaccatcgcaacgcaacagcaacaacagttcctaccagcactgagccacctagccatggtgaaccctgtcgcctacttgcaacagcagc

SEQ ID NO: 346560 - DNA, 388 bp, Zea mays
agaccaactagcaacatagaaagcacaatagtgtaccaacaatggcagccaaaatattttgcctccttatgctccttggtctttctgcaagtgctgctacggcgaccattttcccgaaatgctcgcaagctcctatagcttcccttcttcccccgtacctctcaccagcggtgtcttcggtatgtgaaaacccaattcttcaaccctacaggatccaacaggcaatcacagctggcatcttacctttatcacccttgttcctccaacaatcatcagccctattacatcagttacctttggtgcatttattggcacaaaacatcagggcacaacaactacaacaacttgtgctagcaaaccttgctgcctactctcagcaacagcagtt

SEQ ID NO: 346561 - DNA, 399 bp, Zea mays
agcaaagcggcagtgcgtagagaggatcgtctaacagaacagcatgaagatggtcatcgttctcgtcgtgtgcctggctctgtcagctgccagcgcctctgcaatgcagatgccctgcccctgcgcggggctgcagggcttgtacggcgctggcgccggcctgacgacgatgatgggcgccggcgggctgtacccctacgcggagtacctgaggcagccgcagtgcagcccgctggcggcggcgccctactacgccgggtgtgggcagacgagcgccatgtaccagccgctccggcaacagtgctgccagcagcagatgaggatgatggacgtgcagtccgtcgcgcagcagctgcagatgatgatgcagcttgagcgtgccgctgccgccagcagcag

SEQ ID NO: 346562 - DNA, 272 bp, Zea mays
atctttaccatcaattatctttcatcttagtagtataggcgccagttcaattctgcaacatcaattatctaactccaaaaaccatgaagctggtgcttgtggttcttgctttcattgctttagtatcaagtgtatcttgttcacagacaggcggctgctactgtggtcaacaacaaagccatgcgctgcaacatcatccacaacttcattatccactaaaacaactacatcaaccaccacctcaacatcacctgctgttgctactccaacaa

SEQ ID NO: 346563 - DNA, 286 bp, Zea mays
cagatcagcaaagcggcagtgcgtagagaggatcgtcgaacagaacagcatgaagatggtcatcgttctcgtcgtgtgcctggctctgtcagctgccagcgcctctgcaatgcagatgccctgcccctgcgcggggctgcagggcttgtacggcgctggcgccggcctgacgacgatgatgggcgccggcgggctgtacccctacgcggagtacctgaggcagccgcagtgcagcccgctggcggcggcgccctactacgccgggtgtgggcagacgagcgccatg

SEQ ID NO: 346564 - DNA, 400 bp, Zea mays
attagctttatctactccagagcgcagaagaacccgatcgacaccatgagggtgttgctcgttgccctcgctctcctggctctcgctgcgagcgccacctccacgcatacaagcggcggctgcggctgccagccaccgccgccggttcatctaccgccgccggtgcatctgccacctccggttcacctgccacctccggtgcatctcccaccgccggtccacctgccgccgccggtccacctgccaccgccggtccatgtgccgccgccggttcatctgccgccgccaccatgccactaccctactcaaccgccccggcctcagcctcatccccagccacacccatgcccgtgccaacagccgcatccaagcccgtgccagctgcagggaacctgcggcg

SEQ ID NO: 346565 - DNA, 400 bp, Zea mays
tggacgtcagcctagcaattagctcatcgactccagattggagaactcgacaccatgaaggtgctgatcgttgcccttgctctcctggcgctcgctgcgagcgccgcctccagtacaagcggcggctgtggctgccagacaccaccgtttcatctaccgcctccgttctatatgccgcctccgttctatctgccgccgcagcagcagccgcagccatggcaataccccactcaaccaccgcagctaagcccgtgccagcagttcggatcctgcggcgtcggcagcgtcggcagcccgttcctgggccagtgcgtcgagttcctgaggcaccagtgcagcccggcggcgacgccctacggctcgccacagtgccaggcgctgcagcagcagtgctgccacc

SEQ ID NO: 346566 - DNA, 397 bp, Zea mays
agaaagcacaatagtgtaccaacaatggcagtcaaaatattttgcctccttatgctccttgggatttctgcaagtgctgctacggcgaccattttcccgcaatgctcacaagctcctatagcttcccttcttcccccgtacctctcaccagcggtgtcttcggtatgtgaaaacccaattcttcaaccctacaggatccaacaggcaatcgcagctggcatcttacctttatcacccttgttcctccaacaatcatcagccctattacagcagttacctttggtgcatttattggcacaaaacatcagggcacaacaactacaacaacttgtgctagcaaaccttgctgcctactctcagcaacagcagtttcttccattcaaccaaactgctgcat

SEQ ID NO: 346567 - DNA, 406 bp, Zea mays
gcaacatagaaagcacaatagtgtaccaacaatggcagctaaaatattttgcctccttatgctccttggtctttctgcaagtgctgctacggcgaccattttcccacaatgctcacaagctcctatagcttcccttcttcccccgtacctctcaccaacggtgtcttcggtatgtgaaaacccaattcttcaaccctacaggatccaacaggcaatcgcagctggcatcttacctttatcacccttgttcctccaacaatcatcagccctattacagcagttacctttggtgcatttattggcacaaaacatcagggcacaacaactacaacaacttgtgctagcaaaccttgctgcctactctcagcaacagcagtttcttccattcaaccaactagctgcattg

SEQ ID NO: 346568 - DNA, 277 bp, Zea mays
tgggtcttcagaccattagctttatctactccagagcgcagaagaacccgatcgacaccatgagggtgttgctcgttgccctcgctctcctggctctcgctgcgagcgccacctccacgcatacaagcggcggctgcggctgccagccaccgccgccggttcatctaccgccggcggtgcatctgccacctccggttcacctgccacctccggtgcatctcccaccgccagtccacctgccgacgccggtccacctgccaccgacggtccatgtgcc

SEQ ID NO: 346569 - DNA, 285 bp, Zea mays
ggacttcagcctagctattagctcatcgactccagattggggaactcgacaccatgaaggtgctgatcgttgcccttgctctcctggcgctcgctgcgagcgccacctccagtacaagcggcggctgtggctgccagacaccaccgtttcatctaccgcctccgttctatatgccgcctccgttctatctgccgccgcagcagcagccgcagccatggcaataccccactcaaccaccgcagctaagcccgtgccagcagttcggatcctgcggcgtctgcagcg

SEQ ID NO: 346570 - DNA, 403 bp, Zea mays
gcaacatagaaagcacaatattgtaccaataatggcagccaaaatattttgcctcattatgctccttggtctttctgcaagtgctgctacggcgagcattttcccgcaatgctcacaagctcctatagcttcccttcttcccccatacctctcaccagcgatgtcttcagtatgtgaaaatccaattcttctaccctacaggatccaacaggcaatcgcagcaggcatcttacctttatcacccttgttcctccaacaatcatcagccctattacagcagttacctttggtgcatttattggcacaaaacatcagggcacaacaactacaacaactcgtgctagcaaaccttgctgcctactctcagcaacagcagttacctttggtgcatttgttggcacaa

SEQ ID NO: 346571 - DNA, 367 bp, Zea mays
  unsure (1)..(367): unsure at all n locations
tgagaccaactagcaacatagaaagcacaatattgtaccaacaatggcagccaaaatattttgcctccttatgctccttggtctttctgcaagtgctgctacggcgaccattttcccgaaatgctcgcaagctcctatagcttcccttcttcccccgtacctctcaccagcggtgtcttcggtatgtgaaaacccaattcttcaaccctacaggatccaacaggcaatcacagctggcatcttacctttatcacccttgttcctccaacaatcatcagccctattacatcagttacctttggtgcatttattggcacanaacatcanggcacaacaactacaacaacttgtgctagcaaaccttgct

SEQ ID NO: 346572 - DNA, 400 bp, Zea mays
gcaattagctcatcgactccagattggagaactcgacaccatgaaggtgctgatcgttgcccttgctctcctggcgctcgctgcgagcgccgcctccagtacaagcggcggctgtggctgccagacaccaccgtttcatctaccgcctccgttctatatgccgcctccgttctatctgccgccgcagcagcagccgcagccatggcaataccccactcaaccaccgcagctaagcccgtgccagcagttcggatcctgcggcgtcagcagcgtcggcagcccgttcctgggccagtgcgtcgagttcctgaggcaccagtgcagcccggcggcgacgccctacggctcgccacagtgccaggcgctgcagcagcagtgctgccaccagatcatgcaagtg

SEQ ID NO: 346573 - DNA, 336 bp, Zea mays
attgagaccacatcgcaagatgaatcgaggtttcccatcccagcaacagcgccggcgggggggtcatgatattttacgttcttatgcttctcggtctgtgtggatgacgcgacaacgctacaataatgcttacatgctcacaaacttctattgcttccctcattcctccattccatgaatgcttgattacgtagaaaatccaaaaacccaactctataaccctatacgcgcaaacacgcaatgcaacatagctacatcactctatcaccaataatcgaacactctatcttcgtatctgtcatgcggacatagcaacaaaccacagcggctcagcaa

SEQ ID NO: 346574 - DNA, 287 bp, Zea mays
aacacaccaagcgaagcgcactagcaacaacctaacaacaatggctaccaagatattagccctccttgcgcttcttgcccttttagtgagcgcaacaaatgcgttcattattccacagtgctcacttgctcctagtgccattattccacagttcctcccaccagttacttcaatgggcttcgaacatccagccgtgcaagcctacaggctacaactagcgcttgcggcgagcgtcttacaacaaccaattgcccaattgcaacaacaatccttggcacatctaaacc

SEQ ID NO: 346575 - DNA, 98 bp, Zea mays
aaaaaaaaaaaaaaaaaaaaaaaaaaaaaaaatataaaaaataaaaaaaaaaaaaaaaaaaaaagaaaaaaaaaaaaaaaaaaaaaaaaaaaaaaaag

SEQ ID NO: 346576 - DNA, 287 bp, Zea mays
attgagaccaactagcaacatagaaagcacaatagtgtaccaacaatggcagccaaaatattttgcctccttatgctccttggtctttctgcaagtgctgctacggcgaccattttcccgaaatgctcgcaagctcctatagcttcccttcttcccccgtacctctcaccagcggtgtcttcggtatgtgaaaacccaattcttcaaccctacaggatccaacaggcaatcacagctggcatcttacctttatcacccttgttcctccaacaatcatcagccctatt

SEQ ID NO: 346577 - DNA, 288 bp, Zea mays
gagcattcagaaactcaccaagcgaagcgcactagcaacggcctatcaacaatggctaccaagatattatccctccttgcgcttcttgcgctttttgcgagcgcaacaaatgcgtccattattccacaatgctcacttgctcctagttccattattccacagttcctcccaccagttacttcaatggccttcgaacacccagctgtgcaagcctatatgctacaacaagcgattgcggcgagcgtcttacaacaaccaattgtccaattgcaacaacaatccttggca

SEQ ID NO: 346578 - DNA, 286 bp, Zea mays
attgagaccaactagcaacatagaaagcacaatagtgtaccaacaatggcagccaaaatattttgcctccttatgctccttggtctttctgcaagtgctgctacggcgaccattttcccgaaatgctcgcaagctcctatagcttcccttcttcccccgtacctctcaccagcggtgtcttcggtatgtgaaaacccaattcttcaaccctacaggatccaacaggcaatcacagctggcatcttacctttatcacccttgttcctccaacaatcatcagccctat

SEQ ID NO: 346579 - DNA, 383 bp, Zea mays
gagaccaacaagcaacatagaaagtggaatctagtagcaacaatagagcaacaatggcgaccaagatattttccctccttatgctccttgctctttctgcatgtgttgctaacgcgacaattttccctcaatgctcacaagctcctatagcttcccttcttcccccataccttccatcaatgatagcttcagtatgtgaaaacccagctcttcaaccctataggctccaacaagcaatcgcagcaagcaacatacctttatcacccttgtttcaacaatcgccagccctatctttggtgcagtcattggtacaaaccatcagggcacagcaactgcagcaactcgtgctacctgtgatcaaccaagtagctttggcaaacctt

SEQ ID NO: 346580 - DNA, 401 bp, Zea mays
agaccattagctttatctactccagagcgcataagaacccgatcgacaccatgagggtgttgctcgttgccctcgctctcctggctctcgctgcgagcgccacctccacgcatacaagcggcggctgcggctgccagccaccgccgccggttcatctaccgccgccggtgcatctgccacctccggttcacctgccacctccggtgcatctcccaccgccggtccacctgccgccgccggtccacctgccaccgccggtccatgtgccgccgccggttcatctgccgccgccaccatgccactaccctactcaaccgccccggcctcagcctcatccccagccacacccatgcccgtgccaacagccgcatccaagcccgtgccagctgcagggaacctgc

SEQ ID NO: 346581 - DNA, 197 bp, Zea mays
ataccaaatcgctagcctacactttatattttattaagcccactcgcccccacaagggaggtgttggttttcctatagggcctgccaataccaactcactccccatccattcatacaaacggcactggaaacacactgccatttcctatcttaaatccatcgacacacatgcatttttcaccttctgatgaaataac

SEQ ID NO: 346582 - DNA, 389 bp, Zea mays
agaccaactagcaacatagaaagcacaatagtgtaccaacaatggcagccaaaatattttgcttccttatgctccttggtctttctgcaagtgctgctaccgcaaccattttcccacaatgctcacaagctcctatagtttcctttcttcccccatacctctcaccagcggtgtcttcagtatgtgaaaacccaattcttcaaccctacaggatccaacaggcaatcgcagcaggcatcttacctttatcacccttgttcctccaacaaccgtcagccctattacagcagttacctttggtgcatttgttggcacaaaacatcaaggcacaacaactacaacaacttgtgctaggaaaccttgctgcctactctcagcaacagcagttt

SEQ ID NO: 346583 - DNA, 255 bp, Zea mays
gcaaaccagaacagcgtagagaggatccgcaaacaggagggccggacaaagcaccttgaacacggccagcgccctcctctggcacctggcaccgcctgctgccagcacatgccctacgcatacgccctgccccagcgctgggacggcgctctcgcacggctcacgaccatgactgacgacgacgatcggcacccgcacgctgtacccctacgccaagcacatgacacacccgtagcgcaggccgcctactacggc

SEQ ID NO: 346584 - DNA, 381 bp, Zea mays
aactagcaacatagaaagcacaatagtgtaccaacaatggcagccaaaatattttgcttccttatgctccttggtctttctgcaagtgttgctaccgcaaccattttcccacaatgctcacaagctcctatagcttcccttcttcccccatacctctcaccagcggtgtcttcaatgtgtgaaaacccaattgttcaaccctacaggatccaacaggcaatcgcaacaggcatcttaccattatcacccttgttcctccaacaaccgtcagccctattacagcagttacctttggtccatttggtggcacaaaacatcagggcacaacaactacaacaacttgtgctagcaaaccttgctgcatactctcagcaacatcag

SEQ ID NO: 346585 - DNA, 401 bp, Zea mays
attttcagcattcagaaacacaccaagcgaagcgcactagcaacaacctaacaacaatggctgccaagatattagccctccttgcgcttcttgcccttttagtgagcgcaacaaatgcgttcattattccacagtgctcacttgctcctagtgccattattccacagttcctcccaccagttacttcaatgggcttcgaacatccagccgtgcaagcctacaggctacaactagcgcttgcggcgagcgtcttacaacaaccaattgcccaattgcaacaacaatccttggcacatctaaacctacaaaccatcgcaacgcaacagcaacaacagtttctgccatcactgagccacctagccgtggtgaaccctgtcgcctacttgcaacagcagctactt

SEQ ID NO: 346586 - DNA, 331 bp, Zea mays
acttgaacattcaaaaactcatcaagcatatctcactcaccacaacctaacaacaatcgctgaaaattttttatccttccttgcactttctgccctcaagactatctccacaaatgcttatattactctacacagatcaatttctcatattgccaacatcacacagattttaataccagtcacttcaatgggttatgaacaaccagaccctcaagcctacaatctacaactaattatcattaatagcgtattaaatctaccaattatttaatcactaaaactaagcttgttacatttaaacctacataccatctcaacagatccaacacca

SEQ ID NO: 346587 - DNA, 228 bp, Zea mays
attattccacagtgctcacttgctcctagtgccattattccacagttcctcccaccagttacttcaatgggcttcgaacatccagccgtgcaagcctacaggctacaactagcgcttgcggcgagcgtcttacaacaaccaattgcccaattgcaacaacaatccttggcacatctaaacctacaaaccatcgcaacgcaacagcaacaacagtttctgccatcactg

SEQ ID NO: 346588 - DNA, 261 bp, Zea mays
  unsure (1)..(261): unsure at all n locations
caactagcaacatagaaagcacaatagtgtaccaacaatggcagccaaaatattntgcctccttatgctccttggtctttctgcaagtgctgctacggcgaccattttcccgaaatgctcgcaagctcctatagcttcccttcttcccccgtacctctcaccagcggtgtcttcggtatgtgaaaacccaattcttaaccctacggatccaaaggcatacagtggatttacttataccctgtctaacatatagctatacat

SEQ ID NO: 346589 - DNA, 62 bp, Zea mays
  unsure (1)..(62): unsure at all n locations
acgcgtncgccaactagcaacatagaaagcacaatagtgtaccaacaatggcagctaaaata

SEQ ID NO: 346590 - DNA, 472 bp, Zea mays
  unsure (1)..(472): unsure at all n locations
annnccagcatncagaaacacaccaagcgaagcgcactagcaacaacctaacaacaatggctaccaagatattagccctccttgcgcttcttgcccttttagtgagcgcagcagatgcgttcattattccacagtgctcacttgctcctagtgccattattccacagttcctcccaccagttacttcaatgggcttcgaacatccagccgtgcaagcctacaggctacaactagcgctggcggcgagcgtcttacaacaaccaattgcccaattgcaacaacaatccttggcacatctaaacctacaaaccatcgcaacgcaacagcaacaacagtttctgccatcactgagccacctagccgtggtgaaccctgtcgcctacttgcaacagcagctactngcatccaacccacttgctctggcgaacgtagctgcataccagcaacaacaacgtctgcaacagtttatgcc

SEQ ID NO: 346591 - DNA, 94 bp, Zea mays
gacgcgccctgtacgccataagcgcggggtgtggggtaccgcacggaccgtacatgcaggctaccccgtcttgttttcttctttgcagcgcgtt

SEQ ID NO: 346592 - DNA, 67 bp, Zea mays
cggcgtctgagatccagctacgtacgctgcatgcacgtcatactctctatagtgcacctaaatcaat

SEQ ID NO: 346593 - DNA, 346 bp, Zea mays
aacacaccaagcgaagcgcactagcaacaacctaacaacaatggctaccaagatattagccctccttgcgcttcttgcccttttagtgagcgcaacaaatgcgttcattattccacagtgctcacttgctcctagtgccattattccacagttcctcccaccagttacttcaatgggcttcgaacatccagccgtgcaagcctacatgctacaactagcgcttgcggcgagcgtcttacaacaaccaattgcccaattgcaacaacaatccttggcacatctaaacctacaaaccatcgcaacgcaacagcaacaacagtttctgccatcactgagccacctagcc

SEQ ID NO: 346594 - DNA, 304 bp, Zea mays
  unsure (1)..(304): unsure at all n locations
gccacgcgtcgagacatagcttattactnagagcgcagaaaacccgacgacaccatgagggtgtgctcgttgcctcgctctcctgctctcgctggagcccacctcacgcatacaagcggcggtgcggctgcagccaccgccgccggtcatctaccgccgccgggcatctgccacctccggttcacctgccacctccggtgcatctcccaccgccggtccacctgccgccgccggtccacctgccaccgccggtccatgtgccgccgccggttcatctgccgccgccaccatgccactaccctac

SEQ ID NO: 346595 - DNA, 115 bp, Zea mays
acgcgccctgtacggccattaacgcggggtgtggggtaccgcacgtgccgtacattgcaggcctacgccgtctttgttcttcttcttttgcagtcgcgcttcccgaagttaatgg

SEQ ID NO: 346596 - DNA, 200 bp, Zea mays
  unsure (1)..(200): unsure at all n locations
attcagaaacacaccaagcgaagcgcactagcaacaacctaacaacaatggctaccaagatattatccctccttgcgcttcttgcgctntntgcgagcgcaacanatgcgtccattattccacaatgctcacttgctcctagttccattattccacagttcctcccaccagttacttcaatggccttcgaacacccagct

SEQ ID NO: 346597 - DNA, 317 bp, Zea mays
  unsure (1)..(317): unsure at all n locations
aggacgcgtggcgtttgagcattcagaaacacaccaagcgaagcacattagcaacaacctaacaacaatggctaccaagatatgatccctccttgcgcttcttgcgcttgttgcgagcgcaacanatgcgttcattattccacaatgctcactagctccaagttccattattacacagttcctcccaccagttacttcaatgggcttcgaacacccagctgtgcaagcctataggctacaacaagcaattgcggcgagcgtcttacaacaaccaatttcccagttgcaacaacaatcctttgcacatctaacaatac

SEQ ID NO: 346598 - DNA, 226 bp, Zea mays
  unsure (1)..(226): unsure at all n locations
cacgcgtnncgatgagaccaacangcaacatagaaagtggaatacagtagcaacaatagagcaacaatggcggccaagatattttccatccttatgctccttgctctntctgcatgtgttgctaacgcgaccattttttcctcaatactcacaagctcctatagctgcccttcttccnccataccttccatcaatgaccgcttcagtatgtgaaaacccagccctt

SEQ ID NO: 346599 - DNA, 299 bp, Zea mays
  unsure (1)..(299): unsure at all n locations
caacaagcaacatagaaagtggaatccagtagcaacaatagagcaacaatggcgaccaagatattttccctccttatgctccttgctctntctgcatgtgttgctaacgcgacaattttccctcaatgctcacaagctcctatagcttcccttcttcccccataccttccatcaatgatagcttcagtatgtgaaaacccagctcttcaaccctataggctccaacaagcaatcgcagcangcaacatanccttatcaccctngtttcaacaatcgccagccctatctttggtgcagtc

SEQ ID NO: 346600 - DNA, 289 bp, Zea mays
  unsure (1)..(289): unsure at all n locations
cgccgccacgcgtcgggtcttagacatagcttatcactcagagcgcagaaaacccgtcgcaccatgaggggttgctcgtgcctgctctcctggcttcgtgnagcgcagctcaccatacaacggcggtgggctgcagccaccgcgcggtcattaccgccgcggtgcatctgcacctcggttacctgcacctccggtcatctccaccgcggtcacctgccgcgccggccacctgcaccgccggccatgtgccgccgcggtcatctgccgccgcaccatgccactaccctac

SEQ ID NO: 346601 - DNA, 324 bp, Zea mays
  unsure (1)..(324): unsure at all n locations
atgctcctgtcttctgcaaggctgctcggnaccatttcgcgcatgtcgaagctctatgcttcctcttccccgacctctcaccagcggtgtctcggttgtgaaacccaattcttcaaccctcaggatcaacaggcaatncagctggcatctaccttatcaccctgtcctcaacaatatcagcctatacaacagtaccttggtgcattatgcacnaacatatggccncaactacacaactggcagcnacctgctgctacttagcacagagttcttcatcaccacangtcatgacttgtctattgacacacactcatagcagtctgt

SEQ ID NO: 346602 - DNA, 410 bp, Zea mays
ctcgcatgcctgtgcacttctccatcaccaccactgggtcttcagaccattagctttatctactccagagcgcagaagaacccgatcgacaccatgagggtgttgctcgttgccctcgctctcctggctctcgctgcgagcgccacctccacgcatacaagcggcggctgcggctgccagccaccgccgccggttcatctaccgccgccggtgcatctgccacctccggttcacctgccacctccggtgcatctcccaccgccggtccacctgccgccgccggtccacctgccaccgccggtccatgtgccgccgccggttcatctgccgccgccaccatgccactaccctactcaaccgccccggcctcagcctcatccccagccacacccatgcccgtgccaacagcc

SEQ ID NO: 346603 - DNA, 416 bp, Zea mays
gcacaatagtgtaccaacaatggcagctaaaatattttgcctccttatgctccttggtctttctgcaagtgctgctacggcgaccattttcccgcaatgctcgcaagctcctatagcttcccttcttcccccgtacctctcaccagcggtgtcttcggtatgtgaaaacccaattcttcaaccctacaggatccaacaggcaatcgcagctggcatcttacctttatcacccttgttcctccaacaatcatcagccctattacaacagttacctttggtgcatttattggcacaaaacatcagggcacaacaactacaacaacttgtgctagcaaaccttgctgcctactctcagcaacagcagtttcttccattcaaccaactaggttcattgaactctgcttcttatttgcaac

SEQ ID NO: 346604 - DNA, 403 bp, Zea mays
attttaagcattcaaaaccacaccaagcgaagcgcactaccaacaacctaacaacaatggctaccaagatattagccctccttgcgcttcttgcccttttagtgagcgcaacaaatgcgttcattattccacagtgctcacttgctcctagtgccattattccacagttcctcccaccagttacttcaatgggcttcgaacatccagccgtgcaagcctacaggctacaactagcgcttgcggcgagcgtcttacaacaaccaattgcccaattgcaacaacaatccttggcacatctaaacctacaaaccatcgcaacgcaacagcaacaacagtttctgccatcactgagccacctagccgtggtgaaccctgtcgcctacttgcaacagcagctacttgc

SEQ ID NO: 346605 - DNA, 162 bp, Zea mays
gtgactgtgcaaagcagtgcagtatatgtaggtgaagggggtgctatcgattcgttcattctttgtacgcgatgtcgatttatttacctcaatcgaaatatttgttcgtggcattccagatgggaagtggcccaatataattgagtctgaaaacgtgcgccc

SEQ ID NO: 346606 - DNA, 246 bp, Zea mays
ggtccggaatgcccaagccttcgggtctagaacgggagccggccgttttaaaggttccagcttaccttccccttccttccaaggtattactttttttttggggcaacttaaatcaaattaattggcggcggtttaccacctcgtgacctggaaaacccttgcggtacccaacttaattggcttggaacacaatccccttttggcaggttgcgttataaccaaaaaggcccgaacgatcggcctttc

SEQ ID NO: 346607 - DNA, 404 bp, Zea mays
attggtggagccctctagcagatttcttatgagatataggccaacaatcacgtgcgtgatatgatgtatgtggcttcccagaaataataaagtccatttctaaaccgaaaaaaaacaacaaaaagactgaaaaaacggcgcggccgacctaacgaaccaagcttacatacccttccatgctacgcagtagctgtaatatcgaggaacctaaatccagttcactctccgcaacatttacaacatcctgactggaaaaacccacgcgctccccaacttaacattaatcgcgcacattcccgtttctacacccagcgtaacagctaaaatggccagcccgatagcccttgctaacagttgttcatcctgaatggctaatggcacgcgccctgtatcggcccattaag

SEQ ID NO: 346608 - DNA, 408 bp, Zea mays
gaccaactagcaacatagaaagcacaatagtgtaccaacaatggcagccaaaatattttgcttccttatgctccttggtctttctgcaagtgttgctaccgcaaccattttcccacaatgctcacaagctcctatagcttcccttcttcccccatacctctcaccagcggtgtcttcaatgtgtgaaaacccaattgttcaaccctacaggatccaacaggcaatcgcaacaggcatcttaccattatcacccttgttcctccaacaaccgtcagccctattacagcagttacctttggtccatttggtggcacaaaacatcagggcacaacaactacaacaacttgtgctagcaaaccttgctgcatactctcagcaacatcagtttcttccattcaaccaactggc

SEQ ID NO: 346609 - DNA, 375 bp, Zea mays
  unsure (1)..(375): unsure at all n locations
caccttaaaaggcccattattgtcccaccattggcagccaaaatattgggcctcctaatgctcctgggtatttctgcaagtgctgctacggcgaccattttcccgcattgctcacaagctcctatagcttcccttcttcccccgtacctctcaccagcggtgtcttcggtatgtgaaaacccaattcttcaaccctacaggatccaacaggcaatcgcagctggcatcttacctttatcacccttgttcctccaacaatcatcagccctattacagcagttacctttggtgcatttattggcacaaaacatcanggcacaacaactacaacaacttgtgctagcaaaccttgctgcctactctcagcaacagcag

SEQ ID NO: 346610 - DNA, 385 bp, Zea mays
cagaaacacaccaagcgaagcacattatcaacaacctaacaacaatggctaccaagatattatccctccttgcgcttcttgcgctttttgcgagcgcaacaaatgcgttcattattccacaatgctcacttgctccaagttccattattacacagttcctcccaccagttacttcaatgggcttcgaacacccagctgtgcaagcctataggctacaacaagcaattgcggcgagcgtcttacaacaaccaatttcccagttgcaacaacaatccttggcacatctaacaatacaaaccatcgcaacgcaacagcaacaacaattcctaccagcactgagccacctagccatggtgaaccctgccgcctacttgcaacagcagtt

SEQ ID NO: 346611 - DNA, 153 bp, Zea mays
agccttcggaattattttggcggcttatatgaaaaaccaacgccttaaaacgaccccaaccgaacggtccaggcccaaccggatgggcaatggaacctgcccaacccgcttcggtttcttctttccccgccggccaatggcggcccctttttg

SEQ ID NO: 346612 - DNA, 388 bp, Zea mays
ccaactagcaccatagaaggcacattattgtcccaacaatggcagccaaaatatttggcttccttatgctccttggtctttctgcaagtgctgctaccgcaaccattttcccacaatgctcacaagctcctatagcttcctttcttcccccatacctctcaccagcggtgtcttcagtatgtgaaaacccaattcttcaaccctacaggatccaacaggcaatcgcagcaggcatcttacctttatcacccttgttcctccaacaaccgtcagccctattacagcagttacctttggtgcatttgttggcacaaaacatcaaggcacaacaactacaacaacttgtgctaggaaaccttgctgcctactctcagcaaacagcagtttc

SEQ ID NO: 346613 - DNA, 417 bp, Zea mays
attttgagcattcagaaacacaccaagcgaagcgcactagcaacgacctaacaacaatggctaccaagatattagccctccttgcgcttcttgccctttttgtgagcgcaacaaatgcgttcattattccacaatgctcacttgctcctagtgccattattccacagttcctcccaccagttacttcaatgggcttcgaacacctagctgtgcaagccaacatgcaacaacaagcgcttgcggcgagcgtcttacaacaaccaattgcccaattgcaacaacaatccttgccacatctaacaatacaagccatcacaacgcaacagcaacaacagttcctaccagcactgagccacctagccatggtgaaccctgccgcctacttgcaagagcagctgcttgcatccaacccacttg

SEQ ID NO: 346614 - DNA, 391 bp, Zea mays
  unsure (1)..(391): unsure at all n locations
gctacagcaagccgtgcttccttcttgacacaacaacagttgctgccgttctaccagcagttggcggctaaccccgcaaccctcttacaactacaacaattgttgccctttgtccaacttgctttgacaaacccagcagcctcctaccaacaacacatcattggtggtgccctcttttagattgcttattagatgtaattcaataataaagttttttggatgatgtatgtggccaaccagaaataaaaagttacatttccagattcttaannnaaaaanaaaaaaaaaaaaaaaaaaaaaaaaaaaaaaaaaaaaaaaaaaaaaaaaaaaaaaaaaaaaaaaaaaaaaaaaaaaaatttttttttttttnnaaaaaaaaaaaaaaaaataa

SEQ ID NO: 346615 - DNA, 319 bp, Zea mays
gccagatgctgggaacctgcgtcgagttcatgacgcataacctgagccagagcgtgaagttctagtggtatcatcacagccagacggtgacgccctactgttggcatcagctcaagcaggtgcagccgcagtaccgccaccagctgatgtaggtgtagccgctgcaccgcatccaggagatcttggcgtagagcctccagttcatgctgctgcagcaggcgcaaatcgcgcagcaactgacgctgatgtgcgggctgatagagcagaatctgagcgcgaactgtggtctgcacgatgcgactcacatgcacatactatg

SEQ ID NO: 346616 - DNA, 412 bp, Zea mays
actagatctagagcgggcgctgtcgatgtagcagattcacgctcacgtgcgcgcgcatgcaaagttatagtattgcgataccgaaacctaaattaatggcagtggccgtacaactacaacactgggactgccaaaaccctgccgaaaccaatcttaatggactagatgcacatttcgctttctggagttgtagtaataaggaacaggccgatagcgattgccattactaacacatgctcaatctgaatggggactggcactctccctgtacattaacatcaagcgctgtggttgttacgctcaccctcaccgttacagttgcaattgccatagcgctagctcctgttgctttctttcctttctttctcgtcatggtcacgtgctttggctgtccagctctagctctaaagct

SEQ ID NO: 346617 - DNA, 405 bp, Zea mays
gaccaacaagcaacatagaaagtggaatccagtagcaacaatagagcaacaatggcgaccaagatattttccctccttatgctccttgctctttctgcatgtgttgctaacgcgacaattttccctcaatgctcacaagctcctatagcttcccttcttcccccataccttccatcaatgatagcttcagtatgtgaaaacccagctcttcaaccctataggctccaacaagcaatcgcagcaagcaacatacctttatcacccttgtttcaacaatcgccagccctatctttggtgcagtcattggtacaaaccatcagggcacagcagctgcagcaactcgtgctacctgtgatcaaccaagtagctctggcaaacctttctccctactctcagcaacaacaa

SEQ ID NO: 346618 - DNA, 411 bp, Zea mays
attttcagcattcagaaacacaccaagcgaagcgcactagcaacaacctaacaacgatggctaccaagatattagccctccttgcgcttcttgcccttttagtgagcgcaacaaatgcgttcattattccacagtgctcacttgctcctagtgccattattccacagttcctcccaccagttacttcaatgggcttcgaacatccagccgtgcaagcctacaggctacaactagcgcttgcggcgagcgtcttacaacaaccaattgcccaattgcaacaacaatccttggcacatctaaacctacaaaccatcgcaacgcaacagcaacaacagtttctgccatcactgagccacctagccgtggtgaaccctgtcgcctacttgcaacagcagctacttgcatccaacc

SEQ ID NO: 346619 - DNA, 105 bp, Zea mays
acaacgggacgcgcactgtacccacccattaagcgcgcatgttgtcgtggatacgctcagagcgaccgatacacttgacagcgtgctatcactgagtcatttagc

SEQ ID NO: 346620 - DNA, 418 bp, Zea mays
agcaacatagaaagcacaatagtgtgccaacaatggcagtcaaaatattgagcctccttatgctccttggtctttctgcatgtgctgctacggcgaccattttcccagaaatgctcgcaggctcctatagcttcccttcttcctccgtacctatcaccagcggtgtctaaggtatgtgaaaacccaattcttcaaccctacaggatccaacaggcaatcacagctggcatcttacctttatcaccctagttcctccaacaatcatcagccctattacatcagttacctttggtgcatttattgtcacaaaacatcaaggcacaacaactacaacaacttgtgctagcaaaccttgctgcctactctcagcaacagcagttacttccattcaaccaactagctgcattgaactctgctt

SEQ ID NO: 346621 - DNA, 98 bp, Zea mays
ccggtcttgaacggcagccggccgttttaaaggatccaggctaccgtccccttccttgcgacgtcttaccttttttttagggccacctaaattcaatt

SEQ ID NO: 346622 - DNA, 355 bp, Zea mays
ttgagcattcaaaaacacaccaagcgaagcgcactaccaacgacctaacaacaatggctaccaggatattagccctccttgcgcttcttgccctttttgtgagcgcaacaaatgcgttcattattccacaatgctcacttgctcctagtgccattattccaaagttcctcccaccagttacttcaatgggcttcgaacacctagctgtgcaagccaacatgcaacaacaagcgcttgcggcgagcgtcttacaacaaccaattgcccaattgcaacaacaatccttgccacatctaacaatacaagccatcacaacgcaacagcaacaacagttcctaccagcactgagccacct

SEQ ID NO: 346623 - DNA, 413 bp, Zea mays
ctgggtcttcagaccattagctttatctactccagagcgcagaagaacccgatcgacaccatgagggtgttgctcgttgccctcgctctcctggctctcgctgcgagcgccacctccacgcatacaagcggcggctgcggctgccagccaccgccgccggttcatctaccgccgccggtgcatctgccacctccggttcacctgccacctccggtgcatctcccaccgccggtccacctgccgccgccggtccacctgccaccgccggtccatgtgccgccgccggttcatctgccgccgccaccatgccactaccctactcaaccgccccggcctcagcctcatccccagccacacccatgcccgtgccaacagccgcatccaagcccgtgccagctgcaaggaacctgcgg

SEQ ID NO: 346624 - DNA, 407 bp, Zea mays
gaaacacaccaagcgaagcgcactagcaacaacctaacaacaatggctaccaagatattatccctccttgcgcttcttgcgctttttgcgagcgcaacaaatgcgtccattattccacaatgctcacttgctcctagttccattattccacagttcctcccaccagttacttcaatggccttcgaacacccagctgtgcaagcctataggctacaacaagcgattgcggcgagcgtcttacaacaaccaattgcccaattgcaacaacaatccttggcacatctaacaatacaaaccatcgcaacgcaacagcaacaacagttcctaccagcactgagccacctagccatggtgaaccctgtcgcctacttgcaacagcagctgcttgcatccaacccacttgctct

SEQ ID NO: 346625 - DNA, 392 bp, Zea mays
attgagaccaactagcaacatagaaagcacaatagtgtaccaacaatggcagccgaaatattttgcttccttatgctccttggtctttctgcaagtgctgctaccgcaaccattttcccacaatgctcacaagctcctatagcttcctttcttcccccatacctctcaccagcggtgtcttcagtatgtgaaaacccaattcttcaaccctacaggatccaacaggcaatcgcagcaggcatcttacctttatcacccttgttcctccaacaaccgtcagccctattacagcagttacctttggtgcatttgttggcacaaaacatcaaggcacaacaactacaacaacttgtgctaggaaaccttgctgcctactctcagcaacagcagtt

SEQ ID NO: 346626 - DNA, 421 bp, Zea mays
agaccattagctttatctactccagagcgcagaagaacccgatcgacaccatgagggtgttgctcgttgccctcgctctcctggctctcgctgcgagcgccacctccacgcatacaagcggcggctgcggctgccagccaccgccgccggttcatctaccgccgccggtgcatctgccacctccggttcacctgccacctccggtgcatctcccaccgccggtccacctgccgccgccggtccacctgccaccgccggtccatgtgccgccgccggttcatctgccgccgccaccatgccactaccctactcaaccgccccggcctcagcctcatccccagccacacccatgcccgtgccaacagccgcatccaaacccgtgccagctgcaaggaacctgcggcgttggcagcaccccgat

SEQ ID NO: 346627 - DNA, 306 bp, Zea mays
ttactcaaaagcgcaaaaaaacccgaccgacaccaggagggggtggctggttgccttcgttttcctggttttggttggaagcgccacctccacgcatacaagcgggggttgcggttgccagccaccgccgccggttcatctaccgccgccggtgcatttgccacctccggttaacctgccacctccggtgcatttccaaccgccggtccacctgccgccgccggtccacctgccaccgccggtccatgtgccgccgccggttcatctgccgccgccaccatgccactaccctactcaaccgccccg

SEQ ID NO: 346628 - DNA, 252 bp, Zea mays
  unsure (1)..(252): unsure at all n locations
ccaaaccgacaaaaaaaccccgaccgacaccatgaggggtgtgtgctcgttgnccctcgcttctcctggcttctcgctgcaagcgccacctccacgcatacaaccggcggctgcggctgccagccaccgccgccggttcatctaccgccgccggtgcatctgccacctccggttcacctgccacctccggtgcatctcccaccgccggtccacctgccgccgccggtccacctgccaccgnncggtcatgtg

SEQ ID NO: 346629 - DNA, 420 bp, Zea mays
catcaatcatcattcatcttagtagtataggcaccaaatcaaatctgcggcatcaagtatctaactccaaaaaccatgaagctggtgcttgtggttcttgctttcattgctttagtatcaagtgtttcttggacacagaccggccgctgcagctgtggtcaacaaccaagccatgagccgcaacattattcacaacaacattattcacaaaaacaacaacattaaccaccaccacaacattaccagcagcagcaacaccaacaacaacaagttcacatgcaaccacaaaaacatcagcaacaacaagaagttcatgttcaacaacaacaacaacaaccgcagcaccaacaacaacaacaacaacagcaccaacaacaacatcaatgtgaaagccaacaacaacatcaccaacaatcacaa

SEQ ID NO: 346630 - DNA, 354 bp, Zea mays
tatcacctttttatccccaatggggcccaagacctctggccgacactgggcggctttggttttttaccatggctttcttgcttttctttgatagcgccacctccacgcatacaagcggcggctgcggctgccagccaccgccgccggttcatctaccgccgccggtgcatctgccacctccggttcacctgccacctccggtgcatcttccaccgccggtccacctgccgccgccggtccacctgccaccgccggtccatgtgccgccgccggttcatctgccgccgccaccatgccactaccctactcaaccgccccggcctcagcctcatccccagccacacccatgcccgt

SEQ ID NO: 346631 - DNA, 373 bp, Zea mays
tgaaaggcacattagtgtcccaccaatggcagccaaaatatttggcctccttatgctccttggtctttctgcaagtgctgctacggcgaccattttcccgaaatgctcgcaagctcctatagcttcccttcttcccccgtacctctcaccagcggtgtcttcggtatgtgaaaacccaattcttcaaccctacaggatccaacaggcaatcacagctggcatcttacctttatcacccttgttcctccaacaatcatcagccctattacatcagttacctttggtgcatttattggcacaaaacatcagggcacaacaactacaacaacttgtgctagcaaaccttgctgcctactctcagcaacagcagttt

SEQ ID NO: 346632 - DNA, 414 bp, Zea mays
cagaccattagctttatctactccagagcgcagaagaacccgatcgacaccatgagggtgttgctcgttgccctcgctctcctggctctcgctgcgagcgccacctccacgcatacaagcggcggctgcggctgccagccaccgccgccggttcatctaccgccgccggtgcatctgccacctccggttcacctgccacctccggtgcatctcccaccgccggtccacctgccgccgccggtccacctgccaccgccggtccatgtgccgccgccggttcatctgccgccgccaccatgccactaccctactcaaccgccccggcctcagcctcatccccagccacacccatgcccgtgccaacagccgcatccaagcccgtgccagctgcagggaacctgcggcgttggcagc

SEQ ID NO: 346633 - DNA, 265 bp, Zea mays
caagcaacatagtaagtggaatacagtagcaacgatagagcaacaatggcggccaagatattttccatccttatgctccttgctctttctgcatgtgttgctaacgcgaccatttttcctcaatactcacaagctcctatagctgcccttcttcccccataccttccatcaatgaccgcttcagtatgtgaaaacccagcccttcaaccctacaggctccaacaagcaatcgcaacaagcaacttacctttatcacccctgttct

SEQ ID NO: 346634 - DNA, 265 bp, Zea mays
caactagcaacatagaaagcacaatagtgtaccaagaatggcagccaaaatattttgcttccttatgctccttggtctttctgcaagtgttgctaccgcaaccattttcccacaatgctcacaagctcctatagcttcccttcttcccccatacctctcaccagcggtgtcttcaatgtgtgaaaacccaattgttcaaccctacaagatccaacaggcaatcgcaacaggcatcttaccattatcacccttgttcctccaacaa

SEQ ID NO: 346635 - DNA, 356 bp, Zea mays
attgagaccaactagcaacatagaaagcacaatattgtaccaataatggcagccaaaatggtttgcctcattatgctccttggtctttctgcaagtgctgctacggcgagcattttcccgcaatgctcacaagctcctatagcttcccttcttcccccatacctctcaccagcgatgtcttcagtatgtgaaaatccaattcttctaccctacaggatccaacaggcaatcgcagcaggcatcttacctttatcacccttgttcctccaacaatcatcagccctattacagcagttacctttggtgcatttattggcacaaaacatcagggcacaacaactacaacaactcgtgct

SEQ ID NO: 346636 - DNA, 406 bp, Zea mays
attagctttatctactccagagcgcagaataacccgatcgacaccatgagggtgttgctcgttgccctcgctctcctggctctcgctgcgagcgccacctccacgcatacaagcggcggctgcggctgccagccaccgccgccggttcatctaccgccgccggtgcatctgccacctccggttcacctgccacctccggtgcatctcccaccgccggtccacctgccgccgccggtccacctgccaccgccggtccatgtgccgccgccggttcatctgccgccgccaccatgccactaccctactcaaccgccccggcctcagcctcatccccagccacacccatgcccgtgccaacagccgcatccaagcccgtgccagctgcagggaacctgcggcgttggca

SEQ ID NO: 346637 - DNA, 267 bp, Zea mays
gcattcagaaacacaccaagcgaagcgcactagcaacaacctaacaacaatggctaccaagatattagccctccttgcgcttcttgcccttttagtgagcgcaacaaatgcgttcattattccacagtgctcacttgctcctagtgccattattccacagttcctcccaccagttacttcaatgggcttcgaacatccagccgtgcaagcctacaggctacaactagcgcttgcggcgagcgtcttacaacaaccaattgcccaatt

SEQ ID NO: 346638 - DNA, 376 bp, Zea mays
  unsure (1)..(376): unsure at all n locations
tagcaacatagaaagcacaatagtgtaccaacaatggcagccaaaatattttgcctcctgatgctccttggtctttctgcaagtgctgctacggcgaccattttcccgaaatgctcgcaagctcctatagcttcccttcttcccccgtacctctcaccagcggtgtcttcggtatgtgaaaacccaattcttcaaccctacaggatccaacaggcaatcacagctggcatcttacctttatcacccttgttcctccaacaatcatcagccctattacatcagttacctttggtgcatttattggcacaaaacatcagggcacaacaactacaacaactngtgctagcanaccttgctgcctactctcagcaacagc

SEQ ID NO: 346639 - DNA, 372 bp, Zea mays
cggcagtgcgtagagaggatcgtcgaacagaacagcatgaagatggtcatcgttctcgtggtgtgcctggctctgtcagctgccagcgcctctgcaatgcagatgccctgcccctgcgcggggctgcagggcttgtacggcgctggcgccggcctgacgacgatgatgggcgccggcgggctgtacccctacgcggagtacctgaggcagccgcagtgcagcccgctggcggcggcgccctactacgccgggtgtgggcagacgagcgccatgtaccagccgctcccgcaacagtgctgccagcagcaaatgaggatgatggacgtgcagtccgtcccgcagcagctgcagatgatgatgcagcttgagcgt

SEQ ID NO: 346640 - DNA, 267 bp, Zea mays
gcaacatagaaagtggaatccagtagcaacaatagagcaacaatggcgaccaagatattttccctccttatgctccttgctctttctgcatgtgttgctaacgcgacaattttccctcaatgctcacaagctcctatagcttcccttcttcccccataccttccatcaatgatagcttcagtatgtgaaaacccagctcttcaaccctataggctccaacaagcaatcgcagcaagcaacatacctttatcacccttgtttcaacaa

SEQ ID NO: 346641 - DNA, 269 bp, Zea mays
gggtcttcagtctcattagctttatctactccagagggcagatgaacccgatcgacaccatgagggtgttgctcgttgccctcgctctcctggctctcgctgcgagcgccacctccacgcatacaagcggcggctgcggctgccagccaccgccgccggttcatctaccgccgccggtgcatctgccacctccggttcacctgccacctccggtgcatctcccaccgccggtccacctgccgccgccggtccacctgccaccgccggtc

SEQ ID NO: 346642 - DNA, 391 bp, Zea mays
ctagcaacatagaaagcacaatagtgtaccaacaatggcagctaaaatattttgcctcctgatgctccttggtctttctgcaagtgctgctacggcgaccattttcccacaatgctcacaagctcctatagcttcccttcttcccccgtacctctcaccaacggtgtcttcggtatgtgaaaacccaattcttcaaccctacaggatccaacaggcaatcgcagctggcatcttacctttatcacccttgttcctccaacaatcatcagccctattacagcagttacctttggtgcatttattggcacaaaacatcagggcacaacaactacaacaacttgtgctagcaaaccttgctgcctactctcagcaacagcagtttcttccattc

SEQ ID NO: 346643 - DNA, 410 bp, Zea mays
agcacaatagtgtaccaacaatggcagccaaaatattttgcctccttatgctccttggtgtttctgcaagtgctgctacggcgaccattttcccgcaatgctcacaagctcctatagcttcccttcttcccccgtacctctcaccagcggtgtcttcggtatgtgaaaacccaattcttcaaccctacaggatccaacaggcaatcgcagctggcatcttacctttatcacccttgttcctccaacaatcatcagccctattacagcagttacctttggtgcatttattggcacaaaacatcagggcacaacaactacaacaacttgtgctagcaaaccttgctgcctactctcagcaacagcagtttcttccattcaaccaactagctgcattgaactctgcttcttat

SEQ ID NO: 346644 - DNA, 194 bp, Zea mays
ccaactagcaacatacatagtgaagtacactagcaacatcttagcaccaatgggagccaagatttttgccctccttgccctccttgctctttcagcaagcgctgctacctcgacttttattccacaatgctcacaacaatacctctctccggcgacagccgtgggatttcaatacccaactatacaatcctaca

SEQ ID NO: 346645 - DNA, 411 bp, Zea mays
caactagcaacatagaaagcacaatagtgtaccaacaatggcagccaaaatattttgcctccttatgctccttggtctttctgcaagtgctgctacggcgaccattttcccgaaatgctcgcaagctcctatagcttcccttcttcccccgtacctctcaccagcggtgtcttcggtatgtgaaaacccaattcttcaaccctacaggatccaacaggcaatcacagctggcatcttacctttatcacccttgttcctccaacaatcatcagccctattacatcagttacctttggtgcatttattggcacaaaacatcagggcacaacaactacaacaacttgtgctagcaaaccttgctgcctactctcagcaacagcagtttcttccattcaaccaactagctgcatt

SEQ ID NO: 346646 - DNA, 381 bp, Zea mays
caacaagcaacatagaaagtggaatccagttgcaacaatagagcaacaatggcgaccaagagattttccctccttatgctccttgctctttctgcatgtgttgctaacgcgacaattttccctcaatgctcacaagctcctatagcttcccttcttcccccataccttccatcaatgatagcttcagtatgtgaaaacccagctcttcaaccctataggctccaacaagcaatcgcagcaggcaacatacctttatcacccttgtttcaacaatcgccagccctatctttgtgcagtcattgtacaaccatcaggcacagcactgagcactctgctactgtgatcacagtagcttgcaaccttctctacttagcacacaat

SEQ ID NO: 346647 - DNA, 411 bp, Zea mays
tagcaacatagaaagcacaatagtgtaccaacaatggcagccaaaatattttgcttccttatgctccttggtctttctgcaagtgctgctaccgcaaccattttcccacaatgctcacaagctcctatagcttcctttcttcccccatacctctcaccagcggtgtcttcagtatgtgaaaacccaattcttcaaccctacaggatccaacaggcaatcgcagcaggcatcttacctttatcacccttgttcctccaacaaccgtcagccctattacagcagttacctttggtgcatttgttggcacaaaacatcaaggcacaacaactacaacaacttgtgctaggaaaccttgctgcctactctcagcaacagcagtttcttccattcaaccaactggctgcattgaac

SEQ ID NO: 346648 - DNA, 265 bp, Zea mays
  unsure (1)..(265): unsure at all n locations
accattagctttatctactccagagcgcattataacccgatcgacaccatgcgggcgatgctcgttgccctcgctctcctggctctcgctgcgagcgccacctccacgcatacaagcggcggatgcggctgacagccaccgtcgccggttcatctaccgccgacggtgcatctgccacctncagttcacctgccacctccggtgcatctaccaccgccggtccacctgccgccgccagtccaccttgcaccggcggtacatgtgc

SEQ ID NO: 346649 - DNA, 404 bp, Zea mays
gaccattagctttatctactccagagcgcataagaacccgatcgacaccatgagggtgttgctcgttgccctcgctctcctggctctcgctgcgagcgccacctccacgcatacaagcggcggctgcggctgccagccaccgccgccggttcatctaccgccgccggtgcatctgccacctccggttcacctgccacctccggtgcatctcccaccgccggtccacctgccgccgccggtccacctgccaccgccggtccatgtgccgccgccggttcatctgccgccgccaccatgccactaccctactcaaccgccccggcctcagcctcatccccagccacacccatgcccgtgccaacagccgcatccaagcccgtgccagctgcagggaacctgcggcg

SEQ ID NO: 346650 - DNA, 58 bp, Zea mays
accattagctttatctaacacacattgcttaacgacctaaccgcaaccgtgcgggggt

SEQ ID NO: 346651 - DNA, 271 bp, Zea mays
aacacaccaagttaagcacattagcaacaacctaacgacaatggctaccaagatattatccctccttgcgcttcttgcgctttttgcgagcgcaacaaatgcgttcattattccacaatgctcacttgctccaagttccattattacacagttcctcccacgcagttacttcaatgggcttcgaacacccagctgtgcaagcctataggctacaacaagctattgcggcgagcgtcttacaacatccaatttcccagttgcaacaacaata

SEQ ID NO: 346652 - DNA, 333 bp, Zea mays
gagaccaacaagcaacatagaaagtggaatccagtagcaacaatagagcaacaatggtgagcaagatattttccctccttatgcttcttgctctttctgcatgtgttgctaacgcgacaattttccctcaatgctcacaagctcctatagcttcccttcttcccccataccttccatcaatgatagcttcagtatgtgaaaacccaactcttcaaccctataagctccaacaagcaatcgcagcaagcaacatacctttatcacccttgtttcaacaatcgccagccctatctttggtgcagtcattggtacaaaccatcagggcacagcagc

SEQ ID NO: 346653 - DNA, 407 bp, Zea mays
gcattcagaaacacaccaagcgaagcgcactagcaacaacctaacaacaatggctggcaagatattatccctccttgcgcttcttgcgctttttgcgagcgcaacaaatgcgtccattattccacaatgctcacttgctcctagttccattattccacagttcctcccaccagttacttcaatggccttcgaacacccagctgtgcaagcctataggctacaacaagcgattgcggcgagcgtcttacaacaaccaattgcccaattgcaacaacaatccttggcacatctaacaatacaaaccatcgcaacgcaacagcaacaacagttcctaccagcactgagccacctagccatggtgaaccctgtcgcctacttgcaacagcagctgcttgcatccaacccac

SEQ ID NO: 346654 - DNA, 59 bp, Zea mays
tttatcgccgcagcacatattcccttttccagctgtcgtgttatcgaaaagaggcgctc

SEQ ID NO: 346655 - DNA, 142 bp, Zea mays
tacgcacgcatgctacatcattactattatattatggcacctaactataattaaccggccggcgagcgccaacaacgcgactattataacaaagccgtcacttaccaaaatagccttgctgcacaacctccttccttcagct

SEQ ID NO: 346656 - DNA, 229 bp, Zea mays
ggttcgcacactcacaccacacgatctgatctagaggaaatcgtccggtcgtccccttcaatatacaattcttttctttaaccataccctgcccgactataatcttacacgtggagtggtgtgacaccactgccttcgctacggccaagacccaatacatggcagggatggcctccgaccagaacaggatcatcttatcttgcatacaaatcaaggacaggaccgcccc

SEQ ID NO: 346657 - DNA, 350 bp, Zea mays
atgcagcagctcaaggcctggctcaaggccatgaagaagcagctggaagcgacccgccggcgcgaagcgcgcggctgaggccggggccgcccggatctcagggcgcccggcgcggcccggcgggcacgatcttcatcagcggcgcggccggcttggccgcggcgtccgcgcgcggccggatcatccacgggaagaagcgccacagatacaggccgaaccccagcgcccaagcgcaggccgaggcgtgcagcaaccccgccgtggcgccggttggcatcaaggcggccaggcgcagcagcgccgccaggatcaccaaggcgtagctcagcaccatgctgcggtcggcgcgc

SEQ ID NO: 346658 - DNA, 386 bp, Zea mays
caactagcaacatagaaagcacaatagtgtaccaacaatggcagccaaaatattttgcttggttatgctccttggtctttctgcaagtgctgctaccgcaaccattttcccacaatgctcacaagctcctatagcttcctttcttcccccatacctctcaccagcggtgtcttcagtatgtgaaaacccaattcttcaaccctacaggatccaacaggcaatcgcagcaggcatcttacctttatcacccttgttcctccaacaaccgtcagccctattacagcagttacctttggtgcatttgttggcacaaaacatcaaggcacaacaactacaacaacttgtgctaggaaaccttgctgcctactctcagcaacagcagtttc

SEQ ID NO: 346659 - DNA, 413 bp, Zea mays
cagcattcaaaaacacaccaagcgaagcgcactagcaacaacctaacaacaatgggtgccaagatattagccctccttgcgcttcttgcccttttagtgagcgcaacaaatgcgttcattattccacagtgctcacttgctcctagtgccattattccacagttcctcccaccagttacttcaatgggcttcgaacatccagccgtgcaagcctacaggctacaactagcgcttgcggcgagcgtcttacaacaaccaattgcccaattgcaacaacaatccttggcacatctaaacctacaaaccatcgcaacgcaacagcaacaacagtttctgccatcactgagccacctagccgtggtgaaccctgtcgcctacttgcaacagcagctacttgcatacaacccacttgc

SEQ ID NO: 346660 - DNA, 95 bp, Zea mays
ctgggtcttcagaccattagctttatctactccagagcgcagaagaacccgatcgacaccatgagggtgttgctcgttgccctcgctctcctggc

SEQ ID NO: 346661 - DNA, 306 bp, Zea mays
cccacgcgtccgcccacgcgtccggtcagtctagcaattagctcatcgactccagattggagaactcgacaccatgaaggtgctgatcgttgcccttgctctcctggcgctcgctgcgagcgccgcctccagtacaagcggcggctgtggctgccagacaccaccgtttcatctaccgcctccgttctatatgccgcctccgttctatctgccgccgcagcagcagccgcagccatggcaataccccactcaaccaccgcagctaagcccgtgccagcagttcggatcctgcggcgtcggcagcgt

SEQ ID NO: 346662 - DNA, 265 bp, Zea mays
aacacaccaagctaagcacattagcaacaacctaacaacaatggctaccaagatattatccctccttgcgcttcttgcgctttttgcgagcgcaacaaatgcgttcattattccacaatgctcacttgctccaagttccattattacacagttcctcccaccagttacttcaatgggcttcgaacacccagctgtgcaagcctataggctacaacaagcaattgcggcgagcgtcttacaacaaccaattttccagttgcaacaa

SEQ ID NO: 346663 - DNA, 262 bp, Zea mays
tagcaacattgttagcacaatagtgttccaacaggggcagctaaaatattttgcctccttatgctccttggtctttctgcaagtgctgctacggcgaccattttcccacaatgctcacaagctcctatagcttcccttcttcccccgtacctctcaccaacggtgtcttcggtatgtgaaaacccaattcttcaaccctacaggatccaacaggcaatcgcagctggcatcttacctttatcacccttgtttctccaacaat

SEQ ID NO: 346664 - DNA, 232 bp, Zea mays
cttcgcaacttgcaacattaaaagcacatttttgtaccaacaatggccaacccaaaatatttgcttcctatgctccttggtctttctgcaagtgttgctaccgcaaccattttcccacaatgctcacaagctcctatagcttcccttcttcccccatacctctcaccagcggtgtcttcaatgtgtgaaaacccaattgttcaaccctacaggatccaacaggcaatcgcac

SEQ ID NO: 346665 - DNA, 367 bp, Zea mays
  unsure (1)..(367): unsure at all n locations
ctgggtcttcagaccattagctttatctactccagagcgcagaagaacccgatcgacaccatgagggtgttgctcgttgccctcgctctcctggctctcgctgcgagcgccacctccacgcatacaagcggcggctgcggctgccagccaccgccgccggttcatctaccgccgccggtgcatctgccacctccggttcacctgccacctccggtgcatctnccaccgccggtccacctgccgccgccggtccacctgccaccgccggtccatgtgccgccgccggttcatctgccgccgccaccatgccactaccctactcaaccgccccggcctcagcctcatccccagccacacccatgcccgt

SEQ ID NO: 346666 - DNA, 409 bp, Zea mays
attgagaccaacaagcaacatagaaagtggaatccagtagcaacaatagagcaacaatggcgaccaagatattttccctccttatgctccttgctctttctgcatgtgttgctaacgcgacaattttccctcaatgctcacaagctcctatagcttcccttcttcccccataccttccatcaatgatagcttcagtatgtgaaaacccagctcttcaaccctataggctccaacaagcaatcgcagcaagcaacatacctttatcacccttgtttcaacaatcgccagccctatctttggtgcagtcattggtacaaaccatcagggcacagcagctgcagcaactcgtgctacctgtgatcaaccaagtagctctggcaaacctttctccctactctcagcaacaaca

SEQ ID NO: 346667 - DNA, 351 bp, Zea mays
gagaccaactagcaacatagaaagtacaattgtgtaccaacaatggcagccaaagagattgggcttccttatgctccttggtctttctgcaagtgttgctaccgcaaccattttcccacaatgctcacaagctcctatagcttcccttcttcccccatacctctcaccagcggtgtcttcaatgtgtgaaaacccaattgttcaaccctacaggatccaacaggcaatcgcaacaggcattttaccattatcacccttgtttctccaacaaccgtcagccctattacagcagttacctttggtccatttggtggcacaaaacattatggcacaacaactacaacaacttgt

SEQ ID NO: 346668 - DNA, 409 bp, Zea mays
agctcctatagcttcccttcttcccccgtacctctcaccagcggtgtcttcggtatgtgagaaacccaattcttcaaccctacaggatccaacaggcaatcgcagctggcatcttacctttatcacccttgttcctccaacaatcatcagccctattacaacagttacctttggtgcatttattggcacaaaacatcagggcacaacaactacaacaacttgtgctagcaaaccttgctgcctactctcagcaacagcagtttcttccattcaaccaactaagttcattgaactctgcttcttatttgcaacaacaacaactaccattcagccagctacctgctgcctacccccagcaatttcttccattcaaccaactagcagcattgaactctcctgcttatttaca

SEQ ID NO: 346669 - DNA, 349 bp, Zea mays
  unsure (1)..(349): unsure at all n locations
cattagctttatctactccagagcgcagaagaacccgatcgacaccatgagggtgttgcggggtgccctcgctctcctggctctcgctgcgagcgccacctccacgcatacaagcggcggctgcggttgccatccaccgccgccggttcatctaccgtcgccggtgcatctgccacctccggttcacctgccacctccggtgcatttcccaccgccggtccacctgacgtcgccggtccagctgacaccgccggtccatgtgccgtcgccggttcatttgacgtcgccaccatgccactaccctactcaaccgacccggcctgagcctnatccccagccacacccatgc

SEQ ID NO: 346670 - DNA, 190 bp, Zea mays
attttcagcattcagaaacacaccaagcgaagcgcactagcaacaacctaacaacaatggctaccaagatattagccctccttgcgcttcttgcccttttagtgagcgcaacaaatgcgttcattattccacagtgctcacttgctcctagtgccattattccacagttcctcccaccagttacttcaat

SEQ ID NO: 346671 - DNA, 404 bp, Zea mays
gtgcaagccaacatgcaacaacaagcgcttgcggcgagcgtcttacaacaaccaattgcccaattgcaacaacaatccttgccacatctaacaatacaagccatcacaacgcaacagcaacaacagttcctaccagcactgagccacctagccatggtgaaccctgccgcctacttgcaagagcagctgcttgcatccaacccacttgctctggcgaacgtagttgcaaaccagcaacaacaacagctacaacagtttctgccaacgctcagtcaactagccatggtgaaccctgccgcctacgtacaacaacaacaactgctttcatctagcccgctcgctgtgggcaatgcacctacatacctgcaacaacaattgttgcaacagattgtaccagctctgac

SEQ ID NO: 346672 - DNA, 390 bp, Zea mays
gaaacacaccaagcgaagcgcactagcaacaacctaacaacaatggctaccaagatattagccctccttgcgcttcttgcccttttagtgagcgcaacaaatgcgttcattattccacagtgctcacttgctcctagtgccattattccacagttcctcccaccagttacttcaatgggcttcgaacatccagccgtgcaagcctacaggctacaactagcgcttgcggcgagcgtcttacaacaaccaattgcccaattgcaacaacaatccttggcacatctaaacctacaaaccatcgcaacgcaacagcaacaacagtttctgccatcactgagccacctagccgtggtgaaccctgtcgcctacttgcaacagcagctacttgca

SEQ ID NO: 346673 - DNA, 149 bp, Zea mays
ttgataccaactagcaacatacatagtgaagtacactagcaacatcttagcaccaatgggagccaagatttttgccctccttgccctccttgctctttcagcaagcgctgctacctcgacttttattccacaatgctcacaacaatacc

SEQ ID NO: 346674 - DNA, 341 bp, Zea mays
caactagcaacatagaaagcacaatagtgtaccaacaatggcagccaaaatattttgcctccttatgctccttggtctttctgcaagtgctgctacggcgaccattttcccgcaatgctcgcaagctcctatagcttcccttcttcccccgtacctctcaccagcggtgtcttcggtatgtgaaaacccaattcttcaaccctacaggatccaacaggcaatcgcagctggcatcttacctttatcacccttgttcctccaacaatcatcagccctattacaacagttacctttggtgcatttattggcacaaaacatcaaggcacaacaactacaacaac

SEQ ID NO: 346675 - DNA, 408 bp, Zea mays
gggtcttcagaccattagctttatctactccagagcgcagaagaacccgatcgacaccatgagggtgttgctcgttgccctcgctctcctggctctcgctgcgagcgccacctccacgcatacaagcggcggctgcggctgccagccaccgccgccggttcatctaccgccgccggtgcatctgccacctccggttcacctgccacctccggtgcatctcccaccgccggtccacctgccgccgccggtccacctgccaccgccggtccatgtgccgccgccggttcatctgccgccgccaccatgccactaccctactcaaccgccccggcctcagcctcatccccagccacacccatgcccgtgccaacagccgcatccaagcccgtgccagctgcatggaacctg

SEQ ID NO: 346676 - DNA, 372 bp, Zea mays
  unsure (1)..(372): unsure at all n locations
agaccaacaagcaacatagaaagtggaattcagttgcaacaatagagcaacaatggagacggagatattttccctccttatgctccttgctctttctacatgtgttgctaacgcgacaattttccctcaatgctcacaagctcctatagcttccctttttcccccataccttccatcaattatagcttcagtatgtgaaaacccagctcttcaaccatataggcttcaacaagcaatcgcagcaagcaacatacctttatcgcccttgttgtgtcaacaatcgccagccctatctttggtgcagtcattggtacaaaccatcanggcacaacagctgcagcaactcgtgctacctgtgatcaaccaagtagc

SEQ ID NO: 346677 - DNA, 388 bp, Zea mays
gtcagcctagcaattagctcatcgactccagattggagaactcgacaccatgaaggtgctgatcgttgcccttgctctcctggcgctcgctgcgagcgccgcctccagtacaagcggcggctgtggctggcagacaccaccgtttcatctaccgcctccgttctatatgccgcctccgttctatctgccgccgcagcagcagccgcagccatggcaataccccactcaaccaccgcagctaagcccgtgccagcagttcggatcctgcggcgtcggcagcgtcggcagcccgttcctgggccagtgcgtcgagttcctgaggcaccagtgcagcccggcggcgatgccctacggctcgccacagtgccaggcgctgcagcagcagtgc

SEQ ID NO: 346678 - DNA, 359 bp, Zea mays
  unsure (1)..(359): unsure at all n locations
attagctttatctactccagagcgcagaataacccgatcgacaccatgagggtgttgctcgttgccctcgctctcctggctctcgctgcgagcgccacctccacgcatacaagcggcggctgcggctgccagccaccgccgccggttcatctaccgccgccggtgcatctgccacctccggttcacctgccacctccggtgcatctcccaccgccggtccacctgccgccgccggtccacctgccaccgccggtccatgtgccgccgccggttcatctgccgccgccaccatgccactaccctactcaaccgcccggnctagcctatcccagcacacccatgccgtgcaacagcgatca

SEQ ID NO: 346679 - DNA, 102 bp, Zea mays
  unsure (1)..(102): unsure at all n locations
cagaaacacaccaagcgaagcgcacnagcaacgaccgaacagcaaaggcnaccaagacannagcccaccccgcgcaacnagcccnnnnggggagcgcaacaa

SEQ ID NO: 346680 - DNA, 262 bp, Zea mays
aattagctcatcgactccagattggagaactcgacgccatgaaggtgctgatcgttgcccttgctctcctggcgctcgctgcgagcgccgcctccagtacaagcggcggctgtggctgccagacaccaccgtttcatctaccgcctccgttctatatgccgcctccgttctatctgccgccgcagcagcagccgcagccatggcaataccccactcaaccaccgcagctaagcccgtgccagcagttcggatcctgcggcgt

SEQ ID NO: 346681 - DNA, 327 bp, Zea mays
gccacctagaaagatcaaaagcgcactaacgttcgtacacaagctatcaagacatcttgcgctcgggggcttttttgcatgtgctgatacgctgatactgttaccatattgctcacaagctcacatacttctattgcttccctcgtacctctgaacatctgagcatcggggttttgaaaacccgaaaattcaattcttcaagattccacgagccaacacgccatgcctgctagcattataactctattaccctcgacaatcctacaatcatttacactatttccccatggagcatttatgggttcataggctcaaggcattacggct

SEQ ID NO: 346682 - DNA, 261 bp, Zea mays
caacaagcaacatagaaagtggaatccagtagcaacaatagagcaacaatggcgaccaagggattttccctccttatgctccttgctctttctgcatgtgttgctaacgcgacaattttccctcaatgctcacaagctcctatagcttcccttcttcccccataccttccatcaatgatagcttcagtatgtgaaaacccagctcttcaaccctataggctccaacaagcaatcgcagcaagcaacatacctttatcaccc

SEQ ID NO: 346683 - DNA, 378 bp, Zea mays
aattagctcatcgactccagattggagaactcgacaccatgaaggtgctgatcgtggccgtggctctcctggcgctcgctgcgagcgccgcctccagtacaagcggcggctgtggctgccagacaccaccgtttcatctaccgcctccgttctatatgccgcctccgttctatctgccgccgcagcagcagccgcagccatggcaataccccactcaaccaccgcagctaagcccgtgccagcagttcggatcctgcggcgtcggcagcgtcggcagcccgttcctgggccagtgcgtcgagttcctgaggcaccagtgcagcccggcggcgacgccctacggctcgccacagtgccaggcgctgcagcagcagtgct

SEQ ID NO: 346684 - DNA, 269 bp, Zea mays
attttcagcattcagaaacacaccaagcgaagcgcagtagcaacaacctaacaacaatggctaccaagatattagccctccttgcgcttcttgcccttttagtgagcgcaacaaatgcgttcattattccacagtgctcacttgctcctagtgccattattccacagttcctcccaccagttacttcaatgggcttcgaacatccagccgtgcaagcctacaggctacaactagcgcttgcggcgagcgtcttacaacaaccaattgcc

SEQ ID NO: 346685 - DNA, 323 bp, Zea mays
  unsure (1)..(323): unsure at all n locations
cagaccattagctttatctactccagagcgcagaagaacccgatcgacaccatgagggtgttgctcgttgccctcgctctcctggctctcgctgcgagcgccacctccacgcatacaagcggcggctgcggctgccagccaccgccgccggttcatctaccgccgccggtgcatctgccacctccggttcacctgccaccctccggtgcatctcccaccgccggtccacctgccgncgccggtccacctgccaccgncggtccatgtgccggcgcccgttcatcttgccgccgncaccatgccactaccctactcaaaccgcc

SEQ ID NO: 346686 - DNA, 317 bp, Zea mays
  unsure (1)..(317): unsure at all n locations
ggtcttcagaccattagctttatctactccagagcgcagaagaacccgatcgacaccatgagggtgttgctcgttgccctcgctctcctggctctcgctgcgagcgccacctccacgcatacaagcggcggctgcggctgccagccaccgccgccggttcatctaccgccgccggtgcatctgccacctccggttcacctgccacctccggtgcatcttccaccgccggtccacctgccgccgccggtccacctgccaccgccggtccatgtgccgccgccggttcatctgncgnncgcaccatgccactaccctac

SEQ ID NO: 346687 - DNA, 341 bp, Zea mays
caactagcaacatagaaagcacaatattgtaccaacaatggcagccaaaatatttggcctgcttatgctccttggtctttctgcaagtgctgctacggcgaccattttcccgaaatgctcgcaagctcctatagcttcccttcttcccccgtacctctcaccagcggtgtcttcggtatgtgaaaacccaattcttcaaccctacaggatccaacaggcaatcacagctggcatcttacctttatcacccttgttcctccaacaatcatcagccctattacatcagttacctttggtgcatttattggcacaaaacatcaaggcacaacaactacaacaac

SEQ ID NO: 346688 - DNA, 305 bp, Zea mays
gcattcaaaaacacaccaagcgaagtgcactagcaacaacctaacaacaatggctgcgaggatattatccctccttgcgctacttgcgcttaatgcgagcgcaacaaatgcgtacattattccacaatgctaacttgctcctagttccattatttcacagttcctcccaccagttacttcaatggtcttcgaacacccaactgtgcaagcctataggctacaacaagcgattgcggcgagcgtattacaacaaccaattgcccaattgcaacaacaatacttggcacatctaacaatacaaacca

SEQ ID NO: 346689 - DNA, 255 bp, Zea mays
gttattatcccatggttaatcacaattacacaaacgtatggctacactcaaaacttaggtatgaggaggggattgttattatcacattgttattatcccaatcagcacattaaatacacaagagctacactctcacccccattctcacacttgtaggtgagagatacttaatgccttgtgttcttgagtcttgcaagttcttgtgcttctattttgggttttcaagctcactctcacccgcattctcacacttgt

SEQ ID NO: 346690 - DNA, 90 bp, Zea mays
  unsure (1)..(90): unsure at all n locations
tagacccctagcggtctatatcgttggtgcacgctttcgaacgcccgggtgggacgtcacatgcattctatagagtaaccnaaatacaat

SEQ ID NO: 346691 - DNA, 275 bp, Zea mays
ctgggtcttcagaccattagctttatctactccagagcgcagaagaacccgatcgacaccatgagggtgttgctcgttgccctcgctctcctggctctcgctgcgagcgccacctccacgcatacaagcggcggctgcggctgccagccaccgccgccggttcatctaccgccgccggtgcatctgccacctccggttcacctgccacctccggtgcatctcccaccgccggtccacctgccgccgccggtccacctgccaccgccggtccatgt

SEQ ID NO: 346692 - DNA, 220 bp, Zea mays
attagctttatctactccagagcgcagaagaacccgatcgacaccatgagggtgttgctggttgccctcgctctcctggctctcgctgcgagcgccacctccacgcatacaagcggcggctgcggctgccagccaccgccgccggttcatctaccgccgccggtgcatctgccaccttcggttcacctgccacctccggtgcatcttccaccgccggtcc

SEQ ID NO: 346693 - DNA, 110 bp, Zea mays
aagcaacatacaaaggcgacatcagaagcggcattcgagcaacactggcgggcaacaatggcggcctacatatgctccatgctcttgctgcatgcgttgcttacgcgacc

SEQ ID NO: 346694 - DNA, 96 bp, Zea mays
gttatagatcgcgagcggtctatataaacgatccaggctgacgcacgcatgcatgcgacttcatatcttttatatagagctacctaaattcaattg

SEQ ID NO: 346695 - DNA, 352 bp, Zea mays
attcagaaacacaccaagcgaagcgcactagcaacgacctaacaacaatggctacgcaagagattagccctccttgcgcttcttgccctttttgtgagcgcaacaaatgcgttcattattccacaatgctcacttgctcctagtgccattattccacagttcctcccaccagttacttcaatgggcttcgaacacctagctgtgcaagccaacatgcaacaacaagcgcttgcggcgagcgtcttacaacaaccaattgcccaattgcaacaacaatccttgccacatctaacaatacaagccatcacaacgcaacagcaacaacagttcctaccagcactgagccacctag

SEQ ID NO: 346696 - DNA, 359 bp, Zea mays
attcagaaacacaccaagcgaagcgcactatcaacgacctaacaacaatggctacgaagatattagccctccttgcgcttcttgccctttttgtgagcgcaacaaatgcgttcattattccacaatgctcacttgctcctagtgccattattccacagttcctcccaccagttacttcaatgggcttcgaacacctagctgtgcaagccaacatgcaacaacaagcgcttgcggcgagcgtcttacaacaaccaattgcccaattgcaacaacaatccttgccacatctaacaatacaagccatcacaacgcaacagcaacaacagttcctaccagcactgagccacctagccatggtg

SEQ ID NO: 346697 - DNA, 59 bp, Zea mays
  unsure (1)..(59): unsure at all n locations
acgcgacggcaaagcncnaccagagcgacaccgaaacccaaancacaggccgncggccg

SEQ ID NO: 346698 - DNA, 278 bp, Zea mays
gcctagcaattagctcatcgactccagattggagaactcgacaccatgaaggtgctgatcgttgcccttgctctcctggcgctcgctgcgagcgccgcctccagtacaagcggcggctgtggctgccagacaccaccgtttcatctaccgcctccgttctatatgccgcctccgttctatctgccgccgcagcagcagccgcagccatggcaataccccactcaaccaccgcagctaagcccgtgccagcagttcggatcctgcggcgtcggcagcgt

SEQ ID NO: 346699 - DNA, 322 bp, Zea mays
attttcagcattcagaaacacaccaagcgaagcgcactagcaacaacctaacaacaatgggtaccaagatattagccctccttgcgcttcttgcccttttagtgagcgcaacaaatgcgttcattattccacagtgctcacttgctcctagtgccattattccacagttcctcccaccagttacttcaatgggcttcgaacatccagccgtgcaagcctacaggctacaactagcgcttgcggcgagcgtcttacaacaaccaattgcccaattgcaacaacaatcctttgcacatctaaacctacaaaccattggaacgca

SEQ ID NO: 346700 - DNA, 394 bp, Zea mays
attgagaccaactagcaacatagaaagcacaatagtgtaccaacaatggcagctaaaatgttttgcctccttatgctccttggtctttctgcaagtgctgctacggcgaccattttcccacaatgctcacaagctcctatagcttcccttcttcccccgtacctctcaccaacggtgtcttcggtatgtgaaaacccaattcttcaaccctacaggatccaacaggcaatcgcagctggcatcttacctttatcacccttgttcctccaacaatcatcagccctattacagcagttacctttggtgcatttattggcacaaaacatcaaggcacaacaactacaacaacttgtgctagcaaaccttgctgcctactctcagcaacagcagtttc

SEQ ID NO: 346701 - DNA, 267 bp, Zea mays
tattgagaccaactagcaacatagaaagcacaatagtgtaccaacaatggcagccaaaatattttgcctccttatgctccttggtctttctgcaagtgctgctacggcgaccattttcccgcaatgctcgcaagctcctatagcttcccttcttcccccgtacctctcaccagcggtgtcttcggtatgtgaaaacccaattcttcaaccctacaggatccaacaggcaatcgcagctggcatcttacctttatcacccttgttcct

SEQ ID NO: 346702 - DNA, 362 bp, Zea mays
ccagattggagaactcgacaccatgaaggtgctgatcgttgcccttgctctcctggcgcgcgctgcgagcgccgcctccagtacaagcggcggctgtggctgccagacaccaccgtttcatctaccgcctccgttctatatgccgcctccgttctatctgccgccgcagcagcagccgcagccatggcaataccccactcaaccaccgcagctaagcccgtgccagcagttcggatcctgcggcgtcggcagcgtcggcagcccgttcctgggccagtgcgtcgagttcctgaggcaccagtgcagcccggcggcgacgccctacggctcgccacagtgccaggcgctgcagcagcagtgct

SEQ ID NO: 346703 - DNA, 261 bp, Zea mays
atcgactccagattggagaactcgacaccatgaaggtgctgatcgttgcccttgcggtcgtggcgctcgctgcgagcgccgcctccagtacaagcggcggctgtggctgccagacaccaccgtttcatctaccgcctccgttctatatgccgcctccgttctatctgccgccgcagcagcagccgcagccatggcaataccccactcaaccaccgcagctaaacccgtgccagcagttcggatcctgcggcgtcagcagcg

SEQ ID NO: 346704 - DNA, 250 bp, Zea mays
cagcattcagaaacacaccaagcgaagcgcactagcaacaacctaacaacaatggctaccgagatattagccctccttgcgcttcttgcccttttagtgagcgcaacaaatgcgttcattattccacagtgctcacttgctcctagtgccattattccacagttcctcccaccagttacttcaatgggcttcgaacatccagctgtgcaagcctacaggctacaactagcgcttgcggcgagcgttttac

SEQ ID NO: 346705 - DNA, 401 bp, Zea mays
cttcagaccattagctttatctactccagagcgcataagaacccgatcgacaccatgagggtggggctcgttgccctcgctctcctggctctcgctgcgagcgccacctccacgcatacaagcggcggctgcggctgccagccaccgccgccggttcatctaccgccgccggtgcatctgccacctccggttcacctgccacctccggtgcatctcccaccgccggtccacctgccgacgccggtccacctgccaccgccggtccatgtgccgccgccggttcatctgccgccgccaccatgccactaccctactcaaccgccccggcctcagcctcatccccagccacacccatgcccgtgccaacagccgcatccaagcccgtgccagcttgcaggaac

SEQ ID NO: 346706 - DNA, 220 bp, Zea mays
  unsure (1)..(220): unsure at all n locations
gaaacacaccaagcgaaacgcactagcaacaacctaacaacaatggctaccaagatattagccctccttgcgcttcttgcccttttagtgagcgcaacaaatgcgttcattattccacagtgctcacttgctcctagtgccattattccacagttcctcccaccagttacttcaatgggcttcgaacatccagccgtgcaagcctacagngctacaacta

SEQ ID NO: 346707 - DNA, 260 bp, Zea mays
gagaccaacaagcaacatagaaaggggaatccagtagcaacaatagagcaacaatggcgggcaagatattttccctccttatgctccttgctctttctgcatgtgttgctaacgcgacaattttccctcaatgctcacaagctcctatagcttcccttcttcccccataccttccatcaatgatagcttcagtatgtgaaaacccagctcttcaaccctataggctccaacaagcaatcgcagcaagcaacataccttta

SEQ ID NO: 346708 - DNA, 259 bp, Zea mays
attttgagcattcagaaacacaccaagcgaagcacattagcaacaacctaacaacaatggctaccaagatattatccctccttgcgcttcttgcgctttttgcgagcgcaacaaatgcgttcattattccacaatgctcacttgctccaagttccattattacacagatcctcccaccagttacttcaatgggcttcgaacacccagctgtgcaagcctataggctacaacaagcaattgcggcgagcgtcttacaaca

SEQ ID NO: 346709 - DNA, 197 bp, Zea mays
atccaaatcagataagcggaagtgcgtagtgtggatcggttcacagaacagcatggcgaggggcatggctttcgtcttgtgccttgctttgttaacttgcatggcctctgcaatgcaaatgcccttgcccctgcccggggctggaaggcttggactgtactgggcccgggcctaccacaatgataggatccgggggg

SEQ ID NO: 346710 - DNA, 247 bp, Zea mays
gcaacatagaaagcacaatagtgtaccaacaatggcggccgaaatattttgcctccttatgctccttggtctttctgcaagtgctgctacggcgaccattttcccgaaatgctcgcaagctcctatagcttcccttcttcccccgtacctctcaccagcggtgtcttcggtatgtgaaaacccaattcttcaaccctacaggatccaacaggcaatcacagctggcatcttacctttatcacccttg

SEQ ID NO: 346711 - DNA, 310 bp, Zea mays
gttctttcagtcgctcaacatctccaccaagaataacgaggggactatggcaattatcactctcgacaccgcttatcaagaaggggacgtcgatgctttcctggccgactacttttacgagccagcacagcctgcggccacactcaaggtgctgcatgatgtgaagtccgaagacaagctgaacaccggcagcggcgggagcgcggttgtggacgcagactcgcttctttaccgcaagttcgccgaggtagttgaatacaacgttgaatcgtactttcccggcggggaagaccactaccacgactgctgg

SEQ ID NO: 346712 - DNA, 230 bp, Zea mays
acgcgcgcgttggctcagccttcaggcattcactgctacaacatttaatgaatgcaaccttagggaggatcaagatgcgcatctccaagatctcaacatgcgaactccaacatccagcttgtctgtctattttctaagcatatctgggcagtccatctagcaacattgttgagacaacctgacacctggtcatgaaagcatactacttcctatgcgaacgtgctctctaa

SEQ ID NO: 346713 - DNA, 261 bp, Zea mays
  unsure (1)..(261): unsure at all n locations
cagctgggccgcgcgccgccgcgccgccgccgctcctcctcgccctactcctgctgggggccttcctctgcgccgtgctcgtgctgctcgcgccagcggctcggcagcacggggacgacagcgacgagacggaggagctccccgccgcgtcttcgccgtggggccancgcgacctcccacgcccgccaaccaagtacgccgcggaggcgtggcggccccagcccccccggaaggggaactccccggggcaagggcttccgg

SEQ ID NO: 346714 - DNA, 196 bp, Zea mays
acgcgtgcggacgcaacaacctgcaagccaacagtcctgctgctgctattgcgtccaacctgtcgggggagcaagacgcgcctctctggctgctcaacagccgtgctccgagctccggagtgtatgtaacttgcgagcatacaggatgtcaacacaaatgtctagtccgaatgctgacacaccgctactacttcta

SEQ ID NO: 346715 - DNA, 360 bp, Zea mays
cccacgcgtccgaaaactctatcattatagtgaactaaaatggtaacttgcttcgagtgtgggcacatgattcagtttaaataatcttcatatcgcgatcgacttataagctggtgatacaagtcaacgttacttggcagttggcatcgagtcatgcaaagcttaggtatgaactttttgtttaatgctagtgaacgtttttcatgagctttacatctgagattgaacggatgatcgcatttatttcttactctttaacttagaagtacttgagaaatcccgtgtacttagaaataaggataaaaaccgcgtctgaacggctttgtgctgattgtcctctcttttaagtgttgaaaaaca

SEQ ID NO: 346716 - DNA, 260 bp, Zea mays
agctaattttttctatttcacccactttatagatcacgagcttcttacactccttgaggtggttcttgtaaagatcatggaagctaccccttgctgccacgcgactcatttcaatcagatgaccattagaccgcctgagctcacattttaggtagatagagcctttggactccaccgaggataagcatgctcgactgatgtttactgaggaacgacacacgtattacttggtctttgaaccaattgcaattataaagcct

SEQ ID NO: 346717 - DNA, 272 bp, Zea mays
acacgcgtgcggtatctttttttttaaaacgcaatcacctgtaacataaaaacgcttaactccatgggacaaagagacggaaaatacaattcctatataagcacgcttaggattgggcttaagccgctatgagctgcgaagtcacgaaaacttcggcaagcgcaaacgaagctccagcgagagataattggatacacaggtgccctgaagaacaacactgatgatacagtgaccacaacacgtttaacacagctgcccacacaatgagtgac

SEQ ID NO: 346718 - DNA, 359 bp, Zea mays
accaagcttttacctgaacaatggaagcaaaggtagggaaattcttcgattcggtgagtgagtgttcttctccggttcagatcagctttcttggtgcgatgctgatatcattgcaggatgtgaaaaggaggctgctgaggctaatggttctgatgagtcaaaaaacgaatgtctcacgcgtttttcatgggctcttgttcactcacgacgaacagaagatatagaacgtggtatagctatgctcgaagcttctatagccagcactaccgatccactgaaaatgcgagagaagctttatcttctggctgttgagcatttcccaagaggcgattcttcacggagcagttagcttgctgtgc

SEQ ID NO: 346719 - DNA, 287 bp, Zea mays
accggtccagtaattcccgggtagacacacgcgtgcgcagaaactcttcgagcgacgcgcactatcaacaaacgctaacaacaatggctaacaagaggtaattcttcgttgagctgtttgcacggcctgcgagcgctactaatgcgtacattatcccacattgctatacacgctacttactacttaataccacagtatacgccaacagaagaactagtgcattagcaacactaagataagctagcatatgtgttacaacaagctattgcgagaagcgatttacatca

SEQ ID NO: 346720 - DNA, 240 bp, Zea mays
caccggcggaaaattccgggcgagacacacgcgcgcgttgctgttgaaagatctcccattattagtgcaaacctgagtctcttcgaacgcggaggaccctgacctttcttctgagagcgaacatttgctatactaccattgcgaaccttgtaccacacaccgtaaacggagaatgtgactaagtcactgatgtttatgaccctgagagctactttattacgttcacgccctttgacatgc

SEQ ID NO: 346721 - DNA, 416 bp, Zea mays
agctaaaacgatcaaataccccaactttattcaacagttgcttcacaaacggaaagagggtgatcatgaaaagaagcttaaaaaaaggaggagattgcttgagacccaagccacaacgaaccctatagaagaacctatggacccaattcaagatgaagagtttttggtttccatggatgatagggttgtaccagagatgtcaacaaatgaaagaggtagatgtgaatgattcaaagatttatgttgaattaaagcagttggtgaattggaagccatgtagctagggtgggtttccaagtgagccagtggagcaaactggctgttgaataatatatacatatttgtgtgtgtatgtatatgtatgttatatgaatggatgggcattggttgcatgcatgatgaacccttgaagatga

SEQ ID NO: 346722 - DNA, 351 bp, Zea mays
cttacctctttttacattatttttccactctaaaattcctatacacacgcctgaaggattctcctttggacatgtccaaaccatcttaaccgatgttaaatcaatttctcctcaattcgcgccaccccgaccctatcctggatatcttcgttttggactctatcccttgtgtgctcacaaaaccaaagtaacatgcgcatctcagttgttgacttgttggacatgttgcctttttgtcggccaacattcatcaccatatagcatcaccggtgcgctagagtgatgaatatatttcttaaatgacttgtattgttatatttcgataataaaccttatttagactaatttcaa

SEQ ID NO: 346723 - DNA, 349 bp, Zea mays
cggttcggaattaccggccggacccacgcgtccgttgcattcgaatcttgcttataaaatttcgtcttcaactgataatcggtaataaattgttatgaagccaggtgcgacgttcctcctgggggctatgttcggtgcccttttaactggaggatgcaatcgctgtcgtcatcttaaagaaacaagcagtaccggtagcaggtgagaaaacaggcgctgacctcgtaccaaaccaactcataacatacctgctgatgccaaccgaggcccccaagaggaacagcaatcggaggcatcgcttgtgggctcgtgattgaagacatgctggtgttttgctgatgagatcgta

SEQ ID NO: 346724 - DNA, 361 bp, Zea mays
aaaaagctaccaataaaattttctcttcaactgataatccgaaaaaactagttgttattccacatgctacgaacctacaattcgctatttttcttaaccatattcacacctaagattgattcgatctcttcttcttaatataacaaacactcaagatagcaagtgtgaaaccaatctctcatcctctacactacaaaagtattatatactctgtgacttcaaacaatgtccccaaatcttacaaaaatcttgccataccattttctgataatcattgcatacaactgttttgtctttgtcgtgtatcttttaaatgtaaataacttttacttttaaaactcacttattcttactgttcatc

SEQ ID NO: 346725 - DNA, 328 bp, Zea mays
cccacgcgtccgggcaatgcaccttctctgaccggaatacaatccaaagaccacttagaatcatagatcgaaataataatttcttactttaaggaagacgggcatagggactggactgatagcgcgggctggcctactcgaaaaaaaaaaaaaaaaaaaaaaaaaaaaaaaaaaaaaaaaaaaaaaaaaaaaaaaaaaaaaaaaaaaaaaaaaaaaaaaaccaaaaaaaaaaaaaaaaagaaaaacaaaaaaaaaaagaaaaaaaaaaaaaaaaaaaaagaaaaaaaagaaaaaataaaaaaaaataacgggggggggccttttaaag

SEQ ID NO: 346726 - DNA, 69 bp, Zea mays
aaccgggcgaccaccccacggccccaaaccacacacacacgccaaaggccgagaagcggggaggcccag

SEQ ID NO: 346727 - DNA, 248 bp, Zea mays
cctccggcatatacctcattttccaaataatactcactctacaactaatctacccacacctggagaattttccttttgacatgtccaaaccatctcataccgatgttcaaacactttctcctcaattggacccaccaagcccctatcctggatacccccgcttcgcacctatccctccgactactaccccacctccatcccatttaattaccacttccgcacataccctttctgcccccctacacttc

SEQ ID NO: 346728 - DNA, 242 bp, Zea mays
ccgggtcgcccacgcgtccggttaaccaaggtaaccagagcgtgctgccttattgctcctcatgggtcgtaatttgcgctgttttactcgttatgaagaccgtatcaattgccatgaggagcttcagtgcacgagtttcagatctgcgctccacgctgatcaacggtctcatacttataacttttacagccatcgcgacaatcctaataacaatccctgccatgaccggtcttgacatcttt

SEQ ID NO: 346729 - DNA, 386 bp, Zea mays
cccacgccgtccacgcttttctctccacagcagggcgcaccacacgtcgcggccacgcatccagcccatggggctgcttctcgccatctgctctggggacaactcacacagtgacgccatggtccagcatgacccctcctcctgctcgaaagtgcgtgatgtggccctccgtgccatccactggctctgcttctcgacgcccacctacaccgaccagtataatatccgacgggttcctcgaccgcgtcctctccctcctccgcaccgtagacaccacgctacagcactgcgccctgaaggcgatgcacctactgtgcccggcgttggaggagatcatgaaggcgatgggcgacgccgcattcatgcttgagctggtgagcgccctc

SEQ ID NO: 346730 - DNA, 192 bp, Zea mays
aaataaaaaaaaaataataaaaaaaattttttattatacataaaaataaaaaaaaaaaaaagaaaatttttaataaaaaaaaatacatataaataatttataaatattaaaaaatttatttaatttatcattttcttaattttcctcttttttttttcctcttactttctttttttttttctcttctttttt

SEQ ID NO: 346731 - DNA, 304 bp, Zea mays
cgcgtgcgtccacgcgttctgtaaatgtttgcacggagcctgcaatgtcagcaatagcgcgcagggcgtgattatgtcatccatgtaatagttcatgatagcagtaagaaaattgaacgaagcatagaaaactggaatcaatgtgcacattacagtgctgactttgggaaagactacaggctttgtttttgacagtgcatcttaacggagccattaatacaggcctgtagtcatactcgcatcatgtacctcctctgcacgggtgacaccacggacttactctgatccctgaaggatgtacacc

SEQ ID NO: 346732 - DNA, 419 bp, Zea mays
cccacgcgtccgcttatctgcagctagtaaggttatttagatcgtccctcaatatagagtcgcatagttatgtaacatggatctcatttgcagattctcagaaaagcacttgcttctaccagaaggccaacatgatcactcaaaatttactttgcaatgagccactcatcgactagcaggtctttgtgaatactaactataattttcacatatacttatgctttatttatcagatactttaaatttgtacattgcttacccagaatgaataaatacatcccccatatattcactgtttctaaaaaaaattttccttaattccaatgcttaaacattattataaatttcttaatttcctttttaacatacacaattaatgttccttttctttacactcatttttcatttttgtttattta

SEQ ID NO: 346733 - DNA, 226 bp, Zea mays
aattcccgggtcgacccacgcgtgcgactacgtcttccaattcacgattttacatgctctgtactgcttcctgtgagcagccagttttattctactctttatttttctaaataaactcgatctgctttgtcccttgttaagaatgagctttgagttttctgtagtgcaattgttgtagctccgcatgccatcatatctggaattactttcctaaaagaaaaataat

SEQ ID NO: 346734 - DNA, 107 bp, Zea mays
acccacgcgtcctcccacacattcaagcactccttgctacatttctataaagtggacgactccaccaacaggcggatcctactgccataggagtgccccaaaccaaa

SEQ ID NO: 346735 - DNA, 253 bp, Zea mays
cctggtttgtggatggtcatgtaccttcggttggctatttggtgacgatgatttgggggccatgtaccacccagtcgccctcctctgtttgtaccccgtgtttttgttgctagaatgctacgcgatgggtgtttaaacccataatcatggagcatttgcatcacattgcgcgcgataaactagtcagtaaacagaagcaagcaaagcacctagagattcactctttttttaataaaatagtgagtccacatcc

SEQ ID NO: 346736 - DNA, 266 bp, Zea mays
gcacttaccactgatgcaaattctgactataagcacgatcaggatctacaggaggcggtgtctgttcacaaggtagacaataacctaaacaataaacctcggaaggaacttaagaaaatttatctgtgctagaaatgcacacaccactcatccaaggaagataaagccttcaccttctactaaacaatcataaaccacactaatcaaacatgtaactgccttaactaacggatactactgtcacacctgcatacattaccttttaa

SEQ ID NO: 346737 - DNA, 430 bp, Zea mays
gacattcactacaaaaaataataaaaaaaattaaaaaaaaaaaaaaaaaaaggtaaaaaaatggaaaaaatataaaaaaaaaaaaaaaaaaaaaaataataaaaaaaaaaaaaaaaataaaaaaaaaacgggggtgctgtttttaaggatcaaagttttcttccccttgcttgcaacgtaatattttttttttagtgccacttaaattaaatttattggccgtttttttaaaactcaggaattggaaaaactttgaggttaccaaatttattggttttgaagaaaattctctttttcccagttgggtttttactaaaaaggccttaactaatcaccttttcaaacatttgcaaaccttaaatggtaaatggaaccccccttttatcggtcttttaagcttggaggttgtggtttttccccacattgtgac

SEQ ID NO: 346738 - DNA, 140 bp, Zea mays
cccacgcgttcttccacactttcgggagaattaacgggagaagacatctaggcagcagcaggagcttttacatctcctcctccatcgacgacttttattccttatgcctaaacatgtcgtcaacaacacacttcttaact

SEQ ID NO: 346739 - DNA, 391 bp, Zea mays
  unsure (1)..(391): unsure at all n locations
naaaaaaaaaaaaaaaaaaaaaaaaaaaaaattaaaaaaaaattaaaaaaaaaaaaaaaaaggggaaaaaaagggaaaaaaaaaaaaaaaaaaaaaaaaaaaaaaaaaaaaaaaaaaaaaaaaaaaaaaaaaaaaaaaaggggggggcctttttaaaaaaacaaattttttttccccgtttttccaaaataatatttttttttttgggcaacaaaaataaaattaattgcccgccttttaaaaacggcgaaattgaaaaaaccttgggtttcccaaattaaatccctttaaaaaaaatccctttttaccaatttgggttaatacaaaaaaagcccaaaccaatcccctttccaaaaaattgccaaccttaaatggaaaatggaacccccct

SEQ ID NO: 346740 - DNA, 235 bp, Zea mays
ctgacgcgtgggctggctgctcacaaccgttacggttagcgcggtcttgctcccttcgcgtgtgcttgcgtaacaagatttgggcagacgttcattcttacgatatagctgacgacacgtagtatcggccggggcctggcagatactgataggtggtctggatcgtgacttgatcagtgctcatctcgaggtgtcctgccagggtgactagtacgaggagcgtggtgtggaccca

SEQ ID NO: 346741 - DNA, 241 bp, Zea mays
gtgtcaattactttagtcacacttgccgatttctttgtgctttcgtcctcgttttggccggcgggggataaaaaaggagacgaggtcctgtaaatatgattggggggtacggttggctgagagattggtgggggatctatccatcgcctcctttcgcagtgcattcgtttggttcatggtgttgttggagggagaagcagaaggtgaagaataataatttatggcagggacgcctctcctg

SEQ ID NO: 346742 - DNA, 407 bp, Zea mays
  unsure (1)..(407): unsure at all n locations
ccggccggaattcccgggtcgacccacgcgttcgggacaacctcgcggcccgtacctgtactccacggcgttcacgttatcacgtcttagaaagcatgagcatgnactgacggtttctacagattgaaaaccaaaacgtcttacatgcgctggaaacctgccgctcactgtttacgttgggagtttttacaagtatctcagttcataacactatgcaacatttggttgggggacaggtagtacagtgacgtcctctcttatctctccaattttgtcccctctcatctctccaattttgagggacaactagggataacactggaatagtgatatcctaactcttgacgttgaattaaacaattatttgagggaaaaaaaaaaaaaagataaaaaaaaaattcataatt

SEQ ID NO: 346743 - DNA, 83 bp, Zea mays
aatttttttgggttttgtccgtttcaaactgtattctaaattattacctctgttttcgaagatttgtcgccggcttgttcttt

SEQ ID NO: 346744 - DNA, 447 bp, Zea mays
cccccgtcagcaccgtcctcggcgcccctctcgggtccgtggcggagaccgtcaagaaggcggtggaccgcgtggacgacgccttcgcgcggtcggtgctggactacctggagctgcagaatgcaggcggcaagcagctgagcggccaggctcaggcccaggcgcccagggagcagctcgtaccggcgacggacctgtgggcggtgagctggctggggatggccatgtacgacgccgacttcggctcaggcgcgccgcggttcgtcgcgccggcgcagatgttcggcatcggcacggcgtatatgacgccgcgcggtccggacagggacgacggcatcgccgtgctcatctctctggagcccgagtacctgtcgtgctttgagaaggtcttcttctataacgagtgatgtctcacgtctggagttcaaggatgtgaacgtgtgaatt
